United States Patent Application Publication US 2021/0199660 A1 - sequence listing, part 37

SEQ ID NO: 525037 - DNA, 120 bp, Artificial Sequence
  ENSG00000165732_16 (sequence is synthesized)
cgtccgtagaccagcgctccttgatcaactcaaatgtgggttttgtgaccatgatcttgcagtgctcaattgaaatgccaaatattagttatgcttggaaagaacttaaagagcagctgg

SEQ ID NO: 525038 - DNA, 120 bp, Artificial Sequence
  ENSG00000165732_17 (sequence is synthesized)
gcgaggagattgattccaaagtgaagggaatggtttttctcaaaggaaagctgggtgtttgctttgatgtacctaccgcatcagtaacagaaatacaggagaaatggcatgattcacgac

SEQ ID NO: 525039 - DNA, 120 bp, Artificial Sequence
  ENSG00000165732_18 (sequence is synthesized)
gctggcagctctctgtggccacagagcaaccagaactggaaggaccacgggaaggatatggaggcttcaggggacagcgggaaggcagtcgaggcttcaggggacagcgggacggaaaca

SEQ ID NO: 525040 - DNA, 120 bp, Artificial Sequence
  ENSG00000165732_19 (sequence is synthesized)
ttcagtaaagcatttggtcaataattagaaatagaagatttatatagcaaaaagagaatgatgtttggcaatatagaactgaacattatttttcatgcaaagttaaaagcacattgtgcc

SEQ ID NO: 525041 - DNA, 120 bp, Artificial Sequence
  ENSG00000165732_20 (sequence is synthesized)
tccttttgaccacttgccaagtccctgtctctttcagacacagacaagcttcatttaaattatttcatctgatcattatcatttataactttattgttacttcttcatcagtttttcctt

SEQ ID NO: 525042 - DNA, 120 bp, Artificial Sequence
  ENSG00000165732_21 (sequence is synthesized)
ttgaaaggtgtatgaattcattacatttttattctaatgtattatctgtagattagaagataaaatcaagcatgtatctgcctatactttgtgagttcacctgtctttatactcaaaagt

SEQ ID NO: 525043 - DNA, 120 bp, Artificial Sequence
  ENSG00000165732_22 (sequence is synthesized)
gtcccttaatagtgtccttccctgaaataaatacctaagggagtgtaacagtctctggaggaccactttgagcctttggaagttaaggtttcctcagccacctgccgaacagtttctcat

SEQ ID NO: 525044 - DNA, 120 bp, Artificial Sequence
  ENSG00000165732_23 (sequence is synthesized)
gtggtcctattatttgtctactgagacttaatactgagcaatgttttgaaacaagatttcaaactaatctgggttgtaatacagtttataccagtgtatgctctagacttggaagatgta

SEQ ID NO: 525045 - DNA, 120 bp, Artificial Sequence
  ENSG00000165732_24 (sequence is synthesized)
gtatgtttgatgtggattacctatacttatgttcgttttgatacatttttagcttctcattataaggtgattcatgctttagtgaattcttcatagatagtatatataaaagtacatttt

SEQ ID NO: 525046 - DNA, 120 bp, Artificial Sequence
  ENSG00000165732_25 (sequence is synthesized)
aatagaaagccagggttttaaggaatttcacatgtataaggtggctccatagctttatttgtaagtaggctggataaatggtgcttaaatggtaatgtactccacttcttcctattggaa

SEQ ID NO: 525047 - DNA, 120 bp, Artificial Sequence
  ENSG00000165732_26 (sequence is synthesized)
gtactccacttcttcctattggaagattaacattatttaccaagaaggacttaagggagtagggggcgcagattagcattgctcaagagtatgtaaaaaaaaaaaaaaaaaaaaagaacc

SEQ ID NO: 525048 - DNA, 120 bp, Artificial Sequence
  ENSG00000165732_27 (sequence is synthesized)
aaaaaggtaacaaattcataactggaaagcaaagagaagaacaagtatgatttggatgataaagcattgttttaatggtgaaaacttcacagatcactaatgtttctagaggttaacttc

SEQ ID NO: 525049 - DNA, 120 bp, Artificial Sequence
  ENSG00000165732_28 (sequence is synthesized)
aagtgggcaagctggggtttttaggtagtcagtggcctagttcctaaagccacagtataggatctgttaaactgaatgtctgttgaaagtttgttttagctgcttggaggcttcctttta

SEQ ID NO: 525050 - DNA, 120 bp, Artificial Sequence
  ENSG00000165732_29 (sequence is synthesized)
agacaaactgtatgtgattaagttgttttgagggaactgaagaacctgatgtagcccctggccagataactgcctgatttctcagatattatttctctgggaaacattctacatagcaca

SEQ ID NO: 525051 - DNA, 120 bp, Artificial Sequence
  ENSG00000165732_30 (sequence is synthesized)
ggagcttaagagtggcattatcttctcgccttaatttccagagattatttctgtactgagaatcctggaactactatgctaggaaatttaaagctgcatggtctgtcttgttttcattta

SEQ ID NO: 525052 - DNA, 120 bp, Artificial Sequence
  ENSG00000165732_31 (sequence is synthesized)
attattgtgaatacctagaatctttcttggtcctgatttctcttgcttaatccagtctttatctctaactgccccttatttgatcaccatgtactaggagctctgatagccagctcagct

SEQ ID NO: 525053 - DNA, 120 bp, Artificial Sequence
  ENSG00000165732_32 (sequence is synthesized)
cctaatccttgaggcaacattctttttctatttgaacttcagttctgtccttgaatcccgactagatatttcttgccctctggtctcagaattctcttggcttttattccttgatccact

SEQ ID NO: 525054 - DNA, 120 bp, Artificial Sequence
  ENSG00000165732_33 (sequence is synthesized)
tgccagttttatcactttacccttgttcctcatggcttcccatcaagccatgggtattaggtgacagtgtaatttattagattctggttttgcccaaatactgggcatgctttaataata

SEQ ID NO: 525055 - DNA, 120 bp, Artificial Sequence
  ENSG00000165732_34 (sequence is synthesized)
actgaaccatttcattatttggataggcatgggtaccttatcaagcagattaaaaggatatggtacccgtcctttagaaaagaacagctaaaaccttgttgtggattatggatttagcct

SEQ ID NO: 525056 - DNA, 120 bp, Artificial Sequence
  ENSG00000165732_35 (sequence is synthesized)
aaagaaaaataatctggcataaattaagagtaagagagaagattaatagaaatttcacttcacataacttaaaacatggctatttcaataaaggactaaagtttctcctggatcccagaa

SEQ ID NO: 525057 - DNA, 120 bp, Artificial Sequence
  ENSG00000165732_36 (sequence is synthesized)
ttcaacctgtatttataaatgtataatgtatttagctactttttggtttaaatgaacttgttgggttagcttggtaaatgttataatttttactattttctacaaagaaaatattttcta

SEQ ID NO: 525058 - DNA, 120 bp, Artificial Sequence
  ENSG00000165732_37 (sequence is synthesized)
atttaagttggagctatctgtgcagcagtttctctacagttgtgcataaatgtttttactataaaatgagctaatgtataaaatactgctgtataccataataaagatagtaatacttga

SEQ ID NO: 525059 - DNA, 120 bp, Artificial Sequence
  ENSG00000165732_38 (sequence is synthesized)
gggtcttggcgggcggtcgcccaggagtggtgcgctccccgggcagtggacgcgtcgtttgcccgaccgagccaggtccgccgtgcgctgacctcttcctctgagcttataggcatccac

SEQ ID NO: 525060 - DNA, 120 bp, Artificial Sequence
  ENSG00000165732_39 (sequence is synthesized)
aggtcggaactctggtagagaggccctgttggagctcgggagagggccgggtgtcccacgtggtccccggcgacttgggcgcgcctcacacagtgcgcagagttggaccttcagtcaggc

SEQ ID NO: 525061 - DNA, 120 bp, Artificial Sequence
  ENSG00000165733_0 (sequence is synthesized)
gtccatgctgacctgaggagtcgcggctgcgagcaggttagagttacttgttattggtaaatagccactatggaggctaaggaccagaagaaacacagaaagaaaaacagtggacccaaa

SEQ ID NO: 525062 - DNA, 120 bp, Artificial Sequence
  ENSG00000165733_1 (sequence is synthesized)
gctgcaaagaaaaagaagcggcttctgcaggatctccagctaggagacgaagaagatgcccggaagagaaatcccaaagcttttgcagttcagtctgctgtgcggatggctcgatccttt

SEQ ID NO: 525063 - DNA, 120 bp, Artificial Sequence
  ENSG00000165733_2 (sequence is synthesized)
cacaggactcaggatttgaagacaaaaaagcatcatattccagtggttgatcgaactccactagagcccccaccaatagtggtagtggtgatgggacctccaaaagttggaaagagcact

SEQ ID NO: 525064 - DNA, 120 bp, Artificial Sequence
  ENSG00000165733_3 (sequence is synthesized)
ttgatacaatgcctcattcggaactttacccggcagaagttgactgagatcagaggccctgtgacgattgtgtcaggtaaaaagcgcagactcaccattattgaatgtgggtgtgacatt

SEQ ID NO: 525065 - DNA, 120 bp, Artificial Sequence
  ENSG00000165733_4 (sequence is synthesized)
aacatgatgattgatctggctaaagtagcagatctggtactgatgcttatagatgccagctttgggtttgaaatggaaacgtttgagtttctaaacatctgtcaagtacatggctttcct

SEQ ID NO: 525066 - DNA, 120 bp, Artificial Sequence
  ENSG00000165733_5 (sequence is synthesized)
aaaattatgggagttctcacccacctcgactccttcaagcataataagcaactgaagaagacaaagaagcgattaaaacacaggttctggacggaagtttacccgggtgccaagctgttc

SEQ ID NO: 525067 - DNA, 120 bp, Artificial Sequence
  ENSG00000165733_6 (sequence is synthesized)
tacctttctggaatggtgcatggagaatatcaaaaccaagaaatccacaatctgggccgttttattacagttatgaagtttaggcctctcacatggcaaacttctcacccttatatcctg

SEQ ID NO: 525068 - DNA, 120 bp, Artificial Sequence
  ENSG00000165733_7 (sequence is synthesized)
gcagacaggatggaagatttgacaaacccagaggatatccgaacaaacatcaaatgtgaccggaaggtgtcactttatggttatttaagaggagcacacttgaaaaataaaagccaaatt

SEQ ID NO: 525069 - DNA, 120 bp, Artificial Sequence
  ENSG00000165733_8 (sequence is synthesized)
cacatgccaggggtaggagattttgccgtgagtgacatcagtttcctcccagacccttgcgctcttcctgaacaacaaaagaagcgctgtttaaatgagaaggagaagctggtttatgcg

SEQ ID NO: 525070 - DNA, 120 bp, Artificial Sequence
  ENSG00000165733_9 (sequence is synthesized)
cctctttctggagttgggggtgtgctgtatgacaaagacgctgtctatgttgaccttggtggcagccacgtttttcaggatgaagtggggcccacccatgagctggtccagagtctcatc

SEQ ID NO: 525071 - DNA, 120 bp, Artificial Sequence
  ENSG00000165733_10 (sequence is synthesized)
tctacccactccaccattgatgccaagatggcttcaagtcgagtgacgctgttttctgattccaagccacttgggtcagaggatatagataatcaagggctaatgatgccaaaggaggaa

SEQ ID NO: 525072 - DNA, 120 bp, Artificial Sequence
  ENSG00000165733_11 (sequence is synthesized)
aaacaaatggacttgaacactggtcgaatgcgtcggaaagccattttcggagatgaagatgaatctggagatagtgatgatgaagaagatgatgaaatgtctgaagatgacgggttggaa

SEQ ID NO: 525073 - DNA, 120 bp, Artificial Sequence
  ENSG00000165733_12 (sequence is synthesized)
aacggctctagtgatgaggaagcagaagaggaggaaaatgctgagatgactgatcagtatatggctgttaagggcatcaaacgacggaaacttgagttggaagaagacagtgaaatggat

SEQ ID NO: 525074 - DNA, 120 bp, Artificial Sequence
  ENSG00000165733_13 (sequence is synthesized)
ttgccagcatttgctgacagtgacgatgaccttgagaggagctcagcggaagaaggggaagcggaggaagctgatgaaagcagtgaagaagaggactgcactgcaggagagaagggcatt

SEQ ID NO: 525075 - DNA, 120 bp, Artificial Sequence
  ENSG00000165733_14 (sequence is synthesized)
tcaggatcaaaggctgctggagaaggtagtaaagcagggctgtcaccagctaattgccagagtgaccgtgtgaatctggagaagtctttgctgatgaagaaagcagctctccccactttc

SEQ ID NO: 525076 - DNA, 120 bp, Artificial Sequence
  ENSG00000165733_15 (sequence is synthesized)
gattctgggcattgcacagctgaagaggtgtttgcatctgaagatgaatctgaagaaagctcctcactcagtgcagaggaagaagactcagaaaatgaagaggctattagaaaaaagctt

SEQ ID NO: 525077 - DNA, 120 bp, Artificial Sequence
  ENSG00000165733_16 (sequence is synthesized)
tcaaagccttctcaagtgagcagtggtcagaaactggggccacagaacttcattgatgagaccagtgatatagaaaatttactcaaagaggaagaagattacaaggaagaaaataatgat

SEQ ID NO: 525078 - DNA, 120 bp, Artificial Sequence
  ENSG00000165733_17 (sequence is synthesized)
tccaaagaaacgtcaggtgccctcaagtggaaggaagacctttccagaaaggcagctgaggcctttctgaggcagcagcaagcagctccaaacctccgaaagcttatttatgggacagtg

SEQ ID NO: 525079 - DNA, 120 bp, Artificial Sequence
  ENSG00000165733_18 (sequence is synthesized)
acagaagataatgaagaagaagatgatgatactctagaagagcttggagggttgtttcgtgtcaaccagcctgacagagagtgtaagcacaaggctgactctttggactgctccagattt

SEQ ID NO: 525080 - DNA, 120 bp, Artificial Sequence
  ENSG00000165733_19 (sequence is synthesized)
cttgtggaggccccccatgactgggatttagaggaggttatgaacagtatcagagattgcttcgtgactggaaagtgggaagatgataaagatgcagccaaggtcttagcagaagatgag

SEQ ID NO: 525081 - DNA, 120 bp, Artificial Sequence
  ENSG00000165733_20 (sequence is synthesized)
gagctctacggtgactttgaagacttggaaacaggggacgtgcacaagggaaaatcaggccccaatactcagaatgaagatatagagaaagaagttaaggaagaaattgaccccgacgaa

SEQ ID NO: 525082 - DNA, 120 bp, Artificial Sequence
  ENSG00000165733_21 (sequence is synthesized)
gaagaaagtgccaagaaaaagcatttggataagaagagaaaattgaaggagatgtttgatgcagaatatgatgaaggagaaagcacatattttgatgatcttaaaggagaaatgcagaaa

SEQ ID NO: 525083 - DNA, 120 bp, Artificial Sequence
  ENSG00000165733_22 (sequence is synthesized)
gatgatgaagccagagttcagtatgagggttttcgacctgggatgtacgtccgcattgagattgaaaatgttccctgtgaatttgtgcagaactttgacccccattaccccattatcctg

SEQ ID NO: 525084 - DNA, 120 bp, Artificial Sequence
  ENSG00000165733_23 (sequence is synthesized)
gtgcagaactttgacccccattaccccattatcctgggtggcttgggcaacagtgagggaaatgttggctacgtgcagatgcgtctgaagaaacatcgctggtataagaaaatcctcaag

SEQ ID NO: 525085 - DNA, 80 bp, Artificial Sequence
  ENSG00000165733_24 (sequence is synthesized)
ttcagaccatcccactgtattatatccacagcacatgcattgcggagcagccttttggggccctatcactccacagggaa

SEQ ID NO: 525086 - DNA, 120 bp, Artificial Sequence
  ENSG00000165733_25 (sequence is synthesized)
cataaaaattgtgaagaaattaaagctaactggttttccatataaaattttcaagaacacttcatttattaagggaatgtttaattctgccttggaagtggccaaatttgaaggtgctgt

SEQ ID NO: 525087 - DNA, 120 bp, Artificial Sequence
  ENSG00000165733_26 (sequence is synthesized)
ggtgctgtgattcgaacagtcagtgggataagggggcagatcaagaaagcactccgagctccagaaggagctttcagggccagctttgaggataagctgctgatgagcgatattgtcttc

SEQ ID NO: 525088 - DNA, 63 bp, Artificial Sequence
  ENSG00000165733_27 (sequence is synthesized)
ggaccacgggccaactcaggctcgcccatggcgtcagactaaaggcgaacaaggactctctgt

SEQ ID NO: 525089 - DNA, 120 bp, Artificial Sequence
  ENSG00000165733_28 (sequence is synthesized)
gcccatggcgtcagactaaaggcgaacaaggactctctgtataagccaatcctgaggcaaaagaaacattttaattcactgcacattccaaaagccttgcagaaggccctgccatttaag

SEQ ID NO: 525090 - DNA, 120 bp, Artificial Sequence
  ENSG00000165733_29 (sequence is synthesized)
aacaagcccaagacccaagcaaaggcaggcaaggtgccaaaggacaggcggagaccggccgtcatacgcgagcctcatgaaagaaagatccttgcactgctggatgctctgagtacggtg

SEQ ID NO: 525091 - DNA, 120 bp, Artificial Sequence
  ENSG00000165733_30 (sequence is synthesized)
catagtcagaagatgaagaaggccaaggagcagcggcacctgcacaataaagagcacttcagagccaagcagaaggaggaggaggagaagctgaagcggcagaaggacctcaggaagaag

SEQ ID NO: 525092 - DNA, 120 bp, Artificial Sequence
  ENSG00000165733_31 (sequence is synthesized)
cctttggactggagggactgtccctggatctgcggaggtagacagtttcaaacatcacagtttgaatgcctgtgaatgacaagtcagtgggaaagagctcaagagatgtctctactcaaa

SEQ ID NO: 525093 - DNA, 120 bp, Artificial Sequence
  ENSG00000165733_32 (sequence is synthesized)
ctgtgcctgcaggaggaggaacagagaagcctgggctgctgggactgggttcattctcatgacttggggctgtcgagatttaaagtgatgtaagctgtggttatgtggattctcttactt

SEQ ID NO: 525094 - DNA, 120 bp, Artificial Sequence
  ENSG00000165733_33 (sequence is synthesized)
tcctctgcctgcctcagtttaattattttgtcctacagaaatatcattaaaatatttttttgttacttttggcttagtagttttcattagggatgaatgcctgacaattctttgtggata

SEQ ID NO: 525095 - DNA, 120 bp, Artificial Sequence
  ENSG00000165733_34 (sequence is synthesized)
attatttatactaccaccttcatgaggagtcttccagaagagaaagaaatattcacttgaactctgagctcccatggaagattttagagaatagtgtgtagtgtttttgttttgtttttt

SEQ ID NO: 525096 - DNA, 120 bp, Artificial Sequence
  ENSG00000165733_35 (sequence is synthesized)
gtttgagtgacacacaaacctagatggtacagcctactgtgcacccaggatctatgggctcctttgatcactggcccttgtggacattttctatcttatttcatatgttctgcacattag

SEQ ID NO: 525097 - DNA, 120 bp, Artificial Sequence
  ENSG00000165733_36 (sequence is synthesized)
tatagtgacaaggtaacagtaagtacttttttaaagctttagacttaggagattattgtctcaggtgcagagaccaaggaaatcgtatgtatcagtgagataggcttcccgtattatgct

SEQ ID NO: 525098 - DNA, 120 bp, Artificial Sequence
  ENSG00000165733_37 (sequence is synthesized)
catgcgttatacctgcctagctacattgcctttttttaaattaaacattatgttgaagtaatcatactattacataggcgatgtatgtattttatgattgtatgttgatatagttatggg

SEQ ID NO: 525099 - DNA, 120 bp, Artificial Sequence
  ENSG00000165733_38 (sequence is synthesized)
gaatctattcctatacgatgtaatcatagattcacatatagttgtatattttgcccaatttctctcagtggtaatgtttcacacatataacaatcaggatgttgacatcaatacagcccg

SEQ ID NO: 525100 - DNA, 120 bp, Artificial Sequence
  ENSG00000165733_39 (sequence is synthesized)
acagcccgctgattttattcacatttccccagctttactttccccaacgtatactcctccatgtatgcatgggtgtgtagaaatatggaacgcagctgggcacagtgactcacgcctgta

SEQ ID NO: 525101 - DNA, 120 bp, Artificial Sequence
  ENSG00000165733_40 (sequence is synthesized)
atcacttgagcccaggaatttgagaccaacttgggcaacatggcaaaacctcatcgctacaaaaaataaaaaattcgccaggtgtggtgggtgcacacctgtagttccagctgcttggga

SEQ ID NO: 525102 - DNA, 61 bp, Artificial Sequence
  ENSG00000165733_41 (sequence is synthesized)
ctacaaaaaataaaaaattcgccaggtgtggtgggtgcacacctgtagttccagctgatga

SEQ ID NO: 525103 - DNA, 120 bp, Artificial Sequence
  ENSG00000165733_42 (sequence is synthesized)
ctgtttcaaaaaaaaaaaattatacatatatgtatgtagaacacttcatgaatttgtgtgtcatctgtgcatggggcccatgctgacctctgtgttgtgccagttatagtatgtgtgctg

SEQ ID NO: 525104 - DNA, 120 bp, Artificial Sequence
  ENSG00000165733_43 (sequence is synthesized)
ctgatatgagtgccacattgcctttacaacatcataggggccaaagagggttggcaggattatgagcagttggcctagtctgagaggctctctaaaagcctaaagtctgtaggcaggtgc

SEQ ID NO: 525105 - DNA, 120 bp, Artificial Sequence
  ENSG00000165733_44 (sequence is synthesized)
tcagctttgtatctccataagaagggaagaggatgtgaggatcctgtcagggctaggtccacctgggaagtgacaattggaacactcccagacctctctgggcaactctgggtgtacatt

SEQ ID NO: 525106 - DNA, 120 bp, Artificial Sequence
  ENSG00000165733_45 (sequence is synthesized)
ttcctctgttcctcaagagctattatgaatttcatcatccattatgctgataggcctggggactgacacatagtaagcccataacaattataatttaaaactaatttgttatatagcata

SEQ ID NO: 525107 - DNA, 120 bp, Artificial Sequence
  ENSG00000165733_46 (sequence is synthesized)
attgatatattttaaaatgcaaaactataattcaactaaaatatacaaggcactcaagtcataccatgttttaagtagcttacaaggtgatcagcaagtgtcttatacaacaagcaaatt

SEQ ID NO: 525108 - DNA, 120 bp, Artificial Sequence
  ENSG00000165733_47 (sequence is synthesized)
tgttcaaagagaagcattgcaaataagtatttataattgtatagttttatattttagccagaagagtggaatcctttagcaatgggggaaataaaagaatgtttaattacagttgcagat

SEQ ID NO: 525109 - DNA, 120 bp, Artificial Sequence
  ENSG00000165733_48 (sequence is synthesized)
aattgccttttccaaagacaatgtatgtaggcagaactcatacctgttaatattaaaaatcttggtttatcatatttggagaacaagggaaataaaaagtttgcatattaagattattta

SEQ ID NO: 525110 - DNA, 120 bp, Artificial Sequence
  ENSG00000165733_49 (sequence is synthesized)
aactaaagttaaggaatctctaatgtctgaaagaaacaataaatagcatttttcatgtagaatttttattggtgaaggttccacctggccaggttagtaaaatacagtcacacatcagtt

SEQ ID NO: 525111 - DNA, 120 bp, Artificial Sequence
  ENSG00000165733_50 (sequence is synthesized)
aaggatggggatatattctgagaaatgtatcattaggcaattttgtcattgtgtaaacatcatagagtgacacacaaacctagatggtacagcctactgtgcacctgggctctatggtat

SEQ ID NO: 525112 - DNA, 120 bp, Artificial Sequence
  ENSG00000165733_51 (sequence is synthesized)
ggcctgttgctcctaggctacaaacctgggcagcatgtgactgtactgactactgtaggcagttgtaacacagtggtaaacatttgtgtatcgaaacatagaaaaggcgtagcaaaaata

SEQ ID NO: 525113 - DNA, 120 bp, Artificial Sequence
  ENSG00000165733_52 (sequence is synthesized)
cagtattgtggaaccactgccatatacgtggtccatccttgactgaacatcatgcggcatgtggctgtatgtatacacatagtttttgctgtgagtttgcatccatctcataggaagaca

SEQ ID NO: 525114 - DNA, 120 bp, Artificial Sequence
  ENSG00000165733_53 (sequence is synthesized)
tatatcaaaataaggaccagactggagagtgtgtaaattacttttcaatactaatggcttattaatttgatattgtcagcaagtatgttgcaaaaacaaattccaccagaatgtgagttc

SEQ ID NO: 525115 - DNA, 120 bp, Artificial Sequence
  ENSG00000165733_54 (sequence is synthesized)
catgagagcaggaactgggttgttcaccttgttggcacttggagtagagccactgagcttcgtgctgcataaaattgcttggaagaaagaagggagggcattccaggtaactgaagcatt

SEQ ID NO: 525116 - DNA, 120 bp, Artificial Sequence
  ENSG00000165733_55 (sequence is synthesized)
gctatgcaaagtaagcatttgccctctgaaatattttaacaatgtttatagaaacctttctcaattgtattaaactttgtaaattgtaaaaattattctgttataccttttctatttact

SEQ ID NO: 525117 - DNA, 120 bp, Artificial Sequence
  ENSG00000165733_56 (sequence is synthesized)
aggcacaggcagccataggtgctaggtatgttttgaaaacatattgaacctacagtgtacatatcattccatgccattaaatattcttatttaatcatagatgtgttcaggtgtgtttgg

SEQ ID NO: 525118 - DNA, 120 bp, Artificial Sequence
  ENSG00000165733_57 (sequence is synthesized)
tttcctatttgtggatgtactagattgttttctttttttaacaaaacctgtgaacttgctttaagtattatcatttggtgacatgcccgccatttcagaaataaatgtttgagcaaagag

SEQ ID NO: 525119 - DNA, 120 bp, Artificial Sequence
  ENSG00000165733_58 (sequence is synthesized)
gaaagccaccgggtctgattcagctctctggaggctccagagcttacctcgctgatgggaaaaagagcatcgatttaattgcccttggtaccgacttctagtatctagtattttgccaga

SEQ ID NO: 525120 - DNA, 120 bp, Artificial Sequence
  ENSG00000165733_59 (sequence is synthesized)
ctcaggtatttcttaaagccattattcagagtcttcagcaaggacattgtattttacttgtgtctccttagttttacctagtttatttcatggttttaaagtattgtacatttttataat

SEQ ID NO: 525121 - DNA, 120 bp, Artificial Sequence
  ENSG00000165733_60 (sequence is synthesized)
cctttaacaagacaaaaggttgagatgttggacatttaaatgccaaaggtgttttattatgagacttagcatttcatatttggggatggtaccttatcgaaaatcagataaactttggtt

SEQ ID NO: 525122 - DNA, 120 bp, Artificial Sequence
  ENSG00000165733_61 (sequence is synthesized)
ggatgggtatttggaggaatcttttaagtcttttcttaagcaaagtttggacactctaaaataaggttgccaactggcatgtagagagaaaaggatgtgtcatacatttagaccaggtgg

SEQ ID NO: 525123 - DNA, 120 bp, Artificial Sequence
  ENSG00000165733_62 (sequence is synthesized)
cctgtcctgtaaatttttttgaggggaggggtgggcttgtttttttctgtgtttcggttttttccaatttttgttttgtgataaaatatgcataataaaacttattttatcaatttttaa

SEQ ID NO: 525124 - DNA, 80 bp, Artificial Sequence
  ENSG00000165752_0 (sequence is synthesized)
agaagagcgcacggcgggcgctgccggccccgagcgctcccgctaccactgccgctcccggccctgccggccggccatgc

SEQ ID NO: 525125 - DNA, 80 bp, Artificial Sequence
  ENSG00000165752_1 (sequence is synthesized)
ctgccgcgcgcacccagacccggcgatgaggagtggcgccgagcgcaggggcagcagcgccgcggcgtccccgggctcgc

SEQ ID NO: 525126 - DNA, 120 bp, Artificial Sequence
  ENSG00000165752_2 (sequence is synthesized)
cagccccgggcccgggactcgggcgatgtccgctcgcagccgcgccccctgtttcagtggagcaagtggaagaagaggatgggctcgtccatgtcggcggccaccgcgcggaggccggtg

SEQ ID NO: 525127 - DNA, 120 bp, Artificial Sequence
  ENSG00000165752_3 (sequence is synthesized)
tttgacgacaaggaggacgtgaacttcgaccacttccagatccttcgggccattgggaagggcagctttggcaaggtgtgcattgtgcagaagcgggacacggagaagatgtacgccatg

SEQ ID NO: 525128 - DNA, 120 bp, Artificial Sequence
  ENSG00000165752_4 (sequence is synthesized)
aagtacatgaacaagcagcagtgcatcgagcgcgacgaggtccgcaacgtcttccgggagctggagatcctgcaggagatcgagcacgtcttcctggtgaacctctggtactccttccag

SEQ ID NO: 525129 - DNA, 120 bp, Artificial Sequence
  ENSG00000165752_5 (sequence is synthesized)
gacgaggaggacatgttcatggtcgtggacctgctactgggcggggacctgcgctaccacctgcagcagaacgtgcagttctccgaggacacggtgaggctgtacatctgcgagatggca

SEQ ID NO: 525130 - DNA, 120 bp, Artificial Sequence
  ENSG00000165752_6 (sequence is synthesized)
ctggctctggactacctgcgcggccagcacatcatccacagagatgtcaagcctgacaacattctcctggatgagagaggacatgcacacctgaccgacttcaacattgccaccatcatc

SEQ ID NO: 525131 - DNA, 120 bp, Artificial Sequence
  ENSG00000165752_7 (sequence is synthesized)
aaggacggggagcgggcgacggcattagcaggcaccaagccgtacatggctccggagatcttccactcttttgtcaacggcgggaccggctactccttcgaggtggactggtggtcggtg

SEQ ID NO: 525132 - DNA, 120 bp, Artificial Sequence
  ENSG00000165752_8 (sequence is synthesized)
caacgccgtggagtccctggtgcagctgttcagcaccgtgagcgtccagtatgtccccacgtggtccaaggagatggtggccttgctgcggaagctcctcactgtgaaccccgagcaccg

SEQ ID NO: 525133 - DNA, 120 bp, Artificial Sequence
  ENSG00000165752_9 (sequence is synthesized)
gctctccagcctccaggacgtgcaggcagccccggcgctggccggcgtgctgtgggaccacctgagcgagaagagggtggagccgggcttcgtgcccaacaaaggccgtctgcactgcga

SEQ ID NO: 525134 - DNA, 120 bp, Artificial Sequence
  ENSG00000165752_10 (sequence is synthesized)
ccccacctttgagctggaggagatgatcctggagtccaggcccctgcacaagaagaagaagcgtctggccaagaacaagtcccgggacaacagcagggacagctcccagtccgagaatga

SEQ ID NO: 525135 - DNA, 120 bp, Artificial Sequence
  ENSG00000165752_11 (sequence is synthesized)
ctatcttcaagactgcctcgatgccatccagcaagacttcgtgatttttaacagagaaaagctgaagaggagccaggacctcccgagggagcctctccccgcccctgagtccagggatgc

SEQ ID NO: 525136 - DNA, 120 bp, Artificial Sequence
  ENSG00000165752_12 (sequence is synthesized)
tgcggagcctgtggaggacgaggcggaacgctccgccctgcccatgtgcggccccatttgcccctcggccgggagcggctaggccgggacgcccgtggtcctcaccccttgagctgcttt

SEQ ID NO: 525137 - DNA, 120 bp, Artificial Sequence
  ENSG00000165752_13 (sequence is synthesized)
ggagactcggctgccagagggagggccatgggccgaggcctggcattcacgttcccacccagcctggctggcggtgcccacagtgccccggacacatttcacacctcaggctcgtggtgg

SEQ ID NO: 525138 - DNA, 120 bp, Artificial Sequence
  ENSG00000165752_14 (sequence is synthesized)
tgcaggggacaagaggctgtgggtgcaggggacacctgtggagggcatttcccgtgggcccccgagacccgcctagatggaggaagcgctgctgggcgccctcttaccgctcacggggag

SEQ ID NO: 525139 - DNA, 120 bp, Artificial Sequence
  ENSG00000165752_15 (sequence is synthesized)
ctggggccatggatgggacaggagtctttgtccctgctcagcccggaggctgtgcacggccctcgtcacaaggtgacccttgcagcacaggccgcgggtgccccaggctcggctcaggtc

SEQ ID NO: 525140 - DNA, 120 bp, Artificial Sequence
  ENSG00000165752_16 (sequence is synthesized)
ttggaggtcaagggcatgggttggggtagtgggtggggaggtgaatgttttctagagattcaaactgctccagcaatttctgtagttttcacctctgagaattacaatgtgagaaccgct

SEQ ID NO: 525141 - DNA, 120 bp, Artificial Sequence
  ENSG00000165752_17 (sequence is synthesized)
gcgcccgcggccttgaaggggtggtggtcgacgggcaagtagagaccgcgagggtctggaggggcgaccggcctggcacagaggggaaggaagagagcgggatgctaagtgccgtctggg

SEQ ID NO: 525142 - DNA, 120 bp, Artificial Sequence
  ENSG00000165752_18 (sequence is synthesized)
gagccggagggcccggggcgggcggggctgctcgaggacagccgagcagaaaagaattgctgctgaggcaccacctttggagcggtcctcgctgcctgtccttcccgctgggctcactcc

SEQ ID NO: 525143 - DNA, 120 bp, Artificial Sequence
  ENSG00000165752_19 (sequence is synthesized)
tctcctggggcttcctggagccacttcccacaggagctgcttgtccccaaatcttgcctcaggacttgctgccaggggaacgcagactcagagcgtcctctttggagaagtaaggctgcc

SEQ ID NO: 525144 - DNA, 120 bp, Artificial Sequence
  ENSG00000165752_20 (sequence is synthesized)
tctggacggaggagtgaggggggcgaggaaacgcagaagctgaaagcacaaccagtaccttctcaggagcgtggggaggccagccacccgggcagagcaaggagagaatgaggagtgaca

SEQ ID NO: 525145 - DNA, 120 bp, Artificial Sequence
  ENSG00000165752_21 (sequence is synthesized)
tgggtgttgccgtgagtggcgaaggggatggaagatttcagcacgatgctatttctaacaagtttcagcattccagtatctcttttcacaaataaaacatttactaaccatttgagcgta

SEQ ID NO: 525146 - DNA, 120 bp, Artificial Sequence
  ENSG00000165752_22 (sequence is synthesized)
gtactttgcagttagagaggcgctcacctgtgccgcccgagtgcgagtgaggctcctgccccacaggtggcggggcccggccgctcagaggctcagtctccttggtgaccgcgcggtgtc

SEQ ID NO: 525147 - DNA, 120 bp, Artificial Sequence
  ENSG00000165752_23 (sequence is synthesized)
catcctctgctcacccatgtgcgctggaggcagggccaggccgttgtgcaaagacctgccctgccaggaacgagtgcgctgctgagtcctgtagataaagccgccaaccccggggactgg

SEQ ID NO: 525148 - DNA, 120 bp, Artificial Sequence
  ENSG00000165752_24 (sequence is synthesized)
agtgaggggggcgaggaaacgcagtcttctgagagcacaccccaggactgggattttgccaggaagatgtggaatggtgtggaaagacaagaagctgcagccttcaggctgccatgaaaa

SEQ ID NO: 525149 - DNA, 120 bp, Artificial Sequence
  ENSG00000165752_25 (sequence is synthesized)
agctgggggtgtgttctgtggcccatcaagagggggtgtgtaatgaattgttaatgaatttctcagatgagccaaagtggtgaacttgtctcagtacccagggagactcagactcatccc

SEQ ID NO: 525150 - DNA, 120 bp, Artificial Sequence
  ENSG00000165752_26 (sequence is synthesized)
cagctcttggcctccattttcccagctgctgtgattggagtgggtccctggaattcatatgctggaaatttggtccaggtgtgggtgtgttgggaggtggggtttaaggtgtggttaggc

SEQ ID NO: 525151 - DNA, 120 bp, Artificial Sequence
  ENSG00000165757_0 (sequence is synthesized)
caggcggggcgggtcgcgctggtccccggccggccggagcggcggcggtggcggcgcgaggcggcatgagggagccgctcgtgctgggtcctgccaccaccatggttccagtggttgagc

SEQ ID NO: 525152 - DNA, 120 bp, Artificial Sequence
  ENSG00000165757_1 (sequence is synthesized)
ccaccatggttccagtggttgagctttgctgaagcccaggcatcatgtacagtgtagaagacctcctgatctctcatggatacaagctgtcaagagaccccccagcatcacgcgaggata

SEQ ID NO: 525153 - DNA, 120 bp, Artificial Sequence
  ENSG00000165757_2 (sequence is synthesized)
accccaaggggcgccaggcagcgaggactgggacacgagcaggccagggcctgcagaacgggcatgaggatggccctgcggccctcgcacatcgtaagacgtccgcggggaaaggacatg

SEQ ID NO: 525154 - DNA, 120 bp, Artificial Sequence
  ENSG00000165757_3 (sequence is synthesized)
tgagtgactccgaaagccgccgcagcacaccgagaggccacggggagccccagagcacttctgcttccagaacctcggaggcggggttttgtaatcaacccccctcagcatggtcctctc

SEQ ID NO: 525155 - DNA, 120 bp, Artificial Sequence
  ENSG00000165757_4 (sequence is synthesized)
atcccccgactggtaacgaccaagcctaccggagaagaggacggcaagaagccaggagccagaagccgagggagcacgaaaacctggaggccagaggaatggcccaagcccacagcctgc

SEQ ID NO: 525156 - DNA, 120 bp, Artificial Sequence
  ENSG00000165757_5 (sequence is synthesized)
ctgtccacgtgagggagggtccatgggaagttggaggaaggtcagagcatgtgatgaagaagccagtttgggaagaagaattgcgaatgtcaggtcctgccaagtggcagaacgtcagcc

SEQ ID NO: 525157 - DNA, 120 bp, Artificial Sequence
  ENSG00000165757_6 (sequence is synthesized)
tggaaagctggaaccagccaaggaaattagggaggcagatgtctgatggagatggggagagactgtttcaagacctgtacccattcattcaaggagaacatgtgttgaattctcaaaaca

SEQ ID NO: 525158 - DNA, 120 bp, Artificial Sequence
  ENSG00000165757_7 (sequence is synthesized)
aagggaagtctcgctcactgcctagagttctttcccccgagagcctgagttgcacggaaattcccattccattaaatgaaagacattcacctaaaatgccaccgtatcctcccacttgcg

SEQ ID NO: 525159 - DNA, 120 bp, Artificial Sequence
  ENSG00000165757_8 (sequence is synthesized)
caccaaatttggactccacgaggaattctgagaagagtggctgctcagccccatttccccggcctaagtttgggaggcccctcaagcccccatcttacagctcgcaccagcagtctaggg

SEQ ID NO: 525160 - DNA, 120 bp, Artificial Sequence
  ENSG00000165757_9 (sequence is synthesized)
gaggagcggacagcagtgactctcaggacagccagcagatggacgcctatgtccccaggcatgagctctgcctgtcagaccctggattggaacctccagtgtacgtgcctccgccctcat

SEQ ID NO: 525161 - DNA, 120 bp, Artificial Sequence
  ENSG00000165757_10 (sequence is synthesized)
acagatcgcccccgcagaacatcccaaacccctacttggaagacacggtgcccataaatgtgtgtggcggtcacagtcaacagcagtctccgaccgagaaggctggggccagcggtcagc

SEQ ID NO: 525162 - DNA, 120 bp, Artificial Sequence
  ENSG00000165757_11 (sequence is synthesized)
ctccttcaggcccccctggaactgggaatgagtatggtgtgagcccccgcttgcctcaggggctccccgcacatccccgacctgtcactgcctatgacggcttcgttcagtacattccct

SEQ ID NO: 525163 - DNA, 120 bp, Artificial Sequence
  ENSG00000165757_12 (sequence is synthesized)
ttgatgatccacggttacgacattttaaactagctcagccccagggtttctgtgaagacataaagcttgacgataaatcatataactccagtcctgtcactgctcaagagccggctcatg

SEQ ID NO: 525164 - DNA, 120 bp, Artificial Sequence
  ENSG00000165757_13 (sequence is synthesized)
gaggaatgcagcctgatggtgccatttggaatccacagagcttaatacccccgtcgggggatgagagaggcctggtcttggccgattccagcccccggtggctgtggggccagccccccg

SEQ ID NO: 525165 - DNA, 120 bp, Artificial Sequence
  ENSG00000165757_14 (sequence is synthesized)
gggatggggaaaacagtggcctccccaaccagagagaccgctgtgtggcaaggggacagtggcctgatgtgagaggcagccagcacgggcacactggaagacaagtttcctccccttact

SEQ ID NO: 525166 - DNA, 120 bp, Artificial Sequence
  ENSG00000165757_15 (sequence is synthesized)
cacagggcgagagcacctgcgaaactcaaaccaagctcaaaaagttccaaactgggactcggaccaagaaaagttcaaagaaaaaaatgaacgagactatattttgcttggtttctatcc

SEQ ID NO: 525167 - DNA, 120 bp, Artificial Sequence
  ENSG00000165757_16 (sequence is synthesized)
cagtgaaatcagaatcacatctgccagatagagatatggacaacaatgacttaaagcccagtgctgatcaaaagaatgggtctgataagagcccggctctgcaagaacagagtctgctga

SEQ ID NO: 525168 - DNA, 120 bp, Artificial Sequence
  ENSG00000165757_17 (sequence is synthesized)
gcatgtcttccaccgacctggagctgcaggccctcacaggaagcatgggtgggagaacggagttccaaaaacaagatctaggggaaccagaagaagacagacaaacaaatgacctcagtt

SEQ ID NO: 525169 - DNA, 120 bp, Artificial Sequence
  ENSG00000165757_18 (sequence is synthesized)
tcatccaccttacaaagcacagagaactcaagcattctggctcttggccagggcaccggtacagagatcagcaaacacaaaccagtttctccgaggagccccaaagttcgcagctgctcc

SEQ ID NO: 525170 - DNA, 120 bp, Artificial Sequence
  ENSG00000165757_19 (sequence is synthesized)
ctggtgcaaagctgggagggccgagtcgtgcagcattgagtccaaaatgttcagaccctgctgcctccgaagctcagacgcacacagcattccctaccggtgatcacaaacagaggccaa

SEQ ID NO: 525171 - DNA, 120 bp, Artificial Sequence
  ENSG00000165757_20 (sequence is synthesized)
gtgcccgtaacctgaaaggtcacaggtccctcagcccatccagcaacagtgcgttctcaaggacttccttgtccgtggaccaggcaccgacgccaaaagcaggccgaagtcagccctgcg

SEQ ID NO: 525172 - DNA, 120 bp, Artificial Sequence
  ENSG00000165757_21 (sequence is synthesized)
tggatgtccacgggcttggagcccaccctgggcctaagcgggaggtggtgaagggggagcccacgggcccttgcaacagtaaacaactctttgggcagtttctcctgaaaccggtcagcc

SEQ ID NO: 525173 - DNA, 120 bp, Artificial Sequence
  ENSG00000165757_22 (sequence is synthesized)
gtcgtccctgggatttgatcagtcagttagaaagttttaacaaggagctccaggaagaggaagaaagcagcagtagcagcagcagcagcagcagcagcagtgaggagagtgaggcggagc

SEQ ID NO: 525174 - DNA, 120 bp, Artificial Sequence
  ENSG00000165757_23 (sequence is synthesized)
cgcagcaggagaaccgtgctcactgcagacaggaggatgtgggcttccgcggaaacagcccggaaatgagggttgagccacagccgaggatgtgggtgccggagagccctgtgtgtaggt

SEQ ID NO: 525175 - DNA, 120 bp, Artificial Sequence
  ENSG00000165757_24 (sequence is synthesized)
cgggaagaggtgagagtaagtctgagagctggagtgaggagctgcagcctggccacccacgtgcctggcctccatccccgggccgctttcgcgtggaagaaggtggcggtgcacctttct

SEQ ID NO: 525176 - DNA, 120 bp, Artificial Sequence
  ENSG00000165757_25 (sequence is synthesized)
gctcagcagatggaagcacgagtgcagagaagagacacctggaggttagcaacggaatggacgagctggcaggtagcccatttcctgtgacgagaatgtcttcaagatcaagtgacgcaa

SEQ ID NO: 525177 - DNA, 120 bp, Artificial Sequence
  ENSG00000165757_26 (sequence is synthesized)
aaccactgcccgcgtcctatccagctgaacctagggagccccaggaaagtccgaaaatcaccagtgctttcagctctgtgaaaccaagtgaagcggtccctcggaagtttgacagtggtg

SEQ ID NO: 525178 - DNA, 120 bp, Artificial Sequence
  ENSG00000165757_27 (sequence is synthesized)
gagagaggggggcagggctcccactgtccctgtctaacaagaaccgagggctctcagctccagacttacggtctgtggggctcacccctgggcaagaacagggtgccagtgagctagagg

SEQ ID NO: 525179 - DNA, 120 bp, Artificial Sequence
  ENSG00000165757_28 (sequence is synthesized)
ggtctttgggtgaagcaagcacaatagaaatccccccaggtgagtccttgcaagccagggctgcaaggatcctgggcattgaggtggcggtggagtccctcctgccgggcatccggagag

SEQ ID NO: 525180 - DNA, 120 bp, Artificial Sequence
  ENSG00000165757_29 (sequence is synthesized)
cgggacagaaccagcctgctgagcccgatgcaagtgcctgcaccccagagtccccccaggaagagttgctatctcgcccagcaccggcagatgtccccagggtgtccactgatgcctttt

SEQ ID NO: 525181 - DNA, 120 bp, Artificial Sequence
  ENSG00000165757_30 (sequence is synthesized)
atggcaggaggaagtgcggctggaccaagagccctctctttgtaggggacagggacagtgccaggcgggctcctcaggcttttgagcactcagatgtggacggggttgtcaccagcacag

SEQ ID NO: 525182 - DNA, 120 bp, Artificial Sequence
  ENSG00000165757_31 (sequence is synthesized)
accctgtccctgagcctgagcccagccccttggagtccaagttcttcgaacaaaaggatgtggaaacaaaaccacccttcaggtccactttattccattttgtagaaagaaccccaagtg

SEQ ID NO: 525183 - DNA, 120 bp, Artificial Sequence
  ENSG00000165757_32 (sequence is synthesized)
tggcaggctctgaaaagagacttagaagcccttccaaagtgattgaaagtttacaagagaaactggcctccccgcctaggagagcagaccctgaccgcctgatgagaatgaaagaggtga

SEQ ID NO: 525184 - DNA, 120 bp, Artificial Sequence
  ENSG00000165757_33 (sequence is synthesized)
gctcagtgtcacggatgagagtcctgagcttcaggaatgccgactcccaggaggacgccgaggaattgaaggccaccacaaggggccaggccgggctcccgggaggccttgtgtctcctg

SEQ ID NO: 525185 - DNA, 120 bp, Artificial Sequence
  ENSG00000165757_34 (sequence is synthesized)
gcagtggggaccgtgcccagagattgggccactcactctctgtgtccaaggacagcatctccagggaagagaaggagcatccggcagcacaaaaggagaagagcatggatcaagacttct

SEQ ID NO: 525186 - DNA, 120 bp, Artificial Sequence
  ENSG00000165757_35 (sequence is synthesized)
ggtgcccagattcctatgaccctagcagagtggagagggtgtgatgaaatgccggtggagcttgcattccgttgcgaattgagtattctcaagtagctggtagatttagtctatcagccc

SEQ ID NO: 525187 - DNA, 120 bp, Artificial Sequence
  ENSG00000165757_36 (sequence is synthesized)
cacttccccatgtagaagctggaagctgctgagtttttagcatcctgataacattctttaccactgccactaggaaacttgccatcctctcagaattgctttgtggcgataaagcaatcg

SEQ ID NO: 525188 - DNA, 120 bp, Artificial Sequence
  ENSG00000165757_37 (sequence is synthesized)
tccgttgaaaccatctgtttttatagcatgaagatttaatgcctataattaggaaggagttttcacagaaaccctccctcatgacagatttgactaagctggtaaatagtttggtgttgc

SEQ ID NO: 525189 - DNA, 120 bp, Artificial Sequence
  ENSG00000165757_38 (sequence is synthesized)
tccatggcctgcagtccatgctcttgtgaaggagtttgggacactggctgttgcccggtgtttcagcactttcagtttaggggaaatgtgaatcaataggtatgatccatttctaatcaa

SEQ ID NO: 525190 - DNA, 120 bp, Artificial Sequence
  ENSG00000165757_39 (sequence is synthesized)
tttggccttctgctgctggaagtaactttacttataagtaacttgccatcagagaataaaagcaatatcttttaagttcctgaaaaattaaaacttgtactgtaatatactaagagtatt

SEQ ID NO: 525191 - DNA, 120 bp, Artificial Sequence
  ENSG00000165757_40 (sequence is synthesized)
atttatctggcagtgaaatattttgatcatttgcaaacacgccattgtctgctttgcactcagtattatctatttttattttctgtatgggtatttagaaattctttatatgaaaaataa

SEQ ID NO: 525192 - DNA, 120 bp, Artificial Sequence
  ENSG00000165757_41 (sequence is synthesized)
ttgctggtttaaaatagaccattttaacaaagtgactatatttctttttacgaaaatgctatttttctatgatgtaaacaattgttaggcggcagatttttaaggaagtattattttatt

SEQ ID NO: 525193 - DNA, 120 bp, Artificial Sequence
  ENSG00000165757_42 (sequence is synthesized)
taagagtctgtatccctttgtgtgagaggaacccaaagagggttcacttttgctttaaagctctgtcccttacccactgacaactctgctacttttattttatcttagaaaatgtcaata

SEQ ID NO: 525194 - DNA, 120 bp, Artificial Sequence
  ENSG00000165757_43 (sequence is synthesized)
tagacatatcacagggttaataaaagaaacttttcacaaagatttttgtacaagtgtagctatcaggttatatttgaaaataaccctctgaaaaccagccaacattgtcatgacaatttt

SEQ ID NO: 525195 - DNA, 120 bp, Artificial Sequence
  ENSG00000165757_44 (sequence is synthesized)
tgctgccgtatcaactagaattaccaaaaaacatagttttatctttgtatgtgtgtggggatctaccctgagaccatgcttttcttcccaccctgccaccccacccctttaaagaaatac

SEQ ID NO: 525196 - DNA, 120 bp, Artificial Sequence
  ENSG00000165757_45 (sequence is synthesized)
gtatttttatctagaatgatcttgaattagtctctgcatatttttagaaagtgcttggggacattatatatatgccattacaaaagcattatgaggcctatgtattctactgtgtttaat

SEQ ID NO: 525197 - DNA, 120 bp, Artificial Sequence
  ENSG00000165757_46 (sequence is synthesized)
actgcattaacctgcacaaagtttatgcattttttcatgcatttttttccttctttctaagtaaggtattcctgacaactaacattccctaaatcatttcccctccctccctccctccct

SEQ ID NO: 525198 - DNA, 120 bp, Artificial Sequence
  ENSG00000165757_47 (sequence is synthesized)
cccttcctttcttccttccttctgtcctccctcccttgctacctcttgccctccttccttcaccctgtcctccttttcccttttattttttccccttctctttcattttattttctttta

SEQ ID NO: 525199 - DNA, 120 bp, Artificial Sequence
  ENSG00000165757_48 (sequence is synthesized)
gagaaaccaccttatctatttttagacatttcgaattcctaaaatgtgaaccgttgggtgatctgtcctttggccctaaaacggctggccgggctgtcccggcctgttctcatctgtacc

SEQ ID NO: 525200 - DNA, 120 bp, Artificial Sequence
  ENSG00000165757_49 (sequence is synthesized)
gtatgattttatttcataataactttatgtatttggactgtaacaaacaaaacagaacctaagtcgccccgaaaaatctttccaagccttttcaaaacacttatctgcagtccagaattc

SEQ ID NO: 525201 - DNA, 120 bp, Artificial Sequence
  ENSG00000165757_50 (sequence is synthesized)
agctcttatgaaaagtgagagtgcactccagttttcacagcagcaataagtgcgggaaacaaaaagatcctcttcccaggaaaagttgagtggggaagagttcagacactgttgtagctg

SEQ ID NO: 525202 - DNA, 120 bp, Artificial Sequence
  ENSG00000165757_51 (sequence is synthesized)
gtgaatcattgaagtcacctggtagtaccaaataagggctgaggcgcctggaggtctttgtggggtcttccctctttaaatgcaaacgtaagaaggtatatgtgtatatacatttatata

SEQ ID NO: 525203 - DNA, 120 bp, Artificial Sequence
  ENSG00000165757_52 (sequence is synthesized)
cgtgcacatgtatactcgtacatgtatgcacacatacccatacatgtatatgaactccgttctgatttcctctgaaattttgttgataccatctaaatacctctttgaatcaaaataact

SEQ ID NO: 525204 - DNA, 120 bp, Artificial Sequence
  ENSG00000165757_53 (sequence is synthesized)
taattttagctcattcctcaagagaaagagaaggatccccaaggaagaaaaactgttgtaccttctgtgattctcaaaccaaaatgtgatgcgcttctgttttgttatcttaaattgttg

SEQ ID NO: 525205 - DNA, 120 bp, Artificial Sequence
  ENSG00000165757_54 (sequence is synthesized)
tatcatatctttctgaaaccattctgaattaagttgaaattttcaacatttatactttaactgttctaaatttaagcctacatgtaaatcttttttggggggaaggtaacttgaaaagtt

SEQ ID NO: 525206 - DNA, 120 bp, Artificial Sequence
  ENSG00000165757_55 (sequence is synthesized)
taacttgaaaatttgacctttaaactttcatattctaaggtaaataatagcctataaccaacaacagctttcccagaggtcttgaatttaacactaattgtttagttattgtttctattt

SEQ ID NO: 525207 - DNA, 120 bp, Artificial Sequence
  ENSG00000165757_56 (sequence is synthesized)
ctcatacatacataacttcgttttttgtggctggaagaaaaagtttctatattttgtatttgtctttgttcttctcatgcacacaatttactgttggtgtttaataatttggagctcata

SEQ ID NO: 525208 - DNA, 120 bp, Artificial Sequence
  ENSG00000165757_57 (sequence is synthesized)
aaattaaaagttgtaattttgaccatttgggctaaaaattatatgagggattacatatgcaatggattagtatttcttgatttgcaaaagaagggaaaatgatggtaatttagctcaaat

SEQ ID NO: 525209 - DNA, 120 bp, Artificial Sequence
  ENSG00000165757_58 (sequence is synthesized)
tgcctttctttgaagaaaatttctgaatgactgaaaaccaaatatctatattatcactttcaacctcatgtttctgcaaagtacagaaaaactcctcactgacagtgcacccagcccctg

SEQ ID NO: 525210 - DNA, 120 bp, Artificial Sequence
  ENSG00000165757_59 (sequence is synthesized)
actgggttttcaggattatgtccatgtgcataactgcttggatttcttcttttaaagtccctaaaacatgaatctgttctttgagatcctggtttccttagcagagttgtaggttgcggg

SEQ ID NO: 525211 - DNA, 120 bp, Artificial Sequence
  ENSG00000165757_60 (sequence is synthesized)
tttcattcacgtggaaattctaagtagaacttttgctgccccattttactgttggtgaagggccgttgttaatggaagtttacgttttaaaactcagatgactcagaaaccagactgtga

SEQ ID NO: 525212 - DNA, 120 bp, Artificial Sequence
  ENSG00000165757_61 (sequence is synthesized)
tcattttttgcagcagcaaaatgacttattctgacagcatctcggtttggggcttctgaagaaaaaggatgaagctgatctgttgaaacaactactttcccaactcggaggcaaaagggg

SEQ ID NO: 525213 - DNA, 120 bp, Artificial Sequence
  ENSG00000165757_62 (sequence is synthesized)
ctgatagaagataacattcacctaccatttcatcttgtgacccccagagatcacgtttgcgtgttctggctgagttttttattattgtttgttttaaatgattaaataatacacaattaa

SEQ ID NO: 525214 - DNA, 120 bp, Artificial Sequence
  ENSG00000165757_63 (sequence is synthesized)
atgtcaggatagcatctcttgcaaagtgaccagtgcagcagaattgtctttctatccatatttgagcttagagaaacatttcccatgtcctaagttcttagaagcaattactttagcgtt

SEQ ID NO: 525215 - DNA, 120 bp, Artificial Sequence
  ENSG00000165757_64 (sequence is synthesized)
ggggagcattgttctaccagacccatttatgcaggggagatgaagcttaaaagacgggatgtggggtgggagtgtgtttcttaagccgaagctgttgcaggctgggggatttttgcattt

SEQ ID NO: 525216 - DNA, 120 bp, Artificial Sequence
  ENSG00000165757_65 (sequence is synthesized)
tctttttgttttgtttttgactgcagattctgtacatctgtctgtgggaggagagttgctactcaggacaggatttaagagacacattccagtgacctttaagaatctgcatggcgggag

SEQ ID NO: 525217 - DNA, 120 bp, Artificial Sequence
  ENSG00000165757_66 (sequence is synthesized)
gtccttctccaggagtgtgggttggtccactctgggacccaccacactaagaagggggagatgataaaataacattaaaggaagaatggcctccagcctgcaggttttgttggaaagaaa

SEQ ID NO: 525218 - DNA, 120 bp, Artificial Sequence
  ENSG00000165757_67 (sequence is synthesized)
taaaaagggagtcattaagaccataaattcagattgaggcctcttgaaaaggttgatgtgggctagcaacctgcctgtcgaaacagtccttggttcatcagcagtgtgggaaggcagcca

SEQ ID NO: 525219 - DNA, 120 bp, Artificial Sequence
  ENSG00000165757_68 (sequence is synthesized)
aggctcctgcagattcctggcatcgaccttggaaagcctctgcgatacttgtgtgtacgaatacagcagaggacagggaggtccttgttctgtggtctctgtttagtgactgaaacttaa

SEQ ID NO: 525220 - DNA, 120 bp, Artificial Sequence
  ENSG00000165757_69 (sequence is synthesized)
acccaaaggcaagcccagattgtctggccgttcatccccatgctttgataggggttaggaggaaccctttccgtatgaaagacaggccctactagggcttacaaccaagccaaaggacca

SEQ ID NO: 525221 - DNA, 120 bp, Artificial Sequence
  ENSG00000165757_70 (sequence is synthesized)
tctcttctttcttccacctcccttcacccctgccccgcagcagagccgagatgtgagacattcattgtcacggagcaaggagacaaaggcaagttcaagttgagaagcatatggcagcaa

SEQ ID NO: 525222 - DNA, 120 bp, Artificial Sequence
  ENSG00000165757_71 (sequence is synthesized)
acagaaatgaaaaccatatgtcccagcaaggggaaaagcagtcatttccagattataaaaatcaatgaagtactctccacctaggtcagctgaaattcgagccctcacagtcaggcctgt

SEQ ID NO: 525223 - DNA, 120 bp, Artificial Sequence
  ENSG00000165757_72 (sequence is synthesized)
cagagaagttaagcagaaacatctcggggggacttctaaaatttagtgaagacaaggccttgcaactccaaagaaactttttttcccccccttgaaacagggtcttgctctgttgcccag

SEQ ID NO: 525224 - DNA, 120 bp, Artificial Sequence
  ENSG00000165757_73 (sequence is synthesized)
tctgttgcccagcctggagtgcagtggtgcagtcacggctcactgcagcctcaagctcctgggctcaagcactatccccacctcaacctccttagtagctgggactacaggtgcacacca

SEQ ID NO: 525225 - DNA, 120 bp, Artificial Sequence
  ENSG00000165757_74 (sequence is synthesized)
aaccacagaaactttcatctcttcattttttctttgggcaccattaatacctaagacaggtagaaagggtcccagaaagacaccattggtaatggccgattgccggctgcagtcatcgcc

SEQ ID NO: 525226 - DNA, 120 bp, Artificial Sequence
  ENSG00000165757_75 (sequence is synthesized)
cccagatcaggctggtacaggatgccttaaggtgatgagaggtgagggtgcatgaagaataatgagcacagggaagagagaagcaggacaaagtagcagataaaatgccggcaaagcaca

SEQ ID NO: 525227 - DNA, 120 bp, Artificial Sequence
  ENSG00000165757_76 (sequence is synthesized)
gatgaatgtcttcaagaagctcttgtatttctctgcacagtgtaaatatccttgctatttcaggatggcggctggcctgctcagtaacatacatgttccaaataaagattttgcatgaaa

SEQ ID NO: 525228 - DNA, 120 bp, Artificial Sequence
  ENSG00000165757_77 (sequence is synthesized)
agagctcaaacttagagctgctatcggaggaggattttagatttaggaaattctcagcagagcatccgaggggcttttgaaaaattcaattctttagacgctcatgaagaaatcagggat

SEQ ID NO: 525229 - DNA, 89 bp, Artificial Sequence
  ENSG00000165757_78 (sequence is synthesized)
tccctctgttgcccaggctggagtgcattggtgcaatcacagttcactgcaaccttgacttccctgaggagctgggactacagtgctgg

SEQ ID NO: 525230 - DNA, 120 bp, Artificial Sequence
  ENSG00000165762_0 (sequence is synthesized)
tttcgtgatacaggcttctgcctatgaatcaagacaatggatgtgggcaataagtctaccatgtctgaatttgttttgctggggctctctaattcctgggaactacagatgtttttcttt

SEQ ID NO: 525231 - DNA, 120 bp, Artificial Sequence
  ENSG00000165762_1 (sequence is synthesized)
atggtgttttcattgctttatgtggcaacaatggtgggtaacagcctcatagtcatcacagttatagtggaccctcacctacactctcctatgtatttcctgcttaccaatctttcaatc

SEQ ID NO: 525232 - DNA, 120 bp, Artificial Sequence
  ENSG00000165762_2 (sequence is synthesized)
attgatatgtctcttgcttctttcgccaccccaaagatgattacagattacctaacaggtcacaaaaccatctcttttgatggctgccttacccagatattctttctccaccttttcact

SEQ ID NO: 525233 - DNA, 120 bp, Artificial Sequence
  ENSG00000165762_3 (sequence is synthesized)
ggaactgagatcatcttactcatggccatgtcctttgataggtatattgcaatatgcaagcccctgcactatgcttctgtcattagtccccaggtgtgtgttgctctcgtggtggcttcc

SEQ ID NO: 525234 - DNA, 120 bp, Artificial Sequence
  ENSG00000165762_4 (sequence is synthesized)
cttgtgtggatacttatgttctgggcctctttatgatctcaacaagtggcataattgcgttgtcctgttttattgttttatttaattcatatgttattgtcctggttactgtgaagcatc

SEQ ID NO: 525235 - DNA, 120 bp, Artificial Sequence
  ENSG00000165762_5 (sequence is synthesized)
attcttccagaggatcatctaaggccctttctacttgtacagctcatttcattgttgtcttcttgttctttgggccatgcatcttcatctacatgtggccactaagcagctttctcacag

SEQ ID NO: 525236 - DNA, 120 bp, Artificial Sequence
  ENSG00000165762_6 (sequence is synthesized)
acaagattctgtctgtgttttataccatctttactcccactctgaacccaataatctatactttgaggaatcaagaagtaaagatagccatgaggaaactgaaaaataggtttctaaatt

SEQ ID NO: 525237 - DNA, 120 bp, Artificial Sequence
  ENSG00000165762_7 (sequence is synthesized)
ttaataaggcaatgccttcatagtttttgtgacacagaacattagacacaatgctgtgttaggcttttctttctagagggttcttaccaaattgtaattgccaagaatttgtgagggctc

SEQ ID NO: 525238 - DNA, 120 bp, Artificial Sequence
  ENSG00000165762_8 (sequence is synthesized)
gtccctacaacatccattttatccacagctgatacacaactaatgattcaactaggtcatttatttatattttaaattgccttcgatgctctgtcagaagcctacttaacactgaataat

SEQ ID NO: 525239 - DNA, 120 bp, Artificial Sequence
  ENSG00000165762_9 (sequence is synthesized)
ctaaagccctggttcttctatagatctgataagtaaaagtgttttacaaatgagttctactgaaatattttaaatgtttgcccttcccactcccatttcctaatccctattccatgaagc

SEQ ID NO: 525240 - DNA, 120 bp, Artificial Sequence
  ENSG00000165762_10 (sequence is synthesized)
ttaggtcaatacaacagtttacatatgttaacatttacagaagaagaattcaaacagaggtgaaatgaaagagactgatctttgagcactttcccatgaaaatgttgttatatatccttt

SEQ ID NO: 525241 - DNA, 120 bp, Artificial Sequence
  ENSG00000165762_11 (sequence is synthesized)
gtgatataaaattttaaatcatagaattataaatatttataaggaacacagtcatattttaattaaaaagaaaggaccaaaagaagttaaatgcctttcctttgtctgtatgactgtatt

SEQ ID NO: 525242 - DNA, 120 bp, Artificial Sequence
  ENSG00000165762_12 (sequence is synthesized)
gtaataaattagtctctctggatgaatatcagcaaaactaactttctatgtatttcttttgagtttcaaacaggaaactttatctgggaatactttaacagttcatctctggaaatttac

SEQ ID NO: 525243 - DNA, 120 bp, Artificial Sequence
  ENSG00000165762_13 (sequence is synthesized)
aagagctctacaactgtccatcgaaacttcactataatgtgcttaagagcccttatatgtgatataatttttatatgttttcatcagtaaggatatctttatggacaaattccaaatgac

SEQ ID NO: 525244 - DNA, 120 bp, Artificial Sequence
  ENSG00000165762_14 (sequence is synthesized)
taaacatgtatgtgtatgtgtgtttcacacattgtcagcataaagtaagttcttactgttatcgttagacttacacagatgaatagatggacaaataggtaggtatgtctgttcagaatg

SEQ ID NO: 525245 - DNA, 120 bp, Artificial Sequence
  ENSG00000165762_15 (sequence is synthesized)
atattatcttggttggattgccattagtatcagaaaagaaagtgttcttttcaatacctatgatttaaggaacattttgctataagctctaatatttcataatttccattcaaaacaata

SEQ ID NO: 525246 - DNA, 120 bp, Artificial Sequence
  ENSG00000165762_16 (sequence is synthesized)
gtcaggagtgacagttccagttaggacattcaatatcaataatcaatttattggaaaagaggaccaaggaatgaggagaagaaatatagattaaagcagaactaggagataatgacaatt

SEQ ID NO: 525247 - DNA, 120 bp, Artificial Sequence
  ENSG00000165762_17 (sequence is synthesized)
acccacagtgagcaactgagtcacttagtgagatgctcctaaagtatgacaagctagcaagattcctataatccttaggaactccatactgctgtaggatcttagcctctgacagagaag

SEQ ID NO: 525248 - DNA, 120 bp, Artificial Sequence
  ENSG00000165762_18 (sequence is synthesized)
caatgattttccacatacgttcccaagccactcctacttaacatttaaaccaatttgtgatctcttctattaaagaaaactctagatatattttatttcgaatgttaatgacgtccataa

SEQ ID NO: 525249 - DNA, 120 bp, Artificial Sequence
  ENSG00000165762_19 (sequence is synthesized)
aattgccgtaagtgtagcaatctttaccaaccacttttagttcatcatcaaagcaatacagtcatgatatttctttctgataatgcggaatgagtagggaggctggagaattctgcaaat

SEQ ID NO: 525250 - DNA, 120 bp, Artificial Sequence
  ENSG00000165762_20 (sequence is synthesized)
cagaaaatatgaaatgagttgcagatcagtacactttgttttgtgcagacacgatggttgcttagttcctaagaagttaaaactagaattgagagacacagtttataacagttgaattta

SEQ ID NO: 525251 - DNA, 120 bp, Artificial Sequence
  ENSG00000165762_21 (sequence is synthesized)
tggggagtccatgctttcattttaaagtgttatattgctttccattttggttatttttttcttgaaatatttggatgtaaaaataatgaatctgcatttagtaatacattgtcaatgtaa

SEQ ID NO: 525252 - DNA, 120 bp, Artificial Sequence
  ENSG00000165762_22 (sequence is synthesized)
taagtatgtttttgtacacaaataggttttattactgttataaataaatctggtaggttcaatattagctttaatgtatacaaagtattactaccacctgctggtactaactggaattgc

SEQ ID NO: 525253 - DNA, 120 bp, Artificial Sequence
  ENSG00000165762_23 (sequence is synthesized)
aagtattgaaagaggaaaaataattgtgtataccctactttgcaaatcatctttaaatgatggcaaacattcatgagttaactcttatttagaattttctaaatgatattgataaaatat

SEQ ID NO: 525254 - DNA, 120 bp, Artificial Sequence
  ENSG00000165762_24 (sequence is synthesized)
agtgtcttatatatgatccaacatgtatccacaaagggaaagatatgttgcaaccacagtatttgataatatcaagttgttattttctggtatgattgagtaaatggagaaaacaaatga

SEQ ID NO: 525255 - DNA, 120 bp, Artificial Sequence
  ENSG00000165762_25 (sequence is synthesized)
aatgcattaattatcatttatgaaagataattaaaacagaaaatccttagatgttcatattaaaccaagttataaaaggaatttattttttcttcatcagtttgtgttttatttcttcat

SEQ ID NO: 525256 - DNA, 120 bp, Artificial Sequence
  ENSG00000165762_26 (sequence is synthesized)
taatgtactaagcaaataaggaaaaaacttacagcttgaaagtctgtgatactgtgtttaaagcctgagcagttttgaaattattagataataacgtctacagtattaacataaaataaa

SEQ ID NO: 525257 - DNA, 120 bp, Artificial Sequence
  ENSG00000165762_27 (sequence is synthesized)
acatgcttctgtaagcacaagattagcataattctattttaaatagggatacaaataggccaatttaggttttgagtgtgaactttctcttggttgcagttatatgtacaaatatgttca

SEQ ID NO: 525258 - DNA, 120 bp, Artificial Sequence
  ENSG00000165762_28 (sequence is synthesized)
tattcaaggacttcgtttatgtagaatgttttagctggtgcttaaaaatgctagaaataattcttttacttgacatatttctttgtccagggaatattttcaaaactgtgctgctttttg

SEQ ID NO: 525259 - DNA, 120 bp, Artificial Sequence
  ENSG00000165762_29 (sequence is synthesized)
caatataaaactgtggaatcttttggaagagacgctattgattttctgtgcttttgtggagaattctaaaactcaagaacatttgccaaaataccctcaaaggtgtagctgatcagcaga

SEQ ID NO: 525260 - DNA, 120 bp, Artificial Sequence
  ENSG00000165762_30 (sequence is synthesized)
caactctataaggcaagtcaataatgagattaagtagttggattgatagtaaaattctgtggctgataataaaaaggattacagaaagcctttggagggcttacatatataaatggaact

SEQ ID NO: 525261 - DNA, 120 bp, Artificial Sequence
  ENSG00000165762_31 (sequence is synthesized)
atcacatttctcggtggcttagtgtgaggagtcaatattcatggtacctctgcatgttatataaacacttaaaaatcttagttaggactttaggactcatggtggttggttttatcgata

SEQ ID NO: 525262 - DNA, 120 bp, Artificial Sequence
  ENSG00000165762_32 (sequence is synthesized)
tatctcttagacaagatgctgacactctttcaccaaggataactgcagtgacatggccatggactcgttaagcaatagtaaggatggtgccagctgccaccagagtttccagagacagag

SEQ ID NO: 525263 - DNA, 120 bp, Artificial Sequence
  ENSG00000165762_33 (sequence is synthesized)
ataatgttctgcagagaatacaagataagcaggcaagtataattttaagtgatctgcactatctgcaataacacaactgagggagttctggagcatttataagaagagtgtgttgacaag

SEQ ID NO: 525264 - DNA, 120 bp, Artificial Sequence
  ENSG00000165762_34 (sequence is synthesized)
tgacaacaattgaatgcagatggaaaaactgttaaaaatcaggtatagataaaaacagataaagtgtaaattttaatatgtgaaggaactggatatatgtaatagcaataaaaactacaa

SEQ ID NO: 525265 - DNA, 120 bp, Artificial Sequence
  ENSG00000165762_35 (sequence is synthesized)
attatgtttgtttctaaaaatgcttaagaaaacttttagaatactatatggtataatgatggtggatttaccataaagcttgtaaagcttaggttttataactcctcctttgcatggatt

SEQ ID NO: 525266 - DNA, 120 bp, Artificial Sequence
  ENSG00000165762_36 (sequence is synthesized)
tcctcgaaggccctagaatggaaactaacaaccttttattagttatttcgatttttttttcctgaaacaggtgtcctcaaactgtataagctttaagcctagcttgtccaacccatgacc

SEQ ID NO: 525267 - DNA, 120 bp, Artificial Sequence
  ENSG00000165762_37 (sequence is synthesized)
tgcaggttgcatgcggctcaggagatggctttaaattcagcccaacacaaattcataagctttcttgaaacattataagattttcttgtgatttttttgtaaagctcatcagctatcttt

SEQ ID NO: 525268 - DNA, 120 bp, Artificial Sequence
  ENSG00000165762_38 (sequence is synthesized)
agtatcagtgtattttatgtgtggcccaacacaattcttcttccaatgtggcccagagaagccaaaactttggacacccctgcattaaaaggctctgcagaatctgaagtctaatgtgta

SEQ ID NO: 525269 - DNA, 120 bp, Artificial Sequence
  ENSG00000165762_39 (sequence is synthesized)
gttttaaaagtcttagactctggtatcttttttttttttaaacagtgtttaatactacttctactactagtggtgtaaacttaagctaagtacttaatacctcttagcctcagtttctac

SEQ ID NO: 525270 - DNA, 120 bp, Artificial Sequence
  ENSG00000165762_40 (sequence is synthesized)
atatgttaaaggagataatagtggtctctacaccacagagttatttgaggcataaaagaagcaaataatatgaagcatatggttgtcaataaatgttagtcattgtatcattctgggtga

SEQ ID NO: 525271 - DNA, 120 bp, Artificial Sequence
  ENSG00000165762_41 (sequence is synthesized)
taacctctggatatctttgtttatgggacttgatagtctcttgagctaacacttgacttgtttaatttaaaaggtaaattttcatttatatgttttaaatattcatgtctgtatatgtgt

SEQ ID NO: 525272 - DNA, 120 bp, Artificial Sequence
  ENSG00000165762_42 (sequence is synthesized)
gtcagtattaatttgaaaaattaaaagtaacttccactagaaaattacactggttcttacattaattaaagcttctggaaacttgtttttctgtctgttcacaactgtcattaatcaaga

SEQ ID NO: 525273 - DNA, 120 bp, Artificial Sequence
  ENSG00000165762_43 (sequence is synthesized)
gaagtatcaagttgttgcttaatcattatgctattgcttctttacaatgaataaatattaaattggtttattgattttaggatgaattcacattacaattgttgtcagaataagaatgat

SEQ ID NO: 525274 - DNA, 120 bp, Artificial Sequence
  ENSG00000165762_44 (sequence is synthesized)
gtttgactcatattattaaggtgaagagataggcagatggatagattagtagatagatgaagttttgtattatatgagctgtcttatgtgaagtatttttctgcattgataagggtttag

SEQ ID NO: 525275 - DNA, 120 bp, Artificial Sequence
  ENSG00000165762_45 (sequence is synthesized)
gataatgtgatcactggattatgctgctatatagaagttcttggtaaaatgctgttatttgtgcatatccagactccttatgaaagtattttcaaatttaaaaaactaccagtgaatcta

SEQ ID NO: 525276 - DNA, 120 bp, Artificial Sequence
  ENSG00000165762_46 (sequence is synthesized)
ttctctacatgtgagtttttaaacaactcagttatagcaaaatttgttgagagagttggagtaatcctcctatttccctattctttccctgatattattttgcatgatttttggatgtat

SEQ ID NO: 525277 - DNA, 120 bp, Artificial Sequence
  ENSG00000165762_47 (sequence is synthesized)
atgtcaattgaaaaacggggagaagaaaacagccagggaaatctaattcatgtgaacttcttgcatgtactctcagatgccaatgaaatccgctaagcaacttgatagttttttggttta

SEQ ID NO: 525278 - DNA, 120 bp, Artificial Sequence
  ENSG00000165762_48 (sequence is synthesized)
taagtttctgttgtgctttgttgtttggaattatttttaatgctcttggttacaccatgaggtaaatatgcacaaattattctggagcgtgtaggaccaacactcaaatgagactggaaa

SEQ ID NO: 525279 - DNA, 120 bp, Artificial Sequence
  ENSG00000165762_49 (sequence is synthesized)
tgtgactgggatcattgattcatgtattctgtctctattgttgctaatataactcaattgacatgttattttttctctttgatttttgtaaaacaaacaaataaattccaatatctagta

SEQ ID NO: 525280 - DNA, 120 bp, Artificial Sequence
  ENSG00000165762_50 (sequence is synthesized)
tgcactaaaatactatagtttcatttttattttttactctgataatttacactgccaatataaggagatgaatacctattttttaaattaaaaaatgttctcgggctggaggctccaggt

SEQ ID NO: 525281 - DNA, 120 bp, Artificial Sequence
  ENSG00000165762_51 (sequence is synthesized)
ttttttcccccattagcctttttatgactactaaatgcaagaccactgttaattcgccttttttctttgtgttttaactgtactaggaatctgaagccatcaacaaaagccagatttttc

SEQ ID NO: 525282 - DNA, 120 bp, Artificial Sequence
  ENSG00000165762_52 (sequence is synthesized)
tccctttgctcacttgccacctgttaaagaaaatttaaaggagagatttttttttttagtttgagactagaaatagcaatttaattagtaatttgtttttatataataatatatttatat

SEQ ID NO: 525283 - DNA, 120 bp, Artificial Sequence
  ENSG00000165762_53 (sequence is synthesized)
caattttttcttcttgtttgagtgtacttatattggttgtcctacagttaagaaaacggaaaccattgggtaaattaagcagatttaatacaatgtattaaatgcttgtgaataattcaa

SEQ ID NO: 525284 - DNA, 120 bp, Artificial Sequence
  ENSG00000165762_54 (sequence is synthesized)
agacttacaggaacatgcattggaggctgcaactggagctattgtgttccagagcacattaccccagtaatgtgatgtaagggcaaaaggcaaaaagccttggtgtcattgccactcctt

SEQ ID NO: 525285 - DNA, 120 bp, Artificial Sequence
  ENSG00000165762_55 (sequence is synthesized)
catcaccctcagcactcttgaaggtggtgaatagtcactggacacaggtatggctgccacagttgctttccctcacatctcatcatcatcttgctcaccagcggcaattatatcagtaga

SEQ ID NO: 525286 - DNA, 120 bp, Artificial Sequence
  ENSG00000165762_56 (sequence is synthesized)
tccctctgcctcacttgtgctttctaaagctcatttggtgcatctaattggtggaatctattttgcacagagaaacttggcttcaaaaatcaatttgtagatttcaagattcttatgcaa

SEQ ID NO: 525287 - DNA, 120 bp, Artificial Sequence
  ENSG00000165762_57 (sequence is synthesized)
cagaaaacatgctaatagagggtggattggagggagactccgtcaatcaatcaatatccattactttaatttttttattataacctttttattgcagtgtaaaagcaaggtaaagaaaaa

SEQ ID NO: 525288 - DNA, 120 bp, Artificial Sequence
  ENSG00000165762_58 (sequence is synthesized)
tacacaaacatgtttagcttaatgaaatattacaaggcaaacaccattataatcacatttcaagtcacaaaatagaacttcgccagccacccctgaagtcctcaagtttgttcatctcga

SEQ ID NO: 525289 - DNA, 120 bp, Artificial Sequence
  ENSG00000165762_59 (sequence is synthesized)
tgacaactctctcctccaaaattaaccattaccctgacttaataaattatttgcatttcttttcagtttcatgaatacatatatactcaaatatacatccatacacactcaaacttggcc

SEQ ID NO: 525290 - DNA, 120 bp, Artificial Sequence
  ENSG00000165762_60 (sequence is synthesized)
atccatacacactcaaacttggcctcaccaactttgtttccttttcttgtagcctacaagtctcactatcactatctcttcaatttctgtataatttatctttctttttctttttttttt

SEQ ID NO: 525291 - DNA, 120 bp, Artificial Sequence
  ENSG00000165762_61 (sequence is synthesized)
ttttgtatttttagtagagaaggggttataatttatcttttgaaaaacctgagttatttaccatctagggtctcccagagtctgaaatatgctgattgcatgctcatggtacagttcaac

SEQ ID NO: 525292 - DNA, 120 bp, Artificial Sequence
  ENSG00000165762_62 (sequence is synthesized)
tgcatgctcatggtacagttcaacatggacttctgtcactgcattttctgcaaattgcctatccagcagcttaatcatatttagtttgatactttttgcaagacaaatgacagatgatgt

SEQ ID NO: 525293 - DNA, 120 bp, Artificial Sequence
  ENSG00000165762_63 (sequence is synthesized)
tatattttttcatccaaaagatcttgatgtcttgctttatctctttgggaatgatagtgctgttgttgctgtagtagttgatatctctaaccatttttgttggctgaagcttattctcta

SEQ ID NO: 525294 - DNA, 120 bp, Artificial Sequence
  ENSG00000165762_64 (sequence is synthesized)
ctatattcctcaggaagtcttcttgaagaccctattctctgaattctggcgtgttggcaagtttctttgaaacatttatgtactgtaatttcattggctattcctttattttcttgatta

SEQ ID NO: 525295 - DNA, 120 bp, Artificial Sequence
  ENSG00000165762_65 (sequence is synthesized)
tcttaaattgaaataatgactctctttgtaagcactttgtctggagtctgcaaagcctgtatttttcttcactcaccctagcataccatataattagaagtttggaactgatcttttaat

SEQ ID NO: 525296 - DNA, 120 bp, Artificial Sequence
  ENSG00000165762_66 (sequence is synthesized)
ttttggagggaggtattaataatccttctgatatttatattagtagttaaataattaaatagtagttaaagtaattaaataggactctattgcactcaagagattttaaaacgtttaaat

SEQ ID NO: 525297 - DNA, 120 bp, Artificial Sequence
  ENSG00000165762_67 (sequence is synthesized)
aaatttcctttaagtatattaaaatgtacctaaataaaattgttcttcaagagtaacatgtaattgaatcatcaacatctttatataacttttccaattttttaaagaaagatacctctc

SEQ ID NO: 525298 - DNA, 120 bp, Artificial Sequence
  ENSG00000165762_68 (sequence is synthesized)
tctcttgcagctcaattgctttttaaataaaataaatttgaatccctgtttgtacctggagaccgttttgatctgccctcctcacctcacatttcacacatggagaaaaaaagtctgcac

SEQ ID NO: 525299 - DNA, 120 bp, Artificial Sequence
  ENSG00000165775_0 (sequence is synthesized)
gacaccgcacgctgagctctgtgatgtagccgcttgcggagactgcaagcagccgcggcgcgcccggccctccctcttccgctgccgccgtgggaatggaaacatctgccccacgtgccg

SEQ ID NO: 525300 - DNA, 120 bp, Artificial Sequence
  ENSG00000165775_1 (sequence is synthesized)
gaagccaagtggtggcgacaactgcgcgccactccgcggcctaccgcgcagatcctctacgtgtgtcctcgcgagacaagctcaccgaaatggccgcgtccagtcaaggaaactttgagg

SEQ ID NO: 525301 - DNA, 120 bp, Artificial Sequence
  ENSG00000165775_2 (sequence is synthesized)
gaaattttgagtcactggaccttgcggaatttgctaagaagcagccatggtggcgtaagctgttcgggcaggaatctggaccttcagcagaaaagtatagcgtggcaacccagctgttca

SEQ ID NO: 525302 - DNA, 120 bp, Artificial Sequence
  ENSG00000165775_3 (sequence is synthesized)
ttggaggtgtcactggatggtgcacaggtttcatattccagaaggttggaaagttggctgcaacagctgtgggaggtggattttttctccttcagcttgcaaaccatactgggtacatca

SEQ ID NO: 525303 - DNA, 120 bp, Artificial Sequence
  ENSG00000165775_4 (sequence is synthesized)
aagttgactggcaacgagtggagaaggacatgaagaaagccaaagagcagctgaagatccgtaagagcaatcagatacctactgaggtcaggagcaaagctgaggaggtggtgtcatttg

SEQ ID NO: 525304 - DNA, 120 bp, Artificial Sequence
  ENSG00000165775_5 (sequence is synthesized)
tgaagaagaatgttctagtaactgggggatttttcggaggctttctgcttggcatggcatcctaaggaagatgacctcatgttcattgttcctggttttttccagccagcagcctctaca

SEQ ID NO: 525305 - DNA, 120 bp, Artificial Sequence
  ENSG00000165775_6 (sequence is synthesized)
ctccatcataggacatcgagtccctcctcctcttctcccatgccttcttccctgccatggcaaatctgagtggcttctctaagcatctgctggtacaagtcaatgtggcaccatgagctt

SEQ ID NO: 525306 - DNA, 120 bp, Artificial Sequence
  ENSG00000165775_7 (sequence is synthesized)
catggtggcagaagagacaatagtccttagctctcctcccagtacaccccctacttggccagtctgtaggccaacaagaaggttcctttacccccatgcaagacacttatgagaacacat

SEQ ID NO: 525307 - DNA, 120 bp, Artificial Sequence
  ENSG00000165775_8 (sequence is synthesized)
tacaagatggctgaccgtggaggatgagtggatcctgaaaggttgtcccaaactgttgatttggaaaagaaataagcacatagataaccttattgtgtgctgcatggaaaggaactgaat

SEQ ID NO: 525308 - DNA, 120 bp, Artificial Sequence
  ENSG00000165775_9 (sequence is synthesized)
acatttgcctttaagcatgaaagattttggtatcttggtgtctactttcttttttagttggttttacattacagaaagctatttaaatgtgttataattatgccgacaaaattggcagca

SEQ ID NO: 525309 - DNA, 120 bp, Artificial Sequence
  ENSG00000165775_10 (sequence is synthesized)
taattactgtaattgaaaaatctgatattgtccaggaatgctttctaccgtacaggataatgtatctcatggctgtttccaaagggtttatttattgtaaaacaagtgatttaggtggga

SEQ ID NO: 525310 - DNA, 120 bp, Artificial Sequence
  ENSG00000165775_11 (sequence is synthesized)
aagggaagattttggatttttattttgtagaaaaggttttaagctttgaaatgtgaatgaaatatccttatcaaaacattaggggtggccataactcctctgtgccacttctactatttt

SEQ ID NO: 525311 - DNA, 120 bp, Artificial Sequence
  ENSG00000165775_12 (sequence is synthesized)
tttttttaatctagttagtatgaaatacaacatttaaaccggaattttaaagaagtagctttccagggattcagaattaagaaagatagtgataggacatgagaaataaatttccatcaa

SEQ ID NO: 525312 - DNA, 120 bp, Artificial Sequence
  ENSG00000165775_13 (sequence is synthesized)
gtgtaatctaccgtctcatgatgaccacaaccctgagaattattctttaaaagcttacacacacacacacacacgggcacacacgcacacacagaatcttaccacattttgctgtagtgg

SEQ ID NO: 525313 - DNA, 120 bp, Artificial Sequence
  ENSG00000165775_14 (sequence is synthesized)
catgttaccatgtctacagtccctactagaatatcagtcagctttcagagggcaagacttctgtcttcaccattatactcacagggcctagcacttaataggtgctgagtatttgaataa

SEQ ID NO: 525314 - DNA, 120 bp, Artificial Sequence
  ENSG00000165775_15 (sequence is synthesized)
tgactttatagaaagaaaactcactattaaaggttagttttactcagaattgttaatcttggagatgatctcttgtgaaatatgagtgtgtttctaaggccatacatttaaaaatgtttg

SEQ ID NO: 525315 - DNA, 120 bp, Artificial Sequence
  ENSG00000165775_16 (sequence is synthesized)
cattttaacccgtcttgagaatgatgtattgaatttgaaaatcaaaactaccagtggatgtgtggaactttacagaaaccacctatttgcgtttttctccttacatttaaggaaacataa

SEQ ID NO: 525316 - DNA, 120 bp, Artificial Sequence
  ENSG00000165775_17 (sequence is synthesized)
gccattttgcttgcaatatgtatgaatcatctcaaaaccataatggtatgagcctctttgctgcatattttgctataagaacttattttttttcactttttattatggacgctttcagga

SEQ ID NO: 525317 - DNA, 120 bp, Artificial Sequence
  ENSG00000165775_18 (sequence is synthesized)
atatataaaagtagagaatatagtacaataatccccctgtgtatctatcactcactcacaacaatcatcaaattatagctctgctggtttttaccagttattgtgaaacaaatatcaaaa

SEQ ID NO: 525318 - DNA, 120 bp, Artificial Sequence
  ENSG00000165775_19 (sequence is synthesized)
tgtcattttatcatatttcagtatgtatctctaaaaggtaagaattatttctaaaaatcataaatacctcatcatatcagacattaacagtaattacataatatccaaaatctgatcagt

SEQ ID NO: 525319 - DNA, 120 bp, Artificial Sequence
  ENSG00000165775_20 (sequence is synthesized)
gttcaaaatttcctcaagtgttttatatttagtttgtttgaatcaaaattcatgcaaggttcacatcgtatttgcatgatttggataagtctcttaaccttatagatcctcctctatttt

SEQ ID NO: 525320 - DNA, 120 bp, Artificial Sequence
  ENSG00000165775_21 (sequence is synthesized)
tttttttttgcttgctatatatttatatctctatatatattgatatagacatatgtagtgacactgagtcatctgtttcctgcttccccacactctgcctctcctgacatctgggtctct

SEQ ID NO: 525321 - DNA, 120 bp, Artificial Sequence
  ENSG00000165775_22 (sequence is synthesized)
gggttatgccatatatggtgatagtggctgcagccactttacctgtgtgacttacccacagcaatgggatggtaacagcaaagctaaccaaagtgctctgtgcccctttgggttgcatgt

SEQ ID NO: 525322 - DNA, 120 bp, Artificial Sequence
  ENSG00000165775_23 (sequence is synthesized)
ggggagactggccacccaatgcctctccagtggggtaggggttgtcttttggtgcatctgtttttcctgtgattattggtgagggcagcaaagattagcaggtggttgtaaactaccttg

SEQ ID NO: 525323 - DNA, 120 bp, Artificial Sequence
  ENSG00000165775_24 (sequence is synthesized)
agtaggttgtaataaatagtctggcctcagactgtattctgattgtctgaattaagatctgtaggtaggtccctcctgaagttttttcccagctggctgcctctacgactgtgagggtca

SEQ ID NO: 525324 - DNA, 120 bp, Artificial Sequence
  ENSG00000165775_25 (sequence is synthesized)
tggttgaggtcagtattgcaggttggcctcatcctgctagtatgagaacggctgtgagttctgcccacggtgtgaggccactgtgaccacttgggattgtgcagagctggcatggaggtt

SEQ ID NO: 525325 - DNA, 120 bp, Artificial Sequence
  ENSG00000165775_26 (sequence is synthesized)
ctcaggcatttggggttacctgtgaatcaaggccctattgtgccagcagttttgtttcaggtggtgaagtgggagttaaggtttcccccaaaagaacagctgccactcctccatgcaaaa

SEQ ID NO: 525326 - DNA, 120 bp, Artificial Sequence
  ENSG00000165775_27 (sequence is synthesized)
ccgagatgattcaaggaccaggcagctccacctttcagtgcactactttcatttgactggagaggcctgcttagctaggcacgtattttctccagtagcagagtccaatgacgctctgga

SEQ ID NO: 525327 - DNA, 120 bp, Artificial Sequence
  ENSG00000165775_28 (sequence is synthesized)
cttcctaattagtggtggtggggcggaagtttttccttgggaagagcgttgtcgctgtatatggtccgcagaaacttgacttggaatgtgttcggggtttcatcgcccccttgtggcggc

SEQ ID NO: 525328 - DNA, 120 bp, Artificial Sequence
  ENSG00000165775_29 (sequence is synthesized)
gacgtggtaacaccgcactcaaggcttccaacttgtcaaccaataggatggcatctacgtagtgaaggcttcccttcccttgtcctgcagcgtgctggacagtgtcccggctcagggacc

SEQ ID NO: 525329 - DNA, 120 bp, Artificial Sequence
  ENSG00000165775_30 (sequence is synthesized)
ccttctgtccccttcctggctactatgggtcggccctgcgtcctcaccactttgagccaccctttgacccagcgtctctcccgcaatgggacctggtgggatggggacttggagcatgct

SEQ ID NO: 525330 - DNA, 120 bp, Artificial Sequence
  ENSG00000165775_31 (sequence is synthesized)
acaggagaggtagaacttttgagtctcttcttcccaaggttctccccagagtcggagagcagagacggatccaggggcactttctggccgctgcctgctcgggctcaacagatggagtcc

SEQ ID NO: 525331 - DNA, 120 bp, Artificial Sequence
  ENSG00000165775_32 (sequence is synthesized)
aatgtttcagtctcccccaagaatgtgtatcctcattgctgacacgggagctgggtgcggggagagatgtggtggtggggacccttgcctgagcagcccattgtcatgagtgttattgcc

SEQ ID NO: 525332 - DNA, 120 bp, Artificial Sequence
  ENSG00000165775_33 (sequence is synthesized)
attgtgataatatgttagcatgactctcctcccaaatggccgcttgtttgttgcaatctcccgccactcagcctccagacattcattaacaggacagtggggttcttgactcccctacca

SEQ ID NO: 525333 - DNA, 120 bp, Artificial Sequence
  ENSG00000165775_34 (sequence is synthesized)
ctggggtgacagtccttgctactggatctgggcagttactgtctcatggatgctggcagaagacgattcaagttggcggactagattctacaaggaatgatctcttgcataattctagcc

SEQ ID NO: 525334 - DNA, 120 bp, Artificial Sequence
  ENSG00000165775_35 (sequence is synthesized)
aacatgctcttggggtgggtgcttctggttttggaaagcaaagttactgtgtagttaacaactattgtggtaagaatagtctctccatcattcttttgtttcacggttgtcagaaagatg

SEQ ID NO: 525335 - DNA, 120 bp, Artificial Sequence
  ENSG00000165775_36 (sequence is synthesized)
ggcataactaatggttgggctcttatttggaacctctacttttgtacagtttgggaatctctgcttgaaaagatggtatactgatggatttgaaatttctgagtatcatcaatgtttcat

SEQ ID NO: 525336 - DNA, 120 bp, Artificial Sequence
  ENSG00000165775_37 (sequence is synthesized)
gatgatctcaatttcttctcagagggaagctcacagccagttttggaccccagagaaaaatgtggctgctgccctctactccctctaccaaattatcagcttcatttctttgtcatgaaa

SEQ ID NO: 525337 - DNA, 120 bp, Artificial Sequence
  ENSG00000165775_38 (sequence is synthesized)
tctagtatgatttctcagaaatcaggcccagaactaaaatacattttctgcccaattttctaagaggtcacactaacatctgagtaattgggcagaaaacctattttagttctgagcctg

SEQ ID NO: 525338 - DNA, 120 bp, Artificial Sequence
  ENSG00000165775_39 (sequence is synthesized)
atttttctagaagtcatatggtatagcttatatttccgatgcttgcattctttttaaggggtcatgaatcttaatacttttttttttaaaagaaaagtgtcgcactttttcacattttta

SEQ ID NO: 525339 - DNA, 120 bp, Artificial Sequence
  ENSG00000165775_40 (sequence is synthesized)
taaagctttaaagtcagtttactgacttttcaaaagtgtctacctttttaaattttaaaatggtaagaaatgacattcctgagagcagtggctttcatccttgcttgcacttgggaatca

SEQ ID NO: 525340 - DNA, 120 bp, Artificial Sequence
  ENSG00000165775_41 (sequence is synthesized)
cctgtgaaattttaaaaactactaatgcctggctctcatcctagagattctgatttcactggtctggagtgctgttcaggcatcctgaggttttaaagtgtcttagctttttctaatgag

SEQ ID NO: 525341 - DNA, 120 bp, Artificial Sequence
  ENSG00000165775_42 (sequence is synthesized)
cagcagagactgagaaccactgaagtacacagttggaagctggtgctgaaaaaattaagagttttgctgttaactccttaagagggctttaaagccttttatattaagtgccatacaact

SEQ ID NO: 525342 - DNA, 120 bp, Artificial Sequence
  ENSG00000165775_43 (sequence is synthesized)
tcagatgccttctgaatactgaacacaagtgtaatattatagttcattaaatgtcttaggaatcgtgtggagtgaatgcaaggaaaggagtgacaagatatcaccccacaaatgacttac

SEQ ID NO: 525343 - DNA, 120 bp, Artificial Sequence
  ENSG00000165775_44 (sequence is synthesized)
ccattacgaagggaaaactacctttctagctaaaaggtctgtcagtcactaaccaagtgattaaacttagcatcactaatagccaacttaacaaagtttttttttttttttggtttctaa

SEQ ID NO: 525344 - DNA, 120 bp, Artificial Sequence
  ENSG00000165775_45 (sequence is synthesized)
aatgggagatcatagttttcaccttcctagagttctttgcttaagactgagattcagtgttactcttggtccctaacaataagaagcactcagtaaatgttaagccttctatgatggcta

SEQ ID NO: 525345 - DNA, 120 bp, Artificial Sequence
  ENSG00000165775_46 (sequence is synthesized)
ttttatttttttgtatgtcataataatacctaagaataagaagagttaaattaatgtcttcaaatggatttgttgacttaaactgacacaatcctttaaaagaaggaactgatttgaacc

SEQ ID NO: 525346 - DNA, 120 bp, Artificial Sequence
  ENSG00000165775_47 (sequence is synthesized)
tttcaaaactgaaagaaagtcgtatactgatacagtttggagccaccgaatgtcatgttgaaccgtattccctaatggaggtggatcctggtgagaggtgattggatcgtgggggccatc

SEQ ID NO: 525347 - DNA, 120 bp, Artificial Sequence
  ENSG00000165775_48 (sequence is synthesized)
tgatagtgagttctcatgagatctggcacttcacccctcactctctcttgctcctgctttggccatgtggagtgctcactccccttttgctttctgccatggctgtaagtttcctgaggc

SEQ ID NO: 525348 - DNA, 120 bp, Artificial Sequence
  ENSG00000165775_49 (sequence is synthesized)
ggctgtaagtttcctgaggcgtccccagaagcccatcagataccagtgccatgcttcctgtacagcccatggaactgtgagccaactaaacctcttttatttataaattaccgagtctca

SEQ ID NO: 525349 - DNA, 120 bp, Artificial Sequence
  ENSG00000165775_50 (sequence is synthesized)
ggcactttttatagcaatgcaacaatggactaatacatatactttagcataaaaacatttaaaagagtctgaaactggagtagttaactcagtaaaaataacttggcaataaaacacaga

SEQ ID NO: 525350 - DNA, 120 bp, Artificial Sequence
  ENSG00000165775_51 (sequence is synthesized)
aaaacaatctatttgatcatgtagtgattcctaatgtaaatcctagtacaactgtcaactgataattttaaatgtaatttagatttgtagatggtgtaacattaaagttgtatgatgttt

SEQ ID NO: 525351 - DNA, 61 bp, Artificial Sequence
  ENSG00000165775_52 (sequence is synthesized)
gcgtgatccgcccgcctcggcctccgaaactgctgaaattacaggcgtgagccaccgcgcc

SEQ ID NO: 525352 - DNA, 120 bp, Artificial Sequence
  ENSG00000165775_53 (sequence is synthesized)
cgtgagccaccgcgcccggccagataagtgagtcataggtaaaatattcttcaccaggcgaggattgagtcgcagtcgcgtcaggaactcgcctccaggaaactttgagggaaattttga

SEQ ID NO: 525353 - DNA, 120 bp, Artificial Sequence
  ENSG00000165775_54 (sequence is synthesized)
gagactgcttaggagagactaacaagcaagacttgaaaaagggagcagtttctccaaaaacaaaagaaaactgacatttgattgtattaggcatacatttcttagctctgtggcattggt

SEQ ID NO: 525354 - DNA, 120 bp, Artificial Sequence
  ENSG00000165775_55 (sequence is synthesized)
attcaaatttggctccacattggaatcacctaggagtttttaaaagagccaacgtgtgccactcctgacccacagtctgatttcattggaaaacttaaaactcctgaggtgattctgctg

SEQ ID NO: 525355 - DNA, 120 bp, Artificial Sequence
  ENSG00000165775_56 (sequence is synthesized)
tgctgtgggagccataacttgctgaatcatgccagagtctctgaattcacagccgtttgtctcttcccacagttggcaaccctcacttttgcaagcttgcaaaccatactgggtacatca

SEQ ID NO: 525356 - DNA, 120 bp, Artificial Sequence
  ENSG00000165775_57 (sequence is synthesized)
agtcgcgaccgagctccccggggagtccaagcggcgcggggacggggagggcgctcggggatcgcccctggctcagccgctcccagggtccggccaaggtcacgcgcgtgtctggggcct

SEQ ID NO: 525357 - DNA, 120 bp, Artificial Sequence
  ENSG00000165775_58 (sequence is synthesized)
gtgagccaccgcgcccagccttttttgttatttttaaatttgagaggacaaactagaggactaatttgagattttctaggtttttccctgtaatatagacattagtatttgctgatttta

SEQ ID NO: 525358 - DNA, 120 bp, Artificial Sequence
  ENSG00000165775_59 (sequence is synthesized)
atatagacattagtatttgctgattttagtctgattttccaaaattgcaacttagaataaatttactatttaaaatagaatatttggaggtttcttattacatttatgtctgtttcttta

SEQ ID NO: 525359 - DNA, 120 bp, Artificial Sequence
  ENSG00000165775_60 (sequence is synthesized)
ttttgcagctttcagagcccagcagcaacgcttgccagttttcagtttattcggctccctctacttgttgtgctgcaatggaagtaggatgttgagctttgtcagtagagggcgctggag

SEQ ID NO: 525360 - DNA, 120 bp, Artificial Sequence
  ENSG00000165775_61 (sequence is synthesized)
ggaccttgcagcgggagaggctgcttttcccagttctggtgttgctttgcccctgcagtgcagtcccccagtaatgccaaggagagcaggaagtcacctcgcaatcctggcctgggccac

SEQ ID NO: 525361 - DNA, 120 bp, Artificial Sequence
  ENSG00000165775_62 (sequence is synthesized)
ccaggggacttcaccaccaccattactacttttgcccccttgtgaaaaatcagtttgttgtagttgtccacgtccgtttctgtactttttattctgttctgttggtctgtgtgtctatct

SEQ ID NO: 525362 - DNA, 120 bp, Artificial Sequence
  ENSG00000165775_63 (sequence is synthesized)
cttcttcagtatgacacactgtcttgactactgtagcattatagtaaatcttaaatcaggtagtgtgatttccccaactctgttctttttcagattcattttggtgattccagttccttt

SEQ ID NO: 525363 - DNA, 120 bp, Artificial Sequence
  ENSG00000165775_64 (sequence is synthesized)
gcctttccatataaatcttagaaccggcttatttatgtatctataagaaatcctactgggatttgtgatttgggattgcagtaaatctatggataatttggagagaactgggcatcattt

SEQ ID NO: 525364 - DNA, 120 bp, Artificial Sequence
  ENSG00000165775_65 (sequence is synthesized)
ctgtgttgagtattccattccatgtacatgatgtgtctctccatttatttaggttgtctttgagttctttcttcagcattttgtagttctcagtatacagatcctgtatgttttatttga

SEQ ID NO: 525365 - DNA, 120 bp, Artificial Sequence
  ENSG00000165775_66 (sequence is synthesized)
tttgtacctaatatttaattattttttgcacccattgttgtaaatcatttaaacatttttcatttccagttcaaattgctagcatatagaaattcagttggttttgtgtgaatttgtgtc

SEQ ID NO: 525366 - DNA, 120 bp, Artificial Sequence
  ENSG00000165775_67 (sequence is synthesized)
ctgtgaccctgctaaactcacttttttagtctaggagtttttgttttttgttgaagtctatgaaattttctatgtagacaaagatgtctatgattggagacagtttgacctcttccttgt

SEQ ID NO: 525367 - DNA, 120 bp, Artificial Sequence
  ENSG00000165775_68 (sequence is synthesized)
gaatcaggatgcctcctaattctttttcttgccttgttgtgctgactctgaattcacttctggtacgatatttaataggagtggagacggcggacagctttgccttgttccctgcattcg

SEQ ID NO: 525368 - DNA, 120 bp, Artificial Sequence
  ENSG00000165775_69 (sequence is synthesized)
ttctttcaccattctgtacagtgttagctgcagggttttttatgtagatgttctttatcaagttgaggaagttcccctctattgctctttctctgagagttttatcatgaatttgcgttg

SEQ ID NO: 525369 - DNA, 120 bp, Artificial Sequence
  ENSG00000165775_70 (sequence is synthesized)
aattttgtcagatgtttcttgagtcctgccttgaggttaggccaggcgatactgcaggaaaagcaggaaacacgccaccagtttggtggtgctttgaattctggtcttctccaatctgca

SEQ ID NO: 525370 - DNA, 120 bp, Artificial Sequence
  ENSG00000165775_71 (sequence is synthesized)
cgtcgctgtttttatgtaagagccttcaaatagctagtccatgtattctctcagtttaatagcaggattttgtgggataaacagggtggagtaaatgaaccagagccttcttttagatac

SEQ ID NO: 525371 - DNA, 120 bp, Artificial Sequence
  ENSG00000165775_72 (sequence is synthesized)
aaatgttgatactcaactatgtggttgctgtaagtaatttgttctttttagtactaagtaatattctattgtgtaaatatgatacaatttgtttatccattcatgtgttgatagactttt

SEQ ID NO: 525372 - DNA, 120 bp, Artificial Sequence
  ENSG00000165775_73 (sequence is synthesized)
gtgtatttccagttatagactcataaataaaggtactatggcttgattacttgtgaagttgaactttttcctttttgtggacactttcctctgaattgcccttacccatttttaaagtga

SEQ ID NO: 525373 - DNA, 120 bp, Artificial Sequence
  ENSG00000165775_74 (sequence is synthesized)
actttcttactgatctctataagaagttcacttttttgagtatcaatgttttgtttatgatacacatcacaagtattttctctagtctgtttgggtgactggtggtgccattagctaaaa

SEQ ID NO: 525374 - DNA, 120 bp, Artificial Sequence
  ENSG00000165775_75 (sequence is synthesized)
aatttggtagagagaagtgatattgatagggcattgattgattggctacagtcattctcttcattcctaggatgatattaatccatcatcaaaatctacatgcttgaatcagatttacac

SEQ ID NO: 525375 - DNA, 120 bp, Artificial Sequence
  ENSG00000165775_76 (sequence is synthesized)
tgagttttagtgtttgtgcctgctgtttttatcaagggaaataggtatatgctgtaggtgtctttggatgtggttctcttaatatccgtttatatgaacttgctcatgagaaatctctgt

SEQ ID NO: 525376 - DNA, 120 bp, Artificial Sequence
  ENSG00000165775_77 (sequence is synthesized)
ggggccagatgctagatttcttcctgttaagcaacagtaataactgcctgaatgctttgctctgttcacattgtcaggaaactgacactcatgggcacattgtcagagtcattctctgga

SEQ ID NO: 525377 - DNA, 120 bp, Artificial Sequence
  ENSG00000165775_78 (sequence is synthesized)
aacatttgtattggctgtaaggtccatctcttcaccctacatcttgaccccccaccttgattttcatcttatgtaactctttgtaaaagggttgtaagagtataaataatttaaaagaat

SEQ ID NO: 525378 - DNA, 120 bp, Artificial Sequence
  ENSG00000165775_79 (sequence is synthesized)
tgccagtagttatttctagtgccaggcatatggcttcgcatataggggggatgctgagtagatgtcatcatgatacaaagaatcaaatggcagatgtctccaaaaatggaaagtcagagg

SEQ ID NO: 525379 - DNA, 120 bp, Artificial Sequence
  ENSG00000165782_0 (sequence is synthesized)
tgtgcgtcgctccccaatggaaaaggagagctgccttcacaggaccaggaattggtttatctacgcgaataatagcatgacccgggcggggatagcctatcacgtgctgctagacggaac

SEQ ID NO: 525380 - DNA, 120 bp, Artificial Sequence
  ENSG00000165782_1 (sequence is synthesized)
ctatcacgtgctgctagacggaacggggcggggcaggccactggttgcggagtgagctgggcgcgcggcgcgcaggcgccctggggacccggtagcggcggtggcggtggcggcggtggc

SEQ ID NO: 525381 - DNA, 120 bp, Artificial Sequence
  ENSG00000165782_2 (sequence is synthesized)
gaagggagccggatcgccgacctgagcgggaggcggcggtggcggccatggcggcagatggagagcgttccccgctgctgtctgagcccatcgacggtggcgcgggcggcaacggtttag

SEQ ID NO: 525382 - DNA, 120 bp, Artificial Sequence
  ENSG00000165782_3 (sequence is synthesized)
tggggcccggcgggagtggggctgggcccgggggaggcctgaccccctccgcaccaccgtacggagccgcatttcccccgtttcccgaggggcatccagccgtgttgcctggggaggacc

SEQ ID NO: 525383 - DNA, 120 bp, Artificial Sequence
  ENSG00000165782_4 (sequence is synthesized)
cacccccctattcacccttaactagcccggacagtgggagtgcccctatgatcacctgccgagtctgccaatctctcatcaacgtggaaggcaagatgcatcagcatgtagtcaaatgtg

SEQ ID NO: 525384 - DNA, 120 bp, Artificial Sequence
  ENSG00000165782_5 (sequence is synthesized)
gtgtctgcaatgaagccaccccaatcaagaatgcacccccagggaaaaaatatgttcgatgcccctgtaactgtctccttatctgcaaagtgacatcccaacggattgcatgccctcggc

SEQ ID NO: 525385 - DNA, 120 bp, Artificial Sequence
  ENSG00000165782_6 (sequence is synthesized)
cctactgcaaaagaatcatcaacctggggcctgtgcatcccggacctctgagtccagaaccccaacccatgggtgtcagggttatctgtggacattgcaagaatacttttctgtggacag

SEQ ID NO: 525386 - DNA, 120 bp, Artificial Sequence
  ENSG00000165782_7 (sequence is synthesized)
agttcacagaccgcactttggcacgttgtcctcactgcaggaaagtgtcatctattgggcgcagatacccacgtaagagatgtatctgctgcttcttgcttggcttgcttttggcagtca

SEQ ID NO: 525387 - DNA, 120 bp, Artificial Sequence
  ENSG00000165782_8 (sequence is synthesized)
cgatatggaggcatctatgcagcctgggcatttgtcatcctgttggctgtgctgtgtttgggccgggctctttattgggcctgtatgaaggtcagccaccctgtccagaacttctcctga

SEQ ID NO: 525388 - DNA, 120 bp, Artificial Sequence
  ENSG00000165782_9 (sequence is synthesized)
gcctgatgacccacagactgtgcctggcccctccctggtggggacagtgacactacgaagggagctggggtagttaaaggctcccggggcttctagaaggaagccaagcagctgccttcc

SEQ ID NO: 525389 - DNA, 120 bp, Artificial Sequence
  ENSG00000165782_10 (sequence is synthesized)
ttttccctggggagaggtaggaaggaaccaggccctcacttaggtttggaggggcagataagagcactgctgaccatctgctttcctccaagggttgctgtgtctagggtgaagtaggca

SEQ ID NO: 525390 - DNA, 120 bp, Artificial Sequence
  ENSG00000165782_11 (sequence is synthesized)
aaacgttgcccttaaaactgggccctgaagacggttccagccttgtccttcctgtgtgctccctgagagccattcctgtcccttacacattccagggcagggtgggggtgggtagccctg

SEQ ID NO: 525391 - DNA, 120 bp, Artificial Sequence
  ENSG00000165782_12 (sequence is synthesized)
ggggttcccctccctcttgtgcaccattaggactttgctgctgctattgcacttcaccagaggttggctctggcctcagtaccctcagtctcctctccccacattgtgtcctgtgggggt

SEQ ID NO: 525392 - DNA, 120 bp, Artificial Sequence
  ENSG00000165782_13 (sequence is synthesized)
ggggtcagccgctgctctgtacagaaccacaggaactgatgtgtatataactatttaatgtgggatatgttcccctattcctgtatttcccttaattcctcctcccgaccttttttaccc

SEQ ID NO: 525393 - DNA, 120 bp, Artificial Sequence
  ENSG00000165782_14 (sequence is synthesized)
ccccagttgcagtatttaactgggctgggtagggttgctcagtctttgggggaggttagggacttatcctgtgcttgtaaataaataaggtcatgactctacgctttttcagttgttaac

SEQ ID NO: 525394 - DNA, 120 bp, Artificial Sequence
  ENSG00000165782_15 (sequence is synthesized)
ttgtgtgcatgaaaatatgaggaagagaatgtgtagccccacgaaggggtaagacacgaagacagcaaggctgaaactatggctctttattttcatgtggataattcaaacaaagtcatt

SEQ ID NO: 525395 - DNA, 120 bp, Artificial Sequence
  ENSG00000165782_16 (sequence is synthesized)
agactaagagtcatttcgagtatatttcttagagtaatggtaatgacccctgaaaggtctgtcctatgggaacatgttctgcatccccaccccaaggttctcattgagggagaccctgct

SEQ ID NO: 525396 - DNA, 120 bp, Artificial Sequence
  ENSG00000165782_17 (sequence is synthesized)
taagccggggcgggtccgaggtgctccccggggtactctgaaagccggggagggggcgggaccgagggcggaggcgggtcccagtcgccaggtgcgggactgctgcacctgtgactgggc

SEQ ID NO: 525397 - DNA, 120 bp, Artificial Sequence
  ENSG00000165782_18 (sequence is synthesized)
gaggcttccttccctccgtaatcgcgaccacagcctagggacggaagggggttctgagcaacctgatagaagtgccaattatgagaagccctccgagcttggtcagagggttgaagatca

SEQ ID NO: 525398 - DNA, 120 bp, Artificial Sequence
  ENSG00000165782_19 (sequence is synthesized)
gaaggacttccctaccaccgtggagcatcagtgggggtgtaagtgatcccagcccttctatttgcttcctctccagcatttcccccgtttcccgaggggcatccagccgtgttgcctggg

SEQ ID NO: 525399 - DNA, 120 bp, Artificial Sequence
  ENSG00000165782_20 (sequence is synthesized)
gtgcttttgatgatacccaggtttcagttccaggtgtctcacacagccatttccccagaagccactcaccaaagctaatgttcactttctctcacttttacacctagcctagttcctatt

SEQ ID NO: 525400 - DNA, 120 bp, Artificial Sequence
  ENSG00000165782_21 (sequence is synthesized)
tgcaaatctcatgatatagtctttcttttatttctccttcctggttagcaccttatttttctgatctcataaagtgtttttggagggaagtggaggggattgggattagaggtttgcttg

SEQ ID NO: 525401 - DNA, 120 bp, Artificial Sequence
  ENSG00000165782_22 (sequence is synthesized)
ggccctactggtaagaggcataaggtggggaagggcctaagtggggaactggaaagtcaaaaaaggatgagcgtatacagagaatgtaaaggtgagagagcctagtgtttatttaggaga

SEQ ID NO: 525402 - DNA, 120 bp, Artificial Sequence
  ENSG00000165782_23 (sequence is synthesized)
aaaggctttgaagcatgtgcctcaggaatgttatagctgtctttctcgtttctcaataaaaatattgagatgaaatgatgtcgtttcggagaatagagagccttggggactgggtgtgtt

SEQ ID NO: 525403 - DNA, 120 bp, Artificial Sequence
  ENSG00000165782_24 (sequence is synthesized)
atcctgaggtcggaggggaattggggacctgaagtttaaacagtgctctttctttctcaaggattcttgagggtatacagttgggggacagagtatcttaagtacagagaagtcgagtga

SEQ ID NO: 525404 - DNA, 120 bp, Artificial Sequence
  ENSG00000165782_25 (sequence is synthesized)
cttaatagacagggagtgggggatgtggaacagggactgtgaagatttttaggattaaaaatttttcaaacacaagtttgaaaatacaagtctttttcttttgtatagcaaaagaatcat

SEQ ID NO: 525405 - DNA, 120 bp, Artificial Sequence
  ENSG00000165782_26 (sequence is synthesized)
ttctgcagcctcatctccataggctaagatttgggaaactgctaccctaaaaaaaagtggaagaaacttgggggactagtttgttttgttttaagatatggatgagctaaagtgcaaagt

SEQ ID NO: 525406 - DNA, 120 bp, Artificial Sequence
  ENSG00000165782_27 (sequence is synthesized)
ggctgatcaaacagactttattactactacaagagtgaaaaacagccttcctttctctgtaggatgaggataggacagtgaaattcttaatttaagagttgctatttttcaaacctggct

SEQ ID NO: 525407 - DNA, 120 bp, Artificial Sequence
  ENSG00000165782_28 (sequence is synthesized)
cagttgtcagatattaagaaaaactgagatacagtgtgggatgggatgagtatgttacgcctaagggaaggaagctgatcagctctgcctttaagaaggtccctgagggtggctacatgt

SEQ ID NO: 525408 - DNA, 120 bp, Artificial Sequence
  ENSG00000165782_29 (sequence is synthesized)
ggataaggaacaaggactgaagcgtgagttattactgttcttagaactaataggaggtagtggagaccaacattaaccccatctttcttttcttctccctccttatcttcatcagtttgg

SEQ ID NO: 525409 - DNA, 120 bp, Artificial Sequence
  ENSG00000165792_0 (sequence is synthesized)
ctcttgatttctggggccggtgaccaggcccaacgcagccttcaagtcggcccaaacacggtttctgcctcaaggattatttatataaccattgcttattggctgctggcaaacactcgc

SEQ ID NO: 525410 - DNA, 120 bp, Artificial Sequence
  ENSG00000165792_1 (sequence is synthesized)
tcttctcgttggctgaaactgtcgggagaagttctgcgaaggctgctccttgcggcgttgggactgagggtcacaggcacctgtatttccgtttccggttcgcctccggagccatggcgg

SEQ ID NO: 525411 - DNA, 120 bp, Artificial Sequence
  ENSG00000165792_2 (sequence is synthesized)
cggcactgaagtgtctactgacattaggaagatggtgccccggccttggagtggctccccaggcccgggcgctcgccgccttagtacccggagtgacccaggtagataacaagtccggtt

SEQ ID NO: 525412 - DNA, 120 bp, Artificial Sequence
  ENSG00000165792_3 (sequence is synthesized)
tcctgcagaagaggcctcatcgccagcaccctggcatcctaaagctgccgcacgtgcggctgccacaggcactggctaacggtgcccagttattgctacttgggagcgctgggcccacta

SEQ ID NO: 525413 - DNA, 120 bp, Artificial Sequence
  ENSG00000165792_4 (sequence is synthesized)
tggagaatcaggtgcaaacactgaccagttatctctggagcagacatttgcctgtagagccagaggagttgcaaagacgggctaggcatcttgagaaaaaattcctggaaaacccagact

SEQ ID NO: 525414 - DNA, 120 bp, Artificial Sequence
  ENSG00000165792_5 (sequence is synthesized)
tatctcagacagaggagaaacttcgtggagcagtgctacacgcactacgtaaaactacctaccattggcaagaactgagctacactgagggactgagcctggtgtatatggcagcaagac

SEQ ID NO: 525415 - DNA, 120 bp, Artificial Sequence
  ENSG00000165792_6 (sequence is synthesized)
tggatggtggctttgcagcagtctccagagcattccatgagatccgggctcgaaatccagcatttcagccacaaactttgatggactttggctcaggtactggttctgtcacctgggctg

SEQ ID NO: 525416 - DNA, 120 bp, Artificial Sequence
  ENSG00000165792_7 (sequence is synthesized)
tggcagaaaaactactgaaaggtggttcagaatctggggagccttatattccaggtgtctttttcagacagtttctacctgtatcacccaaggtgcagtttgatgtagtagtgtcagctt

SEQ ID NO: 525417 - DNA, 120 bp, Artificial Sequence
  ENSG00000165792_8 (sequence is synthesized)
tttccttaagtgaactgcccagcaaggctgaccgcactgaggtagttcaaaccttatggcgtaagacaggtcatttcctggtactggtggagaatggaacaaaagctgggcacagccttc

SEQ ID NO: 525418 - DNA, 120 bp, Artificial Sequence
  ENSG00000165792_9 (sequence is synthesized)
tcatggatgccagggatctggtccttaagggaaaagagaagtcacctttggaccctcgacctggttttgtctttgccccgtgtccccatgaactcccttgtccccagttgaccaacctgg

SEQ ID NO: 525419 - DNA, 120 bp, Artificial Sequence
  ENSG00000165792_10 (sequence is synthesized)
cctgtagcttctcacaggcgtaccatcccatccccttcagctggaacaagaaaccaaaggaagaaaagttctctatggtgatccttgctcgggggtctccagaggaggctcatcgctggc

SEQ ID NO: 525420 - DNA, 120 bp, Artificial Sequence
  ENSG00000165792_11 (sequence is synthesized)
cccgtatcactcagcctgtccttaaacggcctcgccatgtgcattgtcacttgtgctgtccagatgggcacatgcagcatgctgtgctcacagcccgccggcacggcagggatttgtatc

SEQ ID NO: 525421 - DNA, 120 bp, Artificial Sequence
  ENSG00000165792_12 (sequence is synthesized)
gttgtgcccgtgtcagctcctggggagatcttttacctgtgcttactccgtctgcgtttcctccatctacggctcaggatccctctgagagttgatgaggatgtgtaacaagtattttct

SEQ ID NO: 525422 - DNA, 120 bp, Artificial Sequence
  ENSG00000165792_13 (sequence is synthesized)
tctatcgtgcctgccagggctgaagctgcctggtatccaggaggggaatgctggtatccccatatgtctgtgtttgtttgagatttttaataataaataataaatttttgaagaatggaa

SEQ ID NO: 525423 - DNA, 120 bp, Artificial Sequence
  ENSG00000165792_14 (sequence is synthesized)
acttccaacctgaactttttgaccatcagttccctattcataaagtagttttctaggatggggattcttgggacattgcatatgcattttttttttaaagaggatctccgctggacatag

SEQ ID NO: 525424 - DNA, 86 bp, Artificial Sequence
  ENSG00000165792_15 (sequence is synthesized)
tatgcattttttttttaaagaggatctccgctggacatagtgggctcctgcctgcagtcccaactgagtttgaggctgcagtgagc

SEQ ID NO: 525425 - DNA, 120 bp, Artificial Sequence
  ENSG00000165792_16 (sequence is synthesized)
cctcatctcttaaaaaaaacacaaaataaagacgttctctttatcctgtgaaagctttctgtgacccaagaaaggtttagaatcactattttaggagattcttatcccataaggtatttg

SEQ ID NO: 525426 - DNA, 120 bp, Artificial Sequence
  ENSG00000165792_17 (sequence is synthesized)
tattgaatctcaaaaggcattcacatctcacatcctctgtgatagcctcctaattcacatttatcaaggtcctaaataagtatctaattaccctactgtgggatgttgtatatttcttca

SEQ ID NO: 525427 - DNA, 120 bp, Artificial Sequence
  ENSG00000165792_18 (sequence is synthesized)
tcttcagccctatcttggtcaattttagctctagaaagccatacttacaccactccaaaattaacagactggaaaaccagagggagaataggcaagttgggaatctataatgtttcttcc

SEQ ID NO: 525428 - DNA, 120 bp, Artificial Sequence
  ENSG00000165792_19 (sequence is synthesized)
atcagattaggcaaggcagaagaaggtatatggattggggccagaacttaaaagaaatgtcaagtaaaaaaaggcgcatgtgtagaaaaattaaaaagaaaaggaattatcaatcaaagt

SEQ ID NO: 525429 - DNA, 120 bp, Artificial Sequence
  ENSG00000165792_20 (sequence is synthesized)
cctctcattgtctttattcttcaccatttttctccttcatgggtttctttatccctctttgagggtctccatcctgattatgtaatgcctatttctttttaggactccttctccctctat

SEQ ID NO: 525430 - DNA, 120 bp, Artificial Sequence
  ENSG00000165792_21 (sequence is synthesized)
aagcatgagccactgtgcccagctgagtctacctttttttttttaggagttgtaaataaaacaagaaaataacactattagttattttattactaactatacaactactttaacataaca

SEQ ID NO: 525431 - DNA, 120 bp, Artificial Sequence
  ENSG00000165792_22 (sequence is synthesized)
ctctcttttcccaggggtggggttgggtgtaaatgggcctcttgtagagatgactcttggtcatgggaattggtgatttataataattttgccatcttagggctgctcacagtatttggg

SEQ ID NO: 525432 - DNA, 120 bp, Artificial Sequence
  ENSG00000165792_23 (sequence is synthesized)
gaccctcgacctggttttgtctttgccccggtgagtattacttctgcctgtcccaccacacggatctgaacttaggcgtggccgggaaatgtaagatggtaaagctaagccactctccac

SEQ ID NO: 525433 - DNA, 120 bp, Artificial Sequence
  ENSG00000165792_24 (sequence is synthesized)
tactttgtgttcctatccagttcctacctaatgattcccctggctcttcctacccactgctcctgtcctcccttctccctggccccttttgactctattattctcagtttttaagttttg

SEQ ID NO: 525434 - DNA, 120 bp, Artificial Sequence
  ENSG00000165792_25 (sequence is synthesized)
taattaaaaagtgggcgagattgaaatatcggttagaaatgaagagtaagaaataattctacaatctctcagatactgaagtctcttatttgactttctaaccagagcagcagttgttac

SEQ ID NO: 525435 - DNA, 120 bp, Artificial Sequence
  ENSG00000165792_26 (sequence is synthesized)
acattaggaagatggtgccccggccttggagtggctccccaggcccgggtgagtgcctacattccctgctgtcggagagactctggatctgcagagacatctccgcgcagaggaggagcg

SEQ ID NO: 525436 - DNA, 120 bp, Artificial Sequence
  ENSG00000165792_27 (sequence is synthesized)
ctcctggcagcccccgccctagcgattgccagcaactttcctttctgccaggaaatcaacctacctttctctgcctgcaggcgctcgccgccttagtacccggagtgacccagggagcgc

SEQ ID NO: 525437 - DNA, 120 bp, Artificial Sequence
  ENSG00000165792_28 (sequence is synthesized)
gaaaaaattcctggaaaacccagacttatctcagacagaggagaaacttcgtggagcagtgctacacgcactacgtaaaactacctaccattggcaagaactgagagttgatgaggatgt

SEQ ID NO: 525438 - DNA, 120 bp, Artificial Sequence
  ENSG00000165792_29 (sequence is synthesized)
ctaccattggcaagaactgaggtaagggggcccagaagaggtgcacaagaaagcaaaggtagactttagaaagagagttgggggagtacaattacacaatcaatttagtattttctttta

SEQ ID NO: 525439 - DNA, 120 bp, Artificial Sequence
  ENSG00000165792_30 (sequence is synthesized)
cctgcctcagcctcccaaagtgctgagcttacaggcgtgagccaccgcacccagcttaccctttaaatttgtatcacactttcctttaatataaaacaaacctgtgggacaggattggtt

SEQ ID NO: 525440 - DNA, 120 bp, Artificial Sequence
  ENSG00000165792_31 (sequence is synthesized)
cctgtgggacaggattggttaagctgaataaaccattcttataaataaaatgctatctgatacaatctgttagtggtagttgttaccgttaattcttgcctgaaacttttctctaggttt

SEQ ID NO: 525441 - DNA, 120 bp, Artificial Sequence
  ENSG00000165792_32 (sequence is synthesized)
gtcgtctcccttgagctttaaggcttttcttaggtggagtcggggaggactgggtgggcagtatattcagatattggatctgagccctgttctccctaggtcctgacttccagtccttgt

SEQ ID NO: 525442 - DNA, 120 bp, Artificial Sequence
  ENSG00000165794_0 (sequence is synthesized)
agaagcagaagcaacacagaaagaagataccaacagcctcctgaaactcacgagagtggacactccagtgttgaccacctaagataccactcctgctccaaagattacagctcccttgtc

SEQ ID NO: 525443 - DNA, 120 bp, Artificial Sequence
  ENSG00000165794_1 (sequence is synthesized)
attctgactcctgggcttaccctacaccccagagatggagcaactactaggaataaaacttggctgcctgtttgccctgttggctctcactctgggctgtggccttactcccatctgctt

SEQ ID NO: 525444 - DNA, 120 bp, Artificial Sequence
  ENSG00000165794_2 (sequence is synthesized)
caaatggttccagattgatgcagccagaggtcatcaccggctagtcctcagactcctgggctgtatttctgctggtgttttcctgggagcagggttcatgcatatgactgctgaagccct

SEQ ID NO: 525445 - DNA, 120 bp, Artificial Sequence
  ENSG00000165794_3 (sequence is synthesized)
ggaggaaattgaatcacagattcagaagttcatggtgcagaacagatcagcaagtgagagaaattcttctggtgatgctgattcagctcatatggagtatccctatggagagctcatcat

SEQ ID NO: 525446 - DNA, 120 bp, Artificial Sequence
  ENSG00000165794_4 (sequence is synthesized)
ctccctgggcttcttttttgtcttctttttggagtcgctggcattgcagtgctgtcctggggctgctggaggatcgacagtgcaggacgaagaatggggtggggctcatatcttcgaact

SEQ ID NO: 525447 - DNA, 120 bp, Artificial Sequence
  ENSG00000165794_5 (sequence is synthesized)
tcttgctgtcactctcctttcactcagtgtttgaagggctagctgtggggctgcagccgacagtagcagctaccgtgcagctctgccttgctgtcctggctcataaggggcttgtggtgt

SEQ ID NO: 525448 - DNA, 120 bp, Artificial Sequence
  ENSG00000165794_6 (sequence is synthesized)
ttggtgtaggaatgcggctagtgcatttaggtaccagctcacgatgggcagtgttctccatactattattagctctcatgtcccccctgggcctagccgtagggctggctgtgactggag

SEQ ID NO: 525449 - DNA, 120 bp, Artificial Sequence
  ENSG00000165794_7 (sequence is synthesized)
gggactctgaaggagggcggggcttagcccaggctgtgttagagggtgtggcagctggtaccttcctgtatgtcaccttcctagaaattcttccacgggagctagctagtcctgaggccc

SEQ ID NO: 525450 - DNA, 120 bp, Artificial Sequence
  ENSG00000165794_8 (sequence is synthesized)
ctctagctaagtggagctgtgtagccgctggttttgccttcatggcctttattgccttgtgggcctgagagattcctggcttttctgatggacctatttaggacaacctctctatcccca

SEQ ID NO: 525451 - DNA, 120 bp, Artificial Sequence
  ENSG00000165794_9 (sequence is synthesized)
gggagacctcccaaatggctttgaccctcagacatttctttactcagactaaatagcattcagtaggactggactggaccccaggtttcctttacatgagatcccatttctcaccctgga

SEQ ID NO: 525452 - DNA, 120 bp, Artificial Sequence
  ENSG00000165794_10 (sequence is synthesized)
ctaagacaaagatatttaggttgagcagctattaattggagaattggtacagagacgctccagattttattcttatcccatttatgctactgtgtgtaataaaatgcccattttaccctc

SEQ ID NO: 525453 - DNA, 120 bp, Artificial Sequence
  ENSG00000165794_11 (sequence is synthesized)
atgataaacaggacaaagggaagagagcgggaaagtgatggagccaaggacatgggtggaacgacaaggaaaatgacagctcttgtgtgggatggtgaaagcaagtcagattaggcttta

SEQ ID NO: 525454 - DNA, 120 bp, Artificial Sequence
  ENSG00000165795_0 (sequence is synthesized)
cggccccccgcattccccgcccccacctccccgccttgttgtccaacttctcccggagcagccggagagcaggcgtcgggacgcagcaaagagaggagagaccccagagtcagaaggagt

SEQ ID NO: 525455 - DNA, 120 bp, Artificial Sequence
  ENSG00000165795_1 (sequence is synthesized)
gagaaccctgacccctaatcccactgcatccagccaataggagcccagccaccatggcggagctgcaggaggtgcagatcacagaggagaagccactgttgccaggacagacgcctgagg

SEQ ID NO: 525456 - DNA, 120 bp, Artificial Sequence
  ENSG00000165795_2 (sequence is synthesized)
cggccaaggaggctgagttagctgcccgaatcctcctggaccagggacagactcactctgtggagacaccatacggctctgtcactttcactgtctatggcacccccaaacccaaacgcc

SEQ ID NO: 525457 - DNA, 120 bp, Artificial Sequence
  ENSG00000165795_3 (sequence is synthesized)
cagcgatccttacctaccacgatgtgggactcaactataaatcttgcttccagccactgtttcagttcgaggacatgcaggaaatcattcagaactttgtgcgggttcatgtggatgccc

SEQ ID NO: 525458 - DNA, 120 bp, Artificial Sequence
  ENSG00000165795_4 (sequence is synthesized)
ctggaatggaagagggagcccctgtgttccctttgggatatcagtacccatctctggaccagcttgcagacatgatcccttgcgtcctgcagtacctaaatttctctacaataattggag

SEQ ID NO: 525459 - DNA, 120 bp, Artificial Sequence
  ENSG00000165795_5 (sequence is synthesized)
ttggtgttggagctggagcctacatcctggcgagatatgctcttaaccacccggacactgttgaaggtcttgtcctcatcaacattgatcccaatgccaagggttggatggattgggcag

SEQ ID NO: 525460 - DNA, 120 bp, Artificial Sequence
  ENSG00000165795_6 (sequence is synthesized)
cccacaagctaacaggcctcacctcttccattccggagatgatccttggacatcttttcagccaggaagagctctctggaaattctgagttgatacaaaagtacagaaatatcattacac

SEQ ID NO: 525461 - DNA, 120 bp, Artificial Sequence
  ENSG00000165795_7 (sequence is synthesized)
atgcacccaacctggataacattgaattgtactggaacagctacaacaaccgccgagacctgaactttgagcgtggaggtgatatcaccctcaggtgtcctgtgatgctggtggtaggag

SEQ ID NO: 525462 - DNA, 120 bp, Artificial Sequence
  ENSG00000165795_8 (sequence is synthesized)
ctccggaggtcagccccagctgactcagccaggcaagctgaccgaggccttcaagtacttcctgcaaggcatgggctacatggcctcatcctgcatgactcgcctgtcccggtctcgtac

SEQ ID NO: 525463 - DNA, 120 bp, Artificial Sequence
  ENSG00000165795_9 (sequence is synthesized)
agcctctctgaccagtgcagcatccgttgatggcaaccggtcccgctctcgcaccctgtcccagagcagcgagtctggaactctttcttcggggcccccggggcacaccatggaggtctc

SEQ ID NO: 525464 - DNA, 120 bp, Artificial Sequence
  ENSG00000165795_10 (sequence is synthesized)
ctgttgaatggcccttgttgccctagagtgggacccagccctcacctcccccagagctaacctgggaggtgctgaaggggcattgggccaccgtaagcaagggaaaaagggcagatcatg

SEQ ID NO: 525465 - DNA, 120 bp, Artificial Sequence
  ENSG00000165795_11 (sequence is synthesized)
cggggagatgaccttgatctttgattgctaccctaaccttgacctttaacccgtgattccccccagctcctggaagagatgtcctaatatctcttagggacccagacccctaaattctcc

SEQ ID NO: 525466 - DNA, 120 bp, Artificial Sequence
  ENSG00000165795_12 (sequence is synthesized)
tcctcccccattttgatgttaaggtggagagggcatatgcatcctctgtcctgatctaggtgtctatagctgaggggtaagaggttgttgtagttgtcctggtgcctccatcagactctc

SEQ ID NO: 525467 - DNA, 120 bp, Artificial Sequence
  ENSG00000165795_13 (sequence is synthesized)
cctacttgtcccatatttgcaaggggaggggatttggggctggggctccattcaccaaagctgaggtggcttctcattaaccctttaggactctgaagggtatggacctacgtgaatgtg

SEQ ID NO: 525468 - DNA, 120 bp, Artificial Sequence
  ENSG00000165795_14 (sequence is synthesized)
tgtcagggggagacttgctggtgggttagtggtcctcaggatgtgatagaaacatccagtgtaaaaaggaagttggaatgggagttggcgggcagtgaacgagtgtggggaaggattggt

SEQ ID NO: 525469 - DNA, 120 bp, Artificial Sequence
  ENSG00000165795_15 (sequence is synthesized)
gctggggcaacaggaaggggcctggggccgtttggctgcactaactttggtagctcagtgtgcatctagagtgggactggggagggagctaagcttgggctgggctgcttggggcttggc

SEQ ID NO: 525470 - DNA, 120 bp, Artificial Sequence
  ENSG00000165795_16 (sequence is synthesized)
atagggtggaaagggctaccctggggctctgaccacactgtagtatgtgtggagggtgccctcccgtctcccacaacttctgctataacaataaactgtagaggaatctgagtaccgtta

SEQ ID NO: 525471 - DNA, 120 bp, Artificial Sequence
  ENSG00000165795_17 (sequence is synthesized)
gggtctgcgggaagcccgagccggggcgggcccgagtcaaaggcaagtgaaggtggaagcggccgcggcggcagcaggccaccatggcggagctgcaggaggtgcagatcacagaggaga

SEQ ID NO: 525472 - DNA, 120 bp, Artificial Sequence
  ENSG00000165795_18 (sequence is synthesized)
gtgattgatccgcgtcccctggagctggaggctcgggggaaagggccagcacggagcgggcgctcggttgctgcgcacaaaggctgaggctccaagagctgcagggcgtgtttggggtgc

SEQ ID NO: 525473 - DNA, 120 bp, Artificial Sequence
  ENSG00000165795_19 (sequence is synthesized)
gcgcgaggttgtgtgcaaggtccggggcgcttggcaccggccacgcaagggtgtcagtctccacgcggacgggctgcgtagggactcgtagggacgggttccgggtgctgggcccggccg

SEQ ID NO: 525474 - DNA, 120 bp, Artificial Sequence
  ENSG00000165795_20 (sequence is synthesized)
gtctcctctgtcctacccatcccttcccgatggcgcttgccttcgcgggccgtcgggggagaacgggagaagattgtgggaccgctctcctctccctttctccactcgtgggacctacac

SEQ ID NO: 525475 - DNA, 120 bp, Artificial Sequence
  ENSG00000165795_21 (sequence is synthesized)
ggagactgagtagaggagagaagcgacggcaccaatctttgtgtttgtttttaaattgtggagggaaacagccatgctctgctaccctcctcttactggagagctgtcaaaaattttggg

SEQ ID NO: 525476 - DNA, 120 bp, Artificial Sequence
  ENSG00000165795_22 (sequence is synthesized)
gatcccctattcccccgcgtttagtccccctgcagatagaaaattgaggccaaatgtagtaactaactggggcaaggtcacactgggagtggcagagccgggattcgaatccggaggttc

SEQ ID NO: 525477 - DNA, 120 bp, Artificial Sequence
  ENSG00000165795_23 (sequence is synthesized)
tgacagggccaccctcttacctccacatcagcacttccttctctcctccgcgcagcctgaactgatgcccttgtagcctatattgattccggctcgagcctagagaggacgtgttctctg

SEQ ID NO: 525478 - DNA, 120 bp, Artificial Sequence
  ENSG00000165795_24 (sequence is synthesized)
gacttaggggtagacagacactggggagggttagtgacccgaggaggttgatgaccctgggagtctgggtcttggctgaggctttccgtccctgaaagaccccaggtctgtctcccatgt

SEQ ID NO: 525479 - DNA, 120 bp, Artificial Sequence
  ENSG00000165795_25 (sequence is synthesized)
ctggaaacggagctgggggcaggaaaggccctctgtgtgttctagagtagtcttcaacccctgggtccctctgttccctgcatcttcctgtgctgagagaggaagcctggtgtttgaggc

SEQ ID NO: 525480 - DNA, 120 bp, Artificial Sequence
  ENSG00000165795_26 (sequence is synthesized)
cctgcagtacctaaagtgagaggcctgggaacccctccaaaccagagttctctttccagcacaaggagacccttagaacttccaggttcaccgtggttcctgagccagtttcagcttctg

SEQ ID NO: 525481 - DNA, 62 bp, Artificial Sequence
  ENSG00000165795_27 (sequence is synthesized)
taccctgaactttctcacctgccttctcctcatagctaacaggcctcacctcttccattccg

SEQ ID NO: 525482 - DNA, 120 bp, Artificial Sequence
  ENSG00000165795_28 (sequence is synthesized)
ctagttctctgtgttcgggcggggggagtcgaactcgtggggtgtcagtatcccgggttcgtctccccactaccggttcccaccactgagtctgggggcgaaggaaggagccagagtgca

SEQ ID NO: 525483 - DNA, 120 bp, Artificial Sequence
  ENSG00000165795_29 (sequence is synthesized)
gggaagggtagaaatgaaacccagagggaggggaggggtcagtgtgggaaggagaagttctctcctggtctgactgtggcatgaaaggaagggtgagttctgactgggggacacgagtcc

SEQ ID NO: 525484 - DNA, 120 bp, Artificial Sequence
  ENSG00000165795_30 (sequence is synthesized)
tgggtttggaaaattggccagagtcaacagaatagccctaatgggtggagggaaggaaaagggtctatgcttggccctgcctcaggctaaggagggccttctctgatcagaaagtcaggg

SEQ ID NO: 525485 - DNA, 120 bp, Artificial Sequence
  ENSG00000165795_31 (sequence is synthesized)
aggaatgaaagggggtgacataatccctgaggaaccagatagacctgtctctttctctcccactcccctctccttcatgcccacacctggtggatggggagctctgcgggtgagagagag

SEQ ID NO: 525486 - DNA, 120 bp, Artificial Sequence
  ENSG00000165795_32 (sequence is synthesized)
gcggccgcggcggcagcagaccccagagtcagaaggagtgagaaccctgacccctaatcccactgcatccagccaataggagcccagccaccatggcggagtgcaggaggtgcagatcac

SEQ ID NO: 525487 - DNA, 120 bp, Artificial Sequence
  ENSG00000165795_33 (sequence is synthesized)
gtaatctcagcagttttgggaggctgaggagagtagatcacctgagctcaggagtttgagatcagcttatatagatggggaaactcccacctccctaagctaagaggcgttctatcacag

SEQ ID NO: 525488 - DNA, 120 bp, Artificial Sequence
  ENSG00000165795_34 (sequence is synthesized)
tgtgtattttcatcacgagcacacatttttatttacctttcctcttatgaactgtggacttcttacaagatctcattagcaatgtgggctttctcatgtccctgtggctccgtggatgtt

SEQ ID NO: 525489 - DNA, 120 bp, Artificial Sequence
  ENSG00000165795_35 (sequence is synthesized)
cccaagcttactggttttggagtcttgcacagcctccttaacgtgaagacaatgaggatgaagacttttatgatgagccacttccactaaacgaatagccaccatggcggagctgcagga

SEQ ID NO: 525490 - DNA, 120 bp, Artificial Sequence
  ENSG00000165795_36 (sequence is synthesized)
gtgggcgggctggggcgggccgggggcgggtctgcgggaagcccgagccggggcgggcccgagtcaaaggcaagtgaaggtggaagcggccgcggcggcagcagaccccagagtcagaag

SEQ ID NO: 525491 - DNA, 120 bp, Artificial Sequence
  ENSG00000165795_37 (sequence is synthesized)
ttgtgtctgttttcacatttgctttaagttccattcttcccgttcctctagaggaaccaggaactaaagcagaacaagttgaactggctcttgaaaattgagaatggacaaagagctatc

SEQ ID NO: 525492 - DNA, 120 bp, Artificial Sequence
  ENSG00000165795_38 (sequence is synthesized)
tatatgggaaaacagtgtgttggttggctggtggatgggtgtttgtttttaagacactagctctccagcagaaagctggggatagacttcaggtatctaccctgactacccgtgccaacc

SEQ ID NO: 525493 - DNA, 120 bp, Artificial Sequence
  ENSG00000165795_39 (sequence is synthesized)
ggcttcttgggcccttctttttcgcgtcctccaaagaaaggtccgtgtctgcctttctttgtgcccgtggactcaggagggagggtgaagagtttgaagagatgggctgtggcaggtttt

SEQ ID NO: 525494 - DNA, 120 bp, Artificial Sequence
  ENSG00000165795_40 (sequence is synthesized)
gtgggagtccaggagtgggtcgagcttagcggggaggggataaggccatgccctgtttctcatttccttccttctgctgtccctcagcttaaccacccggacactgttgaaggtcttgtc

SEQ ID NO: 525495 - DNA, 120 bp, Artificial Sequence
  ENSG00000165795_41 (sequence is synthesized)
tggtagatagcctaactggatggactctgaacttcaaggagggagtaaaggggcaggaaagtgaagctgtcactttgcctgagtctcttataatatcctgaactttctttttctttttct

SEQ ID NO: 525496 - DNA, 120 bp, Artificial Sequence
  ENSG00000165795_42 (sequence is synthesized)
gaattttggggtgagtgagggaggagggttggggtcctaaagtggtggtcagaagagtatcttgccaaggggatgtcctgtttggcacagggagatcaactttggggcactaagaatttg

SEQ ID NO: 525497 - DNA, 120 bp, Artificial Sequence
  ENSG00000165795_43 (sequence is synthesized)
attcctggtaaggaggaactgggtagggagctgatagaaaagggactggggtctgggttcctgggtcccttacgggggaggcgccacagtgggcgtgacctcattcattcagcctcctgc

SEQ ID NO: 525498 - DNA, 120 bp, Artificial Sequence
  ENSG00000165795_44 (sequence is synthesized)
ttactccaggtggaatgtaactcaaaactggaccccacccagacctcgttcctcaaggtcagtaacctgttcctgggcccccgtccacagtcatatatcctctctacatgcagctgctaa

SEQ ID NO: 525499 - DNA, 120 bp, Artificial Sequence
  ENSG00000165795_45 (sequence is synthesized)
cgctgccgtccatgggatggggaagggacataggataccggtggcactgggctctgccctttgccacacacccggccccacagtgccgcagcctcaggctccagctcttcctctaacctc

SEQ ID NO: 525500 - DNA, 120 bp, Artificial Sequence
  ENSG00000165795_46 (sequence is synthesized)
aagtgaaggtggaagcggccgcggcggcagcaggccaccatggcggagctgcaggaggtgcagatcacagaggagaagccactgttgccaggacagacgcctgaggcggccaagccactg

SEQ ID NO: 525501 - DNA, 120 bp, Artificial Sequence
  ENSG00000165795_47 (sequence is synthesized)
ataacattgaattgtactggaacagctacaacaagtgggtgggctgtgtgtgtatgcatccgccgagacctgaactttgagcgtggaggtgatatcaccctcaggtgtcctgtgatgctg

SEQ ID NO: 525502 - DNA, 120 bp, Artificial Sequence
  ENSG00000165795_48 (sequence is synthesized)
ttttggtaccctgtcctttagaatactcagtcactgagctacaagtttcactccctacctgagagtgtggggtggcccctaaatatagcccgagaaatctgagctacacttctgccccac

SEQ ID NO: 525503 - DNA, 120 bp, Artificial Sequence
  ENSG00000165795_49 (sequence is synthesized)
cctggtattttggtccagggcagaggagggaggggtctggaggtgtggtgttgagggtggcagtggggatggtgagtatcaagagaagggctgtcctgattcctcttccaaagcttccac

SEQ ID NO: 525504 - DNA, 120 bp, Artificial Sequence
  ENSG00000165795_50 (sequence is synthesized)
tagtctctctccccatacactataattgggagtcaggcccttgtctcgtcactacactaaccttcatcctttccgtgtctctctttgtcaatctctttctgtctttggtcatttgttggt

SEQ ID NO: 525505 - DNA, 120 bp, Artificial Sequence
  ENSG00000165795_51 (sequence is synthesized)
ctcttccccagtagaaggatggcctctgcttggccctctcttctctctttgctttctttccttctattctagtcctttcccttccctatctctcccctctccttccttcccctcctcttc

SEQ ID NO: 525506 - DNA, 120 bp, Artificial Sequence
  ENSG00000165795_52 (sequence is synthesized)
tctctctaatcttcattattctttcttatcctcaaactcatcttccggtatcatgttttcctcaattcttgctgatcctgtttttaattctttgttcccttttccctcttgcccacccac

SEQ ID NO: 525507 - DNA, 120 bp, Artificial Sequence
  ENSG00000165795_53 (sequence is synthesized)
tcccagctccctgaccttggtgttgctccttttctggcctcgtctcctctgagcctagctcttggtgccctgttttcctgcagactcactctgtggagacaccatacggctctgtcactt

SEQ ID NO: 525508 - DNA, 120 bp, Artificial Sequence
  ENSG00000165795_54 (sequence is synthesized)
agcaaagagaggagaggtaccaggactctgggcacgagggagtcggaactcctgcgccctcgacgttcccccgtgccccctttcggcgccagcacacctgcccctgccagccggcgagac

SEQ ID NO: 525509 - DNA, 120 bp, Artificial Sequence
  ENSG00000165795_55 (sequence is synthesized)
tggcgagatatgctgtaagaaataaaaagcccagaggagggaaaggagggtccagactgattaggagaatactgtttattagtgctgtttgggggaggaagtgggcactaggtggggagt

SEQ ID NO: 525510 - DNA, 120 bp, Artificial Sequence
  ENSG00000165799_0 (sequence is synthesized)
agagatctgacagcctaggagtgcgtggacaccacctcagcccactgagcaggagtcacagcacgaagaccaagcgcaaagcgacccctgccctccatcctgactgctcctcctaagaga

SEQ ID NO: 525511 - DNA, 120 bp, Artificial Sequence
  ENSG00000165799_1 (sequence is synthesized)
gatggcaccggccagagcaggattctgcccccttctgctgcttctgctgctggggctgtgggtggcagagatcccagtcagtgccaagcccaagggcatgacctcatcacagtggtttaa

SEQ ID NO: 525512 - DNA, 120 bp, Artificial Sequence
  ENSG00000165799_2 (sequence is synthesized)
aattcagcacatgcagcccagccctcaagcatgcaactcagccatgaaaaacattaacaagcacacaaaacggtgcaaagacctcaacaccttcctgcacgagcctttctccagtgtggc

SEQ ID NO: 525513 - DNA, 120 bp, Artificial Sequence
  ENSG00000165799_3 (sequence is synthesized)
cgccacctgccagacccccaaaatagcctgcaagaatggcgataaaaactgccaccagagccacggggccgtgtccctgaccatgtgtaagctcacctcagggaagcatccgaactgcag

SEQ ID NO: 525514 - DNA, 120 bp, Artificial Sequence
  ENSG00000165799_4 (sequence is synthesized)
gtacaaagagaagcgacagaacaagtcttacgtagtggcctgtaagcctccccagaaaaaggactctcagcaattccacctggttcctgtacacttggacagagtcctttaggtttccag

SEQ ID NO: 525515 - DNA, 120 bp, Artificial Sequence
  ENSG00000165799_5 (sequence is synthesized)
ctccgcaccactcccctacacccagagcattctcttcccctcatctcttggggctgttcctggttcagcctctgctgggaggctgaagctgacactctggtgagctgagctctagaggga

SEQ ID NO: 525516 - DNA, 120 bp, Artificial Sequence
  ENSG00000165799_6 (sequence is synthesized)
tggcttttcatctttttgttgctgttttcccagatgcttatccccaagaaacagcaagctcaggtctgtgggttccctggtctatgccattgcacatgtctcccctgccccctggcatta

SEQ ID NO: 525517 - DNA, 120 bp, Artificial Sequence
  ENSG00000165799_7 (sequence is synthesized)
gggcagcatgacaaggagaggaaataaatggaaagggggcatatgggatttgtggacacagctgtttctgttcctgaactagaagtcttccccagctctgacgtggcagtgaggtgacct

SEQ ID NO: 525518 - DNA, 120 bp, Artificial Sequence
  ENSG00000165799_8 (sequence is synthesized)
gaaggaaagaaaaatataaataaataccacttcatatttgtatagaatcctctaatcccttgtgacatagacttgacagggattgtatgccttctttatggatgaggaaattaaggtttt

SEQ ID NO: 525519 - DNA, 120 bp, Artificial Sequence
  ENSG00000165799_9 (sequence is synthesized)
agaaagcttaatgaattaaagagcttgtctaattagttagtagcagaacctggacttgaacctaggtctccttgctctaaatacagtgtaccttctactctaccagttgcgcaagaaaga

SEQ ID NO: 525520 - DNA, 120 bp, Artificial Sequence
  ENSG00000165799_10 (sequence is synthesized)
agtcactgttacagaggcaagcggtgaactaggtaagagttcactcatgaagaaacgagtgctctgaagagccagttaccctgtgttggctgcaataaaggtcattacctctctagccaa

SEQ ID NO: 525521 - DNA, 120 bp, Artificial Sequence
  ENSG00000165801_0 (sequence is synthesized)
cgagacacgagcggcgggagggaggcggtggcgcgcccggccccgcccgcccgaccaagcgtcggacgcggcccggcgccgagccatggagcctgagccagtggaggactgtgtgcagag

SEQ ID NO: 525522 - DNA, 120 bp, Artificial Sequence
  ENSG00000165801_1 (sequence is synthesized)
gtgcagagcactctcgccgccctgtatccaccctttgaggcaacagcccccaccctgttgggccaggtgttccaggtggtggagaggacttatcgggaggacgcactgaggtacacgctg

SEQ ID NO: 525523 - DNA, 120 bp, Artificial Sequence
  ENSG00000165801_2 (sequence is synthesized)
gacttcctggtaccagccaagcacctgcttgccaaggtccagcaggaagcctgtgcccaatacagtggattcctcttcttccatgaggggtggccgctctgcctgcatgaacaggtggtg

SEQ ID NO: 525524 - DNA, 120 bp, Artificial Sequence
  ENSG00000165801_3 (sequence is synthesized)
gtgcagctagcagccctaccctggcaactgctgcgcccaggagacttctatctgcaggtggtgccctcagctgcccaagcaccccgactagcactcaagtgtctggcccctgggggtggg

SEQ ID NO: 525525 - DNA, 120 bp, Artificial Sequence
  ENSG00000165801_4 (sequence is synthesized)
cgggtgcaggaggttcctgtgcccaatgaggcttgtgcctacctattcacacctgagtggctacaaggcatcaacaaggaccggccaacaggtcgcctcagtacctgcctactgtctgcg

SEQ ID NO: 525526 - DNA, 120 bp, Artificial Sequence
  ENSG00000165801_5 (sequence is synthesized)
ccctctgggattcagcggctgccctgggctgagctcatctgtccacgatttgtgcacaaagagggcctcatggttggacatcagccaagtacactgcccccagaactgccctctggacct

SEQ ID NO: 525527 - DNA, 120 bp, Artificial Sequence
  ENSG00000165801_6 (sequence is synthesized)
ccagggcttcccagccctccacttcctgaggaggcgctgggtacccggagtcctggggatgggcacaatgcccctgtggaaggacctgagggcgagtatgtggagctgttagaggtgacg

SEQ ID NO: 525528 - DNA, 120 bp, Artificial Sequence
  ENSG00000165801_7 (sequence is synthesized)
ctgcccgtgagggggagcccaacagatgctgaaggctccccaggcctctccagagtccggacggtacccacccgcaagggcgctggagggaagggccgccaccggagacaccgggcgtgg

SEQ ID NO: 525529 - DNA, 120 bp, Artificial Sequence
  ENSG00000165801_8 (sequence is synthesized)
atgcaccagaagggcctggggcctcggggccaggatggagcacgcccacccggcgaggggagcagcaccggagcctcccctgagtctcccccaggagctgaggctgtcccagaggcagca

SEQ ID NO: 525530 - DNA, 120 bp, Artificial Sequence
  ENSG00000165801_9 (sequence is synthesized)
gtcttggaggtgtctgagcccccagcagaggctgtgggagaagcctccggatcttgccccctgaggccaggggagcttagaggaggaggaggaggaggccagggggctgaaggaccacct

SEQ ID NO: 525531 - DNA, 120 bp, Artificial Sequence
  ENSG00000165801_10 (sequence is synthesized)
ggtacccctcggagaacaggcaaaggaaacagaagaaagaagcgagctgcaggtcgaggggctcttagccgaggaggggacagtgccccactgagccctggggacaaggaagatgccagc

SEQ ID NO: 525532 - DNA, 120 bp, Artificial Sequence
  ENSG00000165801_11 (sequence is synthesized)
caccaagaagcccttggcaatctgccctcaccaagtgagcacaagcttccagaatgccacctggttaaggaggaatatgaaggctcagggaagccagaatctgagccaaaagagctcaaa

SEQ ID NO: 525533 - DNA, 120 bp, Artificial Sequence
  ENSG00000165801_12 (sequence is synthesized)
acagcaggcgagaaagagcctcagctctctgaagcctgtgggcctacagaagagggggccggagagagagagctggaggggccaggcctgctgtgtatggcaggacacacaggcccagaa

SEQ ID NO: 525534 - DNA, 120 bp, Artificial Sequence
  ENSG00000165801_13 (sequence is synthesized)
ggccccctgtctgacactccaacacctccgctggagactgtgcaggaaggaaaaggggacaacattccagaagaggcccttgcagtctccgtctctgatcaccctgatgtagcttgggac

SEQ ID NO: 525535 - DNA, 120 bp, Artificial Sequence
  ENSG00000165801_14 (sequence is synthesized)
ttgatggcatctggattcctcatcctgacgggaggggtggaccagagtgggcgagctctgctgaccattaccccaccgtgccctcctgaggagcccccaccctcccgagacacgctgaac

SEQ ID NO: 525536 - DNA, 120 bp, Artificial Sequence
  ENSG00000165801_15 (sequence is synthesized)
acaactcttcattacctccactcactgctcaggcctgatctacagacactggggctgtccgtcctgctggaccttcgtcaggcacctccactgcctccagcactcattcctgccttgagc

SEQ ID NO: 525537 - DNA, 120 bp, Artificial Sequence
  ENSG00000165801_16 (sequence is synthesized)
caacttcaggactcaggagatcctccccttgttcagcggctgctgattctcattcatgatgaccttccaactgaactctgtggatttcagggtgctgaggtgctgtcagagaatgatctg

SEQ ID NO: 525538 - DNA, 120 bp, Artificial Sequence
  ENSG00000165801_17 (sequence is synthesized)
aaaagagtggccaagccagaggagctgcagtgggagttaggaggtcacagggacccctctcccagtcactgggtagagatacaccaggaagtggtaaggctatgtcgcctgtgccaaggt

SEQ ID NO: 525539 - DNA, 120 bp, Artificial Sequence
  ENSG00000165801_18 (sequence is synthesized)
gtgctgggctcggtacggcaggccattgaggagctggagggagcagcagagccagaggaagaggaggcagtgggaatgcccaagccactgcagaaggtgctggcagatccccggctgacg

SEQ ID NO: 525540 - DNA, 120 bp, Artificial Sequence
  ENSG00000165801_19 (sequence is synthesized)
gcactgcagagggatgggggggccatcctgatgaggctgcgctccactcccagcagcaagctggagggccaaggcccagctacactgtatcaggaagtggacgaggccattcaccagctt

SEQ ID NO: 525541 - DNA, 120 bp, Artificial Sequence
  ENSG00000165801_20 (sequence is synthesized)
gtgcgcctctccaacctgcacgtgcagcagcaagagcagcggcagtgcctgcggcgactccagcaggtgttgcagtggctctcgggcccaggggaggagcagctggcaagctttgctatg

SEQ ID NO: 525542 - DNA, 120 bp, Artificial Sequence
  ENSG00000165801_21 (sequence is synthesized)
cctggggacaccttgtctgccctgcaggagacagagctgcgattccgtgctttcagcgctgaggtccaggagcgcctggcccaggcacgggaggccctggctctggaggagaatgccacc

SEQ ID NO: 525543 - DNA, 120 bp, Artificial Sequence
  ENSG00000165801_22 (sequence is synthesized)
tcccagaaggtgctggatatctttgaacagcggctggagcaggttgagagtggcctccatcgggccctgcggctacagcgcttcttccagcaggcacatgaatgggtggatgagggcttt

SEQ ID NO: 525544 - DNA, 120 bp, Artificial Sequence
  ENSG00000165801_23 (sequence is synthesized)
gctcggctggcaggagctgggccgggtcgggaggctgtgctggctgcactggccctgcggcgggccccagagcccagtgccggcaccttccaggagatgcgggccctggccctggacctg

SEQ ID NO: 525545 - DNA, 120 bp, Artificial Sequence
  ENSG00000165801_24 (sequence is synthesized)
ccctgcgagaatggggccgctgccaggcccgctgccaagagctagagaggaggatccagcaacacgtgggagaggaggcgagcccacggggctaccgacgacggcgggcagacggtgcca

SEQ ID NO: 525546 - DNA, 120 bp, Artificial Sequence
  ENSG00000165801_25 (sequence is synthesized)
gcagtggaggggcccagtgggggccccgcagcccctcgcccagcctcagctccttgctgctccccagcagccctgggccacggccagccccatcccattgctccctggccccatgtggag

SEQ ID NO: 525547 - DNA, 120 bp, Artificial Sequence
  ENSG00000165801_26 (sequence is synthesized)
aggactatgaggaagagggccctgagctggctccagaagcagagggcaggcccccaagagctgtgctgatccgaggcctggaggtcaccagcactgaggtggtagacaggacgtgctcac

SEQ ID NO: 525548 - DNA, 120 bp, Artificial Sequence
  ENSG00000165801_27 (sequence is synthesized)
cacgggaacacgtgctgctgggccgggctagggggccagacggaccctggggagtaggcaccccccggatggagcgcaagcgaagcatcagtgcccagcagcggctggtgtctgagctga

SEQ ID NO: 525549 - DNA, 120 bp, Artificial Sequence
  ENSG00000165801_28 (sequence is synthesized)
ttgcctgtgaacaagattacgtggccaccttgagtgagccagtgccaccccctgggcctgagctgacgcctgaacttcggggcacctgggctgctgccctgagtgcccgggaaaggcttc

SEQ ID NO: 525550 - DNA, 120 bp, Artificial Sequence
  ENSG00000165801_29 (sequence is synthesized)
gcagcttccaccggacacactttctgcgggagcttcagggctgcgccacccaccccctacgcattggggcctgcttccttcgccacggggaccagttcagcctttatgcacagtacgtga

SEQ ID NO: 525551 - DNA, 120 bp, Artificial Sequence
  ENSG00000165801_30 (sequence is synthesized)
agcaccgacacaaactggagaatggtctggctgcgctcagtcccttaagcaagggctccatggaggctggcccttacctgccccgagccctgcagcagcctctggaacagctgactcggt

SEQ ID NO: 525552 - DNA, 120 bp, Artificial Sequence
  ENSG00000165801_31 (sequence is synthesized)
atgggcggctcctggaggagctcctgagggaagctgggcctgagctcagttctgagtgccgggcccttggggctgctgtacagctgctccgggaacaagaggcccgtggcagagacctgc

SEQ ID NO: 525553 - DNA, 120 bp, Artificial Sequence
  ENSG00000165801_32 (sequence is synthesized)
tggccgtggaggcggtgcgtggctgtgagatagatctgaaggagcagggacagctcttgcatcgagaccccttcactgtcatctgtggccgaaagaagtgccttcgccatgtctttctct

SEQ ID NO: 525554 - DNA, 120 bp, Artificial Sequence
  ENSG00000165801_33 (sequence is synthesized)
tcgagcatctcctcctgttcagcaagctcaagggccctgaaggggggtcagagatgtttgtttacaagcaggcctttaagactgctgatatggggctgacagaaaacatcggggacagcg

SEQ ID NO: 525555 - DNA, 120 bp, Artificial Sequence
  ENSG00000165801_34 (sequence is synthesized)
gactctgctttgagttgtggtttcggcggcggcgtgcacgagaggcatacactctgcaggcaacctcaccagagatcaaactcaagtggacaagttctattgcccagctgctgtggagac

SEQ ID NO: 525556 - DNA, 120 bp, Artificial Sequence
  ENSG00000165801_35 (sequence is synthesized)
aggcagcccacaacaaggagctccgagtgcagcagatggtgtccatgggcattgggaataaacccttcctggacatcaaagcccttggggagcggacgctgagtgccctgctcactggaa

SEQ ID NO: 525557 - DNA, 120 bp, Artificial Sequence
  ENSG00000165801_36 (sequence is synthesized)
gagccgcccgcacccgggcctccgtggccgtgtcatcctttgagcatgccggcccctcccttcccggcctttcgccgggagcctgctccctgcctgcccgcgtcgaggaggaggcctggg

SEQ ID NO: 525558 - DNA, 120 bp, Artificial Sequence
  ENSG00000165801_37 (sequence is synthesized)
atctggacgtcaagcaaatttccctggccccagaaacacttgactcttctggagatgtgtccccaggaccaagaaacagccccagcctgcaacccccccaccctgggagcagcactccca

SEQ ID NO: 525559 - DNA, 120 bp, Artificial Sequence
  ENSG00000165801_38 (sequence is synthesized)
ccctggccagtcgagggatcttagggctatcccgacagagtcatgctcgagccctgagtgaccccaccacgcctctgtgacctggagaagatccagaacttgcgtgcagcttctcctctc

SEQ ID NO: 525560 - DNA, 120 bp, Artificial Sequence
  ENSG00000165801_39 (sequence is synthesized)
agcacactttgggctgggatggcagtggggcataatggagccctgggcgatcgctgaatttcttccctctgcttcctggacacagaggaggtctaacgaccagagtattgccctgccacc

SEQ ID NO: 525561 - DNA, 120 bp, Artificial Sequence
  ENSG00000165801_40 (sequence is synthesized)
actatctctagtctccctagcttggtgccttctcctgcaggagtcagagcagccacattgcttgccttcataccctggaggtggggaagttatccctcttccggtgctttcccatcctgg

SEQ ID NO: 525562 - DNA, 120 bp, Artificial Sequence
  ENSG00000165801_41 (sequence is synthesized)
gccactgtatccaggacatcactcccatgccagccctccctggcagcccatgttctcctcttttctcaccccctgactttccctgagaagaatcatctctgccaggtcaactggagtccc

SEQ ID NO: 525563 - DNA, 120 bp, Artificial Sequence
  ENSG00000165801_42 (sequence is synthesized)
tggtgactccattctgaggtgtcacaagcaatgaagctatgcaaacaataggagggtgtgacaggggaaccgtagactttatatatgtaattactgttattataatactattgttatatt

SEQ ID NO: 525564 - DNA, 120 bp, Artificial Sequence
  ENSG00000165801_43 (sequence is synthesized)
aaatgtatttactcacactttgcctctaaggagctagagtagtcctctggattaaggtgataaataacttgagcactttccctcaaccagcccttaactagaacacagaaaataaaacca

SEQ ID NO: 525565 - DNA, 120 bp, Artificial Sequence
  ENSG00000165801_44 (sequence is synthesized)
agactggaaggtcccctctacccctcccaggcccagagctagctgactgtgtatgagcctgggagaatgtgtctcctccacagtggctcccagaggttccacacactctctgaagctcct

SEQ ID NO: 525566 - DNA, 120 bp, Artificial Sequence
  ENSG00000165801_45 (sequence is synthesized)
tctcccacactgcacctactccttgaggctgaactggtcacagacaaactgggatccagcacagtccagcagttctcaaaatgaggtcctcaggccacagtgcgtgagaacttgcttggc

SEQ ID NO: 525567 - DNA, 120 bp, Artificial Sequence
  ENSG00000165801_46 (sequence is synthesized)
tgtttgttaaatgctaattcttgggccccatcagagctactgcatcgaaacctgggggtaaaacccaatattctgcatttcttatcaaactctttgggtgataactaagtgtctgaagag

SEQ ID NO: 525568 - DNA, 120 bp, Artificial Sequence
  ENSG00000165801_47 (sequence is synthesized)
gtgactatttcctgacagaaggacccaaagagggaagcaggacataggtaggcagacagacacagggccctgtgcctcaagacacctgtttattggggacacgactctgcaatagggatg

SEQ ID NO: 525569 - DNA, 120 bp, Artificial Sequence
  ENSG00000165801_48 (sequence is synthesized)
acaggaatcgtaccaaaaatagcgacgtctacagggcccctgatggggctagaagggtacagtgccccccaccctcaccccttgtacaaaaataaactctcacgcctatggaccagcaaa

SEQ ID NO: 525570 - DNA, 120 bp, Artificial Sequence
  ENSG00000165801_49 (sequence is synthesized)
agtgggcatcagtgggtgaagggaaacaggactgggaaagagaagcaattgggtgggcttggggactgggggaggcagggtggaaaggaggtaggcatggactgctcccagccaggacag

SEQ ID NO: 525571 - DNA, 120 bp, Artificial Sequence
  ENSG00000165801_50 (sequence is synthesized)
ggccagggtgctggggggtggcccccaggagtgaagaccttgacaatgaggatacaaaggggaggtatggtggaaagtcaggaaaggcatctcgtccccaaatcagtgggactggctggg

SEQ ID NO: 525572 - DNA, 120 bp, Artificial Sequence
  ENSG00000165801_51 (sequence is synthesized)
gtggaggctgaggggcccatctcctaggtttttgctcttagctctgccacctccttgctgaatggcatggggcaagatactaaacctgactgtgcctccatagatctacctcacagggct

SEQ ID NO: 525573 - DNA, 120 bp, Artificial Sequence
  ENSG00000165801_52 (sequence is synthesized)
gctgtggggattacacgaggcaatacataaaagcccttagcacagagcctgccactcataaatgtcgtatgagtaccggttattcttttatataggctcttccatctccataccaactcc

SEQ ID NO: 525574 - DNA, 120 bp, Artificial Sequence
  ENSG00000165801_53 (sequence is synthesized)
gagtgacatggttaggcagtgatggtggaacagtgagaaaacaggagagtgacgggcattgggaggccacaggcaagaggacaagggctgtcactgggcatccttcgtgagcaacacagg

SEQ ID NO: 525575 - DNA, 120 bp, Artificial Sequence
  ENSG00000165801_54 (sequence is synthesized)
gggaaaacagtttataggatgaagaaagaatggcttataataagattcaagatttggcttgagagattactgaagtagaaatgagcctaagatataccaaaaagaaagagaaagctggca

SEQ ID NO: 525576 - DNA, 120 bp, Artificial Sequence
  ENSG00000165801_55 (sequence is synthesized)
cagtggctcatgcctgtaatcccagcgcattttgggaggccaaagtgggaggattgtttgaggccaggtgttcaagaccagcctgggcacatagtgagaccccgtttccacaaaaaattt

SEQ ID NO: 525577 - DNA, 120 bp, Artificial Sequence
  ENSG00000165801_56 (sequence is synthesized)
gggcacatagtgagaccccgtttccacaaaaaattttaaaattaactgggcatggtagtacgcacctatagtcctagctatttgaggggtgaggtaggaggatcgcttgagcccaaacgt

SEQ ID NO: 525578 - DNA, 120 bp, Artificial Sequence
  ENSG00000165801_57 (sequence is synthesized)
tcaaggctacagtgagctatggtggtgccactgtacttgagcctgagtgacagagcaagactctgtctttaaaggatttttttttttcaaattttttaataaagcaaatggctgggaaaa

SEQ ID NO: 525579 - DNA, 120 bp, Artificial Sequence
  ENSG00000165801_58 (sequence is synthesized)
aaggtgagaaactgctcgcttggatttaagaactgctgctacttgctgtgtgacctggactagttttttgtttgttagttttatttttatttttgtttttttgctgggctttaccttggt

SEQ ID NO: 525580 - DNA, 120 bp, Artificial Sequence
  ENSG00000165801_59 (sequence is synthesized)
tttaattttctgaacttcattctgctcatctgaaaaatgaaatactaatgtcttcatcttagtgtaatagggatgattaggtaaggtcaaatatatggaagcatcttgtaaactgtaaag

SEQ ID NO: 525581 - DNA, 120 bp, Artificial Sequence
  ENSG00000165801_60 (sequence is synthesized)
gtatgtaaaaatgtgagggtttgttttttgtgtgtgtatgtgctcttaatgcccaagatgcagagtagaaattaggcagctgggatgccaaacagccaggatgcaacatattggagagaa

SEQ ID NO: 525582 - DNA, 120 bp, Artificial Sequence
  ENSG00000165801_61 (sequence is synthesized)
gagccagatatctgaggaggaagtcacaccatcattgccatccatgttgtgatagtcaacagaaggagtaaaaagagacatcagaggaatgaaagggaggaatgaggattgggaaggaac

SEQ ID NO: 525583 - DNA, 120 bp, Artificial Sequence
  ENSG00000165801_62 (sequence is synthesized)
cttatagtttcctgtcgcttcttccctggttgctctaatgatgctgctgacaatttcctgcctcttggtagggggttcccttgcaactggatcgctatggtgactcacagcttcctgttg

SEQ ID NO: 525584 - DNA, 120 bp, Artificial Sequence
  ENSG00000165801_63 (sequence is synthesized)
ctatggagctttttcttccctgatggagcagcttggttgcttaaggtaatctggagggattctgtactctgctctcaccctagcttccccttcagccccagaaacacttgactcttctgg

SEQ ID NO: 525585 - DNA, 80 bp, Artificial Sequence
  ENSG00000165802_0 (sequence is synthesized)
ccgggtgcggccatgcggggaccgggcccgaccccgagcccgaccccgagcccaagcccgagccggagcccgagcgagac

SEQ ID NO: 525586 - DNA, 80 bp, Artificial Sequence
  ENSG00000165802_1 (sequence is synthesized)
caagcccgagccggagcccgagcgagaccccgagcccgagcccgagcgcgacccccggtgcggcgcggctaccccggcgg

SEQ ID NO: 525587 - DNA, 120 bp, Artificial Sequence
  ENSG00000165802_2 (sequence is synthesized)
cgccgcctccaggaggagggcgctgaggagcgaggccatgtcctcggtggcggccaaagtgcgagcagcccgagcgtttggagagtacctgtcccagagtcaccctgagaaccgcaacgg

SEQ ID NO: 525588 - DNA, 120 bp, Artificial Sequence
  ENSG00000165802_3 (sequence is synthesized)
cgcagatcacctgctggctgatgcctactctggccacgacgggtcccccgagatgcagccggccccccagaacaagcgccgcctgtccctcgtctccaacggctgctacgagggcagcct

SEQ ID NO: 525589 - DNA, 120 bp, Artificial Sequence
  ENSG00000165802_4 (sequence is synthesized)
ctcagaggagcccagcattaggaagcccgcaggcgagggccctcagcctcgagtgtacaccatctctggggagcctgccctgctgcccagccctgaggcggaggccattgagctggcggt

SEQ ID NO: 525590 - DNA, 120 bp, Artificial Sequence
  ENSG00000165802_5 (sequence is synthesized)
ggtgaaggggcggcggcagcggcaccctcaccatcacagccagcccctgcgcgccagccctggtggcagccgggaggacgtcagcaggccctgccagagctgggcgggcagccgccaggg

SEQ ID NO: 525591 - DNA, 120 bp, Artificial Sequence
  ENSG00000165802_6 (sequence is synthesized)
ctccaaggagtgccccggatgtgcccagctggctcctggccccacccctcgggcctttgggctggaccagccacctctgcctgagacctccggtcgccgcaagaagctggagaggatgta

SEQ ID NO: 525592 - DNA, 120 bp, Artificial Sequence
  ENSG00000165802_7 (sequence is synthesized)
cagcgttgaccgtgtgtctgacgacatccctattcgtacctggttccccaaggaaaatcttttcagcttccagacagcaaccacaactatgcaagcggtgttcaggggctacgcggagag

SEQ ID NO: 525593 - DNA, 120 bp, Artificial Sequence
  ENSG00000165802_8 (sequence is synthesized)
gaagcgccggaaacgggagaatgattccgcgtctgtaatccagaggaacttccgcaaacacctgcgcatggtcggcagccggagggtgaaggcccagacgttcgctgagcggcgcgagcg

SEQ ID NO: 525594 - DNA, 120 bp, Artificial Sequence
  ENSG00000165802_9 (sequence is synthesized)
gagcttcagccggtcctggagcgaccccacccccatgaaagccgacacttcccacgactcccgagacagcagtgacctgcagagctcccactgcacgctggacgaggccttcgaggacct

SEQ ID NO: 525595 - DNA, 120 bp, Artificial Sequence
  ENSG00000165802_10 (sequence is synthesized)
ggactgggacactgagaagggcctggaggctgtggcctgcgacaccgaaggcttcgtgccaccaaaggtcatgctcatttcctccaaggtgcccaaggctgagtacatccccactatcat

SEQ ID NO: 525596 - DNA, 120 bp, Artificial Sequence
  ENSG00000165802_11 (sequence is synthesized)
ccgccgggatgacccctccatcatccccatcctctacgaccatgagcacgcaaccttcgaggacatccttgaggagatagagaggaagctgaacgtctaccacaagggagccaagatctg

SEQ ID NO: 525597 - DNA, 120 bp, Artificial Sequence
  ENSG00000165802_12 (sequence is synthesized)
acttctggaagcggctgagccgcctgatgagcaaagtgaacccagagccgaacgtcatccacatcatgggctgctacattctggggaaccccaatggagagaagctgttccagaacctca

SEQ ID NO: 525598 - DNA, 120 bp, Artificial Sequence
  ENSG00000165802_13 (sequence is synthesized)
ggaccctcatgactccttatagggtcaccttcgagtcacccctggagctctcagcccaagggaagcagatgatcgagacgtactttgacttccggttgtatcgcctgtggaagagccgcc

SEQ ID NO: 525599 - DNA, 120 bp, Artificial Sequence
  ENSG00000165802_14 (sequence is synthesized)
agcactcgaagctgctggactttgacgacgtcctgtgaggggcagaggcctccgcccagtcaccatcaggccactccctctgcaccgggacctggggctgggccgcctcgtgctccccgg

SEQ ID NO: 525600 - DNA, 120 bp, Artificial Sequence
  ENSG00000165802_15 (sequence is synthesized)
gactgtgtggctccggtctcgcctggagccacttcagggcacctcagacgttgctcaggttccccctgtgggttccggtcctcgctgcacccgtggccgcagaggctgcagtccctgggg

SEQ ID NO: 525601 - DNA, 120 bp, Artificial Sequence
  ENSG00000165802_16 (sequence is synthesized)
gccgggaggatcccgccctgtggcccgtggatgctcagcggccaggcactgacctgccatgcctcgcctggaggctcagctgtgggcatccctccatggggttcatagaaataagtgcaa

SEQ ID NO: 525602 - DNA, 120 bp, Artificial Sequence
  ENSG00000165802_17 (sequence is synthesized)
tttctacacccccgaaacaattcaaagggaagcagcatttcttgttaactagttaagcactatgctgctagttacagtgtaggcaccccggcccagcagcccagcagcccacatgtgttc

SEQ ID NO: 525603 - DNA, 120 bp, Artificial Sequence
  ENSG00000165802_18 (sequence is synthesized)
aggaccctccctgcccaccccctccctgccgtatcgatcaccagcaccagggtggcccgtgtgcgtggggccagcgtcgccgggctgcccagcctggctctgtctacactggccgagtct

SEQ ID NO: 525604 - DNA, 120 bp, Artificial Sequence
  ENSG00000165802_19 (sequence is synthesized)
ctgggtctgtctacactggccgagtctccgactgtctgtgctttcacttacactcctcttgccaccccccatccctgcttacttagacctcagccggcgccggacccggtaggggcagtc

SEQ ID NO: 525605 - DNA, 120 bp, Artificial Sequence
  ENSG00000165802_20 (sequence is synthesized)
tgggcagcaggaaggaagggcgcagcgtcccctccttcagaggaggctctgggtggggcctgctccccatccccccaagcccacccagcactctcattgctgctgttgagttcagctttt

SEQ ID NO: 525606 - DNA, 120 bp, Artificial Sequence
  ENSG00000165802_21 (sequence is synthesized)
accagcctcagtgtggaggctccatcccagcacacaggcctggggcttggcaggggcccagctggggctgggccctgggttttgagaaactcgctggcaccacagtgggcccctggaccc

SEQ ID NO: 525607 - DNA, 120 bp, Artificial Sequence
  ENSG00000165802_22 (sequence is synthesized)
ggccgcgcagctggtggactgtaggggctcctgactgggcacaggagctcccagcttttgtccacggccagcaggatgggctgtcgtgtatatagctggggcgagggggcaggcccccct

SEQ ID NO: 525608 - DNA, 120 bp, Artificial Sequence
  ENSG00000165802_23 (sequence is synthesized)
tgtgcagagccaggggtctgagggcacctggctgtgttcccagctgagggagggctggggcgggggccgggcttggaacgatgtacgataccctcatagtgaccattaaacctgatcctc

SEQ ID NO: 525609 - DNA, 120 bp, Artificial Sequence
  ENSG00000165802_24 (sequence is synthesized)
agcttctgggcccactcctgtgaggtcactgctgcagggccttcctgcctggacagagttggagctaggccactagaccaccccacagggcatagccagggggaccagcacaggagggga

SEQ ID NO: 525610 - DNA, 120 bp, Artificial Sequence
  ENSG00000165802_25 (sequence is synthesized)
cggagaggagctgcaggagggctggggggaggctgcagtctcggaggggggcctcgccgggtctggaggggacagcagagacagcccgttccccctgccgcctgagggcaccagggagag

SEQ ID NO: 525611 - DNA, 120 bp, Artificial Sequence
  ENSG00000165802_26 (sequence is synthesized)
ggctgtatgtccctcacgccacactgtgtgtgcagtcagcagtgtggccacagatgggggccactctctcaacctcaggtgtcctcagggcccagaccgctgctgggcacagccaggctg

SEQ ID NO: 525612 - DNA, 120 bp, Artificial Sequence
  ENSG00000165802_27 (sequence is synthesized)
gctgccagctggttccctgccccgtggctgggggacagagcagcacgtatcagctgggctagggtcagggggccactggtgcgcagcctggcacagcctggcaggcttgaggcccagtgt

SEQ ID NO: 525613 - DNA, 120 bp, Artificial Sequence
  ENSG00000165802_28 (sequence is synthesized)
gctgggggtggtcacacagccgtcagccacctccagctcttccagggcattctagatggggtcccgggagggggcaggttttggtgccaatttgagtgtataaagttttaggtaaatacc

SEQ ID NO: 525614 - DNA, 120 bp, Artificial Sequence
  ENSG00000165802_29 (sequence is synthesized)
tgccaccaaaggtcatggtgaggcccagcccgggcagtgctcctctacaccccgagcaggactccgccccaacccgagtccagccagctctgcctgggaccacgcagccttctccagctg

SEQ ID NO: 525615 - DNA, 120 bp, Artificial Sequence
  ENSG00000165802_30 (sequence is synthesized)
atgccctcttgcggccccaccctgggccagcgccggcaccccaggtccccagggtgctgtggcgctgctggctctgacgcagccttgatgtggccttgtggcctgtgtctgtccccagga

SEQ ID NO: 525616 - DNA, 120 bp, Artificial Sequence
  ENSG00000165802_31 (sequence is synthesized)
ccatgagcacgcaaccttcgaggacatccttggtatgtgcctcattggccttctctctgctggttccaggcctgggaggggcagacacaggtgggggtgcccctggggctggggtggggg

SEQ ID NO: 525617 - DNA, 120 bp, Artificial Sequence
  ENSG00000165802_32 (sequence is synthesized)
cctggacacctctatctcctcaagaacaaggtggccacctttgccaaagtggagaaggaagaggacatgattcacccctcctccacggtccgctctgtggagtggggtgcctgtcccctg

SEQ ID NO: 525618 - DNA, 120 bp, Artificial Sequence
  ENSG00000165802_33 (sequence is synthesized)
ccactgggtgacccacccctctccaccagcttctggaagcggctgagccgcctgatgagcaaagtgaacccagagccgaacgtcatccacatcatgggctgctacattctggggaacccc

SEQ ID NO: 525619 - DNA, 120 bp, Artificial Sequence
  ENSG00000165802_34 (sequence is synthesized)
tctggagttgaaggggagccctggaaggctgtcgcgggaagagcactgggtgggatttgcctttgggtgggaggtggtgccaggagccagggagagcactggcttcccacaccgaagggg

SEQ ID NO: 525620 - DNA, 120 bp, Artificial Sequence
  ENSG00000165802_35 (sequence is synthesized)
acttcccacgactcccgagacagtaggtgccccgcacaggcccgcccaccttccccagagcctcccctagaccccagacccctgctgggggtcccctgccagggccgctgggctgcgctt

SEQ ID NO: 525621 - DNA, 120 bp, Artificial Sequence
  ENSG00000165802_36 (sequence is synthesized)
ttgcactcctgaatcttggtttacctgtttgtgagatggggacgccctcagcatctccgatcgcaaaggcggggctaacaacggccgcggcagtgctggccgggggcgcctgtagggccg

SEQ ID NO: 525622 - DNA, 120 bp, Artificial Sequence
  ENSG00000165802_37 (sequence is synthesized)
tgcccaccgccactcgcaagaggccctcaggggcagggggctgcggtgcccgcccccactccctcccaggcgcccggcggacttggctggagctgatgcctgcacgcgccttccaccggc

SEQ ID NO: 525623 - DNA, 120 bp, Artificial Sequence
  ENSG00000165802_38 (sequence is synthesized)
ctcgcaccagggtctcccttcccacatcaggccgctgcccagtggtgtccacaggcctgtcctgccgggctggcggcgacctctgtatggtcctcccacttgcttggaggaccctccggg

SEQ ID NO: 525624 - DNA, 120 bp, Artificial Sequence
  ENSG00000165802_39 (sequence is synthesized)
atggggctttcgggccctgtgggccttggggccatggccaggataggaggtgctgccgggcctgctgtcctggtgaccctcttgcttcccaggcagtgacctgcagagctcccactgcac

SEQ ID NO: 525625 - DNA, 120 bp, Artificial Sequence
  ENSG00000165802_40 (sequence is synthesized)
cctggcagccagaaggtagcctcatgggggctcccacagccccttggcttttggatgggcctggggcccctgagcagctctttgtctccgcagctcatttcctccaaggtgcccaaggct

SEQ ID NO: 525626 - DNA, 80 bp, Artificial Sequence
  ENSG00000165804_0 (sequence is synthesized)
gtctccaaaccgcccgcaccccgcccctggcggccgcctctcgcggctcccggggtccccagctccctgtccccggagcc

SEQ ID NO: 525627 - DNA, 120 bp, Artificial Sequence
  ENSG00000165804_1 (sequence is synthesized)
cggcccgccgcccgccgccgccgccgccgccgccgcccgctccgccgccgcccgcccggggctcctccacagcacctgttgccttcattagcagcttttcctcctcttccctgcacttcc

SEQ ID NO: 525628 - DNA, 120 bp, Artificial Sequence
  ENSG00000165804_2 (sequence is synthesized)
gccttcattagcagcttttcctcctcttccctgcacttcccagaaccaaagaatgtgaagggggtccatggagggctcacgtccccgcgccccgagcggccacttagcgccgtcgccgcc

SEQ ID NO: 525629 - DNA, 120 bp, Artificial Sequence
  ENSG00000165804_3 (sequence is synthesized)
ggctttcgacggcgagctggatctgcagcgatactccaacgggccagccgtgagcgcagggtcgctcgggatgggagcggtgagctggtctgagagtcgtgcaggcgaacggcgcttccc

SEQ ID NO: 525630 - DNA, 120 bp, Artificial Sequence
  ENSG00000165804_4 (sequence is synthesized)
ctgccctgtatgcgggaagcgcttccgcttcaactctatccttgctttgcacctgcgggcgcacccaggagcccaggccttccagtgccctcactgcggccaccgcgcggcgcagcgggc

SEQ ID NO: 525631 - DNA, 120 bp, Artificial Sequence
  ENSG00000165804_5 (sequence is synthesized)
tctgctgcgctcgcacctgcgcacacaccagcccgagcgcccacgtagtcctgctgcacgcctgttgctggagttggaagagcgcgcgctactacgcgaggcccgactggggagagcccg

SEQ ID NO: 525632 - DNA, 120 bp, Artificial Sequence
  ENSG00000165804_6 (sequence is synthesized)
aagctcagggggcatgcaggccacccctgccactgagggtctggcgcggccccaggctccttcatcgtccgccttccgttgcccctactgcaaaggcaagtttcgcacctcggcggagcg

SEQ ID NO: 525633 - DNA, 120 bp, Artificial Sequence
  ENSG00000165804_7 (sequence is synthesized)
cgaacgccacctgcacatcctgcataggccctggaagtgcggcctgtgcagtttcggctccagccaggaggaggagctgctgcaccacagcctgacggcccacggggctcccgagcgtcc

SEQ ID NO: 525634 - DNA, 120 bp, Artificial Sequence
  ENSG00000165804_8 (sequence is synthesized)
cctggcggccacctccgctgcgcctccgcctcagcctcagcctcagcctccaccccagcccgaacccagatcagtcccccagccggagccggagccggagcccgaacgtgaggcaacccc

SEQ ID NO: 525635 - DNA, 120 bp, Artificial Sequence
  ENSG00000165804_9 (sequence is synthesized)
gaccccagctcctgccgctcccgaggagcccccagcgcctccggagttccgctgccaagtgtgcggccagagctttacacagtcttggtttctcaagggccacatgcgtaagcacaaggc

SEQ ID NO: 525636 - DNA, 120 bp, Artificial Sequence
  ENSG00000165804_10 (sequence is synthesized)
ctccttcgatcatgcgtgtccggtgtgcggccgctgcttcaaggagccctggttccttaagaaccacatgaaggtgcacgccagcaagctgggcccactgcgtgccccggggcctgcctc

SEQ ID NO: 525637 - DNA, 120 bp, Artificial Sequence
  ENSG00000165804_11 (sequence is synthesized)
ttgggcccagcgctcctcttggccccggctcccaccccggccgagcgccgtgagcccccgagcctcttgggctacctgagcctgcgagctggcgagggccggcccaacggcgagggtgct

SEQ ID NO: 525638 - DNA, 120 bp, Artificial Sequence
  ENSG00000165804_12 (sequence is synthesized)
gagcccggtcccggccgcagcttcggaggcttccgcccgctgtcctctgctctcccggcccgggctcgccggcaccgtgcggaggagcctgaggaagaagaggaggtggtggaggccgag

SEQ ID NO: 525639 - DNA, 120 bp, Artificial Sequence
  ENSG00000165804_13 (sequence is synthesized)
gaggaaacctgggcccggggcaggtcgctgggctctctggcttccctgcacccgcgcccgggtgagggaccggggcactctgcctctgctgctggggcccaggcaagatcgaccgccacg

SEQ ID NO: 525640 - DNA, 120 bp, Artificial Sequence
  ENSG00000165804_14 (sequence is synthesized)
caggaagagaatgggctgttggttggagggacccggcctgaagggggccggggcgccaccggcaaggattgtcctttctgcggaaaatctttccgctcagcacatcacctcaaagtgcat

SEQ ID NO: 525641 - DNA, 120 bp, Artificial Sequence
  ENSG00000165804_15 (sequence is synthesized)
ctgcgagtgcacacaggcgagcggccctacaagtgtccgcactgcgactacgcgggcacccagtccggctcgctcaagtatcacctacagcgccaccaccgggagcagaggagcggggcc

SEQ ID NO: 525642 - DNA, 120 bp, Artificial Sequence
  ENSG00000165804_16 (sequence is synthesized)
ggccccgggccacccccggagccaccgcctccttcccagcggggttcggccccgcaatctggagccaagccgtctccgcagcctgcgacctgggtggagggcgcctcaagtccccggcct

SEQ ID NO: 525643 - DNA, 120 bp, Artificial Sequence
  ENSG00000165804_17 (sequence is synthesized)
ccttctagcggtgctgggccggggtcccgtcggaagcccgccagccctgggaggaccctgcgcaacgggcgaggcggtgaggccgaacccctggacctgtccttgcgggcagggccggga

SEQ ID NO: 525644 - DNA, 120 bp, Artificial Sequence
  ENSG00000165804_18 (sequence is synthesized)
ggcgaggccgggcctgggggtgccctccaccgctgcctcttctgcccgttcgccactggagccccagagctcatggccttgcaccttcaagtgcaccacagccgccgggctaggggccgc

SEQ ID NO: 525645 - DNA, 120 bp, Artificial Sequence
  ENSG00000165804_19 (sequence is synthesized)
cggccaccccaggctgacgcgtccccgccctatgcccgagtaccatcaggagagacccctcccagtccttcgcaggaaggggaggagggctccgggctgtccagacccggagaggcaggg

SEQ ID NO: 525646 - DNA, 120 bp, Artificial Sequence
  ENSG00000165804_20 (sequence is synthesized)
ctgggggggcaagaacggtagtgggccctcaggggcgattagcttagtgagcttaccccgccggagcgggggagcgctagaggtagttgggtagagaagccagcagggggcagcgtggga

SEQ ID NO: 525647 - DNA, 120 bp, Artificial Sequence
  ENSG00000165804_21 (sequence is synthesized)
cccatatcccagccccaggcggaccagaggtggaaggcgcggcgggcgtaggagggtgggctggcggtacccacccagcccaagggagtcacagtgccttagaagtggcagaggtgaggg

SEQ ID NO: 525648 - DNA, 120 bp, Artificial Sequence
  ENSG00000165804_22 (sequence is synthesized)
tcaaagaacggggtccctgggctggcagagaaggtttgtgtccctgttgaggagccactctgccagtctttgctggtccataggcgtgagagtttatttttgtacaaggggtgagggtgg

SEQ ID NO: 525649 - DNA, 120 bp, Artificial Sequence
  ENSG00000165804_23 (sequence is synthesized)
ggggcactgtacccttctagccccatcaggggccctgtagacgtcgctatttttggtacgattcctgtcatccctattgcagagtcgtgtccccaataaacaggtgtcttgaggcacagg

SEQ ID NO: 525650 - DNA, 120 bp, Artificial Sequence
  ENSG00000165804_24 (sequence is synthesized)
atcaagaacggaaaggaccgaagagtaactttaataatgtttcttatacggccgacattaactatctctataatcgcccctcctcctcccccaaaagagagacagaaattgtaagggaga

SEQ ID NO: 525651 - DNA, 120 bp, Artificial Sequence
  ENSG00000165804_25 (sequence is synthesized)
ccactcttccaaggtgtcacaaacagaaaagagctgcagcggacgccactgcaatgtcaaggcaaggcagccaggctgcgctctatcctcactggtgcctggccctggctaggccgggag

SEQ ID NO: 525652 - DNA, 120 bp, Artificial Sequence
  ENSG00000165804_26 (sequence is synthesized)
agtgtaatcctcctcttgtgtgagggagcctctcccctgcagagaggaggaaagcctgcctcggaacagccctggacaaaggggctcagatgccccatcatactgcaggctccaaggttt

SEQ ID NO: 525653 - DNA, 120 bp, Artificial Sequence
  ENSG00000165804_27 (sequence is synthesized)
ttcattagcagcttttcctcctcttccctgcacttcccagaaccaaagaatgtgaagggggtccatggaggtgagtgaagctctggcttcaacctacaagtacctacaactgtatactcc

SEQ ID NO: 525654 - DNA, 120 bp, Artificial Sequence
  ENSG00000165804_28 (sequence is synthesized)
ctacctctctctctctttgacctcccattattagaagttaactccttggccctgacatctcgattcccatacacctccccccaccccatcttcccgaggtgagtagcaccctgtgttcct

SEQ ID NO: 525655 - DNA, 120 bp, Artificial Sequence
  ENSG00000165804_29 (sequence is synthesized)
agttcaggccccagcccaccttccctcgtgttgtccttctggccctcgaggcgacgcccttgcttcctttacagctctaccttcaccctttgctctacgcagatctttctccacagggct

SEQ ID NO: 525656 - DNA, 120 bp, Artificial Sequence
  ENSG00000165804_30 (sequence is synthesized)
gtgcatgttggggcagaaagagcggcagagccaactccttccctggtcttccagaactttcaaaatcaaaatcggggttgcgttaggacatgcctctgggataagattccccatggtggg

SEQ ID NO: 525657 - DNA, 120 bp, Artificial Sequence
  ENSG00000165804_31 (sequence is synthesized)
tttgagtatagcagccccttcgtgcctcaagaagcaagtagggagaatggattggttttgggaatacagaatgctgagagtctgggggtagggagtgactttactgctgaaaactagggc

SEQ ID NO: 525658 - DNA, 120 bp, Artificial Sequence
  ENSG00000165804_32 (sequence is synthesized)
tgcagggtccgggatttggagtggatgggattatgaaaggtggacagaaaagaaaagtgcgatgaggcaaatgtgaagctgtatggggaggtgacaggaagagaggatatggatgcaagg

SEQ ID NO: 525659 - DNA, 120 bp, Artificial Sequence
  ENSG00000165804_33 (sequence is synthesized)
gagaaagcagcttttcagggtggtgaggtgaggatatattctcgtccaggtgtatcttcccctaacagggaaggaacgaaaaaagggcctgctttgagtgaaaactgaaggcactcccgg

SEQ ID NO: 525660 - DNA, 120 bp, Artificial Sequence
  ENSG00000165804_34 (sequence is synthesized)
atgcaggaatgtctggagagcattctctcagggtggaaggagagcagcacgtgtctgttcccgctgtcccaccctctcatttgctcctgtgctggccaccgtgggaccattctccaaacc

SEQ ID NO: 525661 - DNA, 120 bp, Artificial Sequence
  ENSG00000165804_35 (sequence is synthesized)
acaccggcgtgctcgcaagaggcgggaaagcgttagggagagacgcgggtcgcagggtccctccctctgcctgccctatctacccgcctgcccagcgagcctgtccatcttcagcgccca

SEQ ID NO: 525662 - DNA, 120 bp, Artificial Sequence
  ENSG00000165804_36 (sequence is synthesized)
ggccctaggggaggggacgagaaaggccccgcgcttctgactcatcatctccaacccctttctcgcgcgcgctccaagtctcaggacttcggacctgggccctcctgcgagggggtgcgg

SEQ ID NO: 525663 - DNA, 120 bp, Artificial Sequence
  ENSG00000165804_37 (sequence is synthesized)
cgacagcatctgggaagccccagctctgccaagcgtcagctccgagccctcgccagtctctgaagctgccagcgcagggctggggacccagatccagctctctattgcagtggctggggg

SEQ ID NO: 525664 - DNA, 120 bp, Artificial Sequence
  ENSG00000165804_38 (sequence is synthesized)
agcggcacgccagtgcaggaccgcccgcccggctcctccccgaacgcggggccagtggtcgcgtccgagaaagcgccaggctaggccccgacttccccgcctcgcgtcactcagcacatc

SEQ ID NO: 525665 - DNA, 120 bp, Artificial Sequence
  ENSG00000165804_39 (sequence is synthesized)
caacagcgcccctaccgcggagagaaggctctttatttcctagccggtcacgggctagcggggcatcctgggacttgtagtctccgctacagtagaaaggagatggatcgaaaggggaac

SEQ ID NO: 525666 - DNA, 120 bp, Artificial Sequence
  ENSG00000165804_40 (sequence is synthesized)
gaaaaccagagacaggtgtgagcaaattgtagaggtgagaaaggagaaaccccagacagaaacaactgcttcctcctgcccaattttctatcctgtttcccatagtcctgccaatattta

SEQ ID NO: 525667 - DNA, 120 bp, Artificial Sequence
  ENSG00000165804_41 (sequence is synthesized)
cattctaggacctcttcttttctctcctgccccattattttcccttaagtgccactgaccaggataggcagtggaaaaattagttggcagctagctattcgtgctttcttccctgccccc

SEQ ID NO: 525668 - DNA, 120 bp, Artificial Sequence
  ENSG00000165804_42 (sequence is synthesized)
atacctcctgcagctcttgatagtgcagactctggctcctgcagcatcctggtttcctctggctcagcaagaatagggcgtgcactgagaccagcactccccctagggtgaaggcctcag

SEQ ID NO: 525669 - DNA, 120 bp, Artificial Sequence
  ENSG00000165804_43 (sequence is synthesized)
cactgagttccagcaccagcaagccagcatgctgcaggtagacagggctgagaatgcagggaccccgcacctgtttgcccctgcccttttcccttcccacctcctcttgcctccttatcc

SEQ ID NO: 525670 - DNA, 120 bp, Artificial Sequence
  ENSG00000165804_44 (sequence is synthesized)
tcccaccttctccttcattgaccagtacctgggaggaggcagttggggcaggccccaaggctgtcttcatcacctcgaccaccaccactatgaaacccaagatcaagttgaaggtgttga

SEQ ID NO: 525671 - DNA, 120 bp, Artificial Sequence
  ENSG00000165804_45 (sequence is synthesized)
atatcatcatggcccgcacctgccagtgagccagctcagccctgcccagcctaggggagtcattccaacctcaatccccacttgcagcctagctgaagacaaaactcagcttctgcttct

SEQ ID NO: 525672 - DNA, 120 bp, Artificial Sequence
  ENSG00000165804_46 (sequence is synthesized)
cagcctccaaacagggccataagccctcttaacttttttgctttcctcctcagtgattgaggccagtcagtggtgacagctgagagaatgagtcaacacttagccacttacttcctaggc

SEQ ID NO: 525673 - DNA, 120 bp, Artificial Sequence
  ENSG00000165804_47 (sequence is synthesized)
tgagggttgtaggtgtctgttttagggagtgggaggacagtgctgcgttttcttccctctcaccttccaaaggcggggtgctctgcgaagctccagagtgacagtcccagtgaggagacc

SEQ ID NO: 525674 - DNA, 120 bp, Artificial Sequence
  ENSG00000165804_48 (sequence is synthesized)
ctgaatggtgagaagggcaagtgttgagctctggtcccgttaggaaggggccctgggaccttccaccctcccttgtggtgggtcttactgaggctccaggcccaagaggcagcgctgtgg

SEQ ID NO: 525675 - DNA, 120 bp, Artificial Sequence
  ENSG00000165804_49 (sequence is synthesized)
ccatgtgacaatcagagttcaggcaggcgactgagacagcaaggggcaccacaaccactgccagccatagctggctcacctgggggtaagggtagggtaattggggaggaactgtcaggg

SEQ ID NO: 525676 - DNA, 120 bp, Artificial Sequence
  ENSG00000165804_50 (sequence is synthesized)
attccctcccttctcgtaactcctacctctttagagatcaggaaatgggattgaatgcagggtggaggaaagcagtcaacccagagcaaggacgtgatcattaaaaattaagtatcattt

SEQ ID NO: 525677 - DNA, 120 bp, Artificial Sequence
  ENSG00000165805_0 (sequence is synthesized)
agaagtttgagtttgtgtgcttactagcaaccactttcagcgtttctgcaaagctagagaagggttcccagtgccgattccgacactgtgaagaggcccttggcagtgacactgtgtgct

SEQ ID NO: 525678 - DNA, 120 bp, Artificial Sequence
  ENSG00000165805_1 (sequence is synthesized)
cattatggagagagaggaaatgtttagatccactttgcagatttagacacatggaaatgcagcaaaactgcagcatttcatgcttctgggaaactcagcctcttggttgtgtgaagatca

SEQ ID NO: 525679 - DNA, 120 bp, Artificial Sequence
  ENSG00000165805_2 (sequence is synthesized)
gctgtatcttttatcacagcaaacctcgaaatatcaatggattatttttgccaccaagtagcaatatcacactacagaaagaaattcaggaaggaattccactccagtcccagagtcaag

SEQ ID NO: 525680 - DNA, 120 bp, Artificial Sequence
  ENSG00000165805_3 (sequence is synthesized)
aacctctgaaacctcaggaaaatatatcacgacccatccaccatcctttagttttaaaaactaattttgaggaagaagaggaagtagatgaacaaaatgatgcttctagtttatggacaa

SEQ ID NO: 525681 - DNA, 120 bp, Artificial Sequence
  ENSG00000165805_4 (sequence is synthesized)
agacccctgaagaaattgaagaaaaaagagcaataaaggagatgtgttataaatctggggaatactacagatttcatactcctccagatattttgtcatcaaaaagcatgacacctacag

SEQ ID NO: 525682 - DNA, 120 bp, Artificial Sequence
  ENSG00000165805_5 (sequence is synthesized)
cagaaaaacagttagaaaagcctttggaaaatggcagtgaattgcaagaaggagatagtcttacagttccgacaaaacttagccaatatgaaaggcaaggtgaaataaaaacatcattgc

SEQ ID NO: 525683 - DNA, 120 bp, Artificial Sequence
  ENSG00000165805_6 (sequence is synthesized)
atgggaaaccaaagactgacattgctgcttttgaaaatggaggaggtgactgttatgttccacagagggtcatatttcttggagtcgatgaaagtgaagctttaactgaagagaaagaaa

SEQ ID NO: 525684 - DNA, 120 bp, Artificial Sequence
  ENSG00000165805_7 (sequence is synthesized)
taacaaggacagtcctcatccaaagcattccctaactacccgactagtacctacaacgcatgtattaaatgctactgagaatatcagtatgaagtgcagagaggacccctcttcaatgaa

SEQ ID NO: 525685 - DNA, 120 bp, Artificial Sequence
  ENSG00000165805_8 (sequence is synthesized)
tgatgtccagccagtgaagaagcctcattttaaaggtgtgaagaaaagaaaatggatttatgatgaaccacagaactttcctaactctggaatgcagagagcagtacaggccccaagacc

SEQ ID NO: 525686 - DNA, 120 bp, Artificial Sequence
  ENSG00000165805_9 (sequence is synthesized)
ccaaaataaaatgagttatcaccgcaataataaaaatcgaaatgcggagaatgcatcctatatccacgttcaaagagatgctgtcaggactgtcgcgttgaatgcaccttcccgcagcag

SEQ ID NO: 525687 - DNA, 120 bp, Artificial Sequence
  ENSG00000165805_10 (sequence is synthesized)
gcccacgcatgggtcctacaataaagtccatgctaacagggaacccaaacccaacctcagtccagacaaatatacgtcaacatcatataatgattcagcctggcgaaaacgaattccttt

SEQ ID NO: 525688 - DNA, 120 bp, Artificial Sequence
  ENSG00000165805_11 (sequence is synthesized)
ttcaaaaacatattcaaaaagtgaaaagatatatccagagccaagaagaaatgggagcaagtaaacctggaggttgagagagagaaaaatgagaaaaaattgccagacatcatctgattt

SEQ ID NO: 525689 - DNA, 120 bp, Artificial Sequence
  ENSG00000165805_12 (sequence is synthesized)
acaatcaaaaatgaaaattcaaagaatgagatactcaagtactccatgttatgtagtggatagccaaagatgataaaaatgcaaattctgaaaataagatgcaggaagtacattgtgctc

SEQ ID NO: 525690 - DNA, 120 bp, Artificial Sequence
  ENSG00000165805_13 (sequence is synthesized)
tttcaaaactgataaaaatgcaaattaccaacagctgccagtgtatttatgtaggtctggaattcattccgtgcattactccaaacattttaataaaatttaaaagtttgacaattaaaa

SEQ ID NO: 525691 - DNA, 120 bp, Artificial Sequence
  ENSG00000165805_14 (sequence is synthesized)
tgcaaagctagtcatctctcaggaagcactttctatttccaaaactttggtttcatcagtacctggagcaaagcttctggcagaaacacaaatcctcatcaggggagaggcacaggatca

SEQ ID NO: 525692 - DNA, 120 bp, Artificial Sequence
  ENSG00000165805_15 (sequence is synthesized)
actcacggttataaactggactcctgctctgacgggtagcagccatcaactttgcccgattctcataattctgaagggtcaccaaggagttgctaccagccactgtacttaaagtggtgt

SEQ ID NO: 525693 - DNA, 120 bp, Artificial Sequence
  ENSG00000165805_16 (sequence is synthesized)
cacaggattacaaaatagaagaaagtctttcttctctgactaatatgttagtgctctagtaagcatcaaagatgaaagacacacaatgtgagcctgctttggccaacacaaagtacttac

SEQ ID NO: 525694 - DNA, 120 bp, Artificial Sequence
  ENSG00000165805_17 (sequence is synthesized)
ttacagaattttcaggcctacttccagccctggagacaaatttcccatcattcttcattacaggagtaatcatcctcatagggctgtaatagcttttttttttttttagatggagtctcg

SEQ ID NO: 525695 - DNA, 120 bp, Artificial Sequence
  ENSG00000165805_18 (sequence is synthesized)
acagctttttttttttttaagaccagaatgaaattcacaacagtaaagaatagaactgaagagaataaggaaaagaaaaaaggggctgagggagaaggaaaagaaaagagagtttaaaaa

SEQ ID NO: 525696 - DNA, 120 bp, Artificial Sequence
  ENSG00000165805_19 (sequence is synthesized)
agtttattgacttgaaaacccctgcctactaacccgtgctatgagagtatatggatctactttaacaagggggagagagtgaagatggaagtaggagagagataaaagataaagaacaac

SEQ ID NO: 525697 - DNA, 120 bp, Artificial Sequence
  ENSG00000165805_20 (sequence is synthesized)
catggaacatgtgtcaaaagagggaagaatgttatccacctctcttcccacacaacaggggcttgtagtttttaccaaatggttcccagtgccgattccgacactgtgaagaggcccttg

SEQ ID NO: 525698 - DNA, 120 bp, Artificial Sequence
  ENSG00000165805_21 (sequence is synthesized)
actttcagcgtttctgcaaagctagagaaggtatcttctaatttaaatgtctttaagaattatctattgcgtaatatactgtcaacaggaggtcagttttaaaggaatactactgatagc

SEQ ID NO: 525699 - DNA, 120 bp, Artificial Sequence
  ENSG00000165805_22 (sequence is synthesized)
ctgaaagactgtggaaaagaaattatttttcccccttacacactgatagttcttgtatttgcattcctgaaattcatatatatttttcaaaaaaaaaaaaccattggattagcagcaaga

SEQ ID NO: 525700 - DNA, 120 bp, Artificial Sequence
  ENSG00000165805_23 (sequence is synthesized)
ggtttactcttgtctgtggtttgcattcccatggaatttcttgacagcttggctaaacttcactactacttactcccctcttctttaccctggccatcaccaccatagaaactagtgaga

SEQ ID NO: 525701 - DNA, 120 bp, Artificial Sequence
  ENSG00000165805_24 (sequence is synthesized)
ggatttcttccatgtgcagtcctgcacatgatttaaaggatatggaagaaaactcatgttgtgtgcagatgacttcagattgcacctccctagagtttttttctcagagcactgcacttt

SEQ ID NO: 525702 - DNA, 120 bp, Artificial Sequence
  ENSG00000165805_25 (sequence is synthesized)
gttcctccaggacagcttcatgtcactcaggaggactgtttttgaatggctgacattttcttgttccactaactgcattgttcaattttcactgtcaggctagtgccttgacttttctgt

SEQ ID NO: 525703 - DNA, 120 bp, Artificial Sequence
  ENSG00000165805_26 (sequence is synthesized)
aggccttcatgattattttctgaaagggttggtttggggattaactgccatatttttgacaacctctcatctctctcaccatggatagattgcttctaaatcatttcatcatgtaatagg

SEQ ID NO: 525704 - DNA, 120 bp, Artificial Sequence
  ENSG00000165805_27 (sequence is synthesized)
accgaatctctttatctctttttcttcctatgtctcagatggattttgttcttttgaagttgggtttcagttctctaaacttaacaaaatgctgctcaattctatatgatttcatgtttg

SEQ ID NO: 525705 - DNA, 120 bp, Artificial Sequence
  ENSG00000165805_28 (sequence is synthesized)
tttctaagttcacggtttagttagtggagttctgaatattttgaacttatggaaacataagactatatctttctaagtttcttttataatttaataaattttttaaaattatgagtacac

SEQ ID NO: 525706 - DNA, 80 bp, Artificial Sequence
  ENSG00000165805_29 (sequence is synthesized)
ttatttttctttttgctttaaaatagaatgatatatggatgtgtatttgtaaataaggatattcttaggtgaaacgtgct

SEQ ID NO: 525707 - DNA, 120 bp, Artificial Sequence
  ENSG00000165805_30 (sequence is synthesized)
ttaggtgaaacgtgcttttaattttatttattactattatcttatttactgatattgttattgttattatcattttactgcaactggatgtctgtgaagaatacaatgagtactagaaga

SEQ ID NO: 525708 - DNA, 120 bp, Artificial Sequence
  ENSG00000165805_31 (sequence is synthesized)
gctgccaatgtctaggtttgtgtgaaggtgccagaattcatactctatattgcttttgcaccattagtgcaaatgtcaacacaagagaaatgcaaattattggtattacggatcatgctt

SEQ ID NO: 525709 - DNA, 120 bp, Artificial Sequence
  ENSG00000165805_32 (sequence is synthesized)
tgagaacacagctgcatagtaatatttgaaaacacaaatataacattgttagacagtagcagaaatgtagatatgtcagagaaaaataagtatttaaggaccaggtgaggatataaatgc

SEQ ID NO: 525710 - DNA, 120 bp, Artificial Sequence
  ENSG00000165805_33 (sequence is synthesized)
ttcggctatctggggcagtgaggtcggtattgcatcacaccaattactgcgaacatggaagtcacttcatggaaggacatgggacttgggctgtacctcatagtttcacagtttttaaat

SEQ ID NO: 525711 - DNA, 120 bp, Artificial Sequence
  ENSG00000165805_34 (sequence is synthesized)
aaaagctctaataaacattagcagaatttatgcaaaactatgatgaagtgatgcagtcaaaatttttattacatttagatatcataccctcctgtagcttacccttatttgaagcattga

SEQ ID NO: 525712 - DNA, 65 bp, Artificial Sequence
  ENSG00000165805_35 (sequence is synthesized)
atcataccctcctgtagcttacccttatttgaagcattgaacagccaattaagaatctgtcacca

SEQ ID NO: 525713 - DNA, 120 bp, Artificial Sequence
  ENSG00000165806_0 (sequence is synthesized)
cccgcgcgcgggctcaactttgtagagcgaggggccaacttggcagagcgcgcggccagctttgcagagagcgccctccagggactatgcgtgcggggacacgggtcgctttgggctctt

SEQ ID NO: 525714 - DNA, 120 bp, Artificial Sequence
  ENSG00000165806_1 (sequence is synthesized)
ccacccctgcggagcgcactaccccgagccaggggcggtgcaagccccgcccggccctacccagggcggctcctccctccgcagcgccgagacttttagtttcgctttcgctaaaggggc

SEQ ID NO: 525715 - DNA, 120 bp, Artificial Sequence
  ENSG00000165806_2 (sequence is synthesized)
cccagacccttgctgcggagcgacggagagagactgtgccagtcccagccgccctaccgccgtgggaacggcaggaagtggcacttggaaaagaacaccagctgcggtggtagcagtggg

SEQ ID NO: 525716 - DNA, 120 bp, Artificial Sequence
  ENSG00000165806_3 (sequence is synthesized)
atttgtgcttcttatgttacccagatggcagatgatcagggctgtattgaagagcagggggttgaggattcagcaaatgaagattcagtggatgctaagccagaccggtcctcgtttgta

SEQ ID NO: 525717 - DNA, 120 bp, Artificial Sequence
  ENSG00000165806_4 (sequence is synthesized)
ccgtccctcttcagtaagaagaagaaaaatgtcaccatgcgatccatcaagaccacccgggaccgagtgcctacatatcagtacaacatgaattttgaaaagctgggcaaatgcatcata

SEQ ID NO: 525718 - DNA, 120 bp, Artificial Sequence
  ENSG00000165806_5 (sequence is synthesized)
ataaacaacaagaactttgataaagtgacaggtatgggcgttcgaaacggaacagacaaagatgccgaggcgctcttcaagtgcttccgaagcctgggttttgacgtgattgtctataat

SEQ ID NO: 525719 - DNA, 120 bp, Artificial Sequence
  ENSG00000165806_6 (sequence is synthesized)
gactgctcttgtgccaagatgcaagatctgcttaaaaaagcttctgaagaggaccatacaaatgccgcctgcttcgcctgcatcctcttaagccatggagaagaaaatgtaatttatggg

SEQ ID NO: 525720 - DNA, 120 bp, Artificial Sequence
  ENSG00000165806_7 (sequence is synthesized)
aaagatggtgtcacaccaataaaggatttgacagcccactttaggggggatagatgcaaaacccttttagagaaacccaaactcttcttcattcaggcttgccgagggaccgagcttgat

SEQ ID NO: 525721 - DNA, 120 bp, Artificial Sequence
  ENSG00000165806_8 (sequence is synthesized)
gatggcatccaggccgactcggggcccatcaatgacacagatgctaatcctcgatacaagatcccagtggaagctgacttcctcttcgcctattccacggttccaggctattactcgtgg

SEQ ID NO: 525722 - DNA, 120 bp, Artificial Sequence
  ENSG00000165806_9 (sequence is synthesized)
aggagcccaggaagaggctcctggtttgtgcaagccctctgctccatcctggaggagcacggaaaagacctggaaatcatgcagatcctcaccagggtgaatgacagagttgccaggcac

SEQ ID NO: 525723 - DNA, 120 bp, Artificial Sequence
  ENSG00000165806_10 (sequence is synthesized)
tttgagtctcagtctgatgacccacacttccatgagaagaagcagatcccctgtgtggtctccatgctcaccaaggaactctacttcagtcaatagccatatcaggggtacattctagct

SEQ ID NO: 525724 - DNA, 120 bp, Artificial Sequence
  ENSG00000165806_11 (sequence is synthesized)
attaatgaatcacatttttttatgctcttgaaatattcagaaattctccaggattttaatttcaggaaaatgtattgattcaacagggaagaaactttctggtgctgtcttttgttctct

SEQ ID NO: 525725 - DNA, 120 bp, Artificial Sequence
  ENSG00000165806_12 (sequence is synthesized)
gaattttcagagactttttttataatgttattcatttggtgactgtgtaactttctcttaagattaattttctctttgtatgtctgttaccttgttaatagacttaatacatgcaacaga

SEQ ID NO: 525726 - DNA, 120 bp, Artificial Sequence
  ENSG00000165806_13 (sequence is synthesized)
agtgacttctggagaaagctcatggctgtgtccactgcaattggtggtaacagtggtagagtcatgtttgcacttggcaaaaagaatcccaatgtttgacaaaacacagccaaggggata

SEQ ID NO: 525727 - DNA, 120 bp, Artificial Sequence
  ENSG00000165806_14 (sequence is synthesized)
tttactgctctttattgcagaatgtgggtattgagtgtgatttgaatgatttttcattggcttagggcagattttcatgcaaaagttctcatatgagttagaggagaaaaagcttaatga

SEQ ID NO: 525728 - DNA, 120 bp, Artificial Sequence
  ENSG00000165806_15 (sequence is synthesized)
ttctgatatgtatccatcaggatccagtctggaaaacagaaaccattctaggtgtttcaacagagggagtttaatacaggaaattgacttacatagatgataaaagagaagccaaacagc

SEQ ID NO: 525729 - DNA, 120 bp, Artificial Sequence
  ENSG00000165806_16 (sequence is synthesized)
aagaagctgttaccacacccagggctatgaggataatgggaagaggtttggtttcctgtgtccagtagtgggatcatccagaggagctggaaccatggtgggggctgcctagtgggagtt

SEQ ID NO: 525730 - DNA, 120 bp, Artificial Sequence
  ENSG00000165806_17 (sequence is synthesized)
aggaccaccaatggattgtggaaaatggagccatgacaagaacaaagccactgactgagatggagtgagctgagacagataagagaataccttggtctcacctatcctgccctcacatct

SEQ ID NO: 525731 - DNA, 120 bp, Artificial Sequence
  ENSG00000165806_18 (sequence is synthesized)
tccaccagcaccttactgcccaggcctatctggaagccacctcaccaaggaccttggaagagcaagggacagtgaggcaggagaagaacaagaaatggatgtaagcctggcccataatgt

SEQ ID NO: 525732 - DNA, 120 bp, Artificial Sequence
  ENSG00000165806_19 (sequence is synthesized)
gaacataagtaatcactaatgctcaacaatttatccattcaatcatttattcattgggttgtcagatagtctatgtatgtgtaaaacaatctgttttggctttatgtgcaaaatctgtta

SEQ ID NO: 525733 - DNA, 120 bp, Artificial Sequence
  ENSG00000165806_20 (sequence is synthesized)
tagctttaaaatatatctggaactttttagattattccaagccttattttgagtaaatatttgttacttttagttctataagtgaggaagagtttatggcaaagatttttggcactttgt

SEQ ID NO: 525734 - DNA, 120 bp, Artificial Sequence
  ENSG00000165806_21 (sequence is synthesized)
tttcaagatggtgttatcttttgaattcttgataaatgactgtttttttctgcctaatagtaactggttaaaaaacaaatgttcatatttattgattaaaaatgtggttgcttaattcct

SEQ ID NO: 525735 - DNA, 120 bp, Artificial Sequence
  ENSG00000165806_22 (sequence is synthesized)
gactgtgccagtcccagccgccctaccgccgtgggaacgatgctgtaatggactgtgttggttggcctccaggcaggaagtggcacttggaaaagaacaccagctgcggtggtagcagtg

SEQ ID NO: 525736 - DNA, 120 bp, Artificial Sequence
  ENSG00000165806_23 (sequence is synthesized)
aacaaatatttcccgaaagatccaggagcagcatctccaccagcaagctgggctgctgggtgggtacttccttcaaagctgagggagcgtcctacgcccacgcgcgcaggagggcgcccc

SEQ ID NO: 525737 - DNA, 120 bp, Artificial Sequence
  ENSG00000165806_24 (sequence is synthesized)
caccggatcaggtcacacgggcgggtggacgcagagctccgactagccgcaagtccagcgctcttttgtgctgcttctttgtggaaggaaatgtgaagaaaacccagcgtcaccctgtaa

SEQ ID NO: 525738 - DNA, 120 bp, Artificial Sequence
  ENSG00000165806_25 (sequence is synthesized)
accagacaaaatacaaaacagtggagaagcccagagaaggcaaaacagattccggatatttctcttttaaaagtaaaatggcatcatggaagaaatttggccttccgaaagtggaggata

SEQ ID NO: 525739 - DNA, 120 bp, Artificial Sequence
  ENSG00000165806_26 (sequence is synthesized)
gttcaaggggaagaacagcaatacagcatctgcggcttagacatacagagctcgtctgtaatttggagtaagataggagtgggggcggagagggggaaggccatgccctttcagagattc

SEQ ID NO: 525740 - DNA, 120 bp, Artificial Sequence
  ENSG00000165806_27 (sequence is synthesized)
agttcactgctgattcagtcacaggccttcagggccaggcagcctgtgccagtcttctatcccctgctgagctccgagcatgttgagtttttattattacagagaagaaggaaactcact

SEQ ID NO: 525741 - DNA, 120 bp, Artificial Sequence
  ENSG00000165807_0 (sequence is synthesized)
atcctcggcgacgccgtatggcttccagggcgaggccatgtaccgggtgcccgagttttatgcgaggaggaagcggttaggtgggcagaccccttacttgatggatcagttgggattacg

SEQ ID NO: 525742 - DNA, 120 bp, Artificial Sequence
  ENSG00000165807_1 (sequence is synthesized)
attagggatgtggtactggaaagatgaaaccagaactcttgaattcagaaggtttgccgcagaagattctgtccagtggctcctgaaacatcaccctcattttacacctgcagcagaagt

SEQ ID NO: 525743 - DNA, 120 bp, Artificial Sequence
  ENSG00000165807_2 (sequence is synthesized)
caaggaaaaaggaaagaaaggcaaagcagttcactttgcagaaactgatggtccagcttcagacaggttgacagataaaagacttgctgcaaaagatgataagtcagctaaagctgtaga

SEQ ID NO: 525744 - DNA, 120 bp, Artificial Sequence
  ENSG00000165807_3 (sequence is synthesized)
gaaacgaggtcaacagggcaccattacactggatgatgttaaatttgttactttgcttttgctacaagatactgagatgcagcggatctgttcttttacaacatttatgaggaataagaa

SEQ ID NO: 525745 - DNA, 120 bp, Artificial Sequence
  ENSG00000165807_4 (sequence is synthesized)
tcttgataatttcctcatggcattattgtactacttatcccattacttggaaaaaaactcactggaaaagaaacccaaaagctatatggtaggccttgtagagaaaaaagaaatggaatt

SEQ ID NO: 525746 - DNA, 120 bp, Artificial Sequence
  ENSG00000165807_5 (sequence is synthesized)
ggtacttggcgcagaagtactgtatccttgtgctgggcttggccgtgccggataagcatcacatgtgctgtggaaaggagaaaatatcagatacacagaaagactggaagttctttgagt

SEQ ID NO: 525747 - DNA, 120 bp, Artificial Sequence
  ENSG00000165807_6 (sequence is synthesized)
ccttttatactttctgtacatatgtggcttggattgtcttccgacgtcaacacttgacagagattgaagaagaagtagggagactctttcgtaccaatatgttcaacattcctcgcagga

SEQ ID NO: 525748 - DNA, 120 bp, Artificial Sequence
  ENSG00000165807_7 (sequence is synthesized)
ggcgtgaagatgaggaatcaggaggggaaaagaaacgcatgacttttgttcagttcaggagaatgatggcaaaacgcccagcaattaaaaaagctatcaacatgcgttctccagtcatgt

SEQ ID NO: 525749 - DNA, 120 bp, Artificial Sequence
  ENSG00000165807_8 (sequence is synthesized)
ctactctgctgccatctctcagagaaaaagctcaaaacgtctttgagaaaaagtatcatcaagtagacgtcagattcccagccgagatgcaaaagcatgtgggaactctggactctgtgc

SEQ ID NO: 525750 - DNA, 120 bp, Artificial Sequence
  ENSG00000165807_9 (sequence is synthesized)
ccatgccggtagttggcatcttgggggagcctcgatgtctattcaacccacatacgcttcacccccttgatccagaagaaaacacaaaatcatttgggagatatccttccttgatggaaa

SEQ ID NO: 525751 - DNA, 120 bp, Artificial Sequence
  ENSG00000165807_10 (sequence is synthesized)
acaataacatgaggattcaggatacactggacttggtcatgaaaacactgtcctctcatacatcatgccctaagtaacctggtacattccatatctcaagtaaactactttgactttata

SEQ ID NO: 525752 - DNA, 71 bp, Artificial Sequence
  ENSG00000165807_11 (sequence is synthesized)
ttttgtacttttagtagagctaatttttgtacttttagtacttttagtactttaacagcacgcacctcggc

SEQ ID NO: 525753 - DNA, 120 bp, Artificial Sequence
  ENSG00000165807_12 (sequence is synthesized)
ctcccaaagtgctaattacaggcgtaagccactgcatcttgccaagtatagtattcttaacattgaatttgtgttgcaaggactcctgggaagagagaagactcaggtttgtccatgccc

SEQ ID NO: 525754 - DNA, 120 bp, Artificial Sequence
  ENSG00000165807_13 (sequence is synthesized)
atcagaaggaggagcacactgccgttctcagtctattggttgttttggcatagatctttgtggattttgtttctgtttctttttgtacccaatagccataactattgtttgctaattctt

SEQ ID NO: 525755 - DNA, 120 bp, Artificial Sequence
  ENSG00000165807_14 (sequence is synthesized)
ttccttttctttattgcagacttaccctctagttctctgcttcctctttaccacctttccactctccttacctccccaacactcaaattaccagaagcctttggaagaatacatttcctc

SEQ ID NO: 525756 - DNA, 120 bp, Artificial Sequence
  ENSG00000165807_15 (sequence is synthesized)
actggtttgtttaccccaaatttatattgattaactttttaccattctaggagttttgatctgggtaacgtaggaggttgaataagaaagtattgagactctttatcaatgccttttgat

SEQ ID NO: 525757 - DNA, 120 bp, Artificial Sequence
  ENSG00000165807_16 (sequence is synthesized)
agcatttgtgtagctgaaaataatcttggggccaagataatgaccctaactttagagaaagataaggactagtaccctgaaagattgaacttccctctcaacctatagttgtgacttgtt

SEQ ID NO: 525758 - DNA, 120 bp, Artificial Sequence
  ENSG00000165807_17 (sequence is synthesized)
atattacagggagaaaatatcagatacacagaaagactggaagttctttgaggtgagtcacttatgttttggtgctttttgatatgaaacaatatataccaacaaccaatggccatttgt

SEQ ID NO: 525759 - DNA, 120 bp, Artificial Sequence
  ENSG00000165807_18 (sequence is synthesized)
cttatttttagtgaatatcctttctaaaagacggtgctaacaagctatatgctataccttaaattgttggtctgattttcctcatgcaaaagtgagtatgtgtataatttttcattgttt

SEQ ID NO: 525760 - DNA, 120 bp, Artificial Sequence
  ENSG00000165807_19 (sequence is synthesized)
caggaatattgggaaattgggtcatctgggtttgtgtctgcttagctgtgttatacagacaggtaagagttttccatttcacagctaaggatcgtgattcttgtctattttttgttgtag

SEQ ID NO: 525761 - DNA, 120 bp, Artificial Sequence
  ENSG00000165807_20 (sequence is synthesized)
gccatatttgcctagaaaaaaaaaaaactctggtgtatttgacagatggtcagaattgaattctggctccctgcgcagcagttgggattacgattagggatgtggtactggaaagatgaa

SEQ ID NO: 525762 - DNA, 120 bp, Artificial Sequence
  ENSG00000165807_21 (sequence is synthesized)
accagaactcttgaattcagaagatgaagaaacaaggctcagggagattaagcaactgaaccaaagtcatacagccagtttgccgcagaagattctgtccagtggctcctgaaacatcac

SEQ ID NO: 525763 - DNA, 120 bp, Artificial Sequence
  ENSG00000165807_22 (sequence is synthesized)
ataaaaccaaggaaaccctactctttcgtcatggcctgagagaagactctctgagaaccatcaaagaggtctaacttgtgtggaagccaagagtggtccagccctctgcatttacgtgat

SEQ ID NO: 525764 - DNA, 120 bp, Artificial Sequence
  ENSG00000165807_23 (sequence is synthesized)
ggattctagagagaaaatatgaatttctttcctgtttacttcaagttttacacctgcagcagaagtcaaggaaaaaggaaagaaaggcaaagcagttcactttgcagaaactgatggtcc

SEQ ID NO: 525765 - DNA, 120 bp, Artificial Sequence
  ENSG00000165807_24 (sequence is synthesized)
ccttgaggtggcatcccaggtggggctggaaggggcaggggcccaggcaccatgcctctgccagggaatcgagccatgatgacagcccccattttcttacttctgccctgctcccctcct

SEQ ID NO: 525766 - DNA, 120 bp, Artificial Sequence
  ENSG00000165807_25 (sequence is synthesized)
agtttcctttctagagaatcttgaggtacacccatctagaccagaaaaacaattgctagaaagtggtgctagactccaaatagttctagtttggaggagtgagtaactgatttttttttt

SEQ ID NO: 525767 - DNA, 120 bp, Artificial Sequence
  ENSG00000165810_0 (sequence is synthesized)
aattctgtcacacgtgccctggcctctggagctcagctgccagtccacgtctagggaatcttagcatctgggaccaagacactttacagcaatcatcaccctttgcagaggaggtgagct

SEQ ID NO: 525768 - DNA, 120 bp, Artificial Sequence
  ENSG00000165810_1 (sequence is synthesized)
caccaggactcatctgccatttcagaccttttgctgctacctgccaggtggcccccactgctgacgagagatggtggacctctcagtctccccagactccttgaagccagtatcgctgac

SEQ ID NO: 525769 - DNA, 120 bp, Artificial Sequence
  ENSG00000165810_2 (sequence is synthesized)
cagcagtcttgtcttcctcatgcacctcctcctccttcagcctggggagccgagctcagaggtcaaggtgctaggccctgagtatcccatcctggccctcgtcggggaggaggtggagtt

SEQ ID NO: 525770 - DNA, 120 bp, Artificial Sequence
  ENSG00000165810_3 (sequence is synthesized)
cccgtgccacctatggccacagctggatgcccagcaaatggagatccgctggttccggagtcagaccttcaatgtggtacacctgtaccaggagcagcaggagctccctggcaggcagat

SEQ ID NO: 525771 - DNA, 120 bp, Artificial Sequence
  ENSG00000165810_4 (sequence is synthesized)
gccggcgttccggaacaggaccaagttggtcaaggacgacatcgcctatggcagcgtggtcctgcagcttcacagcatcatcccctctgacaagggcacatatggctgccgcttccactc

SEQ ID NO: 525772 - DNA, 120 bp, Artificial Sequence
  ENSG00000165810_5 (sequence is synthesized)
cgacaacttctctggcgaagctctctgggaactggaggtagcagggctgggctcagaccctcacctctcccttgagggcttcaaggaaggaggcattcagctgaggctcagatccagtgg

SEQ ID NO: 525773 - DNA, 120 bp, Artificial Sequence
  ENSG00000165810_6 (sequence is synthesized)
ctggtaccccaagcctaaggttcagtggagagaccaccagggacagtgcctgcctccagagtttgaagccatcgtctgggatgcccaggacctgttcagtctggaaacatctgtggttgt

SEQ ID NO: 525774 - DNA, 120 bp, Artificial Sequence
  ENSG00000165810_7 (sequence is synthesized)
ccgagcgggagccctcagcaatgtgtccgtctccatccagaatctcctcttgagccagaagaaagagttggtggtccagatagcagacgtgttcgtacccggagcctctgcgtggaagag

SEQ ID NO: 525775 - DNA, 120 bp, Artificial Sequence
  ENSG00000165810_8 (sequence is synthesized)
cgcgttcgtcgcgaccctgccgctgctgttggtcctcgcggcgctggcgctgggcgtcctccggaagcagcggagaagccgagaaaagctgaggaagcaggcggagaagagacaagagaa

SEQ ID NO: 525776 - DNA, 120 bp, Artificial Sequence
  ENSG00000165810_9 (sequence is synthesized)
actcactgcagagctggaaaagcttcagacagagcttgactggagacgggctgaaggccaggctgagtggagagcagcccaaaaatatgcagtggatgtgacgctggacccggcctcggc

SEQ ID NO: 525777 - DNA, 120 bp, Artificial Sequence
  ENSG00000165810_10 (sequence is synthesized)
gcaccccagcctggaggtgtcggaggatggcaagagcgtgtcttcccgcggggcgccgccaggcccggcgcctggccacccgcagcggttctcggagcagacgtgcgcgctgagcctgga

SEQ ID NO: 525778 - DNA, 120 bp, Artificial Sequence
  ENSG00000165810_11 (sequence is synthesized)
cggagcagacgtgcgcgctgagcctggagcggttctccgccggccgccactactgggaggtgcacgtgggccgccgcagccgctggttcctgggcgcctgcctggccgcggtgccgcgcg

SEQ ID NO: 525779 - DNA, 120 bp, Artificial Sequence
  ENSG00000165810_12 (sequence is synthesized)
cggctactgggtgctggggctgtggaacggctgcgagtacttcgtcctggccccgcaccgcgtcgcgctcaccctgcgcgtgcccccgcggcgcctgggcgtcttcctggactacgaggc

SEQ ID NO: 525780 - DNA, 120 bp, Artificial Sequence
  ENSG00000165810_13 (sequence is synthesized)
cggagagctgtccttcttcaacgtgtccgacggctcccacatcttcaccttccacgacaccttctcgggcgcgctctgtgcgtacttcaggcccagggcccacgacggcggcgaacatcc

SEQ ID NO: 525781 - DNA, 120 bp, Artificial Sequence
  ENSG00000165810_14 (sequence is synthesized)
cccgccctggactggtggtgaggcgccctcgtggccgcgggactggccccggggggccccctggatcccaggccagcgctttgctctcctgctccgtctgaagggagcaggtgcaccagc

SEQ ID NO: 525782 - DNA, 120 bp, Artificial Sequence
  ENSG00000165810_15 (sequence is synthesized)
caaaatgtcagcgagggggacaaagagagggacctttgcctacgtagatgtgtatgtgtagtgcgattttcttcaaggaaaggagacaagtccaaagctcgtttgtggattgtgggactg

SEQ ID NO: 525783 - DNA, 120 bp, Artificial Sequence
  ENSG00000165810_16 (sequence is synthesized)
agcgaaggagtacaaatatatccacgtcgctcagagctggggtgctcacggtgggcggtgggcaagaagccagcatggaagaaagaagggagaaaactttggtgactgccttagagggat

SEQ ID NO: 525784 - DNA, 120 bp, Artificial Sequence
  ENSG00000165810_17 (sequence is synthesized)
cagttaatttgtatagttttatattttttgtatatgtttgctagctctaaaaaggtcgagatgcaataacacttcgtaagcaacgagttcacctaagtaaggctcagatcctagttttaa

SEQ ID NO: 525785 - DNA, 120 bp, Artificial Sequence
  ENSG00000165810_18 (sequence is synthesized)
aaaccatttcccattaaaatgaagttggaggaacagctgcttctggagccggggcaaaaatttcaaggtgagcctggagcattgtgtgtggtgaagtaaaataaaggctcaaaacgtgac

SEQ ID NO: 525786 - DNA, 120 bp, Artificial Sequence
  ENSG00000165810_19 (sequence is synthesized)
ggcaacccggcaaaagggtagggagccaggccgaaggggcctcactgaccaattgtgggacaatttgaacatcaggatgaataatgacaggagagattataacacactgaataaaaacat

SEQ ID NO: 525787 - DNA, 120 bp, Artificial Sequence
  ENSG00000165810_20 (sequence is synthesized)
aatccatgagttcatgctgatactcaaatttctttttaaaaaggagaaacaggaaggtttcttttggaggtgaaatctaattattggtgagagtcttggagaacaggctgtttccagtct

SEQ ID NO: 525788 - DNA, 120 bp, Artificial Sequence
  ENSG00000165810_21 (sequence is synthesized)
caaagcagtaaccttatacactacttataagtttgaaaggggaaaggttacctttacaatggagacatctaccagatcatccaagtgattaaatttaacatcatcaatgatgggaccaag

SEQ ID NO: 525789 - DNA, 120 bp, Artificial Sequence
  ENSG00000165810_22 (sequence is synthesized)
gacattattagtttgacaactggggaaagaagtgttcttcaccccctacccccaagacattgtctctgtcggccaggctggagtgcagcctcaacctcctgggtccaagtgatcctccca

SEQ ID NO: 525790 - DNA, 120 bp, Artificial Sequence
  ENSG00000165810_23 (sequence is synthesized)
cccacctcagcacacaacaccatgcccaattttaagtgcgttatagagacgggggtctcactttgttacccaggctggtctcaaactcctgcgctcaagcaatcctcccacctgggcctc

SEQ ID NO: 525791 - DNA, 120 bp, Artificial Sequence
  ENSG00000165810_24 (sequence is synthesized)
aatgctgggtgtacaggcatgagccgctgtgcctggcttcattttcagagtgagacatttgtactgtggctatgtaggagaacattcttgttcttagcaaacatactgaagtttttagat

SEQ ID NO: 525792 - DNA, 120 bp, Artificial Sequence
  ENSG00000165810_25 (sequence is synthesized)
attaattaccacagtgtctgccactgaatttccagtgactaagtggaaaaatataaaacatatgaatataaagaaagaaagagacaagtcaaatgtagtaaaatgacaacacttggtgac

SEQ ID NO: 525793 - DNA, 120 bp, Artificial Sequence
  ENSG00000165810_26 (sequence is synthesized)
tctaggtgactggtcgacagatgttcattgtactatcaatgtggctttgctgtgggtttgaaattttgcaaactaagagttgggtggcggggagaaggatacaccaaaaaactaagtgat

SEQ ID NO: 525794 - DNA, 120 bp, Artificial Sequence
  ENSG00000165810_27 (sequence is synthesized)
tatctttggatgggaaaatgtttggtaattgcattcttaaaatgtcttctttgtattttttaatgttcaataatgtatatgtatcagttctgtaataaaggggaaaacactttttttaaa

SEQ ID NO: 525795 - DNA, 120 bp, Artificial Sequence
  ENSG00000165810_28 (sequence is synthesized)
cagacagagcttgactggagacgggctgaaggccaggctgagtgcttcgttttagccagccaccctcctggagaaggtatccaggctgcctctaactccacaacaacactgaatgcatag

SEQ ID NO: 525796 - DNA, 120 bp, Artificial Sequence
  ENSG00000165810_29 (sequence is synthesized)
tctcaaacgtgttgccttacggcgctgtgtggagatttctctggggtttgcaacctctgaatgctgagaagattgagcatctctgtatatgctagttggctctggggacttcctctactg

SEQ ID NO: 525797 - DNA, 120 bp, Artificial Sequence
  ENSG00000165810_30 (sequence is synthesized)
tctggggacttcctctactgaaaattgccagctcacatcactgacccatttttcttatgggatggctgtcttttattattaacaggaatattatatatctgtgtgtgtgtgtgtgtgtgt

SEQ ID NO: 525798 - DNA, 120 bp, Artificial Sequence
  ENSG00000165810_31 (sequence is synthesized)
aatccctcatgggtaaacatcgtgaattccttcttctgttgtgccatctgccattagctttgtccatagttccccttattgaaaaggaattattaattttgataaaacataatccatcaa

SEQ ID NO: 525799 - DNA, 120 bp, Artificial Sequence
  ENSG00000165810_32 (sequence is synthesized)
tccccatcccctgcctggagcctcacttccagcccagcctgggcccgcagaccaccgcgggtgggagtgccgcatcggaggtgaggcctcagtgttcacccatctgttctgtctgcctca

SEQ ID NO: 525800 - DNA, 120 bp, Artificial Sequence
  ENSG00000165810_33 (sequence is synthesized)
ttccccaacctgagagtctttccccttttcttcatcttttttttttttttttctctagagaaactcactgcagagctggaaaagcttcagacagagcttggtaagtgacccctcttagaa

SEQ ID NO: 525801 - DNA, 63 bp, Artificial Sequence
  ENSG00000165810_34 (sequence is synthesized)
aaagcttcagacagagcttggtaagtgacccctcttagaactatttctcctcagggccgggtc

SEQ ID NO: 525802 - DNA, 120 bp, Artificial Sequence
  ENSG00000165810_35 (sequence is synthesized)
actctgtctcaaaaaaaaaaagaactatttctcctcattcatcattttgcatctgattccccatatatcttcttctcatctcccaaccaggtatgatgcccaggcaggacccctgctggc

SEQ ID NO: 525803 - DNA, 120 bp, Artificial Sequence
  ENSG00000165810_36 (sequence is synthesized)
tatgtgggtggtggggggtgcgggacagggtgggtgcaagatgtgatgtgtgagcagggaagcttggggtcctgatgtgctaatttcctgttttcccttggttgcttcagactggagacg

SEQ ID NO: 525804 - DNA, 120 bp, Artificial Sequence
  ENSG00000165810_37 (sequence is synthesized)
ctgcacgcacctgcccaagtgccaaaacccgccgtcatctaaaggctgtgggtcccgttacgagggtttattccagcgcgaggtgtcagggcggccaccggggaacggggatcggtgacc

SEQ ID NO: 525805 - DNA, 120 bp, Artificial Sequence
  ENSG00000165810_38 (sequence is synthesized)
ccggtggggaagggggaagatcgttcatatggacaaaagcggaggtgcggaacggctgcattttccacggaggctagtgcacagatgtcagggttgaccggctgctgtcgttacgccctc

SEQ ID NO: 525806 - DNA, 120 bp, Artificial Sequence
  ENSG00000165810_39 (sequence is synthesized)
ggagcttcacatcacactgtacagagggagcggtgaccagggtctctgctgccagcgccacctcgtccaggttttcatagcgcacagggagtcgggcggatgcgcaacatctccgcacag

SEQ ID NO: 525807 - DNA, 120 bp, Artificial Sequence
  ENSG00000165810_40 (sequence is synthesized)
ggtcaggaagcggcggtcaggcaccgagaaaacagcccagttacgtgaggcagtgtccggggcttaacgtttccgccgagctaatagatttgggaggctccgaccctgattttcacacta

SEQ ID NO: 525808 - DNA, 120 bp, Artificial Sequence
  ENSG00000165810_41 (sequence is synthesized)
gctcccgctccacgcccgtttcccaggcggctgcggtggcgcccggagaaggtcccgcgggaggtttcccggcacgcggcgggcaggccggtctcgcctctcggtgctcagcggcgcctg

SEQ ID NO: 525809 - DNA, 120 bp, Artificial Sequence
  ENSG00000165810_42 (sequence is synthesized)
ctgggctgtgtgcagatttccacctttgagctaagataggatgaggcataagagtcctgcagatgggcctctttttgagggcaatgaaggggcaaagaggaagctgtaaaaaaaaaaaaa

SEQ ID NO: 525810 - DNA, 120 bp, Artificial Sequence
  ENSG00000165813_0 (sequence is synthesized)
atctttgttgatgtgtcagctccgcaggggtttggggaaacggccgctgagtgaggcgtcggctgtgtttctcaccgcggtcttttcctcccactcttggctggttggaccccgctatgg

SEQ ID NO: 525811 - DNA, 120 bp, Artificial Sequence
  ENSG00000165813_1 (sequence is synthesized)
aaaagttggcccctgagccagagctccagcagccttgttagggcgtggcctgaggcttggataagtgggatgtaaaacgaagatcaggagcagatttgaagaattacaaagtgaattggt

SEQ ID NO: 525812 - DNA, 120 bp, Artificial Sequence
  ENSG00000165813_2 (sequence is synthesized)
gccagtcagcatgtcagagacagaccacatagcctctacttcctctgataaaaatgttgggaaaacacctgaattaaaggaagactcatgcaacttgttttctggcaatgaaagcagcaa

SEQ ID NO: 525813 - DNA, 120 bp, Artificial Sequence
  ENSG00000165813_3 (sequence is synthesized)
attagaaaatgagtccaaactattgtcattaaacactgataaaactttatgtcaacctaatgagcataataatcgaattgaagcccaggaaaattatattccagatcatggtggaggtga

SEQ ID NO: 525814 - DNA, 120 bp, Artificial Sequence
  ENSG00000165813_4 (sequence is synthesized)
ggattcttgtgccaaaacagacacaggctcagaaaattctgaacaaatagctaattttcctagtggaaattttgctaaacatatttcaaaaacaaatgaaacagaacagaaagtaacaca

SEQ ID NO: 525815 - DNA, 120 bp, Artificial Sequence
  ENSG00000165813_5 (sequence is synthesized)
aatattggtggaattaaggtcatctacatttccagaatcagctaatgaaaagacttattcagaaagcccctatgatacagactgcaccaagaaatttatttcaaaaataaagagcgtttc

SEQ ID NO: 525816 - DNA, 120 bp, Artificial Sequence
  ENSG00000165813_6 (sequence is synthesized)
agcatcagaggatttgttggaagaaatagaatctgagctcttatctacggagtttgcagaacatcgagtaccaaatggaatgaataagggagaacatgcattagttctgtttgaaaagtg

SEQ ID NO: 525817 - DNA, 120 bp, Artificial Sequence
  ENSG00000165813_7 (sequence is synthesized)
tgtgcaagataaatatttgcagcaggaacatatcataaaaaagttaattaaagaaaataagaagcatcaggagctcttcgtagacatttgttcagaaaaagacaatttaagagaagaact

SEQ ID NO: 525818 - DNA, 120 bp, Artificial Sequence
  ENSG00000165813_8 (sequence is synthesized)
aaagaaaagaacagaaactgagaagcagcatatgaacacaattaaacagttagaatcaagaatagaagaacttaataaagaagttaaagcttccagagatcaactaatagctcaagacgt

SEQ ID NO: 525819 - DNA, 120 bp, Artificial Sequence
  ENSG00000165813_9 (sequence is synthesized)
tacagctaaaaatgcagttcagcagttacacaaagagatggcccaacggatggaacaggccaacaagaaatgtgaagaggcacgccaagaaaaagaagcaatggtaatgaaatatgtaag

SEQ ID NO: 525820 - DNA, 120 bp, Artificial Sequence
  ENSG00000165813_10 (sequence is synthesized)
aggtgagaaggaatctttagatcttcgaaaggaaaaagagacacttgagaaaaaacttagagatgcaaataaggaacttgagaaaaacactaacaaaattaagcagctttctcaggagaa

SEQ ID NO: 525821 - DNA, 120 bp, Artificial Sequence
  ENSG00000165813_11 (sequence is synthesized)
aggacggttgcaccagctgtatgaaactaaggaaggcgaaacgactagactcatcagagaaatagacaaattaaaggaagacattaactctcacgtcatcaaagtaaagtgggcacaaaa

SEQ ID NO: 525822 - DNA, 120 bp, Artificial Sequence
  ENSG00000165813_12 (sequence is synthesized)
caaattaaaagctgaaatggattcacacaaggaaaccaaagataaactcaaagaaacaacaacaaaattaacacaagcaaaggaagaagcagatcagatacgaaaaaactgtcaggatat

SEQ ID NO: 525823 - DNA, 120 bp, Artificial Sequence
  ENSG00000165813_13 (sequence is synthesized)
gataaaaacatatcaggagtcagaagaaattaaatcaaatgagcttgatgcaaagcttagagtcacaaaaggagaacttgaaaaacaaatgcaagaaaaatctgaccagctagagatgca

SEQ ID NO: 525824 - DNA, 120 bp, Artificial Sequence
  ENSG00000165813_14 (sequence is synthesized)
tcatgccaaaataaaggaactagaagatctgaagagaacatttaaggagggtatggatgagttaagaacactgagaacaaaggtgaaatgtctagaagatgaacgattaagaacagaaga

SEQ ID NO: 525825 - DNA, 120 bp, Artificial Sequence
  ENSG00000165813_15 (sequence is synthesized)
tgaattatcaaaatataaggaaattattaatcgccaaaaagctgaaattcagaatttattggacaaggtgaaaactgcagatcagctacaggagcagcttcaaagaggtaagcaagaaat

SEQ ID NO: 525826 - DNA, 120 bp, Artificial Sequence
  ENSG00000165813_16 (sequence is synthesized)
tgaaaatttgaaagaagaagtggaaagtcttaattctttgattaatgacctacaaaaagacatcgaaggcagtaggaaaagagaatctgagctgctgctgtttacagaaaggctcactag

SEQ ID NO: 525827 - DNA, 120 bp, Artificial Sequence
  ENSG00000165813_17 (sequence is synthesized)
taagaatgcacagcttcagtctgaatccaattctttgcagtcacaatttgataaagtttcctgtagtgaaagtcagttacaaagccagtgtgaacaaatgaaacagacaaatattaattt

SEQ ID NO: 525828 - DNA, 120 bp, Artificial Sequence
  ENSG00000165813_18 (sequence is synthesized)
ggaaagtaggttgttgaaagaggaagaactgcgaaaagaggaagtccaaactctgcaagctgaactcgcttgtagacaaacagaagttaaagcattgagtacccaggtagaagaattaaa

SEQ ID NO: 525829 - DNA, 120 bp, Artificial Sequence
  ENSG00000165813_19 (sequence is synthesized)
agatgagttagtaactcagagacgtaaacatgcctctagtatcaaggatctcaccaaacaacttcagcaagcacgaagaaaattagatcaggttgagagtggaagctatgacaaagaagt

SEQ ID NO: 525830 - DNA, 120 bp, Artificial Sequence
  ENSG00000165813_20 (sequence is synthesized)
cagcagcatgggaagtcgttctagttcatcagggtccctgaatgctcgaagcagtgcagaagatcgatctccagaaaatactgggtcctcagtagctgtggataactttccacaagtaga

SEQ ID NO: 525831 - DNA, 120 bp, Artificial Sequence
  ENSG00000165813_21 (sequence is synthesized)
taaggccatgttgattgagagaatagttaggctgcaaaaagcacatgcccggaaaaatgaaaagatagaatttatggaggaccacatcaaacaactggtggaagaaattaggaaaaaaac

SEQ ID NO: 525832 - DNA, 120 bp, Artificial Sequence
  ENSG00000165813_22 (sequence is synthesized)
aaaaataattcaaagttatattttacgagaagaatcaggcacactttcttcagaggcatctgattttaacaaagttcatttaagtagacggggtggcatcatggcatctttatatacatc

SEQ ID NO: 525833 - DNA, 120 bp, Artificial Sequence
  ENSG00000165813_23 (sequence is synthesized)
ccatccagctgacaatggattaacattggagctctctttggaaatcaaccgaaaattacaggctgttttggaggatacgttactaaaaaatattactttgaaggaaaatctacaaacact

SEQ ID NO: 525834 - DNA, 120 bp, Artificial Sequence
  ENSG00000165813_24 (sequence is synthesized)
tggaacagaaatagaacgtcttattaaacaccagcatgaactagaacagaggacaaagaaaacctaaaacaagcctcttgctcagtaaagagacaaaagccacacaggagtaggtgccac

SEQ ID NO: 525835 - DNA, 120 bp, Artificial Sequence
  ENSG00000165813_25 (sequence is synthesized)
tgacctctattgttggagactttgttccactttttgtttcagccagtaaaaatattgttttgcttcatctgtacacaaaaaaatacccttttacaatatgaatgcattgctgtatatact

SEQ ID NO: 525836 - DNA, 120 bp, Artificial Sequence
  ENSG00000165813_26 (sequence is synthesized)
gtaagactgaaagctttgatgaaatttgtttttgtatggtgcaatatgacagcctgtcattgaatctaaacaacttaatttgcttgtattcataagaagtgttgaacattacaagggctt

SEQ ID NO: 525837 - DNA, 120 bp, Artificial Sequence
  ENSG00000165813_27 (sequence is synthesized)
ttataaaaaaccctttgttcatatttcttccctttaaaatatgtaatgtcaaaaatgactcaccttttaaaaattatgcatgaaaacaggtggtaaacattcagtaatacgctatttctc

SEQ ID NO: 525838 - DNA, 120 bp, Artificial Sequence
  ENSG00000165813_28 (sequence is synthesized)
caacatcaagacaactaaaacaaatgataaaaatgtttatttttacactccagcatatcgggtgagttttagggatgtgtatgaatatttaaatcttttaatttcagttttaatgaaagc

SEQ ID NO: 525839 - DNA, 120 bp, Artificial Sequence
  ENSG00000165813_29 (sequence is synthesized)
tgaacttaataggaaagctagctcttggtaactagcaatgatcaggcattgtttgcctctgtcaggttttcttatctgttttaggtacattttttcagattctgattgtttgagttaatg

SEQ ID NO: 525840 - DNA, 120 bp, Artificial Sequence
  ENSG00000165813_30 (sequence is synthesized)
aaaatatgattttaaattacatattaatttagaaaattcctgtgtttacttatattttaaattgtgaaatggatccaatcattagaacagagagaatagttctttgaaactgaaatactt

SEQ ID NO: 525841 - DNA, 120 bp, Artificial Sequence
  ENSG00000165813_31 (sequence is synthesized)
tagttttactgaccttgtgtaaagataatatgaagaaccagcttccaaaagaaaccagcatatggcactataaactatttcatttgagcaccattctttaccatggatatattaattatg

SEQ ID NO: 525842 - DNA, 120 bp, Artificial Sequence
  ENSG00000165813_32 (sequence is synthesized)
ccatggatatattaattatgtattatagtggagtgatcatacagttcccccaaatgtgatgtttcagtgtatttatttaaaacataaagtagaccaggtgcagtagctcacgcctgtaat

SEQ ID NO: 525843 - DNA, 89 bp, Artificial Sequence
  ENSG00000165813_33 (sequence is synthesized)
cttgaaattttaaaagattatccaggcatggtggtgcatgcctatggttccagctactcgggaggctgaagcggtagaatcacttgagc

SEQ ID NO: 525844 - DNA, 120 bp, Artificial Sequence
  ENSG00000165813_34 (sequence is synthesized)
gtgcatgcctatggttccagctactcgggaggctgaagcggtagaatcacttgagcacaggaggtcaaggctgcaggtgagccatgatcgtgtcactgcactccagcctaggcaacagag

SEQ ID NO: 525845 - DNA, 120 bp, Artificial Sequence
  ENSG00000165813_35 (sequence is synthesized)
aaaacaaaaaacctcacacatacctaaaataagtatatatctgtaaccaaaggaacttaattttagagccaaatttttctatcttgttggattttttacagtgtttaagatagacactta

SEQ ID NO: 525846 - DNA, 120 bp, Artificial Sequence
  ENSG00000165813_36 (sequence is synthesized)
agtgttgccgtagtatcaatatttctgtcattgaattttttctcaccccttattatttctcacttacaatttctgagcatgatttttcataattcattatcttcagatcattactataat

SEQ ID NO: 525847 - DNA, 120 bp, Artificial Sequence
  ENSG00000165813_37 (sequence is synthesized)
aagataccgtggctcttatgcagatattgcagcaagccttgtttggtttggatttttgcatccctttttctcccattaagggaattaagttttgggatgatggattaaaagcctgtaaag

SEQ ID NO: 525848 - DNA, 120 bp, Artificial Sequence
  ENSG00000165813_38 (sequence is synthesized)
aattgtttgggctctaaaagttgggctcatggtggcaatatccttttaatgtgttttaacattttttaatcaacatcgtttaaaaataatttactaaggattagattatttaatgaatgt

SEQ ID NO: 525849 - DNA, 120 bp, Artificial Sequence
  ENSG00000165813_39 (sequence is synthesized)
tatcccaaaaaaaatatcttttcacttcaaaatgaaaatatatgttcaaagatgttttatttttagaatagttataaaaagtattagtcttaacataatgtgtcttgttctttttaccaa

SEQ ID NO: 525850 - DNA, 120 bp, Artificial Sequence
  ENSG00000165813_40 (sequence is synthesized)
acataatgtgtcttgttctttttaccaataataatttatcaaaataagagggaaagtgcaatcaaatctgaattattttactatttgtttctagacacactacttaacactcctaaagac

SEQ ID NO: 525851 - DNA, 120 bp, Artificial Sequence
  ENSG00000165813_41 (sequence is synthesized)
tactttgagtaggcaacataactaaatttttctagtttcttatgatacaggttcataaactacaatatttggatttttttccccaaggcacaaaatgtataatggagaccaaatagtgat

SEQ ID NO: 525852 - DNA, 120 bp, Artificial Sequence
  ENSG00000165813_42 (sequence is synthesized)
ctgatccatagtatcctatgcctatacactttaaaatgtatatacattttagacaaaaatgcacactccagtattaatatttgtgctaccatctacttggagaagtttaatgagaaaatt

SEQ ID NO: 525853 - DNA, 120 bp, Artificial Sequence
  ENSG00000165813_43 (sequence is synthesized)
ttagaagaaaagtattacaaacaatattttgactctattacctgttttgccttatacattttagaaactggaaattttttaaagaaaatgctttagttttcttctgttcttcactgtcta

SEQ ID NO: 525854 - DNA, 120 bp, Artificial Sequence
  ENSG00000165813_44 (sequence is synthesized)
cagtgtgcttttgtatatggatcaggactgagcaaagtaattacatgtatcagagatacttatctctatactaattcacagacagctcctgatgtaaggatttagagggccttctgccct

SEQ ID NO: 525855 - DNA, 120 bp, Artificial Sequence
  ENSG00000165813_45 (sequence is synthesized)
ctgaatatatggtgaggagaatggggtatctggaaaaggaaaatgatctggataaatctgagacctggggggaagtttgttttatatgttcattattggttgttacatatcaaggctgtt

SEQ ID NO: 525856 - DNA, 120 bp, Artificial Sequence
  ENSG00000165813_46 (sequence is synthesized)
ttggttatgtatcaatattgtggtttatttgagctggaagtgattttttctgtgtatgtatatgtatacacttcaataggttttaattttgaagtgaatatttgccatgactccattttc

SEQ ID NO: 525857 - DNA, 120 bp, Artificial Sequence
  ENSG00000165813_47 (sequence is synthesized)
cccataccacttcagactttagcctgtttagttttaaggactgaaaatggtaggtttgggcagaagaatgaatttgaactttgatggggtttttttgtttttactttctatcttcataac

SEQ ID NO: 525858 - DNA, 120 bp, Artificial Sequence
  ENSG00000165813_48 (sequence is synthesized)
catttaaagcgatttagcttgaaattaaattttatcaggctaccaacatgttatttatttatttaataaacacatttattgaaaacctatactattgtattggcaccatacagggtattg

SEQ ID NO: 525859 - DNA, 120 bp, Artificial Sequence
  ENSG00000165813_49 (sequence is synthesized)
gtattggcaccatacagggtattgtatttatactagtgagcagaccagggcatttccatcctcatggagttcatggtctaatgaaaatagctggggccgggtgtggtggctcacccctgt

SEQ ID NO: 525860 - DNA, 120 bp, Artificial Sequence
  ENSG00000165813_50 (sequence is synthesized)
gagtttgagaccagccagggcaacatggcaaaaccccatgtgtacaaaagattaaaaaattagccagatgcagtggcacatggctggggtcccagctacccaggaggctgagttgggagg

SEQ ID NO: 525861 - DNA, 120 bp, Artificial Sequence
  ENSG00000165813_51 (sequence is synthesized)
tggggtcccagctacccaggaggctgagttgggaggatcatctgagcctgggaggttgaagcttgcagtgagctatgattgccactgtactctatactccagcctgggtgacagagtgaa

SEQ ID NO: 525862 - DNA, 120 bp, Artificial Sequence
  ENSG00000165813_52 (sequence is synthesized)
aaaaaaaagaggaaagaaaatagctaggagacaatcagagcagatcttgggcttctgtggctcatctcagccctttataactggcctgagaagagggtttatctacttgtgcaagtggcc

SEQ ID NO: 525863 - DNA, 120 bp, Artificial Sequence
  ENSG00000165813_53 (sequence is synthesized)
cagaaatctcactcgtacatgaggctttggaacatccttgcaaaggtacgctgaaagcaaattgctgttttcctggtggttctgcacgtttcctaacttttatcatagtttgattttcat

SEQ ID NO: 525864 - DNA, 120 bp, Artificial Sequence
  ENSG00000165813_54 (sequence is synthesized)
tatttaagaaaaaataaaaaatccaaagaccataagatggcattagattttttaccattaaattattaatgcctatttggtgctcataaagattaatcatgtcacgcatgtttccaatct

SEQ ID NO: 525865 - DNA, 120 bp, Artificial Sequence
  ENSG00000165813_55 (sequence is synthesized)
ttcttttgcagtatattattttctaaaaattgttacatgcaaatttaaaccaagatttatcagtaaaagaaaaaaatagaatccttaataatgtaaatgttgttatatatgctaccctgg

SEQ ID NO: 525866 - DNA, 120 bp, Artificial Sequence
  ENSG00000165813_56 (sequence is synthesized)
tgaaaatatttttataaatcatgttgtcatttatgctttatgtagcctatttttcaataacctttttttaaaagcaattttttttgacaccaagattgttgatttttaattaacaccagt

SEQ ID NO: 525867 - DNA, 120 bp, Artificial Sequence
  ENSG00000165813_57 (sequence is synthesized)
tggtggcactagaaacctgaaatttttcaaagatgaacaaagaaaaattgaaaaggtaatctaaacatggagaatttttaggaaaataaatgaaaaatataattgtatattagagatgta

SEQ ID NO: 525868 - DNA, 120 bp, Artificial Sequence
  ENSG00000165813_58 (sequence is synthesized)
tttttcttctggaatggaattctttttctaaaatgcaaatcgctatccattttgactgcaatgatgaaacttgtttatcttccagaggacatatatatatgtgtgtgtgtgtgtattgta

SEQ ID NO: 525869 - DNA, 120 bp, Artificial Sequence
  ENSG00000165813_59 (sequence is synthesized)
cagatacctttaatttgattacactgtttcttgtaaatatgtttctgtataaaatgaaacttttcaagaggattctatgtatatattgtacttattaaataggtaatgcctatttaccaa

SEQ ID NO: 525870 - DNA, 120 bp, Artificial Sequence
  ENSG00000165813_60 (sequence is synthesized)
gtcagaacatctggattagaatcctacttctttcacttgataatcttgttacctgtggaaatcagaagagagaatatagtaaaaatacgcagtacagtcccagatgtaaaacgaagatca

SEQ ID NO: 525871 - DNA, 120 bp, Artificial Sequence
  ENSG00000165813_61 (sequence is synthesized)
aaaggaaaataccattttgttcatttttacttgcacattagaatcatgcacatagtagttgaacaataaatgtatagttgctgaatgtgtgagcaaatgtcgagtttttcagatatctga

SEQ ID NO: 525872 - DNA, 120 bp, Artificial Sequence
  ENSG00000165813_62 (sequence is synthesized)
gttcaatatgttaaatagtgtaaatgtattaacgtgctagaaatttttatagacaactcaaaatttttcacttttgaaagaatgtagaagtatattgtcaaaactaagagaaactcaaaa

SEQ ID NO: 525873 - DNA, 120 bp, Artificial Sequence
  ENSG00000165813_63 (sequence is synthesized)
ggaaataacaagtcataaaattccacaactttttcttaaaatctgcattctaaattcattggtttaaaacattaaaatttagagaacagaataattgattatcgttcagtaaataataat

SEQ ID NO: 525874 - DNA, 120 bp, Artificial Sequence
  ENSG00000165813_64 (sequence is synthesized)
acagttttggatatgtgaagttctgttttcatgatagtttaaaatttaccatcttaaccatttttatgtgtacgtttcagtagtgttattatatattcacactgttggacaaccaatctg

SEQ ID NO: 525875 - DNA, 120 bp, Artificial Sequence
  ENSG00000165813_65 (sequence is synthesized)
cagaactttttcactttgcaaatctgaaacactgtattcgttaaacaacactatttccacttgccctcagtccctggcaaccaccattctactttctgttgctgagtttgactactcatg

SEQ ID NO: 525876 - DNA, 120 bp, Artificial Sequence
  ENSG00000165813_66 (sequence is synthesized)
atacctcatgtaggtgaaatcatatacttttcatttcatgactggcttatttcatttagcctaatgtcctcatttatccatgttgtaacatgtcagaatttcatttctttttaaggctca

SEQ ID NO: 525877 - DNA, 120 bp, Artificial Sequence
  ENSG00000165813_67 (sequence is synthesized)
ataatattgcattgtatgtatataccacattttgtttattcatccattaatggacatctgggttccttctgctttttggctgttgttaataatgctactgtgaacttgggtttgcaagta

SEQ ID NO: 525878 - DNA, 120 bp, Artificial Sequence
  ENSG00000165813_68 (sequence is synthesized)
tctcttcaagactccaaggcccttcttgatattacccccaaacaaatgcctgctgttgctattcatatccttactgtaatactatattatgtgaataaactgtatgcttttgtacttgaa

SEQ ID NO: 525879 - DNA, 120 bp, Artificial Sequence
  ENSG00000165813_69 (sequence is synthesized)
tacccagacataacaattgactgctgaactggattccagatttctttcttttaaaaagtcatacagtcattgggtgtctgtgctatatgcttgggatacaaaaataaataagacacgtat

SEQ ID NO: 525880 - DNA, 120 bp, Artificial Sequence
  ENSG00000165813_70 (sequence is synthesized)
ttcaacctcctattctctactatttctcacggctttatttgtgttaaaatagggtgaaatatagtaataagctaaaagggacttagcatttacttaatacaaatatattcagatatttgc

SEQ ID NO: 525881 - DNA, 120 bp, Artificial Sequence
  ENSG00000165813_71 (sequence is synthesized)
catagagtttagtttgtttttatagatgtaattgaagggaaatttggaagaaatttctggtactgtaaggaacttctaaatctttcaatactttaaaaagttaactccactgtaattaag

SEQ ID NO: 525882 - DNA, 120 bp, Artificial Sequence
  ENSG00000165813_72 (sequence is synthesized)
tataaaattcttccacacttagaccatgaatgtgtttgtttcttttaatcattaggattttattttttgtgattctgccacattgattgaagctgtatgttttctttgttaatattagta

SEQ ID NO: 525883 - DNA, 120 bp, Artificial Sequence
  ENSG00000165816_0 (sequence is synthesized)
acagtgttcgcggctgcaccgctcggaggctgggtgacccgcgtagaagtgaagtacttttttatttgcagacctgggccgatgccgctttaaaaaacgcgaggggctctatgcacctcc

SEQ ID NO: 525884 - DNA, 120 bp, Artificial Sequence
  ENSG00000165816_1 (sequence is synthesized)
ctggcggtagttcctccgacctcagccgggtcgggtcgtgccgccctctcccaggagagacaaacaggtgtcccacgtggcagccgcgccccgggcgcccctcctgtgatcccgtagcgc

SEQ ID NO: 525885 - DNA, 120 bp, Artificial Sequence
  ENSG00000165816_2 (sequence is synthesized)
cccctggcccgagccgcgcccgggtctgtgagtagagccgcccgggcaccgagcgctggtcgccgctctccttccgttatatcaacatgccccctttcctgttgctggaagccgtctgtg

SEQ ID NO: 525886 - DNA, 120 bp, Artificial Sequence
  ENSG00000165816_3 (sequence is synthesized)
ttttcctgttttccagagtgcccccatctctccctctccaggaagtccatgtaagcaaagaaaccatcgggaagatttcagctgccagcaaaatgatgtggtgctcggctgcagtggaca

SEQ ID NO: 525887 - DNA, 120 bp, Artificial Sequence
  ENSG00000165816_4 (sequence is synthesized)
tcatgtttctgttagatgggtctaacagcgtcgggaaagggagctttgaaaggtccaagcactttgccatcacagtctgtgacggtctggacatcagccccgagagggtcagagtgggag

SEQ ID NO: 525888 - DNA, 120 bp, Artificial Sequence
  ENSG00000165816_5 (sequence is synthesized)
cattccagttcagttccactcctcatctggaattccccttggattcattttcaacccaacaggaagtgaaggcaagaatcaagaggatggttttcaaaggagggcgcacggagacggaac

SEQ ID NO: 525889 - DNA, 120 bp, Artificial Sequence
  ENSG00000165816_6 (sequence is synthesized)
ttgctctgaaataccttctgcacagagggttgcctggaggcagaaatgcttctgtgccccagatcctcatcatcgtcactgatgggaagtcccagggggatgtggcactgccatccaagc

SEQ ID NO: 525890 - DNA, 120 bp, Artificial Sequence
  ENSG00000165816_7 (sequence is synthesized)
agctgaaggaaaggggtgtcactgtgtttgctgtgggggtcaggtttcccaggtgggaggagctgcatgcactggccagcgagcctagagggcagcacgtgctgttggctgagcaggtgg

SEQ ID NO: 525891 - DNA, 120 bp, Artificial Sequence
  ENSG00000165816_8 (sequence is synthesized)
aggatgccaccaacggcctcttcagcaccctcagcagctcggccatctgctccagcgccacgccagactgcagggtcgaggctcacccctgtgagcacaggacgctggagatggtccggg

SEQ ID NO: 525892 - DNA, 120 bp, Artificial Sequence
  ENSG00000165816_9 (sequence is synthesized)
agttcgctggcaatgccccatgctggagaggatcgcggcggacccttgcggtgctggctgcacactgtcccttctacagctggaagagagtgttcctaacccaccctgccacctgctaca

SEQ ID NO: 525893 - DNA, 120 bp, Artificial Sequence
  ENSG00000165816_10 (sequence is synthesized)
ggaccacctgcccaggcccctgtgactcgcagccctgccagaatggaggcacatgtgttccagaaggactggacggctaccagtgcctctgcccgctggcctttggaggggaggctaact

SEQ ID NO: 525894 - DNA, 120 bp, Artificial Sequence
  ENSG00000165816_11 (sequence is synthesized)
gtgccctgaagctgagcctggaatgcagggtcgacctcctcttcctgctggacagctctgcgggcaccactctggacggcttcctgcgggccaaagtcttcgtgaagcggtttgtgcggg

SEQ ID NO: 525895 - DNA, 120 bp, Artificial Sequence
  ENSG00000165816_12 (sequence is synthesized)
ccgtgctgagcgaggactctcgggcccgagtgggtgtggccacatacagcagggagctgctggtggcggtgcctgtgggggagtaccaggatgtgcctgacctggtctggagcctcgatg

SEQ ID NO: 525896 - DNA, 120 bp, Artificial Sequence
  ENSG00000165816_13 (sequence is synthesized)
gcattcccttccgtggtggccccaccctgacgggcagtgccttgcggcaggcggcagagcgtggcttcgggagcgccaccaggacaggccaggaccggccacgtagagtggtggttttgc

SEQ ID NO: 525897 - DNA, 120 bp, Artificial Sequence
  ENSG00000165816_14 (sequence is synthesized)
tcactgagtcacactccgaggatgaggttgcgggcccagcgcgtcacgcaagggcgcgagagctgctcctgctgggtgtaggcagtgaggccgtgcgggcagagctggaggagatcacag

SEQ ID NO: 525898 - DNA, 120 bp, Artificial Sequence
  ENSG00000165816_15 (sequence is synthesized)
gcagcccaaagcatgtgatggtctactcggatcctcaggatctgttcaaccaaatccctgagctgcaggggaagctgtgcagccggcagcggccagggtgccggacacaagccctggacc

SEQ ID NO: 525899 - DNA, 120 bp, Artificial Sequence
  ENSG00000165816_16 (sequence is synthesized)
tcgtcttcatgttggacacctctgcctcagtagggcccgagaattttgctcagatgcagagctttgtgagaagctgtgccctccagtttgaggtgaaccctgacgtgacacaggtcggcc

SEQ ID NO: 525900 - DNA, 120 bp, Artificial Sequence
  ENSG00000165816_17 (sequence is synthesized)
tggtggtgtatggcagccaggtgcagactgccttcgggctggacaccaaacccacccgggctgcgatgctgcgggccattagccaggccccctacctaggtggggtgggctcagccggca

SEQ ID NO: 525901 - DNA, 120 bp, Artificial Sequence
  ENSG00000165816_18 (sequence is synthesized)
ccgccctgctgcacatctatgacaaagtgatgaccgtccagaggggtgcccggcctggtgtccccaaagctgtggtggtgctcacaggcgggagaggcgcagaggatgcagccgttcctg

SEQ ID NO: 525902 - DNA, 120 bp, Artificial Sequence
  ENSG00000165816_19 (sequence is synthesized)
cccagaagctgaggaacaatggcatctctgtcttggtcgtgggcgtggggcctgtcctaagtgagggtctgcggaggcttgcaggtccccgggattccctgatccacgtggcagcttacg

SEQ ID NO: 525903 - DNA, 120 bp, Artificial Sequence
  ENSG00000165816_20 (sequence is synthesized)
ccgacctgcggtaccaccaggacgtgctcattgagtggctgtgtggagaagccaagcagccagtcaacctctgcaaacccagcccgtgcatgaatgagggcagctgcgtcctgcagaatg

SEQ ID NO: 525904 - DNA, 120 bp, Artificial Sequence
  ENSG00000165816_21 (sequence is synthesized)
ggagctaccgctgcaagtgtcgggatggctgggagggcccccactgcgagaaccgattcttgagacgcccctgaggcacatggctcccgtgcaggagggcagcagccgtacccctcccag

SEQ ID NO: 525905 - DNA, 120 bp, Artificial Sequence
  ENSG00000165816_22 (sequence is synthesized)
caactacagagaaggcctgggcactgaaatggtgcctaccttctggaatgtctgtgccccaggtccttagaatgtctgcttcccgccgtggccaggaccactattctcactgagggagga

SEQ ID NO: 525906 - DNA, 120 bp, Artificial Sequence
  ENSG00000165816_23 (sequence is synthesized)
ggatgtcccaactgcagccatgctgcttagagacaagaaagcagctgatgtcacccacaaacgatgttgttgaaaagttttgatgtgtaagtaaatacccactttctgtacctgctgtgc

SEQ ID NO: 525907 - DNA, 120 bp, Artificial Sequence
  ENSG00000165816_24 (sequence is synthesized)
ttgcacacaatcaatgctcgccagaatgttgttgacacagtaatgcccagcagaggcctttactagagcatcctttggacggcgaaggccacggcctttcaagatggaaagcagcagctt

SEQ ID NO: 525908 - DNA, 120 bp, Artificial Sequence
  ENSG00000165816_25 (sequence is synthesized)
ttccacttccccagagacattctggatgcatttgcattgagtctgaaagggggcttgagggacgtttgtgacttctggcgactgccttttgtgtgtggaagagacttggaaaggtctcag

SEQ ID NO: 525909 - DNA, 120 bp, Artificial Sequence
  ENSG00000165816_26 (sequence is synthesized)
actgaaatgtgaccaattaaccagcttgtttgatgatgggggaggggctgagtgtgcaatgggcccaggtctggaggggccacgtaaaatcgttctgagtcgtgagcagtgtccacctga

SEQ ID NO: 525910 - DNA, 73 bp, Artificial Sequence
  ENSG00000165816_27 (sequence is synthesized)
cacgtaaaatcgttctgagtcgtgagcagtgtccacctgaagggtcttcctttcaaaagaggctgcggccaga

SEQ ID NO: 525911 - DNA, 73 bp, Artificial Sequence
  ENSG00000165816_28 (sequence is synthesized)
tgagaccagcctggccaacgtggtgaaagtttgtctttactaaaaatacaaaaggtagccgggggtggtggtg

SEQ ID NO: 525912 - DNA, 120 bp, Artificial Sequence
  ENSG00000165816_29 (sequence is synthesized)
actccagcctgggcaacaagagtaaaaatctgtctcaaaaagaaaaaaatgtacttaggaggggttaattgtggcgtgtttatggaattctttccttattctccttttagtggggcaaag

SEQ ID NO: 525913 - DNA, 120 bp, Artificial Sequence
  ENSG00000165816_30 (sequence is synthesized)
tctttccttattctccttttagtggggcaaagagaagtaagattcttaaactcaaaaatataggataaagaaacttacagagattttgctttttaaagcattgatcttacgctgtctagg

SEQ ID NO: 525914 - DNA, 120 bp, Artificial Sequence
  ENSG00000165816_31 (sequence is synthesized)
ttttaattttgttttgctttgcttttctacacagtttttaaagaaatatttcaagaaatgttggttatttattaaacagggatatttgtacctatgtggcaaagaggcatatttggaata

SEQ ID NO: 525915 - DNA, 120 bp, Artificial Sequence
  ENSG00000165816_32 (sequence is synthesized)
ttctctggcaaactagatacttacttccctatcgctgcagtatttaggaattacttcttctccttggttgtgttgtttagagttggattttctgtagaaatctttctagagctctgatgt

SEQ ID NO: 525916 - DNA, 63 bp, Artificial Sequence
  ENSG00000165816_33 (sequence is synthesized)
agttggattttctgtagaaatctttctagagctctgatgtgactccagacactttatcgtaca

SEQ ID NO: 525917 - DNA, 120 bp, Artificial Sequence
  ENSG00000165816_34 (sequence is synthesized)
tggcctcccaaagttctgggattacaggggtgaaccactgtgcctggcccatttttctttataaatattgtaacataatgttttatagacaaacattcaagggtactttggctttaagaa

SEQ ID NO: 525918 - DNA, 120 bp, Artificial Sequence
  ENSG00000165816_35 (sequence is synthesized)
acattcaagggtactttggctttaagaacttcaggatttctggtgctagaaaagcgcttgaagcagtatcaccaagattttagatattaaaaagtctggtgtaccagacattgagtcata

SEQ ID NO: 525919 - DNA, 120 bp, Artificial Sequence
  ENSG00000165816_36 (sequence is synthesized)
atcatctatattcaagggatactttcattgataactttgttattatgctgcccttcacagaagacaacgtccggggcaggatcacatgctccctagcagatgctgatcagtgatgtcata

SEQ ID NO: 525920 - DNA, 120 bp, Artificial Sequence
  ENSG00000165816_37 (sequence is synthesized)
gaaattacatgaatgcattgtctttaaatagcagtttaaccatgttataatgtaggctttttgtcttgttccgggctggtatttgggtgccctgattgaattacttggatttaaacagca

SEQ ID NO: 525921 - DNA, 120 bp, Artificial Sequence
  ENSG00000165816_38 (sequence is synthesized)
aactgtgggctctcgacttacatagtaagggcctttactgtttctttgtaggaaatgggtttctcgcctttgaaacattttttccccttttgtagtgacagtgccactaaatagttcagc

SEQ ID NO: 525922 - DNA, 120 bp, Artificial Sequence
  ENSG00000165816_39 (sequence is synthesized)
ttttgtcagtcccccaggaaagtgctatcctatggcctaactagccaagccttttttctttcatttaaaagaaattagctttaatttttacctttaattacttattcaaataagacagaa

SEQ ID NO: 525923 - DNA, 120 bp, Artificial Sequence
  ENSG00000165816_40 (sequence is synthesized)
atatattttccttgcaataattaaaacattgcatataggccataaatttccttattttctctgaacgatcctgattccagtcatcttgttgaataccctagttctaataattgactcttg

SEQ ID NO: 525924 - DNA, 120 bp, Artificial Sequence
  ENSG00000165816_41 (sequence is synthesized)
cttttctagagaaatatttccaaatgatgctagttttgtctcttcctttcaaagttgtataccacttctttttcttgtcattttgcattgcctgggacctccagaataatgtttcatgaa

SEQ ID NO: 525925 - DNA, 120 bp, Artificial Sequence
  ENSG00000165816_42 (sequence is synthesized)
gtagcatgtatccatatctggttcttgactttttcatcataataattgttttctatgggttacttatcagtttaagaatgcttaattcctagatgaactaagagtgtttattacatgttg

SEQ ID NO: 525926 - DNA, 120 bp, Artificial Sequence
  ENSG00000165816_43 (sequence is synthesized)
agatttatggtatgctttttcttcctcaagataatgcattttttgtattatctgttaatgtgataggttatccatttgtgtattttcaatcattgaacaacccttgatttttttggataa

SEQ ID NO: 525927 - DNA, 120 bp, Artificial Sequence
  ENSG00000165816_44 (sequence is synthesized)
actctatttggtcattatgcatcattctataaaccctgctgaatttttcatttgccaacatcttatttcagattcttttaatctgtgtccaacaatgagatttgttttcttttgcaattt

SEQ ID NO: 525928 - DNA, 120 bp, Artificial Sequence
  ENSG00000165816_45 (sequence is synthesized)
gttttgaatttttggtatcagagctatactaaccttataatggaaaatacatatttctcaaacttttacactgatatattcatagtatttttttataatttgaaaaatcttgtcagtatc

SEQ ID NO: 525929 - DNA, 120 bp, Artificial Sequence
  ENSG00000165816_46 (sequence is synthesized)
tgtattaaggcctccatttcagttctgctatttcatattgccttaggttgtctatttgtctctttaatgaacccgattttgattttgtcatttttaaaataaacacatttatgctataaa

SEQ ID NO: 525930 - DNA, 120 bp, Artificial Sequence
  ENSG00000165816_47 (sequence is synthesized)
agggctgcccccatggcaggccctcagcctgagccttcacatacatcatgacgaggatggcagctcttcccagctactgagcacttgcttcccaagtgccaggttctgtgctaaacccca

SEQ ID NO: 525931 - DNA, 120 bp, Artificial Sequence
  ENSG00000165816_48 (sequence is synthesized)
tgctcacataaaatcctacagtaggcataaccatcctatttgacatttaaggtacagaaagtttaactaacatagataactccccccaaacttgagaatttatgcattccctttaaacag

SEQ ID NO: 525932 - DNA, 120 bp, Artificial Sequence
  ENSG00000165816_49 (sequence is synthesized)
aacacacttttagaatatccacaagcttcctaagggtctaaagatcccacattcacactgacttgggcagtgacagagcccagagcaaacagggccaggccagcccaaatccagtgacct

SEQ ID NO: 525933 - DNA, 120 bp, Artificial Sequence
  ENSG00000165819_0 (sequence is synthesized)
attttccggttagccttcggggtgtccgcgtgagaattggctatatcctggagcgagtgctgggaggtgctagtccgccgcgccttattcgagaggtgtcagggctgggagactaggatg

SEQ ID NO: 525934 - DNA, 120 bp, Artificial Sequence
  ENSG00000165819_1 (sequence is synthesized)
tcggacacgtggagctctatccaggcccacaagaagcagctggactctctgcgggagaggctgcagcggaggcggaagcaggactcggggcacttggatctacggaatccagaggcagca

SEQ ID NO: 525935 - DNA, 120 bp, Artificial Sequence
  ENSG00000165819_2 (sequence is synthesized)
ttgtctccaaccttccgtagtgacagcccagtgcctactgcacccacctctggtggccctaagcccagcacagcttcagcagttcctgaattagctacagatcctgagttagagaagaag

SEQ ID NO: 525936 - DNA, 120 bp, Artificial Sequence
  ENSG00000165819_3 (sequence is synthesized)
ttgctacaccacctctctgatctggccttaacattgcccactgatgctgtgtccatctgtcttgccatctccacgccagatgctcctgccactcaagatggggtagaaagcctcctgcag

SEQ ID NO: 525937 - DNA, 120 bp, Artificial Sequence
  ENSG00000165819_4 (sequence is synthesized)
aagtttgcagctcaggagttgattgaggtaaagcgaggtctcctacaagatgatgcacatcctactcttgtaacctatgctgaccattccaagctctctgccatgatgggtgctgtggca

SEQ ID NO: 525938 - DNA, 120 bp, Artificial Sequence
  ENSG00000165819_5 (sequence is synthesized)
gaaaagaagggccctggggaggtagcagggactgtcacagggcagaagcggcgtgcagaacaggactcgactacagtagctgcctttgccagttcgttagtctctggtctgaactcttca

SEQ ID NO: 525939 - DNA, 120 bp, Artificial Sequence
  ENSG00000165819_6 (sequence is synthesized)
gcatcggaaccagcaaaggagccagccaagaaatcaaggaaacatgctgcctcagatgttgatctggagatagagagccttctgaaccaacagtccactaaggaacaacagagcaagaag

SEQ ID NO: 525940 - DNA, 120 bp, Artificial Sequence
  ENSG00000165819_7 (sequence is synthesized)
gtcagtcaggagatcctagagctattaaatactacaacagccaaggaacaatccattgttgaaaaatttcgctctcgaggtcgggcccaagtgcaagaattctgtgactatggaaccaag

SEQ ID NO: 525941 - DNA, 120 bp, Artificial Sequence
  ENSG00000165819_8 (sequence is synthesized)
attatcaataaacacactgatgagtctttaggtgactgctctttccttaatacatgtttccacatggatacctgcaagtatgttcactatgaaattgatgcttgcatggattctgaggcc

SEQ ID NO: 525942 - DNA, 120 bp, Artificial Sequence
  ENSG00000165819_9 (sequence is synthesized)
cctggcagcaaagaccacacgccaagccaggagcttgctcttacacagagtgtcggaggtgattccagtgcagaccgactcttcccacctcagtggatctgttgtgatatccgctacctg

SEQ ID NO: 525943 - DNA, 120 bp, Artificial Sequence
  ENSG00000165819_10 (sequence is synthesized)
gacgtcagtatcttgggcaagtttgcagttgtgatggctgacccaccctgggatattcacatggaactgccctatgggaccctgacagatgatgagatgcgcaggctcaacatacccgta

SEQ ID NO: 525944 - DNA, 120 bp, Artificial Sequence
  ENSG00000165819_11 (sequence is synthesized)
ctacaggatgatggctttctcttcctctgggtcacaggcagggccatggagttggggagagaatgtctaaacctctgggggtatgaacgggtagatgaaattatttgggtgaagacaaat

SEQ ID NO: 525945 - DNA, 120 bp, Artificial Sequence
  ENSG00000165819_12 (sequence is synthesized)
caactgcaacgcatcattcggacaggccgtacaggtcactggttgaaccatgggaaggaacactgcttggttggtgtcaaaggaaatccccaaggcttcaaccagggtctggattgtgat

SEQ ID NO: 525946 - DNA, 120 bp, Artificial Sequence
  ENSG00000165819_13 (sequence is synthesized)
gtgatcgtagctgaggttcgttccaccagtcataaaccagatgaaatctatggcatgattgaaagactatctcctggcactcgcaagattgagttatttggacgaccacacaatgtgcaa

SEQ ID NO: 525947 - DNA, 120 bp, Artificial Sequence
  ENSG00000165819_14 (sequence is synthesized)
cccaactggatcacccttggaaaccaactggatgggatccacctactagacccagatgtggttgcacggttcaagcaaaggtacccagatggtatcatctctaaacctaagaatttatag

SEQ ID NO: 525948 - DNA, 120 bp, Artificial Sequence
  ENSG00000165819_15 (sequence is synthesized)
aagcacttccttacagagctaagaatccatagccatggctctgtaagctaaacctgaagagtgatatttgtacaatagctttcttctttatttaaataaacatttgtattgtagttggga

SEQ ID NO: 525949 - DNA, 120 bp, Artificial Sequence
  ENSG00000165819_16 (sequence is synthesized)
gcaaggaactgtttacagcagtggttctcaactggggatgattccctactgcccaactcccaggggatctggtaatgtccggagacatttttattgtcacacatgggggagtgctattgg

SEQ ID NO: 525950 - DNA, 120 bp, Artificial Sequence
  ENSG00000165819_17 (sequence is synthesized)
catctagtgggggtagaggccagggatgttgtcaaacatcctacagtgcatagtgggacaaacccccacaacaaacagttgtctgtcccaaagtgtcaacaatgccaatgtcgacaaatt

SEQ ID NO: 525951 - DNA, 120 bp, Artificial Sequence
  ENSG00000165819_18 (sequence is synthesized)
cttatttagataatctgtcactgaatctgaaagaattggatcaagagaagaggaatccaaatatatagaaatatagggagatgaatggagaggaatactagaccaattatggaaattgac

SEQ ID NO: 525952 - DNA, 120 bp, Artificial Sequence
  ENSG00000165819_19 (sequence is synthesized)
taaataatgtgaattggttctgagtataagcattggcctgacatgagttcttatctgtttggtacttctagtgcgtgagtttgaacaagttaattaacttctcttgagccttagtcttct

SEQ ID NO: 525953 - DNA, 120 bp, Artificial Sequence
  ENSG00000165819_20 (sequence is synthesized)
catctgtaacatgaagataataccagcgtatcctgccttatagaattgaatagactctgagctaaaaagtaaagtgtttagcactatactttttagttcagcacccagtaaatatgtttt

SEQ ID NO: 525954 - DNA, 120 bp, Artificial Sequence
  ENSG00000165819_21 (sequence is synthesized)
ttgtagaaggaatgccttcctggggaggggatgttaacataatgcttagcggtaggaaccaggcctcttccattttaatttcatcccaaatgcatatttgtgaggaaggactgaacccct

SEQ ID NO: 525955 - DNA, 120 bp, Artificial Sequence
  ENSG00000165819_22 (sequence is synthesized)
tgtcgcccagtctggagtgcagtggcatgatgttggctcactgcagcctctgcctcgtgggttcaagcaattctcctccttcagcctccccagtagctgggattataaccttgcatcacc

SEQ ID NO: 525956 - DNA, 72 bp, Artificial Sequence
  ENSG00000165819_23 (sequence is synthesized)
gttcaagcaattctcctccttcagcctccccagtagctgggattataaccttgcatcaccacccccagctaa

SEQ ID NO: 525957 - DNA, 120 bp, Artificial Sequence
  ENSG00000165819_24 (sequence is synthesized)
ccagagtgctgggattacaggcgtgagccccagtgccttaccagaatggaaatatttaagtaaacaaaatatttctaaatgtaaactaatggcctacttatttagcaatttcagttcagt

SEQ ID NO: 525958 - DNA, 120 bp, Artificial Sequence
  ENSG00000165819_25 (sequence is synthesized)
tttcagttcagttcttaggagtttaatatttcatctatattttaattaaccacagatattaggctttctcaaagataacattttgtcctaattttagtttctcaaatcgttattaaggtt

SEQ ID NO: 525959 - DNA, 120 bp, Artificial Sequence
  ENSG00000165819_26 (sequence is synthesized)
atgatggcaacccagcttgtgaagtaatagatgataataatatagtcaggaaatatcatttggtaaccaaggcttcagcaaagtattaagatttttgtgtttgtgagtgttataggtaac

SEQ ID NO: 525960 - DNA, 120 bp, Artificial Sequence
  ENSG00000165819_27 (sequence is synthesized)
actgttggcccccaacattgtcattttgtacactttgttgatcagtggcctgaattcattaaaattcacactacatgcctcaaaaagaatattggatcccagcctaggttgttgagtata

SEQ ID NO: 525961 - DNA, 120 bp, Artificial Sequence
  ENSG00000165819_28 (sequence is synthesized)
ttcctgtcctttattaaaatgtaggttgatagaaaggtggtagggatatttaaatctatcatgctaatttactttctttgtatcacagcaaggatagggaattaggaaaagattactcac

SEQ ID NO: 525962 - DNA, 120 bp, Artificial Sequence
  ENSG00000165819_29 (sequence is synthesized)
tcaatagagaaaaggtagatagaaaatccagtattatcttgacaaagcagtgaatgttttagtatgattgaggataggtaatctagtgctaaagttggtcacagaatttcctgcacaaaa

SEQ ID NO: 525963 - DNA, 120 bp, Artificial Sequence
  ENSG00000165819_30 (sequence is synthesized)
tgaaagatctgtgtatgggaatgctagagaatttgacttctcagaaatatatagaccaacagtggttgccttttttcattttcacttctcttcattcttagatctacggaatccagaggc

SEQ ID NO: 525964 - DNA, 120 bp, Artificial Sequence
  ENSG00000165819_31 (sequence is synthesized)
ggttgaaccatgggaaggaacactgcttggtgagcagcagtggggcccaattcaataggtggagcacaaagaagaatcatttgatttcttactgagaaaaagttcaaaggtgtggtttca

SEQ ID NO: 525965 - DNA, 120 bp, Artificial Sequence
  ENSG00000165819_32 (sequence is synthesized)
taaggtaatctgttatctgtggtgagcaggttggtgtcaaaggaaatccccaaggcttcaaccagggtctggattgtgatgtgatcgtagctgaggtatgtgcttcccaggcctccaaag

SEQ ID NO: 525966 - DNA, 120 bp, Artificial Sequence
  ENSG00000165819_33 (sequence is synthesized)
cttccacatttttgttggtatcagttattcatgttgggtgtattctcatcccagatttttctcatttagatcataaacataatagaaagggctagaattgcaatcttgtgtaacttaaaa

SEQ ID NO: 525967 - DNA, 120 bp, Artificial Sequence
  ENSG00000165819_34 (sequence is synthesized)
accctgtcgcaagctgcacttcaggtctcttggaagggaatgaggtgggatgggtttgtcagaagcagccattccttttcagcatattccttccagtcattggggttctgtctgtaatct

SEQ ID NO: 525968 - DNA, 120 bp, Artificial Sequence
  ENSG00000165819_35 (sequence is synthesized)
tatttagtttatggtttgtgtaagtcctccagaccctgaaggtgtactttcagaagtgcattgtgtgggaagaatacaggctgtactcccaaataactgagattttttttttaaaagctc

SEQ ID NO: 525969 - DNA, 120 bp, Artificial Sequence
  ENSG00000165819_36 (sequence is synthesized)
cctccctcttagaatagcaaagtatgtctgtctctgagccacagtgaaagttaaagtactctgaaaggaggataatcttaggagaaaaggaacctaaactcttaggtcagtgttttattc

SEQ ID NO: 525970 - DNA, 120 bp, Artificial Sequence
  ENSG00000165819_37 (sequence is synthesized)
tgttctacccaagtctcctgcactgcttgccttccagtggtaaaacaggaaaccaagtctttactcagagaggaattacaattgttctgtagtatgaattatggatttccatgctacctg

SEQ ID NO: 525971 - DNA, 120 bp, Artificial Sequence
  ENSG00000165819_38 (sequence is synthesized)
cctcccttaaaactcttgaaggaagctctaatgatagaattaggggagggtaataaaatagacattttgaaatcatttggaatttgaactgttggatctacatctggagcaccatcttga

SEQ ID NO: 525972 - DNA, 120 bp, Artificial Sequence
  ENSG00000165819_39 (sequence is synthesized)
cgcttgagccccaccctcgtccgccttgcccactcctcttcagactgcgaggacgtcgcctttgtgaggctgctcagccccctatcccgcgaagcagcaagaacccctttttgttgctgc

SEQ ID NO: 525973 - DNA, 120 bp, Artificial Sequence
  ENSG00000165819_40 (sequence is synthesized)
tttggcgctttgttccctcagttataacgactgttttgtagtggtcatttcttggcagctgtgggtacagtaagcgaggaatgaacctttatatccgcagtgcccaatttagtggcccgt

SEQ ID NO: 525974 - DNA, 120 bp, Artificial Sequence
  ENSG00000165819_41 (sequence is synthesized)
ccaaatttgtcttgaacacctggcatcaagctgtcctcttgcctaagcctcccaaagtgtttgaattacaggctggaattcagtggcgtgaacacagcttactgcagtctcgacctcagg

SEQ ID NO: 525975 - DNA, 120 bp, Artificial Sequence
  ENSG00000165819_42 (sequence is synthesized)
tcaagtgatcctcctgcctcagcctcctcctgagtggctagcaccacaggtgtaccctaccatgcctgcctactttttaatttttatttctttgtagaaacagggccttgccatgttgcc

SEQ ID NO: 525976 - DNA, 120 bp, Artificial Sequence
  ENSG00000165819_43 (sequence is synthesized)
agtgctgggattacagatgtaatcccagtctagttaagactcttataaaagtatttttggggttgtaattaaatgtatcttgtcttctgaccgagagcttgatctgacccatcatttggt

SEQ ID NO: 525977 - DNA, 120 bp, Artificial Sequence
  ENSG00000165819_44 (sequence is synthesized)
actgtggtaataggtaaagatgaaacatacaaattaaaccagaatgtcactgttctttctgtgttattttgattatttcaaagaatgtattttgttgagctttaggattcttaggaaacc

SEQ ID NO: 525978 - DNA, 120 bp, Artificial Sequence
  ENSG00000165819_45 (sequence is synthesized)
cttgtgaaacactgtattgtaagtttatgaatcatgttgtcatgtaagatataactcaagacttgataaaagttcagattattccattcgtttctcaccggaaataaaaatttgcctacc

SEQ ID NO: 525979 - DNA, 120 bp, Artificial Sequence
  ENSG00000165821_0 (sequence is synthesized)
gcttttacaatgggagctgcagaagcgtagggaagaagctgaagaaaaaaagggggcgtctcccctttaaagacttgcaaagattgagagagaaagagagagagtcaagaacagagaatc

SEQ ID NO: 525980 - DNA, 120 bp, Artificial Sequence
  ENSG00000165821_1 (sequence is synthesized)
agagagagagagagagtctgtgtctctgggaaagaagaacatctctgcttcacagtgatttgcgctgggggagaggcatcaattggcttcggacccaagggggagacgagaccaggtcac

SEQ ID NO: 525981 - DNA, 120 bp, Artificial Sequence
  ENSG00000165821_2 (sequence is synthesized)
cccggttaagaccaagtgagcgttgcccctccctctcccaactctctacccgggaatgtctcggcgaaagcagcggaaaccccaacagttaatctcggactgcgaaggtcccagcgcgtc

SEQ ID NO: 525982 - DNA, 120 bp, Artificial Sequence
  ENSG00000165821_3 (sequence is synthesized)
tgagaacggtgatgctagcgaggaggatcacccccaagtctgtgccaagtgctgcgcacaattcactgacccaactgaattcctcgcccaccagaacgcatgttctactgaccctcctgt

SEQ ID NO: 525983 - DNA, 120 bp, Artificial Sequence
  ENSG00000165821_4 (sequence is synthesized)
aatggtgataattgggggccaggagaaccccaacaactcttcggcctcctctgaaccccggcctgagggtcacaataatcctcaggtcatggacacagagcatagcaaccccccagattc

SEQ ID NO: 525984 - DNA, 120 bp, Artificial Sequence
  ENSG00000165821_5 (sequence is synthesized)
tgggtcctccgtgcccacggatcccacctggggcccagagaggagaggagaggagtcttcagggcatttcctggtcgctgccacaggtacagcggctgggggaggcgggggcctgatctt

SEQ ID NO: 525985 - DNA, 120 bp, Artificial Sequence
  ENSG00000165821_6 (sequence is synthesized)
ggccagtcccaagctgggagcaaccccattacctccagaatcgacccctgcaccccctcctcctccaccaccccctccgcccccaggggtaggcagtggccacttgaatatccccctgat

SEQ ID NO: 525986 - DNA, 120 bp, Artificial Sequence
  ENSG00000165821_7 (sequence is synthesized)
cttggaagagctacgggtgctgcagcagcggcagatccatcagatgcagatgactgagcaaatctgcaggcaggtgctgttgcttggctccttaggccagacggtgggtgcccctgccag

SEQ ID NO: 525987 - DNA, 120 bp, Artificial Sequence
  ENSG00000165821_8 (sequence is synthesized)
tccctcagagctacctgggacagggactgcctcttccaccaagcccctactacccctcttcagccccatcaagcctgtccaaaccagcaagacactggcatcttcctcctcctcctcctc

SEQ ID NO: 525988 - DNA, 120 bp, Artificial Sequence
  ENSG00000165821_9 (sequence is synthesized)
ttcctcttcaggggcagaaacgcccaagcaggccttcttccacctttaccacccactggggtcacagcatcctttctctgctggaggggttgggcgaagccacaaacccacccctgcccc

SEQ ID NO: 525989 - DNA, 120 bp, Artificial Sequence
  ENSG00000165821_10 (sequence is synthesized)
ttccccagccttgccaggcagcacagatcagctgattgcctcgcctcatctggcattcccaagcaccacgggactactggcagcacagtgtcttggggcagcccgaggccttgaggccac

SEQ ID NO: 525990 - DNA, 120 bp, Artificial Sequence
  ENSG00000165821_11 (sequence is synthesized)
tgcctccccagggctcctgaagccaaagaatggaagtggtgagctgagctacggagaagtgatgggtcccttggagaagcctggtggaaggcacaaatgccgcttctgtgccaaagtatt

SEQ ID NO: 525991 - DNA, 120 bp, Artificial Sequence
  ENSG00000165821_12 (sequence is synthesized)
tggcagtgacagtgccctgcagatccaccttcgttcccacacgggtgagaggccctataagtgcaatgtctgtggaaaccgttttaccacccgtggcaacctcaaagtgcatttccaccg

SEQ ID NO: 525992 - DNA, 120 bp, Artificial Sequence
  ENSG00000165821_13 (sequence is synthesized)
gcatcgtgagaagtacccacatgtgcagatgaacccacacccagtaccagagcacctagactatgtcattaccagcagtggcttgccttatggtatgtccgtgccaccagagaaggccga

SEQ ID NO: 525993 - DNA, 120 bp, Artificial Sequence
  ENSG00000165821_14 (sequence is synthesized)
ggaggaggcagccactccaggtggaggggttgagcgcaagcctctggtggcctccacaacagcactcagtgccacagagagcctgactctgctctccaccagtgcaggcacagccacggc

SEQ ID NO: 525994 - DNA, 120 bp, Artificial Sequence
  ENSG00000165821_15 (sequence is synthesized)
tccaggactccctgctttcaataagtttgtgctcatgaaagcagtggaacccaagaataaagctgatgaaaacacccccccagggagtgagggctcagccatcagtggagtggcagaaag

SEQ ID NO: 525995 - DNA, 120 bp, Artificial Sequence
  ENSG00000165821_16 (sequence is synthesized)
tagcacggcaactcgcatgcaactaagtaagttggtgacttcactaccaagctgggcactgcttaccaaccacttcaagtccactggcagcttccccttcccctatgtgctagagccctt

SEQ ID NO: 525996 - DNA, 120 bp, Artificial Sequence
  ENSG00000165821_17 (sequence is synthesized)
gggggcctcaccctctgagacatcaaagctgcagcaactggtagaaaagattgaccggcaaggagctgtggcggtgacctcagctgcctcaggagcccccaccacctctgcccctgcacc

SEQ ID NO: 525997 - DNA, 120 bp, Artificial Sequence
  ENSG00000165821_18 (sequence is synthesized)
ttcatcctcagcctcttctggacctaaccagtgtgtcatctgtctccgagtgcttagctgtcctcgggccctacgccttcattatggccaacatggaggtgagaggcccttcaaatgcaa

SEQ ID NO: 525998 - DNA, 120 bp, Artificial Sequence
  ENSG00000165821_19 (sequence is synthesized)
agtgtgtggcagagccttctccaccaggggtaatctgcgtgcacatttcgtgggccacaaggccagtccagctgcccgggcacagaattcctgccccatctgccagaagaagttcaccaa

SEQ ID NO: 525999 - DNA, 120 bp, Artificial Sequence
  ENSG00000165821_20 (sequence is synthesized)
gtccggatgcacctggggggccagatccccaacggtggtactgcactccctgaaggtggaggagctgctcaggagaatggctccgagcaatctacagtctccggggcacggagtttcccc

SEQ ID NO: 526000 - DNA, 120 bp, Artificial Sequence
  ENSG00000165821_21 (sequence is synthesized)
cagcagcagtcccagcagccatcaccggaagaggagttgtctgaggaggaggaagaggaggatgaggaagaagaggaagatgtgactgatgaagattccctggcagggagaggctcagag

SEQ ID NO: 526001 - DNA, 120 bp, Artificial Sequence
  ENSG00000165821_22 (sequence is synthesized)
agtggaggtgagaaggcaatatcagtgagaggtgattcagaagaggcatctggggcagaggaggaggtggggacagtggcggcagcagccacagctgggaaggagatggacagtaatgag

SEQ ID NO: 526002 - DNA, 120 bp, Artificial Sequence
  ENSG00000165821_23 (sequence is synthesized)
aaaactactcaacagtcttctttgccaccaccaccaccacctgacagcctggatcagcctcagccaatggagcagggaagcagtggtgttttaggaggcaaggaagaggggggcaaaccg

SEQ ID NO: 526003 - DNA, 120 bp, Artificial Sequence
  ENSG00000165821_24 (sequence is synthesized)
gagagaagctcaagtccggcatcagcactcaccccagaaggggaagccaccagcgtgaccttggtagaggagctgagcctgcaggaggcaatgagaaaggagccaggagagagcagcagc

SEQ ID NO: 526004 - DNA, 120 bp, Artificial Sequence
  ENSG00000165821_25 (sequence is synthesized)
agaaaggcctgcgaagtgtgtggccaggcctttccctcccaggcagctctggaggagcatcagaagacccaccccaaggaggggccgctcttcacttgtgttttctgcaggcagggcttt

SEQ ID NO: 526005 - DNA, 120 bp, Artificial Sequence
  ENSG00000165821_26 (sequence is synthesized)
cttgagcgggctaccctcaagaagcatatgctcctggcacaccaccaggtacagccctttgccccccatggccctcagaatattgctgctctttctctagtccctggctgttcgccttcc

SEQ ID NO: 526006 - DNA, 120 bp, Artificial Sequence
  ENSG00000165821_27 (sequence is synthesized)
atcacctccacagggctctccccctttccccgaaaagatgaccccacgatcccatgagcctgtttttctgtacctgctgctctttgtcccacagagcagaaacagcttcacaaaaggacc

SEQ ID NO: 526007 - DNA, 120 bp, Artificial Sequence
  ENSG00000165821_28 (sequence is synthesized)
tcccagagttatgagccctgattttgtctttttctctaagttcttaacatgttatgtccctagtggcttttctgtagtccctgagcttggaaattactgtgcttacaaggggatggcccc

SEQ ID NO: 526008 - DNA, 120 bp, Artificial Sequence
  ENSG00000165821_29 (sequence is synthesized)
ctaaggaatttttcttccctcctcattctttgtacctgaggaacatagattctctgcagctttctcaaggggaaccctctccagcttccctggtgtgacccttcttccccctcctctctc

SEQ ID NO: 526009 - DNA, 120 bp, Artificial Sequence
  ENSG00000165821_30 (sequence is synthesized)
ctctccctttccctttggtaggtgcacctgagcacctacatttggcattgcagcctagccaaaaagggctggcagctgtctctggagggcccagtgccactcctctggggtgacctttct

SEQ ID NO: 526010 - DNA, 120 bp, Artificial Sequence
  ENSG00000165821_31 (sequence is synthesized)
gctcagctggtgggtatgggtcccctatctttctagaaccagtatgtggcattcctgtcaaatggcctgcccatgaagccctggaattccagctccacctccactaccactccaagcctg

SEQ ID NO: 526011 - DNA, 120 bp, Artificial Sequence
  ENSG00000165821_32 (sequence is synthesized)
gccccaccagtgctgtttggcctaggaactgtggctgggaaggtgcctccaacaatgggatccagggaagccaaggagaagacagcccccctcctatttcagcctcctgcacccaaggca

SEQ ID NO: 526012 - DNA, 120 bp, Artificial Sequence
  ENSG00000165821_33 (sequence is synthesized)
gtgcctgagaagcccatcatagacaagaagtagcaaactgtacattccttcttcctccccctgctccagaaggtgccggtactgaagatgctccagtaattggtgacccaaccctaggaa

SEQ ID NO: 526013 - DNA, 120 bp, Artificial Sequence
  ENSG00000165821_34 (sequence is synthesized)
gtagggagaaatgaaggaagggcataggaaaattttcccagtaaatcccctgatggtcacattaaggtaaaggttttggctggtcagtgtgccaagacctctccagcttctcattcatga

SEQ ID NO: 526014 - DNA, 120 bp, Artificial Sequence
  ENSG00000165821_35 (sequence is synthesized)
tgacctctcaaagttgggaaacaagctgatttcttgccaagaggtctcccaggagatatttgggaaatgtgaagttcgtatctttaaggagcatttttggtcagcatggttgatgaacta

SEQ ID NO: 526015 - DNA, 120 bp, Artificial Sequence
  ENSG00000165821_36 (sequence is synthesized)
atgatgagagagttaaggaatgttgctagaacatagggcttgctggtacctatgtgactaagaaagggacatgatgtaagggaaaaggcctcaaattcttgtgaatgtctggacattctc

SEQ ID NO: 526016 - DNA, 120 bp, Artificial Sequence
  ENSG00000165821_37 (sequence is synthesized)
gttaatattcttttgggctaatagtgacatagtgtgcagaggtgtaccagggatcatgggggatttcctagcactagtatgcttctagttttagataactccctcctttattccctggcc

SEQ ID NO: 526017 - DNA, 120 bp, Artificial Sequence
  ENSG00000165821_38 (sequence is synthesized)
ccttgtattttccttatcttcctctttcaagacccctacccattttgcctatccgtaggctggggcttgtgtctttgtcattgtctggttcttaagagtcccagactttgggagaccagc

SEQ ID NO: 526018 - DNA, 120 bp, Artificial Sequence
  ENSG00000165821_39 (sequence is synthesized)
tccaggtggcgtcctccctgcctctccgtcttgtaatgagttgtagtatttactcttaacataggatcatttggaacaggagttctgaggaggagagagtgagggttttgctattgactg

SEQ ID NO: 526019 - DNA, 120 bp, Artificial Sequence
  ENSG00000165821_40 (sequence is synthesized)
acttgaacgatggcttctcctcaagctgtaggctccagagcttcctaacctagtaaaatgtcaagaacagacgggagatattagtgtctttccctctatcattaaaggtgttttaaccaa

SEQ ID NO: 526020 - DNA, 120 bp, Artificial Sequence
  ENSG00000165821_41 (sequence is synthesized)
ctgggtgcagaggctgccgcagacccagcggccatcgcctccctcaatcccaatatccattgtctcccaccccacctggccctccacttcccccacaaccatggcgcacgaatccgagag

SEQ ID NO: 526021 - DNA, 120 bp, Artificial Sequence
  ENSG00000165821_42 (sequence is synthesized)
acagcacctgtcactgcgcctccggaaactctcccgagctctgagctcccgcccccacgcccccgctagcgctcccttctcccgcctcctctagctcccgcctccctccccagcagctcc

SEQ ID NO: 526022 - DNA, 120 bp, Artificial Sequence
  ENSG00000165821_43 (sequence is synthesized)
tccccataaactcccctcctcatcagctcctcccagatctcccctctccccgctttctcactccagcttctccccgcctcctcgctcccctccccctccgccgctgctccctgcccccgc

SEQ ID NO: 526023 - DNA, 120 bp, Artificial Sequence
  ENSG00000165828_0 (sequence is synthesized)
actgcagctccctgagcactctctacagagacgcggaccccagacatgaggaggctcctcctggtcaccagcctggtggttgtgctgctgtgggaggcaggtgcagtcccagcacccaag

SEQ ID NO: 526024 - DNA, 120 bp, Artificial Sequence
  ENSG00000165828_1 (sequence is synthesized)
gtccctatcaagatgcaagtcaaacactggccctcagagcaggacccagagaaggcctggggcgcccgtgtggtggagcctccggagaaggacgaccagctggtggtgctgttccctgtc

SEQ ID NO: 526025 - DNA, 120 bp, Artificial Sequence
  ENSG00000165828_2 (sequence is synthesized)
cagaagccgaaactcttgaccaccgaggagaagccacgaggtcagggcaggggccccatccttccaggcaccaaggcctggatggagaccgaggacaccctgggccatgtcctgagtccc

SEQ ID NO: 526026 - DNA, 120 bp, Artificial Sequence
  ENSG00000165828_3 (sequence is synthesized)
caccctccgcctgaggaggaccagggcgaggagaggccccggttgtgggtgatgccaaatcaccaggtgctcctgggaccggaggaagaccaagaccacatctaccacccccagtagggc

SEQ ID NO: 526027 - DNA, 120 bp, Artificial Sequence
  ENSG00000165828_4 (sequence is synthesized)
tccaggggccatcactgcccccgccctgtcccaaggcccaggctgttgggactgggaccctccctaccctgccccagctagacaaataaaccccagcaggccgggcgcggtggctcacct

SEQ ID NO: 526028 - DNA, 87 bp, Artificial Sequence
  ENSG00000165828_5 (sequence is synthesized)
gacaaataaaccccagcaggccgggcgcggtggctcacctctgtaatcccagcacttttagaggccgaggcaggcggatcacctgaa

SEQ ID NO: 526029 - DNA, 120 bp, Artificial Sequence
  ENSG00000165832_0 (sequence is synthesized)
actcttgttgcatcatcagcgtgcacctccacgatgaaacaggtctgggctacaaaagtatggccgcttctgaggcggcggtggtgtcttcgccgtctttgaaaacagacacatcccctg

SEQ ID NO: 526030 - DNA, 120 bp, Artificial Sequence
  ENSG00000165832_1 (sequence is synthesized)
tccttgaaactgcaggaacggtcgcagcaatggctgcgaccccgtcagcaagggctgcagccgcggtggttgcggccgcggccaggaccggatccgaagccagggtctccaaggccgctt

SEQ ID NO: 526031 - DNA, 120 bp, Artificial Sequence
  ENSG00000165832_2 (sequence is synthesized)
tggctaccaagctgctgtccttgagcggcgtgttcgccgtgcacaagcccaaagggcccacttcagccgagctgctgaatcggttgaaggagaagctgctggcagaagctggaatgcctt

SEQ ID NO: 526032 - DNA, 120 bp, Artificial Sequence
  ENSG00000165832_3 (sequence is synthesized)
ctccagaatggaccaagaggaaaaagcagactttgaaaattgggcatggagggactctagacagcgcagcccgaggagttctggttgttggaattggaagcggaacaaaaatgttgacca

SEQ ID NO: 526033 - DNA, 120 bp, Artificial Sequence
  ENSG00000165832_4 (sequence is synthesized)
gtatgttgtcagggtccaagagatatactgccattggagaactggggaaagctactgatacactagattctacggggagggtaacagaagaaaaaccttacgataaaataacacaagaag

SEQ ID NO: 526034 - DNA, 120 bp, Artificial Sequence
  ENSG00000165832_5 (sequence is synthesized)
atattgaaggcattctacagaaatttactggaaatataatgcaagtgccccccctctattctgcattaaagaaagatggacaaagactttcgactttgatgaagagaggtgaagtcgtag

SEQ ID NO: 526035 - DNA, 120 bp, Artificial Sequence
  ENSG00000165832_6 (sequence is synthesized)
aagcaaaacctgccaggccagtgactgtatacagtatctcccttcaaaaattccagccaccatttttcacattagatgttgaatgtggaggaggtttttatatcagaagcttggtcagtg

SEQ ID NO: 526036 - DNA, 120 bp, Artificial Sequence
  ENSG00000165832_7 (sequence is synthesized)
acattggaaaagaactatcttcctgtgccaatgtgctagagctgacccgaaccaaacagggaccatttacgctagaagaacatgcccttcctgaagacaaatggacaattgatgacattg

SEQ ID NO: 526037 - DNA, 120 bp, Artificial Sequence
  ENSG00000165832_8 (sequence is synthesized)
cacagtctcttgagcattgctcatctcttttcccagcagagttggcacttaaaaaatcaaaacctgagtctaatgaacaggttttgagctgtgaatatataactctaaatgagccaaaga

SEQ ID NO: 526038 - DNA, 120 bp, Artificial Sequence
  ENSG00000165832_9 (sequence is synthesized)
gagaagatgatgtaattaagacgtgttgagattggcctgggaatatcatcattttctagttgacatttgaatcctgtgtgcagatgcagaatgacaagctgcattcaaaagacaaacaat

SEQ ID NO: 526039 - DNA, 120 bp, Artificial Sequence
  ENSG00000165832_10 (sequence is synthesized)
atgtcttttttttttttgcatgaagaaaaatgtctatcatttacagtttcaatagcacataatttattttctatgcattataaatggccttgcagttggctcagttgtttgttgtgttgt

SEQ ID NO: 526040 - DNA, 120 bp, Artificial Sequence
  ENSG00000165832_11 (sequence is synthesized)
gaaatgttttaggattttttgtattgtgaaaatatgaatatgattggattcagaaaaattaactttctgaatttgatctgtcttcagtcttgtgaaaaagttgaacaaatttcctaatca

SEQ ID NO: 526041 - DNA, 120 bp, Artificial Sequence
  ENSG00000165832_12 (sequence is synthesized)
aagaaaaaagtatgagctccatgtttctttagtttcacaaaaatgaccataatttagtgttatttttactttatttaggcttcctggtggcttcattttattgaaattctttaaattgtt

SEQ ID NO: 526042 - DNA, 120 bp, Artificial Sequence
  ENSG00000165832_13 (sequence is synthesized)
taaagtggccattattgatctctttcttctgttttggagagtttattattaaaaacatttctttgataaaatggccatcatctagtaatacctgtgtttgtttagatcttggaaatgaat

SEQ ID NO: 526043 - DNA, 120 bp, Artificial Sequence
  ENSG00000165832_14 (sequence is synthesized)
ctaacaggttgtaaatagaagactaatacttaattaaagtcaccttcctaccattagagcagaagacagctcctatagttttgtattttggcagctatgagatattttcatggtaatgtc

SEQ ID NO: 526044 - DNA, 120 bp, Artificial Sequence
  ENSG00000165832_15 (sequence is synthesized)
aacatggtcaagcactttgtaccaagttattaagtaacataatttttaaaatttaaagaatgtgtcttcaactaaaaactttattctttagcatttatttatatttctctgtagggtgtt

SEQ ID NO: 526045 - DNA, 120 bp, Artificial Sequence
  ENSG00000165832_16 (sequence is synthesized)
ccctgtgacattgtctctttagtttgctctttcaagagatacttacagatgttgagatggctgccctgcatttccagctaatctcttctgctctaaatatttaaaaacagttcttctcaa

SEQ ID NO: 526046 - DNA, 120 bp, Artificial Sequence
  ENSG00000165832_17 (sequence is synthesized)
acattttcattcagatagctttctgaaagttccctatccctctttaccataattttttaaatgtagccacattgtaatagtaaacttcatatataatgagtgcttcatatttttgttatg

SEQ ID NO: 526047 - DNA, 120 bp, Artificial Sequence
  ENSG00000165832_18 (sequence is synthesized)
ggaaagcaatatattatgcagccagtctgtagaaacattcagatccctcttcctttactcaaatacagtttcaaaaggaagactcatgagaaatttcataaaatacaagtttttagatgt

SEQ ID NO: 526048 - DNA, 120 bp, Artificial Sequence
  ENSG00000165832_19 (sequence is synthesized)
ttatgctttgcctttctttttaaaggtgttttcctgctttgtagtctctaactctgaaatttaaaatatgtaaactaaagtggttttatttgtgcttaacccaatttaaactcaatgtaa

SEQ ID NO: 526049 - DNA, 120 bp, Artificial Sequence
  ENSG00000165832_20 (sequence is synthesized)
aatgttatatatgcatcagtacagcattttcaacatattggcaacatattttaaatgaaaacactaaaacaattcttagtatgagacaaaactgtaaggaaaaagagtgttaataccatg

SEQ ID NO: 526050 - DNA, 120 bp, Artificial Sequence
  ENSG00000165832_21 (sequence is synthesized)
atgcattaacataaaatatcaaacacacaaagtcataaaatgaaaatttacagttttacctgttcatatctagtgccccacagtgtgtgtcaaccaaaggtggcagtggctacatctgcc

SEQ ID NO: 526051 - DNA, 120 bp, Artificial Sequence
  ENSG00000165832_22 (sequence is synthesized)
tgttggactggtacaggttacaatatgtcctcttccattgcaaattaaagtccaaatagagaaatacttaggttttagaacacatcagaggtatttctgctgtatttttcaccttaaaaa

SEQ ID NO: 526052 - DNA, 120 bp, Artificial Sequence
  ENSG00000165832_23 (sequence is synthesized)
ttgacacagagtttactaatagaggagtagagattgttgaccatttttaaaaaacgatagccactctttttcttttatgtttaaaactgaagttttgccaaatgggaaaattactgttac

SEQ ID NO: 526053 - DNA, 120 bp, Artificial Sequence
  ENSG00000165832_24 (sequence is synthesized)
ctctaccatcttaatgtagtaactttagaatttaaatttttatattactattttcctttttgttgttcacatagtcttaaggcacctatacttttaaattgactttttcatttgatatta

SEQ ID NO: 526054 - DNA, 120 bp, Artificial Sequence
  ENSG00000165832_25 (sequence is synthesized)
attactttatactcttaatttatttagagtatttctctattgctgaatacttaagtagttttaaattttattatgataaattcctgggagggggattatttagtgaaataatatgaagaa

SEQ ID NO: 526055 - DNA, 120 bp, Artificial Sequence
  ENSG00000165832_26 (sequence is synthesized)
ttcctgggagggggattatttagtgaaataatatgaagaactttatgacttatgtttgccttattgcattcccaaagagttgtaacattttacagtgttaccatttgagtaggggtttta

SEQ ID NO: 526056 - DNA, 120 bp, Artificial Sequence
  ENSG00000165832_27 (sequence is synthesized)
tatgttgttgctaatttagtaaacataggagagaaatcaaagtttttctgatttgcttttatgtgatttatctgtatactttgttcatttatataaataaatgtcttaatggtttctata

SEQ ID NO: 526057 - DNA, 120 bp, Artificial Sequence
  ENSG00000165832_28 (sequence is synthesized)
caaatctctgatattatcagccattttaattctcagtgtgtttctttgggctaagaagattggaaattgtttatcgcattgttgcttacttgataggagtttttgaataaagatttattg

SEQ ID NO: 526058 - DNA, 120 bp, Artificial Sequence
  ENSG00000165837_0 (sequence is synthesized)
cacaaacgccggggcctgagatcgcggtggatgcacgcgcgggagcctggcttggctgttattgttgaaaactctcttggcttggactcagtttaccccctgacattgataataaagtga

SEQ ID NO: 526059 - DNA, 120 bp, Artificial Sequence
  ENSG00000165837_1 (sequence is synthesized)
cgttggctgctgcagaaggagttcaccacctacgacttccccagcatgtctgctgaaaataatcagttatcaggagcatcacctcctcaccctcccacaactccccaatattccacacag

SEQ ID NO: 526060 - DNA, 120 bp, Artificial Sequence
  ENSG00000165837_2 (sequence is synthesized)
aacttgccttcagagaaagaggatactgaagtagaactagatgaggaaagtctacaggatgaatctccattttctccagagggagagtctctggaggacaaagagtatctggaggaggaa

SEQ ID NO: 526061 - DNA, 120 bp, Artificial Sequence
  ENSG00000165837_3 (sequence is synthesized)
gaggatctggaagaggaagagtatctggggaaagaagaatacttgaaggaggaagagtatctggggaaggaagagcatctggaggaggaagagtatctggagaaggcagggtatctggag

SEQ ID NO: 526062 - DNA, 120 bp, Artificial Sequence
  ENSG00000165837_4 (sequence is synthesized)
gaggaagagtatattgaagaggaagagtatctggggaaggaagggtatctggaggaggaagagtacctggggaaggaagagcatctggaggaggaagagtatctggggaaggaagggtat

SEQ ID NO: 526063 - DNA, 120 bp, Artificial Sequence
  ENSG00000165837_5 (sequence is synthesized)
ctggagaaggaagattatattgaggaggtagattatctggggaagaaagcgtatctggaggaggaggagtatctggggaagaaatcatatctagaagaggaaaaggctctggagaaggaa

SEQ ID NO: 526064 - DNA, 120 bp, Artificial Sequence
  ENSG00000165837_6 (sequence is synthesized)
gagaatctggaggaggaagaagctctggagaaggaagagaatctggatggaaaagaaaatctgtataaaaagtatctgaaagaacccaaggcaagttattcatcacaaaccatgcttctt

SEQ ID NO: 526065 - DNA, 120 bp, Artificial Sequence
  ENSG00000165837_7 (sequence is synthesized)
cgtgatgcaaggagtccagacgctggcccctctcaggtgaccaccttcttgactgtcccgttgactttcgctaccccttctcctgtctctgaatctgccacagagtcttctgagttgctt

SEQ ID NO: 526066 - DNA, 120 bp, Artificial Sequence
  ENSG00000165837_8 (sequence is synthesized)
ctgacattgtacaggaggagccaggccagtcagacagactggtgctacgacagaactgccgtaaaatctttaaaatcgaaatcagaaacagagcaagaaaccaccacgaagctggctccg

SEQ ID NO: 526067 - DNA, 120 bp, Artificial Sequence
  ENSG00000165837_9 (sequence is synthesized)
gaagagcatgttaacactaaagtacagcaaaaaaaggaagaaaatgtcctggagtttgcttctaaagagaacttttgggatggtataacagatgagtccattgacaagctggaagtggaa

SEQ ID NO: 526068 - DNA, 120 bp, Artificial Sequence
  ENSG00000165837_10 (sequence is synthesized)
agctcctatcagacagtatttaaaacaataatcaaagaaatggctgctcacaatgaactggaagaggattttgacattcccctaactaagctactggaaagtgaaaacagatggaaactg

SEQ ID NO: 526069 - DNA, 120 bp, Artificial Sequence
  ENSG00000165837_11 (sequence is synthesized)
gtaattatgctgaagaaaaattatgaaaagttcaaggaaacaatcttacggattaagaggagacgtgaagctcaaaagttaacagagatgaccagtttcacatttcatttaatgagcaaa

SEQ ID NO: 526070 - DNA, 120 bp, Artificial Sequence
  ENSG00000165837_12 (sequence is synthesized)
ccaacacctgagaagcctgagacagaagaaatccaaaagcctcaacgtgttgttcatcataggaagaaattagaacgagataaggaatggatacagaagaagacagtggtgcatcaaggt

SEQ ID NO: 526071 - DNA, 120 bp, Artificial Sequence
  ENSG00000165837_13 (sequence is synthesized)
gatggaaaattaattctctaccccaacaagaatgtctatcaaattctctttcctgatgggacaggccagatacattatccatcaggaaacctggctatgctcatcttatatgcgaaaatg

SEQ ID NO: 526072 - DNA, 120 bp, Artificial Sequence
  ENSG00000165837_14 (sequence is synthesized)
aaaaagttcacatacatcattctggaagacagtctagaagggaggatccgggcccttatcaacaactcaggcaatgctaccttctatgatgaaaatagtgatatctggttgaacctgagc

SEQ ID NO: 526073 - DNA, 120 bp, Artificial Sequence
  ENSG00000165837_15 (sequence is synthesized)
tccaacctgggctactacttccccaaagacaaacgccagaaggcctggaactggtggaatctgaacatccatgtccacgcaccccctgtccagcccatctccttgaaaatcaatgagtac

SEQ ID NO: 526074 - DNA, 120 bp, Artificial Sequence
  ENSG00000165837_16 (sequence is synthesized)
atccaggtacaaataaggagccaggataagatcatcttctgcttcacctatgaacagaagcagatttgtttaaacctgggcaccaggtacaagtttgtgatcccagaggtgctgagcgaa

SEQ ID NO: 526075 - DNA, 120 bp, Artificial Sequence
  ENSG00000165837_17 (sequence is synthesized)
atgaagaagaaaaccatcctggaggcagaacccggcccaacagcccagaagatccgggtccttctggggaaaatgaataggctcctgaattacgcgaccacccctgatctggaaaacttc

SEQ ID NO: 526076 - DNA, 120 bp, Artificial Sequence
  ENSG00000165837_18 (sequence is synthesized)
atagaggccgtcagtatatcactgatggacaacaagtacctgaagaagatgctctctaaactctggttttaaggcggggcttatctggcatccaccaaatgccttaggaagttggagacc

SEQ ID NO: 526077 - DNA, 120 bp, Artificial Sequence
  ENSG00000165837_19 (sequence is synthesized)
ttgggagctccagggaaaaaaaacccaaagacctgttgaccttttatgagagttggtttgtaatttgggacctgtcgtggctccttgatttgaagtaaacatttttggcagaagggctaa

SEQ ID NO: 526078 - DNA, 120 bp, Artificial Sequence
  ENSG00000165837_20 (sequence is synthesized)
aagtgaaggagcataggaaatcaacacggttaaccaaggtgcatcaaggtgatggaaaattaattctctaccccaacaagaatgtctatcaaattctctttcctgatgggacaggccaga

SEQ ID NO: 526079 - DNA, 120 bp, Artificial Sequence
  ENSG00000165837_21 (sequence is synthesized)
tacagtatccacagaagcacagggatgctcgtattgacatatattggcacctaaaatgtctacgattttttatgggttatccatcaggaaacctggctatgctcatcttatatgcgaaaa

SEQ ID NO: 526080 - DNA, 120 bp, Artificial Sequence
  ENSG00000165837_22 (sequence is synthesized)
acatttaggtgcacagcccggctggcctgcttatttagaaaccaacagcagaaggctcagctgaaaagcaaaattaagagctatgttagttctcctatggaataccgtcctcaagaaaag

SEQ ID NO: 526081 - DNA, 120 bp, Artificial Sequence
  ENSG00000165837_23 (sequence is synthesized)
tcaaggagggaggggaaccacaagggttgaaaaacctcagcatcatgcaatacagccaggtaacaaacctgcatgtatgtaccccttgaatctaaaataaaagttgaaaaataaaataaa

SEQ ID NO: 526082 - DNA, 120 bp, Artificial Sequence
  ENSG00000165841_0 (sequence is synthesized)
gtcttaacaagaggagaaggcttcaatggatccttttgtggtccttgtgctctgtctctcatgtttgcttctcctttcaatctggagacagagctctgggagaggaaaactccctcctgg

SEQ ID NO: 526083 - DNA, 120 bp, Artificial Sequence
  ENSG00000165841_1 (sequence is synthesized)
ccccactcctctcccagtgattggaaatatcctacagatagatattaaggatgtcagcaaatccttaaccaatctctcaaaaatctatggccctgtgttcactctgtattttggcctgga

SEQ ID NO: 526084 - DNA, 120 bp, Artificial Sequence
  ENSG00000165841_2 (sequence is synthesized)
acgcatggtggtgctgcatggatatgaagtggtgaaggaagccctgattgatcttggagaggagttttctggaagaggccatttcccactggctgaaagagctaacagaggatttggaat

SEQ ID NO: 526085 - DNA, 120 bp, Artificial Sequence
  ENSG00000165841_3 (sequence is synthesized)
cgttttcagcaatggaaagagatggaaggagatccggcgtttctccctcatgacgctgcggaattttgggatggggaagaggagcattgaggaccgtgttcaagaggaagcccgctgcct

SEQ ID NO: 526086 - DNA, 120 bp, Artificial Sequence
  ENSG00000165841_4 (sequence is synthesized)
tgtggaggagttgagaaaaaccaaggcttcaccctgtgatcccactttcatcctgggctgtgctccctgcaatgtgatctgctccattattttccagaaacgtttcgattataaagatca

SEQ ID NO: 526087 - DNA, 120 bp, Artificial Sequence
  ENSG00000165841_5 (sequence is synthesized)
gcaatttcttaacttgatggaaaaattgaatgaaaacatcaggattgtaagcaccccctggatccagatatgcaataattttcccactatcattgattatttcccgggaacccataacaa

SEQ ID NO: 526088 - DNA, 120 bp, Artificial Sequence
  ENSG00000165841_6 (sequence is synthesized)
attacttaaaaaccttgcttttatggaaagtgatattttggagaaagtaaaagaacaccaagaatcgatggacatcaacaaccctcgggactttattgattgcttcctgatcaaaatgga

SEQ ID NO: 526089 - DNA, 120 bp, Artificial Sequence
  ENSG00000165841_7 (sequence is synthesized)
gaaggaaaagcaaaaccaacagtctgaattcactattgaaaacttggtaatcactgcagctgacttacttggagctgggacagagacaacaagcacaaccctgagatatgctctccttct

SEQ ID NO: 526090 - DNA, 120 bp, Artificial Sequence
  ENSG00000165841_8 (sequence is synthesized)
cctgctgaagcacccagaggtcacagctaaagtccaggaagagattgaacgtgtcattggcagaaaccggagcccctgcatgcaggacaggggccacatgccctacacagatgctgtggt

SEQ ID NO: 526091 - DNA, 120 bp, Artificial Sequence
  ENSG00000165841_9 (sequence is synthesized)
gcacgaggtccagagatacatcgacctcatccccaccagcctgccccatgcagtgacctgtgacgttaaattcagaaactacctcattcccaagggcacaaccatattaacttccctcac

SEQ ID NO: 526092 - DNA, 120 bp, Artificial Sequence
  ENSG00000165841_10 (sequence is synthesized)
ttctgtgctacatgacaacaaagaatttcccaacccagagatgtttgaccctcgtcactttctggatgaaggtggaaattttaagaaaagtaactacttcatgcctttctcagcaggaaa

SEQ ID NO: 526093 - DNA, 120 bp, Artificial Sequence
  ENSG00000165841_11 (sequence is synthesized)
acggatttgtgtgggagagggcctggcccgcatggagctgtttttattcctgaccttcattttacagaactttaacctgaaatctctgattgacccaaaggaccttgacacaactcctgt

SEQ ID NO: 526094 - DNA, 120 bp, Artificial Sequence
  ENSG00000165841_12 (sequence is synthesized)
tgtcaatggatttgcttctgtcccgcccttctatcagctgtgcttcattcctgtctgaagaagcacagatggtctggctgctcctgtgctgtccctgcagctctctttcctctggtccaa

SEQ ID NO: 526095 - DNA, 120 bp, Artificial Sequence
  ENSG00000165841_13 (sequence is synthesized)
atttcactatctgtgatgcttcttctgacccgtcatctcacattttcccttcccccaagatctagtgaacattcagcctccattaaaaaagtttcactgtgcaaatatatctgctattcc

SEQ ID NO: 526096 - DNA, 120 bp, Artificial Sequence
  ENSG00000165841_14 (sequence is synthesized)
ccatactctataatagttacattgagtgccacataatgctgatacttgtctaatgttgagttattaacatattattattaaatagagaaagatgatttgtgtattataattcaaaggcat

SEQ ID NO: 526097 - DNA, 120 bp, Artificial Sequence
  ENSG00000165841_15 (sequence is synthesized)
ttcttctctgcatgttctaaacaaaaagcattattatttgctgagtcaggttattagaccttccttcctttgtgcataatgcaggtgacaaattaaagaaaatagagttccaggaggcca

SEQ ID NO: 526098 - DNA, 120 bp, Artificial Sequence
  ENSG00000165841_16 (sequence is synthesized)
tgctggttctcaaaacgataaggacagaaaggacaaaggtgaagatggtagggaagctattttggctgagcattaccaaaatttagagttacatgaggattggatttgaaagtgagaaac

SEQ ID NO: 526099 - DNA, 120 bp, Artificial Sequence
  ENSG00000165841_17 (sequence is synthesized)
tctagggaaatattcagaggatcaggtattgggaggaatggatattaaatgttccacattggtgttccttttttttttttttttgagacaatgtctcactctgtctcccaggctggagtg

SEQ ID NO: 526100 - DNA, 77 bp, Artificial Sequence
  ENSG00000165841_18 (sequence is synthesized)
acactgtgcctggtctaatgttactttaaagtgtcattactttatctctaaataaagaatcaggttacttttattac

SEQ ID NO: 526101 - DNA, 120 bp, Artificial Sequence
  ENSG00000165841_19 (sequence is synthesized)
tactttatctctaaataaagaatcaggttacttttattacttcatgtttccaacttagaatgaagtaatgaagtataaatatatgctttcatattgctgctcatgtgttttgtcatgctt

SEQ ID NO: 526102 - DNA, 120 bp, Artificial Sequence
  ENSG00000165841_20 (sequence is synthesized)
ctgctcatgtgttttgtcatgcttctctcttcaaacatgaacaaaatttcttttcttttttcttttttttttgaaatggagtcccacttttgttccccaggctggagtgcaatggtgcga

SEQ ID NO: 526103 - DNA, 90 bp, Artificial Sequence
  ENSG00000165841_21 (sequence is synthesized)
ctcagcctcccaaactgctgggcacaaaatttctaagaagaattaccagggtttaatctttttcagcttctcctatattgttttagtttt

SEQ ID NO: 526104 - DNA, 120 bp, Artificial Sequence
  ENSG00000165841_22 (sequence is synthesized)
gtttaatctttttcagcttctcctatattgttttagttttaacattagtgggatgataattttatgctattgtcctaatataattagcctcatgtcatctccaaagcatagacaactaag

SEQ ID NO: 526105 - DNA, 120 bp, Artificial Sequence
  ENSG00000165841_23 (sequence is synthesized)
tatcttatgttaaattatgttcaccactcttcctgtcttctacttgaaatgtaagaaataagaagtaacataattgattatgcttttcacagctcatctcctagaacaagctacttacaa

SEQ ID NO: 526106 - DNA, 120 bp, Artificial Sequence
  ENSG00000165841_24 (sequence is synthesized)
tttggaatacatttaaagataatatatgggtacagatgtacatgtacatctatgcatgtgtgtgtacattatgtgcattcacacataatatatatatgtataacttatgcacacatacat

SEQ ID NO: 526107 - DNA, 120 bp, Artificial Sequence
  ENSG00000165841_25 (sequence is synthesized)
atagggttaaatgtttatttacaatattgggctcatatcacacatcttgtattaaaacttgctattttcctaccaagtaatatgccagcaaaacctctaaggtgatagaaacataggcaa

SEQ ID NO: 526108 - DNA, 120 bp, Artificial Sequence
  ENSG00000165841_26 (sequence is synthesized)
ataattcagagagttaatagaagagaaagtggaaatgggtattacattaatggaaagatacagatggaaattacacattatacattttaaacattcttcattgggaaatgaaaatgtatt

SEQ ID NO: 526109 - DNA, 120 bp, Artificial Sequence
  ENSG00000165841_27 (sequence is synthesized)
aatgtagtgttagtagaggtgttgacaaacacccatgggtgagataaataaaaaagttgtctagtctgtttcctcctggagactgtagtggataatctgttttcctgcctatttcagctc

SEQ ID NO: 526110 - DNA, 120 bp, Artificial Sequence
  ENSG00000165841_28 (sequence is synthesized)
ctaaaggctgcctgcattccttggctcatgaactcctttttctttcactccaaacacttgcttcttttgttacatctcctactcctactactcttattctctctcccttatgtaaagacc

SEQ ID NO: 526111 - DNA, 120 bp, Artificial Sequence
  ENSG00000165841_29 (sequence is synthesized)
cttgtgattacatgaaacccaccagtgtaatctcttcatgtccagacattatttagcctaccatactattattatacccatttgaacaaccaaacaattgcactgatgatctgttaagca

SEQ ID NO: 526112 - DNA, 120 bp, Artificial Sequence
  ENSG00000165841_30 (sequence is synthesized)
tcttgttcaaggtcacacagctttttaagtgtcagagccaacaattggacaagggcaatctgactggaaagtagaagttgctaacaactttgctaattctctgcatttatttttattgtt

SEQ ID NO: 526113 - DNA, 120 bp, Artificial Sequence
  ENSG00000165841_31 (sequence is synthesized)
tgtatttcttccctaaaatacatatttcatatgagaagagaactttatttggctcactaatgaataccagccacctgaaacactgtttagaagatactggctcaataaatatttaatgaa

SEQ ID NO: 526114 - DNA, 120 bp, Artificial Sequence
  ENSG00000165841_32 (sequence is synthesized)
tgtggaggagttgagaaaaaccaagggtgggtgaacatactctctatcactgacctttctggactgctctcctctctactgacattcttggaaacatttcaggggtggccagatctttta

SEQ ID NO: 526115 - DNA, 120 bp, Artificial Sequence
  ENSG00000165841_33 (sequence is synthesized)
gtgcatacagtgtgggtataaaagttcatttaatcctatgttctcctgaactttgcttctttgttttcaaataagaaatgatgaatatagattttgagttcattttttgaaagagttaaa

SEQ ID NO: 526116 - DNA, 120 bp, Artificial Sequence
  ENSG00000165841_34 (sequence is synthesized)
gagcagtgtttttcccattatctattccagaacatgtcaccagagaatacttgacaagtggacatggtggaaatggccctatcacacccctagggagcatgaaccaaatggcatgtgctt

SEQ ID NO: 526117 - DNA, 120 bp, Artificial Sequence
  ENSG00000165841_35 (sequence is synthesized)
ttatttaattggactatgtttgtatggtcagcctcactgacttgtctagggtttcttttaggcccatgcttgccattctggccagtaatgacattctacagtttttattgcttaggcata

SEQ ID NO: 526118 - DNA, 120 bp, Artificial Sequence
  ENSG00000165841_36 (sequence is synthesized)
tcttagtgtagttctcatcagcttttatttctctgtaaatacagcattatttaaaaaatagtgttaattatttcttgttactctattgattttgagtaaacatatgctatgacataattc

SEQ ID NO: 526119 - DNA, 120 bp, Artificial Sequence
  ENSG00000165841_37 (sequence is synthesized)
atttaactagattttaattattagtaataactgtaatttttattccttaagtataatttggctctgtttcattttgcttatctctttccaatcatatttatgaaattttggcttagaaat

SEQ ID NO: 526120 - DNA, 120 bp, Artificial Sequence
  ENSG00000165841_38 (sequence is synthesized)
tttccaatcatatttatgaaattttggcttagaaatttatggtaattattattttccactgccaactctactcacctatgaagttttacaatgaatcagtttatcagcttggataccaaa

SEQ ID NO: 526121 - DNA, 87 bp, Artificial Sequence
  ENSG00000165841_39 (sequence is synthesized)
tggtccattttacagagtgctgattgttccattttagctagacacagagcattgattggtacatttttacagagtgctgattggtgc

SEQ ID NO: 526122 - DNA, 120 bp, Artificial Sequence
  ENSG00000165841_40 (sequence is synthesized)
tgtttacaaacctttagctagagagaaaagttctccaagtccccacccgacacagaagcccagatggcttcacctctcagtttagttgtgtacttgtttgtagttggaatttgcaaggca

SEQ ID NO: 526123 - DNA, 120 bp, Artificial Sequence
  ENSG00000165841_41 (sequence is synthesized)
gaataatagggatgaggttagtccatgggtaattattagggcagttgcaccggtaaaacttcagggggttttaatgagaatagccatgataataagtgacatgtggcttatggaggaata

SEQ ID NO: 526124 - DNA, 120 bp, Artificial Sequence
  ENSG00000165841_42 (sequence is synthesized)
agtaatgagtgattttagatcagtttggcacagaaaaattgagcttgttatgattattcctcatagggatagtatgagggaggaataagctataaactctgttaaggggttaaggattag

SEQ ID NO: 526125 - DNA, 120 bp, Artificial Sequence
  ENSG00000165841_43 (sequence is synthesized)
ggtgattcttataatcccatagccacctaattttaggagtactgctgtggagactattggcccagcaatcgggacctctacatgggcttttgggagttctaggtggattccatagagagg

SEQ ID NO: 526126 - DNA, 120 bp, Artificial Sequence
  ENSG00000165841_44 (sequence is synthesized)
tgcttttactataaatgctatgatgcatgctaatcataaaagactgttggaccaggaaattgttagttcttgaagctgggtatttgtcttaaggtagacacaagagtgctgataaatttc

SEQ ID NO: 526127 - DNA, 120 bp, Artificial Sequence
  ENSG00000165841_45 (sequence is synthesized)
tcaagcatgagtgtttgaataagtgaagtttcaaatttgggtcttctgtatattagctgtgggacactgaaaatgaatttgtcattctcttagctcagtttgtttgtttaaaatagagca

SEQ ID NO: 526128 - DNA, 120 bp, Artificial Sequence
  ENSG00000165841_46 (sequence is synthesized)
aatagacctgctgaatatgttggtgtgagggttaattgtaatctgtgtagcaattgtctgaccattgccttgaacatcataggccatctgagtggcaagtataataatcatcatcatgtt

SEQ ID NO: 526129 - DNA, 120 bp, Artificial Sequence
  ENSG00000165841_47 (sequence is synthesized)
tatatataaaattcagaaatatttgagcctgtgtgactgaataaaagcatacaaatacaatgaaaatatgaatctaagtcaggcttagtaaatggacaaaacagtgacttcatttgctgt

SEQ ID NO: 526130 - DNA, 120 bp, Artificial Sequence
  ENSG00000165861_0 (sequence is synthesized)
actccgatcagctgatcccaactgacaacaggagaggaggaagcccgggaggcaacgaaggaggagggtggcggagatggagatgaggatggatctgccggtgtcctgaggaatagcctc

SEQ ID NO: 526131 - DNA, 120 bp, Artificial Sequence
  ENSG00000165861_1 (sequence is synthesized)
tgcccccactggcgccctgcggccccccgacgccgccttgctgcggccgagcttctcagtggtatcccctgaaatactgacttcaggtcgaattatattgaaaagctcctgaccactttc

SEQ ID NO: 526132 - DNA, 120 bp, Artificial Sequence
  ENSG00000165861_2 (sequence is synthesized)
tttcattaccaaaactttgtagctgatgtccaaccgatgaacccaccaccgtgaacccatcagacctctctcagatagccataaaagacccttccaagtcaattttgaccacatctttgc

SEQ ID NO: 526133 - DNA, 120 bp, Artificial Sequence
  ENSG00000165861_3 (sequence is synthesized)
ttgcactttatggaggatgaaaccatcaaaccaaatcaacgttgctgctaatacaagagtcttagaggcagcaaattaaaaatttgaacatttgtttgtgaagaactataacaggacatg

SEQ ID NO: 526134 - DNA, 120 bp, Artificial Sequence
  ENSG00000165861_4 (sequence is synthesized)
aaaggtgttcttttttaaagtgttcagaaccctgtggaagtttcgtgcagtcttcagactcaaatcttcgtcttcacccccggggcaagctcagtgactattatatggtgggtgtgtttc

SEQ ID NO: 526135 - DNA, 120 bp, Artificial Sequence
  ENSG00000165861_5 (sequence is synthesized)
cttaccagcgtgagtatgagtgcccagacttccccagcagagaagggcctgaatccggggctgatgtgccaggaaagttacgcttgcagcgggactgatgaagctatctttgagtgtgat

SEQ ID NO: 526136 - DNA, 120 bp, Artificial Sequence
  ENSG00000165861_6 (sequence is synthesized)
gagtgctgcagtctgcagtgtctccgctgcgaggaggagctccatcggcaggagcgcctgagaaaccatgagcggataagactcaaacctggccatgtcccttactgtgacctctgcaag

SEQ ID NO: 526137 - DNA, 120 bp, Artificial Sequence
  ENSG00000165861_7 (sequence is synthesized)
ggtctcagtgggcatttaccaggtgttaggcagagggcaatagtgaggtgccagacctgcaaaattaacttgtgcctggagtgccagaagaggactcattctgggggtaacaaaaggaga

SEQ ID NO: 526138 - DNA, 120 bp, Artificial Sequence
  ENSG00000165861_8 (sequence is synthesized)
caccctgttactgtgtacaatgtcagtaatctccaggagtcactggaggcagaagagatggatgaggagaccaagaggaagaagatgactgagaaggttgtgagtttcctcctagtagac

SEQ ID NO: 526139 - DNA, 120 bp, Artificial Sequence
  ENSG00000165861_9 (sequence is synthesized)
gaaaatgaagaaattcaggtaacaaatgaagaagactttattagaaaattggactgcaaacctgatcagcatctgaaagtggtttccatttttggaaatactggtgatggaaagtctcat

SEQ ID NO: 526140 - DNA, 120 bp, Artificial Sequence
  ENSG00000165861_10 (sequence is synthesized)
actctcaaccacactttcttttatggtcgtgaagtctttaaaacctccccgacccaggagtcctgcactgtgggagtgtgggcagcctatgacccagttcacaaagtagcagtgatcgat

SEQ ID NO: 526141 - DNA, 120 bp, Artificial Sequence
  ENSG00000165861_11 (sequence is synthesized)
acggaagggctcctgggggccaccgtgaatctaagccagagaacacggctgctgcttaaggtcctggccatctcagacctcgtcatctatcgaactcatgcagaccggctgcataacgac

SEQ ID NO: 526142 - DNA, 120 bp, Artificial Sequence
  ENSG00000165861_12 (sequence is synthesized)
ctcttcaaattccttggggatgcctcagaagcttatctgaagcacttcaccaaggagctcaaggccaccactgctcgctgtggcctggatgtccctttatccacactgggccctgcagtt

SEQ ID NO: 526143 - DNA, 120 bp, Artificial Sequence
  ENSG00000165861_13 (sequence is synthesized)
atcatcttccatgagaccgtgcacacccagctactgggctctgatcatccctcagaggtgccagagaagctcatccaggaccggttccggaagctgggccgtttccctgaagcctttagt

SEQ ID NO: 526144 - DNA, 120 bp, Artificial Sequence
  ENSG00000165861_14 (sequence is synthesized)
tccattcactacaagggaacgaggacttacaaccctcccacggacttttctgggcttcggcgtgctttggagcagctactagagaataacaccacccgttctccccggcacccgggagtc

SEQ ID NO: 526145 - DNA, 120 bp, Artificial Sequence
  ENSG00000165861_15 (sequence is synthesized)
atcttcaaagccctgaaggcactaagtgaccgcttcagcggtgagatccccgatgaccagatggcgcacagctccttttttccagatgagtatttcacctgctcctccttgtgcctcagc

SEQ ID NO: 526146 - DNA, 120 bp, Artificial Sequence
  ENSG00000165861_16 (sequence is synthesized)
tgtggggttggatgtaagaaaagcatgaatcatgggaaggaaggagtgcctcatgaagccaagagccgctgcagatactcccaccagtatgacaaccgagtgtatacctgcaaggcctgc

SEQ ID NO: 526147 - DNA, 120 bp, Artificial Sequence
  ENSG00000165861_17 (sequence is synthesized)
tatgagagaggcgaggaagtcagtgtagtgcccaaaacatctgcttccactgactccccctggatgggtctcgcaaaatatgcctggtctgggtatgtgatcgaatgtcctaactgtggc

SEQ ID NO: 526148 - DNA, 120 bp, Artificial Sequence
  ENSG00000165861_18 (sequence is synthesized)
cggacagagattgtgcatgtgtggcctggaactgatgggtttctgaaggacaacaacaatgctgcccagcgcctgttggacgggatgaacttcatggctcagtcggtgtccgagcttagc

SEQ ID NO: 526149 - DNA, 120 bp, Artificial Sequence
  ENSG00000165861_19 (sequence is synthesized)
cttggacccaccaaggctgtgacttcctggctgacagaccagatcgcccctgcctactggaggcccaactcccagattctgagctgcaacaagtgtgcgacgtcctttaaagataacgac

SEQ ID NO: 526150 - DNA, 120 bp, Artificial Sequence
  ENSG00000165861_20 (sequence is synthesized)
actaagcatcactgccgagcctgtggggagggcttctgtgacagctgttcatcaaagactcggccagtgcctgagcggggctggggccctgcgccagtgcgggtctgtgacaactgctac

SEQ ID NO: 526151 - DNA, 120 bp, Artificial Sequence
  ENSG00000165861_21 (sequence is synthesized)
gaagccaggaacgtccagttagctgttaccgaggcacaagtggacgatgaaggtggaacgctcattgctcggaaggtgggcgaggccgtgcagaacactctgggagccgtggtgacagcc

SEQ ID NO: 526152 - DNA, 120 bp, Artificial Sequence
  ENSG00000165861_22 (sequence is synthesized)
attgacataccactaggtctggtaaaggacgcggccaggcctgcgtactgggtgcctgaccacgaaatcctccactgccacaactgccggaaggagttcagcatcaagctctccaagcac

SEQ ID NO: 526153 - DNA, 120 bp, Artificial Sequence
  ENSG00000165861_23 (sequence is synthesized)
cactgccgggcctgcggacagggcttctgtgatgagtgctcccatgaccgccgggctgttccttctcgtggctgggaccatcccgtccgagtctgcttcaactgcaataaaaagcccggt

SEQ ID NO: 526154 - DNA, 120 bp, Artificial Sequence
  ENSG00000165861_24 (sequence is synthesized)
gacctttaaccccagccccctctccgagtccttcacaattccttaggttctcagggttagaaacagtcttgcgaggtaggccctcctcccagtcacctgctgtggtgtgtgtcctctcct

SEQ ID NO: 526155 - DNA, 120 bp, Artificial Sequence
  ENSG00000165861_25 (sequence is synthesized)
ctccgcatccagggccactttccctcagtgggggtgagcctggcggcaggcccgaaggtgtggacccctcagggcaggggaccttgcaacttatcgcaaaggggaatgaacctgaatccg

SEQ ID NO: 526156 - DNA, 120 bp, Artificial Sequence
  ENSG00000165861_26 (sequence is synthesized)
ttgcatttatttcagttaaaaataatgaatatatatgtgtatatctctctctcatatatacatatgaaaggcactcggggcgtatcgaggctgctgctggctgtgaagacttcgcacagt

SEQ ID NO: 526157 - DNA, 120 bp, Artificial Sequence
  ENSG00000165861_27 (sequence is synthesized)
ctcctccgcacagggtgaggtggcagtggcagcacgtcttcctcatgagccgagccaggtccatggccaccacgtggctggccccttcctctgctgctcttggagccttggaagcctctc

SEQ ID NO: 526158 - DNA, 120 bp, Artificial Sequence
  ENSG00000165861_28 (sequence is synthesized)
ctgtccttggctcttccctccatgcctgtcagctgcctggggagtgagcctccctggtccttcctgcctgaaacagcctgaagggaattctccctaggtctcctgggagtcgagtcccaa

SEQ ID NO: 526159 - DNA, 120 bp, Artificial Sequence
  ENSG00000165861_29 (sequence is synthesized)
ttcttggcttaagcctgttttagtcagagaccacccaacttagcgtgcaggtcaccggagtgggtggagggtcagaggtcgggtcttcggccctgagaagtagaaatgcaggggccgtgc

SEQ ID NO: 526160 - DNA, 120 bp, Artificial Sequence
  ENSG00000165861_30 (sequence is synthesized)
tgtccctggtcccccagggaacagcaaggaaggaactgagccttctccagcagggcttcctgtcccgatgcttctgtctccactcggctttcccaaaaggcggcacccagctcctcaatc

SEQ ID NO: 526161 - DNA, 120 bp, Artificial Sequence
  ENSG00000165861_31 (sequence is synthesized)
gaagcatctgcctcccacccctcggccccctcaagcccaccatctgcttctgagtgtcgcactaggattttcattgcttattttaaagtgtcttaatcctttgttcccagacacacaacc

SEQ ID NO: 526162 - DNA, 120 bp, Artificial Sequence
  ENSG00000165861_32 (sequence is synthesized)
cctctagctctcggaggggcgatcatgagaaaccttccagggaaactgagcacaggatgaactgttagttgtttttaaaagtctatataaatatttcaacagatcgtaaagaaaaaattt

SEQ ID NO: 526163 - DNA, 120 bp, Artificial Sequence
  ENSG00000165861_33 (sequence is synthesized)
atctctttggtccttgcaagagaagtcaaaggaacttttgtttctcctcaagagcctggacatctctgtctgtcatgactggaaagggcccgttgtgctgaaatcctatcatcatggtgg

SEQ ID NO: 526164 - DNA, 120 bp, Artificial Sequence
  ENSG00000165861_34 (sequence is synthesized)
atttgatcttcagtggccaaacacgaattaaagtataattcttaactgaactggtgggtgggttgagctttagggaagtatatggcggtcattcctggtgcgcctatcggtgtgacatga

SEQ ID NO: 526165 - DNA, 120 bp, Artificial Sequence
  ENSG00000165861_35 (sequence is synthesized)
gccctggagtgtgtcgtccctctcagccctgctcctcctgcctcctggggtccagtgactgggaccctactctagaactgtgtaccatccaattcgccatcataaaggaatcttcctgca

SEQ ID NO: 526166 - DNA, 120 bp, Artificial Sequence
  ENSG00000165861_36 (sequence is synthesized)
gcttagtaagtcctgaattgaacagctacacatcaagtcttatggtcactttgaagagaataaagccagagggattcctggtgtgtctccgttcttccctgccagggagttagtggttct

SEQ ID NO: 526167 - DNA, 120 bp, Artificial Sequence
  ENSG00000165861_37 (sequence is synthesized)
gagttggccacggtgagtgtgcaactcaccaaacatccctcttcctccttcctttcactcccttctcagagcatgatggaagcctgcgttttcatttcagactgatgggtttctgaagga

SEQ ID NO: 526168 - DNA, 120 bp, Artificial Sequence
  ENSG00000165861_38 (sequence is synthesized)
gcccggctgagatttctttttcccctgtgtcctcatacaaggatagtagtcgctgtgcctctgtagtgctgttgattgcaagtgtaacaaagaggcatgtgggtttccggctaccctttc

SEQ ID NO: 526169 - DNA, 120 bp, Artificial Sequence
  ENSG00000165861_39 (sequence is synthesized)
tgtgttcagcatctgaggcccagttagtaatcaaggtctggtcgtggccttgtgcctggctcagggtcaggctgttctgtgtaagtggcactggctcctttagccgtctcattgtcagtc

SEQ ID NO: 526170 - DNA, 120 bp, Artificial Sequence
  ENSG00000165861_40 (sequence is synthesized)
ttaacgctacagcacccagagcaagagagcacccagcttcaacccagacacttagtgaaaggaaactcactgtccaccaggcttcctttccattctcagataacgcgttactagaaagct

SEQ ID NO: 526171 - DNA, 120 bp, Artificial Sequence
  ENSG00000165861_41 (sequence is synthesized)
cttgtccttgttgagctaacgccacctgccttagtttctgcttgctccggggtcttgttgactttctcagctgagcagacatgtaccatacctacctgcctctctgttttgttttgggct

SEQ ID NO: 526172 - DNA, 120 bp, Artificial Sequence
  ENSG00000165863_0 (sequence is synthesized)
gggcagaggccaagtgggcaccggatagcgccagccccgcccagagagcgaaatcatggagccttccaagaccttcatgagaaacctgccaatcacaccaggctatagcggctttgtgcc

SEQ ID NO: 526173 - DNA, 120 bp, Artificial Sequence
  ENSG00000165863_1 (sequence is synthesized)
attcctcagctgccaaggaatgtccaaggaggatgacatgaaccactgtgtgaaaaccttccaggagaaaacacagcgctataaagaacagctgcgggaattgtgctgcgcagtggccac

SEQ ID NO: 526174 - DNA, 120 bp, Artificial Sequence
  ENSG00000165863_2 (sequence is synthesized)
tgccccgaaactgaaacctgtcaactccgaggagacggtcctgcaggccctgcaccagtacaatctgcagtaccaccccctgatcctggaatgcaaatatgtaaagaaacctctccagga

SEQ ID NO: 526175 - DNA, 120 bp, Artificial Sequence
  ENSG00000165863_3 (sequence is synthesized)
gcccccgatccctggctgggcaggctacctgccgagagccaaggtcactgaatttggctgtggcacgagatacactgtcatggccaaaaactgctacaaggacttcctggagatcacgga

SEQ ID NO: 526176 - DNA, 120 bp, Artificial Sequence
  ENSG00000165863_4 (sequence is synthesized)
gagtgaggagaaatgtctctttccttcctactaccgttttaaaaaggggatgaaatgtttgcagtggcctttctgcttagctgggccagctccctgcaactcacacggacggttcctctc

SEQ ID NO: 526177 - DNA, 120 bp, Artificial Sequence
  ENSG00000165863_5 (sequence is synthesized)
ctagatggaagctgccctgcccttggaaggcccctgagagaggaccccaaaactccgctgacatgtggctgtgctcagaggccaagtataccatgcagtgggaagatgtatctagagcca

SEQ ID NO: 526178 - DNA, 120 bp, Artificial Sequence
  ENSG00000165863_6 (sequence is synthesized)
ctgtcctccgcaaagtatgcagaaggctagaagcgcagagtctcccaaggaggtgaactttaagtggggcttccaaaacctgccattctcatgttggaatcacgcccagtgagcaataaa

SEQ ID NO: 526179 - DNA, 120 bp, Artificial Sequence
  ENSG00000165863_7 (sequence is synthesized)
gaaatttagtaacaagaattttttaactgccgcctgcatcctgagtggttgacggttgcatgtcattaatgataaagaccgttttttgtcatgtgggaataaagaggctgcttctccgca

SEQ ID NO: 526180 - DNA, 120 bp, Artificial Sequence
  ENSG00000165863_8 (sequence is synthesized)
aaggcacatctgaaaccatatgaagaaatatatggagttagctccacaaaaacttctgctccgtctccaaaagttttgcagcatgaagagctgctgccaaaatatcccgatttttctatt

SEQ ID NO: 526181 - DNA, 120 bp, Artificial Sequence
  ENSG00000165863_9 (sequence is synthesized)
gccgcagtgtctacacccgcaaaaacgcccgctttgacttagagccctccgcatatccttcccctggctggggcagccaaggcgcggaggacagctccgaggccagatgtttactgcgca

SEQ ID NO: 526182 - DNA, 120 bp, Artificial Sequence
  ENSG00000165863_10 (sequence is synthesized)
ctgaaaccatttcccctcacccctggtcacccctgcagattctcataggccagctgagctgccccatagcacccagaatcccgcaccgttccaaatcccaggggtcagcaccaaatgcaa

SEQ ID NO: 526183 - DNA, 71 bp, Artificial Sequence
  ENSG00000165863_11 (sequence is synthesized)
ccgcaccgttccaaatcccaggggtcagcaccaaatgcaaaggctccatttcttaaaatgagaaagacaca

SEQ ID NO: 526184 - DNA, 120 bp, Artificial Sequence
  ENSG00000165863_12 (sequence is synthesized)
agaggctggccagaaagaaacatttctaggggagggggcacagtcctggttagggaagagggtgctggtctgagaactaggagaccctaggcaagtcacaagttttcaggcctcagcttc

SEQ ID NO: 526185 - DNA, 120 bp, Artificial Sequence
  ENSG00000165863_13 (sequence is synthesized)
gaagagtgagtctggcttgggtccgtaccccaggcacaaggtcaaagggagaagtgcaaacccaggatgggggtttaccagatgtccccatcccagcactaggactatttgtgtgtgatt

SEQ ID NO: 526186 - DNA, 120 bp, Artificial Sequence
  ENSG00000165863_14 (sequence is synthesized)
tgtcttagagaaggtgcctcatttgtagtttcagggcttccccagtaggcaggtgccctctgctcccaacctgtgctcagcattccccagcagctctacctgtggtctttgctggtttgc

SEQ ID NO: 526187 - DNA, 120 bp, Artificial Sequence
  ENSG00000165863_15 (sequence is synthesized)
agggaggggatgggagtaaaaaccagcagggctaccatcctggcagtggcttaaggcccaagggtgctgagtggcctcagctttctcttctgcgaaatgaggagggtgatctttaccttt

SEQ ID NO: 526188 - DNA, 120 bp, Artificial Sequence
  ENSG00000165863_16 (sequence is synthesized)
tctgcgaaatgaggagggtgatctttacctttagaataaattgtaaagaaataacataccatgttcatatatttactcatatttatgtattgtattttattctatttattattattctat

SEQ ID NO: 526189 - DNA, 120 bp, Artificial Sequence
  ENSG00000165868_0 (sequence is synthesized)
ggcggctcagacacggcccgagcgccgccgcggacgcggacagagacccgcacgggcacgggcgctgcgctggaggctcccctcgcggtccggggctgcgcgaccatggcggacaaggag

SEQ ID NO: 526190 - DNA, 120 bp, Artificial Sequence
  ENSG00000165868_1 (sequence is synthesized)
gccggcggcagcgacgggccccgagaaacggctcccacatctgcatattcatctccagcccggagtcttggggacacaggaataacgcctctgtccccctcccatattgtgaacgacact

SEQ ID NO: 526191 - DNA, 120 bp, Artificial Sequence
  ENSG00000165868_2 (sequence is synthesized)
gactccaacgtctcagaacagcagtcatttctcgtggtggtggccgtcgactttgggaccacatccagtggctatgcctacagcttcaccaaggagccggaatgcatccatgtgatgagg

SEQ ID NO: 526192 - DNA, 120 bp, Artificial Sequence
  ENSG00000165868_3 (sequence is synthesized)
cgatgggagggaggtgaccctggtgtgtccaatcagaagactccaaccaccatcttgctgactcccgagaggaagttccacagcttcgggtatgccgccagggacttttaccatgacctg

SEQ ID NO: 526193 - DNA, 120 bp, Artificial Sequence
  ENSG00000165868_4 (sequence is synthesized)
gatcccaatgaggccaagcagtggctgtacctggagaagttcaagatgaagctgcacaccactggggacctcaccatggatacagacctgacggcagcaaatggcaagaaagtcaaagcc

SEQ ID NO: 526194 - DNA, 120 bp, Artificial Sequence
  ENSG00000165868_5 (sequence is synthesized)
cttgaaatctttgcttatgccctgcagtactttaaggagcaggcgctgaaggagctgagtgaccaggcgggttcggagttcgagaactctgatgtcagatgggtcatcacggtgcctgcc

SEQ ID NO: 526195 - DNA, 120 bp, Artificial Sequence
  ENSG00000165868_6 (sequence is synthesized)
atctggaagcagccggccaagcagttcatgagacaagctgcctaccaggcaggcctggcctcccccgagaactcggagcagctcatcattgccttggagcctgaggcagcctctatctac

SEQ ID NO: 526196 - DNA, 120 bp, Artificial Sequence
  ENSG00000165868_7 (sequence is synthesized)
tgccgaaagctgcggctacaccagatgattgagctgagcagcaaggcagccgtcaatgggtacagcggcagtgacacagtaggagctgggtttacacaggctaaggaacacatacggcgt

SEQ ID NO: 526197 - DNA, 120 bp, Artificial Sequence
  ENSG00000165868_8 (sequence is synthesized)
aatcggcagagtcggacctttttggtggagaatgtcataggagaaatctggtccgagctggaggaaggtgataagtatgtggttgtggacagtggcggtggcaccgtagacctgacagtc

SEQ ID NO: 526198 - DNA, 120 bp, Artificial Sequence
  ENSG00000165868_9 (sequence is synthesized)
catcagatccggttaccggagggacaccttaaggaactgtataaagcaacaggcggaccctatggatctttaggagtagattatgagttcgaaaaacttctgtataaaatatttggagag

SEQ ID NO: 526199 - DNA, 120 bp, Artificial Sequence
  ENSG00000165868_10 (sequence is synthesized)
gattttattgaacaattcaaaatcaaacgccctgcagcctgggttgacttaatgattgcgtttgagtctcgcaaaagggcggctgccccagacagaactaacccgctgaacatcaccctg

SEQ ID NO: 526200 - DNA, 120 bp, Artificial Sequence
  ENSG00000165868_11 (sequence is synthesized)
cccttctccttcattgactactacaagaagttccgcgggcacagtgtggagcacgccttgcggaaaagcaatgtggattttgtgaagtggtcctcgcaggggatgctgcggatgagtcca

SEQ ID NO: 526201 - DNA, 120 bp, Artificial Sequence
  ENSG00000165868_12 (sequence is synthesized)
gatgccatgaacgccctttttaagccgaccatcgatagcatcattgagcatctccgggacctgtttcagaagcccgaggtgtccaccgtcaagttcctctttctggtgggcggctttgcc

SEQ ID NO: 526202 - DNA, 120 bp, Artificial Sequence
  ENSG00000165868_13 (sequence is synthesized)
gaggcgcccctgctgcagcaggcggtgcaggctgcttttggggaccagtgccggatcatcatcccccaggacgtgggcctcaccatcctcaagggtgccgtcctctttggcctggacccc

SEQ ID NO: 526203 - DNA, 120 bp, Artificial Sequence
  ENSG00000165868_14 (sequence is synthesized)
gcggtcatcaaggtgcgccggtcgccgctcacctacggggtaggcgtgctgaaccgctacgtggagggcaagcacccgcctgagaagctgctggtgaaggatggcactcggtggtgcacc

SEQ ID NO: 526204 - DNA, 120 bp, Artificial Sequence
  ENSG00000165868_15 (sequence is synthesized)
gacgtctttgacaagttcatctctgccgaccagtctgtggctctgggtgagctggtcaagcgtagctacaccccggccaagccctcccagctggtcattgtcatcaacatctacagctct

SEQ ID NO: 526205 - DNA, 120 bp, Artificial Sequence
  ENSG00000165868_16 (sequence is synthesized)
gagcacgacaacgtcagcttcatcactgatcccggggtgaagaagtgtggcacgctccgcctggatctcacagggaccagtggcactgcggtgcccgcccggagggagatccagaccctt

SEQ ID NO: 526206 - DNA, 120 bp, Artificial Sequence
  ENSG00000165868_17 (sequence is synthesized)
atgcagttcggggacaccgagatcaaagccacagccattgatatagccacttcgaagagtgtcaaagttgggatcgacttcttaaattactaaccctcccgccccgctgcctgtcccctt

SEQ ID NO: 526207 - DNA, 120 bp, Artificial Sequence
  ENSG00000165868_18 (sequence is synthesized)
ggactcaacttatctgcatctgctgacctcaaccttgactgttctttccctaaccttgaccctcaccattgcccatgtgaatttcagcagggaagatgagaacaatcagggctagaaata

SEQ ID NO: 526208 - DNA, 120 bp, Artificial Sequence
  ENSG00000165868_19 (sequence is synthesized)
attagtgacttttgagggcacactggagtcagaaaaacagaaattaagattaaggtttaggcatagaaaattaaaggatcctggaggagcagctagttttcataggtacaaaagtggtga

SEQ ID NO: 526209 - DNA, 120 bp, Artificial Sequence
  ENSG00000165868_20 (sequence is synthesized)
aatggccacggagaagggaatcagtacatttctgcagcagtggttgcgctgctttgaacagatctccgttatgtagaatttaggatgccctattgctgtctttctagatttaaaatgaga

SEQ ID NO: 526210 - DNA, 120 bp, Artificial Sequence
  ENSG00000165868_21 (sequence is synthesized)
tctttgaaccaggaggagatcttcatctgagacttgtctttctaaattttttggatggccatcaatataaaatgccacccatctgcagttaatttcttttcctcatcatgtgattaaaag

SEQ ID NO: 526211 - DNA, 120 bp, Artificial Sequence
  ENSG00000165868_22 (sequence is synthesized)
tggtgattcagtgggaactgggaatgtttttagctggtggtagaaggctgcctacactgggcactgttttagattctcatatcatttaaacagcaaggaggttcagggaagaataaccgt

SEQ ID NO: 526212 - DNA, 120 bp, Artificial Sequence
  ENSG00000165868_23 (sequence is synthesized)
gaaacagatagtgaagagttactgacgtatcccaaattatatgctgtgacataaattcccagcatgcccagccctgatttctgagttcataagtaattctagtgaaccttagtaggaatt

SEQ ID NO: 526213 - DNA, 120 bp, Artificial Sequence
  ENSG00000165868_24 (sequence is synthesized)
ctgggtaagaaaatgaggttgccattggtcttgtttgcatcaccaagaccagacatccagaagagcccctcaccttgaaaagcagacagattttaaattaaccccctccttcccactcac

SEQ ID NO: 526214 - DNA, 120 bp, Artificial Sequence
  ENSG00000165868_25 (sequence is synthesized)
cttcatctccctaagagttttggccatttaattccacattttgaaaggaatacattggtgaaatttgggaagagaatctgtgctatgcaatgtttcattaaaatcttcagtttttcaagt

SEQ ID NO: 526215 - DNA, 120 bp, Artificial Sequence
  ENSG00000165868_26 (sequence is synthesized)
ctctctaaaaataatttgtagatctatacttgatgtattaagtcagttttttttcacagcgggcctgtggctcgcctgcatcagaattgcctgggtgcgtgttcagaacaggttcctgga

SEQ ID NO: 526216 - DNA, 120 bp, Artificial Sequence
  ENSG00000165868_27 (sequence is synthesized)
tctgagccctttttaactgaggccgactcttggagaggggcaccagaatctgcatttgtagtgtataccacatcgtggttcaactgaaattggagaaatactaacctgagattttgttga

SEQ ID NO: 526217 - DNA, 120 bp, Artificial Sequence
  ENSG00000165868_28 (sequence is synthesized)
agttcacacacagatcacagcccgccctctgcaggtgtcccctttgggctcctttaggaagagggcttccatgagaaggtgaccccataccttgccctcttggtcaatgggattggggct

SEQ ID NO: 526218 - DNA, 120 bp, Artificial Sequence
  ENSG00000165868_29 (sequence is synthesized)
ccacctggcttggagatggcccttttaaccctcacaggaagggccaggggaggaaaaaaattgcaagaaagcgacaccaagaacggagctgactgaggaaccaactggagggtcttcact

SEQ ID NO: 526219 - DNA, 120 bp, Artificial Sequence
  ENSG00000165868_30 (sequence is synthesized)
ctctccttccccagtgtacaaaaccagttttctgcaacattcaggagccaaatgaggaaaaagaatcaagaatctgactcacagcccatctgatctgttcaaagctgtcttttccacctg

SEQ ID NO: 526220 - DNA, 120 bp, Artificial Sequence
  ENSG00000165868_31 (sequence is synthesized)
ctgaaattcattaaatcactggaggcatgcataatgaatggagaatgagtgaacttccaatgcaacttggattcacaaacccattatcatagccaatatgcagattttaaacagcatttc

SEQ ID NO: 526221 - DNA, 120 bp, Artificial Sequence
  ENSG00000165868_32 (sequence is synthesized)
acatttcatttgaccatgtcttctttttcgcatcgcctgctgcagaattccctactagaatgtgaaacaacgaacaaaccacagaacttagagtgtgctggttagtcacataacttagta

SEQ ID NO: 526222 - DNA, 120 bp, Artificial Sequence
  ENSG00000165868_33 (sequence is synthesized)
gcaggattgtgtatccaggcacaaaggtgtctttgctaatgttctcttgctacctgccctgcttcaaacgctaaatggtatgggtctttctttgttgccagccatattctacaaataaga

SEQ ID NO: 526223 - DNA, 120 bp, Artificial Sequence
  ENSG00000165868_34 (sequence is synthesized)
cttttcaatatagttatgagtaatataattttatgtacatataatgttagaatattgtacagaatcttggtttctacgatgcgcttttcttgtttcaaaaagaggaaaatgcttgatttt

SEQ ID NO: 526224 - DNA, 120 bp, Artificial Sequence
  ENSG00000165868_35 (sequence is synthesized)
tgttgatgatacttttgttactgtccttaattttccatagtttggtttcttaattgtgctcactaagcatcgatctgtgctgatgccaagctatggactatgtacgcaagaccgagcaat

SEQ ID NO: 526225 - DNA, 120 bp, Artificial Sequence
  ENSG00000165868_36 (sequence is synthesized)
agacagaggtgcctagggtccaaacacactgaacgcacgtggaccgcctggatcaggagcctcatcagacccttctccatgcacatccttcccaaacagtcacagattccattgaaagga

SEQ ID NO: 526226 - DNA, 120 bp, Artificial Sequence
  ENSG00000165868_37 (sequence is synthesized)
gcagattctatcagttcttctgtgcagactttaagagctgaacgttctggttctggaagccatgtgactgcgcagaacaacctaagaaaccctttgtgtcctgaggggtcgttgacctct

SEQ ID NO: 526227 - DNA, 120 bp, Artificial Sequence
  ENSG00000165868_38 (sequence is synthesized)
ccttccgggtcggagcagtcactctgagggcaaagcgtggtccactgtgtgtgatgttttcaggatgctagggtcaaagaaagaaaccaagtggtacataagcccagcttttctgctggg

SEQ ID NO: 526228 - DNA, 120 bp, Artificial Sequence
  ENSG00000165868_39 (sequence is synthesized)
ctaagtgtaagtgtgagtaacatggtcaagcccctcttttttgggctaatgtaaagcctttcctgccttgcattaatgctatctccctgtgtactgtttctcttaaatgagcagatagaa

SEQ ID NO: 526229 - DNA, 120 bp, Artificial Sequence
  ENSG00000165868_40 (sequence is synthesized)
atctgcagtgttggcagataggtgatggagaggatgataattttatcttctggccacagagctgcagccccagttgtcagagtccttaaatgaaacccccaaatccatccctccttccct

SEQ ID NO: 526230 - DNA, 120 bp, Artificial Sequence
  ENSG00000165868_41 (sequence is synthesized)
acccccactggaatattctagaataagagcactggataagtacacttgaacacatttttctaaccttagaaaatacctacaaggcctgttgtcttgacccattactcaattgtccctggc

SEQ ID NO: 526231 - DNA, 120 bp, Artificial Sequence
  ENSG00000165868_42 (sequence is synthesized)
atattatctgatcttcacgtttcttggaagcagaatcatcaaggctttcctttgtaactgccctttccgtacacagcaggcatgaataaatgctgagtaacagacaagttacagacagga

SEQ ID NO: 526232 - DNA, 120 bp, Artificial Sequence
  ENSG00000165868_43 (sequence is synthesized)
ggggaaagaggaggaaccatacaactgtttttgcaaaatgatggctgagtccagattatagaggttgccttacccttagaatgttatttagaccaagtttagcttttagagtccaggtct

SEQ ID NO: 526233 - DNA, 120 bp, Artificial Sequence
  ENSG00000165868_44 (sequence is synthesized)
ggttaattgccagggtagcaaagaatcgcatgcaccaatgtaaacaggagtcagaatgcattattagtcaaagatcgaatttcacattgtagagatgtatagctgtgattaagctgcata

SEQ ID NO: 526234 - DNA, 120 bp, Artificial Sequence
  ENSG00000165868_45 (sequence is synthesized)
tgtatgctgggaaacggcttgagtggatggctaatataaaagttgttggccataatgccacacctctcatctgcttgaaatatggaccagtattctaaaatatcagctactggggtctca

SEQ ID NO: 526235 - DNA, 120 bp, Artificial Sequence
  ENSG00000165868_46 (sequence is synthesized)
ttcactacaagataaattcaaacttcacagaactttgcagcagttcaccaccagacgggactgtgtctgcaaactctcttgtcttcacagacgcctaataaagcaaaactctgaatctca

SEQ ID NO: 526236 - DNA, 120 bp, Artificial Sequence
  ENSG00000165868_47 (sequence is synthesized)
aggtccctaccaggtgcccgtagacgtcggcaggctggaggtagaaggtggagttgagcagctcttccagcctgcgcggaacgtcgttctcccggtagtactccatcgcctgctgcttca

SEQ ID NO: 526237 - DNA, 120 bp, Artificial Sequence
  ENSG00000165868_48 (sequence is synthesized)
gcttctgcagctccctagtggtcccacagctgcggccgccgccttcttcctccatgatggagagtgttggcgtgtacggattctgtgggtgtaaagcaaagaacaaaatgaagtgtgatt

SEQ ID NO: 526238 - DNA, 120 bp, Artificial Sequence
  ENSG00000165868_49 (sequence is synthesized)
gccttcttcctccatgatgaaaacatctgagactcagggctaagcaccttgcccaaggccacacaacaagtaggtgatggagagtgttggcgtgtacggattctgtgggtgtaaagcaaa

SEQ ID NO: 526239 - DNA, 120 bp, Artificial Sequence
  ENSG00000165868_50 (sequence is synthesized)
gaacaaaatgaagtgtgattcaaggtgggaaatagccgcttcagctcccccaggctgcagcagctaccacacaaagaagcagtcctatggcaatgacaggacatctgtgtccaggatttg

SEQ ID NO: 526240 - DNA, 120 bp, Artificial Sequence
  ENSG00000165868_51 (sequence is synthesized)
gatttgacgaactggcagttcctgcagggatgacggtactccctagttgtgtctgaattggacgcaccagcacttgagcacacacaaacgcacgtgaacagacggaacatgttatgggcc

SEQ ID NO: 526241 - DNA, 120 bp, Artificial Sequence
  ENSG00000165868_52 (sequence is synthesized)
tgttagccaaggaatgacagaattaatccatgggcatttgcggccagtgttgtgttaaactaaagggaaaaagtgaactggaaaaagcaatgtttgttttatgaaaatctcagacccaat

SEQ ID NO: 526242 - DNA, 120 bp, Artificial Sequence
  ENSG00000165868_53 (sequence is synthesized)
ccttaggtgacagttctggaaatgaggggtgtctaaaacaaagggcatctgaaacttcggtttttcagcttcctttccttgtctcatgacctctttcctacccgctgcctctgttttctc

SEQ ID NO: 526243 - DNA, 120 bp, Artificial Sequence
  ENSG00000165868_54 (sequence is synthesized)
taatatggaacagtgaaaatgggggccagcaaaacagattgctgatgtctgttgattttatcaaaggaaggttagattgagtaagatggcataaataagcacacataggacaatacctgg

SEQ ID NO: 526244 - DNA, 120 bp, Artificial Sequence
  ENSG00000165868_55 (sequence is synthesized)
catatatcaggtgctcaatagcagtgaattctctccctgctgtcatgaattcttgaaggttggagaccatgcgctgttctgcgtgccaagttattttttcggcctgatagcaggtgagct

SEQ ID NO: 526245 - DNA, 120 bp, Artificial Sequence
  ENSG00000165868_56 (sequence is synthesized)
actgagtgaagacagagactggacgctaattcagctctgaatcttcagcacctggcatggaaggtgcacaggacatatttgaaaaaggagaattaatagaattgaccaataggctgacct

SEQ ID NO: 526246 - DNA, 120 bp, Artificial Sequence
  ENSG00000165868_57 (sequence is synthesized)
cctgaatgatgactgagcaaattgatctagaggtattcaaaacagtttagttgactgtcccaaactttctcagacctcttctgccactgacttccctgaaaagaccctttgcagccaggc

SEQ ID NO: 526247 - DNA, 120 bp, Artificial Sequence
  ENSG00000165868_58 (sequence is synthesized)
tagagcgagactctgtctcaaaaaaaaaccaaaaaaacaaaatcaacccttttgcatttttgtcctatcctgttttccgtccccttgagaccgtatcacacgttctttttcctctttggt

SEQ ID NO: 526248 - DNA, 120 bp, Artificial Sequence
  ENSG00000165868_59 (sequence is synthesized)
ttcctctttggtgaccttctttgtctttcttgctgctcctgtacactgttgtttactcacactgcttttattctgagctctcatatctcttctatttctggttctgacgcctatcttgtc

SEQ ID NO: 526249 - DNA, 120 bp, Artificial Sequence
  ENSG00000165868_60 (sequence is synthesized)
tatgcctcgcacactcacctccgactcggagtcctgacctgcacagctgcgattgcggtttgcacactttgagggtgaacagttgtcatgcagcccttttgagtgctaaaaagtgaccac

SEQ ID NO: 526250 - DNA, 120 bp, Artificial Sequence
  ENSG00000165868_61 (sequence is synthesized)
ttaagattttcctcgtggttaggaagatgagtattttaaaatcattctggaggagattagtggtaaagaaaaccttcctcagcaactaaatcattgtggaaaaataagccaattagtcac

SEQ ID NO: 526251 - DNA, 120 bp, Artificial Sequence
  ENSG00000165868_62 (sequence is synthesized)
taaaacaaaaaccttttgaagacttgtgaacagaggaaagaacatgtgaattacaggttttctgttttgtggcattgatagactccagtagtattcatgatcgctgatcatcgcgatggg

SEQ ID NO: 526252 - DNA, 120 bp, Artificial Sequence
  ENSG00000165868_63 (sequence is synthesized)
gaccccggaaaggtgaaattatgttcagttgaatattacctaacccttctcaaaggacaatttgattttgttattccattgttaagggctttttggtggcccttcgagatctggctctgg

SEQ ID NO: 526253 - DNA, 120 bp, Artificial Sequence
  ENSG00000165868_64 (sequence is synthesized)
cttctctttgaccttgaaccctcactctggttgtgctgatctgctgaccgtcctccggacacggtagggtgctccatgccacagggcctttgaacaaacctttcttatccttggaataaa

SEQ ID NO: 526254 - DNA, 120 bp, Artificial Sequence
  ENSG00000165868_65 (sequence is synthesized)
tgccttttcttccttttgttcccctgccaaacacatgctattaggaaagattcaaccccatgtcatcacctccacaaagcttctcctgacacctcccaagttagattgacctttttctct

SEQ ID NO: 526255 - DNA, 120 bp, Artificial Sequence
  ENSG00000165868_66 (sequence is synthesized)
agtaagtgtaagtgctttcacttgttatatcatttaagccctgccaccctatgaagaggccactattatacatacagtcatgcattgctttatgacagggatatgttctgagaaatgcat

SEQ ID NO: 526256 - DNA, 120 bp, Artificial Sequence
  ENSG00000165868_67 (sequence is synthesized)
tattaggcaatttcatcattgtgtgaacatcatagaatgtacttccacaaacctagatgatatagcctgcctcacaactaagctattatatgcaggacagtctgctgctagctgcttcta

SEQ ID NO: 526257 - DNA, 120 bp, Artificial Sequence
  ENSG00000165868_68 (sequence is synthesized)
agctacagaccatatatatgtatatatgtacatatcctctccctgcccctcttgctctttatatatatatgcatatacctataatatatgcatatttagataggcttttatatgtatatt

SEQ ID NO: 526258 - DNA, 120 bp, Artificial Sequence
  ENSG00000165868_69 (sequence is synthesized)
tttgagacagggtcttgctctgtctcccatgctggagtgcagtggtatgatcacggctcactgcagccatgacctcccaggctcgagggatcctcccagctcagcctcccaagtaggtgg

SEQ ID NO: 526259 - DNA, 83 bp, Artificial Sequence
  ENSG00000165868_70 (sequence is synthesized)
gcaccaccacatctggctaatttttgaaggttctcaaactcctaggctcgagtaatccacccaactttgctcccaaagtggtg

SEQ ID NO: 526260 - DNA, 120 bp, Artificial Sequence
  ENSG00000165868_71 (sequence is synthesized)
aagtggtgggattataggtgtgagccaccgcaaccagcccatatatgcatatttaatatacatgtgtagcatatacatacacatatacacatctatgcatataaattaacaatatgtata

SEQ ID NO: 526261 - DNA, 120 bp, Artificial Sequence
  ENSG00000165868_72 (sequence is synthesized)
acatctatgcatataaattaacaatatgtatatatgtgcataaattcacatatattttctgtataaagacagcaagagaggcaggcggagaaagaatcagttgcagtctggaggaatata

SEQ ID NO: 526262 - DNA, 120 bp, Artificial Sequence
  ENSG00000165868_73 (sequence is synthesized)
cgtgtgttacatggtttccctgcctttaaattctctgttaatctgtattccttgtaaagtagatgacagcatgtatcttggcctacatgtttctaaagacaaacctctaagctcttgaag

SEQ ID NO: 526263 - DNA, 120 bp, Artificial Sequence
  ENSG00000165868_74 (sequence is synthesized)
ttctgccatggtgtatcatagtacattgaagtcagaaagcccattagaggaggaggatgcctggctagaatagtgttcttgagtttttccatgtgtattgtctcaggtaggaagatgaca

SEQ ID NO: 526264 - DNA, 120 bp, Artificial Sequence
  ENSG00000165868_75 (sequence is synthesized)
agtcctactttgttcttgtgtgattccccatcattcagtctgtggaggctgagcttgttaatggtggtgaacacgagtttcgttctttgccaggagtgcccaccagtgcccataacgccc

SEQ ID NO: 526265 - DNA, 120 bp, Artificial Sequence
  ENSG00000165868_76 (sequence is synthesized)
tcccggaatgtgccgggcagtatgtttagggtaagactgactaacgacccaacactgacaacggccttagcacaaacccaaaaggctctgctagagctcagaggcagccacgagattggg

SEQ ID NO: 526266 - DNA, 120 bp, Artificial Sequence
  ENSG00000165868_77 (sequence is synthesized)
agagctggatgacggtttgctaagagaattcaagctgtcagtcctcctgtgtatcctttggattctgttatgctgttgcttgtagagggaaaaagttcatgtgtcatttatatacaagtg

SEQ ID NO: 526267 - DNA, 120 bp, Artificial Sequence
  ENSG00000165868_78 (sequence is synthesized)
cccatttgacattgagtgagtcacatttattttaccctatatgaacacaaaatctctgttttaaaatcagattctagaactttaaaagggttcttatgtattgttctgaagtaactcagt

SEQ ID NO: 526268 - DNA, 120 bp, Artificial Sequence
  ENSG00000165868_79 (sequence is synthesized)
ggctcttggtgagcccgccccacctggcctgttgggtgaccctcttcctgccccctcaccggttctgctccttgttcctctctctgcgccttggctccccttcccagagcccttcctctt

SEQ ID NO: 526269 - DNA, 120 bp, Artificial Sequence
  ENSG00000165868_80 (sequence is synthesized)
ggtcttgccaaatcctgcccatcctttgagaaacgcttatgcccatggctgtcttaccccttcctgctttgctgtggtatccattagtctgttctcgcgctgctaataaagacatacaaa

SEQ ID NO: 526270 - DNA, 120 bp, Artificial Sequence
  ENSG00000165868_81 (sequence is synthesized)
tgagatttgggtggggacacagccaaaatatatctggcatatgcaatctgatcaccccttccaaacttctctcttaaaaatgcaacattctgacagcatgtggaggcttggatggaaaca

SEQ ID NO: 526271 - DNA, 120 bp, Artificial Sequence
  ENSG00000165868_82 (sequence is synthesized)
tgcaacattctgacagcatgtggaggcttggatggaaacacggtaaaaattacaacattgtttctcacacttttgcaccaaagtgatacaaatcgcagagctgaggcaactggtgtttct

SEQ ID NO: 526272 - DNA, 120 bp, Artificial Sequence
  ENSG00000165868_83 (sequence is synthesized)
gcgagaatggaatggaatgtggttgaaattttgtgttgttttttaaatatttgcaactatttgtcattcttccataaaaatcagaattcatggttgtgtacataaaagtaattttctaaa

SEQ ID NO: 526273 - DNA, 120 bp, Artificial Sequence
  ENSG00000165868_84 (sequence is synthesized)
cgctgaaggtaggactgatagttgaggccagccagctgtgtgctaggcggtggcacccgtgccagctccgtgtctcgggctgctgcacctgctggccagggtaggaggcacagcctggag

SEQ ID NO: 526274 - DNA, 120 bp, Artificial Sequence
  ENSG00000165868_85 (sequence is synthesized)
gtcaacacaacaggatgaaccctcacacgctgctggtgggaaagtaaaatggtgcggcctctttggaaaacagtttggcaattcctaaaaaagtaaagcacagagttaccgtaggaccca

SEQ ID NO: 526275 - DNA, 120 bp, Artificial Sequence
  ENSG00000165868_86 (sequence is synthesized)
gcagctccactcctgggtggagaaatgaaagaaatccctaagagaaatgaaagaagaaatgaaatccctaagagaaatgaaatccctaagagaaatgaaagaagatgtccacacacacgt

SEQ ID NO: 526276 - DNA, 120 bp, Artificial Sequence
  ENSG00000165868_87 (sequence is synthesized)
atacatgaatgtgcatagcaacattattcataactgtgaaaagtagaaacagtccacatgctgtccacacaaacacacgtatacatgaatgtgcatagcaacattattcacaacgacgaa

SEQ ID NO: 526277 - DNA, 120 bp, Artificial Sequence
  ENSG00000165868_88 (sequence is synthesized)
tgcccggccttcgtctctgcggtgggagcacgcagtcttcactcagcttctctgtgccctgccagccctaggcagcaggcagggagagcactgtagcgcgttccaatgccggccagggag

SEQ ID NO: 526278 - DNA, 120 bp, Artificial Sequence
  ENSG00000165868_89 (sequence is synthesized)
taatgaagaatcaggatactccgggaggaggtgggctttaagcacctctctgctcagcccccctacctggcccctccaaggacccccataaatggaggcatggttaccctggttcatcac

SEQ ID NO: 526279 - DNA, 120 bp, Artificial Sequence
  ENSG00000165868_90 (sequence is synthesized)
ccaccaagtgtctgggggcggggagcttctctctaagaatctgagggtagcctgagagcggttattggcctcacattgtactaggctcttaatctttcttgtgtattaacagattcttaa

SEQ ID NO: 526280 - DNA, 120 bp, Artificial Sequence
  ENSG00000165868_91 (sequence is synthesized)
agatattaactggcatcccggcagaggagccagtaggatgaggccccagaataggctgaagccaagttgtagcaaacgccaaggtgttcatcctgtgatcaaagaggagctgcttaaggt

SEQ ID NO: 526281 - DNA, 80 bp, Artificial Sequence
  ENSG00000165879_0 (sequence is synthesized)
cggctcccgcggctgcaggcgcgcggctagagtgcctggcgggctccggcttccgcgtccgccccggccccggtccagac

SEQ ID NO: 526282 - DNA, 120 bp, Artificial Sequence
  ENSG00000165879_1 (sequence is synthesized)
cgcccgccggcagccgagcccccagcgacgcccgcacagctccgggtgcccagacagggggccatgccgtgccggagggaggaggaagaggaagccggcgaggaggcggagggggaggaa

SEQ ID NO: 526283 - DNA, 120 bp, Artificial Sequence
  ENSG00000165879_2 (sequence is synthesized)
gaggaggaggacagcttcctcctactgcagcagtcagtggcgctgggcagctcgggcgaggtggaccggctggtggcccagatcggcgagacgctgcagctggacgcggcgcagcacagc

SEQ ID NO: 526284 - DNA, 80 bp, Artificial Sequence
  ENSG00000165879_3 (sequence is synthesized)
cccctggctgcggcggtgccggcggacaaggccaggtccccggcggtgccgctgctgctgccgcccgcgttggcggagac

SEQ ID NO: 526285 - DNA, 80 bp, Artificial Sequence
  ENSG00000165879_4 (sequence is synthesized)
accgcggccgcgtgcggggccgcgctgcgccctactgcgtggccgagctcgccacaggccccagcgcgctgtccccactg

SEQ ID NO: 526286 - DNA, 120 bp, Artificial Sequence
  ENSG00000165879_5 (sequence is synthesized)
ctgtccccactgccccctcaggccgaccttgatgggcctccgggagctggcaagcagggcatcccgcagccgctgtcgggtccgtgccggcgaggatggctccggggcgccgccgcctcc

SEQ ID NO: 526287 - DNA, 120 bp, Artificial Sequence
  ENSG00000165879_6 (sequence is synthesized)
cgccgcctgcagcagcgacgcgggtcccaaccagaaacccgcacaggcgacgacgacccgcaccggcttctgcagcagctagtgctctctggaaacctcatcaaggaggccgtgcgaagg

SEQ ID NO: 526288 - DNA, 120 bp, Artificial Sequence
  ENSG00000165879_7 (sequence is synthesized)
cttcattcgcgacggctgcagttacgtgcaaagcttccccaacgcccgctcctgggacctctgtcggccccggtgcatgaacccccttcgcctcgcagccctcgcgcggcctgcagtgac

SEQ ID NO: 526289 - DNA, 120 bp, Artificial Sequence
  ENSG00000165879_8 (sequence is synthesized)
cctggcgcctccgggagggcgcagctcagaactggcgacggcgttcttgtgcctggcagctaacacgcccggggtggccacagcgccagcctcagactggagggcaaggggttcccttga

SEQ ID NO: 526290 - DNA, 120 bp, Artificial Sequence
  ENSG00000165879_9 (sequence is synthesized)
gggctgcagttctactcaggctggtggagaactctggcttttggaagcgagagtaaaaagctaatgacgaggaaccgaaaaatcgcgagtgtttcgcgggtaactggggttgagggccaa

SEQ ID NO: 526291 - DNA, 120 bp, Artificial Sequence
  ENSG00000165879_10 (sequence is synthesized)
aatatttggaatgaaggactttggccctatttaaggcagattttacagagcgcacctcaaacgtacaagtcagtaggactccttatttggcgtgacccgacctggccgcggagcctgcat

SEQ ID NO: 526292 - DNA, 120 bp, Artificial Sequence
  ENSG00000165879_11 (sequence is synthesized)
cgcagcctctcagtgccctccagccccgcgaccatgtggccacaatccacgcttctccggatcgcggtgcgccggaaccacggaggatgatgccagttacttgctttaccttttcagggc

SEQ ID NO: 526293 - DNA, 120 bp, Artificial Sequence
  ENSG00000165879_12 (sequence is synthesized)
tggctcctgatccactttgggggaggagaacatgagtagataatttcagggtgcagcccaatctgccagacttaaaaaaaccatcttgtgtctttggaggtgctgcttaataccaaacat

SEQ ID NO: 526294 - DNA, 120 bp, Artificial Sequence
  ENSG00000165879_13 (sequence is synthesized)
gcggtgccatgaagggaccctttgggggttgaataggagttaacccctgcgctctctttgcaactgtctctcttctcagagtggtgggggaaggctgtacgacacgggtggggaaaggag

SEQ ID NO: 526295 - DNA, 120 bp, Artificial Sequence
  ENSG00000165879_14 (sequence is synthesized)
gtgggggcggggagtattgaatggtggtggaagggtagagaggcgcggagtgaaccccacgccctgtctaaagtgtattttcagagccggcccgcctctcctcggttcaaggtcactgtt

SEQ ID NO: 526296 - DNA, 120 bp, Artificial Sequence
  ENSG00000165879_15 (sequence is synthesized)
tcctgggcacgcactgggttgcgggacagagtagccaggttctgccggtgctcggagaagagcgcagtgttttgcaagtgctggagtctcctgaggacacgcgcgtcgccgccaccgcgg

SEQ ID NO: 526297 - DNA, 120 bp, Artificial Sequence
  ENSG00000165879_16 (sequence is synthesized)
gtgtgggaaagcgcggacgtgctgggcggctgtgcttcggtaggcgaccaccgcccctggccgcgctccgggctttcacggaaactcccgagaccgggccctgggttcctcctctcctac

SEQ ID NO: 526298 - DNA, 120 bp, Artificial Sequence
  ENSG00000165879_17 (sequence is synthesized)
tcggctctgcagtcctactcaagcgggtggctctgggatcctgggggcctgggttgggggctagggagacgccatgtgatggacactccagggacacacagcctagcacagcagcttata

SEQ ID NO: 526299 - DNA, 120 bp, Artificial Sequence
  ENSG00000165879_18 (sequence is synthesized)
atgggctctccggggccatttgcaataacagctgcaattccctggatagacgagttgatttcctccctctgcccctcccccagccatgccagctggcctttgtaagtgcaggaaaccgag

SEQ ID NO: 526300 - DNA, 120 bp, Artificial Sequence
  ENSG00000165879_19 (sequence is synthesized)
tagaaaatgtgaccctccaaatggagaagctgcaggctttgccattgtgaaccatggtgaagtgcttggaacatactgttcactcactctaaaggcgctgagactgtgctgttgttctcg

SEQ ID NO: 526301 - DNA, 120 bp, Artificial Sequence
  ENSG00000165879_20 (sequence is synthesized)
tttttatagtcaatggcttgttcatcatccagatgtggctactgacatatctacacttcgcaccggagtgtctggaattgtggctatcctgattataggattttaacttaactgaaatgc

SEQ ID NO: 526302 - DNA, 120 bp, Artificial Sequence
  ENSG00000165879_21 (sequence is synthesized)
ctgctttgaataaatgtgttgggttttttgtttggttttattttatacttgccatcagtgaaaaagatgtacagaacacatttctctgatctccataaacatgaaaacacttgaaatctc

SEQ ID NO: 526303 - DNA, 120 bp, Artificial Sequence
  ENSG00000165886_0 (sequence is synthesized)
ctctccgcccctccagcggagctggtctccggccgggcaccgtcgcgggcccccctggcccggccacctgggaccgtgctggggagtctgccacttccctctctcccctggcccgcaaag

SEQ ID NO: 526304 - DNA, 120 bp, Artificial Sequence
  ENSG00000165886_1 (sequence is synthesized)
ttttggcggagccatcgctggggctgagcgcgcccccggggggagatcggggagcgcccgatgccgggcggccggagccattgacccgggacgccgccgtccgctgagcagccgaccacc

SEQ ID NO: 526305 - DNA, 120 bp, Artificial Sequence
  ENSG00000165886_2 (sequence is synthesized)
ccgccgcctccggtgcatggggactggctgaggagccagcatgggcaactgcgtggggagacagcgccgggagaggccggcagccccgggacacccccgcaagcgagcaggacgcaatga

SEQ ID NO: 526306 - DNA, 120 bp, Artificial Sequence
  ENSG00000165886_3 (sequence is synthesized)
gcccctgaagaaagagcggcttaagtggaagagcgactaccccatgactgacgggcagctgcggagcaaacgggatgagttctgggacacagcgcctgccttcgagggccgcaaggagat

SEQ ID NO: 526307 - DNA, 120 bp, Artificial Sequence
  ENSG00000165886_4 (sequence is synthesized)
ctgggatgccctcaaggctgccgcctatgctgctgaagccaacgaccacgagctggcccaggccatcctggatggagccagcatcaccctgcctcatggcaccctctgtgaatgctacga

SEQ ID NO: 526308 - DNA, 120 bp, Artificial Sequence
  ENSG00000165886_5 (sequence is synthesized)
tgagctgggcaatcgctaccagctgcccatctactgcctgtcaccgccggtgaacctgctgctggagcacacggaggaggagagcctggagccccccgagcctccacccagcgtgcgccg

SEQ ID NO: 526309 - DNA, 120 bp, Artificial Sequence
  ENSG00000165886_6 (sequence is synthesized)
gcagctgcacgcccaggagggcatcgagccatcgtggcagcggtggttcttctccgggaagctgctcacagaccgcacacggctccaggagaccaagatccagaaagattttgtcatcca

SEQ ID NO: 526310 - DNA, 120 bp, Artificial Sequence
  ENSG00000165886_7 (sequence is synthesized)
ggtcatcatcaaccagcccccaccaccccaggactgatgggcccacggacccctgggaagaggccccgcctggagcactaggcccccaccctgctgctgccttccagtgctgtcattttc

SEQ ID NO: 526311 - DNA, 120 bp, Artificial Sequence
  ENSG00000165886_8 (sequence is synthesized)
ttcaggggccctcccctcggtgtggctggtgggtgagccgtgaagggaccctgcctttcagggcactacgcgccaccagttcccggtacccagggagcaggcagccacacacgggccttg

SEQ ID NO: 526312 - DNA, 120 bp, Artificial Sequence
  ENSG00000165886_9 (sequence is synthesized)
caaccttgtcagagaaaaggcgaacagggccctcaccctgcctgtctcccgaagcaggttcgagccacaagggccaaccaggaggcccctggagcccagatctgtcatctggtgctgcca

SEQ ID NO: 526313 - DNA, 120 bp, Artificial Sequence
  ENSG00000165886_10 (sequence is synthesized)
gctgtgctcactctggttttctgctcagggtctgaagcagctgctgtctccctcctctgcccccatcccctggctctcccctgggcacagtgccactcccttggaagggagggaaccacc

SEQ ID NO: 526314 - DNA, 120 bp, Artificial Sequence
  ENSG00000165886_11 (sequence is synthesized)
cgtgagccccagggcttgggaagcctgaggcgggcctctgcctctccctgcccccagcacaattggcagagatgaggcgggtggtggacagctgggctgtcgtggcagggtctgcacagg

SEQ ID NO: 526315 - DNA, 120 bp, Artificial Sequence
  ENSG00000165886_12 (sequence is synthesized)
gccatgtcctggctgtaacccaggcagtgggaggtctgcagcctggtcatggcctccacagcaggtccctgtggacagacatatctgcatatttatcaataaagccttttgctccttctc

SEQ ID NO: 526316 - DNA, 120 bp, Artificial Sequence
  ENSG00000165887_0 (sequence is synthesized)
aaccagtcccaagtgctcaggacagaggctggacgggctccttcctgcacccctgctcttgggacacagtgccctccggctctaataggccaggagttgggggggcaactggctctgctc

SEQ ID NO: 526317 - DNA, 120 bp, Artificial Sequence
  ENSG00000165887_1 (sequence is synthesized)
cctggccctggctccccctgctccctggggctgcccgaggtgaaggtgacaggtgggggaggcaggtggagaattgggccagtgagctcatggcaaaggcgcccagctgggcaggggtgg

SEQ ID NO: 526318 - DNA, 120 bp, Artificial Sequence
  ENSG00000165887_2 (sequence is synthesized)
gtgctctggcctataaagcccccgaggccctgtggcctgcagaggcggttatggacggcaccatggaggactccgaggcggtgcagagggccacagcgctcatcgagcagcggctggcac

SEQ ID NO: 526319 - DNA, 120 bp, Artificial Sequence
  ENSG00000165887_3 (sequence is synthesized)
aggaggaggagaatgagaaactccgaggagacgcacgccagaagctgcccatggacttgctggtgctggaggatgagaagcaccacggggctcagagtgcagccctgcagaaggtgaagg

SEQ ID NO: 526320 - DNA, 120 bp, Artificial Sequence
  ENSG00000165887_4 (sequence is synthesized)
gccaagagcgcgtgcgcaagacgtccctggacctgcggcgggagatcatcgatgtgggcgggatccagaacctcatcgagctgcggaagaaacgcaagcagaagaagcgggacgctctgg

SEQ ID NO: 526321 - DNA, 120 bp, Artificial Sequence
  ENSG00000165887_5 (sequence is synthesized)
ccgcctcgcatgagccgcccccagagcccgaggagatcactggccctgtggatgaggagaccttcctgaaagctgcggtggaggggaaaatgaaggtcattgagaagttcctggctgacg

SEQ ID NO: 526322 - DNA, 120 bp, Artificial Sequence
  ENSG00000165887_6 (sequence is synthesized)
ccgacacgtgcgaccagttccgtcggacagcactgcaccgagcttccctggaaggccacatggaaatcctggagaagcttctagataatggggccactgtggacttccaggatcggctgg

SEQ ID NO: 526323 - DNA, 120 bp, Artificial Sequence
  ENSG00000165887_7 (sequence is synthesized)
actgcacagccatgcattgggcctgccgcgggggccacttagaggtggtgaaacttctgcaaagccatggagcagacaccaatgtgagggataagctgctgagcaccccgctgcacgtgg

SEQ ID NO: 526324 - DNA, 120 bp, Artificial Sequence
  ENSG00000165887_8 (sequence is synthesized)
cagtccggacagggcaggtggagattgtggagcactttctatccctgggcctggaaatcaatgccagagacagggaaggggatactgccctgcatgacgctgtgaggctcaaccgctaca

SEQ ID NO: 526325 - DNA, 120 bp, Artificial Sequence
  ENSG00000165887_9 (sequence is synthesized)
aaatcatcaaactgctgctcctgcatggggctgacatgatgaccaagaacctggcaggaaagaccccgacggacctggtgcagctctggcaggctgatacccggcacgccctggagcatc

SEQ ID NO: 526326 - DNA, 120 bp, Artificial Sequence
  ENSG00000165887_10 (sequence is synthesized)
ctgagccgggggctgagcataacgggctggaggggcctaatgatagtgggcgagagacccctcagcctgtgccagcccagtgaatgcgtgccccagcccagccagctacccagcccctct

SEQ ID NO: 526327 - DNA, 120 bp, Artificial Sequence
  ENSG00000165887_11 (sequence is synthesized)
ctgtgtgcagccggagggtcctaagaatggctcccggagctaactgagggcccagccttttttctgcatgatccaggagcacataccacaaactaccacaataaaaaagctgtttttgct

SEQ ID NO: 526328 - DNA, 120 bp, Artificial Sequence
  ENSG00000165891_0 (sequence is synthesized)
gactacgatccaggctggagttgcgctcggccggtctgagcgctggcgctgcccggacgccgcggggtccccgccagcccagggcactcggcgcggggatctgcgcgcctcgctctccct

SEQ ID NO: 526329 - DNA, 120 bp, Artificial Sequence
  ENSG00000165891_1 (sequence is synthesized)
tcccgatgccgccgcccggctgctgatcgccgcaccaccttccctcatcggcttgggtccgtggaggtccctgcagaggcaggaagcctccttaggaaagcagggatggaggtaaattgt

SEQ ID NO: 526330 - DNA, 120 bp, Artificial Sequence
  ENSG00000165891_2 (sequence is synthesized)
ttaacactaaaagacctgatcagccccaggcagcccagactagattttgcagttgaagatggggaaaatgcacaaaaggaaaatatatttgttgatcgatcaaggatggccccgaagact

SEQ ID NO: 526331 - DNA, 120 bp, Artificial Sequence
  ENSG00000165891_3 (sequence is synthesized)
ccaataaaaaatgaaccaattgatttatcgaagcaaaaaaaatttactccagaaagaaatcccattactccagttaagtttgttgacagacagcaagcggaaccatggacacccacagct

SEQ ID NO: 526332 - DNA, 120 bp, Artificial Sequence
  ENSG00000165891_4 (sequence is synthesized)
aacctgaagatgctcattagtgctgccagcccagatataagggaccgggagaagaaaaagggactattccgacccattgaaaacaaggacgatgcatttacagattctctacagcttgat

SEQ ID NO: 526333 - DNA, 120 bp, Artificial Sequence
  ENSG00000165891_5 (sequence is synthesized)
gttgttggggacagtgctgtggacgaatttgaaaagcaaaggccaagcagaaaacagaaaagtttaggactcctgtgccagaagtttctagctcgctatccaagttatcccttgtcaact

SEQ ID NO: 526334 - DNA, 120 bp, Artificial Sequence
  ENSG00000165891_6 (sequence is synthesized)
gagaaaactaccatctccctagatgaagttgctgtcagtcttggtgtggaaaggagacgcatctatgacattgtaaatgtgctggagtcgctgcatctggtcagccgggtggctaagaat

SEQ ID NO: 526335 - DNA, 120 bp, Artificial Sequence
  ENSG00000165891_7 (sequence is synthesized)
cagtatggctggcatggacggcacagcctgccaaaaaccctgaggaacctccagagactaggagaggagcagaaatatgaagagcaaatggcctacctccaacagaaagagctggacctg

SEQ ID NO: 526336 - DNA, 120 bp, Artificial Sequence
  ENSG00000165891_8 (sequence is synthesized)
atagattataaatttggagaacgtaaaaaagatggtgatccagattcccaggaacaacagttactggatttctctgaacccgactgtccctcttcatctgcaaacagtagaaaagacaag

SEQ ID NO: 526337 - DNA, 120 bp, Artificial Sequence
  ENSG00000165891_9 (sequence is synthesized)
tctctgagaattatgagccagaagtttgtcatgctgttcctcgtctccaaaaccaagattgtcactctggatgtggctgccaaaatactgatagaagaaagccaagatgccccagaccat

SEQ ID NO: 526338 - DNA, 120 bp, Artificial Sequence
  ENSG00000165891_10 (sequence is synthesized)
agtaaatttaaaacaaaggtacgacgcctctatgacatagccaatgttctgaccagcttggctctgataaagaaagtgcatgtaacagaagagcgaggtcgtaaaccagccttcaagtgg

SEQ ID NO: 526339 - DNA, 120 bp, Artificial Sequence
  ENSG00000165891_11 (sequence is synthesized)
atcgggcctgtggacttcagctcaagtgatgaagaactggtggatgtttctgcatctgtcttaccagaattgaaaagagaaacatatggccagattcaagtctgtgcaaaacagaagctg

SEQ ID NO: 526340 - DNA, 120 bp, Artificial Sequence
  ENSG00000165891_12 (sequence is synthesized)
gctcgccatggttcttttaacacagttcaggcttctgagaggatccagaggaaagtgaactcagaaccgagcagcccgtacagagaagaacaaggatcaggtggctactctttagaaatt

SEQ ID NO: 526341 - DNA, 120 bp, Artificial Sequence
  ENSG00000165891_13 (sequence is synthesized)
ggaagcctggcagctgtctatagacagaaaatagaagacaattcacagggaaaagcctttgccagtaagagagtggtgcctccatcaagcagcttggaccctgttgctcctttccctgtc

SEQ ID NO: 526342 - DNA, 120 bp, Artificial Sequence
  ENSG00000165891_14 (sequence is synthesized)
ctctctgttgacccagaatattgtgttaatcctttagcccacccagtattttctgttgctcagacggacctgcaggcattctccatgcagaacggtctgaatggacaagtggatgtctca

SEQ ID NO: 526343 - DNA, 120 bp, Artificial Sequence
  ENSG00000165891_15 (sequence is synthesized)
cttgcttctgcagcctctgctgtggagagcctgaagccagcactccttgctggccagcctctagtgtatgtgccctctgcctcactgttcatgctgtatggaagtctgcaggagggacca

SEQ ID NO: 526344 - DNA, 120 bp, Artificial Sequence
  ENSG00000165891_16 (sequence is synthesized)
gcgtcagggtcagggtcagagagggatgacagaagctcagaagccccagccacagtagagctgtcatctgcaccctcagctcagaagcgcctctgtgaggagaggaaacctcaggaggag

SEQ ID NO: 526345 - DNA, 120 bp, Artificial Sequence
  ENSG00000165891_17 (sequence is synthesized)
gatgagccagccactaaaaggcaaagtagggaatatgaagacggcccgctgtcgcttgtcatgcccaagaaaccctcagattccacagaccttgcctctcccaagactatgggtaacagg

SEQ ID NO: 526346 - DNA, 120 bp, Artificial Sequence
  ENSG00000165891_18 (sequence is synthesized)
gcatctatacccctcaaagacattcatgtgaatggccaactccctgctgcagaagagatttcaggaaaggcaacagcaaactctcttgtttcttctgagtggggaaatccttcaagaaat

SEQ ID NO: 526347 - DNA, 120 bp, Artificial Sequence
  ENSG00000165891_19 (sequence is synthesized)
acagatgttgaaaagccttcaaaagaaaatgaaagcaccaaagagccttctttgctacaatatctttgtgtgcagtctcctgcaggattaaatggtttcaatgtacttttatctggcagt

SEQ ID NO: 526348 - DNA, 120 bp, Artificial Sequence
  ENSG00000165891_20 (sequence is synthesized)
caaaccccccctactgtgggcccgtcctcaggtcagctgccgtctttcagtgtcccttgcatggtcttaccatctccacctctgggcccttttcctgttctctattctcctgcaatgccg

SEQ ID NO: 526349 - DNA, 120 bp, Artificial Sequence
  ENSG00000165891_21 (sequence is synthesized)
ggcccggtttcttctactcttggtgctctcccaaacacaggacctgtgaatttcagcttgcctggccttggatcaatagcccagcttctcgtcggccccacagctgtggttaatccaaag

SEQ ID NO: 526350 - DNA, 120 bp, Artificial Sequence
  ENSG00000165891_22 (sequence is synthesized)
tcgtccacactcccttctgcagaccctcagcttcagagtcagccctcactaaacctaagtccagtgatgtcaaggtcacacagtgtcgtccaacaacctgagtcccccgtttacgtggga

SEQ ID NO: 526351 - DNA, 120 bp, Artificial Sequence
  ENSG00000165891_23 (sequence is synthesized)
tcaagacacccggcagccttggagaccctgtcctgaagagaagagaaaggaaccagtcacgaaacaccagctcggcccagaggagactagaaatccccagcggcggcgctgactaacctg

SEQ ID NO: 526352 - DNA, 120 bp, Artificial Sequence
  ENSG00000165891_24 (sequence is synthesized)
ccgctttgccaggtgggggtgggatcaaacgccctgagagtcccggatgtccgaggcgggatgcaaaccatcccgtcctgagcacgggtccttcctctctctttcatccacacttctgtt

SEQ ID NO: 526353 - DNA, 120 bp, Artificial Sequence
  ENSG00000165891_25 (sequence is synthesized)
aacttcccaccaccatcaatcatctgatttcctgaaagtaattaattgtgcatttaataccagttagagttccgactctgcatggtgtcacagtgaaagcgccgactgacttatggtttt

SEQ ID NO: 526354 - DNA, 120 bp, Artificial Sequence
  ENSG00000165891_26 (sequence is synthesized)
gattcaagaatcgtcttattctggaagtagatctgaataggctaccggagccttgtttttctaaaggggggcgctgtctagcacttaactagggtaagcattcttaacatgtatttccac

SEQ ID NO: 526355 - DNA, 120 bp, Artificial Sequence
  ENSG00000165891_27 (sequence is synthesized)
ttgccctgagtaaatctgtggtgagagaagcttcctttctgcagtttaaaaaagctactgcttccttaggcttcatcaggaagccaccttcagttgtgaatcctatggtgttatttattt

SEQ ID NO: 526356 - DNA, 120 bp, Artificial Sequence
  ENSG00000165891_28 (sequence is synthesized)
tgttcctgaaatgggatttagtgcaaaaagtttacaactacagtctttaacacatttttttcagggtatgacgacttgaatgtttatacttttattctataatttgccctgcacttattt

SEQ ID NO: 526357 - DNA, 120 bp, Artificial Sequence
  ENSG00000165891_29 (sequence is synthesized)
tacaacctagtaataatgtggataaatgtatctacatgacacatgtcaagaccaaaataactgtgaatgacacaccttgctgtaaatgaactgtgctaaccctgactgtgggcttgagaa

SEQ ID NO: 526358 - DNA, 120 bp, Artificial Sequence
  ENSG00000165891_30 (sequence is synthesized)
caaagatgaactctagaactctagcagcctaactgctgcttctcaaataactgtgtgaacagtgagatattactgtttgtttctaaaaatcctactgtgcccagtttccttcactacatg

SEQ ID NO: 526359 - DNA, 120 bp, Artificial Sequence
  ENSG00000165891_31 (sequence is synthesized)
ccctgcattttttatttaaatatttagctgtagcgccatcagatatggatgccttctaacaattgctgtttgtaaaataaatcaggatggtagaaagtgattatatggaaaattggaacc

SEQ ID NO: 526360 - DNA, 120 bp, Artificial Sequence
  ENSG00000165891_32 (sequence is synthesized)
tggatgagaccttttcgttgaattctgaagagtaatgatgtgaaaattgatacagggcaagagatgattcttttgtttttcttctacttcatgtccagaagagtaagagggaaaatggac

SEQ ID NO: 526361 - DNA, 120 bp, Artificial Sequence
  ENSG00000165891_33 (sequence is synthesized)
atatgtttcatatccaagggtattcaaactgtagttagttggtacctctgaaaaatgagaatggtgagcgcacgggttggttgttctagcatgaatacaattctggaaactgttatgcaa

SEQ ID NO: 526362 - DNA, 120 bp, Artificial Sequence
  ENSG00000165891_34 (sequence is synthesized)
tttcccttttttaacccacattactttaggggtgcattaagtcgccaaactatactagttctttgtattcctagacttgctgatatttacctctctcttgtctcttcagagtaaatggtt

SEQ ID NO: 526363 - DNA, 120 bp, Artificial Sequence
  ENSG00000165891_35 (sequence is synthesized)
cccttctttccttcctactttccttcattctctcttccttccctccttcctacttcttttcttccttcctcttcctctcttaaaactatcttagatgtagaatcctggtgtagggtttta

SEQ ID NO: 526364 - DNA, 120 bp, Artificial Sequence
  ENSG00000165891_36 (sequence is synthesized)
ttttatttttattttttgacccaataaaatgttatatgaaagaatgaaaatattaatttaagagactctgggagtctgaataaagtagctttatattaactacaggataatattagcctt

SEQ ID NO: 526365 - DNA, 120 bp, Artificial Sequence
  ENSG00000165891_37 (sequence is synthesized)
attacccccacaagattttttaaaacttgaggtaggtagctacattaaataaatttgctacttatataaaaatttttatcaacactaaacttttaaagtttacaagttttttttttcttt

SEQ ID NO: 526366 - DNA, 120 bp, Artificial Sequence
  ENSG00000165891_38 (sequence is synthesized)
tttacagtcttctatagagttaggttaaaaatgtggttctaaccatcaacaattgcatggttaaatgaccctgaactaaaactgatgggttccctatcaaaacaaataaaaatatacctt

SEQ ID NO: 526367 - DNA, 120 bp, Artificial Sequence
  ENSG00000165891_39 (sequence is synthesized)
tttcaggtttcaatctgtgcagggtatatgcatgttaattctaccatgcttaagaacttccacaaaatatttcatggagaggtctgcatttagacggaaacagaaattgcttttcccctc

SEQ ID NO: 526368 - DNA, 120 bp, Artificial Sequence
  ENSG00000165891_40 (sequence is synthesized)
actgttcctgaatgctctatacttgttttaacatttttgctatctttttttattattctgatcatgatatgaccatttaacctcagaattcataattcctgaggggtgttaagaagcagt

SEQ ID NO: 526369 - DNA, 120 bp, Artificial Sequence
  ENSG00000165891_41 (sequence is synthesized)
cccattggtgaggatattatgacttggtgaccattcttaggagtagaaaaccaaggacaattgcttctgtattcagtatccacttcttaatgtggctttatatgtaaaaataataatgca

SEQ ID NO: 526370 - DNA, 120 bp, Artificial Sequence
  ENSG00000165891_42 (sequence is synthesized)
gtggttgtttctgtcaggaaaataaatcttacagaacaactggtggaattgaagctgctgcgctagacttggatattttgggtagtgaagaagcaatggcaatcttgagtctattattgt

SEQ ID NO: 526371 - DNA, 120 bp, Artificial Sequence
  ENSG00000165891_43 (sequence is synthesized)
ataatttagtaaaagaaaaaaataatcgttggtggtcctactaagagaatgcagcttttttgagttgtcacagaggctgtgtgtgccctacactgaccagggtttgtaaaaccctttcat

SEQ ID NO: 526372 - DNA, 120 bp, Artificial Sequence
  ENSG00000165891_44 (sequence is synthesized)
tctggtacaagagtcgggggtataacttttatacttgaatctacctaccaagtttacatttctcaattcctttttgtaaggtgctatttctgtatttaaataactttcttttaacgtaaa

SEQ ID NO: 526373 - DNA, 120 bp, Artificial Sequence
  ENSG00000165891_45 (sequence is synthesized)
gctgctttctgcttatcttattgcactgctagttgtatgtaggtattaattttattgctgcttactgcttttgttttcttattatttagctctgctctttttcctaatggctatattatc

SEQ ID NO: 526374 - DNA, 120 bp, Artificial Sequence
  ENSG00000165891_46 (sequence is synthesized)
ttcctaatggctatattatctatagctatttacttgtaactgtactacatgtaaactgattttttgttctgattttttttctaatatttttaggaaaatattaagctttataaaatagca

SEQ ID NO: 526375 - DNA, 120 bp, Artificial Sequence
  ENSG00000165891_47 (sequence is synthesized)
tctgcagattcactgctcagatgggaagtgccaggttgacaaccctggagggagatgttctcttattctcctcactgaagaaagagaagcagatggctccccaactggactgcccacttg

SEQ ID NO: 526376 - DNA, 120 bp, Artificial Sequence
  ENSG00000165891_48 (sequence is synthesized)
acctcattgaaataaacctggctcatggcagttcactcgagtttggcctgttgggagaatagatcactagcattactcccatttttagattggcagccccatgctggttctttttgtgca

SEQ ID NO: 526377 - DNA, 120 bp, Artificial Sequence
  ENSG00000165891_49 (sequence is synthesized)
actgtaagatttactttgaaaaagttatattttcaaagaattttatctaattatatactggagtagacttagactacttagaaaagaactccattcacagaaaatgttgataagaaagac

SEQ ID NO: 526378 - DNA, 120 bp, Artificial Sequence
  ENSG00000165895_0 (sequence is synthesized)
acaacgccgacgactgtcaagagagttggggagtggaactgccggaagtgtctgcgcgccgtgagagaaactttcctgctccggccgcggcccggagcctcgccgcccccgcgttccgaa

SEQ ID NO: 526379 - DNA, 120 bp, Artificial Sequence
  ENSG00000165895_1 (sequence is synthesized)
cgacgatgcgtccagatgacaacaacctgaggggactcgcgcctcggcccgccgcccgcgcctgcgctcgcctagcctcgggggaggaagactgagcccggcgcaggcggcgcggcgctc

SEQ ID NO: 526380 - DNA, 80 bp, Artificial Sequence
  ENSG00000165895_2 (sequence is synthesized)
ggggcccgtttcctccgcgcaatcagtcccctcgcgtcccggcgccttccccgcgatcgcgcgaccccagcgcccgccgc

SEQ ID NO: 526381 - DNA, 120 bp, Artificial Sequence
  ENSG00000165895_3 (sequence is synthesized)
gtccgcggccgccgctggcagcgcctgtgccatggggctgcccactctggagttcagcgattcctacttggacagcccagatttcagggagcgcttgcagtgtcacgagattgagctgga

SEQ ID NO: 526382 - DNA, 120 bp, Artificial Sequence
  ENSG00000165895_4 (sequence is synthesized)
gcgaaccaacaagttcatcaaggagctcattaaggacggctctctgctcattggggcgttgaggaatctgtctatggcagtgcagaaattttcccagtcattgcaagatttccagtttga

SEQ ID NO: 526383 - DNA, 120 bp, Artificial Sequence
  ENSG00000165895_5 (sequence is synthesized)
atgtattggtgatgctgaaacagatgatgaaattagtattgctcagtcactaaaagaatttgcaagactactcattgcagtagaagaagaaaggcgaagactgatccaaaacgctaacga

SEQ ID NO: 526384 - DNA, 120 bp, Artificial Sequence
  ENSG00000165895_6 (sequence is synthesized)
tgtattaattgcaccacttgagaaatttcgaaaagaacagataggtgcagcaaaagatggaaagaagaagtttgacaaagagagtgaaaaatattactctatccttgaaaagcatttaaa

SEQ ID NO: 526385 - DNA, 120 bp, Artificial Sequence
  ENSG00000165895_7 (sequence is synthesized)
tttgtccgcaaagaaaaaggagtctcatttacaagaggcagatacacaaattgaccgagaacatcagaacttctatgaagcatcattagaatatgtctttaaaattcaagaggtccaaga

SEQ ID NO: 526386 - DNA, 120 bp, Artificial Sequence
  ENSG00000165895_8 (sequence is synthesized)
aaaaaagaagtttgaatttgttgaaccgcttttgtcatttcttcagggcttatttactttttaccatgagggatatgaacttgcccaggaatttgcaccgtataagcaacagctgcagtt

SEQ ID NO: 526387 - DNA, 120 bp, Artificial Sequence
  ENSG00000165895_9 (sequence is synthesized)
caacttgcagaatacaaggaataattttgaaagtactcgacaagaggtagagcggttgatgcaaaggatgaaatctgctaaccaggactacagaccacccagccagtggacgatggaagg

SEQ ID NO: 526388 - DNA, 120 bp, Artificial Sequence
  ENSG00000165895_10 (sequence is synthesized)
ctatctgtatgtccaggagaaacgaccgcttggttttacatggattaaacattattgtacatatgataagggaagtaaaacatttacaatgagtgtttcagaaatgaaatccagtgggaa

SEQ ID NO: 526389 - DNA, 120 bp, Artificial Sequence
  ENSG00000165895_11 (sequence is synthesized)
aatgaatggccttgttactagctcaccggaaatgtttaaattaaaatcttgtatccgacgaaagacagattcaattgacaaacgattctgctttgacatagaagtagttgaaaggcatgg

SEQ ID NO: 526390 - DNA, 120 bp, Artificial Sequence
  ENSG00000165895_12 (sequence is synthesized)
gatcatcacgttacaggccttctcagaagctaataggaaactctggcttgaagccatggatgggaaggaaccgatttatactctgcctgccattataagcaagaaagaagaaatgtattt

SEQ ID NO: 526391 - DNA, 120 bp, Artificial Sequence
  ENSG00000165895_13 (sequence is synthesized)
gaatgaagcagggttcaactttgtgagaaaatgcattcaagctgtggaaacaagaggtatcaccattttaggactctaccgaataggaggagtgaactccaaagttcaaaaactcatgaa

SEQ ID NO: 526392 - DNA, 120 bp, Artificial Sequence
  ENSG00000165895_14 (sequence is synthesized)
taccacattttctcctaaatcccctcctgatattgatattgatattgaactgtgggacaataagacgataacaagtgggctgaaaaactacctcaggtgccttgcagaaccactgatgac

SEQ ID NO: 526393 - DNA, 120 bp, Artificial Sequence
  ENSG00000165895_15 (sequence is synthesized)
ttacaagttgcacaaagattttatcattgctgttaaatctgatgatcaaaactacagggtggaggctgtacatgcattggtgcacaaattgccggagaaaaacagagagatgctggacat

SEQ ID NO: 526394 - DNA, 120 bp, Artificial Sequence
  ENSG00000165895_16 (sequence is synthesized)
cttaataaagcatctggtcaaagtatcactacacagccaacaaaatctcatgactgtctcaaatcttggtgtcatatttggcccaactctaatgagagcacaggaagaaactgtggctgc

SEQ ID NO: 526395 - DNA, 120 bp, Artificial Sequence
  ENSG00000165895_17 (sequence is synthesized)
tatgatgaatattaaatttcagaatattgtggtagaaattctgatagagcactatgaaaagatttttcatactgctccagacccaagcattcctcttcctcagcctcagtctcgatctgg

SEQ ID NO: 526396 - DNA, 120 bp, Artificial Sequence
  ENSG00000165895_18 (sequence is synthesized)
atcccgaaggacacgagcaatctgcctctctacagggtctaggaagcccagagggaggtatactccatgcctggccgaacctgatagtgactcctatagcagcagcccagacagcacacc

SEQ ID NO: 526397 - DNA, 120 bp, Artificial Sequence
  ENSG00000165895_19 (sequence is synthesized)
tatggggagcattgagtcactctcttctcattcctctgaacaaaatagcactacaaagtcagcttcctgccagcccagggagaaatctggagggattccttggattgcaaccccatcatc

SEQ ID NO: 526398 - DNA, 120 bp, Artificial Sequence
  ENSG00000165895_20 (sequence is synthesized)
ttccaatggacagaaaagccttggtctgtggacaactagtcctgaatcaagttccagagaagatgcaaccaagacagatgcagaatcagactgccagagtgttgcttcagtcactagccc

SEQ ID NO: 526399 - DNA, 120 bp, Artificial Sequence
  ENSG00000165895_21 (sequence is synthesized)
aggagacgtttccccacccatagacctagtcaagaaagagccttatgggctttcaggactgaaaagagcttctgcttcttctctcagatccatctctgcagctgaaggaaacaagagcta

SEQ ID NO: 526400 - DNA, 120 bp, Artificial Sequence
  ENSG00000165895_22 (sequence is synthesized)
cagtggatctattcaaagcttaacttctgtaggttccaaggagacacccaaagcttcaccaaacccagacctgcctccgaaaatgtgcaggagattaagactagacactgcctcaagcaa

SEQ ID NO: 526401 - DNA, 120 bp, Artificial Sequence
  ENSG00000165895_23 (sequence is synthesized)
tggctatcagcggcctggctcagtagtggcagcaaaagctcaactgtttgaaaatgttggttcacctaaaccagtttcttctgggcgccaagccaaagccatgtactcctgtaaagcaga

SEQ ID NO: 526402 - DNA, 120 bp, Artificial Sequence
  ENSG00000165895_24 (sequence is synthesized)
gcacagtcatgagctttccttcccacaaggagcaatattttctaatgtgtacccatcagtggaaccaggatggttaaaggcaacttatgaaggcaaaacaggactagttccagaaaatta

SEQ ID NO: 526403 - DNA, 120 bp, Artificial Sequence
  ENSG00000165895_25 (sequence is synthesized)
tgttgtcttcctctaatactatttagtggatggcagtatcttcatggtatccatggtaacgaataaatgctatgattttatctgacacagatacacggggatcagcccactaagtgaaaa

SEQ ID NO: 526404 - DNA, 120 bp, Artificial Sequence
  ENSG00000165895_26 (sequence is synthesized)
cagtcaatttctatcaagttcttcaccagcagactatgtagctccttattaatggaaaaaaagatttaaattgttggccattcttttttggttggtttcttattttaaaatatcttactt

SEQ ID NO: 526405 - DNA, 120 bp, Artificial Sequence
  ENSG00000165895_27 (sequence is synthesized)
gtgaaaaatgtgtttttggataatatgtaactctccacaatgtcgcttccgtagcaattgtagagtttcaaatactgtgttaaatactgtatcccagaaatttggaaaccagaaatctgc

SEQ ID NO: 526406 - DNA, 120 bp, Artificial Sequence
  ENSG00000165895_28 (sequence is synthesized)
tatatggattttgagatctgtcctttactgcctggcattctctgaggatctctgaaattgttacttaaaaatgtaatttaaattgttcatttattgttttttttttcttagaaatatact

SEQ ID NO: 526407 - DNA, 120 bp, Artificial Sequence
  ENSG00000165895_29 (sequence is synthesized)
gcttttatatatgattgttttgctggtcctaaacatttcaaggatgtaagtctttgttttaatataactttatttgttttccaagtagatgataatattcaaaagcaataatgtatatga

SEQ ID NO: 526408 - DNA, 120 bp, Artificial Sequence
  ENSG00000165895_30 (sequence is synthesized)
tatctataaaggaagcaaaattaagtcatacactgattccactgtaaacaatctgtccagaattccagacaccttcagcaaactttttctgtaaaggcctgatagcaaatatttttgtgg

SEQ ID NO: 526409 - DNA, 120 bp, Artificial Sequence
  ENSG00000165895_31 (sequence is synthesized)
tgggttgaatttggcttatgggttatagtttgctgacacctagtttagagggtgtgtaaaactatcttcataactttgagatttttataaaattttacatgaaaatatactgataaatta

SEQ ID NO: 526410 - DNA, 120 bp, Artificial Sequence
  ENSG00000165895_32 (sequence is synthesized)
tatgcacatattttctaccagtagcattatagtggcatcatagaagaatatttaccaatgatggggaaactgtaaaactacagtatcaaggcatacaacttaaattccacttggaagatt

SEQ ID NO: 526411 - DNA, 120 bp, Artificial Sequence
  ENSG00000165895_33 (sequence is synthesized)
cttagttgaaacagaaaataaacacaaaggtacaagatccttaaattattttgaaccacagaggttgaaattgttttgtgatcttcagcagaaataaaatctgtacatgattttctttta

SEQ ID NO: 526412 - DNA, 120 bp, Artificial Sequence
  ENSG00000165895_34 (sequence is synthesized)
tgccttttagtttacagtctttattagcaatttcagtgaatttgtagagcatagtaataggtatttactgtccacttatatatatcagcatctggtcatgcacgaaccattaattctata

SEQ ID NO: 526413 - DNA, 120 bp, Artificial Sequence
  ENSG00000165895_35 (sequence is synthesized)
tttctatttcaataattctaatatattatttctataaatgtaatatctgtatgtggcaaagagcctttcttctcaagatcctgaaaagctggttacctgccctttgagtgccacagtcct

SEQ ID NO: 526414 - DNA, 120 bp, Artificial Sequence
  ENSG00000165895_36 (sequence is synthesized)
gaactgcttgttcttgacatcttgcatattacttcagagttccccactgtgcagactctcaggtattaactgtaaaaaactctttacatgccattattatctgtaatctctatctcttct

SEQ ID NO: 526415 - DNA, 120 bp, Artificial Sequence
  ENSG00000165895_37 (sequence is synthesized)
actttaaattaatgtttctagaattaataggttaaatacacatacacacacacaactatgcctcagaaaagttaggcttttacaaataaaaagaataagattagaattaacaagtagaga

SEQ ID NO: 526416 - DNA, 120 bp, Artificial Sequence
  ENSG00000165895_38 (sequence is synthesized)
gaataacggtaggcagagtcagaatcaggaataaatatcagtgaatcaaaagaatgaaaaatattatgtaataaaaattagcaatgtaatgtaaacgtttgataaaagagtatctttttc

SEQ ID NO: 526417 - DNA, 120 bp, Artificial Sequence
  ENSG00000165895_39 (sequence is synthesized)
ttttatctcttactgttgacctctgtgcactgtaataaggtgtgttgctggatcttcttggtcgaggtccttggtgaccttagtagtaataacagcattgctgacaccctaattgccctc

SEQ ID NO: 526418 - DNA, 120 bp, Artificial Sequence
  ENSG00000165895_40 (sequence is synthesized)
tgctggaacagaaggtagttttccagtgtaccagtcccttagtctatacagcacccttggtttaagcacacttgccatcatctggtatcctgctagactagaatctcttaaaagcaaatt

SEQ ID NO: 526419 - DNA, 120 bp, Artificial Sequence
  ENSG00000165895_41 (sequence is synthesized)
ggttttctttcaaagaccaacttgactccaaagagagattcagaatcctacttctcctgctgctgcataaagaatctcaaccttcattttatttgaacacggaccaaagtgttcctgctt

SEQ ID NO: 526420 - DNA, 120 bp, Artificial Sequence
  ENSG00000165895_42 (sequence is synthesized)
ctgagttgtctgtaagctaattctgcagatgttccattcagatttaaagcttttttactgcataggatgtggataggaagcctaactattgtatctgatggcaaggcatatgttgcagcc

SEQ ID NO: 526421 - DNA, 120 bp, Artificial Sequence
  ENSG00000165895_43 (sequence is synthesized)
acagtactggctatggtccctttgctgaaacaagctacagaagcactgattcaagttgtgcttgtgcttgaacttttaatcttctagatttgtgaggatggctctttttccttcataatg

SEQ ID NO: 526422 - DNA, 120 bp, Artificial Sequence
  ENSG00000165895_44 (sequence is synthesized)
gattacaatgtaagcaagtcatggccatatactggagacgggctaaagctgcttttcccttaaagtaagtttcctacagataaggtatttatgagcactgagaaagtcaggacatgtact

SEQ ID NO: 526423 - DNA, 120 bp, Artificial Sequence
  ENSG00000165895_45 (sequence is synthesized)
ctaaatcacacagaatgttaattccacaggaaggcaatgccagacattgaaagaggatcacattcaacttttaatagtagttcaataacaaaaccttagcttttcaggaacaatgtgaag

SEQ ID NO: 526424 - DNA, 120 bp, Artificial Sequence
  ENSG00000165895_46 (sequence is synthesized)
atacattagaattgccacatccatatcttcaaaacacgcaacctctgcaccctaataactgcttacggtataatcagtatgatgatgagattgagggggtctaaatttaagttccttatc

SEQ ID NO: 526425 - DNA, 120 bp, Artificial Sequence
  ENSG00000165895_47 (sequence is synthesized)
tcctgagttatgtgaaaatatccctcagtacaaaacatttgtgtgtttcacagatgactctcttgttttgccgtaatgctaccaagtttatggaaactagtcaactgaaggatttttctg

SEQ ID NO: 526426 - DNA, 120 bp, Artificial Sequence
  ENSG00000165895_48 (sequence is synthesized)
ttgtgttatgtgtaaatgtctgaacagtaaaatcatctgtgtattcctgtaacattcacgaagtatgaggaagtgggtttctccttgtttgatgtgagtggttttgcttgttgcatgggt

SEQ ID NO: 526427 - DNA, 120 bp, Artificial Sequence
  ENSG00000165895_49 (sequence is synthesized)
tccctgtgctttgtaacttgcatgaacacaaccaggtttctcaacaatgatttgtctgctgactcttttcagagatagtgaaggaaaaaaaatgtattaaaaccccaaattatctaggtt

SEQ ID NO: 526428 - DNA, 120 bp, Artificial Sequence
  ENSG00000165895_50 (sequence is synthesized)
tccaagtaggaaaaataaagatacatatgacttttattattattcgatgataattagctttatataatgtggcatccttcataaaaattcactatgttgtgaggcaaacagatttctcac

SEQ ID NO: 526429 - DNA, 120 bp, Artificial Sequence
  ENSG00000165895_51 (sequence is synthesized)
tatcatccagtgtaccctgctcaccttctcactcctagcaccgttcttctggtctgtgttgaaaagggtatcattcatgtggtttcagtttagaagagtccctcagagctttgcctcaag

SEQ ID NO: 526430 - DNA, 120 bp, Artificial Sequence
  ENSG00000165895_52 (sequence is synthesized)
caatttcaaattgtagtgataccttaaatcatgtattcaggatgccttctttagcatttagaaccccaactagacttatactttgactaaagtcagaggcagaccaatttagggaacaga

SEQ ID NO: 526431 - DNA, 120 bp, Artificial Sequence
  ENSG00000165895_53 (sequence is synthesized)
ttttgttctttgcttttatgatacatttgtaactcacagctgttagcatgacctcacatcactgcgtaggacccggaaatcacatctcctggtcaggtcacgaaaaagaacacaggcttg

SEQ ID NO: 526432 - DNA, 120 bp, Artificial Sequence
  ENSG00000165895_54 (sequence is synthesized)
actattgtccagaagttactttccccttgactaaaggtttccccttagggtacacattgctatttaactttgcctcctacccttttttgttaccttccaaaatcaagacacttttaagaa

SEQ ID NO: 526433 - DNA, 120 bp, Artificial Sequence
  ENSG00000165895_55 (sequence is synthesized)
acaaagatagttttctgaacattctgtgtcctgcctgtctcctgttgattcgcagatgtaatatcgagtattcatcaactggtctcaatttcctgaacacattcactgtatccctcattg

SEQ ID NO: 526434 - DNA, 120 bp, Artificial Sequence
  ENSG00000165895_56 (sequence is synthesized)
tcaccgttatccccctgcttcaaaatgtgccagttccacttggtaataacgttgggaaaatgcaggtttatgaatgatgtggacttttagaggatcaaatcaataaattggattttttat

SEQ ID NO: 526435 - DNA, 120 bp, Artificial Sequence
  ENSG00000165895_57 (sequence is synthesized)
tttttgagggcagctgccctcactgttttaaataaagaatcttacataagaatgttgacaacattcacagtaagccattggcagaaaattgatctgcatgtcctagaccaatgattacaa

SEQ ID NO: 526436 - DNA, 120 bp, Artificial Sequence
  ENSG00000165895_58 (sequence is synthesized)
ggtgtctgtggtttagggggcccagcccatcattccttttccccttggcactcatgagagagatgccaagttcagtgtggatttttcttggtgctctatggagaaatggagtctgtgtgc

SEQ ID NO: 526437 - DNA, 120 bp, Artificial Sequence
  ENSG00000165895_59 (sequence is synthesized)
ttactgaagagtcccaaaaaccagagaccattttcatttactgccatcataaatattctccaccattcaagatgcctgtgtacacggctatttgggaaacttaagtgttggaggaggcag

SEQ ID NO: 526438 - DNA, 120 bp, Artificial Sequence
  ENSG00000165895_60 (sequence is synthesized)
gggctgaaggtgtcaaaacctcctcagtaggataacccctttctcccctttggaccatctgccatctttcatgagtgtttcccatggtgtttttgcatccagagttgacaacaactcaat

SEQ ID NO: 526439 - DNA, 120 bp, Artificial Sequence
  ENSG00000165895_61 (sequence is synthesized)
tttgccttgaatttactcagtcttataaattaaaaatgtgcattttatataaagatgcattttatataaaaatgcacacctttaatctctatatggcagcatatacatatatatatataa

SEQ ID NO: 526440 - DNA, 120 bp, Artificial Sequence
  ENSG00000165895_62 (sequence is synthesized)
aatgcacacttttaatctctatatggcagcatttttgaggctttatatctgcccgtgtaccctcaactgcctcctttttgcagagaacgatccccacaggaactggtctaagaacactgt

SEQ ID NO: 526441 - DNA, 120 bp, Artificial Sequence
  ENSG00000165895_63 (sequence is synthesized)
ctgcacatgattgatgcttaaaatccaatataccaccacatatcaaaggttgggattttcagagtccttcttgatttctgagctgaaaccttaacaaatagggaatttggcagggaagac

SEQ ID NO: 526442 - DNA, 120 bp, Artificial Sequence
  ENSG00000165895_64 (sequence is synthesized)
acctgggtttttaattcagaaccctatttatatactgttaaaatttgaggtactgtagtttatataaaagtcggatgttaagatattatatttcagtactaggagcttctttgcagtcat

SEQ ID NO: 526443 - DNA, 120 bp, Artificial Sequence
  ENSG00000165895_65 (sequence is synthesized)
taacatgacaaattaagtaataaatataaaagtgattgtccataaattatcattgaattttttgtttattttgtagtgttctgtatttatctgcactttgtgtatatatacacacataca

SEQ ID NO: 526444 - DNA, 120 bp, Artificial Sequence
  ENSG00000165895_66 (sequence is synthesized)
tatgccaacatgtaaataacctcatgtttattcctaatctaaattgccacaatatttttaatgtatggttacactgtgttttaaattactttaaaaataaactttgtaagcagattttaa

SEQ ID NO: 526445 - DNA, 120 bp, Artificial Sequence
  ENSG00000165895_67 (sequence is synthesized)
attaaagatgacataatttcagatgttaacatttttgaaattagaatgaccttttaaaagattttgtacatcatttaaaactttttgcatagagacttaacaaagactggacttctttta

SEQ ID NO: 526446 - DNA, 120 bp, Artificial Sequence
  ENSG00000165895_68 (sequence is synthesized)
gacataaaagatgttattattctactgagtagataagaagcatgttataaatgagttcttcctttcccaaaaattataggaaattaatgattttgaagacacggtgaaattatgaggagc

SEQ ID NO: 526447 - DNA, 120 bp, Artificial Sequence
  ENSG00000165895_69 (sequence is synthesized)
atcgttcgtggagattttattgtgtctaggggagaagataaaaatatcagcaataataacaaaataccagatactaacaccatgcagacttgaagcaggaagatatgatagttccctggg

SEQ ID NO: 526448 - DNA, 120 bp, Artificial Sequence
  ENSG00000165895_70 (sequence is synthesized)
cagctatttcagagaaggcctgaccttcagcaaagttcttgaaatttaagatgaacctgaagtacatggccatgtgaagatcaagaggaaaacatctcaggacatggacatagctggcct

SEQ ID NO: 526449 - DNA, 120 bp, Artificial Sequence
  ENSG00000165895_71 (sequence is synthesized)
agttaaaacatactataacttccacacaccagctaaatggaaacgctcttgacaggatctgctatgaagaaaatggaaaggagtaacatgaggatatgtggaataagtccggagatggag

SEQ ID NO: 526450 - DNA, 120 bp, Artificial Sequence
  ENSG00000165895_72 (sequence is synthesized)
aaagggtacatatgaccaagatcccccagcacagcaaaatcacagatgctgacacttagaagggttaaaagaaaaaaggagatggatttattttaaagcaaggatcaagggaaataatat

SEQ ID NO: 526451 - DNA, 120 bp, Artificial Sequence
  ENSG00000165895_73 (sequence is synthesized)
gcgaaaacagcttaattatatagtagaagaactgtatataacatatccaaaacgctaacgatgtattaattgcaccacttgagaaatttcgaaaagaacagataggtgcagcaaaagtaa

SEQ ID NO: 526452 - DNA, 120 bp, Artificial Sequence
  ENSG00000165898_0 (sequence is synthesized)
gtggaggaagatggctgccgcctgggggtcgtccctaacggccgcgacgcagagagcggtcactccctggccgaggggcaggctcctcacggcctccctgggaccccaggcgcgtcggga

SEQ ID NO: 526453 - DNA, 120 bp, Artificial Sequence
  ENSG00000165898_1 (sequence is synthesized)
ggcgtcgtcctccagccccgaggccggcgaagggcagatccgcctcacagacagttgcgtccagaggcttttggaaatcaccgaagggtcagaattcctcaggctgcaagtggagggagg

SEQ ID NO: 526454 - DNA, 120 bp, Artificial Sequence
  ENSG00000165898_2 (sequence is synthesized)
tggatgctccggattccaatacaaattttcactggatacagttatcaaccccgacgacagggtatttgaacagggtggggcaagagtggtggttgactctgatagcttggccttcgtgaa

SEQ ID NO: 526455 - DNA, 120 bp, Artificial Sequence
  ENSG00000165898_3 (sequence is synthesized)
aggggcccaggtggacttcagccaagaactgatccgaagctcatttcaagtgttgaacaatcctcaagcacagcaaggctgctcctgtgggtcatctttctctatcaaactttgatgtga

SEQ ID NO: 526456 - DNA, 120 bp, Artificial Sequence
  ENSG00000165898_4 (sequence is synthesized)
tgactggtgactctgggattgtcaccagttgtaccaatttgaagaacctggaattagtagaattctagaagtttacttctaatcatgtccctctcaattttatttcccgcagtccaggag

SEQ ID NO: 526457 - DNA, 120 bp, Artificial Sequence
  ENSG00000165898_5 (sequence is synthesized)
tgttatgttttgccactattattttcagaatgtgaagattttactcttggcttaatttttccctccactcagtgctaaggctgagcctccagatgctgttacctcagatttaatcactgg

SEQ ID NO: 526458 - DNA, 120 bp, Artificial Sequence
  ENSG00000165898_6 (sequence is synthesized)
ttgaaactccgtataatctgtagagcctccatggctctaaaatttggaattaacttctcttgccttaagagctgcttgtacatatgtggatagctatgtataaaagcttcattttaaaga

SEQ ID NO: 526459 - DNA, 120 bp, Artificial Sequence
  ENSG00000165898_7 (sequence is synthesized)
aggttcttattgtgttgtggatcagggtcacagattgggtagcttggacaccagttattagaggatgagaaaagtaaatgaaatgttctctttttcacttcaccctgccagaatgtgcca

SEQ ID NO: 526460 - DNA, 120 bp, Artificial Sequence
  ENSG00000165898_8 (sequence is synthesized)
cttgacttatctttattgtctatgcaacccatttgccacttcctgtttgataggacagatacattttactctcatgctcgtggatctgctatgagtcataaaaccaagagcccgttaccc

SEQ ID NO: 526461 - DNA, 120 bp, Artificial Sequence
  ENSG00000165898_9 (sequence is synthesized)
agaaaacttggaccaaaccctcactgatagtgaattatttcaaaaatagcctccctactcatacagacattttaagattctgtgacaatttaatgactgaatctttttaggatatgttgc

SEQ ID NO: 526462 - DNA, 120 bp, Artificial Sequence
  ENSG00000165898_10 (sequence is synthesized)
attgttataggtaatagattcttgggaacctttttttagattgggttaccagatgaaatgtaggatgcccagttaaatttgaatttcaggtaaataattttttagtatgcatatgtctca

SEQ ID NO: 526463 - DNA, 120 bp, Artificial Sequence
  ENSG00000165898_11 (sequence is synthesized)
aatattgcatatactaaaaattactatttgaaattcaaatttaactcatatttttatttgctgaccttggcaactctgctttagggtcaccaaacagcttttaaaatcacaaattctagt

SEQ ID NO: 526464 - DNA, 120 bp, Artificial Sequence
  ENSG00000165898_12 (sequence is synthesized)
gaattaaagtacttgtgtaggtgtggcacttaaataggcttcggagcttgaaataatcctgttagagtactgtggagctgtgtggacagacagtgaaagaaatctaccaccatcaccaca

SEQ ID NO: 526465 - DNA, 120 bp, Artificial Sequence
  ENSG00000165898_13 (sequence is synthesized)
ccgaatgatttattaatactgatgttggagaaactacaaccaagttgattctggaagagttactggttaaatccatcttttgcttgggagcctagaagtttgttacagtaaagacttgca

SEQ ID NO: 526466 - DNA, 120 bp, Artificial Sequence
  ENSG00000165898_14 (sequence is synthesized)
tttctgcactggattggaattaaggtcatttagtaagaatttactatttaaaaaaatggaaatagagtttagaaaatatctgagacagaaacttagatacatttccaacatggcaaaacc

SEQ ID NO: 526467 - DNA, 120 bp, Artificial Sequence
  ENSG00000165898_15 (sequence is synthesized)
taggacttagagaaaacaaacctatcatgcggttagaggagagaaggggacactcagaaacctgagcacatttcttagagctggtggaaggaggcagaaagcagcataccatgggagcat

SEQ ID NO: 526468 - DNA, 120 bp, Artificial Sequence
  ENSG00000165898_16 (sequence is synthesized)
ctgtgtgcacacatgaccaagacagtgccgccagtacctgcgcctgatagggtttcagttcagactacctgtcctttcatcctccttaaaaagattttgctacattttaaacattagaat

SEQ ID NO: 526469 - DNA, 120 bp, Artificial Sequence
  ENSG00000165898_17 (sequence is synthesized)
atattctttaagaatatttttgtgggttatttattgattttgtggttttaaaactcttgagcacgagcagaacagcttttgttgctaaatcaatcaaattacagtggtgcactagacaga

SEQ ID NO: 526470 - DNA, 120 bp, Artificial Sequence
  ENSG00000165898_18 (sequence is synthesized)
tagacagaaacagtcccttagaatgcagcttatatgtgagtatctactgttaatgggagaattggaattttatgtttagaaaaaggcagatttggggctgggcacggtggctcacgcctg

SEQ ID NO: 526471 - DNA, 120 bp, Artificial Sequence
  ENSG00000165898_19 (sequence is synthesized)
tccggattccaatacaaattttcactggatacagttatcaaccccgacgacaggcaaggaggaaggggtgggcccccaaaggaggtacaggagggacaaaagtgtctccagtttaaggtg

SEQ ID NO: 526472 - DNA, 120 bp, Artificial Sequence
  ENSG00000165898_20 (sequence is synthesized)
ctgaatcaaagtaactaagttataggagcaaaattgatctgcccaggtccattgggtagtcggtagaaagtcaggccggactagattccaggcttaagtccctacacgtttcccagtatt

SEQ ID NO: 526473 - DNA, 120 bp, Artificial Sequence
  ENSG00000165898_21 (sequence is synthesized)
tattccattgaatcattttgcctcaaagaaaatcagcacctgttaaaggtaatggggaagctccctctgtactttagaaaacagaggatgtgcacctctgggctcagggggtgtcttttt

SEQ ID NO: 526474 - DNA, 120 bp, Artificial Sequence
  ENSG00000165899_0 (sequence is synthesized)
agaccttcagataaaggagctctcgaaatacaacccataaggaataaagccatagccagtgcttccctgggggaaaggctacactgaaatgaacattgtaagaaaactcaatttaatgat

SEQ ID NO: 526475 - DNA, 120 bp, Artificial Sequence
  ENSG00000165899_1 (sequence is synthesized)
accttggagtatattcttgcttcatgtactgctgttttcattacaagaatatatttgtgcatcgtctatattgatgggaacatcaaaaaacgggtttaatgaaaatcgacagaaaagagc

SEQ ID NO: 526476 - DNA, 120 bp, Artificial Sequence
  ENSG00000165899_2 (sequence is synthesized)
tcttttagcagcacagtttgaagctacttctccgagatactttttccatgatgctattaattggggtgagagcaaaataaaaggttcttgtccttatgaatgccttaatggagctttctg

SEQ ID NO: 526477 - DNA, 120 bp, Artificial Sequence
  ENSG00000165899_3 (sequence is synthesized)
ttctaagactggaacatgtgactgtcaaatatttcaggctcttgggacaagatgccagatcatcccaaacatgggcaacggcagagatgggatttgtaaaacctggggacagtatcattt

SEQ ID NO: 526478 - DNA, 120 bp, Artificial Sequence
  ENSG00000165899_4 (sequence is synthesized)
tgaaacattcgatggcatctactattacttcccaggaaactgttcttacatttttgcaaaggactgtggtgatttggagcctcggtacactgtatgggttcataacagccctaaatgcct

SEQ ID NO: 526479 - DNA, 120 bp, Artificial Sequence
  ENSG00000165899_5 (sequence is synthesized)
tggttcggtgtattcttgttatcggtcaatcagcttgttcttttcaaaccaagaggaaattcgaatttatggtcatgaaataaaaaagaatggaatcagtttaacattgcctcagacaat

SEQ ID NO: 526480 - DNA, 120 bp, Artificial Sequence
  ENSG00000165899_6 (sequence is synthesized)
tggacagattttcattgagaaactagctgactacattcttgtgaaaacaacctttggcttttcattggcttgggacgggatatctgggatctacctcaagctgtctgaggaccataaggg

SEQ ID NO: 526481 - DNA, 120 bp, Artificial Sequence
  ENSG00000165899_7 (sequence is synthesized)
gaaatcatgtggcctatgtggaaactacaatgacattcaatctgatgatttcataattctgcaagaggactatacagaagacatcgctatgtttgcaaatagttggtcggtgcaaactcc

SEQ ID NO: 526482 - DNA, 120 bp, Artificial Sequence
  ENSG00000165899_8 (sequence is synthesized)
agatgacaccaaatgtgtactcacaccctcagattttccaaatccgtgctccagtggaatgccagcatttgaggcaatcttcttcaagtgtcagatactgttgcagtttccttttctgag

SEQ ID NO: 526483 - DNA, 120 bp, Artificial Sequence
  ENSG00000165899_9 (sequence is synthesized)
ctgccatgagtatatcgatccatacttatatattgccagctgtgttaatgatctttgcaaaactgatgatgatgaaacctattgccgagcagccactgagtatgctagagcctgctctca

SEQ ID NO: 526484 - DNA, 120 bp, Artificial Sequence
  ENSG00000165899_10 (sequence is synthesized)
tgctggctaccctattcaagactggagagatgactttccagcatgcactgataaatgtgatgatagctttgtccatcgggactgtatcagttgttgtccaccaacctgcacatttgagaa

SEQ ID NO: 526485 - DNA, 120 bp, Artificial Sequence
  ENSG00000165899_11 (sequence is synthesized)
gcaatgtcttgggagcaatctccattgtcttgatggatgttactgcccagatggcctcgtaatggacaatgggacttgcatctccttggaaaattgcccatgcggttttcatggattagc

SEQ ID NO: 526486 - DNA, 120 bp, Artificial Sequence
  ENSG00000165899_12 (sequence is synthesized)
ttattcagttggttcaaaaattgaacaagaatgtactgaatgtgtgtgtgttggtggagtttggaactgcactgagcaagactgtccagttcaatgctcagttgtaggtgattctcactt

SEQ ID NO: 526487 - DNA, 120 bp, Artificial Sequence
  ENSG00000165899_13 (sequence is synthesized)
tacaacttttgatggtcgacattattcttttattggcatgtgccaatacatcctcgtgaaaggaactggaaaagataaattcacgattactttacagaaagctccctgtgagcagaatct

SEQ ID NO: 526488 - DNA, 120 bp, Artificial Sequence
  ENSG00000165899_14 (sequence is synthesized)
tggcttggtctgccttcagtctataactctgattctggaggatgattttaacaaacaagtgacccttggtaggggaggacaaattctcactagtcctaaccaaggcttcaacctgaatgg

SEQ ID NO: 526489 - DNA, 120 bp, Artificial Sequence
  ENSG00000165899_15 (sequence is synthesized)
tattgttgaaattcaaactctgtcatccttatttatacttctaaaaaccacatttggtttaaagattctgtttgctatagatggggaaagaatttatattcagcttactagcgcatggaa

SEQ ID NO: 526490 - DNA, 120 bp, Artificial Sequence
  ENSG00000165899_16 (sequence is synthesized)
aagaagaacattaggtctgtgtggcacttttaatggcaacataagggatgattttctttctccatcaggcatgatagaaggtacaccacaacttcacgcaaatgcgtggagagtttcttc

SEQ ID NO: 526491 - DNA, 120 bp, Artificial Sequence
  ENSG00000165899_17 (sequence is synthesized)
tacctgttttgcacctgttcatgtcccagtggtggacccctgtaacatcaatcaacaaaacattgggtatgcagcacactgtgatgtcatccaccaggagctctttgctccttgccacat

SEQ ID NO: 526492 - DNA, 120 bp, Artificial Sequence
  ENSG00000165899_18 (sequence is synthesized)
ctatattagccctgggctgtactatcagctatgccgccacgatgcatgcaagtgtggaagctcctgcctgtgcaatgctcttgcccactatgcctacctctgcggccagcacggtgttcc

SEQ ID NO: 526493 - DNA, 120 bp, Artificial Sequence
  ENSG00000165899_19 (sequence is synthesized)
cattgatttcagaactcagatttctttctgtgctgtggtgtgccagaagggcatgctgtaccatcactgttcctcgttctgcctccattcctgcatttctctctcttccccggagcagtg

SEQ ID NO: 526494 - DNA, 120 bp, Artificial Sequence
  ENSG00000165899_20 (sequence is synthesized)
cagtgatgactgtgctgaaggctgtaattgtccggaaggcaaattctatgaagacactcttaacttttgtgtacccatattccactgccgttgtcattataggggcagtgtttatcaacc

SEQ ID NO: 526495 - DNA, 120 bp, Artificial Sequence
  ENSG00000165899_21 (sequence is synthesized)
tggagagctcatccccacaccctcgggcttatgccagtgttcaaatgggactgtgaaatgtgatgaattagcaacgccctctgctgttcacatctgcccagagggaaaagagtatttcga

SEQ ID NO: 526496 - DNA, 120 bp, Artificial Sequence
  ENSG00000165899_22 (sequence is synthesized)
ctgcaggtttcctgaccctgaattaccagctggtggtgttaattgtgagactacatgtgcaaacctagccatgaacttcacctgcaccccatcctcaccctgtataagtggctgtgtttg

SEQ ID NO: 526497 - DNA, 120 bp, Artificial Sequence
  ENSG00000165899_23 (sequence is synthesized)
tgctccaggaatggcagagcacagaggaaagtgttatgttcctgaaagctgcccatgtatttggaaagattgggagtatctctcaggagaagtgattgctacaccgtgttacacctgcgt

SEQ ID NO: 526498 - DNA, 120 bp, Artificial Sequence
  ENSG00000165899_24 (sequence is synthesized)
ttgtcgacgaggaatgttcaattgcacatattatccatgcccagcagtgtgcacaatatacggggaccgacattattattcttttgatggactagaatatgactatatcagtgattgcca

SEQ ID NO: 526499 - DNA, 120 bp, Artificial Sequence
  ENSG00000165899_25 (sequence is synthesized)
ggtgtttttgataaagagtgcagatgattcagatatatctgtcattgcccagaacaagaaatgctttgacaacgatattgtttgttctaaaagtgttttgatttcagttggggacactga

SEQ ID NO: 526500 - DNA, 120 bp, Artificial Sequence
  ENSG00000165899_26 (sequence is synthesized)
aatttacctgaatgatactccttacaaacagaaacaatcaggtttttttctggaaaacaaatctacctaccagctttggaaggctggttactatatagtagtatactttccagagaaaga

SEQ ID NO: 526501 - DNA, 120 bp, Artificial Sequence
  ENSG00000165899_27 (sequence is synthesized)
tatcactattctttgggataggaagacaactattcatatcaaagttgggccacagtggaagaacaagctatcaggattgtgtggaaactttgacaaatgcacttcaaatgatatgaccac

SEQ ID NO: 526502 - DNA, 120 bp, Artificial Sequence
  ENSG00000165899_28 (sequence is synthesized)
atctaataacttggaagtgagaaatgctcgggtatttggagatagttgggcattaggacagtgtgaaagtccagatgaaacaattaaaccctgtgaggcacatcaaaacaaatttcctta

SEQ ID NO: 526503 - DNA, 120 bp, Artificial Sequence
  ENSG00000165899_29 (sequence is synthesized)
tgccaagaaagaatgctccattttgtacagtgatatttttgcttcttgtcgcaatgtgattgacgttacttcttttgccaaaaattgtcatgaagatacatgtaactgcaatcttggtgg

SEQ ID NO: 526504 - DNA, 120 bp, Artificial Sequence
  ENSG00000165899_30 (sequence is synthesized)
cgactgtgagtgtttgtgcactagtatagctgcatatgcatacaagtgttgtcaggaaggaatatcaattcattggagatcatctactgtttgttcacttgattgtgaatactacaatga

SEQ ID NO: 526505 - DNA, 120 bp, Artificial Sequence
  ENSG00000165899_31 (sequence is synthesized)
aggacttggagaaggaccatatatgctggcaagctatgggcagagtggccttgttctgggggccaatatgaccagcagaagcgttttctgtttgccgagaagcagtgttcataccagttt

SEQ ID NO: 526506 - DNA, 120 bp, Artificial Sequence
  ENSG00000165899_32 (sequence is synthesized)
atttttttattttatgatcactccaggccttttcaaagagaaggtatcatcattagcacttgtttccttggaatctgctgaaaggccaaactactttctctatgtccatgacaatgatac

SEQ ID NO: 526507 - DNA, 120 bp, Artificial Sequence
  ENSG00000165899_33 (sequence is synthesized)
tcttagcttggagctgtgggaggcgaattcagcctttcatcggagagcaacatttttccaccatcagggcctctggattcctggttacagtgcatttgagttatacagcaagaaaggctt

SEQ ID NO: 526508 - DNA, 120 bp, Artificial Sequence
  ENSG00000165899_34 (sequence is synthesized)
tttcatcatattcacagattctagtgtcaaagcatcaaaatatgatgattctgaagaatttaaacattcaagtagcttcagcatagaagaaatccaggcagcagtgccttacaggaagat

SEQ ID NO: 526509 - DNA, 120 bp, Artificial Sequence
  ENSG00000165899_35 (sequence is synthesized)
gtgtgaatggagatatgaaccttgtgctacaccctgttttaaaacatgtagtgaccctgaagcactagcatgtaaatttcttccaccggttgaaggatgcttgccctactgccctaaaaa

SEQ ID NO: 526510 - DNA, 120 bp, Artificial Sequence
  ENSG00000165899_36 (sequence is synthesized)
tatgatccttgatgaggtcaccctcaagtgtgtttatccacgagactgtatacctgtgattcccacagaaccaacattaatgccaccagctaagccaactgtgcccatgtttacagtttg

SEQ ID NO: 526511 - DNA, 120 bp, Artificial Sequence
  ENSG00000165899_37 (sequence is synthesized)
ggaaatgattactccatcagacatcactgtgtttgatatgctaacaccaactacaggcttggaatgtgagcctcagaaatttgatcctgtttatgattgtagccaatacatatgccttaa

SEQ ID NO: 526512 - DNA, 120 bp, Artificial Sequence
  ENSG00000165899_38 (sequence is synthesized)
tatggaatggcagttatacaactggtcccttaattgcccaaaggacgtggaaatgcctgactgtggtttccgaggaaggccagttcaagtgaacagtgatatctgctgccctgagtggga

SEQ ID NO: 526513 - DNA, 120 bp, Artificial Sequence
  ENSG00000165899_39 (sequence is synthesized)
atgtccttgtcggtgttccatgttgtcagaactgagcattattacatttgatggaaacaacgcagcattatatagcatggcttcttatatcttagtaagaattcctggtgaaattatagt

SEQ ID NO: 526514 - DNA, 120 bp, Artificial Sequence
  ENSG00000165899_40 (sequence is synthesized)
tgctcatatcgaaaaatgttccatgaatcagaatggaaactccttaaaaaagctagctccctctggaagaatctctggactttgttttaagaagttaaatgtgacaacacccatacataa

SEQ ID NO: 526515 - DNA, 120 bp, Artificial Sequence
  ENSG00000165899_41 (sequence is synthesized)
aagaaaggtagaagtggattccattgttgtgcctttgcccttttcaagtcaggaactgtccatagaggattctggttcaatgtatgtaattactactccagctggactaatcataaagtg

SEQ ID NO: 526516 - DNA, 120 bp, Artificial Sequence
  ENSG00000165899_42 (sequence is synthesized)
gtctcatcttacaggaatcatagacattcattttggcttccgatttaacttgtcatcctacacagaaggactctgtggaatttgcaatgaagatccggatgatgatctaaggatgcaaaa

SEQ ID NO: 526517 - DNA, 120 bp, Artificial Sequence
  ENSG00000165899_43 (sequence is synthesized)
tggcacaattattacaaatatggaagacataggattatttattgagagctgggaaattgagaaatcatttgaagtaacaatgagaagacctgttaggaattgtactgagcatgattgcag

SEQ ID NO: 526518 - DNA, 120 bp, Artificial Sequence
  ENSG00000165899_44 (sequence is synthesized)
ccagtgcattgatttattaaatagaagaattttcattccatgtcatgataaagtttcaccggaagacttttgtgaaaagatgtggatcaattatacctatttttggaactatgaatgtga

SEQ ID NO: 526519 - DNA, 120 bp, Artificial Sequence
  ENSG00000165899_45 (sequence is synthesized)
tgcactttctgcatatgtggctctgtgcaacaagtttgatatctgtattcagtggagaacacctgattactgctccctgagttgcccagaggggaaggaatatcaaccctgtgtgcgacc

SEQ ID NO: 526520 - DNA, 120 bp, Artificial Sequence
  ENSG00000165899_46 (sequence is synthesized)
ttgtgaagcaagaacatgcctgaaccaatggttctatggacacacttcctgtttgaatctaagagaagactgtgtgtgcaaagttggaactattcttcacaggccacattcagcccagtg

SEQ ID NO: 526521 - DNA, 120 bp, Artificial Sequence
  ENSG00000165899_47 (sequence is synthesized)
cattccagagaaagagtgtgcatgcactgatagtgaagaccaaccccgcactgctggggagatttggaatgggggcattgatgaatgcactctatacaaatgtttggagaatggaagcat

SEQ ID NO: 526522 - DNA, 120 bp, Artificial Sequence
  ENSG00000165899_48 (sequence is synthesized)
tatccctatagaacctgactgtgatgaagagcccacgccagtttgtgaacgagaagctgaagttgtcatgggcatcattgataaatggacctgctgttcaaaggaagtttgtggatgtga

SEQ ID NO: 526523 - DNA, 120 bp, Artificial Sequence
  ENSG00000165899_49 (sequence is synthesized)
cacgactttgtgtgaaactagcattccaacatgtacaaatagtcaaaaattgattgttggccacagtcctctttcttgctgtccacagtacaaatgtgaatgtgacccattgaaatgccc

SEQ ID NO: 526524 - DNA, 120 bp, Artificial Sequence
  ENSG00000165899_50 (sequence is synthesized)
cagtatttcaacaccagaatgcagagaagatcaattcatgattcaagttcgacaggaagaaccttgttgtttttcccctttttgtgtttgtgaatcttgcaccaaacctgttccactatg

SEQ ID NO: 526525 - DNA, 120 bp, Artificial Sequence
  ENSG00000165899_51 (sequence is synthesized)
tcatgatggggaatttctcacagtagatcttaatagcacacacttctgttgtcctcagtattactgtgtatgtgaaccaaacctttgtcctatgccattactcaactgtgcagaagatat

SEQ ID NO: 526526 - DNA, 120 bp, Artificial Sequence
  ENSG00000165899_52 (sequence is synthesized)
gaatcttgtgaaagaaaatgtatctggtcaatgttgcccaacatggcactgtgaatgtaactgtgaaaaccttattatgccaacttgtgaagtgggagaatttactgcaatagaccataa

SEQ ID NO: 526527 - DNA, 120 bp, Artificial Sequence
  ENSG00000165899_53 (sequence is synthesized)
cttccagagtgattgtggatgcatacagtatctctgtgaaaaggatgatgtgtgtgtatttcaagaagtatcagtattgaatcctggacaatccatgataaagtatttggaagaagactt

SEQ ID NO: 526528 - DNA, 120 bp, Artificial Sequence
  ENSG00000165899_54 (sequence is synthesized)
ttgttatgctatagagtgtctggaagaaaaagataaccatacgggctttcacactctgaattttacactggtgaattgttcaaaaaaatgtgatgttcaccaggtatatactccatcccc

SEQ ID NO: 526529 - DNA, 120 bp, Artificial Sequence
  ENSG00000165899_55 (sequence is synthesized)
aagtgattatggttgttgtggtacctgcaaaaatgtatcctgcaaatttcacatggaaaatggaacatcagttgtatacgcggtagggagtacctggcactacaattgcaccacatatga

SEQ ID NO: 526530 - DNA, 120 bp, Artificial Sequence
  ENSG00000165899_56 (sequence is synthesized)
atgtgttaaaactgatgaaggagcaataattctgaactacacaatggtctgtcccccttttaatgagactgaatgcaaaatgaatgaagggattgtgaagctttataatgaaggctgttg

SEQ ID NO: 526531 - DNA, 120 bp, Artificial Sequence
  ENSG00000165899_57 (sequence is synthesized)
caagatctgcaaacgagaagaaagaatatgccagaaagtgatcattaaatcggtcataaggaaacaggactgtatgagccaaagccctataaatgttgcatcttgtgacggcaaatgccc

SEQ ID NO: 526532 - DNA, 120 bp, Artificial Sequence
  ENSG00000165899_58 (sequence is synthesized)
atcagctaccatatataacatcaatattgaaagtcacctaagattctgcaagtgttgtcgtgaaaatggagtacgaaacttgtctgtgcctctgtattgctcaggaaatggcactgaaat

SEQ ID NO: 526533 - DNA, 120 bp, Artificial Sequence
  ENSG00000165899_59 (sequence is synthesized)
tatgtacactctccaggaacccatagactgtacgtgccagtggaattaaacccttgggttccaagagctctatacaacatcataacgtcagatagaattaacttttattgctattactta

SEQ ID NO: 526534 - DNA, 120 bp, Artificial Sequence
  ENSG00000165899_60 (sequence is synthesized)
ggcatgtggcagatttatgctgtttaacaatactgtatttttcagacttggaatgtggaaatttagcaatttgtacaaaatatatacagtttcaatagcaaaattaaatttattgcttta

SEQ ID NO: 526535 - DNA, 120 bp, Artificial Sequence
  ENSG00000165899_61 (sequence is synthesized)
ctctattttagaaaatcaaatgactgtaagttgttcagctgaaatgctgttatgtatttaattacaacttggtgcagatacagtatattctcatcaactggaaggttattttgcaaaatt

SEQ ID NO: 526536 - DNA, 120 bp, Artificial Sequence
  ENSG00000165899_62 (sequence is synthesized)
ccttcaatttcactcagtagctctttttttcttaatttgcaaagtctgctatagctatccaaattaaggtaccctttaatatgtactccttaatctggtaaatgtgatcagttaaaattg

SEQ ID NO: 526537 - DNA, 120 bp, Artificial Sequence
  ENSG00000165899_63 (sequence is synthesized)
tcatctagatagcaataaagagtgatatgcttagagatagataatggattatttaaaacctgaatggtttatagagaagtcattataaattcccctcattttgcaggtgtaacagataac

SEQ ID NO: 526538 - DNA, 120 bp, Artificial Sequence
  ENSG00000165899_64 (sequence is synthesized)
cagagaagctgtgtgactcgtacaaatttattcagtgtaataatatagtaaattcatgttaacagttggattaaatcctagctctctcttattccagtactatatcacttttaaaatcct

SEQ ID NO: 526539 - DNA, 120 bp, Artificial Sequence
  ENSG00000165899_65 (sequence is synthesized)
gagcagtatgtagtaagagtatatcacagaatctttcattcttaaagagtttgcattggatagaattaagtattttaagtttaacatatttgaaaaatgccccccatacattgttattcc

SEQ ID NO: 526540 - DNA, 120 bp, Artificial Sequence
  ENSG00000165899_66 (sequence is synthesized)
aatagtaaggagcagggaaatatagcatcatttgctaaatagaggagatagatcttgaactgttattttttatataattaaaactgctattaaatgtgttgtcagtatttaacatttagt

SEQ ID NO: 526541 - DNA, 120 bp, Artificial Sequence
  ENSG00000165899_67 (sequence is synthesized)
tactgtctcattaatatttaattttgaggatgtacttgcatactgttgaagttgagtgctgttttgctgttaatgctgctgctttgccaatgaagaatgaaataaatttatctgaatgta

SEQ ID NO: 526542 - DNA, 120 bp, Artificial Sequence
  ENSG00000165899_68 (sequence is synthesized)
tcaataactttaaaatggaatgctgcacttttaaaatatggtagattattgacatttgcaagaagaatgtattgaggtctttggaaatgcccaaattctttgccacctataattaaaaat

SEQ ID NO: 526543 - DNA, 120 bp, Artificial Sequence
  ENSG00000165899_69 (sequence is synthesized)
tgtctgaattttctcctcagtataaaggagtgaatgccctacttagtgtaattgtatcaagtgaagtcaaacatcaacaaaagaacagtaaagtctcattgcaaagcagatactgggcct

SEQ ID NO: 526544 - DNA, 120 bp, Artificial Sequence
  ENSG00000165899_70 (sequence is synthesized)
caagggtgggcttaggcttaaactagattatctgctttcatatactaatgttttcatttcaaaatcatgtgtccccaaaatattgcaacttactgaatattttagatctcttgggttact

SEQ ID NO: 526545 - DNA, 120 bp, Artificial Sequence
  ENSG00000165899_71 (sequence is synthesized)
taaatatgtgtgaaaaaatcaacattgcatctgcaaatcccagtgtttactgtatatgcaattgatttatcctgtttgtgcttaatataagtgttcctgagatgttaacatttcaatatt

SEQ ID NO: 526546 - DNA, 120 bp, Artificial Sequence
  ENSG00000165899_72 (sequence is synthesized)
atctattgcccatttttatttccattttctgtaaaatattcattattaaaaatattaagtaatctttaaacctatttgtggagaaatgggaaacattctcctagaactttataaacattc

SEQ ID NO: 526547 - DNA, 120 bp, Artificial Sequence
  ENSG00000165899_73 (sequence is synthesized)
aacaaatacagcaaataagcatttagggcctacatgtgccaggcactattataaactcttgggacacaggcaaaactaaacagacacagtcctaactcccttaattcttagagtctagca

SEQ ID NO: 526548 - DNA, 120 bp, Artificial Sequence
  ENSG00000165899_74 (sequence is synthesized)
agaaagcaggccttaaatagccatacatatgatatgagaatgtccagaaagagatcccaaaacttattagaatgtggcatatcataaagatgactctgaaatcagtggaagagtgcaaat

SEQ ID NO: 526549 - DNA, 120 bp, Artificial Sequence
  ENSG00000165899_75 (sequence is synthesized)
tagctcttaataaatggtgttgggacaactgaatggttacgtagataaagaaaaatttgaattcatacatccattgacattaggataacctccaaatgaatcagagatttaaatgttaaa

SEQ ID NO: 526550 - DNA, 120 bp, Artificial Sequence
  ENSG00000165899_76 (sequence is synthesized)
aaacaaaagaagataggagttacaaaagaaaatagggaagaaatcttagattggggagagccattctaattgtgactcagtatccagataccccaaataaatgattcatagatttaacag

SEQ ID NO: 526551 - DNA, 120 bp, Artificial Sequence
  ENSG00000165899_77 (sequence is synthesized)
ttagaaaactgaaaacagacaaattctgcttggtagaaaaaagtcaaaaaaagataaaagcaaagaaacaatatttgtgacatatcagtgacacagtctaatcctcctgtatgtaaagaa

SEQ ID NO: 526552 - DNA, 120 bp, Artificial Sequence
  ENSG00000165899_78 (sequence is synthesized)
ctcttgaaaaaaataacaaaaggaaaaaattaacaacctgatagaaaaatgagccaaagatataaactgatagttgaaagaaaaataagtaagactagtggatcctttaacaaaaaagat

SEQ ID NO: 526553 - DNA, 120 bp, Artificial Sequence
  ENSG00000165899_79 (sequence is synthesized)
aactgagcacacttctagctaataaaaaatatttcacattcaatctacagaaattcaatttctcacctaccagactggtaaaaaaccagaagtttaatgatacttttattttttaaggct

SEQ ID NO: 526554 - DNA, 120 bp, Artificial Sequence
  ENSG00000165899_80 (sequence is synthesized)
ctgggaagataagcactctcacatgtcattgatggtaacacaaaattgtagaaatcctagggaaaacctagaaatgtatactaatattagaagtgatttttggtttgaccaaactgccta

SEQ ID NO: 526555 - DNA, 120 bp, Artificial Sequence
  ENSG00000165899_81 (sequence is synthesized)
gaatatatatgccgtacaaacgcctgtacaaatacaaagtggtatttgtgaaggttattaattgcagcattgtttgtaatagaaaaaaaccaacaatagttgaataaactacgttaatcc

SEQ ID NO: 526556 - DNA, 120 bp, Artificial Sequence
  ENSG00000165899_82 (sequence is synthesized)
agaccttcagataaaggagctctcgaaatacaacccataaggaataaagccatagccagtgcttccctgggtttggggagtcagaggttacaggaaggattcatggaatccccagaaggc

SEQ ID NO: 526557 - DNA, 120 bp, Artificial Sequence
  ENSG00000165899_83 (sequence is synthesized)
tggaagatcagggttgagacagtcggaaccaaggaagctctggaaacttaagaagtaggaggcacagcaagtctcacggcaagaagagcttgatatgagtactattggctagagaagttt

SEQ ID NO: 526558 - DNA, 120 bp, Artificial Sequence
  ENSG00000165899_84 (sequence is synthesized)
agtaactttcctgaagttttacagaagataagtatagagtgggaactcaaaactatttctgtctgattccaaagcccttttaatattttgtattgcttaagtagcaagaatagagtttgt

SEQ ID NO: 526559 - DNA, 120 bp, Artificial Sequence
  ENSG00000165899_85 (sequence is synthesized)
aagaacatacaatatcaataaatgtttcatgtccttcatcattaactactccagttagtatcaaccgggaacttacttggaatgtacattctctgccccctcaacagacctactgaatca

SEQ ID NO: 526560 - DNA, 120 bp, Artificial Sequence
  ENSG00000165899_86 (sequence is synthesized)
aaaactctggaggtcaggcccagaaatctgtcttttggcatactttccaggtaaacagaatgagaaatgaaacttaatccatgcagctaagactcatctctgctacttcatacccttccc

SEQ ID NO: 526561 - DNA, 120 bp, Artificial Sequence
  ENSG00000165899_87 (sequence is synthesized)
tagaggagctaaatgttttagacagtgactttatattaccttctctttcatctcttgctggagtctcaatgaaggtattaaactattaattatgattatatattttgcaaaatttgcctt

SEQ ID NO: 526562 - DNA, 120 bp, Artificial Sequence
  ENSG00000165899_88 (sequence is synthesized)
ggattcattgagaatctgcccaggtaatcaagattcgaccacttacaaattaaatattcatcatctgtgctctaaaatgtaaagattgtctgctgatcacttgggccacaacacttttca

SEQ ID NO: 526563 - DNA, 120 bp, Artificial Sequence
  ENSG00000165899_89 (sequence is synthesized)
agaccagggtaaaatgtttagcattctggtgttttttcttatccattggcctaaggaagataagagaaacatggagcagcccaggatacaacctacagcttagagctaaactcattcaag

SEQ ID NO: 526564 - DNA, 120 bp, Artificial Sequence
  ENSG00000165899_90 (sequence is synthesized)
cccagactaggcatggatatcaagcatgcctctgagtaaaacaaagagaatccagtctttgaccaattgaccaaacaagacccaagcagctgggaagtttgtcaagtctcataagaatga

SEQ ID NO: 526565 - DNA, 120 bp, Artificial Sequence
  ENSG00000165899_91 (sequence is synthesized)
agataataccttagagacctctatgtttgtaatgactgcttttattttttaaatgaaatgtcaatattgcatgtaagttatttgaaatattctcataatgtacaaacatgaaaagcaaat

SEQ ID NO: 526566 - DNA, 120 bp, Artificial Sequence
  ENSG00000165899_92 (sequence is synthesized)
gaaataatatcttaagattggagatatgttggataagaccaataacttttgactagttttgtaataaacgaaattattgtaactatgttttgaaatacgcaacagaaataatttaaaaca

SEQ ID NO: 526567 - DNA, 120 bp, Artificial Sequence
  ENSG00000165899_93 (sequence is synthesized)
tttgaaaaattcttatcgtggaaatatcatatctaaatattggaaagtatggaacagattatgtaatacagtgacgcagttgatttgtatttaaatagatgttatgcaacaggcaattat

SEQ ID NO: 526568 - DNA, 120 bp, Artificial Sequence
  ENSG00000165899_94 (sequence is synthesized)
tatcaagttattggggctctaattttcacacttatgttgtctgccattttcattcatggtagattgtttccttgtgtgttttataattttttttaatcagcttatttttaccagcacccc

SEQ ID NO: 526569 - DNA, 120 bp, Artificial Sequence
  ENSG00000165899_95 (sequence is synthesized)
tccagacccattagaatcttttgtgacttaggttttgggggtaccactctctccacctcttcattccttcattggatttttccagttattccaggggtatcattggctggtgttgacgtt

SEQ ID NO: 526570 - DNA, 120 bp, Artificial Sequence
  ENSG00000165899_96 (sequence is synthesized)
aattgctcaattttggctttctaagacaaaaatagtgtaaatataaaagtaatgtaaattcatataccaaatttgtttaagatatcaacctaggattttaatttcttagaggtaactttt

SEQ ID NO: 526571 - DNA, 120 bp, Artificial Sequence
  ENSG00000165899_97 (sequence is synthesized)
taatcacagacccagcagttagagaagcttttctatcacctttctatactatgagccagtttcttctagtctgggggttgacaagttacaaccactgggtctcctgcatttttgtgaata

SEQ ID NO: 526572 - DNA, 120 bp, Artificial Sequence
  ENSG00000165899_98 (sequence is synthesized)
tattattatataatttagaaaatacacattgatattttctaaggtcatactttcattgtggcttatacataatggcgaatgtgttattttcatgaatgaataaaagctctgttctatttt

SEQ ID NO: 526573 - DNA, 120 bp, Artificial Sequence
  ENSG00000165905_0 (sequence is synthesized)
gccgcccagggctgagtctcccatctcgcccctcggtccgcagggcctgcgatggagcctgcagccccgggtcgcgtccctccctgagcgcccccgtcggcggccatgctgccccgaggg

SEQ ID NO: 526574 - DNA, 120 bp, Artificial Sequence
  ENSG00000165905_1 (sequence is synthesized)
cccgggcgctgggggccgccgcgctgttgctgctgctgctgctgctcggattcctcctgttcggtggggacctggggtgtgagcgccgcgagcctggcgggcgagcgggggccccgggat

SEQ ID NO: 526575 - DNA, 120 bp, Artificial Sequence
  ENSG00000165905_2 (sequence is synthesized)
ggatgcttccccggcccgctcatgccacgtgtccccccagacgggaggctgcggagagccgccgccctcgacggagacccgggggccggccccggggaccacaaccgctccgactgcggc

SEQ ID NO: 526576 - DNA, 120 bp, Artificial Sequence
  ENSG00000165905_3 (sequence is synthesized)
ccgcagccgccgccgccgcccaagtgcgagctcttgcatgtggccatcgtgtgtgcggggcataactccagccgagacgtcatcaccctggtgaagtccatgctcttctacaggaaaaat

SEQ ID NO: 526577 - DNA, 120 bp, Artificial Sequence
  ENSG00000165905_4 (sequence is synthesized)
ccactgcacctccacttggtgactgacgccgtggccagaaacatcctggagacgctcttccacacatggatggtgcctgctgtccgtgtcagcttttatcatgccgaccagctcaagccc

SEQ ID NO: 526578 - DNA, 120 bp, Artificial Sequence
  ENSG00000165905_5 (sequence is synthesized)
caggtctcctggatccccaacaagcactactccggcctctatgggctaatgaagctggtgctgcccagtgccttgcctgctgagctggcccgcgtcattgtcctggacacggatgtcacc

SEQ ID NO: 526579 - DNA, 120 bp, Artificial Sequence
  ENSG00000165905_6 (sequence is synthesized)
ttcgcctctgacatctcggagctctgggccctctttgctcacttttctgacacgcaggcgatcggtcttgtggagaaccagagtgactggtacctgggcaacctctggaagaaccacagg

SEQ ID NO: 526580 - DNA, 120 bp, Artificial Sequence
  ENSG00000165905_7 (sequence is synthesized)
ccctggcctgccttgggccggggatttaacacaggtgtgatcctgctgcggctggaccggctccggcaggctggctgggagcagatgtggaggctgacagccaggcgggagctccttagc

SEQ ID NO: 526581 - DNA, 120 bp, Artificial Sequence
  ENSG00000165905_8 (sequence is synthesized)
ctgcctgccacctcactggctgaccaggacatcttcaacgctgtgatcaaggagcacccggggctagtgcagcgtctgccttgtgtctggaatgtgcagctgtcagatcacacactggcc

SEQ ID NO: 526582 - DNA, 120 bp, Artificial Sequence
  ENSG00000165905_9 (sequence is synthesized)
gagcgctgctactctgaggcgtctgacctcaaggtgatccactggaactcaccaaagaagcttcgggtgaagaacaagcatgtggaattcttccgcaatttctacctgaccttcctggag

SEQ ID NO: 526583 - DNA, 120 bp, Artificial Sequence
  ENSG00000165905_10 (sequence is synthesized)
cgatgggaacctgctgcggagagagctctttgtgtgccccagccagcccccacctggtgctgagcagttgcagcaggccctggcacaactggacgaggaagacccctgctttgagttccg

SEQ ID NO: 526584 - DNA, 120 bp, Artificial Sequence
  ENSG00000165905_11 (sequence is synthesized)
gcagcagcagctcactgtgcaccgtgtgcatgtcactttcctgccccatgaaccgccacccccccggcctcacgatgtcacccttgtggcccagctgtccatggaccggctgcagatgtt

SEQ ID NO: 526585 - DNA, 120 bp, Artificial Sequence
  ENSG00000165905_12 (sequence is synthesized)
ggaagccctgtgcaggcactggcctggccccatgagcctggccttgtacctgacagacgcagaagctcagcagttcctgcatttcgtcgaggcctcaccagtgcttgctgcccggcagga

SEQ ID NO: 526586 - DNA, 120 bp, Artificial Sequence
  ENSG00000165905_13 (sequence is synthesized)
cgtggcctaccatgtggtgtaccgtgaggggcccctataccccgtcaaccagcttcgcaacgtggccttggcccaggccctcacgccttacgtcttcctcagtgacattgacttcctgcc

SEQ ID NO: 526587 - DNA, 120 bp, Artificial Sequence
  ENSG00000165905_14 (sequence is synthesized)
tgcctattctctctacgactacctcagggcctccattgagcagctggggctgggcagccggcgcaaggcagcactggtggtgccggcattcgagaccctgcgctaccgcttcagcttccc

SEQ ID NO: 526588 - DNA, 120 bp, Artificial Sequence
  ENSG00000165905_15 (sequence is synthesized)
ccattccaaggtggagctgttggccttgctggatgcgggcactctctacaccttcaggtaccacgagtggccccgaggccacgcacccacagactatgcccgctggcgggaggctcaggc

SEQ ID NO: 526589 - DNA, 120 bp, Artificial Sequence
  ENSG00000165905_16 (sequence is synthesized)
cccgtaccgtgtgcaatgggcggccaactatgaaccctacgtggtggtgccacgagactgtccccgctatgatcctcgctttgtgggcttcggctggaacaaagtggcccacattgtgga

SEQ ID NO: 526590 - DNA, 120 bp, Artificial Sequence
  ENSG00000165905_17 (sequence is synthesized)
gctggatgcccaggaatatgagctcctggtgctgcccgaggccttcaccatccatctgccccacgctccaagcctggacatctcccgcttccgctccagccccacctatcgtgactgcct

SEQ ID NO: 526591 - DNA, 120 bp, Artificial Sequence
  ENSG00000165905_18 (sequence is synthesized)
ccaggccctcaaggacgaattccaccaggacttgtcccgccaccatggggctgctgccctcaaatacctcccagccctgcagcagccccagagccctgcccgaggctgaggctgggccgg

SEQ ID NO: 526592 - DNA, 120 bp, Artificial Sequence
  ENSG00000165905_19 (sequence is synthesized)
cgctgcccctcatcttagcattgggcagacaccagggcaacctgccctccgccatccctgctatttaaattatttaaggtctctgggaagggctggggcagagcatctgtggggtggggt

SEQ ID NO: 526593 - DNA, 120 bp, Artificial Sequence
  ENSG00000165905_20 (sequence is synthesized)
cttccccttgctgctattgtatggctggggactggtctctctctgccccagccagtttggggctggttcccccatcttgaattgtttatccctttttcataattaaagttttaaaacatc

SEQ ID NO: 526594 - DNA, 120 bp, Artificial Sequence
  ENSG00000165905_21 (sequence is synthesized)
cagctccacctgtggttgtgcccacccgtcgcatcaggcaagatggcccatggtggtctagtcctgtggctaatgccctgatgagtgtcactggcccagtcctagatgccccgctcttct

SEQ ID NO: 526595 - DNA, 120 bp, Artificial Sequence
  ENSG00000165905_22 (sequence is synthesized)
acggatgtcaccttcgcctctgacatctcggagctctgggccctctttgctcacttttctggtgagaggcctgggagcctgcctggcctgcccaggatccctgcatccagccctgagccc

SEQ ID NO: 526596 - DNA, 120 bp, Artificial Sequence
  ENSG00000165912_0 (sequence is synthesized)
aggccgcggcgcgggcccaggagcggcaggactcgggccggagcgtggccggacccccacccgccgaggggcccagggaggacgcggcagagtcacggtggcagcattgagagttggaca

SEQ ID NO: 526597 - DNA, 120 bp, Artificial Sequence
  ENSG00000165912_1 (sequence is synthesized)
cccgggtccttgaagtgatctctaggccccagccccaaatccgccaccattccgtgctgcggggacaccatggctccagaagaggacgctggaggggaggccttagggggcagtttctgg

SEQ ID NO: 526598 - DNA, 120 bp, Artificial Sequence
  ENSG00000165912_2 (sequence is synthesized)
gaggctggcaactacaggcgcacggtacagcgggtggaggacgggcaccggctgtgcggggacctggtcagctgcttccaggagcgcgcccgcatcgagaaggcttatgcccagcagttg

SEQ ID NO: 526599 - DNA, 120 bp, Artificial Sequence
  ENSG00000165912_3 (sequence is synthesized)
gctgactgggcccgaaagtggagggggaccgtggagaagggcccccagtatggcacactggagaaggcctggcatgcctttttcacggcggctgagcggctgagcgcgctgcacctggag

SEQ ID NO: 526600 - DNA, 120 bp, Artificial Sequence
  ENSG00000165912_4 (sequence is synthesized)
gtgcgggagaagctgcaagggcaggacagtgagcgggtgcgcgcctggcagcggggggctttccaccggcctgtgctgggcggcttccgcgagagccgggcggccgaggacggcttccgc

SEQ ID NO: 526601 - DNA, 120 bp, Artificial Sequence
  ENSG00000165912_5 (sequence is synthesized)
aaggcccagaagccctggctgaagaggctgaaggaggttgaggcttccaagaaaagctaccacgcagcccggaaggatgagaagaccgcccagacgagggagagccacgcaaaggcagac

SEQ ID NO: 526602 - DNA, 120 bp, Artificial Sequence
  ENSG00000165912_6 (sequence is synthesized)
agcgccgtctcccaggagcagctgcgcaaactgcaggaacgggtggaacgctgtgccaaggaggccgagaagacaaaagctcagtatgagcagacgctggcagagctgcatcgctacact

SEQ ID NO: 526603 - DNA, 120 bp, Artificial Sequence
  ENSG00000165912_7 (sequence is synthesized)
tcaaggatatgctgctcaccttacaccagcacctggacctttccagcagtgagaagttccatgaactccaccgtgacttgcaccagggcattgaggcagccagtgacgaagaggatctgc

SEQ ID NO: 526604 - DNA, 120 bp, Artificial Sequence
  ENSG00000165912_8 (sequence is synthesized)
gctggtggcgcagcacccacgggccaggcatggccatgaactggccacagttcgaggagtggtccttggacacacagaggacaatcagccggaaagagaagggtggccggagccctgatg

SEQ ID NO: 526605 - DNA, 120 bp, Artificial Sequence
  ENSG00000165912_9 (sequence is synthesized)
aggttaccctgaccagcattgtgcctacaagagatggcaccgcacccccaccccagtccccggggtccccaggcacggggcaggatgaggagtggtcagatgaagagagtccccggaagg

SEQ ID NO: 526606 - DNA, 120 bp, Artificial Sequence
  ENSG00000165912_10 (sequence is synthesized)
ctgccaccggggttcgggtgagggcactctatgactacgctggccaggaagctgatgagctgagcttccgagcaggggaggagctgctgaagatgagtgaggaggacgagcagggctggt

SEQ ID NO: 526607 - DNA, 120 bp, Artificial Sequence
  ENSG00000165912_11 (sequence is synthesized)
gccaaggccagttgcagagtggccgcattggcctgtaccctgccaactacgtggagtgtgtgggcgcctgagtgtcctgacagcccttctgcaacgtttacccaccctggttcagagccc

SEQ ID NO: 526608 - DNA, 120 bp, Artificial Sequence
  ENSG00000165912_12 (sequence is synthesized)
agcttctcctggagagccggaccctcagggccctgaaccgtcgctctctggctgctcctctgtcccttgagggaggaagtcctgggacccagggaggggaggggcctttgtctagggaag

SEQ ID NO: 526609 - DNA, 120 bp, Artificial Sequence
  ENSG00000165912_13 (sequence is synthesized)
ggactggtagggaagggacgagtctaggctgagggcaagatgggaggtcagaggtgacagaagcgttcaggggtgcctgggcctccccaggagctgtggactcagttcctgacctctgct

SEQ ID NO: 526610 - DNA, 120 bp, Artificial Sequence
  ENSG00000165912_14 (sequence is synthesized)
ttggggttcctggggtgggcttggggtgagtgtagttctggcctagcagcaccctcttgtggcttgttctagcgtgtattaaaacttgacacacacccacacacaaaaacaaaaacacca

SEQ ID NO: 526611 - DNA, 120 bp, Artificial Sequence
  ENSG00000165912_15 (sequence is synthesized)
aagaccaagttcaacaagtttggccaagaagtctagagcttcggtggctaggcctggccctgccgctccgcgtggctccacgggctccgagttatgcagctccgggcggcaaggggtcct

SEQ ID NO: 526612 - DNA, 120 bp, Artificial Sequence
  ENSG00000165912_16 (sequence is synthesized)
gtcgaggggcgcggtccataagggttgaggccagaggcgcgtagcctctgggcgccgagctctggagtggaggctggggttcggagtgcgtcatctggaagcaggcaccccggccggcag

SEQ ID NO: 526613 - DNA, 120 bp, Artificial Sequence
  ENSG00000165912_17 (sequence is synthesized)
aggggctgcccgggaaagaagcccttgggcgcagcctgtgactcaggttccagggatgggccaggcagaatggctgagctccctcccaggggcaagcccccagcttctggaagaggttgg

SEQ ID NO: 526614 - DNA, 120 bp, Artificial Sequence
  ENSG00000165912_18 (sequence is synthesized)
agcggcaggactcgggccggagcgtggccggacccccacccgccgaggggcccagggaggacgcgcgcgtggggacacacaaatcagaatcctggaagcctctgtcggtgactgaagata

SEQ ID NO: 526615 - DNA, 120 bp, Artificial Sequence
  ENSG00000165912_19 (sequence is synthesized)
gacactgtcctgtcagccacaactccatgggttatacaccccggctgaagggtcacccggggctacaggagcaaggacagagaaacaggggaagtgactgaggagaagatgccttaattg

SEQ ID NO: 526616 - DNA, 120 bp, Artificial Sequence
  ENSG00000165912_20 (sequence is synthesized)
gtcactcaagggaaggcaacagaggccctagcctgggcaggagtcctctcatcggcagttgggggagtggggccttctgcccaccgcccacccccgcctgccatttaatccctggctgga

SEQ ID NO: 526617 - DNA, 120 bp, Artificial Sequence
  ENSG00000165912_21 (sequence is synthesized)
tcgtgtgacctgcctggcattctcctccctggaatccggcgcttctgacagcagttgctatattgggggtgccgggcaccgccctggacgctctaggcccccaccctcacccccgctctg

SEQ ID NO: 526618 - DNA, 120 bp, Artificial Sequence
  ENSG00000165912_22 (sequence is synthesized)
ggaggccgcggcgcgggcccaggagcggcaggactcgggccggagcgtggccggacccccacccgccgaggggcccagggaggacgcgagtcacggtggcagcattgagagttggacacc

SEQ ID NO: 526619 - DNA, 120 bp, Artificial Sequence
  ENSG00000165914_0 (sequence is synthesized)
cccggccaggccgcgatggcgaccaagaaggcaggctcgcggctggagacggagatcgagcgctgccgctccgagtgccagtgggagcggatccctgagctcgtcaagcagctgtcggcc

SEQ ID NO: 526620 - DNA, 120 bp, Artificial Sequence
  ENSG00000165914_1 (sequence is synthesized)
aagctcatcgccaacgatgacatggcagagcttctcctcggggagtcgaagctggagcagtacctgaaggaacaccccctgaggcagggggccagtccccgaggccccaagccccagctg

SEQ ID NO: 526621 - DNA, 120 bp, Artificial Sequence
  ENSG00000165914_2 (sequence is synthesized)
actgaggtccgcaagcatctgaccgccgccctggaccgagggaaccttaagtcagaattcctacaagaatccaatctgatcatggccaagttgaattatgtggaaggtgattataaagaa

SEQ ID NO: 526622 - DNA, 120 bp, Artificial Sequence
  ENSG00000165914_3 (sequence is synthesized)
gctctgaacatttacgcccgggtgggcctggacgatctgccactgacagctgtcccgccctacaggctgcgggtgatcgcagaagcctacgctaccaaaggactttgtttggagaagctg

SEQ ID NO: 526623 - DNA, 120 bp, Artificial Sequence
  ENSG00000165914_4 (sequence is synthesized)
cctatttcttcttctaccagtaatctccatgtggaccgggaacaggatgtcatcacctgttatgagaaagcaggggacatcgcactcctgtatctccaagagatagaaagggtaatactt

SEQ ID NO: 526624 - DNA, 120 bp, Artificial Sequence
  ENSG00000165914_5 (sequence is synthesized)
tctaatattcaaaacagaagccctaagcctggccctgctccccacgatcaagaactaggttttttcctagaaacaggacttcagagagcccatgtcctctatttcaaaaatgggaacttg

SEQ ID NO: 526625 - DNA, 120 bp, Artificial Sequence
  ENSG00000165914_6 (sequence is synthesized)
acaagaggagtcggaagatttagagagcttctcagagcagttgaaacaagaacgactcaaaacctgcgaatgacaatagccaggcagctggcagagatcttgttgcggggtatgtgtgag

SEQ ID NO: 526626 - DNA, 120 bp, Artificial Sequence
  ENSG00000165914_7 (sequence is synthesized)
cagagctactggaaccctctggaggatccaccgtgccagtcacctctggacgatcctctccgcaaaggagcaaacacaaaaacctacactctcactcggagagcccgtgtctactcagga

SEQ ID NO: 526627 - DNA, 120 bp, Artificial Sequence
  ENSG00000165914_8 (sequence is synthesized)
gagaacattttttgtcctcaagaaaatacggaagaagccctgttgttattgctgattagtgaatcaatggccaaccgggacgctgtgctgagcaggatacctgaacacaagagtgaccgc

SEQ ID NO: 526628 - DNA, 120 bp, Artificial Sequence
  ENSG00000165914_9 (sequence is synthesized)
ctcatcagtctgcagagtgcatctgtggtctatgacttactcaccattgctcttggaagaagaggccagtatgagatgctgtcagagtgcctagaaagagccatgaagtttgcctttgag

SEQ ID NO: 526629 - DNA, 120 bp, Artificial Sequence
  ENSG00000165914_10 (sequence is synthesized)
gaattccacctgtggtaccagtttgctctgtccctgatggctgctggaaaatctgcccgtgccgtgaaggtgctgaaagagtgtatccgcctgaagccagacgatgccaccatccctctc

SEQ ID NO: 526630 - DNA, 120 bp, Artificial Sequence
  ENSG00000165914_11 (sequence is synthesized)
ctcgctgccaagctctgcatgggctccctgcactggttggaagaggctgaaaagtttgccaaaactgtcgttgatgtgggagagaaaacgtcagagttcaaggccaaaggctacttagct

SEQ ID NO: 526631 - DNA, 120 bp, Artificial Sequence
  ENSG00000165914_12 (sequence is synthesized)
ctggggctcacgtacagtctgcaggccactgacgcttctttgcgagggatgcaggaggtcctacagagaaaggcgcttcttgcatttcagagggcccacagcctgtcacccacagatcac

SEQ ID NO: 526632 - DNA, 120 bp, Artificial Sequence
  ENSG00000165914_13 (sequence is synthesized)
caagcagctttctacctggctctgcagcttgccatctccagacagatcccagaggctctggggtatgtccgccaagctcttcagcttcaaggtgacgatgccaactccctgcacctcctt

SEQ ID NO: 526633 - DNA, 120 bp, Artificial Sequence
  ENSG00000165914_14 (sequence is synthesized)
gccctcctgctgtcagcacagaagcattaccatgacgctctgaacatcatcgacatggccctgagtgaatacccagaaaatttcatactactgttttccaaagtgaagttgcagtcactc

SEQ ID NO: 526634 - DNA, 120 bp, Artificial Sequence
  ENSG00000165914_15 (sequence is synthesized)
tgccgaggcccggacgaggcactgctgacttgtaagcacatgctgcagatatggaaatcctgctacaacctcaccaaccccagtgattctggacgtgggagcagcctcttagatagaacc

SEQ ID NO: 526635 - DNA, 120 bp, Artificial Sequence
  ENSG00000165914_16 (sequence is synthesized)
attgctgacagacgacagcttaatacaattactttgccagacttcagcgatcccgagacaggctccgtccatgccacatcggtagcagcctcaagagtggagcaggcactgtcggaagtg

SEQ ID NO: 526636 - DNA, 120 bp, Artificial Sequence
  ENSG00000165914_17 (sequence is synthesized)
gcttcgtctctgcagagcagtgcccctaagcagggcccgctgcacccctggatgacgctggcacagatctggctccatgcagctgaagtctatatcggcatcgggaagcctgcagaagcc

SEQ ID NO: 526637 - DNA, 120 bp, Artificial Sequence
  ENSG00000165914_18 (sequence is synthesized)
acagcctgtacccaagaagctgccaacctcttcccaatgtcccacaatgtcctctacatgcgcggccagattgctgagctccggggaagcatggacgaggcgcggcggtggtatgaagag

SEQ ID NO: 526638 - DNA, 120 bp, Artificial Sequence
  ENSG00000165914_19 (sequence is synthesized)
gccttagccatcagccccacccacgtgaagagcatgcagcgactggccctgatccttcaccagctaggccgctacagtctggcggagaagatcctccgggacgcggtgcaggtgaactcg

SEQ ID NO: 526639 - DNA, 120 bp, Artificial Sequence
  ENSG00000165914_20 (sequence is synthesized)
acagcccacgaggtctggaacgggctgggcgaggtcctccaagctcagggcaacgatgcggcggctacggagtgcttcctgacagccttggagctggaggccagcagccccgccgtgccc

SEQ ID NO: 526640 - DNA, 120 bp, Artificial Sequence
  ENSG00000165914_21 (sequence is synthesized)
ttcaccatcatcccccgcgtgctctgagcaggcgcctgccagcctcacctgccgctcaggcctcagaggccctgccgggcaccagggcttgtgccatcgccccaaggggatgaatctgcc

SEQ ID NO: 526641 - DNA, 120 bp, Artificial Sequence
  ENSG00000165914_22 (sequence is synthesized)
acactgaggccagggacgagtgttcagtgggccacagtgaaccaaccaaaccaaccccgaatcatcgctctcgccatgtgcgtttctcttgttttttttgccagcccaatggtagtttct

SEQ ID NO: 526642 - DNA, 120 bp, Artificial Sequence
  ENSG00000165914_23 (sequence is synthesized)
gaacctattgacattgttcaaaatggatcatgtgccatattttgttagttgacatctgagttttcagtaaaatgattatggaattaatcagcaaatgtagaagaatatattcaaagttaa

SEQ ID NO: 526643 - DNA, 120 bp, Artificial Sequence
  ENSG00000165914_24 (sequence is synthesized)
aattcagtggcagcacagattatttttatcagagctgtaaagaaaacaactgtccttttctccccaccacccctcctgccccactttggcccagaaaccaaatgtgaacttcctgtctcc

SEQ ID NO: 526644 - DNA, 120 bp, Artificial Sequence
  ENSG00000165914_25 (sequence is synthesized)
cacctcagcactagtccatgccaggacaccagctgacaatttcttggttttactgtcaataattgtaccatgtgatcaattactgtcctcacttagaacaaagcctgagtccgagaatat

SEQ ID NO: 526645 - DNA, 120 bp, Artificial Sequence
  ENSG00000165914_26 (sequence is synthesized)
ttatattttaccaatatatgcctgttacaagagaaggaaatatgagttatttaagtttaacttttttatgtgaattcagagtttatttatcgagggaaatatgtacaaagaagcttcaaa

SEQ ID NO: 526646 - DNA, 120 bp, Artificial Sequence
  ENSG00000165914_27 (sequence is synthesized)
tggaatatttaccgacattccttatacatgacagacacttggctacatgggaagatgatgttaataataaaatgatttttaaatggactcatagcctgtgtcattcgtaaaagctcaaag

SEQ ID NO: 526647 - DNA, 120 bp, Artificial Sequence
  ENSG00000165914_28 (sequence is synthesized)
acctgagaaaggcttagttcctggggtggggagctgtctgtacctgggggcccactctggacatgtcagcccttgacactagaaagcccagcctctctttccccacttattttattttta

SEQ ID NO: 526648 - DNA, 85 bp, Artificial Sequence
  ENSG00000165914_29 (sequence is synthesized)
acttattttatttttattttttgtcagtggtgcgatcacagatcactgcagcctcgacttcccaggttcaggtgatcctcccacc

SEQ ID NO: 526649 - DNA, 120 bp, Artificial Sequence
  ENSG00000165914_30 (sequence is synthesized)
ctgggatcacaggcgcacactagcatgcccggctaattttgtttgtttgtttttgtagagacgggatctcactgtgttacccaggctggtcctgaactcctggactcaagcagccctccc

SEQ ID NO: 526650 - DNA, 120 bp, Artificial Sequence
  ENSG00000165914_31 (sequence is synthesized)
gcctcagcctccgaaagtgctggtgtgagccaccatgcccggccatctcctcacttataatttgaagatgatccctaggtagggacgtgtttcctgcgtcctcagcacccaggcctcctt

SEQ ID NO: 526651 - DNA, 120 bp, Artificial Sequence
  ENSG00000165914_32 (sequence is synthesized)
tttgcagcaacagccctggttttggtttgggaattcgccttagctctcccccgatggggctttggaattggagcatgcaattcagtcctgcccaagcagcctcctgcactcatgggccac

SEQ ID NO: 526652 - DNA, 120 bp, Artificial Sequence
  ENSG00000165914_33 (sequence is synthesized)
agagggtcaggagtgagcatgtgacctaaagcggtccagtcagagcgggagccacagagaaggctgtcgctctttcctgctgcctttcaagctgagaagtgaggctggaactgcagcagc

SEQ ID NO: 526653 - DNA, 120 bp, Artificial Sequence
  ENSG00000165914_34 (sequence is synthesized)
cctcttgccaccatgagaagaaggtgtagaggtgtttgagccaaagtccgaatcccacagagtagacagcaagatccggaaccagagagaaactgagcaggtatctgcagtctctcaggg

SEQ ID NO: 526654 - DNA, 120 bp, Artificial Sequence
  ENSG00000165914_35 (sequence is synthesized)
acagctgtagggtggccccacctttccaggacacagggaaatatggagggctgagctctgaacttaggtgccctgaagcctagaggactgcattcaaactgggcacgacctctctggctc

SEQ ID NO: 526655 - DNA, 120 bp, Artificial Sequence
  ENSG00000165914_36 (sequence is synthesized)
actgaggcaggcgggctagggggcagccaaggagggagagacagtaggtaggagccccagcctcagcactgaccctgccaggcagcacttgtggctttgagtggtcataagtcatggaat

SEQ ID NO: 526656 - DNA, 120 bp, Artificial Sequence
  ENSG00000165914_37 (sequence is synthesized)
ttgcaatgtaggacctggggcaggtactcagtgtggtggcagcttgccctgattggaggcacagggctgggctctgccatcccatgcgggagcgtggggcaaggcccactggatcaggac

SEQ ID NO: 526657 - DNA, 120 bp, Artificial Sequence
  ENSG00000165914_38 (sequence is synthesized)
caggaagggaggaggctgggccaccaaggcagatggtgcaggcgctgtaccagaccttctctgccaggccctcacctcagagactcctgtgcgtatcagccctgcagggcgcgggggctg

SEQ ID NO: 526658 - DNA, 120 bp, Artificial Sequence
  ENSG00000165914_39 (sequence is synthesized)
gctcctgtgtgtctgcccggcacctctccattgtcttcatctccctcagggaaccacccccactctccacccacatggctcaaggatggacacatgggcccagccttaacaaccagagcc

SEQ ID NO: 526659 - DNA, 120 bp, Artificial Sequence
  ENSG00000165914_40 (sequence is synthesized)
ctccagctccccagtatcagtgactggtttgggtttgggcatgtgacccatgcttggccaatgagaagcacccctgggacttttgttatgaaaacattagaaaaaaagcctctttctgct

SEQ ID NO: 526660 - DNA, 120 bp, Artificial Sequence
  ENSG00000165914_41 (sequence is synthesized)
gggtttgatgtcctaataggatgccagtggggggctgtgggtgccatttgacattatatggggtggcctgcctgagaatgatgccaacacagaaaaagagaatgaggaggtggaaagaga

SEQ ID NO: 526661 - DNA, 120 bp, Artificial Sequence
  ENSG00000165914_42 (sequence is synthesized)
gccgggccccgggtcaccgctggagcactgcggcccgagatttttccatcataggaatccatacagtttcccatcttgcttagtgcaagcacaggggtttccatcacttctacctaaaag

SEQ ID NO: 526662 - DNA, 120 bp, Artificial Sequence
  ENSG00000165914_43 (sequence is synthesized)
gtacctaagaaatgcaggaaagtcctgccgtccttggtactccccccttgggcactcttccagactcctcagtcccccaccttaatcccactcacccacctcatattctgttttccagta

SEQ ID NO: 526663 - DNA, 120 bp, Artificial Sequence
  ENSG00000165914_44 (sequence is synthesized)
aatcttgtcttttctacccaaatcgcatctcaaatctctcccattcaacttcatccccagtaccttggccccagccccacacagtccaatgtctgcacagtcctcttagaagggaggatt

SEQ ID NO: 526664 - DNA, 120 bp, Artificial Sequence
  ENSG00000165914_45 (sequence is synthesized)
gagtcggttctctctataaacccctgatggcttctcaagcccttgcctggaaccagactctgtgtcccagccccctgtgtgcctggctgcctctccttccccaagccctctcatggctct

SEQ ID NO: 526665 - DNA, 120 bp, Artificial Sequence
  ENSG00000165914_46 (sequence is synthesized)
gcctggctgcctctccttccccaagccctctcatggctctggccttcttcctagtcttctgacctgctgagcctttcccaactaaggacattcatccatccgtccatccatccatccatc

SEQ ID NO: 526666 - DNA, 120 bp, Artificial Sequence
  ENSG00000165914_47 (sequence is synthesized)
catccatccatccatccgtccatccattaatagatgaggacgcagacgctagacactaagacggcaggacacctgcctggggtcattgtggaattacctggcagaactaagattgagaca

SEQ ID NO: 526667 - DNA, 120 bp, Artificial Sequence
  ENSG00000165914_48 (sequence is synthesized)
aactaagattgagacaggcctgagggataaacatttcaaaagtgcccaggtctgcccagtggaggcattttttggacagtgagatgcaggagatgccgcgtttgattccaggactagtgc

SEQ ID NO: 526668 - DNA, 120 bp, Artificial Sequence
  ENSG00000165914_49 (sequence is synthesized)
tgaccctaacttaggcaaggcgttcctgttccctggtcttagtctccccatctgtgaaatttcattcattcattcactcattcattcatccaacaaatatctatggaatgctcacaacat

SEQ ID NO: 526669 - DNA, 120 bp, Artificial Sequence
  ENSG00000165914_50 (sequence is synthesized)
gccagatgcttattccaggcactgagggcacagcaatgtgtgacacagatgctgcatccacttaggacctaccttctggtagaaggaaacagacagatgaggagtatggcaggtggggtg

SEQ ID NO: 526670 - DNA, 120 bp, Artificial Sequence
  ENSG00000165914_51 (sequence is synthesized)
acgcatggagaaagatgaagccagggaaggggtgtagggagtggcagggctgctgtttagaaggtgactagggaagcctcgctaagaaggtgacatctggctgaagaaagacaggtaacc

SEQ ID NO: 526671 - DNA, 120 bp, Artificial Sequence
  ENSG00000165914_52 (sequence is synthesized)
tgggaggaggacatctcaggaagcaggaacagcaggtgcaaaggcccagaggggagggggatggtcaggtggtgaaggatgagaagaggtcagaagtttaacaggggccacacaggtgcg

SEQ ID NO: 526672 - DNA, 120 bp, Artificial Sequence
  ENSG00000165914_53 (sequence is synthesized)
tttaacaggggccacacaggtgcggcctcgtggaccatgctaacagtgtatattaattgcctgtggttgcagcaaattaccataaactggctgggcatggtggctcctgcctgtaatccc

SEQ ID NO: 526673 - DNA, 84 bp, Artificial Sequence
  ENSG00000165914_54 (sequence is synthesized)
ccagcctgggcaacatggtgagaccccccccccatctctacaaaaaaaaaaaaatagccaggtttggtggctgggctgattgct

SEQ ID NO: 526674 - DNA, 120 bp, Artificial Sequence
  ENSG00000165914_55 (sequence is synthesized)
cttgggaggctgagatgggctgattgcttgagcccaggtggttgaggctgcagtgagtgatcacgccaccgcagtccagcctgcatgagagagcaagaccctatctctacaaataaaata

SEQ ID NO: 526675 - DNA, 120 bp, Artificial Sequence
  ENSG00000165914_56 (sequence is synthesized)
aattaaaaattttaaatgaccgcaaacttagcgtcttaacacaaatttattctctttgttttggaggtcagaagtcaaatcaagctttcagtggggctgtgctccttccccaggctctgg

SEQ ID NO: 526676 - DNA, 120 bp, Artificial Sequence
  ENSG00000165914_57 (sequence is synthesized)
aggaggacgggtgtccccgtcttctccagcggctagaggcttcctgcggccttggctcgtggccacctcacgtcacctttccttcctctgctccgtcactgcgtcacctttctgcctttg

SEQ ID NO: 526677 - DNA, 120 bp, Artificial Sequence
  ENSG00000165914_58 (sequence is synthesized)
acctcctgcctccctctaaggactctgctggttgctctgggccccctggatagtccagggccattgccccacctcgagagccttcgttcaatcacatctgcatcgctccatctgtcatgg

SEQ ID NO: 526678 - DNA, 120 bp, Artificial Sequence
  ENSG00000165914_59 (sequence is synthesized)
aaggcaacatagtcacaggttccagggctcgggatgtggacgtctttgaggggcagggggagcacgttattctgcaggccgcagcgtgggagctgggaggctgtcaggctcctgctgtca

SEQ ID NO: 526679 - DNA, 120 bp, Artificial Sequence
  ENSG00000165914_60 (sequence is synthesized)
cacagcgaccatggtgcttagaccaaggggcgtggaggaagtggcgagaggcactggactgtgaagattctgaagacagagccaagagggttgctcacacatggagctgggtgtgaggga

SEQ ID NO: 526680 - DNA, 120 bp, Artificial Sequence
  ENSG00000165914_61 (sequence is synthesized)
ggggagacgccagggatgagggtgagggtcttgtcctgagctactggaaggatggcgatgatggccaggaaacaggaagaataggttggggaggagaggagaaggcaggagtctgctttc

SEQ ID NO: 526681 - DNA, 120 bp, Artificial Sequence
  ENSG00000165914_62 (sequence is synthesized)
aggcaggttgaatacaaaatgcctgtggagcctctgagggggaggcagctggctgggcaggagcccaggcgagagcccaagatgaggcgagagtgtgggaggtgtcagggatgcggggct

SEQ ID NO: 526682 - DNA, 120 bp, Artificial Sequence
  ENSG00000165914_63 (sequence is synthesized)
gggagccatgggcctgacggggccacttcgggacaagcatagacaaagaggaagaggtcagggctgagctccggggctggcggggtttacaggctgggaaatgaagagatcaggaaagaa

SEQ ID NO: 526683 - DNA, 120 bp, Artificial Sequence
  ENSG00000165914_64 (sequence is synthesized)
ggcgcaggagcagctgcaagggaggcggagagcaggcagggtgagcttcctggaggaggtgggtgggctctctcaatgcctggagaccccgtcagggtggcctgagagctgaccgtgggc

SEQ ID NO: 526684 - DNA, 120 bp, Artificial Sequence
  ENSG00000165914_65 (sequence is synthesized)
ctggtggtgtgcaggttggcagtgaccttgaccagagccatgctggggatgcagttttgctcccccagattcatagggtggagcccccgcccctgtgtgactatatttggagataggccc

SEQ ID NO: 526685 - DNA, 120 bp, Artificial Sequence
  ENSG00000165914_66 (sequence is synthesized)
cttaaggaagtaattcaggtgaagtgaggtcatcaggaggggccctggcccagtaggattggcgtcctcaccagaagaaactctaaagtgcaagtgagctcacgctcagccacgccagga

SEQ ID NO: 526686 - DNA, 120 bp, Artificial Sequence
  ENSG00000165914_67 (sequence is synthesized)
cacacggagaaggcggccacccgcaagccaggagggagcctcacaggaacccagatgggctggaacctttgctttgttctttgaacctccaggactgtgagaaattaagttcattgttga

SEQ ID NO: 526687 - DNA, 120 bp, Artificial Sequence
  ENSG00000165914_68 (sequence is synthesized)
agccacctgtctgtggcggttttcttacggcagcccaagctgactaaggtggggtcaagccaggttggagtgggctcaagggggaggaaaaggtgaagtctctttcaagagcgtagctgc

SEQ ID NO: 526688 - DNA, 120 bp, Artificial Sequence
  ENSG00000165914_69 (sequence is synthesized)
agaggggagctgagaacacaggttaggagtccggtggggaaggggccgtgttgagtgttgaaggcggcctcgctgagcaccttgtgtttccagcagggcaggcgtgaggaaggagagagg

SEQ ID NO: 526689 - DNA, 120 bp, Artificial Sequence
  ENSG00000165914_70 (sequence is synthesized)
gaagctgaggggggctgccttggctgggggcctggtggttccccagagcagcagcagcagggaggcagaggcctgggtacccccaagccagggagccctggggacggggcacccactcct

SEQ ID NO: 526690 - DNA, 120 bp, Artificial Sequence
  ENSG00000165914_71 (sequence is synthesized)
cagtgagcagggagccaacttcgggcagggtggggtggcgaatggaccaggaagggaaggaggaggcagaggagggaggaggcccttctttgaaggagccgccccactcagccaagagga

SEQ ID NO: 526691 - DNA, 120 bp, Artificial Sequence
  ENSG00000165914_72 (sequence is synthesized)
tctcaggacagagccaggctgggggcctgggcaggtgtggccggggcaggccacttcccatccccagccccatttgggatccatgggctcgtctgtctgtctctctgcctccttccaggt

SEQ ID NO: 526692 - DNA, 120 bp, Artificial Sequence
  ENSG00000165914_73 (sequence is synthesized)
cctgggccctgggctgtggccagggctctgctcaccctcagggctgcgtggggacctccctcggtggggaaaggagggaaccaaggcctcccgttatcctccatgccccctacctgtggt

SEQ ID NO: 526693 - DNA, 120 bp, Artificial Sequence
  ENSG00000165914_74 (sequence is synthesized)
catggcctgggggaggtgcatgctcgtgcacaggtgggcgtgtctgtgatcacatggagcaacccagactcctccagatggccccacgcatctccccggcggccacacagtcatcattgc

SEQ ID NO: 526694 - DNA, 120 bp, Artificial Sequence
  ENSG00000165914_75 (sequence is synthesized)
gggcccagactctctgcctgcaggaagtcccccctttgcaggcaccctccccatcatccttggagttctccacgtctgccctgtccgtgctgggcctgtcaccagcctgtcacctgctgc

SEQ ID NO: 526695 - DNA, 120 bp, Artificial Sequence
  ENSG00000165914_76 (sequence is synthesized)
cccagccccagcccaggtccctgcagcacagccggctccaggctggaatgggtgacccggccctactgaaggaatttcagggcagggtcagccactctggccactgtctccctccaatgc

SEQ ID NO: 526696 - DNA, 120 bp, Artificial Sequence
  ENSG00000165914_77 (sequence is synthesized)
ccccataccctcccagcgctcggcccctgccactcggccccctctctccatatcgccaccttctcattcctgctcctcccccaccacctctcaaggccgacagggtgggcattgcccagt

SEQ ID NO: 526697 - DNA, 120 bp, Artificial Sequence
  ENSG00000165914_78 (sequence is synthesized)
gaggggacaccactcatattgaagttctgtaaactgtgtcttgggcactgtaccaggtggctgctcccatccctcccctagcgtctgcttgccctgtccatcctgcctactccagaagca

SEQ ID NO: 526698 - DNA, 120 bp, Artificial Sequence
  ENSG00000165914_79 (sequence is synthesized)
gccacacacttgaccataagcctttgaggcctggccggagtcctccgggggaggcgggcagtagcagccgcactgggcctgaggaccccacacaggaaaatgggccgagccccagggctg

SEQ ID NO: 526699 - DNA, 120 bp, Artificial Sequence
  ENSG00000165914_80 (sequence is synthesized)
acattcctcccacacttgtggtcatgcatttcctgctgcccctgcccacgctgcagccagataggaacagaaaaaggacatcctgcaccatttcagacaggaatgtgctcctcctgaagg

SEQ ID NO: 526700 - DNA, 120 bp, Artificial Sequence
  ENSG00000165914_81 (sequence is synthesized)
tcttttgggggccaggctgaggccccccctcaaggtcacaccgtgggggacccactccagctctgcacctgctgggggtgatcctcactgtgccactgtccctccctggactcagaatca

SEQ ID NO: 526701 - DNA, 120 bp, Artificial Sequence
  ENSG00000165914_82 (sequence is synthesized)
gatgaggacagtcacctctgcccagcctgccttctgggctgagatgtgagtctgcaggcagctgtcagaggtggtgtgtgccaggtaggggacacgagggctaccgcccctcaggaccac

SEQ ID NO: 526702 - DNA, 120 bp, Artificial Sequence
  ENSG00000165914_83 (sequence is synthesized)
cacacagggcctcagggccaggccagcaggcaggactcctcctggacactcaagccctgagtggggctgactatggagaggtggcaggaaggtggtgggggatcttctgcaggtctgcct

SEQ ID NO: 526703 - DNA, 120 bp, Artificial Sequence
  ENSG00000165914_84 (sequence is synthesized)
ggagccagcagctcccgctgaccatccgggccacccacagcccccaccaccctcctcgtctccctcatcttctgctgtttggcccttgaccccctgaggacaatagggtttcctggtgac

SEQ ID NO: 526704 - DNA, 120 bp, Artificial Sequence
  ENSG00000165914_85 (sequence is synthesized)
cactgggctgtgggtcacacagatctggctggaatcccagttctgcctggccgtgtcacctctgatggggaagcactctgtctcctcatctctatggtcggggagtaacttcccttacgg

SEQ ID NO: 526705 - DNA, 120 bp, Artificial Sequence
  ENSG00000165914_86 (sequence is synthesized)
gcttttggggatattaacagaggtcaacctggacagggcatggggcccccggggtgcaccataaagtctttccttctttcttctatcctcaggcgaggggtgagtggctgctgggacgtg

SEQ ID NO: 526706 - DNA, 120 bp, Artificial Sequence
  ENSG00000165914_87 (sequence is synthesized)
ctgaggggtccctgaagcagggcaggaagggcagagctagctgcagctgaggcagagtccgagtcccgctctgcatggaggaggaggtgaggggcctggtcagcatgggcatggctgggg

SEQ ID NO: 526707 - DNA, 120 bp, Artificial Sequence
  ENSG00000165914_88 (sequence is synthesized)
gcctctgtgaccgccaccactcttgtctttgcctccttgaccccacagggtcatcctcgggccctgggtccagccaaggcctgaggagggtcatgcatccctgtcccacttggtcacagc

SEQ ID NO: 526708 - DNA, 120 bp, Artificial Sequence
  ENSG00000165914_89 (sequence is synthesized)
acaggaggctcccatccgccactgcctgaggcggtgcctgtggcccaagggctcgggttgtgggcctgctgggctggagcctgcatcgggacctggccacctactctcctaggagcctta

SEQ ID NO: 526709 - DNA, 120 bp, Artificial Sequence
  ENSG00000165914_90 (sequence is synthesized)
ggtgagtcactagtcctctctgagcctcggtttcctcatctgtgaaatggggagaacaaggtggttgtaaagattcagagggtgtgtaaaacacaagcacatggccgagcacagcccagc

SEQ ID NO: 526710 - DNA, 120 bp, Artificial Sequence
  ENSG00000165914_91 (sequence is synthesized)
cctacccctgcatggctcctcccccgggcatggcaggaggtcagggtttccagcctgagcttagcctgccattcagcagtacccaggaaggcacagctaccaggaaaatgacctccccaa

SEQ ID NO: 526711 - DNA, 120 bp, Artificial Sequence
  ENSG00000165914_92 (sequence is synthesized)
gcccatggaggcttcctgagcacccagcccagcctgaacctccacccacccaggtggcagtgaggccttcctgcctgtgttcagccacggtgtatcaaggacccctggccagacacaggt

SEQ ID NO: 526712 - DNA, 120 bp, Artificial Sequence
  ENSG00000165914_93 (sequence is synthesized)
acctgggctggggagctggtggtcttattggggactgggaagacagaccccaaacagaggggtaaacaaataagataattaccagcttggcagatgattagagcaaatttgaagtgacag

SEQ ID NO: 526713 - DNA, 120 bp, Artificial Sequence
  ENSG00000165914_94 (sequence is synthesized)
ggggagggttactttagattggctggtcggggacacctctgtaagacagtgacattgagtgacaagaaggtgcccaccctggaggacactgggcttcttcacctttaagagggatggtga

SEQ ID NO: 526714 - DNA, 120 bp, Artificial Sequence
  ENSG00000165914_95 (sequence is synthesized)
gcagaagcccaaaagcgtcaggttctgccactttgtaccagatgactaggcccagccagtttgcaaaagggctggcccatcctcacattggcccatcctcacattgccagcaaggaccag

SEQ ID NO: 526715 - DNA, 120 bp, Artificial Sequence
  ENSG00000165914_96 (sequence is synthesized)
accatgtgaagagggaagagcatcctgtaatgtacaaataggggatcaactttaaattatctccagagtttctttctttaatatgttgtccaaaggtaactatgttaatttttacaaata

SEQ ID NO: 526716 - DNA, 120 bp, Artificial Sequence
  ENSG00000165914_97 (sequence is synthesized)
tttttatgtagttttatatagttttacaaatagttttatgtagttttggtttttatttgtttgtttttgttctacttgagatggggtcttgctctgtcaccgaggctggagtacagtggc

SEQ ID NO: 526717 - DNA, 73 bp, Artificial Sequence
  ENSG00000165914_98 (sequence is synthesized)
aagccccactaatttttttcagagacagagttttgccatgttgcctaggctgatctccaactcctggtctcaa

SEQ ID NO: 526718 - DNA, 120 bp, Artificial Sequence
  ENSG00000165914_99 (sequence is synthesized)
tgccatgttgcctaggctgatctccaactcctggtctcaagtgatctggtcccctcagcctcttaaaggtctgggataacaggtgtgagtcagtgtgcctggcctatgtagcagttttta

SEQ ID NO: 526719 - DNA, 120 bp, Artificial Sequence
  ENSG00000165914_100 (sequence is synthesized)
aaactacaaaattaaataagaaaggggcagagctcagacacaatgagacttttcagtccagtgttttcagattctctggctttcaactttacaatttcacttcaaaaatttcaacttcaa

SEQ ID NO: 526720 - DNA, 120 bp, Artificial Sequence
  ENSG00000165914_101 (sequence is synthesized)
atttcacttcattgctttcaaaatcttgagccagcttgtcctttggatctggactgtgcctgtctgcactggcagatggacagagctcctgtatagaaatgaagccagttcacccacggc

SEQ ID NO: 526721 - DNA, 69 bp, Artificial Sequence
  ENSG00000165914_102 (sequence is synthesized)
gccatcacgtccagcgattttttgtgcttagtagagacagagtttcaccatgtaggtcaggctggtctc

SEQ ID NO: 526722 - DNA, 120 bp, Artificial Sequence
  ENSG00000165914_103 (sequence is synthesized)
tttgtttgtttgtttgtttgtttaagcaagcagctttttcttttcttttgtgatcgtaaaacctacacccactgtatcagctgcctgttgctgctacaacaaattgccacaaatatagtg

SEQ ID NO: 526723 - DNA, 120 bp, Artificial Sequence
  ENSG00000165914_104 (sequence is synthesized)
agtggcttaaaacagcatacaattttttctttcttttttaagttataacaatatattttaatctcataacaacttcaactgaatacaaaactctttacattttcagctattaatattaaa

SEQ ID NO: 526724 - DNA, 120 bp, Artificial Sequence
  ENSG00000165914_105 (sequence is synthesized)
tatcattttatatcctgtatctattaacagagatttatgcagatttacattttgttcttcaaattctatagaattttaattttttattttcataggttattggggaacacagtggttaca

SEQ ID NO: 526725 - DNA, 89 bp, Artificial Sequence
  ENSG00000165914_106 (sequence is synthesized)
aataaaacaacgcacatttcctgtcttacatgtagttctgggggtcagaagtctaaaacgggcctcatggggcaaaaggcaaggtgacg

SEQ ID NO: 526726 - DNA, 120 bp, Artificial Sequence
  ENSG00000165914_107 (sequence is synthesized)
agtctaaaacgggcctcatggggcaaaaggcaaggtgacggcagggctgttctttctggaagtactaggaaagacatcaaactttgccctttccagtttctcaggggtgtgcttggctca

SEQ ID NO: 526727 - DNA, 120 bp, Artificial Sequence
  ENSG00000165914_108 (sequence is synthesized)
tggccatgttcactgccggcagtggcatcactccgacctctgctgtagagcgatctctgtgactcctccttctctgcctctgaccctcctgtctccctctttcccttgtaagagcctcct

SEQ ID NO: 526728 - DNA, 120 bp, Artificial Sequence
  ENSG00000165914_109 (sequence is synthesized)
gattacattggtcttacctggataatccaagacactctccccatctgaagatccctcatcaaatggcatctgcacagccccttttgccaggtaagtgaccatcttcacaggttccagaaa

SEQ ID NO: 526729 - DNA, 120 bp, Artificial Sequence
  ENSG00000165914_110 (sequence is synthesized)
gtaggatgcaggcatcttttgggaccatcatttcacttaccatagtcaccttggggacaatttcagacatacgaagactaagatcattaaattccactatttagcgctcaccttctcagc

SEQ ID NO: 526730 - DNA, 120 bp, Artificial Sequence
  ENSG00000165914_111 (sequence is synthesized)
ttagcgctcaccttctcagcattttggcctgttgtcttgcagcattctcccatgagtatagatttttttgttttttgggatggagtctcgctcaattgcccaggctggagtgcagtggtg

SEQ ID NO: 526731 - DNA, 85 bp, Artificial Sequence
  ENSG00000165914_112 (sequence is synthesized)
acaggcgtgagccacagcgcccagccaagtatagatatttaatgaagtgaaatcatactatctataacaccgtatggatcttttc

SEQ ID NO: 526732 - DNA, 120 bp, Artificial Sequence
  ENSG00000165914_113 (sequence is synthesized)
agtgaaatcatactatctataacaccgtatggatcttttcacttaatattctcttgtcagtaaaaatctttctagataacttagagacagcataacctcccctcacatggatgcactgca

SEQ ID NO: 526733 - DNA, 120 bp, Artificial Sequence
  ENSG00000165914_114 (sequence is synthesized)
gactgtttaaccctttctttattgtcaatgatttaagtggtttcacattgtcatgccacatacaatggaatgggtaatgccagctcacaattattgagcatttattatgcaccaatcatt

SEQ ID NO: 526734 - DNA, 120 bp, Artificial Sequence
  ENSG00000165914_115 (sequence is synthesized)
cgacatgtattaactcatctaatcctcatgacagtgctatgatatgcatacagttattacggatacaggtccaggtgagaaatgaagctctcttcagaagatgaacaaacttgcccaagt

SEQ ID NO: 526735 - DNA, 120 bp, Artificial Sequence
  ENSG00000165914_116 (sequence is synthesized)
ttgggtaatactacagcaggccttgaacccaggttgcctgactccagaatccatactcttagccactcacatgctcatgttttctcctagcatctctgattatctatcttagggtagaat

SEQ ID NO: 526736 - DNA, 120 bp, Artificial Sequence
  ENSG00000165914_117 (sequence is synthesized)
tcggataggcagaatggcagttcatcaggctatatttattgagggcttagtttgtgcattttccatgggctcactgagttaatcctcatgactccaagaagtggtctgttaactggccga

SEQ ID NO: 526737 - DNA, 120 bp, Artificial Sequence
  ENSG00000165914_118 (sequence is synthesized)
agccacgctggttggctccagtagctagactctgcctggaacctctgtgtggtagccagtcattagcggtggtgagggctacggcctctccctgacaagctcaccttgccagacggtgcc

SEQ ID NO: 526738 - DNA, 120 bp, Artificial Sequence
  ENSG00000165914_119 (sequence is synthesized)
cccatgaatgcaaaatgcagtcagatcccgctatcggaaagaggtaacaaagcgcagtcaggtcacgccatcagaaacaggtaacaaagcgcagtcaggtcacgccattggaaacaggta

SEQ ID NO: 526739 - DNA, 120 bp, Artificial Sequence
  ENSG00000165914_120 (sequence is synthesized)
acaaagcagtcaggtcacaccatcggaaacaggtaacaaagcgcagtcaggtcacaccattggaaacaggtaacaaagcagtcaggtcacaccatcagaaacaggtaacaaagctcagtc

SEQ ID NO: 526740 - DNA, 120 bp, Artificial Sequence
  ENSG00000165914_121 (sequence is synthesized)
aggtcacgccattggaaacaggtaacaaagcagtcaggtcacaccatcagaaacaaacatcagaaacaggtaacaaatcacagttgggtcacaccaccagaaacaggtaacaaagcgtag

SEQ ID NO: 526741 - DNA, 120 bp, Artificial Sequence
  ENSG00000165914_122 (sequence is synthesized)
tcaggtcacaccatcggaaatgggtaacgaagcgcagtcatgtcacaccatcagaaacaggtaacaaagtgcagttgggtcacaccaccagaaacaaccatcagaaacaggtaacaaaac

SEQ ID NO: 526742 - DNA, 120 bp, Artificial Sequence
  ENSG00000165914_123 (sequence is synthesized)
acagtcgggtcacaccatcagaaacaaccatcagaaacaggtaacaaagcgcagtcaggtcacaccatcggaaacaggtaacaaaacacagtcgggtcacaccatcagaaacaaccatca

SEQ ID NO: 526743 - DNA, 120 bp, Artificial Sequence
  ENSG00000165914_124 (sequence is synthesized)
gaaacaggtaacaaagcacagtcaggtcacaccatcggaaacgggtaacgaggcacagttgggtcacgccatcagaaacaaccatcaaaacaggtaacaaagtgcagtcgggtcatgcca

SEQ ID NO: 526744 - DNA, 120 bp, Artificial Sequence
  ENSG00000165914_125 (sequence is synthesized)
tcagaaacgggtaacgaagcgcactcgggtcacaccgtcggaaacaggtaacaaagtgggaggtcaaggctgcagtgattatgccactgcaccccagcctgggagacacagcaagaccct

SEQ ID NO: 526745 - DNA, 120 bp, Artificial Sequence
  ENSG00000165914_126 (sequence is synthesized)
gcctcaaaagaatgacaaaaataaaataagttgctctaccactttgcgtggtcacctgcagagtgtgaaagtgtccactcacaatgtggccctggttcttaactgaccatttggagggtt

SEQ ID NO: 526746 - DNA, 120 bp, Artificial Sequence
  ENSG00000165914_127 (sequence is synthesized)
gtctgtagccactgaaacccagactccagcttcctccaggctctctgtccggctggacagaaggaggagctggtgctgctgtttagccagccaggggattggaggctcacagcaggggag

SEQ ID NO: 526747 - DNA, 120 bp, Artificial Sequence
  ENSG00000165914_128 (sequence is synthesized)
cgtggggctgtcacccattcctgtttccatggtttgtatgggtaaccgggaggcagcaggcgaccccatggctatgtcatccacagagagaaaccttatcacatacggaagctcttattc

SEQ ID NO: 526748 - DNA, 120 bp, Artificial Sequence
  ENSG00000165914_129 (sequence is synthesized)
tatcacatacggaagctcttattcatacaacatatgccaaccttgtcaaccaataaatgcctatggagcctttactctggatcaagacatccttccaagtgatccacccgcctcagcctc

SEQ ID NO: 526749 - DNA, 82 bp, Artificial Sequence
  ENSG00000165914_130 (sequence is synthesized)
ggctcgccattttcctttagcttgtgatgtgatcataaagtgagtcacatctgccaggcgcagtggctcacgcctgaaatcc

SEQ ID NO: 526750 - DNA, 120 bp, Artificial Sequence
  ENSG00000165914_131 (sequence is synthesized)
aaagtgagtcacatctccctctggatctcagtttccttgtctgtaaaaatggtaaagaaggttttgactaagtgatccctgagcctttgtaactgcgaatttgctaagtttagagattat

SEQ ID NO: 526751 - DNA, 120 bp, Artificial Sequence
  ENSG00000165914_132 (sequence is synthesized)
taggacttctaccagagggacagtaacaggggtggggttaagtgaaacatcaatgtgaagtgcctggcgtagaagatcctcagagtcaagtgaagcttggggagcttcatcactggagtg

SEQ ID NO: 526752 - DNA, 120 bp, Artificial Sequence
  ENSG00000165914_133 (sequence is synthesized)
tgggctggacttggtgacttgcattcagagagaaggatgtggaaataggaaaaatagtaacattaccacagagaaacctggcaggacatcaccttcaccagtcaatgaaggtcagcattc

SEQ ID NO: 526753 - DNA, 120 bp, Artificial Sequence
  ENSG00000165914_134 (sequence is synthesized)
ccagtgatgagtcgtgtgaataccaggtacccccagatatgatggggtgagcagggcacctcatctctgtggtcttcttcccccaaacccataactccagtgtaatcatgagaaaacatc

SEQ ID NO: 526754 - DNA, 120 bp, Artificial Sequence
  ENSG00000165914_135 (sequence is synthesized)
agacaaacccaaaccgatgaactttctacaaaatacctgaccaatacccctcaaaactaccaagagcatgaaaaagaaaagtctaagaaactgacgaaaaccagagaagcccatgaagac

SEQ ID NO: 526755 - DNA, 120 bp, Artificial Sequence
  ENSG00000165914_136 (sequence is synthesized)
atagctaaatattaggtggtacggggtcctggatgaaaggcaccgtattagtacgtcctcatgcagctaataaagacatacccgagactaggtaatttataaagaaaacgagtttaattg

SEQ ID NO: 526756 - DNA, 79 bp, Artificial Sequence
  ENSG00000165914_137 (sequence is synthesized)
acaatcatggaggaaggggatgccgtgcaaaaggagggggaaaaacccttataaaaccatcagagctcatgagaactca

SEQ ID NO: 526757 - DNA, 86 bp, Artificial Sequence
  ENSG00000165914_138 (sequence is synthesized)
catggcagcaggaaggagaagtgccgtgcaaaaggagggggaaaaacccttataaaaccatcagaggggtagccacccccatgatt

SEQ ID NO: 526758 - DNA, 120 bp, Artificial Sequence
  ENSG00000165914_139 (sequence is synthesized)
gtggggacacagccaaaccatatcaggcacattcgtattataagctgctgacatctaaataaagtctggagtttggttactagtaatttatcaatgtcagttccattgttggcacaaatg

SEQ ID NO: 526759 - DNA, 120 bp, Artificial Sequence
  ENSG00000165914_140 (sequence is synthesized)
tatcaatgtcagttccattgttggcacaaatgtgccaggtaacataaaggttatattaggggaaattgagtgaagggtaaatgggaattccctgtgttatctctgaaacttttcagtgaa

SEQ ID NO: 526760 - DNA, 120 bp, Artificial Sequence
  ENSG00000165914_141 (sequence is synthesized)
tctaaaattatcccaaacttaatagtttatttttttttaaagtaaggtctaggccaacaagcacatgaagaaatgttcaacatcattactcactagggaaatgcaagtcaaaactccaag

SEQ ID NO: 526761 - DNA, 120 bp, Artificial Sequence
  ENSG00000165914_142 (sequence is synthesized)
agataccaccttacacccactaggatgtctataatcaaaaagacagacaataacaaatgtttgtgaggacgtggggaaattggaaccctcatacgttgttggagggaatgtaaaatggta

SEQ ID NO: 526762 - DNA, 120 bp, Artificial Sequence
  ENSG00000165914_143 (sequence is synthesized)
cagccactttggaaaacagtttggcagtttcttaaaaagttagacatagaattatccaggaattcctctcttagtatgtaccccagagaaaaggaaatatatgtacaaatataaaataca

SEQ ID NO: 526763 - DNA, 120 bp, Artificial Sequence
  ENSG00000165914_144 (sequence is synthesized)
attttttttatttttttttattttttaaccaatcgcaactctgtacgttggtattattctaagggagcaaagctttgccccaacccccacccccatgtcctggtactcttccactctgag

SEQ ID NO: 526764 - DNA, 120 bp, Artificial Sequence
  ENSG00000165914_145 (sequence is synthesized)
tggtactcttccactctgagagctttagaaccggggttccaaagtctctgcttagcctaacagtgacgtgcttgtcacaaagccagaggccggtgtactcgggttagagagggcctttgt

SEQ ID NO: 526765 - DNA, 120 bp, Artificial Sequence
  ENSG00000165914_146 (sequence is synthesized)
cgttgggttttattcttattgtattattcgggctccaccgacccaaatattagtcaactgggttgggcgaggtaggacggatgaagcccaccgtctaacaatctggacatctataggagc

SEQ ID NO: 526766 - DNA, 120 bp, Artificial Sequence
  ENSG00000165914_147 (sequence is synthesized)
agatccgccgctcgaaacagctgacccagcgacgactgcggaaccactagcagcgtctgcacagatcgaccccgccatcccgccgtcccgttcggtgaccggagacgcagccgggaacgc

SEQ ID NO: 526767 - DNA, 120 bp, Artificial Sequence
  ENSG00000165914_148 (sequence is synthesized)
gactgatcaggctaccgagccgggccgcagggcgaaagcggtgcggtccgaggcctcagaaagggacacgcagcagcggcagtggcgctgactcagcccggcctccctgcagtcccctca

SEQ ID NO: 526768 - DNA, 120 bp, Artificial Sequence
  ENSG00000165914_149 (sequence is synthesized)
aatacaaagacttctccgcaaatgtttatagcagctttatttgtaatagccaaaaactgatcacaatccaaatgtccaccaacagatcaaaggagaagcgaattgtgatctgtccatatg

SEQ ID NO: 526769 - DNA, 120 bp, Artificial Sequence
  ENSG00000165914_150 (sequence is synthesized)
aggggcttggtgcctgcagcaacatgggtgaatctccaggtagtggtgacgagttgaaggagccagtcaaaaaagaacgtgctgtgtgattccatttatagaaaactctagaaaatgtgg

SEQ ID NO: 526770 - DNA, 120 bp, Artificial Sequence
  ENSG00000165914_151 (sequence is synthesized)
actaatctagagtgagggaaagcagacccgtgattgcgcctggggcaaggagacttgggggtggagggggggccagagggaggggtttcaaagatgataaagacattttgagggtgatgg

SEQ ID NO: 526771 - DNA, 120 bp, Artificial Sequence
  ENSG00000165914_152 (sequence is synthesized)
atatgatccctctcttaatagtggcgatggcttcatggatagatacaaatgtcaagacatattgaactgtatactttaaatgcttgcgctttactacgtgccaatcacatcttcataagg

SEQ ID NO: 526772 - DNA, 120 bp, Artificial Sequence
  ENSG00000165914_153 (sequence is synthesized)
tgtttttttgtttgttttttttttttaaaaaaaaaggcctcgtaatggagatgagtacagcctggcctcagtctccccacctgcaatgtgggggatccccgtgtgccttgcaccacctga

SEQ ID NO: 526773 - DNA, 120 bp, Artificial Sequence
  ENSG00000165914_154 (sequence is synthesized)
ccacctgagagctccaggcttaggaggagaccgaggtgagccctgtttctagccagaaaccccaaggccctaacccccagggctgggcagctgcagggcccaggctactgcccctccggg

SEQ ID NO: 526774 - DNA, 120 bp, Artificial Sequence
  ENSG00000165914_155 (sequence is synthesized)
gatggacggtgcgaggccactccaggggcatgacctgttttgggcaggcggtggctgtggggagaagagtggggaggtccctttcttttttcttcctgaataaaaaaatgcatgatgcta

SEQ ID NO: 526775 - DNA, 120 bp, Artificial Sequence
  ENSG00000165914_156 (sequence is synthesized)
ttgaacagctgttgcactgaaaggttcaggatgtgtctggtcctacatgaatttggacacatctgctttgcatgcggcattgcaatttgtttctcagatcaacttattttgggttgtagt

SEQ ID NO: 526776 - DNA, 120 bp, Artificial Sequence
  ENSG00000165914_157 (sequence is synthesized)
cagacttcagcgatcccgagacaggcaactctccagaagcatactttcatggttttccttcccttttttcagttagctccgtccatgccacatcggtagcagcctcaagagtggagcagg

SEQ ID NO: 526777 - DNA, 120 bp, Artificial Sequence
  ENSG00000165914_158 (sequence is synthesized)
aattactttgccagacttcagcgatcccgagacagtgtcagattcctcctcctcctcctctcctctttcaagaaccgaatctcctctccacctgtttgtgtcttctcatcttcattctcc

SEQ ID NO: 526778 - DNA, 120 bp, Artificial Sequence
  ENSG00000165914_159 (sequence is synthesized)
gaagccgcaggctctggttttcatgcacctcaggcccccgcttgcttgggcttaaagttggacaagcccacgaggaggtcaccctgaccaaaaacccctctgagaaggctgtagtattcg

SEQ ID NO: 526779 - DNA, 120 bp, Artificial Sequence
  ENSG00000165914_160 (sequence is synthesized)
tcatggattgcatttggggaaatgctggtggatatggggatccagtgcatttgaatgacctgagcctttagcttatggcaaatactgcccctcacccttaagagttgattccaccctctg

SEQ ID NO: 526780 - DNA, 79 bp, Artificial Sequence
  ENSG00000165914_161 (sequence is synthesized)
actgacagctgtcccgccctacaggctgcgggtgatcgcagaagcctacgctaccaaagggtcacgctccgttgccagg

SEQ ID NO: 526781 - DNA, 120 bp, Artificial Sequence
  ENSG00000165914_162 (sequence is synthesized)
agaaggtgcacagttcttgcaagaagaatccctctggagcagcaatgagggatgtgattgggagcctggggcttgaagggggctgaaacccgttggagcatgttgattggatgtgcggag

SEQ ID NO: 526782 - DNA, 120 bp, Artificial Sequence
  ENSG00000165914_163 (sequence is synthesized)
gacacctccactcatctgagagttaagctgattcctggaggggaaacctgttggttatcttgagcaatgtgttatattaggcagtgcatgatactggatgaaaatgtgggctgagggagt

SEQ ID NO: 526783 - DNA, 120 bp, Artificial Sequence
  ENSG00000165914_164 (sequence is synthesized)
atttttaaacgccagtatcatcacagctgtgtatctggccccccatctgccagcactcacaccgctaggctgagctcctggagggggcatgtgctctgtttgttgacaaaaagattagct

SEQ ID NO: 526784 - DNA, 120 bp, Artificial Sequence
  ENSG00000165914_165 (sequence is synthesized)
aaagcccaaggatggaaactaaggccccgggccgtgattgcccgcgtttctctgtggacagtaaatcttagaaacatcatgggggaaggggtgtgtgtgttccgcgcttgtctgtgtggg

SEQ ID NO: 526785 - DNA, 120 bp, Artificial Sequence
  ENSG00000165915_0 (sequence is synthesized)
gccgcccggatcgccgccgccgccgccgcacggtggccttttgtgtttttcagtacgtggcatgcctggatgtccctgccctggctgtggcatggcgggcccaaggctcctcttcctcac

SEQ ID NO: 526786 - DNA, 120 bp, Artificial Sequence
  ENSG00000165915_1 (sequence is synthesized)
tgcccttgccctggagctcttggaaagggctgggggttcccagccggccctccggagccgggggactgcgacggcctgtcgcctggacaacaaggaaagcgagtcctggggggctctgct

SEQ ID NO: 526787 - DNA, 120 bp, Artificial Sequence
  ENSG00000165915_2 (sequence is synthesized)
gagcggagagcggctggacacctggatctgctccctcctgggttccctcatggtggggctcagtggggtcttcccgttgcttgtcattcccctagagatggggaccatgctgcgctcaga

SEQ ID NO: 526788 - DNA, 120 bp, Artificial Sequence
  ENSG00000165915_3 (sequence is synthesized)
agctggggcctggcgcctgaagcagctgctcagcttcgccctggggggactcttgggcaatgtgtttctgcatctgctgcccgaagcctgggcctacacgtgcagcgccagccctggtgg

SEQ ID NO: 526789 - DNA, 120 bp, Artificial Sequence
  ENSG00000165915_4 (sequence is synthesized)
tgaggggcagagcctgcagcagcagcaacagctggggctgtgggtcattgctggcatcctgaccttcctggcgttggagaagatgttcctggacagcaaggaggaggggaccagccaggc

SEQ ID NO: 526790 - DNA, 120 bp, Artificial Sequence
  ENSG00000165915_5 (sequence is synthesized)
ccccaacaaagaccccactgctgctgccgccgcgctcaatggaggccactgtctggcccagccggctgcagagcccggcctcggtgccgtggtccggagcatcaaagtcagcggctacct

SEQ ID NO: 526791 - DNA, 120 bp, Artificial Sequence
  ENSG00000165915_6 (sequence is synthesized)
caacctgctggccaacaccatcgataacttcacccacgggctggctgtggctgccagcttccttgtgagcaagaagatcgggctcctgacaaccatggccatcctcctgcatgagatccc

SEQ ID NO: 526792 - DNA, 120 bp, Artificial Sequence
  ENSG00000165915_7 (sequence is synthesized)
ccatgaggtgggcgactttgccatcctgctccgggccggctttgaccgatggagcgcagccaagctgcaactctcaacagcgctggggggcctactgggcgctggcttcgccatctgtac

SEQ ID NO: 526793 - DNA, 120 bp, Artificial Sequence
  ENSG00000165915_8 (sequence is synthesized)
ccagtcccccaagggagtagaggagacggcagcctgggtcctgcccttcacctctggcggctttctctacatcgccttggtgaacgtgctccctgacctcttggaagaagaggacccgtg

SEQ ID NO: 526794 - DNA, 120 bp, Artificial Sequence
  ENSG00000165915_9 (sequence is synthesized)
gcagcagctgcttctgctctgtgcgggcatcgtggtaatggtgctgttctcgctcttcgtggattaactttccctgatgccgacgcccctgccccctgcagcaataagatgctcggattc

SEQ ID NO: 526795 - DNA, 120 bp, Artificial Sequence
  ENSG00000165915_10 (sequence is synthesized)
actctgtgaccgcatatgtgagaggcagagagggcgagtggctgcgagagagaatgagcctcccgccagacaggagggaggtgcgtgtggatgtatgtggtgtgcacatgtggccagagg

SEQ ID NO: 526796 - DNA, 120 bp, Artificial Sequence
  ENSG00000165915_11 (sequence is synthesized)
tgtgtgcgcgagaccgacactgtgatccctgtgctgggtccggggcccagtgtagcgcctgtccccagccatgctgtggttacctctccttgccgccctgtcaccttcacctcccggagt

SEQ ID NO: 526797 - DNA, 120 bp, Artificial Sequence
  ENSG00000165915_12 (sequence is synthesized)
aagcagcgaggaagagcagcactggtcccaagcagaggccttgccctgctgggaccccgggagtgagagcagcccaaggatccagggtgcagggaactccagagctgcccacctcccact

SEQ ID NO: 526798 - DNA, 120 bp, Artificial Sequence
  ENSG00000165915_13 (sequence is synthesized)
gccccctcagcacacacacagtccccaggcggcctaggggccaaggctggggcggctttggtcccttttcctggcccttccttccccacttctaagccaaagaaaggagaggcaggtgct

SEQ ID NO: 526799 - DNA, 120 bp, Artificial Sequence
  ENSG00000165915_14 (sequence is synthesized)
cctgtaccccagccccactcagcactgacagtccccagctcctagtagtgagctgggaggcgcttcctaagaccctttcctcagggctgccctgggagctcattcctggccaacacgccc

SEQ ID NO: 526800 - DNA, 120 bp, Artificial Sequence
  ENSG00000165915_15 (sequence is synthesized)
tggcagcaccagcagctcttgccacctccagctgccaaacagcagcctgccgggcagggagcagccccaggccagagaggcctcccggtccagctcagggatgctcctgccagcacaggg

SEQ ID NO: 526801 - DNA, 120 bp, Artificial Sequence
  ENSG00000165915_16 (sequence is synthesized)
gccagggactcctggagcaggcacatagtgagcccgggcagccctgcccagctcaggcccctttccttccccattgaggttggggtaggtgggggcggtgagggctccacgttgtcagcg

SEQ ID NO: 526802 - DNA, 120 bp, Artificial Sequence
  ENSG00000165915_17 (sequence is synthesized)
ctcaggaatgtgctccggcagagtgctgaagccataatccccaaccatttcccttggctgacgcccaggtactcagctggcccactccacagccaggcctggccctgcccttcaccgtgg

SEQ ID NO: 526803 - DNA, 120 bp, Artificial Sequence
  ENSG00000165915_18 (sequence is synthesized)
atgttttcagaagtggccatcgagaggtctggatggttttatagcaactttgctgtgattccgtttgtatctgtaaatatttgttctatagataagatacaaataaatattatccacata

SEQ ID NO: 526804 - DNA, 120 bp, Artificial Sequence
  ENSG00000165915_19 (sequence is synthesized)
ggctgccagcttccttgtgagcaagaaggtgaggggcttggggccagtggggctctggcgattccagtggcagccatgtggattccacctgtgtctggagtctctgcttcttgcccctcc

SEQ ID NO: 526805 - DNA, 120 bp, Artificial Sequence
  ENSG00000165915_20 (sequence is synthesized)
tttccagtggccaacacagtgcccacccagagccagctcagagcagagtaaacctctgtggaatgagtgggcgagtggggtgctcagccctcaacacagaccccgcagccacggctcccc

SEQ ID NO: 526806 - DNA, 120 bp, Artificial Sequence
  ENSG00000165915_21 (sequence is synthesized)
ataagatggagcgcttttgcatacagggaggggggcattttagaagtcctagggcaggatccctgagtagcttttctttgccaagaaactaacccagggattccattttggaactcaggg

SEQ ID NO: 526807 - DNA, 120 bp, Artificial Sequence
  ENSG00000165915_22 (sequence is synthesized)
agggaacagaacgtcctggcagttgtatgggcccggtggggtgagatggacagaaagcttcagaagacaagctgggccaccagggagaagttggcggtctaaggaaggccaacagtgcaa

SEQ ID NO: 526808 - DNA, 120 bp, Artificial Sequence
  ENSG00000165915_23 (sequence is synthesized)
catgaagtgggacaggcaccagaggcagccctgagagctgagtgtgctctcaagagccccagcagaggggaaagtgacagagtaaatggttggagctgccatgggaggctgatgagggtc

SEQ ID NO: 526809 - DNA, 120 bp, Artificial Sequence
  ENSG00000165915_24 (sequence is synthesized)
gcgcggcaccgcagctggatggctggggccgcccggatcgccgccgccgccgccgcacgtacgtggcatgcctggatgtccctgccctggctgtggcatggcgggcccaaggctcctctt

SEQ ID NO: 526810 - DNA, 120 bp, Artificial Sequence
  ENSG00000165915_25 (sequence is synthesized)
tgcctgggagggagggagggtcattgtcctggtctctgggccctggtcccagtgggagttctgggccccagctgcccaacccacccttgtcactgccctggtgccctggatgagatccca

SEQ ID NO: 526811 - DNA, 120 bp, Artificial Sequence
  ENSG00000165915_26 (sequence is synthesized)
ttccaaatggccccctcctatggccctggcttggcttggcctggcctggcctggcattgccgccccctgcaggtggtgaggggcagagcctgcagcagcagcaacagctggggctgtggg

SEQ ID NO: 526812 - DNA, 120 bp, Artificial Sequence
  ENSG00000165915_27 (sequence is synthesized)
ggggacattggtctcatgtcctaggaagaagcgtggatggtcttgccctggctcatctgctcagtttccccactacgtggcatgcctggatgtccctgccctggctgtggcatggcgggc

SEQ ID NO: 526813 - DNA, 120 bp, Artificial Sequence
  ENSG00000165915_28 (sequence is synthesized)
attagggaaagtttagcctcaggcggaggtgctgacacagtctggagctgctcagaaggaaaaaatacgcagtgctcaggagtagggtgtggagacacagggccccattgctgtgcaccc

SEQ ID NO: 526814 - DNA, 120 bp, Artificial Sequence
  ENSG00000165915_29 (sequence is synthesized)
ggaagaggactgccactcacagggcccttaggggctcaggagggaagggctcctggccgctgcctgctccccctgcccatgcctccaccgtgagccgttccctccccacaggcgctccct

SEQ ID NO: 526815 - DNA, 120 bp, Artificial Sequence
  ENSG00000165915_30 (sequence is synthesized)
gccagcgccctcatctaaggctctcatcccccatcctccctgctgctgtcctggccgccactgttctctgatcctgagcccctggtctgttcctgttcccagtactccttgttgggtgcc

SEQ ID NO: 526816 - DNA, 120 bp, Artificial Sequence
  ENSG00000165915_31 (sequence is synthesized)
tctgtcaagctgctaggcgtggcccctgcctgctcctagatgcttcttcctctacctcctccctctggcctctggcctctggcccagaggcagcctactctgcagctggccgagatcttt

SEQ ID NO: 526817 - DNA, 120 bp, Artificial Sequence
  ENSG00000165915_32 (sequence is synthesized)
cccacctcacactgttccccctgcctggaatgttctcccgcccacgcttcgagcggctgacgactcatccttggggcctcgacttacatggactcctccaccaggcctttgctgacctcc

SEQ ID NO: 526818 - DNA, 120 bp, Artificial Sequence
  ENSG00000165915_33 (sequence is synthesized)
tcatctaaatttggttcctgggcctgctcccctgggcactctatccatcctttccttcccagcgcctgtgagtgtgtgagtgagtcctgtctctcccctctataccgctagcttcgtgaa

SEQ ID NO: 526819 - DNA, 120 bp, Artificial Sequence
  ENSG00000165915_34 (sequence is synthesized)
gggcccaggcccccacagtgcccatgatcagcatgggtgtggagctcaggagggtgtggggctgggcctgtccagcatggcactctggggctgggctgtgagggctggagctcctcaccc

SEQ ID NO: 526820 - DNA, 120 bp, Artificial Sequence
  ENSG00000165915_35 (sequence is synthesized)
cgggtggcatcagcagaggggcaccagccaaagggtgtggctaccgcactgctggtccccaggcccgggaggtggggagcacacacagtgccttgggtacccagttgggtgttctcccgc

SEQ ID NO: 526821 - DNA, 120 bp, Artificial Sequence
  ENSG00000165916_0 (sequence is synthesized)
attcgctgctccgcagcacggccggagctggtcgggtcaagagtcgggatttgtggggagaggttttccactggtcaagagaaggctttaagaaagacggtattaatctcccgttgcggc

SEQ ID NO: 526822 - DNA, 120 bp, Artificial Sequence
  ENSG00000165916_1 (sequence is synthesized)
tcccgcctggtcccatcttctgcccgctcctccaggaaatgaatctgctgccgaatattgagagtccagtgactcggcaggagaagatggcgaccgtgtgggatgaggccgagcaagatg

SEQ ID NO: 526823 - DNA, 120 bp, Artificial Sequence
  ENSG00000165916_2 (sequence is synthesized)
gaattggggaggaggtgctcaagatgtccacggaggagatcatccagcgcacacggctgctggacagtgagatcaagatcatgaagagtgaagtgttgagagtcacccatgagctccaag

SEQ ID NO: 526824 - DNA, 120 bp, Artificial Sequence
  ENSG00000165916_3 (sequence is synthesized)
ccatgaaggacaagataaaagagaacagtgagaaaatcaaagtgaacaagaccctgccgtaccttgtctccaacgtcatcgagctcctggatgttgatcctaatgaccaagaggaggatg

SEQ ID NO: 526825 - DNA, 120 bp, Artificial Sequence
  ENSG00000165916_4 (sequence is synthesized)
gtgccaatattgacctggactcccagaggaagggcaagtgtgctgtgatcaaaacctctacacgacagacgtacttccttcctgtgattgggttggtggatgctgaaaagctaaagccag

SEQ ID NO: 526826 - DNA, 120 bp, Artificial Sequence
  ENSG00000165916_5 (sequence is synthesized)
gagacctggtgggtgtgaacaaagactcctatctgatcctggagacgctgcccacagagtatgactcgcgggtgaaggccatggaggtagacgagaggcccacggagcaatacagtgaca

SEQ ID NO: 526827 - DNA, 120 bp, Artificial Sequence
  ENSG00000165916_6 (sequence is synthesized)
gtgctgatgtatgggcccccagggacggggaagaccctcctggcccgggcctgtgccgcacagactaaggccaccttcctaaagctggctggcccccagctggtgcagatgttcattgga

SEQ ID NO: 526828 - DNA, 120 bp, Artificial Sequence
  ENSG00000165916_7 (sequence is synthesized)
gatggtgccaagctagtccgggatgcctttgccctggccaaggagaaagcgccctctatcatcttcattgatgagttggatgccatcggcaccaagcgctttgacagtgagaaggctggg

SEQ ID NO: 526829 - DNA, 120 bp, Artificial Sequence
  ENSG00000165916_8 (sequence is synthesized)
gaccgggaggtgcagaggacaatgctggagcttctgaaccagctggatggcttccagcccaacacccaagttaaggtaattgcagccacaaacagggtggacatcctggaccccgccctc

SEQ ID NO: 526830 - DNA, 120 bp, Artificial Sequence
  ENSG00000165916_9 (sequence is synthesized)
ctccgctcgggccgccttgaccgcaagatagagttcccgatgcccaatgaggaggcccgggccagaatcatgcagatccactcccgaaagatgaatgtcagtcctgacgtgaactacgag

SEQ ID NO: 526831 - DNA, 120 bp, Artificial Sequence
  ENSG00000165916_10 (sequence is synthesized)
gagctggcccgctgcacagatgacttcaatggggcccagtgcaaggctgtgtgtgtggaggcgggcatgatcgcactgcgcaggggtgccacggagctcacccacgaggactacatggaa

SEQ ID NO: 526832 - DNA, 120 bp, Artificial Sequence
  ENSG00000165916_11 (sequence is synthesized)
ggcatcctggaggtgcaggccaagaagaaagccaacctacaatactacgcctagggcacacaggccagccccagtctcacggctgaagtgcgcaataaaagatggtttagggtccctgcc

SEQ ID NO: 526833 - DNA, 120 bp, Artificial Sequence
  ENSG00000165916_12 (sequence is synthesized)
gacagtgagatcaaggtgggcgcacagctcctgtgcgggcgatggagcccccacaggacaggccccggcgatccgagtcgcctctcgtacttcctaatcgggcaccctgggggagacatg

SEQ ID NO: 526834 - DNA, 120 bp, Artificial Sequence
  ENSG00000165916_13 (sequence is synthesized)
gggaggcctgggctgagatgagaagttatcagattgcctttcccagtgagaactgggaataatcctctcaagaatccttcttttagtaaaatgcctattttacagatgaggagacaggcc

SEQ ID NO: 526835 - DNA, 120 bp, Artificial Sequence
  ENSG00000165916_14 (sequence is synthesized)
cagagaggtttgtactgcgataaagcacccagttcttactatgaggcagaacctaaaacctatgtttgcctctctcggaggcctgcttttattccaatactaccactatttcaccaggag

SEQ ID NO: 526836 - DNA, 120 bp, Artificial Sequence
  ENSG00000165916_15 (sequence is synthesized)
gagagtccagtgactcggcaggagaagatggcgaccgtgtgggatgaggccgaggtgggcaccgggcgagctggcggtccgggaaccggggcccgcagggagacgccattgacaagaggg

SEQ ID NO: 526837 - DNA, 120 bp, Artificial Sequence
  ENSG00000165916_16 (sequence is synthesized)
gagccttccctgaggacactaactgagactgcccctgtaacttgtccacagacgtacttccttcctgtgattgggttggtggatgctgaaaagctaaagccaggagacctggtggtgagt

SEQ ID NO: 526838 - DNA, 120 bp, Artificial Sequence
  ENSG00000165917_0 (sequence is synthesized)
gttcccagggtggcgcctgctctccatccaggccccattccggctcccacccgacgctgcttttgttcccacgtttcggggggcagctggcactgtgattcctgccccatgagtgcctag

SEQ ID NO: 526839 - DNA, 120 bp, Artificial Sequence
  ENSG00000165917_1 (sequence is synthesized)
aggcacggagccaccagggatcaccccacgtgggacacagggcttggggaggatggggcaggaccagaccaagcagcagatcgagaaggggctccagctgtaccagtccaaccagacaga

SEQ ID NO: 526840 - DNA, 120 bp, Artificial Sequence
  ENSG00000165917_2 (sequence is synthesized)
gaaggcattgcaggtgtggacaaaggtgctggagaagagctcggacctcatggggcgcttccgcgtgctgggctgcctggtcacagcccactcggagatgggccgctacaaggagatgct

SEQ ID NO: 526841 - DNA, 120 bp, Artificial Sequence
  ENSG00000165917_3 (sequence is synthesized)
gaagttcgctgtggtccagatcgacacggcccgggagctggaggatgccgacttcctcctggagagctacctgaacctggcacgcagcaacgagaagctgtgcgagtttcacaagaccat

SEQ ID NO: 526842 - DNA, 120 bp, Artificial Sequence
  ENSG00000165917_4 (sequence is synthesized)
ctcctactgcaagacctgccttgggctgcctggtaccagggcaggtgcccagctcggaggccaggtcagcctgagcatgggcaatgccttcctgggcctcagcgtcttccagaaggccct

SEQ ID NO: 526843 - DNA, 120 bp, Artificial Sequence
  ENSG00000165917_5 (sequence is synthesized)
ggagagcttcgagaaggccctgcgctatgcccacaacaatgatgacgccatgctcgagtgccgcgtgtgctgcagcctgggcagcttctatgcccaggtcaaggactacgagaaagccct

SEQ ID NO: 526844 - DNA, 120 bp, Artificial Sequence
  ENSG00000165917_6 (sequence is synthesized)
accgggccatgagccagtaccacatggccgtggcctatcgcctgctgggccgcctgggcagtgccatggagtgttgtgaggagtctatgaagatcgcgctgcagcacggggaccggccac

SEQ ID NO: 526845 - DNA, 120 bp, Artificial Sequence
  ENSG00000165917_7 (sequence is synthesized)
tgcaggcgctctgcctgctctgcttcgctgacatccaccggagccgtggggacctggagacagccttccccaggtacgactccgccatgagcatcatgaccgagatcggaaaccgcctgg

SEQ ID NO: 526846 - DNA, 120 bp, Artificial Sequence
  ENSG00000165917_8 (sequence is synthesized)
ggcaggtgcaggcgctgctgggtgtggccaagtgctgggtggccaggaaggcgctggacaaggctctggatgccatcgagagagcccaggatctggccgaggaggtggggaacaagctga

SEQ ID NO: 526847 - DNA, 120 bp, Artificial Sequence
  ENSG00000165917_9 (sequence is synthesized)
gccagctcaagctgcactgtctgagcgagagcatttaccgcagcaaagggctgcagcgggaactgcgggcgcacgttgtgaggttccacgagtgcgtggaggagacggagctctactgcg

SEQ ID NO: 526848 - DNA, 120 bp, Artificial Sequence
  ENSG00000165917_10 (sequence is synthesized)
gcctgtgcggcgagtccataggcgagaagaacagccggctgcaggccctaccttgctcccacatcttccacctcaggtgcctgcagaacaacgggacccggagctgtcccaactgccgcc

SEQ ID NO: 526849 - DNA, 120 bp, Artificial Sequence
  ENSG00000165917_11 (sequence is synthesized)
gctcatccatgaagcctggctttgtatgactcctggcagcaggcgtgggcttcctcctcgccactcctgctctttctccactgcacgccagaggcccatttactcctggggcagctgcca

SEQ ID NO: 526850 - DNA, 120 bp, Artificial Sequence
  ENSG00000165917_12 (sequence is synthesized)
ggtcgtcctcaccatagccaaggccttggggcctgcccagggctgctcccctgggcccagctcccctccctgcctctttgtactttgctctttatagaaaaataaactgtttgtacctgg

SEQ ID NO: 526851 - DNA, 120 bp, Artificial Sequence
  ENSG00000165917_13 (sequence is synthesized)
ctcctgggggggtggacaggggtgggcaggatctcttcggggcactctagggcccagctggcttaatcacagcaataatactaatagcaaacacttaaccttggccaggcgtggtgcctc

SEQ ID NO: 526852 - DNA, 88 bp, Artificial Sequence
  ENSG00000165917_14 (sequence is synthesized)
ctaatagcaaacacttaaccttggccaggcgtggtgcctcacgtctgtctcgcattgagccccggggttcaagatcatcttggccaac

SEQ ID NO: 526853 - DNA, 120 bp, Artificial Sequence
  ENSG00000165923_0 (sequence is synthesized)
agactacccgggccctcacagaaggcggtggcgggcgggtgcagcgagtttgtccccttgcccgcacactgcttggcctctgtacttaagtgcggtggccgcctgcctcgctggagcttc

SEQ ID NO: 526854 - DNA, 120 bp, Artificial Sequence
  ENSG00000165923_1 (sequence is synthesized)
tctgccgcagccatccgtgctgcttgggacgggccggggcgcgaaggcggtcgcatccatcgctctgccctcctgcttctcttgtgtaatcagctgcctatttggaaattgggcagggtt

SEQ ID NO: 526855 - DNA, 120 bp, Artificial Sequence
  ENSG00000165923_2 (sequence is synthesized)
tgcgactggatgctaatgtcactgactagttttcagcctaccatccagaagtaacatgttcccagctttggaaacgcacctaaagcagactattcctgatccttatgaagactttatgta

SEQ ID NO: 526856 - DNA, 120 bp, Artificial Sequence
  ENSG00000165923_3 (sequence is synthesized)
ccgtcacctccaatattatggctactttaaagctcagagaggcagtttaccaaactctgctacgcatcagcatgttcggaagaataaccctcaatgcctgttgaatggctctcttgggga

SEQ ID NO: 526857 - DNA, 120 bp, Artificial Sequence
  ENSG00000165923_4 (sequence is synthesized)
aaaagatgatttgataccagacaccctgcaaaaggagaagcttctatggcctatcagtttatcttcagctgtgcacagacagatagaagccatcaacagagactttcactcttgcctggg

SEQ ID NO: 526858 - DNA, 79 bp, Artificial Sequence
  ENSG00000165923_5 (sequence is synthesized)
cctcccagattcaaattcacatatgctgagtttaccacatcttaggagcagacagcttctttatgatgagttggatgaa

SEQ ID NO: 526859 - DNA, 120 bp, Artificial Sequence
  ENSG00000165923_6 (sequence is synthesized)
tcttaggagcagacagcttctttatgatgagttggatgaagtaaacccacgtcttcgagaaccccaagagctcttttccattttgtctaccaagaggccactgcaggctccaagatggcc

SEQ ID NO: 526860 - DNA, 120 bp, Artificial Sequence
  ENSG00000165923_7 (sequence is synthesized)
aattgaatgtgaggtcatcaaggaaaacatccatcatattgagtgggctccacctcaaccagaatatttctatcagcctaaaggaaatgaaaaggtaccagagattgtaggagagaaaaa

SEQ ID NO: 526861 - DNA, 120 bp, Artificial Sequence
  ENSG00000165923_8 (sequence is synthesized)
aggaacagttgtctatcaattagattcagtgcctatagaaggttcctattttaccagttccagagtgggaggcaaacgaggaattgtcaaggaacttgctgtcacgttgcaaggaccaga

SEQ ID NO: 526862 - DNA, 120 bp, Artificial Sequence
  ENSG00000165923_9 (sequence is synthesized)
agataatactctactgtttgaatcaaggtttgagagtgggaatctgcaaaaagctgtcagagtagacacctatgagtatgaactcaccttgcgaactgacctctacactaacaaacacac

SEQ ID NO: 526863 - DNA, 120 bp, Artificial Sequence
  ENSG00000165923_10 (sequence is synthesized)
tcagtggttttattttcgtgttcagaacaccagaaaagatgctacctatcgcttcaccattgtcaacttgctaaaacccaagagtctttatactgtagggatgaagccactcttgtactc

SEQ ID NO: 526864 - DNA, 120 bp, Artificial Sequence
  ENSG00000165923_11 (sequence is synthesized)
ccaattggatgccaacacccgcaatattggctggaggagagaaggaaatgaaatcaagtactacaagaacaacacggatgatgggcagcagcccttctactgtctcacgtggaccattca

SEQ ID NO: 526865 - DNA, 120 bp, Artificial Sequence
  ENSG00000165923_12 (sequence is synthesized)
gtttccatatgaccaggacacttgcttctttgcacacttctacccatatacatacactgatttgcaatgctacctcctgtcagtggcaaacaaccctatccagtctcagttctgcaagct

SEQ ID NO: 526866 - DNA, 120 bp, Artificial Sequence
  ENSG00000165923_13 (sequence is synthesized)
ccaaactttatgcaggagcctagcaggaaataccgtttacttgctcaccatcaccaacccatcccagacccctcaagaggcagctgcaaagaaagctgtggtcttgagtgccagagttca

SEQ ID NO: 526867 - DNA, 120 bp, Artificial Sequence
  ENSG00000165923_14 (sequence is synthesized)
cttcccatgttaaatccagatggtgtgattgtggggaattatcggtgttccttggccggaagggatttgaacaggcattataaaaccattctgaaggagtctttcccttgtatttggtac

SEQ ID NO: 526868 - DNA, 120 bp, Artificial Sequence
  ENSG00000165923_15 (sequence is synthesized)
accaggaacatgatcaaaagacttcttgaagaaagagaggttctgttgtattgtgatttccatggccacagtcgtaagaataatatcttcctgtatggctgtaataacaacaatcgcaaa

SEQ ID NO: 526869 - DNA, 120 bp, Artificial Sequence
  ENSG00000165923_16 (sequence is synthesized)
tactggcttcatgaacgagtctttcctttaatgttatgcaaaaatgcaccagataagttctcttttcacagttgtaattttaaggtccaaaaatgcaaagaaggaacaggacgagttgtt

SEQ ID NO: 526870 - DNA, 120 bp, Artificial Sequence
  ENSG00000165923_17 (sequence is synthesized)
atgtggcggatgggaatcctaaacagctacaccatggagtctacctttggcgggtccaccctgggtaataaaagagacacccactttaccatcgaagatctgaagtccttaggttatcat

SEQ ID NO: 526871 - DNA, 120 bp, Artificial Sequence
  ENSG00000165923_18 (sequence is synthesized)
gtctgtgacacccttctggacttttgtgatcctgaccaaatgaagttcactcagtgtctagcagagcttaaggagcttttacgacaggaaatccacaagaaattccatgaacttggacaa

SEQ ID NO: 526872 - DNA, 120 bp, Artificial Sequence
  ENSG00000165923_19 (sequence is synthesized)
gatgtagatttagaaggaagttggagtgacatctctttgtctgacattgaatccagcaccagtggctctgacagttctctctcagatggtcttcctgttcacctagcaaacatagcagat

SEQ ID NO: 526873 - DNA, 120 bp, Artificial Sequence
  ENSG00000165923_20 (sequence is synthesized)
gagctgactcagaaaaagaagatgtttaagaagaaaaaaaagaagtcacttcagactaggaaacagcgaaatgagcagtatcagaaaaaaaatttgatgcagaagttaaagttaacagaa

SEQ ID NO: 526874 - DNA, 120 bp, Artificial Sequence
  ENSG00000165923_21 (sequence is synthesized)
gatacctcagaaaaggcaggatttgcttctactctgcaaaagcagccaacctttttcaaaaactcagagaattccagttttttaccaatgaaaaatgaaaacccaaggttaaatgagaca

SEQ ID NO: 526875 - DNA, 120 bp, Artificial Sequence
  ENSG00000165923_22 (sequence is synthesized)
aatttaaatagaagagacaaagacacccccctggacccatcaatggccaccctgattctgcctaagaataaagggagaatgcagaataagaagccaggctttacagtatcatgctctcca

SEQ ID NO: 526876 - DNA, 120 bp, Artificial Sequence
  ENSG00000165923_23 (sequence is synthesized)
aagagaaccataaactccagccaagagccagctccaggtatgaagccaaactggcctaggagcagatatcctgccacaaagagaggctgtgctgccatggcggcatacccatccttgcac

SEQ ID NO: 526877 - DNA, 120 bp, Artificial Sequence
  ENSG00000165923_24 (sequence is synthesized)
atatacacatacccgtaggtgagcctgggctgtgccacacaagcacttcatcgggggttttgagattagacacattttataatgggggagatgtatgactgggaactgcatttacttgtg

SEQ ID NO: 526878 - DNA, 120 bp, Artificial Sequence
  ENSG00000165923_25 (sequence is synthesized)
gtatactgtgttgtgcactcatgcactgaccttacactttgtacttacactgtgggcatgtggtcaagatgcatacctcatgaattcaactattttttcataaaatgaaattttattatg

SEQ ID NO: 526879 - DNA, 120 bp, Artificial Sequence
  ENSG00000165923_26 (sequence is synthesized)
atgtgtaaaaatgctttatcagaaactgaagtgtgttctcatggcacacttcatggcagcacagatatacctcattttaaccaatagatattctctctaaaattatgtgcaaatcaattt

SEQ ID NO: 526880 - DNA, 120 bp, Artificial Sequence
  ENSG00000165923_27 (sequence is synthesized)
ttaaaaatcaaaatctatgttaaacacattttggcagtgtgctataataaaaaaaagtgttgtgtcaaagctttctagtgacggtcagtcctactgctgtatgtcaggtttgctcacaat

SEQ ID NO: 526881 - DNA, 120 bp, Artificial Sequence
  ENSG00000165923_28 (sequence is synthesized)
gaggtattcccacatagaaataacaatgcatgtattacccagaatttaatgttgcgtaccttatgttcaatgaggttttgtaatttttttaggctgatgattaaaattctttctctctaa

SEQ ID NO: 526882 - DNA, 120 bp, Artificial Sequence
  ENSG00000165923_29 (sequence is synthesized)
ccctaacctgacagtgccactgggagcaagaaaacattaaaactgggggagacattgacactgctttggattagacatgactgaagtctggaatcaaatattggtgatttgtgattttac

SEQ ID NO: 526883 - DNA, 120 bp, Artificial Sequence
  ENSG00000165923_30 (sequence is synthesized)
accaagaacataagaacaggctgccttacttaccatccattcatccctctactcacccatctactcaatcagcaaatgttattttaaaataaatcaatgaattttattgggcacctacta

SEQ ID NO: 526884 - DNA, 120 bp, Artificial Sequence
  ENSG00000165923_31 (sequence is synthesized)
accaggttcctctgaaccctaaattcaatctttagggcccactttcccaaccccctgacctttttccatcggcacctaccgagacgacttcgtcgcgtgctcccatacccatttctttca

SEQ ID NO: 526885 - DNA, 120 bp, Artificial Sequence
  ENSG00000165923_32 (sequence is synthesized)
ctttcctgtggcgagcatctcctttctcagggaaagggaagcatggggccagcaccttgggaagaagaagcgggaagatacgctgccctccctgtctcagatgcacctctggcctcggcg

SEQ ID NO: 526886 - DNA, 120 bp, Artificial Sequence
  ENSG00000165923_33 (sequence is synthesized)
tgaccaccttgtttagctgaggagaagctgggttggcagggttttctgaagtcaagagggagctggggggcgcccggggaggtattggcagttttttcacttgtcctcttgtggctttgt

SEQ ID NO: 526887 - DNA, 120 bp, Artificial Sequence
  ENSG00000165923_34 (sequence is synthesized)
agaagaatctgctctaacatgggagaggccagggagcagccttggcctctgtttctaacaccattcaaaacttctctctaaatctactttggattacagggcctatcagtttatcttcag

SEQ ID NO: 526888 - DNA, 120 bp, Artificial Sequence
  ENSG00000165923_35 (sequence is synthesized)
agaagccatcaacagaggtatttcatgtccttccagaccagaagattcaagctccttttttggactatgtcttcatcacctgctgttcccaccagacctaagaattaccagacaggaatg

SEQ ID NO: 526889 - DNA, 120 bp, Artificial Sequence
  ENSG00000165923_36 (sequence is synthesized)
caggaatgggattcatgcctgatgagcactgaaggaccctcagcctttagttccccctttcatttccatttttttcttttttcctcattccctttcttctttttctttttcttttttttt

SEQ ID NO: 526890 - DNA, 62 bp, Artificial Sequence
  ENSG00000165923_37 (sequence is synthesized)
tcctttcttttttatcttcctgaaagcctttcttttcttcccttttttctcattctttcttt

SEQ ID NO: 526891 - DNA, 120 bp, Artificial Sequence
  ENSG00000165923_38 (sequence is synthesized)
aaagcctttcttttcttcccttttttctcattctttctttcccaagagctcttcctctcttctgccccatctcatgccttctctccccttcctctttccatcttctttgttttatgtctg

SEQ ID NO: 526892 - DNA, 120 bp, Artificial Sequence
  ENSG00000165923_39 (sequence is synthesized)
tctgtctttcctttgtatggttatattatggccctgaaattttatttatagattatttcactatagttgataaaaaagaagaaaaaaagaataaagttttatgtaattttttctaaaatg

SEQ ID NO: 526893 - DNA, 120 bp, Artificial Sequence
  ENSG00000165929_0 (sequence is synthesized)
ggccgcgcgaggtgaccggagtcacagttcccgcaggcggcgacagcagagcgcccactgcctccagcaggtaaccggccgcggccgcgcggcgccggcccagcgcgggcgtgggacgtg

SEQ ID NO: 526894 - DNA, 120 bp, Artificial Sequence
  ENSG00000165929_1 (sequence is synthesized)
gagacccggaggagggcggcgggacccgggcggggaaaggcgcggcgtggcttggctcaggtgcgcttctcccacctggcagctcgctcagggctgtggggggtgcctgtgagggcggcc

SEQ ID NO: 526895 - DNA, 120 bp, Artificial Sequence
  ENSG00000165929_2 (sequence is synthesized)
ccgccttgcgggctggagattaatattaagattggaagtttgtgtcttttgctggatattggaaattgaatgtaatggcaacagaatttataaagagttgctgtggaggatgtttctatg

SEQ ID NO: 526896 - DNA, 120 bp, Artificial Sequence
  ENSG00000165929_3 (sequence is synthesized)
gtgaaacagaaaaacacaacttttctgtggaaagagattttaaagcagcagtcccaaatagtcaaaatgctactatctctgtacctccattgacttctgtttctgtaaagcctcagcttg

SEQ ID NO: 526897 - DNA, 120 bp, Artificial Sequence
  ENSG00000165929_4 (sequence is synthesized)
gctgtactgaggattatttgctttccaaattaccatctgatggcaaagaagtaccatttgtggtgcccaagtttaagttatcttacattcaacccaggacacaagaaactccttcacatc

SEQ ID NO: 526898 - DNA, 120 bp, Artificial Sequence
  ENSG00000165929_5 (sequence is synthesized)
tggaagaacttgaaggatctgccagagcatcttttggagatcgaaaggtagaactttccagttcatcccagcacggacctagctatgatgtgtataacccattctatatgtatcagcaca

SEQ ID NO: 526899 - DNA, 120 bp, Artificial Sequence
  ENSG00000165929_6 (sequence is synthesized)
tttcacctgatttgagtcgacgctttcctccccgttcagaagtgaagagactgtatggatcggtttgtgatttaaggacgaacaaacttcccggttcccctgggctaagcaaatctatgt

SEQ ID NO: 526900 - DNA, 120 bp, Artificial Sequence
  ENSG00000165929_7 (sequence is synthesized)
ttgatcttacaaactcatctcagcgattcatccagagacatgattcattgtccagtgtacccagtagttcttcttcaaggaaaaattctcaggggagtaacagaagcctggatacaatta

SEQ ID NO: 526901 - DNA, 120 bp, Artificial Sequence
  ENSG00000165929_8 (sequence is synthesized)
ctctatcaggagatgaaagggactttgggagactgaatgtgaaattgttttataattcttcagtagaacagatctggatcacagttttacagtgcagagatttaagttggccctctagtt

SEQ ID NO: 526902 - DNA, 120 bp, Artificial Sequence
  ENSG00000165929_9 (sequence is synthesized)
atggagacactcctactgtttctataaaaggaatacttacattgcccaaaccagtgcatttcaaatcttcagccaaggaaggttccaacgctattgaatttatggaaacgtttgtatttg

SEQ ID NO: 526903 - DNA, 120 bp, Artificial Sequence
  ENSG00000165929_10 (sequence is synthesized)
ctattaaacttcaaaatctacaaactgtaagacttgtatttaagattcaaacccagactcccaggaagaaaaccattggagaatgctcaatgtcactcagaacccttagcacacaggaaa

SEQ ID NO: 526904 - DNA, 120 bp, Artificial Sequence
  ENSG00000165929_11 (sequence is synthesized)
tggattactctttggatataacaccaccttcaaaaatttctgtttgccatgcagaacttgaattggggacttgttttcaagcagtaaatagcagaattcagttacaaattcttgaggcac

SEQ ID NO: 526905 - DNA, 120 bp, Artificial Sequence
  ENSG00000165929_12 (sequence is synthesized)
ggtaccttccaagctcatcaacacctctgactttgagttttttcgtgaaggtgggaatgtttagctcgggagagttgatttataagaaaaagacacgcttactgaaggcctccaatggaa

SEQ ID NO: 526906 - DNA, 120 bp, Artificial Sequence
  ENSG00000165929_13 (sequence is synthesized)
gagtcaagtggggagagactatgatttttccacttatacagagtgaaaaagaaattgtttttctcattaagctttacagtcgaagctctgtaagaagaaaacactttgtgggccagattt

SEQ ID NO: 526907 - DNA, 120 bp, Artificial Sequence
  ENSG00000165929_14 (sequence is synthesized)
ggataagtgaagacagtaataacattgaagcagtgaaccagtggaaagagacagtaataaatccagaaaaggttgttatcaggtggcacaaattaaatccatcttgaagacttcacacat

SEQ ID NO: 526908 - DNA, 120 bp, Artificial Sequence
  ENSG00000165929_15 (sequence is synthesized)
taatttggtgaagaacttgacattcttttagaagacttatgatttcaatttgctaccaatgagaagaggcaaatcaacaaatttgtcaatttatgggggctataattatggtatataatg

SEQ ID NO: 526909 - DNA, 120 bp, Artificial Sequence
  ENSG00000165929_16 (sequence is synthesized)
tatctgatagaaaatttgataagaaaatgtaatgaattttatcagatatccaaagtaaaggaaatgttttaaaactgcaacaagagacacagacagtaaaatcaaagtattattaggatg

SEQ ID NO: 526910 - DNA, 120 bp, Artificial Sequence
  ENSG00000165929_17 (sequence is synthesized)
actaaataaattataaagtctgtgagaatatcaaccatagatagttctttctatattatgttttcgcttttgtattttaagctttacttagatattcaaaacctggtatatcaagtctct

SEQ ID NO: 526911 - DNA, 120 bp, Artificial Sequence
  ENSG00000165929_18 (sequence is synthesized)
gttagtactattggcatttagaagactttaccattatttcagtgctaggcattattgattaggtcttggctccactgtttacctcttgctatgtattttctcccggtaaaaatgaattga

SEQ ID NO: 526912 - DNA, 120 bp, Artificial Sequence
  ENSG00000165929_19 (sequence is synthesized)
gaaagtttgtgccctgtgttttataatttttttacccataagacatcacattatccctttgtaagctacttatctccaaaaaacttcagaaatagaaaactacattttggcaggaataat

SEQ ID NO: 526913 - DNA, 120 bp, Artificial Sequence
  ENSG00000165929_20 (sequence is synthesized)
tgaaaacaccagaaggttgaagtttaattggaaacccagaatatacatactttgctgttttcttccctcaaatattttactatttgttttatttggagttaaaataagagtatcatccat

SEQ ID NO: 526914 - DNA, 120 bp, Artificial Sequence
  ENSG00000165929_21 (sequence is synthesized)
atggtccatcctaattcacagaattaaatgagcttaaatagaaaattcagtattttatgataatcacttcgtttttagtttttaaaatttagattattctataatttaccgtgtttgagt

SEQ ID NO: 526915 - DNA, 120 bp, Artificial Sequence
  ENSG00000165929_22 (sequence is synthesized)
attttctcatttttttcataaccatacctgattatactgtgtaacaaatattttctattgcagttttctttccagtacttattagaactcagtatttggaaataatttcagcttaattga

SEQ ID NO: 526916 - DNA, 120 bp, Artificial Sequence
  ENSG00000165929_23 (sequence is synthesized)
ccataagaactgtggccaaaaagaacagttttttggagaggcagatgacattatacctgattttagaaaatctcactttatttttgctaataagtagactaagtgctctgtgttctcagt

SEQ ID NO: 526917 - DNA, 120 bp, Artificial Sequence
  ENSG00000165929_24 (sequence is synthesized)
cttccctttttttctgcccccattcttactttgtcccaggcatgcagagaaagatggtgatattttaggccaggagtataccttgctataacctaagcatgccttctttattccagctcc

SEQ ID NO: 526918 - DNA, 120 bp, Artificial Sequence
  ENSG00000165929_25 (sequence is synthesized)
tatgttctgtgtatatcattaacattttcccaaataaacacttaattctcttttccctaggtgccatctcctcaagctacaaaatgtccacatcttatatcccctttgcttctactgctc

SEQ ID NO: 526919 - DNA, 120 bp, Artificial Sequence
  ENSG00000165929_26 (sequence is synthesized)
tgattttgtggtaccagtactctctgccactgaacattttgaaatatttttgttttagatttgcaaaaaatgacatataggtcagtactcacatggatttttaagataaatcacctgtgt

SEQ ID NO: 526920 - DNA, 120 bp, Artificial Sequence
  ENSG00000165929_27 (sequence is synthesized)
gataatattttgaatctgagacgaatacaacttttaaaaattgtttttaaaaatagacttttttttttagagcagttgtaggttaacagaaaaattgagaggaagatagagatttccttt

SEQ ID NO: 526921 - DNA, 120 bp, Artificial Sequence
  ENSG00000165929_28 (sequence is synthesized)
ctcccctgacaaagccctcaacagcctcccaggctatcagtatcctgcaccacaatggtacatttgttacaatcaatgaacctactctgaaacatcattatcatccaaagttcatggttt

SEQ ID NO: 526922 - DNA, 120 bp, Artificial Sequence
  ENSG00000165929_29 (sequence is synthesized)
acattagagtcccctcttggtgttatacatgctagaggacaaatatatgatgatatgtatgcatcattataatatagtatagtttcgctgccctaaacatcctctgcaaatgcaactatt

SEQ ID NO: 526923 - DNA, 120 bp, Artificial Sequence
  ENSG00000165929_30 (sequence is synthesized)
ttaatgggtaccaaagaagtaaatgtatttactggcttttagataataaataacgggctttattgtttattttaaaagctacaatttgttttagctggtttctctgttctattaatgctt

SEQ ID NO: 526924 - DNA, 120 bp, Artificial Sequence
  ENSG00000165929_31 (sequence is synthesized)
agtcatgcatttaacttaatatttaattatttgatttatttaattttctatattcttacaatgtatgtatgatgtataatttaagggaaagctatgacttctcagtttcttagaatccta

SEQ ID NO: 526925 - DNA, 120 bp, Artificial Sequence
  ENSG00000165929_32 (sequence is synthesized)
acttctcagtttcttagaatcctaggtaaataaaacaataaaaagaaaacccttacatttaaaagagctttcaggtacagaagtattgatacaactaagatcctaaatgttttaattagt

SEQ ID NO: 526926 - DNA, 120 bp, Artificial Sequence
  ENSG00000165929_33 (sequence is synthesized)
gtttacttaagcctttttcaggtgaggaggtactaatgctggttatttccttgaagctttatgtggacctataaataaaaatccaatctcctgctaataggtatgcatattgtgagaaaa

SEQ ID NO: 526927 - DNA, 120 bp, Artificial Sequence
  ENSG00000165929_34 (sequence is synthesized)
acgttaggagctggtagtaaaaaatgagattctatgccaaaataacttctcttcatatttgcctaggcatttcttgacctttacccacttacgcaaggagaaggaaatcataatgatgtc

SEQ ID NO: 526928 - DNA, 120 bp, Artificial Sequence
  ENSG00000165929_35 (sequence is synthesized)
atgtgatcaaaggaaaccatggaagggttcacgctgatagctgatagcttttacagtgctcattcctaacagtggatttacttgtaagctttcagatcaacacaaatagctgcagcctgg

SEQ ID NO: 526929 - DNA, 120 bp, Artificial Sequence
  ENSG00000165929_36 (sequence is synthesized)
gttaaaatataacatcactatttggcttttgttttgcatgatttttaaaagcagtactcctagggaaatggcctctgaagtatatcagtttcatctcttaccaagactgttaagaagaaa

SEQ ID NO: 526930 - DNA, 120 bp, Artificial Sequence
  ENSG00000165929_37 (sequence is synthesized)
ctagtgggattttgaacaagttatataattgtggtctgaaaagaccctaaactgaagttctgtttaaatatagttacatgaatttctctgatactaatgtactcaacagccaggtataaa

SEQ ID NO: 526931 - DNA, 120 bp, Artificial Sequence
  ENSG00000165929_38 (sequence is synthesized)
ctatatctcctagtaacattttccatttttgtttaatcaaatacttgcttatgaaggatttcagaaatttgtaataaatgtcagcttttgatagcatagcagtaattgacatttcaaaaa

SEQ ID NO: 526932 - DNA, 120 bp, Artificial Sequence
  ENSG00000165929_39 (sequence is synthesized)
agtcagggtcaagtggtgttagcaatcacatcagcaccaaatggctcaggatgctctggtttcaaagcttataaaacagagggtgattcccttgggactcactcagctcggctccgaaaa

SEQ ID NO: 526933 - DNA, 120 bp, Artificial Sequence
  ENSG00000165929_40 (sequence is synthesized)
gcaaaggccagaaggcagcagtgagcctgggtccctgctgtgtagggagactcaggggctgggaagaaggatggaatcagaaatgctgaaggtttacgtgagctttgcaccgagcgcctc

SEQ ID NO: 526934 - DNA, 120 bp, Artificial Sequence
  ENSG00000165929_41 (sequence is synthesized)
atgttatcttggtgcataagctgtaatttttattcaaaattaaatttcaaatgtttgcagttttggctaaaacattgagttgaaagaattatgaaaagtgggcccatatgaagtaccatg

SEQ ID NO: 526935 - DNA, 120 bp, Artificial Sequence
  ENSG00000165929_42 (sequence is synthesized)
ttcattttgaaatatagatttaagatttagaaatatattaaaagagttaatggagcctcctaaattggattttattttgtgggtgaagaattgtaggaagatgaatgtggcctacagttt

SEQ ID NO: 526936 - DNA, 120 bp, Artificial Sequence
  ENSG00000165929_43 (sequence is synthesized)
ggcctacagttttagtaatctcctagtggagttttttttaacttagtacttttttagttttaagttttttaatctataaaaaatgtgatttctataaaccatgattacaataaataatta

SEQ ID NO: 526937 - DNA, 120 bp, Artificial Sequence
  ENSG00000165929_44 (sequence is synthesized)
ttatatttttaatacaaaattcatataaaatttttttattttactttttatattttgctctttctgtagaagaacttaatgtacagtagttttgaaaggtcccattttgaaatctgatca

SEQ ID NO: 526938 - DNA, 120 bp, Artificial Sequence
  ENSG00000165929_45 (sequence is synthesized)
tctgatcataatacaataatttgtatgtagaattggccttttttcaagaaataatatgtaattggccctccatatctttgggttccacatctgtggatttaaccaactgcacctcaaaaa

SEQ ID NO: 526939 - DNA, 120 bp, Artificial Sequence
  ENSG00000165929_46 (sequence is synthesized)
gggagtgggtacggggagggaagtggaggggagggggtaagtgatagggtaggggaggccctgggaaaggcaggacctcgaggcgcggccgcgcgaggtgaccggagtcacagttcccgc

SEQ ID NO: 526940 - DNA, 120 bp, Artificial Sequence
  ENSG00000165929_47 (sequence is synthesized)
aacacaggggtcctgaagaatgaagggtaccaaggtggaaggggcgcaggattaagagtagggacgcctgcaaaagctctcgtgttaccacctcatcttccaactttcatgtgggtgaaa

SEQ ID NO: 526941 - DNA, 120 bp, Artificial Sequence
  ENSG00000165929_48 (sequence is synthesized)
acgttcatcctaaataattgcttctaattctgaagttttgtgattccttgaaatgtactttggggatgacagccagcatttccatttcactgcaatttcagagttttgcagtggtttgcc

SEQ ID NO: 526942 - DNA, 120 bp, Artificial Sequence
  ENSG00000165929_49 (sequence is synthesized)
aatcataacactttctaattggcacaaaatccacctacctgttgcctctcaggcttgggtaacatacttcagacactttcttaggtaagtcttggcccttggggtgttatttgcccagat

SEQ ID NO: 526943 - DNA, 120 bp, Artificial Sequence
  ENSG00000165929_50 (sequence is synthesized)
agaagcctggatacaattactctatcaggagatgaaagggactttgggagactgaatgtgaaattgttttataattcttcagtagaacagatctggatcacagttttacaggctattgaa

SEQ ID NO: 526944 - DNA, 120 bp, Artificial Sequence
  ENSG00000165934_0 (sequence is synthesized)
gctagtctccagctccaaaatggcggctgccactgtggggcttctgccggccggtagtccctggcgctgctgacccagcatcggcttttctacgtcttgaacctggattcgcctaggggt

SEQ ID NO: 526945 - DNA, 120 bp, Artificial Sequence
  ENSG00000165934_1 (sequence is synthesized)
tgggaagggctgtggacggcgttgggggaggcctgacgagattaataaagaactcttcagaattcctggtgtttcatcatatatacgactaagatatcaactcttctagcttgctgtttc

SEQ ID NO: 526946 - DNA, 120 bp, Artificial Sequence
  ENSG00000165934_2 (sequence is synthesized)
tggaccaaaaaaaatgacgtctattatcaaattaactaccctttctggggtccaagaagaatctgccctttgctatcttctccaagttgatgagtttagatttttattggactgtggctg

SEQ ID NO: 526947 - DNA, 120 bp, Artificial Sequence
  ENSG00000165934_3 (sequence is synthesized)
ggatgagcacttttctatggatattattgattccctgaggaagcatgttcaccagattgatgcagtgctgttgtctcaccctgatcctctccaccttggtgccctcccgtatgctgtcgg

SEQ ID NO: 526948 - DNA, 120 bp, Artificial Sequence
  ENSG00000165934_4 (sequence is synthesized)
aaagttgggtctgaactgtgctatctatgcaaccattcctgtttataaaatgggacagatgttcatgtatgatctttatcagtctcgacacaatacagaagattttacactctttacatt

SEQ ID NO: 526949 - DNA, 120 bp, Artificial Sequence
  ENSG00000165934_5 (sequence is synthesized)
agatgatgtggatgcagcctttgataaaatacagcagctaaaattctctcagattgtgaatttgaaaggtaaaggacatggcctgtctatcacacctctgccagctggtcatatgatagg

SEQ ID NO: 526950 - DNA, 120 bp, Artificial Sequence
  ENSG00000165934_6 (sequence is synthesized)
tggaacaatatggaaaatagtcaaagatggagaagaagaaattgtttatgcagttgacttcaaccacaagagggagatccatttaaatggatgttccctggaaatgctaagcaggccttc

SEQ ID NO: 526951 - DNA, 120 bp, Artificial Sequence
  ENSG00000165934_7 (sequence is synthesized)
cctacttatcacagattcattcaatgctacatatgtacagcctagaagaaaacagagagatgagcagcttctgacaaatgtcctggaaacacttcgaggtgatggaaatgtgttaatagc

SEQ ID NO: 526952 - DNA, 120 bp, Artificial Sequence
  ENSG00000165934_8 (sequence is synthesized)
agtggacacagcaggcagagttttggaacttgctcaacttcttgatcagatttggaggactaaagatgcaggattgggtgtttactcattggcactcctaaataatgtcagttacaatgt

SEQ ID NO: 526953 - DNA, 120 bp, Artificial Sequence
  ENSG00000165934_9 (sequence is synthesized)
ggtggagttttctaagtcccaggtagaatggatgagtgataaattgatgagatgttttgaagacaaaagaaataatccgtttcagtttcgccatctctctttatgtcatggtctttctga

SEQ ID NO: 526954 - DNA, 120 bp, Artificial Sequence
  ENSG00000165934_10 (sequence is synthesized)
cttggcccgtgtacctagccctaaagttgtacttgccagccaacctgacctggaatgcggattttcaagggatctctttattcagtggtgtcaggaccctaaaaactcaatcattctaac

SEQ ID NO: 526955 - DNA, 120 bp, Artificial Sequence
  ENSG00000165934_11 (sequence is synthesized)
ctacagaactactcctgggactttagcacgtttcctaattgataatccttctgaaaaaattacagaaatagagttgaggaaacgtgtgaagcttgaagggaaagaacttgaagaatactt

SEQ ID NO: 526956 - DNA, 120 bp, Artificial Sequence
  ENSG00000165934_12 (sequence is synthesized)
ggaaaaagagaaactaaagaaagaagctgccaaaaagcttgagcagtcaaaagaggcagatatagattccagtgatgagagtgatattgaggaagatattgaccagccatcagctcataa

SEQ ID NO: 526957 - DNA, 120 bp, Artificial Sequence
  ENSG00000165934_13 (sequence is synthesized)
gacgaagcatgacttgatgatgaaaggtgaaggcagtcgtaaaggaagttttttcaaacaggcaaaaaagtcctatcctatgtttcctgccccagaagaaagaattaaatgggatgaata

SEQ ID NO: 526958 - DNA, 120 bp, Artificial Sequence
  ENSG00000165934_14 (sequence is synthesized)
tggagagattatcaaaccagaggatttcttagtgccagagcttcaagctactgaagaagaaaaaagcaaattagaatctggtttgacaaatggagatgaacctatggatcaggatttatc

SEQ ID NO: 526959 - DNA, 120 bp, Artificial Sequence
  ENSG00000165934_15 (sequence is synthesized)
tgatgttcctactaaatgtatttctacaacagagtctattgaaataaaagcccgggttacctacatagactatgaaggacgctctgatggggattccattaaaaaaatcattaatcagat

SEQ ID NO: 526960 - DNA, 120 bp, Artificial Sequence
  ENSG00000165934_16 (sequence is synthesized)
gaaaccacgacagttgatcatcgtccatggcccaccagaggccagtcaagatctggcagagtgctgtcgcgcctttggtgggaaagatattaaagtgtacatgccaaagctacatgaaac

SEQ ID NO: 526961 - DNA, 120 bp, Artificial Sequence
  ENSG00000165934_17 (sequence is synthesized)
agttgatgccactagtgaaactcacatctaccaggtgaggttaaaagactcacttgtcagctctcttcagttttgtaaggcaaaagatgctgaattagcttggatagatggtgtcttaga

SEQ ID NO: 526962 - DNA, 120 bp, Artificial Sequence
  ENSG00000165934_18 (sequence is synthesized)
tatgagagtttccaaagtggacacaggggttattttagaagaaggagaactaaaggatgatggagaagactcagagatgcaagtggaagctccctcagattctagcgttatagcacaaca

SEQ ID NO: 526963 - DNA, 120 bp, Artificial Sequence
  ENSG00000165934_19 (sequence is synthesized)
aaaggccatgaaaagtctgttcggagatgatgaaaaagaaacaggtgaagaaagtgagatcattcctactttggaacccttgccacctcatgaggttcctggacatcagtcagtttttat

SEQ ID NO: 526964 - DNA, 120 bp, Artificial Sequence
  ENSG00000165934_20 (sequence is synthesized)
gaatgaaccaaggctgtcagacttcaagcaagttctcttacgggaggggattcaagctgaatttgtaggaggtgtacttgtttgcaacaatcaagtagcagtccgcagaacggaaactgg

SEQ ID NO: 526965 - DNA, 120 bp, Artificial Sequence
  ENSG00000165934_21 (sequence is synthesized)
acgcattggattagaaggctgcctttgtcaagatttttataggataagagaccttttatatgaacaatatgccattgtataaaggacatgatgtcaagaagtatctgcttgacctttcta

SEQ ID NO: 526966 - DNA, 120 bp, Artificial Sequence
  ENSG00000165934_22 (sequence is synthesized)
agaaaaagggattcttatcttactctgagcttttgatgttttgttttgtaacatacaaaaagaatctgccagaaaaacttacatgtatcagatttttaaaaatataaatagagaacattt

SEQ ID NO: 526967 - DNA, 120 bp, Artificial Sequence
  ENSG00000165934_23 (sequence is synthesized)
tgcaaatgctcaaatgagcattctatcttttggctttcagagtgatagagctcctaacaggtgtacaggcccaagagttgaaggtgattggttttctttacagactccttgttctctaga

SEQ ID NO: 526968 - DNA, 120 bp, Artificial Sequence
  ENSG00000165934_24 (sequence is synthesized)
agggctttttacttgaataaaacaatgcaacttagcaaaccaatttatggccttagagaaacatttttgcatgagttcttacaaactgtttgttatattttctggaatgataagtgagaa

SEQ ID NO: 526969 - DNA, 120 bp, Artificial Sequence
  ENSG00000165934_25 (sequence is synthesized)
ttatttagaaaagacatgctccaaaaaaaaaacaaaactgataaaacagtttttcgaaacttacttttaaaagcatacgtgctatgactctctccagtttgaatatgcaattgttttcac

SEQ ID NO: 526970 - DNA, 120 bp, Artificial Sequence
  ENSG00000165934_26 (sequence is synthesized)
aggcaggatgtctgttttctgcctgtatttcccagtgatttactctagggtaaggtagtacacatttggttcagaaattaatttttatttctcctatatcttgttttatcaagattttgt

SEQ ID NO: 526971 - DNA, 120 bp, Artificial Sequence
  ENSG00000165934_27 (sequence is synthesized)
tgtggcatttcaatgtaaattataacaccatcatttgagtatacataattcaaaagaactacttgatgcagtatagtcttaagggttctgcatacattttagaaacatcttagccgtaag

SEQ ID NO: 526972 - DNA, 120 bp, Artificial Sequence
  ENSG00000165934_28 (sequence is synthesized)
ttaggtcctgtgttaaactgtttagtgctctgtttttaagaaaacaaatgttgaacctcacacttttatgtggtgacagtgtaatttaattaaaaggtgtaaatgttttcatctcttagg

SEQ ID NO: 526973 - DNA, 120 bp, Artificial Sequence
  ENSG00000165934_29 (sequence is synthesized)
cttgctgtctcctaaggtcacccaagcagtggttggattttatacacattactactaaaataatactgaagttggataaggttatcctttctgtatttgcgtctttcttgtgactaacca

SEQ ID NO: 526974 - DNA, 120 bp, Artificial Sequence
  ENSG00000165934_30 (sequence is synthesized)
ccctgatatagtattaaccactgtgttcaagagtaaaaacaatatatgcaattttcattgaacttaaagagtgaaaaccatgtaaactattgaaactattgtaatccattaatgcttttt

SEQ ID NO: 526975 - DNA, 120 bp, Artificial Sequence
  ENSG00000165934_31 (sequence is synthesized)
tccattaatgcttttttagaatggcagaccttgatgtttatttctcaaatggttaagccctcttctttactcttaatttttttttgagacagagtcacccaggctggagtgcagtggtga

SEQ ID NO: 526976 - DNA, 67 bp, Artificial Sequence
  ENSG00000165934_32 (sequence is synthesized)
acccaggctggagtgcagtggtgagattttggctcactataacctcttcctccacatgccactgcac

SEQ ID NO: 526977 - DNA, 66 bp, Artificial Sequence
  ENSG00000165934_33 (sequence is synthesized)
actagcctacccttagatttttggaaggatcgatcttatttaactatgtgtggaacaacccagtaa

SEQ ID NO: 526978 - DNA, 120 bp, Artificial Sequence
  ENSG00000165934_34 (sequence is synthesized)
ggatcgatcttatttaactatgtgtggaacaacccagtaatatcagactcgaattactatttcattctatttcaaatgcttataaagctactattgtagattatagtgttaatgcaaagt

SEQ ID NO: 526979 - DNA, 120 bp, Artificial Sequence
  ENSG00000165934_35 (sequence is synthesized)
ttacagacttttgatatggaaaaccagataaaacaatgttacaaaaggcaaatataaagagtatgttttctttttagtgctttggaaaaatttcacttaaactcttattactgtatagat

SEQ ID NO: 526980 - DNA, 120 bp, Artificial Sequence
  ENSG00000165934_36 (sequence is synthesized)
taagccctataatgctatttatattccaggggaacgaaaatctgaatttgttttatgatttaaagcatctggtttgcatattgtattgtaatactgatacagtttggctgtgtccccacc

SEQ ID NO: 526981 - DNA, 120 bp, Artificial Sequence
  ENSG00000165934_37 (sequence is synthesized)
aaattgaattgtgttaatagttcccataatccctacgtgttgtgggagggacccagtgggcagtaatttaatcatggtggtggttaccctcatgctgttcttgtgatggtgagttctcat

SEQ ID NO: 526982 - DNA, 71 bp, Artificial Sequence
  ENSG00000165934_38 (sequence is synthesized)
agatctgatggttttgtaagggaattttccccctttgcttggcacttcttcctgctgccatgtgaagaagg

SEQ ID NO: 526983 - DNA, 82 bp, Artificial Sequence
  ENSG00000165934_39 (sequence is synthesized)
atgaggcctccccagcctgtgggactgtgagtcaattaaacgtgtttactttataaattacccagtctcaggcaattcttta

SEQ ID NO: 526984 - DNA, 120 bp, Artificial Sequence
  ENSG00000165934_40 (sequence is synthesized)
tttatagcagtgtgagaacagactaatatgaataccaatactgaaaaattgtttcttgcctcaccttgtcctatgaacaggaattaaattttaaagtattgccttaagatggctgtgcta

SEQ ID NO: 526985 - DNA, 120 bp, Artificial Sequence
  ENSG00000165934_41 (sequence is synthesized)
taaattttaaagtattgccttaagatggctgtgctaaataataatcattgcaagagcaatacttttacctgtttctagatgacaatattactaaaatttctcaaatgaagactttgtttt

SEQ ID NO: 526986 - DNA, 120 bp, Artificial Sequence
  ENSG00000165934_42 (sequence is synthesized)
agcttcaattacttcagaaaatataaattttaaagatgactatgagataaatcatgaactcagtggaattttcagatgagatggggcgcgttcagggtggtatgactgtagacggaattt

SEQ ID NO: 526987 - DNA, 120 bp, Artificial Sequence
  ENSG00000165934_43 (sequence is synthesized)
tcagatctttgttatttagaagcaagtataggtataacgtggactatcaactgatatctgcaaataatttggttaaaatgaaatttgattgtagtatttgttgctgtaggattataaatg

SEQ ID NO: 526988 - DNA, 120 bp, Artificial Sequence
  ENSG00000165934_44 (sequence is synthesized)
tcaaatatcattgtaaacatttctatatttttagaaatatcttgggtggcctgaaacagaagtgaggaaatcaattttttaaggtgagccatttggcttttttaaaaaattgagattcaa

SEQ ID NO: 526989 - DNA, 120 bp, Artificial Sequence
  ENSG00000165934_45 (sequence is synthesized)
cttacataccataaagttcactcttctaaagtgtacaattcattggtgttagtatatttacagagttgtacaactattaccactatataatcccagaacactttcatcactccaaaaaga

SEQ ID NO: 526990 - DNA, 120 bp, Artificial Sequence
  ENSG00000165934_46 (sequence is synthesized)
aacaccatacccactaccagtcactcctcatgcccccttcctatgacccctggcagccattaatctactttctgtctccttgaatttggattttctggacacttcataaaaattgaataa

SEQ ID NO: 526991 - DNA, 120 bp, Artificial Sequence
  ENSG00000165934_47 (sequence is synthesized)
tacaatatatgaacttttatgtttgacttctttcacttagcataatgttttcagagtgcatcactgttgtaacatgtatcagtaccctttttgtgactgaatattattccaccgaatgga

SEQ ID NO: 526992 - DNA, 120 bp, Artificial Sequence
  ENSG00000165934_48 (sequence is synthesized)
tataccacattttacttatccattcaaccgttgatgtacatttgagttgattccaaattttggctattaagaatgctgctctgaacattcatgtgcaagtttttttttttttgtatgtac

SEQ ID NO: 526993 - DNA, 120 bp, Artificial Sequence
  ENSG00000165934_49 (sequence is synthesized)
atatgttttcaattttcttggatatatatctaagaattagaattgctggatcatacagtaattctgcttaaccttttgaggagctgccaggctgttttccaaagtggctacaacattttg

SEQ ID NO: 526994 - DNA, 120 bp, Artificial Sequence
  ENSG00000165934_50 (sequence is synthesized)
catttccaccagcatgtgtttgagggttccattttctcctcattcttgacaacatttattactccctttttaaattttagtcatcatagtgtgggtgaagaagtgtctcactgaggtttt

SEQ ID NO: 526995 - DNA, 120 bp, Artificial Sequence
  ENSG00000165934_51 (sequence is synthesized)
gatttgcatttccttaatgactgatgatgtggagcctctttccatgtgtttattgactttttatatattttggagtaatatctgttcatatcctttgtccattttcaatttgtttatgtt

SEQ ID NO: 526996 - DNA, 120 bp, Artificial Sequence
  ENSG00000165934_52 (sequence is synthesized)
gatgtaagagtttttttatatattttctggatactaaaccattatatattgatttgcaagtattttattccattctgtggcttgtcttttcactttcttcgtagtgtagtttgaagcaca

SEQ ID NO: 526997 - DNA, 120 bp, Artificial Sequence
  ENSG00000165934_53 (sequence is synthesized)
tcttttcactttcttcgtagtgtagtttgaagcacaaaagtttttaattttgataaagtccagtttgtttttttcccttcagttctttgtgcttggttttatatcttttttttttttttt

SEQ ID NO: 526998 - DNA, 89 bp, Artificial Sequence
  ENSG00000165934_54 (sequence is synthesized)
ttttgtatttttagtaaagacatggttttaacctcaagtgatccaccaaccttggcccccaaaagtgctgagattacaggtgtgagcca

SEQ ID NO: 526999 - DNA, 120 bp, Artificial Sequence
  ENSG00000165934_55 (sequence is synthesized)
gccaccttgcctggccttggttttatatcttaaaagctattccttcattcaaagtcacgaaggtttacacttaatttttttctatctaaaaaaccattgcttcatctaaagtcatgaaga

SEQ ID NO: 527000 - DNA, 120 bp, Artificial Sequence
  ENSG00000165934_56 (sequence is synthesized)
tttacactctttttttttctaacagttttacagtttaggctcttatcattaggtctttcatttattttgaattattatcattattattattttctttttgaggcagggtctcactctgtc

SEQ ID NO: 527001 - DNA, 120 bp, Artificial Sequence
  ENSG00000165934_57 (sequence is synthesized)
ttattattattttctttttgaggcagggtctcactctgtcacgcaggcttgtgtgcattggtgcaatcacagctcactgcagcttcagccttctggcctcaagcagtcctcccacctcag

SEQ ID NO: 527002 - DNA, 120 bp, Artificial Sequence
  ENSG00000165934_58 (sequence is synthesized)
ctgactaatttttaaaatttttttgtgaagacagtttctcactctgttgcccaagctggtcatctcaaacttccagactcaaacaatactcccactttggctgcccaaagtgctgggatt

SEQ ID NO: 527003 - DNA, 120 bp, Artificial Sequence
  ENSG00000165934_59 (sequence is synthesized)
acaggcatgagtcaccattcctggcattaatttttgtatatggtgtgaggtaggggtccagtttcatttttttgcatgtggatatccagttgtcccagcatcatttgttgaaaagactat

SEQ ID NO: 527004 - DNA, 120 bp, Artificial Sequence
  ENSG00000165934_60 (sequence is synthesized)
ttcttcattgatttttttctgccacccctgtttaaaatcagttgcccatgagtgtatgggtttgttcctggacttgaaattatgtttcattgatctatatatctatgctagtaccacatg

SEQ ID NO: 527005 - DNA, 120 bp, Artificial Sequence
  ENSG00000165934_61 (sequence is synthesized)
tcttcattactgtagctttgtagtaacttttgaaattggggaagtgtgagttccccaactttagttctccttcaggattgttttggctattctgggtctcttgcattttcatgtgagttt

SEQ ID NO: 527006 - DNA, 83 bp, Artificial Sequence
  ENSG00000165934_62 (sequence is synthesized)
tcatgtgagtttagattctgcttaagcatcttgctttgtcacccaggctggagtgctatggctcaatctcagctcactgcaac

SEQ ID NO: 527007 - DNA, 69 bp, Artificial Sequence
  ENSG00000165934_63 (sequence is synthesized)
tctcctgcctcagcctccagagtagttaggactacaggcgctcatgctgaccaggctggtctcgaactc

SEQ ID NO: 527008 - DNA, 82 bp, Artificial Sequence
  ENSG00000165934_64 (sequence is synthesized)
actcagcctaagattcagcttaccaatttctgcaaaaaagcccactcatttttaataggaggtaaaaagcagttgacattta

SEQ ID NO: 527009 - DNA, 120 bp, Artificial Sequence
  ENSG00000165934_65 (sequence is synthesized)
cactcatttttaataggaggtaaaaagcagttgacatttataacttagagtcttttaatgttagtgctgaaagggactagagagctcatctaattcaacccacttattttagtattgaat

SEQ ID NO: 527010 - DNA, 120 bp, Artificial Sequence
  ENSG00000165934_66 (sequence is synthesized)
gaatgaccctgtacaaggaaagggatttgcttgagatccacacagctgtttaaaggcagagttgggattggaaccaagtcttagagaatccattgttgcttctacactgcattattgctt

SEQ ID NO: 527011 - DNA, 120 bp, Artificial Sequence
  ENSG00000165934_67 (sequence is synthesized)
tggttccctagtgtacattcactttgcttaggagtgatatgttcagtttatcttctctaagaatggcagctgttatttaggacagtggcatgctgagaaatagattgatttctattctat

SEQ ID NO: 527012 - DNA, 120 bp, Artificial Sequence
  ENSG00000165934_68 (sequence is synthesized)
actgtgtccagtaaaggtcgggggagaaagagtaaatcttatcttcttctgtacttttctttgattaatgtaagagtctagagttttatcagaagattattgtcctttaaaatattgatg

SEQ ID NO: 527013 - DNA, 120 bp, Artificial Sequence
  ENSG00000165934_69 (sequence is synthesized)
gactgattatcacttaaagggtataaacagtgggtagtaattcagtgattgagaggttaattgcaggttttttttttttttttttctggtaaccatagaatgaatgtagaatgaatttgg

SEQ ID NO: 527014 - DNA, 89 bp, Artificial Sequence
  ENSG00000165934_70 (sequence is synthesized)
cgacagagcgcggcagggggagcggctagagaaggaacattcaaatcttcccacgtgggcaagttccaagcaaatgtttatttttttac

SEQ ID NO: 527015 - DNA, 120 bp, Artificial Sequence
  ENSG00000165934_71 (sequence is synthesized)
cccacgtgggcaagttccaagcaaatgtttatttttttacctcctctttggtttttgtctcacttgaagcactttgtgtttatgggaaaataccaaaaattaccaaaatttaaaaaccca

SEQ ID NO: 527016 - DNA, 120 bp, Artificial Sequence
  ENSG00000165934_72 (sequence is synthesized)
gggctttgctggaagtgagggtatcttcttggcttttcccttttcctccccaccactatacgcacatgcacacacagctctattttttggtgcttttcgttcattattcactccatttca

SEQ ID NO: 527017 - DNA, 120 bp, Artificial Sequence
  ENSG00000165934_73 (sequence is synthesized)
ccatttcattttagctcttgaagtcaaaatgggattccaaagagcaaaatagaagtttggagagtttgaaatctctcctcgtggctggacgccgtggctcacacctgtgatcccagcact

SEQ ID NO: 527018 - DNA, 120 bp, Artificial Sequence
  ENSG00000165934_74 (sequence is synthesized)
ggaggatcacttgagcctggggaggttgagactgcactgagtcttgaatgaatgaatccatctctctttctctctccatatagtcaaagagaaccaaaaatgtatgtgctttttttgtga

SEQ ID NO: 527019 - DNA, 120 bp, Artificial Sequence
  ENSG00000165934_75 (sequence is synthesized)
tgtgctttttttgtgaaattgttaaggattccatgatcctactaaaatttttgataatgataatttcaagtggagaatatataaaggactcgtgaggccttcctacctcattttctgagg

SEQ ID NO: 527020 - DNA, 120 bp, Artificial Sequence
  ENSG00000165934_76 (sequence is synthesized)
ttatgttgactttaatatccaatgtatcataggtgttttcttttttctctgacaattgttatgttaaaaacaaaaagaagcacatactgtacagtcaaaactatcagacgtaactctgtg

SEQ ID NO: 527021 - DNA, 120 bp, Artificial Sequence
  ENSG00000165934_77 (sequence is synthesized)
ggaaactttattccaagggtgctgccactgcccttgttttaaatatttttggaacttcatttctcttcaggtctatttaataagcttgttaggaatattgtaaattattttagaaacaca

SEQ ID NO: 527022 - DNA, 120 bp, Artificial Sequence
  ENSG00000165934_78 (sequence is synthesized)
ttgtggtctcagcctcatgtggcattgccacttgttactacatgacccccccacaccccctaaaaaagaaaaaggactttaaaaaccctctcaggacaaacatttgctaccgtggttgat

SEQ ID NO: 527023 - DNA, 120 bp, Artificial Sequence
  ENSG00000165934_79 (sequence is synthesized)
tgctaccgtggttgattttttaattttacattaactatttaatatcagactataactaaaatacaagtagtggaattatacttttataaagtatcaaattatgtagatgatgacgaagtt

SEQ ID NO: 527024 - DNA, 120 bp, Artificial Sequence
  ENSG00000165934_80 (sequence is synthesized)
ttccaacttcacccataggtcatggtatagttgaaatttcatatttaaatatcaaaacataaatgtctaaagagattgtgtaaattctttatcagttataaggaaaaaccaaattcaaat

SEQ ID NO: 527025 - DNA, 120 bp, Artificial Sequence
  ENSG00000165934_81 (sequence is synthesized)
ttttttttttttttttttgagacaaacttgcagggagagaattatgtggcatgaggaggattgagaatgttgttcattttatctaattactgcctattaagaaaagcttcacatttattt

SEQ ID NO: 527026 - DNA, 120 bp, Artificial Sequence
  ENSG00000165934_82 (sequence is synthesized)
cctattaagaaaagcttcacatttatttcagctattctattgaatacttttacctaagataatgaaaccgttaagtagagatttttctaatagtataaaaatcagtgtaggcccagcaca

SEQ ID NO: 527027 - DNA, 60 bp, Artificial Sequence
  ENSG00000165934_83 (sequence is synthesized)
aggctactcatctctattaaaaatcagaaaaattggccaggtgtggtggctcatgcctgt

SEQ ID NO: 527028 - DNA, 120 bp, Artificial Sequence
  ENSG00000165934_84 (sequence is synthesized)
agagtgagaccctgtctcaaaaacaacaaaaatctcagtgtgacaaattcctaacagctcaaatactacttgtcttatttgttaactattttgaaataattttaaacttacagaaaagta

SEQ ID NO: 527029 - DNA, 120 bp, Artificial Sequence
  ENSG00000165934_85 (sequence is synthesized)
gaaaagtagaatagttcaaaagatcctgtatatccttcccctagattcttctattgttaacatcttgccatattttccataccactctctagctatgtattcacattattttttgaactg

SEQ ID NO: 527030 - DNA, 120 bp, Artificial Sequence
  ENSG00000165934_86 (sequence is synthesized)
tttgttactaagttgcaattgtgatgtcccattagtactaaatacttaagtgtatactttttaaaaacaaggacactcctacataaccacagtacttaaaatcaggaaaccagcattgat

SEQ ID NO: 527031 - DNA, 120 bp, Artificial Sequence
  ENSG00000165934_87 (sequence is synthesized)
aaaattctaccatttgatccacgaaccccattcaaatgttgccatttactccaaaaatatccttacaataaccctttccttttttggtccacagtccaatcaggatgaagcacgcattta

SEQ ID NO: 527032 - DNA, 120 bp, Artificial Sequence
  ENSG00000165934_88 (sequence is synthesized)
gttacattttccctttagtcttcctcaatctggagcggttccttggtttttccttttttgtgaccttgacatttttgaagaatgcaggccaggtactttgtagaatgatgtgcactttgg

SEQ ID NO: 527033 - DNA, 120 bp, Artificial Sequence
  ENSG00000165934_89 (sequence is synthesized)
gtttgtctgatatttcctcaagattagattcaggttgtgaatttttggcaggaataccagagaggtgatgctgtcttcttctctgcattgtatcaggaggcacatcatgtcaattttttc

SEQ ID NO: 527034 - DNA, 120 bp, Artificial Sequence
  ENSG00000165934_90 (sequence is synthesized)
cattactggtgatgttaatttttaacagttggttacgatgttttcaagatttctccactgttagtattttctccacttgtatttgttttttggtataaacttaaaaagtacagcatgatg

SEQ ID NO: 527035 - DNA, 120 bp, Artificial Sequence
  ENSG00000165934_91 (sequence is synthesized)
ttttggtatatgtatccatagtgaaatgattattacaggtattaattaatgaggaattacgtattttgtgggtagctattttgagactctcaatatcctatttctcaaaattttaccctt

SEQ ID NO: 527036 - DNA, 120 bp, Artificial Sequence
  ENSG00000165934_92 (sequence is synthesized)
tcaaaattttaccctttacttttagcatccattgatgatccttgtctggatcagttattgccaaatggtagttttcttttcttttcttttcttttgagacagtgtcttgctctgttgccc

SEQ ID NO: 527037 - DNA, 120 bp, Artificial Sequence
  ENSG00000165934_93 (sequence is synthesized)
tgttgcccaggctacagtgcagtgatgagatcatagcccactgcagcctcaaactcctgggctcatgccattttcccctcagcttttggagttagctgggactacaggcatgcatcacca

SEQ ID NO: 527038 - DNA, 120 bp, Artificial Sequence
  ENSG00000165934_94 (sequence is synthesized)
tgtagaaacggggtctcttcttccccatttattcaatatttatatcagtatagaacatgggtccctgttttatcatctgtaagttatgatttattttgatgcccccattgtccaagattt

SEQ ID NO: 527039 - DNA, 120 bp, Artificial Sequence
  ENSG00000165934_95 (sequence is synthesized)
gactagcgagagcactttccagctagctcctgtgtcctttggacataccccatggttcattgagcacttccttgctttctggcaccacaagatgttccaggctcgtcttctattttccct

SEQ ID NO: 527040 - DNA, 120 bp, Artificial Sequence
  ENSG00000165934_96 (sequence is synthesized)
accccgctcctgacatcagccatttctccaaagagtcctggttcatattagtggagaatggtatttaaaaccaagatccggatgctaaaggctgtgctcattgcccctgtgctagcattg

SEQ ID NO: 527041 - DNA, 120 bp, Artificial Sequence
  ENSG00000165934_97 (sequence is synthesized)
ccactgtgcgttctcccagtggacaaatttggaaatatatgcgtctatgcttgttacctcatccatccatatatatattaaaaacaagtacacactgatacctatttcacatctactcca

SEQ ID NO: 527042 - DNA, 120 bp, Artificial Sequence
  ENSG00000165934_98 (sequence is synthesized)
cagagtttattctagtcttctccctttccacaattgtatcttctccaccctatatttaaaaactggacttccagagtctccaatacattggcttatttgttcattttccctgtgattaac

SEQ ID NO: 527043 - DNA, 120 bp, Artificial Sequence
  ENSG00000165934_99 (sequence is synthesized)
caacctcctgaccacgtggctggctcctttgctccatctctgcccctcaccccctaccgtacatcactgctgtgaggaccaagtttcctccctttcctcgatccatgacagcacctgcca

SEQ ID NO: 527044 - DNA, 120 bp, Artificial Sequence
  ENSG00000165934_100 (sequence is synthesized)
gttgaaccccacagtgggaattttaaagaaggcacttttggctcagatggcagtgccaaagcaggcattccaattcacatggtgctctagcaattgtgaaataaacagattctgaaggtc

SEQ ID NO: 527045 - DNA, 120 bp, Artificial Sequence
  ENSG00000165934_101 (sequence is synthesized)
gaactcctggcctcaagcagtcctcccacagtgctaggattataggtgtgagctactgtgcctggccaaccagtttgatttaaattaaacccattctagatgatgtgtgacagctcaatt

SEQ ID NO: 527046 - DNA, 120 bp, Artificial Sequence
  ENSG00000165934_102 (sequence is synthesized)
ttaaagatgatagagcaatttagagatgtgatgtatctcatatcccactgctttaaccccctaatattaacatattaacatttccttttgtcttttatttttttttagttgaggaaacgt

SEQ ID NO: 527047 - DNA, 120 bp, Artificial Sequence
  ENSG00000165934_103 (sequence is synthesized)
gaagggctgtggacggcgttgggggaggcctgacgaggcaagtgagggcgggagaaaggagcgagcctcgggctggggaaggcggcgtcattggccctccgggagcacggggccccgact

SEQ ID NO: 527048 - DNA, 120 bp, Artificial Sequence
  ENSG00000165935_0 (sequence is synthesized)
acctgccttggtgtttaccactcaaatggttcctctctgcctttggtgctgaggaaaggaggctctggcaccactggaacaggaaaacttgactgttgctagtctattccattgaactta

SEQ ID NO: 527049 - DNA, 120 bp, Artificial Sequence
  ENSG00000165935_1 (sequence is synthesized)
cagatatttgggattaccaaattgggaagagcaaagctatctccagtgccgaagaaatggctctcacgcccacaaacctaaataacaaaatgtctctgcagatgaagatggactgccagg

SEQ ID NO: 527050 - DNA, 120 bp, Artificial Sequence
  ENSG00000165935_2 (sequence is synthesized)
aacaacagctgactaagaaaaacaatggctttttccaaaagctcaatgtgactgaaggtgcaatgcaggatttgctaaaggaaattatcaaagtggaccacatcttagacagatcggatg

SEQ ID NO: 527051 - DNA, 120 bp, Artificial Sequence
  ENSG00000165935_3 (sequence is synthesized)
atgaggatgacatttcctccgaaaaccctcaaactgacttccttcacaagggtatgttggagctagaggctgagcatgaccaggacctgagtaaacaggataagcaagaaacagatgttg

SEQ ID NO: 527052 - DNA, 120 bp, Artificial Sequence
  ENSG00000165935_4 (sequence is synthesized)
atgaggaccctcaagcgtctacatctctgcagttttcaaagaagaacctccttgaactgtgtctgaagggcatgttcctcaagctaaactactggaacacaaagataggtctccaggtga

SEQ ID NO: 527053 - DNA, 120 bp, Artificial Sequence
  ENSG00000165935_5 (sequence is synthesized)
aaaacacagtgaagagcttattaaaagacatgctgaccctgaagggtcaaattgaaaagctggaggaccggggccttgaccttgatcaagggacaagcactgaggtgaatacttgtaatg

SEQ ID NO: 527054 - DNA, 120 bp, Artificial Sequence
  ENSG00000165935_6 (sequence is synthesized)
aagtttatgaattaaagaagaaagtcatagaaaggctggaggacctttgcaagaatgtggaactgctgagtgcaaagctaaggatgtatcaaatggaggcagaggacactgactctcaca

SEQ ID NO: 527055 - DNA, 120 bp, Artificial Sequence
  ENSG00000165935_7 (sequence is synthesized)
gttctgaggaaatagatacggaagagatggaggccctgcttcctcaggccccagcatcctttttagtgcagaagtctcctccccgcaatacagcatggaaacgtgcactgaggattttca

SEQ ID NO: 527056 - DNA, 120 bp, Artificial Sequence
  ENSG00000165935_8 (sequence is synthesized)
tgaggattttcatcatgtttgatgtcctcaccgtcactggacttttatgttacatactattttttggtgctacatttctctttgaaagggtgcttctgagaatgcttgggtgccgcacca

SEQ ID NO: 527057 - DNA, 120 bp, Artificial Sequence
  ENSG00000165935_9 (sequence is synthesized)
gggagatgagagagcctttcttgaatttggaagtggaagccttgttaccctcctaaagatacagaagttactgtcaccctactgactttctcaccagtaaacattgtggctgttcctgta

SEQ ID NO: 527058 - DNA, 120 bp, Artificial Sequence
  ENSG00000165935_10 (sequence is synthesized)
ccagatctttttgtggacagctcttttgcaaagccgtccggcctgaatattcagtctgacataatgacttacattcataaattctaaaatgttaaatatttaaaagaaatattttctcag

SEQ ID NO: 527059 - DNA, 120 bp, Artificial Sequence
  ENSG00000165935_11 (sequence is synthesized)
aaacataactatgtttcttcaacttgtgtcctggtagaagttttttaaggagcaaggaaggagtaatgaagagagaagcatgatttattattaactgctattgtgtaaatgcatacctct

SEQ ID NO: 527060 - DNA, 120 bp, Artificial Sequence
  ENSG00000165935_12 (sequence is synthesized)
aaagtattgaaaataatcttgttatgttaatcttatggttataccacttacagtctgcaatttatgattacactatgaatttgctctaagaggaagaagtttacaaagtaaaagtaaact

SEQ ID NO: 527061 - DNA, 120 bp, Artificial Sequence
  ENSG00000165935_13 (sequence is synthesized)
agacactgaaaaatgggtaagagagacacttaaatgacacagtaggttgaagagaagaacttcacgccgcatatcttaaagtggtaagaaaatatctgagggttttcttctaattggtgc

SEQ ID NO: 527062 - DNA, 120 bp, Artificial Sequence
  ENSG00000165935_14 (sequence is synthesized)
agaacttcaaagcttgaaatcaggagggaggcagggaatatggcattgttcccactggatgctgctgttaccacatgaaggacttactagccttcccatgcgaacaaaaaagaaaaaaaa

SEQ ID NO: 527063 - DNA, 120 bp, Artificial Sequence
  ENSG00000165943_0 (sequence is synthesized)
gcgcagcttccccgagcgagaccaaaacaggtggaatccgggctggagccggagctccggcggcgcgggtggcggcacgtccctccagacagtaccacaggcacctggagtaccggcatc

SEQ ID NO: 527064 - DNA, 120 bp, Artificial Sequence
  ENSG00000165943_1 (sequence is synthesized)
ggtcgctgtggcccccgagtgtccgtcagagcctaggggagcctgccctcccgcgcctcgtcggggcccggccaggcaccttggccgccggcgcacggacgcgggcacgagcactagatc

SEQ ID NO: 527065 - DNA, 120 bp, Artificial Sequence
  ENSG00000165943_2 (sequence is synthesized)
acggctgctggacctcggcacgttgacaagatttctctggggtaccgcggaggattactttgaatttcggtggtcgcctgtggtctggcatatttagaacttaagtctattatttcgggc

SEQ ID NO: 527066 - DNA, 120 bp, Artificial Sequence
  ENSG00000165943_3 (sequence is synthesized)
accatgactttgaggcttttagaagactggtgcagggggatggacatgaaccctcggaaagcgctattgattgccggcatctcccagagctgcagtgtggcagaaatcgaggaggctctg

SEQ ID NO: 527067 - DNA, 120 bp, Artificial Sequence
  ENSG00000165943_4 (sequence is synthesized)
caggctggtttagctcccttgggggagtacagactgcttggaaggatgttcaggagggatgagaacaggaaagtagccttagtagggcttactgcggagactagtcacgccctggtccct

SEQ ID NO: 527068 - DNA, 120 bp, Artificial Sequence
  ENSG00000165943_5 (sequence is synthesized)
aaggagataccgggaaaagggggtatctggagagtgatctttaagccccctgacccagataatacatttttaagcagattaaatgaatttttagcgggagagggcatgacagtgggtgag

SEQ ID NO: 527069 - DNA, 120 bp, Artificial Sequence
  ENSG00000165943_6 (sequence is synthesized)
ttgagcagagctcttggacatgaaaatggctccttagacccagagcagggcatgatcccggaaatgtgggcccctatgttggcacaggcattagaggctcttcagcctgccctgcaatgc

SEQ ID NO: 527070 - DNA, 120 bp, Artificial Sequence
  ENSG00000165943_7 (sequence is synthesized)
ttgaagtataaaaagctgagagtgttctcgggcagggagtctccagaaccaggagaagaagaatttggacgctggatgtttcatactactcagatgataaaggcgtggcaggtgccagat

SEQ ID NO: 527071 - DNA, 120 bp, Artificial Sequence
  ENSG00000165943_8 (sequence is synthesized)
gtagagaagagaaggcgattgctagagagccttcgaggcccagcacttgatgttattcgtgtcctcaagataaacaatcctttaattactgtcgatgaatgtctgcaggctcttgaggag

SEQ ID NO: 527072 - DNA, 120 bp, Artificial Sequence
  ENSG00000165943_9 (sequence is synthesized)
gtatttggggttacagataatcctagggagttgcaggtcaaatatctaaccacttaccagaaggatgaggaaaagttgtcggcttatgtactaaggctggagcctttgttacagaagctg

SEQ ID NO: 527073 - DNA, 120 bp, Artificial Sequence
  ENSG00000165943_10 (sequence is synthesized)
gaggagcaattgagagagatgctgtgaatcaggcccgcctagaccaagtcattgctggggcagtccacaaaacaattcgcagagagcttaatctgccagaggatggcccagcccctggtt

SEQ ID NO: 527074 - DNA, 120 bp, Artificial Sequence
  ENSG00000165943_11 (sequence is synthesized)
tcttgcagttattggtactaataaaggattatgaggcagctgaggaggaggaggcccttctccaggcaatattggaaggtaatttcacctgagtctcagggaaccacgaagggatatggc

SEQ ID NO: 527075 - DNA, 120 bp, Artificial Sequence
  ENSG00000165943_12 (sequence is synthesized)
aatgagtagagcatgaaggtagaacagtctatatactcttgtgacacatacaatccctaccttgtgctgccaagtaactcatttttgtgcaattctcagtataagccctttgtcgtttct

SEQ ID NO: 527076 - DNA, 120 bp, Artificial Sequence
  ENSG00000165943_13 (sequence is synthesized)
gtgcctatttaaagtctcctaaaggtgtaattgactaggaaggatgtagttctacactgccatttacctatttaaattcatccttgtgaatatctttgttgttgttgttgagacagagtc

SEQ ID NO: 527077 - DNA, 70 bp, Artificial Sequence
  ENSG00000165943_14 (sequence is synthesized)
tggcgtgatcttggctcactgcatcctccgccttccaggtttaagctattctcctgcctcagtttgcatt

SEQ ID NO: 527078 - DNA, 120 bp, Artificial Sequence
  ENSG00000165943_15 (sequence is synthesized)
tacaggcgtgagacactgcgcccagcctcatccctgtgaatttcttattgtacacaagttctttcactatctgtgtgcagtgctctgaggggacagacaaggcttgggtgtatatgccaa

SEQ ID NO: 527079 - DNA, 120 bp, Artificial Sequence
  ENSG00000165943_16 (sequence is synthesized)
ccaaccagatctcattgaagtatcagcttgtttggtactaggtgcaagtgtagcatgtcacatgtgaccatgttggatcattgacaatttttaggtatgtactgacctacatttatgatg

SEQ ID NO: 527080 - DNA, 120 bp, Artificial Sequence
  ENSG00000165943_17 (sequence is synthesized)
aagatcctgagcggaggttaagatattaagttattttccatatgaatcagaattatattgattctgtgcaatcaaaacaaaaggcagaatagaatgctgagattggttaagtttgcaatg

SEQ ID NO: 527081 - DNA, 120 bp, Artificial Sequence
  ENSG00000165943_18 (sequence is synthesized)
accatcttgaaccacagatttctgctatgtgtcatcaaaacatctagttctgagtaacattttcacgattgttataaaattataggtgtgaacttctaaaataaaggaatgctaataaaa

SEQ ID NO: 527082 - DNA, 120 bp, Artificial Sequence
  ENSG00000165943_19 (sequence is synthesized)
atgacgtcagatcgcccccgcccgccgcgcagcttccccgagcgagaccaaaacaggtggaatccgggctggagccggagctccggcggcgcgggtggcggcacgtccctccaggtgggt

SEQ ID NO: 527083 - DNA, 120 bp, Artificial Sequence
  ENSG00000165943_20 (sequence is synthesized)
ggctctctgggtctggcgactcagcgctcctcagccttgccccctggtgcccgctcgcgactgtcatcgccccatcacttctcgttgcagacagtaccacaggcacctggagtaccggca

SEQ ID NO: 527084 - DNA, 120 bp, Artificial Sequence
  ENSG00000165948_0 (sequence is synthesized)
gcttggggcgctggcacctcctcttacagctttactcctgccagcttgggaaaaggccggagaaggtgaaattctgtgtgctccctccggcgagagactttgtcagctcccgcacagtaa

SEQ ID NO: 527085 - DNA, 120 bp, Artificial Sequence
  ENSG00000165948_1 (sequence is synthesized)
cctttattcaaaccagatcctgaataaagtcaaaactcaaccaacaggtggaagtccaagaatccgagtggaggctcaccgaggcgaaggggccaaccatgggaaaggagagtggatggg

SEQ ID NO: 527086 - DNA, 120 bp, Artificial Sequence
  ENSG00000165948_2 (sequence is synthesized)
gccatgggcttcacctcagtaggaatcgccgcatcctccatagcagccaagatgatgtctacagcagccattgccaacgggggcggagttgctgctggcagtctggtggctattctgcag

SEQ ID NO: 527087 - DNA, 120 bp, Artificial Sequence
  ENSG00000165948_3 (sequence is synthesized)
tcagtgggggcagctggactctctgtgacatctaaagttatcgggggctttgctgggacagctcttggggcctggctgggttcacccccttccagctgaacaccacactgaggcagggag

SEQ ID NO: 527088 - DNA, 120 bp, Artificial Sequence
  ENSG00000165948_4 (sequence is synthesized)
ttggctctcttggtggagatgactttcctgggcctctggatgacaatcttccaaaggacaagtctcctactcccaaaactatttaaggaagcatgaaaaataaagatgctggttatcttc

SEQ ID NO: 527089 - DNA, 120 bp, Artificial Sequence
  ENSG00000165948_5 (sequence is synthesized)
gatcacagaggtccatctctgcccagggtgcacaatgttggggaagccagcccttaaccaatgatgtgaagggacttggggtaaattacagaaacgaccatattctccgccctttcagca

SEQ ID NO: 527090 - DNA, 120 bp, Artificial Sequence
  ENSG00000165948_6 (sequence is synthesized)
tggctgtacagctcctcccatcaagaggtaggaatttctttcccctccctttgaatctcctctggcctgcggagttgctctggcctggccgatagaacacagtggaagtgatggcgtgct

SEQ ID NO: 527091 - DNA, 120 bp, Artificial Sequence
  ENSG00000165948_7 (sequence is synthesized)
gctcaccgaggcgaaggggccaaccatgggaaaggagagtggatgggactcagcaggaaggcttttggcctgagctgctgagaggatggattccgggttcagcagtgacttgggccagag

SEQ ID NO: 527092 - DNA, 120 bp, Artificial Sequence
  ENSG00000165948_8 (sequence is synthesized)
cagaggcagagagacaagttaggaagctcctccagtcatcccactgagagacgcgggtggcttggtccgggactggagctgcagaagtatgagggatggtcagactggatatttctgaag

SEQ ID NO: 527093 - DNA, 120 bp, Artificial Sequence
  ENSG00000165948_9 (sequence is synthesized)
agctttactcctgccagcttgggaaaaggccggagaaggtgaaattctgtgtgctccctccggcgagagactttgtcagctcccgcacagtaactagcagaagcagagtcccaggatcca

SEQ ID NO: 527094 - DNA, 120 bp, Artificial Sequence
  ENSG00000165948_10 (sequence is synthesized)
tgttggctaggctggagtgcagtggttgggtcatggctcactgcagctgttactggatagaggtcccgatgcatatcctaagagaaggttcttggatatcatgcaagaaagaatttcagg

SEQ ID NO: 527095 - DNA, 120 bp, Artificial Sequence
  ENSG00000165948_11 (sequence is synthesized)
tgaatccataaagcaagagcaagtttattaacaaagtaagggaataaaagaatggccattccatagtcagaatagcagcttgagctgcttgaatgataatacttatagttatttcttgat

SEQ ID NO: 527096 - DNA, 120 bp, Artificial Sequence
  ENSG00000165948_12 (sequence is synthesized)
ggagaaggtgaaattctgtgtgctccctccggcgagagactttgtcagctcccgcacagtaacatcctgaataaagtcaaaactcaaccaacaggtggaagtccaagaatccgagtggag

SEQ ID NO: 527097 - DNA, 120 bp, Artificial Sequence
  ENSG00000165948_13 (sequence is synthesized)
gaaattctgtgtgctccctccggcgagagactttgtcagctcccgcacagtaactcttcctgtgtgaggtccaagcaccctctcttggagtctggattgggacccctttccagtaatata

SEQ ID NO: 527098 - DNA, 120 bp, Artificial Sequence
  ENSG00000165948_14 (sequence is synthesized)
ggtcggaggaggtgagtctctatgggaaggaactcaagcccccatcccccgcctccccccagccctgagcctctgggagaaactggctttgaccaaacccaggattctccaagacatagc

SEQ ID NO: 527099 - DNA, 120 bp, Artificial Sequence
  ENSG00000165948_15 (sequence is synthesized)
tcagcttccaccaagtacaaaccatgcaaccccggatgagtcattggagcagtcacagcccgggattcctccccgtctaaagcagggcccatggtatccttggggacttttgaagggagt

SEQ ID NO: 527100 - DNA, 120 bp, Artificial Sequence
  ENSG00000165948_16 (sequence is synthesized)
atgtcagctgagctgtgtctcattcctcaaaagtatttgacaaatgctggtagcccatccactgagtcagaagcttttgacctgctataaagcagtgtcctccaatgcaatggccaaaac

SEQ ID NO: 527101 - DNA, 120 bp, Artificial Sequence
  ENSG00000165948_17 (sequence is synthesized)
taaagaaaatcataatgtttctctgtcacctgcaccacatttcaagtgctaaacgtggctaccctagtagacagtacagaaaacaaatgtggctgtgattgcagatggctctctgactgc

SEQ ID NO: 527102 - DNA, 120 bp, Artificial Sequence
  ENSG00000165949_0 (sequence is synthesized)
ggcaggagctacccttcccgtggccccggaccttgggtgggctgtgggctcagggagcggaggggaggccttaagcatccactctctgcccggtgtttttgttctcatcagggagcctca

SEQ ID NO: 527103 - DNA, 120 bp, Artificial Sequence
  ENSG00000165949_1 (sequence is synthesized)
gatgggaagggactcgagccccacctgtccctggactctggaatgccacggaattaacccgagcaggcatggaggcctctgctctcacctcatcagcagtgaccagtgtggccaaagtgg

SEQ ID NO: 527104 - DNA, 120 bp, Artificial Sequence
  ENSG00000165949_2 (sequence is synthesized)
tcagggtggcctctggctctgccgtagttttgcccctggccaggattgctacagttgtgattggaggagttgtggccatggcggctgtgcccatggtgctcagtgccatgggcttcactg

SEQ ID NO: 527105 - DNA, 120 bp, Artificial Sequence
  ENSG00000165949_3 (sequence is synthesized)
ggaatcgcctcgtcctccatagcagccaagatgatgtccgcggcggccattgccaatgggggtggagttgcctcgggcagccttgtggctactctgcagtcactgggagcaactggactc

SEQ ID NO: 527106 - DNA, 120 bp, Artificial Sequence
  ENSG00000165949_4 (sequence is synthesized)
tccggattgaccaagttcatcctgggctccattgggtctgccattgcggctgtcattgcgaggttctactagctccctgcccctcgccctgcagagaagagaaccatgccaggggagaag

SEQ ID NO: 527107 - DNA, 120 bp, Artificial Sequence
  ENSG00000165949_5 (sequence is synthesized)
gcacccagccatcctgacccagcgaggagccaactatcccaaatatacctggggtgaaatataccaaattctgcatctccagaggaaaataagaaataaagatgaattgttgcaactctt

SEQ ID NO: 527108 - DNA, 120 bp, Artificial Sequence
  ENSG00000165949_6 (sequence is synthesized)
gggaacacatccaagcttaagacggtgaggtcagcttcacattctcaggaactctccttctttggggagcctcagatgggaagggactcgagccccacctgtccctggactctggaatgt

SEQ ID NO: 527109 - DNA, 120 bp, Artificial Sequence
  ENSG00000165949_7 (sequence is synthesized)
ttaagacggtgaggtcagcttcacattctcaggaactctccttctttgggtctggctgaagttgaggatctcttactctctaggccacggaattaacccgagcaggcatggaggcctctg

SEQ ID NO: 527110 - DNA, 120 bp, Artificial Sequence
  ENSG00000165949_8 (sequence is synthesized)
ctgtcttctcacagcaggcgtccaccctaactttccatctgggagggggcccggggcaggcagactctggccagatgcccagccctgggtgttccacaggtcctctcccctctgggcccg

SEQ ID NO: 527111 - DNA, 120 bp, Artificial Sequence
  ENSG00000165949_9 (sequence is synthesized)
ggcctcctcctgcctagccggaaagggtctatctaccactgagtcccactctcttcagctctcccttcccccagattcaccatcagaattcatctcctttaggagtttaccttgtcaata

SEQ ID NO: 527112 - DNA, 120 bp, Artificial Sequence
  ENSG00000165949_10 (sequence is synthesized)
gaggacaagtggctttcccaaggaaggtcctgctgcccagaagagcttggcccagagccctgtgcccagtgaccccactagcttttccctctactttccccgcctggctgtgctcccctt

SEQ ID NO: 527113 - DNA, 120 bp, Artificial Sequence
  ENSG00000165949_11 (sequence is synthesized)
gattcgtgcctattggccgtgcccatagtctctcccaagctcaaagttcacctctttctccagatcccctggggtccccaagcctgactcagtgtatctgggggggtcccttctgagccc

SEQ ID NO: 527114 - DNA, 120 bp, Artificial Sequence
  ENSG00000165949_12 (sequence is synthesized)
tctggggtgcagcctccttccctgaagagcgaggctgcttctagctctggagttcaccatgggggttcatgcctgcagcagcctctccccaaacaaagaccccgagggagcaactggact

SEQ ID NO: 527115 - DNA, 120 bp, Artificial Sequence
  ENSG00000165949_13 (sequence is synthesized)
caactcagtacagagaagtgtgatgagcaagcaagggcctgggccacgcccagcagtcctttctgtttgtcagaaatgcagatgacttctcagtttaagatcaagcaattcataaaatta

SEQ ID NO: 527116 - DNA, 120 bp, Artificial Sequence
  ENSG00000165949_14 (sequence is synthesized)
aaataataacagctcaacttaagcaagcgcttttatgttctagtcacttaccctagcacttgaggtttgtcaatttaattctcataacaaccccagaggaagataagaagataatatcgt

SEQ ID NO: 527117 - DNA, 120 bp, Artificial Sequence
  ENSG00000165949_15 (sequence is synthesized)
cccttatttaccaactgggacaatttactgttgtccaagtgctctgggcaggacagaagggtgtgggtgtgctgcttccaggcttggaacaggaggtagaacaatgaacaatgacagaaa

SEQ ID NO: 527118 - DNA, 120 bp, Artificial Sequence
  ENSG00000165949_16 (sequence is synthesized)
gaggtagaacaatgaacaatgacagaaagtattaataggccaggcacggtggctcacacctgcaatcccggcactttgggaggccaagaagggcggatcactcgaggtcaggagtttgag

SEQ ID NO: 527119 - DNA, 65 bp, Artificial Sequence
  ENSG00000165949_17 (sequence is synthesized)
caggagtttgagaccagcctggccaccacggtaaaaccctgtctctaccaaaaatacaaatcaga

SEQ ID NO: 527120 - DNA, 120 bp, Artificial Sequence
  ENSG00000165949_18 (sequence is synthesized)
ctgcactccaggctgggtgacagagctaagattctgtctcaaaaaaaaagaaagaaatattaatagaagtaggaaaaggttggagggaggtctcagggtagggcaggttctgaatggcac

SEQ ID NO: 527121 - DNA, 120 bp, Artificial Sequence
  ENSG00000165949_19 (sequence is synthesized)
tctgaatggcacgaaataatggccaggctactccgccgtatgaatgcccatcagctgagcctaacaggcaggcctccagacacaccgcagccagttcctgagggcttttgtgtgtcaggg

SEQ ID NO: 527122 - DNA, 120 bp, Artificial Sequence
  ENSG00000165949_20 (sequence is synthesized)
tgcaggtctgctgggctgccagccaacttgacatcacctctcttgcctgccaataaaactgaaccttctaacgaggttatccattcctgattccctgggctcataacccttctaggtggc

SEQ ID NO: 527123 - DNA, 120 bp, Artificial Sequence
  ENSG00000165949_21 (sequence is synthesized)
ctttctggtcactcaggggtgggccttcatacctgcgtctctttacttcctcccaccatcactctaaggcctctccctgggagctggctgagctcactcctgcacatttggctgtcttta

SEQ ID NO: 527124 - DNA, 120 bp, Artificial Sequence
  ENSG00000165949_22 (sequence is synthesized)
gaactcctggtcccaaattgcagttctggcccctctggctgctggggaacataacctctgcctgctccccaggggctcaccgtgtgggggagcaaatcatgtatatccagtgctgtgagt

SEQ ID NO: 527125 - DNA, 120 bp, Artificial Sequence
  ENSG00000165949_23 (sequence is synthesized)
aagaatctgggaaggcttcctggaggagggaacaatggcatggaccttgaagagtcagaagctttcaattcattccattcaagcattgctctcatgtggcattcaagcattctatagtgc

SEQ ID NO: 527126 - DNA, 120 bp, Artificial Sequence
  ENSG00000165949_24 (sequence is synthesized)
ttgccgtgactcaggcgcacagtgcaaaaggaagcacatctttctctgccatgaggacttattagtgtctgaagagctttttctggactataggagaaagtcatggtctccctcactaat

SEQ ID NO: 527127 - DNA, 120 bp, Artificial Sequence
  ENSG00000165949_25 (sequence is synthesized)
aaacactgaccctgcttcggatgagctaacagccctgctcagaaagcatgacacccatcctgttcacttttccctgccccggtcaaaccaccaagccctagatttcattgccaagtatcc

SEQ ID NO: 527128 - DNA, 120 bp, Artificial Sequence
  ENSG00000165949_26 (sequence is synthesized)
tgtatttactgggaatggacatcacagtagcatgccttcctagccacatctatgaggttttgttcattttcattctgctttttgtttgagctaaacctgccttgggaggcagaaaagaaa

SEQ ID NO: 527129 - DNA, 120 bp, Artificial Sequence
  ENSG00000165949_27 (sequence is synthesized)
agataacatctgattcccccgatcaaccaaccaatcaactaggtcagggccacgtaaattcattcaggacaagcactgaggtcaaactccccagtgatcctcaccctcctccagaatttc

SEQ ID NO: 527130 - DNA, 120 bp, Artificial Sequence
  ENSG00000165949_28 (sequence is synthesized)
cacttcccgaaatgaagcaaagagcggtagacaggagtcatcccttcttgtggctcccaacctggggcagccccctgcctccctttagatgggcaatcggcttagaaagtggaggggaag

SEQ ID NO: 527131 - DNA, 120 bp, Artificial Sequence
  ENSG00000165949_29 (sequence is synthesized)
gggggtaagagacagtgagtgcccaaacacagcgtcctgtacagacagcttgggcgttgttctcagggaagactgcgcctcgaagatccttggaggaaaccaaagtgggctcccagccag

SEQ ID NO: 527132 - DNA, 120 bp, Artificial Sequence
  ENSG00000165949_30 (sequence is synthesized)
gttcgctgcttctgtctctgtctctgtctcgttattctcaccgctccagccattaaggaagagcacaccggacccgaaggatgcagcatgtgacagaatctccttcctcgataaggctga

SEQ ID NO: 527133 - DNA, 120 bp, Artificial Sequence
  ENSG00000165949_31 (sequence is synthesized)
atagtgctgctatgtacgtgggggcagtgcttcagtcggggtggagctgcttaaaaggcctgggatcacaccctttgggaacacatccaagcttaagacggtgaggtcagcttcacattc

SEQ ID NO: 527134 - DNA, 120 bp, Artificial Sequence
  ENSG00000165953_0 (sequence is synthesized)
ctcccaggtgcctggcagagagtcctcaccagccccctgccggatgtctggctggcatctgaggggactgaacatggcaagaagcaaaacagcagcacaagaaaccagtttcttcatctg

SEQ ID NO: 527135 - DNA, 120 bp, Artificial Sequence
  ENSG00000165953_1 (sequence is synthesized)
aaaccgagcaggctctactccagaacagaacccacagtcccaggcgctgggccttcttcttaagttgggaaatcactcatccccaggagaaaaaaagagcaaaagcttccagtactgggg

SEQ ID NO: 527136 - DNA, 120 bp, Artificial Sequence
  ENSG00000165953_2 (sequence is synthesized)
atgtggggagaggttttttaaaaatatcagcccaacatatgggaaaatatgggatgcaggcatccccaggtgtcaagcgtccagatccgtagacacactgggacgatggtgatcagtatc

SEQ ID NO: 527137 - DNA, 120 bp, Artificial Sequence
  ENSG00000165953_3 (sequence is synthesized)
actccctctgactcatcggccctacagggaagacaccatgctggtgcacagtcggtgccaaacccgcgtttgtaaatgaataagtgttgctgccctggtggaagcccagctcatgtggag

SEQ ID NO: 527138 - DNA, 120 bp, Artificial Sequence
  ENSG00000165953_4 (sequence is synthesized)
gaagccagcttgcagagagagcaagaacagagccagcacacacattggagcaaaggcaagggcagatggaaagttctggcggcatcatgccaaggctcccatccgaggcctccctgaacc

SEQ ID NO: 527139 - DNA, 120 bp, Artificial Sequence
  ENSG00000165953_5 (sequence is synthesized)
ccactctctcggcgccaccttggatgctgcgggctggtacattccccacttgcaaaactctgtggggctgggttcctctcttttctttccaaatatcccaggaagtggatggttttatcc

SEQ ID NO: 527140 - DNA, 120 bp, Artificial Sequence
  ENSG00000165953_6 (sequence is synthesized)
aaattcagcagacgagtaaaaagagtcttcgggaggtgcaatagctttctaggaatgaggatattcttcaaggaaaatgaaccccacactaggcctggccatttttctggctgttctcct

SEQ ID NO: 527141 - DNA, 120 bp, Artificial Sequence
  ENSG00000165953_7 (sequence is synthesized)
cacggtgaaaggtcttctaaagccgagcttctcaccaaggaattataaagctttgagcgaggtccaaggatggaagcaaaggatggcagccaaggagcttgcaaggcagaacatggactt

SEQ ID NO: 527142 - DNA, 120 bp, Artificial Sequence
  ENSG00000165953_8 (sequence is synthesized)
gctggccttttacaaccctggcaggaacatcttcctatcccccttgagcatctctacagctttctccatgctgtgcctgggtgcccaggacagcaccctggacgagatcaagcaggggtt

SEQ ID NO: 527143 - DNA, 120 bp, Artificial Sequence
  ENSG00000165953_9 (sequence is synthesized)
caacttcagaaagatgccagaaaaagatcttcatgagggcttccattacatcatccacgagctgacccagaagacccaggacctcaaactgagcattgggaacacgctgttcattgacca

SEQ ID NO: 527144 - DNA, 120 bp, Artificial Sequence
  ENSG00000165953_10 (sequence is synthesized)
gaggctgcagccacagcgtaagtttttggaagatgccaagaacttttacagtgccgaaaccatccttaccaactttcagaatttggaaatggctcagaagcagatcaatgactttatcag

SEQ ID NO: 527145 - DNA, 120 bp, Artificial Sequence
  ENSG00000165953_11 (sequence is synthesized)
tcaaaaaacccatgggaaaattaacaacctgatcgagaatatagaccccggcactgtgatgcttcttgcaaattatattttctttcgagccaggtggaaacatgagtttgatccaaatgt

SEQ ID NO: 527146 - DNA, 120 bp, Artificial Sequence
  ENSG00000165953_12 (sequence is synthesized)
aactaaagaggaagatttctttctggagaaaaacagttcagtcaaggtgcccatgatgttccgtagtggcatataccaagttggctatgacgataagctctcttgcaccatcctggaaat

SEQ ID NO: 527147 - DNA, 120 bp, Artificial Sequence
  ENSG00000165953_13 (sequence is synthesized)
accctaccagaaaaatatcacagccatcttcatccttcctgatgagggcaagctgaagcacttggagaagggattgcaggtggacactttctccagatggaaaacattactgtcacgcag

SEQ ID NO: 527148 - DNA, 120 bp, Artificial Sequence
  ENSG00000165953_14 (sequence is synthesized)
ggtcgtagacgtgtctgtacccagactccacatgacgggcaccttcgacctgaagaagactctctcctacataggtgtctccaaaatctttgaggaacatggtgatctcaccaagatcgc

SEQ ID NO: 527149 - DNA, 120 bp, Artificial Sequence
  ENSG00000165953_15 (sequence is synthesized)
ccctcatcgcagcctgaaagtgggcgaggctgtgcacaaggctgagctgaagatggatgagaggggtacggaaggggccgctggcaccggagcacagactctgcccatggagacaccact

SEQ ID NO: 527150 - DNA, 120 bp, Artificial Sequence
  ENSG00000165953_16 (sequence is synthesized)
cgtcgtcaagatagacaaaccctatctgctgctgatttacagcgagaaaataccttccgtgctcttcctgggaaagattgttaaccctattggaaaataaaggagaattcctgcttgcca

SEQ ID NO: 527151 - DNA, 120 bp, Artificial Sequence
  ENSG00000165953_17 (sequence is synthesized)
ggccttactcttccaagaggccatggaagtataaataataaagcaagaaaggcagatgcatttggctggctcagtggacttctgaatgtactgtgagtatgagaccttcccttccaaaag

SEQ ID NO: 527152 - DNA, 120 bp, Artificial Sequence
  ENSG00000165953_18 (sequence is synthesized)
atccggtgcttcttgtctattccacacgaagcttgcttcagatcgagggaggatgtagcactgtccacaggtctactactcaacaggatattcttcaaggaaaatgaaccccacactagg

SEQ ID NO: 527153 - DNA, 120 bp, Artificial Sequence
  ENSG00000165959_0 (sequence is synthesized)
ctcgcgcgcccgccagccaggctctccgcgcccgccgcccgcgccgcgctggcccgggctctcccgcccgcgcttcatggctgcacacgagtgggactggttccaacgcgaggagctcat

SEQ ID NO: 527154 - DNA, 120 bp, Artificial Sequence
  ENSG00000165959_1 (sequence is synthesized)
ctgcacacgagtgggactggttccaacgcgaggagctcatcgggcagattagcgacatccgagtgcagaacctgcaagttgagagggaaaatgtgcagaagaggacctttacacgatgga

SEQ ID NO: 527155 - DNA, 120 bp, Artificial Sequence
  ENSG00000165959_2 (sequence is synthesized)
taaatctacatctagaaaagtgcaacccacctctagaagttaaagatttattcgtcgatatacaagatggcaaaatcctaatggctttgttagaagtcctgtctgggcggaatctgctgc

SEQ ID NO: 527156 - DNA, 120 bp, Artificial Sequence
  ENSG00000165959_3 (sequence is synthesized)
acgaatacaaatcctcgtcgcatcgtatttttcggttgaacaacatagcgaaagcacttaagtttttggaagatagcaatgtaaaactggttagcattgatgcagcagaaatagcagatg

SEQ ID NO: 527157 - DNA, 120 bp, Artificial Sequence
  ENSG00000165959_4 (sequence is synthesized)
gcaacccttctttggttcttgggctgatatggaacataatcctcttcttccagattaaggagctcacaggcaacctcagcagaaactctccatcttccagcttgtcccctggctcagggg

SEQ ID NO: 527158 - DNA, 120 bp, Artificial Sequence
  ENSG00000165959_5 (sequence is synthesized)
gcacagactcagactcatccttcccacccacacccactgcagagaggagcgtggcaatatcggtgaaagaccagaggaaggctatcaaggccctgttggcgtgggtgcagaggaaaacga

SEQ ID NO: 527159 - DNA, 120 bp, Artificial Sequence
  ENSG00000165959_6 (sequence is synthesized)
gaaagtatggcgtggcggtgcaggactttgcgggcagttggaggagtgggctggctttcctggcggtgatcaaggccattgaccccagcctggtggacatgaaacaggccctggaaaatt

SEQ ID NO: 527160 - DNA, 120 bp, Artificial Sequence
  ENSG00000165959_7 (sequence is synthesized)
ccacacgagaaaatctagagaaggctttcagcatcgcacaggatgccctgcacatccccaggctcctggagccagaagacatcatggttgacacaccagacgagcagtctatcatgactt

SEQ ID NO: 527161 - DNA, 120 bp, Artificial Sequence
  ENSG00000165959_8 (sequence is synthesized)
acgtggcacagtttctagaacgttttccggagttggaagccgaagatattttcgattcagataaagaagttcctatcgaatccacttttgttcgcatcaaagaaactccttctgaacagg

SEQ ID NO: 527162 - DNA, 120 bp, Artificial Sequence
  ENSG00000165959_9 (sequence is synthesized)
agagcaaagtcttcgttctgactgaaaatggggagcgtacctacactgttaaccatgaaaccagccacccaccaccctccaaagtctttgtctgtgacaagcccgagagcatgaaggaat

SEQ ID NO: 527163 - DNA, 120 bp, Artificial Sequence
  ENSG00000165959_10 (sequence is synthesized)
tccgcctggatggtgtttccagccatgcgctgtcagacagctccaccgagttcatgcaccagattattgaccaggtcctgcaagggggcccaggtaagaccagcgacatcagtgagccat

SEQ ID NO: 527164 - DNA, 120 bp, Artificial Sequence
  ENSG00000165959_11 (sequence is synthesized)
ctccagaatcctccattttatcatccagaaaggagaacgggaggtccaactctttgccgatcaagaaaacagttcactttgaggctgacacctacaaggatcctttctgcagtaagaacc

SEQ ID NO: 527165 - DNA, 120 bp, Artificial Sequence
  ENSG00000165959_12 (sequence is synthesized)
tgtccctttgctttgaagggagcccaagagtggcaaaggaatcattgaggcaggatggacatgtcttggcagttgaggttgctgaggaaaaggaacagaaacaggaatcctcgaagattc

SEQ ID NO: 527166 - DNA, 120 bp, Artificial Sequence
  ENSG00000165959_13 (sequence is synthesized)
cagaatcctcctctgacaaggtcgctggtgacatttttttggtggagggcacaaacaataattctcagtcttcttcctgtaatggtgctttagagagtacagcccgccacgatgaagaaa

SEQ ID NO: 527167 - DNA, 120 bp, Artificial Sequence
  ENSG00000165959_14 (sequence is synthesized)
gtcactctctttcacccccaggagaaaatactgtgatggccgattccttccagatcaaggttaacctgatgactgtagaagctttagaggagggagactattttgaagccatcccattaa

SEQ ID NO: 527168 - DNA, 120 bp, Artificial Sequence
  ENSG00000165959_15 (sequence is synthesized)
aagcctcaaaatttaacagcgacctaatagattttgcttctaccagccaggctttcaacaaagttccttcacctcatgagacaaaacctgacgaggatgctgaggcttttgagaatcatg

SEQ ID NO: 527169 - DNA, 120 bp, Artificial Sequence
  ENSG00000165959_16 (sequence is synthesized)
ctgaaaaactaggtaaaaggagtattaaatctgctcacaaaaagaaggattcgccagagcctcaagttaagatggacaaacatgaacctcatcaggactccggagaagaagctgaaggct

SEQ ID NO: 527170 - DNA, 120 bp, Artificial Sequence
  ENSG00000165959_17 (sequence is synthesized)
gtccttcagccccagaagagacaccagtggataaaaagccagaggtgcatgaaaaggccaagagaaagtccacccgtcctcattatgaggaagagggagaagacgatgacctccagggtg

SEQ ID NO: 527171 - DNA, 120 bp, Artificial Sequence
  ENSG00000165959_18 (sequence is synthesized)
tgggcgaggaattatcttccagccccccaagcagctgtgtcagcttggagacccttgggagtcacagcgaagaaggcctggatttcaagccctccccacccctctcaaaggtttccgtca

SEQ ID NO: 527172 - DNA, 120 bp, Artificial Sequence
  ENSG00000165959_19 (sequence is synthesized)
ttccccacgacctcttctatttcccacactatgaggttcccctggctgcagttttggaggcttatgtagaagacccggaggatctaaaaaatgaagaaatggatctcgaagagccagagg

SEQ ID NO: 527173 - DNA, 120 bp, Artificial Sequence
  ENSG00000165959_20 (sequence is synthesized)
gctatatgccagacctggactccagggaggaggaggccgatggctctcagagcagctccagttcctcggtgccaggagagagcctccccagtgccagcgaccaggtgctgtatctcagca

SEQ ID NO: 527174 - DNA, 120 bp, Artificial Sequence
  ENSG00000165959_21 (sequence is synthesized)
ggggtggtgtgggtaccacaccagcctcagaacccgctccactggccccccatgaggaccaccagcaaagggagaccaaagagaatgaccccatggacagccatcagtcccaggaatccc

SEQ ID NO: 527175 - DNA, 120 bp, Artificial Sequence
  ENSG00000165959_22 (sequence is synthesized)
caaacctggaaaacatagcaaaccccctagaagaaaatgtaacgaaagaatcaatcagtagtaaaaaaaaggaaaaaaggaaacatgtggaccacgtagaaagttcactatttgtagcac

SEQ ID NO: 527176 - DNA, 120 bp, Artificial Sequence
  ENSG00000165959_23 (sequence is synthesized)
caggaagtgttcaatcctcagatgacctagaagaagacagtagcgactacagcattccttccaggactagtcacagtgactccagcatttaccttcgacgacatactcataggtcttcgg

SEQ ID NO: 527177 - DNA, 120 bp, Artificial Sequence
  ENSG00000165959_24 (sequence is synthesized)
aatcggatcattttagctatgttcagttgaggaacgcagcagatctggatgacagaagaaaccgaatattaaccaggaaggccaacagctcaggagaagccatgtcactggggagccaca

SEQ ID NO: 527178 - DNA, 120 bp, Artificial Sequence
  ENSG00000165959_25 (sequence is synthesized)
gcccgcagagtgactccctgacacagcttgtccagcagccggatatgatgtattttattctcttcctgtggctcctggtgtactgcttgctgctcttcccacaactggatgttagcaggc

SEQ ID NO: 527179 - DNA, 120 bp, Artificial Sequence
  ENSG00000165959_26 (sequence is synthesized)
tctgatacgtgtgtctggataataaaaaagacaggaccctgaccaggggcggggttacttcattttattttgggttctgggtggggcacttctacagacagttgaggacctccgaggaaa

SEQ ID NO: 527180 - DNA, 120 bp, Artificial Sequence
  ENSG00000165959_27 (sequence is synthesized)
cttagaccccctttctcgctattgtggtttttttttttttttcaggtttccttttttttctggacaacctgagcatgcttttttctttggctgtgtactcaaaactcaggcatgcagctg

SEQ ID NO: 527181 - DNA, 120 bp, Artificial Sequence
  ENSG00000165959_28 (sequence is synthesized)
gatccgtaggtggggttttgtccttgtgtgccttgctgggttggatagggagcattgttagtgatcattagcccgcctggatcttagcacaccccacattgcaggttcacacgctggatg

SEQ ID NO: 527182 - DNA, 120 bp, Artificial Sequence
  ENSG00000165959_29 (sequence is synthesized)
aacttgagtttcttacctctcagatgaagggctgcttaatgagaaagagggtgggcaccccaggccaagccccagctggggagagagctgccacgttttcctccaagcgtgggtgtttga

SEQ ID NO: 527183 - DNA, 120 bp, Artificial Sequence
  ENSG00000165959_30 (sequence is synthesized)
gagaaggtgctggggtccatgcacctgtcgcagtccggtaactggttgcattcactaggggaaatccgagcagccagctctgtgtaagcacatccaggaatggcagaatccagggaggaa

SEQ ID NO: 527184 - DNA, 83 bp, Artificial Sequence
  ENSG00000165959_31 (sequence is synthesized)
tgtgtaagcacatccaggaatggcagaatccagggaggaaggtgaaagctgtgttgagagccactgtgtgctctttttcaccc

SEQ ID NO: 527185 - DNA, 120 bp, Artificial Sequence
  ENSG00000165959_32 (sequence is synthesized)
gattgagatagaaccatgattttcaaaccagatcgccagggcccagcagggccatataaaagccatgaggagtggctgggctggaatcagctcccagcagtgctggagctgggtggtggg

SEQ ID NO: 527186 - DNA, 120 bp, Artificial Sequence
  ENSG00000165959_33 (sequence is synthesized)
gtagcttcctgcccactaaagctttggtgcacacctccctcagaatgcatgtcttggaacgggcattctttgtggtcacttgtaatgggtttcttgaagaggctttctggacagcactcc

SEQ ID NO: 527187 - DNA, 120 bp, Artificial Sequence
  ENSG00000165959_34 (sequence is synthesized)
gggagcaggccagcacaggaggtttgtgaaagaagagaggcatctctagcacccctgcccccagtcttcctcagccccaggctccctctgctctctcctccctgccaagactcaggtccg

SEQ ID NO: 527188 - DNA, 120 bp, Artificial Sequence
  ENSG00000165959_35 (sequence is synthesized)
tggtgagtctctgcattggttcctcctccccttgctctccccttcagaaagcatgtaccaggcaacccttataaaatcacaaatgagtcaggaggggactcagtgagcatcttgtctagc

SEQ ID NO: 527189 - DNA, 120 bp, Artificial Sequence
  ENSG00000165959_36 (sequence is synthesized)
tggacccagagagacagagcagcttgaccaagatcatatagccgaccaggggcagacttgcagtgagcacacaggcacctgatgccctgtccagagctgtcaccccttgtaggaaacttc

SEQ ID NO: 527190 - DNA, 120 bp, Artificial Sequence
  ENSG00000165959_37 (sequence is synthesized)
cactgggcacaccaatgtcctgagaaaaagataaaatgactagattaaaatgtccacattcaagcaaaaccaaaaagtttagaccaactatcgacatttgttttgttcttgtatttttcc

SEQ ID NO: 527191 - DNA, 120 bp, Artificial Sequence
  ENSG00000165959_38 (sequence is synthesized)
catgaggaattcttactcaccttcaagctcatccccaattccttctgaaatacccttgacagctgcaacagcttgtcatttgacataccagcgtcgctcttactccaggaatcacgtttc

SEQ ID NO: 527192 - DNA, 120 bp, Artificial Sequence
  ENSG00000165959_39 (sequence is synthesized)
tttctttgctagccaaggacttgctcatttcaagcagtgggtttcaagtttacagaattccagcatggccagaagaatttacatagcacatctgagtcgatgacagccaaaatctggcct

SEQ ID NO: 527193 - DNA, 120 bp, Artificial Sequence
  ENSG00000165959_40 (sequence is synthesized)
ctaaaccagtctgattatagtctgtctcccctcctgaaagaatttcagccttccaaccagaaagctgctgggagcttggagtgattccatctggaaggccaagagccccatggaaaatga

SEQ ID NO: 527194 - DNA, 120 bp, Artificial Sequence
  ENSG00000165959_41 (sequence is synthesized)
gctaattaatgagctccctggcatcaatgaaagctcaaaggtacagataataaagattatgtgatagtttataactctgggcaccatgcagtccttgcctaaattagatgctcgaagagc

SEQ ID NO: 527195 - DNA, 120 bp, Artificial Sequence
  ENSG00000165959_42 (sequence is synthesized)
ctgggaagagccaacccaaatgtgaatcatttcattttatgggtctagaccttgttcagaaaaacctctgcaagatacttctctcacctattacaacttgtaatattgtttaaaacatct

SEQ ID NO: 527196 - DNA, 120 bp, Artificial Sequence
  ENSG00000165959_43 (sequence is synthesized)
actggcaagatgcctgaaagtcatttggttcaggttggcagtcaactgatattttgcaaaggaaaaaaaaatctcatttgagtataggcttctatggaagaagctggatatagaaaatgg

SEQ ID NO: 527197 - DNA, 120 bp, Artificial Sequence
  ENSG00000165959_44 (sequence is synthesized)
atgtggaagtctgcaggacaaaccaccccattgcttgtaaattttttttaaattaaaagaaatacaataaggcttttaacaagaactagcagtcccctaagtctcgctgcttagaagtaa

SEQ ID NO: 527198 - DNA, 120 bp, Artificial Sequence
  ENSG00000165959_45 (sequence is synthesized)
ccactttcaactctcttatgtttgcatttctacataacgtgcttacactttattttttaatttagaaacatctactggcttgctgtcacagtagaggaggatttcactcttaccataccg

SEQ ID NO: 527199 - DNA, 120 bp, Artificial Sequence
  ENSG00000165959_46 (sequence is synthesized)
tgctttggttttccagtatagctagatcacatcatttagtacatttctattaggtgttgacattacctggagcacttaaggattgttgactcccaagcccagcagtgtgttatggttaca

SEQ ID NO: 527200 - DNA, 120 bp, Artificial Sequence
  ENSG00000165959_47 (sequence is synthesized)
tgtcctttctcctccaaatgtccccattaatttgctattctctctctttactttttttttttttttggtgtggcacattctttaataacttcctgaggaagagaacatgggaagtaaata

SEQ ID NO: 527201 - DNA, 120 bp, Artificial Sequence
  ENSG00000165959_48 (sequence is synthesized)
tggttgtaaatattttgagatttttgcatgacttaagatgtctgtattctgcccttaacagaaatgtggctgagcatagaatgacaggtggaaaataataccctcccctagcccctccca

SEQ ID NO: 527202 - DNA, 120 bp, Artificial Sequence
  ENSG00000165959_49 (sequence is synthesized)
agcgtgctggttgagatttctgatgccattctgattcccgtacctttatatgtgacttaggtttttttatccacccttcctggaaacatttaagatctctttattcttggtgttctgaac

SEQ ID NO: 527203 - DNA, 120 bp, Artificial Sequence
  ENSG00000165959_50 (sequence is synthesized)
tgtcatgatggtgttgtatcccgggtgttaaaccttgtgctgggccttcatgggaaatttcttaaattttcttgtgattatttacattctttctttctggaccacctattatttcaatgt

SEQ ID NO: 527204 - DNA, 120 bp, Artificial Sequence
  ENSG00000165959_51 (sequence is synthesized)
tggaccctcccctacacccaggctgatgctctaatattttttatcttttctatttttcgtctatgtttctgatctgctttcaggaagaattattcatttttatcttcccaatctgaatgt

SEQ ID NO: 527205 - DNA, 120 bp, Artificial Sequence
  ENSG00000165959_52 (sequence is synthesized)
tttattgaatttttattttccaagttaataaaacctttggttattatcctgtctttgttttacagtgtcctgctcttgatgcgtggatgcagattttgtctctctgtggacgttaatgat

SEQ ID NO: 527206 - DNA, 120 bp, Artificial Sequence
  ENSG00000165959_53 (sequence is synthesized)
cctgtgttgccctcattttctctgagttctctttattttggtggtctcagtctctatctttcacgttgtgaatttttctcaaatatatggtgatcctatggatctgttcatgttttaaga

SEQ ID NO: 527207 - DNA, 120 bp, Artificial Sequence
  ENSG00000165959_54 (sequence is synthesized)
gtgaggcatccaaaagctgattggaagttgtgtgtgccaactggtgagcttttccactagggtcaccaggtgggcacctggactcatcattggagaacactgcctgtcagtatttgcacg

SEQ ID NO: 527208 - DNA, 120 bp, Artificial Sequence
  ENSG00000165959_55 (sequence is synthesized)
tgttttctctggggctcattctgtttcttgagagatattcccactactctccttcctgggaaacgggcatacacagggcttttagcctatgctgagtactcatgtggtttcaaaaatggt

SEQ ID NO: 527209 - DNA, 120 bp, Artificial Sequence
  ENSG00000165959_56 (sequence is synthesized)
gtcccatctgggcagaagtccccatgagcacttggcttgactggcaaaggacaccttttgccccttcctccagacatacccagctctgagcttggacaatgctcgaggaacaatgaaaag

SEQ ID NO: 527210 - DNA, 120 bp, Artificial Sequence
  ENSG00000165959_57 (sequence is synthesized)
gctagattttaactcctaattgccctctttagccaagtgcctctgtgcaatgcacaactgtaggaccatatccagagaccctggtctatactcagtgtgcccgagtcctgaccgctgagc

SEQ ID NO: 527211 - DNA, 120 bp, Artificial Sequence
  ENSG00000165959_58 (sequence is synthesized)
aggcagcctcatcacccgtgagtatttagactttcattaagttgcttcaacctttgctgtgcctggtgtccctgagttggagctgctctgatttctccatggagtaggagcacagtggtc

SEQ ID NO: 527212 - DNA, 120 bp, Artificial Sequence
  ENSG00000165959_59 (sequence is synthesized)
atctggctgcatgggaaggacaggggacctcagagccaataaatgccctggtcttcagccccatgtctcaccccatccctcctattccaatccccaagcctctcctggaggccacagggc

SEQ ID NO: 527213 - DNA, 120 bp, Artificial Sequence
  ENSG00000165959_60 (sequence is synthesized)
atctctgctgaccactctgtggcctcccctctgcaggcatgtggttttaggatccccctccctgctcacttttccatcagttccattcctgcataaataggttgctagctcttgcttact

SEQ ID NO: 527214 - DNA, 120 bp, Artificial Sequence
  ENSG00000165959_61 (sequence is synthesized)
gttctcttctgtattctgtgttcatggttgtattaatataactttcattcctctgctcctattttcatggggtttcatgagggaagaaacaggctcatgtgttcagtataccatcttgat

SEQ ID NO: 527215 - DNA, 120 bp, Artificial Sequence
  ENSG00000165959_62 (sequence is synthesized)
ccataaaccccatttgagttatctcacaggttgcttagggggcttgctgctctgactggtttgtgaacgtgccctgagtccagctgggactgcagcaacatccatcctgttgagctgtgg

SEQ ID NO: 527216 - DNA, 120 bp, Artificial Sequence
  ENSG00000165959_63 (sequence is synthesized)
tctgctaagtgattttgtgtaatgctgtgccaagtgcaggagagggatacatagcatggctaagctctgcttgaatgccatgattagttattaccttccttccttccccctggttttgct

SEQ ID NO: 527217 - DNA, 120 bp, Artificial Sequence
  ENSG00000165959_64 (sequence is synthesized)
gcctattgtcagtaaatgatcttagatctcctgcctccccaaagatatagtctatgtggtggtctgggttctaggttttctttaccacccttgcttcacttaagaaacagaaaactggct

SEQ ID NO: 527218 - DNA, 65 bp, Artificial Sequence
  ENSG00000165959_65 (sequence is synthesized)
tttaccacccttgcttcacttaagaaacagaaaactggctaggcacagtagtggctcacaattca

SEQ ID NO: 527219 - DNA, 87 bp, Artificial Sequence
  ENSG00000165959_66 (sequence is synthesized)
tttgagcccatgactttgaggttactgtgagctatgatcctgctattttactccacctgagtgacagagcgagacgctgtctcaaaa

SEQ ID NO: 527220 - DNA, 120 bp, Artificial Sequence
  ENSG00000165959_67 (sequence is synthesized)
ttactccacctgagtgacagagcgagacgctgtctcaaaaataaagaaacaagtagtccacacaggtgtttgccagcaaacaaacagcgcggattctctgttgaacgtggccaacattgc

SEQ ID NO: 527221 - DNA, 120 bp, Artificial Sequence
  ENSG00000165959_68 (sequence is synthesized)
ctcgtcgaagtttgtatcttgccatagttgatgatcaggtggtcggggcttcctggtcagacctgacctttgtggggagatgttctcccaccaaggctcagaagcaggacactcttgctg

SEQ ID NO: 527222 - DNA, 120 bp, Artificial Sequence
  ENSG00000165959_69 (sequence is synthesized)
cccctcgggcagccacccagaacatgggcgtctccatttctgaggttcagcatagttccccccaccctcttcccatgcagtgcatgcctgctctttatcaggatggaacagagggaaggc

SEQ ID NO: 527223 - DNA, 120 bp, Artificial Sequence
  ENSG00000165959_70 (sequence is synthesized)
agaggcactgggggcagcctgtgttgttgatctctgtaagtcacagactgttcgaaaacctcaggaattatgtaagcgttcagtgcctcatttaagagatgaaaaactgaagattagaaa

SEQ ID NO: 527224 - DNA, 120 bp, Artificial Sequence
  ENSG00000165959_71 (sequence is synthesized)
gaggaaacgactagtcgccctgctagttgatgacctccagatagccatcttcattcccagttaagtttactacaaaaccacagcctcagctgctgaagctaacctccctacccaccatcg

SEQ ID NO: 527225 - DNA, 120 bp, Artificial Sequence
  ENSG00000165959_72 (sequence is synthesized)
ctagggactcagaacaccatggagctcatctctccaacaaaagtcagaattagcaagtacagatgtgtcttacgaaaatgtcagaatccatcatggctgctttggtgaggagctgttctc

SEQ ID NO: 527226 - DNA, 120 bp, Artificial Sequence
  ENSG00000165959_73 (sequence is synthesized)
cttccgtggtcatgccattggaaggcagttgtatgacaagaatgctttcacatgagctccgattttcttaactctccagaaggacttcagaagcctctggagttttgagacacggcctct

SEQ ID NO: 527227 - DNA, 120 bp, Artificial Sequence
  ENSG00000165959_74 (sequence is synthesized)
ctctcccttctgcttggagacaccttcctgggggtctccactgcattccccgccggtattcctctgtggagccttgcgccctcaggtcccagaaatgggctgtgtgggagcttccagtca

SEQ ID NO: 527228 - DNA, 120 bp, Artificial Sequence
  ENSG00000165959_75 (sequence is synthesized)
gcctggtatctcgggaccttctcagccaggaaatgagactgcacaaagccctgtgaggcccagctgtgttatttctccttccccgacattgcataatcactgctgacacagcatttgggg

SEQ ID NO: 527229 - DNA, 120 bp, Artificial Sequence
  ENSG00000165959_76 (sequence is synthesized)
aagatttaacgtcttgggccagcagctgccatctggaaccatcaccacatagcaggttgttctgtcccatccaactgatgagggggctgccctaatgacaaggtccaggacctgggttgg

SEQ ID NO: 527230 - DNA, 120 bp, Artificial Sequence
  ENSG00000165959_77 (sequence is synthesized)
gtggtggaaggctgggagctggagtgggcattattgtgcttctgtgctgaaaattgctatggctcttttcccctaacagccagcgtgggagaaccaaacatgagacacaagcatcccctt

SEQ ID NO: 527231 - DNA, 120 bp, Artificial Sequence
  ENSG00000165959_78 (sequence is synthesized)
gagctccacagatcttgcgccttgctctcatcaggcatttccttggaaaacagcagtcagcagctcatggaagtgagcccggtgcacagactttgcatggactttgcacaggttccattt

SEQ ID NO: 527232 - DNA, 120 bp, Artificial Sequence
  ENSG00000165959_79 (sequence is synthesized)
ccatcgtgtgcagacacctgtatctttgggctccacgtgagcacctgccctcttcactctgattttttttttaagagacagcatcttactctgtcaccgaggctggagtacagtggtgtg

SEQ ID NO: 527233 - DNA, 87 bp, Artificial Sequence
  ENSG00000165959_80 (sequence is synthesized)
gtacaggtgcatgccaccacgcccacctaatttttttatcttttatagatacaggtctcactgttgctcaggctggtctcgaactcc

SEQ ID NO: 527234 - DNA, 90 bp, Artificial Sequence
  ENSG00000165959_81 (sequence is synthesized)
accaaaatgctgggattataggcatgaaccactgtgcctggccttcactctgatttttcttaagagtcctacaggaccttcaggtcttgt

SEQ ID NO: 527235 - DNA, 120 bp, Artificial Sequence
  ENSG00000165959_82 (sequence is synthesized)
tgatttttcttaagagtcctacaggaccttcaggtcttgtcacttctctaccattgtgtgtgagacagggcatggggtgagcttggtcaggtgtgggtcaaaagcctggagactcagagc

SEQ ID NO: 527236 - DNA, 120 bp, Artificial Sequence
  ENSG00000165959_83 (sequence is synthesized)
tgctggttccccaagagcccacaaaagttatcagagtttctgagctgagtgttctgcagttgccagaccccacaatgctgggaatactggcttctttgtgtttagaacttgttctgagaa

SEQ ID NO: 527237 - DNA, 120 bp, Artificial Sequence
  ENSG00000165959_84 (sequence is synthesized)
ccttgatgagaacacatcaagcaagcagttcctcccagccagggctggagcaacatgccaaaaaacattcttgtctatgggaaaaagacaaccagtattttgtactgtttgaccaagttg

SEQ ID NO: 527238 - DNA, 120 bp, Artificial Sequence
  ENSG00000165959_85 (sequence is synthesized)
tttttaaatatacacatgcctcaacaatccacggcctcaatcgcactgctaatttgtttaaatccctgacactcagatgtcaagaatagcttcatctagcagtgttctctttaaaggaac

SEQ ID NO: 527239 - DNA, 120 bp, Artificial Sequence
  ENSG00000165959_86 (sequence is synthesized)
ccttttttttgttttcattttaatcactgccttcttctctgggaggtattgtgggctagagaaagaagtcaggtttgggagtcagccagatttagattggagtcccagctctgtcaccag

SEQ ID NO: 527240 - DNA, 120 bp, Artificial Sequence
  ENSG00000165959_87 (sequence is synthesized)
atctctgggtgatcttggcaaactaacttctgagcttctgtgcattataggcattcagcacatatttgttggatgaaaaatacttttcttgaaagtttatgaagttgtaggatgcccagc

SEQ ID NO: 527241 - DNA, 120 bp, Artificial Sequence
  ENSG00000165959_88 (sequence is synthesized)
agcccccttttctctatttccttcctcttgaagcaagcgttgactatacctctttccctaacccttagtgtaccatagcttcttccaacctctctccaatccattacttttttctgagct

SEQ ID NO: 527242 - DNA, 120 bp, Artificial Sequence
  ENSG00000165959_89 (sequence is synthesized)
accctgtctcaaatctaactcaggcctttttgcaagaggaagtttaagccattgtttactcattaactcacttgacccttagaacaatcgtgggaggtgtttatttcggaaaggaagcta

SEQ ID NO: 527243 - DNA, 120 bp, Artificial Sequence
  ENSG00000165959_90 (sequence is synthesized)
aagcacaggacagaaaaataaggtcatagcgtgaactagtaagtagcagaactgggaacataggactgttattttcaaacactctaaacttcactgcagttgcaaatttgcaaccaaaat

SEQ ID NO: 527244 - DNA, 120 bp, Artificial Sequence
  ENSG00000165959_91 (sequence is synthesized)
ggccgccttgaaagggtcttttgcagtaaaatctcagtgtccaacatcaaagacagttcttcagggcctccaattaactatacatcctgcccccagctgctcatctctgcacctctaaca

SEQ ID NO: 527245 - DNA, 120 bp, Artificial Sequence
  ENSG00000165959_92 (sequence is synthesized)
cgtacttcacagagtaggaaattgggctttctccttcaaaaagaaaagtagagaaggcctgagggcagtgtaattaaaatggagaagtagagaccacgaattacttggatgaattcataa

SEQ ID NO: 527246 - DNA, 120 bp, Artificial Sequence
  ENSG00000165959_93 (sequence is synthesized)
ctggttggtctctgaggcagggattattatttttcctgtattttaagcttaaaagtagtgatttttgcattgttacaaaaaacaaaatagcaaaatatcatttgatacttgtattctgtt

SEQ ID NO: 527247 - DNA, 120 bp, Artificial Sequence
  ENSG00000165959_94 (sequence is synthesized)
tgcaatagctaccacttcctttagccccagcaaaaatcaataggtgtgtattctctacaagcccatgctgtgccagaatgccagtattgctaaatgtcatgcaaggatttagacactttt

SEQ ID NO: 527248 - DNA, 120 bp, Artificial Sequence
  ENSG00000165959_95 (sequence is synthesized)
ttaaaggaaactctgggagtgcctgttgtctggagagttgacattgtccaaagcaggccaacactggtatgggtatggagaacccacgtcctagctgtggctcacctgcagatgccttga

SEQ ID NO: 527249 - DNA, 120 bp, Artificial Sequence
  ENSG00000165959_96 (sequence is synthesized)
atttacctctctgggttggaagtgggaagacttcttttaaaagtcctttctaagtttaaaaatccaaaggttacgaaggtagtttttatttatctcaataagtggcctatttgcttaaag

SEQ ID NO: 527250 - DNA, 120 bp, Artificial Sequence
  ENSG00000165959_97 (sequence is synthesized)
caagtgtacctctgtatatcagcccaaagcttagggcagtgcttcttggctttagtatctgagaaaggtgcctttgggaagagtttggtcagacagaaggtagtctgaatcttaaaggtt

SEQ ID NO: 527251 - DNA, 120 bp, Artificial Sequence
  ENSG00000165959_98 (sequence is synthesized)
tcagatgaatgtttgaagtagaacctgggaaatctgcttcctagggctgttagaaggaaattggtctccttaaattacgtcagcatctgaggcagtttcctaagggaatttcttttaaat

SEQ ID NO: 527252 - DNA, 120 bp, Artificial Sequence
  ENSG00000165959_99 (sequence is synthesized)
tcaaaagttcaactgcaggaataaatagctgtacaggactagatcttcccatccctcatcttttccccttccccgagtaacgactcaaaaaggcttctgaaattctactcagaatcggag

SEQ ID NO: 527253 - DNA, 120 bp, Artificial Sequence
  ENSG00000165959_100 (sequence is synthesized)
ccgtttgcattccaacaaggatcccttaagccaaatgctggtgtgtttgtgtagaatgtccctggggtaggggcggtagctgtggggagggaatgtggtgcaggggacacctgccctctg

SEQ ID NO: 527254 - DNA, 120 bp, Artificial Sequence
  ENSG00000165959_101 (sequence is synthesized)
cccttgaaattgcaccataagatgctgcctatgtcactcacagtggtgctgatactatccgccaaagacaaattgtgaacacggaaaaatggtcgttccctactgtacatcctcaggaca

SEQ ID NO: 527255 - DNA, 120 bp, Artificial Sequence
  ENSG00000165959_102 (sequence is synthesized)
gacttaactaaacttggagacaggagattgttcagaccatattgtagtgggtggtgatcattgttttattttgggggagtctggtctattgagcagattgaatgtttccttattgtgcag

SEQ ID NO: 527256 - DNA, 120 bp, Artificial Sequence
  ENSG00000165959_103 (sequence is synthesized)
ggcttaattgactatgtctgaaagtttttactgagagctctaagaaaactattgaggaaaatgaaatgttattttgtagtacaaggattatttttgtctatttaggatatacatagctgt

SEQ ID NO: 527257 - DNA, 120 bp, Artificial Sequence
  ENSG00000165959_104 (sequence is synthesized)
agctttgtaaaaaaaaagatctttataaacaatatatgaatgtgccgtcttatttattgattactgtaaattaagatataaatggctatttgaataatttatacctgtgggaattaactg

SEQ ID NO: 527258 - DNA, 120 bp, Artificial Sequence
  ENSG00000165959_105 (sequence is synthesized)
gagtatttgttatttgactgttttctattaaggaatattaggcttggtgctatgatgaatgatcttgtaaaatcatgtgtattcttaagaaaatttttgaatataaatttcttgaactga

SEQ ID NO: 527259 - DNA, 120 bp, Artificial Sequence
  ENSG00000165959_106 (sequence is synthesized)
gagccctggtcaccagctgctgtgtccttggtgggcctccacggggagtctttgattctggagcccagccaagaacaggcctccacttccccatgagcgtggcctggcacttcacacctg

SEQ ID NO: 527260 - DNA, 120 bp, Artificial Sequence
  ENSG00000165959_107 (sequence is synthesized)
gtggagctgacccactggtttgccttgtaatgccatcttcccccaacctggaggagcgtcagtgtgcttcagttcaggctgcacgaatacaaatcctcgtcgcatcgtatttttcggttg

SEQ ID NO: 527261 - DNA, 120 bp, Artificial Sequence
  ENSG00000165959_108 (sequence is synthesized)
tgtacacaagcgtggagctctctcttggagagctggctctctccaagagagagctggcctggcctgtgagtttaactctgatctaaaacaaaccaaacgtgttacctcccgattcaaagc

SEQ ID NO: 527262 - DNA, 120 bp, Artificial Sequence
  ENSG00000165959_109 (sequence is synthesized)
caagggccttgggtgccgaaagcaggaggttgccccgggcaatggcctgtattgagttcccaggagtaccttgggcaagggccatgaagtggcacgtgattgctgacccgtaggggacag

SEQ ID NO: 527263 - DNA, 120 bp, Artificial Sequence
  ENSG00000165959_110 (sequence is synthesized)
cccccttcctctctgtcttgtgtggtctcttgcccttttgccttccactatgggatgatgcaccagcagattccagtgctgtgttcttggactgcccagcctctagaaatccttctgtta

SEQ ID NO: 527264 - DNA, 120 bp, Artificial Sequence
  ENSG00000165959_111 (sequence is synthesized)
ttgtgtgtcaaaatcacaagctccctgaagactaaggatgtgtctaagataacgtctccactcatagcaggcaatattttgagagggaaaatgtgcagaagaggacctttacacgatgga

SEQ ID NO: 527265 - DNA, 120 bp, Artificial Sequence
  ENSG00000165959_112 (sequence is synthesized)
agcagacatgaagagggaaagcaaacatgccaggatgtctatgaaagtatttcttgctgtcggagaactgttggcctggcctaatgttgctgaattgctggaaacctgcccatttaaaac

SEQ ID NO: 527266 - DNA, 120 bp, Artificial Sequence
  ENSG00000165959_113 (sequence is synthesized)
ataggaaaccagaaaaacgtctcaaattcttacaattctgagacgtccccattcctgttgaagtcatagagttgctttattatgtttttatttttaaaaaattttatttactcgccacag

SEQ ID NO: 527267 - DNA, 120 bp, Artificial Sequence
  ENSG00000165959_114 (sequence is synthesized)
atttgaattggcttggaaggatttagattactggaatcggaagcctctgtctgaatattacccaacacccaagagtgtggtcattagaaccccatccctctggctgctaaaaaagaagca

SEQ ID NO: 527268 - DNA, 120 bp, Artificial Sequence
  ENSG00000165959_115 (sequence is synthesized)
agacagctcctttcccctgccatgaaatggaaatactaattcaagttttccaccaggctggatatgctcataggaaaataatcctttttgctcttatgagatagaggcgttgaaaataga

SEQ ID NO: 527269 - DNA, 120 bp, Artificial Sequence
  ENSG00000165959_116 (sequence is synthesized)
aaaatagaacctgtaaagttgagaaatgcagtcgtgttttcagttgtctacattgagcatttattacctttataataaaaaatatggtttaggctgcgcatggtggctcacgcctgtaat

SEQ ID NO: 527270 - DNA, 120 bp, Artificial Sequence
  ENSG00000165959_117 (sequence is synthesized)
ggagtttgagactagcctgggcaacacagagagaccgtgtctctataaaaagtatatagtttaacttgtttctgtggacagctttttaaagaagaccatcatgtgggtatttatcattca

SEQ ID NO: 527271 - DNA, 120 bp, Artificial Sequence
  ENSG00000165959_118 (sequence is synthesized)
gagatagttctgggacaagtggttttagcctctcgtaatctccattacaccgcacgaaaccaccctaagaggcttacactgcaggcttctctacatgcagctccaagcagaggccccagc

SEQ ID NO: 527272 - DNA, 120 bp, Artificial Sequence
  ENSG00000165959_119 (sequence is synthesized)
cccaggcaaaaccttctgggcttccctatgatccgccaggcaaaactgaaatgacattttaacactaccacctataaaataaaagcaggaaggtaaatctgactgaaatcaaatctagta

SEQ ID NO: 527273 - DNA, 120 bp, Artificial Sequence
  ENSG00000165959_120 (sequence is synthesized)
attattttaaaggtaatattccaaagccaaaacaaaactgtggggaatgggagaggtctttgtttctttctgatagatgatttaaaatgatctgctattagggacacttcatcccttaga

SEQ ID NO: 527274 - DNA, 120 bp, Artificial Sequence
  ENSG00000165959_121 (sequence is synthesized)
tgacctatggggtcccctgcgttactaacaaacagcagcaagcgatcagtatctaactccgtgtcactctctgagagcactgtggcatcaagaaaggtgtcccaggagacctggcctagg

SEQ ID NO: 527275 - DNA, 120 bp, Artificial Sequence
  ENSG00000165959_122 (sequence is synthesized)
cgccctctctgtcgccaagttaattgcatggccttgggcaagtcactccaccccgaaagcctcagtgtgtccatctgcagaatggggctgccacctcctctcacctgatgttatggagat

SEQ ID NO: 527276 - DNA, 120 bp, Artificial Sequence
  ENSG00000165959_123 (sequence is synthesized)
gaacggagtacgtgcaaaagctcgaggggctgcctggatggcccgacgcactgccttgggccagtacacacagtgtggggcctacctggacatggtgctggggagccttcgggtcttcag

SEQ ID NO: 527277 - DNA, 120 bp, Artificial Sequence
  ENSG00000165959_124 (sequence is synthesized)
gcggggagtgggggccggggagagacgggtagcactgggtggggtccactttcctgggaacctgcttggtaactgcgtttcctctgtgtttcttctgtaggaaggccaacagctcaggag

SEQ ID NO: 527278 - DNA, 120 bp, Artificial Sequence
  ENSG00000165959_125 (sequence is synthesized)
ccttatcattaagcacagtccgatcggatatccggtttgggcaataagagatgtaaataaagtgaggattttaaagcccaaaggcctccttgctataaaaacgcacccaaaacgcctcac

SEQ ID NO: 527279 - DNA, 120 bp, Artificial Sequence
  ENSG00000165959_126 (sequence is synthesized)
ctggaccccgcgcgcacccagaaggatcacgttcagagacagaggtgcaacatgagtcaagagatttcatctttactaattgggttgcgggggcttttgtttataaatttcactgtagga

SEQ ID NO: 527280 - DNA, 120 bp, Artificial Sequence
  ENSG00000165959_127 (sequence is synthesized)
gttcagagacagaggtgcaacatgagtcaaggtccgatggacagtggcacgtgctcagtagcagatgtgttagaacccggagcagcacaccccaatccgggttccgggtggtggggtctc

SEQ ID NO: 527281 - DNA, 120 bp, Artificial Sequence
  ENSG00000165959_128 (sequence is synthesized)
tcgcactcacaagggaggggcttaggggaggaggtagaggaatgtatattgtttagcactttgattttggatctagacgctggcggtattgagaaatgcccggcatgctcggctttgtgt

SEQ ID NO: 527282 - DNA, 120 bp, Artificial Sequence
  ENSG00000165966_0 (sequence is synthesized)
atcacacctcccacccgccacctccctccactgccgccgccgcgagacggctgccccgggggtggcccggggaaggcaggggggctcggagaagacggactctgctttcgctcccccttt

SEQ ID NO: 527283 - DNA, 120 bp, Artificial Sequence
  ENSG00000165966_1 (sequence is synthesized)
cttccccatccctaacatgggctttgccctggagcgcttcgcagaagccgtggacccggctctggagtgcaaactgtgcggccaggtgcttgaagagcccctgtgcacgccgtgcgggca

SEQ ID NO: 527284 - DNA, 120 bp, Artificial Sequence
  ENSG00000165966_2 (sequence is synthesized)
cgtcttctgcgccagctgcctgttgccctgggcggtgcggaggcgccggtgcccgctgcagtgccagcccttggcgcccggcgagctgtaccgggtgctgccgctgcgcagcctcatcca

SEQ ID NO: 527285 - DNA, 120 bp, Artificial Sequence
  ENSG00000165966_3 (sequence is synthesized)
gaagctgcgagtccagtgcgactaccgcgcccgcggctgcggccactcggtcaggctgcacgagctggaggcgcacgtcgagcactgcgacttcggccctgcccgccggctccgcagccg

SEQ ID NO: 527286 - DNA, 80 bp, Artificial Sequence
  ENSG00000165966_4 (sequence is synthesized)
ctgcgacttcggccctgcccgccggctccgcagccgcgggggctgcgcttcggggctgggcggtggtgaggtgcccgcgc

SEQ ID NO: 527287 - DNA, 120 bp, Artificial Sequence
  ENSG00000165966_5 (sequence is synthesized)
ccgcgggcggggacccgggcctcgggtcctcgcctggaggcggcgcgagaaggcgctgctggcgcagctctgggcgctgcagggcgaggtgcagctcacggcgcgcaggtaccaggagaa

SEQ ID NO: 527288 - DNA, 120 bp, Artificial Sequence
  ENSG00000165966_6 (sequence is synthesized)
gttcacccaatacatggctcacgtccgcaacttcgtcggcgacctcggtggcggccaccgcagggatggagagcataagccattcactattgtgttagaaagagaaaatgacactttggg

SEQ ID NO: 527289 - DNA, 120 bp, Artificial Sequence
  ENSG00000165966_7 (sequence is synthesized)
attcaatattataggaggtcgaccaaatcagaataatcaggaaggaacatcgactgaaggaatttacgtttcaaaaattttagaaaatggacctgctgacagagcagatggcctggagat

SEQ ID NO: 527290 - DNA, 120 bp, Artificial Sequence
  ENSG00000165966_8 (sequence is synthesized)
tcatgacaaaatcatggaggtcaatgggaaggatctttcaaaggccactcatgaagaggcagtggaagcttttcgcaatgccaaggagcccattgtggtgcaggtgttaaggcgaacacc

SEQ ID NO: 527291 - DNA, 120 bp, Artificial Sequence
  ENSG00000165966_9 (sequence is synthesized)
tcttagtagaccagcctatgggatggcttcagaagtgcagcttatgaatgccagcactcagacggacatcaccttcgaacacatcatggctctggccaagcttcgtccacctacccctcc

SEQ ID NO: 527292 - DNA, 120 bp, Artificial Sequence
  ENSG00000165966_10 (sequence is synthesized)
agtgccagacatctgtccattcctgctctcagacagctgccattctctacatccaatggagcatgaattttatgaggacaatgagtatatttccagcttgcctgctgatgcagacagaac

SEQ ID NO: 527293 - DNA, 120 bp, Artificial Sequence
  ENSG00000165966_11 (sequence is synthesized)
agaagactttgaatatgaggaggtcgagttgtgtcgtgttagcagtcaagagaagctgggcctgacagtctgttaccgaacagatgatgaagaagacaccggcatttatgtcagcgaggt

SEQ ID NO: 527294 - DNA, 120 bp, Artificial Sequence
  ENSG00000165966_12 (sequence is synthesized)
tgacccaaatagcattgctgccaaagacggccggattcgagaaggggatcggattttgcaaataaatggggaagatgtccagaatcgagaagaagcagtggccttgctgtctaacgatga

SEQ ID NO: 527295 - DNA, 120 bp, Artificial Sequence
  ENSG00000165966_13 (sequence is synthesized)
gtgtaagagaatcgtgctgcttgttgcaaggccagagattcagctggatgaaggctggctggaagatgaaaggaatgaattcttagaggagttaaacttggagatgttggaagaagagca

SEQ ID NO: 527296 - DNA, 120 bp, Artificial Sequence
  ENSG00000165966_14 (sequence is synthesized)
taatgaagcaatgcagcccactgccaatgaggtggagcagccaaaaaagcaagaagaagaagaaggcacaacagacactgcaacatcctcatccaacaaccatgagaaggacagtggagt

SEQ ID NO: 527297 - DNA, 120 bp, Artificial Sequence
  ENSG00000165966_15 (sequence is synthesized)
aggacgtacagatgaaagcttgcgaaatgatgagagctcagagcaggagaatgcagccgaggaccccaatagcacatctttgaagagcaagagagacctggggcagagccaagacactct

SEQ ID NO: 527298 - DNA, 120 bp, Artificial Sequence
  ENSG00000165966_16 (sequence is synthesized)
gggaagtgttgaacttcagtacaatgagagcctcgtatctggtgaatacattgactcagactgcattggcaacccagatgaggactgtgaaagattcaggcagctcttggagctcaaatg

SEQ ID NO: 527299 - DNA, 120 bp, Artificial Sequence
  ENSG00000165966_17 (sequence is synthesized)
tatgacctgtattactcaagcagcacaattgaatgcaatcaaggggagcaagagggagtggagcatgagctacagttgcttaatgaagaactgagaaacattgagcttgagtgtcagaat

SEQ ID NO: 527300 - DNA, 120 bp, Artificial Sequence
  ENSG00000165966_18 (sequence is synthesized)
atcatgcaggctcacaggctccagaaagtgacagaccagtatggagacatctggacattgcatgatggaggattccggaattataacaccagcatagatatgcaaaggggaaagctagat

SEQ ID NO: 527301 - DNA, 120 bp, Artificial Sequence
  ENSG00000165966_19 (sequence is synthesized)
gacatcatggagcatccagaaaagtctgacaaggacagttctagtgcttacaacacagctgagagctgcagaagtactccgctcactgtagaccgttcccctgacagttcccttccaagg

SEQ ID NO: 527302 - DNA, 120 bp, Artificial Sequence
  ENSG00000165966_20 (sequence is synthesized)
gtgatcaacctcaccaataagaaaaacctgagaagcacaatggcagccacccagtcctcttccggacagagcagtaaagagtcgacctccaccaaagccaaaaccactgagcaaggttgt

SEQ ID NO: 527303 - DNA, 120 bp, Artificial Sequence
  ENSG00000165966_21 (sequence is synthesized)
agcgctgaaagcaaggagaaggttttagaaggcagcaagcttcctgatcaagagaaggcagtcagcgaacacatcccttacctctctccttaccacagctcctcatatagatatgcaaac

SEQ ID NO: 527304 - DNA, 120 bp, Artificial Sequence
  ENSG00000165966_22 (sequence is synthesized)
atcccagcacacgcccggcattatcaaagctacatgcagttaattcaacagaaatctgcagtcgagtatgctcagagtcagctcagcttggtgagcatgtgcaaggagtctcagaagtgt

SEQ ID NO: 527305 - DNA, 120 bp, Artificial Sequence
  ENSG00000165966_23 (sequence is synthesized)
tcagagcccaagatggaatggaaggtgaaaattaggagcgacgggacacggtacatcacaaagagacccgtgcgagaccgaatcctgaaggaacgtgccttaaagatcaaggaagagcgg

SEQ ID NO: 527306 - DNA, 120 bp, Artificial Sequence
  ENSG00000165966_24 (sequence is synthesized)
agtggcatgaccacagacgatgacaccatgagcgagatgaaaatggggcgctactggagcaaagaggagagaaagcagcacctggttagggccaaagagcagcgccgtcgccgtgagttc

SEQ ID NO: 527307 - DNA, 120 bp, Artificial Sequence
  ENSG00000165966_25 (sequence is synthesized)
atgatgcgaagcaggttagagtgtctcaaggagagccctcagagcggcagtgagggcaagaaggagatcaatatcattgaactgagtcacaaaaagatgatgaaaaagagaaacaagaaa

SEQ ID NO: 527308 - DNA, 120 bp, Artificial Sequence
  ENSG00000165966_26 (sequence is synthesized)
attttggacaactggatgacaatccaagaactgatgacccatggggccaagtctccagatggcacgagagtccataatgccttcttgtcggtgaccactgtatgaccgaatgaatggaat

SEQ ID NO: 527309 - DNA, 120 bp, Artificial Sequence
  ENSG00000165966_27 (sequence is synthesized)
gcatgcgactgattttaggaggatgctaccagtttcggtagagtatgattgcctcgttcaatgtggcgtttttatatatattttgtgactctttatagtttaaattttttgtaagcaaaa

SEQ ID NO: 527310 - DNA, 120 bp, Artificial Sequence
  ENSG00000165966_28 (sequence is synthesized)
aatacctggtaatttttcatttgtttttcatatactggtaccttctttttggctgagatctttcttttacttgtgatatattcatattactcgtttataaaaaatcaaaaacaaaaggaa

SEQ ID NO: 527311 - DNA, 120 bp, Artificial Sequence
  ENSG00000165966_29 (sequence is synthesized)
agaaaacaaaaaaaacttgcacaaaaatactgaggagccaattaatttcctacttcaatgtatctaatgtaagtgaaaatctggatttatttctctagtttacttattttctactttaat

SEQ ID NO: 527312 - DNA, 120 bp, Artificial Sequence
  ENSG00000165966_30 (sequence is synthesized)
aataactcaatgccaaaatatttctatgcttgtttcttggcataatacattttaaatcaaacctgttcgtaataaatcatgtgccacatcttgtcttacacataaaagccactgctttta

SEQ ID NO: 527313 - DNA, 120 bp, Artificial Sequence
  ENSG00000165966_31 (sequence is synthesized)
acatcccattgtacatttaacacataaatggtgttaacatcccattgtacatttaacacataaatggccattgtctttgtctcagtaaagtgtaggtggacaatcttcctgtgatatgta

SEQ ID NO: 527314 - DNA, 120 bp, Artificial Sequence
  ENSG00000165966_32 (sequence is synthesized)
gtgacattggtcatgtagctagataattatggtaattgtgacaattaaagagaaataaattattgattatccttcagaaaaattatcaaggagtgttttattttccttgtccacagtggt

SEQ ID NO: 527315 - DNA, 120 bp, Artificial Sequence
  ENSG00000165966_33 (sequence is synthesized)
tgacagttataaagtagttatatgtgtatactatttagaagacgcctaattgtggattataaaatgtgcacattttctatcacttgtttccaataaagttgtattgaaacattccctata

SEQ ID NO: 527316 - DNA, 120 bp, Artificial Sequence
  ENSG00000165966_34 (sequence is synthesized)
acgggggagtgttgccatgaactgactggaaactctgtgtgtgtatccgtgagtgcaagatacttagggaaagcgaagaagagcatgctgctacacaccactctggcttacgcttccagc

SEQ ID NO: 527317 - DNA, 120 bp, Artificial Sequence
  ENSG00000165966_35 (sequence is synthesized)
taacagcggtttgtctgtgtttctggactgaagtgactgatgaaaaacagtagtcaagtctggagggtgattccctttcagttcacttgcctttcagttctggggaaattagaagatttg

SEQ ID NO: 527318 - DNA, 120 bp, Artificial Sequence
  ENSG00000165966_36 (sequence is synthesized)
aggaacactacaaactgctgtatgaagtttcccaggagctgtgacttgaacaatgctattctgcatgaaattgagaaattgccagtgttcccaacctgatggagagtatgtgtgggatct

SEQ ID NO: 527319 - DNA, 120 bp, Artificial Sequence
  ENSG00000165966_37 (sequence is synthesized)
acatcagtctttccacagaatacaactctgaccataggcccttattcctagcattctctcagaaattgcaaattgatggacttcacgtagagggagaaagaaaagctattgcttttcctc

SEQ ID NO: 527320 - DNA, 120 bp, Artificial Sequence
  ENSG00000165966_38 (sequence is synthesized)
agctgtagtttgtttaaagactagatcactacagatcttattccaaagcagagcaaactaaagtgaaattctaaaatcagttttaatctggaaaacaacccatttaatctattcctatca

SEQ ID NO: 527321 - DNA, 120 bp, Artificial Sequence
  ENSG00000165970_0 (sequence is synthesized)
cacgccaaacacgcagccccctcccgctggagtgacaactggccagcatactctaggctgttgtccctttaaaacttgaatccaagggggtaatgatttatcaaacttgtattatcaaga

SEQ ID NO: 527322 - DNA, 120 bp, Artificial Sequence
  ENSG00000165970_1 (sequence is synthesized)
aaatgtcaaaccaagggcaccttgctttgcactgacgcaaacccggcctttcccaaggagatatagaaagcgcctctcctgcctgagccaaacccagtcttgtcaatagcgggtttcacc

SEQ ID NO: 527323 - DNA, 120 bp, Artificial Sequence
  ENSG00000165970_2 (sequence is synthesized)
ctccaccagttcagtctgttgcctgtgtcagacatggattgcagtgctcccaaggaaatgaataaactgccagccaacagcccggaggcggcggcggcgcagggccacccggatggccca

SEQ ID NO: 527324 - DNA, 120 bp, Artificial Sequence
  ENSG00000165970_3 (sequence is synthesized)
tgcgctcccaggacgagcccggagcaggagcttcccgcggctgccgccccgccgccgccacgtgtgcccaggtccgcttccaccggcgcccaaactttccagtcagcggacgcgcgagcc

SEQ ID NO: 527325 - DNA, 120 bp, Artificial Sequence
  ENSG00000165970_4 (sequence is synthesized)
tgcgaggctgagcggccaggagtggggtcttgcaaactcagtagcccgcgggcgcaggcggcctctgcagctctgcgggacttgagagaggcgcaaggcgcgcaggcctcgccccctccc

SEQ ID NO: 527326 - DNA, 120 bp, Artificial Sequence
  ENSG00000165970_5 (sequence is synthesized)
gggagctccgggcccggcaacgcgctgcactgtaagatcccttttctgcgaggcccggagggggatgcgaacgtgagtgtgggcaagggcaccctggagcggaacaatacccctgttgtg

SEQ ID NO: 527327 - DNA, 120 bp, Artificial Sequence
  ENSG00000165970_6 (sequence is synthesized)
ggctgggtgaacatgagccagagcaccgtggtgctggccacggatggaatcacgtccgtgctcccgggcagcgtggccaccgttgccacccaggaggacgagcaaggggatgagaataag

SEQ ID NO: 527328 - DNA, 120 bp, Artificial Sequence
  ENSG00000165970_7 (sequence is synthesized)
gcccgagggaactggtccagcaaactggacttcatcctgtccatggtggggtacgcagtggggctgggcaatgtctggaggtttccctacctggccttccagaacgggggaggtgctttc

SEQ ID NO: 527329 - DNA, 120 bp, Artificial Sequence
  ENSG00000165970_8 (sequence is synthesized)
ctcatcccttacctgatgatgctggctctggctggattacccatcttcttcttggaggtgtcgctgggccagtttgccagccagggaccagtgtctgtgtggaaggccatcccagctcta

SEQ ID NO: 527330 - DNA, 120 bp, Artificial Sequence
  ENSG00000165970_9 (sequence is synthesized)
caaggctgtggcatcgcgatgctgatcatctctgtcctaatagccatatactacaatgtgattatttgctatacacttttctacctgtttgcctcctttgtgtctgtactaccctggggc

SEQ ID NO: 527331 - DNA, 120 bp, Artificial Sequence
  ENSG00000165970_10 (sequence is synthesized)
tcctgcaacaacccttggaatacgccagaatgcaaagataaaaccaaacttttattagattcctgtgttatcagtgaccatcccaaaatacagatcaagaactcgactttctgcatgacc

SEQ ID NO: 527332 - DNA, 120 bp, Artificial Sequence
  ENSG00000165970_11 (sequence is synthesized)
gcttatcccaacgtgacaatggttaatttcaccagccaggccaataagacatttgtcagtggaagtgaagagtacttcaagtactttgtgctgaagatttctgcagggattgaatatcct

SEQ ID NO: 527333 - DNA, 120 bp, Artificial Sequence
  ENSG00000165970_12 (sequence is synthesized)
ggcgagatcaggtggccactagctctctgcctcttcctggcttgggtcattgtgtatgcatcattggctaaaggaatcaagacttcaggaaaagtggtgtacttcacggccacgttcccg

SEQ ID NO: 527334 - DNA, 120 bp, Artificial Sequence
  ENSG00000165970_13 (sequence is synthesized)
tatgtcgtactcgtgatcctcctcatccgaggagtcaccctgcctggagctggagctgggatctggtacttcatcacacccaagtgggagaaactcacggatgccacggtgtggaaagat

SEQ ID NO: 527335 - DNA, 120 bp, Artificial Sequence
  ENSG00000165970_14 (sequence is synthesized)
gctgccactcagattttcttctctttatctgctgcatggggaggcctgatcactctctcttcttacaacaaattccacaacaactgctacagggacactctaattgtcacctgcaccaac

SEQ ID NO: 527336 - DNA, 120 bp, Artificial Sequence
  ENSG00000165970_15 (sequence is synthesized)
agtgccacaagcatctttgccggcttcgtcatcttctccgttatcggcttcatggccaatgaacgcaaagtcaacattgagaatgtggcagaccaagggccaggcattgcatttgtggtt

SEQ ID NO: 527337 - DNA, 120 bp, Artificial Sequence
  ENSG00000165970_16 (sequence is synthesized)
tacccggaagccttaaccaggctgcctctctctccgttctgggccatcatctttttcctgatgctcctcactcttggacttgacactatgtttgccaccatcgagaccatagtgacctcc

SEQ ID NO: 527338 - DNA, 120 bp, Artificial Sequence
  ENSG00000165970_17 (sequence is synthesized)
atctcagacgagtttcccaagtacctacgcacacacaagccagtgtttactctgggctgctgcatttgtttcttcatcatgggttttccaatgatcactcagggtggaatttacatgttt

SEQ ID NO: 527339 - DNA, 120 bp, Artificial Sequence
  ENSG00000165970_18 (sequence is synthesized)
cagcttgtggacacctatgctgcctcctatgcccttgtcatcattgccatttttgagctcgtggggatctcttatgtgtatggcttgcaaagattctgtgaagatatagagatgatgatt

SEQ ID NO: 527340 - DNA, 120 bp, Artificial Sequence
  ENSG00000165970_19 (sequence is synthesized)
ggattccagcctaacatcttctggaaagtctgctgggcatttgtaaccccaaccattttaacctttatcctttgcttcagcttttaccagtgggagcccatgacctatggctcttaccgc

SEQ ID NO: 527341 - DNA, 120 bp, Artificial Sequence
  ENSG00000165970_20 (sequence is synthesized)
tatcctaactggtccatggtgctcggatggctaatgctcgcctgttccgtcatctggatcccaattatgtttgtgataaaaatgcatctggcccctggaagatttattgagaggctgaag

SEQ ID NO: 527342 - DNA, 120 bp, Artificial Sequence
  ENSG00000165970_21 (sequence is synthesized)
ttggtgtgctcgccacagccggactggggcccattcttagctcaacaccgcggggagcgttacaagaacatgatcgaccccttgggaacctcttccttgggactcaaactgccagtgaag

SEQ ID NO: 527343 - DNA, 120 bp, Artificial Sequence
  ENSG00000165970_22 (sequence is synthesized)
gatttggaactgggcactcagtgctagtccagtggtgtgggatggtccagacttgatcctgtttttcctctctgcctcctcctaatgttttccatagctctcctcccatttttcttcatc

SEQ ID NO: 527344 - DNA, 120 bp, Artificial Sequence
  ENSG00000165970_23 (sequence is synthesized)
tttcttcctacatcttggttcacatccacgcatgagagtgattatgtagaaaagtaggcatagtgtcgcatgctgcagtaaagagctacatagaccacctgaagcgctgtttgcctgtgc

SEQ ID NO: 527345 - DNA, 120 bp, Artificial Sequence
  ENSG00000165970_24 (sequence is synthesized)
ccatggtgactgtttctggtcaggttggtcccctgaccacacgttttaccctgcagaggaggatcagttaggtgagcactggtaggtatgcgtggttttgtcaatagagaggtatccact

SEQ ID NO: 527346 - DNA, 120 bp, Artificial Sequence
  ENSG00000165970_25 (sequence is synthesized)
gtgtgatggcatggggggtgccagtaaggcatgtatagagtggccgaattacaagactttatttggacttgaacagaactgagcaatgtggtgatcttgttcagacacacaaagttcaag

SEQ ID NO: 527347 - DNA, 120 bp, Artificial Sequence
  ENSG00000165970_26 (sequence is synthesized)
acaggtttttttttttttcagagagttagcagtggtcagaaaatgttttggatgtaagacaagaccattcaatttggacaccactgaggtggttaagtttatatttccagtcaccactgg

SEQ ID NO: 527348 - DNA, 120 bp, Artificial Sequence
  ENSG00000165970_27 (sequence is synthesized)
ggatctgtttccttcgtttggatcagcaatctccagttaccactaactcagatgctacagtctacacattgtgactttgattgaactgtcagttttcttccctcaactgtctttttttgt

SEQ ID NO: 527349 - DNA, 120 bp, Artificial Sequence
  ENSG00000165970_28 (sequence is synthesized)
tttaaataaccacatttgtgagttcttttggtcatttcctccacctctgcccaagaagccatcatataagttgtgcctcattttgtacgttcatagtagagctccatgctcatttctaca

SEQ ID NO: 527350 - DNA, 120 bp, Artificial Sequence
  ENSG00000165970_29 (sequence is synthesized)
atttagcaccatggttcaatgtcacgatcctgtgtttcttctctaaatgtctttctataagctgtagacaccttgtcttttgacctctgggaaaacaagacttaccctggttctgtctat

SEQ ID NO: 527351 - DNA, 120 bp, Artificial Sequence
  ENSG00000165970_30 (sequence is synthesized)
atattatatatataggacacatgctcttaaaagacagataacttcttaatttttactctttttcattcacagtaaatgccaactgtggtcatagagaaatcaaagaaatggagagtttaa

SEQ ID NO: 527352 - DNA, 120 bp, Artificial Sequence
  ENSG00000165970_31 (sequence is synthesized)
tagaaagcaaccacaatattcactgcactggtagtacattttaggacatggtatttatagaactttctgataaatacagcttaggtaagtagcgagtgagccaattaagactatagcttt

SEQ ID NO: 527353 - DNA, 120 bp, Artificial Sequence
  ENSG00000165970_32 (sequence is synthesized)
taagactacatttagccaattcaattttaagagttccctattcacagtactcattttaacggcactctaatgagagctgatcatatgtctgcagaaattggcaaagtgtaaactttatta

SEQ ID NO: 527354 - DNA, 120 bp, Artificial Sequence
  ENSG00000165970_33 (sequence is synthesized)
tcttcttgtatcctgaacatgcatatatgaaatttttaaaatgtgacatgtgttcatgtagtgtgtacttgtagtggtgttttctgtccttataaatatcttttgaattctgtagagatg

SEQ ID NO: 527355 - DNA, 120 bp, Artificial Sequence
  ENSG00000165970_34 (sequence is synthesized)
gtgagtttagtatagtgtagtctggggattttattttcccttacagtaataatatctaaacctaaaattgtttcctttaggggagatcatttcaatcattttcttcatttatcttcatag

SEQ ID NO: 527356 - DNA, 120 bp, Artificial Sequence
  ENSG00000165970_35 (sequence is synthesized)
tacagggtctcaggcaaagtttttcagttcaaatcttgtatattgttgtgacattttcatcctgtttaacagcaatgaaacccaacaacaggctttaatgtacatttttttttaaaagat

SEQ ID NO: 527357 - DNA, 120 bp, Artificial Sequence
  ENSG00000165970_36 (sequence is synthesized)
ttcatttgttaaaaaaagtctcaactcattttactgagctctcccttttctagggcaagtatcatcgccatttgccaacatcaatatgaacttccagtttttaagagtagcttgtgaaag

SEQ ID NO: 527358 - DNA, 120 bp, Artificial Sequence
  ENSG00000165970_37 (sequence is synthesized)
gttttagaaaaggaaacaaagatgggttttgaactttagattttcatgtcttttgtctgcagtgtatatttgttctcccctctccttctcctcctttccccccttgtctcccaaagctca

SEQ ID NO: 527359 - DNA, 120 bp, Artificial Sequence
  ENSG00000165970_38 (sequence is synthesized)
aacttgcttgagtctatcatagagactaaaccttgagcttcccctaaacttagctttaggaagctgagctgtggcctcacctgtctgccatgaacacagatttctctaagaaagccatat

SEQ ID NO: 527360 - DNA, 120 bp, Artificial Sequence
  ENSG00000165970_39 (sequence is synthesized)
tgatgagaagcccccaattactgcagcagacgtcgcacaatggtaccaaaaatgagcctctccagctgatacctggtagagtgagaggagccaggaggaataacttaggcctggaaatta

SEQ ID NO: 527361 - DNA, 120 bp, Artificial Sequence
  ENSG00000165970_40 (sequence is synthesized)
tctgcaggctttgcaatttgaaggttgagaaagagagcttaaatcaattagcattctctcatgggactggtatgtttgtgtcaggatgaatggtttttggctctcctgttgcctcttggc

SEQ ID NO: 527362 - DNA, 120 bp, Artificial Sequence
  ENSG00000165970_41 (sequence is synthesized)
taaaactctgattgagccaatggttgcagtctgatgctggacgccaacccaatttctgctaattattgcttttgtgattaaaagaaggtgggggtggggggctcccacagatgctgccag

SEQ ID NO: 527363 - DNA, 120 bp, Artificial Sequence
  ENSG00000165970_42 (sequence is synthesized)
gtttgttttgtacaaactgaaagttaacttaattgtgagaacggagacctcatcactagctgcatgttttggatttgggggcatttacatttgtgttaattatgatttgtccaggtaaga

SEQ ID NO: 527364 - DNA, 120 bp, Artificial Sequence
  ENSG00000165970_43 (sequence is synthesized)
tgcagtagctgctccctgagcagctgtttcccccccaccccacttcactataatttccaagatttatttccctttgtttaaagggacacgcttaggtgaaaggttccaaatttacctgga

SEQ ID NO: 527365 - DNA, 120 bp, Artificial Sequence
  ENSG00000165970_44 (sequence is synthesized)
aatggttaccttgtaaatttagcttgtctaatggattgtttccatgatattaaaatgtacagtcaattggaagaaaaaaaatgaaaaaaataaaatgaataacattgttagaaactggca

SEQ ID NO: 527366 - DNA, 120 bp, Artificial Sequence
  ENSG00000165970_45 (sequence is synthesized)
cctgaaaacttcccttcaaagtgggggaaaaaaccgagtagctgaggaaagactttcattggttcactgtgtagaatggtggagcattttccacttgtgagattatttcataacaccaac

SEQ ID NO: 527367 - DNA, 120 bp, Artificial Sequence
  ENSG00000165970_46 (sequence is synthesized)
aaatgccagaaactcattcagaaaaaaagccatatgtgaaaaacagtaatcctgtcatatccttagaggagaaaaaatgtatatttcttaacaagtggtgttgtgacttcttatgcaaat

SEQ ID NO: 527368 - DNA, 120 bp, Artificial Sequence
  ENSG00000165970_47 (sequence is synthesized)
gtcttgcatattagtaacttttattatctttaggactgtgcttatcaggtacaaatgtgtctagttctgttttattgtttctttttcctttatatttatgtattgcatgaggtctgtggt

SEQ ID NO: 527369 - DNA, 120 bp, Artificial Sequence
  ENSG00000165970_48 (sequence is synthesized)
caatgcaaaatcatgatgacctcaatgtctttgaaatttgcaatgtgtttttaatatgtaagaaatgtaatcaacttgtatttcagtaagcagcactttaaaaagagtttaacatgatga

SEQ ID NO: 527370 - DNA, 120 bp, Artificial Sequence
  ENSG00000165970_49 (sequence is synthesized)
cctttaaatggataggacttgggttgtttttatggtaatgttgcattggagttgagttttcctttaattaagttcttgtttcctcatctatgtgtctctcagtgcttcctgtccaccttt

SEQ ID NO: 527371 - DNA, 120 bp, Artificial Sequence
  ENSG00000165970_50 (sequence is synthesized)
gctctcagcatggtttcccatgcctaaaagtaagattttcttttctctttgttcccttggctgtaggtcattgtcctcttcccagaggctagcacaataactgttgctcaatgtaagatg

SEQ ID NO: 527372 - DNA, 120 bp, Artificial Sequence
  ENSG00000165970_51 (sequence is synthesized)
agatggcaagatcatactactgttgttgcacctggatttgagttgggacatgcttctttgaggcagatgattcaagagaggacgtgctgtgtggcaggtgttttgcaggaccaaaaggcc

SEQ ID NO: 527373 - DNA, 120 bp, Artificial Sequence
  ENSG00000165970_52 (sequence is synthesized)
aaggccaacagaggagcatttccttctctttcacactgggtatcaagcagaaaacttccaggctgggagcaaaggtgtgggtgattctgccttgatactcatttccccacaaagtggccc

SEQ ID NO: 527374 - DNA, 120 bp, Artificial Sequence
  ENSG00000165970_53 (sequence is synthesized)
taggatttgtgaaagtgaagcttcctatctttcccagattttgctttaattgcccagaaaggccaagtagttttgaaatgtggtctttgctcaggtcacctctgagcagcctgcagccaa

SEQ ID NO: 527375 - DNA, 120 bp, Artificial Sequence
  ENSG00000165970_54 (sequence is synthesized)
agagaaagtgttttcagattaggtattcatcacctctgaaaagcaagcagtggtttgacttgcctgccacggattaaatacatcttcaggtaaccatttgccttacaggtgtattttact

SEQ ID NO: 527376 - DNA, 120 bp, Artificial Sequence
  ENSG00000165970_55 (sequence is synthesized)
gttaggatgattcttagtaattgactaaaaactgttttgtctctcatttgtttgtggtttttgcactttattatggacctgtaaaggaataggttaattcttacattgtgtacttggcta

SEQ ID NO: 527377 - DNA, 120 bp, Artificial Sequence
  ENSG00000165970_56 (sequence is synthesized)
atgtcctaaatgcaggcatcttttgtgggtactgttgcccatgaataaacatatgttccctaatcaggtccttatatttttccattaactatacatgaagaaaatatattatgttacaaa

SEQ ID NO: 527378 - DNA, 120 bp, Artificial Sequence
  ENSG00000165970_57 (sequence is synthesized)
tcttatagattacatattatatactgcacattattcatttaagaagtcattcttgaggccctacctcaaattttctatttatgtataaaaatgcaatttattgtattatatatttgccta

SEQ ID NO: 527379 - DNA, 120 bp, Artificial Sequence
  ENSG00000165970_58 (sequence is synthesized)
ataaaaatgcaatttattgtattatatatttgcctattatgtactgatataaattagaatttaccctaataatgtatgagttcacaaaaccctaaataaatgtcagtgtttaaaacatga

SEQ ID NO: 527380 - DNA, 120 bp, Artificial Sequence
  ENSG00000165972_0 (sequence is synthesized)
gcacttatccgttggccagctgcgttccgggatcagctaccagacggtccctgagatgaccgggaaccgggctgggggaggatagagccgagactggaggatcgattggcacctccgccc

SEQ ID NO: 527381 - DNA, 120 bp, Artificial Sequence
  ENSG00000165972_1 (sequence is synthesized)
acttttcccacaacgccttcccgaacgataggttggaaaggctcctggatccaaactcgctgagggccaggcaagaaaatgtcctcaaatttattgccaacactgaattctggaggtaaa

SEQ ID NO: 527382 - DNA, 120 bp, Artificial Sequence
  ENSG00000165972_2 (sequence is synthesized)
gtaaaagatggctcaaccaaagaggacaggccttataagatctttttcagagatctctttcttgtcaaagaaaatgaaatggcagcaaaggaaacggaaaaatttatgaaccgtaacatg

SEQ ID NO: 527383 - DNA, 120 bp, Artificial Sequence
  ENSG00000165972_3 (sequence is synthesized)
aaagtctaccagaaaactactttttcatccagaatgaagagtcattcatacctgagccaactagctttctaccctaaaaggagtggtaggtcatttgaaaagtttgggccaggtcctgct

SEQ ID NO: 527384 - DNA, 120 bp, Artificial Sequence
  ENSG00000165972_4 (sequence is synthesized)
ccgattcctagattaatagaaggttccgacacaaaaaggactgtccatgaatttattaatgaccagagagacaggtttctgctcgagtatgctttgtcaaccaaaagaaacacaatcaaa

SEQ ID NO: 527385 - DNA, 120 bp, Artificial Sequence
  ENSG00000165972_5 (sequence is synthesized)
aagtttgaaaaagacatagcaatgagggaacggcaactaaaaaaagcagagaaaaagctccaagatgatgcactggcctttgaagagttccttcgagaaaatgaccagagatctgtagac

SEQ ID NO: 527386 - DNA, 120 bp, Artificial Sequence
  ENSG00000165972_6 (sequence is synthesized)
gctctgaaaatggcagcacaggaaacaataaacaaactccaaatgacagcagagctgaagaaagcaagcatggaggtacaagcagtgaaaagtgaaatagcaaaaacagaattcctcctc

SEQ ID NO: 527387 - DNA, 120 bp, Artificial Sequence
  ENSG00000165972_7 (sequence is synthesized)
aaatattagcaaaattatcattacattcaagtaacaaggaaggcatccttgaggagtccgggaggacagctgtcctttcagaagatgcttctcagggaagagacagccaaggaaagccaa

SEQ ID NO: 527388 - DNA, 120 bp, Artificial Sequence
  ENSG00000165972_8 (sequence is synthesized)
gcagaagcctgactcgcactccagagaaaaagaaatcaaacctggctgaaagtttcggttcagaagacagtttggaattccttttagatgatgaaatggacgttgatttggagccagcac

SEQ ID NO: 527389 - DNA, 120 bp, Artificial Sequence
  ENSG00000165972_9 (sequence is synthesized)
tttatttcaaggaaccagaggagttacttcaagtcctcagagagctggaagagcagaatcttactttgtttcaatattcccaagatgtagatgaaaatcttgaagaggtaaacaaaagag

SEQ ID NO: 527390 - DNA, 120 bp, Artificial Sequence
  ENSG00000165972_10 (sequence is synthesized)
aaaaagttatacaggataaaacaaatagcaacatagagtttcttttggagcaagaaaaaatgcttaaagctaactgtgtgagagaagaagagaaagcagcagaattgcaattaaagtcca

SEQ ID NO: 527391 - DNA, 120 bp, Artificial Sequence
  ENSG00000165972_11 (sequence is synthesized)
agctctttagctttggagaatttaattcagatgctcaggaaatactgatagactcacttagtaaaaagattactcaagtatacaaagtctgcattggagatgctgaggatgacggcctca

SEQ ID NO: 527392 - DNA, 120 bp, Artificial Sequence
  ENSG00000165972_12 (sequence is synthesized)
acccaattcaaaagctggtaaaagtagaatctcgcctggtagaactgtgtgacctcatcgaatccattcccaaagaaaatgtggaggcaattgagaggatgaaacagaaagaatggcggc

SEQ ID NO: 527393 - DNA, 120 bp, Artificial Sequence
  ENSG00000165972_13 (sequence is synthesized)
aaaagtttcgtgatgagaaaatgaaagaaaaacaaagacaccaacaggaaaggctaaaagctgctctggaaaaagcagtagcacaaccaaagaaaaagttgggaagacgacttgtctttc

SEQ ID NO: 527394 - DNA, 120 bp, Artificial Sequence
  ENSG00000165972_14 (sequence is synthesized)
attcaaaacctccatctggtaacaaacagcagctacctttagtcaatgaaacaaaaacaaaatcacaagaggaagaatatttttttacttgaataaaagcagtaagacattttattacca

SEQ ID NO: 527395 - DNA, 120 bp, Artificial Sequence
  ENSG00000165972_15 (sequence is synthesized)
ggagctgtgacttctacccaggagatgtggaggcaaggctatctgcattctactgttaaagcaaactaaacatggcctgagaaggactccatactccatacttctatatttgagtccttg

SEQ ID NO: 527396 - DNA, 120 bp, Artificial Sequence
  ENSG00000165972_16 (sequence is synthesized)
cgaactgcaacctaacttaataggtaaagtaaaagatggctcaaccaaagaggacaggccttataagatctttttcagagatctctttcttgtcaaagaaaatgaaatggcagcaaagga

SEQ ID NO: 527397 - DNA, 120 bp, Artificial Sequence
  ENSG00000165972_17 (sequence is synthesized)
caccagtgattacatccatattcctgccagccaggagaaaaggggaaggggggacatgccctgaagttgcattcaccacttccgctgacctgcctccaagggaggctgagaaacatagcc

SEQ ID NO: 527398 - DNA, 120 bp, Artificial Sequence
  ENSG00000165972_18 (sequence is synthesized)
tctactctgagtgttcatttagggttctattcctatagaagaaggaagaatggatattgggggttcactagtagtatctgctccactaccattttttttaaaaaagcatttaaaaggagc

SEQ ID NO: 527399 - DNA, 120 bp, Artificial Sequence
  ENSG00000165972_19 (sequence is synthesized)
catgtttggaatttattctacagatatgtatgcacaagtgattaaagatgtgtgtacaggaatatttattgcagcattgtttacaatagcaaaagactggaatcaatcataatgtccatt

SEQ ID NO: 527400 - DNA, 120 bp, Artificial Sequence
  ENSG00000165972_20 (sequence is synthesized)
tgtccattggaaagggttggttatgtaaactataatacaaccagggaatgggataatgggatactagacagacagcttctctgtcacccaagctgaagtgcagtggcaccatctcggctc

SEQ ID NO: 527401 - DNA, 78 bp, Artificial Sequence
  ENSG00000165972_21 (sequence is synthesized)
ggttcaagcaattctcgtgcctcagccttccgggtagctggaattacaggtgcccaccacgcctggctaatttttgta

SEQ ID NO: 527402 - DNA, 74 bp, Artificial Sequence
  ENSG00000165972_22 (sequence is synthesized)
gcccgcctcggtagttatttagttttttttttttttttgatgtcgtgaatatatatttgctgatataaaaggaa

SEQ ID NO: 527403 - DNA, 120 bp, Artificial Sequence
  ENSG00000165972_23 (sequence is synthesized)
ttttgatgtcgtgaatatatatttgctgatataaaaggaactcctaggtatattgctaaccaaaaaaaacaaaatgcagaatattagactagtatggattggatgatgccttttttaatt

SEQ ID NO: 527404 - DNA, 120 bp, Artificial Sequence
  ENSG00000165972_24 (sequence is synthesized)
tacagtttcctggatgttgacaagagatacaaaactcttgggtcagagacaaacgactttattactcacaaaacaacaagcagcatgagttttgacatatttggtaccagttccctaaga

SEQ ID NO: 527405 - DNA, 120 bp, Artificial Sequence
  ENSG00000165972_25 (sequence is synthesized)
cccatagccttcttttaagattaatacaattatatattaataacataatatgaacctttgaacccatcagaacccaaagacgaggatcttcacaagaaattacaacctgacaataactac

SEQ ID NO: 527406 - DNA, 120 bp, Artificial Sequence
  ENSG00000165972_26 (sequence is synthesized)
ataccctatcccttggctttcaacacctaagccaggcaccatgttgaagtctgtttagaatttttcttcactattttatttgtatgtatagttttatactgtatatatgcagtcttaaag

SEQ ID NO: 527407 - DNA, 89 bp, Artificial Sequence
  ENSG00000165972_27 (sequence is synthesized)
catgttgcccaggctggtcttgaattctcgggttcaagcgatccacttcagtgtcccaaactatccaacattatattttaagattcatt

SEQ ID NO: 527408 - DNA, 120 bp, Artificial Sequence
  ENSG00000165972_28 (sequence is synthesized)
tgcccagccaacattatattttaagattcattcatactgttgtatggtttagatcattcattttcactgctgtataatatcacaaaatgcaaatgtaccatagtttacagttgacacttc

SEQ ID NO: 527409 - DNA, 120 bp, Artificial Sequence
  ENSG00000165972_29 (sequence is synthesized)
tttgggtatttgggttgttttcagcttattgctactaaatggtgctgctaataaacattcttgttcacatctcctggtatacaagaaagtttctttgcatgtatacctaggaatagaatt

SEQ ID NO: 527410 - DNA, 120 bp, Artificial Sequence
  ENSG00000165972_30 (sequence is synthesized)
gctgaatctgacgttagctgagtattcaacttcagataataatgtcaaagtgttttccaaagtagttgtgccaatcataactctacaagaaatgtattagagatcctgtggaattatatc

SEQ ID NO: 527411 - DNA, 120 bp, Artificial Sequence
  ENSG00000165972_31 (sequence is synthesized)
ctctccaaacacttggcattgtcaagttttttaatgctttgccaatcaaatgggtgaaattatggtctttatttgcatttccctgataactaatgaagttgaacaactcttcatatgttt

SEQ ID NO: 527412 - DNA, 120 bp, Artificial Sequence
  ENSG00000165972_32 (sequence is synthesized)
attgaccataaatgtttcttcttctgttaaatgcttatttaatacagtcttttttctatttttctttaggttgttagtgctctttatattgatttgcagttttgtagatgtggtatatcc

SEQ ID NO: 527413 - DNA, 120 bp, Artificial Sequence
  ENSG00000165972_33 (sequence is synthesized)
caattatgtcatctctatggagtacaaatattttctcccagttttaatttatctttcaatttgtttatggcgtcttttgatgaacaaagtctttaatcttaatatagctgaatttatcaa

SEQ ID NO: 527414 - DNA, 120 bp, Artificial Sequence
  ENSG00000165972_34 (sequence is synthesized)
attttatattttccaaaatgatgaaatttcttcccatttcaaaatagtatttgttgtcgagatttacctgaatattcaaaagccacggttatgagtaaagatgaagtgtcattttcattt

SEQ ID NO: 527415 - DNA, 120 bp, Artificial Sequence
  ENSG00000165972_35 (sequence is synthesized)
tttgtttgtttctaagaagcaaattaacagatcttcattgcttttcagggcagcacaggaaacaataaacaaactccaaatgacagcagagctgaagaaagcaagcatggaggtacaagc

SEQ ID NO: 527416 - DNA, 120 bp, Artificial Sequence
  ENSG00000165972_36 (sequence is synthesized)
agtgaaaagcatatctgggaggatttcaatctaaaacggaggcagcagtagaatgaaggtctcccatcaatcttccaactggtgatacgtgaagcagccatttactgacccttgaatatc

SEQ ID NO: 527417 - DNA, 120 bp, Artificial Sequence
  ENSG00000165973_0 (sequence is synthesized)
acccggcgctgccgagccacctcccccgccgcccgctagcaagtttggcggctccaagccaggcgcgcctcaggatccaggctcatttgcttccacctagcttcggtgccccctgctagg

SEQ ID NO: 527418 - DNA, 120 bp, Artificial Sequence
  ENSG00000165973_1 (sequence is synthesized)
cggggaccctcgagagcgatgccgatggatttgattttagttgtgtggttctgtgtgtgcactgccaggacagtggtgggctttgggatggaccctgaccttcagatggatatcgtcacc

SEQ ID NO: 527419 - DNA, 120 bp, Artificial Sequence
  ENSG00000165973_2 (sequence is synthesized)
gagcttgaccttgtgaacaccacccttggagttgctcaggtgtctggaatgcacaatgccagcaaagcatttttatttcaagacatagaaagagagatccatgcagctcctcatgtgagt

SEQ ID NO: 527420 - DNA, 120 bp, Artificial Sequence
  ENSG00000165973_3 (sequence is synthesized)
gagaaattaattcagctgttccggaacaagagtgaattcaccattttggccactgtacagcagaagccatccacttcaggagtgatactgtccattcgagaactggagcacagctatttt

SEQ ID NO: 527421 - DNA, 120 bp, Artificial Sequence
  ENSG00000165973_4 (sequence is synthesized)
gaactggagagcagtggcctgagggatgagattcggtatcactacatacacaatgggaagccaaggacagaggcacttccttaccgcatggcagatggacaatggcacaaggttgcactg

SEQ ID NO: 527422 - DNA, 120 bp, Artificial Sequence
  ENSG00000165973_5 (sequence is synthesized)
tcagttagcgcctctcatctcctgctccatgtcgactgtaacaggatttatgagcgtgtgatagaccctccagataccaaccttcccccaggaatcaatttatggcttggccagcgcaac

SEQ ID NO: 527423 - DNA, 120 bp, Artificial Sequence
  ENSG00000165973_6 (sequence is synthesized)
caaaagcatggcttattcaaagggatcatccaagatgggaagatcatctttatgccgaatggatatataacacagtgtccaaatctaaatcacacttgcccaacctgcagtgatttctta

SEQ ID NO: 527424 - DNA, 120 bp, Artificial Sequence
  ENSG00000165973_7 (sequence is synthesized)
agcctggtgcaaggaataatggatttacaagagcttttggccaagatgactgcaaaactaaattatgcagagacaagacttagtcaattggaaaactgtcattgtgagaagacttgtcaa

SEQ ID NO: 527425 - DNA, 120 bp, Artificial Sequence
  ENSG00000165973_8 (sequence is synthesized)
gtgagtggactgctctatcgagatcaagactcttgggtagatggtgaccattgcaggaactgcacttgcaaaagtggtgccgtggaatgccgaaggatgtcctgtccccctctcaattgc

SEQ ID NO: 527426 - DNA, 120 bp, Artificial Sequence
  ENSG00000165973_9 (sequence is synthesized)
tccccagactccctcccagtgcacattgctggccagtgctgtaaggtctgccgaccaaaatgtatctatggaggaaaagttcttgcagaaggccagcggattttaaccaagagctgtcgg

SEQ ID NO: 527427 - DNA, 120 bp, Artificial Sequence
  ENSG00000165973_10 (sequence is synthesized)
gaatgccgaggtggagttttagtaaaaattacagaaatgtgtcctcctttgaactgctcagaaaaggatcacattcttcctgagaatcagtgctgccgtgtctgtagaggtcataacttt

SEQ ID NO: 527428 - DNA, 120 bp, Artificial Sequence
  ENSG00000165973_11 (sequence is synthesized)
tgtgcagaaggacctaaatgtggtgaaaactcagagtgcaaaaactggaatacaaaagctacttgtgagtgcaagagtggttacatctctgtccagggagactctgcctactgtgaagat

SEQ ID NO: 527429 - DNA, 120 bp, Artificial Sequence
  ENSG00000165973_12 (sequence is synthesized)
attgatgagtgtgcagctaagatgcattactgtcatgccaatactgtgtgtgtcaaccttcctgggttatatcgctgtgactgtgtcccaggatacattcgtgtggatgacttctcttgt

SEQ ID NO: 527430 - DNA, 120 bp, Artificial Sequence
  ENSG00000165973_13 (sequence is synthesized)
ccatctgcagagctttctgtgaagagggctgcagatacggtggaacgtgtgtggctcccaacaaatgtgtctgtccatctggattcacaggaagccactgcgagaaagatattgatgaat

SEQ ID NO: 527431 - DNA, 120 bp, Artificial Sequence
  ENSG00000165973_14 (sequence is synthesized)
gttcagagggaatcattgagtgccacaaccattcccgctgcgttaacctgccagggtggtaccactgtgagtgcagaagcggtttccatgacgatgggacctattcactgtccggggagt

SEQ ID NO: 527432 - DNA, 120 bp, Artificial Sequence
  ENSG00000165973_15 (sequence is synthesized)
cctgtattgacattgatgaatgtgccttaagaactcacacctgttggaacgattctgcctgcatcaacctggcagggggctttgactgtctctgcccctctgggccctcctgctctggtg

SEQ ID NO: 527433 - DNA, 120 bp, Artificial Sequence
  ENSG00000165973_16 (sequence is synthesized)
actgtcctcatgaaggggggctgaagcacaatggccaggtgtggaccttgaaagaagacaggtgttctgtctgctcctgcaaggatggcaagatattctgccgacggacagcttgtgatt

SEQ ID NO: 527434 - DNA, 120 bp, Artificial Sequence
  ENSG00000165973_17 (sequence is synthesized)
gccagaatccaagtgctgacctattctgttgcccagaatgtgacaccagagtcacaagtcaatgtttagaccaaaatggtcacaagctgtatcgaagtggagacaattggacccatagct

SEQ ID NO: 527435 - DNA, 120 bp, Artificial Sequence
  ENSG00000165973_18 (sequence is synthesized)
gtcagcagtgtcggtgtctggaaggagaggtagattgctggccactcacttgccccaacttgagctgtgagtatacagctatcttagaaggggaatgttgtccccgctgtgtcagtgacc

SEQ ID NO: 527436 - DNA, 120 bp, Artificial Sequence
  ENSG00000165973_19 (sequence is synthesized)
cctgcctagctgataacatcacctatgacatcagaaaaacttgcctggacagctatggtgtttcacggcttagtggctcagtgtggacgatggctggatctccctgcacaacctgtaaat

SEQ ID NO: 527437 - DNA, 120 bp, Artificial Sequence
  ENSG00000165973_20 (sequence is synthesized)
gcaagaatggaagagtctgttgttctgtggattttgagtgtcttcaaaataattgaagtatttacagtggactcaacgcagaagaatggacgaaatgaccatccaacgtgattaaggata

SEQ ID NO: 527438 - DNA, 120 bp, Artificial Sequence
  ENSG00000165973_21 (sequence is synthesized)
ggaatcggtagtttggtttttttgtttgttttgtttttttaaccacagataattgccaaagtttccacctgaggacggtgtttggaggttgccttttggacctaccactttgctcattct

SEQ ID NO: 527439 - DNA, 120 bp, Artificial Sequence
  ENSG00000165973_22 (sequence is synthesized)
tgctaacctagtctaggtgacctacagtgccgtgcatttaagtcaatggttgttaaaagaagtttcccgtgttgtaaatcatgtttcccttatcagatcatttgcaaatacatttaaatg

SEQ ID NO: 527440 - DNA, 120 bp, Artificial Sequence
  ENSG00000165973_23 (sequence is synthesized)
atctcatggtaaatgttgatgtattttttggtttattttgtgtactaacataatagagagagactcagctccttttatttattttgttgatttatggatcaaattctaaaataaagttgc

SEQ ID NO: 527441 - DNA, 120 bp, Artificial Sequence
  ENSG00000165973_24 (sequence is synthesized)
ctgttgtgacttttgtcccatctactgcatacttagtgctgagatccctgtaaaatgttttgatgaaaatatgtatgtagagtccagtcgcattatacatacatttcatagtgctgaacc

SEQ ID NO: 527442 - DNA, 120 bp, Artificial Sequence
  ENSG00000165973_25 (sequence is synthesized)
ttcttaaatgcctactcattcagcttaaacaggctgaagccaagtatgacaaagaggggaagggccaaaaacataatcaaagaataattttaaagagaattcttgtctctcttgcaaaaa

SEQ ID NO: 527443 - DNA, 120 bp, Artificial Sequence
  ENSG00000165973_26 (sequence is synthesized)
agagctaggaagttgtggtggtactgaagaagagggatgacgacagcctgaacaaagacagtgtctgggggcagaggcaaaatgtatctatggaggaaaagttcttgcagaaggccagcg

SEQ ID NO: 527444 - DNA, 120 bp, Artificial Sequence
  ENSG00000165973_27 (sequence is synthesized)
gaatgttctttgaggcactctgacaagtaagacagaaggcagaggagtgcacaataaaggagcctctagacagccccggaggtaggaggacaacaggaagaatgcagtgtcaaaagggca

SEQ ID NO: 527445 - DNA, 120 bp, Artificial Sequence
  ENSG00000165973_28 (sequence is synthesized)
gaatgtttcaaaaggaggcagagcacgactgtttgggaagttaccaagggttcacttagtggtcaggccaccgtctggccattaactttggcacaatgtagagaataagatttgtaagag

SEQ ID NO: 527446 - DNA, 120 bp, Artificial Sequence
  ENSG00000165973_29 (sequence is synthesized)
agagagaattatgacccaagcaagaatcatgggtccagaattccacccaaggaagctagttcaaagccagagaaagagcacagcttttcacacaattgaatagatctcaacttcatgatt

SEQ ID NO: 527447 - DNA, 120 bp, Artificial Sequence
  ENSG00000165973_30 (sequence is synthesized)
ttggtattgaagatgctgacagtagccagtggctctgtgaaggcaattttccaacctaccattcttggctactcctgggatattttacttggctgtgagatccccctgagaagcttctct

SEQ ID NO: 527448 - DNA, 120 bp, Artificial Sequence
  ENSG00000165973_31 (sequence is synthesized)
ttttctcacacaattcctccatcagcgaagtgtggtgggcagcacacagtgactatgattcctggagatggcactgggactgaacttatgctgcctgtcaagattatgttcagacatgtg

SEQ ID NO: 527449 - DNA, 120 bp, Artificial Sequence
  ENSG00000165973_32 (sequence is synthesized)
tgtgtgcctgtggactttgagggaatgtcagtgacctccacctctgcctcacatgaagaggaaattcataatgccatcatggcagttcattgaaaccgtgtggctttgaagagtagcgtt

SEQ ID NO: 527450 - DNA, 120 bp, Artificial Sequence
  ENSG00000165973_33 (sequence is synthesized)
aaaactgacgacaccctgccaccatcatacaaatccttcaacaacatgttgcataccaccctagatctctatgccagtgtcattcatttaaaaaatttgccaaacgtggagacctggcac

SEQ ID NO: 527451 - DNA, 120 bp, Artificial Sequence
  ENSG00000165973_34 (sequence is synthesized)
aaagatgtagacatcctagttgtttgggaaaacacagagggtgagtatagcaatctggagcatgagagtgtgaaaggagtgacagagagcctaaagatcatgactaaggccaagtctttg

SEQ ID NO: 527452 - DNA, 120 bp, Artificial Sequence
  ENSG00000165973_35 (sequence is synthesized)
tgcattgctgaatatgccttccagctggcccagaagatgggatgcaaaaaagtgatggctgtgcacaaggtcaacatcacgaaactgggagatggtctcttcctccagtgctgtggggga

SEQ ID NO: 527453 - DNA, 120 bp, Artificial Sequence
  ENSG00000165973_36 (sequence is synthesized)
agaaagtggtgagaatgctggctccatgaaagaggtctgcgagagcagggaccttgtttgctctccagggcttactgcaacagactggcacataagtgtctaataaatattccgacagaa

SEQ ID NO: 527454 - DNA, 120 bp, Artificial Sequence
  ENSG00000165973_37 (sequence is synthesized)
aaagcacacacatttatgaacacccatgaggttcctgagttacagtttaatgtctcatttggtattcattagaccatgacagccaatatttcttcaatttagagtgattccaccttgtgt

SEQ ID NO: 527455 - DNA, 120 bp, Artificial Sequence
  ENSG00000165973_38 (sequence is synthesized)
aaaataaaaaaaacaaaaaacagataatgctaagaatcagtgaactgctctgagcatttttttctcttctcagaaggattttttttcttgttgctattagctttgttaggatgatgcaat

SEQ ID NO: 527456 - DNA, 120 bp, Artificial Sequence
  ENSG00000165973_39 (sequence is synthesized)
gctggttcatcagggactgacattgcttcatgactcctggctgctgtggaaaataatttttcccctccttctgatagcaagatggagtctggctctctgtcacccaggctggagtgcagt

SEQ ID NO: 527457 - DNA, 89 bp, Artificial Sequence
  ENSG00000165973_40 (sequence is synthesized)
tgctgggattacagacatagaaagagagatccatgcagctcctcatgtgagtgagaaattaattcagctgttccggaacaagagtgaat

SEQ ID NO: 527458 - DNA, 120 bp, Artificial Sequence
  ENSG00000165983_0 (sequence is synthesized)
aaaaaggccagggaagttggcctgccggaagttcccagggagaaggcagcgcgttgtacccgagattcagggtctggctctgcttcccaggctagagtgcatttggcgcgatcacagctc

SEQ ID NO: 527459 - DNA, 120 bp, Artificial Sequence
  ENSG00000165983_1 (sequence is synthesized)
actgcagcctcgacctcctgagctcaagcgaacttcctgcctcagcctcctgagcttcctgagtagctgcgactacagaaaaaagaaatcctctttttagaacatctcttggtggtacca

SEQ ID NO: 527460 - DNA, 120 bp, Artificial Sequence
  ENSG00000165983_2 (sequence is synthesized)
tcagaaatgtcttccttaagtggaaaagtccaaaccgttttgggccttgtagagccaagcaaactgggccgtaccctgacccatgaacacctggccatgacctttgactgctgttactgt

SEQ ID NO: 527461 - DNA, 120 bp, Artificial Sequence
  ENSG00000165983_3 (sequence is synthesized)
ccacctcccccgtgccaggaagctatttccaaagaacctatcgtgatgaaaaatttatattggattcagaaaaacgcctattcccataaagaaaaccttcaattaaatcaggagacagaa

SEQ ID NO: 527462 - DNA, 120 bp, Artificial Sequence
  ENSG00000165983_4 (sequence is synthesized)
gccataaaggaagaactgttgtattttaaagctaatggtggaggggctttggtggaaaacacaaccactgggattagccgagacacacagacgttgaagaggcttgcagaagagactggc

SEQ ID NO: 527463 - DNA, 120 bp, Artificial Sequence
  ENSG00000165983_5 (sequence is synthesized)
gtccatatcatatctggagccgggttttatgtggatgcaactcactcctcagagaccagggccatgtcagtggagcagcttaccgatgtccttatgaatgaaattctccatggagctgat

SEQ ID NO: 527464 - DNA, 120 bp, Artificial Sequence
  ENSG00000165983_6 (sequence is synthesized)
ggaaccagtatcaagtgtggcattattggagaaattggttgctcctggcctttgactgagagtgaaagaaaggttctccaggccacagctcatgcccaggctcagcttggttgtcctgtt

SEQ ID NO: 527465 - DNA, 120 bp, Artificial Sequence
  ENSG00000165983_7 (sequence is synthesized)
attatccatcctggacggagctccagggcaccatttcagattatccgaatattgcaagaagcaggcgcagacatctccaaaacagtcatgtcacacctggataggactattcttgataag

SEQ ID NO: 527466 - DNA, 120 bp, Artificial Sequence
  ENSG00000165983_8 (sequence is synthesized)
aaagagctcttggagtttgctcaacttggctgctacttggaatatgatctctttggtactgaactacttcattaccaactcggcccagatattgacatgcctgatgataacaaaagaatt

SEQ ID NO: 527467 - DNA, 120 bp, Artificial Sequence
  ENSG00000165983_9 (sequence is synthesized)
agaagggtgcgtctcctggtggaagagggctgtgaagatcgaattctggtagcacatgacatacatacgaaaacccggctgatgaaatatggaggtcacggctattctcatatactcacc

SEQ ID NO: 527468 - DNA, 120 bp, Artificial Sequence
  ENSG00000165983_10 (sequence is synthesized)
aatgttgttcctaaaatgttgctgagaggcataactgagaatgtgcttgataagattctaatagagaaccctaagcaatggctaactttcaaataggatggttgcttatgaattcacacc

SEQ ID NO: 527469 - DNA, 120 bp, Artificial Sequence
  ENSG00000165983_11 (sequence is synthesized)
ttgagtataaaacttgcagagaacattcagcgatttccagtccactgtgagatattaatcagttacctaggactaatgacagatcatttccttctgatgagaactaggagggtttgcctt

SEQ ID NO: 527470 - DNA, 120 bp, Artificial Sequence
  ENSG00000165983_12 (sequence is synthesized)
ctctgagaccagctattacaactgtgcctctagggagttactcagcctaattgagccctattattttaacttaacaaaataaatacagaagtacctatttctaaacaatgatttaaagtc

SEQ ID NO: 527471 - DNA, 120 bp, Artificial Sequence
  ENSG00000165983_13 (sequence is synthesized)
tatatcccctaagcggagttgttgtttttctccctaatctatcagctgcactacttgagaaaatttaaagtgtttctagttaaattatttccttcttgagcgatctaatgtttcttgtaa

SEQ ID NO: 527472 - DNA, 120 bp, Artificial Sequence
  ENSG00000165983_14 (sequence is synthesized)
tattgatgatcctactaattatcctgctgttctttaattaatgcttaatgaataatatggcactgtaaaatagcttctgcaacaagggaagttaaattttgagacttttttccccaaagg

SEQ ID NO: 527473 - DNA, 120 bp, Artificial Sequence
  ENSG00000165983_15 (sequence is synthesized)
ttttatactgtccacctatctatatattcttctactgaaatgattttgatatctttggctttccggtatctatttttgccatacattttgctgttttgcaaagtttgtataagaacacat

SEQ ID NO: 527474 - DNA, 120 bp, Artificial Sequence
  ENSG00000165983_16 (sequence is synthesized)
tgcaaagtttgtataagaacacataacactactgaattataaaaattcaatcataaaagtcaaaatatattacataatatagtttaatgaatcattacatttataataacaaaggccaca

SEQ ID NO: 527475 - DNA, 120 bp, Artificial Sequence
  ENSG00000165983_17 (sequence is synthesized)
tgcaaaaaaaaaaagagaaatgtttgccttatgtatattccctttatttcctttaccttttgtttttccttggacctaaacagagaaaataatgcttatgtatctgaagaaaaggtcaga

SEQ ID NO: 527476 - DNA, 120 bp, Artificial Sequence
  ENSG00000165983_18 (sequence is synthesized)
tctattggaaatgacagcccgatacttgagcctcctctttaaaaggtatccagccctgatattttgtgtaaataaaatgtttttaaaacctgttagttaaaacacttaggtgatgggcac

SEQ ID NO: 527477 - DNA, 120 bp, Artificial Sequence
  ENSG00000165983_19 (sequence is synthesized)
tgctgcttataaattcatcttttggttgaatcctcactatgctatttggtacctaaaaatattctccaaacccttgctgccagttcctctttgataaatatatagttaattcgaaataaa

SEQ ID NO: 527478 - DNA, 120 bp, Artificial Sequence
  ENSG00000165983_20 (sequence is synthesized)
atccattgcaattcatttatgagttatcttacatatcacaaagaccaattagaattagtcattattcttgatgaagagtctgtttttaatcataaaaatcatgacagttactcagaccca

SEQ ID NO: 527479 - DNA, 120 bp, Artificial Sequence
  ENSG00000165983_21 (sequence is synthesized)
ggcatttcaacagagctaacaccaccttcagataggcacaccatgcataactcttgggaagttgagctttgctaaataaaagatatttctgctgatcaaagatgatcaagctttctgtgt

SEQ ID NO: 527480 - DNA, 120 bp, Artificial Sequence
  ENSG00000165983_22 (sequence is synthesized)
attggaacagaaagtaacaaagaggaatgagccaggagaacaaactaattcctttaaataaataaaaaaaaaaaatgcaaatgtccttcaccagtaaagcaagcaaatttttaaaatctc

SEQ ID NO: 527481 - DNA, 120 bp, Artificial Sequence
  ENSG00000165983_23 (sequence is synthesized)
tgtttttgaaatctactcgtcaaagagttttcagaggcaatgaaaggggaacagatttttcattgtaatagtggaagttgtgtgatagttaggagatatcaacatgcatttttaatcttt

SEQ ID NO: 527482 - DNA, 120 bp, Artificial Sequence
  ENSG00000165983_24 (sequence is synthesized)
tccttagatgaaagagatggcttttggcagtgtgttctaaccagaaagaaaggatttgtattactctccaaatctactgtactgtcagcttcactccacctgagaaaaaagaaaaaaaaa

SEQ ID NO: 527483 - DNA, 120 bp, Artificial Sequence
  ENSG00000165983_25 (sequence is synthesized)
ttgatagctcaaatgcatgtaattcataaacactgcaaaggagagccacttggtgtctgcagtcctcatattaacagtctgtcacagaatgcagttaaagtattgattggcatatggtaa

SEQ ID NO: 527484 - DNA, 120 bp, Artificial Sequence
  ENSG00000165983_26 (sequence is synthesized)
tagagcaaccatagccttaacttacagacctgtgaaataaagggcattttgacctaatacaattaattttctggataactcttaaagagaagtcattttaactgtttttgctactccata

SEQ ID NO: 527485 - DNA, 120 bp, Artificial Sequence
  ENSG00000165983_27 (sequence is synthesized)
tattgtcattcaaaatatattttaacccaaaataagttaaataatttgtgcatgtttgtgtgtgtatatatgcatacacttttttatattaaaattttgaggctatacagccactgtgcc

SEQ ID NO: 527486 - DNA, 120 bp, Artificial Sequence
  ENSG00000165983_28 (sequence is synthesized)
ctgtggaataaagccatatatataaatgttttatatgtatatgttttatacataaataaaacatttcatctaatatatatatgtgtgtgtgagtatatgtgtgcatgtttagcagatatt

SEQ ID NO: 527487 - DNA, 120 bp, Artificial Sequence
  ENSG00000165983_29 (sequence is synthesized)
tgtataaaatataaacactctgttgtcatataggctatatgcgaaattgttaattttaaaataacctcaggccacagacttgtagtaatcatttgaaggcctcacctagtgtccccttgg

SEQ ID NO: 527488 - DNA, 120 bp, Artificial Sequence
  ENSG00000165983_30 (sequence is synthesized)
tgacgtatgcagcagctcaaattaaacctttgtgcattgggttatgaataatcttttcttccaaagatggcaaaagcctcggtttgatttgatactaaagaataaatttctctgactttc

SEQ ID NO: 527489 - DNA, 120 bp, Artificial Sequence
  ENSG00000165983_31 (sequence is synthesized)
gagagaaccagagggcgaagtgggagggcacaggggagactaaaaaggccagggaagttggcctgccggaagttcccagggagaaggcagcgcgttgtacccgagaaaaaagaaatcctc

SEQ ID NO: 527490 - DNA, 120 bp, Artificial Sequence
  ENSG00000165983_32 (sequence is synthesized)
gagagaaccagagggcgaagtgggagggcacaggggagactaaaaaggccagggaagttggcctgccggaagttcccagggagaaggcagcgcgttgtacccgagcttaccgatgtcctt

SEQ ID NO: 527491 - DNA, 120 bp, Artificial Sequence
  ENSG00000165983_33 (sequence is synthesized)
aaattaagaatctacagtaatcagtcaatgcaatactaatcacgcagagaaaaccactaactatatggaaggtagtatttataaagtttcacaactgacatgaataaaagtcaatgctgc

SEQ ID NO: 527492 - DNA, 120 bp, Artificial Sequence
  ENSG00000165985_0 (sequence is synthesized)
ctcctcttctcctggcaggtggtacccaggcagaattctgccttcagtctctctctcgctccgctcccggccgtgaggcgctcgccgctgctcgctcgctcctccgccccagctctgagc

SEQ ID NO: 527493 - DNA, 120 bp, Artificial Sequence
  ENSG00000165985_1 (sequence is synthesized)
ctcgccgtgccgaccgtgcccgccgccgccgccgctgggcgcacccgggggacgcccgggcccacgcggggctttggggtgcgcgtctattcgagttgtggtggtggcaaaggaggaaga

SEQ ID NO: 527494 - DNA, 120 bp, Artificial Sequence
  ENSG00000165985_2 (sequence is synthesized)
gagaaaggaggcaataaaaaaaaaaggcagcggacgggcgaactgagcgagcgaaagaagaggaggaggaggcagaaaaaggcaacttcagacggaaagttggtgcgaacaggcgcagtc

SEQ ID NO: 527495 - DNA, 120 bp, Artificial Sequence
  ENSG00000165985_3 (sequence is synthesized)
tgcaaaaacggaaaagtcgatcgcaggcggcggcggcataaaagtgtgagctgcccgggcgagctcaggaggcggcggctggctctgccctcccggtggccgcgccggcgccggctgcag

SEQ ID NO: 527496 - DNA, 80 bp, Artificial Sequence
  ENSG00000165985_4 (sequence is synthesized)
gcgcacccctcccccggcccccaccccgggctcgggacttcggctcaagtcactgggcgcccgcgctccctccccagccg

SEQ ID NO: 527497 - DNA, 120 bp, Artificial Sequence
  ENSG00000165985_5 (sequence is synthesized)
cagcctccgcggggggagcaggagtcggcagcagcggccggcgcacgcacgcccaggggagttggggttcgcagggggttgttttcggctctgaagaggtccccgcccaaccttcaaaat

SEQ ID NO: 527498 - DNA, 120 bp, Artificial Sequence
  ENSG00000165985_6 (sequence is synthesized)
tctgtccaaaagcagacaagaggatcgccccgcgctgagccggctggtgggcagcaggaggcgcctgatcgccgccggggcgctgggggtggtgatggtgctgctgctggtgatcctcat

SEQ ID NO: 527499 - DNA, 120 bp, Artificial Sequence
  ENSG00000165985_7 (sequence is synthesized)
cccggtgctggtgagctcggccggcacgtcggcgcactacgagatgctgggcacctgccgcatggtctgcgacccctacgggggcaccaaggcgcccagcaccgctgccacgcccgaccg

SEQ ID NO: 527500 - DNA, 120 bp, Artificial Sequence
  ENSG00000165985_8 (sequence is synthesized)
caccaaggcgcccagcaccgctgccacgcccgaccgcggcctcatgcagtccctgcccaccttcatccagggccccaaaggcgaggccggcaggcccgggaaggcgggtccgcgcgggcc

SEQ ID NO: 527501 - DNA, 120 bp, Artificial Sequence
  ENSG00000165985_9 (sequence is synthesized)
cagcacggtgcccaagatcgccttctacgccggcctcaagcggcagcatgaaggctacgaggtgctcaagttcgacgacgtggtcaccaacctcggaaaccactacgaccccaccaccgg

SEQ ID NO: 527502 - DNA, 120 bp, Artificial Sequence
  ENSG00000165985_10 (sequence is synthesized)
caagttcacctgctccatcccgggcatctacttcttcacctaccacgtcctgatgcgcggaggggacggcaccagcatgtgggctgatctctgcaaaaacaaccaggtgcgtgctagtgc

SEQ ID NO: 527503 - DNA, 120 bp, Artificial Sequence
  ENSG00000165985_11 (sequence is synthesized)
aattgcccaagatgctgatcagaattacgactatgccagtaacagtgtggttcttcatttggagccgggagatgaagtctatatcaaattagatggcgggaaagcccatggaggaaacaa

SEQ ID NO: 527504 - DNA, 120 bp, Artificial Sequence
  ENSG00000165985_12 (sequence is synthesized)
caacaaatacagcacgttttctggatttattatttatgctgactgataatgcagaaactaagcttattattctgagtttgaacactggattcgtatggctaacgtcagtgaatcaaggat

SEQ ID NO: 527505 - DNA, 120 bp, Artificial Sequence
  ENSG00000165985_13 (sequence is synthesized)
cccaggggatgccaatggcagggcacctcagttgtgtatatgtggggaaatcaaatgctacctgactcacatctgtatcactcagaaacattatgtaaaaaatatcaaagcaagataagc

SEQ ID NO: 527506 - DNA, 120 bp, Artificial Sequence
  ENSG00000165985_14 (sequence is synthesized)
agatgtgtgatccactaccgccaaagcaaatactccttatcgttagtgtccatgtgaatgaagtcctatatagatcacaaatttttatagacaaatctaagacattgaattatttcttct

SEQ ID NO: 527507 - DNA, 120 bp, Artificial Sequence
  ENSG00000165985_15 (sequence is synthesized)
atatatatgatactttggtgtactgtgatcttgctgcttttatccatatgtcagctttggttcttgtgagtttacctgcttattatgatacttggagtccattcatagtgtggggaagaa

SEQ ID NO: 527508 - DNA, 120 bp, Artificial Sequence
  ENSG00000165985_16 (sequence is synthesized)
tgatttttgccctgcaggagaaggtctaattgaaataatgctgcttgtccccaaagaaattgtttgccttgtactcttgttaaccttagagctagacctgggaatgattcaacttcaagc

SEQ ID NO: 527509 - DNA, 120 bp, Artificial Sequence
  ENSG00000165985_17 (sequence is synthesized)
cttaacctggaattttctggatttgagggaattcccaagcctatgatctttttcacattttctttttcttatatgaattttcttttctctcttttctggtgatagtctttaaaaatagag

SEQ ID NO: 527510 - DNA, 120 bp, Artificial Sequence
  ENSG00000165985_18 (sequence is synthesized)
attgacagtgtatcataggattaccctctaagtgtgaaaatgtgtaattatgtacggtatttagaaaaagcccttatgtgtccattttgtcaactgaatacatttagattcactgggaaa

SEQ ID NO: 527511 - DNA, 120 bp, Artificial Sequence
  ENSG00000165995_0 (sequence is synthesized)
cacctcctcccctcgtcgcctgcccaccctctgctcctctcctggcgccggggaccctgcccctttgcgccttttcctggctctgcctcggcttccatttttctctgcttccgaaaagcc

SEQ ID NO: 527512 - DNA, 120 bp, Artificial Sequence
  ENSG00000165995_1 (sequence is synthesized)
agtggggaagggcgggggagacctgccagtcctcccagacttctcccgggttgctccagctggccctcctcgccccttcccgggagaggcacatggagagacatgaatcaggggagtgga

SEQ ID NO: 527513 - DNA, 120 bp, Artificial Sequence
  ENSG00000165995_2 (sequence is synthesized)
ctggacctgctgaagatctcatatggaaaaggagccagaaggaaaaacagatttaaaggatctgatggaagcacgtcatctgatactacctcaaatagttttgttcgccagggttcggca

SEQ ID NO: 527514 - DNA, 120 bp, Artificial Sequence
  ENSG00000165995_3 (sequence is synthesized)
gactcctacactagccgtccatccgattccgatgtatctctggaggaggaccgggaggcagtgcgcagagaagcggagcggcaggcccaggcacagttggaaaaagcaaagacaaagccc

SEQ ID NO: 527515 - DNA, 120 bp, Artificial Sequence
  ENSG00000165995_4 (sequence is synthesized)
gttgcatttgcggttcggacaaatgtcagctacagtgcggcccatgaagatgatgttccagtgcctggcatggccatctcattcgaagcaaaagattttctgcatgttaaggaaaaattt

SEQ ID NO: 527516 - DNA, 120 bp, Artificial Sequence
  ENSG00000165995_5 (sequence is synthesized)
aacaatgactggtggatagggcgattggtaaaagaaggctgtgaaatcggattcattccaagcccagtcaaactagaaaacatgaggctgcagcatgaacagagagccaagcaagggaaa

SEQ ID NO: 527517 - DNA, 120 bp, Artificial Sequence
  ENSG00000165995_6 (sequence is synthesized)
ttctactccagtaaatcaggaggaaattcatcatccagtttgggtgacatagtacctagttccagaaaatcaacacctccatcatctgctatagacatagatgctactggcttagatgca

SEQ ID NO: 527518 - DNA, 120 bp, Artificial Sequence
  ENSG00000165995_7 (sequence is synthesized)
gaagaaaatgatattccagcaaaccaccgctcccctaaacccagtgcaaacagtgtaacgtcaccccactccaaagagaaaagaatgcccttctttaagaagacagagcacactcctccg

SEQ ID NO: 527519 - DNA, 120 bp, Artificial Sequence
  ENSG00000165995_8 (sequence is synthesized)
tatgatgtggtaccttccatgcgaccagtggtcctagtgggcccttctctgaagggctacgaggtcacagatatgatgcaaaaagcgctgtttgattttttaaaacacagatttgaaggg

SEQ ID NO: 527520 - DNA, 120 bp, Artificial Sequence
  ENSG00000165995_9 (sequence is synthesized)
cggatatccatcacaagggtcaccgctgacatctcgcttgccaaacgctcggtattaaacaatcccagtaagcacgcaataatagaaagatccaacacaaggtcaagcttagcggaagtt

SEQ ID NO: 527521 - DNA, 120 bp, Artificial Sequence
  ENSG00000165995_10 (sequence is synthesized)
cagagtgaaatcgaaaggatttttgaacttgcaagaacattgcagttggtggtccttgacgcggatacaattaatcatccagctcaactcagtaaaacctccttggcccctattatagta

SEQ ID NO: 527522 - DNA, 120 bp, Artificial Sequence
  ENSG00000165995_11 (sequence is synthesized)
tatgtaaagatttcttctcctaaggttttacaaaggttaataaaatctcgagggaaatctcaagctaaacacctcaacgtccagatggtagcagctgataaactggctcagtgtcctcca

SEQ ID NO: 527523 - DNA, 120 bp, Artificial Sequence
  ENSG00000165995_12 (sequence is synthesized)
gagctgttcgatgtgatcttggatgagaaccagcttgaggatgcctgtgagcaccttgccgactatctggaggcctactggaaggccacccatcctcccagcagtagcctccccaaccct

SEQ ID NO: 527524 - DNA, 120 bp, Artificial Sequence
  ENSG00000165995_13 (sequence is synthesized)
gccccaccctagcctctaattcacagggttctcaaggtgatcagaggactgatcgctccgctcctatccgttctgcttcccaagctgaagaagaacctagtgtggaaccagtcaagaaat

SEQ ID NO: 527525 - DNA, 120 bp, Artificial Sequence
  ENSG00000165995_14 (sequence is synthesized)
cccagcaccgctcttcctcctcagccccacaccacaaccatcgcagtgggacaagtcgcggcctctccaggcaagagacatttgactcggaaacccaggagagtcgagactctgcctacg

SEQ ID NO: 527526 - DNA, 120 bp, Artificial Sequence
  ENSG00000165995_15 (sequence is synthesized)
tagagccaaaggaagattattcccatgaccacgtggaccactatgcctcacaccgtgaccacaaccacagagacgagacccacgggagcagtgaccacagacacagggagtcccggcacc

SEQ ID NO: 527527 - DNA, 120 bp, Artificial Sequence
  ENSG00000165995_16 (sequence is synthesized)
gttcccgggacgtggatcgagagcaggaccacaacgagtgcaacaagcagcgcagccgtcataaatccaaggatcgctactgtgaaaaggatggagaagtgatatcaaaaaaacggaatg

SEQ ID NO: 527528 - DNA, 120 bp, Artificial Sequence
  ENSG00000165995_17 (sequence is synthesized)
aggctggggagtggaacagggatgtttacatccgccaatgagttttgcccgtttgtgtttttttttttttttttttgaagtcttgtataactaacagcatccccaaaacaaagtctttgg

SEQ ID NO: 527529 - DNA, 120 bp, Artificial Sequence
  ENSG00000165995_18 (sequence is synthesized)
ggtctacactgcaatcatatgtgatctgtcttgtaatattttgtattattgctgttgcttgaatagcaatagcatggatagagtattgagatactttttcttttgtaagtgctacataaa

SEQ ID NO: 527530 - DNA, 120 bp, Artificial Sequence
  ENSG00000165995_19 (sequence is synthesized)
ttggcctggtatggctgcagtcctccggttgcatactggactcttcaaaaactgttttgggtagctgccacttgaacaaaatctgttgccacccaggtgatgttagtgttttaagaaatg

SEQ ID NO: 527531 - DNA, 120 bp, Artificial Sequence
  ENSG00000165995_20 (sequence is synthesized)
tagttgatgtatccaacaagccagaatcagcacagataaaaagtggaatttcttgtttctccagatttttaatacgttaatacgcaggcatctgatttgcatattcattcatggaccact

SEQ ID NO: 527532 - DNA, 120 bp, Artificial Sequence
  ENSG00000165995_21 (sequence is synthesized)
gtttcttgcttgtacctctggctgactaaatttggggacagattcagtcttgccttacacaaaggggatcataaagttagaatctattttctatgtactagtactgtgtactgtatagac

SEQ ID NO: 527533 - DNA, 120 bp, Artificial Sequence
  ENSG00000165995_22 (sequence is synthesized)
agtttgtaaatgttatttctgcaaacaaacaccttcttattatatatataatatatatatatatcagtttgatcacactattttagagtcttaatgccaagtcagcagatttgctttatg

SEQ ID NO: 527534 - DNA, 120 bp, Artificial Sequence
  ENSG00000165995_23 (sequence is synthesized)
aattacagggactagaaatgcccacattcaggaaatttgtaataacattgtctagacacctatcctcattctagtagaaagtgtgtacatactgtaaatatgtgtgattgcttgacttga

SEQ ID NO: 527535 - DNA, 120 bp, Artificial Sequence
  ENSG00000165995_24 (sequence is synthesized)
aaaggtttgaattctgaatgttataccatccttgtaagtaagtttgtaatttccaccataaattatggtaaatataaaactccagaggttgttctactccatacagttcacactgattgt

SEQ ID NO: 527536 - DNA, 120 bp, Artificial Sequence
  ENSG00000165995_25 (sequence is synthesized)
gacacattcttagtagctagtgtctgttctagtcactgcactggagtctacgagccggaactcgctatatgcacgtgtgtgtgtccgtatgtaagaaagtgtgcaccgagtgactgaatg

SEQ ID NO: 527537 - DNA, 120 bp, Artificial Sequence
  ENSG00000165995_26 (sequence is synthesized)
gagatctccaaagataaggcttgaactttgcacttgcaaatgtcactgcatacgtttttgcactagtttttttttttttttttctgcgattcttttacaactaatttcttttaacaattt

SEQ ID NO: 527538 - DNA, 120 bp, Artificial Sequence
  ENSG00000165995_27 (sequence is synthesized)
gagcgcagggaagagaatgtttagggttatgagatgcattaagtttagaacgagttgatgctcggcttttgaatgcacttgtcttctttatttttaaagcaatataaagcactcgagtgt

SEQ ID NO: 527539 - DNA, 120 bp, Artificial Sequence
  ENSG00000165995_28 (sequence is synthesized)
gtgttttcagcccctcctggaatgggaaaataagaatctccctggatgggagtcctctggggcagggagtgaaagccccggaggcagaaagggacggagaacaggggcttgcccagagca

SEQ ID NO: 527540 - DNA, 120 bp, Artificial Sequence
  ENSG00000165995_29 (sequence is synthesized)
tggataggaaaggagctggggttctccggggctcagcgcgcactgagaacctgtgcccggggctgcagctgcggacgataaaggcgctgtctggctcatgaaggccacctggatcaggct

SEQ ID NO: 527541 - DNA, 120 bp, Artificial Sequence
  ENSG00000165995_30 (sequence is synthesized)
gactttgatgagctcctctgctctgcctaagtggttctggaacagagagctgttgtgatccgacgaactttagaaagtcacactaactaagactacacaccccaagccagcaagaaaaag

SEQ ID NO: 527542 - DNA, 120 bp, Artificial Sequence
  ENSG00000165995_31 (sequence is synthesized)
gaaagcagttgctatgctgttcagcaaagcaagacttggctgccttttagctagtcctgaattcttgctcctgtgaagaaaattcctgctggagtgctgggcgcacttggaattggtcta

SEQ ID NO: 527543 - DNA, 120 bp, Artificial Sequence
  ENSG00000165995_32 (sequence is synthesized)
taacaacccattgagcagtcagggaatgtgagtaagcttgctgccaaaggtaactaggaaagcattcatctgctgcctccttgtttttgctcctagagagtgaaaatacaggcaatttta

SEQ ID NO: 527544 - DNA, 120 bp, Artificial Sequence
  ENSG00000165995_33 (sequence is synthesized)
ctgtgagtgtttcactggaaatgtacaatctttgtgtgttagagtatttgttttagtaagaaatgtttacacagcttgtggaattatttcgtgggaaaataaatttttataacttctccc

SEQ ID NO: 527545 - DNA, 120 bp, Artificial Sequence
  ENSG00000165995_34 (sequence is synthesized)
cagcagcgtgctaagaagcagtcacataaacagcagcaggagtaggcctcctgcttttcaaaagcagagtactgcagggtcgcgaaatgcaagacactcagatgtttgaaaatctcccga

SEQ ID NO: 527546 - DNA, 120 bp, Artificial Sequence
  ENSG00000165995_35 (sequence is synthesized)
gttgagaatggctactgtaaaagcgtcaccaagaaactctgacgatctggacagtcctaactctgtgttagcaatacttacttccggaaaattaatgctacttcttgtagatttttgcaa

SEQ ID NO: 527547 - DNA, 120 bp, Artificial Sequence
  ENSG00000165995_36 (sequence is synthesized)
ataggaaacccccttgaagaagatctcaaattacgccccccacccccaaaaaaagacaaacaggggagaacaaagttttggcatgcctgcaggaacggtggcttttttagaaactaccta

SEQ ID NO: 527548 - DNA, 120 bp, Artificial Sequence
  ENSG00000165995_37 (sequence is synthesized)
ggaggcagaagctaagtgatttgctcatgcctcttacctgggagtagaaggtgggaagaaatggaccgaggctgtgacgagaagacaaggcacagtgcagcttggtgaagccacacgctg

SEQ ID NO: 527549 - DNA, 120 bp, Artificial Sequence
  ENSG00000165995_38 (sequence is synthesized)
ttacctcccagttacctaccattcctccccaccaccgactccagcaggttcactgtctgtcagaacccagaagtgcttcttataaccaaagtttctgttcttcagaagaaatcagggcaa

SEQ ID NO: 527550 - DNA, 120 bp, Artificial Sequence
  ENSG00000165995_39 (sequence is synthesized)
aatggggtgacttgaagtgaataaaatgttaagaatattatcctacataagacatgtacacagaaggggaaccttgaagacattatctccatgcctcaattacactgctgtaagaagctt

SEQ ID NO: 527551 - DNA, 120 bp, Artificial Sequence
  ENSG00000165995_40 (sequence is synthesized)
acaatgtcatcatgtttaaggctaagaccttttccgtgtctcaagtgtatattttgtccagttataactggatggtaagacagtattaagagtgcaagtacctggcacttgaagtttgtc

SEQ ID NO: 527552 - DNA, 120 bp, Artificial Sequence
  ENSG00000165995_41 (sequence is synthesized)
agtacctggcacttgaagtttgtcccaggaaaatgcctgtgtataattacctaacttcagatctgcacattaacttatttaacaaaataaatcagccgggcgcagtggctcatgcctgta

SEQ ID NO: 527553 - DNA, 120 bp, Artificial Sequence
  ENSG00000165995_42 (sequence is synthesized)
atggtccaaagggacatgtccaagtcgcctcccacagcggcggcggcggtggcgcaggagatccagatggaactgctagagaacgtggctcccgcgggggcgctcggagccgccgcacag

SEQ ID NO: 527554 - DNA, 120 bp, Artificial Sequence
  ENSG00000165995_43 (sequence is synthesized)
catgttggcctcccaaagttctgagattacaggcgtgatccactgtgcccggccttgaggtcaactttaaacagcttccaaacaaatcctcagaaaaattagtgaccctgtggggttctc

SEQ ID NO: 527555 - DNA, 120 bp, Artificial Sequence
  ENSG00000165995_44 (sequence is synthesized)
ctagtacgtggcttgtctgtgttgtgtgggctgattttggtaccaaagaataggtctgcagggcagtgaaagactatgaatctgaggaggaccttcctgggtcactggcagaaacagcct

SEQ ID NO: 527556 - DNA, 120 bp, Artificial Sequence
  ENSG00000165995_45 (sequence is synthesized)
ccgtttctgtgaagtagcattgcacatcgctgcagttgtataacacacataactaaatcaatggctctcaacctctgctaatataaatataccttttaaagtggaaagaagtcacaggcc

SEQ ID NO: 527557 - DNA, 120 bp, Artificial Sequence
  ENSG00000165995_46 (sequence is synthesized)
tcttgcaataacttcagcgctccctggggctctgtggcccagaaattgggaactgctagagtagatgatccttttttatgcttaacctatacttttttttaatgtttcaccttgactagg

SEQ ID NO: 527558 - DNA, 120 bp, Artificial Sequence
  ENSG00000165995_47 (sequence is synthesized)
attttaagagcattgccaagcgtgggaaactagtatcactatattccagctgtggaaactgtatcactgtcataatgcacttgaacttcctatgaaaggatttcttagcggacatgctga

SEQ ID NO: 527559 - DNA, 120 bp, Artificial Sequence
  ENSG00000165995_48 (sequence is synthesized)
acaaaaaacaaaaaaaactatccagcaaaattataaaatctactttgttttgcttccttgattattccaagttcttaccaaatattcttagccttttataagtaaaactgttttacattt

SEQ ID NO: 527560 - DNA, 120 bp, Artificial Sequence
  ENSG00000165995_49 (sequence is synthesized)
tataagtaaaactgttttacatttaactccttatttcccttacccccaagaaaacgcaatattaaaaatgattaagctggggtggtagagtatacctgtagacccagctacttgggaggc

SEQ ID NO: 527561 - DNA, 120 bp, Artificial Sequence
  ENSG00000165995_50 (sequence is synthesized)
caggaggtggaggctgcagtgaaccgtgactgtaccaatgcactccagcctggtgacaacctggtgtttaaaaaaagaaaataaaaattagttacatatataatgttttatcagcttata

SEQ ID NO: 527562 - DNA, 120 bp, Artificial Sequence
  ENSG00000165995_51 (sequence is synthesized)
tatgaaaaaatttccctcagttcgttaattagccctacactgtttacataaatttatttactgagtataaaatcagtagtcataataaacttgacaattcttacattggtaggaaaccat

SEQ ID NO: 527563 - DNA, 120 bp, Artificial Sequence
  ENSG00000165995_52 (sequence is synthesized)
gtaggaaaccatattctaattaaaattgaatttataaaatatttctgataaaacttttgtcatggtaagagattcacaattattagttcaatcctttattatttcatcccaattaatgat

SEQ ID NO: 527564 - DNA, 120 bp, Artificial Sequence
  ENSG00000165995_53 (sequence is synthesized)
aaattcttgaaacatagctagtatttatcttacttgctgctatcattaatccctttcaaaaagtagtggtgagagtttccatcttttttattttgtatctagattcttagcttgcacttt

SEQ ID NO: 527565 - DNA, 120 bp, Artificial Sequence
  ENSG00000165995_54 (sequence is synthesized)
actgtagaacatattagtgcaaatcagaatattcctcaaagaactagcttgaaggatttgacataagagccgctatatgtgaaaaactgtatagtggacatatgtgtaaactgtgtagta

SEQ ID NO: 527566 - DNA, 120 bp, Artificial Sequence
  ENSG00000165995_55 (sequence is synthesized)
aatctgtaaatgaggaaataatctcaagggcaatgggatatttactgacctgcggaatgtaaagttacagtcttttcacacaacaaaggcttaaccttaacctactcagttgtagagcca

SEQ ID NO: 527567 - DNA, 120 bp, Artificial Sequence
  ENSG00000165995_56 (sequence is synthesized)
ttaatagttttttttttttttttttttggtcatatccatttcagtctttcctatgctctttctctactgctcatttaagttactgttacaaaaaggtgctgctaaatgtaggatgtctta

SEQ ID NO: 527568 - DNA, 120 bp, Artificial Sequence
  ENSG00000165995_57 (sequence is synthesized)
gttacaaaaaggtgctgctaaatgtaggatgtcttagtcatgttgtactttgggacaatgccacatttttaacatggtctgctatgcattcctgttaaacattcactgtcagctacactg

SEQ ID NO: 527569 - DNA, 120 bp, Artificial Sequence
  ENSG00000165995_58 (sequence is synthesized)
aactgtctaacaaacctggtttaaagtaattcatataaaacaaataaagagctggcttctgcactgtttattagtagtagtattaattgccatgttagaaatgattcatgtagttgagac

SEQ ID NO: 527570 - DNA, 120 bp, Artificial Sequence
  ENSG00000165995_59 (sequence is synthesized)
tatattaaatattcaacacttcccagctgcagggcatctttcttggggcaatgctaaatactttatgttcctttagtaatcttcctattatgtctgattaaaaaaaaagatacctccacg

SEQ ID NO: 527571 - DNA, 120 bp, Artificial Sequence
  ENSG00000165995_60 (sequence is synthesized)
tagataaaatattttattcaacgtgagctctagcagaataatctgggtcagttatgagttctggatcaagagtttaatttctgctgcgctgtacttttaactatttgtactttgcttcat

SEQ ID NO: 527572 - DNA, 120 bp, Artificial Sequence
  ENSG00000165995_61 (sequence is synthesized)
tatttaaaacatgacacagggttttaaagtaaatgtactcactgttgaacttaagtacttcttctgtttcatagaaatgttaatattaaatgttaaaatatatattaattttccctcaca

SEQ ID NO: 527573 - DNA, 120 bp, Artificial Sequence
  ENSG00000165995_62 (sequence is synthesized)
tagagaacgtggctcccgcgggggcgctcggagccgccgcacaggtagcgagagcgcggcgccttctccttcctttgtgagccgccgggcagggcaccgacctcgggttctcccggcgcc

SEQ ID NO: 527574 - DNA, 120 bp, Artificial Sequence
  ENSG00000165995_63 (sequence is synthesized)
ttaaaggtgggtttcactcttttccttaagatttatgtagtatgattgtacttacttttaattgaagtgaagacggtgctgtttaatgtcataattaaaatattttaatcttaagtgaga

SEQ ID NO: 527575 - DNA, 120 bp, Artificial Sequence
  ENSG00000165995_64 (sequence is synthesized)
ctaagtaataattacactctttcctggcaagttgaggaaagagaagtgtggcattcattacagaggatttctttgaaacagtgagagaactccagcagaaatgattatggatttgggggg

SEQ ID NO: 527576 - DNA, 120 bp, Artificial Sequence
  ENSG00000165995_65 (sequence is synthesized)
ggaagattccttgaaagaattgagtgtactggctttccttccactttcttcagcctaccccagttatgttttcacccacaccactcagctaaactagtcatgtcaagatcacccatgacc

SEQ ID NO: 527577 - DNA, 120 bp, Artificial Sequence
  ENSG00000165995_66 (sequence is synthesized)
ttcacattgctaaatccagggataaattttcagccctaatcttacttgaccatgagcagtagttgacatggtggattattccatcctctttgaaatactttgcttggtttctggaaccac

SEQ ID NO: 527578 - DNA, 120 bp, Artificial Sequence
  ENSG00000165995_67 (sequence is synthesized)
acttttctggttttccttctatcacactgactgctcctttgtctcctttgctgatacttcctcatcaactggaaatcttggacagcccagggctaagctctatgatgtcttttacctaca

SEQ ID NO: 527579 - DNA, 120 bp, Artificial Sequence
  ENSG00000165995_68 (sequence is synthesized)
agacaaggcacagtgcagcttggtgaagccacacgctgactgcgttctgccccctcttcatgcagtgctgcgggctggtgcatcgccggcgagtacgggtgtcctatgaatacagcttac

SEQ ID NO: 527580 - DNA, 120 bp, Artificial Sequence
  ENSG00000165995_69 (sequence is synthesized)
aagggacctgaagtacctcttcaaggagaactacgaaccactgctcaagaaaataataggacacaaacaaatgggaaaacattctatgctcatggataggaagattcaatatcgtgaaaa

SEQ ID NO: 527581 - DNA, 120 bp, Artificial Sequence
  ENSG00000165995_70 (sequence is synthesized)
tcatatggaaccaaaaaagagcctgtatagtcaaaacagtcctaggcaaaaataacaaagctggaggcataatgttacctgacttcaagctacactacaaggctgcagtaaccaaaacag

SEQ ID NO: 527582 - DNA, 81 bp, Artificial Sequence
  ENSG00000165995_71 (sequence is synthesized)
accaaaacagacatatagaccaatggaatagaatagagacctcagaaataacgctgcatgtctacaaccatctgatcttca

SEQ ID NO: 527583 - DNA, 120 bp, Artificial Sequence
  ENSG00000165995_72 (sequence is synthesized)
gacttaaatgtaaaacctaaaatcataaaaatcctacaagaaaacctatgtatgggcaaagactttatgatgaaaacaccaaaagcaattagaacaaaagccaaaactgacaaatgggat

SEQ ID NO: 527584 - DNA, 120 bp, Artificial Sequence
  ENSG00000165995_73 (sequence is synthesized)
ctcaaaagaagacatttatgaggccaacaaacatatttaaaaagctcatcatcacagattatcaaacaaatgcaaatcaaaacaatgagataccatctcacatcagtcagaatggtgatt

SEQ ID NO: 527585 - DNA, 80 bp, Artificial Sequence
  ENSG00000165995_74 (sequence is synthesized)
atgagaacacatggacacagggaggggaccaacccacaccagggcctctcagggggtggggggcaaggggaaggatggcg

SEQ ID NO: 527586 - DNA, 120 bp, Artificial Sequence
  ENSG00000165995_75 (sequence is synthesized)
taggtgcaacaagtcaccatggcacatgcatacctatgtaacaaacgtgtacattctgcacatgtatcctggagcttaatattttaaaaaataatataaataattaaaaaataaaaaggc

SEQ ID NO: 527587 - DNA, 120 bp, Artificial Sequence
  ENSG00000165996_0 (sequence is synthesized)
ctggctgcgccgagccccctgcgcgctgcacatggggcgcctgacggaagcggcggcagcgggcagcggctctcgggctgcaggctgggcagggtcccctcccacgctcctgccgctgtc

SEQ ID NO: 527588 - DNA, 120 bp, Artificial Sequence
  ENSG00000165996_1 (sequence is synthesized)
tgtctcccacgtcccccaggtgcgcggccaccatggcgtccagcgacgaggacggcaccaacggcggcgcctcggaggccggcgaggaccgggaggctcccggcgagcggaggcgcctgg

SEQ ID NO: 527589 - DNA, 120 bp, Artificial Sequence
  ENSG00000165996_2 (sequence is synthesized)
gggtcttggccaccgcctggctcaccttctacgacatcgccatgaccgcggggtggttggttctagctattgccatggtacgtttttatatggaaaaaggaacacacagaggtttatata

SEQ ID NO: 527590 - DNA, 120 bp, Artificial Sequence
  ENSG00000165996_3 (sequence is synthesized)
aaagtattcagaagacacttaaatttttccagacatttgccttgcttgagatagttcactgtttaattggaattgtacctacttctgtgattgtgactggggtccaagtgagttcaagaa

SEQ ID NO: 527591 - DNA, 120 bp, Artificial Sequence
  ENSG00000165996_4 (sequence is synthesized)
tctttatggtgtggctcattactcacagtataaaaccaatccagaatgaagagagtgtggtgctttttctggtcgcgtggactgtgacagagatcactcgctattccttctacacattca

SEQ ID NO: 527592 - DNA, 120 bp, Artificial Sequence
  ENSG00000165996_5 (sequence is synthesized)
gccttcttgaccacttgccatacttcattaaatgggccagatataatttttttatcatcttatatcctgttggagttgctggtgaacttcttacaatatacgctgccttgccgcatgtga

SEQ ID NO: 527593 - DNA, 120 bp, Artificial Sequence
  ENSG00000165996_6 (sequence is synthesized)
agaaaacaggaatgttttcaataagacttcctaacaaatacaatgtctcttttgactactattattttcttcttataaccatggcatcatatatacctttgtttccacaactctattttc

SEQ ID NO: 527594 - DNA, 120 bp, Artificial Sequence
  ENSG00000165996_7 (sequence is synthesized)
atatgttacgtcaaagaagaaaggtgcttcatggagaggtgattgtagaaaaggatgattaaatgatctctgcaaacaaggtgctttttccagaataaccaagattacctgagtccaagt

SEQ ID NO: 527595 - DNA, 120 bp, Artificial Sequence
  ENSG00000165996_8 (sequence is synthesized)
tttaataacaagaataaacaactttgtgaaatatcatggattgtatggtttcttaaaatataacttgagacacgtggtatttgccagtatttgtgttcctcttgtgccagatctattttt

SEQ ID NO: 527596 - DNA, 120 bp, Artificial Sequence
  ENSG00000165996_9 (sequence is synthesized)
gggggaaaaaaaaacttttgctaagttttttttgaaacatgctcaaagctttttaaatcaatatttagaaattagtttaacgatttactattatacctgctagtgatatttatgtgatat

SEQ ID NO: 527597 - DNA, 120 bp, Artificial Sequence
  ENSG00000165996_10 (sequence is synthesized)
ttataaatgaaaataaatgcaaaattataacaacttgttaataatgtattggtatttttgaacccacaatctattttttcaggaataaggcagcattatgactaataacagtgtttggaa

SEQ ID NO: 527598 - DNA, 120 bp, Artificial Sequence
  ENSG00000165996_11 (sequence is synthesized)
gcgtggatataatttgctaaagtaagacttttgatgtagataaagtagcagcataaaaacacacaaatattcaagtagatgtcacagttggaaaatattctttggaaatatttctaggca

SEQ ID NO: 527599 - DNA, 120 bp, Artificial Sequence
  ENSG00000165996_12 (sequence is synthesized)
gctgaaattacttatactgctaaggaaatctgctttttatttaaattagccacttaaggacaaggttttcaactgtgaaggttttaaggggttaggaagagcataagtatttgccccact

SEQ ID NO: 527600 - DNA, 90 bp, Artificial Sequence
  ENSG00000165996_13 (sequence is synthesized)
gttttaaggggttaggaagagcataagtatttgccccactattaaaaaaaaaacatgacatctgactataatgttgtattcaggctggga

SEQ ID NO: 527601 - DNA, 120 bp, Artificial Sequence
  ENSG00000165996_14 (sequence is synthesized)
tcaaggccagtctgggcaacatagcaagaccccatccctaaaaaaattacaaacaaaaaaaattaaccaggcatggtgacacatgcctgtagttccagctgcttgggaggctgaggtggg

SEQ ID NO: 527602 - DNA, 89 bp, Artificial Sequence
  ENSG00000165996_15 (sequence is synthesized)
atgatggtaccactgtacttagaaaaatagtgatgatgatgatgatgatgataacgatgatgaggaagatgatcatgctgtactcagaa

SEQ ID NO: 527603 - DNA, 120 bp, Artificial Sequence
  ENSG00000165996_16 (sequence is synthesized)
gataacgatgatgaggaagatgatcatgctgtactcagaactttggttgagaaagtcttctctatactgtagaattatcttgtaacaattgttatgataatccctttgtggtacttaggt

SEQ ID NO: 527604 - DNA, 120 bp, Artificial Sequence
  ENSG00000165996_17 (sequence is synthesized)
aactaaacattttggggtatgatctttggacagactcctttcattctgaattccattgaatagcaaaaggtcttgtaataaagttcctgtccttgtgtttaataaaaaaaatacaccaga

SEQ ID NO: 527605 - DNA, 120 bp, Artificial Sequence
  ENSG00000165996_18 (sequence is synthesized)
gccatacttcattaaatgggccaggtggcgatatcttgcagtttagtttctccttgtcctgtgcatgcttattttgtgtgctaacgccagagaattaaaattcgtgtttcagccccacga

SEQ ID NO: 527606 - DNA, 120 bp, Artificial Sequence
  ENSG00000165996_19 (sequence is synthesized)
tgccagaatgctgttataggaggtataactggtataactaataattatacaagttatgatttgtattctaaaagcttaatgatgagagaggaatcgtattaataaatattttgagtgaaa

SEQ ID NO: 527607 - DNA, 120 bp, Artificial Sequence
  ENSG00000165996_20 (sequence is synthesized)
aaagtattcagaagacacttaaatttttccagacatttgccttgcttgaggtaagttttccatcatgctgtttttctattgctgtaatatttatgtgaacattttttgttgtgcaaaatc

SEQ ID NO: 527608 - DNA, 120 bp, Artificial Sequence
  ENSG00000165996_21 (sequence is synthesized)
aatatgattttgctgattacataccacctatggatttgctgaatgccaatgttgacagtggtttatttaatgttttctattattgacgtaatgatttttttctatttgcttacagatagt

SEQ ID NO: 527609 - DNA, 120 bp, Artificial Sequence
  ENSG00000165996_22 (sequence is synthesized)
gtgactggggtccaagtgagttcaagaatctttatggtgtggctcattactcacagtataaaaccagtaagtgacacaaacatgttgtctacttgagcctgcaggaaagctttccattca

SEQ ID NO: 527610 - DNA, 120 bp, Artificial Sequence
  ENSG00000165996_23 (sequence is synthesized)
taggaatctaaaatattaacatttgtatatttcaggaggtggaagtgttggacaaaaaggagttgggtttgagttttagatgttgtgcattgacttagtgccttagcagaatgactttga

SEQ ID NO: 527611 - DNA, 120 bp, Artificial Sequence
  ENSG00000165996_24 (sequence is synthesized)
tacacaaacaaacccaaatattggcatcttagatccgtaatatattctcctttgatattttccagtttttgaaatcagtattcaggttctgtcaaataacctgcagaaaatgttcttttc

SEQ ID NO: 527612 - DNA, 120 bp, Artificial Sequence
  ENSG00000165996_25 (sequence is synthesized)
ttcttttctatagaagtttcttttcaatccaagttgtcctctttgattatgtaatcgaagttgtcagtatacaatttattatttctggccagccgcagtggcccacacctgtaatcccag

SEQ ID NO: 527613 - DNA, 66 bp, Artificial Sequence
  ENSG00000165996_26 (sequence is synthesized)
aaatacaaaaattaaccaggcgtgggggcgagcacctgaaaggttgcattgagctgagattgtgcc

SEQ ID NO: 527614 - DNA, 120 bp, Artificial Sequence
  ENSG00000165996_27 (sequence is synthesized)
atagttcactgtttaattggaattgtacctacttctgtgattgtgactggggtccaagtgagttcaagaatctttatggtgtggctcattactcacagtataaaaccaatataatttttt

SEQ ID NO: 527615 - DNA, 120 bp, Artificial Sequence
  ENSG00000165996_28 (sequence is synthesized)
ggaggctcccggcgagcggaggcgcctgggggtcttggccaccgcctggctcaccttctacgacatcgccatgaccgcgggacggagactcattctgtcgcccaggctggagtgcattgg

SEQ ID NO: 527616 - DNA, 120 bp, Artificial Sequence
  ENSG00000165996_29 (sequence is synthesized)
gggattacaggtgtgagccatcgcaccgggcctaatattttattttaattttttaaaaatagagatggcctctcactgtgttggctaggctggtctcaaactcccggcctcaagcaatcc

SEQ ID NO: 527617 - DNA, 120 bp, Artificial Sequence
  ENSG00000165996_30 (sequence is synthesized)
tcccacctcaacctccaaaagtgctgggattaccacttccggcttaatattttaaactttctccagggtttatagaaaaatgtgattgacaaaaatttaataaatctttacctatggtga

SEQ ID NO: 527618 - DNA, 120 bp, Artificial Sequence
  ENSG00000165997_0 (sequence is synthesized)
agtgggctcgaaacaaagggctgtccggtggggattcgtcgcggcgccttctgagtggtcgggtcgaggcttctcggcctagcagtgccctcgctgcgcgatctcaggcgggttctcctc

SEQ ID NO: 527619 - DNA, 120 bp, Artificial Sequence
  ENSG00000165997_1 (sequence is synthesized)
ggctccgcgcagcccgcgccgcggtgggggacccggcgcagcggcacctgctgccgagggaccccgcggcccgccccggtgctcgtgatggggctgatcttcgccaaactgtggagcctc

SEQ ID NO: 527620 - DNA, 120 bp, Artificial Sequence
  ENSG00000165997_2 (sequence is synthesized)
ttctgtaaccaagaacacaaagtaattatagtgggactggataatgcagggaaaaccaccattctttaccaattcttaatgaatgaagtggttcatacttctccaaccataggaagcaat

SEQ ID NO: 527621 - DNA, 120 bp, Artificial Sequence
  ENSG00000165997_3 (sequence is synthesized)
gttgaagaaatagttgtgaagaacactcattttcttatgtgggatattggtggtcaggagtctctgcgatcatcctggaacacatattactcaaatacagagttcatcattcttgttgtt

SEQ ID NO: 527622 - DNA, 120 bp, Artificial Sequence
  ENSG00000165997_4 (sequence is synthesized)
gatagcattgacagggaacgactagctattacaaaagaagaattatacagaatgttggctcatgaggatttacggaaggctgcagtccttatctttgcaaataaacaggatatgaaaggg

SEQ ID NO: 527623 - DNA, 120 bp, Artificial Sequence
  ENSG00000165997_5 (sequence is synthesized)
tgtatgacagcagctgaaatctcgaaatacctcacccttagttcaattaaggatcatccatggcacattcaatcctgctgtgctctcacaggagaagggttatgccaaggtctagagtgg

SEQ ID NO: 527624 - DNA, 120 bp, Artificial Sequence
  ENSG00000165997_6 (sequence is synthesized)
atgacctcccggattggtgtgagataacttttttgcttgaaagagactgctctatttattctgtgacatgaacattttttcctagtacctttggctgctaaggcagcagcatgtttaatt

SEQ ID NO: 527625 - DNA, 120 bp, Artificial Sequence
  ENSG00000165997_7 (sequence is synthesized)
tataacaacacaaacctctgagagcaacacttgaatcaagtgcagctgaactggaacataaaagattttttcttaactttttttttttaacacactaatcttcagttggatgaatgtaat

SEQ ID NO: 527626 - DNA, 120 bp, Artificial Sequence
  ENSG00000165997_8 (sequence is synthesized)
gtataactatgttttcagcaacaattcttctgtttattctaattaatcagtgactgccttgtaagaaatgtttgtcatatgcgtgatgtcttctgaaatattcttataaccttaatgacc

SEQ ID NO: 527627 - DNA, 120 bp, Artificial Sequence
  ENSG00000165997_9 (sequence is synthesized)
aattgctttcaattcttgaccagcactccctcccaaccagagaattactggtttgatagagtagtcttggaaaccatcaggtactgcctgcagacttctccagcactaaatatatttgtt

SEQ ID NO: 527628 - DNA, 120 bp, Artificial Sequence
  ENSG00000165997_10 (sequence is synthesized)
ccctctataaaccattcatctttcggacagaacttactgtaaagaaagaaatctgcctagaggatatatgtaaggaagattccacatcatgagtacttgccttttaactttcccccacat

SEQ ID NO: 527629 - DNA, 120 bp, Artificial Sequence
  ENSG00000165997_11 (sequence is synthesized)
tactgttgagtcatggaataatgtttaagttgttatttgcatggaaattaagtaggctgtttatttatctaaaggaatcaagtccactcttctgcctgcaacatttgttcaaaaactaac

SEQ ID NO: 527630 - DNA, 120 bp, Artificial Sequence
  ENSG00000165997_12 (sequence is synthesized)
caaggtaaaatatttatttgaaagcccaactttgatgttaaatattcttgaataaatctgttattttaagaatatcacattattcaatgcatataaaactatcagaagttagtaaatcat

SEQ ID NO: 527631 - DNA, 120 bp, Artificial Sequence
  ENSG00000165997_13 (sequence is synthesized)
accagcactaaaaataagacaattggaatatattttagcatcagtttacaaacaactttattatcaacagaaattttagctcttttctttgcaagatatatcacagctgctttgggcagt

SEQ ID NO: 527632 - DNA, 120 bp, Artificial Sequence
  ENSG00000165997_14 (sequence is synthesized)
agctgaagccgaagtatgaacagtccattttgtttcttaaaatttgaagtcgtgtctgtcatagcatttttactaccagcagtatgttacttaaaaaactacatggctttccttgaattt

SEQ ID NO: 527633 - DNA, 120 bp, Artificial Sequence
  ENSG00000165997_15 (sequence is synthesized)
atttgacggtattatgtaatagacttgaaacaattgccatctttgtagttatgccttgggttctaaaatgttataggaaactgctgaattgaatcctagcttttagaatattaataggag

SEQ ID NO: 527634 - DNA, 120 bp, Artificial Sequence
  ENSG00000165997_16 (sequence is synthesized)
actcaaagttaatattcttaacaacttaaaattaaaaaaagtcataatctatcaaaagtttatttattggatggcattaaaacatttttgaggcagttgtctaatatgaacaataatcta

SEQ ID NO: 527635 - DNA, 120 bp, Artificial Sequence
  ENSG00000165997_17 (sequence is synthesized)
aacaatatattccttaaattaagaggaaagacaagtgtcgtatttcgatcctgtttattcaaatgtgtgattttgctgaaatgaaagggataaaatgaatacttagagaataatacttca

SEQ ID NO: 527636 - DNA, 120 bp, Artificial Sequence
  ENSG00000165997_18 (sequence is synthesized)
taattttgataaaaaagatacaaagttcataatatcaaaatatgtgttcaaaattggtattttaattttaatatttttgtaagttgatttaaattttgctcttttttcaggtgtgcttgg

SEQ ID NO: 527637 - DNA, 120 bp, Artificial Sequence
  ENSG00000165997_19 (sequence is synthesized)
tttcaggtgtgcttggtttattatatttagtcaagttaatttagtcgaatgtggtaacatttttctgatttatctttagttggagcacacccttgaactgaacagtggccaaaggaaagc

SEQ ID NO: 527638 - DNA, 120 bp, Artificial Sequence
  ENSG00000165997_20 (sequence is synthesized)
tttctgggctttggaaagtagttgtttaactttgttttaagccgttttcttagtgattctgtatcaagtagaggataagtgtagtttaacttagtttttaatataacccataatcaagaa

SEQ ID NO: 527639 - DNA, 120 bp, Artificial Sequence
  ENSG00000165997_21 (sequence is synthesized)
catgagcgaaaagcagacataaatcgatatggatggtttgtggtgtgtgtgggatgtgggggaattaagaaaatgccatttacctaagcacagtttgcctgaatttctgcttggttgtgt

SEQ ID NO: 527640 - DNA, 120 bp, Artificial Sequence
  ENSG00000165997_22 (sequence is synthesized)
tgtttaccgtaagtactgagggtagtttccctaagtctgtcctgagaaaaagcatacttagtactcctgtatttgttcttatgaaatgactatctgccttcttgtatctagtaagattgg

SEQ ID NO: 527641 - DNA, 120 bp, Artificial Sequence
  ENSG00000165997_23 (sequence is synthesized)
ctggctcaattttcttctgtcaaattatatggttattttttatattaccacatcagcattatattaaaagtgtttttaatagttgattgtattttgccaactactagtatagactcaaat

SEQ ID NO: 527642 - DNA, 120 bp, Artificial Sequence
  ENSG00000165997_24 (sequence is synthesized)
ttgctatttaatttttaaaatacaatttattttgtaaatcctttaaaaaatatttggttagttttggattagaaatgatttatgttagccatgtgttgaagatgaaattggcatcagtgt

SEQ ID NO: 527643 - DNA, 120 bp, Artificial Sequence
  ENSG00000165997_25 (sequence is synthesized)
agacggtgctgattgggaaaagttcatgattaggaaattcatgtaagactttttaagagtattttttaggttttcactcaatctttcctgtcacagtaacgtgaaaactgattattcttt

SEQ ID NO: 527644 - DNA, 120 bp, Artificial Sequence
  ENSG00000165997_26 (sequence is synthesized)
actccaagagaatgttttaacccaagcaagtatctaatactagagcattggttctgacattcattgtaaatcagtgaactgtaagatactgtctaaaaaatgtacatttgtaattagtgc

SEQ ID NO: 527645 - DNA, 120 bp, Artificial Sequence
  ENSG00000165997_27 (sequence is synthesized)
ctttattcatattttgaaataagttcttagttttatattatacctgttctttagaagtcatgttagcagctaattatttcagtgatgaaataatttgtgttttatatcccccttcacctc

SEQ ID NO: 527646 - DNA, 120 bp, Artificial Sequence
  ENSG00000165997_28 (sequence is synthesized)
catgtattggttagcacagtttatagtaagtgaaaagcaagggacccacctacattaccttcaggagactgttctaccttttaatttgaaaacaaggaaattaaattttaacagaaatct

SEQ ID NO: 527647 - DNA, 120 bp, Artificial Sequence
  ENSG00000165997_29 (sequence is synthesized)
tttaaacccatcattcttattgaagcccatttgagaactcttagaattaatagaaccttttataagggaatatatggaatattttttattgttaatgtaacttaattccttaaaacctgg

SEQ ID NO: 527648 - DNA, 120 bp, Artificial Sequence
  ENSG00000165997_30 (sequence is synthesized)
attaaaagctgaagattaaatatgtaatttttgcttttagtttcttgtgttagtatgcttaaaggtatcaatacttttattctatattcattagaagaaaggtaataaatttaagtttca

SEQ ID NO: 527649 - DNA, 120 bp, Artificial Sequence
  ENSG00000165997_31 (sequence is synthesized)
ggtaataaatttaagtttcattgctgaaaaattttaaatgagtgccaccccatagccatagtcattttgattaagcataatttaactttcattatagcataaagagaaaataattatttt

SEQ ID NO: 527650 - DNA, 120 bp, Artificial Sequence
  ENSG00000165997_32 (sequence is synthesized)
agtatggaaacagtgataggcagtgctgtaaacaatattctctgaaaagttgtgggggtcacaaagaaaattttaaagaatatagaagcttttttaaaaaatctttttagtgtagtttct

SEQ ID NO: 527651 - DNA, 120 bp, Artificial Sequence
  ENSG00000165997_33 (sequence is synthesized)
tagaacaaattataaacataatcattctgaataatcaatttttatttagtccttaactatgtaaaaccgtatcagtagaaaaatgtgctggtgtcgtgtctaaagatggataaatttctt

SEQ ID NO: 527652 - DNA, 120 bp, Artificial Sequence
  ENSG00000165997_34 (sequence is synthesized)
tggaatttatctttggagaccaactttatgaggcagactttttgtctacagctttggaaccaaaaaaacttcactctaattcagtcctaaaggctattttacattttgccggggtaaagt

SEQ ID NO: 527653 - DNA, 120 bp, Artificial Sequence
  ENSG00000165997_35 (sequence is synthesized)
gacttcaagatacagcatggtgtcttgtatctagtagaatattgtgctagccatctaaaaaagtggatttgagccttaatttggccgtttctcaattgtctagttgaccttagacaatta

SEQ ID NO: 527654 - DNA, 120 bp, Artificial Sequence
  ENSG00000165997_36 (sequence is synthesized)
gtgtccatggctttccttttgtttttcccatactgaggaacttaaactacagctctaaaatgtcttttggttttaaaattctgaatgcttatatactactattaaaaattaaaaatccct

SEQ ID NO: 527655 - DNA, 120 bp, Artificial Sequence
  ENSG00000165997_37 (sequence is synthesized)
caaatagtagggcaatacaggtaatatgaaattaaatgtatttttatccattatttgattcccacctgttattttatttagaatacgaatacaaccaagtagggaaaaacgtatcagtaa

SEQ ID NO: 527656 - DNA, 120 bp, Artificial Sequence
  ENSG00000165997_38 (sequence is synthesized)
ctgctattcaacttaaattcagcgaattaatagctgaatagaaatagctaatgacaatgcaaaagagaaaacaagccatattgctaagaaaaggatagtaagctgcttagaaagaaccag

SEQ ID NO: 527657 - DNA, 120 bp, Artificial Sequence
  ENSG00000165997_39 (sequence is synthesized)
cctgtgttggaaataattctcttctagataatttaccttattttcttggcttgtactaattgaatggaagtggttaatttgttcagagtttattgccgtttgatgccaccccagtctata

SEQ ID NO: 527658 - DNA, 120 bp, Artificial Sequence
  ENSG00000165997_40 (sequence is synthesized)
gttctgtgtgactttccatattgaaagagtagggttagtagccaggttgtcagtcttttacaaatgtctacataaatgtctacataaatctgaaagtggtttatattcaaggttagtttt

SEQ ID NO: 527659 - DNA, 120 bp, Artificial Sequence
  ENSG00000165997_41 (sequence is synthesized)
tcagtagcgtctcctccttattcattcacttttactgtgaagactgaaatccaaaagccaggttccccaaaaaagtatttttaaaaaattttaggggaccaaaataaatagaggaagacc

SEQ ID NO: 527660 - DNA, 120 bp, Artificial Sequence
  ENSG00000165997_42 (sequence is synthesized)
aatataaaaaaatatgttcaactattccattttaaatttaaagcagaaaaaaaaattgtgcccctcagacctaaaggcagctttaaatgtatatagtttggtgaaacatttgggaaatat

SEQ ID NO: 527661 - DNA, 120 bp, Artificial Sequence
  ENSG00000165997_43 (sequence is synthesized)
taatttggaggtttagaagcatacgaaaaacaaattcaaagcacttgaaagtaaagacaatatcatgaggtcgaaaaaacttcaaaaggatattaggtaagagaaaatgtgaatgaaagc

SEQ ID NO: 527662 - DNA, 120 bp, Artificial Sequence
  ENSG00000165997_44 (sequence is synthesized)
agtgaatttctgcctctcctcgtatttagggtacttaaaattactaaaaaatactgtctttttaccatacagctagatggcctgtattattcttaatgtggccaaaggagtgaagactga

SEQ ID NO: 527663 - DNA, 120 bp, Artificial Sequence
  ENSG00000165997_45 (sequence is synthesized)
ttagggttttagaatttggaactgtagtcacataaaggcatcttttgcatttcttaaaccagtaatctacattttctcctggaaatggagaaatatgaaatgtgctgtgcatagcttttg

SEQ ID NO: 527664 - DNA, 120 bp, Artificial Sequence
  ENSG00000165997_46 (sequence is synthesized)
gaatagaaaacaaagttttaaaagaatggatatgttttcttgcacaacttgtaaaattttaattaaaaaattacctcatttttcaatccataaggtgctttgctcaagtttgtgggatgt

SEQ ID NO: 527665 - DNA, 120 bp, Artificial Sequence
  ENSG00000165997_47 (sequence is synthesized)
ttgtaccatcccataaaaacccccttcacccaaactgtatttgaaatatgcaaaattcataactaagggatagcattccttggagactttgttttgttttactcttgtttaccagctggg

SEQ ID NO: 527666 - DNA, 120 bp, Artificial Sequence
  ENSG00000165997_48 (sequence is synthesized)
ccaacatggtagatatatgagattcacatatggtttcattaaagcacataggaaagtgctcagtcaatatttaattagtttaattagataagggaaaggagaaatcctaaatttgatgga

SEQ ID NO: 527667 - DNA, 120 bp, Artificial Sequence
  ENSG00000165997_49 (sequence is synthesized)
ttcttttatactgtgaatatatttccatcagtgttggtaagatatcaaatgactatcagttgatcccagtcatcagtgacttatttgcatatttaagccctattcacaagagaccataat

SEQ ID NO: 527668 - DNA, 120 bp, Artificial Sequence
  ENSG00000165997_50 (sequence is synthesized)
cattttaatcttatattttccctcaggaaatttagggactctgaagcccctattttattctcttggagtaaactgttgagtgtagttacaaaaacttttatttatgacttaaaaaaagtt

SEQ ID NO: 527669 - DNA, 120 bp, Artificial Sequence
  ENSG00000165997_51 (sequence is synthesized)
tagctgctatttcagtgaaagtgtaaaataaaacggtcatgatttttttcaattacagaatagttacaaattttaccatgttcatctattccacagagcatgttaaaaacaacaacaaca

SEQ ID NO: 527670 - DNA, 120 bp, Artificial Sequence
  ENSG00000165997_52 (sequence is synthesized)
aaaacctaacagcaattacaaccttggtgttgcgtttattctaatcagagtgaatgattataatcacactttgctattttaacataaattggtgctttagagcattaaagaggaagcagc

SEQ ID NO: 527671 - DNA, 120 bp, Artificial Sequence
  ENSG00000165997_53 (sequence is synthesized)
aggccctgtactcagtatttattatttcttgcctcagaatgcaaaacaactttaaagtgtctatattcatatatatgtgcatttcttaagatttaaatacaaactgttgttactccttaa

SEQ ID NO: 527672 - DNA, 120 bp, Artificial Sequence
  ENSG00000165997_54 (sequence is synthesized)
gcttcaggctttctgcgaaagctctaagaatatcttcattactatgcttggtcaactggaagatggtattaataaggtcagaattaggaattggattgctctgtgggtcctccggtattg

SEQ ID NO: 527673 - DNA, 120 bp, Artificial Sequence
  ENSG00000165997_55 (sequence is synthesized)
tgcagaggaaagaaaaatgtctttcacaccacaaactgtgtgtctgaaccccagccaaacaaatgtgttccattggtccaatatataagcattaacaacaacaacaaaaaatttaaaaca

SEQ ID NO: 527674 - DNA, 120 bp, Artificial Sequence
  ENSG00000165997_56 (sequence is synthesized)
agtaaattaatgcattcacatgatcacttcttgaaaatggttcaaagcatgttttcctgatggtgggattgtttaaatgacatgttttaaagtttttaatactttattagttatgaagtg

SEQ ID NO: 527675 - DNA, 120 bp, Artificial Sequence
  ENSG00000165997_57 (sequence is synthesized)
cttcttttatatgttaagtttaggttgccagtactcataatttttatttctgcaattatgttataatgagttgtttgcatgcctacttaacccaagtaaaacgatgctgtttgctctgga

SEQ ID NO: 527676 - DNA, 120 bp, Artificial Sequence
  ENSG00000165997_58 (sequence is synthesized)
atgttcatcttttagacaggttttggctcatttccaatcatggtgcaatatagtgtaacattcatttgttttcattcaacagttttatttttgtcataataaataattacttttccaata

SEQ ID NO: 527677 - DNA, 120 bp, Artificial Sequence
  ENSG00000166002_0 (sequence is synthesized)
ccgcgcgggcgccgagaggagaggcgaggcggggagcgcaagcggcggcggccactgccacgtattcccggcagtggtggcggcggcggcggcggcgcccgcgggcaggaataactcaag

SEQ ID NO: 527678 - DNA, 120 bp, Artificial Sequence
  ENSG00000166002_1 (sequence is synthesized)
aactcaagtcacctgtactggaaatcagtttgctgaaattaatcaacgattcttgaagttgaagaaaaggaggttccagccttggcaagaggagtgtggcccttcctggaatccctctgg

SEQ ID NO: 527679 - DNA, 120 bp, Artificial Sequence
  ENSG00000166002_2 (sequence is synthesized)
acacaccctcctagcatcctctaggaaagatgcggcagctcaaagggaagcccaagaaggagacctccaaggacaagaaggagcggaagcaagccatgcaggaggcccggcagcagatca

SEQ ID NO: 527680 - DNA, 120 bp, Artificial Sequence
  ENSG00000166002_3 (sequence is synthesized)
ctacagtggtgctgcccacgctggccgtggtcgtgctcttgatcgtggtgtttgtgtacgtggccacgcgccccaccatcaccgagtgagccccgcagccggctgcggaccccatcggca

SEQ ID NO: 527681 - DNA, 120 bp, Artificial Sequence
  ENSG00000166002_4 (sequence is synthesized)
aaacaaaaaatggctttcatattcagagatgttcatgttgctgagctgtaagcaggagcaccctgtcttctctggtctttgacttgattaaagtatctccgctttcttgggagggaatag

SEQ ID NO: 527682 - DNA, 120 bp, Artificial Sequence
  ENSG00000166002_5 (sequence is synthesized)
gctttcttgggagggaataggggatgttttatcagtgaatgtgccatacaccttatggtccacttcatgtgcctttcagacttcaaagcgcgcgcgcatgtgtgtgtgtgtgtgtgtgtg

SEQ ID NO: 527683 - DNA, 120 bp, Artificial Sequence
  ENSG00000166002_6 (sequence is synthesized)
tctttttctctcctaaaaatcgataagtagctccacctgaagagggatggaacctctgggtcaggaaacagctggaatccacactcacctcattcccattgtttggatcatgcttctttc

SEQ ID NO: 527684 - DNA, 120 bp, Artificial Sequence
  ENSG00000166002_7 (sequence is synthesized)
caacacgtgttcacaatctccaaagggactgtatttcttctctgtgcttaatgtgatttgaaatatgttgaatcaaagtgaaatatttattttttgaataaaggagataatagccttaaa

SEQ ID NO: 527685 - DNA, 120 bp, Artificial Sequence
  ENSG00000166002_8 (sequence is synthesized)
caggaataactcaagtcacctgtactggaaatcagtttgctgaaattaatcaacgattcttgaagttgaagaaaagttgttctctctacaggaggttccagccttggcaagaggagtgtg

SEQ ID NO: 527686 - DNA, 120 bp, Artificial Sequence
  ENSG00000166004_0 (sequence is synthesized)
gcagaaacggctgctgggcagctgatgggcaggagcttaccaggctggcttgctctgagctgcggttactgtgtccaggccccgggttctcagaactgtcatacataaagtacacagaaa

SEQ ID NO: 527687 - DNA, 120 bp, Artificial Sequence
  ENSG00000166004_1 (sequence is synthesized)
tgaagagaaaagtcgtgaatactcacaagctgagattgagtcctaatgaggaagccttcattttgaaggaagattatgaaagaaggcgaaaactaagattgctacaggttcgagaacaag

SEQ ID NO: 527688 - DNA, 120 bp, Artificial Sequence
  ENSG00000166004_2 (sequence is synthesized)
aaagagatatcgccttacagataagagaagacataaaacagaggagaaatcaacaatttacacgtttggcagaggagctaagggcagaatgggaagaatcacaaactcagaaaatacaga

SEQ ID NO: 527689 - DNA, 120 bp, Artificial Sequence
  ENSG00000166004_3 (sequence is synthesized)
acttggaaaaactgtatttggcaagtttaagaagtatgggagagggacatcgacaggccaaagaaaatgaacctgatttggatgctttggcacagcgggcagcagaaaggaaaagaaaag

SEQ ID NO: 527690 - DNA, 120 bp, Artificial Sequence
  ENSG00000166004_4 (sequence is synthesized)
cagatttgaggcataaagaagccttgaaagtacagaaaaatcaaaaagaaatattactgaaacaaaaaacctggcatataaaagctcgaaaggaagcactgcttgtggaaaaagagagat

SEQ ID NO: 527691 - DNA, 120 bp, Artificial Sequence
  ENSG00000166004_5 (sequence is synthesized)
cagccaaaattacaagtctgccacctcctcctccaactctttttgagaacatcgaagtaaaaagaatttctgcagtcaaaaccaatagttctacctaccatcatcttcacacttttgtga

SEQ ID NO: 527692 - DNA, 120 bp, Artificial Sequence
  ENSG00000166004_6 (sequence is synthesized)
atagagagacagacacaaaacggccagatgctcgtttggctgctgaagaggaagctaaacgattggaagaactacaaaaacaggcagcacaagagagaatggaacggtttgaaaaggcac

SEQ ID NO: 527693 - DNA, 120 bp, Artificial Sequence
  ENSG00000166004_7 (sequence is synthesized)
atgtacggggattccaagcaatgaagaagatccatttggctcaaaatcaggagaaactaatgaaagaactcaaacagctacagcaagaggacctggcacgtaggagacagactgtagcac

SEQ ID NO: 527694 - DNA, 120 bp, Artificial Sequence
  ENSG00000166004_8 (sequence is synthesized)
aaatgccaccacaactagttgaacttccatacaaacgcagtgaaatgaaagaagactggcagagagaattggaatttgcctttgaagatatgtacaatgcagacaggaaggtgaaaggga

SEQ ID NO: 527695 - DNA, 120 bp, Artificial Sequence
  ENSG00000166004_9 (sequence is synthesized)
atctgattctgcaccttgaaccagagcccttgcccactgtgactaatcagatccaagatgaagagctggacctttcaatggaacaagaaaatttgggtgcagctgaagaccttccagtga

SEQ ID NO: 527696 - DNA, 120 bp, Artificial Sequence
  ENSG00000166004_10 (sequence is synthesized)
cagaagctgaaatatgttctagtgaaacagatgttcccttggtaatgaagacccaacagattccttcaaaagttctttttaaaaaattattaaataagatccgaagccaaaaatctctct

SEQ ID NO: 527697 - DNA, 120 bp, Artificial Sequence
  ENSG00000166004_11 (sequence is synthesized)
ggacaattaaatctatgtctgaggatgaaagtgaaatgattacgactgttagtgaaattgagagtaaagcaccaacggttgagtcaggaacaattgccagcaaagagagaacgttatcct

SEQ ID NO: 527698 - DNA, 120 bp, Artificial Sequence
  ENSG00000166004_12 (sequence is synthesized)
ctgggcaggaacaagttgttgaaagtgatacactaacaattgagtctggaccacttgctagtgaagataaaccactttcgtgtggtacaaactctggaaaagaacaagaaataaatgaga

SEQ ID NO: 527699 - DNA, 120 bp, Artificial Sequence
  ENSG00000166004_13 (sequence is synthesized)
ctctgcctatcacaactgtagctcagagttcagttctacttcatcctcaagaagcagcagccaggattagaatgtcagcaaggcagaaacagataatggaaatagaagagcagaagcaaa

SEQ ID NO: 527700 - DNA, 120 bp, Artificial Sequence
  ENSG00000166004_14 (sequence is synthesized)
agcaattggaattacttgaacaaattgaacagcagaaattaagattagaaactgactgcttcagggctcagctggaagaagaaaaaagaaaaaaaactcaaccgactggggttggcattg

SEQ ID NO: 527701 - DNA, 120 bp, Artificial Sequence
  ENSG00000166004_15 (sequence is synthesized)
ctccagcatcatgccctgtaatttctgatgaagatagtcataggcagatgattcgtaactatcaacatcagcttttacaacaaaacaggttacacaggcagtctgttgaaacagccagga

SEQ ID NO: 527702 - DNA, 120 bp, Artificial Sequence
  ENSG00000166004_16 (sequence is synthesized)
aacaattacttgaatatcaaactatgttaaaaggaaggtgcccatcggtgtcagctccatcattgataactgattctgttatatcagtgccatcatggaaatctgagagaccgactgcta

SEQ ID NO: 527703 - DNA, 120 bp, Artificial Sequence
  ENSG00000166004_17 (sequence is synthesized)
tatcagagcattgggatcaaggtcagagactcaagttgagtcctaacaaataccaacccatacaacctatacagacctccaaattagaacaagatcattttcaggtagcgagacaaaatc

SEQ ID NO: 527704 - DNA, 120 bp, Artificial Sequence
  ENSG00000166004_18 (sequence is synthesized)
actttccacaaagacaggtggaaacaacagaaacattacgcgcttcagatattttaaccaatcaagctttagaatcacaagaacatctaaggcaattctctcagactgaaacacaacaga

SEQ ID NO: 527705 - DNA, 120 bp, Artificial Sequence
  ENSG00000166004_19 (sequence is synthesized)
gagactataaattggtccccaaagattctgagacactttcaagggctttgtcacatgacaggcagctaatatcacaggatgctagaaaaatatctgaaacatttggggcaacaacttttc

SEQ ID NO: 527706 - DNA, 120 bp, Artificial Sequence
  ENSG00000166004_20 (sequence is synthesized)
aaagtttagaatcccaacaattgttctcagagaatagtgaaaatatatcttaccatttaactgaaccttcttcatttgtaccactggtacctcagcattcttttagttctctgcctgtta

SEQ ID NO: 527707 - DNA, 120 bp, Artificial Sequence
  ENSG00000166004_21 (sequence is synthesized)
aagttgagtcaggaaaaattcaagaacccttttcagccatgagcaaaagtacagtttccacaagccattctataatcagccaaatgcatgataggcctttgctgccgtcagagaatatca

SEQ ID NO: 527708 - DNA, 120 bp, Artificial Sequence
  ENSG00000166004_22 (sequence is synthesized)
cagcccagcaaggtaatatgaaggccctccaagaacagttagacctacagaagaaagttcttcaggcaactcaggaagctcaggaacagttgcttttgtgcaaacagaaagaagtggaac

SEQ ID NO: 527709 - DNA, 120 bp, Artificial Sequence
  ENSG00000166004_23 (sequence is synthesized)
agcaaacgggcctctcggtattccttcccttggtaactccagattcatctgctttattgccttctgccaaagcagatttggggagaatccaggaatcttcaccaaccaagaataatattg

SEQ ID NO: 527710 - DNA, 120 bp, Artificial Sequence
  ENSG00000166004_24 (sequence is synthesized)
cagtttcctcagaccatcatgtgatctcacaacttcaggataagcgtttgagtctttcacagcctatcctatcacagcaaaataattttaaatttctccaagagcagttgaatattcaga

SEQ ID NO: 527711 - DNA, 120 bp, Artificial Sequence
  ENSG00000166004_25 (sequence is synthesized)
aggatagccttcaggctaggcgagaagcccaggaagtattgtatgtacataaacagagtgaattggatagaagagtatgttccgaacaggctgagccctctttcccatttcaggtagctc

SEQ ID NO: 527712 - DNA, 120 bp, Artificial Sequence
  ENSG00000166004_26 (sequence is synthesized)
agcatacatttacttcactaccatctgctgatacaaaatctggaaaaatacaggagcaacattcatctaagagcgagaaaggacttgtttcatgccaatctgacatccccatatctcagg

SEQ ID NO: 527713 - DNA, 120 bp, Artificial Sequence
  ENSG00000166004_27 (sequence is synthesized)
atgggtctttgagtttcctacagcagttcctacctctacatgatagtttgaagttgctccaagaacagttgactaaacagagggatactcttcaggctaggcatgaagctcaggtggaat

SEQ ID NO: 527714 - DNA, 120 bp, Artificial Sequence
  ENSG00000166004_28 (sequence is synthesized)
tacttttacatagacaaagagatttgggggacagtaagtctgggctggtgagctcttcatcctcaccagtggttgttcagcattcagttgcttcacaagcttctgctaaagctgagccta

SEQ ID NO: 527715 - DNA, 120 bp, Artificial Sequence
  ENSG00000166004_29 (sequence is synthesized)
ggagaattcaggagctttatttatctgagaaggagaatgtaggtccctcctgtcatttgataatcccaacatttcaggataagtctcttagttttccacagcatagcctggcacagcaag

SEQ ID NO: 527716 - DNA, 120 bp, Artificial Sequence
  ENSG00000166004_30 (sequence is synthesized)
aaaatttgacaatactccaagaacagtcacaaatacaaagggtaatacttggtgctaaagaaggaactcaggaatttgtacacacagaaagtgaattggagaaaagaatttcttctgaac

SEQ ID NO: 527717 - DNA, 120 bp, Artificial Sequence
  ENSG00000166004_31 (sequence is synthesized)
agactggcacctcctcatccctttcccaggtggatgaatctgagagattccaggaatgtatatcaatcaagagtgacagtaccattcccttaagccatcctaagatcccaagatgtcagg

SEQ ID NO: 527718 - DNA, 120 bp, Artificial Sequence
  ENSG00000166004_32 (sequence is synthesized)
aaagacttttgagagtttcacaacatatgctacctctacaagataatttggaggaacaccaagcatggctagacactgagaaagaagcctttcatttcagccagaaaacccaagaaaata

SEQ ID NO: 527719 - DNA, 120 bp, Artificial Sequence
  ENSG00000166004_33 (sequence is synthesized)
ggaacctctttttacagagagtgaaagtaaaattttttcaagccaccttcagatcccacaattgcaggataggcttttgaggatatcgcaacttatccagcctcaacaagataatttgaa

SEQ ID NO: 527720 - DNA, 120 bp, Artificial Sequence
  ENSG00000166004_34 (sequence is synthesized)
ggcacttcaagaacagttagctacacagagagaagccatcattctagctagacaagaagctcgggaagaattacttttacatcagagtgaatgggagggaagaatatctcccgagcaggt

SEQ ID NO: 527721 - DNA, 120 bp, Artificial Sequence
  ENSG00000166004_35 (sequence is synthesized)
tgacacctcttccttacccctagtaccacagcattcattcgcctcattacctcttaatgaatctgaaagaaaccaagaaccatgttcaattaacagtgataatatagtatcctcaggtca

SEQ ID NO: 527722 - DNA, 120 bp, Artificial Sequence
  ENSG00000166004_36 (sequence is synthesized)
ctcagagataccaacattgcctgatgggctgttgggtttatcacatcttgttttacctcaacaagataatttgattgcacttgaagaacacttgcatgcacagacagatttccttccttc

SEQ ID NO: 527723 - DNA, 120 bp, Artificial Sequence
  ENSG00000166004_37 (sequence is synthesized)
tattgagaaaacccagaaagaattggttttgtcaaaaccatgtaaatttgaggaaaaggtatcttctgagcattttatccagtctcaccatggtgatttgcaggcacttcaacagcagtt

SEQ ID NO: 527724 - DNA, 120 bp, Artificial Sequence
  ENSG00000166004_38 (sequence is synthesized)
agatacacagaagaaagccattcgatctatacaggaagtccaagaagaattgcttttgcaaagattaagtgaattggagaaaagggtatcatctgaacaagtttgctcctcttcatttgt

SEQ ID NO: 527725 - DNA, 120 bp, Artificial Sequence
  ENSG00000166004_39 (sequence is synthesized)
atcccaggtgcctgttgctgactctgaaagaacccagaagtctttcccaaccaaaagtaatgatactcttccctcaagtcatcgtgagattccaagattacaggatagacttttgagttt

SEQ ID NO: 527726 - DNA, 120 bp, Artificial Sequence
  ENSG00000166004_40 (sequence is synthesized)
atcaaagcctattctgcctcagcaagataatatgacagcacaattggatgcacaaagggaagtgatgtattcttatgagaaaccccaggaagaactgtctttaaacaaacaaagaaagtt

SEQ ID NO: 527727 - DNA, 120 bp, Artificial Sequence
  ENSG00000166004_41 (sequence is synthesized)
gaacaaaagtgaatctgctgagcatactatcccctctttgtttctacccaaggaaacagagcattcgtttattccactaccttttgcagaagctaaacctaaaagcacttgtgaattgta

SEQ ID NO: 527728 - DNA, 120 bp, Artificial Sequence
  ENSG00000166004_42 (sequence is synthesized)
ttcatcccagaatgaacatgcagcccccccaagtaatcctgtgatcccagggtttcaagatagacttttgagtttttcacagtctgtcttaactcagcaagataacttgggacttcagaa

SEQ ID NO: 527729 - DNA, 120 bp, Artificial Sequence
  ENSG00000166004_43 (sequence is synthesized)
acagttggatctacaaagagaagttctgcattatagccagaaagcccaggaaaaattgcttgtacagagacaaacagcattgcagcagcagatacagaaacatgaagagactttgaagga

SEQ ID NO: 527730 - DNA, 120 bp, Artificial Sequence
  ENSG00000166004_44 (sequence is synthesized)
tttctttaaagacagtcagataagtaagcccacagttgaaaatgatttaaaaacccagaagatggggcagctcagagactggtttcctaatacacaagacctagcaggaaatgatcaaga

SEQ ID NO: 527731 - DNA, 120 bp, Artificial Sequence
  ENSG00000166004_45 (sequence is synthesized)
aaatattaggcatgcagataggaacaactctgatgataatcatttggcttcagaagatactagtgccaagcaaagtggtgagcatctggagaaagatctggggagaagatcctcaaagcc

SEQ ID NO: 527732 - DNA, 120 bp, Artificial Sequence
  ENSG00000166004_46 (sequence is synthesized)
acctgtagcaaaagtcaaatgtggtttggacttaaaccagcatgaacttagtgctatacaagaagtagagtcaccagcaattggcagaacttctatactaggtaaaccaggtatttatga

SEQ ID NO: 527733 - DNA, 120 bp, Artificial Sequence
  ENSG00000166004_47 (sequence is synthesized)
agacagagaccccctgcgagtctcaataagccgagaacaaagtttctttgggagcccactggcccatgatccgtttagttgtcttcaactggttggccaagagaatgtctgtggtgatga

SEQ ID NO: 527734 - DNA, 120 bp, Artificial Sequence
  ENSG00000166004_48 (sequence is synthesized)
ctatgatgaagcagttaagctgaaggaatctgttgttgaaaatcatgcagtgttaagttatgctgtggaggaagaacatgcatatttgggtccaactgtgaagccagatgataaggctaa

SEQ ID NO: 527735 - DNA, 120 bp, Artificial Sequence
  ENSG00000166004_49 (sequence is synthesized)
aacactgtcttatgaaccattatcttcagcaactgtttccactgggagccttttaagttatgaaaacacagatttgagccttacagatccagagtcattttcagagcacatggatgatag

SEQ ID NO: 527736 - DNA, 120 bp, Artificial Sequence
  ENSG00000166004_50 (sequence is synthesized)
caagcaagaatctaccaccagtaaagaagaggaaacaaatattataagttccatagttccttcaacacaagatatttatcagcggcagaactcttcagacgttcataaatctctgttgcc

SEQ ID NO: 527737 - DNA, 120 bp, Artificial Sequence
  ENSG00000166004_51 (sequence is synthesized)
tgcagtggatgaaactacatgtggtcacacacactttcagcaaatgatagacaagtacattaatgaagcaaatttgatacctgaaaaaacagatttgcaagaattggaacacatttttcc

SEQ ID NO: 527738 - DNA, 120 bp, Artificial Sequence
  ENSG00000166004_52 (sequence is synthesized)
taatttgcatcatcagctgtttaaacccttagaaccacatccagattttgacttatcatcatcatcctctgggatttctccagacaacagagacttttaccagagatcagattcttcatc

SEQ ID NO: 527739 - DNA, 120 bp, Artificial Sequence
  ENSG00000166004_53 (sequence is synthesized)
tgaaagccactgtgctactggattatccaaaagtacagtttatttcacagcactgaggaggaccagcatgcattcttctcttaacacaagtccgaatcaacaacctgacactaacttggc

SEQ ID NO: 527740 - DNA, 120 bp, Artificial Sequence
  ENSG00000166004_54 (sequence is synthesized)
tcatgttggagctcacagttttgctacagaaaatattattgggggatctgaacaatgttttgaacagcttcagccagaatattcttcacaggaggagagccagcatgctgatctaccaag

SEQ ID NO: 527741 - DNA, 120 bp, Artificial Sequence
  ENSG00000166004_55 (sequence is synthesized)
tatttttagcattgaagcaagagattcttcccaaggcatgaaaaatcagaactatccctctgaagaacatactgaaatattacaaaacaagaaaaaaattgttcatttccagctttctat

SEQ ID NO: 527742 - DNA, 120 bp, Artificial Sequence
  ENSG00000166004_56 (sequence is synthesized)
aggaaacttaagttcagtctacagttcatctgatgaagctaatgtatttgatcagttaaatgtacagcatagcactccatgtggttctaactctagtgagtgctcaacaaaacaccaact

SEQ ID NO: 527743 - DNA, 120 bp, Artificial Sequence
  ENSG00000166004_57 (sequence is synthesized)
agaaagcagaaaggaaagtatgggctttgaagaactatcaaaaagaggggttgttacaatgttacaaagtcaaggactcattgaagataataaaaatgaaacctgtagggttttagacat

SEQ ID NO: 527744 - DNA, 120 bp, Artificial Sequence
  ENSG00000166004_58 (sequence is synthesized)
aaatccacaggtagaggaaactgactctcgattatgtgtaagaacagtggagatgggaacttcaattcaggcaccatattccttaactactcaaaatgaaaaatattttgagaattcagc

SEQ ID NO: 527745 - DNA, 120 bp, Artificial Sequence
  ENSG00000166004_59 (sequence is synthesized)
tgaaacagacattccaaaaatcaccaaaaaactatctcaactaggagaatcagagctttttgcaagttctggatcattttcattacagagctctataccagtctgggaaacagaaactgg

SEQ ID NO: 527746 - DNA, 120 bp, Artificial Sequence
  ENSG00000166004_60 (sequence is synthesized)
ccatggtataatggaagaaccagaacttactttaataagcaccactgataccagtattgctgaaatggattttgcaaatttaaccctagaagagaagagcgagaatgaagcaaaatgctt

SEQ ID NO: 527747 - DNA, 120 bp, Artificial Sequence
  ENSG00000166004_61 (sequence is synthesized)
ctttcaggtgagtgagtttctgcctcttgtatcagcaacagaagcctcagattatccagctgtatcagaactttccatagaaaaaccaaggacagcatctacagaaacccctcgcaggct

SEQ ID NO: 527748 - DNA, 120 bp, Artificial Sequence
  ENSG00000166004_62 (sequence is synthesized)
tacacctgtaccagggagcttacaagaagcatttataaagaggaaaaaatcatttatggagagatcccaccagaggcagaaagaaataaggaataaaattcatgtctctgaaaattctca

SEQ ID NO: 527749 - DNA, 120 bp, Artificial Sequence
  ENSG00000166004_63 (sequence is synthesized)
aatcaaaacagttaaagagaaaccatctataagttcatctgtgagtcgtctaaagggcgtgaataaagtcagagcatcttttcctgaagacagaaagactacacaggctctaaggcacca

SEQ ID NO: 527750 - DNA, 120 bp, Artificial Sequence
  ENSG00000166004_64 (sequence is synthesized)
aaggggtctaaggttatacaatcaactagctgaagtgaaacaacaaaaggaagaaaaaacaaaacaagaagcttatgcccaaaacagagcaagggcaaaagaattccataagaaaacact

SEQ ID NO: 527751 - DNA, 120 bp, Artificial Sequence
  ENSG00000166004_65 (sequence is synthesized)
agagaaacttcgagccaaaaatacatgctgactttctagaaatagtgtaaaggttttttaattgtgtatatgtagcattagacaaaattatttaaagtcaataaattgttattcgaggaa

SEQ ID NO: 527752 - DNA, 120 bp, Artificial Sequence
  ENSG00000166004_66 (sequence is synthesized)
tggcgcatatggtattctaaatattactggaagtaacagggatgctctgtagatccccaacaatacttttgagaagcagttgctgatatatttttccattcagtggaaacctatccgagc

SEQ ID NO: 527753 - DNA, 120 bp, Artificial Sequence
  ENSG00000166004_67 (sequence is synthesized)
aaatttcatggttgcactgatctcttaacaatatgtattaccatgcttctccactaaaatatgtctgtaaggaagtacccagtacagtatgtctgtaaggaatattccattaaaaggaat

SEQ ID NO: 527754 - DNA, 75 bp, Artificial Sequence
  ENSG00000166004_68 (sequence is synthesized)
agtacagtatgtctgtaaggaatattccattaaaaggaatatagtgtcgctgtcaattacatttttttttctgca

SEQ ID NO: 527755 - DNA, 120 bp, Artificial Sequence
  ENSG00000166004_69 (sequence is synthesized)
tgctacaacaccgttttaccacagaatatattgagggcatttagtgagaaaggggatctggaaccaattagactcactgaggcacatttataggagattaattagcaaatcttcctttgc

SEQ ID NO: 527756 - DNA, 120 bp, Artificial Sequence
  ENSG00000166004_70 (sequence is synthesized)
cattgcagagttagctattacggctgaggcggtattactgataaataagagcaggagctcagaaatcatacagttctggatttgagtcatagcctgaccatttcctagctgtaaaaccat

SEQ ID NO: 527757 - DNA, 120 bp, Artificial Sequence
  ENSG00000166004_71 (sequence is synthesized)
gggcaagttactttttaatcttttataaaagaggaatattatagattaaatgagatagtgcacataaagcacaatgtctggcccatagtaacactgaatacagtgagcctttttcctttt

SEQ ID NO: 527758 - DNA, 120 bp, Artificial Sequence
  ENSG00000166004_72 (sequence is synthesized)
ttaagcttatactgaagcagtggttacatatgtcctgttgatcctcattagcctcataaggctgtggaaatggaaattcgtatttgtcaaaagtttgttcatacctgtaatcgtagcact

SEQ ID NO: 527759 - DNA, 120 bp, Artificial Sequence
  ENSG00000166004_73 (sequence is synthesized)
ccaggatttcaagaccagcctgggcaacactgagaccccatctctattttaaaaaaaaattttttaaatttaaaaaaattaaatttctctaaaaataaaacttaaaaagttttggtcact

SEQ ID NO: 527760 - DNA, 120 bp, Artificial Sequence
  ENSG00000166004_74 (sequence is synthesized)
tcatgggggaaaaactgaagtttttgttacactggagttacctgaaaataagcgtttatgaatatgttcttaatactccttttctagtgtttaccttaaaaataaatttatgattttttt

SEQ ID NO: 527761 - DNA, 120 bp, Artificial Sequence
  ENSG00000166006_0 (sequence is synthesized)
gtggagagtggggtgtaaataaggcaggcagaagctccagagagggtggagacagagcttcacggaagaaaaatatgtgaacctggttggtacacatagcttctccagacccacccaccc

SEQ ID NO: 527762 - DNA, 120 bp, Artificial Sequence
  ENSG00000166006_1 (sequence is synthesized)
actctttcctgagccctgtgcttcggatggcggcgggaggttgatggcgagtggtgctgaagggacagctccagcagtggctgatttgggggagaaacaaaatctgcagatggaatccga

SEQ ID NO: 527763 - DNA, 120 bp, Artificial Sequence
  ENSG00000166006_2 (sequence is synthesized)
gcagggcgacttcaccttcaagtggtgagctctcctgacctgcggccagtctccactccattcacggccagccgatctgcccgctcccggaggggtcgggcagtgccggctggacccgcc

SEQ ID NO: 527764 - DNA, 120 bp, Artificial Sequence
  ENSG00000166006_3 (sequence is synthesized)
ccgagctccatggtttgcccaaccctgcgcgatggtgactctgggcgcggaggttggcgactggcaaatccgcagatcacagaatgaaggcggggagcgcggccggcggccggcgggggc

SEQ ID NO: 527765 - DNA, 120 bp, Artificial Sequence
  ENSG00000166006_4 (sequence is synthesized)
tttctcccccaccccagcgcccagggaagcggctcaaccacctgaatccggaaaacgccaacaagtagtttctcgtcggagaagggcggctcacctgggcgccaagactcagtcccgctg

SEQ ID NO: 527766 - DNA, 120 bp, Artificial Sequence
  ENSG00000166006_5 (sequence is synthesized)
cccagagaacctcgtccactcggaaaccaaagcagaaccacttttctctcggtctcgttaagtcatgtctgagtcacagagatgggcaagatcgagaacaacgagagggtgatcctcaat

SEQ ID NO: 527767 - DNA, 120 bp, Artificial Sequence
  ENSG00000166006_6 (sequence is synthesized)
gtcgggggcacccggcacgaaacctaccgcagcaccctcaagaccctgcctggaacacgcctggcccttcttgcctcctccgagcccccaggcgactgcttgaccacggcgggcgacaag

SEQ ID NO: 527768 - DNA, 120 bp, Artificial Sequence
  ENSG00000166006_7 (sequence is synthesized)
caggcgactgcttgaccacggcgggcgacaagctgcagccgtcgccgcctccactgtcgccgccgccgagagcgcccccgctgtcccccgggccaggcggctgcttcgagggcggcgcgg

SEQ ID NO: 527769 - DNA, 120 bp, Artificial Sequence
  ENSG00000166006_8 (sequence is synthesized)
gaccatcccggtggcggccgcgagttcttcttcgaccggcacccgggcgtcttcgcctatgtgctcaattactaccgcaccggcaagctgcactgccccgcagacgtgtgcgggccgctc

SEQ ID NO: 527770 - DNA, 120 bp, Artificial Sequence
  ENSG00000166006_9 (sequence is synthesized)
ttcgaggaggagctggccttctggggcatcgacgagaccgacgtggagccctgctgctggatgacctaccggcagcaccgcgacgccgaggaggcgctggacatcttcgagacccccgac

SEQ ID NO: 527771 - DNA, 120 bp, Artificial Sequence
  ENSG00000166006_10 (sequence is synthesized)
ctcattggcggcgaccccggcgacgacgaggacctggcggccaagaggctgggcatcgaggacgcggcggggctcgggggccccgacggcaaatctggccgctggaggaggctgcagccc

SEQ ID NO: 527772 - DNA, 120 bp, Artificial Sequence
  ENSG00000166006_11 (sequence is synthesized)
cgcatgtgggccctcttcgaagacccctactcgtccagagccgccaggtttattgcttttgcttctttattcttcatcctggtttcaattacaactttttgcctggaaacacatgaagct

SEQ ID NO: 527773 - DNA, 120 bp, Artificial Sequence
  ENSG00000166006_12 (sequence is synthesized)
ttcaatattgttaaaaacaagacagaaccagtcatcaatggcacaagtgttgttctacagtatgaaattgaaacggatcctgccttgacgtatgtagaaggagtgtgtgtggtgtggttt

SEQ ID NO: 527774 - DNA, 120 bp, Artificial Sequence
  ENSG00000166006_13 (sequence is synthesized)
acttttgaatttttagtccgtattgttttttcacccaataaacttgaattcatcaaaaatctcttgaatatcattgactttgtggccatcctacctttctacttagaggtgggactcagt

SEQ ID NO: 527775 - DNA, 120 bp, Artificial Sequence
  ENSG00000166006_14 (sequence is synthesized)
gggctgtcatccaaagctgctaaagatgtgcttggcttcctcagggtggtaaggtttgtgaggatcctgagaattttcaagctcacccgccattttgtaggtctgagggtgcttggacat

SEQ ID NO: 527776 - DNA, 120 bp, Artificial Sequence
  ENSG00000166006_15 (sequence is synthesized)
actcttcgagctagtactaatgaatttttgctgctgataattttcctggctctaggagttttgatatttgctaccatgatctactatgccgagagagtgggagctcaacctaacgaccct

SEQ ID NO: 527777 - DNA, 120 bp, Artificial Sequence
  ENSG00000166006_16 (sequence is synthesized)
tcagctagtgagcacacacagttcaaaaacattcccattgggttctggtgggctgtagtgaccatgactaccctgggttatggggatatgtacccccaaacatggtcaggcatgctggtg

SEQ ID NO: 527778 - DNA, 120 bp, Artificial Sequence
  ENSG00000166006_17 (sequence is synthesized)
ggagccctgtgtgctctggctggagtgctgacaatagccatgccagtgcctgtcattgtcaataattttggaatgtactactccttggcaatggcaaagcagaaacttccaaggaaaaga

SEQ ID NO: 527779 - DNA, 120 bp, Artificial Sequence
  ENSG00000166006_18 (sequence is synthesized)
aagaagcacatccctcctgctcctcaggcaagctcacctactttttgcaagacagaattaaatatggcctgcaatagtacacagagtgacacatgtctgggcaaagacaatcgacttctg

SEQ ID NO: 527780 - DNA, 120 bp, Artificial Sequence
  ENSG00000166006_19 (sequence is synthesized)
gaacataacagatcagtgttatcaggtgacgacagtacaggaagtgagccgccactatcacccccagaaaggctccccatcagacgctctagtaccagagacaaaaacagaagaggggaa

SEQ ID NO: 527781 - DNA, 120 bp, Artificial Sequence
  ENSG00000166006_20 (sequence is synthesized)
acatgtttcctactgacgacaggtgattacacgtgtgcttctgatggagggatcaggaaaggatatgaaaaatcccgaagcttaaacaacatagcgggcttggcaggcaatgctctgagg

SEQ ID NO: 527782 - DNA, 120 bp, Artificial Sequence
  ENSG00000166006_21 (sequence is synthesized)
ctctctccagtaacatcaccctacaactctccttgtcctctgaggcgctctcgatctcccatcccatctatcttgtaaaccaaacaaccaaactgcatcagtcggctaaattgtattaat

SEQ ID NO: 527783 - DNA, 120 bp, Artificial Sequence
  ENSG00000166006_22 (sequence is synthesized)
tcaagtgctgtttaccccataatggaaataattaaatgtagagttactccaggctccattaatacagtataaatcttgcatgatactacaatttgaagtcagaaatgccacttgggtagc

SEQ ID NO: 527784 - DNA, 120 bp, Artificial Sequence
  ENSG00000166006_23 (sequence is synthesized)
tattgaccagtgcactaatatataaacataccttcagggagatatatttaaaacagtgtgcttccaaatgccaaccacttcattggaactttatttcttgtgactgtaaaccattctgaa

SEQ ID NO: 527785 - DNA, 120 bp, Artificial Sequence
  ENSG00000166006_24 (sequence is synthesized)
gatgtctgggatcctatcttgattgcacacgacatgacttgtgtcagctcatttgcatggaccatcttgtctctatcacctgaaagcaatgttgcagagttcggggactgtggatagctc

SEQ ID NO: 527786 - DNA, 120 bp, Artificial Sequence
  ENSG00000166006_25 (sequence is synthesized)
aggatatgtgtacttgcatcgaaccatcctgctgatatgaaagcattggtcgactgttctgcatgttgaattgtggggcagggagggcacttttctccttgacatttttttcttattatt

SEQ ID NO: 527787 - DNA, 120 bp, Artificial Sequence
  ENSG00000166006_26 (sequence is synthesized)
tgaaagaaatatatgttttaaatagtttaatttcttgattgatttacttttcttcaaaaatgctgtattggagttctgaatgtctctggttgtttgcacacagataactgcaaagaggtt

SEQ ID NO: 527788 - DNA, 120 bp, Artificial Sequence
  ENSG00000166006_27 (sequence is synthesized)
gtcattactggttacacgcaagccgaggccagatctcttacttaatgacttggggaaggcacaaaacatgagagaaaggtaactgccagccaggcttgcattgtttagccagaaattgct

SEQ ID NO: 527789 - DNA, 120 bp, Artificial Sequence
  ENSG00000166006_28 (sequence is synthesized)
gcttggttctagactctttaaaaaaaaaaaatacccagggtttgtcatcattttcagaggcagagtgccaaatatcacccaaagctcttgtgtcttttttttacccccttattttatttt

SEQ ID NO: 527790 - DNA, 120 bp, Artificial Sequence
  ENSG00000166006_29 (sequence is synthesized)
tatttattaattttttgtgcaaacatcaaatgtcactggtgttcacagaaggcttttttgactagccttaaattcctgagtcaaaagattaatcagattttcaggcagtgtttaatcagg

SEQ ID NO: 527791 - DNA, 120 bp, Artificial Sequence
  ENSG00000166006_30 (sequence is synthesized)
tgctttgtcctgtatgttgttcttgtctgtcttagctccctgtctttcctgtatatgccatctgtctccatgaagcacagaaatgcctctgtaagatgtttatgattttaatatttactc

SEQ ID NO: 527792 - DNA, 120 bp, Artificial Sequence
  ENSG00000166006_31 (sequence is synthesized)
cctccaaacccgactccataccattttttgctatttggagcagcctctctgctttgtgtataaattaatgatgctctgtagactacctaagttaatcggcactgtgaatctttttgataa

SEQ ID NO: 527793 - DNA, 120 bp, Artificial Sequence
  ENSG00000166006_32 (sequence is synthesized)
gcagggtttaagcagcaatttcaccattgcacttggttgcctgctgcagtgtcagtttctactacctagcaaccagcattcattactacactccaacaaaatccttagggagtcatattc

SEQ ID NO: 527794 - DNA, 120 bp, Artificial Sequence
  ENSG00000166006_33 (sequence is synthesized)
agtctgagtggaagaaagtctatttatgcattcctatgaattcaacagcaatagcgtgtctcatgtattgagcatgtgagggaagaaaaagaccgtaatataaatagagggataaataat

SEQ ID NO: 527795 - DNA, 120 bp, Artificial Sequence
  ENSG00000166006_34 (sequence is synthesized)
atcactaaggcatttgggagccttgagactgctgattaattcctatttctcatgtttattttttgttaggaagacaattgtcacttttattattggccacgaaacatgtattactctata

SEQ ID NO: 527796 - DNA, 120 bp, Artificial Sequence
  ENSG00000166006_35 (sequence is synthesized)
tccccaagtcctagagcatgacctgcatgttggagatgttgtacagcaatgtatttatccagacatacatatatgatatttagagacacagtgattcttttgataacaccacacatagaa

SEQ ID NO: 527797 - DNA, 120 bp, Artificial Sequence
  ENSG00000166006_36 (sequence is synthesized)
cattataattacacacaaatttatggtaaaagaattaatatgctgtctggtgctgctgttattgactacagtgttgtacagaatttatcatggattattgactgctgagaaagggacagt

SEQ ID NO: 527798 - DNA, 120 bp, Artificial Sequence
  ENSG00000166006_37 (sequence is synthesized)
ggaatttagccataccaaggactatactggaaacagacttctgctgctgaatgtgccctgatgtgaccaggttgcacttggaagagatcctcgcgtcttcatgaggcacttaaagcttat

SEQ ID NO: 527799 - DNA, 120 bp, Artificial Sequence
  ENSG00000166006_38 (sequence is synthesized)
aaaagaactgcggctggaactcatctggtgctccccatgagagtgctctgcttgtagactggccagtgtccatgaaacaactgtaaataccaacatgtgtgcatgggtcaacagtcttgg

SEQ ID NO: 527800 - DNA, 120 bp, Artificial Sequence
  ENSG00000166006_39 (sequence is synthesized)
ccatttctcatcaaaagaagccaaattcatgatcaacatctctgaagtttcaagtaaggcccacacttctttgaattactcttcatgggcccacattaggttgtgctgtgaattacttaa

SEQ ID NO: 527801 - DNA, 120 bp, Artificial Sequence
  ENSG00000166006_40 (sequence is synthesized)
ggcagtgatactgatgtagtatagttttgtcttaatttcccttatttctacttctttggttgaatctatgaacttgattgtataattttcttataaattactgatgtaatcagcttgtca

SEQ ID NO: 527802 - DNA, 120 bp, Artificial Sequence
  ENSG00000166006_41 (sequence is synthesized)
attatgttgtgaaattgttagtattcatttatcaaaaatgacctatgtttagtcacatatttgtttagttctgggaaattgttatagcttaaatggaactcaccaacattattcatagtt

SEQ ID NO: 527803 - DNA, 120 bp, Artificial Sequence
  ENSG00000166006_42 (sequence is synthesized)
taagtcttttatcattattacctcaattataaatattacaaaaacataattctggcaatgagagtatttttttattcaatgatcaaggagcaatgtcagtatatagtagaatatcaatta

SEQ ID NO: 527804 - DNA, 120 bp, Artificial Sequence
  ENSG00000166006_43 (sequence is synthesized)
aattatatcctaaaatgtatattttgcataaaagagatattctttaatcaattacttttttgtgagttttgtggcaaatgaagcttgtacgtgtctttaaaactgttgtagatgaaactg

SEQ ID NO: 527805 - DNA, 120 bp, Artificial Sequence
  ENSG00000166006_44 (sequence is synthesized)
tataagatttttacatcttgcttaatcaatattttcagagtctattagttcccctgggattctgaatataacatatagcctattataaatccctgtatcgtggaccttttgtgaacattt

SEQ ID NO: 527806 - DNA, 120 bp, Artificial Sequence
  ENSG00000166006_45 (sequence is synthesized)
caaggcgcatgcacaaccttgatgataaccagtggaaatgtaactaactgaaatgaagaataaaaggcaaatgagctggggataaacttgaatgttatctgattaaattactcaaattat

SEQ ID NO: 527807 - DNA, 120 bp, Artificial Sequence
  ENSG00000166006_46 (sequence is synthesized)
tactggttacacgcaagccgaggccagatctcttacttaatgacttggggaaggcacaaaacatgagagaaagtgttgtacagaatttatcatggattattgactgctgagaaagggaca

SEQ ID NO: 527808 - DNA, 120 bp, Artificial Sequence
  ENSG00000166006_47 (sequence is synthesized)
ttctgatggagggatcaggaaaggaattagaaatgggcattccatcctacatcacctggataatggcaccaaatgccattatttaagaatcatcttttaaccctataaagctggaagatt

SEQ ID NO: 527809 - DNA, 120 bp, Artificial Sequence
  ENSG00000166006_48 (sequence is synthesized)
aaatatgctggaaaaagagttgtccatttaaacttaagtatgctttattggcttaggaaataaaaaatgaaaagagaaaaagtagcctacttatttctctttttttcaagaatacattct

SEQ ID NO: 527810 - DNA, 120 bp, Artificial Sequence
  ENSG00000166006_49 (sequence is synthesized)
gaaatttaaaaatattagtcaagcttatatcttacttaagttgctttgcctaatttttaaatgagttctagtattctatatgccaaaattatattaatgctaactataatctgggaaaaa

SEQ ID NO: 527811 - DNA, 120 bp, Artificial Sequence
  ENSG00000166006_50 (sequence is synthesized)
atatattttgaagtattgtaacaataatttgtgatggctggtttaatcttttcaaaatggcaactacagtgagcttcatttttttagagttataaattgtctcaatattaaattctttgt

SEQ ID NO: 527812 - DNA, 120 bp, Artificial Sequence
  ENSG00000166006_51 (sequence is synthesized)
ggcgtgagccaccgcgcccggccgataaattcttattaagggaaagcaagtggcttcagcacatacagaaccaaaccctgaacacagaagatcaagtttcatgcaggaagatttgaacgc

SEQ ID NO: 527813 - DNA, 120 bp, Artificial Sequence
  ENSG00000166012_0 (sequence is synthesized)
ccttttcttccgcacggttggaggaggtcggctggttatcgggagttggagggctgaggtcgggagggtggtgtgtacagagctctaggacaccaggccagtcgcgggttttgggccgag

SEQ ID NO: 527814 - DNA, 120 bp, Artificial Sequence
  ENSG00000166012_1 (sequence is synthesized)
gcctgggttacaagcagcaagtgcgcggttggggccactgcgaggccgttttagaaaactgtttaaaacaaagagcaattgatggataaatcaggaatagattctcttgaccatgtgaca

SEQ ID NO: 527815 - DNA, 120 bp, Artificial Sequence
  ENSG00000166012_2 (sequence is synthesized)
tctgatgctgtggaacttgcaaatcgaagtgataactcttctgatagcagcttatttaaaactcagtgtatcccttactcacctaaaggggagaaaagaaaccccattcgaaaatttgtt

SEQ ID NO: 527816 - DNA, 120 bp, Artificial Sequence
  ENSG00000166012_3 (sequence is synthesized)
cgtacacctgaaagtgttcacgcaagtgattcatcaagtgactcatcttttgaaccaataccattgactataaaagctatttttgaaagattcaagaacaggaaaaagagatataaaaaa

SEQ ID NO: 527817 - DNA, 120 bp, Artificial Sequence
  ENSG00000166012_4 (sequence is synthesized)
aagaaaaagaggaggtaccagccaacaggaagaccacggggaagaccagaaggaaggagaaatcctatatactcactaatagataagaagaaacaatttagaagcagaggatctggcttc

SEQ ID NO: 527818 - DNA, 120 bp, Artificial Sequence
  ENSG00000166012_5 (sequence is synthesized)
ccatttttagaatcagagaatgaaaaaaacgcaccttggagaaaaattttaacgtttgagcaagctgttgcaagaggattttttaactatattgaaaaactgaagtatgaacaccacctg

SEQ ID NO: 527819 - DNA, 120 bp, Artificial Sequence
  ENSG00000166012_6 (sequence is synthesized)
tttttggatgatgatggatccatttctcctattgaggagtcaacagcagaggatgaggatgcaacacatcttgaagataacgaatgtgatatcaaattggcaggggatagtttcatagta

SEQ ID NO: 527820 - DNA, 120 bp, Artificial Sequence
  ENSG00000166012_7 (sequence is synthesized)
agttctgaattccctgtaagactgagtgtatacttagaagaagaggatattactgaagaagctgctttgtctaaaaagagagctacaaaagccaaaaatactggacagagaggcctgaaa

SEQ ID NO: 527821 - DNA, 120 bp, Artificial Sequence
  ENSG00000166012_8 (sequence is synthesized)
atgtgacaggatcatgaatgtcaaaggtgaagcatatagaaaaaacgacttcatagaaatgaataaagataaatgtggatatatgtaccagtctggtggtgaagaaattctgaaacccag

SEQ ID NO: 527822 - DNA, 120 bp, Artificial Sequence
  ENSG00000166012_9 (sequence is synthesized)
aactttataacaagaaaaaaaatttttaaccctgtgaagaagtttgtgaaagaaacttgtgaagtagtaataattagaaaaaaaaccattaaaacaccagagaaaatacatagaaaaatt

SEQ ID NO: 527823 - DNA, 120 bp, Artificial Sequence
  ENSG00000166012_10 (sequence is synthesized)
tgagaaattgtcatttgatttctgaataagagcttacaggtgtcctgtgagtattgaaacaatgaaatgtagtgattttaattttgaaaagaaaatcttaaagtaacttgacacccaacc

SEQ ID NO: 527824 - DNA, 120 bp, Artificial Sequence
  ENSG00000166012_11 (sequence is synthesized)
atcttgaagaggggatttgaaatgctgtaattttatcccagctttgttcagccatgacaagtgacctgtcagatgcttagtattgtaataacctcatttccctttccaaatttagagtat

SEQ ID NO: 527825 - DNA, 120 bp, Artificial Sequence
  ENSG00000166012_12 (sequence is synthesized)
cctttccaaatttagagtatctttaatactattttttttagacagagtctcgatctgtcacccaggctgtagtgcaatggccgcagtcttggcttactgcaacctccatctcccgggttc

SEQ ID NO: 527826 - DNA, 84 bp, Artificial Sequence
  ENSG00000166012_13 (sequence is synthesized)
tggcacctggcctaatactacttttaactaccattttcactttttattagttcaagaaaaggcatacacatttattcaacatgt

SEQ ID NO: 527827 - DNA, 120 bp, Artificial Sequence
  ENSG00000166012_14 (sequence is synthesized)
tattagttcaagaaaaggcatacacatttattcaacatgtatacctggggagaaccagtcattaccccgatgttcattattttgatcaccacgatagagctgactactctgctatgtagt

SEQ ID NO: 527828 - DNA, 120 bp, Artificial Sequence
  ENSG00000166012_15 (sequence is synthesized)
gcattttgggactgcacttatgtatgtttttgtttaacgtggacaaagacttacagataggtgcaaaaaataaatcctcttttgcaacccagaactcattgttcagtatgagttttgata

SEQ ID NO: 527829 - DNA, 120 bp, Artificial Sequence
  ENSG00000166012_16 (sequence is synthesized)
catataagaagggatattatgatacctgagacagttgattgatgggagtattgatagccataaaggttggttccaggccaggtgcaatgggtcaagcctgcaatccccacaccaaggtgg

SEQ ID NO: 527830 - DNA, 120 bp, Artificial Sequence
  ENSG00000166012_17 (sequence is synthesized)
gagtattgcttgaaaccaggagttcaagaccagcctaggcaagaaagtaagaaacacatctccacaaaaatttaaaaattagctgggtactggggcatgtgcctgtagttggagttactc

SEQ ID NO: 527831 - DNA, 120 bp, Artificial Sequence
  ENSG00000166012_18 (sequence is synthesized)
agaaaggggggaggctgaggcagagttggaggctgcactgagctttgatggcaccactgtactccagcctgagtaacaaagacagaccctgtctcttaagaaaaaaaggttgattccagg

SEQ ID NO: 527832 - DNA, 120 bp, Artificial Sequence
  ENSG00000166012_19 (sequence is synthesized)
cctgtagaatagataaacagcatgggatatgagggaaatcctcagcagtattaattttgcattccaatttcatgttgatgatatacacaatggctttttgttttaaaggcttttatcttg

SEQ ID NO: 527833 - DNA, 120 bp, Artificial Sequence
  ENSG00000166012_20 (sequence is synthesized)
agaacatggtgtctggagttaaaggtatgtctcaatttgagttttcacatcatatttgtttatgtgtaggaaacagtatgttgtcagagcaagtttcattttattcagggacatttctac

SEQ ID NO: 527834 - DNA, 120 bp, Artificial Sequence
  ENSG00000166012_21 (sequence is synthesized)
catgcttttaattcccatttatactgatttctgaaaagaagaatcctagattcacacattttatagtgatgtgtcagattcattttagttgcaagcattagagggtcctgaatttgttag

SEQ ID NO: 527835 - DNA, 120 bp, Artificial Sequence
  ENSG00000166012_22 (sequence is synthesized)
tttgtagcaataatcagaactttggatttcctacttgaagcctacagcattattttgaattaatgcacaatctaaaatgaggcagaggattttatggtttaatgcaaaatatagtataat

SEQ ID NO: 527836 - DNA, 120 bp, Artificial Sequence
  ENSG00000166012_23 (sequence is synthesized)
aaaagatgattacacaggtcataagaattcataaatttgaatgatgtagagtttgattaaaagttatataatgccaaagtcgtaacttacaggcacattatattcctgtattttataatg

SEQ ID NO: 527837 - DNA, 120 bp, Artificial Sequence
  ENSG00000166012_24 (sequence is synthesized)
gatgacaattaattttgagccaagaattaaaatttgctgaaatcttcgaattgggaaaacaacatcctctgttgcaatactgaagttcataacaacagttagactttaaacttaaatctt

SEQ ID NO: 527838 - DNA, 120 bp, Artificial Sequence
  ENSG00000166012_25 (sequence is synthesized)
aagtttaaatctttttcctttggttcatgtaaaggagctacttgatgttactttttatttatcattcctctggctcctaagcacaacgtgattgtgaaattattgtttttgtgattaacg

SEQ ID NO: 527839 - DNA, 120 bp, Artificial Sequence
  ENSG00000166012_26 (sequence is synthesized)
tagtaggaagtttctgcagttggcaatattgtaagagcatattgcagtttctgctcataatttctttcctatggagtgttagactttgttatttatgtgtataaatactagctggacaca

SEQ ID NO: 527840 - DNA, 120 bp, Artificial Sequence
  ENSG00000166012_27 (sequence is synthesized)
ctactctggaggctaaggcaggagaaacacttgagcccagcggtttgaggctacagtgagatgtgatcctgccacatctcactgtagcctcgaacccctgggctcaagtgattcagcaag

SEQ ID NO: 527841 - DNA, 120 bp, Artificial Sequence
  ENSG00000166012_28 (sequence is synthesized)
agacatggcagatcctgtgtctttaaaaaaaaatcaaaaccttgtaaatagtggttgaggtctatcccgatggggcttttcctgtagcctgcacatcgttggaaacgcctcatagagtaa

SEQ ID NO: 527842 - DNA, 120 bp, Artificial Sequence
  ENSG00000166012_29 (sequence is synthesized)
ctctgtggttttactttactcacaggactattgttagatctgtgggaaggaattacaagacagttgctaaaagtttgaaaaagacggttgctaaacgttatgaaaaaccagataatctac

SEQ ID NO: 527843 - DNA, 120 bp, Artificial Sequence
  ENSG00000166012_30 (sequence is synthesized)
ttttttaccttaggtattggcatactccacacatctgtaccattcttgagtgatcgcttaggtaagttttaattggtgacagtataatcttttgggaaataatgattacagttcagatga

SEQ ID NO: 527844 - DNA, 120 bp, Artificial Sequence
  ENSG00000166012_31 (sequence is synthesized)
tgaatttaactgttcaactgctgaatgataacgggcatgaactaaaacttaattctgacagagctggatatggctgtataataaactggatcttaaatttatacttgggttttagtttta

SEQ ID NO: 527845 - DNA, 120 bp, Artificial Sequence
  ENSG00000166012_32 (sequence is synthesized)
ataactggaaatgtatcctttctaaatctttaattggtactttctataggaatgaatgtgatttgaactcattcatgttgagaggtaagtaaaatatttaacttataataatcaaggact

SEQ ID NO: 527846 - DNA, 120 bp, Artificial Sequence
  ENSG00000166012_33 (sequence is synthesized)
caaaagatgaaaaatagaaattacaccatcccagtatttcaggtataacacagaattagtaagatactggcaaaaatattacaatgtatatatttgtatagagaaggaaaatgaagagac

SEQ ID NO: 527847 - DNA, 120 bp, Artificial Sequence
  ENSG00000166012_34 (sequence is synthesized)
tgcatgtctatacctaccaaacgaaactacctgtgttctttgcatcattattcaactggcagttacacatatttcatcctaaagtcacgtaaacctgtgtggatatgttgaatcaatagg

SEQ ID NO: 527848 - DNA, 120 bp, Artificial Sequence
  ENSG00000166012_35 (sequence is synthesized)
gatatgaattacataaaaagaattttgtgtaactggcagtttgagcaacaatgagcttgacgtttgttgtctgatctgttaagttacatgtatatattccatctttaagttttatagaga

SEQ ID NO: 527849 - DNA, 120 bp, Artificial Sequence
  ENSG00000166012_36 (sequence is synthesized)
gactgggcaaagattaggcaaagactagagttgtagcttaaaatgtagttaatgtagcttccttattacagtgacaattaggaaaaaagctcaaattattgtacttgttaaaggaatttg

SEQ ID NO: 527850 - DNA, 120 bp, Artificial Sequence
  ENSG00000166012_37 (sequence is synthesized)
agaggtttgtgaaagcatttctcagcaatattgcaaatttgggaatacgagttgtacagttcagtcataattgcactgcatggtatctgcactcagcagtttacacctgctagggtgttc

SEQ ID NO: 527851 - DNA, 120 bp, Artificial Sequence
  ENSG00000166012_38 (sequence is synthesized)
aaaggtcagtgctatagaaattcagtatctggcatcgttggttttcttggctttgtgcttgttaaacctggtatttctactgatacagtatttgtgtaggtttctcagagtgttcagttt

SEQ ID NO: 527852 - DNA, 120 bp, Artificial Sequence
  ENSG00000166012_39 (sequence is synthesized)
gatatactctaaaatagtaagcaatgcttttttttccagggtgtcaaattgagaaccaggtagatccccaccacctacagtaaaaaggaccctaaagtaaattggttgaagaaattagat

SEQ ID NO: 527853 - DNA, 120 bp, Artificial Sequence
  ENSG00000166012_40 (sequence is synthesized)
cccaaagattcttggtgaattttgaagtcttcatcagtatatccatattaaaacgagatgacagaagccaaagtaattatggcaagtaatggtttttatcttaactataagttatttgct

SEQ ID NO: 527854 - DNA, 120 bp, Artificial Sequence
  ENSG00000166012_41 (sequence is synthesized)
caagggtgtaatggtcattaccaaggcttttagaatgcagtttctcatttgctgtggacatgaccataaaaaaatttcccagtaggttttctatctgctactttgctagcaatcagctta

SEQ ID NO: 527855 - DNA, 120 bp, Artificial Sequence
  ENSG00000166012_42 (sequence is synthesized)
ttgggaacagttgattaactgtaatagaaatgcaatacaaataaaatgtgaaccacatgtgatttttctttaaaatcagtgagatttgaaaattctcctagatctcttgaatcatgcaaa

SEQ ID NO: 527856 - DNA, 120 bp, Artificial Sequence
  ENSG00000166012_43 (sequence is synthesized)
tttgctttgcctttatattgtaacccttgtgggttgctaataaccaagcagtttgtagtagagttaactcaggctcgttctagggactcattcatgttcactcactgtacactcatctct

SEQ ID NO: 527857 - DNA, 120 bp, Artificial Sequence
  ENSG00000166012_44 (sequence is synthesized)
ggaaatgtaaaatttacttttatactattgttatgtagggctgacaggacaactggatcagtttcattaaaaagggcaaacttgaagataaatcttttgactccagctctttagaggatc

SEQ ID NO: 527858 - DNA, 120 bp, Artificial Sequence
  ENSG00000166012_45 (sequence is synthesized)
taaagtgaccttgatggacagtggaagaaatcacaacatggaattcctcgaataacaatttattgactttaaataattttgtctaatgctacatatacacaattaaaaaacctttacact

SEQ ID NO: 527859 - DNA, 120 bp, Artificial Sequence
  ENSG00000166012_46 (sequence is synthesized)
ataatgaacaaagatacagagtatgacaattgggattattacagttgagccaagcttggcacaccgttcatctagaattctccagaacacaaaattctcaaattttgtgtttcctttgac

SEQ ID NO: 527860 - DNA, 120 bp, Artificial Sequence
  ENSG00000166012_47 (sequence is synthesized)
tagtattgcagtttcagttatatttcagagtggaatatacaactaattaggtcatcgaagattctgtcatctcgatgataaattttaatattacagagcagaggatgaggatgcaacaca

SEQ ID NO: 527861 - DNA, 120 bp, Artificial Sequence
  ENSG00000166012_48 (sequence is synthesized)
gatccccaccacctacagtaaaaaggtaagattctctgtttctattgattctgcttgtttccctctatcagtagcactgccagcataacaagaacttcgtacaaatacactactaagctt

SEQ ID NO: 527862 - DNA, 120 bp, Artificial Sequence
  ENSG00000166012_49 (sequence is synthesized)
taaagacttttacaatgcctcattctagagaatgggcactgttgatcatggtgtccaaaaatagttaatgtggctaaattgagacaggttatgcttccatcacagtatgcatattgcagt

SEQ ID NO: 527863 - DNA, 120 bp, Artificial Sequence
  ENSG00000166012_50 (sequence is synthesized)
ggtgacaatgagacctgtaacattttgctatgtttatgagtaaaaatgtaggagaaaaatgttgacttttcaatattagaaataacatttaataaggaattttcagctcttataggacca

SEQ ID NO: 527864 - DNA, 120 bp, Artificial Sequence
  ENSG00000166012_51 (sequence is synthesized)
ctttttttatgtgctgtatattgactgaaacattgtaatgtggtatacattactgtgtcttggatcaggtgtcaaaatgtaactgtactttgtacaattcaacttctaggaccctaaagt

SEQ ID NO: 527865 - DNA, 120 bp, Artificial Sequence
  ENSG00000166012_52 (sequence is synthesized)
agatacaaatttttggatgatgatggatccatttctcctattgaggagtcaacgcttttatcttgagaacatggtgtctggagttaaaggtattggcatactccacacatctgtaccatt

SEQ ID NO: 527866 - DNA, 120 bp, Artificial Sequence
  ENSG00000166012_53 (sequence is synthesized)
tgaattatgagaaactattgtatataatgagtgacagtaaagataattttcaggaattgggaaagaaggaaaactagatttcactgaccttccaagtttatctagttacatagattgata

SEQ ID NO: 527867 - DNA, 120 bp, Artificial Sequence
  ENSG00000166012_54 (sequence is synthesized)
taatagcattgcaaatactttaaattcaaaatgtgaatatattatgggacacattcgtcgagaaaaaatgtattctttgggtcatattagcatctcttccagactacatcctccggttcg

SEQ ID NO: 527868 - DNA, 120 bp, Artificial Sequence
  ENSG00000166012_55 (sequence is synthesized)
cattagaaaagacatttgtatgggtcatttcaaagagggcttatgaggctgtgaaacccagagctcttaacgctgtgaccaaagatggaagttctctataggaagccatagcactcctaa

SEQ ID NO: 527869 - DNA, 120 bp, Artificial Sequence
  ENSG00000166012_56 (sequence is synthesized)
tgtttggtgctatgttttcctgaggagatataaaacgtaataatccaggattgttgccatgtgagagttttaaaggttaatcaaaatttctcttcttcagggcaaacttgaagataaatc

SEQ ID NO: 527870 - DNA, 120 bp, Artificial Sequence
  ENSG00000166012_57 (sequence is synthesized)
gcttgaaaaattaagtccttctccctcagttatactcaccttatggaattcttttgcccttgctctgttttgggcataagcttcttgttttgttttttcttccttttgttgtttcacttc

SEQ ID NO: 527871 - DNA, 120 bp, Artificial Sequence
  ENSG00000166012_58 (sequence is synthesized)
agctagttgattgtataacctgtaaagaatttatatagaattagagacaaacactgcaaaaagtgaatcactaaaaaaaaaaaaaaaattaaccctaccttagacccctttggtgcctta

SEQ ID NO: 527872 - DNA, 120 bp, Artificial Sequence
  ENSG00000166012_59 (sequence is synthesized)
cctcgggaaaccgaacgcaacgctcagactggaaacaaaggagctggcccagcaactttcccagaacgcaccgcaagctccctcctcgggacgctgcattttcattttgcattgagcctc

SEQ ID NO: 527873 - DNA, 120 bp, Artificial Sequence
  ENSG00000166012_60 (sequence is synthesized)
aatgcagtgggctgcctaaaggatcggactttttatccccggaattgtccaaactatggagcaaagcagaaaactgtttaaaacaaagagcaattgatggataaatcaggaatagattct

SEQ ID NO: 527874 - DNA, 120 bp, Artificial Sequence
  ENSG00000166012_61 (sequence is synthesized)
actaattaggtcatcgaagattctgtcatctcgatgataaattttaatattacagagcagaggatgaggatgcaacacatcttgaagataacgaatgtgatatcaaattggcagtaagtg

SEQ ID NO: 527875 - DNA, 120 bp, Artificial Sequence
  ENSG00000166012_62 (sequence is synthesized)
acttatttttttcctattccattttgggaaggcaggagttggttgatacagaaggaattatatttagtttttctcttacacttcatttaacttttgaaaagctctataagtttactgcag

SEQ ID NO: 527876 - DNA, 120 bp, Artificial Sequence
  ENSG00000166012_63 (sequence is synthesized)
gaaatgcaagaaggaaaataattttttagagacttgataaagaacatggggttttcagtactatttttaataagtagcattctgatacatattattgctagttaggatgtcaaatgaaaa

SEQ ID NO: 527877 - DNA, 120 bp, Artificial Sequence
  ENSG00000166012_64 (sequence is synthesized)
aataagcaatgttaatttggatttttaacatctacatgtagtctctaggttatctgaagtaatccagggcattcagctatatgtaattactaaactatttgagttattgcttaatccatg

SEQ ID NO: 527878 - DNA, 120 bp, Artificial Sequence
  ENSG00000166016_0 (sequence is synthesized)
gcagaagtttgcagagcgctttctcgccggctggtcccggactcgcgctgcgccctgcgccctgcgccgccgcctcctccttctgccgccgccgccctgttctcccgggattccttctct

SEQ ID NO: 527879 - DNA, 120 bp, Artificial Sequence
  ENSG00000166016_1 (sequence is synthesized)
gtggaggactgactctctgcttgtgggaattagaggtggacaagggggagtgccggggggtagcgacggggttctttccagtggcagctgcgagtcgggacgccgggagcgtggggctcc

SEQ ID NO: 527880 - DNA, 120 bp, Artificial Sequence
  ENSG00000166016_2 (sequence is synthesized)
tgctggccacggatctcggccaccttcccgcggcctccgggcaggcaatgcggccgccgagccccgcgacgcagagaggaaggagggtggcccggagggcctagagcttgtttctgccca

SEQ ID NO: 527881 - DNA, 120 bp, Artificial Sequence
  ENSG00000166016_3 (sequence is synthesized)
cttgggaaagagggcatggagttgtgagtgcccctcgctcggcgacgccgccctcggcaggctccccatggccgggacgtacagctcgactctgaagacgctggaggacttgaccttgga

SEQ ID NO: 527882 - DNA, 120 bp, Artificial Sequence
  ENSG00000166016_4 (sequence is synthesized)
ctccgggtatggggccggggactcgtgccgctcgctcagcctctcgtcctccaagtccaactcgcaggcgctcaactcttcggcgcagcagcaccgcggggcggcctggtggtgctactc

SEQ ID NO: 527883 - DNA, 120 bp, Artificial Sequence
  ENSG00000166016_5 (sequence is synthesized)
cggctccatgaacagccgccacaacagctgggacacggtgaacacggtgctgcccgaggaccccgaagtggccgacctcttctcgcgctgtccgcggctccccgagctggaggagttccc

SEQ ID NO: 527884 - DNA, 120 bp, Artificial Sequence
  ENSG00000166016_6 (sequence is synthesized)
ctggaccgaaggagacgtggcccgggtgctccgcaaaggcgctggcggccggcggctgccccagttctccgccgaggcggtgaggcgcctggccgggctgctccgcagggcactgatccg

SEQ ID NO: 527885 - DNA, 120 bp, Artificial Sequence
  ENSG00000166016_7 (sequence is synthesized)
cgtggcccgcgaggcgcagcgcctgagcgtgctgcacgccaagtgcacccgctttgaggtgcagagcgccgtgcgcctggtgcacagctgggcgctggccgagagctgcgcgctggcagc

SEQ ID NO: 527886 - DNA, 120 bp, Artificial Sequence
  ENSG00000166016_8 (sequence is synthesized)
cgtcaaggcgctgtccctgtacagcatgagcgccggcgacgggctgcgccggggcaagtccgcgcgctgcggcctcaccttctcagtgggtcgctttttccgctggatggtggacacccg

SEQ ID NO: 527887 - DNA, 120 bp, Artificial Sequence
  ENSG00000166016_9 (sequence is synthesized)
aatctccgtgcgcatccacgagtacgcagccatctccctcaccgcctgcatggagaacctggtggaggagatccgggccagggtgatggccagccacagccctgatggcggaggggccgg

SEQ ID NO: 527888 - DNA, 120 bp, Artificial Sequence
  ENSG00000166016_10 (sequence is synthesized)
aggcggggaggtgtctgctgaggccctggagatggtcatcaacaacgacgccgagctctggggcgtcttgcagccctatgagcatctcatctgcggcaagaacgccaatggtgtcctctc

SEQ ID NO: 527889 - DNA, 120 bp, Artificial Sequence
  ENSG00000166016_11 (sequence is synthesized)
cctccccgcatacttcagcccctacaacggcgggtccctgggccatgacgagcgagccgatgcctatgcccagctggagctccgaaccctggagcagtccctcctggccacctgcgtggg

SEQ ID NO: 527890 - DNA, 120 bp, Artificial Sequence
  ENSG00000166016_12 (sequence is synthesized)
cagcatctcggagctgagtgacttggtctcccgtgccatgcaccacatgcaggggcgtcaccccctgtgcccgggtgccagccctgcccgccaggcccgccagccgccacagcccatcac

SEQ ID NO: 527891 - DNA, 120 bp, Artificial Sequence
  ENSG00000166016_13 (sequence is synthesized)
ttggtcccccgacgccctccacacgctctactactttctgcggtgtccacagatggagtccatggagaaccccaacctggaccccccgagaatgaccttgaacaatgaacggcccttcat

SEQ ID NO: 527892 - DNA, 120 bp, Artificial Sequence
  ENSG00000166016_14 (sequence is synthesized)
gctgctgccgcccctcatggagtggatgcgcgtggccatcacctacgcagagcaccgccgcagcctcaccgtggacagcggcgacatccggcaggcagcccggctgctgctgcctggtct

SEQ ID NO: 527893 - DNA, 120 bp, Artificial Sequence
  ENSG00000166016_15 (sequence is synthesized)
ggactgtgaacctcggcagctcaaacccgaacactgtttcagttccttccggaggctggatgcccgagcagctactgaaaaattcaaccaggacctgggtttccgcatgctcaactgtgg

SEQ ID NO: 527894 - DNA, 120 bp, Artificial Sequence
  ENSG00000166016_16 (sequence is synthesized)
gaggacggacctcatcaaccaagccatcgaggccttgggtccggatggggttaacaccatggatgaccagggtatgacgccactgatgtacgcctgcgctgctggggacgaagcgatggt

SEQ ID NO: 527895 - DNA, 120 bp, Artificial Sequence
  ENSG00000166016_17 (sequence is synthesized)
ccagatgttgattgatgctggggcaaacttggacatccaggttccaagcaactcccccaggcacccttccatccaccccgacagccggcactggacctcactgacattcgctgtgctgca

SEQ ID NO: 527896 - DNA, 120 bp, Artificial Sequence
  ENSG00000166016_18 (sequence is synthesized)
tggacacatctctgtggtccagttgctgctggatgctggtgcccatgtcgagggctcggcagtgaacggcggcgaggacagctatgcggagacgcccctgcagctggcctctgcggcagg

SEQ ID NO: 527897 - DNA, 120 bp, Artificial Sequence
  ENSG00000166016_19 (sequence is synthesized)
gaactatgagctggtcagtttgttgctgagccgaggcgccgaccccctcctcagcatgctggaggcccacggcatgggctcctccctccacgaggacatgaactgcttcagccactcagc

SEQ ID NO: 527898 - DNA, 120 bp, Artificial Sequence
  ENSG00000166016_20 (sequence is synthesized)
aagtgatgcgtcgagccagggcagtggcagcgaggggcccgtgcggctgagccggacccgcaccaaggccctacaggaggccatgtactacagcgctgagcacggctacgtggacatcac

SEQ ID NO: 527899 - DNA, 120 bp, Artificial Sequence
  ENSG00000166016_21 (sequence is synthesized)
catggagctgagggcactgggagtcccctggaagctgcacatctggatcgagtctctgaggacctcgttctcgcagtcgcggtactcggtggtgcagagcctcctgcgggacttcagctc

SEQ ID NO: 527900 - DNA, 120 bp, Artificial Sequence
  ENSG00000166016_22 (sequence is synthesized)
catcagagaggaggagtacaacgaggagctggtgaccgagggcttgcagctcatgttcgacatcctcaagaccagcaaaaacgactccgtcatccagcaactggctaccatcttcaccca

SEQ ID NO: 527901 - DNA, 120 bp, Artificial Sequence
  ENSG00000166016_23 (sequence is synthesized)
ctgctatggcagcagtcccatccccagcatcccagagatccggaagaccctgccggccaggctagatccacactttttgaacaataaggagatgtcagatgtgaccttcctggtggaagg

SEQ ID NO: 527902 - DNA, 120 bp, Artificial Sequence
  ENSG00000166016_24 (sequence is synthesized)
aaagctgttttatgcacataaagtcctgctggtgacagcttctaacaggttcaagacactaatgaccaataaatcagaacaggatggggacagcagcaagaccatcgagatcagcgacat

SEQ ID NO: 527903 - DNA, 120 bp, Artificial Sequence
  ENSG00000166016_25 (sequence is synthesized)
gaagtaccacatttttcagatgatgatgcagtatctgtactacggaggaacagaatccatggagatccccaccactgacatcctggagctgctgtcagctgccagcctgttccagctgga

SEQ ID NO: 527904 - DNA, 120 bp, Artificial Sequence
  ENSG00000166016_26 (sequence is synthesized)
tgccctgcagaggcactgcgagatcctgtgctcccagaccctcagcatggagagtgccgtgaacacctacaaatatgccaagatccacaatgccccagaactggccctgttctgtgaggg

SEQ ID NO: 527905 - DNA, 120 bp, Artificial Sequence
  ENSG00000166016_27 (sequence is synthesized)
cttcttcctcaagcacatgaaggccctactggagcaggatgccttccggcagctcatctacggccgcagcagcaaagtgcagggcctggatccactgcaggacctgcagaacaccctggc

SEQ ID NO: 527906 - DNA, 120 bp, Artificial Sequence
  ENSG00000166016_28 (sequence is synthesized)
agagcgcgtgcactctgtctacatcacctcccgggtgtgaggcagggggcggaggctgccgaggccagggcctgtggaggtgccagggcccaccatgtcggggtatggttgtaggccctc

SEQ ID NO: 527907 - DNA, 120 bp, Artificial Sequence
  ENSG00000166016_29 (sequence is synthesized)
ttggagccaggttcacggggctgtttcctcctcctcccccagatgtcccccctgtcaccgggcagctcaccctcatctcctctgccctagagctgtttgttcaatcactgatgggcaaag

SEQ ID NO: 527908 - DNA, 120 bp, Artificial Sequence
  ENSG00000166016_30 (sequence is synthesized)
gggagatgtagctaactggtggccctcctccccatctcagtttgcaactcaagggcagccatgcactcccccggggtgtcgctctcccctcctgcaggtcagcagctgatcctgatccac

SEQ ID NO: 527909 - DNA, 120 bp, Artificial Sequence
  ENSG00000166016_31 (sequence is synthesized)
ctccgcccaggccctccaagctctactcacccctagggcctcagtaaactcagaccatcccaactggggctcctgggggtacaggaatccttatgaatgtatagaatgcatactgcctag

SEQ ID NO: 527910 - DNA, 120 bp, Artificial Sequence
  ENSG00000166016_32 (sequence is synthesized)
gcccccagtcgtctgcagtaattcaaaagctggtatttttcttcctaaatgtcacatagcaaaggctgcccaaatccccaaacttgttcttcaaaggtttgacaggcttaatgtgggcat

SEQ ID NO: 527911 - DNA, 120 bp, Artificial Sequence
  ENSG00000166016_33 (sequence is synthesized)
ccagtggcctgtggacccccccctgccaccacgactgctgccacccggagttcccccattgtctttggtgcctgggcttccagagtccctcccatcaggactaccagcttgctcagttag

SEQ ID NO: 527912 - DNA, 120 bp, Artificial Sequence
  ENSG00000166016_34 (sequence is synthesized)
cagcagagggcagttccccagcttgatggtttctgagctaagtctggcatggaggggcaaggggtaggggatggggtgctgtgtaggaatggcctcagctcttgttttgctgctggtttt

SEQ ID NO: 527913 - DNA, 120 bp, Artificial Sequence
  ENSG00000166016_35 (sequence is synthesized)
aggggccaaagtaaatgggtggattctggaacctcaggcctagactaggttgcctttgtgggggcgatgaagcagagtcccctggtcaagtctctcggctcctttaatgtaggattgaga

SEQ ID NO: 527914 - DNA, 120 bp, Artificial Sequence
  ENSG00000166016_36 (sequence is synthesized)
gctgggcaaacaggtcccactggggactgtgactcttggagattaaaggacagggcattgatggaaggtaagggccaggagaagaggcctttctgctgtgtcccctcacggccttgccct

SEQ ID NO: 527915 - DNA, 120 bp, Artificial Sequence
  ENSG00000166016_37 (sequence is synthesized)
cgaattctgcaggccctgggctcccctgacacctgtcatatttatggaccagacactggggcagcatcaggcacagtctgtctgggtgcaacttcttcagctgtctggccgcaccttaaa

SEQ ID NO: 527916 - DNA, 120 bp, Artificial Sequence
  ENSG00000166016_38 (sequence is synthesized)
aactatttattcaccaaaagccccaggcatttcagaaggtggcactcaggtcaccctgaaaagcccccaggggcttgcaattctggaaaatattttgactagctgcttggctggatgtac

SEQ ID NO: 527917 - DNA, 120 bp, Artificial Sequence
  ENSG00000166016_39 (sequence is synthesized)
aaagaaataggcattattttattgctgtaatattgtatgatactttaactgtacaataatgttgtcacttactgtaaatgtactatggttttattaacaataaacactcattaacaatga

SEQ ID NO: 527918 - DNA, 120 bp, Artificial Sequence
  ENSG00000166024_0 (sequence is synthesized)
gcggagacggcggaagcggagagcaacagcgcgccgagacttccagtgtcctactattgaagcctgcacctgctgcattgctgttttcctgagacggagttttgccatgttgtccaggct

SEQ ID NO: 527919 - DNA, 120 bp, Artificial Sequence
  ENSG00000166024_1 (sequence is synthesized)
cttcccaaagtgctgggattacaggtgaggctgctgtcagaaaggaacttttacacagtttgccttcagagacagtctatcggcatgttgtagagttttattactaagaaaataaatgtt

SEQ ID NO: 527920 - DNA, 120 bp, Artificial Sequence
  ENSG00000166024_2 (sequence is synthesized)
cggcatgttgtagagttttattactaagaaaataaatgttacttacatgattgtggtggtgccatgcagcaagaatcagagagatgcagagttagagccagaaggcctgacatggcactt

SEQ ID NO: 527921 - DNA, 120 bp, Artificial Sequence
  ENSG00000166024_3 (sequence is synthesized)
tatgtacctaaagctcgtaggggtgcagtactccttaagacaggtgatgaagaagaaagctgtggttcacctaactctgtggtgaaagaaaagcaaaaagaaagttctctctcccaaaaa

SEQ ID NO: 527922 - DNA, 120 bp, Artificial Sequence
  ENSG00000166024_4 (sequence is synthesized)
gaagtctttaaagacaaaccggaggctcgaagactaaatatcaatcctgatagaaaggagcataattgtagagaagaaaagaaatcttcaacaaaattaagaatggacacatgccttcaa

SEQ ID NO: 527923 - DNA, 120 bp, Artificial Sequence
  ENSG00000166024_5 (sequence is synthesized)
aaaacaaatagagtttgttctaagagaggaaccactgaatccaaagaagtattatcccaaggacaacagcagggagccccaaatgctggggttataactaatgcacctttgcagagacat

SEQ ID NO: 527924 - DNA, 120 bp, Artificial Sequence
  ENSG00000166024_6 (sequence is synthesized)
tttaaaccaaagaaggtggagtgtttggaagttgaaactacggatgtgacaggacatgagaggatacttctttcacaggcctgtttagaaatcagcgaggctcaagttccaagcaaacca

SEQ ID NO: 527925 - DNA, 120 bp, Artificial Sequence
  ENSG00000166024_7 (sequence is synthesized)
ttccaaaatgtggaattctgtgacttcagtaggcatgaacctgatggggaagcatttgaagacaaagatttggaaggcagaattgaaactgataccaaggttttggagatactatatgag

SEQ ID NO: 527926 - DNA, 120 bp, Artificial Sequence
  ENSG00000166024_8 (sequence is synthesized)
tttcctagagtttttagttctgtcatgaaacctgagaatatgattgtaccaataaaactaagctctgattctgaaattgtacaacaaagcatgcaaacatcagatggaatattgaatccc

SEQ ID NO: 527927 - DNA, 120 bp, Artificial Sequence
  ENSG00000166024_9 (sequence is synthesized)
agcagcggaggcatcaccactacttctgttcctggaagtccagatggtgtctttgatcaaacttgcgtagattttgaagttgagagtgtaggtggtatagccaatagtacaggtttcatc

SEQ ID NO: 527928 - DNA, 120 bp, Artificial Sequence
  ENSG00000166024_10 (sequence is synthesized)
ttagatcaaaaagatacagattccattcctgcaactatgggtcacatctctctgtcagagagcacaaatgacactgttagtccagtaatgattagagaatgtgagaagaatgacagcact

SEQ ID NO: 527929 - DNA, 120 bp, Artificial Sequence
  ENSG00000166024_11 (sequence is synthesized)
gctgatgagttacatgtaaagcacgaacctcctgatacagctgtccttgctcatgaaacacatagagatagtggatttaagaatgtaggtgacattaccaataaagcatgtatgatggac

SEQ ID NO: 527930 - DNA, 120 bp, Artificial Sequence
  ENSG00000166024_12 (sequence is synthesized)
actacaggtatgtcctgtagtgatcatgtaactgttgatagcccttatgtagttgcagttagaatagctgatgagacctctattaatacacgaagtttctcaaagtttgtaggaatgagt

SEQ ID NO: 527931 - DNA, 120 bp, Artificial Sequence
  ENSG00000166024_13 (sequence is synthesized)
gcagatgcaacccctcttcatgtagctagaagtgggaatgacactgaagatttcagcaacccttctgcttgctcagatatttatggtgagagtatttcatctcattttacagagtcaaca

SEQ ID NO: 527932 - DNA, 120 bp, Artificial Sequence
  ENSG00000166024_14 (sequence is synthesized)
tgtcagattgtgcttcctccttacctataaaaaagattgctggtagtaattataacacttttttggactctgaactcagtatgttaaatgggacaaaagttctttcagacagtgccgtgg

SEQ ID NO: 527933 - DNA, 120 bp, Artificial Sequence
  ENSG00000166024_15 (sequence is synthesized)
gcattgacctgggtagtactggtgatacaacagaagcattgcacgaactaagaactgccgaagagttcaaaacagaagagcaagatgactcagggagtatagaatttggtgtatcttttc

SEQ ID NO: 527934 - DNA, 120 bp, Artificial Sequence
  ENSG00000166024_16 (sequence is synthesized)
ctgatagggaatcatcatctatggaaacatccatcgaaccaaaagcaactgaaacttctcacacagagggaattactgccattgaggagagctgggagtctatgtttaacgatgatggtg

SEQ ID NO: 527935 - DNA, 120 bp, Artificial Sequence
  ENSG00000166024_17 (sequence is synthesized)
actgcctggatccacgtcttctacaagagttatcagggaataccaagagcagagagagcatccaggaacctagatctgattactacaatcatgaagttcctgatattgacctcagtgatt

SEQ ID NO: 527936 - DNA, 120 bp, Artificial Sequence
  ENSG00000166024_18 (sequence is synthesized)
gtgaattcccacatgtcattgaaatttatgactttccccaagaatttcatactgaagaccttctacgggttttctgcagttatcaaaagaaaggatttgatattaaatgggtggatgata

SEQ ID NO: 527937 - DNA, 120 bp, Artificial Sequence
  ENSG00000166024_19 (sequence is synthesized)
cacatgccctaggagtattctccagtccaattacagctcgtgatgcgttgggtattaaacacaccatggtgaagattcgtcccttgtcacaggccacaagagcagccaaggccaaagcta

SEQ ID NO: 527938 - DNA, 120 bp, Artificial Sequence
  ENSG00000166024_20 (sequence is synthesized)
gagcttatgctgagttcctccagccagcaaaggagcgtcctgagacttcagcagccctagccagaaggttagtcatcagtgcccttggggttcgaagtaagcagagcaaaaccgaacgag

SEQ ID NO: 527939 - DNA, 120 bp, Artificial Sequence
  ENSG00000166024_21 (sequence is synthesized)
aagcagagctcaagaaactgcaagaagccagagagagaaagcggttggaagccaagcaacgggaagacatctgggaaggcagagaccagtctacagtttgaacatcactcaatgaaaggg

SEQ ID NO: 527940 - DNA, 120 bp, Artificial Sequence
  ENSG00000166024_22 (sequence is synthesized)
ataattccatgaatcagaaaatgtttccatagccttcagataagatgatccttccagagctctatgtacatgcagatgtgcatgttaaagagataaagtgatcgagacaaggactgactg

SEQ ID NO: 527941 - DNA, 120 bp, Artificial Sequence
  ENSG00000166024_23 (sequence is synthesized)
ggtatagaaggaagacagactcctgtcttcactcctaaatgcagttctttggaatcaccctactgtggtgggcgtagtagggagccatcagctaggaagaaacgtgggagatgtgaattc

SEQ ID NO: 527942 - DNA, 120 bp, Artificial Sequence
  ENSG00000166024_24 (sequence is synthesized)
caagagttgcctggacagggcaagtcatgttagcgtgggtcacacttccaagatatttaaagcaaatacaaaacagaacagaggattcaaaccgcaagtatgggagatttaggccctgca

SEQ ID NO: 527943 - DNA, 120 bp, Artificial Sequence
  ENSG00000166024_25 (sequence is synthesized)
gaggcagaccattccttagtatctcacaaagcagagtaatactggaggcagagtagggggtggttggagagcagttagtacaaagaggcagaacagtgtctggtttacttggcatacaca

SEQ ID NO: 527944 - DNA, 120 bp, Artificial Sequence
  ENSG00000166024_26 (sequence is synthesized)
gaatctgcactgccggttccagaactgcaaagttggtgaactacaggagatgtgggtatttagactccaaagtttatactgagctcagtgcctgggaccgctccagctgcactgcagcca

SEQ ID NO: 527945 - DNA, 120 bp, Artificial Sequence
  ENSG00000166024_27 (sequence is synthesized)
ggggggataccagcttcattcctcagagtaaaccaaccttgggagctgtgtgccagttccagtgtaagcagtaataccatgttgtaagagggaacattaaagcccattttatgacatata

SEQ ID NO: 527946 - DNA, 120 bp, Artificial Sequence
  ENSG00000166024_28 (sequence is synthesized)
aggcctgacgcgcgccccagcggcgcgagcggaagagatagagcttcgcggagacggcggaagcggagagcaacagcgcgccggtgaggctgctgtcagaaaggaacttttacacagttt

SEQ ID NO: 527947 - DNA, 120 bp, Artificial Sequence
  ENSG00000166024_29 (sequence is synthesized)
gccttcagagacagtctatcggcatgttgtagagttttattactaagaaaataaatgttacttacatgatggttttactcagcatttggtgtggtggatcttacataaacctttagaact

SEQ ID NO: 527948 - DNA, 120 bp, Artificial Sequence
  ENSG00000166025_0 (sequence is synthesized)
agcgcgcgagaagctctaggacccagcagcggttgtcgggtttggggctggaggtgaagccctgtgtgaatggggttgattgtccggcgccacttccccgcgctgcccggcagccgtctt

SEQ ID NO: 527949 - DNA, 120 bp, Artificial Sequence
  ENSG00000166025_1 (sequence is synthesized)
ccccagccgagggactgaactagccatgatcgcctcatgtggagggcaaagttgcgccggggaacttgtgagcctgcggtgaaagggtccccttctgcttgttatagccccagtagtcct

SEQ ID NO: 527950 - DNA, 120 bp, Artificial Sequence
  ENSG00000166025_2 (sequence is synthesized)
gtccaggttctagaagactccacctacttttccccagactttcagctctattctgggaggcatgaaacatctgctttgacggtggaggcaaccagtagcatcagggaaaaagttgttgaa

SEQ ID NO: 527951 - DNA, 120 bp, Artificial Sequence
  ENSG00000166025_3 (sequence is synthesized)
gatcctctttgtaacttccactccccaaacttcctgaggatctcagaggtggaaatgagaggttccgaggatgcggcagctggaacagtattgcagcggctgatccaggaacaactgcgg

SEQ ID NO: 527952 - DNA, 120 bp, Artificial Sequence
  ENSG00000166025_4 (sequence is synthesized)
tatggcaccccaaccgagaacatgaacttgctggccattcagcaccaggccacagggagtgcaggaccagcccatcctacaaacaacttttcttccacggaaaacctcactcaagaagac

SEQ ID NO: 527953 - DNA, 120 bp, Artificial Sequence
  ENSG00000166025_5 (sequence is synthesized)
ccacaaatggtctaccagtcagcacgccaagaaccgcagggtcaagaacaccaggtggacaatacggtgatggagaaacaggtccggtccacgcagcctcagcagaacaacgaggaactg

SEQ ID NO: 527954 - DNA, 120 bp, Artificial Sequence
  ENSG00000166025_6 (sequence is synthesized)
cccacttacgaggaggccaaagcacagtcgcagttcttcagggggcagcagcagcagcaacagcagcagggggcggtgggccatggttactacatggcagggggcaccagtcagaagtcc

SEQ ID NO: 527955 - DNA, 120 bp, Artificial Sequence
  ENSG00000166025_7 (sequence is synthesized)
cgaactgaggggaggcccactgtgaaccgtgccaacagtggacaggcgcataaggacgaggcgctgaaggaactgaagcagggccacgtccgctcgctcagcgagagaatcatgcagctg

SEQ ID NO: 527956 - DNA, 120 bp, Artificial Sequence
  ENSG00000166025_8 (sequence is synthesized)
tccctggagaggaatggggccaagcaacaccttcccggctcggggaatggaaagggcttcaaagtaggaggggggccctcccctgcccagcctgcaggtaaagtgctggaccctcggggt

SEQ ID NO: 527957 - DNA, 120 bp, Artificial Sequence
  ENSG00000166025_9 (sequence is synthesized)
cctccacctgagtaccccttcaagaccaagcaaatgatgtccccagtcagcaagacccaggagcacggacttttttatggtgaccagcaccccgggatgctccacgagatggtcaagccc

SEQ ID NO: 527958 - DNA, 120 bp, Artificial Sequence
  ENSG00000166025_10 (sequence is synthesized)
taccctgctcctcagcctgtgagaacagatgtggccgtcctgcggtaccagccaccccctgagtatggggtaacgagccgcccatgccaacttccgttcccatcaaccatgcagcagcac

SEQ ID NO: 527959 - DNA, 120 bp, Artificial Sequence
  ENSG00000166025_11 (sequence is synthesized)
agccccatgtcctcccagacctcttccgccagcgggccactgcactctgtctccctgccgcttccactcccgatggccctgggtgctccacagcccccgcctgccgcctcccccagccag

SEQ ID NO: 527960 - DNA, 120 bp, Artificial Sequence
  ENSG00000166025_12 (sequence is synthesized)
cagcttggtccagatgcctttgcgattgtggagcgagcccagcaaatggtggagatattaacagaggagaaccgggtgcttcaccaggaacttcagggttactacgacaatgccgacaag

SEQ ID NO: 527961 - DNA, 120 bp, Artificial Sequence
  ENSG00000166025_13 (sequence is synthesized)
ctccacaagtttgaaaaagaacttcagagaatttcggaagcctatgaaagtctggtcaagtctaccaccaagcgagaatcgctggacaaggccatgagaaacaaattggaaggcgagatt

SEQ ID NO: 527962 - DNA, 120 bp, Artificial Sequence
  ENSG00000166025_14 (sequence is synthesized)
agaagacttcatgatttcaacagagacctccgagatcgactagagactgctaacaggcaactatccagcagggaatacgaagggcatgaagacaaagctgcagaggggcattatgcttcc

SEQ ID NO: 527963 - DNA, 120 bp, Artificial Sequence
  ENSG00000166025_15 (sequence is synthesized)
cagaacaaagaattcttgaaggaaaaggagaaattagaaatggagttagcagcagtgcggactgcaagtgaggaccatcggagacacatcgagatcctggaccaggctttgagcaacgcc

SEQ ID NO: 527964 - DNA, 120 bp, Artificial Sequence
  ENSG00000166025_16 (sequence is synthesized)
caggccagggtcatcaagctggaagaggagttacgagagaagcaagcatatgttgagaaagttgagaagctgcagcaggccctgacccagctgcagtctgcatgtgagaagcgagaacag

SEQ ID NO: 527965 - DNA, 120 bp, Artificial Sequence
  ENSG00000166025_17 (sequence is synthesized)
atggagcggagactgcggacttggctggagagagagctggatgcactgagaacccagcagaaacatggaaatggccagccagccaacatgccggaatacaatgccccagccctcctggaa

SEQ ID NO: 527966 - DNA, 120 bp, Artificial Sequence
  ENSG00000166025_18 (sequence is synthesized)
cttgtgcgggagaaggaggagcggatcctggccctggaggccgacatgacaaagtgggagcagaagtacctggaggagagcaccatccgacactttgccatgaatgccgcagccactgca

SEQ ID NO: 527967 - DNA, 120 bp, Artificial Sequence
  ENSG00000166025_19 (sequence is synthesized)
gcagctgagagggacaccacgatcatcaaccactcacggaatggcagctacggagagagctcgctggaggcccacatctggcaagaggaggaggaggtggtgcaggccaacagaaggtgt

SEQ ID NO: 527968 - DNA, 120 bp, Artificial Sequence
  ENSG00000166025_20 (sequence is synthesized)
caggacatggaatacactattaaaaatctccatgccaaaatcatagagaaagatgctatgattaaggtcctgcagcagcgatctcgtaaagatgccgggaagacagactcctccagccta

SEQ ID NO: 527969 - DNA, 120 bp, Artificial Sequence
  ENSG00000166025_21 (sequence is synthesized)
cgtcctgcccgctccgttccatccatagcagcagctactgggacacactctcgccagacctctcttaccagcagccagctggctgaggaaaagaaggaagagaagacctggaaggggagc

SEQ ID NO: 527970 - DNA, 120 bp, Artificial Sequence
  ENSG00000166025_22 (sequence is synthesized)
ataggattgctgctggggaaggagcaccatgagcatgcctctgccccactgctgccacccccacccacctcagcactgtcctccatagcctccactacggcagccagcagtgcccacgcc

SEQ ID NO: 527971 - DNA, 120 bp, Artificial Sequence
  ENSG00000166025_23 (sequence is synthesized)
aagacaggcagcaaggacagcagcacacagactgacaagagtgccgagctcttctggcccagcatggcctcccttcccagccgcggccggctgagcacgacccctgctcacagccccgtc

SEQ ID NO: 527972 - DNA, 120 bp, Artificial Sequence
  ENSG00000166025_24 (sequence is synthesized)
ctgaaacacccagcggccaaagggaccgcagagaaactggagaactctcctggccatgggaagtcgcctgaccacagaggccgggtcagcagcttgctgcacaagcccgagttccctgat

SEQ ID NO: 527973 - DNA, 120 bp, Artificial Sequence
  ENSG00000166025_25 (sequence is synthesized)
ggagagatgatggaagtcctcatctaactgccatccctgtggaatttcagtacagaacactgacaaacaaggaaagcggcagagaaagaagaaagacctagaaggttgtagatgggaaat

SEQ ID NO: 527974 - DNA, 120 bp, Artificial Sequence
  ENSG00000166025_26 (sequence is synthesized)
caggaatgatttgaactgataaagatttcagactcataagaacacattttataaatgttaaacacaaaaactacatgactgaagatagaagagaatgcgatggattttattacacatggt

SEQ ID NO: 527975 - DNA, 120 bp, Artificial Sequence
  ENSG00000166025_27 (sequence is synthesized)
ggaagagagaagaggcgtgtaggtttgcaaacaaagttaagaaataggaaactgaatttttcattgtacagaaaatgtatctcttggggagggcctgtgtacccccattctctgattata

SEQ ID NO: 527976 - DNA, 120 bp, Artificial Sequence
  ENSG00000166025_28 (sequence is synthesized)
aacagataaacccaaatgtggatcatccttggaatacccccattctccttgcctcttagcatgtttgatttaagaaaagcctccaggaaatcttgagagcctgtcttggcataatgcagt

SEQ ID NO: 527977 - DNA, 120 bp, Artificial Sequence
  ENSG00000166025_29 (sequence is synthesized)
gtcacctgtgccaaccatggggtgtcccgtgagtgtgagtgtggcagtgagaagaagcatcgagggcgaggggaatatgaaagttggtcttcacctaattacctgtttggtttggatttt

SEQ ID NO: 527978 - DNA, 120 bp, Artificial Sequence
  ENSG00000166025_30 (sequence is synthesized)
caagagatgattgggcttcttagcttttctgaattctgcagtattttctaaacaggatagattatgatctcggtccccatccatcctaacttctgagttcatctctgtctctgctttaca

SEQ ID NO: 527979 - DNA, 120 bp, Artificial Sequence
  ENSG00000166025_31 (sequence is synthesized)
gtctttaattttttgttgttccttcatttttttctttttaataagacatagcagaattccttaggtatgggatttatgagaccagtacctgaactgtcatcattcctactgtgtttgata

SEQ ID NO: 527980 - DNA, 120 bp, Artificial Sequence
  ENSG00000166025_32 (sequence is synthesized)
gtgaccagtaggacaaagccacgtgccgacttcctggctgcttcacctttgcatagctgggttgcagctgcgaacctcattctgactgtgaactaagcaagctttgaggaggcaggagat

SEQ ID NO: 527981 - DNA, 120 bp, Artificial Sequence
  ENSG00000166025_33 (sequence is synthesized)
tccgtgggtccctgtgacatattgcattaagatcgtggcacttgcttttttgtctttcacatcggctgtcttgcaaggagcttgacatttccaaattccattgctctgtttggggaagac

SEQ ID NO: 527982 - DNA, 120 bp, Artificial Sequence
  ENSG00000166025_34 (sequence is synthesized)
ttaggacagcactccaggaaacagatgacaatttacagacagttgtctcagtggtttccagaatctcaccagcctcccgtatagcttcttgtattgaggctcatgagcgtattcacactc

SEQ ID NO: 527983 - DNA, 120 bp, Artificial Sequence
  ENSG00000166025_35 (sequence is synthesized)
tttcctcccccgcgcacgcctctgcttgctctcgatcagcatccagacctccgtggcaccaggttgcctctgttgtgaacttcttttgtaacctaccaggccagttgtatatacagtgtt

SEQ ID NO: 527984 - DNA, 120 bp, Artificial Sequence
  ENSG00000166025_36 (sequence is synthesized)
gtcaggtttttccgggtttcagttttgaggcagtttattcaaagtgagacagaagtgccacggaaaagaggcaggagtgtgttaggtggtgggtccattagacctctgctgtgacattgc

SEQ ID NO: 527985 - DNA, 120 bp, Artificial Sequence
  ENSG00000166025_37 (sequence is synthesized)
gggtcctgatgtttttgtacctccaggtcagctggatcgctgttttcccagttccctttgctcatgcttacttagaggaagaaagaaaggggggtacctcttccaagtaccttctaaatg

SEQ ID NO: 527986 - DNA, 120 bp, Artificial Sequence
  ENSG00000166025_38 (sequence is synthesized)
aaacactcaagagagtgctactcaggaaactttgcttggatcctaaaatggactggtcttgggtgtgtaaccccggtgaagttatagcctccccaaattgaggtgacagaaggaagacaa

SEQ ID NO: 527987 - DNA, 120 bp, Artificial Sequence
  ENSG00000166025_39 (sequence is synthesized)
gaggtgtaagctggagagggaagggaagaaatcagtggctttggccagcctctgtgccacccagtacgacagaggagtgggaactggccctctggggctctgcttggccataggcactgc

SEQ ID NO: 527988 - DNA, 120 bp, Artificial Sequence
  ENSG00000166025_40 (sequence is synthesized)
acattgtgccacctgctcatcacctcctctagtctcacactgagcatcggagtacctgttgtgcagacaggaaaactgaggagctctgagaggctgagcatggagctcaccccatgccat

SEQ ID NO: 527989 - DNA, 120 bp, Artificial Sequence
  ENSG00000166025_41 (sequence is synthesized)
agggtgtgggaagagggcacaggaggcctcatccatgggggaaagggttgaggatggacatgggtggggagagggcatagacatcccttcctaatctctgttcccaccacatttcatagg

SEQ ID NO: 527990 - DNA, 120 bp, Artificial Sequence
  ENSG00000166025_42 (sequence is synthesized)
agatgagttaggagatgacagctaactctcttaaggacattttgaccccagtttatgttggggatggaccagaaaggaaaatgtctagagataggaaggtaaatcaactctgccagcccc

SEQ ID NO: 527991 - DNA, 120 bp, Artificial Sequence
  ENSG00000166025_43 (sequence is synthesized)
taccatcaggtctgggccaccccaaacttgggctgcctcccttagacataggttagagtgagagacccagctgtttctcccgaagcctcgtcttcatgccccagacacctgattgcccca

SEQ ID NO: 527992 - DNA, 120 bp, Artificial Sequence
  ENSG00000166025_44 (sequence is synthesized)
atcaggtgtcagacttgcttgctcttcgaggtccccctgagctgccaagtgttttcattgtaaacagacacatcgccatgtttcagggcttcaacggcattgtattttggactttgaccg

SEQ ID NO: 527993 - DNA, 120 bp, Artificial Sequence
  ENSG00000166025_45 (sequence is synthesized)
tattttttttctcttaacctactgagactcttccttaagaacaggatctatagctttaaaatgtcttcttctatgggaaatttcctgccaagccagggcactaaattctttcatcattag

SEQ ID NO: 527994 - DNA, 120 bp, Artificial Sequence
  ENSG00000166025_46 (sequence is synthesized)
agctttcctgaagtccggccatatactgagtacctgctctgagttctgggcagcttacaatatcttaaacagattttcagaaaaataatgcaactatattttctagtgtcaactgtatgc

SEQ ID NO: 527995 - DNA, 120 bp, Artificial Sequence
  ENSG00000166025_47 (sequence is synthesized)
aaacagtgtggtaaataccttttaattagtcctccacccacctggagtacagggggtgcgtttattattctgatttcactgatgaggaaatgggctcagaaaggttaagtcccttcctga

SEQ ID NO: 527996 - DNA, 120 bp, Artificial Sequence
  ENSG00000166025_48 (sequence is synthesized)
aatctcacagccaggagaagctaggatgatttaaaacaaagtttggagaggcactgggcatagaccctggctgtacagcctctaacatgcggcactgcatcttggcagtctctatgcctg

SEQ ID NO: 527997 - DNA, 90 bp, Artificial Sequence
  ENSG00000166025_49 (sequence is synthesized)
cacacatctcagagcctaagaaataggactaagcccagaactcctagaatcacctataaatgctaggcatagatggaaattattgtgttc

SEQ ID NO: 527998 - DNA, 120 bp, Artificial Sequence
  ENSG00000166025_50 (sequence is synthesized)
cacctataaatgctaggcatagatggaaattattgtgttccaccagaagcacagctccaaactatacctaaaaaatatttctgcacttcccagagacctggacttcaaactttcccagtg

SEQ ID NO: 527999 - DNA, 120 bp, Artificial Sequence
  ENSG00000166025_51 (sequence is synthesized)
gagcctgattatagaacttgagggtcctatctcaggatgaaggggagaggccctggcttcacgggaaggtattccagcattgttctgcttcacccttgactgcgttgtctggcagtttct

SEQ ID NO: 528000 - DNA, 120 bp, Artificial Sequence
  ENSG00000166025_52 (sequence is synthesized)
gtgtgctgccaggatattatatggaactggagaagttggagtcaggtctctgaagctagagtttcactaattagatgcctctgtacatgagaactattactgtctgcaggtccatatagc

SEQ ID NO: 528001 - DNA, 120 bp, Artificial Sequence
  ENSG00000166025_53 (sequence is synthesized)
taagctgccaggaaaaacacattatcttccaaaactttcagagcatgtgcagaaccctttcttagcgttttcttctcagcattttctctgcctcccagaggctggcagccagtgacactg

SEQ ID NO: 528002 - DNA, 120 bp, Artificial Sequence
  ENSG00000166025_54 (sequence is synthesized)
cagagttcagcatgttctaaccatgcacgcagggcaggggctgccttggccctcctcaggctttcgttgggagagcaggcagtggtggagcccttctgggtgcagtcctctggggttgct

SEQ ID NO: 528003 - DNA, 120 bp, Artificial Sequence
  ENSG00000166025_55 (sequence is synthesized)
ctttggaactcatgtatgagtttgactccacaaggcttggcatggataccaaaacagttgcaacaaattagttctgaacctggaacagagaattcagtgcttctgttactcaggaaggag

SEQ ID NO: 528004 - DNA, 120 bp, Artificial Sequence
  ENSG00000166025_56 (sequence is synthesized)
gtgttcagaatgccccgtgcagagcagccagtcattactcttgtttgttctcacctgggtgcgcaccctcatgatgcagtggctgtagcaccttcatgccaggtgctgagagaatgggaa

SEQ ID NO: 528005 - DNA, 120 bp, Artificial Sequence
  ENSG00000166025_57 (sequence is synthesized)
attcttcctccccattgacctgagtcccagagacttagggacacagacttcaggtgaggctgcggacctcagaagcagtggataatagattggggcattaaaagcttttgaggcaggggg

SEQ ID NO: 528006 - DNA, 120 bp, Artificial Sequence
  ENSG00000166025_58 (sequence is synthesized)
ctcatgttttgactgcagggagttatgctgagcaaagagatgtgtttttcaaaaccagggttcaaaaccagtgtccacgctggagtaagtggagcatgcttctctgtgttctctgaatga

SEQ ID NO: 528007 - DNA, 120 bp, Artificial Sequence
  ENSG00000166025_59 (sequence is synthesized)
tcttgcactcctcttaagcaaaggagtaccatgaccatagtcagtgggatcccacaaatgttcttaaatgggtaaggctttaagtagccagagagtatccagcctaccattggcttctcc

SEQ ID NO: 528008 - DNA, 120 bp, Artificial Sequence
  ENSG00000166025_60 (sequence is synthesized)
acatcctaaaacctgagacagccttggtatatgctttataaatgtttcttttcttgttgtttaagtaattaaagtgtttaaaatgtcttcattagatgtgacgattgtttaatgagtttg

SEQ ID NO: 528009 - DNA, 120 bp, Artificial Sequence
  ENSG00000166025_61 (sequence is synthesized)
cctctgacgtgtggctccatgggagataggcaaagtaattaagaagttaccagaaattggtcggctggggaaatgcaaaagttagcatttcagtagtgaatttctcctggaacaaatgag

SEQ ID NO: 528010 - DNA, 120 bp, Artificial Sequence
  ENSG00000166025_62 (sequence is synthesized)
caatttttcctctttctcttaagtagtatacccttttctcacttagtaatttaatggtatataaagacatgtgtataagtgagtgcatacatatgaggtatgactatagggttgtttgtg

SEQ ID NO: 528011 - DNA, 120 bp, Artificial Sequence
  ENSG00000166025_63 (sequence is synthesized)
ggaatttcttttcctaacatacagaagatcaaagtgttcatctcaccccgccctccttaaaaggtgtcttttgggagactatgtgctcattgactatagtgctgccaagtaaaaatatct

SEQ ID NO: 528012 - DNA, 120 bp, Artificial Sequence
  ENSG00000166025_64 (sequence is synthesized)
tgggaactcttctactagaatggccttcagggcttggcatgttcctttggtttacccttagagatgagaaatcctcctcctttgaggatggatttaagttctggaaataatctcaagtgc

SEQ ID NO: 528013 - DNA, 120 bp, Artificial Sequence
  ENSG00000166025_65 (sequence is synthesized)
ttgatagcacagttggatgaaaaaagatggcaattaaggtaagttacaccatttttgtttctaaaaaaatccctaagaaatttcttggaatgagtctttggcctcagagcctctcaaagt

SEQ ID NO: 528014 - DNA, 120 bp, Artificial Sequence
  ENSG00000166025_66 (sequence is synthesized)
gtccacttcaaggggggatcatcctcattagcacacagatttttaaaaatcaattctcttgccatgcctcctatgtgttcacatctctgcatacactacagatataagtgcataatcatt

SEQ ID NO: 528015 - DNA, 120 bp, Artificial Sequence
  ENSG00000166025_67 (sequence is synthesized)
catataaacatctggtaggtattctgtaaaactgtgtttactttagtgcatgttattgtcatgttatgatgtgactggggtgtttctttgtcatgaaactttgcttcttcacagaattag

SEQ ID NO: 528016 - DNA, 120 bp, Artificial Sequence
  ENSG00000166025_68 (sequence is synthesized)
aatactgctctctctatattgaactacatatacagcgttttcttgtatcagcccccaaagtctggatgcccggtgttgtgtttacatgtgattgtgcctaggagtctgttcacatagaga

SEQ ID NO: 528017 - DNA, 120 bp, Artificial Sequence
  ENSG00000166025_69 (sequence is synthesized)
cctaggagtctgttcacatagagacacctgtaagtatttattacaaaacggaatgtaagcaaatatatccacattggttttatttgaatcaaggtgtttttttgttttttgttttttttc

SEQ ID NO: 528018 - DNA, 120 bp, Artificial Sequence
  ENSG00000166025_70 (sequence is synthesized)
cctcctccatgagcacttacagaattgtgtaaaattctgtgaaacagtggtaagcatgggcacccgatttcagctgtcctgctgccgctgccctccaacctgctctgtgtgtgtgtgtcg

SEQ ID NO: 528019 - DNA, 120 bp, Artificial Sequence
  ENSG00000166025_71 (sequence is synthesized)
ctgtgcttggtggcagtgtgccgtgctcgtgccggctcttcccagcagactggtatctggctgtaacgtttgacgtcttcatattgccagtctgtattgaggggtgatgtacatggccat

SEQ ID NO: 528020 - DNA, 120 bp, Artificial Sequence
  ENSG00000166025_72 (sequence is synthesized)
acagccaaatgggtctgtgtaccagtgtggggattccaagaacactgcctgtcccccacagcaaatattgatgctgttggtcagccaaagattttcctctcctttgctgcttaaacttgt

SEQ ID NO: 528021 - DNA, 120 bp, Artificial Sequence
  ENSG00000166025_73 (sequence is synthesized)
gccttaatattgtacataataaatggataaaatggcaaaatgactcttttctctcgcttgctcctttcttccttaaagaacttataaactgatgctcaataaatgtttcatttcattgta

SEQ ID NO: 528022 - DNA, 120 bp, Artificial Sequence
  ENSG00000166025_74 (sequence is synthesized)
tgaagtggggagggaaatcagtcatacttcagttatagatatgtggaagcattgtgtaaattctaaagactgcaccactggagtagctcttagccatgggttgactcagatcagaattat

SEQ ID NO: 528023 - DNA, 120 bp, Artificial Sequence
  ENSG00000166025_75 (sequence is synthesized)
ctattattgttgtaagttgaggtgacccttataacacaaaaggctctcatagaaaagcctagagacatcacgcctctgaacttggctctgctctagaccagttgtatgacggctccacct

SEQ ID NO: 528024 - DNA, 120 bp, Artificial Sequence
  ENSG00000166025_76 (sequence is synthesized)
ctgcttccacgtctggaaagggaggacagtgtctgcctgctttaccccatggggagtgggagggaataatgggataatggggggaggagagtgtctgcctgctttaccccatggggcgtg

SEQ ID NO: 528025 - DNA, 120 bp, Artificial Sequence
  ENSG00000166025_77 (sequence is synthesized)
ggagggaagaatgggataatggtgggaggagagtgtctgcctgctttaccccatggggcgtgggagggaagaatgggataatggggggaggacagtgtctgcctgctttaccccatgggg

SEQ ID NO: 528026 - DNA, 120 bp, Artificial Sequence
  ENSG00000166025_78 (sequence is synthesized)
cacacgagtgttcctgccaccatgcactgcattctgtgcacaccacaggagaggcagctcctcccctggcctctgtacactccaagccgcccatgccaacttccgttcccatcaaccatg

SEQ ID NO: 528027 - DNA, 120 bp, Artificial Sequence
  ENSG00000166025_79 (sequence is synthesized)
agagttggctcagccaggcagcactcgttgctctttttaaactccacggcaccagggatgaagtcacctttcttcttttaaaacgaacacatttgctctgtgagtccctgtcacttctgt

SEQ ID NO: 528028 - DNA, 120 bp, Artificial Sequence
  ENSG00000166025_80 (sequence is synthesized)
tagaacttagtattttttccactgccggtcaccaggacttctcacaggagattgcttccatttgatctgaaagctatacatacaaggggctagaagcatggacctcagtgaaaaatggac

SEQ ID NO: 528029 - DNA, 120 bp, Artificial Sequence
  ENSG00000166033_0 (sequence is synthesized)
cccgaggccctcctgcactctccccggcgccgctctccggccctcgccctgtccgccgccaccgccgccgccgccagagtcgccatgcagatcccgcgcgccgctcttctcccgctgctg

SEQ ID NO: 528030 - DNA, 80 bp, Artificial Sequence
  ENSG00000166033_1 (sequence is synthesized)
tcttctcccgctgctgctgctgctgctggcggcgcccgcctcggcgcagctgtcccgggccggccgctcggcgcctttgg

SEQ ID NO: 528031 - DNA, 80 bp, Artificial Sequence
  ENSG00000166033_2 (sequence is synthesized)
ctgctgcgaggtgtgcggcgcgcccgagggcgccgcgtgcggcctgcaggagggcccgtgcggcgaggggctgcagtgcg

SEQ ID NO: 528032 - DNA, 120 bp, Artificial Sequence
  ENSG00000166033_3 (sequence is synthesized)
gcagtgcgtggtgcccttcggggtgccagcctcggccacggtgcggcggcgcgcgcaggccggcctctgtgtgtgcgccagcagcgagccggtgtgcggcagcgacgccaacacctacgc

SEQ ID NO: 528033 - DNA, 120 bp, Artificial Sequence
  ENSG00000166033_4 (sequence is synthesized)
caacctgtgccagctgcgcgccgccagccgccgctccgagaggctgcaccggccgccggtcatcgtcctgcagcgcggagcctgcggccaagggcaggaagatcccaacagtttgcgcca

SEQ ID NO: 528034 - DNA, 120 bp, Artificial Sequence
  ENSG00000166033_5 (sequence is synthesized)
taaatataactttatcgcggacgtggtggagaagatcgcccctgccgtggttcatatcgaattgtttcgcaagcttccgttttctaaacgagaggtgccggtggctagtgggtctgggtt

SEQ ID NO: 528035 - DNA, 120 bp, Artificial Sequence
  ENSG00000166033_6 (sequence is synthesized)
tattgtgtcggaagatggactgatcgtgacaaatgcccacgtggtgaccaacaagcaccgggtcaaagttgagctgaagaacggtgccacttacgaagccaaaatcaaggatgtggatga

SEQ ID NO: 528036 - DNA, 120 bp, Artificial Sequence
  ENSG00000166033_7 (sequence is synthesized)
gaaagcagacatcgcactcatcaaaattgaccaccagggcaagctgcctgtcctgctgcttggccgctcctcagagctgcggccgggagagttcgtggtcgccatcggaagcccgttttc

SEQ ID NO: 528037 - DNA, 120 bp, Artificial Sequence
  ENSG00000166033_8 (sequence is synthesized)
caaagagctggggctccgcaactcagacatggactacatccagaccgacgccatcatcaactatggaaactcgggaggcccgttagtaaacctggacggtgaagtgattggaattaacac

SEQ ID NO: 528038 - DNA, 120 bp, Artificial Sequence
  ENSG00000166033_9 (sequence is synthesized)
tttgaaagtgacagctggaatctcctttgcaatcccatctgataagattaaaaagttcctcacggagtcccatgaccgacaggccaaaggaaaagccatcaccaagaagaagtatattgg

SEQ ID NO: 528039 - DNA, 120 bp, Artificial Sequence
  ENSG00000166033_10 (sequence is synthesized)
tatccgaatgatgtcactcacgtccagcaaagccaaagagctgaaggaccggcaccgggacttcccagacgtgatctcaggagcgtatataattgaagtaattcctgataccccagcaga

SEQ ID NO: 528040 - DNA, 120 bp, Artificial Sequence
  ENSG00000166033_11 (sequence is synthesized)
agctggtggtctcaaggaaaacgacgtcataatcagcatcaatggacagtccgtggtctccgccaatgatgtcagcgacgtcattaaaagggaaagcaccctgaacatggtggtccgcag

SEQ ID NO: 528041 - DNA, 120 bp, Artificial Sequence
  ENSG00000166033_12 (sequence is synthesized)
gggtaatgaagatatcatgatcacagtgattcccgaagaaattgacccataggcagaggcatgagctggacttcatgtttccctcaaagactctcccgtggatgacggatgaggactctg

SEQ ID NO: 528042 - DNA, 120 bp, Artificial Sequence
  ENSG00000166033_13 (sequence is synthesized)
ggctgctggaataggacactcaagacttttgactgccattttgtttgttcagtggagactccctggccaacagaatccttcttgatagtttgcaggcaaaacaaatgtaatgttgcagat

SEQ ID NO: 528043 - DNA, 120 bp, Artificial Sequence
  ENSG00000166033_14 (sequence is synthesized)
ccgcaggcagaagctctgcccttctgtatcctatgtatgcagtgtgctttttcttgccagcttgggccattcttgcttagacagtcagcatttgtctcctcctttaactgagtcatcatc

SEQ ID NO: 528044 - DNA, 120 bp, Artificial Sequence
  ENSG00000166033_15 (sequence is synthesized)
ttagtccaactaatgcagtcgatacaatgcgtagatagaagaagccccacgggagccaggatgggactggtcgtgtttgtgcttttctccaagtcagcacccaaaggtcaatgcacagag

SEQ ID NO: 528045 - DNA, 120 bp, Artificial Sequence
  ENSG00000166033_16 (sequence is synthesized)
accccgggtgggtgagcgctggcttctcaaacggccgaagttgcctcttttaggaatctctttggaattgggagcacgatgactctgagtttgagctattaaagtacttcttacacattg

SEQ ID NO: 528046 - DNA, 120 bp, Artificial Sequence
  ENSG00000166033_17 (sequence is synthesized)
ctcccatgtggacagtccagggtgcccagaacccttccagcaagactttgatttctgtttcgaaggatttcttgaggcccctctgtagagctgcttgtcttcttcataaccggtgcctgg

SEQ ID NO: 528047 - DNA, 120 bp, Artificial Sequence
  ENSG00000166035_0 (sequence is synthesized)
agaaattaccaagaaagcctggaccccgggtgaaacggagaaatggacacaagtcccctgtgtttctccattctgttggttttatgcatctttatccaatcaagtgcccttggacaaagc

SEQ ID NO: 528048 - DNA, 120 bp, Artificial Sequence
  ENSG00000166035_1 (sequence is synthesized)
ctgaaaccagagccatttggaagaagagctcaagctgttgaaacaaacaaaacgctgcatgagatgaagaccagattcctgctctttggagaaaccaatcagggctgtcagattcgaatc

SEQ ID NO: 528049 - DNA, 120 bp, Artificial Sequence
  ENSG00000166035_2 (sequence is synthesized)
aatcatccggacacgttacaggagtgcggcttcaactcctccctgcctctggtgatgataatccacgggtggtcggtggacggcgtgctagaaaactggatctggcagatggtggccgcg

SEQ ID NO: 528050 - DNA, 120 bp, Artificial Sequence
  ENSG00000166035_3 (sequence is synthesized)
ctgaagtctcagccggcccagccagtgaacgtggggctggtggactggatcaccctggcccacgaccactacaccatcgccgtccgcaacacccgccttgtgggcaaggaggtcgcggct

SEQ ID NO: 528051 - DNA, 120 bp, Artificial Sequence
  ENSG00000166035_4 (sequence is synthesized)
cttctccggtggctggaggaatctgtgcaactctctcgaagccatgttcacctaattgggtacagcctgggtgcacacgtgtcaggatttgccggcagttccatcggtggaacgcacaag

SEQ ID NO: 528052 - DNA, 120 bp, Artificial Sequence
  ENSG00000166035_5 (sequence is synthesized)
attgggagaatcacagggctggatgccgcgggacctttgtttgagggaagtgcccccagcaatcgtctttctccagatgatgccaattttgtggatgccattcatacctttacccgggag

SEQ ID NO: 528053 - DNA, 120 bp, Artificial Sequence
  ENSG00000166035_6 (sequence is synthesized)
cacatgggcctgagcgtgggcatcaaacagcccataggacactatgacttctatcccaacgggggctccttccagcctggctgccacttcctagagctctacagacatattgcccagcac

SEQ ID NO: 528054 - DNA, 120 bp, Artificial Sequence
  ENSG00000166035_7 (sequence is synthesized)
ggcttcaatgccatcacccagaccataaaatgctcccacgagcgatcggtgcaccttttcatcgactccttgctgcacgccggcacgcagagcatggcctacccgtgtggtgacatgaac

SEQ ID NO: 528055 - DNA, 120 bp, Artificial Sequence
  ENSG00000166035_8 (sequence is synthesized)
agcttcagccagggcctgtgcctgagctgcaagaagggccgctgcaacacgctgggctaccacgtccgccaggagccgcggagcaagagcaagaggctcttcctcgtaacgcgagcccag

SEQ ID NO: 528056 - DNA, 120 bp, Artificial Sequence
  ENSG00000166035_9 (sequence is synthesized)
tcccccttcaaagtttatcattaccagttcaagatccagttcatcaaccaaactgagacaccaatacaaacaacttttaccatgtcactactcggaacaaaagagaaaatgcagaaaatt

SEQ ID NO: 528057 - DNA, 120 bp, Artificial Sequence
  ENSG00000166035_10 (sequence is synthesized)
tattcctttcttatcacgctggatgtggatatcggcgagctgatcatgatcaagttcaagtgggaaaacagtgcagtgtgggccaatgtctgggacacggtccagaccatcatcccatgg

SEQ ID NO: 528058 - DNA, 120 bp, Artificial Sequence
  ENSG00000166035_11 (sequence is synthesized)
agcacagggccgcgccactcaggcctcgttctgaagacgatcagagtcaaagcaggagaaacccagcaaagaatgacattttgttcagaaaacacagatgacctactacttcgcccaacc

SEQ ID NO: 528059 - DNA, 120 bp, Artificial Sequence
  ENSG00000166035_12 (sequence is synthesized)
caggaaaaaatcttcgtgaaatgtgaaataaagtctaaaacatcaaagcgaaagatcagatgagatttaatgaagacccagtgtaaagaataaatgaatcttactccttatctggaatgg

SEQ ID NO: 528060 - DNA, 120 bp, Artificial Sequence
  ENSG00000166035_13 (sequence is synthesized)
ctgccttatttagaagccaaaattacataaagaatctcacacaaagcttaaataaagtttagatttaaggggggtatgtttcactctcataaactgagcttttaaaaacgatatgatata

SEQ ID NO: 528061 - DNA, 120 bp, Artificial Sequence
  ENSG00000166035_14 (sequence is synthesized)
actattttccagtatcagtacaaccaaaaatgtcccaattttatctctggttaaatgttaatatatgcaaataagtacaaatgcaagagccattttagatctgttgttctaatttacaat

SEQ ID NO: 528062 - DNA, 120 bp, Artificial Sequence
  ENSG00000166035_15 (sequence is synthesized)
gtcttttataattaagtttcccacatgtccttgctagtttattatgacccatttttgaaccatgctagaaagatacttttttattaggtaactagtgcttcaataaagcaagattctaat

SEQ ID NO: 528063 - DNA, 120 bp, Artificial Sequence
  ENSG00000166035_16 (sequence is synthesized)
taatcaccactagttgtgtataccaaatacacatcctttaagacaatacagttcttaaaagaagaaaaattataattattctaatatttatacaaatcatataacgatttcacagaacca

SEQ ID NO: 528064 - DNA, 120 bp, Artificial Sequence
  ENSG00000166035_17 (sequence is synthesized)
aacacttacaagtagaattctactaaaactacttgtgataacagtgaaagctagacatgtggtcattttaataatggaattacaaattaaataaacataattattatatcttactaatgc

SEQ ID NO: 528065 - DNA, 120 bp, Artificial Sequence
  ENSG00000166035_18 (sequence is synthesized)
ttgcaacaaaagctaattttaaaaacttggaatgtctcaaagcatttgctatggactgaatgtttgagtcaccccaaaattcatatgctgaaatctaatccccaatgtgatggtgtttgg

SEQ ID NO: 528066 - DNA, 120 bp, Artificial Sequence
  ENSG00000166035_19 (sequence is synthesized)
aggtggggcctttgggaggtgatcaggtcatgagggtggagccctcataagtgggattagtgcccttataggggataaaggatcagaactctctgccatgtgcggatatgagaaggcaac

SEQ ID NO: 528067 - DNA, 120 bp, Artificial Sequence
  ENSG00000166035_20 (sequence is synthesized)
tatatgcaaaccaggaagttgaccctcacctggaagtagactaccagatctgctggcacctttatcttggacttctcagcttccagaactgtgagaaataaatgtttcttgtttaagcca

SEQ ID NO: 528068 - DNA, 120 bp, Artificial Sequence
  ENSG00000166035_21 (sequence is synthesized)
gatgagaattgccaaggcacagcaaagcctgcagcttccatacccgtcatgagagcaaataacttatttgtaaacctaagcacttaattaactaaatggaaagcaaggcagtgagtgatt

SEQ ID NO: 528069 - DNA, 120 bp, Artificial Sequence
  ENSG00000166035_22 (sequence is synthesized)
cctgacatggccgaatttaagtcaagctgtgaagctccaggtgcagccagaaatggagatggacaacttgaactgaaccctgagagcttctaaaaaggctttggaccactgcttctcagc

SEQ ID NO: 528070 - DNA, 67 bp, Artificial Sequence
  ENSG00000166035_23 (sequence is synthesized)
tgagagcttctaaaaaggctttggaccactgcttctcagcagtttttcttacggagtctctctgtgt

SEQ ID NO: 528071 - DNA, 120 bp, Artificial Sequence
  ENSG00000166035_24 (sequence is synthesized)
agagcctgacttttctccagagatgggcatgaacttttctttttaaaacgtgtgtcacaaagaatccaggggtttctgactgtatgggacagagcttgcttcagagcgtgccaggtggtt

SEQ ID NO: 528072 - DNA, 120 bp, Artificial Sequence
  ENSG00000166035_25 (sequence is synthesized)
ctatacacgacctcacaggttcacagggacacgtagccgtttgtaaacagaaatgaaattttagaaaatcatcctcggattaaaagtcttctaagagtgcctgcagctagcagtgaagtc

SEQ ID NO: 528073 - DNA, 120 bp, Artificial Sequence
  ENSG00000166035_26 (sequence is synthesized)
agtcaaagcaggagaaacccagcaaagatctcccaacaggatcaatctgggaagattaaactgctcgctcctcttctgcactgagctcttctcacatgactctttggcccattggagcag

SEQ ID NO: 528074 - DNA, 120 bp, Artificial Sequence
  ENSG00000166035_27 (sequence is synthesized)
cgctgcttctgagctctgaccctgcccagatgctcttagctggagagtaattcctcagtttaggtggctgctcaccctgacaatcccatgtggcttgacctgaaagggtggctaaagcac

SEQ ID NO: 528075 - DNA, 120 bp, Artificial Sequence
  ENSG00000166035_28 (sequence is synthesized)
aacactaccttctccactggggcacacccatgtggtacggaagaagaaatgaggagagggaggggcctggcccttccagggctcccacacggggtgagcattgaagcaggtgctccatgg

SEQ ID NO: 528076 - DNA, 120 bp, Artificial Sequence
  ENSG00000166035_29 (sequence is synthesized)
cattggtctcacgtgatctttgctgtgatcctgaaatgggtagtattggctgtgcagattaggaacctgaggctcacagaagttacacagcttgaggacattgctcaaaattgtcccagt

SEQ ID NO: 528077 - DNA, 120 bp, Artificial Sequence
  ENSG00000166035_30 (sequence is synthesized)
ccagatttgactgggatttgtctgatttattacccatttgttgggggtgtgctgtttccaacagttccttcttccattagttttggttccattaatctgaattttctcagtctaatctag

SEQ ID NO: 528078 - DNA, 120 bp, Artificial Sequence
  ENSG00000166035_31 (sequence is synthesized)
cagagttgcagtgctggacattaacatatgtatgcatcaaacccatccttagggctgtaggaggtactgtatgcgggttatgggagctataattttttttaggttgtaaataccgagtgc

SEQ ID NO: 528079 - DNA, 120 bp, Artificial Sequence
  ENSG00000166035_32 (sequence is synthesized)
ctcctctgtgtctacacagtgccaggtactatcggagaatacaaaaaaaaaaaaaaaaatctgagttgtggctcttggtagaaataaactccaggacctaaccaggaaaataagatgaat

SEQ ID NO: 528080 - DNA, 120 bp, Artificial Sequence
  ENSG00000166035_33 (sequence is synthesized)
taattttactaacggtgtggtccatcccagggcttctcaaactttcacgagcatacaaagcatctgggaatcatgttaaaatgcaggttctgctttagtgagtctggggtgagcctgatg

SEQ ID NO: 528081 - DNA, 120 bp, Artificial Sequence
  ENSG00000166035_34 (sequence is synthesized)
ttctgcatttctaacaagcgaccaggcaatgctgttgctgcaggtcaacagaccacactttgaatagtgagagtccagcattacacaacccgggaagtgtaagaagaaagttcagacccg

SEQ ID NO: 528082 - DNA, 120 bp, Artificial Sequence
  ENSG00000166035_35 (sequence is synthesized)
tacacttggggctgtgctgcaacatgctttgaggaggccaagaggtgttcccagggagacaggcagccggcaaagcaatatggctggcaggatcggatggactccagtgtcagccagtcc

SEQ ID NO: 528083 - DNA, 120 bp, Artificial Sequence
  ENSG00000166035_36 (sequence is synthesized)
taaactcacattttaacttcactgctcacaatctgtgtagcctcaaacaataacttcactcttcaagactcagttgtttagtgataaacgagaatcataatatacatttcatgagactaa

SEQ ID NO: 528084 - DNA, 120 bp, Artificial Sequence
  ENSG00000166035_37 (sequence is synthesized)
ttgtgccaggcagtctcacaatttaatactcacattcatcatgtgaggtgagtattattaggccctagtgatggagtacagaagctcagaaaggtgaagtgactatcccaactttacaca

SEQ ID NO: 528085 - DNA, 120 bp, Artificial Sequence
  ENSG00000166035_38 (sequence is synthesized)
gccacaggtgccaggacaaggattcacacccaggtctttgaatacacaccagggtctccccactgcccgtggctaacgctgcctgcctctggagcctgaggaccatcacacgaaccccag

SEQ ID NO: 528086 - DNA, 120 bp, Artificial Sequence
  ENSG00000166037_0 (sequence is synthesized)
ctttctgtgtaagctgtgagcgtaggcggccctgagggggtgtgttgcaggggtttccaagcccagcaccagcacccttgcccttttccatcaggggttcagcctagggtccccgctggt

SEQ ID NO: 528087 - DNA, 120 bp, Artificial Sequence
  ENSG00000166037_1 (sequence is synthesized)
gggcggctcccgagtcttggagaagagcacgagaacctagaccgcccccgaagtgcggagaccccctgggcaggctgaaagatggcggcggcgtctgtctctgcggcttctggttctcac

SEQ ID NO: 528088 - DNA, 120 bp, Artificial Sequence
  ENSG00000166037_2 (sequence is synthesized)
ttgtcgaacagctttgctgagccatcaaggtctaatggaagcatggttcggcattcttcatctccatatgtagtatatccttcggataagcctttccttaatagtgatctacgacgctcc

SEQ ID NO: 528089 - DNA, 120 bp, Artificial Sequence
  ENSG00000166037_3 (sequence is synthesized)
ccaagtaagcctacacttgcctatccagaaagcaacagcagagccatattttctgctcttaagaatcttcaagataagattcgacgcttggaacttgagaggattcaggcagaagaaagt

SEQ ID NO: 528090 - DNA, 120 bp, Artificial Sequence
  ENSG00000166037_4 (sequence is synthesized)
gtgaaaaccttgtctagagaaacaattgaatataagaaagtactggatgaacagatacaagaaagggagaattcaaagaatgaggaatcaaagcacaatcaagaactgacatctcagttg

SEQ ID NO: 528091 - DNA, 120 bp, Artificial Sequence
  ENSG00000166037_5 (sequence is synthesized)
ttagctgcagaaaataaatgcaatctattagaaaaacaattggaatacatgcgaaatatgataaagcatgccgaaatggagaggacatctgtcttagagaaacaagtttccctagaaaga

SEQ ID NO: 528092 - DNA, 120 bp, Artificial Sequence
  ENSG00000166037_6 (sequence is synthesized)
gaacgacaacatgatcaaacacatgttcagagccaacttgaaaaattggatcttcttgaacaggagtataacaaacttaccacaatgcaggcccttgcagaaaaaaaaatgcaagagttg

SEQ ID NO: 528093 - DNA, 120 bp, Artificial Sequence
  ENSG00000166037_7 (sequence is synthesized)
gaagcaaaactccatgaagaagaacaggaaaggaaacgcatgcaagctaaggcagctgagttgcagactggtctagaaacaaatagacttatctttgaagataaggcaactccgtgtgtt

SEQ ID NO: 528094 - DNA, 120 bp, Artificial Sequence
  ENSG00000166037_8 (sequence is synthesized)
cccaatgcaagaagaattaaaaaaaagaagtcaaaaccaccagaaaagaaaagttctaggaactattttggtgcacaaccacattatagattatgcttgggtgatatgccatttgtagct

SEQ ID NO: 528095 - DNA, 120 bp, Artificial Sequence
  ENSG00000166037_9 (sequence is synthesized)
gggaagtccacaagccctagccatgccgtggtagccaatgttcagcttgtcttgcatctaatgaagcaacacagtaaagctttgtgcaatgatcgagtcatcaacagtattcctttggca

SEQ ID NO: 528096 - DNA, 120 bp, Artificial Sequence
  ENSG00000166037_10 (sequence is synthesized)
aagcaagtatcttcacgaggtggtaaaagtaagaagttgtcagtaacacctccctcctccaacggtattaatgaggagttgtcagaagtcttacagactttacaggatgaatttgggcaa

SEQ ID NO: 528097 - DNA, 120 bp, Artificial Sequence
  ENSG00000166037_11 (sequence is synthesized)
atgagctttgatcaccagcagcttgcaaaacttatccaggagtcgccaaccgttgaactgaaagacaagttggagtgtgaattggaggcattagtgggaaggatggaagcaaaagccaac

SEQ ID NO: 528098 - DNA, 120 bp, Artificial Sequence
  ENSG00000166037_12 (sequence is synthesized)
caaataactaaagttcgaaaataccaagcccagctggagaaacagaagttagagaagcagaagaaggaattaaaagctaccaaaaagactcttgatgaagaaagaaacagcagcagccgt

SEQ ID NO: 528099 - DNA, 120 bp, Artificial Sequence
  ENSG00000166037_13 (sequence is synthesized)
aataagaaagattttatgaaactgagacctggagaaaaaaggagaaaaaatcttcagttattgaaggacatgcaaagcatacagaattcattacaaagcagtagtttgtgttgggattac

SEQ ID NO: 528100 - DNA, 120 bp, Artificial Sequence
  ENSG00000166037_14 (sequence is synthesized)
tgactcataaccaggtcagaaattttattcagataatctgtacctcatcaatcagatgatgacaatttacttcccaggtctcatactcacttatgttggaattaattaatagcaggtgtt

SEQ ID NO: 528101 - DNA, 120 bp, Artificial Sequence
  ENSG00000166037_15 (sequence is synthesized)
aaaggacccaggcttcattacacaggcttttcatgtatgcaggatgactcaatgttaaagcatttaaatggaaaccaggggagttttaaagcccgagaaaccacacataatcttttgttg

SEQ ID NO: 528102 - DNA, 120 bp, Artificial Sequence
  ENSG00000166037_16 (sequence is synthesized)
agatgagtttgctgtactgacgctgcactttgtaaacagattaccagttttttacttgtgggtgtgattttttaaaatagttctttatatataattaaaattaggtttaaattttcaaaa

SEQ ID NO: 528103 - DNA, 120 bp, Artificial Sequence
  ENSG00000166037_17 (sequence is synthesized)
tatgagactatgctataggcagtgcttgcttgaaaagtctcatttttaaatctccctggcatgaggtgcccacttcccctttccaaagcaaccattaaacatactttgtttctactattg

SEQ ID NO: 528104 - DNA, 120 bp, Artificial Sequence
  ENSG00000166037_18 (sequence is synthesized)
gtggagtttttctatatttaaaaatacatatatatttcagaggatttttattttgctttttggcatttcagactttgatcagtgttaagtgcacttgtattgctttttaatctgttaatt

SEQ ID NO: 528105 - DNA, 120 bp, Artificial Sequence
  ENSG00000166037_19 (sequence is synthesized)
ttttaaagacccaagcagtcattttgagttatatctataaaaattataaaaggatttttgaaagtataaacaaattgtcagtgaaataaatgagattttggaataaagtgagaatgggag

SEQ ID NO: 528106 - DNA, 120 bp, Artificial Sequence
  ENSG00000166037_20 (sequence is synthesized)
aagggatatgttgtgagcatataccttcacagttcttaatacctgttttgtaatcatgatattcagtcaaggcattatggtttttaatcttgaaacttagagaaccctttgaatatttgc

SEQ ID NO: 528107 - DNA, 120 bp, Artificial Sequence
  ENSG00000166037_21 (sequence is synthesized)
ttttactggtgtacagtatgagtggaatataaactgtacacataattatcatgttgatataaatcataatttcaactagatcaagacatgttaaccttttataaatttaaagtcaataaa

SEQ ID NO: 528108 - DNA, 120 bp, Artificial Sequence
  ENSG00000166037_22 (sequence is synthesized)
gcacctttttaaaggaaacactgcaactttccttaacagcctgttaataaaggctttgtgacaagctctcaaaaaatgcatttctaaataggaggacatcaatgtattgatgaagagaaa

SEQ ID NO: 528109 - DNA, 120 bp, Artificial Sequence
  ENSG00000166037_23 (sequence is synthesized)
aaactagtacttagttgccacactcatgcttacatagaaagagagcccaagaatattagatttcctcatgatacaagatactacagtaacaggctttaatttaggatccttaagattttg

SEQ ID NO: 528110 - DNA, 120 bp, Artificial Sequence
  ENSG00000166037_24 (sequence is synthesized)
gggtattatttgtgactctcctgaaattgtaaacttgtgcttctgtgtccagttttctaatgagtaggttcgtagcttgattgaattaataattgtgagcccatagacacaagggaagtg

SEQ ID NO: 528111 - DNA, 120 bp, Artificial Sequence
  ENSG00000166037_25 (sequence is synthesized)
agaaacagtgctctggtgacatgataaatatatgtgtcaaccaccatttcagctattaaaaactcctgttatctccttgtttgaatttcaggtcattaaattgtataaccatcatttgaa

SEQ ID NO: 528112 - DNA, 120 bp, Artificial Sequence
  ENSG00000166037_26 (sequence is synthesized)
aaaggtctgcggtcgcggctatttctaacagccagtcccaggtttggctgagagcgccccaatccaattgagcaaatgttcgcgaaaggctcgttctctgccgcaactttttttcccttg

SEQ ID NO: 528113 - DNA, 120 bp, Artificial Sequence
  ENSG00000166037_27 (sequence is synthesized)
agaaaaggtgtgaagacagaaccaaatcaggcaaaatgctgattacttggtatagtttatgtcaaaacacccataaactgtgtggtgtactacaaccttgagagagtaaatctttcattc

SEQ ID NO: 528114 - DNA, 120 bp, Artificial Sequence
  ENSG00000166037_28 (sequence is synthesized)
taaatttttatcctgatagtgagaaaatatataagcattttggaactacagaacaccatacaaaattagcattattagtactgcattatcttgtgctcttacaatgttttgtgtatatgt

SEQ ID NO: 528115 - DNA, 120 bp, Artificial Sequence
  ENSG00000166037_29 (sequence is synthesized)
atactgattttctacttagaatgtaactgttgttttgtcaagtgcttttttccccccagcctttcctaggctaggatatatgctaacaagtactattaggagctggcttgtgatcataat

SEQ ID NO: 528116 - DNA, 120 bp, Artificial Sequence
  ENSG00000166037_30 (sequence is synthesized)
gccaactatagataaggcaagtagtagcctagtagttaactgaagtttcaagttagtcatgtatagtcagtttttattatcatgtgaataaaataaaattgttttccttttcttttcatt

SEQ ID NO: 528117 - DNA, 120 bp, Artificial Sequence
  ENSG00000166037_31 (sequence is synthesized)
cagaaaagttctaggaactattttggtgcacaaccacattatagattatgcttgggtgatatgccatttgtagctgggaaggtgagttggtcaaactccggattctttttatacaacatt

SEQ ID NO: 528118 - DNA, 120 bp, Artificial Sequence
  ENSG00000166037_32 (sequence is synthesized)
gatccctgaattaagtccctgcatctgcaagtatgtctacaaatggaaggaacatttttctgtgcctttaccagtgtgtggatcacagtgatgtgaaaatgagatgtagggaggtttttg

SEQ ID NO: 528119 - DNA, 120 bp, Artificial Sequence
  ENSG00000166037_33 (sequence is synthesized)
gggattagggaagcaaggaagagatggggaggataccttaaagtagataaagtatatgtggaaaggaagtgataaaacagagaccctaagttgaagaaggtgttgtttcagataggggtc

SEQ ID NO: 528120 - DNA, 120 bp, Artificial Sequence
  ENSG00000166037_34 (sequence is synthesized)
aaggaaataagaaatagtatgtttgtagcattggatttttagtatcaatcctgttgagttacatttagatataggtagatattcgaataagcacgtagcacattctgcttgtcctcacat

SEQ ID NO: 528121 - DNA, 120 bp, Artificial Sequence
  ENSG00000166037_35 (sequence is synthesized)
ccagatcatttctaggactaattctccaagaagcagtcatacgtacacttgaatcttcagtttcttcagcacttgaatgtaaagctgtattgtcatatatcaagtactgagtgaagtgcc

SEQ ID NO: 528122 - DNA, 120 bp, Artificial Sequence
  ENSG00000166037_36 (sequence is synthesized)
taaaactgtgctagttgacactactttataagctgtttgtgttgctggtggttttatatttagattccaactagattgttattctggcatcttgggaagtaaatgttcttctgaattttg

SEQ ID NO: 528123 - DNA, 120 bp, Artificial Sequence
  ENSG00000166037_37 (sequence is synthesized)
tgtgtctttttattgttaacatatatcagggtggtttttttttaatgttaattattttacatcactggatatttatagcattaaaagtgatcttataatgaagaaatatattggagtttt

SEQ ID NO: 528124 - DNA, 90 bp, Artificial Sequence
  ENSG00000166037_38 (sequence is synthesized)
tgtaatcccactgtaatcccagtggctgagccactgcgcccagcctgcttttgacttttacgacatcgacccttctatgatacatcactg

SEQ ID NO: 528125 - DNA, 120 bp, Artificial Sequence
  ENSG00000166037_39 (sequence is synthesized)
ttgacttttacgacatcgacccttctatgatacatcactgaaactaaaacaaatggtggaagaattggtatctcatagaaacatttttagagaaatgaaaaagcagaaaagtcaagacaa

SEQ ID NO: 528126 - DNA, 120 bp, Artificial Sequence
  ENSG00000166037_40 (sequence is synthesized)
attatagtgtatttctgtaaagttacacagaatgtgctagcctctcctgcctccccctccacttcttctgcctctgccactcctgagacagcaagaccaaccctacccttctgcctactc

SEQ ID NO: 528127 - DNA, 120 bp, Artificial Sequence
  ENSG00000166037_41 (sequence is synthesized)
aacagtgaagataatggggatgaaggcctgtatggtgatccagttaatgaatagtaaatatactttctcttccttaggattttcttaatatttttttctaactttacttttagaatattg

SEQ ID NO: 528128 - DNA, 120 bp, Artificial Sequence
  ENSG00000166037_42 (sequence is synthesized)
cttacaatacataaaacaaaaatgcttccagtcaacagcaggctattacattttagggcaaaatttattatagttctcagttacataagtgggagctgaatgatcagaacccatggacac

SEQ ID NO: 528129 - DNA, 120 bp, Artificial Sequence
  ENSG00000166037_43 (sequence is synthesized)
atagtggggaacaacatacactggagcctgtttggtgggggagttggtcaacggggagggagagcatcaggaagagtacctaatggatgctggggttaatacctaggtgatgggttgatc

SEQ ID NO: 528130 - DNA, 120 bp, Artificial Sequence
  ENSG00000166037_44 (sequence is synthesized)
aaaccaccatgacacacatttacctatataacaaacctgcgcatgtacgccagaacttaaaagttgaaggaaaaaaaaatttcattatggcagagttttgactacatgggtggtcggtgc

SEQ ID NO: 528131 - DNA, 120 bp, Artificial Sequence
  ENSG00000166037_45 (sequence is synthesized)
gtcggtgcccctaacccctccattgttcaagggtcaagtgcatattaatataatcagaaaaataacagaacgagaattttttaaattattgcatattgaaagtgtactcataggcaatta

SEQ ID NO: 528132 - DNA, 120 bp, Artificial Sequence
  ENSG00000166037_46 (sequence is synthesized)
gtatgctaaatatatattacaagttacgagcaaaatagtggttacatcgattgatttttgaatagtggaccagccttgcattgatgtaataaactcccacttggatgtgatatataatac

SEQ ID NO: 528133 - DNA, 120 bp, Artificial Sequence
  ENSG00000166037_47 (sequence is synthesized)
gaaaacacaaatttccaaaccctaactctgcagtgagtttggtgtgctgcctaggaacctgcattttaaatatgctttctaataatatttatggagccaagtaagcccagccatctattt

SEQ ID NO: 528134 - DNA, 120 bp, Artificial Sequence
  ENSG00000166037_48 (sequence is synthesized)
ataaagtggaatagtacattgagattgttggtttagtgtttaaaacaaaagcaaaatatctttgagaagtctatcaggtttttcttacacacgtgatagacatgtaatttagtgcttcct

SEQ ID NO: 528135 - DNA, 120 bp, Artificial Sequence
  ENSG00000166037_49 (sequence is synthesized)
attattccaggatacagaaatgaacaatagtgtctaccacctggatgtacactgtttaataggtgaaatagatatgtaaaagcaattaaaatatgataaatgctatgagagagatgtaaa

SEQ ID NO: 528136 - DNA, 120 bp, Artificial Sequence
  ENSG00000166037_50 (sequence is synthesized)
aagtgttataggtgatctgataatggactgattgattacctggcagttttaaggaagcctttaaaaataatatatttgaactgggttttaaagaatgatataaatgttgctaatacacca

SEQ ID NO: 528137 - DNA, 120 bp, Artificial Sequence
  ENSG00000166037_51 (sequence is synthesized)
aaaaaatgtcatctgcaaatatggtttgttcacaaaatggagagaaggggaggatgataggacatgaggctaggaaatgtaggttgcagctcaatgatgtgtatgtagggccttattttc

SEQ ID NO: 528138 - DNA, 120 bp, Artificial Sequence
  ENSG00000166037_52 (sequence is synthesized)
cattctgaaacatagttagtggatttatatcaaaggatttcaaatagaagaacatcatgatgagaataattttaggatttatatactctactttagggggtggagagttctttttaccta

SEQ ID NO: 528139 - DNA, 120 bp, Artificial Sequence
  ENSG00000166037_53 (sequence is synthesized)
acacacagatacagagggcttaccgtgtatgctttctaccctcagtcagctttcagttctcattggagagaattagacttaaatatttgagcaatcatacaacagtatttgagaagatgt

SEQ ID NO: 528140 - DNA, 120 bp, Artificial Sequence
  ENSG00000166046_0 (sequence is synthesized)
ggttttgtgatggccgcgccgtggctgcctccctagagtccctcagggccctttaaataccgcgttgggggggacactggggctgggggggtttgttgggctggtgagttttcgaggtga

SEQ ID NO: 528141 - DNA, 120 bp, Artificial Sequence
  ENSG00000166046_1 (sequence is synthesized)
ctgtgctgtgctcggtgaggggacgcccagagagccctgacccggggtcactccgtcgccgttctcctcttgtctacgtgctggacccggtgctacctttttacccacacttaagtgacg

SEQ ID NO: 528142 - DNA, 120 bp, Artificial Sequence
  ENSG00000166046_2 (sequence is synthesized)
caaaatgcccttcaatggcgagaagcagtgtgtgggagaggaccagccaagcgattctgattcttcccggttttccgaaagcatggcttcgctcagtgactatgaatgctccaggcagag

SEQ ID NO: 528143 - DNA, 120 bp, Artificial Sequence
  ENSG00000166046_3 (sequence is synthesized)
ctttgcaagtgactcctccagcaaatccagctctcctgcttcaacaagccctccaagggttgtaacatttgatgaagtgatggctacagcaaggaacttatcaaacttgactcttgctca

SEQ ID NO: 528144 - DNA, 120 bp, Artificial Sequence
  ENSG00000166046_4 (sequence is synthesized)
tgagattgctgtaaatgagaactttcaattgaaacaagaggctctcccagaaaagagtttggctggtcgagtgaagcacattgttcaccaggccttctgggacgtcttggattcagaact

SEQ ID NO: 528145 - DNA, 120 bp, Artificial Sequence
  ENSG00000166046_5 (sequence is synthesized)
aaatgctgaccctcctgagtttgaacatgccatcaaactgtttgaagaaatcagagagattcttctctcttttctcactcccggtggcaaccggcttcgcaaccaaatctgtgaagtttt

SEQ ID NO: 528146 - DNA, 120 bp, Artificial Sequence
  ENSG00000166046_6 (sequence is synthesized)
ggacacagacctcattaggcagcaggctgagcacagtgctgttgacatccaaggcctggccaactatgtcatcagtacgatgggaaagctgtgtgctcccgtgcgagataatgatatcag

SEQ ID NO: 528147 - DNA, 120 bp, Artificial Sequence
  ENSG00000166046_7 (sequence is synthesized)
agagttaaaggctactggcaacatcgtggaggtgctgagacaaatattccatgtcctggacctcatgcaaatggacatggccaattttacaattatgagtctcagaccgcaccttcaacg

SEQ ID NO: 528148 - DNA, 120 bp, Artificial Sequence
  ENSG00000166046_8 (sequence is synthesized)
ccagttggtggaatatgagagaaccaagttccaggaaattttggaagaaactccaagtgctcttgatcagactacagaatggataaaagaatctgtaaatgaagaattattttctctttc

SEQ ID NO: 528149 - DNA, 120 bp, Artificial Sequence
  ENSG00000166046_9 (sequence is synthesized)
accagagacacttatgacagatggagcacgtcttcaggaactaacagaaaagctgaatcaattgaaaattattgcctgcctgtccctaattaccaacaacatggtgggtgctattacagg

SEQ ID NO: 528150 - DNA, 120 bp, Artificial Sequence
  ENSG00000166046_10 (sequence is synthesized)
aggcctgcctgagcttgcaagcaggttaacaaggatttcagctgttctacttgaaggcatgaacaaagagacctttaacttgaaggaagtcctgaattctattggtattcagacttgtgt

SEQ ID NO: 528151 - DNA, 120 bp, Artificial Sequence
  ENSG00000166046_11 (sequence is synthesized)
tgaggttaacaagaccctgatggaaagaggtttacccactttaaatgctgagattcaagctaatcttataggtcaattttcaagcattgaagaggaggacaatcctatctggtccttgat

SEQ ID NO: 528152 - DNA, 120 bp, Artificial Sequence
  ENSG00000166046_12 (sequence is synthesized)
tgataaacgaattaagctttacatgagaaggctactttgtcttccaagccctcaaaaatgcatgcctcctatgccaggaggcctagctgtcattcagcaggagctagaagccctaggctc

SEQ ID NO: 528153 - DNA, 120 bp, Artificial Sequence
  ENSG00000166046_13 (sequence is synthesized)
tcaatatgcaaacattgtgaatctcaacaaacaagtgtatggaccattttatgcaaatatacttcgaaagctgctcttcaatgaggaagccatggggaaggtagatgcttcacctcctac

SEQ ID NO: 528154 - DNA, 120 bp, Artificial Sequence
  ENSG00000166046_14 (sequence is synthesized)
taactaaagaagaactgacattggacgagagattggaaatccagtactttggtatccagtccacttccattgatggcattagagatccagcacattctcagtactgtggtgcagtattag

SEQ ID NO: 528155 - DNA, 120 bp, Artificial Sequence
  ENSG00000166046_15 (sequence is synthesized)
cccaaatctgtgtaatgggtaatattagcattacagaagacacacacatcacatagaccctcagaagacgtaaacatcacatagaccctatttgtgcatcattttcaagtttaaaacaaa

SEQ ID NO: 528156 - DNA, 120 bp, Artificial Sequence
  ENSG00000166046_16 (sequence is synthesized)
tatttgtaatgaacagaaaacaatttgtaattaattatattacctatataatacttgtaaatgttttcttaaccatttatatttggcttatgacatttaacccctaaggagttgtttttc

SEQ ID NO: 528157 - DNA, 120 bp, Artificial Sequence
  ENSG00000166046_17 (sequence is synthesized)
tcacttgttattatcaaacctaatggtttttaattttggtacaactccttaaagggttgaaggttgtgacaataactgagggaactgatgttctgaataaatgatgtgaagtaaacacaa

SEQ ID NO: 528158 - DNA, 120 bp, Artificial Sequence
  ENSG00000166046_18 (sequence is synthesized)
aaggcggggtcaggggccatcaagctcggctcctagttcatgtcttcccactccgcgtccccttgtttgacctcgaactgccgtcccgcgtgggagcggggagcggggcaccgagtggcc

SEQ ID NO: 528159 - DNA, 120 bp, Artificial Sequence
  ENSG00000166046_19 (sequence is synthesized)
gggtgaggtcgtgcagactgctgctgcgtccccttgccgggacctttggttaaggggaagaggtggagaaaagccgattgggcctgggctcgaacgctgaaccctcaggtgttgcttgtg

SEQ ID NO: 528160 - DNA, 120 bp, Artificial Sequence
  ENSG00000166046_20 (sequence is synthesized)
cttcccaaagctgctactgtaggtggcaccactgggggtaatagcaatgatttgaggtggcatatggatgaacatagttacttgttttcgttactattaagaaaatctgttccattaagt

SEQ ID NO: 528161 - DNA, 120 bp, Artificial Sequence
  ENSG00000166046_21 (sequence is synthesized)
aagcagtttcacaatgatagagtttccttttaaaataaatatatttaaatgcaaaaatctagtcaagatagagacgcggttactaaattatagtaaaggtaaggagggagacgtagaaat

SEQ ID NO: 528162 - DNA, 120 bp, Artificial Sequence
  ENSG00000166046_22 (sequence is synthesized)
agtcatgaagagtggcactcaaacgacttaagtttgggaaatcttagatggttgtcctgctaccttaactgtgaagaaactggacaagttgtccttgtccccagtgggtgtctcagcacc

SEQ ID NO: 528163 - DNA, 120 bp, Artificial Sequence
  ENSG00000166046_23 (sequence is synthesized)
ctctcttctctagggatttcatgcatcaccctgacagccagtggaagttgcctgatttgaagaggcccagggccgaagatacccagtcatgtgtggaagcagcttcaatgccattttgtg

SEQ ID NO: 528164 - DNA, 120 bp, Artificial Sequence
  ENSG00000166046_24 (sequence is synthesized)
taaaggttaaaatgaaaattaggtgatgttttcatttttgacttcatatatagtatcactaaagaattttggcctttctattaaacatttttttaccttccaaaattgacatcacaaact

SEQ ID NO: 528165 - DNA, 120 bp, Artificial Sequence
  ENSG00000166046_25 (sequence is synthesized)
tacagttgtttattctgtccaggaactgtgctaagcactattcgtttcttcattcattcaagatatatttattgagtgcctcctgtgtttcagacactgcttaggtgcagtggatactgc

SEQ ID NO: 528166 - DNA, 120 bp, Artificial Sequence
  ENSG00000166046_26 (sequence is synthesized)
agcgaacagaatggaatacagttgccgtccccaaggagctgacattctagtaggcatgacaaataaataaacatatattgtcaggtgtattattaagtgctatgaagaaaaataggataa

SEQ ID NO: 528167 - DNA, 120 bp, Artificial Sequence
  ENSG00000166046_27 (sequence is synthesized)
agggacagtaatgggtcagaagtgaggacagcattgttttttagatgtgatggactgggaaggtctctgtaagtaacatttgagtaaagtttgcaaagaaatgaggaaggggcatgtaaa

SEQ ID NO: 528168 - DNA, 120 bp, Artificial Sequence
  ENSG00000166046_28 (sequence is synthesized)
aacacagggcagacattgtgacgggagtagagttggtaaggggagagtggtaagagatgaggctgaaaaggagataaaggcaggtcacatagagcattgttagtaaatgagaggagtttg

SEQ ID NO: 528169 - DNA, 120 bp, Artificial Sequence
  ENSG00000166046_29 (sequence is synthesized)
gatttcattccatgtgcggtggaaactcatcagagagttttaatcaggggagcaacatctgattttcatttttgaagaatattcttgttcctggctacagaataggtcatgtgggaacaa

SEQ ID NO: 528170 - DNA, 120 bp, Artificial Sequence
  ENSG00000166046_30 (sequence is synthesized)
agagggaaacagaggtaccaattaggtggtattacagttgctcaggcaagaaatgatggtggcttgttccagatggtaatggtggaaggagtgagaagagaccagattctggatacattt

SEQ ID NO: 528171 - DNA, 120 bp, Artificial Sequence
  ENSG00000166046_31 (sequence is synthesized)
tgaaagtggagtaatcagatttgctgaagattggataagggagaaaagagttgagggtgactctaaggtttttggcctcgtacaaccgggtgaatggtcatacagtttgagtgaaactgg

SEQ ID NO: 528172 - DNA, 120 bp, Artificial Sequence
  ENSG00000166046_32 (sequence is synthesized)
tgagaccaggagaaagaaggttgggagatgacatggaatcaagagttcagtttggtgatgtaaacttttgagatttcatttgacatcaatgtggagatgttaggtaggcatttagatatg

SEQ ID NO: 528173 - DNA, 120 bp, Artificial Sequence
  ENSG00000166046_33 (sequence is synthesized)
aattatgagtttacaggaataatggaaactgtatatgtatttgggaatcatcagtatatgtatgatatataaagccatggaactgggtactagttaacacttagaaaatccttatcacac

SEQ ID NO: 528174 - DNA, 120 bp, Artificial Sequence
  ENSG00000166046_34 (sequence is synthesized)
tctaagtactttacctgtacaaactaatttaatccttgcaacaactatatgaagttaccccccattttatgggtgcggaaactgaggcactgtgaggttaagtcactggcctatgtaaca

SEQ ID NO: 528175 - DNA, 120 bp, Artificial Sequence
  ENSG00000166046_35 (sequence is synthesized)
cacttaaaagtataggagctcacctaggaaggcagcttggctccatagtccatgttcctgtccattatattacactgggtgagactacctagggggagtgagtgtggactctgaaagaaa

SEQ ID NO: 528176 - DNA, 120 bp, Artificial Sequence
  ENSG00000166046_36 (sequence is synthesized)
ctgacgtggggcactccagcagctagaagctgaagttgagatgaggaggagggtctaacaatggagactatgagggagtagccagagaggtagtgtgacagtcaggagaggcgggtgtcc

SEQ ID NO: 528177 - DNA, 120 bp, Artificial Sequence
  ENSG00000166046_37 (sequence is synthesized)
tgtaagatacgtgaagaaggtatttggagaaggaaggcatgtttggatttgacaagcattgctaagtggtcaagaaagacacaggccaacttgaccattggatttgactgtttgatgatg

SEQ ID NO: 528178 - DNA, 120 bp, Artificial Sequence
  ENSG00000166046_38 (sequence is synthesized)
gccaacttgaccattggatttgactgtttgatgatggtcagtaaccttgatgagagtggtttcagtggatttgtgtgcattaaagccagactgggcagggcacagtggctcacacctgta

SEQ ID NO: 528179 - DNA, 120 bp, Artificial Sequence
  ENSG00000166046_39 (sequence is synthesized)
accagcctggccaacatgctgaaaccccttctctactaaaatctaaaaattagccgggatgatggcaggtgcctgtaatcccagctgctcgggaggttgagatgggagaatcgcttgaac

SEQ ID NO: 528180 - DNA, 120 bp, Artificial Sequence
  ENSG00000166046_40 (sequence is synthesized)
gatgggagaatcgcttgaacccaggagatggtggttgcagtgagccaaggtcgcatcattgcactccagcctggggggctgagcaagactccgtctcggaaaaaaaaaaaaaaaaaaaaa

SEQ ID NO: 528181 - DNA, 120 bp, Artificial Sequence
  ENSG00000166046_41 (sequence is synthesized)
tcttactgcatgaagcctttctggaaagacttttggatatcactggattattggaccaaagtatatagacatttttaaggagaatcttgagtcagacctggcaaaagaaattaacagcag

SEQ ID NO: 528182 - DNA, 120 bp, Artificial Sequence
  ENSG00000166046_42 (sequence is synthesized)
ccaccccagcaacaagccctccaagggttgtaacatttgatgaagtgatggctacagcaaggaacttatcaaacttgactcttgctcatgagattgctgtaaatgagaactttcaattga

SEQ ID NO: 528183 - DNA, 120 bp, Artificial Sequence
  ENSG00000166046_43 (sequence is synthesized)
tgtgactccaaggagctaatcgtcccgtgcaggtgctacctttttacccacacttaagtgacgcaaaatgcccttcaatggcgagaagcagtgtgtgggagaggaccagccaagcgattc

SEQ ID NO: 528184 - DNA, 120 bp, Artificial Sequence
  ENSG00000166046_44 (sequence is synthesized)
ctggtgagttttcgaggtgactgtgctgtgctcggtgaggggacgcccagagagccctgacccggggtcactccgtcgccgttctcctcttgtctacgtgctggacccgggatttcatgc

SEQ ID NO: 528185 - DNA, 120 bp, Artificial Sequence
  ENSG00000166046_45 (sequence is synthesized)
ctttacctttgaccagtgattaaatcctccaggtgctacctttttacccacacttaagtgacgcaaaatgcccttcaatggcgagaagcagtgtgtgggagaggaccagccaagcgattc

SEQ ID NO: 528186 - DNA, 120 bp, Artificial Sequence
  ENSG00000166046_46 (sequence is synthesized)
aaagccgaggttgcaggtgcctcatgaggctgaccttgcttttggaaccagagagagcagtcaccgtgccagcctgtgagagtgaagtctctgccgatccctaagagaagagccaacgtt

SEQ ID NO: 528187 - DNA, 120 bp, Artificial Sequence
  ENSG00000166046_47 (sequence is synthesized)
tcactctaaacgcatgctccttctgctttaccggtcattctcaagtctgactacaaattagaatcatctggggcgtttaaacacagaggcctgagccctgcctcagacagaataaatcaa

SEQ ID NO: 528188 - DNA, 120 bp, Artificial Sequence
  ENSG00000166046_48 (sequence is synthesized)
agtctccaggagctgtgcccatgaactctttttttcctttttaaagctccccaggtgattctaaagtcagccaggattgagaaccactatgccacactgttgcttttgttcaaggtaact

SEQ ID NO: 528189 - DNA, 120 bp, Artificial Sequence
  ENSG00000166046_49 (sequence is synthesized)
aaatgggctcttaaatgtgtcagctgtaaatgattaaacttgcagtataaatgcttattactgccacattgtaattatattcacgatgatttccactcgcgctctctcagttggatgtct

SEQ ID NO: 528190 - DNA, 120 bp, Artificial Sequence
  ENSG00000166046_50 (sequence is synthesized)
tttaaatgaaagactgcaagtcttttacatctttataaaacagaactagcaaaccaaaaacaacatttgccaactgaggagaaacaagagttgtgaaattctgggggtggtgttgcttta

SEQ ID NO: 528191 - DNA, 120 bp, Artificial Sequence
  ENSG00000166046_51 (sequence is synthesized)
gtgtggcaaacagaactactcataaattatccctgctcaagtgctgggtccaagaagaatttcagtctctctctactctgcacctgtgttcaggctgtatttcttggcaattgtcacctt

SEQ ID NO: 528192 - DNA, 120 bp, Artificial Sequence
  ENSG00000166046_52 (sequence is synthesized)
ataaattctaccaaatgtataattgtataagaactgtggtataaaaagcaatttgtttctagtgggaaaccttagaactgggcctaaagcaaaataaagtgaattttgtcctaaggcaga

SEQ ID NO: 528193 - DNA, 120 bp, Artificial Sequence
  ENSG00000166046_53 (sequence is synthesized)
agaactgtgctaagcactattcgtttcttcattcattcaagatatatttattgagtgcctcctgtgtttcagacactgcttaggtgcagtggatactgcagcgaacagaatggaatacag

SEQ ID NO: 528194 - DNA, 120 bp, Artificial Sequence
  ENSG00000166049_0 (sequence is synthesized)
gcactctggggcccacgcacttccctgaagagtctagaagctgctcctcatttccagactttccgggcgcccaccaggctcccgggctctcaccggagaccacagggaggagcttcaagg

SEQ ID NO: 528195 - DNA, 120 bp, Artificial Sequence
  ENSG00000166049_1 (sequence is synthesized)
taccccaagtccctgcggcctccagcagtgaagagttccacaagggagtcttcctacgtcactgaataatgaatgaagatgagaggggaaaagagaagagacaaagtcaatccaaaaagc

SEQ ID NO: 528196 - DNA, 120 bp, Artificial Sequence
  ENSG00000166049_2 (sequence is synthesized)
tctcaaaggaaattaaactggattccatcatttcctacctatgattacttcaaccaagtgacgctacagttattagatggctttatgattacactgagcacagatggagtgatcatttgt

SEQ ID NO: 528197 - DNA, 120 bp, Artificial Sequence
  ENSG00000166049_3 (sequence is synthesized)
gtggctgaaaacatctcttctcttcttggacatttaccagctgagattgtgggcaaaaaattattaagccttctgcctgatgaagagaaagatgaagtctaccaaaagattattctcaaa

SEQ ID NO: 528198 - DNA, 120 bp, Artificial Sequence
  ENSG00000166049_4 (sequence is synthesized)
tttcctttactaaactcagaaacacatattgaattttgctgtcatttaaaaagaggaaatgtcgaacatggtgatagttctgcttacgaaaacgtgaaatttattgtgaatgtaagagat

SEQ ID NO: 528199 - DNA, 120 bp, Artificial Sequence
  ENSG00000166049_5 (sequence is synthesized)
atttgtaatgagtttcctgtggtctttagtggcttgttttccagccacctctgtgctgactttgctgcatgtgttcctcaggaggatcggctttatcttgtgggaaatgtttgcattctc

SEQ ID NO: 528200 - DNA, 120 bp, Artificial Sequence
  ENSG00000166049_6 (sequence is synthesized)
aggactcagctcctgcagcaactttacacttcaaaggcagtcagtgatgaagctgtacttacacaagattcagatgaggaaccttttgtgggagagctcagtagctctcaaggtcaaaga

SEQ ID NO: 528201 - DNA, 120 bp, Artificial Sequence
  ENSG00000166049_7 (sequence is synthesized)
ggacacactagcatgaaagccgtgtacgttgaacccgctgctgctgctgctgctgctgctatctcagacgaccaaattgatattgcagaggttgagcagtatggaccacaagaaaacgtt

SEQ ID NO: 528202 - DNA, 120 bp, Artificial Sequence
  ENSG00000166049_8 (sequence is synthesized)
cacatgtttgtagattctgattcaacttattgctccagtacagttttcctggatactatgcctgaatctccagccttatccttgcaagactttcgaggtgagcctgaggtgaatccattg

SEQ ID NO: 528203 - DNA, 120 bp, Artificial Sequence
  ENSG00000166049_9 (sequence is synthesized)
tacagggcagacccagtggacctggagttctcggtggatcaggtggactcagtggaccaggagggcccaatggaccagcaggacccagagaacccagttgccccgttggaccaggcaggc

SEQ ID NO: 528204 - DNA, 120 bp, Artificial Sequence
  ENSG00000166049_10 (sequence is synthesized)
ctgatggatccagtggatccagaggactcagtggacctgggggctgctggcgcaagtgctcagccattacagccatcatcaccagttgcatatgacatcattagccaggaactggaactg

SEQ ID NO: 528205 - DNA, 120 bp, Artificial Sequence
  ENSG00000166049_11 (sequence is synthesized)
atgaagaagttgaaggagcagctagaagagaggacttggttgctgcatgatgccatccaaaaccagcagaatgcattggaattgatgatggatcaccttcagaagcagccaaacacatta

SEQ ID NO: 528206 - DNA, 120 bp, Artificial Sequence
  ENSG00000166049_12 (sequence is synthesized)
gtgtttctgtggtttatctttatccaactctctcaaaaacactggggagcttcaggagccttgtgttgccttcaaccagcagcaactggtgcagcaagaacaacacctgaaggagcagca

SEQ ID NO: 528207 - DNA, 120 bp, Artificial Sequence
  ENSG00000166049_13 (sequence is synthesized)
gcggcagctgcgggagcagctgcaacagctgagagagcaaaggaaggtgcagaagcagaagaagatgcaggagaagaagaagctgcaggagcagaaaatgcaggagaagaagaagctgca

SEQ ID NO: 528208 - DNA, 120 bp, Artificial Sequence
  ENSG00000166049_14 (sequence is synthesized)
ggagcagaggcggcaaaagaagaagaagctacaggagcggaagaagtggcaggggcagatgctacagaaagagccagaggaggagcagcagaagcagcagctgcaagagcagccactgaa

SEQ ID NO: 528209 - DNA, 120 bp, Artificial Sequence
  ENSG00000166049_15 (sequence is synthesized)
gcataatgtcatcgtggggaatgagagggtgcagatatgcctgcaaaacccacgtgacgtatctgtgcccctctgcaatcaccctgttagatttttacaggcccaacccattgttcctgt

SEQ ID NO: 528210 - DNA, 120 bp, Artificial Sequence
  ENSG00000166049_16 (sequence is synthesized)
ccagagagcagctgaacaacagccctctggcttctatcaagatgaaaactgtgggcaacaggaagatgagagtcaaagtttttatcctgaggcgtatcaagggccccccgtgaaccagct

SEQ ID NO: 528211 - DNA, 120 bp, Artificial Sequence
  ENSG00000166049_17 (sequence is synthesized)
gccattgatagatacctcaaactctgaggcaatttcttcttccagcattcctcagtttcccataacttcagactcaaccataagcaccctggagaccccacaggattacatccggctttg

SEQ ID NO: 528212 - DNA, 120 bp, Artificial Sequence
  ENSG00000166049_18 (sequence is synthesized)
gcaagagttgtctgattcactcggtcctgttgtccaagtgaacacttggtcttgcgatgagcagggcaccctgcacggccaacccacctaccatcaggtgcaagtttctgaggtaggagt

SEQ ID NO: 528213 - DNA, 120 bp, Artificial Sequence
  ENSG00000166049_19 (sequence is synthesized)
cgagggacctcctgatccacaggctttccaaggccctgctgcataccagccagaccagatgagatctgcggagcagaccagattgatgcctgcagagcaacgtgactcaaataagccgtg

SEQ ID NO: 528214 - DNA, 120 bp, Artificial Sequence
  ENSG00000166049_20 (sequence is synthesized)
ctaacagtactttcatgaccagtgatgaggggaaatggggggagggggcaggccaatgaggtctgcatggccaggggaccttcaaggtgcgtaaagtcccttggggtagggtttagtggg

SEQ ID NO: 528215 - DNA, 120 bp, Artificial Sequence
  ENSG00000166049_21 (sequence is synthesized)
tagagacttatttgtttcctgataggttatgtttgtaattgtttgttaagcacagcctgtttcttggaagttatgctgtagaggcagcctgtgatccgtagtatgctagggtgtgacagc

SEQ ID NO: 528216 - DNA, 120 bp, Artificial Sequence
  ENSG00000166049_22 (sequence is synthesized)
agccagccacagctggatctgatgtcttgtctgccccgcccagctttgcatatccatgttctaccacaggaaggtggcctgccaagagtctgctcaaagttttcaacataaagaataaag

SEQ ID NO: 528217 - DNA, 120 bp, Artificial Sequence
  ENSG00000166049_23 (sequence is synthesized)
aaaaaaaaatgccaaagtgcttttcaatctagtaaatctagagggttgttttgtcttagccacaagaattccgaggtcttgaccctgatgatcaacctgcctcccctccatagtcttgtt

SEQ ID NO: 528218 - DNA, 120 bp, Artificial Sequence
  ENSG00000166049_24 (sequence is synthesized)
ggagaagcccagagagaatgggactccaactaagggaacctgaaatcaactcaatggaggcacttcagagctaaaataattatggcttccttgcttaataaacattttcgttcactgcaa

SEQ ID NO: 528219 - DNA, 120 bp, Artificial Sequence
  ENSG00000166049_25 (sequence is synthesized)
gacatgcatggaatggtgatagtggctatgattattgcttttccctcatggctggatcccatgcctgagatcacagacagacgacctatccatgtggcaccagcgtccctctcatcaata

SEQ ID NO: 528220 - DNA, 120 bp, Artificial Sequence
  ENSG00000166049_26 (sequence is synthesized)
gcaacttgctctcaacttgccttctctgtggccacggccatcatccttctgcatgtgtggtgcatggatgagcatccattgatggaacaaaggggtacccatgaagaaaggactagataa

SEQ ID NO: 528221 - DNA, 120 bp, Artificial Sequence
  ENSG00000166049_27 (sequence is synthesized)
ggaagcctcaatgctagggaattagcccacaaaccttgaaatcacttggctggattccccaagcccagtctcttgcacagggtgtctatggacaagtcttgtgcccatagctgaaagact

SEQ ID NO: 528222 - DNA, 120 bp, Artificial Sequence
  ENSG00000166049_28 (sequence is synthesized)
tctgggcttccagtttcattccccaactttcctggaatctggtgatggcagtaggccaagtgcaggtatctccctggcatttatgaacagtaagagggaagtgagtgtgaaacaactgct

SEQ ID NO: 528223 - DNA, 120 bp, Artificial Sequence
  ENSG00000166049_29 (sequence is synthesized)
agattgctaagatcagccaagaacacatgaaggctaagtcctgagtggcaatatagggacatgaacacatttctgctcaataataaggtcttcagttccaaatgctagaaagataaggtt

SEQ ID NO: 528224 - DNA, 120 bp, Artificial Sequence
  ENSG00000166049_30 (sequence is synthesized)
cttctcagcaatgaaaggattgcttagcacatagttggggcccactaaatagttttgaatgaatgttagctttctgagacgggcctcctaaagctctctggacttccttctgggccttgc

SEQ ID NO: 528225 - DNA, 120 bp, Artificial Sequence
  ENSG00000166049_31 (sequence is synthesized)
tttcgaatcagtgactttgacatgaagactgctttagggccatattgtccacttgacctgatcatcagaatccacctgaggagggtttggaaagtatagattcagagtctgggatggggt

SEQ ID NO: 528226 - DNA, 120 bp, Artificial Sequence
  ENSG00000166049_32 (sequence is synthesized)
tcaaaaatctgtattgatcacaagacttccaggcttagggttgtggagagagcactggatttggagtttggaaatctgccttacagtctctgctcagccattagctccctgagtgctttc

SEQ ID NO: 528227 - DNA, 120 bp, Artificial Sequence
  ENSG00000166049_33 (sequence is synthesized)
aaagtaggtgaaatgactttccaaggccacagagagcatagttgtagcaggaacaagactgtccaagtaatataaataaaaccaggtgagacaagggattgtaatttctctcagtgtcta

SEQ ID NO: 528228 - DNA, 120 bp, Artificial Sequence
  ENSG00000166049_34 (sequence is synthesized)
cattcacattactttgacaagttgaatcttagtcaggccaaagtgagaatacaaacaagtgaatcctgtggtgtagccaccaaaaccaaatgtgcctgaagcacctactgatgaccacgt

SEQ ID NO: 528229 - DNA, 120 bp, Artificial Sequence
  ENSG00000166068_0 (sequence is synthesized)
gctgcgctccaccccagtggctggaggagcagctctccagtcagcctttgcagcccctctctttttccctttccaccgggcctcctcggatcccttggctgggcactgaggcgggggaag

SEQ ID NO: 528230 - DNA, 120 bp, Artificial Sequence
  ENSG00000166068_1 (sequence is synthesized)
aggctggggtcgccacggcggaggttgctgccgccacccccctgcgggggtggccggggttcccggctgggggggtaccgttctgggtgaggcatccaccatggtgaggcccctgtgccg

SEQ ID NO: 528231 - DNA, 120 bp, Artificial Sequence
  ENSG00000166068_2 (sequence is synthesized)
ctgcccccgcgcccccccggccgccgctgcctcctgcccctcggtgctgctgttgctcccccgcctgctgttgctcctccatctccagatcggatcacggtgagggaaagatgagcgagg

SEQ ID NO: 528232 - DNA, 120 bp, Artificial Sequence
  ENSG00000166068_3 (sequence is synthesized)
agacggcgacttctgacaacgataatagttatgcacgagtgcgagctgtggtgatgacccgagatgactcaagtggtggatggttaccacttggagggagtggactaagcagcgtcactg

SEQ ID NO: 528233 - DNA, 120 bp, Artificial Sequence
  ENSG00000166068_4 (sequence is synthesized)
tcttcaaagtccctcatcaggaagagaatggctgtgctgacttttttatccgtggagagcgactcagggacaaaatggtggttttggaatgtatgcttaaaaaagacctcatttataata

SEQ ID NO: 528234 - DNA, 120 bp, Artificial Sequence
  ENSG00000166068_5 (sequence is synthesized)
aggtcactccaacatttcaccactggaagattgatgacaagaagtttggtcttacgtttcaaagtcctgctgatgctagggcttttgatagaggtatccgaagagctatagaggatattt

SEQ ID NO: 528235 - DNA, 120 bp, Artificial Sequence
  ENSG00000166068_6 (sequence is synthesized)
ctcaaggatgccccgaatcaaaaaatgaagctgaaggggcagatgacttacaagcaaatgaagaggattcttccagttctctagtgaaggatcacctttttcagcaagagacagttgtta

SEQ ID NO: 528236 - DNA, 120 bp, Artificial Sequence
  ENSG00000166068_7 (sequence is synthesized)
ccagtgagccttatagaagctcaaatataagaccttctccctttgaagatctgaatgccagaagagtctacatgcaaagccaagccaatcagataacatttggtcagccaggcttggaca

SEQ ID NO: 528237 - DNA, 120 bp, Artificial Sequence
  ENSG00000166068_8 (sequence is synthesized)
ttcagagcagaagtatggaatacgtacagcggcaaatatccaaggaatgtggaagcctaaagtcccaaaatagggtccctttgaaatcaatcagacatgtcagctttcaagatgaggatg

SEQ ID NO: 528238 - DNA, 120 bp, Artificial Sequence
  ENSG00000166068_9 (sequence is synthesized)
agattgtcagaataaaccctcgagatatcttaatacgtcgctatgcagactacagacatcctgacatgtggaaaaatgacttggaaagagatgatgctgattccagtattcagttttcta

SEQ ID NO: 528239 - DNA, 120 bp, Artificial Sequence
  ENSG00000166068_10 (sequence is synthesized)
aaccagacagtaaaaaatcagactatctgtactcttgtggggatgagactaagttaagttcacccaaagactctgtggtatttaagacgcagccttcctcattaaaaattaagaagtcaa

SEQ ID NO: 528240 - DNA, 120 bp, Artificial Sequence
  ENSG00000166068_11 (sequence is synthesized)
aacgaagaaaagaggatggtgaacgttctcgctgcgtatactgccaggaaaggtttaatcatgaagaaaatgttaggggaaaatgtcaggatgctccagaccctattaaaagatgcatat

SEQ ID NO: 528241 - DNA, 120 bp, Artificial Sequence
  ENSG00000166068_12 (sequence is synthesized)
atcaagttagttgcatgctctgtgcagagagcatgttgtatcattgtatgtcagactcagagggagatttttctgatccctgttcgtgtgacactagcgacgacaagttctgcttgcgat

SEQ ID NO: 528242 - DNA, 120 bp, Artificial Sequence
  ENSG00000166068_13 (sequence is synthesized)
ggttagccctggtagctttgtctttcattgtaccatgtatgtgctgctacgtccctttgagaatgtgccatcgctgtggtgaggcatgtggttgctgtggtgggaaacataaagctgctg

SEQ ID NO: 528243 - DNA, 120 bp, Artificial Sequence
  ENSG00000166068_14 (sequence is synthesized)
gatgaaatggtccagtgccaaaatgagcttaaaatctttgtttccaggaattagctaacttggatttgtggaagcttttggcaagcaatatggaatcttgcctggtatcattgagcccac

SEQ ID NO: 528244 - DNA, 120 bp, Artificial Sequence
  ENSG00000166068_15 (sequence is synthesized)
acatggaggaagcagaactcatcagttcttggcgtttcacgccatgcctaacttttcccttgagtgcatggcatgttttgttacaggttgtagagtatttgcagaaggaaaccatttctg

SEQ ID NO: 528245 - DNA, 120 bp, Artificial Sequence
  ENSG00000166068_16 (sequence is synthesized)
gttatttggctataaaaagtcagcataaaatatgatccaactaaaagggattaatttttggcatttttgtatatttatgcattaggtgatgggacttttaaaggtttgaatttattagga

SEQ ID NO: 528246 - DNA, 120 bp, Artificial Sequence
  ENSG00000166068_17 (sequence is synthesized)
cacgaactaaaaataaaagtgcactaggggacagttgatttcaatctaagaaaagttaacacttgggaattacaagaagtaaaacaagtgcaactaaatcatttattagttgttttttga

SEQ ID NO: 528247 - DNA, 120 bp, Artificial Sequence
  ENSG00000166068_18 (sequence is synthesized)
ttttttgaaagcagttttatgtataaataacaaatgtttatatttaactaaatgtaaggtacgaattattacatattaaacttttcttccccttcctagttctgaagtagatatatatat

SEQ ID NO: 528248 - DNA, 120 bp, Artificial Sequence
  ENSG00000166068_19 (sequence is synthesized)
ctactgtcacattccatatattttgaatatttaactcatctagttaataatgtttttattccatgcgaatgatttgatattttcatccttatttctctttggctacaatttatattgagt

SEQ ID NO: 528249 - DNA, 120 bp, Artificial Sequence
  ENSG00000166068_20 (sequence is synthesized)
tatatctgtacattctggtaatctaaaatccttaaaaatactctaatagccttgagtgaccaactttttttttaaagcacagatgtaattgtctaatgttctgatgggaacgtaacactt

SEQ ID NO: 528250 - DNA, 120 bp, Artificial Sequence
  ENSG00000166068_21 (sequence is synthesized)
atttttatataaaaagagactgagtaaacaaacattatagaaaaaaagtgaagttttttagttgttttttgtggtattcaaccagcaagttgttttctttcagagtttcctccttcaaaa

SEQ ID NO: 528251 - DNA, 120 bp, Artificial Sequence
  ENSG00000166068_22 (sequence is synthesized)
agttatattgcatttacaaatgttttacaaggcagaaagtttgactggatagttagtgtaaaagcttcatgttgagatcttcacgtatcattctgctaaaccagaatatgttcagctgtg

SEQ ID NO: 528252 - DNA, 120 bp, Artificial Sequence
  ENSG00000166068_23 (sequence is synthesized)
ttactaatttttcagcttaatcctcagtgcttattatttacataacaataactttttatcagttacattttatttttatttaaactggccaaaagcaaaattattttatgttaaaatgtg

SEQ ID NO: 528253 - DNA, 120 bp, Artificial Sequence
  ENSG00000166068_24 (sequence is synthesized)
tgctaaactatcccaggaaagtatttaatccaacattgtaaatgaagtatcttgtacatataaatttatttcttttgcagagcattatattactggatgtttaatttacaaaatagttgg

SEQ ID NO: 528254 - DNA, 120 bp, Artificial Sequence
  ENSG00000166068_25 (sequence is synthesized)
gtaaatgttccaacaaactttaaagtaccttgaagtcaaattgtctgtttttgttttgttgttgttgttgttgttttcttaagtgttacattaaaactctaaccaaggaaagggttcttt

SEQ ID NO: 528255 - DNA, 120 bp, Artificial Sequence
  ENSG00000166068_26 (sequence is synthesized)
aagaacattcccttagagggataaagttgagaagtgtgccttttttttaatggcttgaagtttcagaggtgataaaaattaaaatcacactactatttgaagctcattttctatgcaggt

SEQ ID NO: 528256 - DNA, 120 bp, Artificial Sequence
  ENSG00000166068_27 (sequence is synthesized)
ttttaaacgtcatttatgtatcattctttttatatatcacacttaagcttgtgttagcttttttcttttgccccagatcaaactgaacaatgtatataacactatctgtctgtaaaatac

SEQ ID NO: 528257 - DNA, 120 bp, Artificial Sequence
  ENSG00000166068_28 (sequence is synthesized)
tttttttaagaaagcatttatatttatatgacagcttgaactgacaacattgtgtatatagatcatcttgaagtattatttcacattgaaaagaagaaaatatattgataactatagatg

SEQ ID NO: 528258 - DNA, 120 bp, Artificial Sequence
  ENSG00000166068_29 (sequence is synthesized)
ttatgaagaagagggtatttctagttttgtactaaaaatcaattggatgaactaaatccaaaacatgacactgtaggcagcagttttaagtcttatttttactgtttatatatttgaatg

SEQ ID NO: 528259 - DNA, 120 bp, Artificial Sequence
  ENSG00000166068_30 (sequence is synthesized)
tttcaaaatttttattggtgaaatggaaatactgtttttccttgtgaatgaattttcatatttgtaagtgctaagtttataattcaggtttgatcaaggtgtgaataactgaagaaaata

SEQ ID NO: 528260 - DNA, 120 bp, Artificial Sequence
  ENSG00000166068_31 (sequence is synthesized)
acttgctggctatataggaaaatgctgtggaaatgaactgtgtatatacttctgggaggaacaaatttaatcatttcttctgttaagcactaatcagtatagtgcaactcctggttctgt

SEQ ID NO: 528261 - DNA, 120 bp, Artificial Sequence
  ENSG00000166068_32 (sequence is synthesized)
actgtattttatatgcaacatatatgctttaatattttaatgtttgtgcattaatattttcaatttgtttaaccactttgctgctaagattttgccgtcccattcccattttttccttta

SEQ ID NO: 528262 - DNA, 120 bp, Artificial Sequence
  ENSG00000166068_33 (sequence is synthesized)
caattttaaacaagtttcttcattaaaaactatggtgatgaaatggtttttattttaccttggatctttatagttaacatacccagtttcttaatcagtctacaagactaactgatgata

SEQ ID NO: 528263 - DNA, 120 bp, Artificial Sequence
  ENSG00000166068_34 (sequence is synthesized)
taatgttctctgaatccctatatggaaattttcttttgagtaaatgagaattcctttgtgaaagcaaatgggtagtttaaatcactgattcttaaacatgtgtataggcaccttcaggaa

SEQ ID NO: 528264 - DNA, 120 bp, Artificial Sequence
  ENSG00000166068_35 (sequence is synthesized)
cattttctcattctctgtacagattcggcactgccaattggcttttcctctaaaacttttctttgtttttatctgatataagcagatggctcaagacaactgcttgagtaatagtattga

SEQ ID NO: 528265 - DNA, 120 bp, Artificial Sequence
  ENSG00000166068_36 (sequence is synthesized)
aaatggaatcatctagacggcatgacaagcaagactggtctgatgaacttgttcagaattgataattcttaaatatttctcttggcttcaaaagggacatcatttgatttctgaagaagt

SEQ ID NO: 528266 - DNA, 120 bp, Artificial Sequence
  ENSG00000166068_37 (sequence is synthesized)
atgtcgtgtggagcttcagcaccacctactggatgatttccaggccagagacatgagatggcaatagggatctgacagggttcatcactactaccattaaagggctatttatgtggtgac

SEQ ID NO: 528267 - DNA, 120 bp, Artificial Sequence
  ENSG00000166068_38 (sequence is synthesized)
cacctctaccagggaaaccaggaataagaactgtctcaaaggaattgtaaaatggttatttacctaatgtgtcttgttggcttgctgaaagattttaagcacttttttcttacatatcct

SEQ ID NO: 528268 - DNA, 120 bp, Artificial Sequence
  ENSG00000166068_39 (sequence is synthesized)
gttttaaaatatttgttgatatttgggactggcaatcaaacttaatggatgtactgaggcatttatagaaccagttgctttaactctcaaaagccattaccaaaatggtatttttttcct

SEQ ID NO: 528269 - DNA, 120 bp, Artificial Sequence
  ENSG00000166068_40 (sequence is synthesized)
ccttccgccagtcagggagaatttttaaaaataataatcaaaacatgaaaaaacataatcacacctgtattttatcatgacagcttcagagagtgtgtgtgtacgtttttctctctttta

SEQ ID NO: 528270 - DNA, 120 bp, Artificial Sequence
  ENSG00000166068_41 (sequence is synthesized)
acaggcatgagctactgcgcccagccgtgtgtatgtttctgaaatgatgatggggtggggttaaaatctaaagggaaaaacttgaaactacctattttcattggttattcagcagtgcct

SEQ ID NO: 528271 - DNA, 120 bp, Artificial Sequence
  ENSG00000166068_42 (sequence is synthesized)
ttggttattcagcagtgcctaaaatgagcttttgaagtaatgtaaatgcactttcaattcatgtgtatagtgccatctgatatcttgggtaagtcttgctttttcttttctttttcctct

SEQ ID NO: 528272 - DNA, 120 bp, Artificial Sequence
  ENSG00000166068_43 (sequence is synthesized)
cccctgcccccttaattaaatggcacggaaatgtttcttaatatgcacgtgagtctccagagtacaggaaatgtgctttcctctaaatggtcaatgtaaagaatcttaaggatatttctt

SEQ ID NO: 528273 - DNA, 120 bp, Artificial Sequence
  ENSG00000166068_44 (sequence is synthesized)
gtgttgaaatttacattcgattttgtgattacacttggaagtatgtgttaaattgggtttttaattgtagcccaaaggtgcattaagcaagtgtaacattttttccacataaaacttaga

SEQ ID NO: 528274 - DNA, 120 bp, Artificial Sequence
  ENSG00000166068_45 (sequence is synthesized)
aaactttagttacctgaaaagcaaggattctttactaattattatgctcattcttgatttgacttccatgttcacacttcaaagtgtaagaggaagcactagaaactggcattattgttg

SEQ ID NO: 528275 - DNA, 120 bp, Artificial Sequence
  ENSG00000166068_46 (sequence is synthesized)
cactaaaaaagtctataaatcataatagcaccatgaggtgttttgcaatgagacaaacatgaagaatgaatttctttaagagagaaacacaaccggaggtgatttatataaaccaaaaga

SEQ ID NO: 528276 - DNA, 120 bp, Artificial Sequence
  ENSG00000166068_47 (sequence is synthesized)
aaaaaaaaggctttaaggtattaggtactgtttgcctagcagccaggtggttataaaagattcatatgctttggtacactgataaatgttagccattattcctgaaagcttcttaaattg

SEQ ID NO: 528277 - DNA, 120 bp, Artificial Sequence
  ENSG00000166068_48 (sequence is synthesized)
catcagttgttttgaaattttttcaagaataaactagttgaaaagtctttgtattaaaaatacacatagatttttgtgaacatttccagtgtgtagtgtcgtttgctttctatttctgac

SEQ ID NO: 528278 - DNA, 120 bp, Artificial Sequence
  ENSG00000166068_49 (sequence is synthesized)
ctcaaaagtgcctcacttgtatattatttccattaaaagcttgactgcattctttctaatgaacaatgaaaaactgtttaactcatgtcataatgtgtctcctcagatatagttaactag

SEQ ID NO: 528279 - DNA, 120 bp, Artificial Sequence
  ENSG00000166068_50 (sequence is synthesized)
cttgatagttttgagtatataatgtaaataatacattataagtttgtaaccatttctgttacttcatacccgtgtaattggacatagcagatgattatcataagaatttgttttaatggt

SEQ ID NO: 528280 - DNA, 120 bp, Artificial Sequence
  ENSG00000166068_51 (sequence is synthesized)
ttttttccctcctggaattacctgattaaacctgtcatgaattataaaaggactttttcttattctcctagagcttatcaaattatcacataagagataattactggaggagaaagtaaa

SEQ ID NO: 528281 - DNA, 120 bp, Artificial Sequence
  ENSG00000166068_52 (sequence is synthesized)
aatggaagcttttgataattagctctgttctttaaaagtatacttttaaactgaaagttcacatatagttcatcttaataacatatttattcatccttaattgtattcagattttttttt

SEQ ID NO: 528282 - DNA, 120 bp, Artificial Sequence
  ENSG00000166068_53 (sequence is synthesized)
aagtctctaagctaataatgttatatttattggtttggtaacatgttgcagctaagctaatgaccttaagtggcaattgtttaacccaggactactgatttttttatattcaagtcagtt

SEQ ID NO: 528283 - DNA, 120 bp, Artificial Sequence
  ENSG00000166068_54 (sequence is synthesized)
tcatcgttttacttaactcgccatataaccaaaaataacgaataatctaaaggaaaggttattaggacagtaataaaaaattatagtgtatctcaacactagaataagttggattactat

SEQ ID NO: 528284 - DNA, 120 bp, Artificial Sequence
  ENSG00000166068_55 (sequence is synthesized)
attatagtttatttgaaaaatcaaggagtaactgtatctttaccattaattatgaaatgtagtctcatgtgcttatttacaggtttttcagaatttgctttacattcttcacatcaagtt

SEQ ID NO: 528285 - DNA, 120 bp, Artificial Sequence
  ENSG00000166068_56 (sequence is synthesized)
aatacccacaagtaagtagaatagcttttataacaaggaaattgaaactagggttctagcttggctatcaatataagtgtcatgcacatagtgctccttaaagaaaaagacatcgacatc

SEQ ID NO: 528286 - DNA, 120 bp, Artificial Sequence
  ENSG00000166068_57 (sequence is synthesized)
aatggtatgaaagctgtagtcactctttaaattgaactgctctaagatttgcagttttagtgagatctgaaatgatggttcaaaaaatacattcataataaaagtcttaacaaaatcaca

SEQ ID NO: 528287 - DNA, 120 bp, Artificial Sequence
  ENSG00000166068_58 (sequence is synthesized)
actttggactcaggactcagacagtaaataaaagctggaaggtctttgaggcgagttttagtgaagttccgaagagacttactggaagcttgaagatctttggatagagcgtcagtgagg

SEQ ID NO: 528288 - DNA, 120 bp, Artificial Sequence
  ENSG00000166068_59 (sequence is synthesized)
gcttaaatgaaaatgaagaaaaccatattggaaaatggaagaaagggaatgtttatttagtggctgaaagcttagcaacaatgtcatggcagtaatgtgggaggcagaaaatgtacctaa

SEQ ID NO: 528289 - DNA, 120 bp, Artificial Sequence
  ENSG00000166068_60 (sequence is synthesized)
tgtactgagtggttaagctaaggagttttcaagcaaaaggttgaagctgtttgcctgatttcttcttactgcttatgataaacagtaaatgagagaagtaagctaaggaagggctcctaa

SEQ ID NO: 528290 - DNA, 120 bp, Artificial Sequence
  ENSG00000166068_61 (sequence is synthesized)
gaaagatgagcgaggagacggcgacttctgacaacgactacagcaattcaattctgaattcttctgcagtccctcacagctcagccttgaaacccactctttaatagttatgcacgagtg

SEQ ID NO: 528291 - DNA, 120 bp, Artificial Sequence
  ENSG00000166069_0 (sequence is synthesized)
ggaatctacaatggaaggacacaagaaagatcagctggattaagtagtcatgattatgcaaagccatatccagagaccaaggtgtaaagcaggtcggagaaaatggaaatctcaagattg

SEQ ID NO: 528292 - DNA, 120 bp, Artificial Sequence
  ENSG00000166069_1 (sequence is synthesized)
gctcagtcaaaaagaaacattatcagtttgaacatggaccttgaaagggatacgcagagaatagatgaagcaaatcagaaacttcttctcaaaatccaagagagggaagataagattcag

SEQ ID NO: 528293 - DNA, 120 bp, Artificial Sequence
  ENSG00000166069_2 (sequence is synthesized)
aggctggaaagtgagatcattcagacgcggggcctggtggaagatgaagagtgggagaaggagaaccgcaccacgatggaaagggaaagagccttgcaggagctggaggaagaaacagcc

SEQ ID NO: 528294 - DNA, 120 bp, Artificial Sequence
  ENSG00000166069_3 (sequence is synthesized)
agacttgaaaggaagaataagacgttggtccacagtataacagaacttcaacaaaagcttacaaggaaatcacaaaagataaccaattgtgaacaaagcagtccagatggagccctagaa

SEQ ID NO: 528295 - DNA, 120 bp, Artificial Sequence
  ENSG00000166069_4 (sequence is synthesized)
gagacaaaggttaagttacaacagctggaagcttcctatgcatgccaagagaaggagctgctcaaggtaatgaaggagtatgcatttgtgacccagctctgtgaagatcaagccctctac

SEQ ID NO: 528296 - DNA, 120 bp, Artificial Sequence
  ENSG00000166069_5 (sequence is synthesized)
aaaactcgtgagcatgaaccctgtggaaaaagagcataccagccaaaataatgagggtactcctacccaaaagacagcaagattattcagtaaaaagattttttgctgtctctttttcat

SEQ ID NO: 528297 - DNA, 120 bp, Artificial Sequence
  ENSG00000166069_6 (sequence is synthesized)
caccctatttttcatcagactgctgagctacatgttttttcatgtaagattcataaatccagatctcctcgtcaatgtactgcccaaggtactgggcaggagcaccttgtggaagctcag

SEQ ID NO: 528298 - DNA, 120 bp, Artificial Sequence
  ENSG00000166069_7 (sequence is synthesized)
atgcttcttctttccatctctcacacttgagacagaggacatgttaccccactgattccctaagaaatatccttgagcaatagaagggaagtgggatccgagcctgtagaagggaggcat

SEQ ID NO: 528299 - DNA, 120 bp, Artificial Sequence
  ENSG00000166069_8 (sequence is synthesized)
gaaacttgtggaggaaagagatttgcttcagttttttcctcaccgtttgcctgcttgactaccttctgtcaccacgtcatctttccaggattaaccttgaccagtaaaaagctctgtaat

SEQ ID NO: 528300 - DNA, 120 bp, Artificial Sequence
  ENSG00000166069_9 (sequence is synthesized)
agatttatgtggctctgtggatcggctgaatagtacttgatagtaaacaaatttgaccatttggggaattatatagatgctaagaaaagttaattgataaattattctagtgaatctcaa

SEQ ID NO: 528301 - DNA, 120 bp, Artificial Sequence
  ENSG00000166069_10 (sequence is synthesized)
aaaggaacatcctggttttggtagaaactccatctcagcctgagtcagagcaaacagttctcagaccaatttctatttggaattgaatgagtcccgacgccacatatctttgccctctgt

SEQ ID NO: 528302 - DNA, 120 bp, Artificial Sequence
  ENSG00000166069_11 (sequence is synthesized)
tgggcctcctccttttagtggcaagatggctgccaacaatccagatctcgtactaccagattggcaacctttgcagaataaaagtcttttccaacaggttcagcagtaaagtccagaaaa

SEQ ID NO: 528303 - DNA, 120 bp, Artificial Sequence
  ENSG00000166069_12 (sequence is synthesized)
tgaggtcaattgcctaccctgtcccacagtcaatgtggccagagggatggagtactctgattggtcaagcttatgtcatatgttcagccccttactaaggattaagagcagtcaaagaag

SEQ ID NO: 528304 - DNA, 120 bp, Artificial Sequence
  ENSG00000166069_13 (sequence is synthesized)
aagaacaaagtaagggaatgacctaaactatatgaaatgcatttctcccactaaaaggggctcagtgcctatggaagagaaaagggatgctggacacgcaaaagcagaggtctacttcat

SEQ ID NO: 528305 - DNA, 120 bp, Artificial Sequence
  ENSG00000166069_14 (sequence is synthesized)
tgctaaactctgtgtcttcctataagcaaaaattataacttctaaagatagtagattaagacggtgaaagcttctacaaagagctcagtttaagaaccatgtaaataatcaggtcactag

SEQ ID NO: 528306 - DNA, 120 bp, Artificial Sequence
  ENSG00000166069_15 (sequence is synthesized)
ggctaaagtaagcaacaattctaaaataagtagaatatgactggtataaattgcttcaccaactcaaagtagcatatatatcacacctcttatttttccaattaattgctgaaacattca

SEQ ID NO: 528307 - DNA, 120 bp, Artificial Sequence
  ENSG00000166069_16 (sequence is synthesized)
catgccttactaataggatatactctacattattttccagtacaagagaaaattattttaaatggtaaggttttaggtctaaaagtgtctcaattttaagaaagctgatatcaagcaggt

SEQ ID NO: 528308 - DNA, 120 bp, Artificial Sequence
  ENSG00000166069_17 (sequence is synthesized)
catattttctaggcattgtgcaatgactatagaaattatgaaaatgtgtaaccaaccagtaatatctagccacaggcaaattttataaaagatccttttaattaacttctggattaaatg

SEQ ID NO: 528309 - DNA, 120 bp, Artificial Sequence
  ENSG00000166069_18 (sequence is synthesized)
gaaaatccaaactgagattacttttatagggtcagttacatgctaaggaggaagcatagagagtagaagaatggttaccagaggctgtaaccttcttaatttaaggtaaaaaattctacc

SEQ ID NO: 528310 - DNA, 120 bp, Artificial Sequence
  ENSG00000166069_19 (sequence is synthesized)
tattagcttagtattagatgaaaacagaaattcttgtcacatacaggcactattcactgcagtgaagtatatcttttcagaaagttgcataaaatcgaataaaataccatgtattaaatt

SEQ ID NO: 528311 - DNA, 120 bp, Artificial Sequence
  ENSG00000166069_20 (sequence is synthesized)
atatccagagaccaaggtgtaaagcagcgcaaggggttatttaaggaagcaaagcttctcaagaaaccagagtgaaggtgcactgttagattgagcactttggaggagaaagcctgggaa

SEQ ID NO: 528312 - DNA, 120 bp, Artificial Sequence
  ENSG00000166069_21 (sequence is synthesized)
cacattatcacattattattcgggttgatattaagagtaaaaacatgtactttagaaagagttggtggtcagtcaccttgataagtagggtattccttatatatcacagaaaggcctttt

SEQ ID NO: 528313 - DNA, 120 bp, Artificial Sequence
  ENSG00000166069_22 (sequence is synthesized)
cattaataccatcctcacttcccccaaatatatggacacccaaccataagggataggcatgaaactaatctctagactcatactacagctaccacattatataaatcagaactgtacact

SEQ ID NO: 528314 - DNA, 120 bp, Artificial Sequence
  ENSG00000166069_23 (sequence is synthesized)
gtattgaactacgaacatttaaaattagagatgggaaagcactcctcaaagtacaatgagtttgtcaagagtctaaatggtgagaaatccaaaccaaaaacctcatctccatttcttgac

SEQ ID NO: 528315 - DNA, 120 bp, Artificial Sequence
  ENSG00000166069_24 (sequence is synthesized)
cccctctgtaagttaaatcttaatgcagtcaagaagtatttctatttatgaaatatttttaaatccttagatcaagaacaagagatcaaaactgcatatagcctctctctatatatatat

SEQ ID NO: 528316 - DNA, 120 bp, Artificial Sequence
  ENSG00000166069_25 (sequence is synthesized)
ggacttgtaggtccttgcccctaaaggacaccttcaagtcactcaagatccctgctgaacattggtttatggcttaactgttaagccaagattctagaaaaggttgcccagtagaatttt

SEQ ID NO: 528317 - DNA, 120 bp, Artificial Sequence
  ENSG00000166069_26 (sequence is synthesized)
ctgtgctagttagtaggtaaaactaactacatatggcaattgagtacataaaagatgtactcaactgaggaaattaatttaactttaattaatttaaatagctataggtagacagtagtt

SEQ ID NO: 528318 - DNA, 120 bp, Artificial Sequence
  ENSG00000166069_27 (sequence is synthesized)
acaatattggacagtacagatttagaatataaagcttttttaaaataaccatagtgtagtatgaatatttcagtgcactttgttcaatttctgtcctggctgttatcttcatagatcaaa

SEQ ID NO: 528319 - DNA, 120 bp, Artificial Sequence
  ENSG00000166069_28 (sequence is synthesized)
actcgtgagcatgaaccctgtggaaaaagagcataccagccaaaataatgaggtaaacactccattctctcttcagctcctcacagtgtcattgcctttcaaagccatctccagcaaact

SEQ ID NO: 528320 - DNA, 120 bp, Artificial Sequence
  ENSG00000166069_29 (sequence is synthesized)
ataaggcaccaaatatatacccaatcttgccatgcgcattttccaagaacagtaccagctataattacagagcattccaaccctaaacaaacaaactagactctaaggaacaatctactt

SEQ ID NO: 528321 - DNA, 120 bp, Artificial Sequence
  ENSG00000166069_30 (sequence is synthesized)
tcttctcattcagccatacaaataacaggctctcaaaaaactagccgaagacctaagagaactcagaatggaggcaagaagcaaccttaattgagggtatgctctatagaaagaggccaa

SEQ ID NO: 528322 - DNA, 120 bp, Artificial Sequence
  ENSG00000166069_31 (sequence is synthesized)
tatagggcacatacaccacctcttccatctcctacaatcacagtactctttcctgatgatcttgacatggttcctaatctctcacaacacagagcacccaccatctgtcatcatctagtc

SEQ ID NO: 528323 - DNA, 120 bp, Artificial Sequence
  ENSG00000166069_32 (sequence is synthesized)
agaattggcctgtgagttaaaacatagaacgctattgcttctttgtgacagagtttcagtgtctgttcatatttaatatagcaaagccaccagcacacatgtaaaggtctgaaggaaaag

SEQ ID NO: 528324 - DNA, 120 bp, Artificial Sequence
  ENSG00000166069_33 (sequence is synthesized)
aacaatttcatacagagcaccaatcctcttggcctgcttgatgtcttgtggcagcaaggataaaaggttaaagttaaactttggttgggctttaattttgtaatttatattggctttaga

SEQ ID NO: 528325 - DNA, 120 bp, Artificial Sequence
  ENSG00000166069_34 (sequence is synthesized)
gtccaggttgacaaacatcagaaattacagatagtcaagataaatacttagaaaagagaactaaacacttccttaaaagcaaatatcaaatattggccattgtgtttgggtcatccaaat

SEQ ID NO: 528326 - DNA, 120 bp, Artificial Sequence
  ENSG00000166069_35 (sequence is synthesized)
gtttggatatatgttaggccatgtccatggttcttaagagtactgaacaagtcattctggccccgaagcttgcatattctgcttagtaaacaaaatccctgaaattaactcgacccactt

SEQ ID NO: 528327 - DNA, 120 bp, Artificial Sequence
  ENSG00000166069_36 (sequence is synthesized)
ctgtagaaccaagtttttgacatctccaatgtgtcctaccatctctccccacagctcatcaaaatattccttctaactatgtgtcagaggaaaaaattaaagttgtctacatcaagctca

SEQ ID NO: 528328 - DNA, 120 bp, Artificial Sequence
  ENSG00000166069_37 (sequence is synthesized)
ggaagcatcacaggaaaagctttgggttttcatgccttcccttcatgctcctagatctgctggactctgtgtccatctcagcacaactggagggcttctcttgtccaccaagcttcttac

SEQ ID NO: 528329 - DNA, 120 bp, Artificial Sequence
  ENSG00000166069_38 (sequence is synthesized)
cacatctacaccccacttaacgggtctgagaatgctcagtcgcttcttctgcgccaccctaattatacttgcaacaacctcctcactcttacctccttcacctgtttatgtttcctcatg

SEQ ID NO: 528330 - DNA, 120 bp, Artificial Sequence
  ENSG00000166069_39 (sequence is synthesized)
atactctggagtctgcatgccagattcatgccctcccctgagttctggccaggtttcttgaccagttcaaactgttacaaaattcagctggaggttttgctctccctgtggcattttccc

SEQ ID NO: 528331 - DNA, 120 bp, Artificial Sequence
  ENSG00000166069_40 (sequence is synthesized)
tgcgcctctggccaccctccagaaggatccctgtagtgccaagcaggaatggcctgcttggggacctagcaagctcacagggcctttcccattgcttcctctatccctgtattgtgttca

SEQ ID NO: 528332 - DNA, 120 bp, Artificial Sequence
  ENSG00000166073_0 (sequence is synthesized)
tgggggcgtcctccttcgtccccgcccggctgtcaagctgtgttctagcggccgagggaccgaggggggctaagaaagggggcgcccagccatgcagaggcaaaaaggcgctgcggaacg

SEQ ID NO: 528333 - DNA, 120 bp, Artificial Sequence
  ENSG00000166073_1 (sequence is synthesized)
gggtccccgtcgccagtgctgaggcaggaggtcggagccacaagtgaggggctgggaagcaggacccagcacgggcgtcttggcaggcggccgggcgcagggccaggctgctggggacgc

SEQ ID NO: 528334 - DNA, 120 bp, Artificial Sequence
  ENSG00000166073_2 (sequence is synthesized)
tcagggctttccacccaagccatgggcgctgtcgggcactcgggggtcccctcgtggctccggccactcggcgtgggcattacgttggcttcacatcgccatccagcctcgaagccaaca

SEQ ID NO: 528335 - DNA, 120 bp, Artificial Sequence
  ENSG00000166073_3 (sequence is synthesized)
ggactgaaaaatagcttcggccaaacgttctcctcccgctaaggagaggggtcgagtgcgtcagcccgaggggactggagagggatgccctagccctcgaggggcggaggacccgcggtt

SEQ ID NO: 528336 - DNA, 120 bp, Artificial Sequence
  ENSG00000166073_4 (sequence is synthesized)
gaaggaggcagcgggagcggagagcgccctccttgaccatcgaatgcctccttctgtgtttccattcctgtcgagtgggctgggccacgctgaccaccctggaggagggacggacgacgc

SEQ ID NO: 528337 - DNA, 120 bp, Artificial Sequence
  ENSG00000166073_5 (sequence is synthesized)
tcggcgggctctgaccgtgccgccttcttgtggctgctgactgggatccaggagggagtgggcatggggcgcagccgcgcctccctccctccccgcctcccgggcgccggggttggcgat

SEQ ID NO: 528338 - DNA, 120 bp, Artificial Sequence
  ENSG00000166073_6 (sequence is synthesized)
gtggagacgtgaggggacccgtcggctgctccggcttctccaggactccgccaggcgcccgcgcgtccctcctcacccggaggaggagaggctccgcgcggggctccgaggcgggcggcg

SEQ ID NO: 528339 - DNA, 120 bp, Artificial Sequence
  ENSG00000166073_7 (sequence is synthesized)
cgcggagccggagtcccagcctcgccatgggacataacgggagctggatctctccaaatgccagcgagccgcacaacgcgtccggcgccgaggctgcgggtgtgaaccgcagcgcgctcg

SEQ ID NO: 528340 - DNA, 120 bp, Artificial Sequence
  ENSG00000166073_8 (sequence is synthesized)
gggagttcggcgaggcgcagctgtaccgccagttcaccaccaccgtgcaggtcgtcatcttcataggctcgctgctcggaaacttcatggtgttatggtcaacttgccgcacaaccgtgt

SEQ ID NO: 528341 - DNA, 120 bp, Artificial Sequence
  ENSG00000166073_9 (sequence is synthesized)
tcaaatctgtcaccaacaggttcattaaaaacctggcctgctcggggatttgtgccagcctggtctgtgtgcccttcgacatcatcctcagcaccagtcctcactgttgctggtggatct

SEQ ID NO: 528342 - DNA, 120 bp, Artificial Sequence
  ENSG00000166073_10 (sequence is synthesized)
acaccatgctcttctgcaaggtcgtcaaatttttgcacaaagtattctgctctgtgaccatcctcagcttccctgctattgctttggacaggtactactcagtcctctatccactggaga

SEQ ID NO: 528343 - DNA, 120 bp, Artificial Sequence
  ENSG00000166073_11 (sequence is synthesized)
gtggtggccagtgtccctgtgtttgcagtaaccaatgtggctgacatctatgccacgtccacctgcacggaagtctggagcaactccttgggccacctggtgtacgttctggtgtataac

SEQ ID NO: 528344 - DNA, 120 bp, Artificial Sequence
  ENSG00000166073_12 (sequence is synthesized)
atcaccacggtcattgtgcctgtggtggtggtgttcctcttcttgatactgatccgacgggccctgagtgccagccagaagaagaaggtcatcatagcagcgctccggaccccacagaac

SEQ ID NO: 528345 - DNA, 120 bp, Artificial Sequence
  ENSG00000166073_13 (sequence is synthesized)
accatctctattccctatgcctcccagcgggaggccgagctgcacgccaccctgctctccatggtgatggtcttcatcttgtgtagcgtgccctatgccaccctggtcgtctaccagact

SEQ ID NO: 528346 - DNA, 120 bp, Artificial Sequence
  ENSG00000166073_14 (sequence is synthesized)
gtgctcaatgtccctgacacttccgtcttcttgctgctcactgctgtttggctgcccaaagtctccctgctggcaaaccctgttctctttcttactgtgaacaaatctgtccgcaagtgc

SEQ ID NO: 528347 - DNA, 120 bp, Artificial Sequence
  ENSG00000166073_15 (sequence is synthesized)
ttgatagggaccctggtgcaactacaccaccggtacagtcgccgtaatgtggtcagtacagggagtggcatggctgaggccagcctggaacccagcatacgctcgggtagccagctcctg

SEQ ID NO: 528348 - DNA, 120 bp, Artificial Sequence
  ENSG00000166073_16 (sequence is synthesized)
gagatgttccacattgggcagcagcagatctttaagcccacagaggatgaggaagagagtgaggccaagtacattggctcagctgacttccaggccaaggagatatttagcacctgcctg

SEQ ID NO: 528349 - DNA, 120 bp, Artificial Sequence
  ENSG00000166073_17 (sequence is synthesized)
gagggagagcaggggccacagtttgcgccctctgccccacccctgagcacagtggactctgtatcccaggtggcaccggcagcccctgtggaacctgaaacattccctgataagtattcc

SEQ ID NO: 528350 - DNA, 120 bp, Artificial Sequence
  ENSG00000166073_18 (sequence is synthesized)
ctgcagtttggctttgggccttttgagttgcctcctcagtggctctcagagacccgaaacagcaagaagcggctgcttccccccttgggcaacaccccagaagagctgatccagacaaag

SEQ ID NO: 528351 - DNA, 120 bp, Artificial Sequence
  ENSG00000166073_19 (sequence is synthesized)
gtgcccaaggtaggcagggtggagcggaagatgagcagaaacaataaagtgagcatttttccaaaggtggattcctagcaaggattgtaaattcttggaagcaacggggagcttccatat

SEQ ID NO: 528352 - DNA, 120 bp, Artificial Sequence
  ENSG00000166073_20 (sequence is synthesized)
tcccaccagagtgtgggaatgctgtggccatgtgattgtatgatctccttgcaactcagtgtgagttgattcctccaatatgggccagatgcttttgaatgatagggaaatctacataaa

SEQ ID NO: 528353 - DNA, 120 bp, Artificial Sequence
  ENSG00000166073_21 (sequence is synthesized)
atccagtgtcctctttattgagggagtatatgtatccatctcagtgatccatgtccttagtgaagtccacattattctctgtggggacaagagctgggcagttttgaatgggtcttgagg

SEQ ID NO: 528354 - DNA, 120 bp, Artificial Sequence
  ENSG00000166073_22 (sequence is synthesized)
tgggtaccccatgtgcactttctgaggatgcctcacttccctgggctctgcagagaacacacagagagaagactttcagagctcacaggagcagggagcaggagcactctaagggaattc

SEQ ID NO: 528355 - DNA, 120 bp, Artificial Sequence
  ENSG00000166073_23 (sequence is synthesized)
cattctgatgcccgagtccaagtggcttttccagcgacacatctttggtctttgttctcagtgttgggggttgcgttgtgaggtgttgtctcttcatgagaaggcagtgtgacgtagtga

SEQ ID NO: 528356 - DNA, 120 bp, Artificial Sequence
  ENSG00000166073_24 (sequence is synthesized)
gtgaaccgcagcgcgctcggggagttcggcgaggcgcagctgtaccgccagttcaccaccaccgtgcaggtcgtcatcttcataggctcgctgctcggctttccacctggtaccaccttc

SEQ ID NO: 528357 - DNA, 120 bp, Artificial Sequence
  ENSG00000166073_25 (sequence is synthesized)
ccaaatggagccagtgagtgggcattccaaggcgcccagcaccatattaattgagaatggaacttacgtttcattttcaggtactactcagtcctctatccactggagaggaaaatatct

SEQ ID NO: 528358 - DNA, 86 bp, Artificial Sequence
  ENSG00000166073_26 (sequence is synthesized)
tttatttacatgaaccagctcacatgccaacaaatgcatcaaaaagcctgcttttcctgatggggagactatcatcacttatttca

SEQ ID NO: 528359 - DNA, 120 bp, Artificial Sequence
  ENSG00000166073_27 (sequence is synthesized)
cctgcttttcctgatggggagactatcatcacttatttcatcagattgtaccagtaaaaatttaagtttaaacaaccaaacactgagagtggaaccaggagaagtgaattctcactccaa

SEQ ID NO: 528360 - DNA, 120 bp, Artificial Sequence
  ENSG00000166073_28 (sequence is synthesized)
gggcaaaggctttccacctggtaccaccttcccaaatggagccagtgagtgggcattccaaggcgcccagcaccatattaattgagaatggaacttacgtttcattttcaggaaacttca

SEQ ID NO: 528361 - DNA, 120 bp, Artificial Sequence
  ENSG00000166073_29 (sequence is synthesized)
tggtggctccagagaaaatgcctgtttgatgaacttaaacatgtcaaacattttctgttgagaaggtagggatttggtgtcttacactgtttctctggaagccccagtcatatgactcac

SEQ ID NO: 528362 - DNA, 120 bp, Artificial Sequence
  ENSG00000166073_30 (sequence is synthesized)
tgtttctcctgatacccttcgtccctttcattgggatgtaggtaaggaatgacgattcctcacctatggtacacatggcgatagatgtgcccgggagtaagggagatattttgtccttga

SEQ ID NO: 528363 - DNA, 120 bp, Artificial Sequence
  ENSG00000166073_31 (sequence is synthesized)
taattctgattttcccttggcatcaccaacgcctcagagagatacacctgcaccctccagtcagggtcagtgttggctggaaaacactgaaaagtcttcgctctgtctttcaccttaaat

SEQ ID NO: 528364 - DNA, 120 bp, Artificial Sequence
  ENSG00000166073_32 (sequence is synthesized)
tgtgttttctcaacaaatgagagagaagcttacgggggagatgcctgagagatgcctatggcgctgtagtttttttttcttccctatgatctcacatgaaaggtgctatgtaacaaccag

SEQ ID NO: 528365 - DNA, 120 bp, Artificial Sequence
  ENSG00000166073_33 (sequence is synthesized)
tatgagtcaaatatattgaaaaaatcatcttatgcaaactttaggaattaaaaggtatttttaaaatggagagttagtgtaagctgggtcctttggaaacatcaaactgaaaaggcctga

SEQ ID NO: 528366 - DNA, 120 bp, Artificial Sequence
  ENSG00000166073_34 (sequence is synthesized)
tttggaaaggtgactctgcccaaaaggttggcaagaatctgacaaagatggtttccttccgaggaagactccggaactcaggtgtggccagtctccttttcagtctgtttgtacagctgc

SEQ ID NO: 528367 - DNA, 120 bp, Artificial Sequence
  ENSG00000166073_35 (sequence is synthesized)
ggttctctcttaattttggacacagaggaggaacagaacagggagaaataatcattgtagagtgccaaggcaacatctgacccagatgagctcttcacttcctccttccctgtcgttgta

SEQ ID NO: 528368 - DNA, 120 bp, Artificial Sequence
  ENSG00000166073_36 (sequence is synthesized)
gagccagactgggtagaagagggagggcagtgtcctcaactcatcagcctcacaagcaatttgggacccctctggggtggatttcaccaggttgaattagaaccgcagataatacttccc

SEQ ID NO: 528369 - DNA, 120 bp, Artificial Sequence
  ENSG00000166073_37 (sequence is synthesized)
tgttagtgaggacaaaccaagcgccagctctgcccttttctctagagtgttgtgttcttgctcttggtacttacaggagctagtctggtgccttgagcaagcttgaagggaagtgggtgt

SEQ ID NO: 528370 - DNA, 120 bp, Artificial Sequence
  ENSG00000166073_38 (sequence is synthesized)
cctcaccagcaaacttccacatctcaactcgtgccctcttttggccacactggccccgtctcttggagggagcccagaccctgtagggagttttgttttcctttcttctcttgggtgtgg

SEQ ID NO: 528371 - DNA, 120 bp, Artificial Sequence
  ENSG00000166073_39 (sequence is synthesized)
tgtcttgtgtttctgaatgtgaacccaaagaccctacccctggagaggaagcaccttcctctttgtgttggtctcctcatagcactgtttgctcacagcagaaacggggctgccacagcc

SEQ ID NO: 528372 - DNA, 120 bp, Artificial Sequence
  ENSG00000166073_40 (sequence is synthesized)
tcctgcggctctgctgccttctgggccctgcgtgcatggcatctatagctccttgccctgatagtcaatgctgtggcccttcaagcttgtctttcaaagctttcacaatcattacaactt

SEQ ID NO: 528373 - DNA, 120 bp, Artificial Sequence
  ENSG00000166073_41 (sequence is synthesized)
ttatcaaggggaataataatctctaggaaaattatgtccactttaggagaatctgtcaagtgtagccactttggtgttgttctgataatatactgtatatgtacaacttaataaattttg

SEQ ID NO: 528374 - DNA, 120 bp, Artificial Sequence
  ENSG00000166073_42 (sequence is synthesized)
atgaggcagaatctggttgggtatgtttcttatatatgtttgaagcagatggctgactactaacaggtcattgccaggtgtatttctatactctttgaagaataacattttaataaaaaa

SEQ ID NO: 528375 - DNA, 120 bp, Artificial Sequence
  ENSG00000166086_0 (sequence is synthesized)
gcaaccctcgacatggcgctgaggcggccaccgcgactccggctctgcgctcggctgcctgacttcttcctgctgctgcttttcaggggctgcctgataggggctgtaaatctcaaatcc

SEQ ID NO: 528376 - DNA, 120 bp, Artificial Sequence
  ENSG00000166086_1 (sequence is synthesized)
agcaatcgaaccccagtggtacaggaatttgaaagtgtggaactgtcttgcatcattacggattcgcagacaagtgaccccaggatcgagtggaagaaaattcaagatgaacaaaccaca

SEQ ID NO: 528377 - DNA, 120 bp, Artificial Sequence
  ENSG00000166086_2 (sequence is synthesized)
tatgtgttttttgacaacaaaattcagggagacttggcgggtcgtgcagaaatactggggaagacatccctgaagatctggaatgtgacacggagagactcagccctttatcgctgtgag

SEQ ID NO: 528378 - DNA, 120 bp, Artificial Sequence
  ENSG00000166086_3 (sequence is synthesized)
gtcgttgctcgaaatgaccgcaaggaaattgatgagattgtgatcgagttaactgtgcaagtgaagccagtgacccctgtctgtagagtgccgaaggctgtaccagtaggcaagatggca

SEQ ID NO: 528379 - DNA, 120 bp, Artificial Sequence
  ENSG00000166086_4 (sequence is synthesized)
acactgcactgccaggagagtgagggccacccccggcctcactacagctggtatcgcaatgatgtaccactgcccacggattccagagccaatcccagatttcgcaattcttctttccac

SEQ ID NO: 528380 - DNA, 120 bp, Artificial Sequence
  ENSG00000166086_5 (sequence is synthesized)
ttaaactctgaaacaggcactttggtgttcactgctgttcacaaggacgactctgggcagtactactgcattgcttccaatgacgcaggctcagccaggtgtgaggagcaggagatggaa

SEQ ID NO: 528381 - DNA, 120 bp, Artificial Sequence
  ENSG00000166086_6 (sequence is synthesized)
gtctatgacctgaacattggcggaattattgggggggttctggttgtccttgctgtactggccctgatcacgttgggcatctgctgtgcatacagacgtggctacttcatcaacaataaa

SEQ ID NO: 528382 - DNA, 120 bp, Artificial Sequence
  ENSG00000166086_7 (sequence is synthesized)
caggatggagaaagttacaagaacccagggaaaccagatggagttaactacatccgcactgacgaggagggcgacttcagacacaagtcatcgtttgtgatctgagacccgcggtgtggc

SEQ ID NO: 528383 - DNA, 120 bp, Artificial Sequence
  ENSG00000166086_8 (sequence is synthesized)
tgagagcgcacagagcgcacgtgcacatacctctgctagaaactcctgtcaaggcagcgagagctgatgcactcggacagagctagacactcattcagaagcttttcgttttggccaaag

SEQ ID NO: 528384 - DNA, 120 bp, Artificial Sequence
  ENSG00000166086_9 (sequence is synthesized)
ttgaccactactcttcttactctaacaagccacatgaatagaagaattttcctcaagatggacccggtaaatataaccacaaggaagcgaaactgggtgcgttcactgagttgggttcct

SEQ ID NO: 528385 - DNA, 120 bp, Artificial Sequence
  ENSG00000166086_10 (sequence is synthesized)
aatctgtttctggcctgattcccgcatgagtattagggtgatcttaaagagtttgctcacgtaaacgcccgtgctgggccctgtgaagccagcatgttcaccactggtcgttcagcagcc

SEQ ID NO: 528386 - DNA, 120 bp, Artificial Sequence
  ENSG00000166086_11 (sequence is synthesized)
acgacagcaccatgtgagatggcgaggtggctggacagcaccagcagcgcatcccggcgggaacccagaaaaggcttcttacacagcagccttacttcatcggcccacagacaccaccgc

SEQ ID NO: 528387 - DNA, 120 bp, Artificial Sequence
  ENSG00000166086_12 (sequence is synthesized)
agtttcttcttaaaggctctgctgatcggtgttgcagtgtccattgtggagaagctttttggatcagcattttgtaaaaacaaccaaaatcaggaaggtaaattggttgctggaagaggg

SEQ ID NO: 528388 - DNA, 120 bp, Artificial Sequence
  ENSG00000166086_13 (sequence is synthesized)
atcttgcctgaggaaccctgcttgtccaacagggtgtcaggatttaaggaaaaccttcgtcttaggctaagtctgaaatggtactgaaatatgcttttctatgggtcttgtttattttat

SEQ ID NO: 528389 - DNA, 120 bp, Artificial Sequence
  ENSG00000166086_14 (sequence is synthesized)
ttgctaaggatgtattttgattattgaaaagaaaatttctatttaaactgtaaatatattgtcatacaatgttaaataacctatttttttaaaaaagttcaacttaaggtagaagttcca

SEQ ID NO: 528390 - DNA, 120 bp, Artificial Sequence
  ENSG00000166086_15 (sequence is synthesized)
atcaataattaagagtattttacccaaggaatcctctcatggaagtttactgtgatgttccttttctcacacaagttttagcctttttcacaagggaactcatactgtctacacatcaga

SEQ ID NO: 528391 - DNA, 120 bp, Artificial Sequence
  ENSG00000166086_16 (sequence is synthesized)
ccatagttgcttaggaaacctttaaaaattccagttaagcaatgttgaaatcagtttgcatctcttcaaaagaaacctctcaggttagctttgaactgcctcttcctgagatgactagga

SEQ ID NO: 528392 - DNA, 120 bp, Artificial Sequence
  ENSG00000166086_17 (sequence is synthesized)
cagtctgtacccagaggccacccagaagccctcagatgtacatacacagatgccagtcagctcctggggttgcgccaggcgcccccgctctagctcactgttgcctcgctgtctgccagg

SEQ ID NO: 528393 - DNA, 120 bp, Artificial Sequence
  ENSG00000166086_18 (sequence is synthesized)
aggccctgccatccttgggccctggcagtggctgtgtcccagtgagctttactcacgtggcccttgcttcatccagcacagctctcaggtgggcactgcagggacactggtgtcttccat

SEQ ID NO: 528394 - DNA, 120 bp, Artificial Sequence
  ENSG00000166086_19 (sequence is synthesized)
gtagcgtcccagctttgggctcctgtaacagacctctttttggttatggatggctcacaaaatagggcccccaatgctattttttttttttaagtttgtttaattatttgttaagattgt

SEQ ID NO: 528395 - DNA, 120 bp, Artificial Sequence
  ENSG00000166086_20 (sequence is synthesized)
ctaaggccaaaggcaattgcgaaatcaagtctgtcaagtacaataacatttttaaaagaaaatggatcccactgttcctctttgccacagagaaagcacccagacgccacaggctctgtc

SEQ ID NO: 528396 - DNA, 120 bp, Artificial Sequence
  ENSG00000166086_21 (sequence is synthesized)
gcatttcaaaacaaaccatgatggagtggcggccagtccagccttttaaagaacgtcaggtggagcagccaggtgaaaggcctggcggggaggaaagtgaaacgcctgaatcaaaagcag

SEQ ID NO: 528397 - DNA, 120 bp, Artificial Sequence
  ENSG00000166086_22 (sequence is synthesized)
ttttctaattttgactttaaatttttcatccgccggagacactgctcccatttgtggggggacattagcaacatcactcagaagcctgtgttcttcaagagcaggtgttctcagcctcac

SEQ ID NO: 528398 - DNA, 120 bp, Artificial Sequence
  ENSG00000166086_23 (sequence is synthesized)
atgccctgccgtgctggactcaggactgaagtgctgtaaagcaaggagctgctgagaaggagcactccactgtgtgcctggagaatggctctcactactcaccttgtctttcagcttcca

SEQ ID NO: 528399 - DNA, 120 bp, Artificial Sequence
  ENSG00000166086_24 (sequence is synthesized)
gtgtcttgggttttttatactttgacagcttttttttaattgcatacatgagactgtgttgactttttttagttatgtgaaacactttgccgcaggccgcctggcagaggcaggaaatgc

SEQ ID NO: 528400 - DNA, 120 bp, Artificial Sequence
  ENSG00000166086_25 (sequence is synthesized)
tccagcagtggctcagtgctccctggtgtctgctgcatggcatcctggatgcttagcatgcaagttccctccatcattgccaccttggtagagagggatggctccccaccctcagcgttg

SEQ ID NO: 528401 - DNA, 120 bp, Artificial Sequence
  ENSG00000166086_26 (sequence is synthesized)
gggattcacgctccagcctccttcttggttgtcatagtgatagggtagccttattgccccctcttcttataccctaaaaccttctacactagtgccatgggaaccaggtctgaaaaagta

SEQ ID NO: 528402 - DNA, 120 bp, Artificial Sequence
  ENSG00000166086_27 (sequence is synthesized)
gagagaagtgaaagtagagtctgggaagtagctgcctataactgagactagacggaaaaggaatactcgtgtattttaagatatgaatgtgactcaagactcgaggccgatacgaggctg

SEQ ID NO: 528403 - DNA, 120 bp, Artificial Sequence
  ENSG00000166086_28 (sequence is synthesized)
tgattctgcctttggatggatgttgctgtacacagatgctacagacttgtactaacacaccgtaatttggcatttgtttaacctcatttataaaagcttcaaaaaaacccaaacattgct

SEQ ID NO: 528404 - DNA, 120 bp, Artificial Sequence
  ENSG00000166086_29 (sequence is synthesized)
tcattctttgttatttgctcttacgttgggtttgtctcttcttcctagcatttcagtggttaggcatgcacactaaaaatgctatcaatcacccatccaccagggaagtcagtgctgggc

SEQ ID NO: 528405 - DNA, 120 bp, Artificial Sequence
  ENSG00000166086_30 (sequence is synthesized)
aggaggtcagcctgtgtgctcaagagcagtgctgcgcctctccgccaccgagcccacctgtgttgcggttcccacttgggatggcagtgggcagatctcagtggcatcccatcccccaaa

SEQ ID NO: 528406 - DNA, 120 bp, Artificial Sequence
  ENSG00000166086_31 (sequence is synthesized)
atggatggccacagtgcgctccatccctgccatctctctttgtcatcctctgtcttgcccatgctgcagtgccttgcagatttgtttatatgcatgactttgtcatctgttgctgagagc

SEQ ID NO: 528407 - DNA, 120 bp, Artificial Sequence
  ENSG00000166086_32 (sequence is synthesized)
tctctttcccttggctccttccagtgaaggtcagatttgagagagaaagcagttaacttggcttacctaagagactttattgtggaatatttttccatcctctgtggctgcctgataggg

SEQ ID NO: 528408 - DNA, 120 bp, Artificial Sequence
  ENSG00000166086_33 (sequence is synthesized)
agcaaccctcgacatggcgctgaggcggccaccgcgactccggctctgcgctcggctgcctgacttcttcctgctgctgcttttcagggagtcaagtctagtctgctttccaaggctgca

SEQ ID NO: 528409 - DNA, 120 bp, Artificial Sequence
  ENSG00000166086_34 (sequence is synthesized)
gagagatactgaaacttcttgataagacaggagtcaaaaatctagaatgttagggattctacaggaaaaatgacccttcttccttttataaacaagtacattcttagggggtaaaataag

SEQ ID NO: 528410 - DNA, 120 bp, Artificial Sequence
  ENSG00000166086_35 (sequence is synthesized)
gaagagaaagaaaccatagattgagaccgaagagggatattaagcaaatgttactagggccctgatcggataatcaactgtaaaagtcattagacaatcggggaaattggattactaggt

SEQ ID NO: 528411 - DNA, 120 bp, Artificial Sequence
  ENSG00000166086_36 (sequence is synthesized)
ggtatttgatgatctattaagcaactgttcattgctttaggcatgatgaaggtattgtggttacgattttttacagtcttgtagagatactgaagtatttatggataaaaggtgtttgga

SEQ ID NO: 528412 - DNA, 120 bp, Artificial Sequence
  ENSG00000166086_37 (sequence is synthesized)
tttaagtgtacattcatctttgagaaccaatacactaggataaaggagatttttttaaaacttccaagttacttggctcttgttgataaattccctgcatagttttccatgtgtcgcttg

SEQ ID NO: 528413 - DNA, 120 bp, Artificial Sequence
  ENSG00000166086_38 (sequence is synthesized)
cttgaaggaacggctgccagagccccatatgaaagtgacccagtgcctttgcccagtgtatagacatgagaaaagggttccagggggtttcctctcagagggcttatagatcggaggtca

SEQ ID NO: 528414 - DNA, 120 bp, Artificial Sequence
  ENSG00000166086_39 (sequence is synthesized)
ggcagccggcagagacaaagctctagttcttacctaggattctttacttgtttgttttttgagacagattctttaaggcttgaagctacctttcttccccgcagcaatctgcaacaaagg

SEQ ID NO: 528415 - DNA, 120 bp, Artificial Sequence
  ENSG00000166086_40 (sequence is synthesized)
gaggccctggaaattagggattcttttcttcttgggatcctggctcctaatcttgtcctcataaccatttcctccataagtaatctcaggcattcagccagaggatttttaagcctacag

SEQ ID NO: 528416 - DNA, 120 bp, Artificial Sequence
  ENSG00000166086_41 (sequence is synthesized)
catttcaactgtagaagtctcagtacttttcacgtgtgaagttaggagttatggtgtcctatatgttctaggctagaaggattgtaagtgttctctcttctagctggggtaggcctgagg

SEQ ID NO: 528417 - DNA, 120 bp, Artificial Sequence
  ENSG00000166090_0 (sequence is synthesized)
ggcttgctgaaaataaaatcaggactcctaacctgctccagtcagcctgcttccacgaggcctgtcagtcagtgccccacttgtgactgagtgtgcagtgcccagcatgtaccaggtcag

SEQ ID NO: 528418 - DNA, 120 bp, Artificial Sequence
  ENSG00000166090_1 (sequence is synthesized)
tgcagagggctgcctgagggctgtgctgagagggagaggagcagagatgctgctgagggtggagggaggccaagctgccaggtttggggctgggggccaagtggagtgagaaactgggat

SEQ ID NO: 528419 - DNA, 120 bp, Artificial Sequence
  ENSG00000166090_2 (sequence is synthesized)
cccagggggagggtgcagatgagggagcgacccagattaggtgaggacagttctctcattagccttttcctacaggtggttgcattcttggcaatggtcatgggaacccacacctacagc

SEQ ID NO: 528420 - DNA, 120 bp, Artificial Sequence
  ENSG00000166090_3 (sequence is synthesized)
cactggcccagctgctgccccagcaaagggcaggacacctctgaggagctgctgaggtggagcactgtgcctgtgcctcccctagagcctgctaggcccaaccgccacccagagtcctgt

SEQ ID NO: 528421 - DNA, 120 bp, Artificial Sequence
  ENSG00000166090_4 (sequence is synthesized)
agggccagtgaagatggacccctcaacagcagggccatctccccctggagatatgagttggacagagacttgaaccggctcccccaggacctgtaccacgcccgttgcctgtgcccgcac

SEQ ID NO: 528422 - DNA, 120 bp, Artificial Sequence
  ENSG00000166090_5 (sequence is synthesized)
agggctactgcctggagcgcaggctgtaccgtgtttccttagcttgtgtgtgtgtgcggccccgtgtgatgggctagccggacctgctggaggctggtccctttttgggaaacctggagc

SEQ ID NO: 528423 - DNA, 120 bp, Artificial Sequence
  ENSG00000166090_6 (sequence is synthesized)
caggtgtacaaccacttgccatgaagggccaggatgcccagatgcttggcccctgtgaagtgctgtctggagcagcaggatcccgggacaggatggggggctttggggaaagcctgcact

SEQ ID NO: 528424 - DNA, 120 bp, Artificial Sequence
  ENSG00000166090_7 (sequence is synthesized)
tctgcacattttgaaaagagcagctgctgcttagggccgccggaagctggtgtcctgtcattttctctcaggaaaggttttcaaagttctgcccatttctggaggccaccactcctgtct

SEQ ID NO: 528425 - DNA, 120 bp, Artificial Sequence
  ENSG00000166090_8 (sequence is synthesized)
cttcctcttttcccatcccctgctaccctggcccagcacaggcactttctagatatttcccccttgctggagaagaaagagcccctggttttatttgtttgtttactcatcactcagtga

SEQ ID NO: 528426 - DNA, 120 bp, Artificial Sequence
  ENSG00000166090_9 (sequence is synthesized)
gcatctactttgggtgcattctagtgtagttactagtcttttgacatggatgattctgaggaggaagctgttattgaatgtatagagatttatccaaataaatatctttatttaaaaatg

SEQ ID NO: 528427 - DNA, 120 bp, Artificial Sequence
  ENSG00000166090_10 (sequence is synthesized)
ctcaagtcactccctaaaaagacagtggaaataaatttgaataaacaaaacaggcttgctgaaaataaaatcaggactcctaacctgctccagtcagcctgcttccacgaggcctgtcag

SEQ ID NO: 528428 - DNA, 120 bp, Artificial Sequence
  ENSG00000166091_0 (sequence is synthesized)
gttagagaagggggacacaaatgtcttcaggcttaggtccctgggggctcccagtcctgcccctgttcctctactcacatcccagctcctcccagtttcttttcggacctcctcctctcc

SEQ ID NO: 528429 - DNA, 120 bp, Artificial Sequence
  ENSG00000166091_1 (sequence is synthesized)
ccttccttctctattccaggctgggttgggctctaagcaaggggagggattagagcctccttcctctctgcccctccccatgggtctctagggggctggtgcaggcagcagcagaggcac

SEQ ID NO: 528430 - DNA, 120 bp, Artificial Sequence
  ENSG00000166091_2 (sequence is synthesized)
tctgggcagctgggtgagggcccatctgggcaaggcccccagcgcctgccttctctcccggggccctgtgggcaagcctcctgcttcactttcaggtttctcgaagtgccttcttgctcc

SEQ ID NO: 528431 - DNA, 120 bp, Artificial Sequence
  ENSG00000166091_3 (sequence is synthesized)
tgtctgtttccccatcctgccagatttctgtttctcttgctgggcttttggcagtagggggctgtgttggtgggccctacgaagatgctcagtgctcgagatcgccgggaccggcaccct

SEQ ID NO: 528432 - DNA, 120 bp, Artificial Sequence
  ENSG00000166091_4 (sequence is synthesized)
gaggagggggtagttgcagagctccagggcttcgcggtggacaaggccttcctcacctcccacaagggcatcctgctggaaaccgagctggccctgaccctcatcatcttcatctgcttc

SEQ ID NO: 528433 - DNA, 120 bp, Artificial Sequence
  ENSG00000166091_5 (sequence is synthesized)
acggcctccatctctgcctacatggccgcggcgctactggagttcttcatcacacttgccttcctcttcctctatgccacccagtactaccagcgcttcgaccgaattaactggccctgt

SEQ ID NO: 528434 - DNA, 120 bp, Artificial Sequence
  ENSG00000166091_6 (sequence is synthesized)
ctggacttcctgcgctgtgtcagtgccatcatcatcttcctggtggtctcctttgcagctgtgacctcccgggacggagctgccattgctgcttttgtttttggcatcatcctggtttcc

SEQ ID NO: 528435 - DNA, 120 bp, Artificial Sequence
  ENSG00000166091_7 (sequence is synthesized)
atctttgcctatgatgccttcaagatctaccggactgagatggcacccggggccagccagggggaccagcagtgactctggggctacctggctcctaggcccagccagccagagaggaca

SEQ ID NO: 528436 - DNA, 120 bp, Artificial Sequence
  ENSG00000166091_8 (sequence is synthesized)
gtggagcccagacacgtctccttgggattcactagcccccagcccgccaaaccccaccccagccctacacagcagtctggcctgagacgtcactggggacttatctgtggagcctggtgc

SEQ ID NO: 528437 - DNA, 120 bp, Artificial Sequence
  ENSG00000166091_9 (sequence is synthesized)
tccaggatgtggcttctcatgaagctctggccagaggaggggaacttattgggggagggggggtggaggggaggaatctggacctctaagtcattcccaaattaaaatattcaaattcta

SEQ ID NO: 528438 - DNA, 120 bp, Artificial Sequence
  ENSG00000166091_10 (sequence is synthesized)
tggcctggcttgacccccccgggctggcatactccagccgctgtcccctgggttccagccccagcgcctggcttctggtcctggttgctctggttcatctgcttccactccctgggtagc

SEQ ID NO: 528439 - DNA, 120 bp, Artificial Sequence
  ENSG00000166091_11 (sequence is synthesized)
catctccctgacccccggctcctggccagccttatgccagcccccagctcacccttcagtagcctccttccccaagccctctggacacctctcctgcccgcagctgccccttcttcgtct

SEQ ID NO: 528440 - DNA, 120 bp, Artificial Sequence
  ENSG00000166091_12 (sequence is synthesized)
cctactctgccttcttgctgcctctccacccggagacatttacagcaggtttcagttgcagcaggaaggactgcagttagacagggtgactttttgggacattgaggaagcttgagacat

SEQ ID NO: 528441 - DNA, 120 bp, Artificial Sequence
  ENSG00000166091_13 (sequence is synthesized)
agggatgggacaggggcaatgacagcctctaacatggccacttctcagcacgtccaagaagtctaactatcaaaaagggcagacttcctgcaactgcactttatctgtggtctgctgccc

SEQ ID NO: 528442 - DNA, 120 bp, Artificial Sequence
  ENSG00000166091_14 (sequence is synthesized)
agaaacatctcttctcaggaaaggatcttcccctggttacttagcaagaccacagtgtagagttaaggcctctgcacgtatgccaccctaggtcatcagagctaaaggggctcccagaaa

SEQ ID NO: 528443 - DNA, 120 bp, Artificial Sequence
  ENSG00000166091_15 (sequence is synthesized)
ccactgggcagcatctgccttctctcttggcatggaatcaaaggctctggtccttgtcagggggctttcaggcatctgggggtggggaaagcattatgaggcagggggctcctcttggtc

SEQ ID NO: 528444 - DNA, 120 bp, Artificial Sequence
  ENSG00000166091_16 (sequence is synthesized)
gggtctctgtgggcacaactccaggggctggcattcacactgtacctatgaattactgtgggatagtgctcctgggagccatatggcttggccagactgctggggttgctgggtgagcag

SEQ ID NO: 528445 - DNA, 120 bp, Artificial Sequence
  ENSG00000166091_17 (sequence is synthesized)
agtgggaggccggagactgcccttgaccggcaaatgccctgcaacggtggctcctgacaccaggggatagggagatgtgccagagtccttcctcccctccaaggacaggtagtaggtgcc

SEQ ID NO: 528446 - DNA, 120 bp, Artificial Sequence
  ENSG00000166091_18 (sequence is synthesized)
agcctaggggagcttccaaggaggggaaggcaaagccctggcccctgcctgtgtccccttcttggcatgttccacatgctcggtcctgcaggccctgaccctcatcatcttcatctgctt

SEQ ID NO: 528447 - DNA, 120 bp, Artificial Sequence
  ENSG00000166091_19 (sequence is synthesized)
ctagcccagtttggggcccttccctctcctctaaatgatgcattttcctttcctccccgagcttctttccatttccacaccacagctgggctttgtcccatgctatgccctgcactcaaa

SEQ ID NO: 528448 - DNA, 120 bp, Artificial Sequence
  ENSG00000166091_20 (sequence is synthesized)
ctggaaaacttcagggtaacgccccctgccttctgaggtcctgttaaccctgcacccctggcccccaggacttcctgcgctgtgtcagtgccatcatcatcttcctggtggtctcctttg

SEQ ID NO: 528449 - DNA, 120 bp, Artificial Sequence
  ENSG00000166091_21 (sequence is synthesized)
cagctgtgacctcccgggacggagctgccattgctgcttttgtgagttcagccctgcaggactccttagcccctcaagagctcaggctggtgcttgcacactttctgtatcagaagccac

SEQ ID NO: 528450 - DNA, 120 bp, Artificial Sequence
  ENSG00000166091_22 (sequence is synthesized)
agccaggacttggggttctggcttgcacctcaccctataccttaacccaatggccctatagcctctgttttgccatccccactcccactcccacaggtttttggcatcatcctggtttcc

SEQ ID NO: 528451 - DNA, 120 bp, Artificial Sequence
  ENSG00000166105_0 (sequence is synthesized)
ctccctgtgccagccggctgtcgacccaggttaggaagcccgaggtcggggcgttaccccaagggccctcccgcttcccctccgagggcagagaggcgtccgcgcccggacgcactgcgg

SEQ ID NO: 528452 - DNA, 120 bp, Artificial Sequence
  ENSG00000166105_1 (sequence is synthesized)
gaacacctggagcgccggcggagctcggctgtccccgcgggagggagcccgacgcgcatccttgggacccggacccggcgcccgcgcctcgggacggatttctgcctcggctgcaggcgc

SEQ ID NO: 528453 - DNA, 120 bp, Artificial Sequence
  ENSG00000166105_2 (sequence is synthesized)
gacctgagcctgccccgcggaaccggggctcgagtcccggcccgagcgcggcgtcggggccagcggagaggggcggaagccgcaagggaccctcggcgcctcggcctggccgcgatgaag

SEQ ID NO: 528454 - DNA, 120 bp, Artificial Sequence
  ENSG00000166105_3 (sequence is synthesized)
cgatgaagtccccgcccctcctcagcccgtgtctctcctggaagagaatggcgggcatctttttcctgccatttatctcatcaggttttgctcctcggtttaagcaggaagagaacttca

SEQ ID NO: 528455 - DNA, 120 bp, Artificial Sequence
  ENSG00000166105_4 (sequence is synthesized)
tgcttggaagagcgcatccgtcccagcctaggtttaattggtctcatctgacccctctggagctgaagaatcgatctgtgggacttggaactgaaagcacaggtcggggtaagccccact

SEQ ID NO: 528456 - DNA, 120 bp, Artificial Sequence
  ENSG00000166105_5 (sequence is synthesized)
tcacactggagggccacaagttcctgatcttcgggggctccatccactatttccgggtgcccagggagtactggagggaccgcctgctgaagctgaaggcctgtggcttcaatactgtca

SEQ ID NO: 528457 - DNA, 120 bp, Artificial Sequence
  ENSG00000166105_6 (sequence is synthesized)
ccacctatgttccgtggaacctgcatgagccagaaagaggcaaatttgacttctctgggaacctggacctggaggccttcgtcctgatggccgcagagatcgggctgtgggtgattctgc

SEQ ID NO: 528458 - DNA, 120 bp, Artificial Sequence
  ENSG00000166105_7 (sequence is synthesized)
gtccaggccgctacatctgcagtgagatggacctcgggggcttgcccagctggctcctgcaagacccccggttactgttgaggacaaccaacaagagcttcattgaagcagttgagaagt

SEQ ID NO: 528459 - DNA, 120 bp, Artificial Sequence
  ENSG00000166105_8 (sequence is synthesized)
attttgaccacctgattcccagagtgattcctctccagtaccgccaggcaggccctgtcatcgcggtgcaagtggagaatgagtatggctcattcaataaggataaaacatacatgccgt

SEQ ID NO: 528460 - DNA, 120 bp, Artificial Sequence
  ENSG00000166105_9 (sequence is synthesized)
atctccacaaggccctgctgagaagagggattgtggagcttctcttgacctctgatggtgagaaacatgtgctgagtggccacaccaaaggagtgttggccgccatcaatttgcaaaaac

SEQ ID NO: 528461 - DNA, 120 bp, Artificial Sequence
  ENSG00000166105_10 (sequence is synthesized)
ttcaccaggatactttcaatcagcttcataaagtccagagagataagccccttctgattatggaatactgggtcggctggttcgacagatggggagataagcaccatgttaaagatgcaa

SEQ ID NO: 528462 - DNA, 120 bp, Artificial Sequence
  ENSG00000166105_11 (sequence is synthesized)
aggaggttgaacatgctgtgtctgaattcatcaaatatgagatctccttcaatgtatatatgttccatggtggaaccaactttggtttcatgaacggggccacatatttcgggaagcact

SEQ ID NO: 528463 - DNA, 120 bp, Artificial Sequence
  ENSG00000166105_12 (sequence is synthesized)
atctgaagcttcaaaaactctttcaatctgtctcagcaactcccctgccccgagtacccaaacttcctcccaaggctgtgtatccccccgtgagaccgtcgctgtacctcccgctgtggg

SEQ ID NO: 528464 - DNA, 120 bp, Artificial Sequence
  ENSG00000166105_13 (sequence is synthesized)
acgccctatcctacttaaatgagccagtcaggtcgcgtcagcccgtcaacatggagaaccttcccataaacaatgggagcggccagtcctacgggcttgtcctgtatgagaagtccatct

SEQ ID NO: 528465 - DNA, 120 bp, Artificial Sequence
  ENSG00000166105_14 (sequence is synthesized)
gctccggaggccgcctccgtgcccacgctcatgacgtggcacaggtgtttttggatgagacaatgatagggattctgaatgagaataataaggacctgcacattcctgaactcagggact

SEQ ID NO: 528466 - DNA, 120 bp, Artificial Sequence
  ENSG00000166105_15 (sequence is synthesized)
gccgatacctgaggatcctggtggagaatcaaggacgagtcaatttttcatggcaaatacagaatgagcagaaaggaataactggatctgtcagcatcaataactcttccctggagggct

SEQ ID NO: 528467 - DNA, 120 bp, Artificial Sequence
  ENSG00000166105_16 (sequence is synthesized)
ttaccatctattccctggagatgaaaatgagcttctttgagaggctccgctctgccacctggaagcctgtcccagacagccaccagggcccggccttctactgtgggaccttgaaggctg

SEQ ID NO: 528468 - DNA, 120 bp, Artificial Sequence
  ENSG00000166105_17 (sequence is synthesized)
gcccttctcccaaggacaccttcctgagcctgctgaactggaattatggatttgtgttcatcaatggacgtaaccttgggcgatattggaatattgggcctcagaaaacactgtaccttc

SEQ ID NO: 528469 - DNA, 120 bp, Artificial Sequence
  ENSG00000166105_18 (sequence is synthesized)
ctggagtttggcttcatccagaagacaatgaggtcatcttgtttgagaagatgatgagtggctcagatatcaaatctacagacaagcccacgctgtaaaactgtgtctgaacattttttt

SEQ ID NO: 528470 - DNA, 120 bp, Artificial Sequence
  ENSG00000166105_19 (sequence is synthesized)
attacaggcgtgagccaccactcccggccgtgaacatattttttgggttgctggagttcatctataagtcatttttgaggaataagatttatgttaagactatcaaacacagtgttgcct

SEQ ID NO: 528471 - DNA, 120 bp, Artificial Sequence
  ENSG00000166105_20 (sequence is synthesized)
tatcaaacacagtgttgcctacaatagcaaaaatgtgaaaataacaacaacaacaaaacagcagaggaattgttatgtattttgtagtctatctatatgatgcctatttttaggctttaa

SEQ ID NO: 528472 - DNA, 120 bp, Artificial Sequence
  ENSG00000166105_21 (sequence is synthesized)
aaagtcttcaaaatctttaatgactgatttatctagttaaatgcttaatccttagcaggctcttattctttaattaaacgtgcctttgagtagatgtgaataaaataaaaacaagtttca

SEQ ID NO: 528473 - DNA, 120 bp, Artificial Sequence
  ENSG00000166105_22 (sequence is synthesized)
gcggccctagtggctggtctttcctgtgcttgggatgttggccttgtagagttacttctgtaatctcaagacagaaactgacagctttgtttgatcaaaattgttacttcaccttgcaca

SEQ ID NO: 528474 - DNA, 120 bp, Artificial Sequence
  ENSG00000166105_23 (sequence is synthesized)
ttttcaagagttctacaggtttaatgagcacagaaatctgggggaactttcactctccagggctccttcatagaggttctcaaatactccatcagcagaggggagccccagatggcaaaa

SEQ ID NO: 528475 - DNA, 120 bp, Artificial Sequence
  ENSG00000166105_24 (sequence is synthesized)
ggacacaggatatgtcatctttcaaatgaaccaataatccattatttgattcttctacctttgtcaaaattcctccagcaacgcctgcagaaaatcacaattcttgatacatagcttgtt

SEQ ID NO: 528476 - DNA, 120 bp, Artificial Sequence
  ENSG00000166105_25 (sequence is synthesized)
ccaataaagcaccacagcatttctagtgactgcaggcccagctgtcaaactctttcaacttgatagagaatatgtacacaaaacctatagctgtcatcatacttaatagtgaaaaacaga

SEQ ID NO: 528477 - DNA, 120 bp, Artificial Sequence
  ENSG00000166105_26 (sequence is synthesized)
atgttttccagctgacactggggacaaggtaacagtgtcagttcctgccgctcttattcaacacagaaattttagtcatcatactaagacacacaaaaaaaggaataaaaagccacgcag

SEQ ID NO: 528478 - DNA, 120 bp, Artificial Sequence
  ENSG00000166105_27 (sequence is synthesized)
actggaaaggtagaaataaaactctccatatttgcagatgacatgattatctacatggaaaatgccaagtaatacacaaataacctcttaaaattaataggtgagtttgccaaggtcaca

SEQ ID NO: 528479 - DNA, 120 bp, Artificial Sequence
  ENSG00000166105_28 (sequence is synthesized)
ggatatgagatcaacatgagaaacacaatcacatttctgtatgctaacaacaaacatgtaaaaactgaaataaaaataataacagtttaaatctcttgagagcaaaggaaatatttaagt

SEQ ID NO: 528480 - DNA, 120 bp, Artificial Sequence
  ENSG00000166105_29 (sequence is synthesized)
ataaacctaacaaaacgtgataggatctgatgttgaaaaaatcacacaattctgatgaaagaagtgaaaaaaaaaaaactatttaaatagacagacataccatgttcgtgggttggaaga

SEQ ID NO: 528481 - DNA, 120 bp, Artificial Sequence
  ENSG00000166105_30 (sequence is synthesized)
ttcaacataataaggatacaattctcaatttgatccataggttgattgcaattcctctcgaaataccaacatggctttttgtagaaacagacaagtttattctaaattttatgtgggaag

SEQ ID NO: 528482 - DNA, 120 bp, Artificial Sequence
  ENSG00000166105_31 (sequence is synthesized)
gcacaagccctagaatactttaaacttgacaaagaagaataaagtgtgtggctgtaaaaccaaactgtaaaaaattaacagttcattgcttgcagtcgaaaaaatgaggaaaagatggac

SEQ ID NO: 528483 - DNA, 120 bp, Artificial Sequence
  ENSG00000166105_32 (sequence is synthesized)
gatctaggaaactttcagggagctaaggtgtcggagagcaaagtatccttgtaaggaatgagacaagataaactccctcccccacacacagtattttcagagaactacattcttggtttc

SEQ ID NO: 528484 - DNA, 120 bp, Artificial Sequence
  ENSG00000166105_33 (sequence is synthesized)
aacctgatgtcataggctgtgttctttgcaacggaagaagcaaagacttcaaagggagaaatcggaagatttcttttttcatcgtagggacttcacatcagcgtttccaaaaccgagtcc

SEQ ID NO: 528485 - DNA, 120 bp, Artificial Sequence
  ENSG00000166105_34 (sequence is synthesized)
atcgccttttccctctgcgcagcctctatcccttcctgtgtttcgcatctcaataaacgtccccgccaagtgacttcagcctgaaacatgcggcctcccggactcctctctgtgtcaccg

SEQ ID NO: 528486 - DNA, 120 bp, Artificial Sequence
  ENSG00000166105_35 (sequence is synthesized)
acctcttgcgctcagttctccggagctgccggtttaacctcgcaagtcttcccggaacccgtgccctcctcctgggcagcgttaccaccacgagcgcctacctgagaggacgcctgttct

SEQ ID NO: 528487 - DNA, 120 bp, Artificial Sequence
  ENSG00000166105_36 (sequence is synthesized)
ctgtcttctggaagggtctgggcagctcggcgtggcgtccacggccccaccaggcctctgcctcctgcaggtcccgctacttcgtcaccaaagcgcccgccgcgctcgcatctgctgtga

SEQ ID NO: 528488 - DNA, 120 bp, Artificial Sequence
  ENSG00000166105_37 (sequence is synthesized)
ggctgtgctcgggccgctcccgccgagggaacggccctcccaaggctctgcgccccaattctcgctcgtttgccaagaggtagccgtgtcggggagctagagttctccggggactctctc

SEQ ID NO: 528489 - DNA, 120 bp, Artificial Sequence
  ENSG00000166105_38 (sequence is synthesized)
ctgcccctcgtggccctctgtggaaccctcgttttaggatctgcacgccgtttccagtcgcgcgcgcggcacggagaccgcccgctgtgccccgcgctgcgctctctccgcccctctccc

SEQ ID NO: 528490 - DNA, 120 bp, Artificial Sequence
  ENSG00000166105_39 (sequence is synthesized)
tgtgattcttccataattttgtccttctaagcttctgatgcactgaattatgtaaagtgcattcccttcaccagcttgtgcaccctattctgtaactgataataaatggttggtattgca

SEQ ID NO: 528491 - DNA, 120 bp, Artificial Sequence
  ENSG00000166105_40 (sequence is synthesized)
gccagagtgagactccgtctcgaaaaaaaacaaaaacccagaaagactgaatatttggatggaagttttaccagaagcacaaatgccgttcacaggcacatgtatgcaacgaggaaagct

SEQ ID NO: 528492 - DNA, 120 bp, Artificial Sequence
  ENSG00000166105_41 (sequence is synthesized)
gaggtacacatttagagttagttcacaggagaacagggctctcagccagcccgtgtaaatcttgaacacactgcagagaaaaccaagtgcatctcgatacctccctttcccgtgtccact

SEQ ID NO: 528493 - DNA, 120 bp, Artificial Sequence
  ENSG00000166105_42 (sequence is synthesized)
gggatggatcctggagttcgatgttacaataaatgaggactcaaggttaaggctcagggccactcacagctccctatcttggccttgctcctgccgtctttaaacacagcagcactggag

SEQ ID NO: 528494 - DNA, 120 bp, Artificial Sequence
  ENSG00000166105_43 (sequence is synthesized)
ctcctctgttctcaggacgcctttccatctcccatagtttttctgtggcaagaaatctgcattggtgctgcgcctggcttgggatcagggccatctccactaacttgggaaaccacaggg

SEQ ID NO: 528495 - DNA, 120 bp, Artificial Sequence
  ENSG00000166105_44 (sequence is synthesized)
agaaccagaagatgggtgttgtgtcaggaaccccgcctagatccggttccattcctgggatcctaccgcccaaggctctgtgtggacacttaggagatcctagagaattaagtggcagga

SEQ ID NO: 528496 - DNA, 120 bp, Artificial Sequence
  ENSG00000166105_45 (sequence is synthesized)
agattctggacggactcatcagatggcaatagtgagggacacgcccgggagtgagcaggggagcggggcgagctgctgccggcggctgccgttctgcctccttagtagtggctcttccaa

SEQ ID NO: 528497 - DNA, 120 bp, Artificial Sequence
  ENSG00000166105_46 (sequence is synthesized)
ggaagcctggcacactggaacacgtgctgagcttggggccaggaagcctgtgtcccgtttccagtctaatcatgtcagggagccttggcctggctcacttctctgcacagagtgtggtta

SEQ ID NO: 528498 - DNA, 120 bp, Artificial Sequence
  ENSG00000166105_47 (sequence is synthesized)
atttcaacagtgggtgtcctcgcaagtgtcagggatgtggcgatggccgtggcagccctttggatgtggcagagtggggtccagacagcatctcgccatcctcactgctgagcatgggtt

SEQ ID NO: 528499 - DNA, 120 bp, Artificial Sequence
  ENSG00000166105_48 (sequence is synthesized)
ctcatgcctcagctgggtctctctcttctttatgcagtgttggccgccatcaatttgcaaaaacttcaccaggatactttcaatcagcttcataaagtccagccagtcaggtcgcgtcag

SEQ ID NO: 528500 - DNA, 120 bp, Artificial Sequence
  ENSG00000166105_49 (sequence is synthesized)
ggctccggaagcctgttctggcaccactgggttcttgacctataatctatgctgagtactgaagattttcctatctactttccttccttctgtatgttcataatgccccaacaggctgtc

SEQ ID NO: 528501 - DNA, 120 bp, Artificial Sequence
  ENSG00000166105_50 (sequence is synthesized)
attgcagtagacagggctttccgggacttagagctccgcttcacacatctggtatactgccctgttggcttgaacctctgaagagaggcagggtaggaacggtgactgctgtaaaggcac

SEQ ID NO: 528502 - DNA, 120 bp, Artificial Sequence
  ENSG00000166105_51 (sequence is synthesized)
gtaggaacggtgactgctgtaaaggcacagacctgcacggccgggcgatacagactgagcaaagaaaagagtacccgttgaaggggtgtccactcttttggcttccctgggccacactgg

SEQ ID NO: 528503 - DNA, 60 bp, Artificial Sequence
  ENSG00000166105_52 (sequence is synthesized)
aaaaaacacacctgtagcccatgagctgtgggttgaacaagtttgcattagaaagtgaag

SEQ ID NO: 528504 - DNA, 120 bp, Artificial Sequence
  ENSG00000166105_53 (sequence is synthesized)
atgagctgtgggttgaacaagtttgcattagaaagtgaagaagtgggggcaagcccagtgtcatggcttgacactggaagccagtggaaggtgcccaggaagagttgtggggaatgtcct

SEQ ID NO: 528505 - DNA, 120 bp, Artificial Sequence
  ENSG00000166105_54 (sequence is synthesized)
tagactggcatcacacacccacgtgggatggaaggtgtcttccttttgtctcactcacggtggccctggccatctcctgccagcggtgctgaaacagggcctcctgcagagactgcatgg

SEQ ID NO: 528506 - DNA, 120 bp, Artificial Sequence
  ENSG00000166105_55 (sequence is synthesized)
ctggtgactggccctggtgtcttgcagactatgatgcagtgctcacggaggctggagattacacagaaaaatatctgaagcttcaaaaactctttcaatctgtctcaggtactcagcacc

SEQ ID NO: 528507 - DNA, 120 bp, Artificial Sequence
  ENSG00000166105_56 (sequence is synthesized)
catttaacttacgggccagccctcctcatgtggagtctctgttctgtggaaaagtgaggaaggcgtgggtctcccttgtgggcagcagttacaccaagctcctgagaacaagggcaacct

SEQ ID NO: 528508 - DNA, 120 bp, Artificial Sequence
  ENSG00000166105_57 (sequence is synthesized)
taacttcgaaccctggggttaaaatctgtgtgattttttaaaatcagggtttctaagcattttataagcctcagtttcttcactgaagcataaagatagtaaccttggtctcctgtgatg

SEQ ID NO: 528509 - DNA, 120 bp, Artificial Sequence
  ENSG00000166105_58 (sequence is synthesized)
actgcgaagattgagttactctttgtaaagctcttataccatggatgacatagtaacccccaatatgaaaggaaaagccatgctggataggcatggggggcttagagaaggcagtggtca

SEQ ID NO: 528510 - DNA, 120 bp, Artificial Sequence
  ENSG00000166105_59 (sequence is synthesized)
tgggacgccctatcctacttaaatgaggtgcgtgctgcctggccacaggaggcggagtggccattggagggatgggggagggattccttcaggaaactttttattaggaagtgggaaaac

SEQ ID NO: 528511 - DNA, 120 bp, Artificial Sequence
  ENSG00000166105_60 (sequence is synthesized)
aaatcctctgcatttcattcaaatttagaactgtgggacaagagccaccagctccttccgggtggactgtgaaggggtttgaccttggagtcagtgtgcaggggaggggcagcaggacgt

SEQ ID NO: 528512 - DNA, 120 bp, Artificial Sequence
  ENSG00000166105_61 (sequence is synthesized)
cggaggatcccgggttcccgcttagatgaacctgtctggagatgctcttgtttggactgtgtggtccttacggaatccacgtaggaaaagctgctgagctggaatcgggagactagcttc

SEQ ID NO: 528513 - DNA, 120 bp, Artificial Sequence
  ENSG00000166105_62 (sequence is synthesized)
tgcccgtgcttcaccagcagctgggcctgaacttcctgggtcactgctcccccttttccatcagccttcctgtcctattttgaagaaaggtgaaagctgtttggaactgaaactgtagcc

SEQ ID NO: 528514 - DNA, 120 bp, Artificial Sequence
  ENSG00000166105_63 (sequence is synthesized)
ctctgctatcactattttagagaaaaggtagtgactggtacactaaagaaactacatttatttaatgtaactaaatttaatttaatgaaataaacatttgcttggtgcctcattcattgc

SEQ ID NO: 528515 - DNA, 120 bp, Artificial Sequence
  ENSG00000166105_64 (sequence is synthesized)
ttgctagacttcaactattttagaatacaatttatttactctttttttttcttgagacagggtcttgcttggtggctgtggctggaatgcggtggcacaatcatggctcactgcagcctt

SEQ ID NO: 528516 - DNA, 88 bp, Artificial Sequence
  ENSG00000166105_65 (sequence is synthesized)
tgaagcaatcctccgagggcaccaccacgcccagctacatttttaagttttttgtagatgtgggtctcactatgttgcccaggctgct

SEQ ID NO: 528517 - DNA, 72 bp, Artificial Sequence
  ENSG00000166105_66 (sequence is synthesized)
atccatttcctctgttaatcagttcttaggattataacgattgctccctcatcaccatgccctgcatttccc

SEQ ID NO: 528518 - DNA, 120 bp, Artificial Sequence
  ENSG00000166105_67 (sequence is synthesized)
tataacgattgctccctcatcaccatgccctgcatttccctgagtttccttcctgggcagtggagacgtaagcacagagcagtgtcacatggcatctgtttcatcatttcccatttgaag

SEQ ID NO: 528519 - DNA, 120 bp, Artificial Sequence
  ENSG00000166105_68 (sequence is synthesized)
aacccttggggaccattaggcaggaccaaatgacagggtcttaggaaggaggatcctgactgctcagcccttggacttctgctcttgccatttctcctcatagccagtcaggtcgcgtca

SEQ ID NO: 528520 - DNA, 120 bp, Artificial Sequence
  ENSG00000166105_69 (sequence is synthesized)
ctccacaaggtaagagggccttggtttggccccatgtttacatgcctccttcctcctctgtgcgtttctgattcctggatgcatgagtgatcgggctggacactgtgcattctgagaatg

SEQ ID NO: 528521 - DNA, 120 bp, Artificial Sequence
  ENSG00000166106_0 (sequence is synthesized)
atgcttctgctgggcatcctaaccctggctttcgccgggcgaaccgctggaggctctgagccagagcgggaggtagtcgttcccatccgactggacccggacattaacggccgccgctac

SEQ ID NO: 528522 - DNA, 120 bp, Artificial Sequence
  ENSG00000166106_1 (sequence is synthesized)
tactggcggggtcccgaggactccggggatcagggactcatttttcagatcacagcatttcaggaggacttttacctacacctgacgccggatgctcagttcttggctcccgccttctcc

SEQ ID NO: 528523 - DNA, 120 bp, Artificial Sequence
  ENSG00000166106_2 (sequence is synthesized)
actgagcatctgggcgtccccctccaggggctcaccgggggctcttcagacctgcgacgctgcttctattctggggacgtgaacgccgagccggactcgttcgctgctgtgagcctgtgc

SEQ ID NO: 528524 - DNA, 120 bp, Artificial Sequence
  ENSG00000166106_3 (sequence is synthesized)
ggggggctccgcggagcctttggctaccgaggcgccgagtatgtcattagcccgctgcccaatgctagcgcgccggcggcgcagcgcaacagccagggcgcacaccttctccagcgccgg

SEQ ID NO: 528525 - DNA, 120 bp, Artificial Sequence
  ENSG00000166106_4 (sequence is synthesized)
ggtgttccgggcgggccttccggagaccccacctctcgctgcggggtggcctcgggctggaaccccgccatcctacgggccctggacccttacaagccgcggcgggcgggcttcggggag

SEQ ID NO: 528526 - DNA, 120 bp, Artificial Sequence
  ENSG00000166106_5 (sequence is synthesized)
agtcgtagccggcgcaggtctgggcgcgccaagcgtttcgtgtctatcccgcggtacgtggagacgctggtggtcgcggacgagtcaatggtcaagttccacggcgcggacctggaacat

SEQ ID NO: 528527 - DNA, 120 bp, Artificial Sequence
  ENSG00000166106_6 (sequence is synthesized)
tatctgctgacgctgctggcaacggcggcgcgactctaccgccatcccagcatcctcaaccccatcaacatcgttgtggtcaaggtgctgcttcttagagatcgtgactccgggcccaag

SEQ ID NO: 528528 - DNA, 120 bp, Artificial Sequence
  ENSG00000166106_7 (sequence is synthesized)
gtcaccggcaatgcggccctgacgctgcgcaacttctgtgcctggcagaagaagctgaacaaagtgagtgacaagcaccccgagtactgggacactgccatcctcttcaccaggcaggac

SEQ ID NO: 528529 - DNA, 120 bp, Artificial Sequence
  ENSG00000166106_8 (sequence is synthesized)
ctgtgtggagccaccacctgtgacaccctgggcatggctgatgtgggtaccatgtgtgaccccaagagaagctgctctgtcattgaggacgatgggcttccatcagccttcaccactgcc

SEQ ID NO: 528530 - DNA, 120 bp, Artificial Sequence
  ENSG00000166106_9 (sequence is synthesized)
cacgagctgggccacgtgttcaacatgccccatgacaatgtgaaagtctgtgaggaggtgtttgggaagctccgagccaaccacatgatgtccccgaccctcatccagatcgaccgtgcc

SEQ ID NO: 528531 - DNA, 120 bp, Artificial Sequence
  ENSG00000166106_10 (sequence is synthesized)
aacccctggtcagcctgcagtgctgccatcatcaccgacttcctggacagcgggcacggtgactgcctcctggaccaacccagcaagcccatctccctgcccgaggatctgccgggcgcc

SEQ ID NO: 528532 - DNA, 120 bp, Artificial Sequence
  ENSG00000166106_11 (sequence is synthesized)
agctacaccctgagccagcagtgcgagctggcttttggcgtgggctccaagccctgtccttacatgcagtactgcaccaagctgtggtgcaccgggaaggccaagggacagatggtgtgc

SEQ ID NO: 528533 - DNA, 120 bp, Artificial Sequence
  ENSG00000166106_12 (sequence is synthesized)
cagacccgccacttcccctgggccgatggcaccagctgtggcgagggcaagctctgcctcaaaggggcctgcgtggagagacacaacctcaacaagcacagggtggatggttcctgggcc

SEQ ID NO: 528534 - DNA, 120 bp, Artificial Sequence
  ENSG00000166106_13 (sequence is synthesized)
aaatgggatccctatggcccctgctcgcgcacatgtggtgggggcgtgcagctggccaggaggcagtgcaccaaccccacccctgccaacgggggcaagtactgcgagggagtgagggtg

SEQ ID NO: 528535 - DNA, 120 bp, Artificial Sequence
  ENSG00000166106_14 (sequence is synthesized)
aaataccgatcctgcaatctggagccctgccccagctcagcctccggaaagagcttccgggaggagcagtgtgaggctttcaacggctacaaccacagcaccaaccggctcactctcgcc

SEQ ID NO: 528536 - DNA, 120 bp, Artificial Sequence
  ENSG00000166106_15 (sequence is synthesized)
gtggcatgggtgcccaagtactccggcgtgtctccccgggacaagtgcaagctcatctgccgagccaatggcactggctacttctatgtgctggcacccaaggtggtggacggcacgctg

SEQ ID NO: 528537 - DNA, 120 bp, Artificial Sequence
  ENSG00000166106_16 (sequence is synthesized)
tgctctcctgactccacctccgtctgtgtccaaggcaagtgcatcaaggctggctgtgatgggaacctgggctccaagaagagattcgacaagtgtggggtgtgtgggggagacaataag

SEQ ID NO: 528538 - DNA, 120 bp, Artificial Sequence
  ENSG00000166106_17 (sequence is synthesized)
agctgcaagaaggtgactggactcttcaccaagcccatgcatggctacaatttcgtggtggccatccccgcaggcgcctcaagcatcgacatccgccagcgcggttacaaagggctgatc

SEQ ID NO: 528539 - DNA, 120 bp, Artificial Sequence
  ENSG00000166106_18 (sequence is synthesized)
ggggatgacaactacctggctctgaagaacagccaaggcaagtacctgctcaacgggcatttcgtggtgtcggcggtggagcgggacctggtggtgaagggcagtctgctgcggtacagc

SEQ ID NO: 528540 - DNA, 120 bp, Artificial Sequence
  ENSG00000166106_19 (sequence is synthesized)
ggcacgggcacagcggtggagagcctgcaggcttcccggcccatcctggagccgctgaccgtggaggtcctctccgtggggaagatgacaccgccccgggtccgctactccttctatctg

SEQ ID NO: 528541 - DNA, 120 bp, Artificial Sequence
  ENSG00000166106_20 (sequence is synthesized)
cccaaagagcctcgggaggacaagtcctctcatcccaaggacccccggggaccctctgtcttgcacaacagcgtcctcagcctctccaaccaggtggagcagccggacgacaggccccct

SEQ ID NO: 528542 - DNA, 120 bp, Artificial Sequence
  ENSG00000166106_21 (sequence is synthesized)
gcacgctgggtggctggcagctgggggccgtgctccgcgagctgcggcagtggcctgcagaagcgggcggtggactgccggggctccgccgggcagcgcacggtccctgcctgtgatgca

SEQ ID NO: 528543 - DNA, 120 bp, Artificial Sequence
  ENSG00000166106_22 (sequence is synthesized)
gcccatcggcccgtggagacacaagcctgcggggagccctgccccacctgggagctcagcgcctggtcaccctgctccaagagctgcggccggggatttcagaggcgctcactcaagtgt

SEQ ID NO: 528544 - DNA, 120 bp, Artificial Sequence
  ENSG00000166106_23 (sequence is synthesized)
cagtgcaacttgcaccgcaagccccaggagctggacttctgcgtcctgaggccgtgctgagtggggtcatcgctttctccccctcactctccaccccactgatatgccagcgttctgcca

SEQ ID NO: 528545 - DNA, 120 bp, Artificial Sequence
  ENSG00000166106_24 (sequence is synthesized)
gctggagtagcgggcagaggacggtggccaggggctcacgccacgatgtcacccacatccggggacaaggaccatgggctggggcgagaggttccctcctcctccctggactgggcagag

SEQ ID NO: 528546 - DNA, 120 bp, Artificial Sequence
  ENSG00000166106_25 (sequence is synthesized)
ggaagcccaggaactcccgcacagtctacctcaggccccgctcctcgggccggttgcggggagaggctttgaggtgcagggcagaaggtgctgaggcccagtttccaaggaacttggagg

SEQ ID NO: 528547 - DNA, 120 bp, Artificial Sequence
  ENSG00000166106_26 (sequence is synthesized)
atgggcaccttccaggcagaacttcagggaccccggcccccagaacggaggccacaggctgctggaagagccatgtcccagcagcttggcaccctcaggtggccccatgggctctgagcc

SEQ ID NO: 528548 - DNA, 120 bp, Artificial Sequence
  ENSG00000166106_27 (sequence is synthesized)
gtgtctgaacgaggcagggttttcacggtgcttttagcccactttcctttttgaactgacatggactaagcaataaaagctggctggggctgggcagaagccacggggagagtgagatta

SEQ ID NO: 528549 - DNA, 120 bp, Artificial Sequence
  ENSG00000166106_28 (sequence is synthesized)
gggcccctggagcctggcactccaccttggaagacgtggacgtgcacagggagtcccgaggtttctcatcctgcactcttggccctcctataaagaagcagcctctccttcctctgatgt

SEQ ID NO: 528550 - DNA, 120 bp, Artificial Sequence
  ENSG00000166106_29 (sequence is synthesized)
gcagggtgtaggactagtggtagggctgccacggaagtgtcctctgaggctctgcaggtagcggggaaagccagtagggagtctgctgtcttcttcaagatggagccggccattacagaa

SEQ ID NO: 528551 - DNA, 120 bp, Artificial Sequence
  ENSG00000166106_30 (sequence is synthesized)
agatgttgacatttgctaggggctatgcagtctgtggctgatgcagggagttttcagaaagttctggagggttctgctgtcactggactggggttggtgctgagctctgggcctggcttt

SEQ ID NO: 528552 - DNA, 120 bp, Artificial Sequence
  ENSG00000166106_31 (sequence is synthesized)
gggagatgtcaccctgggatagggaggaggaagctgcatttctaatggcttcctcctccagagaggcacgtatatgcaggctgacatccgagggtctgtgtcgcctcagacagccctgac

SEQ ID NO: 528553 - DNA, 120 bp, Artificial Sequence
  ENSG00000166106_32 (sequence is synthesized)
agtggccacagtcccgtacccattgtgaggggctggggcatgcctaggagggctaggtgctgaacatctatgtgcctataaactcgtcttcgttccaaacagctactgctgtctgccctg

SEQ ID NO: 528554 - DNA, 120 bp, Artificial Sequence
  ENSG00000166106_33 (sequence is synthesized)
ggcacgtcacgttgcatcctaggccttagcttctccactgtttgctacctcagattatgccctctgggaacccagccgtatccctcccctaggacagtggtgacctggtccttccaccac

SEQ ID NO: 528555 - DNA, 120 bp, Artificial Sequence
  ENSG00000166106_34 (sequence is synthesized)
actcagtctttggagagcgagctgtccagccacagaaatgagggtgtggtgcgtggcttcctgctccccacagcccagccccctgttggggctccaaagccgaagacagggcctcttcag

SEQ ID NO: 528556 - DNA, 120 bp, Artificial Sequence
  ENSG00000166106_35 (sequence is synthesized)
actccttgggagtaggtttcaggaggcaccaagaatcaatgactgacccagggggcctggcagccactagtatgaactgctggagacctgtctgtcttatagacatgtcaggaaaataga

SEQ ID NO: 528557 - DNA, 120 bp, Artificial Sequence
  ENSG00000166106_36 (sequence is synthesized)
aacaggcattttctctagctccaagtggggagatattttggggtcacagcttctttggctaagcagggtgtttcttgaaggttcagatgccccactgtgtacatgggatattctgcttct

SEQ ID NO: 528558 - DNA, 120 bp, Artificial Sequence
  ENSG00000166106_37 (sequence is synthesized)
gagtgtaggtgatgaatccaggtcctcagtggagaattttctggagctaagatcaaagcatgtgtcttcctgggagagaagagttccgttcttttatgtgggtttccctaatagtcagaa

SEQ ID NO: 528559 - DNA, 120 bp, Artificial Sequence
  ENSG00000166106_38 (sequence is synthesized)
tccacaaaccagccagccagccagccaagcctctgcgatgatgttctcatccggtctaacgctgggctggaaaccttggacagagttcatgcgggggcagagggggtgccagtctctgag

SEQ ID NO: 528560 - DNA, 120 bp, Artificial Sequence
  ENSG00000166106_39 (sequence is synthesized)
gcagggctgcagtcacccctgaagaactaagtgaacaggaacccctctgtgccagtgaccactgtggggctaaagggacaaaaaggaccagggtaccaggcagaagcagatccttgatag

SEQ ID NO: 528561 - DNA, 120 bp, Artificial Sequence
  ENSG00000166106_40 (sequence is synthesized)
ctgacgacagcactgcgccctgtgcttggtgcactccctccttcaggaggagagggtggcatggggtctgtgcgggatggcagggggattgggtgggtgggaagagaggtgccatcggta

SEQ ID NO: 528562 - DNA, 120 bp, Artificial Sequence
  ENSG00000166106_41 (sequence is synthesized)
ggaggctggcctccagtagaggagagcagcttttgccatcagtcactttacaaaccatttcaaggaaggacaacctctctggctcctgacacaagccaggcctcggtgcttttatctgtt

SEQ ID NO: 528563 - DNA, 120 bp, Artificial Sequence
  ENSG00000166106_42 (sequence is synthesized)
gtggtggtttttcttctttccctttttaaaagacgcatgaccaagacaacctagggagtttgtcttgcttgcctttgactatttccttaatccaaccatgctctcgagggctgagcagag

SEQ ID NO: 528564 - DNA, 120 bp, Artificial Sequence
  ENSG00000166106_43 (sequence is synthesized)
actagactcaaggcacaggtttctggtgatggagtaaagttacagcggtatctcatgtctacacaagaagaggaacgttctgaaagctccaacaacttcttgagggggatggaccaatac

SEQ ID NO: 528565 - DNA, 120 bp, Artificial Sequence
  ENSG00000166106_44 (sequence is synthesized)
agctttgggctcaggattccctagcctcctctgcccatcgcgtgcactgattggaggagtctggcccaaacactctcatatgaacctcgacatgctggagtggggtctggcaggagctga

SEQ ID NO: 528566 - DNA, 120 bp, Artificial Sequence
  ENSG00000166106_45 (sequence is synthesized)
tgacagtttgagggacttgagtgtccctagcctggcagttggctcccggaagcactagacactgacactcattggtagaccctccctccccgccgttgtgtttggttcttttgcactcca

SEQ ID NO: 528567 - DNA, 120 bp, Artificial Sequence
  ENSG00000166106_46 (sequence is synthesized)
tgtactgcagaaggatggaaggacctgggtgctggctgggctgtgtatactgtgtatacaagggagctggctgctgaggtgaccacagccttctcctaataaagctgtaagtatttaaaa

SEQ ID NO: 528568 - DNA, 120 bp, Artificial Sequence
  ENSG00000166111_0 (sequence is synthesized)
actctcgccgcggtctcctggcggcggaggctttgtctcgtgggctggtccccagcggctccctccccgaacagctgctgctccagggaggaagcggcgcgggtgctgtccagcttcccg

SEQ ID NO: 528569 - DNA, 120 bp, Artificial Sequence
  ENSG00000166111_1 (sequence is synthesized)
gtgctgaaaaccggagggctcgtcatccaccactaccatgtaagggccatgagaagggctcatcctggcgcagcgcggacatggaggaggacttattccagctaaggcagctgccggttg

SEQ ID NO: 528570 - DNA, 120 bp, Artificial Sequence
  ENSG00000166111_2 (sequence is synthesized)
tgaaattccgtcgcacaggcgagagtgcaaggtcagaggacgacacggcttcaggagagcatgaagtccagattgaaggggtccacgtgggcctagaggctgtggagctggatgatgggg

SEQ ID NO: 528571 - DNA, 120 bp, Artificial Sequence
  ENSG00000166111_3 (sequence is synthesized)
cagctgtgcccaaggagtttgccaatcccactgatgatactttcatggtggaagatgcagtggaagccattggctttggaaaatttcagtggaagctgtctgttctcactggcttggctt

SEQ ID NO: 528572 - DNA, 120 bp, Artificial Sequence
  ENSG00000166111_4 (sequence is synthesized)
ggatggctgatgccatggagatgatgatcctcagcatcctggcaccacagctgcattgcgagtggaggctcccaagctggcaggtggcattgctgacctcggtggtctttgtaggcatga

SEQ ID NO: 528573 - DNA, 120 bp, Artificial Sequence
  ENSG00000166111_5 (sequence is synthesized)
tgtccagctccacgctctggggaaatatctcagaccagtacggcaggaaaacagggctgaagatcagcgtgctgtggactctgtactatggcatccttagtgcatttgcgcccgtgtata

SEQ ID NO: 528574 - DNA, 120 bp, Artificial Sequence
  ENSG00000166111_6 (sequence is synthesized)
gctggatcctggtgctccggggcctggtgggcttcgggatcggaggagttccccagtcggtgacgctgtatgccgagttccttcccatgaaagccagagctaaatgtattttgctgattg

SEQ ID NO: 528575 - DNA, 120 bp, Artificial Sequence
  ENSG00000166111_7 (sequence is synthesized)
aggtattctgggccatcgggacagtgttcgaggtcgtcctggctgtgttcgtgatgcccagcctgggctggcgttggctgctcatcctctcagctgtcccgctcctcctctttgccgtgc

SEQ ID NO: 528576 - DNA, 120 bp, Artificial Sequence
  ENSG00000166111_8 (sequence is synthesized)
tgtgtttctggctgcctgaaagtgcaaggtatgatgtgctgtcagggaaccaggaaaaggcaatcgccaccttaaagaggatagcaactgaaaacggagctcccatgccgctggggaaac

SEQ ID NO: 528577 - DNA, 120 bp, Artificial Sequence
  ENSG00000166111_9 (sequence is synthesized)
tcatcatctccagacaggaagaccgaggcaaaatgagggaccttttcacaccccattttagatggacaactttgctgctgtggtttatatggttttccaatgcattctcttactacgggt

SEQ ID NO: 528578 - DNA, 120 bp, Artificial Sequence
  ENSG00000166111_10 (sequence is synthesized)
tagttctactcaccacagaactcttccaggcaggagatgtctgcggcatctccagtcggaagaaggctgtagaggcaaaatgcagcctggcctgcgagtacctgagtgaggaggattaca

SEQ ID NO: 528579 - DNA, 120 bp, Artificial Sequence
  ENSG00000166111_11 (sequence is synthesized)
tggacttgctgtggaccaccctctctgagtttccaggtgtccttgtgactctgtggattattgaccgcctggggcgcaagaagaccatggccctgtgctttgtcatcttctccttctgca

SEQ ID NO: 528580 - DNA, 120 bp, Artificial Sequence
  ENSG00000166111_12 (sequence is synthesized)
gcctcctgctgtttatctgtgttggaagaaatgtgctcactctgttactcttcattgcaagagcgtttatttctggaggctttcaagcggcatatgtttacacacctgaggtctacccca

SEQ ID NO: 528581 - DNA, 120 bp, Artificial Sequence
  ENSG00000166111_13 (sequence is synthesized)
cggcaacgcgggccctcggcctgggcacctgcagcggcatggcaagagtgggtgctctcatcactccgttcatcgcccaggtgatgctggaatcctctgtgtacctgactctggcagttt

SEQ ID NO: 528582 - DNA, 120 bp, Artificial Sequence
  ENSG00000166111_14 (sequence is synthesized)
acagtggctgctgcctcctggctgccctggcctcctgctttttgcccattgagaccaaaggccgaggactgcaggagtccagccaccgggagtggggccaggagatggtcggccgaggaa

SEQ ID NO: 528583 - DNA, 120 bp, Artificial Sequence
  ENSG00000166111_15 (sequence is synthesized)
tgcacggtgcaggtgttaccaggtcgaactctggctctcaggaatagtgaccgatgggggactgagctggtctttgaggctgcagagcttggggggctggcaggccccaactggggcact

SEQ ID NO: 528584 - DNA, 120 bp, Artificial Sequence
  ENSG00000166111_16 (sequence is synthesized)
gattgtcactgccgacatcaagaactcacccaagagtatgacctggaccaacagggttttgtgtcttgactcagtttgctcatcttcattgaggtccacccagggatggggagatgtttg

SEQ ID NO: 528585 - DNA, 120 bp, Artificial Sequence
  ENSG00000166111_17 (sequence is synthesized)
ctctagggggttctctgtatatgtggtgaaagctttgttcataacctgtggatctacatgggaagactacccatattaggagggtctggtaatgccagcaaccaatcagacaccacccag

SEQ ID NO: 528586 - DNA, 120 bp, Artificial Sequence
  ENSG00000166111_18 (sequence is synthesized)
agtcacccggccaaaccctcagtgaacaaccaaaatatctctctgtagataccgtccaggctcaggcccatgtgacacctgctgtccacccaccggacctgttcagtaggtttctcccac

SEQ ID NO: 528587 - DNA, 120 bp, Artificial Sequence
  ENSG00000166111_19 (sequence is synthesized)
actcacagccccaggctttcttctttgaaattgcaggcgatctaggtgtggtctgagcagctatttcctggcaggggccccccggtttgcctccctagagcctgaccagtggattctctg

SEQ ID NO: 528588 - DNA, 120 bp, Artificial Sequence
  ENSG00000166111_20 (sequence is synthesized)
gcagatggacatggtgcattcaaactggagccacatgcccccacccagccccctctggagttgccgttgttggcaccaagagatccagatgtgtccctggggacagctggtcttgcacca

SEQ ID NO: 528589 - DNA, 120 bp, Artificial Sequence
  ENSG00000166111_21 (sequence is synthesized)
ggtgacaacctcagaacgccgttaccccctgggaactgaggactgaggccaaagtgaatcaagctgaagtcagagcacgggcctccccttctgaagcagcgaaggccacggttccgactt

SEQ ID NO: 528590 - DNA, 87 bp, Artificial Sequence
  ENSG00000166111_22 (sequence is synthesized)
gcctccccttctgaagcagcgaaggccacggttccgacttctttcctggccccctccttggtcaggctgaatggtgacttttattgt

SEQ ID NO: 528591 - DNA, 120 bp, Artificial Sequence
  ENSG00000166111_23 (sequence is synthesized)
gcctcccacagtgctgagattacaggtgggagccactgcacccggcctgaatgatgactcttgaggggaaaaagtttactcaggtttgcaggtacaaaatccaaaatccagggctttggg

SEQ ID NO: 528592 - DNA, 120 bp, Artificial Sequence
  ENSG00000166111_24 (sequence is synthesized)
tacaaaatccaaaatccagggctttgggttttgtgcatgggtagacagctgaatgggcagagaaaccagaaggatgctacacccaccatctcatcccatggggatcaggggaccaggatt

SEQ ID NO: 528593 - DNA, 120 bp, Artificial Sequence
  ENSG00000166111_25 (sequence is synthesized)
ccctgatgcgaagctgctcctctgtccagggacgtcttgatcattacacaaaggcagcccctggagttccattcatggagcctgccgtggagtggagaggggtgggaggactcaggtgtg

SEQ ID NO: 528594 - DNA, 120 bp, Artificial Sequence
  ENSG00000166111_26 (sequence is synthesized)
tggttttgagttggtctccgcaggcaacatcacttctgggatttggtttactggagccttttttcccatggtgaaggcaggggacatagacaaggagggaggaagctggcagatcccatc

SEQ ID NO: 528595 - DNA, 120 bp, Artificial Sequence
  ENSG00000166111_27 (sequence is synthesized)
aaaggccagagcagacagacctactgcttgaagtaaacattgcaaggaagccaatttgtgcgttcaactcttattaaaacatgtcagtgatggacattgcaagagcctaagtttattcat

SEQ ID NO: 528596 - DNA, 120 bp, Artificial Sequence
  ENSG00000166111_28 (sequence is synthesized)
tgtcatcatgtcctagtgacagtccagcctaacggtctgactacctttgttcatcggaattcatctcaatgctttagtgtgataatctcctttccaatgagtggggaaagacataccgtt

SEQ ID NO: 528597 - DNA, 120 bp, Artificial Sequence
  ENSG00000166111_29 (sequence is synthesized)
ggcagccaacattgtggctgagcttgttggagacaacactttcttctaatggtgtgcaggtcatgatgggggacttcttccagctcaagttctaaatcaactgcaaacaatactgtgtct

SEQ ID NO: 528598 - DNA, 120 bp, Artificial Sequence
  ENSG00000166111_30 (sequence is synthesized)
ctaaaatgtgggctgcagccccctccgcccaggcagttgaagaggagatggcttggcagatctctgtctctctctgacaaccacatttccttgaaccacgtgtggctgtagctctaatta

SEQ ID NO: 528599 - DNA, 120 bp, Artificial Sequence
  ENSG00000166111_31 (sequence is synthesized)
tttctggacagctgagctctcctgggtaacacagaacttttgcttgtctcttttgccttccggctggtcagacgctactggatgatcatgtccgctccctcaccctagaataacccagtg

SEQ ID NO: 528600 - DNA, 120 bp, Artificial Sequence
  ENSG00000166111_32 (sequence is synthesized)
gagctgggggctgggggggatagagtgcttggtgggcaggaatatttcccagagactagggtaaaggggtttacagttgagggccttctctacttgagaaagtgaaagttaaaaactcct

SEQ ID NO: 528601 - DNA, 90 bp, Artificial Sequence
  ENSG00000166111_33 (sequence is synthesized)
tctttgccttgtaaatagcctgcctttttcaaaaaaatcaatattatcaaatgatacaagagctatcacaaaaggcacccaaacttctga

SEQ ID NO: 528602 - DNA, 120 bp, Artificial Sequence
  ENSG00000166111_34 (sequence is synthesized)
atgatacaagagctatcacaaaaggcacccaaacttctgaatatgtgagacctttagctgagaacatttgtatctaattttgaacaatcctattcaaaaagctcctattttcgttaatgg

SEQ ID NO: 528603 - DNA, 120 bp, Artificial Sequence
  ENSG00000166111_35 (sequence is synthesized)
aaatgccatgtttctcttagagttacgaaagatctcagaaagtggcaaaagatatttaatgtagccagagctatatatttctgtttttctcgtacttcaagtattctgaaaaacatataa

SEQ ID NO: 528604 - DNA, 120 bp, Artificial Sequence
  ENSG00000166111_36 (sequence is synthesized)
ctgaccttggtggtgttcacaatgggatgaaacagtatcttaggaattgactttgaaattagtatggaaattcattgtttttaatataacattgagcaacagaaagccttgaatgataag

SEQ ID NO: 528605 - DNA, 120 bp, Artificial Sequence
  ENSG00000166111_37 (sequence is synthesized)
taagatcaagagtctcccctgccattattttcaatggcaaaaactgcaattactttttttttttttttgagatgaagtctcagctcactgcaactctgtctcccaggttcaagcgattct

SEQ ID NO: 528606 - DNA, 120 bp, Artificial Sequence
  ENSG00000166111_38 (sequence is synthesized)
tgatccgcccaccttggcctcccaaatgcaattacttttgcaccaacctaagaacagtaatctcagtcaatagtggcttaaaccattagaaccaaaaccaggcagagatcagagaaggtt

SEQ ID NO: 528607 - DNA, 120 bp, Artificial Sequence
  ENSG00000166111_39 (sequence is synthesized)
ggttcaacgctcaacaatgttatcaagaacccagcttctttttgccttttcttttcaccatcctctgcatgttggccatctgaccctgtgcttgaaacctcatggtcacaaaatggctgc

SEQ ID NO: 528608 - DNA, 120 bp, Artificial Sequence
  ENSG00000166111_40 (sequence is synthesized)
ccctgtgctggacatcatatttcttttcaaagaaggtagaatgggaaaggagcagtcataaaaggttttctttcagaagagtctgttggttttggttagaaaaggaagtcccctggcaga

SEQ ID NO: 528609 - DNA, 120 bp, Artificial Sequence
  ENSG00000166111_41 (sequence is synthesized)
tttaccattgcttctcattgatcagacctgggtgtcatgcccatcccagcatgagtcctgctgtagggctggaaggaagggcctacgagcaccaagggatacccacagcctcctgaacac

SEQ ID NO: 528610 - DNA, 120 bp, Artificial Sequence
  ENSG00000166111_42 (sequence is synthesized)
aaaattgggattctgttagcacagaagaaggatagcaatggctgttggatgggcgatggttgcaaggagcctgccgtggatgtgtaggccacagagctctcatcagcactgttttcgtgg

SEQ ID NO: 528611 - DNA, 120 bp, Artificial Sequence
  ENSG00000166111_43 (sequence is synthesized)
ccaggaacagaaattctactcaggataattaaaattaaggaacagagctttattataagactgggatcggtagttaatttcctacaggggaaattcagggcatgtaaatcagtgaaatgg

SEQ ID NO: 528612 - DNA, 120 bp, Artificial Sequence
  ENSG00000166111_44 (sequence is synthesized)
aaaaggtgtaaggacaagagaaacaccagccctgtctgcaggggggggctgcaactcccttccagctgatgttgttccaccatgggtccagtgtgaccagatcttacaatgttcaaaaga

SEQ ID NO: 528613 - DNA, 120 bp, Artificial Sequence
  ENSG00000166111_45 (sequence is synthesized)
ggagtctaggtttttctgtgaaatctccaaatattagtatattggatcaaaaatgttcaaatgatgtgtgagctcaataaaatgcatctgcagtgcagctttggttgatgggctgatggt

SEQ ID NO: 528614 - DNA, 120 bp, Artificial Sequence
  ENSG00000166111_46 (sequence is synthesized)
tcactctgacagtttagagagattgcataggaataaagtacagcctggtgtcattcagaggaacagggatctgggaaaccactggggcccaagacagctgcccctctgaatctgtggctc

SEQ ID NO: 528615 - DNA, 120 bp, Artificial Sequence
  ENSG00000166111_47 (sequence is synthesized)
ttgtttcttcccttttctggcagaaatgagtctagcttccatctgtttccttgtggctgctgtgtatgcataatcatgcacagagcttccatagcctcataacccagctctgcaaacata

SEQ ID NO: 528616 - DNA, 120 bp, Artificial Sequence
  ENSG00000166111_48 (sequence is synthesized)
cctgactcagctgctcagtgccccactcccagatcttcaggaatgaagctgattggcccagtttagtgttggattgagtcttggtccaattcaattgggtcaggaagaagtggtggagag

SEQ ID NO: 528617 - DNA, 120 bp, Artificial Sequence
  ENSG00000166111_49 (sequence is synthesized)
gtacagacacggtggcattggcctgccctttagcagggtggtgcagacaattgctggtatgcctggaatctgcagtgacatgtgcataaactctcaagtctattcatcagaactctctta

SEQ ID NO: 528618 - DNA, 120 bp, Artificial Sequence
  ENSG00000166111_50 (sequence is synthesized)
cagatcataacgtggcaagtggtcagtatgcatggaatatccagcatgtcctggacatgttattcaacactgaggatgcaaaatatcataagacatggtcctggctgggtgcagtggctc

SEQ ID NO: 528619 - DNA, 120 bp, Artificial Sequence
  ENSG00000166111_51 (sequence is synthesized)
aagaaacccccatgctgctcaactgggtttccatggcctacaaggaaggacacagttctttgcacatggagcctttgcttgaatttcaatcaacaaaatttatgtggcgtaataagtggt

SEQ ID NO: 528620 - DNA, 120 bp, Artificial Sequence
  ENSG00000166111_52 (sequence is synthesized)
ttttaatgcaatggacagatagcactttgatttcaggcagcgtttgcaaatttcagtagttcgaacatcatcctcctgatttccgtcatatccaggttatcatctgtacgtactatcatt

SEQ ID NO: 528621 - DNA, 120 bp, Artificial Sequence
  ENSG00000166111_53 (sequence is synthesized)
tccttcatctttttctttaacttgactgcttttaatcaccgtgcaggctggagtgcagtggcgctctcctagcttactgcagccttgaactcctgaactcaagcaatcctccctcctcag

SEQ ID NO: 528622 - DNA, 120 bp, Artificial Sequence
  ENSG00000166118_0 (sequence is synthesized)
ataggagttctcaggcagcttcaatggaaggagggagccaagaagggggcctggtatacattcaaagatgataattacgacatggattgtgtatattcttgctcggaaaggtgtagggct

SEQ ID NO: 528623 - DNA, 120 bp, Artificial Sequence
  ENSG00000166118_1 (sequence is synthesized)
tcccttcctaccaataaccagttcggacattgacgttgtggaaagtgaggctgtgtctgtactacatcattggttgaaaaaaacagaagaagaggcttctcggggcataaaggaaaagct

SEQ ID NO: 528624 - DNA, 120 bp, Artificial Sequence
  ENSG00000166118_2 (sequence is synthesized)
gtccatcaaccacccttcccagggtgtaagggagaagatgtccactgactcccctcccacccatggccaggacatccacgtgaccagagatgtggtgaagcaccacctctctaagtctga

SEQ ID NO: 528625 - DNA, 120 bp, Artificial Sequence
  ENSG00000166118_3 (sequence is synthesized)
ggagagaacacgaatccagttcataagatggagccacactcgtatcttccaagtgccaagtgagatgacagaggacatcatgcgagatcgaatagagcaggtgagacgaagcatatcccg

SEQ ID NO: 528626 - DNA, 120 bp, Artificial Sequence
  ENSG00000166118_4 (sequence is synthesized)
tcttacagatgtctcagctcaggacttcagtatgagaccctcctcctcagactgctgagagcaacagatggagctttgggaacgcggagaacagtggggttacagggagtcatcatcagc

SEQ ID NO: 528627 - DNA, 120 bp, Artificial Sequence
  ENSG00000166118_5 (sequence is synthesized)
cctaccccttggccaaccacatctccctgctgtgtcccctgggcatttctctacctcccaggtggaagtccttcagggtccagcagcaacctgtatcagaagaacatccttctctgcttg

SEQ ID NO: 528628 - DNA, 120 bp, Artificial Sequence
  ENSG00000166118_6 (sequence is synthesized)
acctgaagaagggccagacctgggcagaaagactccagcaggtgagctcttcatgcgacagtgtcagcactggagtcttcttgctgaactgcgaataaagagatgtgctgtttaacaacc

SEQ ID NO: 528629 - DNA, 120 bp, Artificial Sequence
  ENSG00000166123_0 (sequence is synthesized)
ggcgcgggcgccgggcgcggggatgcggctgtgggcgccggggccgggtagctgctccaggcgcgcgagctaaccgagtgcggcgagggcctaccaggggcgacagggtttctctccgca

SEQ ID NO: 528630 - DNA, 120 bp, Artificial Sequence
  ENSG00000166123_1 (sequence is synthesized)
gcctaccaggggcgacagggtttctctccgcaagcgcgcgatgcagcgggcggcggcgctggtccggcggggctgtggtccccggacccccagctcctggggccgcagccagagcagcgc

SEQ ID NO: 528631 - DNA, 120 bp, Artificial Sequence
  ENSG00000166123_2 (sequence is synthesized)
ggcccgagcgcagccggcgcgagcgcatcctcacgctggagtccatgaacccgcaggtgaaggcggtggagtacgccgtgcggggacccatcgtgctcaaggccggcgagatcgagctcg

SEQ ID NO: 528632 - DNA, 120 bp, Artificial Sequence
  ENSG00000166123_3 (sequence is synthesized)
agctgcagcggggtatcaaaaagccattcacagaggtcatccgagccaacatcggggacgcccaggctatggggcagcagccaatcaccttcctccggcaggtgatggcactatgcacct

SEQ ID NO: 528633 - DNA, 120 bp, Artificial Sequence
  ENSG00000166123_4 (sequence is synthesized)
acccaaacctgctggacagccccagcttcccagaagatgctaagaaacgtgcccggcggatcctgcaggcttgtggcgggaacagcctggggtcctacagtgctagccagggtgtcaact

SEQ ID NO: 528634 - DNA, 120 bp, Artificial Sequence
  ENSG00000166123_5 (sequence is synthesized)
gcatccgtgaagatgtggctgcctacatcaccaggagggatggcggtgtgcctgcggaccccgacaacatctacctgaccacgggagctagtgacggcatttctacgatcctgaagatcc

SEQ ID NO: 528635 - DNA, 120 bp, Artificial Sequence
  ENSG00000166123_6 (sequence is synthesized)
tcgtctccgggggcggcaagtcacggacaggtgtgatgatccccatcccacaatatcccctctattcagctgtcatctctgagctcgacgccatccaggtgaattactacctggacgagg

SEQ ID NO: 528636 - DNA, 120 bp, Artificial Sequence
  ENSG00000166123_7 (sequence is synthesized)
agaactgctgggcgctgaatgtgaatgagctccggcgggcggtgcaggaggccaaagaccactgtgatcctaaggtgctctgcataatcaaccctgggaaccccacaggccaggtacaaa

SEQ ID NO: 528637 - DNA, 120 bp, Artificial Sequence
  ENSG00000166123_8 (sequence is synthesized)
gcagaaagtgcatagaagatgtgatccactttgcctgggaagagaagctctttctcctggctgatgaggtgtaccaggacaacgtgtactctccagattgcagattccactccttcaaga

SEQ ID NO: 528638 - DNA, 120 bp, Artificial Sequence
  ENSG00000166123_9 (sequence is synthesized)
aggtgctgtacgagatggggcccgagtactccagcaacgtggagctcgcctccttccactccacctccaagggctacatgggcgagtgtggttacagaggaggctacatggaggtgatca

SEQ ID NO: 528639 - DNA, 120 bp, Artificial Sequence
  ENSG00000166123_10 (sequence is synthesized)
acctgcaccctgagatcaagggccagctggtgaagctgctgtcggtgcgcctgtgccccccagtgtctgggcaggccgccatggacattgtcgtgaaccccccggtggcaggagaggagt

SEQ ID NO: 528640 - DNA, 120 bp, Artificial Sequence
  ENSG00000166123_11 (sequence is synthesized)
cctttgagcaattcagccgagagaaggagtcggtcctgggtaatctggccaaaaaagcaaagctgacggaagacctgtttaaccaagtcccaggaattcactgcaaccccttgcaggggg

SEQ ID NO: 528641 - DNA, 120 bp, Artificial Sequence
  ENSG00000166123_12 (sequence is synthesized)
ccatgtacgccttccctcggatcttcattcctgccaaagctgtggaggctgctcaggcccatcaaatggctccagacatgttctactgcatgaagctcctggaggagactggcatctgtg

SEQ ID NO: 528642 - DNA, 120 bp, Artificial Sequence
  ENSG00000166123_13 (sequence is synthesized)
tcgtgcccggcagtggctttgggcagagggaaggcacttaccacttcaggatgactatcctccctccagtggagaagctgaaaacggtgctgcagaaggtgaaagacttccacatcaact

SEQ ID NO: 528643 - DNA, 120 bp, Artificial Sequence
  ENSG00000166123_14 (sequence is synthesized)
tcctggagaagtacgcgtgaggacgcctgagccccagcgggagacctgtccttggctcttcctcccaatgcccgtcaggctgaactcgcctcccccgtgactctgcctcgggcctcgcag

SEQ ID NO: 528644 - DNA, 120 bp, Artificial Sequence
  ENSG00000166123_15 (sequence is synthesized)
aggccgctggtcacttcgtcatcattttgcccctggagacgtctttctttgtgccttgatgttgagagcgcctctcttttgagcaaacaagcattctatatgcaaccagagtagagggga

SEQ ID NO: 528645 - DNA, 120 bp, Artificial Sequence
  ENSG00000166123_16 (sequence is synthesized)
atctgttattgtttttgcttctggaaagttcatttggggtttacaacaactaggatgtgttgggtgagatgtttcagatctggagaaatgagcaggtgtcgggaaatgtgtgacttaacc

SEQ ID NO: 528646 - DNA, 120 bp, Artificial Sequence
  ENSG00000166123_17 (sequence is synthesized)
gtggtgagggctggaaatccaaactcaccaccatgatctgtgaaataaagcccttagcggtgtgaagcatccggtcctttgaacagaagggcctggaaggcccctggggctgagaaaggg

SEQ ID NO: 528647 - DNA, 120 bp, Artificial Sequence
  ENSG00000166123_18 (sequence is synthesized)
tccgcccggtggcctggaggcaggcgccgggagcgcagtagcacgtggactgggcaggatgttgcactagcttggggtagatgctgggggctgcggccacggtcagagggccccactgtg

SEQ ID NO: 528648 - DNA, 120 bp, Artificial Sequence
  ENSG00000166123_19 (sequence is synthesized)
aggcgtgggtgtgagccaggctgcaggaggaactgggcctccgcttcccagcaacgcagccaggcctgagaattctgtgcgcccggcgggctttgggaatgaggggttcccttgaacatg

SEQ ID NO: 528649 - DNA, 120 bp, Artificial Sequence
  ENSG00000166123_20 (sequence is synthesized)
cgtaggctggaaccccgtctgagaggtctccctgaatttcagtgacacatagtgcagcccggcagtgtcccacttccgtggagagagccgctggaatggtgtggacccatcccgcgggtg

SEQ ID NO: 528650 - DNA, 120 bp, Artificial Sequence
  ENSG00000166123_21 (sequence is synthesized)
accggtgcctgttctcccctgaccgagcctgtgagcacatcgccccctgctggcgacagcggggaaatgagggctgaaaatatcctccccacaagggcaatccccgggacctgccgagca

SEQ ID NO: 528651 - DNA, 120 bp, Artificial Sequence
  ENSG00000166123_22 (sequence is synthesized)
gccaaggccctgtcctttcttgaatggtggcgagctgaatctggtcggtttcctagcttttaggtggtaaaagtgcctggcagcttggctgccgtggaggagtcagtcgtggttggaggt

SEQ ID NO: 528652 - DNA, 120 bp, Artificial Sequence
  ENSG00000166123_23 (sequence is synthesized)
tcattgccgtgctttcatgcagagtgttttgccttcatgttagcttccggctcccctcccaggctgcagactctgacctgtggcatcaggcttctcccagtacaggagggtgccatcccc

SEQ ID NO: 528653 - DNA, 120 bp, Artificial Sequence
  ENSG00000166123_24 (sequence is synthesized)
cagcatgcggcttctctgccattagcagccctgggcgggccgaccacactcgaggctgcggtgctacgggcttagccctcgcctccctcactgggagcttccccatcctccctgccttcc

SEQ ID NO: 528654 - DNA, 120 bp, Artificial Sequence
  ENSG00000166123_25 (sequence is synthesized)
ccagtgggaagttagggaagctcaggagcctgggaccccgcatgtcccaaaatgggattggagaagctggagagaaagcagaagaggccgaggagtgaggcagcagcctctatgctgtga

SEQ ID NO: 528655 - DNA, 120 bp, Artificial Sequence
  ENSG00000166123_26 (sequence is synthesized)
tttccacaccgggtccgtgcagaggaaacagaaactcccaactgtccttacccaccgacatcacagcccctatgaagaaagtagccacaatctcaaataacaaaagggaatgttctaaaa

SEQ ID NO: 528656 - DNA, 120 bp, Artificial Sequence
  ENSG00000166123_27 (sequence is synthesized)
ctttttcttccttaaaaaatggagaaaattgcacttgtgcttgctgtgtggtatataaaccaggattagtcccagggtcgtgaggtttctggtgaaaaggttaaatcgtagaagctagta

SEQ ID NO: 528657 - DNA, 120 bp, Artificial Sequence
  ENSG00000166123_28 (sequence is synthesized)
tattttttatatttttgtaacaattgcttttttcatgggggaggcggggttagtatttatagtcctaacaagtccagtaattttttataaatcttcagattataaacagcccctaaaaac

SEQ ID NO: 528658 - DNA, 120 bp, Artificial Sequence
  ENSG00000166123_29 (sequence is synthesized)
tttacaacgtttacacagttttttaaaaagagactgtatacacttgatttgctttcaaaataaataaggtcagctagtctaggaggttaacgtcgggtaggaatgctgatcatgataggt

SEQ ID NO: 528659 - DNA, 120 bp, Artificial Sequence
  ENSG00000166123_30 (sequence is synthesized)
ttggttttctacagattctgttccggtgcctttcctatccaggcaccacctgagaaagttgtcatttgaggtcgcacttggaagttacatctgtgaagtttctgtcattcgtccagatct

SEQ ID NO: 528660 - DNA, 120 bp, Artificial Sequence
  ENSG00000166123_31 (sequence is synthesized)
gtgtgtgtagcatgtgctgaggaagcacgtgctgggctgtgcctcagacagtgcatcaccgggcacccagaggcttgcctggctattcctgttctggtgtgtgtggagtgttggggagga

SEQ ID NO: 528661 - DNA, 120 bp, Artificial Sequence
  ENSG00000166123_32 (sequence is synthesized)
acagatgcagatcaacctgtggctgttttcccgtctaggttctcacaggtatctcctgacagaggtacttaacaatggctctgctggaaatttctataaataaaatgtccaaaatggtga

SEQ ID NO: 528662 - DNA, 120 bp, Artificial Sequence
  ENSG00000166123_33 (sequence is synthesized)
cagagacgtacaccacacatagacacatactacaaacactgcacacagacacccacacatgcacatgtgtgtgcacacacacacaccaccacacctacacaaataccacatagacacaca

SEQ ID NO: 528663 - DNA, 120 bp, Artificial Sequence
  ENSG00000166123_34 (sequence is synthesized)
ccccaccacacctacacacacaccaaatacagacacacacaccccaccacacctgcacacacattacacaccatacacagacaccccaacacacctacacacacaccacacagacacaaa

SEQ ID NO: 528664 - DNA, 120 bp, Artificial Sequence
  ENSG00000166123_35 (sequence is synthesized)
cacactcttacaccccaccacacctacacacgcaacatatacagacacacaccccaccacacctacacacacaccaaatacagacacacataccccaccacacctgcacacattacacac

SEQ ID NO: 528665 - DNA, 120 bp, Artificial Sequence
  ENSG00000166123_36 (sequence is synthesized)
cacacacagacacacctcaacacacctatacacacaccacacacagatacacacacactcatacccccaccacacccacacacacactacagactcacacacacaccacatacacacacc

SEQ ID NO: 528666 - DNA, 120 bp, Artificial Sequence
  ENSG00000166123_37 (sequence is synthesized)
ccacacacaggctcatatacccaccacacctacacacacacccccatcacacctacacacacacctacacacatacacagacacatacaccccacaccacactacaactacacacacacc

SEQ ID NO: 528667 - DNA, 120 bp, Artificial Sequence
  ENSG00000166123_38 (sequence is synthesized)
acacagacacacacacacccaccacacctacacacacacacatcccaccatgccaacacaccacacacagacacatgcacatgtgagtgtatgcgtgcacacaccccaccacacctacaa

SEQ ID NO: 528668 - DNA, 86 bp, Artificial Sequence
  ENSG00000166123_39 (sequence is synthesized)
atgtgagtgtatgcgtgcacacaccccaccacacctacaaataccacaccacacctacacacaaagccttcataaaaataagagcc

SEQ ID NO: 528669 - DNA, 120 bp, Artificial Sequence
  ENSG00000166123_40 (sequence is synthesized)
acagagcgagactccgtctcaaaaaaattaaaaaaaaaaaaataagagagccaggtgagaaccccttctccctcgcataactggctgaggagagtcagacacacaggctgctcttctggg

SEQ ID NO: 528670 - DNA, 120 bp, Artificial Sequence
  ENSG00000166123_41 (sequence is synthesized)
aggctgctcttctgggcgtccctggaggccgactacaccatcatgcatggcagctggggaggggggcctctgcggggagggtgttctatgggtctcaagggaacacagggcactgagtga

SEQ ID NO: 528671 - DNA, 120 bp, Artificial Sequence
  ENSG00000166123_42 (sequence is synthesized)
gaatgggcatgtgtcctagaagcatgttctgaggaattccgtccagagccaagtccatacagactgacaggcaacaactggtttttctcattttctggaaagacatcctggtacgagaat

SEQ ID NO: 528672 - DNA, 120 bp, Artificial Sequence
  ENSG00000166123_43 (sequence is synthesized)
agaacccatgacacaggctgctgggctctaccctttggcctagaactccctggtgtctgtgtgccccacaccccagggcacgtggcagcctcccagggtgagcgctgtggaagaatttgt

SEQ ID NO: 528673 - DNA, 120 bp, Artificial Sequence
  ENSG00000166123_44 (sequence is synthesized)
gccgggagatgtgttccacccacctccctgttttgctgtgctcaggctcacacaagctcttctttggtcagtctgtctgataccccagtgtcgaaggaacagaccaccccacccactccg

SEQ ID NO: 528674 - DNA, 120 bp, Artificial Sequence
  ENSG00000166123_45 (sequence is synthesized)
tctgtgtggtgtgcatggggcatgtgacccaggcagagcaaatctgagtcaacgcatgggtcagaggggacatgtgttcaaagctggagcaaagtcatcatctgggatttccgcaagtgc

SEQ ID NO: 528675 - DNA, 120 bp, Artificial Sequence
  ENSG00000166123_46 (sequence is synthesized)
gcgggtgagcgcgcgctgggccccggggaggctggggccgctgagcaagggaaaaaccgcagcagccccagctggggtccttcccacgacgtccacccccatggccagctcctcagtcag

SEQ ID NO: 528676 - DNA, 120 bp, Artificial Sequence
  ENSG00000166123_47 (sequence is synthesized)
ccaagcctggctaaaacgagagaatgccccctcccgcccgttcacttactggtgcccagcaccgggcactcagtgaggccttgcaatacggttcacttgttgaattgaattcgtcaattg

SEQ ID NO: 528677 - DNA, 120 bp, Artificial Sequence
  ENSG00000166123_48 (sequence is synthesized)
ttgagcgggccgtgctgccaggcaccgcacgttgtgtgtctgccctactctcgtggaaccaaggtccagtggagagaggaacataagcgaatgaagaaagaagcaatagagtctcagtga

SEQ ID NO: 528678 - DNA, 120 bp, Artificial Sequence
  ENSG00000166123_49 (sequence is synthesized)
taagttcttggaaaaaaggtctttgccaatcctgattcccggaagagagtcggcagaattccttcctttaggcccctctggagccttggccgaccagccacttctgtggtctggggacag

SEQ ID NO: 528679 - DNA, 120 bp, Artificial Sequence
  ENSG00000166126_0 (sequence is synthesized)
gtctcctggtggggtgcaaggagccgaggcgagatgggcgtcctgggccgggtcctgctgtggctgcagctctgcgcactgacccaggcggtctccaaactctgggtccccaacacggac

SEQ ID NO: 528680 - DNA, 120 bp, Artificial Sequence
  ENSG00000166126_1 (sequence is synthesized)
ttcgacgtcgcagccaactggagccagaaccggaccccgtgcgccggcggcgccgttgagttcccggcggacaagatggtgtcagtcctggtgcaagaaggtcacgccgtctcagacatg

SEQ ID NO: 528681 - DNA, 120 bp, Artificial Sequence
  ENSG00000166126_2 (sequence is synthesized)
ctcctgccgctggatggggaactcgtcctggcttcaggagccggattcggcgtctcagacgtgggctcgcacctggactgtggcgcgggcgaacctgccgtcttccgcgactctgaccgc

SEQ ID NO: 528682 - DNA, 120 bp, Artificial Sequence
  ENSG00000166126_3 (sequence is synthesized)
ttctcctggcatgacccgcacctgtggcgctctggggacgaggcacctggcctcttcttcgtggacgccgagcgcgtgccctgccgccacgacgacgtcttctttccgcctagtgcctcc

SEQ ID NO: 528683 - DNA, 120 bp, Artificial Sequence
  ENSG00000166126_4 (sequence is synthesized)
ttccgcgtggggctcggccctggcgctagccccgtgcgtgtccgcagcatctcggctctgggccggacgttcacgcgcgacgaggacctggctgttttcctggcgtcccgcgcgggccgc

SEQ ID NO: 528684 - DNA, 120 bp, Artificial Sequence
  ENSG00000166126_5 (sequence is synthesized)
ctacgcttccacgggccgggcgcgctgagcgtgggccccgaggactgcgcggacccgtcgggctgcgtctgcggcaacgcggaggcgcagccgtggatctgcgcggccctgctccagccc

SEQ ID NO: 528685 - DNA, 120 bp, Artificial Sequence
  ENSG00000166126_6 (sequence is synthesized)
ctgggcggccgctgcccccaggccgcctgccacagcgccctccggccccaggggcagtgctgtgacctctgtggagccgttgtgttgctgacccacggccccgcatttgacctggagcgg

SEQ ID NO: 528686 - DNA, 120 bp, Artificial Sequence
  ENSG00000166126_7 (sequence is synthesized)
ggagatccaggtggtgctggtggagaatgggcccgagacaggcggagcggggcggctggcccgggccctcctggcggacgtcgccgagaacggcgaggccctcggcgtcctggaggcgac

SEQ ID NO: 528687 - DNA, 120 bp, Artificial Sequence
  ENSG00000166126_8 (sequence is synthesized)
gcgtcctggaggcgaccatgcgggagtcgggcgcacacgtctggggcagctccgcggctgggctggcgggcggcgtggcggctgccgtgctgctggcgctgctggtcctgctggtggcgc

SEQ ID NO: 528688 - DNA, 120 bp, Artificial Sequence
  ENSG00000166126_9 (sequence is synthesized)
cgcggggaggctcaggtggaggaggcacgaggcggcggccccggctggagcgcccctcggcttccgcaacccggtgttcgacgtgacggcctccgaggagctgcccctgccgcggcggct

SEQ ID NO: 528689 - DNA, 120 bp, Artificial Sequence
  ENSG00000166126_10 (sequence is synthesized)
cagcctggttccgaaggcggccgcagacagcaccagccacagttacttcgtcaaccctctgttcgccggggccgaggccgaggcctgagcggccgcctgaccgtcgaccttggggctctc

SEQ ID NO: 528690 - DNA, 120 bp, Artificial Sequence
  ENSG00000166126_11 (sequence is synthesized)
cacccgctctggccccagtcgaactgggggctagccacctcctcgtccagcccccaaacctccccttcctttccccctcctccgggggccaaggacagggtggccttactcagtaaaggt

SEQ ID NO: 528691 - DNA, 120 bp, Artificial Sequence
  ENSG00000166126_12 (sequence is synthesized)
gtttcctgcacctgctgtcagcctggctatgccgccaccggccccgcccatgaggactaggagcccagccttgcgccgcattcgcactgggggacatgggaggggtctagctggccactg

SEQ ID NO: 528692 - DNA, 120 bp, Artificial Sequence
  ENSG00000166126_13 (sequence is synthesized)
ctggaggcagcgctggtcgtcacctgggcggccagaggctgggatctgcgaagttgaacccagaactaggagtggggcttcccccgccttccggtgaggggagggtgaggagctggaggg

SEQ ID NO: 528693 - DNA, 120 bp, Artificial Sequence
  ENSG00000166126_14 (sequence is synthesized)
aggggcgggagagaggcaaggggtggacggagccaaaggccgtgcctggtggggcggacggaaaaggggtgggcatccctcctggtaccaagctgctgggtgcgaaggcagatcatatgg

SEQ ID NO: 528694 - DNA, 120 bp, Artificial Sequence
  ENSG00000166126_15 (sequence is synthesized)
agtgtcccgaagcggggcttgggaggtcgtgctcagacgcgtggcgtggcgtggcgtggcgtggtgtggcgcggcgcttgttccgtggagctcagggatgtgctccggctcaggcgaacc

SEQ ID NO: 528695 - DNA, 120 bp, Artificial Sequence
  ENSG00000166126_16 (sequence is synthesized)
cccctctccccacctcggcccgaccccgcccctcctggtctgcacacgttgggtctgagcactcaggtgaagtctcttcctcgggctggctccggtggggacccggctgcccgcagacgt

SEQ ID NO: 528696 - DNA, 120 bp, Artificial Sequence
  ENSG00000166126_17 (sequence is synthesized)
gtggaaggagagatgctctgggcttccaggggagccgcctgctgcagcagcagcccaggccatgctgcctggcacagagctcaaggtcccaagtgcccccgctgggtgctgggctgcctg

SEQ ID NO: 528697 - DNA, 120 bp, Artificial Sequence
  ENSG00000166126_18 (sequence is synthesized)
ccctggcttgcagtcttctcccaggtccgcactcttctgcaggggccatcactgcccttgtcctaccaaggacaactaggtctcagtgagtggcaaatagaagccaactccctgcataac

SEQ ID NO: 528698 - DNA, 120 bp, Artificial Sequence
  ENSG00000166126_19 (sequence is synthesized)
tcaggaaactgactccgagcattccctcaaccagggaccactcaccctggcccagacctccccgagaactcctgcctcttcctggggcctctggcctaccccatcctgtcccttggggct

SEQ ID NO: 528699 - DNA, 120 bp, Artificial Sequence
  ENSG00000166126_20 (sequence is synthesized)
gctggcagggttggcgtgtatgggtgtggacaggcagaccctcgcgggcagcctgctcctggggccctggcactgcctggctggggctcacaggcacgctgccctcctcccttcactcct

SEQ ID NO: 528700 - DNA, 120 bp, Artificial Sequence
  ENSG00000166126_21 (sequence is synthesized)
gccccaaggatgccctctgttcaggctgaacaccccaacagcagccttttgggtgacctccgagtgagttacccagaatagcttctgctggcgaatagcatcttctgcaaggtggctcct

SEQ ID NO: 528701 - DNA, 120 bp, Artificial Sequence
  ENSG00000166126_22 (sequence is synthesized)
tcactgccttttggagctcaggcacttctggggcccagacacacgggtgacatgttaccacatccaaacggaccactgggaactttaaaactgccgtcttctgctttattgacagccttg

SEQ ID NO: 528702 - DNA, 120 bp, Artificial Sequence
  ENSG00000166126_23 (sequence is synthesized)
ccaagcagccgaccggtgggaggacaggggaagcctggcccaagctgtggacaagctgtgtctgccgccacagttaatcacaagcctctgacgacacagggccacagagctggtcactca

SEQ ID NO: 528703 - DNA, 120 bp, Artificial Sequence
  ENSG00000166126_24 (sequence is synthesized)
acatctggtacaaagggaggcagaagccgtggaagcgaatggaaaacagcacagctgacttcacagtagtagatactggtgacacttcatggctgcgacccagaatgaacttaatgcaca

SEQ ID NO: 528704 - DNA, 120 bp, Artificial Sequence
  ENSG00000166126_25 (sequence is synthesized)
cagggacgcagggtgtcactggtcctgggcctttgtccatgactaggtggtcagcaggacttctgcagctgactgtgcaatggctaaatgaaaaaaaggccacagactaacctccacttt

SEQ ID NO: 528705 - DNA, 120 bp, Artificial Sequence
  ENSG00000166126_26 (sequence is synthesized)
cctgtcttcaaaattctagtgacactgggaatgctataggacctcctactattctcttaaggtcctaggaaagtttcaggaactagggaaaagactgggtactgaggctgtgtccccaga

SEQ ID NO: 528706 - DNA, 120 bp, Artificial Sequence
  ENSG00000166126_27 (sequence is synthesized)
tgtctgcttccgaagcagccgcgtcatgacgggtttctgctgaggaagtggtgttggcagggccccatatgccctctcgggttgtcaggggtgggagacaggctgtatgggggtccttca

SEQ ID NO: 528707 - DNA, 120 bp, Artificial Sequence
  ENSG00000166126_28 (sequence is synthesized)
tgtgcagatggaacagcatcgcctcacagctgtgcagacgaacagatgtggtctactgccacgaacaatgcggcataaaactgatcaatattataataaagatttgtcttcttcatctcc

SEQ ID NO: 528708 - DNA, 120 bp, Artificial Sequence
  ENSG00000166126_29 (sequence is synthesized)
gtgttcgacgtgacggcctccgaggagctggtgagggggctggaggggggaccggggcctcctcggggccgggactcggcgccgaccgccgcctgaccctgtcaccccgcagcccctgcc

SEQ ID NO: 528709 - DNA, 120 bp, Artificial Sequence
  ENSG00000166126_30 (sequence is synthesized)
agtgcatcgggcggtgcgggagaggagaggaggggctccgggaacctcggccagccccggcctccggcggctcctgccctcgcggtttttccgtctgcgaaatgggcgcggtccccagaa

SEQ ID NO: 528710 - DNA, 120 bp, Artificial Sequence
  ENSG00000166126_31 (sequence is synthesized)
cctgccgagagcagcgagtgtgcgcctgcggggctcggcagaccgcctcagcttcccggtccccaagggagcactgagccctcctccgccttcacaccaggccggcgcgtgtccctggcg

SEQ ID NO: 528711 - DNA, 120 bp, Artificial Sequence
  ENSG00000166126_32 (sequence is synthesized)
cccccttccctaaacccctcgcggctccctcaggacaaccccacccaccacattcagggccggcctgacctggtcctgccgcccccagccccttcttacttctcataccgggttgcgctc

SEQ ID NO: 528712 - DNA, 120 bp, Artificial Sequence
  ENSG00000166126_33 (sequence is synthesized)
tgtcgcagctcttcccggcccaggtaggactcctccgggaagccttcctgattccaaggccgagaagaggtctgtgctgccccatcctcctccatgccccagttgtcactgtccttaaca

SEQ ID NO: 528713 - DNA, 120 bp, Artificial Sequence
  ENSG00000166126_34 (sequence is synthesized)
acgctgtcctctgctccagcgccaggcaaactgggggcagtgccgggaggctatctaggcaggcgtcctgcagggcgcgtttgagcgggctctgcaggtatcagtagaagtccgttggag

SEQ ID NO: 528714 - DNA, 120 bp, Artificial Sequence
  ENSG00000166126_35 (sequence is synthesized)
agcgcccgggcagggcgcccacagtctggccgggagggaccagggtctgggtccgggcccccggggatggggttcctatgcgtcccgggtgatccgcgcggaccttccgcacttctctgg

SEQ ID NO: 528715 - DNA, 120 bp, Artificial Sequence
  ENSG00000166128_0 (sequence is synthesized)
agagggccggagcgagaagatggcgaagacgtacgattatctcttcaagctcctgctgatcggcgactcgggggtaggcaagacctgcctcctgttccgcttctcagaggacgccttcaa

SEQ ID NO: 528716 - DNA, 120 bp, Artificial Sequence
  ENSG00000166128_1 (sequence is synthesized)
caccaccttcatctccaccatcggaattgattttaaaattagaacgatagaactagatggaaagaaaattaagcttcagatatgggacacagcgggtcaggaaagattccgaacaatcac

SEQ ID NO: 528717 - DNA, 120 bp, Artificial Sequence
  ENSG00000166128_2 (sequence is synthesized)
gacagcgtactacagaggagccatgggcattatgctggtctatgacatcacaaatgaaaaatcctttgacaatattaaaaattggatcagaaacattgaagagcatgcctcttccgatgt

SEQ ID NO: 528718 - DNA, 120 bp, Artificial Sequence
  ENSG00000166128_3 (sequence is synthesized)
cgaaagaatgatcctgggtaacaaatgtgatatgaatgacaaaagacaagtgtcaaaagaaagaggggagaagctagcaattgactatgggattaaattcttggagacaagcgcaaaatc

SEQ ID NO: 528719 - DNA, 120 bp, Artificial Sequence
  ENSG00000166128_4 (sequence is synthesized)
cagtgcaaatgtagaagaggcattttttacacttgcacgagatataatgacaaaactcaacagaaaaatgaatgacagcaattcagcaggagcaggtggaccagtgaaaataacagaaaa

SEQ ID NO: 528720 - DNA, 120 bp, Artificial Sequence
  ENSG00000166128_5 (sequence is synthesized)
ccgatcaaagaagaccagtttctttcgttgctcgctactttgatgaactctttctgagagactgcagcacacctagagggccctttcctgcttctctgaaagcacaggtcacccagcctc

SEQ ID NO: 528721 - DNA, 120 bp, Artificial Sequence
  ENSG00000166128_6 (sequence is synthesized)
agaatcacacctcccggctgctgctgagagcaccactgaacttagacctctcaacacagtatgccaagtggattccagcctcatggcctagcaaaagaacagactccctttttcaaacat

SEQ ID NO: 528722 - DNA, 120 bp, Artificial Sequence
  ENSG00000166128_7 (sequence is synthesized)
ggaagcaatgaagtggagacacatgcaggacctaactcgttttttccttgttttattacctgttgcagaagcggttatctttcttttttactttgcacatcagtgttagcctttccctat

SEQ ID NO: 528723 - DNA, 120 bp, Artificial Sequence
  ENSG00000166128_8 (sequence is synthesized)
ttcagcacaatcttagactcatatttgcacacttttgtgtcgtgaagttctagacaaatttgtacatgtggcaatgttaaaagagcatttacagcagaggttaatatactaaaattaaag

SEQ ID NO: 528724 - DNA, 120 bp, Artificial Sequence
  ENSG00000166128_9 (sequence is synthesized)
ggtatttggtctggttcatatggtcaaatattactgccttggtagcatttatttaagggctttttcttaaataagaatcattaaagtcattaaaaaaatttactgaaatgcccatcttgt

SEQ ID NO: 528725 - DNA, 120 bp, Artificial Sequence
  ENSG00000166128_10 (sequence is synthesized)
catcaaaggccacaatttctttatttcttcagattaagagctttgcctcatccccgacctgttttccagagtctgggtagctgaatgaatcactttaaaatgattacctctgcctaatct

SEQ ID NO: 528726 - DNA, 120 bp, Artificial Sequence
  ENSG00000166128_11 (sequence is synthesized)
atagaaactgcatttggaaatcaccataatctcatttttccctggggtttgtatttgctattctttcccatgtttgacttaagtgtaatcactcttaagtaatatttgaacattattatc

SEQ ID NO: 528727 - DNA, 120 bp, Artificial Sequence
  ENSG00000166128_12 (sequence is synthesized)
tgtttctatttgtgaacttcttgagctgaaattttacgtgggctgagagatataccatttagggttttagtgcagcatctaactgtgattctgtcaataaggatatgtaatatatttttt

SEQ ID NO: 528728 - DNA, 120 bp, Artificial Sequence
  ENSG00000166128_13 (sequence is synthesized)
cttaggttcactccttagctggctggtttagttgtaataccaaattcctaccataatccctgtctacaaaagttaggtttagattttagtttgcggaaaccttccctatatagagacaga

SEQ ID NO: 528729 - DNA, 120 bp, Artificial Sequence
  ENSG00000166128_14 (sequence is synthesized)
ttaacttgttgatataaatttaatagagctagctcttggtaatggtgaaaataatgagttttggttggttttatttggcagatgtttttagaaataaaagtacttagacctagtgcagcc

SEQ ID NO: 528730 - DNA, 120 bp, Artificial Sequence
  ENSG00000166128_15 (sequence is synthesized)
tctaggaaaagtcttgccttttcattagagaaaacaggaccaaggtttcagttttcaaacagctgttgttgattgtgtagaacccagttccatctgttttggttcattgttacagaactt

SEQ ID NO: 528731 - DNA, 120 bp, Artificial Sequence
  ENSG00000166128_16 (sequence is synthesized)
agtccagtcatttgggctaaagccaaccaaaagcttagttgcctttctcaacaaacactggtactggtatacttttgtagatgaaaccatcacaaggtatttagtgttaacttgtgtgcc

SEQ ID NO: 528732 - DNA, 120 bp, Artificial Sequence
  ENSG00000166128_17 (sequence is synthesized)
aaattcagatcactatgtcgttgttgctctagccttcagtgtcataacacaggggggataaaacagaggggatgagggaaatgaattctgttaataattattcttcctggtatgcctgtt

SEQ ID NO: 528733 - DNA, 120 bp, Artificial Sequence
  ENSG00000166128_18 (sequence is synthesized)
ttgcttcacaaaggctactatcatgctggatagataagaacaggagatggcagtggaaagggattgcttgttaccacagagaattctcttcaaattaagatatgtcattagaatgcttgg

SEQ ID NO: 528734 - DNA, 120 bp, Artificial Sequence
  ENSG00000166128_19 (sequence is synthesized)
accagtcaatcttttgtacttatttgaaaatataggaacaatttagcagctgcaaatatgcccaagctatttttaatagatatactaaacttattgttgacaaatttcagcctccttaat

SEQ ID NO: 528735 - DNA, 120 bp, Artificial Sequence
  ENSG00000166128_20 (sequence is synthesized)
ttttttttttttggtaattacctataggcttaaaagtcattcgttgctgttctagtataattagtagttccgtgattgaaagtttattgtaattctactatcttcaaattagatacattt

SEQ ID NO: 528736 - DNA, 120 bp, Artificial Sequence
  ENSG00000166128_21 (sequence is synthesized)
tcaaaaggaaaagataattttttagaaacatcttaatattcactatttcctgaaaaaatccaagcagttaacgctttctggatggtaacaaagtaccttctaaaagataagtgctatgac

SEQ ID NO: 528737 - DNA, 120 bp, Artificial Sequence
  ENSG00000166128_22 (sequence is synthesized)
accatgtatgaatgtaattctcttagtaatttacctctgactatttggtgtcttaacgctttggtttatataatctcaggggttgtctgcaaaccaaaactgacatattctgtggttagc

SEQ ID NO: 528738 - DNA, 120 bp, Artificial Sequence
  ENSG00000166128_23 (sequence is synthesized)
ttttattacttttttttttaacagaatgctttgctttggttatatttcttctttcttcttttgtcttatatggattaataactagtctccatgaacttcacttgaaagagcctgtaaaag

SEQ ID NO: 528739 - DNA, 120 bp, Artificial Sequence
  ENSG00000166128_24 (sequence is synthesized)
ttagatgagtctaaaagtgctctttgaagtagcagcaaattgggagtatatgctctgttatatagaaataaattgtccttgctattttcttacatttagctttgctagattgtatataca

SEQ ID NO: 528740 - DNA, 120 bp, Artificial Sequence
  ENSG00000166128_25 (sequence is synthesized)
ttgagctaagaccttaggaaattcactttctgcatgataaaatgacccaataaatattccactttgcttaataatgtacatacagtgcattattttttctatttgtagatgaatttaatg

SEQ ID NO: 528741 - DNA, 120 bp, Artificial Sequence
  ENSG00000166128_26 (sequence is synthesized)
acagataattgtctgttccccgctgaaactgaagaaatctagtttttttgtgaacatttttgtggtcttatggataaggtacatgaagatttttgcagcagtattagtggttcagtggct

SEQ ID NO: 528742 - DNA, 120 bp, Artificial Sequence
  ENSG00000166128_27 (sequence is synthesized)
gcactttattaatcagtgtgttaatttttgacagtgattggactagaccttttcaaatagagtctgagggtatcagacagtgaaaatgtgctgtaactaagtagcatgtaaatcagttga

SEQ ID NO: 528743 - DNA, 120 bp, Artificial Sequence
  ENSG00000166128_28 (sequence is synthesized)
ttgtaaaacgtttcgctgggaacttattttagctatattttacttcagacagattatgatacaataatctacctgtgcatcagttagtaggtgctgcagggtttcttactatttacagaa

SEQ ID NO: 528744 - DNA, 120 bp, Artificial Sequence
  ENSG00000166128_29 (sequence is synthesized)
acattttgtgcagtctttgttataaattttcagaagactatactctttactttgaaggtctattttttaattatacctcatttagctaactagtattctaatacctggtagaaaaacagt

SEQ ID NO: 528745 - DNA, 120 bp, Artificial Sequence
  ENSG00000166128_30 (sequence is synthesized)
gagccagcctttaagcatctaacaaaatttagactctttgttttgttttgaactgaagacatcattgggaaaggtaggaaatattagtttaggatagagcatacatgtcatatccagtag

SEQ ID NO: 528746 - DNA, 120 bp, Artificial Sequence
  ENSG00000166128_31 (sequence is synthesized)
cataaaaaaagtattatctccctgtctccattaataaatttagctgtgcaatataggtgcgtttttgcagaagtttctagtaagagattataactccattttacaggttctgaatgctca

SEQ ID NO: 528747 - DNA, 120 bp, Artificial Sequence
  ENSG00000166128_32 (sequence is synthesized)
gagtctatattaaggcttataaagtttttcctgtgatcagtaagtgacacatttaagcagacattcttttcaagttcatgacttagattcctttacaaatttagttctcaatctttaaaa

SEQ ID NO: 528748 - DNA, 120 bp, Artificial Sequence
  ENSG00000166128_33 (sequence is synthesized)
accacatttcattatgttggttaattattataaattttaagcactcatttctgcaatcaggtttctcagaattttttttttttaaacagaagagacattcctttttccttgttacatcca

SEQ ID NO: 528749 - DNA, 120 bp, Artificial Sequence
  ENSG00000166128_34 (sequence is synthesized)
aggggggcacaggggtgggtggaaaggaatgtctaaaaatgaaatcccttgatatagagggacctagacggacaggatatgctaaaataatttcaaattctagcacaattttagagtaga

SEQ ID NO: 528750 - DNA, 120 bp, Artificial Sequence
  ENSG00000166128_35 (sequence is synthesized)
ataagtcatttttttagactaataaaattaatggctgtcatgttcactctgaaaaaaatctaaatgactgaaatgtacagaaataaaaattagcaaacaattattctagggatattttca

SEQ ID NO: 528751 - DNA, 120 bp, Artificial Sequence
  ENSG00000166128_36 (sequence is synthesized)
gattttacttcatttcttgaaatgcgtgtgccatatgcaattgcatttcttgtgccaagaaactaatagaacttatttcactttacctttttttaaaatgtgaatttagttattatagtt

SEQ ID NO: 528752 - DNA, 120 bp, Artificial Sequence
  ENSG00000166128_37 (sequence is synthesized)
caattttatggccttacagatggcttttattttgtttgcagctgacactgcagttcctttcatgcaaaataccataaactgtttgatgaaaatcatgcccctaatggaaactctctagtt

SEQ ID NO: 528753 - DNA, 120 bp, Artificial Sequence
  ENSG00000166128_38 (sequence is synthesized)
tttccatataactatcctactgtacatgtttaaacatattttatttttgctccaatggcttaatgtgaaaagctcctgcagataagtggacctgtcatgtggttaatcttgtttaagcca

SEQ ID NO: 528754 - DNA, 120 bp, Artificial Sequence
  ENSG00000166128_39 (sequence is synthesized)
attcattaactgtgtactgatactgatgctatgttttttttaaatggattttattccaggtgaactttttttttataataatgttcgtctaaaataaaaactacataatgaaaatgaaaa

SEQ ID NO: 528755 - DNA, 120 bp, Artificial Sequence
  ENSG00000166130_0 (sequence is synthesized)
agggttcccacgaacgccaaggcggccacgtcctgctccccctggtgaagaagctgccctgggcttgtcgtcctagggtctccagacatgtctgaggtgaagagccggaagaagtcgggg

SEQ ID NO: 528756 - DNA, 120 bp, Artificial Sequence
  ENSG00000166130_1 (sequence is synthesized)
cccaagggagcccctgctgcggagcccgggaagcggagcgagggcgggaagacccccgtggcccggagcagcggaggcgggggctgggcagacccccgaacgtgcctgagcctgctgtcg

SEQ ID NO: 528757 - DNA, 120 bp, Artificial Sequence
  ENSG00000166130_2 (sequence is synthesized)
ctggggacgtgcctgggcctggcctggtttgtatttcagcagtcagaaaaatttgcaaaggtggaaaaccaataccagttactgaaactagaaaccaatgaattccaacaacttcaaagt

SEQ ID NO: 528758 - DNA, 120 bp, Artificial Sequence
  ENSG00000166130_3 (sequence is synthesized)
aaaatcagtttaatttcagaaaagcttgagtctactgaaagcatcctgcaggaagctacatcatccatgtctttgatgacccagtttgagcaggaagtatccaacctccaagatatcatg

SEQ ID NO: 528759 - DNA, 120 bp, Artificial Sequence
  ENSG00000166130_4 (sequence is synthesized)
catgacattcaaaataatgaagaggtgctcactcaaaggatgcaaagccttaatgagaaatttcagaatattacggatttctggaagagaagcctagaagaaatgaacattaatacagac

SEQ ID NO: 528760 - DNA, 120 bp, Artificial Sequence
  ENSG00000166130_5 (sequence is synthesized)
attttcaaatcagaagcaaaacatatacattctcaagtaactgtccaaattaactcagctgagcaggaaataaaattgctcactgaacggctaaaagatttggaagatagcacactaaga

SEQ ID NO: 528761 - DNA, 120 bp, Artificial Sequence
  ENSG00000166130_6 (sequence is synthesized)
aatattagaacagtaaaaagacaagaagaagaagatctcctgcgagtagaggagcagctaggctctgatacaaaggcaattgaaaagttagaagaggaacagcatgccctctttgccaga

SEQ ID NO: 528762 - DNA, 120 bp, Artificial Sequence
  ENSG00000166130_7 (sequence is synthesized)
gatgaagatctgactaataaactttccgactacgaacccaaagttgaagaatgcaagacacatttgccaacaattgaaagtgctattcactctgttctcagagtctctcaggatctgata

SEQ ID NO: 528763 - DNA, 120 bp, Artificial Sequence
  ENSG00000166130_8 (sequence is synthesized)
gaaacagaaaagaaaatggaagacttgactatgcagatgtttaatatggaagatgatatgctgaaagcagtgtctgaaataatggagatgcagaaaacccttgaaggaattcagtatgat

SEQ ID NO: 528764 - DNA, 120 bp, Artificial Sequence
  ENSG00000166130_9 (sequence is synthesized)
aatagcatattaaagatgcaaaatgaactggatattctaaaagaaaaagttcatgattttatagcatactcaagtacaggagaaaagggaactttaaaagaatataatatagaaaataaa

SEQ ID NO: 528765 - DNA, 120 bp, Artificial Sequence
  ENSG00000166130_10 (sequence is synthesized)
ggaattggtggtgatttttaaattcatgacatttattctgatgaaccatatcattatacataaattgattagtccattgattttgagttactttgatacgcctcatcttatcctacatta

SEQ ID NO: 528766 - DNA, 120 bp, Artificial Sequence
  ENSG00000166130_11 (sequence is synthesized)
ttggaaaataaatgagatgtccacacaaatggattatccacataatcaaagcttatctttttaagcactaaaacttacttcattgtaactatttgaaatagaaatagttctttaaaaata

SEQ ID NO: 528767 - DNA, 120 bp, Artificial Sequence
  ENSG00000166130_12 (sequence is synthesized)
tacttaatatttttaatgttttttaaagcattaatgaacatcatcattaatttcacctattatattgtacccacatatattgatgtctccaggggctaataaagagtatttaccacttca

SEQ ID NO: 528768 - DNA, 120 bp, Artificial Sequence
  ENSG00000166130_13 (sequence is synthesized)
ctaaatgaccccaatttgccattttcaaacctatgtctcataccttttctgtcacctgaacttactgtcaggttggttggtaatgtgcctgcctcagccagttcactttcttaggtaatt

SEQ ID NO: 528769 - DNA, 120 bp, Artificial Sequence
  ENSG00000166130_14 (sequence is synthesized)
cactgcaggttaagaatccacacaaccaagttcatgggaattttgtgtaaaataaaagataacatgcctgagggagagcctggtgcctttgctatgaattaatatgcactttctgaaaac

SEQ ID NO: 528770 - DNA, 120 bp, Artificial Sequence
  ENSG00000166130_15 (sequence is synthesized)
tctaaagcctgggaaacattttagtttttgttaaggttctaaactgtgttacagatacttgtaagacttttaaaatcagagtaagtatgttcttacataaggcctttcttaggaattatg

SEQ ID NO: 528771 - DNA, 120 bp, Artificial Sequence
  ENSG00000166130_16 (sequence is synthesized)
tgtatataaatctttgaaatatctttatatacctgagttttaggttccaactgtgttagacatgagtttgctagatccatggtctctagatggtttacttaaataggccaggcgcagtgg

SEQ ID NO: 528772 - DNA, 120 bp, Artificial Sequence
  ENSG00000166130_17 (sequence is synthesized)
tgtctcaataaataaataaataaataaaaataagcctgtggcctgttttgagggaaaagtaacataactctgataattaattatgataataactatgatagttaaaaatacgtcatttta

SEQ ID NO: 528773 - DNA, 120 bp, Artificial Sequence
  ENSG00000166130_18 (sequence is synthesized)
gttaaaaatacgtcattttaaagatttcccaaaccacaccactaaatttgttttatgaattgattttattttatttgaaattatataatgtagtcaactgcaatatggaagtttgttctt

SEQ ID NO: 528774 - DNA, 120 bp, Artificial Sequence
  ENSG00000166130_19 (sequence is synthesized)
gtttctttgtcaataaccttaccagttttataatgcagtttttgatggaattaaacacaaagaacttgaaagcagtcagttacaaaaaggtagttgtggtcaagtagttttaatatgtaa

SEQ ID NO: 528775 - DNA, 120 bp, Artificial Sequence
  ENSG00000166130_20 (sequence is synthesized)
atttgcaagtttttggagaacccccaaactccttctccactggagttaggagggcctgtggtagacagcgtgaatcatgaaaataagcctggagagttctgttattaaggggcatagcat

SEQ ID NO: 528776 - DNA, 120 bp, Artificial Sequence
  ENSG00000166130_21 (sequence is synthesized)
taatttttgcagtcttaaaattacacttcttgacttctgaatgtctcttatttgcgtgcactgacaaaattctatttgtttacttttatattaatggtaataaaatagattataaagtaa

SEQ ID NO: 528777 - DNA, 120 bp, Artificial Sequence
  ENSG00000166130_22 (sequence is synthesized)
gctaagcctcagggacgcgccgcgttcccaccaatgccggactcgggcagcggcggcgcgcccgacgtggcgcgcgcgaccccttcgtcctgcccctcctcctcgggtcccgtcggcctg

SEQ ID NO: 528778 - DNA, 120 bp, Artificial Sequence
  ENSG00000166130_23 (sequence is synthesized)
cgcgcgcccgggagtttgaatttcctcggatttggagcaatatcgcagtggaaggcgctgtgggttgaggtcgccgcccacctctcctaggggaactatggagctggcagctgaaagact

SEQ ID NO: 528779 - DNA, 120 bp, Artificial Sequence
  ENSG00000166130_24 (sequence is synthesized)
tggtccaataggataactgaaaaacaggatatactgaacaacagtctgacgacgctttctcaagacattacaaaagtagaccaaagtacaacttccatggcaaaagatgttggtctcaag

SEQ ID NO: 528780 - DNA, 120 bp, Artificial Sequence
  ENSG00000166130_25 (sequence is synthesized)
attacaagtgtaaaaacagatatacgacggatttcaggtttagtaactgatgtaatatcattgacagattctgtgcaagaactagaaaataaaatagagaaagtagaaaaaaatacagta

SEQ ID NO: 528781 - DNA, 120 bp, Artificial Sequence
  ENSG00000166130_26 (sequence is synthesized)
aaaaatataggtgatcttctttcaagcagtattgatcgaacagcaacgctccgaaagacagcatctgaaaattcacaaagaattaactctgttaagaagacgctaaccgaactaaagagt

SEQ ID NO: 528782 - DNA, 120 bp, Artificial Sequence
  ENSG00000166130_27 (sequence is synthesized)
gacttcgacaaacatacagatagatttctaagcttagaaggtgacagagccaaagttctgaagacagtgacttttgcaaatgatctaaaaccaaaggtgtataatctaaagaaggacttt

SEQ ID NO: 528783 - DNA, 120 bp, Artificial Sequence
  ENSG00000166130_28 (sequence is synthesized)
tcccgtttagaaccattagtaaatgatttaacactacgcattgggagattggttaccgacttactacaaagagagaaagaaattgctttcttaagtgaaaaaatatctaatttaacaata

SEQ ID NO: 528784 - DNA, 120 bp, Artificial Sequence
  ENSG00000166130_29 (sequence is synthesized)
gtccaagctgagattaaggatattaaagatgaaatagcacacatttcagatatgaattagtttgacattattgagattagactaaggtaatttttttaatgggacctctcatgagaagac

SEQ ID NO: 528785 - DNA, 120 bp, Artificial Sequence
  ENSG00000166130_30 (sequence is synthesized)
tggtaaatcaaaaataatgatattttggagcaaaagtcattttatatttaatcctattttgtacagtaaaaataaaactttaaaacaggttgattttccaaaataaatatgctaaaacct

SEQ ID NO: 528786 - DNA, 120 bp, Artificial Sequence
  ENSG00000166133_0 (sequence is synthesized)
agatcgcgaccctgggagtggagtgggggcagcgtggttatgtggctggaccgccgcggatggctcagggttcttggacattggcgctacgaccttaggcgccctagctttaccaggact

SEQ ID NO: 528787 - DNA, 120 bp, Artificial Sequence
  ENSG00000166133_1 (sequence is synthesized)
tggagtggcgataagggcccaatggcagaaacagtgtctacccaggttgggacagagggcgggctgagggcttcgcatcagcaaaacggtgacgctggtggcgacgcgaaggttgagctg

SEQ ID NO: 528788 - DNA, 120 bp, Artificial Sequence
  ENSG00000166133_2 (sequence is synthesized)
tcccccgggcccccgaagccggctggccgggaagtggagccggccccagtaggcggggagcatccctcggctgcagccccaggcccgggcaagcataagaagcggcggggcgcaaccagg

SEQ ID NO: 528789 - DNA, 120 bp, Artificial Sequence
  ENSG00000166133_3 (sequence is synthesized)
gagcgtgtcgtgccgcccccgaagaagcggcggaccggggtgagcttcggagatgagcactttgcagaaaccagttattacttcgagggcggcctgcgtaaggtgcggccctattacttt

SEQ ID NO: 528790 - DNA, 120 bp, Artificial Sequence
  ENSG00000166133_4 (sequence is synthesized)
gacttccggacctactgcaaaggtcgctgggtgggccacagcttgctgcacgtcttcagtaccgagttccgagctcagcccctggcctactatgaggccgcggtccgggcgggccgcctg

SEQ ID NO: 528791 - DNA, 120 bp, Artificial Sequence
  ENSG00000166133_5 (sequence is synthesized)
caactcaacgagaagccggtgcaggacctcaacatcgtgctcaaggacaatgatttcttgcggaacacagtgcacaggcatgagccaccagtcacagcagagcccattcgcctgctagct

SEQ ID NO: 528792 - DNA, 120 bp, Artificial Sequence
  ENSG00000166133_6 (sequence is synthesized)
gagaacgaagatgtggtggttgtagacaagccttcctccattcccgttcacccctgtggccgcttccgacacaacacagttatcttcatcctaggcaaggagcaccaactcaaggagcta

SEQ ID NO: 528793 - DNA, 120 bp, Artificial Sequence
  ENSG00000166133_7 (sequence is synthesized)
caccccttgcatcggcttgaccgccttacctcaggggtgcttatgtttgccaagacagctgcagtctctgagagaattcacgagcaggttcgggaccggcagctggagaaggagtacgtg

SEQ ID NO: 528794 - DNA, 120 bp, Artificial Sequence
  ENSG00000166133_8 (sequence is synthesized)
tgccgggtggaaggggagttccccactgaggaagtgacctgtaaagaacccatcttagtggtgtcttacaaagtaggggtgtgccgtgtagatccccggggcaagccctgtgagacagtg

SEQ ID NO: 528795 - DNA, 120 bp, Artificial Sequence
  ENSG00000166133_9 (sequence is synthesized)
ttcagttcttgggccatcccattctcaacgaccccatctacaactcagttgcctggggtccttctcgaggccggggcggctacattcccaagacaaacgaggagttgctacgggacctgg

SEQ ID NO: 528796 - DNA, 120 bp, Artificial Sequence
  ENSG00000166133_10 (sequence is synthesized)
tagcagagcaccaggccaaacagagcctggatgtgctagatctctgtgagggtgacctgtccccaggactcacagactctacggccccctcctcagagttgggcaaggacgacctggaag

SEQ ID NO: 528797 - DNA, 120 bp, Artificial Sequence
  ENSG00000166133_11 (sequence is synthesized)
agttggctgcagctgcccagaagatggaggaagtagctgaggcagcccctcaggagttggacacaatagccttggcatcagagaaggcagttgaaacagatgtcatgaatcaagagacag

SEQ ID NO: 528798 - DNA, 120 bp, Artificial Sequence
  ENSG00000166133_12 (sequence is synthesized)
acccactctgtgcagagtgccggctggtgcgacaggatcccttgccccaagaccttgtgatgttcctacatgccctacgctataaagggccaggctttgagtacttttcaccaatgcctg

SEQ ID NO: 528799 - DNA, 120 bp, Artificial Sequence
  ENSG00000166133_13 (sequence is synthesized)
cctgggcacaggatgactggcaaaaggactgagggtgtggccaatggagggattgcttcttgggttgtgacaaggatgggctatagggcaagggctgaccccatgggctagtacttgggg

SEQ ID NO: 528800 - DNA, 120 bp, Artificial Sequence
  ENSG00000166133_14 (sequence is synthesized)
tttctataggaatgaggacgggcttctaaagagacctgctcatacttgctacctccttccagtgggaatttggagactttttggtttgtaaatatatccctttttctaacatctttgatg

SEQ ID NO: 528801 - DNA, 120 bp, Artificial Sequence
  ENSG00000166133_15 (sequence is synthesized)
tctggttttcttccggcttcttttttattactgatgtaaaattcacataacataaaattaaccactttaactagccaggcacagtggctcatggctataatcctagtactttgggaggta

SEQ ID NO: 528802 - DNA, 120 bp, Artificial Sequence
  ENSG00000166133_16 (sequence is synthesized)
tcctagtactttgggaggtagaagtgaaaggatcactggaggccaagagttcaaggttaaagtgaactgtgattgtgctgctgcactccagagcctaggtgacagagtgagaccctgtct

SEQ ID NO: 528803 - DNA, 120 bp, Artificial Sequence
  ENSG00000166133_17 (sequence is synthesized)
accaatttaagatgtacagcgtagtcacatttagtacattcacagtgttgtacaaccataacctcatatatttccaaaacattttcatcaccccaaaaggaaacctgtacccattaagta

SEQ ID NO: 528804 - DNA, 120 bp, Artificial Sequence
  ENSG00000166133_18 (sequence is synthesized)
agtggtcactttccactccccttccaccagcctctggcaaccactaatctactttctgtctgtttggatttgcctgtttattctggacattttatataaatggaatgataaaacatgtga

SEQ ID NO: 528805 - DNA, 120 bp, Artificial Sequence
  ENSG00000166133_19 (sequence is synthesized)
agtcctgatggggctggccagaagcgggcgaggaaaaggggccgggttttgttttgttttgttttgttttttagtcttagtaaagcataggtactggattaaaatcatggcaattctaaa

SEQ ID NO: 528806 - DNA, 120 bp, Artificial Sequence
  ENSG00000166135_0 (sequence is synthesized)
gtccctggcggcggagatggcggcgacagcggcggaggctgtggcctctggctctggagagccccgggaggaggctggagccctcggccccgcctgggatgaatcccagttgcgcagtta

SEQ ID NO: 528807 - DNA, 120 bp, Artificial Sequence
  ENSG00000166135_1 (sequence is synthesized)
tagcttcccgactaggcccattccgcgtctgagtcagagcgacccccgggcagaggagcttattgagaatgaggagcctgtggtgctgaccgacacaaatcttgtgtatcctgccctgaa

SEQ ID NO: 528808 - DNA, 120 bp, Artificial Sequence
  ENSG00000166135_2 (sequence is synthesized)
atgggaccttgaatacctgcaagagaatattggcaatggagacttctctgtgtacagtgccagcacccacaagttcttgtactatgatgagaagaagatggccaatttccagaactttaa

SEQ ID NO: 528809 - DNA, 120 bp, Artificial Sequence
  ENSG00000166135_3 (sequence is synthesized)
gccgaggtccaacagggaagaaatgaaatttcatgagttcgttgagaaactgcaggatatacagcagcgaggaggggaagagaggttgtatctgcagcaaacgctcaatgacactgtggg

SEQ ID NO: 528810 - DNA, 120 bp, Artificial Sequence
  ENSG00000166135_4 (sequence is synthesized)
caggaagattgtcatggacttcttaggttttaactggaactggattaataagcaacagggaaagcgtggctgggggcagcttacctctaacctgctgctcattggcatggaaggaaatgt

SEQ ID NO: 528811 - DNA, 120 bp, Artificial Sequence
  ENSG00000166135_5 (sequence is synthesized)
gacacctgctcactatgatgagcagcagaacttttttgctcagataaaaggttacaaacgatgcatcttattccctccggatcagttcgagtgcctctacccataccctgttcatcaccc

SEQ ID NO: 528812 - DNA, 120 bp, Artificial Sequence
  ENSG00000166135_6 (sequence is synthesized)
atgtgacagacagagccaggtggactttgacaatcccgactacgagaggttccctaatttccaaaatgtggttggttacgaaacagtggttggccctggtgatgttctttacatcccaat

SEQ ID NO: 528813 - DNA, 120 bp, Artificial Sequence
  ENSG00000166135_7 (sequence is synthesized)
gtactggtggcatcacatagagtcattactaaatggggggattaccatcactgtgaacttctggtataagggggctcccacccctaagagaattgaatatcctctcaaagctcatcagaa

SEQ ID NO: 528814 - DNA, 120 bp, Artificial Sequence
  ENSG00000166135_8 (sequence is synthesized)
agtggccataatgagaaacattgagaagatgcttggagaggccttggggaacccacaagaggtggggcccttgttgaacacaatgatcaagggccgatacaactagcctgccaggggtca

SEQ ID NO: 528815 - DNA, 120 bp, Artificial Sequence
  ENSG00000166135_9 (sequence is synthesized)
aggcctcctgccaggtgactgctatcccgtccacaccgcttcattgatgaggacaggagactccaagcgctagtattgcacgctgcacttaatggactggactcttgccatggcccagga

SEQ ID NO: 528816 - DNA, 120 bp, Artificial Sequence
  ENSG00000166135_10 (sequence is synthesized)
gtcaggtgtttggagcgaggcagggcagttggcactccactcctatttggagggacttcatacccttgcctcttgtgccccagcaccttctctctctgccccccgcctaaagtcctgcat

SEQ ID NO: 528817 - DNA, 120 bp, Artificial Sequence
  ENSG00000166135_11 (sequence is synthesized)
tcagtgtgtggagtcccagcttttggttgtcatcatgtctgtgtgtatgttagtctgtcaacttcggaatgtgtgcgtgtgtgtgcatgcacacgcatgtatgtatctgttccctgttcc

SEQ ID NO: 528818 - DNA, 120 bp, Artificial Sequence
  ENSG00000166135_12 (sequence is synthesized)
ttctgggtcaggctgtcacttccggctctcagccctatctcctgcaacctcagtgcctcagcctgagagagagatgagatgctcttggactccccactgcatctgggctgcagggccaga

SEQ ID NO: 528819 - DNA, 120 bp, Artificial Sequence
  ENSG00000166135_13 (sequence is synthesized)
gctagtctgaccattaggtcagtctgcctcctgacagtttttgcgtagtcaagctctaggcggtatgggaatggctaccgggactctaatggggtgaaagagaggggaggcttgcctttg

SEQ ID NO: 528820 - DNA, 120 bp, Artificial Sequence
  ENSG00000166135_14 (sequence is synthesized)
agagcctatatagccttcctgtgagagaggattagatagggttccaactgggcctacaagctcaagccatacataaaaggaccttgggacataagaaccaatgattgtgcataagttcta

SEQ ID NO: 528821 - DNA, 120 bp, Artificial Sequence
  ENSG00000166135_15 (sequence is synthesized)
aattagagacacatatagtttctctctttcagcaccagctcttgcccctatgctgggtaccaagggagttctcctagctgtggcttctctaggttctaggggtgcaagcctctgtgtgtt

SEQ ID NO: 528822 - DNA, 120 bp, Artificial Sequence
  ENSG00000166135_16 (sequence is synthesized)
ctaggttctaggggtgcaagcctctgtgtgtttgtttgtgtgtgtctgtgtgtgcgtatccacactaggggtgcaagcctctgggtgtgtgtgtgtgtgtgcgtgcgtgtgtgtgtgtgt

SEQ ID NO: 528823 - DNA, 120 bp, Artificial Sequence
  ENSG00000166135_17 (sequence is synthesized)
gccagcctccctacttaccaaggttctccactgcttaccttttccagtgggacagtacagtgtgagcccccgggaagtactgcctgacctatcctaagcttttacacttggattttagcc

SEQ ID NO: 528824 - DNA, 120 bp, Artificial Sequence
  ENSG00000166135_18 (sequence is synthesized)
atcatatgttggccaggtctcactgcagcctgcccgaggctaactggctagagcctccaggccctatgatgctccctgcccaggccatatcctttattcctgctgagcttcctggctgaa

SEQ ID NO: 528825 - DNA, 120 bp, Artificial Sequence
  ENSG00000166135_19 (sequence is synthesized)
tagatgaaatggggtcaagcccaggcagctcattcactacctgtgatccacctcagggcacgggcaaacacataggcttgcgtcttaaagccagctcctctgccagaccccgttgtaatg

SEQ ID NO: 528826 - DNA, 120 bp, Artificial Sequence
  ENSG00000166135_20 (sequence is synthesized)
tgccacaacaccctcaatagtcagggcaactggtggagcatggaagtcgaatttccttttctgttaggagctactcctgggaacccctctcagggctgcagcttacaggtgggcagctgt

SEQ ID NO: 528827 - DNA, 120 bp, Artificial Sequence
  ENSG00000166135_21 (sequence is synthesized)
gattgcacaacttgaagggccatcattcacatctattcagtgggagtggggtccctgggattgggcagtgtggtggccctgtgtctcctcacctctgctcctgtcttcatcaccttctct

SEQ ID NO: 528828 - DNA, 120 bp, Artificial Sequence
  ENSG00000166135_22 (sequence is synthesized)
ctggttttcttttctttttttttttttttgccaaaggtttacttccagcatctgagctctggctctcacccctgaagctcagttatagtgcactgatgaactgagaggatgcgtgtggat

SEQ ID NO: 528829 - DNA, 120 bp, Artificial Sequence
  ENSG00000166135_23 (sequence is synthesized)
ctgatgaactgagaggatgcgtgtggatgtgtgtgcatgcctgagtgcgttttttggggaggggtgtttatttttagtaccccattctggggttctctgatgcagtgtggatgtgaagat

SEQ ID NO: 528830 - DNA, 120 bp, Artificial Sequence
  ENSG00000166135_24 (sequence is synthesized)
atggtaccttctcaagtgtagctctttcaaatatagtcaatgctgggaaatgtgattgcagtgatctctatctctccacttcttttgggaaagaggagcacaggagcggaggaaaaactt

SEQ ID NO: 528831 - DNA, 120 bp, Artificial Sequence
  ENSG00000166135_25 (sequence is synthesized)
ggccacagtcacacttggaaagatagtagattattttcgttctcctcagcaggtctgctgtattcctcgctcagcgctcaaagatgtgggtgatgtgtcaaggaggcatgcactcagctg

SEQ ID NO: 528832 - DNA, 120 bp, Artificial Sequence
  ENSG00000166135_26 (sequence is synthesized)
gtccttgctgagttatttgctgacacaggtctcactaaggtggctgaggggtgggagggagaaggctaatcttggaaccttcacaggattggccttgatccttgggtaacacaagagtga

SEQ ID NO: 528833 - DNA, 120 bp, Artificial Sequence
  ENSG00000166135_27 (sequence is synthesized)
ttcctgatttttagacacctaatatgtgcctagtgcttttctctttgttcctcactatcctgcaaggtaggtattctcacttacagatgaataaatgggctcagagagattaggtgatta

SEQ ID NO: 528834 - DNA, 120 bp, Artificial Sequence
  ENSG00000166135_28 (sequence is synthesized)
gtgacaatcagttgtaacttagcactgttaggctgcaaaccccttgctccttcctttccaccaaactatgttgattttccttccttacctccctccttgtaccacaggttctgtcctcaa

SEQ ID NO: 528835 - DNA, 120 bp, Artificial Sequence
  ENSG00000166135_29 (sequence is synthesized)
gatatcaccccactgggcagtatctgaaggcagacccagcccaagatggtgcagaatatacagctcagggtgaaagttcttctgggctcctgctaacaaagtcttggaaaaactgcctgg

SEQ ID NO: 528836 - DNA, 120 bp, Artificial Sequence
  ENSG00000166135_30 (sequence is synthesized)
gaagccatattatgaattagtgctagaagaagctgtggggggaactgagttctgtgtctaattgcattacttatgtgtccttgaataggacccataactcctcccggcatgcttttgcat

SEQ ID NO: 528837 - DNA, 120 bp, Artificial Sequence
  ENSG00000166135_31 (sequence is synthesized)
ctatagaactgaagctgtagttctagatggcactaagggtcttggttcatattcagctgctgcttccccccaaggaaaagatgaggtttttccccttcgattaccttttgagggatgttt

SEQ ID NO: 528838 - DNA, 120 bp, Artificial Sequence
  ENSG00000166135_32 (sequence is synthesized)
aggctcaaattctgcttgccacagaggaaacatttctgctgtagttgtttacctccatcctagctggcagtgtgggacacacacatacagcaagtgaaggtgggggtttgggcctgtata

SEQ ID NO: 528839 - DNA, 120 bp, Artificial Sequence
  ENSG00000166135_33 (sequence is synthesized)
gaggtcagctacgctgcaggctcatctattcacaccagcaggtacagagaaaactagtgttttgtaaagtcaaatatttgttgggggttggagttctggggttggaggaggggctgttct

SEQ ID NO: 528840 - DNA, 120 bp, Artificial Sequence
  ENSG00000166135_34 (sequence is synthesized)
gggcatcagttgagcagatgcccaggatgcctgggggagaccagcttcccctacaaatcagagctctaaattacaaggtttttaccaacgtgaacagttgggggaagtcgtctgctctca

SEQ ID NO: 528841 - DNA, 120 bp, Artificial Sequence
  ENSG00000166135_35 (sequence is synthesized)
tttgcgtaatggtttctgtcactggtgattagacacaggatgaaggaaaagaaatttgacaattaggaatgagcgatcattaatctgaatctgttaggagacagagaggggaaggatcct

SEQ ID NO: 528842 - DNA, 120 bp, Artificial Sequence
  ENSG00000166135_36 (sequence is synthesized)
tatcagtgggccagcccagtatggggagacactccctccctctgcccccagagactcctgggctacatcctctttcagtattgccacaagtgggcagagcttgtatttcttaacaaagat

SEQ ID NO: 528843 - DNA, 120 bp, Artificial Sequence
  ENSG00000166135_37 (sequence is synthesized)
tagggacccagttgccagcctgagatggatataggaacagacatctttgggcatgagccaacaaagatagaaatagatgagtgtcaggtacaagctataaggcaaagaataacagtggaa

SEQ ID NO: 528844 - DNA, 120 bp, Artificial Sequence
  ENSG00000166135_38 (sequence is synthesized)
aagttttgacatgtgtttgccatttgtggaaaatgtttttgtaatagtcaacacccctcatagcccacctgtgacaagtacttgttacattccagcactgtagggcgtgaggaaaatctg

SEQ ID NO: 528845 - DNA, 120 bp, Artificial Sequence
  ENSG00000166135_39 (sequence is synthesized)
gtccttatcaaatcccaggagcttctgcttagttggggaagaaattacatgaagcaaccagaggttataaggccacacttgtatatcgtgcaccctgtgtggacaagattagggactgtt

SEQ ID NO: 528846 - DNA, 120 bp, Artificial Sequence
  ENSG00000166135_40 (sequence is synthesized)
gagagaggaggaaaccagtagagagcaaagctctacccaggctccttgtaagcctctgggctcccccgagagggcctcgctactctacgcttcctagcaacgttgatgtccccacaaccc

SEQ ID NO: 528847 - DNA, 120 bp, Artificial Sequence
  ENSG00000166135_41 (sequence is synthesized)
cacatcagtgcagctgtggctgtgtggaggggctctgaggcctctgaggccagatgtgtaaacagtgctgaggttcagtaataggatgagtcttcaggtgtggagcagcccaccttggct

SEQ ID NO: 528848 - DNA, 120 bp, Artificial Sequence
  ENSG00000166135_42 (sequence is synthesized)
cttcccatgtctctgtgttacttctcatattctgctgtcctttcaaacttcaaggacagtattaatttatactagtatttcttcctcagttttgtgacttgaatgcagtgagtgccttag

SEQ ID NO: 528849 - DNA, 120 bp, Artificial Sequence
  ENSG00000166135_43 (sequence is synthesized)
aggatccaaggatgaaggaatgcgggttggtggttctctctttcagaatgggaacttcccaaaaatggggctgcgtctcgcctctcagtaggttccctacctctgggtcttccacccttc

SEQ ID NO: 528850 - DNA, 120 bp, Artificial Sequence
  ENSG00000166135_44 (sequence is synthesized)
aaaatctggtacagaatttagcaggggctgcagggaatgaccctcagggaccagtttcacccagatggggtagatgatgaggtatacctagaagtagctcagggctccagagtctggcct

SEQ ID NO: 528851 - DNA, 120 bp, Artificial Sequence
  ENSG00000166135_45 (sequence is synthesized)
ttcagctggtgtcttactcccctttgagaccttcagctgcttgtcttccactgcctgcatacttctctgatgtcttctcaaactgttggctctaaagggatgttccagcctccctctcca

SEQ ID NO: 528852 - DNA, 120 bp, Artificial Sequence
  ENSG00000166135_46 (sequence is synthesized)
gagctgcctgcagtttcccttattcagctgtctcctgcctagtctctccagcggcctccttaccaagaccctttttcctaaacagttgtccttccctcagaaactccatggctgcaagtg

SEQ ID NO: 528853 - DNA, 120 bp, Artificial Sequence
  ENSG00000166135_47 (sequence is synthesized)
tgaatagacttgtctttaggatccctctctctggtcatccctgatcatcttagggccgtctcccttttctgatttttgacagctctgtttattttgcccatggctagtcctcttgttttg

SEQ ID NO: 528854 - DNA, 120 bp, Artificial Sequence
  ENSG00000166135_48 (sequence is synthesized)
tgtctgctgtgtgttcttgcccttccattgtcagttctgtacatcctggttcagcttgtctcactgtggtagccccttctgcttgtcttcagccatcttggtttaatcctcataggtcat

SEQ ID NO: 528855 - DNA, 120 bp, Artificial Sequence
  ENSG00000166135_49 (sequence is synthesized)
ggatgaatggagccttgctgagcactttgagggcatttctgttgggcacaacctcagaaacgggaagtcttgaggcctgggggcgtgtggtcagtgaggcctccagaggtgggttagggg

SEQ ID NO: 528856 - DNA, 120 bp, Artificial Sequence
  ENSG00000166135_50 (sequence is synthesized)
tgggcacctacaagggccagttgaggggagaggtgcagggattgctgaggagactttgtgagaatgatgtcaggcccgggaagctggtgtggaagaactgagctgtcagaaggagatacc

SEQ ID NO: 528857 - DNA, 120 bp, Artificial Sequence
  ENSG00000166135_51 (sequence is synthesized)
aatatcccctttgcagggtggtgatgggcatcaaacatgacgtggaacatgtccccttcatggagggtttccatctaaatgcatctgtgtgccttagggatcagtagttcaggggtggtg

SEQ ID NO: 528858 - DNA, 120 bp, Artificial Sequence
  ENSG00000166135_52 (sequence is synthesized)
gacttttttgagtgtctcctaatttctctgaggtgtctttggctctgtgtcaccaaatgtgcctgacctctgcatcccagtggttgctgaaagggaaacagtatattgcgtagtcagatg

SEQ ID NO: 528859 - DNA, 120 bp, Artificial Sequence
  ENSG00000166135_53 (sequence is synthesized)
cactcctccaagagtttgagtcccatagctgatgaaagaatttacatatgggctcccccctgctttcccactgaaaatctattctcatattttgggaaggagcatatgtcctttaacttt

SEQ ID NO: 528860 - DNA, 120 bp, Artificial Sequence
  ENSG00000166135_54 (sequence is synthesized)
caatggtaaacaatctaggatagtgtttaaaggcatggattttggagtcacatatagttggtttgaatttctagcttcactacttaccagctgggtttgaccttggttgatttacttaac

SEQ ID NO: 528861 - DNA, 120 bp, Artificial Sequence
  ENSG00000166135_55 (sequence is synthesized)
ctctctgagcctcagtttcctcaactataataacatgggtggagggaggcatgttgaaaatatctacctcagggttgttggaataactgaaacaatgtttgtaaagctttagcacagtgc

SEQ ID NO: 528862 - DNA, 120 bp, Artificial Sequence
  ENSG00000166135_56 (sequence is synthesized)
ctggcaagcacttaataaatggctgtggtggtggtggttatatttattatgtgatttattcagaaacttggtttcagtgatctctaaacagatttccagtggttctttctctctcaagaa

SEQ ID NO: 528863 - DNA, 120 bp, Artificial Sequence
  ENSG00000166135_57 (sequence is synthesized)
aagcatagggaaaaacgagaaacaccttagataaaccatattgagttgagggtagacagaagagtctagtacctaaactcaccctagaggaagagaaacaggaagtgtcttatgcctctt

SEQ ID NO: 528864 - DNA, 120 bp, Artificial Sequence
  ENSG00000166135_58 (sequence is synthesized)
ctgcctgggcagccagactttactgctgtactaccagcccagggccttgggtgagaaggtttcaggtctgagctccccttgcactgtgtgagaggccgtggagccgaatgagtccttatt

SEQ ID NO: 528865 - DNA, 120 bp, Artificial Sequence
  ENSG00000166135_59 (sequence is synthesized)
atacctggagaagctgttgtctcctcacaccatgaaatgtaatagcagtcaaatcaggcccctcttgattcaattttagtccatgcctttccatgtatttaaattatataagtgttggcc

SEQ ID NO: 528866 - DNA, 82 bp, Artificial Sequence
  ENSG00000166135_60 (sequence is synthesized)
accaaccttgggcagcatagtgagaccccttctcttaataattttttttgaaaataattttttaaaaattacaaatatggac

SEQ ID NO: 528867 - DNA, 120 bp, Artificial Sequence
  ENSG00000166135_61 (sequence is synthesized)
cttgggcagcatagtgagaccccttctcttaataattttttttgaaaataattttttaaaaattacaaatatggaccagacacctgggaggattacctcacgcctgtaatcccagcactt

SEQ ID NO: 528868 - DNA, 86 bp, Artificial Sequence
  ENSG00000166135_62 (sequence is synthesized)
tcacgtcattgcactccagcctgggtgactacttatgagtatgttaagattgttctaggggagaagggcaatcaaaattcagaaaa

SEQ ID NO: 528869 - DNA, 120 bp, Artificial Sequence
  ENSG00000166135_63 (sequence is synthesized)
agattgttctaggggagaagggcaatcaaaattcagaaaaatatgagtgggatgttaatagctaccatttgttgaacacttctgttccaggcactgtattagttcgtccccatgtggtgc

SEQ ID NO: 528870 - DNA, 120 bp, Artificial Sequence
  ENSG00000166135_64 (sequence is synthesized)
tctcagatcagtaggggagacaggcaggcagttagaattatggtgtatagaggagaagcattgcactatgtccagttttttatggtaggcttcctgcagaaagtgataagtccaagctga

SEQ ID NO: 528871 - DNA, 120 bp, Artificial Sequence
  ENSG00000166135_65 (sequence is synthesized)
tatgtggaagatgaataattaaccagaggttgggggatttcccccttagcttctctttcttccagtccagcagtccaaaacaaacactgcttcccaatgcctaagggttttgtcgtacct

SEQ ID NO: 528872 - DNA, 120 bp, Artificial Sequence
  ENSG00000166135_66 (sequence is synthesized)
tactccagggaatgggtgagacagtagatcccaagaagaaaaccctttggttagtcacagaaatctgaaagtcttggttgctggctcagatttgtcctggagtggacgtagattggactt

SEQ ID NO: 528873 - DNA, 120 bp, Artificial Sequence
  ENSG00000166135_67 (sequence is synthesized)
gcttatttgtagccctccaccgttctcatttgtgttctggcctctggagccaccctgccagaccctacttggaagaaatgttgaatcaagctactcagacttcagcctgagatgtattat

SEQ ID NO: 528874 - DNA, 120 bp, Artificial Sequence
  ENSG00000166135_68 (sequence is synthesized)
ggctggctggaattctcagccctttccacatcatgatcccattaatctcttgggtctatccccacgcccagccacctctcctcctcactataagccaagtctccctgcagttctctataa

SEQ ID NO: 528875 - DNA, 120 bp, Artificial Sequence
  ENSG00000166135_69 (sequence is synthesized)
atactcagatcctcttgcctcagaccctggtccctagctttgtgggtgaagaagatacctctttagcttgtgccaacccatccctctgggctacaggccattctgtagtcaccttgcagt

SEQ ID NO: 528876 - DNA, 120 bp, Artificial Sequence
  ENSG00000166135_70 (sequence is synthesized)
cacgtctttccttctagataactggctctgggccttggaaaccttctctttggctctagctaattttgctgttttattccgtttacttaaaacctattcacttggtcattgaggtcagaa

SEQ ID NO: 528877 - DNA, 120 bp, Artificial Sequence
  ENSG00000166135_71 (sequence is synthesized)
ctatcaggaaagctgtgctccttaacccatcatctaagctaagcttgggccaggtttttattacctcttgaatatatatagtgcaatatagtgtagtggttgagagtggagtctgcatac

SEQ ID NO: 528878 - DNA, 120 bp, Artificial Sequence
  ENSG00000166135_72 (sequence is synthesized)
ctggatctgccattctgcatgactttgggcaaatggacaaactgcccgaaacttgacttgtttatatgtatggggaagacatcatttacattgtcagggtaaggcttagcagaatgaccg

SEQ ID NO: 528879 - DNA, 120 bp, Artificial Sequence
  ENSG00000166135_73 (sequence is synthesized)
gtccatagcaagggctcagtctttctgtgtctctcagtctttacctctcttccccatctagctttctgtctaagttcctgtttctagtctcagggcatatctagttgtcagctcctgagc

SEQ ID NO: 528880 - DNA, 120 bp, Artificial Sequence
  ENSG00000166135_74 (sequence is synthesized)
agagcagaggtataagtgtcaactcatgcttgtgttaccagttcctacccctgtcagtaacctctgatgcttacaaggatactatcacctatgccatcagtggggaatgaccttccaaaa

SEQ ID NO: 528881 - DNA, 120 bp, Artificial Sequence
  ENSG00000166135_75 (sequence is synthesized)
atatttttaacaatactaaaaatacctgaaacatactgggtgaaaataagacattggagctgctgctccccaaggagataaaaggacagttcctaaagaggcattgaaggtttgtatgag

SEQ ID NO: 528882 - DNA, 120 bp, Artificial Sequence
  ENSG00000166135_76 (sequence is synthesized)
ccagcagcacagtcagaaggcaagaaggagaccctgggatgtgcacaaggatgcaggagacgagattgtcacagaggctgtcatgctagtaagagtcagaggttactgatgggtagagat

SEQ ID NO: 528883 - DNA, 120 bp, Artificial Sequence
  ENSG00000166135_77 (sequence is synthesized)
tgtcagagtctgccttgctagtctagaggtaggaccatggatttaagaacgttgcctccaagtttttgaattgtgaatttttgatcatatttgaacaaaaccccacctacagtctgcatg

SEQ ID NO: 528884 - DNA, 120 bp, Artificial Sequence
  ENSG00000166135_78 (sequence is synthesized)
gtcattgttctcacaagggtttgtgtgatgcactgacaagaacagaggctttggaggtgactcctgggtttgaatcaccatttgccactagctaattctaaccttaggtaagtcagtgtc

SEQ ID NO: 528885 - DNA, 120 bp, Artificial Sequence
  ENSG00000166135_79 (sequence is synthesized)
tctgggtctcaacctcttcctctgtgaggggtaggaaatagcacataacttgtagcattgttataagggctcgtgataatgtttttaaaacacctggctcaagcactcaggaaaatgttt

SEQ ID NO: 528886 - DNA, 120 bp, Artificial Sequence
  ENSG00000166135_80 (sequence is synthesized)
tattatgaagaccaagtgtctctgaaaagtgtttccttagtgtctggagagactacagcagcaaggcttttctgatcctactctgactctcaagataatggtgcttgaagtgaaatcaca

SEQ ID NO: 528887 - DNA, 120 bp, Artificial Sequence
  ENSG00000166135_81 (sequence is synthesized)
gaagagatgactggggcaggaaaagcaagatggaaaagataaagttgtggaagggactgaaagtccatgaagtgctgggctggggacagaaagggtttaatagggcagggtcttgaggaa

SEQ ID NO: 528888 - DNA, 120 bp, Artificial Sequence
  ENSG00000166135_82 (sequence is synthesized)
caggaacagagaccttggttctgggttgccatctgattcccagaagagtaaaggaaatggggcaggaggatgtctgtggaggacacagtgtggctgagtggagagaacacaagcttctgg

SEQ ID NO: 528889 - DNA, 120 bp, Artificial Sequence
  ENSG00000166135_83 (sequence is synthesized)
ccagtgaacctaagtgagaatgtcagtggactttgcacaggctgggtgcctttgggggtgttcatctcgctatgcttcggtcccctcatttaaaaaaattggttaataatatgatgacct

SEQ ID NO: 528890 - DNA, 120 bp, Artificial Sequence
  ENSG00000166135_84 (sequence is synthesized)
gccaatgtgtgtggaaatactatgtaaactgagcactatataaatgctggttgttgagatattgggagtgggggtttcgggagattttgtttgtttgtttttttgagatggagttttcgc

SEQ ID NO: 528891 - DNA, 120 bp, Artificial Sequence
  ENSG00000166135_85 (sequence is synthesized)
caggtgcgagctaccacacctggccctggatttcttaataggtcctcttatgtggctattgagaatgaatgagacaactcattaactaactaagttaattcagaacttagtgcctagtaa

SEQ ID NO: 528892 - DNA, 120 bp, Artificial Sequence
  ENSG00000166135_86 (sequence is synthesized)
gtgctcagtaaatgttagtttcttttcctccatttcttcttaggaagcatcgtttacccagcataaacaggaggactcaactgtgcatgtcttagtgtgaacaagtaacatcagatttcc

SEQ ID NO: 528893 - DNA, 120 bp, Artificial Sequence
  ENSG00000166135_87 (sequence is synthesized)
cttttctgaggagagatcagttctgtaagagggagcatgagtgtgaatggggaagaatcatggagaagggagcaggactccacagtactggagatggagtagggacctctgggaatcgtt

SEQ ID NO: 528894 - DNA, 120 bp, Artificial Sequence
  ENSG00000166135_88 (sequence is synthesized)
ggcatgggggtgtggtgcagaaagggtgatgctaagaggtgagagtctcaagaaagaagatgggtgttctagaggggaaagctaaacgatgataggcaatgaggagcggaggacaagacc

SEQ ID NO: 528895 - DNA, 120 bp, Artificial Sequence
  ENSG00000166135_89 (sequence is synthesized)
ctgaactaagggtgaggaggccagcattctgtcaggagaaccttaggaattgtgaccagaagtcaaagttgttacagcaatcctgcattcaaccaggtttcatctgaaaaacttaagagt

SEQ ID NO: 528896 - DNA, 120 bp, Artificial Sequence
  ENSG00000166135_90 (sequence is synthesized)
acttgtaatcccaacactttgggaggcttgagtcaggaggaagcttgaggccaggagtttgagatcagcctaggcagcatagtgacaccccatctcttgaaaaaacaaacactcttaaga

SEQ ID NO: 528897 - DNA, 120 bp, Artificial Sequence
  ENSG00000166135_91 (sequence is synthesized)
aaaaacaaacactcttaagagcagtggttcacctagaaataaaaagcagaaatcatcaagatgagaagacattttgtgttttgacagccaaggaaatttgccactgagacaaggtatctg

SEQ ID NO: 528898 - DNA, 120 bp, Artificial Sequence
  ENSG00000166135_92 (sequence is synthesized)
acagcctagatgggattctagacttctgtgagaaagtgcagttaggccctgaatagcgtcaaactcagggatgtgagctgactgactgcctttttatgtaatggaggccatgtgataggg

SEQ ID NO: 528899 - DNA, 120 bp, Artificial Sequence
  ENSG00000166135_93 (sequence is synthesized)
ctttatgaggccacaaatagcactttctgggtcctttcacagtctagtcagtggcccaaccaacatatctggttgttctgcaatctcagtcatctgagaagataacctccaaaatacatg

SEQ ID NO: 528900 - DNA, 120 bp, Artificial Sequence
  ENSG00000166135_94 (sequence is synthesized)
cagtggcatcaggtgtttccttggtaggtgtgcatcttttaatgatggaggacttaggatgaagaacaggtgtgtttaaaaacatcaaacccccacatcattactatttgctgtaaggat

SEQ ID NO: 528901 - DNA, 120 bp, Artificial Sequence
  ENSG00000166135_95 (sequence is synthesized)
ctatgcagtttgtattttaagtccttgacatatggaagagcatttgtgagagtaacaggtttgctttgtaatgccaactaaaaagtgtgtatttatactcgaattttaagttgaaatttt

SEQ ID NO: 528902 - DNA, 120 bp, Artificial Sequence
  ENSG00000166135_96 (sequence is synthesized)
tttcctgtatttataaacttaatttattggaaatataagtacttgatcaggttttgtcttggtcagataaattaagtacttaaggaaatcaaatacattaatcatataaatgccatttaa

SEQ ID NO: 528903 - DNA, 120 bp, Artificial Sequence
  ENSG00000166135_97 (sequence is synthesized)
gtgtttaaaggagtttagttaaatgtaagttggatcaaacattaaacttttttgttttataagcaaaataataagatttgttagcagaacttaaaagcttagaaaagagaggattttgga

SEQ ID NO: 528904 - DNA, 120 bp, Artificial Sequence
  ENSG00000166135_98 (sequence is synthesized)
attttggatatgtaactttgaagaggtgaatagtttgctcttttctgagacagggcattgcttttcgacgcaggctggagtgcagtggggcaagcatggctcactgcagcctcaacctcc

SEQ ID NO: 528905 - DNA, 68 bp, Artificial Sequence
  ENSG00000166135_99 (sequence is synthesized)
gcctcacttcattgcccaggcggatctcgaacacctgggctcaagcagtcctgcctcagcctcccaaa

SEQ ID NO: 528906 - DNA, 62 bp, Artificial Sequence
  ENSG00000166135_100 (sequence is synthesized)
gtagagacaggggcctcacttcattgcccaggcggatctcgaacacctgggctcaagcagtg

SEQ ID NO: 528907 - DNA, 120 bp, Artificial Sequence
  ENSG00000166135_101 (sequence is synthesized)
tttctatataacccaaagtcactctcattgacattaagaaactcagagagtgggttctaaatgtaatattaccacacacccaagtcacttagcctctacaagtaccacgtaactagcagc

SEQ ID NO: 528908 - DNA, 120 bp, Artificial Sequence
  ENSG00000166135_102 (sequence is synthesized)
cgttaaaagatggccaccgctagtccagtcggccacagacatggttttgtttggccaatacaagtttttgaaagttttaaaaaattgacaacattaaagatcagaaacttgacctaaaaa

SEQ ID NO: 528909 - DNA, 120 bp, Artificial Sequence
  ENSG00000166135_103 (sequence is synthesized)
ctagtaatgcctaggctggaatgtctttccccttccccgtagtgatatgccaggttcggattacaggctgttcttgccttaacacaccaagagggtaatttcattgtagctcacatattc

SEQ ID NO: 528910 - DNA, 120 bp, Artificial Sequence
  ENSG00000166135_104 (sequence is synthesized)
caggctccctggagtggccaccagatgtttgtaagtataactagccccacagagctaattctcaggacagacactgtcattgatgctgatggactctggttactctgtttgattggctta

SEQ ID NO: 528911 - DNA, 120 bp, Artificial Sequence
  ENSG00000166135_105 (sequence is synthesized)
taagtttatggaacaaaatgtgtatgtctccattggatttaatcattgtttgcttttgtcatggatgctatttctttttgataagaagggtgaataaaactgagctatgttgtttaatgt

SEQ ID NO: 528912 - DNA, 120 bp, Artificial Sequence
  ENSG00000166135_106 (sequence is synthesized)
aaatgaaactcgacgctctggatagagccaaggaaggctcctgctattcgggggtcctcgagggagccattaaaacctcggcttcctcatttgaggaaacagcctgagccaaggagaaaa

SEQ ID NO: 528913 - DNA, 120 bp, Artificial Sequence
  ENSG00000166135_107 (sequence is synthesized)
ttgaagtcctctcagctgcagctgctcacccacccccctcccacctccctccacagagaaaagcacccactccattgactctgaggggtcacgagaaggttcgggaaaaagggtcacagt

SEQ ID NO: 528914 - DNA, 120 bp, Artificial Sequence
  ENSG00000166135_108 (sequence is synthesized)
caagccacccaacccagccggccttctcccatcactacttgggtgcgagcataccctctctgtctcaccccatgccatcatccgggagcctgtggtgctgaccgacacaaatcttgtgta

SEQ ID NO: 528915 - DNA, 120 bp, Artificial Sequence
  ENSG00000166135_109 (sequence is synthesized)
gaatggtgaaagagatgggagactggcagggctctagactagggcctatgggaagatggagagaaaggcgaggagatacggaacttaggggttcgtgctgattaacaggagaaattattc

SEQ ID NO: 528916 - DNA, 120 bp, Artificial Sequence
  ENSG00000166135_110 (sequence is synthesized)
tgaagttgagaagtagttgggatcatggaggccaacccaccggctccttggcattacttcatttggtgtttttcacctgttgttttcatttaggagcctgtggtgctgaccgacacaaat

SEQ ID NO: 528917 - DNA, 120 bp, Artificial Sequence
  ENSG00000166135_111 (sequence is synthesized)
ggcggagcttccggttccggtgggggccgtccctggcggcggagatggcggcgacagcggcggaggctgtggcctctggctctggagagccccgggaggaggctggagccctcggccccg

SEQ ID NO: 528918 - DNA, 120 bp, Artificial Sequence
  ENSG00000166136_0 (sequence is synthesized)
gaaacgtgaagaaggtgaagatggcggtggccagggccggggtcttgggagtccagtggctgcaaagggcatcccggaacgtgatgccgctgggcgcacggacagcctcccacatgacca

SEQ ID NO: 528919 - DNA, 120 bp, Artificial Sequence
  ENSG00000166136_1 (sequence is synthesized)
aggacatgttcccggggccctatcctaggaccccagaagaacgggccgccgccgccaagaagtataatatgcgtgtggaagactacgaaccttacccggatgatggcatggggtatggcg

SEQ ID NO: 528920 - DNA, 120 bp, Artificial Sequence
  ENSG00000166136_2 (sequence is synthesized)
actggggtgaaccgatgcactggcacctagacatgtacaacaggaaccgtgtggatacatcccccacacctgtttcttggcatgtcatgtgtatgcagctcttcggtttcctggctttca

SEQ ID NO: 528921 - DNA, 120 bp, Artificial Sequence
  ENSG00000166136_3 (sequence is synthesized)
tgatattcatgtgctgggtgggggacgtgtaccctgtctaccagcctgtgggaccaaagcagtatccttacaataatctgtacctggaacgaggcggtgatccctccaaagaaccagagc

SEQ ID NO: 528922 - DNA, 120 bp, Artificial Sequence
  ENSG00000166136_4 (sequence is synthesized)
gggtggttcactatgagatctgaggaggcttcgtgggcttttgggtcctctaactaggactccctcattcctagaaatttaaccttaatgaaatccctaataaaactcagtgctgtgtta

SEQ ID NO: 528923 - DNA, 120 bp, Artificial Sequence
  ENSG00000166136_5 (sequence is synthesized)
ccagcctgtggtgagtatccgagaagtgctcccttaggcacgcttgcttagccccatttcctgagggagtgaagtctctggggtaggaatccagtcaataccaagcttggcttcctggag

SEQ ID NO: 528924 - DNA, 120 bp, Artificial Sequence
  ENSG00000166136_6 (sequence is synthesized)
tcttaggagataggaagataggagggccttgacccattggcctgccacaagtaccacagcacttctccacccctacttcttggaccagtctgggtgagtagatacacttgaagactagat

SEQ ID NO: 528925 - DNA, 120 bp, Artificial Sequence
  ENSG00000166136_7 (sequence is synthesized)
gagcaatgagtgtgtggaaaccagctagtcaccagagttgccatttggggattatatttattaacaatatttcattaagtgatctttcacagtagagttaaggaatcttgagtgaaaatc

SEQ ID NO: 528926 - DNA, 120 bp, Artificial Sequence
  ENSG00000166136_8 (sequence is synthesized)
ctgggtgggggacgtgtaccctgtctaccagcctgtgtgtaggcaccacttctcttacaatttaggctttctctctgccttgggctgagtgaggaagaggagtgctgttcctgccttcct

SEQ ID NO: 528927 - DNA, 120 bp, Artificial Sequence
  ENSG00000166136_9 (sequence is synthesized)
agcccagctgggtctgaccagaggctactgtgtacccatttaccatgcgtgattgttaactcagagtggggtgtagccaggtattgactgaatgtatgttcttgctgacctgtgtttttt

SEQ ID NO: 528928 - DNA, 120 bp, Artificial Sequence
  ENSG00000166136_10 (sequence is synthesized)
ggtgaaccggtaagagaaccatatctcatttgaccttccttctctctttgtcttcttggcgattctttagctcagatggcacttctttgaccaagtaacactaagctttcctgctcaagg

SEQ ID NO: 528929 - DNA, 120 bp, Artificial Sequence
  ENSG00000166136_11 (sequence is synthesized)
aagcaaggtccagtgatgtgagatctgagattgcatgtggcacactgaatgggacgtctgggaatcatgaaactctgtactgtgaaagttgtgcacttccatgatggagctgtccctatt

SEQ ID NO: 528930 - DNA, 120 bp, Artificial Sequence
  ENSG00000166136_12 (sequence is synthesized)
tgacccctcagagtcaatggagtgggtgcttttctctgtggagggaggtgggaggggggtgggtgagcagctgcagctgagaggacttcaattttctccttggctcaggctgtttcctca

SEQ ID NO: 528931 - DNA, 120 bp, Artificial Sequence
  ENSG00000166136_13 (sequence is synthesized)
aatgaggaagccgaggttttaatggctccctcgaggacccccgaatagcaggagccttccttggctctatccagagcgtcgagtttcatttagattgagcatctgctgcgctcaggtgct

SEQ ID NO: 528932 - DNA, 120 bp, Artificial Sequence
  ENSG00000166136_14 (sequence is synthesized)
ttggcttcccaactgcgtatttaaaccccgcccctgttgaacccttcggcttttcttcactcccggcttcctccgtcacgtttggcccggctcagccgccgtgacaggcctttgcgcatg

SEQ ID NO: 528933 - DNA, 120 bp, Artificial Sequence
  ENSG00000166140_0 (sequence is synthesized)
gttccttgctgcctcgccccgcggcctctaggagacaggggccacggggagagcacagccacccggcgcgaagagccctctgtaccccgcttcctcttgaggccctcggaccgtccagga

SEQ ID NO: 528934 - DNA, 120 bp, Artificial Sequence
  ENSG00000166140_1 (sequence is synthesized)
aatgtctgggagcccgcctgcggagggcatagcgccgaccctcgctccccgcccaggacccgaatgaacctggagagcggatgccagcagtggccgaggcgctaggacaggaaggaccgc

SEQ ID NO: 528935 - DNA, 120 bp, Artificial Sequence
  ENSG00000166140_2 (sequence is synthesized)
cagacctctcaagatcagccttcctcgccaccgttctcacctctttgtccgctgccttctcctcaatgcctagcagcgcgtacaggtccatctgtaagagctccttggtcactgccatgg

SEQ ID NO: 528936 - DNA, 120 bp, Artificial Sequence
  ENSG00000166140_3 (sequence is synthesized)
ttccggcctgacggattcgtactacaactcccaagagtctaagcgcgcgtgaggactgcaggctccgagcggcgcctagccctctgggaattgtgttctgggtcaggcttgactgactct

SEQ ID NO: 528937 - DNA, 120 bp, Artificial Sequence
  ENSG00000166140_4 (sequence is synthesized)
gagggaggccggcagtcgtgaatgaactacgactcccagcagcccccgttgccgccgctgccgtacgctggctgcaggagagcgtccggattccctgctctaggtcgcggcgggacagtg

SEQ ID NO: 528938 - DNA, 120 bp, Artificial Sequence
  ENSG00000166140_5 (sequence is synthesized)
ccagtgggcgtgtggggcggggcagggcagggaagggaagggcggagctggggtgagggtccaaggggcccaggacttggccggcgtgatctcagctctgcagaccctgcggtgctggga

SEQ ID NO: 528939 - DNA, 120 bp, Artificial Sequence
  ENSG00000166140_6 (sequence is synthesized)
gccaccatggagagtaggtgctacggctgcgctgtcaagttcaccctcttcaagaaggagtacggctgtaagaattgtggcagggccttctgttcaggctgcctaagcttcagtgcagca

SEQ ID NO: 528940 - DNA, 120 bp, Artificial Sequence
  ENSG00000166140_7 (sequence is synthesized)
gtgcctcggactgggaacacccaacagaaagtctgcaagcaatgccatgaggtcctgaccagagggtcttctgccaatgcctccaagtggtcaccacctcagaactataagaagcgtgtg

SEQ ID NO: 528941 - DNA, 120 bp, Artificial Sequence
  ENSG00000166140_8 (sequence is synthesized)
gcagccttggaagccaagcaaaagcccagcacttcccagagccagggactgacacgacaagaccagatgattgctgagcgcctagcacgactccgccaggagaacaagcccaagttagtc

SEQ ID NO: 528942 - DNA, 120 bp, Artificial Sequence
  ENSG00000166140_9 (sequence is synthesized)
ccctcacaggcagagatagaggcacggctggctgccctaaaggatgaacgtcagggttccatcccttccacccaggaaatggaggcacgacttgcagcgttgcagggcagagttctacct

SEQ ID NO: 528943 - DNA, 120 bp, Artificial Sequence
  ENSG00000166140_10 (sequence is synthesized)
tctcaaaccccccagccggcacatcacacaccggacaccaggacccaagcccagcagacacaggatctgctaacgcagctggcagctgaggtggctatcgatgaaagctggaaaggagga

SEQ ID NO: 528944 - DNA, 120 bp, Artificial Sequence
  ENSG00000166140_11 (sequence is synthesized)
ctccagaatgatctcaaccagggtggcccagggagcactaattccaagaggcaggccaactggtccttggaggaggagaagagcagactgctggctgaggcagcacttgagttgcgggag

SEQ ID NO: 528945 - DNA, 120 bp, Artificial Sequence
  ENSG00000166140_12 (sequence is synthesized)
gagaacacgaggcaggaacggattctggccctggccaagcgactagccatgctgcggggacaggaccccgagagagtgaccctccaggactatcgcctcccagacagtgatgacgacgag

SEQ ID NO: 528946 - DNA, 120 bp, Artificial Sequence
  ENSG00000166140_13 (sequence is synthesized)
gatgaggagacagccatccaaagagtcctgcagcagctcactgaagaagcttccctggatgaggcaagtggctttaacatccctgcagagcaggcttctcgaccctggacgcaaccccgc

SEQ ID NO: 528947 - DNA, 120 bp, Artificial Sequence
  ENSG00000166140_14 (sequence is synthesized)
ggggcagagcctgaggcccaggatgtggaccccaggcctgaggctgaggaagaggagctcccctggtgctgcatctgcaatgaggatgccaccctacgctgcgctggctgcgatggggac

SEQ ID NO: 528948 - DNA, 120 bp, Artificial Sequence
  ENSG00000166140_15 (sequence is synthesized)
ctcttctgtgcccgctgcttccgagagggccatgatgcctttgagcttaaagagcaccagacatctgcctactctcctccacgtgcaggccaagagcactgaagacaccctggtcctccc

SEQ ID NO: 528949 - DNA, 120 bp, Artificial Sequence
  ENSG00000166140_16 (sequence is synthesized)
ggaagggcagtcccacaggcagcggcacccatttctgggcccagccacaggacgtccgatgggagagcttgtctggctctactgatgatggataggccccttcctgagccttggtgtccc

SEQ ID NO: 528950 - DNA, 120 bp, Artificial Sequence
  ENSG00000166140_17 (sequence is synthesized)
tggaatgaggaaagattctccattcgagagaatgactgggagggaagaagtcggggccctcctattagaagcccagactggaagtgagaggcatgatggggagagaccagactgaatcta

SEQ ID NO: 528951 - DNA, 120 bp, Artificial Sequence
  ENSG00000166140_18 (sequence is synthesized)
cgggtgagccctgtaacctggctctagggcacaggcccctcccctggcacttagtgggtctaataaagtatgttgattcattgggcccagcatctcatttctacaaccctatgagcctgg

SEQ ID NO: 528952 - DNA, 120 bp, Artificial Sequence
  ENSG00000166140_19 (sequence is synthesized)
gccctgtgagaggtggcaggaacagagcaggctgtaagcacagttgtggggaatgggggaaaaggttgagccatcctatgaacttctccaggcaggaacagccctacccatcctggtggc

SEQ ID NO: 528953 - DNA, 120 bp, Artificial Sequence
  ENSG00000166140_20 (sequence is synthesized)
ctcatacgaagtaaacatgtattcattcaactcaactgtgctccagctctgggcagccccacttagccaccagtccccaccatcttggatttctcagcctctctactactcacacaatgc

SEQ ID NO: 528954 - DNA, 120 bp, Artificial Sequence
  ENSG00000166140_21 (sequence is synthesized)
acgcaggaacaatgcacacacaccctgcttcctgccttactggcaaaggaccccagctcctagggctcctgtcccaacctgcctgccattcagtctcagtatctctcttccagtaatgcg

SEQ ID NO: 528955 - DNA, 120 bp, Artificial Sequence
  ENSG00000166140_22 (sequence is synthesized)
ccctaaccggacccctgacctctcggcatgtaccctttacatgcctctgcattgcctctgctgtttctcttcctgcccctggctggaaccaactataaagagccctcgggctgaggtcta

SEQ ID NO: 528956 - DNA, 120 bp, Artificial Sequence
  ENSG00000166140_23 (sequence is synthesized)
acttggccggcgtgatctcagctctgcagaccctgcggtgctgggagccaccatggagagtaggtgctacggctgcgctgtcaagttcaccctcttcaagaaggagagggtcttctgcca

SEQ ID NO: 528957 - DNA, 120 bp, Artificial Sequence
  ENSG00000166140_24 (sequence is synthesized)
tgggagatgaatataaatcggagagtgatcaacgttataagagttaccattcattgagtgcttactccaaagggagccagtgtaagcctagtgtttaagtgcacgggctttagaatcaga

SEQ ID NO: 528958 - DNA, 120 bp, Artificial Sequence
  ENSG00000166140_25 (sequence is synthesized)
cagtgattcccatttctaccacgtattagctgtgtgatgctggacaagttacttgacctaagtctcactttcctcatgtgtaaaatgaaggtatgtatggaaaaacctacctcacaggga

SEQ ID NO: 528959 - DNA, 120 bp, Artificial Sequence
  ENSG00000166140_26 (sequence is synthesized)
catggtgaaggctgactgtcctgtccctatcacagacctgccagattcctctggtaaactgcagtacggctgtaagaattgtggcagggccttctgttcaggctgcctaagcttcagtgc

SEQ ID NO: 528960 - DNA, 120 bp, Artificial Sequence
  ENSG00000166140_27 (sequence is synthesized)
catttggcttgaataaggtactggaaaccgaggaattgctttactcaccatccctaggccttaggggccccactcctcttcttcctcccagcagctggtcataacttcagtgacttctct

SEQ ID NO: 528961 - DNA, 120 bp, Artificial Sequence
  ENSG00000166140_28 (sequence is synthesized)
ctgtgtgtgcttggagagtccctgggagcagcctgcaggggcgggtgagagggggatctcccgcttcatgtttcttgtagtacggctgtaagaattgtggcagggccttctgttcaggct

SEQ ID NO: 528962 - DNA, 120 bp, Artificial Sequence
  ENSG00000166140_29 (sequence is synthesized)
caaagctactcttttctgtcggcccagtgtagcatctggcggttttcttctctccaccctgctcctccgaagcgcggtgtccatcacaccaagcccgttactccctctgctctgaaatct

SEQ ID NO: 528963 - DNA, 120 bp, Artificial Sequence
  ENSG00000166140_30 (sequence is synthesized)
tcctctggtaaactgcaggttccctctgcctcagttgtggccagggattctgaccaggagatgatgggaactagatggagtaaattagtgtcacgcaggaaggcaggaccgtgcagcatt

SEQ ID NO: 528964 - DNA, 120 bp, Artificial Sequence
  ENSG00000166140_31 (sequence is synthesized)
caccaacctggattttggagtcagcgttcaaatctgagctctgctgtcttattgaggcggtgaccttggtttggataagttatgtaacctctctggccctctcaaaataaggataatcac

SEQ ID NO: 528965 - DNA, 120 bp, Artificial Sequence
  ENSG00000166140_32 (sequence is synthesized)
ggttggcatcaagattaagtaaaataatgtgtgtaaattgtaaggaataaatcacatgatgaatgttaagtactgggtttagtgcctggcacatagtaagtgcttaataaatggaggcta

SEQ ID NO: 528966 - DNA, 120 bp, Artificial Sequence
  ENSG00000166140_33 (sequence is synthesized)
ttgttagcccatcctgagccaagcctccctccatctctgcaagagcagaggaggcatcggctctgccctgtctctctgattctcctttgtggaagagtcagtggcctgaaatactgggct

SEQ ID NO: 528967 - DNA, 120 bp, Artificial Sequence
  ENSG00000166140_34 (sequence is synthesized)
aacagaaagtctgcaagcaatgccatgaggtcctgaccaggtaagaggcaggcatgggtgaaagttcagccaagtatggcagtgggcatctggccagccctcacagctttgtactctgtc

SEQ ID NO: 528968 - DNA, 120 bp, Artificial Sequence
  ENSG00000166140_35 (sequence is synthesized)
gcgagagtcagccgaggaagtgtttggagtggggggcactgcctggtgggatggcaggatttataacactagatttcttctctgtagagggtcttctgccaatgcctccaagtggtcacc

SEQ ID NO: 528969 - DNA, 120 bp, Artificial Sequence
  ENSG00000166140_36 (sequence is synthesized)
tcccagacagtgatgacgacgaggatgaggagacagccatccaaagagtcctgcagcaggtgggcctggattacccacctgccaccccttgtcccgtctccgcctcattgccccacctct

SEQ ID NO: 528970 - DNA, 120 bp, Artificial Sequence
  ENSG00000166140_37 (sequence is synthesized)
actctggggctgggtggacagtaactgtgaagctcctgttctctttgggccccctcctgtgacccagacccagacctgcccactggtccctggagatagggaatcagcagccacaggcca

SEQ ID NO: 528971 - DNA, 120 bp, Artificial Sequence
  ENSG00000166140_38 (sequence is synthesized)
caagtaaagaaaaagatgagtttgagaagctaagtccacagtgcacagaaatactgggagatggagggcctgggcctgaagcaggggagtagtacatcttcaccctgtccgcagctcact

SEQ ID NO: 528972 - DNA, 120 bp, Artificial Sequence
  ENSG00000166143_0 (sequence is synthesized)
cacttccctctgtggctctgctcagaactggcggtttttcccagctccttgcccagaccaatacttccatgctgtcttcaagccctgcttcctgcacatctcccagcccagatggggaga

SEQ ID NO: 528973 - DNA, 120 bp, Artificial Sequence
  ENSG00000166143_1 (sequence is synthesized)
acccatgtaagaaggtccactgggcttctgggaggagaaggacatcatccacagactcagagtccaagtcccacccggactcctccaagatacccaggtcccggagacccagccgcctga

SEQ ID NO: 528974 - DNA, 120 bp, Artificial Sequence
  ENSG00000166143_2 (sequence is synthesized)
cagtgaagtatgaccggggccagctccagcgctggctggagatggagcaatgggtggatgctcaagttcaggagctcttccaggatcaagcaaccccttctgagcctgagattgacctgg

SEQ ID NO: 528975 - DNA, 120 bp, Artificial Sequence
  ENSG00000166143_3 (sequence is synthesized)
tcagctggaggccattcttgggaactgcccccgccccacagaggcttttatctctgagctgctcagtcaactcaagaaactccggagactcagccggcctcagaaataagcctgagagac

SEQ ID NO: 528976 - DNA, 120 bp, Artificial Sequence
  ENSG00000166143_4 (sequence is synthesized)
catctttagcagcctcagcactgccaggcctgccctgaaactccagatcctggctaagagggaaatagctccttgggacacaaacaagaaatgtggacaaggagggacatttgcatactc

SEQ ID NO: 528977 - DNA, 120 bp, Artificial Sequence
  ENSG00000166143_5 (sequence is synthesized)
ctactgtctgtgtggtcacagctagtttctgtcagctgggctctctgggagaaagctggctgttgtccaatgccttccttggcagccaagtggataaaacctttaggagccccagctcaa

SEQ ID NO: 528978 - DNA, 120 bp, Artificial Sequence
  ENSG00000166143_6 (sequence is synthesized)
ccgggttcaatcgattctcctgcctcagctcctggagtagctgggattacgggatcaagcaaccccttctgagcctgagattgacctggaagctctcatggatctatccacagaggagca

SEQ ID NO: 528979 - DNA, 120 bp, Artificial Sequence
  ENSG00000166145_0 (sequence is synthesized)
atgtcggccccgccccgacggcgctgactcagtttcaccagaaaccagggggagaaggcggccgagccccagctctccgagcaccgggtcggaagccgcgacccgagccgcgcaggaagc

SEQ ID NO: 528980 - DNA, 120 bp, Artificial Sequence
  ENSG00000166145_1 (sequence is synthesized)
tgggaccggaacctcggcggacccggccccacccaactcacctgcgcaggtcaccagcaccctcggaacccagaggcccgcgctctgaaggtgacccccctggggaggaaggcgatggcc

SEQ ID NO: 528981 - DNA, 120 bp, Artificial Sequence
  ENSG00000166145_2 (sequence is synthesized)
aaggcgatggcccctgcgaggacgatggcccgcgcccgcctcgccccggccggcatccctgccgtcgccttgtggcttctgtgcacgctcggcctccagggcacccaggccgggccaccg

SEQ ID NO: 528982 - DNA, 120 bp, Artificial Sequence
  ENSG00000166145_3 (sequence is synthesized)
gggctgcccgcgggagccgactgcctgaacagctttaccgccggggtgcctggcttcgtgctggacaccaacgcctcggtcagcaacggagctaccttcctggagtcccccaccgtgcgc

SEQ ID NO: 528983 - DNA, 120 bp, Artificial Sequence
  ENSG00000166145_4 (sequence is synthesized)
cggggctgggactgcgtgcgcgcctgctgcaccacccagaactgcaacttggcgctagtggagctgcagcccgaccgcggggaggacgccatcgccgcctgcttcctcatcaactgcctc

SEQ ID NO: 528984 - DNA, 120 bp, Artificial Sequence
  ENSG00000166145_5 (sequence is synthesized)
tacgagcagaacttcgtgtgcaagttcgcgcccagggagggcttcatcaactacctcacgagggaagtgtaccgctcctaccgccagctgcggacccagggctttggagggtctgggatc

SEQ ID NO: 528985 - DNA, 120 bp, Artificial Sequence
  ENSG00000166145_6 (sequence is synthesized)
cccaaggcctgggcaggcatagacttgaaggtacaaccccaggaacccctggtgctgaaggatgtggaaaacacagattggcgcctactgcggggtgacacggatgtcagggtagagagg

SEQ ID NO: 528986 - DNA, 120 bp, Artificial Sequence
  ENSG00000166145_7 (sequence is synthesized)
aaagacccaaaccaggtggaactgtggggactcaaggaaggcacctacctgttccagctgacagtgactagctcagaccacccagaggacacggccaacgtcacagtcactgtgctgtcc

SEQ ID NO: 528987 - DNA, 120 bp, Artificial Sequence
  ENSG00000166145_8 (sequence is synthesized)
accaagcagacagaagactactgcctcgcatccaacaaggtgggtcgctgccggggctctttcccacgctggtactatgaccccacggagcagatctgcaagagtttcgtttatggaggc

SEQ ID NO: 528988 - DNA, 120 bp, Artificial Sequence
  ENSG00000166145_9 (sequence is synthesized)
tgcttgggcaacaagaacaactaccttcgggaagaagagtgcattctagcctgtcggggtgtgcaaggtgggcctttgagaggcagctctggggctcaggcgactttcccccagggcccc

SEQ ID NO: 528989 - DNA, 120 bp, Artificial Sequence
  ENSG00000166145_10 (sequence is synthesized)
tccatggaaaggcgccatccagtgtgctctggcacctgtcagcccacccagttccgctgcagcaatggctgctgcatcgacagtttcctggagtgtgacgacacccccaactgccccgac

SEQ ID NO: 528990 - DNA, 120 bp, Artificial Sequence
  ENSG00000166145_11 (sequence is synthesized)
gcctccgacgaggctgcctgtgaaaaatacacgagtggctttgacgagctccagcgcatccatttccccagtgacaaagggcactgcgtggacctgccagacacaggactctgcaaggag

SEQ ID NO: 528991 - DNA, 120 bp, Artificial Sequence
  ENSG00000166145_12 (sequence is synthesized)
tggtggttgttacggcaacaagaacaactttgaggaagagcagcagtgcctcgagtcttgtcgcggcatctccaagaaggatgtgtttggcctgaggcgggaaatccccattcccagcac

SEQ ID NO: 528992 - DNA, 120 bp, Artificial Sequence
  ENSG00000166145_13 (sequence is synthesized)
aggctctgtggagatggctgtcgcagtgttcctggtcatctgcattgtggtggtggtagccatcttgggttactgcttcttcaagaaccagagaaaggacttccacggacaccaccacca

SEQ ID NO: 528993 - DNA, 120 bp, Artificial Sequence
  ENSG00000166145_14 (sequence is synthesized)
cccaccacccacccctgccagctccactgtctccactaccgaggacacggagcacctggtctataaccacaccacgcggcccctctgagcctgggtctcaccggctctcacctggccctg

SEQ ID NO: 528994 - DNA, 120 bp, Artificial Sequence
  ENSG00000166145_15 (sequence is synthesized)
cttcctgcttgccaaggcagaggcctgggctgggaaaaactttggaaccagactcttgcctgtttcccaggcccactgtgcctcagagaccagggctccagcccctcttggagaagtctc

SEQ ID NO: 528995 - DNA, 120 bp, Artificial Sequence
  ENSG00000166145_16 (sequence is synthesized)
agctaagctcacgtcctgagaaagctcaaaggtttggaaggagcagaaaacccttgggccagaagtaccagactagatggacctgcctgcataggagtttggaggaagttggagttttgt

SEQ ID NO: 528996 - DNA, 120 bp, Artificial Sequence
  ENSG00000166145_17 (sequence is synthesized)
ttcctctgttcaaagctgcctgtccctaccccatggtgctaggaagaggagtggggtggtgtcagaccctggaggccccaaccctgtcctcccgagctcctcttccatgctgtgcgccca

SEQ ID NO: 528997 - DNA, 120 bp, Artificial Sequence
  ENSG00000166145_18 (sequence is synthesized)
gggctgggaggaaggacttccctgtgtagtttgtgctgtaaagagttgctttttgtttatttaatgctgtggcatgggtgaagaggaggggaagaggcctgtttggcctctctatcctct

SEQ ID NO: 528998 - DNA, 120 bp, Artificial Sequence
  ENSG00000166145_19 (sequence is synthesized)
cttcctcttcccccaagattgagctctctgcccttgatcagccccaccctggcctagaccagcagacagagccaggagaagctcagctgcattccgcagcccccacccccaaggttctcc

SEQ ID NO: 528999 - DNA, 120 bp, Artificial Sequence
  ENSG00000166145_20 (sequence is synthesized)
aacatcacagcccagcccgcccactgggtaataaaagtggtttgtggagtttctggctctgttctgtgggccaggagagggactaggttgctggggggtgatgggaccgtcctgttcagc

SEQ ID NO: 529000 - DNA, 120 bp, Artificial Sequence
  ENSG00000166145_21 (sequence is synthesized)
tggttcaggcttcagccaccctgttgagcaggttttcccatcgtctctctcgaaactggcctggcccctgactttggagagcagtgccatgtttgaccaccagaggggaggagtgagcgg

SEQ ID NO: 529001 - DNA, 120 bp, Artificial Sequence
  ENSG00000166145_22 (sequence is synthesized)
gccacgggagccacgagtgtggggaggctgcagtgctgctgtgtagcatttcttcctggtgtgagcctctccacaagcctgttgagtggttgagctctccacaattctgctcatttggag

SEQ ID NO: 529002 - DNA, 120 bp, Artificial Sequence
  ENSG00000166145_23 (sequence is synthesized)
gttggggttaggggtgcacaggcaccttggctcctacctccatgttagggcccaggtgactagctgtctccctcccaacagaagccctggcttctgcgctggagtgcagcacccccaacc

SEQ ID NO: 529003 - DNA, 120 bp, Artificial Sequence
  ENSG00000166145_24 (sequence is synthesized)
aggctctgagctccttcccaggagcctttagtagagacacgccactccaacccacacccctgcatttgttcaagctacctcccggtgccaaaaaaaaaaaaaaatcatactttgagctca

SEQ ID NO: 529004 - DNA, 120 bp, Artificial Sequence
  ENSG00000166145_25 (sequence is synthesized)
ggaggtgctgggcagcagccacgtggagcctagcagaaggtggcagggaggccatggactcgctcaccatagcctaccccataccccccagggcactgcgtggacctgccagacacagga

SEQ ID NO: 529005 - DNA, 120 bp, Artificial Sequence
  ENSG00000166145_26 (sequence is synthesized)
acctgcgcaggtaacccgggcccccgcgcgcaaggccgaggcgcaggcggagcgggctggagcatgtccggccctttgttctgcgctcgtgcgtgtgtccgggtcaccagcaccctcgga

SEQ ID NO: 529006 - DNA, 120 bp, Artificial Sequence
  ENSG00000166145_27 (sequence is synthesized)
acaaacatcccaccccttccagcccagcatcgtcctatgaggatctgcccagtttgcgtggggcaggagtggggttggtggaaagggaatgggggatgtgctgtgtctgggcagagaggg

SEQ ID NO: 529007 - DNA, 120 bp, Artificial Sequence
  ENSG00000166147_0 (sequence is synthesized)
gtggtgatgagggcgacgaaggagggggtgtcattttctttttctttctttttttaaaaaaagtatttctctcgcgagaaaccgctgcgcggacgatacttgaagaggtggggaaaggag

SEQ ID NO: 529008 - DNA, 120 bp, Artificial Sequence
  ENSG00000166147_1 (sequence is synthesized)
ggggctgcgggagccgcggcagagactgtgggtgccacaagcggacaggagccacagctgggacagctgcgagcggagccgagcagtggctgtagcggccacgactgggagcagccgccg

SEQ ID NO: 529009 - DNA, 120 bp, Artificial Sequence
  ENSG00000166147_2 (sequence is synthesized)
ccgcctcctcgggagtcggagccgccgcttctccactggcaggggccgcctgaagtgggagcagcgcctggagaaggcgggaggagcccggcccgggggacgggcggcgggatagcggga

SEQ ID NO: 529010 - DNA, 120 bp, Artificial Sequence
  ENSG00000166147_3 (sequence is synthesized)
ggcggcgcggtgcgcttcagggcgcagcggcggccgcagaccgagccccgggcgcggcaagaggcggcgggagccggtggcggctcggcatcatgcgtcgagggcgtctgctggagatcg

SEQ ID NO: 529011 - DNA, 120 bp, Artificial Sequence
  ENSG00000166147_4 (sequence is synthesized)
atcgccctgggatttaccgtgcttttagcgtcctacacgagccatggggcggacgccaatttggaggctgggaacgtgaaggaaaccagagccagtcgggccaagagaagaggcggtgga

SEQ ID NO: 529012 - DNA, 120 bp, Artificial Sequence
  ENSG00000166147_5 (sequence is synthesized)
ggacacgacgcgcttaaaggacccaatgtctgtggatcacgttataatgcttactgttgccctggatggaaaaccttacctggcggaaatcagtgtattgtccccatttgccggcattcc

SEQ ID NO: 529013 - DNA, 120 bp, Artificial Sequence
  ENSG00000166147_6 (sequence is synthesized)
tgtggggatggattttgttcgaggccaaatatgtgcacttgcccatctggtcagatagctccttcctgtggctccagatccatacaacactgcaatattcgctgtatgaatggaggtagc

SEQ ID NO: 529014 - DNA, 120 bp, Artificial Sequence
  ENSG00000166147_7 (sequence is synthesized)
tgcagtgacgatcactgtctatgccagaaaggatacatagggactcactgtggacaacctgtttgtgaaagtggctgtctcaatggaggaaggtgtgtggccccaaatcgatgtgcatgc

SEQ ID NO: 529015 - DNA, 120 bp, Artificial Sequence
  ENSG00000166147_8 (sequence is synthesized)
acttacggatttactggaccccagtgtgaaagagattacaggacaggcccatgttttactgtgatcagcaaccagatgtgccagggacaactcagcgggattgtctgcacaaaaacgctc

SEQ ID NO: 529016 - DNA, 120 bp, Artificial Sequence
  ENSG00000166147_9 (sequence is synthesized)
tgctgtgccacagtcggccgagcctggggccacccctgtgagatgtgtcctgcccagcctcacccctgccgccgtggcttcattccaaatatccgcacgggagcttgtcaagatgtggat

SEQ ID NO: 529017 - DNA, 120 bp, Artificial Sequence
  ENSG00000166147_10 (sequence is synthesized)
gaatgccaggccatccccgggctctgtcagggaggaaattgcattaatactgttgggtcttttgagtgcaaatgccctgctggacacaaacttaatgaagtgtcacaaaaatgtgaagat

SEQ ID NO: 529018 - DNA, 120 bp, Artificial Sequence
  ENSG00000166147_11 (sequence is synthesized)
attgatgaatgcagcaccattcctggaatctgtgaagggggtgaatgtacaaacacagtcagcagttacttttgcaaatgtccccctggtttttacacctctccagatggtaccagatgc

SEQ ID NO: 529019 - DNA, 120 bp, Artificial Sequence
  ENSG00000166147_12 (sequence is synthesized)
atagatgttcgcccaggatactgttacacagctctgacaaacgggcgctgctctaaccagctgccacagtccataaccaaaatgcagtgctgctgtgatgccggccgatgctggtctcca

SEQ ID NO: 529020 - DNA, 120 bp, Artificial Sequence
  ENSG00000166147_13 (sequence is synthesized)
ggggtcactgtcgcccctgagatgtgtcccatcagagcaaccgaggatttcaacaagctgtgctctgttcctatggtaattcctgggagaccagaatatcctcccccaccccttggcccc

SEQ ID NO: 529021 - DNA, 120 bp, Artificial Sequence
  ENSG00000166147_14 (sequence is synthesized)
attcctccagttctccctgttcctcctggctttcctcctggacctcaaattccggtccctcgaccaccagtggaatatctgtatccatctcgggagccaccaagggtgctgccagtaaac

SEQ ID NO: 529022 - DNA, 120 bp, Artificial Sequence
  ENSG00000166147_15 (sequence is synthesized)
gttactgattactgccagttggtccgctatctctgtcaaaatggacgctgcattccaactcctgggagttaccggtgtgagtgcaacaaagggttccagctggacctccgtggggagtgt

SEQ ID NO: 529023 - DNA, 120 bp, Artificial Sequence
  ENSG00000166147_16 (sequence is synthesized)
attgatgttgatgaatgtgagaaaaacccctgtgctggtggtgagtgtattaacaaccagggttcgtacacctgtcagtgccgagctggatatcagagcacactcacgcggacagaatgc

SEQ ID NO: 529024 - DNA, 120 bp, Artificial Sequence
  ENSG00000166147_17 (sequence is synthesized)
cgagacattgatgagtgtttacagaatggccggatctgcaataatggacgctgcatcaacacagatggcagttttcattgcgtgtgtaatgcgggctttcatgttacacgagatgggaag

SEQ ID NO: 529025 - DNA, 120 bp, Artificial Sequence
  ENSG00000166147_18 (sequence is synthesized)
aactgtgaagatatggatgaatgcagcataaggaacatgtgccttaatggaatgtgtatcaatgaagatggcagttttaaatgtatttgcaaacctggattccagctggcatcagatgga

SEQ ID NO: 529026 - DNA, 120 bp, Artificial Sequence
  ENSG00000166147_19 (sequence is synthesized)
cgttattgcaaagacattaacgagtgtgaaacccctgggatctgcatgaatgggcgttgcgtcaacactgatggctcctacagatgtgaatgcttccctggactggctgtgggtctggat

SEQ ID NO: 529027 - DNA, 120 bp, Artificial Sequence
  ENSG00000166147_20 (sequence is synthesized)
ggccgtgtgtgtgttgacacacacatgcggagcacatgctatggtggatacaagagaggccagtgtatcaaacctttgtttggtgctgtcactaaatctgaatgctgttgcgccagcact

SEQ ID NO: 529028 - DNA, 120 bp, Artificial Sequence
  ENSG00000166147_21 (sequence is synthesized)
gagtatgcatttggggaaccttgccagccgtgtcctgcacagaattcagcggaatatcaggcactctgcagcagtgggccaggaatgacgtcagcaggcagtgatataaatgaatgtgca

SEQ ID NO: 529029 - DNA, 120 bp, Artificial Sequence
  ENSG00000166147_22 (sequence is synthesized)
ctagatcctgatatttgcccaaatggaatctgtgaaaaccttcgtgggacctataaatgtatatgcaattcaggatatgaagtggattcaactgggaaaaactgcgttgatattaatgaa

SEQ ID NO: 529030 - DNA, 120 bp, Artificial Sequence
  ENSG00000166147_23 (sequence is synthesized)
tgtgtactgaacagtctcctttgtgacaatggacaatgtagaaatactcctggaagttttgtctgtacctgccccaagggatttatctacaaacctgatctaaaaacatgtgaagacatt

SEQ ID NO: 529031 - DNA, 120 bp, Artificial Sequence
  ENSG00000166147_24 (sequence is synthesized)
gatgaatgcgaatcaagtccttgcattaatggagtctgcaagaacagcccaggctcttttatttgtgaatgttcttctgaaagtactttggatccaacaaaaaccatctgcatagaaacc

SEQ ID NO: 529032 - DNA, 120 bp, Artificial Sequence
  ENSG00000166147_25 (sequence is synthesized)
atcaagggcacttgctggcagactgtcattgatgggcgatgtgagatcaacatcaatggagccaccttaaagtcccagtgctgctcctccctcggtgctgcgtggggaagcccgtgcacc

SEQ ID NO: 529033 - DNA, 120 bp, Artificial Sequence
  ENSG00000166147_26 (sequence is synthesized)
ctatgccaagttgatcccatatgtggtaaagggtactcaagaattaaaggaacacaatgtgaagatatagatgaatgtgaagtgttcccaggagtgtgtaaaaatggcctgtgtgttaac

SEQ ID NO: 529034 - DNA, 120 bp, Artificial Sequence
  ENSG00000166147_27 (sequence is synthesized)
actagggggtcattcaagtgtcagtgtcccagtggaatgactttggatgccacaggaaggatctgtcttgatatccgcctggaaacctgcttcctgaggtacgaggacgaggagtgcacc

SEQ ID NO: 529035 - DNA, 120 bp, Artificial Sequence
  ENSG00000166147_28 (sequence is synthesized)
ctgcctattgctggccgccaccgcatggacgcctgctgctgctccgtcggggcagcctggggtactgaggaatgcgaggagtgtcccatgagaaatactcctgagtacgaggagctgtgt

SEQ ID NO: 529036 - DNA, 120 bp, Artificial Sequence
  ENSG00000166147_29 (sequence is synthesized)
ccgagaggacccggatttgccacaaaagaaattacaaatggaaagcctttcttcaaagatatcaatgagtgcaagatgatacccagcctctgcacccacggcaagtgcagaaacaccatt

SEQ ID NO: 529037 - DNA, 120 bp, Artificial Sequence
  ENSG00000166147_30 (sequence is synthesized)
ggcagctttaagtgcaggtgtgacagcggctttgctcttgattctgaagaaaggaactgcacagacattgacgaatgccgcatatctcctgacctctgtggcagaggccagtgtgtgaac

SEQ ID NO: 529038 - DNA, 120 bp, Artificial Sequence
  ENSG00000166147_31 (sequence is synthesized)
acccctggggactttgaatgcaagtgtgacgaaggctatgaaagtggattcatgatgatgaagaactgcatggatattgatgagtgtcagagagatcctctcctatgccgaggtggtgtt

SEQ ID NO: 529039 - DNA, 120 bp, Artificial Sequence
  ENSG00000166147_32 (sequence is synthesized)
tgccataacacagagggaagttaccgctgtgaatgcccgcctggccatcagctgtcccccaacatctccgcgtgtatcgacatcaatgaatgtgagctgagtgcacacctgtgccccaat

SEQ ID NO: 529040 - DNA, 120 bp, Artificial Sequence
  ENSG00000166147_33 (sequence is synthesized)
ggccgttgcgtgaacctcatagggaagtatcagtgtgcctgcaaccctggctaccattcaactcccgataggctattttgtgttgacattgatgaatgcagcataatgaatggtggttgt

SEQ ID NO: 529041 - DNA, 120 bp, Artificial Sequence
  ENSG00000166147_34 (sequence is synthesized)
gaaaccttctgcacaaactctgaaggcagctatgaatgtagctgtcagccgggatttgcactaatgcctgaccagagatcatgcaccgacatcgatgagtgtgaagataatcccaatatc

SEQ ID NO: 529042 - DNA, 120 bp, Artificial Sequence
  ENSG00000166147_35 (sequence is synthesized)
tgtgatggtggtcagtgcacaaatatccctggagagtacaggtgcttgtgttatgatggattcatggcatctgaagacatgaagacttgtgtagatgtcaatgagtgtgacctgaatcca

SEQ ID NO: 529043 - DNA, 120 bp, Artificial Sequence
  ENSG00000166147_36 (sequence is synthesized)
aatatctgcctaagtgggacctgtgaaaacacgaaaggctcatttatctgccactgtgatatgggctactccggcaaaaaaggaaaaactggctgtacagacatcaatgaatgtgaaatt

SEQ ID NO: 529044 - DNA, 120 bp, Artificial Sequence
  ENSG00000166147_37 (sequence is synthesized)
ggagcacacaactgtggcaaacatgctgtatgtaccaatacagcaggaagcttcaaatgtagctgcagtcccgggtggattggagatggcattaagtgcactgatctggacgaatgttcc

SEQ ID NO: 529045 - DNA, 120 bp, Artificial Sequence
  ENSG00000166147_38 (sequence is synthesized)
aatggaacccatatgtgcagccagcatgcagactgcaagaataccatgggatcttaccgctgtctgtgcaaggaaggatacacaggtgatggcttcacttgtacagaccttgatgagtgc

SEQ ID NO: 529046 - DNA, 120 bp, Artificial Sequence
  ENSG00000166147_39 (sequence is synthesized)
tctgagaacctgaatctctgtggcaatggccagtgcctcaatgcaccaggaggataccgctgtgaatgcgacatgggcttcgtgcccagtgctgacgggaaagcctgtgaagatattgat

SEQ ID NO: 529047 - DNA, 120 bp, Artificial Sequence
  ENSG00000166147_40 (sequence is synthesized)
gagtgctcccttccgaacatctgtgtctttggaacttgccacaacctccctggcctgttccgctgtgagtgtgagataggctacgaactggacagaagcggcgggaactgcacagatgtg

SEQ ID NO: 529048 - DNA, 120 bp, Artificial Sequence
  ENSG00000166147_41 (sequence is synthesized)
aatgaatgcctggatccaaccacgtgcatcagtgggaactgtgtcaacactccaggcagctatatctgtgactgcccacctgattttgaactgaacccaactcgagttggctgtgttgat

SEQ ID NO: 529049 - DNA, 120 bp, Artificial Sequence
  ENSG00000166147_42 (sequence is synthesized)
acccgctctggaaattgctatttggatattcgacctcgaggagacaatggagatacagcctgcagcaatgaaattggagttggtgtttccaaagcttcctgctgctgttctctgggtaaa

SEQ ID NO: 529050 - DNA, 120 bp, Artificial Sequence
  ENSG00000166147_43 (sequence is synthesized)
gcctggggtactccttgtgagatgtgtcctgctgtgaacacatccgagtacaaaattctttgtcctggaggggaaggtttccgaccaaatcctatcaccgttatattggaagatattgat

SEQ ID NO: 529051 - DNA, 120 bp, Artificial Sequence
  ENSG00000166147_44 (sequence is synthesized)
gagtgccaggagctaccagggctgtgccaaggaggaaaatgtatcaacacctttgggagtttccagtgccgctgtccaaccggctactacctgaatgaagatacacgagtgtgtgatgat

SEQ ID NO: 529052 - DNA, 120 bp, Artificial Sequence
  ENSG00000166147_45 (sequence is synthesized)
gtgaatgaatgtgagactcctggaatctgtggtccagggacatgttacaacaccgttggcaactacacctgtatctgtcctccagactacatgcaagtgaatgggggaaataattgcatg

SEQ ID NO: 529053 - DNA, 120 bp, Artificial Sequence
  ENSG00000166147_46 (sequence is synthesized)
gatatgagaagaagtttgtgctacagaaactactatgctgacaaccagacctgtgatggagaattgttattcaacatgaccaagaagatgtgctgctgttcctacaacattggccgggcg

SEQ ID NO: 529054 - DNA, 120 bp, Artificial Sequence
  ENSG00000166147_47 (sequence is synthesized)
tggaacaagccctgtgaacagtgtcccatcccaagtacagatgagtttgctacactctgtggaagtcaaaggccaggctttgtcatcgacatttataccggtttacccgttgatattgat

SEQ ID NO: 529055 - DNA, 120 bp, Artificial Sequence
  ENSG00000166147_48 (sequence is synthesized)
agatattgacgagtgtcagaacggcccagtgtgccagcgcaacgccgaatgcatcaacactgcaggcagctaccgctgtgactgtaagcccggctaccgcttcacctccacaggacagtg

SEQ ID NO: 529056 - DNA, 120 bp, Artificial Sequence
  ENSG00000166147_49 (sequence is synthesized)
caatgatcgtaatgaatgtcaagaaatccccaatatatgcagtcatgggcagtgcattgacacagttggaagcttttattgcctttgccacactggttttaaaacaaatgatgaccaaac

SEQ ID NO: 529057 - DNA, 120 bp, Artificial Sequence
  ENSG00000166147_50 (sequence is synthesized)
catgtgcttggacataaatgaatgtgaaagagatgcctgtgggaatggaacttgccggaacacaattggttccttcaactgccgctgcaatcatggtttcatcctttctcacaacaatga

SEQ ID NO: 529058 - DNA, 120 bp, Artificial Sequence
  ENSG00000166147_51 (sequence is synthesized)
ctgtatagatgttgatgaatgtgcaagtggaaatgggaatctttgcagaaatggccaatgcattaatacagtggggtctttccagtgccagtgcaatgaaggctatgaggtggctccaga

SEQ ID NO: 529059 - DNA, 120 bp, Artificial Sequence
  ENSG00000166147_52 (sequence is synthesized)
tgggaggacctgtgtggatatcaatgaatgtcttctagaacccagaaaatgtgcaccaggtacctgtcaaaacttggatgggtcctacagatgcatttgcccacctggatacagtcttca

SEQ ID NO: 529060 - DNA, 120 bp, Artificial Sequence
  ENSG00000166147_53 (sequence is synthesized)
aaatgagaagtgtgaagatattgatgagtgtgtcgaagagccagaaatttgtgccctgggcacatgcagtaacactgaaggcagcttcaaatgtctgtgtccagaagggttttccttgtc

SEQ ID NO: 529061 - DNA, 120 bp, Artificial Sequence
  ENSG00000166147_54 (sequence is synthesized)
ctccagtggaagaaggtgccaagatttgcgaatgagctactgttatgcgaagtttgaaggaggaaagtgttcatcacccaaatccagaaatcactccaagcaggaatgctgctgtgcctt

SEQ ID NO: 529062 - DNA, 120 bp, Artificial Sequence
  ENSG00000166147_55 (sequence is synthesized)
gaagggagaaggctggggagacccctgcgagctctgccccacggaacctgatgaggccttccgccagatatgtccttatggaagtgggatcatcgtgggacctgatgattcagcagttga

SEQ ID NO: 529063 - DNA, 120 bp, Artificial Sequence
  ENSG00000166147_56 (sequence is synthesized)
tatggacgaatgcaaagaacccgatgtctgtaaacatggacagtgcatcaatacagatggttcctatcgctgcgagtgtccctttggttatattctagcagggaatgaatgtgtagatac

SEQ ID NO: 529064 - DNA, 120 bp, Artificial Sequence
  ENSG00000166147_57 (sequence is synthesized)
tgatgaatgttctgttggcaatccttgtggaaatggaacctgcaagaatgtgattggaggttttgaatgcacctgcgaggagggatttgagcccggtccaatgatgacatgtgaagatat

SEQ ID NO: 529065 - DNA, 120 bp, Artificial Sequence
  ENSG00000166147_58 (sequence is synthesized)
aaatgaatgtgcccagaatcctctgctctgtgccttccgatgtgtgaacacttatgggtcatatgaatgcaaatgtcccgtgggatatgtgctcagagaagaccgtaggatgtgcaaaga

SEQ ID NO: 529066 - DNA, 120 bp, Artificial Sequence
  ENSG00000166147_59 (sequence is synthesized)
tgaggatgagtgtgaagagggaaaacatgactgtactgaaaaacaaatggaatgcaagaacctcattggcacatatatgtgcatctgtggacccgggtatcagcggagacctgatggaga

SEQ ID NO: 529067 - DNA, 120 bp, Artificial Sequence
  ENSG00000166147_60 (sequence is synthesized)
aggctgtgtagatgagaatgaatgtcagacgaagccagggatctgtgagaatgggcgctgcctcaacacccgtgggagctacacctgtgagtgtaatgatgggtttaccgccagccccaa

SEQ ID NO: 529068 - DNA, 120 bp, Artificial Sequence
  ENSG00000166147_61 (sequence is synthesized)
ccaggacgagtgccttgacaatcgggaagggtactgcttcacagaggtgctacaaaacatgtgtcagatcggctccagcaacaggaaccccgtcaccaaatcggaatgctgctgtgacgg

SEQ ID NO: 529069 - DNA, 120 bp, Artificial Sequence
  ENSG00000166147_62 (sequence is synthesized)
agggagaggctggggtccccactgtgagatctgccctttccaggggactgtggctttcaagaaactctgtccccatggccgaggattcatgaccaatggagcagatatcgatgaatgcaa

SEQ ID NO: 529070 - DNA, 120 bp, Artificial Sequence
  ENSG00000166147_63 (sequence is synthesized)
ggttattcacgatgtttgccgaaatggggaatgtgtcaatgacagaggatcatatcattgcatttgtaaaactgggtacactccagatataactgggacttcctgtgtagatctgaacga

SEQ ID NO: 529071 - DNA, 120 bp, Artificial Sequence
  ENSG00000166147_64 (sequence is synthesized)
gtgcaaccaggctcccaaaccctgcaattttatctgcaaaaacacagaagggagttaccagtgttcatgcccgaaaggctacattctgcaagaggatggaaggagctgcaaagatcttga

SEQ ID NO: 529072 - DNA, 120 bp, Artificial Sequence
  ENSG00000166147_65 (sequence is synthesized)
tgagtgtgcaaccaagcaacacaactgccagttcctatgtgttaacaccattggcggcttcacatgcaaatgtcctcccggatttacccaacaccatacgtcctgcattgataacaatga

SEQ ID NO: 529073 - DNA, 120 bp, Artificial Sequence
  ENSG00000166147_66 (sequence is synthesized)
atgcacctctgacatcaatctgtgcgggtctaagggcatttgccagaacactcctggaagcttcacctgtgaatgccagcggggattctcacttgatcagaccggctccagctgtgaaga

SEQ ID NO: 529074 - DNA, 120 bp, Artificial Sequence
  ENSG00000166147_67 (sequence is synthesized)
cgtggacgagtgtgagggtaaccaccgctgccagcatggctgccagaacatcattgggggctacaggtgcagctgcccccagggctacctccagcactaccagtggaaccagtgtgttga

SEQ ID NO: 529075 - DNA, 120 bp, Artificial Sequence
  ENSG00000166147_68 (sequence is synthesized)
tgaaaacgaatgcctcagcgctcacatctgcggaggagcctcctgtcacaacaccctggggagctacaagtgcatgtgtcccgccggcttccagtatgaacagttcagtggaggatgcca

SEQ ID NO: 529076 - DNA, 120 bp, Artificial Sequence
  ENSG00000166147_69 (sequence is synthesized)
agacatcaatgaatgtggctctgcgcaggccccctgcagctatggctgttccaataccgagggcggttacctgtgtggctgtccacctggttacttccgcataggccaagggcactgtgt

SEQ ID NO: 529077 - DNA, 120 bp, Artificial Sequence
  ENSG00000166147_70 (sequence is synthesized)
ttctggaatgggcatgggccgaggaaacccagagccacctgtcagtggtgaaatggatgacaattcactctccccagaggcttgttacgagtgtaagatcaatggctaccccaaacgggg

SEQ ID NO: 529078 - DNA, 120 bp, Artificial Sequence
  ENSG00000166147_71 (sequence is synthesized)
caggaaacggagaagcacaaacgaaactgatgcctccaatatcgaggatcagtctgagacagaagccaatgtgagtcttgcaagttgggatgttgagaagacagccatctttgctttcaa

SEQ ID NO: 529079 - DNA, 120 bp, Artificial Sequence
  ENSG00000166147_72 (sequence is synthesized)
tatttcccacgtcagtaacaaggttcgaatcctagaactccttccagctcttacaactctgacgaatcacaacagatacttgatcgaatctggaaatgaagatggcttctttaaaatcaa

SEQ ID NO: 529080 - DNA, 120 bp, Artificial Sequence
  ENSG00000166147_73 (sequence is synthesized)
ccaaaaggaagggatcagctacctccacttcacaaagaagaagccagtggctggaacctattcattacaaatcagtagtactccactttataaaaagaaagaacttaaccaactagaaga

SEQ ID NO: 529081 - DNA, 120 bp, Artificial Sequence
  ENSG00000166147_74 (sequence is synthesized)
caaatatgacaaagactacctcagtggtgaactgggtgataatctgaagatgaaaatccaggttttgcttcattaattcaccatccagagaccaaataattaaaagaaaaacaaatatag

SEQ ID NO: 529082 - DNA, 120 bp, Artificial Sequence
  ENSG00000166147_75 (sequence is synthesized)
ataggtagaactatattttcccccaatcagaatcatcatatcataggtacaatctttcaccaagtaaatttgtataaataagcactattctttgtattaccaaagcaaggtacaggtgac

SEQ ID NO: 529083 - DNA, 120 bp, Artificial Sequence
  ENSG00000166147_76 (sequence is synthesized)
taccctagttcaaaacaaccactttctcaggcttctcatgtgtgtagctaagctaccttgtcatatgtgttgattcttgaaaactgggacgtgtatttccattgggggttggccatttat

SEQ ID NO: 529084 - DNA, 120 bp, Artificial Sequence
  ENSG00000166147_77 (sequence is synthesized)
gctgacatgccatccttccagcaaacgtacgggaatgtgctttcaattgatggactactctattttttgcaaatttgtaaactttgcttctccaaatacaagtactaggttgtccattta

SEQ ID NO: 529085 - DNA, 120 bp, Artificial Sequence
  ENSG00000166147_78 (sequence is synthesized)
tggtacctatttggtgctagtaaattttcaaactagatttataaatgcactgtaatatgtacacaacttagaaaccaaattacaagtattcagttccaatacttcattaatttcaatcaa

SEQ ID NO: 529086 - DNA, 120 bp, Artificial Sequence
  ENSG00000166147_79 (sequence is synthesized)
ccaaagttagttcagtagcttatctcagttatgagtataatacattacatgtaaattaagtgtgtgtatactgtaatcgtgctattttttatcattgaaacatttataaactagaataat

SEQ ID NO: 529087 - DNA, 120 bp, Artificial Sequence
  ENSG00000166147_80 (sequence is synthesized)
aatgcccttaatgtgagggtttgtaatggtgcttattaagaccaaagacttgttaaatgtatacaccaagtggtaatgaaatttcggtgactggcccacacgtgcatagaggtctgggag

SEQ ID NO: 529088 - DNA, 120 bp, Artificial Sequence
  ENSG00000166147_81 (sequence is synthesized)
gaccaggaaacagcctcagtggccagaggatcaccagtgcatccttcatcacagcatgtgcaatatgccaagattaccctcggtcattcctgtcaacaaggggtcaatgtcataaatgtc

SEQ ID NO: 529089 - DNA, 120 bp, Artificial Sequence
  ENSG00000166147_82 (sequence is synthesized)
acaataaaacaatctcttcttttttttagtttaccccttggctttgtgttcttgcatggatttggggttggaggggccattccggaggctaaataaagtctcctggatttaaattatcct

SEQ ID NO: 529090 - DNA, 120 bp, Artificial Sequence
  ENSG00000166147_83 (sequence is synthesized)
gggtctcttacttatggcttatgaaagtaccaaatgtataaccactagaagaaaatttaacatatgagtcgatcccttgttttatccattgaaagtagcagagtctggtgtcattaacct

SEQ ID NO: 529091 - DNA, 120 bp, Artificial Sequence
  ENSG00000166147_84 (sequence is synthesized)
gacttgcttgtgagaaatttagattgtagagtcatttctgaaacatgacctaattcatcttgtgacttttaaatagtcttaaataccaagttcagtcattgtcttagagcacatgaattt

SEQ ID NO: 529092 - DNA, 120 bp, Artificial Sequence
  ENSG00000166147_85 (sequence is synthesized)
cattataatagatttatcatgcccccctctcaaatatacacagttttggcaagccttaggtgttctgttccatttttttttcccctaaacatctttcgttagtcaatgctcatctaatta

SEQ ID NO: 529093 - DNA, 120 bp, Artificial Sequence
  ENSG00000166147_86 (sequence is synthesized)
caaagggataatcccagactgtatccaattgctgtaacttttggtttcttaatgtcataatttttaaagtctgttttattttaagtgcaatattgagtatttagctgttaggctcaatcc

SEQ ID NO: 529094 - DNA, 120 bp, Artificial Sequence
  ENSG00000166147_87 (sequence is synthesized)
gtcgatatgaaataattttttaaatccctaagggcaggaaagcatttcgtggtagtgaaaataagaggaaataagatggcatgaaggtggtgggcggagaaactaggtaggacacaggaa

SEQ ID NO: 529095 - DNA, 120 bp, Artificial Sequence
  ENSG00000166147_88 (sequence is synthesized)
agtgctctcaaaaatctttgaagagctcagctgaaaaaaatggagtagatttggctcatactattccggaaggcaaaaccagggtcagctgatgtcagccccagtttaatacacacggtc

SEQ ID NO: 529096 - DNA, 120 bp, Artificial Sequence
  ENSG00000166147_89 (sequence is synthesized)
ccaattatagagctactcactgaaagaatgggtttccttgcattgtggtgagctccctgtcacaagatagaagagtttcagtctaggcttaatggcaaccattggacaaagatgctttct

SEQ ID NO: 529097 - DNA, 120 bp, Artificial Sequence
  ENSG00000166147_90 (sequence is synthesized)
tccacctaacaggccattaacatcttaaaggtatttttgtatctctaattttgtttataataggtgctcaacagaatgagctgaatggctgttacaaagggggtttgtaccttgggtaag

SEQ ID NO: 529098 - DNA, 120 bp, Artificial Sequence
  ENSG00000166147_91 (sequence is synthesized)
agattaaaatataactcaaaatttccttctaacgctgcacctatggaaccatgtgatagaggtgtattaaaattgttatcgaagaatatatagcatatggtaaacaacagtttgcatatg

SEQ ID NO: 529099 - DNA, 120 bp, Artificial Sequence
  ENSG00000166147_92 (sequence is synthesized)
gaaaatgtctttgataatttaaccagaactgcattatattcaataacggattttctttataacaaacaacaggggaaaatggagttggcacacagtggatcactttgatatttttaatag

SEQ ID NO: 529100 - DNA, 120 bp, Artificial Sequence
  ENSG00000166147_93 (sequence is synthesized)
tccaagtctggattttatttattcctgagccaacaattttgaacagcatattttccatgtttctgactgtaacaaaacattttcctcattgttccattgtaaatattcctcttgttggaa

SEQ ID NO: 529101 - DNA, 120 bp, Artificial Sequence
  ENSG00000166147_94 (sequence is synthesized)
ctctttttaatcctgagatttaaacctgtacctttcaattgtctgtgacctttcaatttcactttcaatagttgaagaacttggctttgtaaatctctcagaagcttgaaaatatcttgt

SEQ ID NO: 529102 - DNA, 120 bp, Artificial Sequence
  ENSG00000166147_95 (sequence is synthesized)
ctctaccccctcagcccatttcatttgccaataattattttgtaagtagggttgaaatgaactcagctggccttgtgaaatgtttaaacttgcacaaacaactacatttttgttcaacaa

SEQ ID NO: 529103 - DNA, 120 bp, Artificial Sequence
  ENSG00000166147_96 (sequence is synthesized)
atagcagtttactcagccaaaatcactttggatattgccattacaaatactgttaaacttcagaaatcatgtctgtaaattagatgagccaaaataaaggacaattgggttgatgctgca

SEQ ID NO: 529104 - DNA, 120 bp, Artificial Sequence
  ENSG00000166147_97 (sequence is synthesized)
taaaggacgtggggatttaattctgtggctgaagatctgcagagaggtgtgaggcctggtcagacatttgtctcatttctctgggctgtcaccaactagtgtgttcccttgggaatgtga

SEQ ID NO: 529105 - DNA, 120 bp, Artificial Sequence
  ENSG00000166147_98 (sequence is synthesized)
aaaaagaaactaagctttactttgttgcttaacaggatgccacacttttactcacacttgtgctttttctctctggttttaaatttgtttgtgattatagagagatacctctctgtgctc

SEQ ID NO: 529106 - DNA, 120 bp, Artificial Sequence
  ENSG00000166147_99 (sequence is synthesized)
cactgggatgctggaaacccagacttcttatttaaaatacaagaaaatgtcaaaatctgaggaaggataaaaaatgttcatattttggagatgccgtaatgactgtgattgtccattggg

SEQ ID NO: 529107 - DNA, 120 bp, Artificial Sequence
  ENSG00000166147_100 (sequence is synthesized)
ctcagcaccaccctgcagctaaattcttcctttgctaattggatcctgaatcacttgtttggaatttcttggctgcctttgaagcccttggtgatcaggatccacttccgtatgtttctc

SEQ ID NO: 529108 - DNA, 120 bp, Artificial Sequence
  ENSG00000166147_101 (sequence is synthesized)
tgcccctctgtctgtaagcatggctattcccctgtatttctgggagcagagagagttataagcttgtctaggccaatgtctttctgcctacttactgaatgtcttatttgtttccctcag

SEQ ID NO: 529109 - DNA, 120 bp, Artificial Sequence
  ENSG00000166147_102 (sequence is synthesized)
cgcgcttaaagggtaaaggaaccggttccctcctttggtgtgggtctcccaagtttcaagatccagaacaacgggcaggatgactctccctgtggaagactccttggcaagacctcctgg

SEQ ID NO: 529110 - DNA, 120 bp, Artificial Sequence
  ENSG00000166147_103 (sequence is synthesized)
gggcaccttagaggtgctagggttgtttagtccccaccccgttcgtggttaaactaccttgcccctactcccagagatttctgccccaaaggagaggacgtggttaaatggaatcttggg

SEQ ID NO: 529111 - DNA, 120 bp, Artificial Sequence
  ENSG00000166147_104 (sequence is synthesized)
ccattgttgaggcagattttgggaggcgagaagagttccttggggaagaaggggaggagttgcgagtgggataagaggagaagcccgttcctttccctgcaatatcaattctggttgttt

SEQ ID NO: 529112 - DNA, 120 bp, Artificial Sequence
  ENSG00000166147_105 (sequence is synthesized)
ctagaggaaagtactttccttggggtcatcttggtagatgctgtatttgaaagggggcaaggaaaggaagggattcccatgacagtcagaggagaaatcacacagtagttgactcttccg

SEQ ID NO: 529113 - DNA, 120 bp, Artificial Sequence
  ENSG00000166147_106 (sequence is synthesized)
taaattatgcttattaaaattacggattgggttttctgggcaatgcttcctttagatgtctacattggaagcagaacagggcaagtggttctgagaactggttttttgagttgtgtgggg

SEQ ID NO: 529114 - DNA, 120 bp, Artificial Sequence
  ENSG00000166147_107 (sequence is synthesized)
ctctccgtttcactgcagcagtaaggctgctgtggccggccttaagggagtatttttaactagtggtgtttgtgttgtgtacatgcaactgaccatttcactggcttcccatgccgctgt

SEQ ID NO: 529115 - DNA, 120 bp, Artificial Sequence
  ENSG00000166147_108 (sequence is synthesized)
tacagatgtttcagccggaaaaattttaattagacttgactaagggttgtcattttcctgtattgaaggacagtgggaatacatttcctttaagagaaatttgtctgcagttgtttaagt

SEQ ID NO: 529116 - DNA, 120 bp, Artificial Sequence
  ENSG00000166147_109 (sequence is synthesized)
taaagcctccatggaaacaacaggatggactgtcagtgaccccttttatcttcttggaggagcctgttaaataaattcagacagtatatatagggagattttgtattaaattcttaccat

SEQ ID NO: 529117 - DNA, 120 bp, Artificial Sequence
  ENSG00000166147_110 (sequence is synthesized)
tctcgctgatgctcttttcctgagtggttctgtagctttattatatagctctgggtcaccaagtgatggtatccacttggatatgtggctgttcatttcacttactctttttttgttatg

SEQ ID NO: 529118 - DNA, 120 bp, Artificial Sequence
  ENSG00000166147_111 (sequence is synthesized)
aggtgttatagtcatgtatatgtagtaaaatttgtgtttgtatggcccagatatgagaagaaaaagtaaactcaccagaccagtttttgactcctagtctggagtaaggacaagatgatt

SEQ ID NO: 529119 - DNA, 120 bp, Artificial Sequence
  ENSG00000166147_112 (sequence is synthesized)
gtatgagccaagcacttaggctgtgataaaatagcacagaaaatagttatgattaattcggttccatcttggccttcgtggaaaataaacccagaattccgataatgttggaaggaagtt

SEQ ID NO: 529120 - DNA, 120 bp, Artificial Sequence
  ENSG00000166147_113 (sequence is synthesized)
tgcttatcatggtaaacctgaccttgatcagacagcagatgtttattgccctgtgtgcaaggcacatggcaagttcaataagtagactgaggctctgattttcatatgttctcaagagga

SEQ ID NO: 529121 - DNA, 120 bp, Artificial Sequence
  ENSG00000166147_114 (sequence is synthesized)
atttataaagccttcctaaaaacagggtattaatagaattgtaattatgtgtgttcctaattctcatgttaattataagattttataataagtgatatatatatatacacacacacacac

SEQ ID NO: 529122 - DNA, 120 bp, Artificial Sequence
  ENSG00000166147_115 (sequence is synthesized)
acgggggtgaaaataataatttaaaaatatatacaattaaaagtatttccctgccacctttcagagaccattttcttgtgtatttttctataaatcttttaggcatatgtatacatgtac

SEQ ID NO: 529123 - DNA, 120 bp, Artificial Sequence
  ENSG00000166147_116 (sequence is synthesized)
aaataaacacaaatatatatgtatacatacacatgtgtgtgtgtatcctttttaatacatggaatgtattgtacatgcaatattctgaactttacttactttttatgtatctttaatgca

SEQ ID NO: 529124 - DNA, 83 bp, Artificial Sequence
  ENSG00000166147_117 (sequence is synthesized)
tattctgaactttacttactttttatgtatctttaatgcatccatctattaactcatatggatctacctcattcattttcttt

SEQ ID NO: 529125 - DNA, 120 bp, Artificial Sequence
  ENSG00000166147_118 (sequence is synthesized)
ccaggatggtctcaaactcttggcctcaagcgatccacccacctctgcctctccaaattacaggcttgagccactgcgccctaccccattttcttgttgtatagaacctcattatgtcac

SEQ ID NO: 529126 - DNA, 120 bp, Artificial Sequence
  ENSG00000166147_119 (sequence is synthesized)
tggaacagttccctagtgatggctctttagattacattgagtcttttgctattaccaactttcttctgcatacctgtgtttacatacacgtgtttatatgtggtataaattagtaaaaat

SEQ ID NO: 529127 - DNA, 120 bp, Artificial Sequence
  ENSG00000166147_120 (sequence is synthesized)
agaattgctggatcaaagtctttcccatagattttaagcaaaccccaattcttatgttaaatttgaataacattttaaatttattccctctgcttattgccgttacagtctcatatgaat

SEQ ID NO: 529128 - DNA, 120 bp, Artificial Sequence
  ENSG00000166147_121 (sequence is synthesized)
aaatcctttaacggtgccctgctgtataaatcatcagaaaaagcagttatgtactacatttttccagttattgcttaaaatttctgtttttgtctgttaaaatattaccggcttcaaaac

SEQ ID NO: 529129 - DNA, 120 bp, Artificial Sequence
  ENSG00000166147_122 (sequence is synthesized)
tcacctctttgactacagtgaaacctgtttaccattctgattggagatgcacagtttatgaagtgaaagtgatttgtaacccccgagtctgcctgatgcccagttggtggcagcaacttt

SEQ ID NO: 529130 - DNA, 120 bp, Artificial Sequence
  ENSG00000166147_123 (sequence is synthesized)
cagcacctcactaatctttcctctagttaaaaggtaccttaaactcatcagtatctgctgtgcactggttccttctccccagcaaatactgccttcttgtttttctctgatgtggcaggt

SEQ ID NO: 529131 - DNA, 120 bp, Artificial Sequence
  ENSG00000166147_124 (sequence is synthesized)
gactacaaaatccgccttggtattcttcaaatgcatatatattcctttcttgtcagctccctctcttcctagattagaaaactgcctcattttctgctcactggatgtgcagtcccagct

SEQ ID NO: 529132 - DNA, 120 bp, Artificial Sequence
  ENSG00000166147_125 (sequence is synthesized)
tgtcttcctctcctccccccctgttgcaggtgttcttttttttttttattctctccccactgggcagcaaaagttgttccacagtggaaatttaggcatcctcaagtttcttcccagctt

SEQ ID NO: 529133 - DNA, 120 bp, Artificial Sequence
  ENSG00000166147_126 (sequence is synthesized)
ctgctgtgttttcttagagtaaattgccaatttctgtttttacaggaaatccttttttaaaaatggaatcagtgtggtccccatctactctgcaaaaattgcatttttctctattttcaa

SEQ ID NO: 529134 - DNA, 120 bp, Artificial Sequence
  ENSG00000166147_127 (sequence is synthesized)
atgagatttgttcaagtttcaaaaccacgtgaaataataaatgtatagtagttttcttttccttgggcattgcttgatatgtgaaatgggtttatgaaaaataataaaatcataacgcta

SEQ ID NO: 529135 - DNA, 120 bp, Artificial Sequence
  ENSG00000166147_128 (sequence is synthesized)
tgggccatgcagggtgcagactggccatgatgtaagtaagactgtaggccttaaagacagtaacacaatttaatttaattgtaagtctaattagaatgttcattaaaaattattttatct

SEQ ID NO: 529136 - DNA, 120 bp, Artificial Sequence
  ENSG00000166148_0 (sequence is synthesized)
agaccctgcgcttcggacgaggagcccaagtcctccgagacggggagggagcggcccgcgagggctggagctccgaagagggccgagtaggagctgcatggacagcatgcgtctctccgc

SEQ ID NO: 529137 - DNA, 120 bp, Artificial Sequence
  ENSG00000166148_1 (sequence is synthesized)
cggtcccgacgcggggccctcgggcaactccagcccatggtggcctctggccaccggcgctggcaacacaagccgggaggccgaagccctcggggagggcaacggcccaccgagggacgt

SEQ ID NO: 529138 - DNA, 120 bp, Artificial Sequence
  ENSG00000166148_2 (sequence is synthesized)
gcgcaacgaggagctggccaaactggagatcgccgtgctggcggtgactttcgcggtggccgtgctgggcaacagcagcgtactgctggctctgcaccggacgccgcgcaagacgtcccg

SEQ ID NO: 529139 - DNA, 120 bp, Artificial Sequence
  ENSG00000166148_3 (sequence is synthesized)
catgcacctcttcatccgacacctcagcctggccgacctggccgtggcattcttccaggtgctgccgcaaatgtgctgggacatcacctaccgcttccgcggccccgactggctgtgccg

SEQ ID NO: 529140 - DNA, 120 bp, Artificial Sequence
  ENSG00000166148_4 (sequence is synthesized)
cgtggtgaagcacctgcaggtgttcggcatgtttgcgtcggcctacatgctggtagtcatgacagccgaccgctacatcgcggtgtgccacccgctcaagactctgcaacagcccgcgcg

SEQ ID NO: 529141 - DNA, 120 bp, Artificial Sequence
  ENSG00000166148_5 (sequence is synthesized)
ccgctcgcgcctcatgatcgcggccgcctgggtgctgagcttcgtgctgagcacgccgcagtacttcgtcttctccatgatcgaggtgaacaatgtcaccaaggcccgcgactgctgggc

SEQ ID NO: 529142 - DNA, 120 bp, Artificial Sequence
  ENSG00000166148_6 (sequence is synthesized)
caccttcatccagccctggggttctcgtgcctacgtgacctggatgacgggcggcatctttgtggcgcccgtggtcatcttgggtacctgctacggcttcatctgctacaacatctggtg

SEQ ID NO: 529143 - DNA, 120 bp, Artificial Sequence
  ENSG00000166148_7 (sequence is synthesized)
caacgtccgcgggaagacggcgtcgcgccagagcaagggtgcagagcaagcgggtgtggccttccaaaaggggttcctgctcgcaccctgtgtcagcagcgtgaagtccatttcccgggc

SEQ ID NO: 529144 - DNA, 120 bp, Artificial Sequence
  ENSG00000166148_8 (sequence is synthesized)
caagatccgcacggtgaagatgacttttgtgatcgtgacggcttacatcgtctgctgggcgcctttcttcatcatccagatgtggtctgtctgggatcccatgtccgtctggaccgaatc

SEQ ID NO: 529145 - DNA, 120 bp, Artificial Sequence
  ENSG00000166148_9 (sequence is synthesized)
ggaaaaccctaccatcaccatcactgcattactgggttccttgaatagctgctgtaatccctggatatacatgttttttagtggccatctccttcaagactgtgttcaaagcttcccatg

SEQ ID NO: 529146 - DNA, 120 bp, Artificial Sequence
  ENSG00000166148_10 (sequence is synthesized)
ctgccaaaacatgaaggaaaaattcaacaaagaagatactgacagtatgagcagaagacagactttttattctaacaatcgaagcccaacaaacagtacgggtatgtggaaggactcgcc

SEQ ID NO: 529147 - DNA, 120 bp, Artificial Sequence
  ENSG00000166148_11 (sequence is synthesized)
taaatcttccaagtccatcaaattcattcctgtttcaacttgagccttgcattcatgcaacttgattcttgtgattgactttttggctcattagctgaattgagctagaaatcacaagaa

SEQ ID NO: 529148 - DNA, 120 bp, Artificial Sequence
  ENSG00000166148_12 (sequence is synthesized)
caaatacactttattaatataaccataaatcaattcattgtgtatgagactgtgtttctagttgcattttcatattgctaccaaaaactagacattattttgtatggaatattaatggaa

SEQ ID NO: 529149 - DNA, 120 bp, Artificial Sequence
  ENSG00000166148_13 (sequence is synthesized)
acatgctgtactaaaatatgcaggtctgattcccagaaatacaacagaagttatatttttaaaggaaaaatcataaccaccctagctttatattttgttgttagtttcttttattttcat

SEQ ID NO: 529150 - DNA, 120 bp, Artificial Sequence
  ENSG00000166148_14 (sequence is synthesized)
ttctaacataagtaagacttgattggtttaaaagtcacataaaatgcggcactatttctgaacaaagagagctcatcatcagtcttaatattcagagaaaacttcagagaaattatgttt

SEQ ID NO: 529151 - DNA, 120 bp, Artificial Sequence
  ENSG00000166148_15 (sequence is synthesized)
tcatccattaaaattaatttgtgcatcagaaaatgcagccttaaacagtgtccaggagatgggatggtacctcctaggagtacaagtgcctggggtgtaatgagctcctgctcattgtgg

SEQ ID NO: 529152 - DNA, 120 bp, Artificial Sequence
  ENSG00000166148_16 (sequence is synthesized)
ccagtttagagttctattagaagctatcaatcaccttgcatttcaaaatggtaactttacaactggcagtggcctccttttggttcctcacatattattggtcaagaaaagcatgaaaac

SEQ ID NO: 529153 - DNA, 120 bp, Artificial Sequence
  ENSG00000166148_17 (sequence is synthesized)
tgagatgctgaaggtgagaggaaatgttgactggccaaaaatatcttttttcccccactgcgaggttgttttaaagtcagatttgtataaggaaagccaaattttattaaaagagtagaa

SEQ ID NO: 529154 - DNA, 120 bp, Artificial Sequence
  ENSG00000166148_18 (sequence is synthesized)
aaggattgcttaaggtactctggactttctcttggacattgtaaacgtattttgatcagtgttacaagggtatcctgtgctatgctggacattaacaagatcattatcttcatgtttggg

SEQ ID NO: 529155 - DNA, 120 bp, Artificial Sequence
  ENSG00000166148_19 (sequence is synthesized)
gaattcagattcataatatgagtatcctaaagagtgactcaggatataaagtgtcccaacatgtttaattaaaaatagctttgtctttccaatctctcactcatctaacaattgcaaagc

SEQ ID NO: 529156 - DNA, 120 bp, Artificial Sequence
  ENSG00000166148_20 (sequence is synthesized)
agagatgagacagggttgggacatgggtgacagatggaaagagaactgctctgtgcccagactggcttccttcattattaaatccacaactttaggcaagtttcttaaacacatataaag

SEQ ID NO: 529157 - DNA, 120 bp, Artificial Sequence
  ENSG00000166148_21 (sequence is synthesized)
cctctgtttccttgacttaccgtggggttgataacacttacctcacagggttgttgtaaggactaaatgaaatcaaatatgttaaaagagcttcagaaatagtaaagtactatacacatg

SEQ ID NO: 529158 - DNA, 120 bp, Artificial Sequence
  ENSG00000166148_22 (sequence is synthesized)
ctagcagttgcttttattatagccttgggatctccaaaattgcacagatgttttccagtttatttttcattaactagaattggttcatttcatggctgggatataaaatcctaaaattta

SEQ ID NO: 529159 - DNA, 120 bp, Artificial Sequence
  ENSG00000166148_23 (sequence is synthesized)
aatatagatcgctgattcattggacaacatttccagtgactgctcagcttgacttctcctgcctgactaaagttttccaatttaaagacagaacttgcttttctttgaatgcaggtagat

SEQ ID NO: 529160 - DNA, 120 bp, Artificial Sequence
  ENSG00000166148_24 (sequence is synthesized)
atggaactcagtgatttttttcctagctattttgtctggctgcttcttcttcttagagatcatgcaatgatttgaggatacatcataaatattttgcatccttaagaggaagtaatagtt

SEQ ID NO: 529161 - DNA, 120 bp, Artificial Sequence
  ENSG00000166148_25 (sequence is synthesized)
ttacctttgtagataagaaaatgagaactggatagcactgtgagaacccggaagcgataacttcactcctcttcattcttctgccttttgaaattctcagcccttaggctccttgtattg

SEQ ID NO: 529162 - DNA, 120 bp, Artificial Sequence
  ENSG00000166148_26 (sequence is synthesized)
ataggcctaaaaacatgtttccaaatgctttatagagattataaacctagggactccctaggttttcaaattcttctttctaaaaataacaaatatgtctcttaaagggtactgtccaat

SEQ ID NO: 529163 - DNA, 120 bp, Artificial Sequence
  ENSG00000166148_27 (sequence is synthesized)
ataagccataactaaattaattaattcattatttgagttagagtagcatctcagtaacccagcactcgaagactgtcagtccttttaacaactctttgatagttcaaaaactaaagcttt

SEQ ID NO: 529164 - DNA, 120 bp, Artificial Sequence
  ENSG00000166148_28 (sequence is synthesized)
ttggtttggaactaagatgaacccatttttttctaaatccatttccaaagtaagaacctcagaacctatagatcttgcttcaaaatgttgatatgtacccccaagcaaaacaattcaatt

SEQ ID NO: 529165 - DNA, 120 bp, Artificial Sequence
  ENSG00000166148_29 (sequence is synthesized)
tgaatgttatttctgagaacagctcacaaaaaaaagtgcatatcaccctacccagttgtattttctccttttaaatgtattgggagatgagacagtagaaaatgggctggggaaacatga

SEQ ID NO: 529166 - DNA, 120 bp, Artificial Sequence
  ENSG00000166148_30 (sequence is synthesized)
gatctgggtgctagttctgcactaggcaaatacatggtcttattctctgcggtttaggctgagaagtttcatctgtctggttgctaaattttctcaatgttatgtacccagaaatggacg

SEQ ID NO: 529167 - DNA, 120 bp, Artificial Sequence
  ENSG00000166148_31 (sequence is synthesized)
ccacatatctcaaaacaatatttcagattggaaggaatctacctgcctgtctgtttcagaagaagagaaactgaaaaagtattccgggaagggaagttttccttttcttgactaaagaga

SEQ ID NO: 529168 - DNA, 120 bp, Artificial Sequence
  ENSG00000166148_32 (sequence is synthesized)
agacctgagatattatgccaaataacagcttacagtcaagaaaaaaatgtgttgcagcaccttattttatttttcacagttaacagtgggaagatcctgcaagtacacaattttaatgcc

SEQ ID NO: 529169 - DNA, 120 bp, Artificial Sequence
  ENSG00000166148_33 (sequence is synthesized)
tctatatgggtattaggaatgtgatatataaaaaatgtccagtagggagaaactaatcagttgggcatttgatgaatattaactgatgatggtaaataaacaatttagagtgcattatta

SEQ ID NO: 529170 - DNA, 120 bp, Artificial Sequence
  ENSG00000166148_34 (sequence is synthesized)
agtgcttaatgggttaattttggagcatgtattctaaagtgtaaaactacttggcttttattttgaaatttcatttggaacacaattgtgaaggaaatcagtgaaattcttgggttaatt

SEQ ID NO: 529171 - DNA, 120 bp, Artificial Sequence
  ENSG00000166148_35 (sequence is synthesized)
atatacttgttttacatatagaatttctatcatcatcaaacaagtcttatgccatgatttcgggaagggtatggttttagagaaaaaaatactaagcagtcttaatgatacacaggaccc

SEQ ID NO: 529172 - DNA, 120 bp, Artificial Sequence
  ENSG00000166148_36 (sequence is synthesized)
tgccaagcttattacagtttctagaatggacaactactaatgattaagaaacaactttcatctgttattacacaagaaacccgattaggttaaagtttgatgttttcagactctaaagcc

SEQ ID NO: 529173 - DNA, 120 bp, Artificial Sequence
  ENSG00000166148_37 (sequence is synthesized)
tatgtttttgtaacttaattggactttcagagtgttaaattatggcttcagagtttggctctacctaaaatttagttagatgccaaccagggagaaattaaacctaatccttcaccccaa

SEQ ID NO: 529174 - DNA, 120 bp, Artificial Sequence
  ENSG00000166148_38 (sequence is synthesized)
atatcagaggttagacaaacccatgttaattggagccttatggttattcatattggaggcaatagctttatttagaggaagcccaggacagggccgtctgggatgctagttctggaaatg

SEQ ID NO: 529175 - DNA, 120 bp, Artificial Sequence
  ENSG00000166148_39 (sequence is synthesized)
cagaagcagccactgtatccctgcccaccccctccatccagcccttttggtactactcagtattgttgacaacatttggaatcataagtaacataggacagtaagtattagagaatgatt

SEQ ID NO: 529176 - DNA, 120 bp, Artificial Sequence
  ENSG00000166148_40 (sequence is synthesized)
ctccgttagaattggacctcagccgatttgagccaaaatttaggaactattcagaagacagtttctttcttttgagtgcttaagacagtgtaaatggttcgaatcacacacattttaaga

SEQ ID NO: 529177 - DNA, 120 bp, Artificial Sequence
  ENSG00000166148_41 (sequence is synthesized)
ttccattgtatacataagcattttaagaatattgttttaacataattattaggcatactaagttatcatgaatgaaaatgtacatgtgacctgtagtatgttatatattattatggctaa

SEQ ID NO: 529178 - DNA, 120 bp, Artificial Sequence
  ENSG00000166148_42 (sequence is synthesized)
acctgtagtatgttatatattattatggctaaatgttaaatgccatttttttgctttttagttttatgtatttttgtatgtatatacccacatttttacattgatttatgttctaaataa

SEQ ID NO: 529179 - DNA, 120 bp, Artificial Sequence
  ENSG00000166148_43 (sequence is synthesized)
aaattcaggaaagaaaatctgatgataaatctgatataaataccagaataattattattaatataaaataatattttcacatatgaaggtatgtcttcatactacaggatttctgacttg

SEQ ID NO: 529180 - DNA, 120 bp, Artificial Sequence
  ENSG00000166148_44 (sequence is synthesized)
gtatgtcttcatactacaggatttctgacttgaatatattctataatgctttaattcattaccataacaaatgtactaagaattaatgttgcatctttagtattccattttttggaactg

SEQ ID NO: 529181 - DNA, 120 bp, Artificial Sequence
  ENSG00000166148_45 (sequence is synthesized)
tttttcaaatgttctatatcctctagcttattatgctatctaaaataatttcagtgtgttttttcctggggcaactgaatgattcttgttttgaatgagtgataaaatgttttgtgatag

SEQ ID NO: 529182 - DNA, 120 bp, Artificial Sequence
  ENSG00000166148_46 (sequence is synthesized)
tatctaatatttggtcctttacagaaaaaatggcttgtggtactatattgaaaaaactattgtatttcctcaattttactgtgtgttgtcttgtttctataaacaaaaataagttttgga

SEQ ID NO: 529183 - DNA, 120 bp, Artificial Sequence
  ENSG00000166152_0 (sequence is synthesized)
actctgccctttatgttcacatctggaggccacaccctaccttctaagtcaccaggccatcaagtccagacaaagggatcgaaagagtgagacagtgccagccacctcccacccaagcca

SEQ ID NO: 529184 - DNA, 120 bp, Artificial Sequence
  ENSG00000166152_1 (sequence is synthesized)
ctagcaagactccacaatgtcagagcaacaaatggacctgaaggatttaatgcccacaaagaggaaatacatgtggaagactgctgaagataggcgcatgtctgacctcacctgtgtgct

SEQ ID NO: 529185 - DNA, 120 bp, Artificial Sequence
  ENSG00000166152_2 (sequence is synthesized)
ggagtggctggagcggaggcaggggaagaagaaacaagctcccgagaagcaaaagcccaaagtggtgacagtccttaaacgaaataagaagaaggaagagaagaaaggcaaaggcctcat

SEQ ID NO: 529186 - DNA, 120 bp, Artificial Sequence
  ENSG00000166152_3 (sequence is synthesized)
gacagcacggggagggaaccgcagggacacggagacttcccagcaggccttaggaaagagattcaggaaggacgccgcctcctaccgaagcctctatggagtggagcaaaaggggaaaca

SEQ ID NO: 529187 - DNA, 120 bp, Artificial Sequence
  ENSG00000166152_4 (sequence is synthesized)
atggtccctggcagctacatcaaggatggccccaagaaatctgatacagacatcaaggatgcagtcgacccagagtccactcagcggccaaacccattccgtcgacaaagcattgtctta

SEQ ID NO: 529188 - DNA, 120 bp, Artificial Sequence
  ENSG00000166152_5 (sequence is synthesized)
gatcccatgttacaggagggtacctttaacagccagagggcaaccttcataagagactggtccaacaagatgcctgacatggcttacgaacgcaagctaaagagcctcatggagaaaagc

SEQ ID NO: 529189 - DNA, 120 bp, Artificial Sequence
  ENSG00000166152_6 (sequence is synthesized)
accgaacctaagatggaaaccatgaggatgttgaagccagaggaggtgctgagctgccgatacctgaggttatccaaggagaacattcggaccttgctcaagttgtgcaaggatgcagga

SEQ ID NO: 529190 - DNA, 120 bp, Artificial Sequence
  ENSG00000166152_7 (sequence is synthesized)
atgaatgtggatatccacccccacatggtcgaagaggacatagatgctaaaaaggtgttcaccggaatacccagcatggccctctaaatagctcctctcgccaccaccttcaggctcctt

SEQ ID NO: 529191 - DNA, 120 bp, Artificial Sequence
  ENSG00000166152_8 (sequence is synthesized)
ctgtcatgggacccttcacctccagatgccatcctctggcacactacaagtggtccttccaacttagtgcatccctttagaaagtaagcaatcagaaaacaagcctcggctgtgtgatca

SEQ ID NO: 529192 - DNA, 120 bp, Artificial Sequence
  ENSG00000166153_0 (sequence is synthesized)
gctatggtgccaggggaggagccagcgcgcgagcttatggcggttcttttgactccgaggttccgtagacttgtcagtcagaacgagcttccgggcccagggctgaacgggccaagttcc

SEQ ID NO: 529193 - DNA, 120 bp, Artificial Sequence
  ENSG00000166153_1 (sequence is synthesized)
aggaaccgtagagatggcttctgccggaaaaggaggacaggatgctctggtccttttcaagctactcagctatgggatggtattattcactctcttcaggcccaagtggaaataaaaaga

SEQ ID NO: 529194 - DNA, 120 bp, Artificial Sequence
  ENSG00000166153_2 (sequence is synthesized)
aggaggcatcatttacagacatacaaagactgtttcactggttctgatgctgtcgatgtggtcttaagtcatcttatgcaaaacacgtgcctaagtagcaatgacatctcttgtcttaaa

SEQ ID NO: 529195 - DNA, 120 bp, Artificial Sequence
  ENSG00000166153_3 (sequence is synthesized)
ggggttcatctttgccaagttctaatgaatcacaaagtatttgaaccagtaggaatgaagaagcttttcaaaaaagaaaaggaattagaatttgaagattccaacattagtctctacagg

SEQ ID NO: 529196 - DNA, 120 bp, Artificial Sequence
  ENSG00000166153_4 (sequence is synthesized)
agaccaggatatgaaatgatttcaaatcctctagcacaggagattggtgaggaaagaattgaggaacttattcatacaataaatgggaatccagctttatgtccaaatatcacagttcag

SEQ ID NO: 529197 - DNA, 120 bp, Artificial Sequence
  ENSG00000166153_5 (sequence is synthesized)
aaaccttttctccggctttcaaaagaagatgtttggaaagaacaaacattattatgtcttcttcaattgattcaccttccattcttggacaatattttggagcctccagttaaaacacaa

SEQ ID NO: 529198 - DNA, 120 bp, Artificial Sequence
  ENSG00000166153_6 (sequence is synthesized)
aatcttcaactaaacaaagaggaagatcttgttatcactaacacttgcctagacagagaacttattccaagcttatgtctacctgaaaaatgagaaaagagcagaagcacttgaagcaac

SEQ ID NO: 529199 - DNA, 120 bp, Artificial Sequence
  ENSG00000166153_7 (sequence is synthesized)
acaactatatctaagattgctgttgctgaacattagagaagaattacgacggctacttacttttatggcaatggcatcagagcccaatgcctacaagttgcaaaaacaggtgaaaaattt

SEQ ID NO: 529200 - DNA, 120 bp, Artificial Sequence
  ENSG00000166153_8 (sequence is synthesized)
tgcaataagttttgccatttttttttgctatttttttcctctaaaaaccatttatgctaatgttaatctttctgtttacagtatgataataaaacagtggtcctgaaaactcttgccaaa

SEQ ID NO: 529201 - DNA, 120 bp, Artificial Sequence
  ENSG00000166153_9 (sequence is synthesized)
tgaaaactcttgccaaatcagttttgcaagccaaatcattattaaaagtgcgggcagaacaactggtctggtttccactggagtaccactctgagctcttcaagacaccagttactttat

SEQ ID NO: 529202 - DNA, 120 bp, Artificial Sequence
  ENSG00000166153_10 (sequence is synthesized)
tggatctggttagtaagaaacttaagaagcttctacatggagaagatgcagatgccatatcagttggggaggaagttagtatacttccagtggaagacctgagagggtacctgaagagat

SEQ ID NO: 529203 - DNA, 120 bp, Artificial Sequence
  ENSG00000166153_11 (sequence is synthesized)
tgccaccaagccctcttcgatagaagtctccttatttggaaagttgccattttaatgttcagtgtgaatcaggtagggatttgctagtcatcactatgaatggtggatactttgacaaat

SEQ ID NO: 529204 - DNA, 120 bp, Artificial Sequence
  ENSG00000166153_12 (sequence is synthesized)
gctttaaggatattaccatgttgttgcgtctgctgttcagaaaattataaccttagacaaatatctttgcactgagcctcagttttttaaaaatctctaaaataaaaatacacatgcaca

SEQ ID NO: 529205 - DNA, 120 bp, Artificial Sequence
  ENSG00000166153_13 (sequence is synthesized)
tccctgaccagttaatagttacagttagtcagcagttaatgcaaaacagaaatgaagagacaagattgaacagtcagaagaagatactctttgatgtcatagcaaaatactatgctcaag

SEQ ID NO: 529206 - DNA, 120 bp, Artificial Sequence
  ENSG00000166153_14 (sequence is synthesized)
agagagattgcctattaactgatgagtattttgatattcattcaggaattattgaacttttagaaaatgagaaaagagcagaagcacttgaagcaacacaactatatctaagattgctgt

SEQ ID NO: 529207 - DNA, 120 bp, Artificial Sequence
  ENSG00000166153_15 (sequence is synthesized)
ccatatcaggctttacgttttgccaacccttgacatacaaggagtttgaaaagcagaagggaaggacaattcagtatctacaccagttggctcttgagattaatagtaaccccagcatct

SEQ ID NO: 529208 - DNA, 120 bp, Artificial Sequence
  ENSG00000166153_16 (sequence is synthesized)
cccttagtattttaggatgtgagaaaatattcatgttataagcttatactatctctcttttataaattatcattatgaatcctcatttgatctaataaagccattggtcatgacctataa

SEQ ID NO: 529209 - DNA, 120 bp, Artificial Sequence
  ENSG00000166153_17 (sequence is synthesized)
tgagctcttcaaggtatggctgaaaataacagctacacatctacagcttaggatactggagatttaatgagaaaaagtaccaaaaggttgacacatggctttacgttttgccaacccttg

SEQ ID NO: 529210 - DNA, 120 bp, Artificial Sequence
  ENSG00000166153_18 (sequence is synthesized)
acatacaaggagtttgaaaagcagaagggaaggacaattcagtatctacaccagttggctcttgagattaatagtaaccccagcatctctctgaaacgaaaaaagaaattaattaaggaa

SEQ ID NO: 529211 - DNA, 120 bp, Artificial Sequence
  ENSG00000166153_19 (sequence is synthesized)
tttcaaaaacaccatccagaagctttgaattaacatttctgatacaagaaactacaatttttggggaggaagttagtatacttccagtggaagacctgagagggtacctgaagagatacc

SEQ ID NO: 529212 - DNA, 120 bp, Artificial Sequence
  ENSG00000166153_20 (sequence is synthesized)
gagtgcagtgacgcaatcctaactgactgtaacctcaaactcctggactcaagccatctccctaccttggccacccaaagtggtagaattacagaggaaggctgaggcaggaggattgct

SEQ ID NO: 529213 - DNA, 120 bp, Artificial Sequence
  ENSG00000166153_21 (sequence is synthesized)
taaacgcaggagtctgcagctgcaatgaactgtgatcccactactgcattccagcctgggtggacagaacaaggccctgtctctattttaaaataataataacacaaaaatgcccctccc

SEQ ID NO: 529214 - DNA, 120 bp, Artificial Sequence
  ENSG00000166153_22 (sequence is synthesized)
ccatttttttttaaagttcagtatgtaacaagttctatactggatcctttctttctctaataatcctcaagaaatccttacaggtaagtattgcttccgccactgcagaggcgaaagcca

SEQ ID NO: 529215 - DNA, 120 bp, Artificial Sequence
  ENSG00000166153_23 (sequence is synthesized)
gcagaggcgaaagccagtgctttggtaaaggtcctagtctttctggctttaacacagaaagtcttaataccatttggattaaagattcacaagttaggccgggcgcggtggctcatgcct

SEQ ID NO: 529216 - DNA, 120 bp, Artificial Sequence
  ENSG00000166159_0 (sequence is synthesized)
atccctctctttccttctcagtttgtgactgacccagcagccccgtcccccgtctgccacaagcagtccacctcctggtgctgtgtgctgcgtgccagccgctgctcccgctgagtggag

SEQ ID NO: 529217 - DNA, 120 bp, Artificial Sequence
  ENSG00000166159_1 (sequence is synthesized)
actctggcaccagtgcccactgcgctctgcctgccggtggtgtctggatttctataggaatcccaggagggtcttactggagggttgagagccacctgattgaaggcgtttgcagtcaga

SEQ ID NO: 529218 - DNA, 120 bp, Artificial Sequence
  ENSG00000166159_2 (sequence is synthesized)
gtaaagacggctgccgcagcatgaacccctgagctgatgagtcttattatagcccggctggcggaagacagagtgctgctattcacctctgcgtgggcgtcggtggtgcagggggaagca

SEQ ID NO: 529219 - DNA, 120 bp, Artificial Sequence
  ENSG00000166159_3 (sequence is synthesized)
gcaggccatccagcggctcacaccctacgcggctgcagctgccaagggcctggcccctgcctccctcgggccatggactgacaggcggcgcacccaggggctcctctctccccagagcga

SEQ ID NO: 529220 - DNA, 120 bp, Artificial Sequence
  ENSG00000166159_4 (sequence is synthesized)
cagggcccggagagccgtgggcctcaccatgctggcgccgggcagcagccctgggcagaggggcaggctcgccctgcagtggaggcaagtctcctggatcacctgctggatcgccctgta

SEQ ID NO: 529221 - DNA, 120 bp, Artificial Sequence
  ENSG00000166159_5 (sequence is synthesized)
tgctgtggaggccctccccacctgccctttctcctgcaagtgtgacagccgcagcctggaggtggactgcagtggccttggcctcaccacggtgcccccagacgtgcccgcagccacccg

SEQ ID NO: 529222 - DNA, 120 bp, Artificial Sequence
  ENSG00000166159_6 (sequence is synthesized)
aaccctcttgctcttgaacaataagctgagtgccctgccaagctgggctttcgccaacctctccagcctgcagcggttggacctgtccaacaacttcctggaccggctgccccgctccat

SEQ ID NO: 529223 - DNA, 120 bp, Artificial Sequence
  ENSG00000166159_7 (sequence is synthesized)
tttcggggacctgacgaatctgactgagcttcagctgcgcaataacagcatcaggaccctggacagggacctgctgcggcactcgccgctgctccgccacctggacctgtccatcaacgg

SEQ ID NO: 529224 - DNA, 120 bp, Artificial Sequence
  ENSG00000166159_8 (sequence is synthesized)
cctggcccagttgccccctggtcttttcgacgggctcctggctctgcgctccctctcgcttcgctccaaccgtctgcagaatctggaccggctgacatttgaacccctagcaaacctgca

SEQ ID NO: 529225 - DNA, 120 bp, Artificial Sequence
  ENSG00000166159_9 (sequence is synthesized)
gctgctgcaggtcggggataacccctgggagtgtgactgtaacctgcgtgagttcaaacactggatggagtggttctcctaccgagggggacgcttggaccagcttgcctgcaccctgcc

SEQ ID NO: 529226 - DNA, 120 bp, Artificial Sequence
  ENSG00000166159_10 (sequence is synthesized)
caaggagctgagggggaaggacatgcggatggtccccatggagatgttcaactactgctcccagctggaggacgagaatagctcagctgggctggatattcctgggccaccctgcaccaa

SEQ ID NO: 529227 - DNA, 120 bp, Artificial Sequence
  ENSG00000166159_11 (sequence is synthesized)
ggccagtccagagcctgctaagcccaagcccggggctgagccggagccggagcccagcacagcctgcccacagaagcagaggcaccggccggcgagcgtgaggcgagccatgggcacggt

SEQ ID NO: 529228 - DNA, 120 bp, Artificial Sequence
  ENSG00000166159_12 (sequence is synthesized)
gatcattgcaggggtcgtgtgcggcgtcgtctgcatcatgatggtggtggccgctgcctatggctgcatctacgcctccctcatggccaagtaccaccgggagctcaaaaagcgccagcc

SEQ ID NO: 529229 - DNA, 120 bp, Artificial Sequence
  ENSG00000166159_13 (sequence is synthesized)
cctgatgggggaccccgagggcgagcacgaggaccagaagcagatctcttctgtggcctgagcgcccatccccacccggccaggtaggaagggcggggagagcacacggcattgctcagc

SEQ ID NO: 529230 - DNA, 120 bp, Artificial Sequence
  ENSG00000166159_14 (sequence is synthesized)
cacagctcccaccttgacccggcgctggccactgcctccccgagtccaccctcctccccgccctccagcagacaagccacaccgggttctctccctgcactttcgaggctccctgaaagc

SEQ ID NO: 529231 - DNA, 120 bp, Artificial Sequence
  ENSG00000166159_15 (sequence is synthesized)
aacatgtgggggatctccctaagctctggccacagcaaagcaaggaggtgtgtgcaagaggaggcttccggactgggcattcccctgtcgcccttcctgccctggggtggccatagctgg

SEQ ID NO: 529232 - DNA, 120 bp, Artificial Sequence
  ENSG00000166159_16 (sequence is synthesized)
tgactcttcctaccttgctggtcccacctcacctgcattgaggggacggggagggagggatctgagggatgaaggtagatttctgagactctctcctaagccagaaagacgttcttaaca

SEQ ID NO: 529233 - DNA, 120 bp, Artificial Sequence
  ENSG00000166159_17 (sequence is synthesized)
cccctgcagtgtgaaagctggtccagctctacaactgttggtaccaatgtgcaaacacaccagccctgccatctggacccagcactcagaaacaccatacacccctggccgacgccatca

SEQ ID NO: 529234 - DNA, 120 bp, Artificial Sequence
  ENSG00000166159_18 (sequence is synthesized)
tgcccctggatctgctataggccacactgaccacatgctcctggattcgctaattcactcacacacccattgcatcaccagtgcggtcacatggattgaaagaattaatacacacacaca

SEQ ID NO: 529235 - DNA, 120 bp, Artificial Sequence
  ENSG00000166159_19 (sequence is synthesized)
cacacacacactcacacggtcacacggagaccgaggctatgagcgctcgaacagcagagacatgctcttccccaggggtctccctgagaccacagagcctctcgcgtgctcactgcaatc

SEQ ID NO: 529236 - DNA, 120 bp, Artificial Sequence
  ENSG00000166159_20 (sequence is synthesized)
ttctcaagtcaacagcaggaaggaactcaaccagtaacaccaggatcctttgagatcctctaaagtgggccaaagtggtgcccctggaggagccctcctgtcaccatggtaaccctctca

SEQ ID NO: 529237 - DNA, 120 bp, Artificial Sequence
  ENSG00000166159_21 (sequence is synthesized)
cacctctcctgctgggctttcccgggataccacccaggggcctggagcggctgcatgtgtgcatggcggcctcctgaggacccagccacacaccactggtgttgcctcggtcctgcccac

SEQ ID NO: 529238 - DNA, 120 bp, Artificial Sequence
  ENSG00000166159_22 (sequence is synthesized)
gcatctcacagcaccaggccctgtggggcccccactgattcctccacagcctgcagcctggcaccgtgactctgtgcctctcgccctccatcttcagtactcctggcctgtgacttcagg

SEQ ID NO: 529239 - DNA, 120 bp, Artificial Sequence
  ENSG00000166159_23 (sequence is synthesized)
gctgggacttggtggtgctttgccattggtggcaccctctggggaaagcaggtggcaggcagagaacacggtggctcccctgaggctcattgcctgccagcttattgcagacagagccca

SEQ ID NO: 529240 - DNA, 120 bp, Artificial Sequence
  ENSG00000166159_24 (sequence is synthesized)
ggagcaggagcgggtggccacgtgctgcccagaggctcccaggatggggcctctgttcccgggctttgtctgctcagtgtggctccctagagcacccagccggggccaaaccagagagtg

SEQ ID NO: 529241 - DNA, 120 bp, Artificial Sequence
  ENSG00000166159_25 (sequence is synthesized)
ggtggggagcctgtctgggacagagccacctgctgccaaggcagtgcaagttttccaggttacctgtccccctccctagctctgcccctcctcagagtgtgaagatggtgggtacctagg

SEQ ID NO: 529242 - DNA, 120 bp, Artificial Sequence
  ENSG00000166159_26 (sequence is synthesized)
tgtcatgctcacaggctcaggaggcatcaggctcgtccctggctctgggatggaatctcgatgggggctcaggaagaggccagcaagaaccctgaagccaagggtctgagcagagggagt

SEQ ID NO: 529243 - DNA, 120 bp, Artificial Sequence
  ENSG00000166159_27 (sequence is synthesized)
tggcaggcctagctcctgtgccccactccgaccctccctgctcatgcggcagtgggtgggtgaggtgggctgggggcctggaggagtgcctttgaggaggtcagtcctggcaggtggaca

SEQ ID NO: 529244 - DNA, 120 bp, Artificial Sequence
  ENSG00000166159_28 (sequence is synthesized)
gaggacgcctggcatgggctgcttactgggaccccaggcggccctggccatggccacagtcttccttcttttggcgtgtgggctggtaccagatctggggattttctaaagggactgggg

SEQ ID NO: 529245 - DNA, 120 bp, Artificial Sequence
  ENSG00000166159_29 (sequence is synthesized)
ggaggggagggcattgtcaatggtggtatctttagcctgagacagaagatttttaaaggcaaaattatatttctggtttgttgtttcagaagaccaataaagactgtattttcctatgta

SEQ ID NO: 529246 - DNA, 120 bp, Artificial Sequence
  ENSG00000166159_30 (sequence is synthesized)
ggaggcgcaggatggaagatggaggtggtggtgaaaccgctttcctcctccctgtggtcggcagcgattcatccacaggcgcctttttccactgaaatgtgagcgtggccagggtgagcg

SEQ ID NO: 529247 - DNA, 120 bp, Artificial Sequence
  ENSG00000166159_31 (sequence is synthesized)
ctgccctcgcggccggccgtggtgcctctggtgtgcgcctgtgtgtgctgctgccgctgtcatcacagatgcaccccagctgtcactccccgctccactctggctcgctgctcgcgcaca

SEQ ID NO: 529248 - DNA, 120 bp, Artificial Sequence
  ENSG00000166159_32 (sequence is synthesized)
gctgtggcggggctagaggaaccgggacccaggaatgcccagatgggagaccaggttgccatgaaaacatctgagtgatcaacatactcgggaggcaacaagaaggcagatgaggctggg

SEQ ID NO: 529249 - DNA, 120 bp, Artificial Sequence
  ENSG00000166159_33 (sequence is synthesized)
ggctagaggaaccgggacccaggtgaggggagcctccagggacaggtgacagttgtggcctgtgacctcactctgctcacctcggagagatgacctcagtttctccacccataactcaag

SEQ ID NO: 529250 - DNA, 120 bp, Artificial Sequence
  ENSG00000166160_0 (sequence is synthesized)
cgtgaccctcaggtgacgcaccagggccggctgccgtcggggacagggctttccatagccatggcccagcagtggagcctccaaaggctcgcaggccgccatccgcaggacagctatgag

SEQ ID NO: 529251 - DNA, 120 bp, Artificial Sequence
  ENSG00000166160_1 (sequence is synthesized)
gacagcacccagtccagcatcttcacctacaccaacagcaactccaccagaggccccttcgaaggcccgaattaccacatcgctcccagatgggtgtaccacctcaccagtgtctggatg

SEQ ID NO: 529252 - DNA, 120 bp, Artificial Sequence
  ENSG00000166160_2 (sequence is synthesized)
atctttgtggtcattgcatccgtcttcacaaatgggcttgtgctggcggccaccatgaagttcaagaagctgcgccacccgctgaactggatcctggtgaacctggcggtcgctgacctg

SEQ ID NO: 529253 - DNA, 120 bp, Artificial Sequence
  ENSG00000166160_3 (sequence is synthesized)
gcagagaccgtcatcgccagcactatcagcgttgtgaaccaggtctatggctacttcgtgctgggccaccctatgtgtgtcctggagggctacaccgtctccctgtgtgggatcacaggt

SEQ ID NO: 529254 - DNA, 120 bp, Artificial Sequence
  ENSG00000166160_4 (sequence is synthesized)
ctctggtctctggccatcatttcctgggagagatggatggtggtctgcaagccctttggcaatgtgagatttgatgccaagctggccatcgtgggcattgccttctcctggatctgggct

SEQ ID NO: 529255 - DNA, 120 bp, Artificial Sequence
  ENSG00000166160_5 (sequence is synthesized)
cttcatgcggcccagacgtgttcagcggcagctcgtaccccggggtgcagtcttacatgattgtcctcatggtcacctgctgcatcaccccactcagcatcatcgtgctctgctacctcc

SEQ ID NO: 529256 - DNA, 120 bp, Artificial Sequence
  ENSG00000166160_6 (sequence is synthesized)
aagtgtggctggccatccgagcggtggcaaagcagcagaaagagtctgaatccacccagaaggcagagaaggaagtgacgcgcatggtggtggtgatggtcctggcattctgcttctgct

SEQ ID NO: 529257 - DNA, 120 bp, Artificial Sequence
  ENSG00000166160_7 (sequence is synthesized)
ggggaccctacgccttcttcgcatgctttgctgctgccaaccctggctaccccttccaccctttgatggctgccctgccggccttctttgccaaaagtgccactatctacaaccccgtta

SEQ ID NO: 529258 - DNA, 120 bp, Artificial Sequence; identical to SEQ ID NO: 128602
  ENSG00000166160_8 (sequence is synthesized)

SEQ ID NO: 529259 - DNA, 120 bp, Artificial Sequence; identical to SEQ ID NO: 128603
  ENSG00000166160_9 (sequence is synthesized)

SEQ ID NO: 529260 - DNA, 120 bp, Artificial Sequence
  ENSG00000166160_10 (sequence is synthesized)
tctttggttggagcaggtggcaaagcagcagaaagagtctgaatccacccagaaggcagagaaggaagtgacgcgcatggtggtggtgatggtcctggcattctgcttctgctggggacc

SEQ ID NO: 529261 - DNA, 120 bp, Artificial Sequence
  ENSG00000166164_0 (sequence is synthesized)
gggcctggcgcggggggcgggcaccggggcccggtcggacatgggcaagaagcacaagaagcacaagtcggacaaacacctctacgaggagtatgtagagaagcccttgaagctggtcct

SEQ ID NO: 529262 - DNA, 120 bp, Artificial Sequence
  ENSG00000166164_1 (sequence is synthesized)
caaagtaggagggaacgaagtcaccgaactctccacgggcagctcggggcacgactccagcctcttcgaagacaaaaacgatcatgacaaacacaaggacagaaagcggaaaaagagaaa

SEQ ID NO: 529263 - DNA, 120 bp, Artificial Sequence
  ENSG00000166164_2 (sequence is synthesized)
gaaaggagagaagcagattccaggggaagaaaaggggagaaaacggagaagagttaaggaggataaaaagaagcgagatcgagaccgggtggagaatgaggcagaaaaagatctccagtg

SEQ ID NO: 529264 - DNA, 120 bp, Artificial Sequence
  ENSG00000166164_3 (sequence is synthesized)
tcacgcccctgtgagattagacttgcctcctgagaagcctctcacaagctctttagccaaacaagaagaagtagaacagacaccccttcaagaagctttgaatcaactgatgagacaatt

SEQ ID NO: 529265 - DNA, 120 bp, Artificial Sequence
  ENSG00000166164_4 (sequence is synthesized)
gcagagaaaagatccaagtgctttcttttcatttcctgtgactgattttattgctcctggctactccatgatcattaaacacccaatggattttagtaccatgaaagaaaagatcaagaa

SEQ ID NO: 529266 - DNA, 120 bp, Artificial Sequence
  ENSG00000166164_5 (sequence is synthesized)
caatgactatcagtccatagaagaactaaaggataacttcaaactaatgtgtactaatgccatgatttacaataaaccagagaccatttattataaagctgcaaagaagctgttgcactc

SEQ ID NO: 529267 - DNA, 120 bp, Artificial Sequence
  ENSG00000166164_6 (sequence is synthesized)
aggaatgaaaattcttagccaggaaagaattcagagcctgaagcagagcatagacttcatggctgacttgcagaaaactcgaaagcagaaagatggaacagacacctcacagagtgggga

SEQ ID NO: 529268 - DNA, 120 bp, Artificial Sequence
  ENSG00000166164_7 (sequence is synthesized)
ggacggaggctgctggcagagagagagagaggactctggagatgccgaagcacacgccttcaagagtcccagcaaagaaaataaaaagaaagacaaagatatgcttgaagataagtttaa

SEQ ID NO: 529269 - DNA, 120 bp, Artificial Sequence
  ENSG00000166164_8 (sequence is synthesized)
aagcaataatttagagagagagcaggagcagcttgaccgcatcgtgaaggaatctggaggaaagctgaccaggcggcttgtgaacagtcagtgcgaatttgaaagaagaaaaccagatgg

SEQ ID NO: 529270 - DNA, 120 bp, Artificial Sequence
  ENSG00000166164_9 (sequence is synthesized)
aacaacgacgttgggacttctccatcctgtggatcccattgtaggagagccaggctactgccctgtgagactgggaatgacaactggaagacttcagtctggagtgaatactttgcaggg

SEQ ID NO: 529271 - DNA, 120 bp, Artificial Sequence
  ENSG00000166164_10 (sequence is synthesized)
gttcaaagaggataaaaggaacaaagtcactccagtgttatatttgaattatgggccctacagttcttatgcaccgcattatgactccacatttgcaaatatcagcaaggatgattctga

SEQ ID NO: 529272 - DNA, 120 bp, Artificial Sequence
  ENSG00000166164_11 (sequence is synthesized)
tttaatctattcaacctatggggaagactctgatcttccaagtgatttcagcatccatgagtttttggccacgtgccaagattatccgtatgtcatggcagatagtttactggatgtttt

SEQ ID NO: 529273 - DNA, 120 bp, Artificial Sequence
  ENSG00000166164_12 (sequence is synthesized)
aacaaaaggagggcattccaggaccctacaagagatggagatgtcattgcctgaagatgaaggccatactaggacacttgacacagcaaaagaaatggagattacagaagtagagccacc

SEQ ID NO: 529274 - DNA, 120 bp, Artificial Sequence
  ENSG00000166164_13 (sequence is synthesized)
agggcgtttggactccagtactcaagacaggctcatagcgctgaaagcagtaacaaattttggcgttccagttgaagtttttgactctgaagaagctgaaatattccagaagaaacttga

SEQ ID NO: 529275 - DNA, 120 bp, Artificial Sequence
  ENSG00000166164_14 (sequence is synthesized)
tgagaccaccagattgctcagggaactccaggaagcccagaatgaacgtttgagcaccagaccccctccgaacatgatctgtctcttgggtccctcatacagagaaatgcatcttgctga

SEQ ID NO: 529276 - DNA, 120 bp, Artificial Sequence
  ENSG00000166164_15 (sequence is synthesized)
acaagtgaccaataatcttaaagaacttgcacagcaagtaactccaggtgatatcgtaagcacgtatggagttcgaaaagcaatggggatttccattccttcccccgtcatggaaaacaa

SEQ ID NO: 529277 - DNA, 120 bp, Artificial Sequence
  ENSG00000166164_16 (sequence is synthesized)
ctttgtggatttgacagaagacactgaagaacctaaaaagacggatgttgctgagtgtggacctggtggaagttgaggctgcctggtatttgattatatattatgtacatactttttcat

SEQ ID NO: 529278 - DNA, 120 bp, Artificial Sequence
  ENSG00000166164_17 (sequence is synthesized)
tcttaacttagaaatgcttttcagaagatattaaatatttgtaaattgtgtttttaattaaactttggaacagcgaatttggatgttccagaggttggacttgtattaggtaataaagct

SEQ ID NO: 529279 - DNA, 120 bp, Artificial Sequence
  ENSG00000166164_18 (sequence is synthesized)
ggacctgggactcgtgaggaaggaatgtgcttggggctgttgccatacctgtgcagcattctttcaaaatagtgccttccaatgcttcttccttatgtcccacagacaggatcatcacta

SEQ ID NO: 529280 - DNA, 120 bp, Artificial Sequence
  ENSG00000166164_19 (sequence is synthesized)
agaagcgttcttaaaacggccccatccagtgagattttccgttatacgaacatacttgaaataattttagaatttactactgtggttctgcccctgcatacccagtgggaatgatgccct

SEQ ID NO: 529281 - DNA, 120 bp, Artificial Sequence
  ENSG00000166164_20 (sequence is synthesized)
tgtatgggtaattaggcacctcccacccacccctgacaaaagcacactgggagttttatagcactgtcacatggctagtgttcttttttggttttttccgttttttaaagaaagaggagt

SEQ ID NO: 529282 - DNA, 120 bp, Artificial Sequence
  ENSG00000166164_21 (sequence is synthesized)
acatttctactttacttactgtttatctgaaatacaaaggtcaagtacccaaggagttgaactctaagtaggagaccacaagattcatggcccccttttatcagcaagctgagataaatg

SEQ ID NO: 529283 - DNA, 120 bp, Artificial Sequence
  ENSG00000166164_22 (sequence is synthesized)
gtgattttgctgaatcggtatagaacctgttatacacaagggaaaaaaatcaggatggagatagatagatagatagccttgttcagtgaacaaattaagtttgaaggcccttatacaatc

SEQ ID NO: 529284 - DNA, 120 bp, Artificial Sequence
  ENSG00000166164_23 (sequence is synthesized)
cttctataaatcacccaggcaggaagccatttgatttctattattttcctgactttgaaaattaattagtatttaggaagaacaaatagggtaaaggaaaattaattccctcaaaagact

SEQ ID NO: 529285 - DNA, 120 bp, Artificial Sequence
  ENSG00000166164_24 (sequence is synthesized)
taaaatcttatgctaaaagagtcaaattttcaagttgtttgagtctacttttaatctctagtgagttcatgaggaccacgaaaataaaataccttcagatatttgagtttttcaaattgc

SEQ ID NO: 529286 - DNA, 120 bp, Artificial Sequence
  ENSG00000166164_25 (sequence is synthesized)
taatttaatgtataaaaagcagctaaacactggtactttataaaaatgaaacagcattttgaaacaaatgttacagatctataaatattcattatatagaataaaccctagttacttgca

SEQ ID NO: 529287 - DNA, 120 bp, Artificial Sequence
  ENSG00000166164_26 (sequence is synthesized)
tgcaccacctcaaatcatatttctttacactgacctattatatacacaaagtatacagtggttaatgatcttctcttctgtttgtttgtttgtttgtttgttaggaaatttcctcaataa

SEQ ID NO: 529288 - DNA, 120 bp, Artificial Sequence
  ENSG00000166164_27 (sequence is synthesized)
gccagaaaaccttaggtattattttcacaaaagttaactcaggagaaattgtaaggaagtccttgacccatggagaaggtcactgtttgtttgtttgttagatacgtgtgtctgtcataa

SEQ ID NO: 529289 - DNA, 120 bp, Artificial Sequence
  ENSG00000166164_28 (sequence is synthesized)
aacaaaatgacaccagtaattacttggtaatttaaaaacaagttcataaaaagaaaatacctgcaggtaatttttatggtcagttatattctataacctgaacactgaaaactaaaaact

SEQ ID NO: 529290 - DNA, 120 bp, Artificial Sequence
  ENSG00000166164_29 (sequence is synthesized)
tttacttacaaactattattatctgagcacagcacagtgctttgctttaattggaaataaaaatgcatgagtgagtggtagtcagttatttgttaaactcccaactggggtttctgttgt

SEQ ID NO: 529291 - DNA, 120 bp, Artificial Sequence
  ENSG00000166164_30 (sequence is synthesized)
tactgaagaaaaaaacaaatattccaagagtacaaatatgctgacctcagagaggcccagtgcactaatgtgtttctatgttatattagcaacagaaaccttcctgacttgccaggagag

SEQ ID NO: 529292 - DNA, 120 bp, Artificial Sequence
  ENSG00000166164_31 (sequence is synthesized)
cccccgccgggcagccctggtcactgctagatcttgagagcacagatttcagtatagtattcatgtgaaaccagcccttcatgtaaaaagttttggtgtgtaaaaaaggcaacttaagcg

SEQ ID NO: 529293 - DNA, 120 bp, Artificial Sequence
  ENSG00000166164_32 (sequence is synthesized)
aggctaattgcccttaccagcattgttgccatgaaattcctttatacagcaagttcttctattcatactgattccacttatgtgcagcacatgagagctgccactagtctacccagcacc

SEQ ID NO: 529294 - DNA, 120 bp, Artificial Sequence
  ENSG00000166164_33 (sequence is synthesized)
tttgtgcaaattagaatacacctgcccttcctcgggctgataaagccacacgacacagcacaggcagacaggttcaattttcgttccctccaccgccacccccgcacttagctgtactct

SEQ ID NO: 529295 - DNA, 120 bp, Artificial Sequence
  ENSG00000166164_34 (sequence is synthesized)
taatttgcagcccggggcaactcatcccaggaccccaacaagtctggtcagtcacccaatctgcaaccctgtataatcatcttgtaaaggctcctgtatgcaagactttgtgtagaactt

SEQ ID NO: 529296 - DNA, 120 bp, Artificial Sequence
  ENSG00000166164_35 (sequence is synthesized)
tacggggttcatggggacacctagctaagaatccctgctatgtagggaaactgagtgcattagaaatcctggcgatgctctggtgatgaggccaccggttaagtcttccggttatgaagt

SEQ ID NO: 529297 - DNA, 120 bp, Artificial Sequence
  ENSG00000166164_36 (sequence is synthesized)
ccattcagaaaaagtcacgggcagtttggtcatttctcaccctgttgttacagttaggttgactttcaattccttgggaagttgaagcacagtaagacacatccccaaaacctggctttt

SEQ ID NO: 529298 - DNA, 120 bp, Artificial Sequence
  ENSG00000166164_37 (sequence is synthesized)
tgcatttgccttgactcacgcagtttcagagcaagaacggctcagcatttgtgagggggcgggcttcccagatccaggagcctctgcatgcacccatgcggagtagatccttctagtttt

SEQ ID NO: 529299 - DNA, 120 bp, Artificial Sequence
  ENSG00000166164_38 (sequence is synthesized)
gaagctctccagagttagctgtgaagactaaaggaaagaagagatgcactcacaggttgtccaagttgtctctaaacagactccattcctttctggtaagaaaagtaagatacagttgaa

SEQ ID NO: 529300 - DNA, 120 bp, Artificial Sequence
  ENSG00000166164_39 (sequence is synthesized)
ggacggcaggggagaacgcaaagatgtgtgagtaatcaaggaagaggtgaaaggccgcaccttactttcaaagcacctctctccagaatgcttgcctcacaagctgcctcattcaaaggc

SEQ ID NO: 529301 - DNA, 120 bp, Artificial Sequence
  ENSG00000166164_40 (sequence is synthesized)
aaggctctgctgctccccgccttcttgctgtgaccacattcctcaggactctatccccacagccagctgaccccataagctgatgctagacagtagtcctccttacatgtcagtggttaa

SEQ ID NO: 529302 - DNA, 120 bp, Artificial Sequence
  ENSG00000166164_41 (sequence is synthesized)
aaaggcagagcatacactggagggaagagatttatgtctagtgtctgaaaagtcattcaaaaggataaaaaccccattaatgtattcatttaaaacaaacatgccagacaaggcaaaaag

SEQ ID NO: 529303 - DNA, 120 bp, Artificial Sequence
  ENSG00000166164_42 (sequence is synthesized)
taacagtgttaattgtggtgtttttctctctacctgtttgaaaccgtttacagatgtaaaacacccctttcagcttcatttaccagaatgcctctgtgagaaatgctgtcattgccaggc

SEQ ID NO: 529304 - DNA, 120 bp, Artificial Sequence
  ENSG00000166164_43 (sequence is synthesized)
agactgggtaatttatgaagaaaagagctttgattaactcacagttccacaggctgtacaggacacatggctggagagacccaaggaaacttacaatcgtactggaacatgaaggggaag

SEQ ID NO: 529305 - DNA, 120 bp, Artificial Sequence
  ENSG00000166164_44 (sequence is synthesized)
aggggaagcaagcacgtcttcacatggcagcaggagagagtgaagggggaagtgctacacactttcttttttttttttagatggtttacatttttttaatttttttttttttaatttaag

SEQ ID NO: 529306 - DNA, 68 bp, Artificial Sequence
  ENSG00000166164_45 (sequence is synthesized)
taatgttacatatatattcatgtgccatgttggtgcgctgaacccattaactcatcatttacattagg

SEQ ID NO: 529307 - DNA, 71 bp, Artificial Sequence
  ENSG00000166164_46 (sequence is synthesized)
ggagaacgtgcggtgtttggttttctgtccttgccatagtttgctcagaaacagcttcatccatgtcccta

SEQ ID NO: 529308 - DNA, 120 bp, Artificial Sequence
  ENSG00000166164_47 (sequence is synthesized)
ccttcccccgtcatggaaaacaactttgtggatttgacagaagacactgaagaacctaaaaagacggatgttgctgagtgtggacctggtggaagttgaggctgcctggcccaccaggga

SEQ ID NO: 529309 - DNA, 120 bp, Artificial Sequence
  ENSG00000166164_48 (sequence is synthesized)
gagggagtctccaatccgtgctagacagctcagcttactcccccttggtgtctagaaaaacagacctcacttgtgcgtgcccacaggccactgaggtggaagtctgttttcatcatgtgc

SEQ ID NO: 529310 - DNA, 120 bp, Artificial Sequence
  ENSG00000166164_49 (sequence is synthesized)
taaagttgcctgcctggcacctcagggaacaaagatctcaaagtcagccccgaaccagtgaacattctccagctggcctggaaactgttacagaccaggcacagagcttctggcctcccc

SEQ ID NO: 529311 - DNA, 120 bp, Artificial Sequence
  ENSG00000166164_50 (sequence is synthesized)
tgcgcattatggctcagtggctgcttcgagccagaatctggtgcatgtgtctgagaaatcctccagtgcaggtccaaagaagccaacatgcacagccatctgcatgcctttgggattggc

SEQ ID NO: 529312 - DNA, 120 bp, Artificial Sequence
  ENSG00000166164_51 (sequence is synthesized)
gtggggcggagagtcttctcctgggcttgcttcagggaaggagactggcttcccggccttttcggaatccagcaggagccctcagttcagccccagcccctgaaacttggcagtgtccgt

SEQ ID NO: 529313 - DNA, 120 bp, Artificial Sequence
  ENSG00000166164_52 (sequence is synthesized)
acagacaaagtaagtcctcagctcgcctttgcctttgacgttgatcaggccacggcattcacaagagtacccgaggccctggaggatggtgcaggtctcctcggtaacctgaaaaggaag

SEQ ID NO: 529314 - DNA, 120 bp, Artificial Sequence
  ENSG00000166164_53 (sequence is synthesized)
agagacctgttgtcttcagaggcgggaagaacacctgtcatggtagggacagatagagactgcccaggcatgcagtctgccttccctggagagtgtgatagctagaaccatggctgctgg

SEQ ID NO: 529315 - DNA, 120 bp, Artificial Sequence
  ENSG00000166164_54 (sequence is synthesized)
gtgagacagcagctcttaagtccaagtcccctcacctctggggaagatcttttccccttagtcaactgcttccccaataggtctttacctggattttcccaagttctccagtgctttcca

SEQ ID NO: 529316 - DNA, 120 bp, Artificial Sequence
  ENSG00000166164_55 (sequence is synthesized)
ttcggctggccacattgacagtgtttccccagatgtcatactgaggttttcgggccccaatcactccagcaatcacaggcccatggtttatgcctgaagatgatgtttacagttacccaa

SEQ ID NO: 529317 - DNA, 120 bp, Artificial Sequence
  ENSG00000166164_56 (sequence is synthesized)
gcgtgcaggcaaagcctcaagcttctgcccttagaggaggccagagaatccataccccagcacaggatgcggggacaaaacaactagagtgaaggctgggttgcttcccagagtcactgc

SEQ ID NO: 529318 - DNA, 120 bp, Artificial Sequence
  ENSG00000166164_57 (sequence is synthesized)
gaagtctgggtttgatgttaacacttgtatctgctaatctctcttttaacaaagaatactttgttaaaagtattaacaaaggcctggctttgagcgcaggcccgcaactatttaggttta

SEQ ID NO: 529319 - DNA, 120 bp, Artificial Sequence
  ENSG00000166164_58 (sequence is synthesized)
gtaactttgcttccttctctatattttaaggtcacctgtttacagacaataattttggttctccattttctgtagttacgtattattaaaactctcaatggtaactatatgctaactata

SEQ ID NO: 529320 - DNA, 120 bp, Artificial Sequence
  ENSG00000166164_59 (sequence is synthesized)
tgcaaaacatcagaataattgtccaactgctgagcttgtcagatcagagggatttctaaaacctttcataatagatggcgaggtgcagctgtgccacacagactgggtggactggcctag

SEQ ID NO: 529321 - DNA, 120 bp, Artificial Sequence
  ENSG00000166164_60 (sequence is synthesized)
aggcaggggctccccaccccgctccatcacccgggctcaccgacgcggaggcggaaggagttgaaggagtgcctgttgatgccgtccagcttactcatcagggcgatgctgaactccacc

SEQ ID NO: 529322 - DNA, 120 bp, Artificial Sequence
  ENSG00000166164_61 (sequence is synthesized)
atgacaccaatgtgggcatgctgccgctccagctcctgcgggacaggctgtgggtcagatccttgcatctccagagcccccagacctagtgggccctggcgcgccactcttgttgaggat

SEQ ID NO: 529323 - DNA, 120 bp, Artificial Sequence
  ENSG00000166164_62 (sequence is synthesized)
ccccaccactaaaatcctggctgagccctacaagtacctgtgcccctcccccaggacgagataagggcacaccctttaagtaaggtgacaggtcacctttaagtgaggacagtcagctga

SEQ ID NO: 529324 - DNA, 120 bp, Artificial Sequence
  ENSG00000166164_63 (sequence is synthesized)
atttcacctcttgggcttgagtacctggttctcgtgccctgaggcgacgctgagccctgcagctgccatgtacgtgctgccgatggtcttgatcttctccacgccgctgaacttgggctt

SEQ ID NO: 529325 - DNA, 120 bp, Artificial Sequence
  ENSG00000166164_64 (sequence is synthesized)
cagtaggagctgcaggcaagaaggaagcggtgaagcagccgccactccatagccgcagccaggctgcccctgcttctcaggaagggtgtggggttccctccacccatcgccgcctctcgc

SEQ ID NO: 529326 - DNA, 120 bp, Artificial Sequence
  ENSG00000166164_65 (sequence is synthesized)
acacacgtctcatggctgccctgccagctgagcgcatgactaagcatggtgaggacatggcccttggcggctcctgctcttcctgttgtctccgtccccacactgtctccctcttccctt

SEQ ID NO: 529327 - DNA, 120 bp, Artificial Sequence
  ENSG00000166164_66 (sequence is synthesized)
ccatctgtgtctgcacagagcaaacacagcattatctacacaggaatgtagattctttgtctccagcaaagaattcaacccaaactgatttcctctgtttggcttggttgatagcgtggg

SEQ ID NO: 529328 - DNA, 120 bp, Artificial Sequence
  ENSG00000166164_67 (sequence is synthesized)
cttagttggaaatgaagctaaggggcctgagtctaatcttagcaagctgcccatcacagagaagatgccaacgaattatttgctgcataaaacagaatgaaaaagaaatgtgtaccttta

SEQ ID NO: 529329 - DNA, 120 bp, Artificial Sequence
  ENSG00000166165_0 (sequence is synthesized)
gttcgcctgcgtcgctccgggagctgccgacggacggagcgcccccgcccccgcccggccgcccgcccgccgccgccatgcccttctccaacagccacaacgcactgaagctgcgcttcc

SEQ ID NO: 529330 - DNA, 120 bp, Artificial Sequence
  ENSG00000166165_1 (sequence is synthesized)
cggccgaggacgagttccccgacctgagcgcccacaacaaccacatggccaaggtgctgacccccgagctgtacgcggagctgcgcgccaagagcacgccgagcggcttcacgctggacg

SEQ ID NO: 529331 - DNA, 120 bp, Artificial Sequence
  ENSG00000166165_2 (sequence is synthesized)
acgtcatccagacaggcgtggacaacccgggccacccgtacatcatgaccgtgggctgcgtggcgggcgacgaggagtcctacgaagtgttcaaggatctcttcgaccccatcatcgagg

SEQ ID NO: 529332 - DNA, 120 bp, Artificial Sequence
  ENSG00000166165_3 (sequence is synthesized)
accggcacggcggctacaagcccagcgatgagcacaagaccgacctcaaccccgacaacctgcagggcggcgacgacctggaccccaactacgtgctgagctcgcgggtgcgcacgggcc

SEQ ID NO: 529333 - DNA, 120 bp, Artificial Sequence
  ENSG00000166165_4 (sequence is synthesized)
gcagcatccgtggcttctgcctccccccgcactgcagccgcggggagcgccgcgccatcgagaagctcgcggtggaagccctgtccagcctggacggcgacctggcgggccgatactacg

SEQ ID NO: 529334 - DNA, 120 bp, Artificial Sequence
  ENSG00000166165_5 (sequence is synthesized)
ccgcgactggcccgacgcccgcggtatctggcacaatgacaataagaccttcctggtgtgggtcaacgaggaggaccacctgcgggtcatctccatgcagaaggggggcaacatgaagga

SEQ ID NO: 529335 - DNA, 120 bp, Artificial Sequence
  ENSG00000166165_6 (sequence is synthesized)
ggtgttcacccgcttctgcaccggcctcacccagattgaaactctcttcaagtctaaggactatgagttcatgtggaaccctcacctgggctacatcctcacctgcccatccaacctggg

SEQ ID NO: 529336 - DNA, 120 bp, Artificial Sequence
  ENSG00000166165_7 (sequence is synthesized)
caccgggctgcgggcaggtgtgcatatcaagctgcccaacctgggcaagcatgagaagttctcggaggtgcttaagcggctgcgacttcagaagcgaggcacaggcggtgtggacacggc

SEQ ID NO: 529337 - DNA, 120 bp, Artificial Sequence
  ENSG00000166165_8 (sequence is synthesized)
tgcggtgggcggggtcttcgacgtctccaacgctgaccgcctgggcttctcagaggtggagctggtgcagatggtggtggacggagtgaagctgctcatcgagatggagcagcggctgga

SEQ ID NO: 529338 - DNA, 120 bp, Artificial Sequence
  ENSG00000166165_9 (sequence is synthesized)
gcagggccaggccatcgacgacctcatgcctgcccagaaatgaagcccggcccacacccgacaccagccctgctgcttcctaacttattgcctgggcagtgcccaccatgcacccctgat

SEQ ID NO: 529339 - DNA, 120 bp, Artificial Sequence
  ENSG00000166165_10 (sequence is synthesized)
gttcgccgtctggcgagcccttagccttgctgtagagacttccgtcacccttggtagagtttatttttttgatggctaagatactgctgatgctgaaataaactagggttttggcctgcc

SEQ ID NO: 529340 - DNA, 120 bp, Artificial Sequence
  ENSG00000166165_11 (sequence is synthesized)
ggtcccggccccccctccccccgcgcagccgcagggtcctcagcagcgcgctcgggcccggcagtgacgtcactgtccccgtcccgcgccccctcccccaggccacccgtacatcatgac

SEQ ID NO: 529341 - DNA, 120 bp, Artificial Sequence
  ENSG00000166165_12 (sequence is synthesized)
cgggtggagtcttggcagcagcctccactcctgggcatggcagggagcagcacctcagggacttgggaagttcctttggtctgggggcggcctggggcttttttctgggtatgccctgag

SEQ ID NO: 529342 - DNA, 120 bp, Artificial Sequence
  ENSG00000166165_13 (sequence is synthesized)
cgcggtccccgcccgcttttgtttacgtcgcccgggagcggcagccgccgtcgcgctcttatctgcgcgcgcccgggttcagtttcccggagggaccgagggacggaggcccagccccgc

SEQ ID NO: 529343 - DNA, 120 bp, Artificial Sequence
  ENSG00000166165_14 (sequence is synthesized)
ggcgggtccgcgctgcgggctggaggggcgggcgcgggagccgagcgtcctgagcgcacccctcgcagccctgtccagcctggacggcgacctggcgggccgatactacgcgctcaagag

SEQ ID NO: 529344 - DNA, 120 bp, Artificial Sequence
  ENSG00000166165_15 (sequence is synthesized)
ggcctgagtggtacgcgggagcccgggaaccccggcgtgccggtcccctctgaccccgcgtctccccgcagcccgccgccgccatgcccttctccaacagccacaacgcactgaagctgc

SEQ ID NO: 529345 - DNA, 120 bp, Artificial Sequence
  ENSG00000166165_16 (sequence is synthesized)
cccagcgatgagcacaagaccgacctcaaccccgacaacctgcaggtgcggggctgcgggcgggccgggcgggcggggccggggtcttcgggcgctcactcccgtctcgcctcccagggc

SEQ ID NO: 529346 - DNA, 120 bp, Artificial Sequence
  ENSG00000166166_0 (sequence is synthesized)
gttgtggccgccgccgccgcgcgtcgcggaggcacgtgtggagccccggcagcaggagcgtcgcaggtccttggcccttgccagacattagcaccatgagcttcgtggcatacgaggagc

SEQ ID NO: 529347 - DNA, 120 bp, Artificial Sequence
  ENSG00000166166_1 (sequence is synthesized)
tgatcaaggagggtgacacggccatcctgtcactgggccatggtgcaatggtggcggtgcgtgtgcagcgtggggcacagacccagacccggcatggtgtcctgcggcactcagttgacc

SEQ ID NO: 529348 - DNA, 120 bp, Artificial Sequence
  ENSG00000166166_2 (sequence is synthesized)
ttatcggccgccccttcggctccaaggtgacgtgcggccgaggtggctgggtgtatgtgctgcaccccacgcccgagctctggacgctgaacctgccgcaccgcacgcagatcctctact

SEQ ID NO: 529349 - DNA, 120 bp, Artificial Sequence
  ENSG00000166166_3 (sequence is synthesized)
ccacagacatcgccctcatcaccatgatgttggagcttcggcccggctctgtggtctgtgagtctggcaccggcagtggctctgtgtcccacgccatcatccgcaccattgcacccacgg

SEQ ID NO: 529350 - DNA, 120 bp, Artificial Sequence
  ENSG00000166166_4 (sequence is synthesized)
gtcacctgcacacggtggagttccaccagcagcgggcagagaaggcccgggaggagttccaggagcaccgtgtgggccgctgggtgactgtgcgcacccaggacgtgtgccgcagtggct

SEQ ID NO: 529351 - DNA, 120 bp, Artificial Sequence
  ENSG00000166166_5 (sequence is synthesized)
ttggcgtgagccacgtggccgacgccgtcttcctggacatcccatcaccctgggaggccgtgggccacgcctgggacgccctcaaggtcgaaggcgggcgcttctgctccttctcaccgt

SEQ ID NO: 529352 - DNA, 120 bp, Artificial Sequence
  ENSG00000166166_6 (sequence is synthesized)
gcatcgagcaggtgcaacgcacatgccaggcgctggcagcgcgcggcttctcagagctgagcaccctggaggtgctgccacaggtctacaacgtgcgcactgtcagcctgccaccgcccg

SEQ ID NO: 529353 - DNA, 120 bp, Artificial Sequence
  ENSG00000166166_7 (sequence is synthesized)
acctgggcacaggcacagatggccctgccggctccgacaccagccccttccgcagcggcacgcccatgaaggaggccgtgggccacaccggctacctgaccttcgccaccaagaccccag

SEQ ID NO: 529354 - DNA, 120 bp, Artificial Sequence
  ENSG00000166166_8 (sequence is synthesized)
gctagggggccgcctcccagggcaccagggagctgggagcactgaagggctgggcagggaggccagaggcaccttatatggtcagcgatgcctgccagacacagacggtggggtggggct

SEQ ID NO: 529355 - DNA, 120 bp, Artificial Sequence
  ENSG00000166166_9 (sequence is synthesized)
tgggggcctcctgggtggccagagtgggacagcaggaagggcggctgtgatggaggagcagtgctggggctgggcctcagccattcctgtccagccctgtggcccatcccagctgctgtt

SEQ ID NO: 529356 - DNA, 120 bp, Artificial Sequence
  ENSG00000166166_10 (sequence is synthesized)
tgttgccaatatgaagtatccactgccacaggctcccctgggtgttgaagccaaagggtgcaggtgggggagtctgaccccctcccaggtgggcctaagcaggaagggggtggaggaggg

SEQ ID NO: 529357 - DNA, 120 bp, Artificial Sequence
  ENSG00000166166_11 (sequence is synthesized)
aggggggcattgaccctgagaccacgctgcgtctgacccctgggcccccacggccctggctgccccacggggcctgagaccatctcgtgcttctccagtccccgggccgaggctccagcc

SEQ ID NO: 529358 - DNA, 120 bp, Artificial Sequence
  ENSG00000166166_12 (sequence is synthesized)
ttggccagaagctggggtgagctgacccagaatccctgccctgctctccccagcgctaggagaccaggccagcccaggaaccagggaggtgaccctgctctctggcctcctggctgatgt

SEQ ID NO: 529359 - DNA, 120 bp, Artificial Sequence
  ENSG00000166166_13 (sequence is synthesized)
gaggccaggcagcgctgcggagaggagcggcagagtgggttgtctgccgcaggcaaccaggcaagtgtgtcggggctggggtgtgaatgccagcctgtgagtcccggaactatgtgggta

SEQ ID NO: 529360 - DNA, 120 bp, Artificial Sequence
  ENSG00000166166_14 (sequence is synthesized)
cccctacccctcacagaagccaagggcatggaggaggtccctccacagtgacaacggtgtggggtaggggaggtgcattcaggacaccacccagggacagtgcctatgtgatcacctctt

SEQ ID NO: 529361 - DNA, 120 bp, Artificial Sequence
  ENSG00000166166_15 (sequence is synthesized)
aaaggctaagcttaggggcatttcccaaagtggggacagagggcaggacgcccaggctgggggctctcctcgcccgccctggtgtctgacagcctcaaggaaggagcagtgcctgtgtca

SEQ ID NO: 529362 - DNA, 120 bp, Artificial Sequence
  ENSG00000166166_16 (sequence is synthesized)
gccatggggcccttggagctgccgctggtgcctagggggcctgggtttctgcccaggcagccagtggctgttgggagcctctgtttcccctgtgctgggggccttgagtgctatgctagc

SEQ ID NO: 529363 - DNA, 120 bp, Artificial Sequence
  ENSG00000166166_17 (sequence is synthesized)
aggggcctggccccaagtgtgagtgatgagcaataaacgtaccgtccccctctgttctgagtgatccctagcagccaaggccacccccagctgctgtctaggccagccctacctgcgctc

SEQ ID NO: 529364 - DNA, 120 bp, Artificial Sequence
  ENSG00000166166_18 (sequence is synthesized)
tgcccctggtccctgctcctccctgtcctggtttggcatgataggcgctccagtctccaggacaaaggggcaaatgtgtggccacccccatctggctgcagaaaaggccactccttcctg

SEQ ID NO: 529365 - DNA, 120 bp, Artificial Sequence
  ENSG00000166166_19 (sequence is synthesized)
gggttggggtggtccaggagtgctgggccttcttccacagtcctgggctggaattcagtgtggctgcctgggttacttgtatgcgcccctgaaggaagggtccactccaggccgcctggt

SEQ ID NO: 529366 - DNA, 120 bp, Artificial Sequence
  ENSG00000166166_20 (sequence is synthesized)
ccctgcgaagtgtcacactgtgggtcaccgggggctgtggctaatgtggtccgggaggcctgtgtccctgagagttgctcagccctgctccgagggcttgtcctctccttccaggaccca

SEQ ID NO: 529367 - DNA, 120 bp, Artificial Sequence
  ENSG00000166166_21 (sequence is synthesized)
gcttcccttctaaccttgttactcacctggggcacagaggaggggcccccagtcaggttcaacatggaagtgggtgaccctaatgccaggagctttggggtcaggctgtccctggggtgt

SEQ ID NO: 529368 - DNA, 120 bp, Artificial Sequence
  ENSG00000166166_22 (sequence is synthesized)
catgaactgggtgacgcacacccctgagatctcagttcccccaagcctgccctgcccctcctggccacagcaaaggcctgcatggtgtctgatgggtggacaccgggaggtgtttctttg

SEQ ID NO: 529369 - DNA, 120 bp, Artificial Sequence
  ENSG00000166166_23 (sequence is synthesized)
aggcgcagctccatggtttataggacacataggcctcaggcaccgtagggtccaggttgtgcccattttccagccggggctggttgccctggtggcagccctgggtgagtcaccagggtc

SEQ ID NO: 529370 - DNA, 120 bp, Artificial Sequence
  ENSG00000166166_24 (sequence is synthesized)
cgcacatggagagcgggaggtcccagcccacccttagttgtcacatgggacagagttgctgtgtcaatcccctcggccctgctgctctgccctgcacacaggcccccatgatgaccttga

SEQ ID NO: 529371 - DNA, 120 bp, Artificial Sequence
  ENSG00000166166_25 (sequence is synthesized)
gcctccaggcatccacccccaccgtatggccctctagacccagctgggcctcaccccactccctcagcttggatcctcacgtggcctggagccagcattaaactcctgtatgtccttcaa

SEQ ID NO: 529372 - DNA, 120 bp, Artificial Sequence
  ENSG00000166167_0 (sequence is synthesized)
agtggcctcggcgattatggacccggccgaggcggtgctgcaagagaaggcactcaagtttatgtgctctatgcccaggtctctgtggctgggctgctccagcctggcggacagcatgcc

SEQ ID NO: 529373 - DNA, 120 bp, Artificial Sequence
  ENSG00000166167_1 (sequence is synthesized)
ttcgctgcgatgcctgtataacccagggactggcgcactcacagctttccagaattcctcagagagagaagactgtaataatggcgaaccccctaggaagataataccagagaagaattc

SEQ ID NO: 529374 - DNA, 120 bp, Artificial Sequence
  ENSG00000166167_2 (sequence is synthesized)
acttagacagacatacaacagctgtgccagactctgcttaaaccaagaaacagtatgtttagcaagcactgctatgaagactgagaattgtgtggccaaaacaaaacttgccaatggcac

SEQ ID NO: 529375 - DNA, 120 bp, Artificial Sequence
  ENSG00000166167_3 (sequence is synthesized)
ttccagtatgattgtgcccaagcaacggaaactctcagcaagctatgaaaaggaaaaggaactgtgtgtcaaatactttgagcagtggtcagagtcagatcaagtggaatttgtggaaca

SEQ ID NO: 529376 - DNA, 120 bp, Artificial Sequence
  ENSG00000166167_4 (sequence is synthesized)
tcttatatcccaaatgtgtcattaccaacatgggcacataaactcgtatcttaaacctatgttgcagagagatttcataactgctctgccagctcggggattggatcatattgctgagaa

SEQ ID NO: 529377 - DNA, 120 bp, Artificial Sequence
  ENSG00000166167_5 (sequence is synthesized)
cattctgtcatacctggatgccaaatcactatgtgctgctgaacttgtgtgcaaggaatggtaccgagtgacctctgatggcatgctgtggaagaagcttatcgagagaatggtcaggac

SEQ ID NO: 529378 - DNA, 120 bp, Artificial Sequence
  ENSG00000166167_6 (sequence is synthesized)
agattctctgtggagaggcctggcagaacgaagaggatggggacagtatttattcaaaaacaaacctcctgacgggaatgctcctcccaactctttttatagagcactttatcctaaaat

SEQ ID NO: 529379 - DNA, 120 bp, Artificial Sequence
  ENSG00000166167_7 (sequence is synthesized)
tatacaagacattgagacaatagaatctaattggagatgtggaagacatagtttacagagaattcactgccgaagtgaaacaagcaaaggagtttactgtttacagtatgatgatcagaa

SEQ ID NO: 529380 - DNA, 120 bp, Artificial Sequence
  ENSG00000166167_8 (sequence is synthesized)
aatagtaagcggccttcgagacaacacaatcaagatctgggataaaaacacattggaatgcaagcgaattctcacaggccatacaggttcagtcctctgtctccagtatgatgagagagt

SEQ ID NO: 529381 - DNA, 120 bp, Artificial Sequence
  ENSG00000166167_9 (sequence is synthesized)
gatcataacaggatcatcggattccacggtcagagtgtgggatgtaaatacaggtgaaatgctaaacacgttgattcaccattgtgaagcagttctgcacttgcgtttcaataatggcat

SEQ ID NO: 529382 - DNA, 120 bp, Artificial Sequence
  ENSG00000166167_10 (sequence is synthesized)
gatggtgacctgctccaaagatcgttccattgctgtatgggatatggcctccccaactgacattaccctccggagggtgctggtcggacaccgagctgctgtcaatgttgtagactttga

SEQ ID NO: 529383 - DNA, 120 bp, Artificial Sequence
  ENSG00000166167_11 (sequence is synthesized)
tgacaagtacattgtttctgcatctggggatagaactataaaggtatggaacacaagtacttgtgaatttgtaaggaccttaaatggacacaaacgaggcattgcctgtttgcagtacag

SEQ ID NO: 529384 - DNA, 120 bp, Artificial Sequence
  ENSG00000166167_12 (sequence is synthesized)
ggacaggctggtagtgagtggctcatctgacaacactatcagattatgggacatagaatgtggtgcatgtttacgagtgttagaaggccatgaggaattggtgcgttgtattcgatttga

SEQ ID NO: 529385 - DNA, 120 bp, Artificial Sequence
  ENSG00000166167_13 (sequence is synthesized)
taacaagaggatagtcagtggggcctatgatggaaaaattaaagtgtgggatcttgtggctgctttggacccccgtgctcctgcagggacactctgtctacggacccttgtggagcattc

SEQ ID NO: 529386 - DNA, 120 bp, Artificial Sequence
  ENSG00000166167_14 (sequence is synthesized)
cggaagagtttttcgactacagtttgatgaattccagattgtcagtagttcacatgatgacacaatcctcatctgggacttcctaaatgatccagctgcccaagctgaacccccccgttc

SEQ ID NO: 529387 - DNA, 120 bp, Artificial Sequence
  ENSG00000166167_15 (sequence is synthesized)
cccttctcgaacatacacctacatctccagataaataaccatacactgacctcatacttgcccaggacccattaaagttgcggtatttaacgtatctgccaataccaggatgagcaacaa

SEQ ID NO: 529388 - DNA, 120 bp, Artificial Sequence
  ENSG00000166167_16 (sequence is synthesized)
cagtaacaatcaaactactgcccagtttccctggactagccgaggagcagggctttgagactcctgttgggacacagttggtctgcagtcggcccaggacggtctactcagcacaactga

SEQ ID NO: 529389 - DNA, 120 bp, Artificial Sequence
  ENSG00000166167_17 (sequence is synthesized)
ctgcttcagtgctgctatcagaagatgtcttctatcttttgtgaatgattggaacttttaaacctcccctcctctcctcctttcacctctgcacctagttttttcccattggttccagac

SEQ ID NO: 529390 - DNA, 120 bp, Artificial Sequence
  ENSG00000166167_18 (sequence is synthesized)
aaaggtgacttataaatatatttagtgttttgccagaatctctcttgctttgccattaagcagaagaactagtttccctgtatagcctgctgggagagacccacttctagggtatggggg

SEQ ID NO: 529391 - DNA, 120 bp, Artificial Sequence
  ENSG00000166167_19 (sequence is synthesized)
atgcagcttcaagcccagtgcccagtgtctccctgttaactgcaggaatgccaagcacctggccagagcagcccagccccaatatgcttaggaggagacagagttccctctgtatagcct

SEQ ID NO: 529392 - DNA, 120 bp, Artificial Sequence
  ENSG00000166167_20 (sequence is synthesized)
ctgggacaagaaaaagaaaacacaagaatgtatacactggaagatttgggcctcctgcctgccttctctttgtttctgttcctcttcccatctactcccctacgccccttcaaccttttt

SEQ ID NO: 529393 - DNA, 120 bp, Artificial Sequence
  ENSG00000166167_21 (sequence is synthesized)
tctctgtctgcttcacctgagaagaaagtgtacgaagagagtgtcctcctctcacatgagccagatcagccagaaaatgcaacacttggaagagttaaatgctgttcagtgaagatttca

SEQ ID NO: 529394 - DNA, 120 bp, Artificial Sequence
  ENSG00000166167_22 (sequence is synthesized)
gccccaggcctttgctgcaagtgaccctgtggcaacagtggattctcagacatgatactctcatcatatttgcaactcttctctctctttcttccccacacccaagaggaggattggtgg

SEQ ID NO: 529395 - DNA, 120 bp, Artificial Sequence
  ENSG00000166167_23 (sequence is synthesized)
tagggggcaggcagagggggtggggagaagtttcctgggctccatcaatggctgcatcttttctggactcagcagtctccttgattccatgtagagtgtggaaaggagttgctgattgca

SEQ ID NO: 529396 - DNA, 120 bp, Artificial Sequence
  ENSG00000166167_24 (sequence is synthesized)
tttcctctcattaacaattgggtgtgtaataaaaagcattgtacttcatcttaaatcactggtaaggctcagcctacagaaagatttgaaatggccagagccaatcgcttggtgcattct

SEQ ID NO: 529397 - DNA, 120 bp, Artificial Sequence
  ENSG00000166167_25 (sequence is synthesized)
tcctcatcagggcctgtgaatacccaggtgcctgtatctttgccaagaccgtgatcaaggtagcttaagagagatggtcaggagaaaacactgtttttgttttttttgttgttttgtttt

SEQ ID NO: 529398 - DNA, 120 bp, Artificial Sequence
  ENSG00000166167_26 (sequence is synthesized)
gttttggccagttaaatatcatctctcaaatattgatctcaccgtgtcaaccttgcactgcacaaccttccttctgcttctcccacacccagtatttgcagaagggcaaagctgcttaag

SEQ ID NO: 529399 - DNA, 120 bp, Artificial Sequence
  ENSG00000166167_27 (sequence is synthesized)
agagaggatcagggtgaagtttggcacacagggtttattaatggggcaaaaactgccttttcttcctcctcctgaccttattttgctcttcactctccccagccaataaagcgtctgtgg

SEQ ID NO: 529400 - DNA, 120 bp, Artificial Sequence
  ENSG00000166167_28 (sequence is synthesized)
cgattggtgaacagcataaacagctggacctcagcaagggtcaggcaaacccagtcactcggaaggcagctgtgtgagctgccaagctagtgggcttcaggtgcaagggtacctgtgcca

SEQ ID NO: 529401 - DNA, 120 bp, Artificial Sequence
  ENSG00000166167_29 (sequence is synthesized)
caccaacctgggagcacacagaatactattaatgtgcacccagctggtctccccaggcaagaaggtatcctcttcccaaggtgtacccactgaatgttgttactacatattgagagtcat

SEQ ID NO: 529402 - DNA, 120 bp, Artificial Sequence
  ENSG00000166167_30 (sequence is synthesized)
tttatgcatatgcattctacctttcctgctttatgagtatttttaagcttttagttcaaggttatattcagaaaatatttcccagtataatgatacatcgtagcctaagaaatattttct

SEQ ID NO: 529403 - DNA, 120 bp, Artificial Sequence
  ENSG00000166167_31 (sequence is synthesized)
caatgtaattcccttcccagctacccaaatgctacagagaaatgttttctacttggccactatcagggttcgtcatctattgtgttgactattaatggctttttgattgggtaaggattt

SEQ ID NO: 529404 - DNA, 120 bp, Artificial Sequence
  ENSG00000166167_32 (sequence is synthesized)
tgctatagatgaaggtagagggctgtcagccctgaaaaacacacaggtcagacatttaaaaggcatgggtttcgagctgtctcaaaatattgcccaatagccataattttaccagccttt

SEQ ID NO: 529405 - DNA, 120 bp, Artificial Sequence
  ENSG00000166167_33 (sequence is synthesized)
ctgtcatatgctgctattacaaagtggaagctgttgaatgtttattggtgcccagggttttgctctccaatctaggttcagttgaaggaatattgtttctaagactgttttgagacatgt

SEQ ID NO: 529406 - DNA, 120 bp, Artificial Sequence
  ENSG00000166167_34 (sequence is synthesized)
ccagtacatcacaaaggagatcggggcgacccctgcagatgtggagccattagcccagttgaggatattctccaagttgtcctctctcctgctgatggaaatgggaatgaagttaagtgg

SEQ ID NO: 529407 - DNA, 120 bp, Artificial Sequence
  ENSG00000166167_35 (sequence is synthesized)
tctgaaaaacttgaatcgttcacatttctcagctctgggggtcatttaccagtttgttgtagaagaaataatcaggtaagttaaaagttcatttccagagaaggtaaaccccacttacca

SEQ ID NO: 529408 - DNA, 120 bp, Artificial Sequence
  ENSG00000166167_36 (sequence is synthesized)
tctctgcatgatttcagtgggaattgattatcactaatccccaactgggctagaataaatgtaaagtttgacctttttaaaacgaaaagagagacaaagtctcagcacattccaaggagt

SEQ ID NO: 529409 - DNA, 120 bp, Artificial Sequence
  ENSG00000166167_37 (sequence is synthesized)
ggtagaaacagagctgaaggtgtccccattgtagattagtctcttctcactaaaatttactttccaacgtagggcctaaaggaaacctttcttaaagacaggctgaaaccccttcaaagg

SEQ ID NO: 529410 - DNA, 120 bp, Artificial Sequence
  ENSG00000166167_38 (sequence is synthesized)
cagatgaggaggtacagacacgtgaccttttggtgcacactggagctacttggacaagaccagcatgccttgctgcacgtgtgtgtatttcactgctgagaacatcctttaacttggtgt

SEQ ID NO: 529411 - DNA, 120 bp, Artificial Sequence
  ENSG00000166167_39 (sequence is synthesized)
gcaatttgaaaggatgtgaatcatggatggaaggccatttgtacatgtcccttggcaaaattctttctggtgtctcctaacttcagagacagggactctttttggatctctattgacaag

SEQ ID NO: 529412 - DNA, 120 bp, Artificial Sequence
  ENSG00000166167_40 (sequence is synthesized)
taataaaagtctggccctcataacttgtttccgaactagaaaagtctgtgagacccctacatcattctggtttttttgcttgagtaagaacaatccttttttatttttcttctgtacagt

SEQ ID NO: 529413 - DNA, 120 bp, Artificial Sequence
  ENSG00000166167_41 (sequence is synthesized)
ctaaagctacagagaaaaaaaaatgcactcttcccttgccggctcctggtaccattggtctgaacagctgtagttggtctactccttacttagcacttgattgtgtggggaaacaaaggt

SEQ ID NO: 529414 - DNA, 120 bp, Artificial Sequence
  ENSG00000166167_42 (sequence is synthesized)
gggaggggtggggaatactggaaataatcagggcaatttttttctttcccataattggactagataccttggtactgttgaccttctcagcatctcccttttgccttagatggcaacacc

SEQ ID NO: 529415 - DNA, 120 bp, Artificial Sequence
  ENSG00000166167_43 (sequence is synthesized)
ctccagtctgtagcagagcagtccaacccagattagtgcagcccggaggcttagggtgcagcctccctggtcttcctccacacagttgttcaccaacagaccagacctcctttaaccaca

SEQ ID NO: 529416 - DNA, 120 bp, Artificial Sequence
  ENSG00000166167_44 (sequence is synthesized)
gtgtcaacatagtatcggaaagagagccatttcttaggggaataaaacagtttcgcttctttagctcatctgtggtgtcagaatccttggagctgaagagagaaatcaaaagagcatgat

SEQ ID NO: 529417 - DNA, 120 bp, Artificial Sequence
  ENSG00000166167_45 (sequence is synthesized)
gatggctgcctggtttcaggtggaacttaatgcattgatctttagaagctccttctgttggaagttgagtacctgtgatctaaaatgtcctggaggcagatgacatctaaaatatgtgct

SEQ ID NO: 529418 - DNA, 120 bp, Artificial Sequence
  ENSG00000166167_46 (sequence is synthesized)
ttccaaccagcacagctggcgctcttagctcctgattggttgtgtgttttattaaggatcagtgcagttaagtcgtattttaaagtgttacctcccctcctaacccttccccttcttgga

SEQ ID NO: 529419 - DNA, 120 bp, Artificial Sequence
  ENSG00000166167_47 (sequence is synthesized)
cactgaaggaaaaggccaactagggtgttagccctctgggcaccaaggaaactaacagctttctcaaagcggtgaccactcaggccagcccagacaaatctgagggatggccagtgcact

SEQ ID NO: 529420 - DNA, 120 bp, Artificial Sequence
  ENSG00000166167_48 (sequence is synthesized)
ccaatgatgggacaggcctaacaacacatgtaagcttccccgagagctttcagctggttcacctctttgttctctagactcttaagtactgactgctttgacttttgtgattatgttatg

SEQ ID NO: 529421 - DNA, 120 bp, Artificial Sequence
  ENSG00000166167_49 (sequence is synthesized)
gtgatgtgtagtcagtgtaccaatatgttcacaacctaggatcatgataatggagtgtgttttgggttttttttaactgttcagaaaaaaagtaaattacaaatataagattaaagtgaa

SEQ ID NO: 529422 - DNA, 120 bp, Artificial Sequence
  ENSG00000166167_50 (sequence is synthesized)
gattctccttggcccctcagcctgcgcctgagaggtaagagagggcggggggaaggaagaggaggcgggatccgggcgctgcgttggctgcggcctggcaccaaaggggcggccccggcg

SEQ ID NO: 529423 - DNA, 120 bp, Artificial Sequence
  ENSG00000166167_51 (sequence is synthesized)
tgttgctagttcatggaactttctcctgccgtttgggtcaccaactcctgtaaagccgaggaagcagacaatgtgagacagggctgaagctgccacagtgtggacagtgcctttcaccaa

SEQ ID NO: 529424 - DNA, 120 bp, Artificial Sequence
  ENSG00000166167_52 (sequence is synthesized)
ggtagccagcctcagttctagatgattctagggtcctacttgtgtggtaagcctagtcattcctgccctagttatctagtagtactgttatgaaaataaaatgagatttgaatcagtttg

SEQ ID NO: 529425 - DNA, 120 bp, Artificial Sequence
  ENSG00000166167_53 (sequence is synthesized)
tggacccggccgaggcggtgctgcaagagaaggcactcaagtttatggttcaggctctgttgcaccatccaaccttgagcaagatgcttactcaaagattattaattcctcagagagaga

SEQ ID NO: 529426 - DNA, 120 bp, Artificial Sequence
  ENSG00000166167_54 (sequence is synthesized)
actgaaaagcggaggaagctctctggagaaacgccgtgaggccgctggcggggccttcctggtgtcagggttaccgtgctctatgcccaggtctctgtggctgggctgctccagcctggc

SEQ ID NO: 529427 - DNA, 120 bp, Artificial Sequence
  ENSG00000166169_0 (sequence is synthesized)
ctgctggtaagtggtctattcctgcccacccccgggtgactagcttggccagtagtcgaccccacccggggaccgactctgggggttggagagactcttggggccggggtcgggcactcc

SEQ ID NO: 529428 - DNA, 120 bp, Artificial Sequence
  ENSG00000166169_1 (sequence is synthesized)
agctttcttctagccccgagctgggattccctggcctgcgccagctgcgtacacggcgagtacaccgcacctgcccgggacttcacccgcagctgcgagactcctccattcccggagggc

SEQ ID NO: 529429 - DNA, 120 bp, Artificial Sequence
  ENSG00000166169_2 (sequence is synthesized)
tccccacacctgctgcggccgtgccccatctccccgcagctgcggcgctgagcacccccatgtcgagaggctgagaccaggacagcagccctgaccaacgctccaataggccgggatcca

SEQ ID NO: 529430 - DNA, 120 bp, Artificial Sequence
  ENSG00000166169_3 (sequence is synthesized)
gccatacttcaatggatcccaggggtatcttgaaggcatttcccaagcggcagaaaattcatgctgatgcatcatcaaaagtacttgcaaagattcctaggagggaagagggagaagaag

SEQ ID NO: 529431 - DNA, 120 bp, Artificial Sequence
  ENSG00000166169_4 (sequence is synthesized)
cagaagagtggctgagctcccttcgggcccatgttgtgcgcactggcattggacgagcccgggcagaactctttgagaagcagattgttcagcatggcggccagctatgccctgcccagg

SEQ ID NO: 529432 - DNA, 120 bp, Artificial Sequence
  ENSG00000166169_5 (sequence is synthesized)
gcccaggtgtcactcacattgtggtggatgaaggcatggactatgagcgagccctccgccttctcagactaccccagctgcccccgggtgctcagctggtgaagtcagcctggctgagct

SEQ ID NO: 529433 - DNA, 120 bp, Artificial Sequence
  ENSG00000166169_6 (sequence is synthesized)
tgtgccttcaggagaggaggctggtggatgtagctggattcagcatcttcatccccagtaggtacttggaccatccacagcccagcaaggcagagcaggatgcttctattcctcctggca

SEQ ID NO: 529434 - DNA, 120 bp, Artificial Sequence
  ENSG00000166169_7 (sequence is synthesized)
cccatgaggccctgcttcagacagccctttctcctcctcctcctcccaccaggcctgtgtctcctccccaaaaggcaaaagaggcaccaaacacccaagcccagcccatctctgatgatg

SEQ ID NO: 529435 - DNA, 120 bp, Artificial Sequence
  ENSG00000166169_8 (sequence is synthesized)
aagccagtgatggggaagaaacccaggttagtgcagctgatctggaagccctcatcagtggccactaccccacctcccttgagggagattgtgagcctagcccagcccctgctgtcctgg

SEQ ID NO: 529436 - DNA, 120 bp, Artificial Sequence
  ENSG00000166169_9 (sequence is synthesized)
ataagtgggtctgtgcacagccctcaagccagaaggcgaccaatcacaacctccatatcacagagaagctggaagttctggccaaagcctacagtgttcagggagacaagtggagggccc

SEQ ID NO: 529437 - DNA, 120 bp, Artificial Sequence
  ENSG00000166169_10 (sequence is synthesized)
tgggctatgccaaggccatcaatgccctcaagagcttccataagcctgtcacctcgtaccaggaggcctgcagtatccctgggattgggaagcggatggctgagaaaatcatagagatcc

SEQ ID NO: 529438 - DNA, 120 bp, Artificial Sequence
  ENSG00000166169_11 (sequence is synthesized)
atatcagtgagagcgtgcctgtcttggagctcttctccaacatctggggagctgggaccaagactgcccagatgtggtaccaacagggcttccgaagtctggaagacatccgcagccagg

SEQ ID NO: 529439 - DNA, 120 bp, Artificial Sequence
  ENSG00000166169_12 (sequence is synthesized)
cctccctgacaacccagcaggccatcggcctgaagcattacagtgacttcctggaacgtatgcccagggaggaggctacagagattgagcagacagtccagaaagcagcccaggccttta

SEQ ID NO: 529440 - DNA, 120 bp, Artificial Sequence
  ENSG00000166169_13 (sequence is synthesized)
actctgggctgctgtgtgtggcatgtggttcataccgacggggaaaggcgacctgtggtgatgtcgacgtgctcatcactcacccagatggccggtcccaccggggtatcttcagccgcc

SEQ ID NO: 529441 - DNA, 120 bp, Artificial Sequence
  ENSG00000166169_14 (sequence is synthesized)
tccttgacagtcttcggcaggaagggttcctcacagatgacttggtgagccaagaggagaatggtcagcaacagaagtacttgggggtgtgccggctcccagggccagggcggcggcacc

SEQ ID NO: 529442 - DNA, 120 bp, Artificial Sequence
  ENSG00000166169_15 (sequence is synthesized)
ggcgcctggacatcatcgtggtgccctatagcgagtttgcctgtgccctgctctacttcaccggctctgcacacttcaaccgctccatgcgagccctggccaaaaccaagggcatgagtc

SEQ ID NO: 529443 - DNA, 120 bp, Artificial Sequence
  ENSG00000166169_16 (sequence is synthesized)
tgtcagaacatgccctcagcactgctgtggtccggaacacccatggctgcaaggtggggcctggccgagtgctgcccactcccactgagaaggatgtcttcaggctcttaggcctcccct

SEQ ID NO: 529444 - DNA, 120 bp, Artificial Sequence
  ENSG00000166169_17 (sequence is synthesized)
accgagaacctgctgagcgggactggtgacccatggctgggggtgctgaggagagccgagttggactggctacccctcctggccacccagtactccctccagcctcagctggctgaacct

SEQ ID NO: 529445 - DNA, 120 bp, Artificial Sequence
  ENSG00000166169_18 (sequence is synthesized)
cgccgctccaaccaccagcttcctcagcgagcagggcccagggctctgggcctgaagcaagagccagcccggctcccagtgtctgcccggctcccagtgtctgcccagccctctcccaga

SEQ ID NO: 529446 - DNA, 120 bp, Artificial Sequence
  ENSG00000166169_19 (sequence is synthesized)
caggagcaggctgccaccccttctacctcaccactgcccctcgaagaattttgcaaatggccccttgccccattttaagcaggagcaggtggctggtttgaagccccaggtatccccctt

SEQ ID NO: 529447 - DNA, 120 bp, Artificial Sequence
  ENSG00000166169_20 (sequence is synthesized)
ccctgctatgggaaaggccaagctgctgggtggggacagaagctgcaggggagagggaagcagccgtgctgtcaacatcatccggcaccctctggggtaggagaacagccattccacatg

SEQ ID NO: 529448 - DNA, 120 bp, Artificial Sequence
  ENSG00000166169_21 (sequence is synthesized)
tgttccctctatccgtcctgcttcctgggcagctggtggtgctgggaatggggtgccccagccttggtgaggacagtgttgggaggcccaggggcccagtaaagtgcatttgacattgaa

SEQ ID NO: 529449 - DNA, 120 bp, Artificial Sequence
  ENSG00000166169_22 (sequence is synthesized)
agccctgaccaacgctccaataggccgggatccagccatacttcaatggatcccaggggtatcttgaaggcatttcccaagcggcagaaaattcatgctgatgcatcatcaaaaccttca

SEQ ID NO: 529450 - DNA, 120 bp, Artificial Sequence
  ENSG00000166169_23 (sequence is synthesized)
aggtgcagggcgttcccactcacccccgaaagtcctcctccttcctctgcgagtctgtgttggaggtagagaaatagtatgtggggtttatgtgcaggtcctccccaggctccgctccat

SEQ ID NO: 529451 - DNA, 120 bp, Artificial Sequence
  ENSG00000166169_24 (sequence is synthesized)
cccctaaagctccatttcctagcccagcatcccatttggtaaagcccttcgaagtgggccgcagcagggctgtgctgaatctttagcgcaacccctctgaggaatggtgtcgtttcctac

SEQ ID NO: 529452 - DNA, 120 bp, Artificial Sequence
  ENSG00000166169_25 (sequence is synthesized)
tcctcaaaagtacccccgatggcaccagccttcccctcatttcccgtaatactccaacttcgaaaggctggggagtgtgaagctaggctaaaccactgaagtttaaccgggtttgaagag

SEQ ID NO: 529453 - DNA, 120 bp, Artificial Sequence
  ENSG00000166169_26 (sequence is synthesized)
accccctcccccgacccgcttccccaaactgggctgctacccccaaagcctggtcaggaaagaccctacctccataggcaaaggggttggagggcctcaattctggatttccacgtgcag

SEQ ID NO: 529454 - DNA, 120 bp, Artificial Sequence
  ENSG00000166169_27 (sequence is synthesized)
gtaaaagcacagtgtcagtaggatttggtttggggctggaagaaagctccatcaagatggagttaagaccaggcacagtggcttatgcctttaatcccagcacattgggagaacagggtg

SEQ ID NO: 529455 - DNA, 71 bp, Artificial Sequence
  ENSG00000166169_28 (sequence is synthesized)
gcttatgcctttaatcccagcacattgggagaacagggtggacagatcatctgagcaaaacatacaaaaat

SEQ ID NO: 529456 - DNA, 86 bp, Artificial Sequence
  ENSG00000166169_29 (sequence is synthesized)
taggcgggtgccgtggctcatgcctataatcccagtttcttgggaggctgaggtgggagatttgcttgaacctgggaggcggaggt

SEQ ID NO: 529457 - DNA, 120 bp, Artificial Sequence
  ENSG00000166169_30 (sequence is synthesized)
caagactctgtctgaaaaaaaaaaaaagattgagttaaagttaggctttaattaggcgtaggattttcttaatgttggttgcttttaagttaagatttgtagttgtccaagaaataagat

SEQ ID NO: 529458 - DNA, 120 bp, Artificial Sequence
  ENSG00000166169_31 (sequence is synthesized)
agatttgtagttgtccaagaaataagatttgggtttggtttagagttgggttagcgattaggttcatgtaaaagctagattagagagacactggactgcatttagggctagatgtatcat

SEQ ID NO: 529459 - DNA, 120 bp, Artificial Sequence
  ENSG00000166169_32 (sequence is synthesized)
ttgttcaatgggcattaggattaggagctgcttgtaataggcaagttttgctcactttggtcagggattctgatagagtgggatcccatggagactggcctagtttgattgaaatcagcc

SEQ ID NO: 529460 - DNA, 120 bp, Artificial Sequence
  ENSG00000166169_33 (sequence is synthesized)
cccagctccattccaggccacaaggctatgaggccggtatgagatggatggacaggcctctttgtctgcccatcaccaggccttggtgctagtgatgacaccgtcactcagccatggtgt

SEQ ID NO: 529461 - DNA, 120 bp, Artificial Sequence
  ENSG00000166169_34 (sequence is synthesized)
ccgggcatggagaatgcctcagtcagtacccagcccattggaacaaaagaggcttcccacctggcctcctgtgcccccatttaagggctccagccataggagttttgatgggattactca

SEQ ID NO: 529462 - DNA, 120 bp, Artificial Sequence
  ENSG00000166169_35 (sequence is synthesized)
cgtggacctcctccttccattctcttgggaggctcaagaagggagtaaggggattagcggagccctcctgtcaggatacttgaggtgtccggggccccagaattttcagtgtcctggggt

SEQ ID NO: 529463 - DNA, 120 bp, Artificial Sequence
  ENSG00000166169_36 (sequence is synthesized)
ggaggcaggaggccatctgcatatgaaagaacctcagtgtctcaggggtggaggctaatgggtttatttttcctcagagggacaatccttcagctggcagttgctgtctcagctccctcc

SEQ ID NO: 529464 - DNA, 120 bp, Artificial Sequence
  ENSG00000166169_37 (sequence is synthesized)
ccaccaagaaaggatgtgggtgttggctcagaactgccccctctttgctttctttcctctcctttcccacaggtgcagctgtatttctgtgctccactttctcctgggcctgggcctggc

SEQ ID NO: 529465 - DNA, 120 bp, Artificial Sequence
  ENSG00000166169_38 (sequence is synthesized)
gcatgctgccagccacctgctcagtcctcaaaccccagctcacatattccaaacctttagctccaaatcagtagatatctggggctgcctagacctggctgagggctttcagcacctggc

SEQ ID NO: 529466 - DNA, 120 bp, Artificial Sequence
  ENSG00000166169_39 (sequence is synthesized)
acgtgggctggggcaggggcagagagagtctgtgtctccctactcttaaagagctccacagggcaagctcagtgcccactctcagaagcagagccggcaccttctcccgtctctcctcag

SEQ ID NO: 529467 - DNA, 120 bp, Artificial Sequence
  ENSG00000166169_40 (sequence is synthesized)
gcttgcctcctgcacagtgagctttttcttctctcctgtcctagcgaagggaaagaacagcagctcctcagggtggattcccctgggcttgcagcaggcatctggaatgggcataagctg

SEQ ID NO: 529468 - DNA, 120 bp, Artificial Sequence
  ENSG00000166169_41 (sequence is synthesized)
agggtgtgggcccgagtctgggaaggcccttgtactgctgtgggagaggagctccccacgcacagcccctcacctgtcaccgctctctttcccaggtccagaaagcagcccaggccttta

SEQ ID NO: 529469 - DNA, 120 bp, Artificial Sequence
  ENSG00000166169_42 (sequence is synthesized)
atttgccctccttccccccttcgtccgctctcattggctctgctgccttcatgtgcttcagccctacgttgtttatgtccagaatcagatattggagctgactctgcctgtccagggcct

SEQ ID NO: 529470 - DNA, 120 bp, Artificial Sequence
  ENSG00000166169_43 (sequence is synthesized)
cctggctctgcccacaatcaccagggcagcttggtaaggatgaagatgacaaggtccatcctcagactgatggaatcatgaacgagcatcttaggatagtggcagggctggatgatggca

SEQ ID NO: 529471 - DNA, 120 bp, Artificial Sequence
  ENSG00000166169_44 (sequence is synthesized)
tgtttcccatgctccctgcctttcccaagtcctgctgagtacagacccaactgcccctaggttggtcctgcctctagccttccctagagtctggggcgatggaagccttgtgtgtgtgct

SEQ ID NO: 529472 - DNA, 120 bp, Artificial Sequence
  ENSG00000166170_0 (sequence is synthesized)
cggtcactccaggctgcctcgctgcgccgctggcggtgggcgtggcgctgccggcggctaggcgcggacgccggaggaggtgtccccgggtttaggggtgttcggccaggggcggggctg

SEQ ID NO: 529473 - DNA, 120 bp, Artificial Sequence
  ENSG00000166170_1 (sequence is synthesized)
ccgggcccgggcgactgccggagctgcggaagtcgtggaagcgtcggcgacgcatcgcgcgatggcgcgggcgggacagtgcttgtgaaactgaacacaacaaaagtatggatatgggaa

SEQ ID NO: 529474 - DNA, 120 bp, Artificial Sequence
  ENSG00000166170_2 (sequence is synthesized)
accaacatccttctattagtaggcttcaggaaatccaaaaggaagtaaaaagtgtagaacagcaagttatcggcttcagtggtctgtcagatgacaagaattacaagaaactggagagga

SEQ ID NO: 529475 - DNA, 120 bp, Artificial Sequence
  ENSG00000166170_3 (sequence is synthesized)
ttctaacaaaacagctttttgaaatagactctgtagatactgaaggaaaaggagatattcagcaagctaggaagcgggcagcacaggagacagaacgtcttctcaaagagttggagcaga

SEQ ID NO: 529476 - DNA, 120 bp, Artificial Sequence
  ENSG00000166170_4 (sequence is synthesized)
atgcaaaccacccacaccggattgaaatacagaacatttttgaggaagcccagtccctcgtgagagagaaaattgtgccattttataatggaggcaactgcgtaactgatgagtttgaag

SEQ ID NO: 529477 - DNA, 120 bp, Artificial Sequence
  ENSG00000166170_5 (sequence is synthesized)
aaggcatccaagatatcattctgaggctgacacatgttaaaactggaggaaaaatctccttgcggaaagcaaggtatcacactttaaccaaaatctgtgcggtgcaagagataatcgaag

SEQ ID NO: 529478 - DNA, 120 bp, Artificial Sequence
  ENSG00000166170_6 (sequence is synthesized)
actgcatgaaaaagcagccttccctgccgctttccgaggatgcacatccttccgttgccaaaatcaacttcgtgatgtgtgaggtgaacaaggcccgaggggtcctgattgcacttctga

SEQ ID NO: 529479 - DNA, 120 bp, Artificial Sequence
  ENSG00000166170_7 (sequence is synthesized)
tgggtgtgaacaacaatgagacctgcaggcacttatcctgtgtgctctcggggctgatcgctgacctggatgctctagatgtgtgcggccggacagaaatcagaaattatcggagggagg

SEQ ID NO: 529480 - DNA, 120 bp, Artificial Sequence
  ENSG00000166170_8 (sequence is synthesized)
tagtagaagatatcaacaaattattgaaatatctggatttggaagaggaagcagacacaactaaagcatttgacctgagacagaatcattccattttaaaaatagaaaaggtcctcaaga

SEQ ID NO: 529481 - DNA, 120 bp, Artificial Sequence
  ENSG00000166170_9 (sequence is synthesized)
gaatgagagaaataaaaaatgaacttctccaagcacaaaacccttctgaattgtacctgagctccaaaacagaattgcagggtttaattggacagttggatgaggtaagtcttgaaaaaa

SEQ ID NO: 529482 - DNA, 120 bp, Artificial Sequence
  ENSG00000166170_10 (sequence is synthesized)
acccctgcatccgggaagccaggagaagagcagtgatcgaggtgcaaactctgatcacatatattgacttgaaggaggcccttgagaaaagaaagctgtttgcttgtgaggagcacccat

SEQ ID NO: 529483 - DNA, 120 bp, Artificial Sequence
  ENSG00000166170_11 (sequence is synthesized)
cccataaagccgtctggaacgtccttggaaacttgtctgagatccagggagaagttctttcatttgatggaaatcgaaccgataagaactacatccggctggaagagctgctcaccaagc

SEQ ID NO: 529484 - DNA, 120 bp, Artificial Sequence
  ENSG00000166170_12 (sequence is synthesized)
agctgctagccctggatgctgttgatccgcagggagaagagaagtgtaaggctgccaggaaacaagctgtgaggcttgcgcagaatattctcagctatctcgacctgaaatctgatgaat

SEQ ID NO: 529485 - DNA, 120 bp, Artificial Sequence
  ENSG00000166170_13 (sequence is synthesized)
gggagtactgaaataccagagatctcacttttgatactgttttgcacttcatatgtgcttctatgtatagagagctttcagttcattgatttatacgtgcatatttcagtctcagtattt

SEQ ID NO: 529486 - DNA, 120 bp, Artificial Sequence
  ENSG00000166170_14 (sequence is synthesized)
atgattgaagcaaattctattcagtatctgctgcttttgatgttgcaagacaaatatcattacagcacgttaacttttccattcggatcattatctgtatgatgtggtgtggtttgtttg

SEQ ID NO: 529487 - DNA, 120 bp, Artificial Sequence
  ENSG00000166170_15 (sequence is synthesized)
gtttgtccttttttttgcgtttttaatcagaaaacaaaatagaggcagcttttgtagattttaaatgggttgtgcaagcattaaaatgcaggtctttcagaatctagaactaggcataac

SEQ ID NO: 529488 - DNA, 120 bp, Artificial Sequence
  ENSG00000166170_16 (sequence is synthesized)
cttacataatactaggaaaattatgagaaaggggaaatttttggttaaataagagtaaggttcaaacacaagcagtacatgttctgtttcattatgctcgatagaaggcttttttttcac

SEQ ID NO: 529489 - DNA, 120 bp, Artificial Sequence
  ENSG00000166170_17 (sequence is synthesized)
ttataaggcctgattggtcctacccagcttaacggggtggggtttttttgtttgttcagacagtctgttcttttgtaaacatttttagttggaaaaacagcatctgcattttccccatcc

SEQ ID NO: 529490 - DNA, 120 bp, Artificial Sequence
  ENSG00000166170_18 (sequence is synthesized)
tctacgttttagagaggaatcttgtttttgtgtgcaacataagaaaattatgaaaactaatagccaaaaaacctttgagattgcattaaagagaagggataaaggaccagcaataatacc

SEQ ID NO: 529491 - DNA, 120 bp, Artificial Sequence
  ENSG00000166170_19 (sequence is synthesized)
ttgtaagttgcttttgtttgtaaaatctgagcttatagttttccttagtgagtaaattcataaggatgggaacatttaaattaagttaatgggcctttaaaaaaaaaaaaaggaaacact

SEQ ID NO: 529492 - DNA, 120 bp, Artificial Sequence
  ENSG00000166170_20 (sequence is synthesized)
ggttatactaaaactaaatcagaaagtctgaatgtagcacataatggttctcttctgttgtccaaggctgtaaaatggacagccttgtcacacctccccggtgctgttttacaacgtgag

SEQ ID NO: 529493 - DNA, 120 bp, Artificial Sequence
  ENSG00000166170_21 (sequence is synthesized)
ggtagacgctgtcagtaacccagagggaccaggccttcctaggttttctaggcagtcagctgttaaccactcacttagtaaatgtcataactacacctgctccaggaccaatcagtgaaa

SEQ ID NO: 529494 - DNA, 120 bp, Artificial Sequence
  ENSG00000166170_22 (sequence is synthesized)
cctgctcggaattaaaggcttcctctgggtgcctgctgaacaactgagctcatgtcatgggcatgtggtggtttctctgttgcctgaaagagccattaaagtcagtcgtgcgtgaagcat

SEQ ID NO: 529495 - DNA, 120 bp, Artificial Sequence
  ENSG00000166170_23 (sequence is synthesized)
ctctcttctaaaggatgtgtatttccataaatgctttctgaggatccggtacaaaatgatttcccaaagttctgaagtgccttgagaacatgtgggtccgagtgttataacagactcctc

SEQ ID NO: 529496 - DNA, 120 bp, Artificial Sequence
  ENSG00000166170_24 (sequence is synthesized)
ccccgggtcaccttttgcctggtcatcctgttagagtacatctttggaaatccagggtaatattctctttcagagatgctcattgtgtaactctgtgtagggagatagtcactttaaaca

SEQ ID NO: 529497 - DNA, 120 bp, Artificial Sequence
  ENSG00000166170_25 (sequence is synthesized)
gctcaaagtagctagctaaaggagtagccttaaatacctaaaagatgacagaagcatagcccttaacaaatcttcagcttgtctctcagtatttcccaatcatgaaaatcccttgctatg

SEQ ID NO: 529498 - DNA, 120 bp, Artificial Sequence
  ENSG00000166170_26 (sequence is synthesized)
tctttcctactagaaatgttctagaatcgctggacggtggggtcagagggcagtcggtatttaggccgtgagcttcccatactactgcaggtccaactcctggcaaccgcgggctcaagg

SEQ ID NO: 529499 - DNA, 120 bp, Artificial Sequence
  ENSG00000166170_27 (sequence is synthesized)
caggtcattggaatccacgttttggccacagtagttgtaggattgcttttctgtatcataattttagaatgctcttaaaatcttgaggaagagtttttattttttatttatttttgagat

SEQ ID NO: 529500 - DNA, 120 bp, Artificial Sequence
  ENSG00000166170_28 (sequence is synthesized)
ggattaacgggtgtgagccacggcgcccagcccaggaagagtttttaaattagagctctgtttaattataccactgggaaatcatggttacgcttcaggcatattcttccccagagtact

SEQ ID NO: 529501 - DNA, 120 bp, Artificial Sequence
  ENSG00000166170_29 (sequence is synthesized)
acttacattttaaatttcattttgtaaagttaaatgtcagcattccctttaaaagtgtccattgttctttgaaagtagacgtttcagtcattcttttcaaacaagtgtttgtgtaccttt

SEQ ID NO: 529502 - DNA, 120 bp, Artificial Sequence
  ENSG00000166170_30 (sequence is synthesized)
tgccaagctgtgggcatcgtgtgtgagtacagggtgctcagctcttccaccgtcattttgaattgttcacatgggtaattggtcatggaaatgatcagattgaccttgattgactgtcag

SEQ ID NO: 529503 - DNA, 120 bp, Artificial Sequence
  ENSG00000166170_31 (sequence is synthesized)
gcatggctttgtttctggtttcaatctgttctcgttccttgtaccggattattctactcctgcaatgaaccctgttgacaccggatttagctcttgtcggccttcgtggggagctgtttg

SEQ ID NO: 529504 - DNA, 120 bp, Artificial Sequence
  ENSG00000166170_32 (sequence is synthesized)
tgttaatatgagctactgcatgtaattcttaaactgggcttgtcacattgtattgtatttttgtgatctgtaatgaaaagaatctgtactgcaagtaaaacctactccccaaaaatgtgt

SEQ ID NO: 529505 - DNA, 120 bp, Artificial Sequence
  ENSG00000166170_33 (sequence is synthesized)
ggctttgggtctgcattaaacgctgtagtccatgttcatgccaaaaatggctgggaacgtttgctttatttacattcagtcagcgttgctttcagatcacactttatccacacaggaaag

SEQ ID NO: 529506 - DNA, 120 bp, Artificial Sequence
  ENSG00000166170_34 (sequence is synthesized)
ccagtcagcctataatgaagtagttattaaaataaatgtaatgaatatgtctacaaagtatagtttagtggtttattttgctaaaatgcacatatatttgatataatttagtttgagaag

SEQ ID NO: 529507 - DNA, 120 bp, Artificial Sequence
  ENSG00000166170_35 (sequence is synthesized)
ttcagctagtttttctcctttgtttgactttgtcaatttctatctggtttttaagggtctgagcttagcttgtgcatgcaaggttttgggtttttttattttttttttgagcacagcttt

SEQ ID NO: 529508 - DNA, 120 bp, Artificial Sequence
  ENSG00000166170_36 (sequence is synthesized)
tcaccttttaatttgttgggtatttttctcttaataagagaaatattggccatcgatttttacatataatacaagtgtgtttttccagtacattggttcctgtcccctctctgtgaactg

SEQ ID NO: 529509 - DNA, 120 bp, Artificial Sequence
  ENSG00000166170_37 (sequence is synthesized)
tttgagtattggaacagtatgtcttcaataattcaatgttactttgagatacatgtgttaatatacccttagttattcttgaaataaaaccagtctcttacgcttgcagtggagaaaggc

SEQ ID NO: 529510 - DNA, 120 bp, Artificial Sequence
  ENSG00000166170_38 (sequence is synthesized)
gcaggcgcgccctggcacccgggccaagacgcccggagcggctgctgcagccagtagcggccccttcaccggctgccccgctcagacctagtcgggaggggtgcgaggcatgcagctggg

SEQ ID NO: 529511 - DNA, 120 bp, Artificial Sequence
  ENSG00000166170_39 (sequence is synthesized)
ggcccagctccggtgccgcaccccgtaaagggctgatcttccacctcgccacctcagccacgggacgccaagaccgcatccaattcagacttcttttggtgcttgtgaaactgaacacaa

SEQ ID NO: 529512 - DNA, 120 bp, Artificial Sequence
  ENSG00000166170_40 (sequence is synthesized)
ctcgggccgccttccctccgtggcctccaggacatccgccggggatagattatgcgtttccattggttacccaccttgagcgagccgtttgatagaaaccaagagcttgaaacgtgcatt

SEQ ID NO: 529513 - DNA, 120 bp, Artificial Sequence
  ENSG00000166171_0 (sequence is synthesized)
gcttagcaggggaaagatggcggtgacgggctggttggagagtctgcggacagcccagaagactgcgctgctgcaggacgggagaaggaaggttcactatttattcccagacggcaagga

SEQ ID NO: 529514 - DNA, 120 bp, Artificial Sequence
  ENSG00000166171_1 (sequence is synthesized)
aatggctgaagaatatgacgagaagacgagtgaactacttgtgagaaagtggcgtgtgaaaagtgccctgggagccatgggccagtggcagcttgaagtaggagacccagcgcccctagg

SEQ ID NO: 529515 - DNA, 120 bp, Artificial Sequence
  ENSG00000166171_2 (sequence is synthesized)
agcagggaacctggggcctgaactcatcaaggaaagcaatgccaatcctatcttcatgcgcaaggacaccaagatgagtttccagtggcggattcgaaacctcccctatcctaaggatgt

SEQ ID NO: 529516 - DNA, 120 bp, Artificial Sequence
  ENSG00000166171_3 (sequence is synthesized)
ccagctacctctggatgacgccttgctgagctttgcccacgccaactgcaccctgatcatctcttaccagaagccaaaggaggttgtggtggccgagtctgagctacagaaggaactaaa

SEQ ID NO: 529517 - DNA, 120 bp, Artificial Sequence
  ENSG00000166171_4 (sequence is synthesized)
gaaggtgaagacagcccacagcaacgatggggactgcaagacccagtagttggcccctgagccttatacctccaccacagggggtgccgtgagacttcaaggcttggcccttcttgacca

SEQ ID NO: 529518 - DNA, 120 bp, Artificial Sequence
  ENSG00000166171_5 (sequence is synthesized)
cggcagcctcctgtcttctaggagctatcaagggtctctaagaactgggcatggggcactcctagccagtgagtcatggtcatatttcctgagtaaagtcattctgagttacttactgca

SEQ ID NO: 529519 - DNA, 120 bp, Artificial Sequence
  ENSG00000166171_6 (sequence is synthesized)
tcccagagggtggagggtgttaggatcaggaaggcagagcctgaagctagagtggcgagtgaggctcctccctgcggagcccgaggggcatctgcagcccgaatttattcttcgcaggga

SEQ ID NO: 529520 - DNA, 120 bp, Artificial Sequence
  ENSG00000166171_7 (sequence is synthesized)
ggtagagaggggacatctccttgcagaccgcccctccgcttggtggtcctgaggctcccgtgggcacaaggtgtggcggggctgttccatctctccctggagaggattccggccccgata

SEQ ID NO: 529521 - DNA, 120 bp, Artificial Sequence
  ENSG00000166171_8 (sequence is synthesized)
gagagatgggatgctggcaaagcactgttcccctgcttcctgcctcaggactggaacttctgaggttctccctctgagggggcccccagacctgtgctgccctctgtcaacctgctcacc

SEQ ID NO: 529522 - DNA, 120 bp, Artificial Sequence
  ENSG00000166171_9 (sequence is synthesized)
aggcggctgaagataccccggtgggaccggccatctgggaatctttgcaagtacttttgatgatgcatcagcatgaattttctgccgcttgggaaatgccttcaagatacccctgggatc

SEQ ID NO: 529523 - DNA, 120 bp, Artificial Sequence
  ENSG00000166171_10 (sequence is synthesized)
cattgaagtatggctggatcccggcctattggagcgttggtcagggctgctgcacgtggaaatccagaattgaggccctccaacccctttgcctatggagggagaaggaaggttcactat

SEQ ID NO: 529524 - DNA, 120 bp, Artificial Sequence
  ENSG00000166171_11 (sequence is synthesized)
ttattcccagacggcaaggaaatggctgaagaatatgacgagaagacgagtgaactacttgaaaggcctgagtgtggactgatgggcagacaggaggacctcacttgagccactgggccc

SEQ ID NO: 529525 - DNA, 120 bp, Artificial Sequence
  ENSG00000166171_12 (sequence is synthesized)
cagaacaaccaacaagaaatagacaccagctacctctggatgacgccttgctgagctttgcccacgccaactgcaccctgatcatctctgtaagattcacccagacttcttggacactgc

SEQ ID NO: 529526 - DNA, 120 bp, Artificial Sequence
  ENSG00000166171_13 (sequence is synthesized)
tcttcctctttccctgcccacttcccatcccataagagtcctcagttctagccccaagccctaggtaccagaagccaaaggaggttgtggtggccgagtctgagctacagaaggaactaa

SEQ ID NO: 529527 - DNA, 120 bp, Artificial Sequence
  ENSG00000166171_14 (sequence is synthesized)
gtggaccagaaggagcgctgcatcattgtcagaacaaccaacaagaataccagaagccaaaggaggttgtggtggccgagtctgagctacagaaggaactaaagaaggtgaagacagccc

SEQ ID NO: 529528 - DNA, 120 bp, Artificial Sequence
  ENSG00000166173_0 (sequence is synthesized)
gcgtgaggaccccggcggcgccgcagtcccgcgagccatggcccagtccggcggggaggctcggcccgggcccaagacggcggtgcagatccgcgtcgccatccaggaggccgaggacgt

SEQ ID NO: 529529 - DNA, 120 bp, Artificial Sequence
  ENSG00000166173_1 (sequence is synthesized)
atccgcgtcgccatccaggaggccgaggacgtggacgagttggaggacgaggaggagggggcggagactcggggcgccggggacccggcccggtacctcagccccggctggggcagcgcg

SEQ ID NO: 529530 - DNA, 120 bp, Artificial Sequence
  ENSG00000166173_2 (sequence is synthesized)
agcgaggaggagccgagccgcgggcacagtggcaccactgcaagtggaggtgagaacgagcgtgaggacctggagcaggagtggaagcccccggatgaggagttgatcaagaaactggtg

SEQ ID NO: 529531 - DNA, 120 bp, Artificial Sequence
  ENSG00000166173_3 (sequence is synthesized)
gatcagatcgaattctacttttctgatgaaaacctggagaaggacgcctttttgctaaaacacgtgaggaggaacaagctgggatatgtgagcgttaagctactcacatccttcaaaaag

SEQ ID NO: 529532 - DNA, 120 bp, Artificial Sequence
  ENSG00000166173_4 (sequence is synthesized)
gtgaaacatcttacacgggactggagaaccacagcacatgctttgaagtattcagtggtccttgagttgaatgaggaccaccggaaggtgaggaggaccacccccgtcccactgttcccc

SEQ ID NO: 529533 - DNA, 120 bp, Artificial Sequence
  ENSG00000166173_5 (sequence is synthesized)
aacgagaacctccccagcaagatgctcctggtctatgatctctacttgtctcctaagctgtgggctctggccaccccccagaagaatggaagggtgcaagagaaggtgatggaacacctg

SEQ ID NO: 529534 - DNA, 120 bp, Artificial Sequence
  ENSG00000166173_6 (sequence is synthesized)
ctcaagctttttgggacttttggagtcatctcatcagtgcggatcctcaaacctgggagagagctgccccctgacatccggaggatcagcagccgctacagccaagtggggacccaggag

SEQ ID NO: 529535 - DNA, 120 bp, Artificial Sequence
  ENSG00000166173_7 (sequence is synthesized)
tgcgccatcgtggagttcgaggaggtggaagcagccatcaaagcccatgagttcatgatcacagaatctcagggcaaagagaacatgaaagctgtcctgattggtatgaagccacccaaa

SEQ ID NO: 529536 - DNA, 120 bp, Artificial Sequence
  ENSG00000166173_8 (sequence is synthesized)
aagaaacctgccaaagacaaaaatcatgacgaggagcccactgcgagcatccacctgaacaagtccctgaacaagagagtcgaggagcttcagtacatgggtgatgagtcttctgccaac

SEQ ID NO: 529537 - DNA, 120 bp, Artificial Sequence
  ENSG00000166173_9 (sequence is synthesized)
agctcctctgaccccgagagcaaccccacatcccctatggcgggccgacggcacgcggccaccaacaagctcagcccgtctggccaccagaatctctttctgagtccaaatgcctccccg

SEQ ID NO: 529538 - DNA, 120 bp, Artificial Sequence
  ENSG00000166173_10 (sequence is synthesized)
tgcacaagtccttggagcagccccttggcccaacgcaaaggcgtttccagaaagtccccactggcggaggaaggtagactgaactgcagcaccagccctgagatcttccgcaagtgtatg

SEQ ID NO: 529539 - DNA, 120 bp, Artificial Sequence
  ENSG00000166173_11 (sequence is synthesized)
gattattcctctgacagcagcgtcactccctctggcagcccctgggtccggaggcgtcgccaagccgagatggggacccaggagaaaagccccggtacgagtcccctgctctcccggaag

SEQ ID NO: 529540 - DNA, 120 bp, Artificial Sequence
  ENSG00000166173_12 (sequence is synthesized)
atgcagactgcagatgggctacccgtaggggtgctgaggttgcccaggggtcctgacaacaccagaggatttcatggccatgagaggagcagggcctgtgtataaataccttctattttt

SEQ ID NO: 529541 - DNA, 120 bp, Artificial Sequence
  ENSG00000166173_13 (sequence is synthesized)
aatacaagctccactgaaaaccaccttcgttttcaaggttctgacaaacacctggcatgacagaatggaattcgttcccctttgagagattttttattcatgtagacctcttaatttatc

SEQ ID NO: 529542 - DNA, 120 bp, Artificial Sequence
  ENSG00000166173_14 (sequence is synthesized)
tatctgtaatatacataaatcggtacgccatggtttgaagaccaccttctagttcaggactcctgttcttcccagcatggccactattttgatgatggctgatgtgtgtgagtgtgatgg

SEQ ID NO: 529543 - DNA, 120 bp, Artificial Sequence
  ENSG00000166173_15 (sequence is synthesized)
ccctgaagggctgtaggacggaggttccctgggggaagtctgttctttggtatggaatttttctctcttctttggtatggaatttttcccttcagtgactgagctgtcctcgataggcca

SEQ ID NO: 529544 - DNA, 120 bp, Artificial Sequence
  ENSG00000166173_16 (sequence is synthesized)
tgcaagggcttcctgagagttcaggaaagttctcttgtgcaacagcaagtagctaagcctatagcatggtgtcttgtaggaccaaatcgatgttacctgtcaagtaaataaataataaaa

SEQ ID NO: 529545 - DNA, 120 bp, Artificial Sequence
  ENSG00000166173_17 (sequence is synthesized)
cacccaactgggagtgctgactttgaggttatagattgtgcctgacaaaagtctgtgcctgtctgacagagctgtgggtggtatgtcatgaggccctgaggagcttagcagagacatctt

SEQ ID NO: 529546 - DNA, 120 bp, Artificial Sequence
  ENSG00000166173_18 (sequence is synthesized)
tttttttatttgtacacatttatgggctacatgagaaactttgttacatgtttataatgcatagtgatcaagtcagggcatttagggtttctcactgtaccccagggcagccccagggct

SEQ ID NO: 529547 - DNA, 120 bp, Artificial Sequence
  ENSG00000166173_19 (sequence is synthesized)
ctccttgggcttctggcagcctgagtggtgtctcatcacagggaattttactgagcaaaggcagcttggcgtatactgagggtgtacagtccaggacccacagcattgatctcacctggg

SEQ ID NO: 529548 - DNA, 120 bp, Artificial Sequence
  ENSG00000166173_20 (sequence is synthesized)
aacttattagaaatccagattctcaggccaaccctaggcccactgaattagaaagtctgggagaaaggcctggaatttgggttttaacaaacgctgcaggtgattctgatgcacgctgga

SEQ ID NO: 529549 - DNA, 120 bp, Artificial Sequence
  ENSG00000166173_21 (sequence is synthesized)
gaaccactggatggacaaaggctgcaggacttgaggtcagtccatttgacccccaatctctcactattttgtgaccttgggaaggttactaagccccgtgaacctcatcatctccctgtg

SEQ ID NO: 529550 - DNA, 120 bp, Artificial Sequence
  ENSG00000166173_22 (sequence is synthesized)
aattgctttgttacgatgtccatgtctggaatgcagctggccctccataaatgttagctctctttccttctcacttgggttaatgtttgttatcatcaggagctgccttggtgtagcaga

SEQ ID NO: 529551 - DNA, 120 bp, Artificial Sequence
  ENSG00000166173_23 (sequence is synthesized)
aagagcattggcctagattccagtgttggcttatgctctggctatttggcaggatttaatagagcttgttaataattattgaacagtgattaggtgccagggactatgctaagagctttc

SEQ ID NO: 529552 - DNA, 120 bp, Artificial Sequence
  ENSG00000166173_24 (sequence is synthesized)
catgcattatctcatttaatctgcccaaaaactacaagagaaatgttcaggtattatctctattttattccagaaaaaaacagactttacttgggtaattaacttgtctaaggcttaaca

SEQ ID NO: 529553 - DNA, 120 bp, Artificial Sequence
  ENSG00000166173_25 (sequence is synthesized)
gctaaattggtagagttgggcttgaaactagtggtctggctttggagcccacactgtttaaccactaagtggtactcaacatttctgatctttactatccatattcaaaaaagaatccac

SEQ ID NO: 529554 - DNA, 120 bp, Artificial Sequence
  ENSG00000166173_26 (sequence is synthesized)
cataaaaggtgctaatatttattcagcaccttcctacgtgctaggcattgggttagacacatttcacttactctcagtgtccatcataaggaattattatgccagtatcacacatgcagc

SEQ ID NO: 529555 - DNA, 120 bp, Artificial Sequence
  ENSG00000166173_27 (sequence is synthesized)
tgctgaagtaggaaaataatatcccaaacttgtgaaaatggacaaagatagtatatcctaaatgatatggctctatacaaattagcaggtgattgtgatctggatagtaagatgctttgt

SEQ ID NO: 529556 - DNA, 120 bp, Artificial Sequence
  ENSG00000166173_28 (sequence is synthesized)
cccttaagatgcagaagagttcgtgttaactggcaaatgcctccagcaatgttctggatttgccatttccagcactaccagctgtaggtagcctgaaggcttgtgcctagaccaccagga

SEQ ID NO: 529557 - DNA, 120 bp, Artificial Sequence
  ENSG00000166173_29 (sequence is synthesized)
ctcctgaccttgggcaatgtcagggccccctccagccccgccctatgcttccctccctgactctgctcccatcaccccctgcctgctccttccctgcagccactccacctgctccttggc

SEQ ID NO: 529558 - DNA, 120 bp, Artificial Sequence
  ENSG00000166173_30 (sequence is synthesized)
catcgggccatctgggcttcaccagctcttcttggcctgtgacattcaaggctgttccaccctattatgcctgttacacaagtcacagctctatttttagattaaccctcgtggatcata

SEQ ID NO: 529559 - DNA, 120 bp, Artificial Sequence
  ENSG00000166173_31 (sequence is synthesized)
gttacttttaaaaatacctacaccctcacctttacatgtgaatacagatgaacttggccttcctttggtcgtattgccctgtgtgacattataaaagaaccctgaagtgggggtcagcag

SEQ ID NO: 529560 - DNA, 120 bp, Artificial Sequence
  ENSG00000166173_32 (sequence is synthesized)
atctgaggtcgagtcgtggcttttctactaagcaactgtgaccttcagcaagtcatttattttattggttcacagttcttcccacaaaccagtggataacaagaagatgttccttaaata

SEQ ID NO: 529561 - DNA, 120 bp, Artificial Sequence
  ENSG00000166173_33 (sequence is synthesized)
aggtcatatatgtgcaagtgctttctgaatggaaaagtgctttgcaggcattagtcactacttatcctgctgtctgatcatcacctccaaaggcaagcctccttttgctgcaattcttaa

SEQ ID NO: 529562 - DNA, 86 bp, Artificial Sequence
  ENSG00000166173_34 (sequence is synthesized)
tcacctccaaaggcaagcctccttttgctgcaattcttaaccctggcctcacattagagtcacctaaagagcttttaaaaactgcc

SEQ ID NO: 529563 - DNA, 120 bp, Artificial Sequence
  ENSG00000166173_35 (sequence is synthesized)
gccgcaaagtccatccctacccgccttcccctccccttgcgagtggtcccgcttacccttcactgccatcatcgccctgcctttcccagtcctgctggctgcgctcagtctttaggtggt

SEQ ID NO: 529564 - DNA, 120 bp, Artificial Sequence
  ENSG00000166173_36 (sequence is synthesized)
agcacctagcacagcacccagcacataggacatgtttgttgactgaatgcgtatctctatcatcacactcactcaatggtgttgagatatttgtgtttccccttccctagacagtgagat

SEQ ID NO: 529565 - DNA, 120 bp, Artificial Sequence
  ENSG00000166173_37 (sequence is synthesized)
ccttgaaggcagctgccttatcttattcctttttgtatttccatacctagcctaatacctagcttatataagggaacagaataaatgaacaataaagaaaagtctttacagcctctaaaa

SEQ ID NO: 529566 - DNA, 120 bp, Artificial Sequence
  ENSG00000166173_38 (sequence is synthesized)
atcatcgccctgcctttcccagtcctgctggctgcgctcagtctttaggtggtagcaggccaggtacagcggacacttgctgatgggggattccaggaggtgggatttcaagtggcacca

SEQ ID NO: 529567 - DNA, 120 bp, Artificial Sequence
  ENSG00000166173_39 (sequence is synthesized)
aactgcccagctcccgtggcttgagtctcagcaagtgttcagtctgaagcccttcctgctgcccactggcatagagttgaccccagaaaatccctggggttcttcggtgagctgacagag

SEQ ID NO: 529568 - DNA, 120 bp, Artificial Sequence
  ENSG00000166173_40 (sequence is synthesized)
cccagtgggcaggcacccagagcaggaggagatgtagccaagaacaggatccacactatcccctgtttggacccaggctcgcatggcagcagccatcacccgatgtgaatgttctcagct

SEQ ID NO: 529569 - DNA, 120 bp, Artificial Sequence
  ENSG00000166173_41 (sequence is synthesized)
cctggagcctacaggagaaaacccagattcctcaatctgctcattaagatgtgacacccactcacatcatctcctcagcccattgcctcaacagttcacgctgtcaacagttcacgctcc

SEQ ID NO: 529570 - DNA, 120 bp, Artificial Sequence
  ENSG00000166173_42 (sequence is synthesized)
attccagctagttccctgagcatagggggctattttgtgtctacatgcctctgcacccccacctctaggtcctctgattgactgatttctagtcagcctttaaaacttcgctgcctcttc

SEQ ID NO: 529571 - DNA, 120 bp, Artificial Sequence
  ENSG00000166173_43 (sequence is synthesized)
tccaccacccccaatccccaccccagagctggctgtgtttcctttcttctctgttgctgtagtactctgtacattttatgcctagcaccttccacaattgtgattctatcattgtgtctc

SEQ ID NO: 529572 - DNA, 120 bp, Artificial Sequence
  ENSG00000166181_0 (sequence is synthesized)
gcggctgcactggcggcagctggaggtgtaatagtgcgggtagtgggtttggagaagttccgaggcggcggtggcgccggtcaggacaaggatagcggaaccgggccctgggcttgtcgc

SEQ ID NO: 529573 - DNA, 120 bp, Artificial Sequence
  ENSG00000166181_1 (sequence is synthesized)
tcaccatgccgacagtagaggagctttaccgcaattatggcatcctggccgatgccacggagcaagtgggccagcataaagatgcctatcaagtgatattggatggtgtgaaaggtggta

SEQ ID NO: 529574 - DNA, 120 bp, Artificial Sequence
  ENSG00000166181_2 (sequence is synthesized)
ctaaggaaaagcgattagcagctcaatttattccgaaattctttaagcattttccagaattggctgattctgctatcaatgcacagttagacctctgtgaggatgaagatgtatctattc

SEQ ID NO: 529575 - DNA, 120 bp, Artificial Sequence
  ENSG00000166181_3 (sequence is synthesized)
gacgtcaagcaattaaagaactgcctcaatttgccactggagaaaatcttcctcgagtggcagatatactaacgcaacttttgcagacagatgactctgcagaatttaacctagtgaaca

SEQ ID NO: 529576 - DNA, 120 bp, Artificial Sequence
  ENSG00000166181_4 (sequence is synthesized)
atgccctattaagtatatttaaaatggatgcaaaagggactttaggtgggttgttcagccaaatacttcaaggagaggacattgttagagaacgagcaattaaattcctttctacaaaac

SEQ ID NO: 529577 - DNA, 120 bp, Artificial Sequence
  ENSG00000166181_5 (sequence is synthesized)
ttaagactttaccagatgaagtcttaacaaaggaagtggaagagcttatactaactgaatccaaaaaggtcctagaagatgtgactggtgaagaatttgttctatttatgaagatactgt

SEQ ID NO: 529578 - DNA, 120 bp, Artificial Sequence
  ENSG00000166181_6 (sequence is synthesized)
ctgggttaaaaagcttacagacagtgagtggaagacagcaacttgtagagttggtggctgaacaggccgacctagaacagaccttcaatccctcggatcctgactgtgtggacaggctct

SEQ ID NO: 529579 - DNA, 120 bp, Artificial Sequence
  ENSG00000166181_7 (sequence is synthesized)
tacagtgcactcggcaggcagtacccctcttctctaaaaatgtccattccacaaggtttgtgacatatttctgtgagcaggttctccctaacctcggtaccttgactaccccagtggaag

SEQ ID NO: 529580 - DNA, 120 bp, Artificial Sequence
  ENSG00000166181_8 (sequence is synthesized)
gtcttgatatacagttggaggtattgaaattgttggcggagatgagttcattttgtggtgacatggaaaaactagaaacaaatttaaggaaactatttgataagttattggaatacatgc

SEQ ID NO: 529581 - DNA, 120 bp, Artificial Sequence
  ENSG00000166181_9 (sequence is synthesized)
ccctccctccagaagaggcagaaaatggagagaatgctggtaatgaagaacccaagctacagttcagttatgtggaatgtttgttgtacagttttcaccagttgggccgaaaacttccag

SEQ ID NO: 529582 - DNA, 120 bp, Artificial Sequence
  ENSG00000166181_10 (sequence is synthesized)
atttcttaacagccaaactgaatgcagaaaagctcaaagatttcaaaatcaggctgcagtactttgcacggggcctgcaagtttatatcagacaacttcgcttagctctccagggtaaaa

SEQ ID NO: 529583 - DNA, 120 bp, Artificial Sequence
  ENSG00000166181_11 (sequence is synthesized)
cgggtgaggccttaaaaacagaagagaacaagattaaagtcgttgcattgaaaataacaaacaatatcaatgttttaatcaaggatctcttccacattcctccttcttataagagcacag

SEQ ID NO: 529584 - DNA, 120 bp, Artificial Sequence
  ENSG00000166181_12 (sequence is synthesized)
taacactatcctggaaacctgtacaaaaggttgagattgggcaaaagagagccagtgaagatacaacttcaggttcaccacccaagaaatcttcagcaggaccaaaaagagatgccaggc

SEQ ID NO: 529585 - DNA, 120 bp, Artificial Sequence
  ENSG00000166181_13 (sequence is synthesized)
agatttataaccctcccagtgggaaatatagcagcaatttgggcaactttaattatgagaggagccttcaggggaagtagaggtggccgaggttggggcacacgaggaaatcgtagtcgg

SEQ ID NO: 529586 - DNA, 120 bp, Artificial Sequence
  ENSG00000166181_14 (sequence is synthesized)
ggaagactctactgaataagacatcagcattcttcagcattgtcatgagcttaatatacttaaattctactactcattggattgccggggatgtccctttaaacagactgctgccttcag

SEQ ID NO: 529587 - DNA, 120 bp, Artificial Sequence
  ENSG00000166181_15 (sequence is synthesized)
tgacttgtttttgcagtatcattattcagacttcaaattgtgaatcttttaaacatcttgataatttgttgttgagagctgttcattctaaaatgtaatgaaattcagtctagttctgct

SEQ ID NO: 529588 - DNA, 120 bp, Artificial Sequence
  ENSG00000166181_16 (sequence is synthesized)
gataaagatcatcagttttgaaaggttactgattttcctcttccctcttagttttttacccaatatatggagaagagtaatggtcaatcttaacattttgttttaattgtttaataaagc

SEQ ID NO: 529589 - DNA, 120 bp, Artificial Sequence
  ENSG00000166181_17 (sequence is synthesized)
tgctgggcagtggtgcagcattcctacctagtgtcataaaagcaaaatacttacatagctttcttaaaatataggaatgacattacatttttaggagaaagtaagttgctttgcaccgcc

SEQ ID NO: 529590 - DNA, 120 bp, Artificial Sequence
  ENSG00000166181_18 (sequence is synthesized)
tacttaattcttttccatatattgtgatacaaacttttgaatatggaatcttactatttgaatagaaatgtgtatgtataatatacatacatacataagcatatatgtgtgtgtgtgtgt

SEQ ID NO: 529591 - DNA, 120 bp, Artificial Sequence
  ENSG00000166181_19 (sequence is synthesized)
gtatatatatatatatgcatgctgtgaaacttgactacacaacataaatcactttttaaattccaggaacgggtagtctgacacggtgattatccttttgaggctgaatccgttattaac

SEQ ID NO: 529592 - DNA, 120 bp, Artificial Sequence
  ENSG00000166181_20 (sequence is synthesized)
ttgttatttaggtttttactcccagtagcaagggattctaagttagttgcacttacatgattattgttatttaaaactaagaataaaggctgcattttcaaagataaattggaattgctg

SEQ ID NO: 529593 - DNA, 120 bp, Artificial Sequence
  ENSG00000166181_21 (sequence is synthesized)
ttggtgaaataacaaccaaaatactgaatctgatgtacatacaggtttctacaggaagagatggtataatttacaatttggagatttaataaccagggctacccagaaaaagtgacttga

SEQ ID NO: 529594 - DNA, 120 bp, Artificial Sequence
  ENSG00000166181_22 (sequence is synthesized)
taacatggtaccaataagtaagggatgctctctcggtttgcttttgccactttcaagattttaacttctcaggttattaatcaaaattattgtataagttagccaatagaatttttaggt

SEQ ID NO: 529595 - DNA, 120 bp, Artificial Sequence
  ENSG00000166181_23 (sequence is synthesized)
taaaacaacagatggggggtttgtggagtgtttaatgtcatgggcatttttagtaggatagaccctttgttctgcatttgaatgtttcgtatatttttgtttcacagttaatcttccctc

SEQ ID NO: 529596 - DNA, 120 bp, Artificial Sequence
  ENSG00000166181_24 (sequence is synthesized)
cccaagtttgctattcaaatcaactgcctgaatgacatttctagtagtctgatgtatttttctgaggaatagtttgtgattccaatgcaggtgtcttcattaccattacctctacactgc

SEQ ID NO: 529597 - DNA, 120 bp, Artificial Sequence
  ENSG00000166181_25 (sequence is synthesized)
agaagaagcaaaactcctttattagaattactgcacatgtgtatggggaaaatagttctgaaaggctagaatgatacaagtgagcaaaagttggtcagcttggctatggagtggtggcaa

SEQ ID NO: 529598 - DNA, 120 bp, Artificial Sequence
  ENSG00000166181_26 (sequence is synthesized)
taatctctaaacattccaaaagaccatgagctgaacctaaactcccttggaatctgaacaaaggaatataaaattgccatttgaaaactgaccagctaatctggacctcagagatagatc

SEQ ID NO: 529599 - DNA, 120 bp, Artificial Sequence
  ENSG00000166181_27 (sequence is synthesized)
agccagtggcccaaagccatttcaagtacagaaattatagagactacagctaaataaatttgaacattaaatataattttaccactttttgtctttataagcatatttgtaaactcagaa

SEQ ID NO: 529600 - DNA, 120 bp, Artificial Sequence
  ENSG00000166181_28 (sequence is synthesized)
ctgagcagaagtgactttactttctcaagtttgatactgagttgactgttcccttatccctcacccttccccttccctttcctaaggcaatagtgcacaacttaggttatttttgcttcc

SEQ ID NO: 529601 - DNA, 120 bp, Artificial Sequence
  ENSG00000166181_29 (sequence is synthesized)
gaatttgaatgaaaaacttaatgccatggatttttttcttttgcaagacacctgtttatcatcttgtttaaatgtaaatgtccccttatgcttttgaaataaatttccttttgtaatttt

SEQ ID NO: 529602 - DNA, 120 bp, Artificial Sequence
  ENSG00000166181_30 (sequence is synthesized)
tggagtagcaatctgatatatcagagtacacaataaaatactatggtatggtctggcatggcatcacacccaggcttaaatttacatatgataaagtgtattagcctttttcaacacctt

SEQ ID NO: 529603 - DNA, 120 bp, Artificial Sequence
  ENSG00000166181_31 (sequence is synthesized)
tatggtgagcgtttccgtttgggtacaaggaatatgagagattaggcagaaattgtgttatactttattttaattagtaattatatacagtgtcatggttctatccaatgacttttctga

SEQ ID NO: 529604 - DNA, 120 bp, Artificial Sequence
  ENSG00000166181_32 (sequence is synthesized)
attagcttggagaactagggctgttgaggaaatgatttatcccattcctctctcattcacccttctgggctgactgtattgaacatgcaacattaaacagtaagcacttaaagaaaaata

SEQ ID NO: 529605 - DNA, 120 bp, Artificial Sequence
  ENSG00000166181_33 (sequence is synthesized)
aaaagacatcaagacatcaccctagtaagacataatggcaaaaaaattgattgcaaaattgactgaaaaggtatttttcaagcctccaagattgtggatcaaaaacagcaaaaccaagct

SEQ ID NO: 529606 - DNA, 120 bp, Artificial Sequence
  ENSG00000166181_34 (sequence is synthesized)
aaaacaacttctatgtgcatgtgaccttactcattttttagctacattctaacctgtcaagggaacacagattatttgctttctttgctacatctagatttgtttagagtcaagcaatag

SEQ ID NO: 529607 - DNA, 120 bp, Artificial Sequence
  ENSG00000166181_35 (sequence is synthesized)
gaatacgcattatctatagatttaaaccaaggaattctgtaaagactgtagaggtgattctgatagaagtgtaattactctagttctatgacagaatggattatgcctcatagaagttat

SEQ ID NO: 529608 - DNA, 120 bp, Artificial Sequence
  ENSG00000166183_0 (sequence is synthesized)
agtccctgagtcccgcaggccctgcgtccccgctgcacacccccgtccactcccgtggtccccggtccggcatggcgcgcgcggtggggcccgagcggaggctgctggccgtctacaccg

SEQ ID NO: 529609 - DNA, 120 bp, Artificial Sequence
  ENSG00000166183_1 (sequence is synthesized)
gcggcaccattggcatgcggagtgagctcggcgtgcttgtgcccgggacgggcctggctgccatcctgaggacactgcccatgttccatgacgaggagcacgcccgagcccgcggcctct

SEQ ID NO: 529610 - DNA, 120 bp, Artificial Sequence
  ENSG00000166183_2 (sequence is synthesized)
ctgaggacaccctggtgctacccccggccagccgcaaccagaggattctctacaccgtgctggagtgccagcccctcttcgactccagtgacatgaccatcgctgagtgggtttgccttg

SEQ ID NO: 529611 - DNA, 120 bp, Artificial Sequence
  ENSG00000166183_3 (sequence is synthesized)
cccagaccatcaagaggcactacgagcagtaccacggctttgtggtcatccacggcaccgacaccatggcctttgctgcctcgatgctgtccttcatgctggagaacctgcagaagactg

SEQ ID NO: 529612 - DNA, 120 bp, Artificial Sequence
  ENSG00000166183_4 (sequence is synthesized)
tcatcctcactggggcccaggtgcccatccatgccctgtggagcgacggccgtgagaacctgctgggggcactgctcatggctggccagtatgtgatcccagaggtctgccttttcttcc

SEQ ID NO: 529613 - DNA, 120 bp, Artificial Sequence
  ENSG00000166183_5 (sequence is synthesized)
agaatcagctgtttcggggcaaccgggcaaccaaggtagacgctcggaggttcgcagctttctgctccccgaacctgctgcctctggccacagtgggtgctgacatcacaatcaacaggg

SEQ ID NO: 529614 - DNA, 120 bp, Artificial Sequence
  ENSG00000166183_6 (sequence is synthesized)
agctggtgcggaaggtggacgggaaggctgggctggtggtgcacagcagcatggagcaggacgtgggcctgctgcgcctctaccctgggatccctgccgccctggttcgggccttcttgc

SEQ ID NO: 529615 - DNA, 120 bp, Artificial Sequence
  ENSG00000166183_7 (sequence is synthesized)
agcctcccctgaagggcgtggtcatggagaccttcggttcagggaacggacccaccaagcccgacctgctgcaggagctgcgggtggccaccgagcgcggcctggtcatcgtcaactgta

SEQ ID NO: 529616 - DNA, 120 bp, Artificial Sequence
  ENSG00000166183_8 (sequence is synthesized)
cccactgcctccagggggctgtgaccacagactatgcagctggcatggccatggcgggagccggcgtcatctcaggcttcgacatgacatcggaggccgccctggccaagctatcgtatg

SEQ ID NO: 529617 - DNA, 120 bp, Artificial Sequence
  ENSG00000166183_9 (sequence is synthesized)
tgctgggccagccagggctgagcctggatgtcaggaaggagctgctgaccaaggaccttcggggggagatgacgccaccctcggtggaagagcgccggccctcactgcagggcaacacgc

SEQ ID NO: 529618 - DNA, 120 bp, Artificial Sequence
  ENSG00000166183_10 (sequence is synthesized)
tgggcggtggggtctcctggctcctcagtctgagcggcagccaggaggcagatgccctgcggaatgccctggtgcccagcctggcctgtgctgctgcccacgccggtgacgtggaggcgc

SEQ ID NO: 529619 - DNA, 120 bp, Artificial Sequence
  ENSG00000166183_11 (sequence is synthesized)
tgcaggcgcttgtggagctgggcagtgacctgggcctggtggactttaacggccaaaccccactgcacgcggccgcccggggaggccacacagaggcagtcaccatgctgctgcagagag

SEQ ID NO: 529620 - DNA, 120 bp, Artificial Sequence
  ENSG00000166183_12 (sequence is synthesized)
gtgtggacgtgaacacccgggacacggatggcttcagcccgctgctgctggccgtgcggggcaggcatccgggtgtcattgggttgctgcgggaagccggggcctccctgtccacccagg

SEQ ID NO: 529621 - DNA, 120 bp, Artificial Sequence
  ENSG00000166183_13 (sequence is synthesized)
agctggaggaagcagggacggagctgtgcaggctggcatacagggccgacctcgaaggcctgcaggtgtggtggcaggcaggggctgacctggggcagccgggctatgacgggcacagcg

SEQ ID NO: 529622 - DNA, 120 bp, Artificial Sequence
  ENSG00000166183_14 (sequence is synthesized)
ccctgcacgtcgcagaggcagccgggaacctggcagtggtggcctttctacagagcctggagggtgcggttggtgcccaggccccatgcccagaagtgctgcctggtgtctaacctgaag

SEQ ID NO: 529623 - DNA, 120 bp, Artificial Sequence
  ENSG00000166183_15 (sequence is synthesized)
gcgtcctgctgcagtataagccattccttcctcccatgacctgctggaggggtctcaggcatgaccccactgctggggctgcttcccagcctgctctcatgtaaagcctgaaggcctttg

SEQ ID NO: 529624 - DNA, 120 bp, Artificial Sequence
  ENSG00000166183_16 (sequence is synthesized)
ttgggcaggacggcaataaagtctctgacatcccctcaccaggtctgtacagcctggctctgagaggctctgtctgggtccgggactgtggatgtgtgtggggagtcaggcccaggctct

SEQ ID NO: 529625 - DNA, 120 bp, Artificial Sequence
  ENSG00000166183_17 (sequence is synthesized)
gtggggtctctgcgggggtcacttggcccatccttccgggggcagctgtgcgtgtgagctgggcagggtggggtgcatggacgtgacttggccaagtggtcctttcccagctgccactcc

SEQ ID NO: 529626 - DNA, 120 bp, Artificial Sequence
  ENSG00000166183_18 (sequence is synthesized)
cccttcctgccaccctgcctttgcccaggctggtccctcctccagacaccctctgcccatctccttacctcctgcgccttcattctggagcttgaagtcccctcccccaggcagccctcc

SEQ ID NO: 529627 - DNA, 120 bp, Artificial Sequence
  ENSG00000166183_19 (sequence is synthesized)
aacccctggatgagcatgctgcccctgcttaactctttagtcctcacagtcccgtcccagttgctgtctggttttctgtcaccccagtatcgctgcacccggcccccctctcaggccagg

SEQ ID NO: 529628 - DNA, 120 bp, Artificial Sequence
  ENSG00000166183_20 (sequence is synthesized)
cctgtgagtgtcaagggggcttcacactctggtggtgagcccctggggaccattccagcccctgctctgcctgaagctcctgatgcagcctccaccgtgagccaggccaccctgtaaggg

SEQ ID NO: 529629 - DNA, 120 bp, Artificial Sequence
  ENSG00000166183_21 (sequence is synthesized)
aagaggtgagctgtgcctgcctggttgcacagcctgggcaggtgggcgggtggggcgggccctgctgctgcccggtgggggtggtgctccaaggccaagggcagcctcgtgccttctttc

SEQ ID NO: 529630 - DNA, 120 bp, Artificial Sequence
  ENSG00000166183_22 (sequence is synthesized)
agctggggctgaaatcgggggtgtggacccctggcccccatcatgtgtgcatgcactggcctgggatggccagggactccctgctgctgcccccagcccctgaccccttcttgctgggtg

SEQ ID NO: 529631 - DNA, 120 bp, Artificial Sequence
  ENSG00000166183_23 (sequence is synthesized)
tgaggagcatgggggctgcctccctccaggcctctctacctgcccaggtgacggttccttttgtccctctgtttggctggcctctggactggagccccaggagggcaaaagcatgacccc

SEQ ID NO: 529632 - DNA, 120 bp, Artificial Sequence
  ENSG00000166183_24 (sequence is synthesized)
agagctggcccttggcacctgggcataccccaggctcctcagcctggttcccaagcctggctggtactgccgctggcatccttgctgtcctcaccccgacacaggtgtgcctgggccttg

SEQ ID NO: 529633 - DNA, 120 bp, Artificial Sequence
  ENSG00000166183_25 (sequence is synthesized)
cacaacaaggtgacgccatgcgagcgtggcagggccggggaagcctttgctcctcaccctggtgaggcccatgaggggctgcaggtggagggagggtggcaccgggccccagagccagga

SEQ ID NO: 529634 - DNA, 120 bp, Artificial Sequence
  ENSG00000166183_26 (sequence is synthesized)
gcccctgctgtccccggatggccgagacccttggagggccttgggagaggcggtggggcatctggacaaatgcctggtgcaggtgagaaggggtgggactacctccggcatccctgggct

SEQ ID NO: 529635 - DNA, 120 bp, Artificial Sequence
  ENSG00000166183_27 (sequence is synthesized)
gagcccacctggtctccccggttgctcctgcacacggcagtgcccacctgcttccctcagctcctgaggggctgggcagagcctgttgctcacgccaccccactcagtgctgctccgggt

SEQ ID NO: 529636 - DNA, 120 bp, Artificial Sequence
  ENSG00000166183_28 (sequence is synthesized)
tgtgaaagctgcaggtggctcacgttagcccacatggcagcaccctcccagagcaggtgccaacctgccagtgtagacacaccgactgatgccgggggtgagtgtcctgtagtgtagaaa

SEQ ID NO: 529637 - DNA, 120 bp, Artificial Sequence
  ENSG00000166183_29 (sequence is synthesized)
cgcccactcatcctgcttgtcccgcagagagcatttgtcaagctggcctttctccaactgggtcactgatggagttcggcagagacggcttgggggccacgggctgggcagatggggaga

SEQ ID NO: 529638 - DNA, 120 bp, Artificial Sequence
  ENSG00000166183_30 (sequence is synthesized)
gctcctcacaaggctgggcagccagacccccattgtcagtcccctccaaaccctcgtgggatgtagggccctaccacagggagccccgggactgggccagtgtctcaggaggctgtgaag

SEQ ID NO: 529639 - DNA, 120 bp, Artificial Sequence
  ENSG00000166183_31 (sequence is synthesized)
agtcataggcttgagtctgggagctttctcgggggccgttttgtgccccttggggagaggccagaggggccctgggtaaggggactcctctagaatcacccagaagtggcaggaggtgca

SEQ ID NO: 529640 - DNA, 120 bp, Artificial Sequence
  ENSG00000166183_32 (sequence is synthesized)
gggccactgctcggggctccctgggctctgagctgggcagtgacctggccccaaggcctctggctctctggcgtgcagtgggaacagccgggacagacaggcttggagcgttcgtgtcct

SEQ ID NO: 529641 - DNA, 120 bp, Artificial Sequence
  ENSG00000166183_33 (sequence is synthesized)
gcgccgcgttggtgtgtttcgtccccactgtgcctgtaggagggcaccgggtccccgtctatcctacttcatggctgaggaagctaaggcacagagtggccccgtcctgcgcccagggct

SEQ ID NO: 529642 - DNA, 120 bp, Artificial Sequence
  ENSG00000166183_34 (sequence is synthesized)
ctgcgttggcacagggcagagctgggctgtgaatcagggccgccttgtctcttgctgtggtgtgaggctgtgggagactcaggaatgaggcacagccaggtgcccagtgcccgtgggacc

SEQ ID NO: 529643 - DNA, 120 bp, Artificial Sequence
  ENSG00000166183_35 (sequence is synthesized)
cgcctccccacagtggggtggcgccgctcacacctggtaatttcacgctgggggaggccttggttcctatagcccatctcgaatcacctggatcccagggctatctctggggaacatctc

SEQ ID NO: 529644 - DNA, 120 bp, Artificial Sequence
  ENSG00000166183_36 (sequence is synthesized)
ctctccatcacgactactgtctttttcaccagcattttctatcctaaaatcagactcctcagctgagggccctccaggaccgcccttccccagctggaggtaaccagatttctcgtgtat

SEQ ID NO: 529645 - DNA, 120 bp, Artificial Sequence
  ENSG00000166183_37 (sequence is synthesized)
gctaggaagttccccttctggtcacacctcaatatttcctgctgctggtgggaactgcaggtgcttgtacttgtcaccttctccccgtcctctctcgtcagttcccttggatgctggaca

SEQ ID NO: 529646 - DNA, 120 bp, Artificial Sequence
  ENSG00000166183_38 (sequence is synthesized)
cgggagccacctgggcgaggggagcccatccaagtggctgtgcgtcgggaagagtctgcccaggactgggctagaccagaacttagaattaaggagtggtggccaggcttggtggctcac

SEQ ID NO: 529647 - DNA, 78 bp, Artificial Sequence
  ENSG00000166183_39 (sequence is synthesized)
gcttgagcctaggagtttgagaacagccaacatggcgaaactctgtctcttaaaaaataaataaaaacattagccagg

SEQ ID NO: 529648 - DNA, 120 bp, Artificial Sequence
  ENSG00000166183_40 (sequence is synthesized)
gcaccctctccaaaggctgccacctccaggaaggacacctggacaattcaccagctcactgctctgcccctccccgctctgcccctcccccaaatgcctggccctccccatgcaggaccc

SEQ ID NO: 529649 - DNA, 120 bp, Artificial Sequence
  ENSG00000166183_41 (sequence is synthesized)
gcacagactgggtccccttcccggggctctgagtggtgggggtgacgagagtggaggagctgctggggccctgtgtgtgtgggctggggacaggggagggcatcctggggatggggatcc

SEQ ID NO: 529650 - DNA, 120 bp, Artificial Sequence
  ENSG00000166183_42 (sequence is synthesized)
cacgtgagccatttgctcacccctgtctctaacatcccctcagcttacagggctttaggactgaccagcagtcgccttccaccagagcctgaacctctgagggtgccccgtgcctggtcc

SEQ ID NO: 529651 - DNA, 120 bp, Artificial Sequence
  ENSG00000166183_43 (sequence is synthesized)
caccttccctccccaccctcctcccacacccccagccaggctgcttcggcaagtgtgatgagggcgccccgtctagggatcctgtatatcaggagccagctggcccaggtggccttgccc

SEQ ID NO: 529652 - DNA, 120 bp, Artificial Sequence
  ENSG00000166183_44 (sequence is synthesized)
ccagcatagaggtccttccatttctcagctctgggcccagctccctgatgtcccccacagctgggggtgagctgggagttgccctcgtggtggctgaccaccacagccgccacaggcgag

SEQ ID NO: 529653 - DNA, 120 bp, Artificial Sequence
  ENSG00000166183_45 (sequence is synthesized)
cctcctgcaagcatcctctcctgcctggggatggctggtcccagcccccctcttcgagctggtgtgggaagaagactgctgggagtggcccatcctgacctacgtccttgcctctgtggg

SEQ ID NO: 529654 - DNA, 120 bp, Artificial Sequence
  ENSG00000166183_46 (sequence is synthesized)
gagctccaggtggaaggggggccgggccccgtacctgggatgctgagaacttgctatgtgcggagcccttggcgtaggggccccagctctgccagaggggaacagagcgggtcagggcat

SEQ ID NO: 529655 - DNA, 120 bp, Artificial Sequence
  ENSG00000166183_47 (sequence is synthesized)
ctggactcccagcccaggctccgcctgtccttgtgccttctcagactgcatggagacctgaggctcccctaactgtcgccaggaaatcctctcctgctctccactcttcctcgaggctgc

SEQ ID NO: 529656 - DNA, 120 bp, Artificial Sequence
  ENSG00000166183_48 (sequence is synthesized)
cttcctcgagggtggggttcagacacagctggccccagacccttgggttgccagcctctggggctggacggaggcttttggggcccctggagaccctgagctgctgctgaccaaggacct

SEQ ID NO: 529657 - DNA, 120 bp, Artificial Sequence
  ENSG00000166188_0 (sequence is synthesized)
cacagcggacctacaggcgctcagagaagcccaccttccccctctctgtcccgagaaggcttagagtggtacctgcttgctcaagcaacctgctgcctccacccagagcagccgctcctc

SEQ ID NO: 529658 - DNA, 120 bp, Artificial Sequence
  ENSG00000166188_1 (sequence is synthesized)
tcctccctcccttccggaagatgctgaggatgacagcttttagcctgactcttacatttctttggcagagcagttagaggccagactgtcctgtgaaggcttctccttccttcttcctct

SEQ ID NO: 529659 - DNA, 120 bp, Artificial Sequence
  ENSG00000166188_2 (sequence is synthesized)
gctcaggagaaaacttacaaacttttaaatgtaagaggcagatgagctgggaacctggaagtgggttgcatctgactctgaaagttcctccctctcgctggcattacctcatgctgccac

SEQ ID NO: 529660 - DNA, 120 bp, Artificial Sequence
  ENSG00000166188_3 (sequence is synthesized)
aaagtgaacggatcactggggaaggcagagtctccccggcactgctgggaccctcccttgaagagcccccatgtcctgtaggcagagccttgtagtctgtccgcttggttactgactcgg

SEQ ID NO: 529661 - DNA, 120 bp, Artificial Sequence
  ENSG00000166188_4 (sequence is synthesized)
gctgtctgaccagcccctcttctgtgccttgtctgaggtccttgtccatctctgtgattgggcagcttctctctctggattgggtcacgtgaagcgggaaactgaagccattactctcca

SEQ ID NO: 529662 - DNA, 120 bp, Artificial Sequence
  ENSG00000166188_5 (sequence is synthesized)
aaccctgtttcatcttcccaagcatgtcggaaagctggcaacagccgccacagacgcagccgcagcagccacagccaccgcagcctcagcaccatgcagagccaccgccagccctggcag

SEQ ID NO: 529663 - DNA, 120 bp, Artificial Sequence
  ENSG00000166188_6 (sequence is synthesized)
agcacacgctgcctccgggcacggcggagaaccccctgggctgtgccgtctatggcatcctcctgcagccagaccccggcctgcagcccccacaacacgcacccctgcaggcagcaggag

SEQ ID NO: 529664 - DNA, 120 bp, Artificial Sequence
  ENSG00000166188_7 (sequence is synthesized)
agccaggccccaaatgtggcgtgtgtggtcacgacctggcgcacctgtccagtccgcatgagcaccagtgtctggcgggccatgaccgctcattccagtgcacacagtgtctcaagatct

SEQ ID NO: 529665 - DNA, 120 bp, Artificial Sequence
  ENSG00000166188_8 (sequence is synthesized)
tccaccaggccactgacctgctggagcaccagtgcgtgcaggctgagcagaagcccttcgtctgtggggtctgcaagatgggcttctcactactcacctcactggcacagcaccacagct

SEQ ID NO: 529666 - DNA, 120 bp, Artificial Sequence
  ENSG00000166188_9 (sequence is synthesized)
cccacagtggcctggtgaagtgttccatctgtgaaaagacctacaagccagctgaggcagcggagccagccaccacagccgccccgtcgcttcccgcagcacccgcgccttccactgtca

SEQ ID NO: 529667 - DNA, 120 bp, Artificial Sequence
  ENSG00000166188_10 (sequence is synthesized)
cccctgctgaacaggccgacaagccctacagctgccccatctgccaaaagcccttcaagcacctgtcggagctctctcggcatgagcggatccacaccggtgagaagccctacaagtgca

SEQ ID NO: 529668 - DNA, 120 bp, Artificial Sequence
  ENSG00000166188_11 (sequence is synthesized)
cgctgtgtgacaaaagcttcagccagtcgtcgcacctggtgcaccacaagcgcacgcacagctccgagcggccctacaagtgcgcagtctgcgagaagaccttcaagcaccgctctcacc

SEQ ID NO: 529669 - DNA, 120 bp, Artificial Sequence
  ENSG00000166188_12 (sequence is synthesized)
tggtgcgccacatgtacgcgcactcgggcgagcaccacctgttccgctgcaacgtgtgcgagttgcatttcaaggagtcgtcggagctgctgcagcacccgtgcacgccaagtggggagc

SEQ ID NO: 529670 - DNA, 120 bp, Artificial Sequence
  ENSG00000166188_13 (sequence is synthesized)
ggcccttccgctgcggcgagtgccagaaggccttcaagcggccctcggacctgcggcagcatgagcgcacacacagcgccgagcggcccttcaagtgcgacctgtgccccatgggcttca

SEQ ID NO: 529671 - DNA, 120 bp, Artificial Sequence
  ENSG00000166188_14 (sequence is synthesized)
agcagcagtacgcactgatgcgccaccggcgcacacacaagaccgaggagcccttcaaatgcggcctatgtgagaagggctttgggcagcccagccacctgctctaccaccagcacgtgc

SEQ ID NO: 529672 - DNA, 120 bp, Artificial Sequence
  ENSG00000166188_15 (sequence is synthesized)
acaccctcgagactctcttcaagtgccccgtgtgccagaaaggctttgaccaatctgccgagctgctgcggcacaagtgcctgcccggcgcggccgagcggcccttcaagtgccctgtgt

SEQ ID NO: 529673 - DNA, 120 bp, Artificial Sequence
  ENSG00000166188_16 (sequence is synthesized)
gcaacaaggcctacaagcgcgcgtcggccctgcagaagcaccagctggcccactgtgcggcggcagagaagcccctgcgctgcacgctttgcgaacgccgcttcttctcctcttccgagt

SEQ ID NO: 529674 - DNA, 120 bp, Artificial Sequence
  ENSG00000166188_17 (sequence is synthesized)
cggcccgcgagaagccactcaagtgcccagactgcgagaaacgcttcaagtacgcgtcagacctgcagcggcaccggcgggtacacacaggcgagaagccctacaagtgccccaactgcg

SEQ ID NO: 529675 - DNA, 120 bp, Artificial Sequence
  ENSG00000166188_18 (sequence is synthesized)
acaaggccttcaagcagcgggagcatctcaacaagcaccagggcgtgcacgcccgcgagcagcagttcaagtgtgtatggtgcggggagcgcttcctagacgtggccttgttgcaggagc

SEQ ID NO: 529676 - DNA, 120 bp, Artificial Sequence
  ENSG00000166188_19 (sequence is synthesized)
acagcgcgcagcacagtgccgccgccgcggcagcggagggcgcctaccaggtagccgcctgcctgccctgactctgcggctgtggcccctaccagcctgacctgagtcggcgccgtgggc

SEQ ID NO: 529677 - DNA, 120 bp, Artificial Sequence
  ENSG00000166188_20 (sequence is synthesized)
ccagcaggcctcgcgcagcctagctcctcacagctgccttgcaccaagggccccacccagctcggtgttctgagacctcgggagtgaggacgcaggggtatgaggcagggagagggtgtg

SEQ ID NO: 529678 - DNA, 120 bp, Artificial Sequence
  ENSG00000166188_21 (sequence is synthesized)
ccgctcgtactcctggcaccagcgggcagtgcgggcggccagattgctgtggcccatcctgattccacaaacctctttcccatgacaagattcactttcttgagagccatcagcaccccc

SEQ ID NO: 529679 - DNA, 120 bp, Artificial Sequence
  ENSG00000166188_22 (sequence is synthesized)
cttatttccggggcactggagccaggctggaagtcaagtggcttctccctgccctaaggagggtgtgatgccagcccaaccttcccatatctttcaagctagcagccacataggttagga

SEQ ID NO: 529680 - DNA, 120 bp, Artificial Sequence
  ENSG00000166188_23 (sequence is synthesized)
aagcggaggctcatggtggggctggggccccagaggtgggctaggtgtaaggcatcagttgccgtgtgggggagaaggccagctttaagacgtaggcctggggactgggagggcagaggg

SEQ ID NO: 529681 - DNA, 120 bp, Artificial Sequence
  ENSG00000166188_24 (sequence is synthesized)
tgagtcacagccctctccgtctgctctagccaggggcgacgtgtccccaggtttctggcaggggagatgtgcagggtgggtcttggggctgggtctgcctggagaccagtgggcccaggg

SEQ ID NO: 529682 - DNA, 120 bp, Artificial Sequence
  ENSG00000166188_25 (sequence is synthesized)
ggaagggggaagctgagaagttcgtgtgacaccctcagccaagggacagtgccatccttggggacaggaggaaaagcagcctgtctctgctaagggcaaatcctccggttttggaagcgc

SEQ ID NO: 529683 - DNA, 120 bp, Artificial Sequence
  ENSG00000166188_26 (sequence is synthesized)
ccctcccacctttgtagtgcagttcctaggtgtggtggggaatgtgccgtgctctcagcagacagaactgctggtgtgaaaggcagggattgtcagcccacctgaggctgggaggaagca

SEQ ID NO: 529684 - DNA, 120 bp, Artificial Sequence
  ENSG00000166188_27 (sequence is synthesized)
ggaccaggcctaggatctccccagcagatgcaaacaagtgtcctcccctgaattgtgtgaaccaaagcgtcaggggcttggggcacagccccagtcagctcaacccagtcctgcttcaga

SEQ ID NO: 529685 - DNA, 120 bp, Artificial Sequence
  ENSG00000166188_28 (sequence is synthesized)
gccaagactaggccagggtggggacccccccagtaccctccctacatcaatgtggctgctggcctggaccccaggggtctggtacagccaagatgttctggacaacatccagctacttca

SEQ ID NO: 529686 - DNA, 120 bp, Artificial Sequence
  ENSG00000166188_29 (sequence is synthesized)
aaggccagagtgtcctttgggtcctcctagagtccccctaggtctctggctgcccatgaggctcatgaagcagagggtatcccagtcatagggagcagaaagagcaagtgggttaaggaa

SEQ ID NO: 529687 - DNA, 120 bp, Artificial Sequence
  ENSG00000166188_30 (sequence is synthesized)
gcctgtgggggacctggtggatggagttgaccaacatcgctgggtggctacggccctccttaggaagcccagaaggacctttattattaaaataatcattttgaaccctgctctatcccc

SEQ ID NO: 529688 - DNA, 120 bp, Artificial Sequence
  ENSG00000166188_31 (sequence is synthesized)
tgccctcttccagccccacccctccctggtcttgaaagaagactaatcagtgggcacaccaagggccctgaggggcagggagatgccaccatgcttctctgtcaccgtaagaaggctgac

SEQ ID NO: 529689 - DNA, 120 bp, Artificial Sequence
  ENSG00000166188_32 (sequence is synthesized)
cagccacgcccacctcctctgtctgactgagttccttcctgtggccacagggaggggctggtccttcccctcggtgctggctctctgtcacaatgcctcaaaagacatggaacccaggcc

SEQ ID NO: 529690 - DNA, 120 bp, Artificial Sequence
  ENSG00000166188_33 (sequence is synthesized)
tacaaccgtcccaactgctaattcttttcctttcattttgctttctgaaagcagtttgttatactattcataacattgtagagtttaatttcatgtcattttggatcttatataaaaatg

SEQ ID NO: 529691 - DNA, 120 bp, Artificial Sequence
  ENSG00000166188_34 (sequence is synthesized)
tgaggatttggatttttaaaaagaatgactccattttaggtagccacttttgatgttaatatatagtgagtccaatgtatgctttagaagtaaagacattgaccgtcacagaccactgca

SEQ ID NO: 529692 - DNA, 120 bp, Artificial Sequence
  ENSG00000166189_0 (sequence is synthesized)
gctccgctcccccgagaatcgggcctcgccctgctgggcggctggacctgggcaaagcctgggcgcgctcccgcgcagcggcgccatgaagcgctcggggactctgcggctgctctcgga

SEQ ID NO: 529693 - DNA, 120 bp, Artificial Sequence
  ENSG00000166189_1 (sequence is synthesized)
cctgagcgccttcggcggcgcggcgcggctccgggagctggtggccggggactcagcggtccgagtccgtggcagtccggacggccgccacttgctgctcctgcgaccccctggggcggt

SEQ ID NO: 529694 - DNA, 120 bp, Artificial Sequence
  ENSG00000166189_2 (sequence is synthesized)
cggtagccccacagctgctagtcgcgtcgcgagggcccggcgcggagctagagcgggcctggccggccggccagccctccccgctggacgccttcttcctgccgtggccagcgcggccgg

SEQ ID NO: 529695 - DNA, 120 bp, Artificial Sequence
  ENSG00000166189_3 (sequence is synthesized)
ggtgctggtgtgggagagtggcctggccgaggtgtggggcgcgggcgtggggcctggctggcggccgctgcagagcaccgagctgtgtccgggcgggggagcccgcgttgtggcagtggc

SEQ ID NO: 529696 - DNA, 120 bp, Artificial Sequence
  ENSG00000166189_4 (sequence is synthesized)
ggcgctccgaggccgcctggtgtggtgcgaggagcggcaggcccgggccgagggcccgtcagggtcgccagcagccgctttcagccactgtgtgtgcgtccggactctggagcccagcgg

SEQ ID NO: 529697 - DNA, 120 bp, Artificial Sequence
  ENSG00000166189_5 (sequence is synthesized)
ggaagctagcaccagcctgggccgcacacacgtcctgctgcaccactgccctgccttcgggctgctggcctcctgcagacaactcttcctggtgcccactgccaccacctggcctggcgt

SEQ ID NO: 529698 - DNA, 120 bp, Artificial Sequence
  ENSG00000166189_6 (sequence is synthesized)
ggcccacgttctactcatctggagcccaggcaagggcaaagtgatggtggctgccccacggcttggtctctcctacagtaagagtctgaatcctggacgaggggacacatgggacttccg

SEQ ID NO: 529699 - DNA, 120 bp, Artificial Sequence
  ENSG00000166189_7 (sequence is synthesized)
gaccctgctccgaggccttcctgggttgctgtcccccagggagccactggctgtacacacctgggccccaactccccagggcctgctgttgcttgacttcgggggcactgtgagcctatt

SEQ ID NO: 529700 - DNA, 120 bp, Artificial Sequence
  ENSG00000166189_8 (sequence is synthesized)
gcagtcccacggtggtacgcgggctgtgggcaccctgcaggaggcacctgtaggcccgtgggggtctgcagccctaggcacatttcagggcactctggcctgtgtgctgggctccacatt

SEQ ID NO: 529701 - DNA, 120 bp, Artificial Sequence
  ENSG00000166189_9 (sequence is synthesized)
ggaactgctggacatgggcagtgggcagctgctggagaggaaggtcctaagtacagacagggtacatctgctagaaccgccagcccccggcatggaggatgaggaagagctggagacccg

SEQ ID NO: 529702 - DNA, 120 bp, Artificial Sequence
  ENSG00000166189_10 (sequence is synthesized)
agggaatcttcgtctgctttcagccttgggtctgttttgtgtgggctgggaagccccacagggtgttgagttgccttcagccaaggatctggtgtttgaggaggcctgcgggtactacca

SEQ ID NO: 529703 - DNA, 120 bp, Artificial Sequence
  ENSG00000166189_11 (sequence is synthesized)
cctgcggggtgcccagctcactccagaagaactgagacacagcagcacattccgggcacctcaggctctggcctccatcctccagggccacctgcccccatctgcactgctgaccatgtt

SEQ ID NO: 529704 - DNA, 120 bp, Artificial Sequence
  ENSG00000166189_12 (sequence is synthesized)
gaggaccgagcttcgggattaccgaggcttagaacagctgaaggcccagctggtggctggggatgatgaggaggctggttggactgagctggcggagcaggaagtggcacgcctgctgag

SEQ ID NO: 529705 - DNA, 120 bp, Artificial Sequence
  ENSG00000166189_13 (sequence is synthesized)
gactgagttgataggagaccagctagcccagctcaacaccgttttccaagcccttcctacagcagcctggggtgccaccctcagggccctgcagctccagctagatgggaatggcaagct

SEQ ID NO: 529706 - DNA, 120 bp, Artificial Sequence
  ENSG00000166189_14 (sequence is synthesized)
gaggtcccaagcaccccctgatgtgtggaagaaagtgttagggggaataaccgctggaaaggaaccccccaatggaatactgcccccctttgaactcctgtgccagtgtctgtgccagct

SEQ ID NO: 529707 - DNA, 120 bp, Artificial Sequence
  ENSG00000166189_15 (sequence is synthesized)
ggagcctcgatggctgccaccctttgtggagctggcacagcagcagggcgggccgggctggggggcagggggcccaggactgcccctgtatcgccgagctctggcagtgctaggtgagga

SEQ ID NO: 529708 - DNA, 120 bp, Artificial Sequence
  ENSG00000166189_16 (sequence is synthesized)
ggggaccaggcctgaggctctggagctagagctgctcttgagcagtgggcggcctaaagctgtgctccaagctgtcgggcagctggtgcaaaaggaacaatgggatcgggctctggatgc

SEQ ID NO: 529709 - DNA, 120 bp, Artificial Sequence
  ENSG00000166189_17 (sequence is synthesized)
tggcctggccctcggcccctccagtcccctgcttcgaagtgaaatcttcaaactgctgctggccgagtttgcccagcaccgccggcttgatgctcacctccccctcctttgccgcctgtg

SEQ ID NO: 529710 - DNA, 120 bp, Artificial Sequence
  ENSG00000166189_18 (sequence is synthesized)
cccaccagaactggctccagctgagctcctgcttctactgaggacatacctcccagatgaggtggggcccccaaccccattccctgagcctggagcagagccccctctcactgtgggctt

SEQ ID NO: 529711 - DNA, 120 bp, Artificial Sequence
  ENSG00000166189_19 (sequence is synthesized)
gctcaaagccctgctggagcagactggggctcaaggatggctgtcgggcccagttctaagcccatatgaggacatcctatgggaccccagcactccacccccgactccacctcgggacct

SEQ ID NO: 529712 - DNA, 120 bp, Artificial Sequence
  ENSG00000166189_20 (sequence is synthesized)
atgactacccttcaggcatcagaacactcagggcctggaggcttgcttgggactggaggcttgcttggacagttcctctgtgtcactgacacaggaaatcatttctaggacacagtgatc

SEQ ID NO: 529713 - DNA, 120 bp, Artificial Sequence
  ENSG00000166189_21 (sequence is synthesized)
agggaagggtgcctgggacttggagggtcccatgtatggacctgtgtatgcaatactgttctgtcatctggagctatttttaagatgtgtgtgttaaatatatacatagtttaatatata

SEQ ID NO: 529714 - DNA, 120 bp, Artificial Sequence
  ENSG00000166192_0 (sequence is synthesized)
gtcgctttccggccaacacagaggtgcctgaaggctggttggggtggtgaggcccgaggcagctcttgttcagcttctggaatttctgagcagccctcgtcagtacaagatggaccccgt

SEQ ID NO: 529715 - DNA, 120 bp, Artificial Sequence
  ENSG00000166192_1 (sequence is synthesized)
agtcttgagttacatggacagtctactgcggcaatcagatgtctcactattggatccgccaagctggctcaatgaccatattattgggtttgcgtttgagtactttgccaacagtcagtt

SEQ ID NO: 529716 - DNA, 120 bp, Artificial Sequence
  ENSG00000166192_2 (sequence is synthesized)
tcatgactgctctgatcacgtcagtttcatcagccctgaagtcacccagttcatcaagtgcactagcaacccagcagagattgccatgttccttgaaccactggacctccccaacaagag

SEQ ID NO: 529717 - DNA, 120 bp, Artificial Sequence
  ENSG00000166192_3 (sequence is synthesized)
agttgtatttttagccatcaatgataactccaaccaggcagctggaggaacccactggagtttattggtctacctccaagataaaaatagcttttttcattatgattcccatagcaggag

SEQ ID NO: 529718 - DNA, 120 bp, Artificial Sequence
  ENSG00000166192_4 (sequence is synthesized)
caactcagttcacgcaaagcaggtagcagagaaactggaggctttcttaggcagaaaaggagacaaactggcctttgtggaagagaaagcccctgcccaacaaaacagctatgactgtgg

SEQ ID NO: 529719 - DNA, 120 bp, Artificial Sequence
  ENSG00000166192_5 (sequence is synthesized)
gatgtacgtgatatgtaacactgaggccttgtgtcagaacttctttaggcaacagacagaatcactgctgcagctactcacccctgcatacatcacaaagaagaggggagaatggaaaga

SEQ ID NO: 529720 - DNA, 120 bp, Artificial Sequence
  ENSG00000166192_6 (sequence is synthesized)
tctcattaccacacttgctaaaaagtagctattgaagtatatttgcgacttttgaaggctcctctttctgcccttccccatttgttggatggctgcaatctcagtgcctgagggaagatg

SEQ ID NO: 529721 - DNA, 120 bp, Artificial Sequence
  ENSG00000166192_7 (sequence is synthesized)
cctagtagaggaaagcttaatactctttttcctgaaagaatatcatcctctgcattatccccatggaacgtttcactttaaccctgactggggagcaatatgttctgtgaaaatatcttg

SEQ ID NO: 529722 - DNA, 120 bp, Artificial Sequence
  ENSG00000166192_8 (sequence is synthesized)
aaattgtacaccaaaaccttacaaccaacttatttgaacatttattacacacagggtttacgtaagacttttcttattggtatataattaatttcctttggtctcccttatccacattgg

SEQ ID NO: 529723 - DNA, 120 bp, Artificial Sequence
  ENSG00000166192_9 (sequence is synthesized)
cttattctggaggaaaagcagtgatctgtaaaacaaatcaagaatatattaaatctagaggaatgcagagaagaaaactataaaacagaaccaaaaacttgttgcacagcctacataatt

SEQ ID NO: 529724 - DNA, 120 bp, Artificial Sequence
  ENSG00000166192_10 (sequence is synthesized)
aagagatcaactggctggaagcagatcaaggcctaacttcattcaagacctaaatattatgagactcagttattcggttttatgtgacatctcttccattcaccatgcacaggcttttcc

SEQ ID NO: 529725 - DNA, 120 bp, Artificial Sequence
  ENSG00000166192_11 (sequence is synthesized)
agctatctatataatgtttgcaaatatttgataaagatgatgttaccctatcttcctccatctgattcctggaatgcttgaagaaaggggaaatcttgagtaacctcattaaaattaatg

SEQ ID NO: 529726 - DNA, 120 bp, Artificial Sequence
  ENSG00000166192_12 (sequence is synthesized)
tctggtggacctctcagtttgctcactgattgggtagacttgctactctggattaataactgcttttctctgccttgtctattagccatgcacacacttcctccttatatccaaagttct

SEQ ID NO: 529727 - DNA, 120 bp, Artificial Sequence
  ENSG00000166192_13 (sequence is synthesized)
ttggttctaaaattcatagttgataccttcccaaggttacctgttgtttcagataaacatttgttcttcctgatagttataggttttcctctctgtccttaattctggcagaattgtttt

SEQ ID NO: 529728 - DNA, 120 bp, Artificial Sequence
  ENSG00000166192_14 (sequence is synthesized)
tagttatgtcatggtaatttcaggatgatttttgtatctgaaacttaacagacttagagttggtttgttttttaaatataaaggaagaaaagtgacctttctcagcccttttacttaatt

SEQ ID NO: 529729 - DNA, 120 bp, Artificial Sequence
  ENSG00000166192_15 (sequence is synthesized)
aaaaatgcagggaatgtaatttgtaaaatgtggaaccaagagtagaacgaaatactatccctccagaagcactgatgtgtttcagttgtttcaaatagtaaacaaccagatgacatgtta

SEQ ID NO: 529730 - DNA, 120 bp, Artificial Sequence
  ENSG00000166192_16 (sequence is synthesized)
ggtacacaaattaattctattcctaatgagaattagattgcaaggcctatgagacttgaaaaccaaagatgagcttcagccatgaaacttatttcagctacctccccagcctaaccctgc

SEQ ID NO: 529731 - DNA, 120 bp, Artificial Sequence
  ENSG00000166192_17 (sequence is synthesized)
aataagtacaggttacatagcaggcctgagtgagcaggagctgaaactaaaagtcaaagagaaagctatcaaaaaaagtttccatttcaagtcggtacattttggataaaaaccagtcct

SEQ ID NO: 529732 - DNA, 120 bp, Artificial Sequence
  ENSG00000166192_18 (sequence is synthesized)
aatggaagatggggctaggaaaaagattaggaactggcagtcatccatagaggtgaaatacagagggagggacagcaagagaagtgacaaaggtcactgatgataggccacaagtgtaga

SEQ ID NO: 529733 - DNA, 120 bp, Artificial Sequence
  ENSG00000166192_19 (sequence is synthesized)
taaagataagaaaacaatgttatttcagtgactgttgacttaggcagctaatctagactattaaagtcaaatcctctctgggaaaagttatctttctgacaatgcaaagtatgtttattt

SEQ ID NO: 529734 - DNA, 120 bp, Artificial Sequence
  ENSG00000166192_20 (sequence is synthesized)
aaatatcagagtatcttcaatctgagaattaaagcatatgaaagcaatctttcctaactccctacgattcatcttataagtaaatttataagtaaatttttaaactacactagtctttta

SEQ ID NO: 529735 - DNA, 120 bp, Artificial Sequence
  ENSG00000166192_21 (sequence is synthesized)
aatatatatagaaaaatatatatacacacgtatagacatgtatatgtaatctatctacatatatataaaaaatgcattttccaaatgcattagcctgattggactgtgccacagattagt

SEQ ID NO: 529736 - DNA, 120 bp, Artificial Sequence
  ENSG00000166192_22 (sequence is synthesized)
gtcctcctatgaaattttgagtatgtcatttgtaaatgttagcattataaattgcaggagaatttaagaattgacttgtatttcactggatactatagtacccggtaagttacacacctg

SEQ ID NO: 529737 - DNA, 120 bp, Artificial Sequence
  ENSG00000166192_23 (sequence is synthesized)
cttgaccacataccattcatgttacatgacacaaaataggaaaaaatcttttgctggtattgcgttcccttctctcttagagtcaaaaggatctattctgcaaaattaatcaaaatattc

SEQ ID NO: 529738 - DNA, 120 bp, Artificial Sequence
  ENSG00000166192_24 (sequence is synthesized)
aaaaggaaggcaggtttttcaaaactgggctaagcaattatcaaactgaactaacctgctttcagatatcctgttgtattgcccggtaagtatagtcacacttgtccaacccgtgtctca

SEQ ID NO: 529739 - DNA, 120 bp, Artificial Sequence
  ENSG00000166192_25 (sequence is synthesized)
atatggaattcagaaaagttaccatatataaacccagctataaatggttgtagaaaatataagtatcagtgggtttcctatgtaatagtgtttaaaacacaaatatttcaaccatttggc

SEQ ID NO: 529740 - DNA, 120 bp, Artificial Sequence
  ENSG00000166192_26 (sequence is synthesized)
aaggtatatgttgaagttcacaagcgctggtcctaaccagatcagataaagtggattatgtttctgatatgtacctaattattttgactatactataattttacaatatgcatattgacc

SEQ ID NO: 529741 - DNA, 120 bp, Artificial Sequence
  ENSG00000166192_27 (sequence is synthesized)
tatactataattttacaatatgcatattgaccgtatgttttaataacacattccattgaaatgaccaagtagaatttctcagttacatggggcaggccgggcgcaatggctcatgcctgt

SEQ ID NO: 529742 - DNA, 120 bp, Artificial Sequence
  ENSG00000166192_28 (sequence is synthesized)
aagtatttacagaaatgtacatgctatggtgttagagcatgaatgtcaaatccagggtctgtcagattcagtagtctcatctacaaaataaaccttgttttccttctgtcctactcagtt

SEQ ID NO: 529743 - DNA, 120 bp, Artificial Sequence
  ENSG00000166192_29 (sequence is synthesized)
ccattttaagactaacaacaagtttgaaaacttagttttatattgctatgcagctaaacagctgtgtaaaaaatggctgataattactgttatgtacaaaagagaaacttattcaaggat

SEQ ID NO: 529744 - DNA, 120 bp, Artificial Sequence
  ENSG00000166192_30 (sequence is synthesized)
ggtgaatagcaacaactaacctttttatcactctgtaatgtgcagggtactttatgcacacatattacacaagtaccttgcatattatatatgcatcattatatatattaccatatatat

SEQ ID NO: 529745 - DNA, 120 bp, Artificial Sequence
  ENSG00000166192_31 (sequence is synthesized)
aaagtaacttgtacatttttgaggttctatagaaatatataatctcattaattcttatgttctcatgtttcaacaggtactgttattctcattttataaataaactcagaagctcagtca

SEQ ID NO: 529746 - DNA, 120 bp, Artificial Sequence
  ENSG00000166192_32 (sequence is synthesized)
acttactccaacagcagtcaagagaatgaacaggagggcatgacaagaggcagaagacagaaggcaagaagaccactcagcattacagaagcccaacaaacagatattttcagttaaaat

SEQ ID NO: 529747 - DNA, 120 bp, Artificial Sequence
  ENSG00000166192_33 (sequence is synthesized)
aagatagaggcaacaaaaagtaataaggaatgacctgaaatatcatgagggaaaatgtacaaggcagtgacagactggatgttggcagtgaagtacagagtgaagcggagggcaattccc

SEQ ID NO: 529748 - DNA, 120 bp, Artificial Sequence
  ENSG00000166192_34 (sequence is synthesized)
acttttttcagcccaacccctccaaacatgggtctcggtcggtccccttaagccacaatggagggaatacattaggctaagcaaatattccctcaggatttcatggcaaagccctttcaa

SEQ ID NO: 529749 - DNA, 120 bp, Artificial Sequence
  ENSG00000166192_35 (sequence is synthesized)
ccaaagaaaggatcgcgactaaggagaaagataacaagtggaaatggatcgtcataaaggtcttcatcctcatcatcatgttgagtaggctgaagaggaggaggaaaaggagcaattggt

SEQ ID NO: 529750 - DNA, 120 bp, Artificial Sequence
  ENSG00000166192_36 (sequence is synthesized)
tcagctttagattctccctgtactggaaagggatgtcgcaaggttggggacgaaacctctgagtttgcgaccgtagctgtcgctttccggccaacacagaggtgcctgaaggctggttgg

SEQ ID NO: 529751 - DNA, 120 bp, Artificial Sequence
  ENSG00000166197_0 (sequence is synthesized)
gcggccggtgggctccgcccttaaccaagatggcgatacgcgtgggaccggaaagagtttatagatttcccgtctaccctacctctgaggtgaaggtgggactgccctgtggagcccacc

SEQ ID NO: 529752 - DNA, 120 bp, Artificial Sequence
  ENSG00000166197_1 (sequence is synthesized)
ctttccgttatgcgcccgcgcggcgcaatgacgtaacacaggcccgcccactgcccctgttgggttcctgagtcgtgctgcgtcgacaacggtagtgacgcgtattgcctggaggatggc

SEQ ID NO: 529753 - DNA, 120 bp, Artificial Sequence
  ENSG00000166197_2 (sequence is synthesized)
ggacgccggcattcgccgcgtggttcccagcgacctgtatcccctcgtgctcggcttcctgcgcgataaccaactctcagaggtggccaataagttcgccaaagcgacaggagctacaca

SEQ ID NO: 529754 - DNA, 120 bp, Artificial Sequence
  ENSG00000166197_3 (sequence is synthesized)
gcaggatgccaatgcctcttccctcttagacatctatagcttctggctcaagtctgccaaggtcccagagcgaaagttacaggcaaatggaccagtggctaagaaagctaagaagaaggc

SEQ ID NO: 529755 - DNA, 120 bp, Artificial Sequence
  ENSG00000166197_4 (sequence is synthesized)
ctcatccagtgacagtgaggacagcagcgaggaggaggaggaagttcaagggcctccagcaaagaaggctgctgtacctgccaagcgagtcggtctgcctcctgggaaggctgcagccaa

SEQ ID NO: 529756 - DNA, 120 bp, Artificial Sequence
  ENSG00000166197_5 (sequence is synthesized)
agcatcagagagtagcagcagtgaagagtccagtgatgatgatgatgaggaggaccaaaagaaacagcctgtccagaagggagttaagccccaagccaaggcagccaaagctcctcctaa

SEQ ID NO: 529757 - DNA, 120 bp, Artificial Sequence
  ENSG00000166197_6 (sequence is synthesized)
gaaggccaagagctctgattctgattctgactcaagctccgaggatgagccaccaaagaaccagaagccaaagataacacctgtgacagttaaagctcagactaaagcccctcccaaacc

SEQ ID NO: 529758 - DNA, 120 bp, Artificial Sequence
  ENSG00000166197_7 (sequence is synthesized)
agctcgagcagcacctaaaatagccaatggtaaagcagccagtagcagcagtagcagcagcagcagcagtagcagtgatgactcagaggaggagaaggcagcagccacccccaagaagac

SEQ ID NO: 529759 - DNA, 120 bp, Artificial Sequence
  ENSG00000166197_8 (sequence is synthesized)
tgtacctaaaaagcaagttgtggccaaggccccagtgaaagcagctaccacccctacccggaagagttctagcagtgaggattcctccagtgacgaggaagaggagcaaaaaaaacccat

SEQ ID NO: 529760 - DNA, 120 bp, Artificial Sequence
  ENSG00000166197_9 (sequence is synthesized)
gaaaaataaaccaggtccctacagttcagtccccccgccttctgctcccccaccaaagaagtctctgggaacccagcctcccaagaaggctgtggagaagcagcagcctgtggaaagcag

SEQ ID NO: 529761 - DNA, 120 bp, Artificial Sequence
  ENSG00000166197_10 (sequence is synthesized)
tgaagacagcagtgatgagtctgattcaagttctgaagaagagaagaaacccccaactaaggcagtagtctctaaagcaaccactaaaccacctccagcaaagaaagcagcagagagctc

SEQ ID NO: 529762 - DNA, 120 bp, Artificial Sequence
  ENSG00000166197_11 (sequence is synthesized)
ttcagacagctcagactctgacagctctgaggatgatgaagctccttctaagccagctggtaccaccaagaattcttcaaataagccagctgtcaccaccaagtcacctgcagtgaagcc

SEQ ID NO: 529763 - DNA, 120 bp, Artificial Sequence
  ENSG00000166197_12 (sequence is synthesized)
agctgcagcccccaagcaacctgtgggcggtggccagaagcttctgacgagaaaggctgacagcagctccagtgaggaagagagcagctccagtgaggaggagaagacaaagaagatggt

SEQ ID NO: 529764 - DNA, 120 bp, Artificial Sequence
  ENSG00000166197_13 (sequence is synthesized)
ggccaccactaagcccaaggcgactgccaaagcagctctatctctgcctgccaagcaggctcctcagggtagtagggacagcagctctgattcagacagctccagcagtgaggaggagga

SEQ ID NO: 529765 - DNA, 120 bp, Artificial Sequence
  ENSG00000166197_14 (sequence is synthesized)
agagaagacatctaagtctgcagttaagaagaagccacagaaggtagcaggaggtgcagccccttccaagccagcctctgcaaagaaaggaaaggctgagagcagcaacagttcttcttc

SEQ ID NO: 529766 - DNA, 120 bp, Artificial Sequence
  ENSG00000166197_15 (sequence is synthesized)
tgatgactccagtgaggaagaggaagagaagctcaagggcaagggctctccaagaccacaagcccccaaggccaatggcacctctgcactgactgcccagaatggaaaagcagctaagaa

SEQ ID NO: 529767 - DNA, 120 bp, Artificial Sequence
  ENSG00000166197_16 (sequence is synthesized)
aggaggcagagactcctcaggccaagaagataaagcttcagacccctaacacatttccaaaaaggaagaaaggagaaaaaagggcatcatccccattccgaagggtcagggaggaggaaa

SEQ ID NO: 529768 - DNA, 120 bp, Artificial Sequence
  ENSG00000166197_17 (sequence is synthesized)
ttgaggtggattcacgagttgcggacaactcctttgatgccaagcgaggtgcagccggagactggggagagcgagccaatcaggttttgaagttcaccaaaggcaagtcctttcggcatg

SEQ ID NO: 529769 - DNA, 120 bp, Artificial Sequence
  ENSG00000166197_18 (sequence is synthesized)
agaaaaccaagaagaagcggggcagctaccggggaggctcaatctctgtccaggtcaattctattaagtttgacagcgagtgacctgaggccatcttcggtgaagcaagggtgatgatcg

SEQ ID NO: 529770 - DNA, 120 bp, Artificial Sequence
  ENSG00000166197_19 (sequence is synthesized)
gagactacttactttctccagtggacctgggaaccctcaggtctctaggtgagggtcttgatgaggacagaagtttagagtaggtcctaagactttacagtgtaacatcctctctggtcc

SEQ ID NO: 529771 - DNA, 120 bp, Artificial Sequence
  ENSG00000166197_20 (sequence is synthesized)
ttttctgtgttcctagttttgtacagacttgtttttgagtgttgagtagcagggacaaaataagggaatgttattttttaagaaaattcattttcattgttgtctccttccttttctgtg

SEQ ID NO: 529772 - DNA, 120 bp, Artificial Sequence
  ENSG00000166197_21 (sequence is synthesized)
aaagtcctcatactgagaaatttgtatattttatattaaatcacttactattgatttttgttgtgattttcaaaggtggattcccacagataaaatcttggctattgcccaaaacatagt

SEQ ID NO: 529773 - DNA, 120 bp, Artificial Sequence
  ENSG00000166197_22 (sequence is synthesized)
aaagggtcacgtgtgactttttataataggaagaaaattctgcctttgtgagtgcacatgtccacatttcatccctccttccctcaaaaccctagagaggggcattaaagaattgttgat

SEQ ID NO: 529774 - DNA, 120 bp, Artificial Sequence
  ENSG00000166197_23 (sequence is synthesized)
gtatatgcaatgtctgttaagcatgcactatgtatttcatcctcatttattgggtctgggactgaagtttttagccagcatggacctaacctactttttgggataaaattctctgttttg

SEQ ID NO: 529775 - DNA, 120 bp, Artificial Sequence
  ENSG00000166197_24 (sequence is synthesized)
ttacaggcaaaattctggtatggcgtgaatgccatgggtcattctgaatatatttttttctgtaattttatcattacacgatgtttgcaatacgtgctttgttttttaatttgaaagcaa

SEQ ID NO: 529776 - DNA, 120 bp, Artificial Sequence
  ENSG00000166197_25 (sequence is synthesized)
acttttctactgttgaaagacattttttgacaacttgacccttcctagtattgagttctaagttgaggactgcatcttctcgttttttacagtatagagaacaaaatgacatgagtttga

SEQ ID NO: 529777 - DNA, 120 bp, Artificial Sequence
  ENSG00000166197_26 (sequence is synthesized)
aaaatacatatcacttggtattgctgtcttggttgcagtggtgatacagaattggtttcattaattcctacatggttgagaatcactgatcaagaaagtggggggaaaaaaaacaaacgt

SEQ ID NO: 529778 - DNA, 120 bp, Artificial Sequence
  ENSG00000166197_27 (sequence is synthesized)
taaaacctcaatcctcagtaggaaggtagattacattaggtgaaattataggtaatctatgtatgtgctaatggggttggaaagaaccttacagagcatattacctgataaactggagtg

SEQ ID NO: 529779 - DNA, 120 bp, Artificial Sequence
  ENSG00000166197_28 (sequence is synthesized)
ggtttgggagaacaaactaataggattattgtgtctcctagttggtacctgggagcaattgacatgcccccttcagaaccttaactgttagtagcagtggctgtaacaacacaaaccagt

SEQ ID NO: 529780 - DNA, 120 bp, Artificial Sequence
  ENSG00000166197_29 (sequence is synthesized)
gaccagagataacagcttttaggccaagctggcctgacggtatggctgcaggaagtgactgagcagtagcggtactcagccagaccaagacggagagggaagagtccacagctttctgga

SEQ ID NO: 529781 - DNA, 120 bp, Artificial Sequence
  ENSG00000166197_30 (sequence is synthesized)
agctaaggcattctggtggtagaaaagtgtgccccaagccttcatggacgagttataggtcttaagattagtctcctcttgtttggattccatacttgctaaataacctgataataacct

SEQ ID NO: 529782 - DNA, 120 bp, Artificial Sequence
  ENSG00000166197_31 (sequence is synthesized)
ggttttccatgtaactgcctctaggaagaaaatgtactgttcatgctgacacagatatttcagtctgcatggtaaaagttctaaatcttactacaaaataataaactggctggtttataa

SEQ ID NO: 529783 - DNA, 120 bp, Artificial Sequence
  ENSG00000166197_32 (sequence is synthesized)
gtgatgagtctgactctgacagctctgaggatgatgaagctccttctaagccagctggtaccaccaagaattcttcaaataagccagctgtcaccaccaagtcacctgcagtgaagccag

SEQ ID NO: 529784 - DNA, 120 bp, Artificial Sequence
  ENSG00000166197_33 (sequence is synthesized)
ggcggacgccggcattcgccgcgtggttcccagcgacctgtatcccctcgtgctcggcttcctgcgcgataaccaactctcagaggtggccaataagttcgccaaagcgacaggagctgt

SEQ ID NO: 529785 - DNA, 120 bp, Artificial Sequence
  ENSG00000166197_34 (sequence is synthesized)
gcggacaactcctttgatgccaaggaagaaaatgtactgttcatgctgacacagatatttcagtctgcatggtaaaagttctaaatcttactacaaaataataaactggctggtttataa

SEQ ID NO: 529786 - DNA, 120 bp, Artificial Sequence
  ENSG00000166199_0 (sequence is synthesized)
actcttaaggttccgatcacagactgcggagtgggtcaggggctgcgagggctgccccaagtcctaccgggtttgcacgggcgcgcccggctccgcccgcaagtgcgccttcctgactta

SEQ ID NO: 529787 - DNA, 120 bp, Artificial Sequence
  ENSG00000166199_1 (sequence is synthesized)
ctgctgggtgcgcggggctgggggtgcgagtaccacccctgaagtctcttcctgggcgacctccggggcctcattctaggcctccttaaagagaaggatctaaattaggaaaaggaagtg

SEQ ID NO: 529788 - DNA, 120 bp, Artificial Sequence
  ENSG00000166199_2 (sequence is synthesized)
cccttatccacgaccaagctcttccacctgcggagctcgcttagtctgcacctcaaccgtgcggaaagtgactgccctgtttactgaggaaaaactggggctcagaaagataccatggag

SEQ ID NO: 529789 - DNA, 120 bp, Artificial Sequence
  ENSG00000166199_3 (sequence is synthesized)
tagtttgaaacaggaacaaaatcttctgaaagctcggagcagaagcctttttggtcaacatggaggaaaaaagacggcgagcccgagttcagggagcctgggctgcccctgttaaaagcc

SEQ ID NO: 529790 - DNA, 120 bp, Artificial Sequence
  ENSG00000166199_4 (sequence is synthesized)
aggccattgctcagccagctaccactgctaagagccatctccaccagaagcctggccagacctggaagaacaaagagcatcatctctctgacagagagtttgtgttcaaagaacctcagc

SEQ ID NO: 529791 - DNA, 120 bp, Artificial Sequence
  ENSG00000166199_5 (sequence is synthesized)
aggtagtacgtagagctcctgagccacgagtgattgacagagagggtgtgtatgaaatcagcctgtcacccacaggtgtatctagggtctgtttgtatcctggctttgttgacgtgaaag

SEQ ID NO: 529792 - DNA, 120 bp, Artificial Sequence
  ENSG00000166199_6 (sequence is synthesized)
tatggagaacttccttacacttattcaagaatcactatggaaccaaatcctcactggcaccctgtgctgcgcacactaaagaaccgcattgaagagaacactggccacaccttcaactcc

SEQ ID NO: 529793 - DNA, 120 bp, Artificial Sequence
  ENSG00000166199_7 (sequence is synthesized)
ttactctgcaatctttatcgcaatgagaaggacagcgtggactggcacagtgatgatgaaccctcactagggaggtgccccattattgcttcactaagttttggtgccacacgcacattt

SEQ ID NO: 529794 - DNA, 120 bp, Artificial Sequence
  ENSG00000166199_8 (sequence is synthesized)
gagatgagaaagaagccaccaccagaagagaatggagactacacatatgtggaaagagtgaagatacccttggatcatgggaccttgttaatcatggaaggagcgacacaagctgactgg

SEQ ID NO: 529795 - DNA, 120 bp, Artificial Sequence
  ENSG00000166199_9 (sequence is synthesized)
cagcatcgagtgcccaaagaataccactctagagaaccgagagtgaacctgacctttcggacagtctatccagaccctcgaggggcaccctggtgacgtcagagctttgagagagaagct

SEQ ID NO: 529796 - DNA, 120 bp, Artificial Sequence
  ENSG00000166199_10 (sequence is synthesized)
tcactgaaacggagcaaaccttccactgagaagccacttcaagaggctggtgctgctagatctcatgatgtggctgttgggaagatggtggggtttgtttgccagcttggagtcctatta

SEQ ID NO: 529797 - DNA, 120 bp, Artificial Sequence
  ENSG00000166199_11 (sequence is synthesized)
aatgaaagccagcaactcatgttggtaataggtctactgtgggaacagttatccctaaccacagctcaaaatcgctatcatctttaggcaaattaaaatctatgtggcagtgctcatgga

SEQ ID NO: 529798 - DNA, 120 bp, Artificial Sequence
  ENSG00000166199_12 (sequence is synthesized)
agatgttccctggaaacagaggactggcatcagagaggattccatattgcaactaacctttaagaagtcagcacctgttagtggaaccgcgactgctccgcagagctgctggtatgagcg

SEQ ID NO: 529799 - DNA, 120 bp, Artificial Sequence
  ENSG00000166199_13 (sequence is synthesized)
cccgtcgccaccccacatcccaggcccagccattctgacaagaactagactttgggctccttgagaatattcagtttttggcaccctgtgctgcgcacactaaagaaccgcattgaagag

SEQ ID NO: 529800 - DNA, 120 bp, Artificial Sequence
  ENSG00000166199_14 (sequence is synthesized)
gacagatctggattcaaagcgagttctggctggcgccagagtccttgtattttacagcactggttctcaagctttatgtgcattaagaattcctgggttgagggtggcgttagttaacaa

SEQ ID NO: 529801 - DNA, 120 bp, Artificial Sequence
  ENSG00000166199_15 (sequence is synthesized)
attctgggactctacaaattgagtagatctgggatggggctctggaatctattttcaacaattgttccctggcaaataacatatggctccccagtgaatggagcaagaagataccatgga

SEQ ID NO: 529802 - DNA, 120 bp, Artificial Sequence
  ENSG00000166199_16 (sequence is synthesized)
tttgtcaagatgttccctggaaacagaggactggcatcagagagggcgctgcaagctggatgtagatgcaccaagactgctgaagaagattgcaggagttgattacgtttattttgtcca

SEQ ID NO: 529803 - DNA, 120 bp, Artificial Sequence
  ENSG00000166199_17 (sequence is synthesized)
gctgactggatattggaacagctttgtcaagatgttccctggaaacagaggactggcatcagagaggtggcaccctgtgctgcgcacactaaagaaccgcattgaagagaacactggcca

SEQ ID NO: 529804 - DNA, 120 bp, Artificial Sequence
  ENSG00000166199_18 (sequence is synthesized)
atagccctaggtggcagtcactgtcatcctccccattttacaaatgagtaagtcagggtacagagagatgaggtaacttgccaacagtcaagcagctgccaaatgacagagctatatatg

SEQ ID NO: 529805 - DNA, 120 bp, Artificial Sequence
  ENSG00000166199_19 (sequence is synthesized)
gattcccacagtctggctgagcagaggtttccatttttttttgacctctgtcaggttctgttgcatcttgattacacaggcaaaacatttattacaacaaatgctgttttctaggaagag

SEQ ID NO: 529806 - DNA, 120 bp, Artificial Sequence
  ENSG00000166200_0 (sequence is synthesized)
ctcctccccctcccggccaagatgtctgacatggaggatgatttcatgtgcgatgatgaggaggactacgacctggaatactctgaagatagtaactccgagccaaatgtggatttggaa

SEQ ID NO: 529807 - DNA, 120 bp, Artificial Sequence
  ENSG00000166200_1 (sequence is synthesized)
aatcagtactataattccaaagcattaaaagaagatgacccaaaagcggcattaagcagtttccaaaaggttttggaacttgaaggtgaaaaaggagaatggggatttaaagcactgaaa

SEQ ID NO: 529808 - DNA, 120 bp, Artificial Sequence
  ENSG00000166200_2 (sequence is synthesized)
caaatgattaagattaacttcaagttgacaaactttccagaaatgatgaatagatataagcagctattgacctatattcggagtgcagtcacaagaaattattctgaaaaatccattaat

SEQ ID NO: 529809 - DNA, 120 bp, Artificial Sequence
  ENSG00000166200_3 (sequence is synthesized)
tctattcttgattatatctctacttctaaacagatggatttactgcaggaattctatgaaacaacactggaagctttgaaagatgctaagaatgatagactgtggtttaagacaaacaca

SEQ ID NO: 529810 - DNA, 120 bp, Artificial Sequence
  ENSG00000166200_4 (sequence is synthesized)
aagcttggaaaattatatttagaacgagaggaatatggaaagcttcaaaaaattttacgccagttacatcagtcgtgccagactgatgatggagaagatgatctgaaaaaaggtacacag

SEQ ID NO: 529811 - DNA, 120 bp, Artificial Sequence
  ENSG00000166200_5 (sequence is synthesized)
ttattagaaatatatgctttggaaattcaaatgtacacagcacagaaaaataacaaaaaacttaaagcactctatgaacagtcacttcacatcaagtctgccatccctcatccactgatt

SEQ ID NO: 529812 - DNA, 120 bp, Artificial Sequence
  ENSG00000166200_6 (sequence is synthesized)
atgggagttatcagagaatgtggtggtaaaatgcacttgagggaaggtgaatttgaaaaggcacacactgatttttttgaagccttcaagaattatgatgaatctggaagtccaagacga

SEQ ID NO: 529813 - DNA, 120 bp, Artificial Sequence
  ENSG00000166200_7 (sequence is synthesized)
accacttgcttaaaatatttggtcttagcaaatatgcttatgaaatcgggaataaatccatttgactcacaggaggccaagccgtacaaaaatgatccagaaattttagcaatgacgaat

SEQ ID NO: 529814 - DNA, 120 bp, Artificial Sequence
  ENSG00000166200_8 (sequence is synthesized)
ttagtaagtgcctatcagaataatgacatcactgaatttgaaaagattctaaaaacaaatcacagcaacatcatggatgatcctttcataagagaacacattgaagagcttttgcgaaac

SEQ ID NO: 529815 - DNA, 120 bp, Artificial Sequence
  ENSG00000166200_9 (sequence is synthesized)
atcagaacacaagtgcttataaaattaattaagccttacacaagaatacatattccttttatttctaaggagttaaacatagatgtagctgatgtggagagcttgctggtgcagtgcata

SEQ ID NO: 529816 - DNA, 120 bp, Artificial Sequence
  ENSG00000166200_10 (sequence is synthesized)
ttggataacactattcatggccgaattgatcaagtcaaccaactccttgaactggatcatcagaagaggggtggtgcacgatatactgcactagataaatggaccaaccaactaaattct

SEQ ID NO: 529817 - DNA, 120 bp, Artificial Sequence
  ENSG00000166200_11 (sequence is synthesized)
ctcaaccaggctgtagtcagtaaactggcttaacagagaacaagcttttacagacgtccttaaggcaacagtgcagagatgtaatccttaaaagaactgggaatggcaaaactactgtcg

SEQ ID NO: 529818 - DNA, 120 bp, Artificial Sequence
  ENSG00000166200_12 (sequence is synthesized)
gttgatgtgtcctgaaaattattggagttatggcagaagtgcttttttgatcaactggtttgtgttttgctgctgcatttatcccaagaaaaacagctttaatctccagaagaaaaccaa

SEQ ID NO: 529819 - DNA, 120 bp, Artificial Sequence
  ENSG00000166200_13 (sequence is synthesized)
aataccatgggatttatgctgtattgacatcttgccctaaacgtacaacatcatagtaatttgtcatgggcaacatgaccagagagaagatttttgtcatgattttaaatacactgacac

SEQ ID NO: 529820 - DNA, 120 bp, Artificial Sequence
  ENSG00000166200_14 (sequence is synthesized)
gctactgttggttaaatttaaacatgttttacctgcagaaattctctcacaaataacctgcaataacttgaaatgcatacccttttgaacacttccttttctcatgtataaattaaaatg

SEQ ID NO: 529821 - DNA, 120 bp, Artificial Sequence
  ENSG00000166200_15 (sequence is synthesized)
tttgctgcattttgcaaaatgtcaattctctaaaaatgtgtccgtatatttctgtacctgcagtgtagtaaaggtttagacgaaaccccataattatagtggcatactgtcacttaggtt

SEQ ID NO: 529822 - DNA, 120 bp, Artificial Sequence
  ENSG00000166200_16 (sequence is synthesized)
tcaagcagcaaaataaacagtgcagctcagaaattgtagtttggttcttgatgtgtttttattacatttggagttgttttgttttttagtaccttcgaaatttcaaattattttatcttc

SEQ ID NO: 529823 - DNA, 120 bp, Artificial Sequence
  ENSG00000166200_17 (sequence is synthesized)
agttaatgattttaaaaagcctgggggcaaataagttggttatttgctttcaagtttttaaaagtagtctttattgatagagtaaggagaactactttctaacaaaacacgtgcatagtt

SEQ ID NO: 529824 - DNA, 120 bp, Artificial Sequence
  ENSG00000166200_18 (sequence is synthesized)
atgacagtgatgctttaaaggaataaaattctttttttttaaagagtgatattccttttcaaaagaatactaactctcagaatgttcactttaaacgaatatgccagaacatagacagct

SEQ ID NO: 529825 - DNA, 120 bp, Artificial Sequence
  ENSG00000166200_19 (sequence is synthesized)
aaatgaatgttactctgcatagtgatcatgctggaaggttatttcctaatgccagcaatctaccattgcccaaaacctgctgagtttactcttttagaattgcattcaaagttaatttgt

SEQ ID NO: 529826 - DNA, 120 bp, Artificial Sequence
  ENSG00000166200_20 (sequence is synthesized)
cacacacactaaactttatgattatacattgttttaaaaaatatagtattaggaagcttgattatttttagttaccattacttggcaccaaatgaaagtttccaaaacttccacctaact

SEQ ID NO: 529827 - DNA, 120 bp, Artificial Sequence
  ENSG00000166200_21 (sequence is synthesized)
ttgaggtaatgcagaaagtatataactggctttgaaggcaatcccaaaagagttttaaaggttttttgagcagtggcagtatacttaggagaatgaactgtggccttccaaggtaactac

SEQ ID NO: 529828 - DNA, 120 bp, Artificial Sequence
  ENSG00000166200_22 (sequence is synthesized)
cttaaaggaactcagctcatttgaatgtattgagttttggatgtatttgtttcattttttaaaaagttcacattattttatagtgtcgaaaggaagaactaggattaacataatttcttt

SEQ ID NO: 529829 - DNA, 120 bp, Artificial Sequence
  ENSG00000166200_23 (sequence is synthesized)
ggtttttctattgcttgttattattatgtaaaaactgggtggcagttcagaaggaagattgtggttacagaagagtgacaaccaagaattttttgatcattaaatcagattttataaaca

SEQ ID NO: 529830 - DNA, 120 bp, Artificial Sequence
  ENSG00000166200_24 (sequence is synthesized)
gtggaaggagcatggacttaaaacaaggcatgcttattcggttttgtcaaaattttacgaaaatatgtgatatatatttatactaaaaatatataatccttagatttagaaaagcaatca

SEQ ID NO: 529831 - DNA, 120 bp, Artificial Sequence
  ENSG00000166200_25 (sequence is synthesized)
gttaatgtctttagcagactaaagcagtattaaacacaggtacaagttggaaattgtagaaaacggaaagaaaacaaaagacaaaatgtctatggtagggaataaaagtttaagatatta

SEQ ID NO: 529832 - DNA, 120 bp, Artificial Sequence
  ENSG00000166200_26 (sequence is synthesized)
taaaattatgtgtattttctcttttacataaatcatttgtgaaaagtgtgctaaactttttttacaagagtgatattaattaggatttatttttcaatataatttggagaccctttgtta

SEQ ID NO: 529833 - DNA, 120 bp, Artificial Sequence
  ENSG00000166200_27 (sequence is synthesized)
ggaattagaattcaaagatttgaatgaaatgatttaacctttatcctccaattcttacagtgcccagttctcctgtgctatctttgctttgtacaatagtgcatcttccactttctagag

SEQ ID NO: 529834 - DNA, 120 bp, Artificial Sequence
  ENSG00000166200_28 (sequence is synthesized)
agaaagcatgcacttgttatttggaaaactgggctaaatatataacagtatccaaagttataccataataatttattgtaattgtgtattacatagctttgtttacccagatataggtgc

SEQ ID NO: 529835 - DNA, 120 bp, Artificial Sequence
  ENSG00000166200_29 (sequence is synthesized)
gttcttttttttctgttagtcatctgtgacttttgttctggaatacaggtttttaaatatatcttaacagtctgactaacttaaaataatttattcttcccttaaaacatttttctgtgt

SEQ ID NO: 529836 - DNA, 120 bp, Artificial Sequence
  ENSG00000166200_30 (sequence is synthesized)
ttttgtgcatcaaatattgtagagttgaaatcttagagattgcttatcgaaatataaatttaggggaagttaaaaatcgattggcaaatttgtagcatttattcactgattaaatctttt

SEQ ID NO: 529837 - DNA, 120 bp, Artificial Sequence
  ENSG00000166200_31 (sequence is synthesized)
ccacttttgtgaaaaccataccagtggtttacatcatattgtaatgtgttcatctcattcttctttttatccctaaacctagctaaaagttactgcaaagaaatctttggctgccacaag

SEQ ID NO: 529838 - DNA, 120 bp, Artificial Sequence
  ENSG00000166200_32 (sequence is synthesized)
tagatgctctctactacaagagctggatttccattactcactcttgctcttacattaaagttgttgattaaatactttttctctacatcttaatgtaacataactgatttctttttaaag

SEQ ID NO: 529839 - DNA, 120 bp, Artificial Sequence
  ENSG00000166200_33 (sequence is synthesized)
atgagtatatatgtactaagtaatgctctcattacatgagtcccttctaactacaggctgatacatctttcaggaaaactgagaacctaatatttaagtgaggcctattttaaatgagct

SEQ ID NO: 529840 - DNA, 120 bp, Artificial Sequence
  ENSG00000166200_34 (sequence is synthesized)
atactgtgggtggtagtgtttgttaccttatgtaagacttaggtttgtcttagactgaaaaactcttattcttaatatttaaaatatccatgatggtagaaattttgtgggaaattttct

SEQ ID NO: 529841 - DNA, 120 bp, Artificial Sequence
  ENSG00000166200_35 (sequence is synthesized)
tttttaatcaatagttacagttcttcagtaaacacaggtatgtatgcttttgtggtgtcagtgtcagtctaaatctatgggtgaagcagttagtccataagacaaaaaattatttgccta

SEQ ID NO: 529842 - DNA, 120 bp, Artificial Sequence
  ENSG00000166200_36 (sequence is synthesized)
gtggattccctttacctctttttaagaagctcagagatctgtaatcattaatttactaaggattttttaaaatattattttagtcacttttaaacctgaaaatttctcttttgatttaga

SEQ ID NO: 529843 - DNA, 120 bp, Artificial Sequence
  ENSG00000166200_37 (sequence is synthesized)
tttttgaagtgaggcttgagcatacacaagtaaagctgggagtttcattcttcatatgggatttatgactaaatatttctagcattttgaagaagataaacattttgaactgaagtatat

SEQ ID NO: 529844 - DNA, 120 bp, Artificial Sequence
  ENSG00000166200_38 (sequence is synthesized)
aacaaaaaaaggaatttgacatttaactattttgtatcaaagtgtttaagaacactatccagaacaagagatggagtatcaggtttcagaatgtgacgcaaaaggcatttggtcttcatt

SEQ ID NO: 529845 - DNA, 120 bp, Artificial Sequence
  ENSG00000166200_39 (sequence is synthesized)
tatgtgaccacaattaaaattttcctctttttttctttttctggaggttttcttttagttttcattgttttaggtttttttttcccccaaatcagcatcctatttatatttgtttgatac

SEQ ID NO: 529846 - DNA, 81 bp, Artificial Sequence
  ENSG00000166200_40 (sequence is synthesized)
tacagttttaagcaggaatttggcagaaatttcgtaacgaagacaaattggaggttctctttaactcgagattattaaatt

SEQ ID NO: 529847 - DNA, 120 bp, Artificial Sequence
  ENSG00000166200_41 (sequence is synthesized)
gacaaattggaggttctctttaactcgagattattaaatttatagtaacttcttgggccattaaaatgtgagtttaaatgccatttggaggatttgtgttatattaagcaccacaaattt

SEQ ID NO: 529848 - DNA, 120 bp, Artificial Sequence
  ENSG00000166200_42 (sequence is synthesized)
aaactgtcaactagtgattctacatgtttctcaaaatgctaaagtttagcatcacttacttgcttttgaattttaaggagattcgtcttaggtaatgtctcagaagaaaccagtgtgtgg

SEQ ID NO: 529849 - DNA, 120 bp, Artificial Sequence
  ENSG00000166200_43 (sequence is synthesized)
ttctctaaaattttacttttttactgtcacgtataataatatctaaactacctgtagtagttaaaaatattacggcatcaaaggtatatgccaagtgtaccttaaaaccctgtgacagga

SEQ ID NO: 529850 - DNA, 120 bp, Artificial Sequence
  ENSG00000166200_44 (sequence is synthesized)
aaaaagaaaaaattatttcttaagtacttactattcgggggcaactttgttccgtgttggcaaaattatgaactttgctcagaatttccacatgaatagctgaccaaaacttttttgtgt

SEQ ID NO: 529851 - DNA, 120 bp, Artificial Sequence
  ENSG00000166200_45 (sequence is synthesized)
gcatatgtatacatatgtaataagtgaaacatacttgtgggagtacaaaattcatcaccagtttatcacagtaattttccagttttctattttacttaatatcacttatttctgacacag

SEQ ID NO: 529852 - DNA, 120 bp, Artificial Sequence
  ENSG00000166200_46 (sequence is synthesized)
gcaaatgtcatatgccatgaaaagaattaccagtgtaccagtaacttgcgtgttatgactaggtttcatgtggaagactgtccaaatttacataatctagagtaattttttaattctgaa

SEQ ID NO: 529853 - DNA, 120 bp, Artificial Sequence
  ENSG00000166200_47 (sequence is synthesized)
gtaagggcattttaaaattaattgctaaaggttgttttattgtacatccattttatgggagtttagagtttagaaaaagtaatctctagcgtcatcccatgaagttgtcaaaagttttgg

SEQ ID NO: 529854 - DNA, 120 bp, Artificial Sequence
  ENSG00000166200_48 (sequence is synthesized)
catgcttattagcaacatattaatgccaagtgttgagtatctaatttctgttcaaatgtttgcctatcccttactgtttacgacagtaataaatttttatgcatctattttaaataacac

SEQ ID NO: 529855 - DNA, 120 bp, Artificial Sequence
  ENSG00000166200_49 (sequence is synthesized)
tgaagaaaattaaaatatatttcaagaaatggagcaatgacatggaaaatagaaagttgtttggttttgcaatgtgttacataattggttgcattataaattttctccattttgtttatg

SEQ ID NO: 529856 - DNA, 120 bp, Artificial Sequence
  ENSG00000166200_50 (sequence is synthesized)
ataagctaatataaaaggtatcaaattccttgagctaacactaggtgggaaggaagtagtaggtgattaggaatgtaacaggatgtctgcctgaaatggtcagttccaccaattaataat

SEQ ID NO: 529857 - DNA, 120 bp, Artificial Sequence
  ENSG00000166200_51 (sequence is synthesized)
tgagaactgattatatgtgcaggatgtgtcataagatgctgtaaggcttaaatactcaagggtttttttatttatctggaagtgcacattccttattggtaataaaaaatacgtaatcta

SEQ ID NO: 529858 - DNA, 81 bp, Artificial Sequence
  ENSG00000166200_52 (sequence is synthesized)
agtgcttataaaattaattaagccttacacaagaatacatattccttttatttctaagatggagtctcgctcttgttgcct

SEQ ID NO: 529859 - DNA, 120 bp, Artificial Sequence
  ENSG00000166200_53 (sequence is synthesized)
agatttggacacagacacacagagaagaggtcaaagtgaagacagaaccagagattggagttttgctgccataagccaagaaaccaagagccaagaaacaccagaaggtaggagaaaggc

SEQ ID NO: 529860 - DNA, 120 bp, Artificial Sequence
  ENSG00000166200_54 (sequence is synthesized)
aaggtaggagaaaggcaaggaagaacttcccctctaaagccttcaaagaaagaaaatataaccctgccagcaccttgatttcagacttctggctccagaactgtgagagaataaatttct

SEQ ID NO: 529861 - DNA, 120 bp, Artificial Sequence
  ENSG00000166200_55 (sequence is synthesized)
tataccttggggccagtagtattcaagttacagaatttaaaaactgaaaggcactgaaatagttttcatttggcatttatgaggtggtcagttttgttattacagaactgaaaatgtcct

SEQ ID NO: 529862 - DNA, 120 bp, Artificial Sequence
  ENSG00000166200_56 (sequence is synthesized)
tcagtgtgtttattatttatagtaagggctttgttctttatagatggaaaggcctagagcttctatttaagtagttgtgctagttattagtatgctttaaaaatgataagtactattttc

SEQ ID NO: 529863 - DNA, 120 bp, Artificial Sequence
  ENSG00000166200_57 (sequence is synthesized)
ctggttatattactgattatataatagtaaaaggtaataactccagcttgatctctttaaataatgccttcagatgctaaaatctgtaaacaacttttcaggcttatgttagactcctat

SEQ ID NO: 529864 - DNA, 120 bp, Artificial Sequence
  ENSG00000166206_0 (sequence is synthesized)
cagcaggagcagccccggctgcgggtcgcgacggcggcggggcgccccctcccccgtgccggggcgcggcggagggatgtggggccttgcgggaggaaggcttttcggcatcttctcggc

SEQ ID NO: 529865 - DNA, 120 bp, Artificial Sequence
  ENSG00000166206_1 (sequence is synthesized)
gaggaaggcttttcggcatcttctcggccccggtgctggtggctgtggtgtgctgcgcccagagtgtgaacgatcccgggaacatgtcctttgtgaaggagacggtggacaagctgttga

SEQ ID NO: 529866 - DNA, 120 bp, Artificial Sequence
  ENSG00000166206_2 (sequence is synthesized)
aaggctacgacattcgcctaagacccgacttcgggggtcccccggtctgcgtggggatgaacatcgacatcgccagcatcgacatggtttccgaagtcaacatggattataccttaacca

SEQ ID NO: 529867 - DNA, 120 bp, Artificial Sequence
  ENSG00000166206_3 (sequence is synthesized)
tgtattttcaacaatattggagagataaaaggctcgcctattctgggatccctctcaacctcacgcttgacaatcgagtggctgaccagctatgggtgcccgacacatatttcttaaatg

SEQ ID NO: 529868 - DNA, 120 bp, Artificial Sequence
  ENSG00000166206_4 (sequence is synthesized)
acaaaaagtcatttgtgcatggagtgacagtgaaaaaccgcatgatccgtcttcaccctgatgggacagtgctgtatgggctcagaatcaccacgacagcagcatgcatgatggacctca

SEQ ID NO: 529869 - DNA, 120 bp, Artificial Sequence
  ENSG00000166206_5 (sequence is synthesized)
ggagataccccctggacgagcagaactgcactctggaaattgaaagctatggctacaccacggatgacattgagttttactggcgaggcggggacaaggctgttaccggagtggaaagga

SEQ ID NO: 529870 - DNA, 120 bp, Artificial Sequence
  ENSG00000166206_6 (sequence is synthesized)
ttgagctcccgcagttctccatcgtggagcaccgtctggtctcgaggaatgttgtcttcgccacaggtgcctatcctcgactgtcactgagctttcggttgaagaggaacattggatact

SEQ ID NO: 529871 - DNA, 120 bp, Artificial Sequence
  ENSG00000166206_7 (sequence is synthesized)
tcattcttcagacttatatgccctctatactgataacgattctgtcgtgggtgtccttctggatcaattatgatgcatctgctgctagagttgccctcgggatcacaactgtgctgacaa

SEQ ID NO: 529872 - DNA, 120 bp, Artificial Sequence
  ENSG00000166206_8 (sequence is synthesized)
tgacaaccatcaacacccaccttcgggagaccttgcccaaaatcccctatgtcaaagccattgacatgtaccttatgggctgcttcgtctttgtgttcctggcccttctggagtatgcct

SEQ ID NO: 529873 - DNA, 120 bp, Artificial Sequence
  ENSG00000166206_9 (sequence is synthesized)
ttgtcaactacattttctttggaagaggccctcaaaggcagaagaagcttgcagaaaagacagccaaggcaaagaatgaccgttcaaagagcgaaagcaaccgggtggatgctcatggaa

SEQ ID NO: 529874 - DNA, 120 bp, Artificial Sequence
  ENSG00000166206_10 (sequence is synthesized)
atattctgttgacatcgctggaagttcacaatgaaatgaatgaggtctcaggcggcattggcgataccaggaattcagcaatatcctttgacaactcaggaatccagtacaggaaacaga

SEQ ID NO: 529875 - DNA, 120 bp, Artificial Sequence
  ENSG00000166206_11 (sequence is synthesized)
gcatgcctcgagaagggcatgggcgattcctgggggacagaagcctcccgcacaagaagacccatctacggaggaggtcttcacagctcaaaattaaaatacctgatctaaccgatgtga

SEQ ID NO: 529876 - DNA, 120 bp, Artificial Sequence
  ENSG00000166206_12 (sequence is synthesized)
atgccatagacagatggtccaggatcgtgtttccattcactttttctcttttcaacttagtttactggctgtactatgttaactgagtgactgtacttgatttttcaaagacttcattta

SEQ ID NO: 529877 - DNA, 120 bp, Artificial Sequence
  ENSG00000166206_13 (sequence is synthesized)
acactgagtgaaatattactctgcctgtcaagtttttatacctgtacacacacagacacacaagcagacacacacatatatacatacgcaattgtatatatatgtgaactttctcagcat

SEQ ID NO: 529878 - DNA, 120 bp, Artificial Sequence
  ENSG00000166206_14 (sequence is synthesized)
atatataaaatacacgtgtatatgaggatgtatgtgtatatgtttatacacacaggagtcagtgcccatgtgtatggaagacaaatacacatacatatatacattttgcagctatggaca

SEQ ID NO: 529879 - DNA, 120 bp, Artificial Sequence
  ENSG00000166206_15 (sequence is synthesized)
atttaccacaggatgcatattaaagaaagtcatagtttttttcttttttaattgaaagggacaagtatcatctaaatattatgccttgagaatgagggcgtgaaacacaatatcatcccc

SEQ ID NO: 529880 - DNA, 120 bp, Artificial Sequence
  ENSG00000166206_16 (sequence is synthesized)
aaatgtgtcttgtattatcataagttagatgttttagtttaaaaatcagaaagacattcttagttaatctttgaaaactcatacagtggtattgctagtttaaaatgagtcacttacttc

SEQ ID NO: 529881 - DNA, 120 bp, Artificial Sequence
  ENSG00000166206_17 (sequence is synthesized)
atatcctctcgttcagtttagtaagcaaaggcttcttggcttctctggtgatggggtttgttttcatcgggcatacgttttctgcaatggtttagtggctggggtgagccactggcagtg

SEQ ID NO: 529882 - DNA, 120 bp, Artificial Sequence
  ENSG00000166206_18 (sequence is synthesized)
tgcttacctgttgtctgaaacatagatagatcccacgttgatgtctgaacgaccgtcttttgaaaactcatcgggagtgaatggcatctcgttgtaagtactctaatatacagtgtgtag

SEQ ID NO: 529883 - DNA, 120 bp, Artificial Sequence
  ENSG00000166206_19 (sequence is synthesized)
tttgtttctgttgttcacttggagtggatccagcttcactgtcatgtgcgaacacagtgacacgtttggccagtgacatttcaatcactgaaaatgtgctctacatctcgtatggatttc

SEQ ID NO: 529884 - DNA, 120 bp, Artificial Sequence
  ENSG00000166206_20 (sequence is synthesized)
taggcctgatatccaacagaaagcatagacgtctcaggttattcgttactctaaggtaaaaccatctaggatgattttcccccttgcagttatgttatcattcttataacattgtatgtt

SEQ ID NO: 529885 - DNA, 120 bp, Artificial Sequence
  ENSG00000166206_21 (sequence is synthesized)
aatagaaaatatatttgcataatatgcatatatatgtatatttaccaagattttgtttcttacgcttgctatcatggcagcatgcgatgtcatattttcctttatgtgatgtaactactt

SEQ ID NO: 529886 - DNA, 120 bp, Artificial Sequence
  ENSG00000166206_22 (sequence is synthesized)
tctgttatctagaaattaagattgaagctaaaacacttctactgttcaatttcagaaactaagaatcatcctcatgcctttatttctgtatctgacatatttcataagcacatccaacta

SEQ ID NO: 529887 - DNA, 120 bp, Artificial Sequence
  ENSG00000166206_23 (sequence is synthesized)
ctcctagactgactaggattctgcaggaacatgacccgtacacaccacgcgtcacccaacgacccatgaccgttctctgaggcaaaggagggcaacctgacagcaaacacagtcactgtt

SEQ ID NO: 529888 - DNA, 120 bp, Artificial Sequence
  ENSG00000166206_24 (sequence is synthesized)
tctgatccacagcctcatcagtatttggactttttaaagctcgtagaaacaagacaaggtgcaccggtttcatagacgcaaccttaacttactatttagatgagatctttctaaagaaaa

SEQ ID NO: 529889 - DNA, 120 bp, Artificial Sequence
  ENSG00000166206_25 (sequence is synthesized)
aaaaaagagatgatatattttttgtaaacaatatttctatcacaggcatccataaactgaaatgactacagttgtgcaaacaggtgtcacagtgaagttgagcatttggagaaaaaaata

SEQ ID NO: 529890 - DNA, 120 bp, Artificial Sequence
  ENSG00000166206_26 (sequence is synthesized)
aaaagcaaaatttgcaggaagaactgctaaattaatactttatcccaaaatgccacgtatgcctcaccctctctgttctatccaaaaccaaggaccagagtgctccaatggtaggcccca

SEQ ID NO: 529891 - DNA, 120 bp, Artificial Sequence
  ENSG00000166206_27 (sequence is synthesized)
gttgtctcgatgtaggtagaggcaccaccctccccgaggatgcgtgtggtgtggactatccccatgagctgaccactacttgatttttctttggtggccgtaacaacctttaatttgtgg

SEQ ID NO: 529892 - DNA, 120 bp, Artificial Sequence
  ENSG00000166206_28 (sequence is synthesized)
gcatctgcaacagttcaaaacccaccatcagataaaacataatccacaaaatctcacgctagaggcaattacctacttttagacccttttccctctttcattcctatctttttcctccta

SEQ ID NO: 529893 - DNA, 120 bp, Artificial Sequence
  ENSG00000166206_29 (sequence is synthesized)
atcgctgctctctggttttattttcatctggagactagccagggatttctttggctttggcttttctctgaccattttttccatgggtaacaatgggggatcctaaaagttaaacagatt

SEQ ID NO: 529894 - DNA, 120 bp, Artificial Sequence
  ENSG00000166206_30 (sequence is synthesized)
gggaaaaaccttgttaagtggccttatcattattatcatgttaaagaaaaaaaatacatttgcaaagaccttatccctttcaatacttcaggtatctttttctgtatccagtaattaaag

SEQ ID NO: 529895 - DNA, 120 bp, Artificial Sequence
  ENSG00000166206_31 (sequence is synthesized)
gtgtgaggtccacatgcagaagagggaccccaaaatgtaaatggatgtggacaaaaacagtcaatggtctatttaagtgtataatttatactattcagaactgtgacattaattctttct

SEQ ID NO: 529896 - DNA, 120 bp, Artificial Sequence
  ENSG00000166206_32 (sequence is synthesized)
gggagaaaagtgatttaaaacttttttgatgcatagttgaggtacccaaatatcaaaggcagagaccccatggggctccaaagagctgcagtctccttcccaaggttttctggatataaa

SEQ ID NO: 529897 - DNA, 120 bp, Artificial Sequence
  ENSG00000166206_33 (sequence is synthesized)
tttgcatggtatagtcataatagcttttgagctttttatatgcatttggcaccaagactgggatccacaactttgtagacactgcgatgaagttaacatattagctatactataaatagt

SEQ ID NO: 529898 - DNA, 120 bp, Artificial Sequence
  ENSG00000166206_34 (sequence is synthesized)
acacacacacacacacacacaaatacatacatatattctgtaaaaacaaaaaaaaactttttaagatccttgggtatgtgtttgctttactccatttcagaagaaaattacttttcttct

SEQ ID NO: 529899 - DNA, 120 bp, Artificial Sequence
  ENSG00000166206_35 (sequence is synthesized)
aaattacttttcttctaacaaaattattttatagcttctccatttttaaaacttgtgagagcattgagaagagaactctgactgtgttaacagaagagagttgaattggagtctctgttg

SEQ ID NO: 529900 - DNA, 120 bp, Artificial Sequence
  ENSG00000166206_36 (sequence is synthesized)
tgttaaaatgacctctcgttactccacagtagttatttgagccagtgactgagtcgcgttgaggaattctgaacccggacctctgacgttgttgggaggtggctgttacccacacccaga

SEQ ID NO: 529901 - DNA, 120 bp, Artificial Sequence
  ENSG00000166206_37 (sequence is synthesized)
cctcttgagtaaggacagaaacgttatcattggggatataatgagatttctttcttaacaattgaaagtaataaagagttaattttctcagtagtcctgtctttccaaaatgcgccacag

SEQ ID NO: 529902 - DNA, 120 bp, Artificial Sequence
  ENSG00000166206_38 (sequence is synthesized)
gggctcaagatctacagaagaatcttgttatgacagtttgttattacccatattcagatatccttgagataatggaagagccctgctacataactccctacagagaaagactgatagact

SEQ ID NO: 529903 - DNA, 120 bp, Artificial Sequence
  ENSG00000166206_39 (sequence is synthesized)
tgagtagtccttaaaacaagtgttattcctgttcaccaaccccgggactgtggaggggtttcactgtctataccatgcgacatccatttcccctgaatctcaaacgaactagaaagtatg

SEQ ID NO: 529904 - DNA, 120 bp, Artificial Sequence
  ENSG00000166206_40 (sequence is synthesized)
tcatgataatatttccattagatttggaagctacctgtacatctgcaatattgtgtttttaacgccagcacccagaactttgacatgttcagtcactccctgaaaggcacttctctcttg

SEQ ID NO: 529905 - DNA, 120 bp, Artificial Sequence
  ENSG00000166206_41 (sequence is synthesized)
tccaaacacagcgttgacatttttactgaggagatcatctcaaaggtgatgccaaacgagtctggggctggttttaaggggacaggcacattgcagttgtaggtgttcattttcagcatc

SEQ ID NO: 529906 - DNA, 120 bp, Artificial Sequence
  ENSG00000166206_42 (sequence is synthesized)
tagtagataatccattggtgtttgtcccaccattggtgtattctaacaagaatgtgtccaactttgaatctcctggcttgaaagtataaaccatcacttaattcttattttaactctcca

SEQ ID NO: 529907 - DNA, 120 bp, Artificial Sequence
  ENSG00000166206_43 (sequence is synthesized)
cctgaaaaccagttcatatttctggccattttatgtaagcaaaactgaacaattggtgaaacattttgttactcttggaattgactctggctgtcagtgtgagccattagagtaacatcg

SEQ ID NO: 529908 - DNA, 120 bp, Artificial Sequence
  ENSG00000166206_44 (sequence is synthesized)
aatcttggggcaaagaactgcccaggtgaattaaatttttccaggacactagctagtgtgccttggattgattacctcttctactgcattgaaaggcgccatgttttcctgaaatactaa

SEQ ID NO: 529909 - DNA, 120 bp, Artificial Sequence
  ENSG00000166206_45 (sequence is synthesized)
attcccaacacctgggtaaacaatgaccttccagagagtggctcccgtatgcctctccctaggaccaaccccatgaacatgttttgtcacgtttgtctcatgtttctacttcacaagtca

SEQ ID NO: 529910 - DNA, 120 bp, Artificial Sequence
  ENSG00000166206_46 (sequence is synthesized)
gtgagtgtgtttaaggtaagtacaggattattctagtaggaataggcgattgctgtcataatcaattctcatgttgatttcattttattgtaaagataaatttaaacccagttttgctta

SEQ ID NO: 529911 - DNA, 120 bp, Artificial Sequence
  ENSG00000166206_47 (sequence is synthesized)
agcacattgatgtaattttttggtattatttgacatgaaaaaacagcaaaattgagtgatagatacaatatgaaacttgttgatgaatgaattcaaatttattaaaaaaggagtaactga

SEQ ID NO: 529912 - DNA, 120 bp, Artificial Sequence
  ENSG00000166206_48 (sequence is synthesized)
acagagtccttcctgtttccagtctagaggctccagggaggtgagacgaccactcccaccagcagcaggccctgtgctggctgtgtcgcaggtgcagagtgagatgcagcagctcaggag

SEQ ID NO: 529913 - DNA, 120 bp, Artificial Sequence
  ENSG00000166206_49 (sequence is synthesized)
gctctgggtcctggcagctcaacccttctgccacctaccagagaggtgtcgcctgttctttgaaatcgggggcatttcattggcgatgccccagtgccttctctggatttgcctggctgt

SEQ ID NO: 529914 - DNA, 120 bp, Artificial Sequence
  ENSG00000166206_50 (sequence is synthesized)
gtgggaggcacgaggagacctcccattcattgctgagaatgatgccgtcctcacggtgaactggaacgcagtcaaagaacacagaacattttatgccatttatgaaaccagtgtgaacga

SEQ ID NO: 529915 - DNA, 120 bp, Artificial Sequence
  ENSG00000166206_51 (sequence is synthesized)
gggaacagcatcagtgggcttttgctttatctaggctagatgaagacctttggctgtagatgagctgtccgtgacgtaggtttgtacgtcaactcagccttattctgggaaatcattaat

SEQ ID NO: 529916 - DNA, 120 bp, Artificial Sequence
  ENSG00000166206_52 (sequence is synthesized)
ccttaactctgatgactgtgcaaaagtagtcactgaccactcacgcagatgcttgagagtgatcacattcttgtagtgataaaaggttgttttaaatcatgagccatttttcccatgact

SEQ ID NO: 529917 - DNA, 120 bp, Artificial Sequence
  ENSG00000166206_53 (sequence is synthesized)
cttgtagccccttgagcttgaaacttggggtaacactagcttgctcttcttaccagcttgagctcagctgaatatgacggtgaactgagatccctgcaccagcttgtcagcatgtgatgg

SEQ ID NO: 529918 - DNA, 120 bp, Artificial Sequence
  ENSG00000166206_54 (sequence is synthesized)
gagagaatgctctggacagggtatgcatgccatcctaaaataaaacataaatccttgacaatttcctttggacagtcaaaccatttaaggaactaggaagatcttggctgactaagagac

SEQ ID NO: 529919 - DNA, 120 bp, Artificial Sequence
  ENSG00000166206_55 (sequence is synthesized)
taatggtcctttgtcctgtcccagtcacagcttttctgttttctttgatgctgcactgaagttttcttctatttgtaaaaaggcagagttatcatcccttttcctaactttctttttcag

SEQ ID NO: 529920 - DNA, 120 bp, Artificial Sequence
  ENSG00000166206_56 (sequence is synthesized)
tctcttggccctcggatgtcattgaatgtctcaccttgcatcattaagcatactttgtaatgtggtcttttcttcatgccatacatgttgtatcttcttatcatttctctgatgctatga

SEQ ID NO: 529921 - DNA, 120 bp, Artificial Sequence
  ENSG00000166206_57 (sequence is synthesized)
gttggcgaggggggggttcacaaaatagtattcactttgctccaaaaagcacctgggaatctgaggctgagtcatcaaagcaacatccatattttgcctgagaagtgtattgcaaaacct

SEQ ID NO: 529922 - DNA, 120 bp, Artificial Sequence
  ENSG00000166206_58 (sequence is synthesized)
gttggacagtacattataaagttcccacttgtggctaaaaattgctttaagttggcaaaattgccatttctatacttaaagattgaaagcaatattaaaatgaagccagaacttatatca

SEQ ID NO: 529923 - DNA, 120 bp, Artificial Sequence
  ENSG00000166206_59 (sequence is synthesized)
gaagattcaaattaaatcatcgaattcgtttgactagcatcttattctgaaactgttttatatggtggttctgttaaaatacttttctcctcagaaaagatatcaactcacagaggtatt

SEQ ID NO: 529924 - DNA, 120 bp, Artificial Sequence
  ENSG00000166206_60 (sequence is synthesized)
aggtctcgtgtgatttttatgcagccgtccctaactcccaaacccttgttttgtcaccatctcccaaattatgcaactaaaaagcatattgataaatttcttaccagatgggattatgcc

SEQ ID NO: 529925 - DNA, 120 bp, Artificial Sequence
  ENSG00000166206_61 (sequence is synthesized)
aatttacactcccaccagcaataaagtatatattagctttaggattgtgatgcctgctttggaatttattatcactcaggctactgcaagtaatctatccattttcttcatctctcaaag

SEQ ID NO: 529926 - DNA, 120 bp, Artificial Sequence
  ENSG00000166206_62 (sequence is synthesized)
ctggtgaagattgcctgactcactttaaattctggcttatacacttctctgctccccacccccagcatgttttatccttcccctccttataaggactcttctcaccttctctgcaaactc

SEQ ID NO: 529927 - DNA, 120 bp, Artificial Sequence
  ENSG00000166206_63 (sequence is synthesized)
tcccctcacttggatttaatgaggttacttcaaactttagttggaaacacagaaacttcatctttgcgttacaaagagcccacctgagctatctgttggctcattctttgcctcccctat

SEQ ID NO: 529928 - DNA, 120 bp, Artificial Sequence
  ENSG00000166206_64 (sequence is synthesized)
caaaatggggagcagcttggcatcctgaccatttccaaaatgagcttcaccttggcaccctgtcactactggaggacttggctcctgcagtcctgaccttgccctttctgctactttcct

SEQ ID NO: 529929 - DNA, 120 bp, Artificial Sequence
  ENSG00000166206_65 (sequence is synthesized)
cctccctcatcatgcttccagtacacacactttccttctgctcttcagaaacatcaggcatgcccctgtcctagggcctttgcacatgcccttgctgtatatggctgcactgtgtctaga

SEQ ID NO: 529930 - DNA, 120 bp, Artificial Sequence
  ENSG00000166206_66 (sequence is synthesized)
tggttatgtgttgagcatcattagaaggtaattaggtaactaaggattgctcagctgtcacactgatagggagagcccttctctgatcattcattcactttctattacattacctttctg

SEQ ID NO: 529931 - DNA, 120 bp, Artificial Sequence
  ENSG00000166206_67 (sequence is synthesized)
tccagagctgacattatcttgtcagtttattgcatttcttacttattgactcactattcccatccatgatgacggggaagccactatgagaatataaactctttgagaaaagaatggttt

SEQ ID NO: 529932 - DNA, 120 bp, Artificial Sequence
  ENSG00000166206_68 (sequence is synthesized)
ctgtcttgttcattattccatccccaaattctagagtagtgcttcatggaaaaaaaaaagtatggcatgagagttaactttgaattccatttagcctttccatagtacttatattttcat

SEQ ID NO: 529933 - DNA, 120 bp, Artificial Sequence
  ENSG00000166206_69 (sequence is synthesized)
attttccatttaggtgttcaatcccttggaatttatcttggtgtaggatgtgatgtagctatccacatttttgtttccttccttccttccttctttctttttctttctttccttctttct

SEQ ID NO: 529934 - DNA, 62 bp, Artificial Sequence
  ENSG00000166206_70 (sequence is synthesized)
ctgggactacaggtgtgcactaccatctctcgaactcctgaccccgtgatctgcccgcctca

SEQ ID NO: 529935 - DNA, 120 bp, Artificial Sequence
  ENSG00000166206_71 (sequence is synthesized)
ggcatgagccactgcacccagcctgtttgtttcttttgagacagggtcttgctctgttgctcagactggagtacagtggcacaatcatggttcattgttacttccaactcccaggctcta

SEQ ID NO: 529936 - DNA, 120 bp, Artificial Sequence
  ENSG00000166206_72 (sequence is synthesized)
cctcagcctcctgagtagctgtgactgaaggtgcaggcccccacaaccagctattttttttgtgtgtgtgtgtgaagatggggttttattatgttgcccagactggtctcaaacttctag

SEQ ID NO: 529937 - DNA, 120 bp, Artificial Sequence
  ENSG00000166206_73 (sequence is synthesized)
attttttttgtgtgtgtgtgtgaagatggggttttattatgttgcccagactggtctcaaacttctagcttcaagcagtcctccagccttggactcccaaaatgctgggattataggcat

SEQ ID NO: 529938 - DNA, 120 bp, Artificial Sequence
  ENSG00000166206_74 (sequence is synthesized)
tacatgcttagctatttgtcctaatagttaccagtttattcttccacattaactttagaatcatttattttatcaaattcctaaaagtatagcttgtgttgtttgttgaaattatgcaca

SEQ ID NO: 529939 - DNA, 120 bp, Artificial Sequence
  ENSG00000166206_75 (sequence is synthesized)
tgtagcactactttggcaagagcaaaagatatactatattcaatgtttcttgcgtgaacatggcatgtcctcattcatgtctttgtttatggcttttagtaaagttttgtcatttactcc

SEQ ID NO: 529940 - DNA, 120 bp, Artificial Sequence
  ENSG00000166206_76 (sequence is synthesized)
actgactgctaaactttccatttttaacttaacatttcttgctaaacttactccactttttgaaagtgtgatgctcttagaagtggaatcattgctccattatttttctagctggctttc

SEQ ID NO: 529941 - DNA, 120 bp, Artificial Sequence
  ENSG00000166206_77 (sequence is synthesized)
cccggtatgtgggaaggctcatggtcaatttgtatataactacctttaagtatgcatctatcaaaaattatatctagtcagtctgatgtttcattattttcaacagtttagttaatcctg

SEQ ID NO: 529942 - DNA, 120 bp, Artificial Sequence
  ENSG00000166206_78 (sequence is synthesized)
attattttagtcttacaatcatattgcttataatgatgatttttaatcttcattttcaattgtttttattcttatttctgttttattgtatttccaccttccagaacaatgataaccagt

SEQ ID NO: 529943 - DNA, 120 bp, Artificial Sequence
  ENSG00000166206_79 (sequence is synthesized)
gataacagtgttaatatcagcacatttttcattgcaatgggtgcttcttgtggcccaccatgaaggatgagctgcacttttagtttaatgtaactatttcttattcttttacttccattg

SEQ ID NO: 529944 - DNA, 120 bp, Artificial Sequence
  ENSG00000166206_80 (sequence is synthesized)
ttttttgttcctgatatataaattagtatctttaagtccaccaacaccactatgcattttgtgcaatttagaaattacttcaggcatgtgactagtaagcatgttagtgctaatactatc

SEQ ID NO: 529945 - DNA, 120 bp, Artificial Sequence
  ENSG00000166206_81 (sequence is synthesized)
tatgcagaggagcaagtacagtgtgaaataaaggaatgcgaacatttatgtgaaatgtgtattcatgctaaatctgtctttaggcttaactctattaaaaaggaattgtcaaactgccaa

SEQ ID NO: 529946 - DNA, 80 bp, Artificial Sequence
  ENSG00000166206_82 (sequence is synthesized)
gctgggccggaggcctcttcggccggggccgagtttccccggtccgcagagggagccgcgctcccaggcgccggcccctc

SEQ ID NO: 529947 - DNA, 120 bp, Artificial Sequence
  ENSG00000166206_83 (sequence is synthesized)
cctggctggcgtcggagccgcgagggcgcacccttcctgcgggggagtcctggccggcctagtgctcccatctgccgctgcccgtgggctcccagctcctccagcgctctgtcgcctggt

SEQ ID NO: 529948 - DNA, 120 bp, Artificial Sequence
  ENSG00000166206_84 (sequence is synthesized)
ccgggagctgcttctccccacactccgcccctgcgcctccccgagcttcagcctctcctgtaaagagcagagatggagaggaagcgacagtcacaacttccggttagcgtggcggaggct

SEQ ID NO: 529949 - DNA, 120 bp, Artificial Sequence
  ENSG00000166206_85 (sequence is synthesized)
ctcggagtctttgggacctcagcaccgggataccgggagactccctcgtgtccccatgtgggccacctaccagacagaagagacaggcttggaattcaaaactctgacagactctccatc

SEQ ID NO: 529950 - DNA, 120 bp, Artificial Sequence
  ENSG00000166206_86 (sequence is synthesized)
ccatgcaaattccatctctttgtgactgtgctcttctctttggttcatgccacatcattgcaaagttaaatgaggttctaggtagcacagggcgtggagtttgctgaaggatcactcaca

SEQ ID NO: 529951 - DNA, 120 bp, Artificial Sequence
  ENSG00000166206_87 (sequence is synthesized)
caagcggctgcccgctgttcctggctcagtgctcaccactgcacgtcacaaggagcggcaccatggctcccgtaacaggaaaaccctgcatttgctactcccggctgcacgagagtggag

SEQ ID NO: 529952 - DNA, 120 bp, Artificial Sequence
  ENSG00000166206_88 (sequence is synthesized)
ggaggcttggacctttccaccacccccttccctttgttgccagctactcttacccactagtctactcaagtcacctcagcagacacccaagacccaaactgagaggcgctgctggtggtg

SEQ ID NO: 529953 - DNA, 120 bp, Artificial Sequence
  ENSG00000166206_89 (sequence is synthesized)
cggagagcgacacagtccaaaataagacgcggagcccgagctgtcaggctgtgagtgacagccgggctcctagggctgactgacaagttctctcccttcttgtggcaagccatgtgcgag

SEQ ID NO: 529954 - DNA, 120 bp, Artificial Sequence
  ENSG00000166206_90 (sequence is synthesized)
gggcgctagacatcgcgactcaggcgtaagcatgcggggttaggagtaaagaaagaaacaagtgaaacttctatttcaatacgagtgtaacatggagggtgatagtagagaaactctgtg

SEQ ID NO: 529955 - DNA, 120 bp, Artificial Sequence
  ENSG00000166206_91 (sequence is synthesized)
taaattccccatggtggaaggtttgcagagagctggggttgttcctgctgttcctgcttgtaaagtactgctgaggaaggtcctgcccagcagagattgctttcctactgattatgtgct

SEQ ID NO: 529956 - DNA, 120 bp, Artificial Sequence
  ENSG00000166206_92 (sequence is synthesized)
tgaaatactggttggactggctgtatcactgagaccttcagactgaatttctctcacccctggacactgagattggctctcaccttgtctatccagcagtagcctacactggtagcttga

SEQ ID NO: 529957 - DNA, 120 bp, Artificial Sequence
  ENSG00000166206_93 (sequence is synthesized)
cttttcagtaccaacctggtacaaataaaatggcagcagtaacatgagaatattggaaagttagttctttgatgacacttcccctagacaagcacattaagcaaatctactcaaaacata

SEQ ID NO: 529958 - DNA, 120 bp, Artificial Sequence
  ENSG00000166206_94 (sequence is synthesized)
gcagagccgcaacctccatgttaatgatagtttatttagccgtgcatttatacgaaatggtgatgtttgctgtctccctgcttctctcttggcagatggctacaccacggatgacattga

SEQ ID NO: 529959 - DNA, 120 bp, Artificial Sequence
  ENSG00000166206_95 (sequence is synthesized)
tttggctgctcggagagtaggggggagagcggatcccagcaggttaggccggaggaacagcgccatgtgctccgggctcctggagctcctgctgcccatctggctctcctggaccctggg

SEQ ID NO: 529960 - DNA, 120 bp, Artificial Sequence
  ENSG00000166206_96 (sequence is synthesized)
aagggaataaatgctggccccgcggagcatctgtggcaatgtgcttgggtctgtggaatgtttgttatttggctatttacagtagatcttgctgctgctcactttttgggacggctctct

SEQ ID NO: 529961 - DNA, 120 bp, Artificial Sequence
  ENSG00000166206_97 (sequence is synthesized)
atttatgagctgtgatactcgctgcagaggtctgtgggtttacttctgaagtcggctagagtaaccagcccacgaacccaccgggaggaacgaaaaactcgggatacgctacctttaaga

SEQ ID NO: 529962 - DNA, 120 bp, Artificial Sequence
  ENSG00000166206_98 (sequence is synthesized)
gctgtaacgctcgctgcaaaggtctgcagcttcacatagataatgaactcagagtaccaacccaccagaagaaaaaaaaaaaaactctggacccgtcttaacagctggaggaaggaactc

SEQ ID NO: 529963 - DNA, 120 bp, Artificial Sequence
  ENSG00000166206_99 (sequence is synthesized)
aaaattttttctaaacagatttccaattctggccaagatggaatagtgccattcctcccaggtccttcctcctggaacacaaaactctggccataacacaacaaataaacacaggaagaa

SEQ ID NO: 529964 - DNA, 120 bp, Artificial Sequence
  ENSG00000166206_100 (sequence is synthesized)
agagctgggctgttactggatatatgccatgtgagctggatggcctgtgaaagagaaaggcagttggtgataaaaataattggatgattcttaaagaaatagaagagacttgctgttggc

SEQ ID NO: 529965 - DNA, 120 bp, Artificial Sequence
  ENSG00000166206_101 (sequence is synthesized)
agtcacaacttccggttagcgtggcggaggctctcggagtctttgggacctcagcaccgggataccgggagactccctcgtgtccccatgtgggccacctaccagacagaagaggattat

SEQ ID NO: 529966 - DNA, 120 bp, Artificial Sequence
  ENSG00000166206_102 (sequence is synthesized)
ggggaacgaagacagtggtctgtgcgttccaggggtgtctctgcggtttttccaaggctgcctcctggactgggagacccgggcccggcaccgccagtctctgtccgaggtgctgacagg

SEQ ID NO: 529967 - DNA, 120 bp, Artificial Sequence
  ENSG00000166206_103 (sequence is synthesized)
atccctgaagaggcaagaggcactagattgcctccctagttcctgccctgccctgcatttgacatgcactgatgattaaccatacaagtaacgactgtcaggctctcagtggcttgcaga

SEQ ID NO: 529968 - DNA, 120 bp, Artificial Sequence
  ENSG00000166206_104 (sequence is synthesized)
ccatttcgtatccttccatgttcacctgtagtttctgaactgcttcatgtagagcagccaatggctcgtgacaagcctggcagggtcactgcagccctcggcctccccttacttcaccac

SEQ ID NO: 529969 - DNA, 120 bp, Artificial Sequence
  ENSG00000166211_0 (sequence is synthesized)
gatggttatgtcttaacaattctaatttttaaaaaaaatattactattttttttcatcagagccattgcactggaaaataattttttattttcatgatagcctaccgttgaatttaccgt

SEQ ID NO: 529970 - DNA, 120 bp, Artificial Sequence
  ENSG00000166211_1 (sequence is synthesized)
tctgatattaatgaaacatctctataaagggttgaagtgtcttcccggattgtcaacttattttattttattttcttcaagcaacaattgctaaggaacagaattgtcaatttattaatg

SEQ ID NO: 529971 - DNA, 120 bp, Artificial Sequence
  ENSG00000166211_2 (sequence is synthesized)
aaatatgacgtgtgttgaacaagacaagctgggtcaagcatttgaagatgcttttgaggttctgaggcaacattcaactggagatcttcagtactcgccagattacagaaattacctggc

SEQ ID NO: 529972 - DNA, 120 bp, Artificial Sequence
  ENSG00000166211_3 (sequence is synthesized)
tttaatcaaccatcgtcctcatgtcaaaggaaattccagctgctatggagtgttgcctacagaggagcctgtctataattggagaacggtaattaacagtgctgcggacttctattttga

SEQ ID NO: 529973 - DNA, 120 bp, Artificial Sequence
  ENSG00000166211_4 (sequence is synthesized)
aggaaatattcatcaatctctgcagaacataactgaaaaccagctggtacaacccactcttctccagcaaaaggggggaaaaggcaggaagaagctccgactgtttgaataccttcacga

SEQ ID NO: 529974 - DNA, 120 bp, Artificial Sequence
  ENSG00000166211_5 (sequence is synthesized)
agatggcatcttgtattcagtgggtagataaaaccaaaggcatctttcagtttgtatcaaaaaacaaagaaaaacttgccgagctttgggggaaaagaaaaggcaacaggaagaccatga

SEQ ID NO: 529975 - DNA, 120 bp, Artificial Sequence
  ENSG00000166211_6 (sequence is synthesized)
cttaccagaaaatggccagggcactcagaaattacggaagaagtggggaaattaccaaaatccggaggaagctgacttaccagttcagtgaggccattctccaaagactctctccatcct

SEQ ID NO: 529976 - DNA, 120 bp, Artificial Sequence
  ENSG00000166211_7 (sequence is synthesized)
atttcctggggaaagagatcttctattcacagtgtgttcaacctgatcaagaatatctcagtttaaataactggaatgcaaattataattatacatatgccaattaccatgagctaaatc

SEQ ID NO: 529977 - DNA, 120 bp, Artificial Sequence
  ENSG00000166211_8 (sequence is synthesized)
accatgattgctaaatatactttcatatttcatggtttactggcatcggaaatctctacaagttttaatgatttctccctccctctctttttttcctcctctgaagaaatttaggatttt

SEQ ID NO: 529978 - DNA, 120 bp, Artificial Sequence
  ENSG00000166211_9 (sequence is synthesized)
tctcttaaagcaaatactaaagaggaaaaaaaattaactttattgttgcttttatcaaagagtatgtaatctatactaacttgttgggaaattctgccaatgaacaacttttttataata

SEQ ID NO: 529979 - DNA, 120 bp, Artificial Sequence
  ENSG00000166220_0 (sequence is synthesized)
acaaagcaggcagacttgcccacagaacccacagccttcccctcgatttgtcctcttgctccttcctgctaggacagcagggcttctcgtacacatgctgtagcgggcactgccttggca

SEQ ID NO: 529980 - DNA, 120 bp, Artificial Sequence
  ENSG00000166220_1 (sequence is synthesized)
ggaggatttggggcttccacatatcctgttctcaagattgtagcatctcagtactctagagcccagtacctgacatcaaggatgtctggagcttccttttaaggaaagaaaagatcagca

SEQ ID NO: 529981 - DNA, 120 bp, Artificial Sequence
  ENSG00000166220_2 (sequence is synthesized)
aacttgcctgttcccgtttacacttccaccaccagttcgtgagagttcctgttctgcatcctcaacactagtattaagtgagagttcctgttctgcatcctcaacgctagtattaagtgc

SEQ ID NO: 529982 - DNA, 120 bp, Artificial Sequence
  ENSG00000166220_3 (sequence is synthesized)
actggcctttagtctgttaaaaagcatacaatggctacagatgttcaattggctgattatccactgatgagtccaaaggctgagctgaaactggagaagaagtcagggcgcaagccaagg

SEQ ID NO: 529983 - DNA, 120 bp, Artificial Sequence
  ENSG00000166220_4 (sequence is synthesized)
agccccagggacagtgggccacagaaagaactggtgatcccagggattgtggatttcgagcggatccgccgggcattgaggaccccaaagccccaaacccctggcacctactgctttgga

SEQ ID NO: 529984 - DNA, 120 bp, Artificial Sequence
  ENSG00000166220_5 (sequence is synthesized)
cgcctcagtcaccactccttcttctcccggcaccacccacacccccagcacgtgacccacatccaagatctcaccgggaagcctgtctgtgtcgtcagggattttccagcccccttgcct

SEQ ID NO: 529985 - DNA, 120 bp, Artificial Sequence
  ENSG00000166220_6 (sequence is synthesized)
tcaaatggggatacccaccatctctgtccccattggagacccacagtctaatcggaacccccagctttcttctgaagcctggaagaaggagttgaaggagctagcttcccgggtggcctt

SEQ ID NO: 529986 - DNA, 120 bp, Artificial Sequence
  ENSG00000166220_7 (sequence is synthesized)
cctcaccaaggaggatgaactgaagaagaaagagaaggagcagaaggaggagcctctgcgggagcagggggcaaagtactcagcagagactgggaggctcatccccgcttccacccgggc

SEQ ID NO: 529987 - DNA, 120 bp, Artificial Sequence
  ENSG00000166220_8 (sequence is synthesized)
tgtcggccgccgcagatctcaccagggccagcagagtcagtcttccagcagacatgaaggagtccaggctttcctccttcaggatcaggagctgctggtcctggagctcctgtgtcggat

SEQ ID NO: 529988 - DNA, 120 bp, Artificial Sequence
  ENSG00000166220_9 (sequence is synthesized)
cctggaaacagacttgctaagcgcaatccagttctggctgctctacgctccgcccaaggaaaaagacctcgctctgggactcctgcagacagcagtggctcagctccttccccagcccct

SEQ ID NO: 529989 - DNA, 120 bp, Artificial Sequence
  ENSG00000166220_10 (sequence is synthesized)
agtctccatccctacagaaaagctcctaagccagcttccagaagtgcatgaacctcctcaagagaagcaagagccaccctgcagtcaatccccgaagaaaacgaagatatcaccttttac

SEQ ID NO: 529990 - DNA, 120 bp, Artificial Sequence
  ENSG00000166220_11 (sequence is synthesized)
aaaaagcgaaaaaccagagtacattggagaagctcaagtcctccagatgcattcaagccagaacacagagaagaagacatcgaagccgagggcagagagctgaggggccctaacacttgc

SEQ ID NO: 529991 - DNA, 120 bp, Artificial Sequence
  ENSG00000166220_12 (sequence is synthesized)
acctgccttgctcaagagcagccccaagggttcaggggtgtttctgtctccaccaccttcacagcagtacctgattccctaccgtgaaaactcttactaaataaaaccgtcttccctgag

SEQ ID NO: 529992 - DNA, 120 bp, Artificial Sequence
  ENSG00000166220_13 (sequence is synthesized)
caatgtgctgaactctggggatcagtgaggaagaattcagacaagttcctgctgtcacggaacttacatcccagcaaggaggaatacagacaacaaattaaaacacctggggaggagtgg

SEQ ID NO: 529993 - DNA, 120 bp, Artificial Sequence
  ENSG00000166224_0 (sequence is synthesized)
atttccgggaggggcgaggccggcggctgccgggcctccaatctcggcggcggcggcggcaacaggggagcctgggtctcgcggcctgcgagtccgtcgcgtgctgagggagacgcagga

SEQ ID NO: 529994 - DNA, 120 bp, Artificial Sequence
  ENSG00000166224_1 (sequence is synthesized)
ggtggagccggccgggtgctcgagggaaggagactggaagctggttccggcgtgaggagagtctgaaaaaggggagcgcggagaggaggctggaagaggaagatgcctagcacagacctt

SEQ ID NO: 529995 - DNA, 120 bp, Artificial Sequence
  ENSG00000166224_2 (sequence is synthesized)
ctgatgttgaaggcctttgagccctacttagagattttggaagtatactccacaaaagccaagaattatgtaaatggacattgcaccaagtatgagccctggcagctaattgcatggagt

SEQ ID NO: 529996 - DNA, 120 bp, Artificial Sequence
  ENSG00000166224_3 (sequence is synthesized)
gtcgtgtggaccctgctgatagtctggggatatgagtttgtcttccagccagagagtttatggtcaaggtttaaaaagaaatgttttaagctcaccaggaagatgcccattattggtcgt

SEQ ID NO: 529997 - DNA, 120 bp, Artificial Sequence
  ENSG00000166224_4 (sequence is synthesized)
aagattcaagacaagttgaacaagaccaaggatgatattagcaagaacatgtcattcctgaaagtggacaaagagtatgtgaaagctttaccctcccagggtctgagctcatctgctgtt

SEQ ID NO: 529998 - DNA, 120 bp, Artificial Sequence
  ENSG00000166224_5 (sequence is synthesized)
ttggagaaacttaaggagtacagctctatggacgccttctggcaagaggggagagcctctggaacagtgtacagtggggaggagaagctcactgagctccttgtgaaggcttatggagat

SEQ ID NO: 529999 - DNA, 120 bp, Artificial Sequence
  ENSG00000166224_6 (sequence is synthesized)
tttgcatggagtaaccccctgcatccagatatcttcccaggactacgcaagatagaggcagaaatcgtgaggatagcttgttccctgttcaatgggggaccagattcgtgtggatgtgtg

SEQ ID NO: 530000 - DNA, 120 bp, Artificial Sequence
  ENSG00000166224_7 (sequence is synthesized)
acttctgggggaacagaaagcatactgatggcctgcaaagcatatcgggatctggcctttgagaaggggatcaaaactccagaaattgtggctccccaaagtgcccatgctgcatttaac

SEQ ID NO: 530001 - DNA, 120 bp, Artificial Sequence
  ENSG00000166224_8 (sequence is synthesized)
aaagcagccagttactttgggatgaagattgtgcgggtcccattgacgaagatgatggaggtggatgtgcgggcaatgagaagagctatctccaggaacactgccatgctcgtctgttct

SEQ ID NO: 530002 - DNA, 120 bp, Artificial Sequence
  ENSG00000166224_9 (sequence is synthesized)
accccacagtttcctcatggtgtaatagatcctgtccctgaagtggccaagctggctgtcaaatacaaaataccccttcatgtcgacgcttgtctgggaggcttcctcatcgtctttatg

SEQ ID NO: 530003 - DNA, 120 bp, Artificial Sequence
  ENSG00000166224_10 (sequence is synthesized)
gagaaagcaggatacccactggagcacccatttgatttccgggtgaaaggtgtaaccagcatttcagctgacacccataagtatggctatgccccaaaaggctcatcattggtgttgtat

SEQ ID NO: 530004 - DNA, 120 bp, Artificial Sequence
  ENSG00000166224_11 (sequence is synthesized)
agtgacaagaagtacaggaactatcagttcttcgtcgatacagattggcagggtggcatctatgcttccccaaccatcgcaggctcacggcctggtggcattagcgcagcctgttgggct

SEQ ID NO: 530005 - DNA, 120 bp, Artificial Sequence
  ENSG00000166224_12 (sequence is synthesized)
gccttgatgcacttcggtgagaacggctatgttgaagctaccaaacagatcatcaaaactgctcgcttcctcaagtcagaactggaaaatatcaaaggcatctttgtttttgggaatccc

SEQ ID NO: 530006 - DNA, 120 bp, Artificial Sequence
  ENSG00000166224_13 (sequence is synthesized)
caattgtcagtcattgctctgggatcccgtgattttgacatctaccgactatcaaacctgatgactgctaaggggtggaacttgaaccagttgcagttcccacccagtattcatttctgc

SEQ ID NO: 530007 - DNA, 120 bp, Artificial Sequence
  ENSG00000166224_14 (sequence is synthesized)
atcacattactacacgcccggaaacgagtagctatacaattcctaaaggacattcgagaatctgtcactcaaatcatgaagaatcctaaagcgaagaccacaggaatgggtgccatctat

SEQ ID NO: 530008 - DNA, 120 bp, Artificial Sequence
  ENSG00000166224_15 (sequence is synthesized)
ggcatggcccagacaactgttgacaggaatatggttgcagaattgtcctcagtcttcttggacagcttgtacagcaccgacactgtcacccagggcagccagatgaatggttctccaaaa

SEQ ID NO: 530009 - DNA, 120 bp, Artificial Sequence
  ENSG00000166224_16 (sequence is synthesized)
ccccactgaacttggaccctttctagtctcaaggggattccagccttcagaaggttcttgggatatggaacaggccgtgcacaactttgacatctggtcttgctccatagagcacaactc

SEQ ID NO: 530010 - DNA, 120 bp, Artificial Sequence
  ENSG00000166224_17 (sequence is synthesized)
aagatagaccatgagacagcttgagcctcaggattcttgttcttcctcttatcttccttttgtggtttttaatttgaagaccccagagaattccattacataatgattttgcccttgtta

SEQ ID NO: 530011 - DNA, 120 bp, Artificial Sequence
  ENSG00000166224_18 (sequence is synthesized)
taaatgttaccctaggaattgttttaaccatttccttttctaaactctctagctttcaactttacttaaacattgtgtggtagctctgacctgtcctgattctttagagaagctggggta

SEQ ID NO: 530012 - DNA, 120 bp, Artificial Sequence
  ENSG00000166224_19 (sequence is synthesized)
cagtttatgagatagctagagcttctttgttatctcaggcaggaggcgtttacataacagatgtttcctcagctgggtgtgaggtatactctaagcaggaggctttttcagccttctctc

SEQ ID NO: 530013 - DNA, 71 bp, Artificial Sequence
  ENSG00000166224_20 (sequence is synthesized)
cacccaccaccacgcctggctaatttttcaattttctttttcagtagagacgggccgcccccccgcctcag

SEQ ID NO: 530014 - DNA, 79 bp, Artificial Sequence
  ENSG00000166224_21 (sequence is synthesized)
tctctcttaagagtaggttcattgtctgtcttagagtcacttctattgcaactcattttctttttccagggcacagatc

SEQ ID NO: 530015 - DNA, 120 bp, Artificial Sequence
  ENSG00000166224_22 (sequence is synthesized)
cttctattgcaactcattttctttttccagggcacagatcgaccaagctgccgttccctattctgcaggacaggactattctagcatacctgcttcgtccacccaggcagggtttggggt

SEQ ID NO: 530016 - DNA, 120 bp, Artificial Sequence
  ENSG00000166224_23 (sequence is synthesized)
agtccccatttgacacttggttgccaccatctttggagattattgtttggaatgatgcttccattggctttttcttgttaccatggactaggaagaaaacatggtttccaaataatctgg

SEQ ID NO: 530017 - DNA, 120 bp, Artificial Sequence
  ENSG00000166224_24 (sequence is synthesized)
gagcttttggccatggtgccgccttcctgaattggcagtggtcagagcacacctgaaccctatcctgggctggtgatgagcagaaatcagacctttttctatgcttttttgaatatcaga

SEQ ID NO: 530018 - DNA, 120 bp, Artificial Sequence
  ENSG00000166224_25 (sequence is synthesized)
gtaggatgaacacccagattcaaatatgtcaccaaagttggtggtggtccttccctgcacccttgcgttaagccattatgtaatgaaaatgtgtttgcttgaaggaacagctcaaagcac

SEQ ID NO: 530019 - DNA, 120 bp, Artificial Sequence
  ENSG00000166224_26 (sequence is synthesized)
cttcacaagttgccttgacttaccctaggtgggtgtgaaagagcacccgtagcaaggaaaattttctctattagtgtgttcttctgcctcttcccccttgattcagctttcagaggtact

SEQ ID NO: 530020 - DNA, 120 bp, Artificial Sequence
  ENSG00000166224_27 (sequence is synthesized)
atggcagttttgcctcaggtgctgaacatttctcagccctggctaaaagggagcagcacagggagagaaacaggataggaaagcagaatggcgagcagcctatggcccagggcctgtaat

SEQ ID NO: 530021 - DNA, 120 bp, Artificial Sequence
  ENSG00000166224_28 (sequence is synthesized)
cccttcccaagactagctgctcagggtggtgcagggacaggaccagaccctgcgcctatttcctgccttctttcccctatagggaactctgtaggctgagccactgtcctgctcttatga

SEQ ID NO: 530022 - DNA, 120 bp, Artificial Sequence
  ENSG00000166224_29 (sequence is synthesized)
cattatatcttgtgcctttctcctcagcagtgagcagtgagctactcctggcccaggccctaggggaaatggatcagtctttgaggtttctatttggggaggggagtacttaagatgagt

SEQ ID NO: 530023 - DNA, 120 bp, Artificial Sequence
  ENSG00000166224_30 (sequence is synthesized)
caaaagacactttcctctgttccattccccatctcagggactcctgaatattcagcctctccaggctggtgtcttctagtttcccccactgggaatgctggctgggagagccatgactac

SEQ ID NO: 530024 - DNA, 120 bp, Artificial Sequence
  ENSG00000166224_31 (sequence is synthesized)
cagacttttcctcaggctccttggcatgttagtctgaattgttcttgagcactgtactactgacccaacaactgtgactagctggccacgccattcagggctggtgtggcatttatgtgt

SEQ ID NO: 530025 - DNA, 120 bp, Artificial Sequence
  ENSG00000166224_32 (sequence is synthesized)
gtgtgtgtgtgtgtgtgtgtttttcctgtttgcccagcagtgcattgtgggttccaagagtgggtagtgtgtgtatgtgtgtgtgtcagagggagacctggcaggcacctctttgagagt

SEQ ID NO: 530026 - DNA, 120 bp, Artificial Sequence
  ENSG00000166224_33 (sequence is synthesized)
agctgtggtcagagctgtttggtcagtgcattatgttgaatgaggtccaggaacccagagccacccagcagacaccactgtggcttgccagctgccaagatggagaagcatgtgcccctg

SEQ ID NO: 530027 - DNA, 120 bp, Artificial Sequence
  ENSG00000166224_34 (sequence is synthesized)
tagagcgtctccccagaaccagaccccgagccactcgcttcctctgtgctgtgacaacattggtgccaggggagatggtgtttttcaaagggacctactgtagccactttaatttacaat

SEQ ID NO: 530028 - DNA, 120 bp, Artificial Sequence
  ENSG00000166224_35 (sequence is synthesized)
taagagccttagtttgacttaacacttttgtaggcttttcattgtgtatttttgtgtatgtgtgcatatagcagctactctgtagcagaggtgggtagagacacttaatagtatcatgtc

SEQ ID NO: 530029 - DNA, 120 bp, Artificial Sequence
  ENSG00000166224_36 (sequence is synthesized)
gcatgcagatgtcacatcggcctctgcaaaaactgtactgtcttgtttctgcattagacttaagtagtcatgtgaatatactgctatgtcacttttaatattacgagttttatacttgga

SEQ ID NO: 530030 - DNA, 120 bp, Artificial Sequence
  ENSG00000166224_37 (sequence is synthesized)
aaatggtacttgcttcttttaaatctctgtcttctctaacctcccccttcccatttcaatgctcccttcctaatttcagcaataatctcaaaaagcaattaaatagttaaatgaccctaa

SEQ ID NO: 530031 - DNA, 120 bp, Artificial Sequence
  ENSG00000166224_38 (sequence is synthesized)
ttgtaattactgtggatggttgcattcatttgattacttgggcacacacgagatgacaaatggggcagtggccatgcttgaatgggctcctggtgagagattgccccctggtggtgaaac

SEQ ID NO: 530032 - DNA, 120 bp, Artificial Sequence
  ENSG00000166224_39 (sequence is synthesized)
aatcgtgtgtgcccactgataccaagaccaatgaaagagacacagttaagcagcaatccatctcatttccaggcacttcaataggtcgctgattggtccttgcaccagcagtggtagtcg

SEQ ID NO: 530033 - DNA, 120 bp, Artificial Sequence
  ENSG00000166224_40 (sequence is synthesized)
tacctatttcagagaggtctgaaattcaggttcttagtttgccagggacaggccctatcttatatttttttccatcttcatcatccacttctgcttacagtttgctgcttacaataactt

SEQ ID NO: 530034 - DNA, 120 bp, Artificial Sequence
  ENSG00000166224_41 (sequence is synthesized)
aatgatggattgagttatctgggtggtctctagccatctgggcagtgtggttctgtctaaccaaagggcattggcctcaaaccctgcatttggtttaggggctaacagagctcctcagat

SEQ ID NO: 530035 - DNA, 120 bp, Artificial Sequence
  ENSG00000166224_42 (sequence is synthesized)
aatcttcacacacatgtaactgctggagatcttattctattatgaataagaaacgagaagtttttccaaagtgttagtcaggatctgaaggctgtcattcagataacccagcttttcctt

SEQ ID NO: 530036 - DNA, 120 bp, Artificial Sequence
  ENSG00000166224_43 (sequence is synthesized)
ttggcttttagcccattcagactttgccagagtcaagccaaggattgcttttttgctacagttttctgccaaatggcctagttcctgagtacctggaaaccagagagaaagaggatccag

SEQ ID NO: 530037 - DNA, 120 bp, Artificial Sequence
  ENSG00000166224_44 (sequence is synthesized)
gatgtacttggatgaggaggcctggcttatctaggaagtcgtgtctggggtgcttattgctgctccatacagctgtacgtcagccccttggccttctctgtaggttcttggcagcaatga

SEQ ID NO: 530038 - DNA, 120 bp, Artificial Sequence
  ENSG00000166224_45 (sequence is synthesized)
gcagctttcactcagtgacacaagtaattactgagtcctaatttgatagccaccaactgtacctgggtaggcaaagtcagatttttgagaacctttttcctgatttgaagttttaattac

SEQ ID NO: 530039 - DNA, 120 bp, Artificial Sequence
  ENSG00000166224_46 (sequence is synthesized)
ttaccttattttcttttatgctttcctctgtcttgtaatcttttctcttcttaatatccttccctataatttcaattatttggattaattttagaataaacctatttatttctaaaaaaa

SEQ ID NO: 530040 - DNA, 120 bp, Artificial Sequence
  ENSG00000166224_47 (sequence is synthesized)
actctgctcataatagttctcaaaattcctaggactggataggaaaggagagaagaaggaagctattgcagaaaaaggccactccaaagccatatagagaacaaaaaataagtatagaca

SEQ ID NO: 530041 - DNA, 120 bp, Artificial Sequence
  ENSG00000166224_48 (sequence is synthesized)
aaggcaaatgttcctgctgttagaaggcagttgaggatgaggacaacattattatcagattgcctttattgtagctaaatgctattaatatctttttcacattgctgataataatgattt

SEQ ID NO: 530042 - DNA, 120 bp, Artificial Sequence
  ENSG00000166224_49 (sequence is synthesized)
ttccactcaacatttttttcttttgtatccagaggagtttcttcctgtttcttctttatcagaacctgtcttcccagagattcttgcttactgaccagtgaccttacctttctctgcaga

SEQ ID NO: 530043 - DNA, 120 bp, Artificial Sequence
  ENSG00000166224_50 (sequence is synthesized)
tctggagggcccactgtctgtgctgggccctgacagcagaagggccctcctgttgactagccgtttccagtcagatgggtctgactgcctttgattgtggcagccagaatatgaaaaact

SEQ ID NO: 530044 - DNA, 120 bp, Artificial Sequence
  ENSG00000166224_51 (sequence is synthesized)
gttgtatgaatggagtagttgaggaaagtctaaagcaaatacccgtgacctcattttctctttcaacactatttgaaatactatttccaaatgtgtaggagaaatggggattttagtttc

SEQ ID NO: 530045 - DNA, 120 bp, Artificial Sequence
  ENSG00000166224_52 (sequence is synthesized)
ttcaggtttgttgtctttcagagttggaaggggccactgagctgatgcttggccgctgtgtgaacatttctgcttgaacatgtgttgtgccgggaagccttcttctcattctcactgagt

SEQ ID NO: 530046 - DNA, 120 bp, Artificial Sequence
  ENSG00000166224_53 (sequence is synthesized)
tcagttggtctgacttcagatccctccctcttgcctactttgtgtccttacccctggtaagggtagaggttgctgaccattgtgactgatgggagagggtctgtgtggagcagatgggat

SEQ ID NO: 530047 - DNA, 120 bp, Artificial Sequence
  ENSG00000166224_54 (sequence is synthesized)
aggatagctccaccctctagggggcactttggcaatgggggactgggggaggagggagtcttttttcttctagtgtagtctgaaaatacatgttttattattaaattattattaaatctt

SEQ ID NO: 530048 - DNA, 120 bp, Artificial Sequence
  ENSG00000166224_55 (sequence is synthesized)
gaggtggagattgcagtgagccgagatcacgccatggcactccagtctaggtgaaagattgagaccccatctcaaaaaaaaacaaaaaagaaaaaagtagaatttaggtattcctacttt

SEQ ID NO: 530049 - DNA, 120 bp, Artificial Sequence
  ENSG00000166224_56 (sequence is synthesized)
aacaaaaaagaaaaaagtagaatttaggtattcctacttttacagtcaaaagtccactggtgtttgcataacaatgatgttttgactagttattggactaaaagtaggacacatgaagca

SEQ ID NO: 530050 - DNA, 120 bp, Artificial Sequence
  ENSG00000166224_57 (sequence is synthesized)
ggtgactaggaatttggaaatattattgcttaggtcattactggaccttacgaagagattgttgcactggtgacttggactttgctggtccctccccgactcttcacagctggcttgacg

SEQ ID NO: 530051 - DNA, 120 bp, Artificial Sequence
  ENSG00000166224_58 (sequence is synthesized)
taaaccacaggacatgctgctgatttgcagagctgacctcagctgtgacttctgggggaacagaaagcatactgatggcctgcaaagcatatcgggatctggcctttgagaaggggatca

SEQ ID NO: 530052 - DNA, 120 bp, Artificial Sequence
  ENSG00000166225_0 (sequence is synthesized)
tcttcctatagatacgtaccaagattaacaatgactccaggatagagttatgaccaacactactaaaggttaaatcagcaaacaaagaaaacatggtattttgaaatatgattaaactcc

SEQ ID NO: 530053 - DNA, 120 bp, Artificial Sequence
  ENSG00000166225_1 (sequence is synthesized)
tgatgctgcagcagaggctaagaatattaatggccagatctagtgcacacatggtcttctgaagaagccatgggtagctgttgtagctgtccagataaagacactgtcccagataaccat

SEQ ID NO: 530054 - DNA, 120 bp, Artificial Sequence
  ENSG00000166225_2 (sequence is synthesized)
cggaacaagtttaaggtcattaatgtggatgatgatgggaatgagttaggttctggcataatggaacttacagacacagaactgattttatacacccgcaaacgtgactcagtaaaatgg

SEQ ID NO: 530055 - DNA, 120 bp, Artificial Sequence
  ENSG00000166225_3 (sequence is synthesized)
cactacctctgcctgcgacgctatggctatgactcgaatctcttttcttttgaaagtggtcgaaggtgtcaaactggacaaggaatctttgcctttaagtgtgcccgtgcagaagaatta

SEQ ID NO: 530056 - DNA, 120 bp, Artificial Sequence
  ENSG00000166225_4 (sequence is synthesized)
tttaacatgttgcaagagattatgcaaaataatagtataaatgtggtggaagagccagttgtagaaagaaataatcatcagacagaattggaagtccctagaacacctcgaacacctaca

SEQ ID NO: 530057 - DNA, 120 bp, Artificial Sequence
  ENSG00000166225_5 (sequence is synthesized)
actccaggatttgctgctcagaacttacctaatggatatccccgatatccctcatttggagatgcttcatcccatccgtcaagcagacatccttctgtgggaagtgctcgcctgccttca

SEQ ID NO: 530058 - DNA, 120 bp, Artificial Sequence
  ENSG00000166225_6 (sequence is synthesized)
gtaggggaagaatctacacatcctttgcttgtggctgaggaacaagtacatacctatgtcaacactacaggtgtgcaagaagagcggaaaaaccgcacaagtgtgcatgttccattggag

SEQ ID NO: 530059 - DNA, 120 bp, Artificial Sequence
  ENSG00000166225_7 (sequence is synthesized)
gcgagggtttctaacgctgaaagcagcacaccaaaagaagaaccaagtagtattgaggacagggatcctcagattcttcttgaacctgaaggagtcaaatttgttttagggccaacccct

SEQ ID NO: 530060 - DNA, 120 bp, Artificial Sequence
  ENSG00000166225_8 (sequence is synthesized)
gttcaaaagcagttaatggaaaaagagaaactggagcaacttggaagagatcaagttagtggaagtggagcaaataacacagaatgggacactggctatgacagtgatgaacgaagagat

SEQ ID NO: 530061 - DNA, 120 bp, Artificial Sequence
  ENSG00000166225_9 (sequence is synthesized)
gcaccctctgttaacaaactggtgtatgaaaatataaatgggctatctatccctagtgcctcaggggtcaggagaggtcgtctgacatccaccagtacctcagatacccagaatatcaac

SEQ ID NO: 530062 - DNA, 120 bp, Artificial Sequence
  ENSG00000166225_10 (sequence is synthesized)
aactcagctcagagaagaactgcattattaaactatgaaaatctaccatctttgcctcctgtttgggaagcccgcaagctaagtagggatgaagatgacaatttaggaccaaagacccca

SEQ ID NO: 530063 - DNA, 120 bp, Artificial Sequence
  ENSG00000166225_11 (sequence is synthesized)
tctctaaatggctaccataataatctagatccaatgcataactatgtaaatacagagaatgtaacagtgccagcaagtgctcacaaaatagaatattcaaggcgtcgggactgtacacca

SEQ ID NO: 530064 - DNA, 120 bp, Artificial Sequence
  ENSG00000166225_12 (sequence is synthesized)
acagtctttaactttgatatcagacgcccaagtttagaacacaggcagcttaattacatacaggttgacttggaaggtggcagtgactctgacaaccctcagactccaaaaacgcctaca

SEQ ID NO: 530065 - DNA, 120 bp, Artificial Sequence
  ENSG00000166225_13 (sequence is synthesized)
actccccttccacaaacccctaccaggcgcacagagctgtatgccgtgatagacatcgagagaactgctgctatgtcaaatttgcagaaagcactgccacgagatgatggtacatctagg

SEQ ID NO: 530066 - DNA, 120 bp, Artificial Sequence
  ENSG00000166225_14 (sequence is synthesized)
aaaactagacacaatagtactgatctgcccatgtgagcctggaaagcattgtgttgtttgcacctttgtgaagtttttaaaaatgaagatgcaagtgcttcattttcatttctaaacact

SEQ ID NO: 530067 - DNA, 120 bp, Artificial Sequence
  ENSG00000166225_15 (sequence is synthesized)
aactccttttatagactgataaaatttttttctgaatatttcatgtgcatctttaactaaagggaattaatgtagagcaggtactccttaaagaacactaatttcattatatactactcg

SEQ ID NO: 530068 - DNA, 120 bp, Artificial Sequence
  ENSG00000166225_16 (sequence is synthesized)
ttgtacagcagcattcccgttttcacagtgcctatttaaaatgagagttgaagtaaatgacatgctggttgatttttatcaatattctggacttaacgcatacctttcatgtctaagtca

SEQ ID NO: 530069 - DNA, 120 bp, Artificial Sequence
  ENSG00000166225_17 (sequence is synthesized)
tggttggcttttaaaactttttataaagcctcttgacaatgtacattgctaacaggtaactataggctttgaaagtaatgctcgtagattcagtgttcacagtatgtggcctccagcatg

SEQ ID NO: 530070 - DNA, 120 bp, Artificial Sequence
  ENSG00000166225_18 (sequence is synthesized)
taacatgaggaatcctttatttcattaattaatggctttttgacttgagccaaaacatatgtaaaggaaacagaagtaccgcacctcctcttacaccagtcagctcctttgccttcagtg

SEQ ID NO: 530071 - DNA, 120 bp, Artificial Sequence
  ENSG00000166225_19 (sequence is synthesized)
ttactagaaagcggcctgtgtccatgagtgtgctttgctgttggtgcactgaaaggcaggaaggagacaagattttctatttactcatctcatgatgtcatttgaagggcatgtccagat

SEQ ID NO: 530072 - DNA, 120 bp, Artificial Sequence
  ENSG00000166225_20 (sequence is synthesized)
atcttaaaattataataggctcaagaatcagtctcaggtcactttacccaaaaacatttgaaaatctgaaccacaatctcctgaaagtttttctcctatagattgttgacaacacattgt

SEQ ID NO: 530073 - DNA, 120 bp, Artificial Sequence
  ENSG00000166225_21 (sequence is synthesized)
tttctggaggcatttgtgccattaggtttccatttatcttcagtttttttctttggtgtttgggatgtcttattttgttgccttatgtccttttcaatttaaaatgtttgagtttgtata

SEQ ID NO: 530074 - DNA, 120 bp, Artificial Sequence
  ENSG00000166225_22 (sequence is synthesized)
tagttttgaaattggattatgtgttcattgttgtttagtttgcatttttgtcaaattatggttttgaaggttcatttggaacttactgttagtctgtaacagggttgcccttgtccagta

SEQ ID NO: 530075 - DNA, 120 bp, Artificial Sequence
  ENSG00000166225_23 (sequence is synthesized)
tttatttataagctgtttacttttcaagttgataaaaacattctccaattctaaatttgcttgtgtccataggtgatctctttagcaaactgagaaaaaaaggaagctacttttaacatg

SEQ ID NO: 530076 - DNA, 120 bp, Artificial Sequence
  ENSG00000166225_24 (sequence is synthesized)
caaagttccctcaaggtgtaccgtgttgtctctgtgggcactcttccccagcactttagcagtaattcccccagctacacgctgcagttgtactctgcccactctagtgttcctcagctc

SEQ ID NO: 530077 - DNA, 120 bp, Artificial Sequence
  ENSG00000166225_25 (sequence is synthesized)
tgctgtccttttacttgtagctggatctttgattatccttcgatttccatgaaatattaatattgttgccagcatagcaggtacagtggaagtcttgtagcagtgagattgtatcataat

SEQ ID NO: 530078 - DNA, 120 bp, Artificial Sequence
  ENSG00000166225_26 (sequence is synthesized)
ttaggatttaaaatgaattaaagtttatataaactgaagagtctccatatgtcaaactcttggaaaatcaaagatgttccaatttcctaaacactagagaatacgagagaaggtagagtg

SEQ ID NO: 530079 - DNA, 120 bp, Artificial Sequence
  ENSG00000166225_27 (sequence is synthesized)
ctggatctaccagatataactaaggttaatttagcatgaaaaagttttagtcatattggcatccaacctattcagtaaccgaatcataggacaatgatggattaggagaacaatagagtg

SEQ ID NO: 530080 - DNA, 120 bp, Artificial Sequence
  ENSG00000166225_28 (sequence is synthesized)
ggatcattataaagaaaataaattattaaaggtgtctttatcgttttagtgccatttttagtgtctttactataaatcaatatcagtgtattttatcattctatgtgcatagcagaattt

SEQ ID NO: 530081 - DNA, 120 bp, Artificial Sequence
  ENSG00000166225_29 (sequence is synthesized)
tcttttctcccttttgttcccctgtgaacttggtgcttattaaagtgctcactgttctcttaaaagagagcagtggtataggtgtgcagtttccatgatgcaggttccatttttaatata

SEQ ID NO: 530082 - DNA, 120 bp, Artificial Sequence
  ENSG00000166225_30 (sequence is synthesized)
ttgttccacttatcctttcttctgagtaaattgctaattgtgccaaatttatgtaatagtttttgtaatgtggaataagaattatgatggaaccattgcacatttttttctgaaacagcc

SEQ ID NO: 530083 - DNA, 120 bp, Artificial Sequence
  ENSG00000166225_31 (sequence is synthesized)
agtcaaggcagaacattaatctccaaatgcaagggctgatctatttattcattttggaggttgggtactttattctttctttccgtcatccttttcattgtttcccccggattctaatta

SEQ ID NO: 530084 - DNA, 120 bp, Artificial Sequence
  ENSG00000166225_32 (sequence is synthesized)
gtttttattttttttagataactccaatataatcattacagtttatgctttaaatactatgtgctttaaaaaggaaaatgggaccaatttgtctgctaagaatttgattttaggtactat

SEQ ID NO: 530085 - DNA, 120 bp, Artificial Sequence
  ENSG00000166225_33 (sequence is synthesized)
aagagtattaggaaaatatatacaactggtgttaatttctagatattttctagaaatcacttgtgttcctatttaataaaaggtaatttagaatactacttgtcctttgcagtagtttag

SEQ ID NO: 530086 - DNA, 120 bp, Artificial Sequence
  ENSG00000166225_34 (sequence is synthesized)
taatgggcattaagctgtgtcctcgaaggatgtacctattactaggtgcattttagaatgaaatattgatattttattagcatataattgtggccatatatctcagattttctgaggcag

SEQ ID NO: 530087 - DNA, 120 bp, Artificial Sequence
  ENSG00000166225_35 (sequence is synthesized)
atctaattttagataattctgttggtagaccatgtgatccttctttttggttttggaaatataatcattgttaatgttttccctccaaatagaatactgttttatccatacaaatcataa

SEQ ID NO: 530088 - DNA, 120 bp, Artificial Sequence
  ENSG00000166225_36 (sequence is synthesized)
cagcatctatcccatgctagggttggaaactgatattggtattacttgtgttttttcttagtgtgttttatttcccagtttcatcttcttctaaaaatgaaaatatggtgccttccctcc

SEQ ID NO: 530089 - DNA, 120 bp, Artificial Sequence
  ENSG00000166225_37 (sequence is synthesized)
ctccaggaagactggcaaatatttccttttatttactgctgctgtggagtgatgagatatgcactttactctttaagattcagcaaaaagcttttcacttctcagtatatccagaataca

SEQ ID NO: 530090 - DNA, 120 bp, Artificial Sequence
  ENSG00000166225_38 (sequence is synthesized)
tcatatctgggacttaggaaaatttgccaagcaatctttgtttttatagatactaatgttgaccctctccagcgttcaatgttataaatagaacaagtcaagctagtgtttatctcctcc

SEQ ID NO: 530091 - DNA, 120 bp, Artificial Sequence
  ENSG00000166225_39 (sequence is synthesized)
ccctccccaaaactgtggcacagcatataaaaatgtacctcaataatgttctattaaaaatgggacaggggccttatgttttcataatttcccaacaatgtgccgccatatttttgcctc

SEQ ID NO: 530092 - DNA, 120 bp, Artificial Sequence
  ENSG00000166225_40 (sequence is synthesized)
aaggtaaaggttttaacagatgaaaaagtacttcccaattcccccgtgctattcctaacctataatgcccaaatgttttgtgcaatgtgtagtgtgtgtgtataaatacatatattcttg

SEQ ID NO: 530093 - DNA, 120 bp, Artificial Sequence
  ENSG00000166225_41 (sequence is synthesized)
aaatagacataccatcagagacatcattcacaagtaactgatgtattggcatctcattcatatttctgatgtgtgaggtatatggtactaattaccttttccttgatgtttgccaaattt

SEQ ID NO: 530094 - DNA, 120 bp, Artificial Sequence
  ENSG00000166225_42 (sequence is synthesized)
gaataaaggcattggtacgaaattacagaatgtaaagaaaatgtttttggcttgaaaaattaacatattttatgacgtaccacagtatactctgcccaaaccagcaccctatctatcttt

SEQ ID NO: 530095 - DNA, 120 bp, Artificial Sequence
  ENSG00000166225_43 (sequence is synthesized)
cctgttctttacatccctgttccccatccctacttcctcatttttggtataacacagttcttttgtagcatcattataattgcagttctatggcaattggacagttatagcatggaaaca

SEQ ID NO: 530096 - DNA, 120 bp, Artificial Sequence
  ENSG00000166225_44 (sequence is synthesized)
gactggtataagtagtacagtagtcaccagtgtgccacatttgcattagtaatgcaaaatatacattttataaaggacaaactttgtgttatgttttattttcattacattgtataatat

SEQ ID NO: 530097 - DNA, 120 bp, Artificial Sequence
  ENSG00000166225_45 (sequence is synthesized)
tgtaagactattgtatgtcctaatttgcattataaatgtttttttcctacgtaaaggcataaatatagcaactttgtataaaggtagcttattagatttttaattttttcttttataaaa

SEQ ID NO: 530098 - DNA, 120 bp, Artificial Sequence
  ENSG00000166225_46 (sequence is synthesized)
aattgtccaacagtgggactaccattgccaaattgtatatgaaatatgaattttacccccatggttaatttcttttataaacattccatatttctctaataaaaagacataagtgatact

SEQ ID NO: 530099 - DNA, 120 bp, Artificial Sequence
  ENSG00000166225_47 (sequence is synthesized)
gtactatgcatacattgtatcttaatgctgtttcagatcagcattttaaattttggtttgcatttttaatattggcaaaacgtaaccactgttaattaaaataaaaccttgttgtatatg

SEQ ID NO: 530100 - DNA, 120 bp, Artificial Sequence
  ENSG00000166225_48 (sequence is synthesized)
taacaacataattttccctctatcccttcccaccctttgttctctatttctccctatcagtgccaacttcatacattttgtagcatggcaataaaatataacttttacactgaggccgag

SEQ ID NO: 530101 - DNA, 120 bp, Artificial Sequence
  ENSG00000166225_49 (sequence is synthesized)
tgtggctttttggaggaagtggggatgggacgattgccctctagttgtcctttgcatatgactgttttttgccatataagccatgtcatcaggcatgaaaagttttctcatatatgatgt

SEQ ID NO: 530102 - DNA, 120 bp, Artificial Sequence
  ENSG00000166225_50 (sequence is synthesized)
aaacttgcttttaaggacaagtgtgaatgtgctttttaagcttaatttttgtcatgacaactaattttttttatctttggagaagtcagagttctttacaatcaaacgtttattaactgg

SEQ ID NO: 530103 - DNA, 120 bp, Artificial Sequence
  ENSG00000166225_51 (sequence is synthesized)
agtacttagaataagctagtaattgaatttagttcaagggctaagcaacacatttttaaatccttatttattgtagagtattagtatactgtcctacaaattatgtaaaatatggtttaa

SEQ ID NO: 530104 - DNA, 120 bp, Artificial Sequence
  ENSG00000166225_52 (sequence is synthesized)
tattagatgactttggattttgcaatgccttactgttgtcattctagcataaatatccataatgaggtactcaagttgatactggaagctgagctgatcatacactgacctgaagcattc

SEQ ID NO: 530105 - DNA, 120 bp, Artificial Sequence
  ENSG00000166225_53 (sequence is synthesized)
atgaaaagctgctttattgaataaagtctgattggagttcttttcatgctcactttccccttattgctgaaagtagattgcaataaaaccccaataaaacgtttggtcggatatctactt

SEQ ID NO: 530106 - DNA, 120 bp, Artificial Sequence
  ENSG00000166225_54 (sequence is synthesized)
ggaagtgcttttccaagattcgggccggagagaggccttgtaggcacagcggctgagactcgatctgctccaagtaggggctccagcgcgggtcggagtctgggggttcgcgcccgccga

SEQ ID NO: 530107 - DNA, 120 bp, Artificial Sequence
  ENSG00000166225_55 (sequence is synthesized)
cccgcgccctgctccctctcagcacctgggcggacgaaatgaccattaagaagtagatgcccagatgcaaaagtgatgaaacagtccatttgtcataaagtaagatgcagctgtggcatg

SEQ ID NO: 530108 - DNA, 120 bp, Artificial Sequence
  ENSG00000166225_56 (sequence is synthesized)
gcgccctgctccctctcagcacctgggcggacgattgaaggtttgtggcaaccctgtattcagaattctgtatcagtgccatttttccagccagcgtgtgcttacttcatgtctctgggt

SEQ ID NO: 530109 - DNA, 120 bp, Artificial Sequence
  ENSG00000166225_57 (sequence is synthesized)
acagcggctgagactcgatctgctccaagtaggggctccagcgcgggtcggagtctgggggttcgcgcccgccgacccgcgccctgctccctctcagcacctgggcggacggtacccagg

SEQ ID NO: 530110 - DNA, 120 bp, Artificial Sequence
  ENSG00000166225_58 (sequence is synthesized)
ctgaagtgcagtgtcacaatcatagctcaccacggtcttgaactcctgggctcaagcgatcattctgactcagcctcccaagtaggtaggaccacaggtgtacagaaatgaccattaaga

SEQ ID NO: 530111 - DNA, 120 bp, Artificial Sequence
  ENSG00000166225_59 (sequence is synthesized)
tcagaagagaattccacaaggagattttcttctttctaccatcatcaagatcaagcaggcaagtttacttgctgtcatcttctgcaaggttaaatcagcaaacaaagaaaacatggtatt

SEQ ID NO: 530112 - DNA, 120 bp, Artificial Sequence
  ENSG00000166226_0 (sequence is synthesized)
agtccgctggtcccgagcacgagctgtgaggggattcacttgtgtgcggaactcctcggaaccatggcgtccctttcccttgcacctgttaacatctttaaggcaggagctgatgaagag

SEQ ID NO: 530113 - DNA, 120 bp, Artificial Sequence
  ENSG00000166226_1 (sequence is synthesized)
agagcagagacagctcgtctgacttcttttattggtgccatcgccattggagacttggtaaagagcaccttgggacccaaaggcatggacaaaattcttctaagcagtggacgagatgcc

SEQ ID NO: 530114 - DNA, 120 bp, Artificial Sequence
  ENSG00000166226_2 (sequence is synthesized)
tctcttatggtaaccaatgatggtgccactattctaaaaaacattggtgttgacaatccagcagctaaagttttagttgatatgtcaagggttcaagatgatgaagttggtgatggcact

SEQ ID NO: 530115 - DNA, 120 bp, Artificial Sequence
  ENSG00000166226_3 (sequence is synthesized)
acctctgttaccgttttagcagcagaattattaagggaagcagaatctttaattgcaaaaaagattcatccacagaccatcatagcgggttggagagaagccacgaaggctgcaagagag

SEQ ID NO: 530116 - DNA, 120 bp, Artificial Sequence
  ENSG00000166226_4 (sequence is synthesized)
gcgctgttgagttctgcagttgatcatggttccgatgaagttaaattccgtcaagatttaatgaatattgcgggcacaacattatcctcaaaacttcttactcatcacaaagaccacttt

SEQ ID NO: 530117 - DNA, 120 bp, Artificial Sequence
  ENSG00000166226_5 (sequence is synthesized)
acaaagttagctgtagaagcagttctcagactgaaaggctctggcaacctggaggcaattcatattatcaagaagctaggaggaagtttggcagattcctatttagatgaaggcttcctg

SEQ ID NO: 530118 - DNA, 120 bp, Artificial Sequence
  ENSG00000166226_6 (sequence is synthesized)
ttggataaaaaaattggagtaaatcaaccaaaacgaattgaaaatgctaaaattcttattgcaaatactggtatggatacagacaaaataaagatatttggttcccgggtaagagttgac

SEQ ID NO: 530119 - DNA, 120 bp, Artificial Sequence
  ENSG00000166226_7 (sequence is synthesized)
ttatcctgaacagctctttggtgctgctggtgtcatggctattgagcatgcagattttgcaggtgtggaacgcctagctcttgtcacaggtggtgaaattgcctctacctttgatcaccc

SEQ ID NO: 530120 - DNA, 120 bp, Artificial Sequence
  ENSG00000166226_8 (sequence is synthesized)
agaactggtgaagcttggaagttgcaaacttatcgaggaagtcatgattggagaagacaaactcattcacttttctggggttgcccttggtgaggcttgtaccattgttttgcgtggtgc

SEQ ID NO: 530121 - DNA, 120 bp, Artificial Sequence
  ENSG00000166226_9 (sequence is synthesized)
cactcaacaaattttagatgaagcagaaagatcattgcatgatgctctttgtgttcttgcgcaaactgtaaaggactctagaacagtttatggaggaggctgttctgagatgttgatggc

SEQ ID NO: 530122 - DNA, 120 bp, Artificial Sequence
  ENSG00000166226_10 (sequence is synthesized)
tcatgctgtgacacagcttgccaatagaacaccaggcaaagaagctgttgcaatggagtcttatgctaaagcactgagaatgttgccaaccatcatagctgacaatgcaggctatgacag

SEQ ID NO: 530123 - DNA, 120 bp, Artificial Sequence
  ENSG00000166226_11 (sequence is synthesized)
tgcagacctggtggcacagctcagggctgctcacagtgaaggcaataccactgctggattggatatgagggaaggcaccattggagatatggctatcctgggtataacagaaagttttca

SEQ ID NO: 530124 - DNA, 120 bp, Artificial Sequence
  ENSG00000166226_12 (sequence is synthesized)
agtgaagcgacaggttcttctgagtgcagctgaagcagcagaggtgattctgcgtgtggacaacatcatcaaagcggcacccaggaaacgtgtccctgatcaccacccctgttaagcatt

SEQ ID NO: 530125 - DNA, 120 bp, Artificial Sequence
  ENSG00000166226_13 (sequence is synthesized)
cccacgtgctgtcgatctttggaccagtttctagcaaagttgtgtttgaaagatactctattaaagaagactgtggaatctgtttatcggtgcccattatatccttaagtttggatattt

SEQ ID NO: 530126 - DNA, 120 bp, Artificial Sequence
  ENSG00000166226_14 (sequence is synthesized)
agctgaccttcgctttaacataggtctaatttatttgccgtgtcattttccatacaaatcagttgatttaaaaaagttcatttctcatactgtgcattaaaataaaaatttgaacaatta

SEQ ID NO: 530127 - DNA, 120 bp, Artificial Sequence
  ENSG00000166226_15 (sequence is synthesized)
tctttaaaacgtttaattataaaagacaagtatgttctccttagtaaaaatcagagtccccagaatcaccatccccaatcccatgcccctccccaatgacaagtactgttatcatttgca

SEQ ID NO: 530128 - DNA, 120 bp, Artificial Sequence
  ENSG00000166226_16 (sequence is synthesized)
cgtacatcttctaatattctgtttatgtagaagtatgtgtacttcattatgtattttatactcatgtaacatactgttttataaaacagatactatttatcaatacttttttgtagcttg

SEQ ID NO: 530129 - DNA, 120 bp, Artificial Sequence
  ENSG00000166226_17 (sequence is synthesized)
tgagctcatttgtaggcttatctacctactgagtaaagtagttgggtgtcctaattttattaataggattaatttttattataaatcattagagatgttttgatactttagttaaaactg

SEQ ID NO: 530130 - DNA, 120 bp, Artificial Sequence
  ENSG00000166226_18 (sequence is synthesized)
gcactaaaaagcttggaataggtatgaatctattgtgtatatacacatatatatacgttggtaaaaatgttgaaatatgctatgggactctttaaaaagagtaatgaggcctggcgtggt

SEQ ID NO: 530131 - DNA, 120 bp, Artificial Sequence
  ENSG00000166226_19 (sequence is synthesized)
ataatgaaactgatgctctctttatgcttcgtttgtcttagatatttggttcccgggtaagagttgactctacagcaaaggttgcagaaatagaacatgcggaaaaggaaaaaatgaagg

SEQ ID NO: 530132 - DNA, 120 bp, Artificial Sequence
  ENSG00000166226_20 (sequence is synthesized)
cttaatgcaagaaatctataggacactgaaaagcatacacaaagatcatcttgctgcctcaccccactccaacagtcaaacctacatcagcctccagagatagccactaaagttaagttt

SEQ ID NO: 530133 - DNA, 120 bp, Artificial Sequence
  ENSG00000166226_21 (sequence is synthesized)
tacaggcgtgagccactgtgcccggccatttctcacattcttgccaacattagacttttgcatgcttgtgtggcccccacccctcttttttttttggcattttgccagtttggtggggaa

SEQ ID NO: 530134 - DNA, 120 bp, Artificial Sequence
  ENSG00000166226_22 (sequence is synthesized)
cttttttttttggcattttgccagtttggtggggaaaataacatctttaatttgtgtttcttgattactgctgaggtttaattcttttcatatagcttacagacttgatcagttagggta

SEQ ID NO: 530135 - DNA, 120 bp, Artificial Sequence
  ENSG00000166226_23 (sequence is synthesized)
tgttaacatttttgaaataactttataaataggctgtgttgaccaatcgtactgtcaattgatgtccactagttgttaattatcgttgttaaaatacaagcttcaggagtgcccgtatgt

SEQ ID NO: 530136 - DNA, 120 bp, Artificial Sequence
  ENSG00000166226_24 (sequence is synthesized)
tcagaggtaatctagtccttacttcctctgtctttactattgaggagtgcttaataattttctatttataacttttgttttataactttattaataggaagcagaatctttaattgcaaa

SEQ ID NO: 530137 - DNA, 120 bp, Artificial Sequence
  ENSG00000166226_25 (sequence is synthesized)
gtccgctggtcccgagcacgagctgtgaggggattcacttgtgtgcggaactcctcggaaccatggtctttgcatagtcccggcagcccaggtccgcgcctcacccggagcgaagaaatt

SEQ ID NO: 530138 - DNA, 120 bp, Artificial Sequence
  ENSG00000166226_26 (sequence is synthesized)
tctagtgtgggacccgctccgccctccttctaggggcggagcctggagcgacggggtctgagccatcagagggtggaggggccgcagccttccgagggtggaagatggaggccgcgttcc

SEQ ID NO: 530139 - DNA, 78 bp, Artificial Sequence
  ENSG00000166226_27 (sequence is synthesized)
ataaaggtatgtaactctactttttaaaaattaaaattactgcccaggcagtggtggatcatctgagatcagaagttt

SEQ ID NO: 530140 - DNA, 120 bp, Artificial Sequence
  ENSG00000166226_28 (sequence is synthesized)
gcgtgcggcctgcgccaggccagccggtggagctcaccacgagggggaggggtggaccgcaaagccagcgtctccttgtgcctaggtctttgcatagtcccggcagcccaggtccgcgcc

SEQ ID NO: 530141 - DNA, 120 bp, Artificial Sequence
  ENSG00000166228_0 (sequence is synthesized)
ctctccgctggccacctgctgccgcccgcgccatggctggcaaagcacacaggctgagcgctgaggagagggaccagctgctgccaaacctgagggctgtggggtggaatgagctggaag

SEQ ID NO: 530142 - DNA, 120 bp, Artificial Sequence
  ENSG00000166228_1 (sequence is synthesized)
gccgtgatgccatcttcaagcagtttcatttcaaagacttcaacagggcctttgggttcatgacaagagtggccctgcaggctgagaaactggaccaccatcctgaatggtttaacgtgt

SEQ ID NO: 530143 - DNA, 120 bp, Artificial Sequence
  ENSG00000166228_2 (sequence is synthesized)
acaacaaggtccacatcacgctgagcacccatgagtgtgccggcctttcagaacgggacataaacctggccagcttcatcgaacaagtagcagtgtccatgacatagaccctgcccttcc

SEQ ID NO: 530144 - DNA, 120 bp, Artificial Sequence
  ENSG00000166228_3 (sequence is synthesized)
accctcccaccactcccctcccaagacccagccgccgccgttgagggctgagtccttgctgtgggatgtgccagtgtccccaccaacaccaggaatttagaccttttccctgcaccactc

SEQ ID NO: 530145 - DNA, 120 bp, Artificial Sequence
  ENSG00000166228_4 (sequence is synthesized)
tcttcatcctgggggctctgttacactaatttgaataaactctcccctttctttgcaacttcccagcaacaataatgattttcttgccaggccgtctcttgctccctaattcatttccca

SEQ ID NO: 530146 - DNA, 120 bp, Artificial Sequence
  ENSG00000166228_5 (sequence is synthesized)
ggaagctgtgatacagggtgaaataaagtcttgtcttagaaaccaggaccctaaaccccacactatgtaatagaaacacatgtgtttttatgtctcaaataaaactattatatcacttgg

SEQ ID NO: 530147 - DNA, 120 bp, Artificial Sequence
  ENSG00000166228_6 (sequence is synthesized)
ggggcctacgaccttcctgggccggggaagacagtcgtggaggagtccacggatctcgtccccttggtggcccgattctgctttatactggggtgggagcgagagggaggctgagtttgc

SEQ ID NO: 530148 - DNA, 120 bp, Artificial Sequence
  ENSG00000166228_7 (sequence is synthesized)
gcgctcgtgtgcgtgcctgtccgctgccccttcccgctggcactctgggtacggggtctgcctgggactcacgctctgcgccggtatgctggccccagagccactccccgcgccggcttg

SEQ ID NO: 530149 - DNA, 120 bp, Artificial Sequence
  ENSG00000166228_8 (sequence is synthesized)
cttgaggcccgtgccaggccacgggggcttggtggcgctggagcagccctcctcccgtgagcttcccccacccacccccggggcgggggcgggggcggggcccttgctctgctgtaagct

SEQ ID NO: 530150 - DNA, 120 bp, Artificial Sequence
  ENSG00000166228_9 (sequence is synthesized)
tcagcctccataatcacatgagccaattccttataagaaatctctttgtgtgtattggttctgtttctctggagaatcataatacacaggcctatcatatcagatatggcagatcccaaa

SEQ ID NO: 530151 - DNA, 120 bp, Artificial Sequence
  ENSG00000166233_0 (sequence is synthesized)
agtagcgatagcagcggccgtggaggtggcgttggggactgttttctctcggaggccggagcggagccgcgtctgactgaggcgggcagcaagcggccccctcgctccctccctccctcc

SEQ ID NO: 530152 - DNA, 120 bp, Artificial Sequence
  ENSG00000166233_1 (sequence is synthesized)
ctcctccgcgccctccccgccgccaccagccgtcaaacgccaaccgccgctcctggggaggagccgcggctcgcggggccggagccaggcctgcgtccggacatcagccggagccggagc

SEQ ID NO: 530153 - DNA, 120 bp, Artificial Sequence
  ENSG00000166233_2 (sequence is synthesized)
gccggggcctcggcgtccccgccctctccccgcctcggccagcgtccgccgggcccccgcgcgtcgcgccatggactcggacgagggctacaactacgagttcgacgaggacgaggagtg

SEQ ID NO: 530154 - DNA, 120 bp, Artificial Sequence
  ENSG00000166233_3 (sequence is synthesized)
cagtgaggaggacagcggcgccgaggaggaggaggacgaagacgacgacgagccggacgatgataccctggatctgggcgaggtggagctggtggagcccgggctgggcgtcggcgggga

SEQ ID NO: 530155 - DNA, 120 bp, Artificial Sequence
  ENSG00000166233_4 (sequence is synthesized)
ggcagcgctctggggcccggcggtggcggcggcggcggcggcggcggtggtggtggcgggccggggcatgagcaggaggaggattaccgctacgaggtgctcacggccgagcagattcta

SEQ ID NO: 530156 - DNA, 120 bp, Artificial Sequence
  ENSG00000166233_5 (sequence is synthesized)
ggattaccgctacgaggtgctcacggccgagcagattctacaacacatggtggaatgtatccgggaggtcaacgaggtcatccagaatccagcaactatcacaagaatactccttagcca

SEQ ID NO: 530157 - DNA, 120 bp, Artificial Sequence
  ENSG00000166233_6 (sequence is synthesized)
cttcaattgggataaagagaagctaatggaaaggtactttgatggaaacctggagaagctctttgctgagtgtcatgtaattaatccaagtaaaaagtctcgaacacgccagatgaatac

SEQ ID NO: 530158 - DNA, 120 bp, Artificial Sequence
  ENSG00000166233_7 (sequence is synthesized)
aaggtcatcagcacaggatatgccttgtcagatctgctacttgaactaccctaactcgtatttcactggccttgaatgtggacataagttttgtatgcagtgctggagtgaatatttaac

SEQ ID NO: 530159 - DNA, 120 bp, Artificial Sequence
  ENSG00000166233_8 (sequence is synthesized)
taccaaaataatggaagaaggcatgggtcagactatttcgtgtcctgctcatggttgtgatatcttagtggatgacaacacagttatgcgcctgatcacagattcaaaagttaaattaaa

SEQ ID NO: 530160 - DNA, 120 bp, Artificial Sequence
  ENSG00000166233_9 (sequence is synthesized)
gtatcagcatttaataacaaatagctttgtagagtgcaatcgactgttaaagtggtgtcctgccccagattgccaccatgttgttaaagtccaatatcctgatgctaaacctgttcgctg

SEQ ID NO: 530161 - DNA, 120 bp, Artificial Sequence
  ENSG00000166233_10 (sequence is synthesized)
caaatgtgggcgccaattttgctttaactgtggagaaaattggcatgatcctgttaaatgtaagtggttaaagaaatggattaaaaagtgtgatgatgacagtgaaacctccaattggat

SEQ ID NO: 530162 - DNA, 120 bp, Artificial Sequence
  ENSG00000166233_11 (sequence is synthesized)
tgcagccaacacaaaggaatgtcccaaatgccatgtcacaattgagaaggatggtggttgtaatcacatggtctgtcgtaaccagaattgtaaagcagagttttgctgggtgtgtcttgg

SEQ ID NO: 530163 - DNA, 120 bp, Artificial Sequence
  ENSG00000166233_12 (sequence is synthesized)
cccatgggaaccacatggatctgcctggtacaactgtaaccgctataatgaggatgatgcaaaggcagcaagagatgcacaggagcgatctagggcagccctgcagaggtacctgttcta

SEQ ID NO: 530164 - DNA, 120 bp, Artificial Sequence
  ENSG00000166233_13 (sequence is synthesized)
ctgtaatcgctatatgaaccacatgcagagcctgcgctttgagcacaaactatatgctcaggtgaaacagaaaatggaggagatgcagcagcacaacatgtcctggattgaggtgcagtt

SEQ ID NO: 530165 - DNA, 120 bp, Artificial Sequence
  ENSG00000166233_14 (sequence is synthesized)
cctgaagaaggcagttgatgtcctctgccagtgtcgtgccacactcatgtacacttatgtcttcgctttctacctcaaaaagaataaccagtccattatctttgagaataaccaagcaga

SEQ ID NO: 530166 - DNA, 120 bp, Artificial Sequence
  ENSG00000166233_15 (sequence is synthesized)
tctagagaatgccacagaggtgctctcgggctaccttgaacgagatatttcccaagattctctgcaggatataaagcagaaagtacaagacaagtacagatactgtgagagtcgacgaag

SEQ ID NO: 530167 - DNA, 120 bp, Artificial Sequence
  ENSG00000166233_16 (sequence is synthesized)
ggttttgttacagcatgtgcatgaaggctatgaaaaagatctgtgggagtacattgaggactgagaatggccctgcataaaatgaactctgaaaactttaccatctagagtgctcatgca

SEQ ID NO: 530168 - DNA, 120 bp, Artificial Sequence
  ENSG00000166233_17 (sequence is synthesized)
attaaaacaaaacaaacacaaacaaggaggcactaagcctattctgacaccactggtctgtagtaccagaattgttttgttaatggaaagtttaagtaaattatattgtaataaaaaggt

SEQ ID NO: 530169 - DNA, 120 bp, Artificial Sequence
  ENSG00000166233_18 (sequence is synthesized)
agataaaccattgtacaacagtattctaggccaccaacaaaagtgtgacagacacactaaaagccctccaactttaacttgtaacgtagcttcattctcaaagctgactccttttttttc

SEQ ID NO: 530170 - DNA, 120 bp, Artificial Sequence
  ENSG00000166233_19 (sequence is synthesized)
tttttccttttcctgagtgtagtacagttaaaatttcaaacagctccttgacactgcttttcatgttcaaaccagccattttgttgtactttggtaaaggacctcttccccttcctcccc

SEQ ID NO: 530171 - DNA, 120 bp, Artificial Sequence
  ENSG00000166233_20 (sequence is synthesized)
tacacatacagatacacccacacacagactgactctctttctctcataccccaaggtcatgagtgaatgatgcttagttccttgtaaagaaaatcttgggatggggaaaggggtaggcag

SEQ ID NO: 530172 - DNA, 120 bp, Artificial Sequence
  ENSG00000166233_21 (sequence is synthesized)
caagaggattcaacaaacgaaaaacataaaaactttgtatatgacttttaaaacaagaggacaacacagtatttttcaaaattgtatatagcgcatatgcatggacaaagcaagcgtggc

SEQ ID NO: 530173 - DNA, 120 bp, Artificial Sequence
  ENSG00000166233_22 (sequence is synthesized)
acgtgtttgcataatgtttaattacaaaaaaatatttattctttaaaaatcttcaagattatgtctatttgctgtgcattttctttcagtttgcttatctttcccgggttggggttggga

SEQ ID NO: 530174 - DNA, 120 bp, Artificial Sequence
  ENSG00000166233_23 (sequence is synthesized)
taaaggtgtgtcggtttagcacctctggaagacctatctagagctctttcactttcctgaggttattttgccctttctggtgttggtatgtctgttgccggccatgggcctcatgccttg

SEQ ID NO: 530175 - DNA, 120 bp, Artificial Sequence
  ENSG00000166233_24 (sequence is synthesized)
aattcctgctcttgatcagggacaagggaggtcaagctctgactaatgccatgacctgattaaggggtacagcagggagttttgttgctacagctcatgaattaacctgtcccaacctaa

SEQ ID NO: 530176 - DNA, 120 bp, Artificial Sequence
  ENSG00000166233_25 (sequence is synthesized)
tccccctccatggcatcatgcctctacccaagcctttgtgtgcccatgttatgcacacagctgtaggcattcttaagtcccctgtcgcatccagtggaagcattttaaaatttcttttac

SEQ ID NO: 530177 - DNA, 120 bp, Artificial Sequence
  ENSG00000166233_26 (sequence is synthesized)
tttttggttttcccttaattgctgcttttcagattttagttatggctcgtctgctcaccccttctctacattagggtgtcaaagagaatgttttgctttaaatataaatagccattcatt

SEQ ID NO: 530178 - DNA, 120 bp, Artificial Sequence
  ENSG00000166233_27 (sequence is synthesized)
tagtctcagattgtgaatttaaaatggtggataccgaaattgcttgtgtgtgttgctgtgggtttggtttgaaggcaaacacccctagaacatgatattcccatctagtgcatttaaata

SEQ ID NO: 530179 - DNA, 120 bp, Artificial Sequence
  ENSG00000166233_28 (sequence is synthesized)
gaaatcactgagtttgctgcttttttattgtcagcagataggagaattaataatgcattttagctgtgatgtccatttttatgaaattcctactaagagctatgttaaaagtaaaggatg

SEQ ID NO: 530180 - DNA, 120 bp, Artificial Sequence
  ENSG00000166233_29 (sequence is synthesized)
gtggtggttgtattaactatatacctgtttaggccattctggctgtggtatttttcaataggtcagcatctgtaaatctgtcagttttatacaggagtgcagagtgaactaggcaactag

SEQ ID NO: 530181 - DNA, 120 bp, Artificial Sequence
  ENSG00000166233_30 (sequence is synthesized)
attaagaggtctaaatatgaaataccagttgaggctgaggacctcttcgtcttcctttaaatgtcttttgcctagggagtgtttaccatttgtgaggcagctttgtctgctcttacactg

SEQ ID NO: 530182 - DNA, 120 bp, Artificial Sequence
  ENSG00000166233_31 (sequence is synthesized)
tacatcctattactccattgggaagtaggttcactttcctctggccttttgcctaagttaggctttgctgaatcaaccctacttttccttttagaaaaggttgttacaggagatttactg

SEQ ID NO: 530183 - DNA, 120 bp, Artificial Sequence
  ENSG00000166233_32 (sequence is synthesized)
gcaactgttcttttcccatcaaaaatcagtgaatgtttgctgagtataaatgctgcttccttaaaccacttgtcgctttaggatcaactttacctgtaccttttctcctttcctcccttg

SEQ ID NO: 530184 - DNA, 120 bp, Artificial Sequence
  ENSG00000166233_33 (sequence is synthesized)
ccacctcaggtgcaaatctgaactcagtgtctgcttcttccattttctcgtctctctcccctcttcccccattatccatatgacattattttacttcaaatgacagcatcaatcttaaaa

SEQ ID NO: 530185 - DNA, 120 bp, Artificial Sequence
  ENSG00000166233_34 (sequence is synthesized)
agatatacattaaaactaaggagtttttttaaagaaagcctgaataagttcctttccctggtaactttgaaaagcagtcagagttgctatatagatatatgtggctcctttaaaatgctt

SEQ ID NO: 530186 - DNA, 120 bp, Artificial Sequence
  ENSG00000166233_35 (sequence is synthesized)
tgtgtatgtgtggtgtttaaaaaaaaaaaatcttaccagttaactttgcagtgtctaggtttgagtgtcataaatccacgtgttcctgttgcaacaaatacccaaaaattgtgtgtgcac

SEQ ID NO: 530187 - DNA, 120 bp, Artificial Sequence
  ENSG00000166233_36 (sequence is synthesized)
ttcctaataccagtcttcacccatggaggaacagtgctttttagagatgctttctatttcaatgttggcatactgcctgagggtattgcagttgtgggtgcattccctaatttgtatgat

SEQ ID NO: 530188 - DNA, 120 bp, Artificial Sequence
  ENSG00000166233_37 (sequence is synthesized)
caagatgaactggcccttttctacttccaagcttttaacagataccaccatatttgacagaattcccagagtgaattgcttgtgttattagtagattcagtgcccccagctgggataggc

SEQ ID NO: 530189 - DNA, 120 bp, Artificial Sequence
  ENSG00000166233_38 (sequence is synthesized)
aagccatgacagcttccctgtttcacctacagaagtcttatctgagggatctattcacagtaagcaccaaggtctccatgtcttgaggtcagtttcattgtcttttgaaaagtgcatgct

SEQ ID NO: 530190 - DNA, 120 bp, Artificial Sequence
  ENSG00000166233_39 (sequence is synthesized)
tcatttgaacaattcattcagcagcagatggactttcagtgatttaaaataaaattttgatccaaagctcaggacacaaaccacagtggtaaaattgagtagcatataatatcagactaa

SEQ ID NO: 530191 - DNA, 120 bp, Artificial Sequence
  ENSG00000166233_40 (sequence is synthesized)
attatctgtaattttccacaacccagattgtatgtgttttatgtgtgtttaaataaatatgttagatacacgtgtatacatacacccatatacaacagatccaagactggctgacttcat

SEQ ID NO: 530192 - DNA, 120 bp, Artificial Sequence
  ENSG00000166233_41 (sequence is synthesized)
ttgaaatggttgaatctgctgtgtaataaagtggttcaaccatgattaggaactgaaatttagtagaagagggaaaaggagttaatgtaacaaattattttagctacaaaccccggtaat

SEQ ID NO: 530193 - DNA, 120 bp, Artificial Sequence
  ENSG00000166233_42 (sequence is synthesized)
agagcacttgggggatgggatggggtgggttggtgagacaatcagaatggtaaattgattaaatgctcctaaccctgtaattttgtgcatagagcaccctatgctgtggaaataactgtt

SEQ ID NO: 530194 - DNA, 120 bp, Artificial Sequence
  ENSG00000166233_43 (sequence is synthesized)
cttagatttcattgtaactggactgttcaggttgcccagagggaaagaacattcctaattctaataaaataaacttttattttgttattccattagttacttatgtttatttttatagtt

SEQ ID NO: 530195 - DNA, 120 bp, Artificial Sequence
  ENSG00000166233_44 (sequence is synthesized)
aaaaaatgactaaaggtggctaatagccacccgtattatgtgccttattcactgttcccacttaatataaaatgtcaaaaattggttgtttctttgcagggaactgtgaatgagcccatt

SEQ ID NO: 530196 - DNA, 120 bp, Artificial Sequence
  ENSG00000166233_45 (sequence is synthesized)
cccccaacatttaacttggttaatgaagctttcagagcattttctgaaagatttccaatttctgcatctcagatattgaatttaaattgtttgtgttgtaacagtgatacaaaaatgttc

SEQ ID NO: 530197 - DNA, 120 bp, Artificial Sequence
  ENSG00000166233_46 (sequence is synthesized)
aatagctctttgaatgccactttttttaaagaaaatactttaaaagtcattcttagctaacctcaaaactcctttacattactttcattttagctcactcttaaagctgatactgttata

SEQ ID NO: 530198 - DNA, 120 bp, Artificial Sequence
  ENSG00000166233_47 (sequence is synthesized)
tagggatgaagggagagttttcttaaagaaggtcccaaagttgaagatcgtttgtcattgatactctggccaagtccaggttttaggacaatttaatttactcttatttggatctgtaat

SEQ ID NO: 530199 - DNA, 120 bp, Artificial Sequence
  ENSG00000166233_48 (sequence is synthesized)
tatgggagtttatcacttttcctcttcaaagcacttcaacttactgtctaaaacaagtggagaagaaattgccattttttataaaggaggaagataaggctcactgaggttaaataactc

SEQ ID NO: 530200 - DNA, 120 bp, Artificial Sequence
  ENSG00000166233_49 (sequence is synthesized)
cctcaatttttcatttccttctacctgaaacttaacatcatgctacctctttgtatcatattttgttattctggtcacagaatgacctagtattctgtaccagggaaggtagttcttaac

SEQ ID NO: 530201 - DNA, 120 bp, Artificial Sequence
  ENSG00000166233_50 (sequence is synthesized)
tatattgtacttttaaaccacattaaagactattataaatgcctatcactgctactgttagaggttgctctatactatctctgatctttcatttgttgcagtttgcaacacagtagttga

SEQ ID NO: 530202 - DNA, 120 bp, Artificial Sequence
  ENSG00000166233_51 (sequence is synthesized)
gaataagtggtttagtatgatttgcttaatagtacccaagtaatttgcagttgttggtttagttattcaaatgaatttccattgtaaagaattttggatagtctgcaggaaattgttaca

SEQ ID NO: 530203 - DNA, 120 bp, Artificial Sequence
  ENSG00000166233_52 (sequence is synthesized)
ggatgcacagaacatcccatatccattggatctcagcctttgaggctttaaaaagatgataagcagtgagttttatgagaaaattttggctccttcagaaacaggaagataagtgggccc

SEQ ID NO: 530204 - DNA, 120 bp, Artificial Sequence
  ENSG00000166233_53 (sequence is synthesized)
ctcagatttttcatatatctttggggataaagttggttatatctggtttattttagggattttgcttctgtagttacccaagatcaaatagccaactcagaaatactcagttggatatca

SEQ ID NO: 530205 - DNA, 120 bp, Artificial Sequence
  ENSG00000166233_54 (sequence is synthesized)
atcaaatagtgcctaccaggggagtaaacagacaacttttaggtttttagtttttgcttttgtgtggagttgagtccaatttttaaggcaactattgttgacctttctctaggcggtagc

SEQ ID NO: 530206 - DNA, 120 bp, Artificial Sequence
  ENSG00000166233_55 (sequence is synthesized)
atttaggatgggaaaaaataatatgagttatgtgcgaaaagcagttttcaggctatcatttagggccacagatatgcttatttaggactattttcagggtaggagccagttaaagtttgt

SEQ ID NO: 530207 - DNA, 120 bp, Artificial Sequence
  ENSG00000166233_56 (sequence is synthesized)
atatcagtcacacattgatatgtagcagctctatcaataccacaacaaccttattaccatagtaattcaggggtctcaagtaatccaggagtctcaaactgaaatgtcaacaagagccaa

SEQ ID NO: 530208 - DNA, 120 bp, Artificial Sequence
  ENSG00000166233_57 (sequence is synthesized)
gtaaatattttagaaatagagtaccctggagtagatgggctctgagaggagcctgtgaaatccagacttcatgtgaattctcttaattaaatgtgggccaaagaaaacccggccatgggc

SEQ ID NO: 530209 - DNA, 120 bp, Artificial Sequence
  ENSG00000166233_58 (sequence is synthesized)
agtttttttttcccagcttctactagtcttggcttgcaacaatgccactgtccatctggcattacctagaccagtgatacttaaacttgactgcgaattggaatcactgagaagctttaa

SEQ ID NO: 530210 - DNA, 120 bp, Artificial Sequence
  ENSG00000166233_59 (sequence is synthesized)
aaaatattagtgcctgagtgttactttatggagattatgatttaattgctttgggtaggcatcagtaatttttgtaaagccctttacgcattctcacccctaattccagccggtgattct

SEQ ID NO: 530211 - DNA, 120 bp, Artificial Sequence
  ENSG00000166233_60 (sequence is synthesized)
cacatgcagactaggttgagatccttgatctagactgccttctatagttgcaaaaagagaatataggcgagcaactccagatcataagggacaaaatgattcaaggcaaattgactggct

SEQ ID NO: 530212 - DNA, 120 bp, Artificial Sequence
  ENSG00000166233_61 (sequence is synthesized)
cagaatagggcctcactggaggccctagttgagtgggttttgtggaatggtgcctcccaagggtctggtgtgcagtgcccaatttggttttttgttggttttctggtaagtggtccacct

SEQ ID NO: 530213 - DNA, 120 bp, Artificial Sequence
  ENSG00000166233_62 (sequence is synthesized)
tggagaaaatcacaaaactaaaagtcttaccaagaagtagaactgacaagcagccatgttgattggcagtacattctcttaccaagggggagaaatctatctagggaaaataatacagag

SEQ ID NO: 530214 - DNA, 120 bp, Artificial Sequence
  ENSG00000166233_63 (sequence is synthesized)
tctgagcaaaggaagttgagtggttataagcaaaactgtcattaaagctagttgcgtcaagtctgcacaattccacgagcacttaagagtttacaagtttctcatgtctatcattctttt

SEQ ID NO: 530215 - DNA, 120 bp, Artificial Sequence
  ENSG00000166233_64 (sequence is synthesized)
gataatcttgtatttttatttcaagtgtggtatagtagtaagaatattggtatttctcagccatagatttcccttttgtaaaatgggaatactaataggaactgtaatttgttgagtgct

SEQ ID NO: 530216 - DNA, 120 bp, Artificial Sequence
  ENSG00000166233_65 (sequence is synthesized)
ttttgccagatgccttacttttgtctgtatcttccaagcagccctaaagcaaaatgggcattgttaccctatttttatgaggaaagacactcatatactactaacttactcaaaagttac

SEQ ID NO: 530217 - DNA, 120 bp, Artificial Sequence
  ENSG00000166233_66 (sequence is synthesized)
acattgagtgtataacagggccatgcttgtctgattccatatgttcattctattatgctgctgttgtctgttacataggaatattgtgaggatcaaagaacatgtgaaaacaaaacctag

SEQ ID NO: 530218 - DNA, 120 bp, Artificial Sequence
  ENSG00000166233_67 (sequence is synthesized)
ttacaataataagcacaccagtgctaacttgggcaaaagataaggatacagagctgtctcagagactcccaaaggcaggatgagattgggaactagaaaaccattttggacccctaaagt

SEQ ID NO: 530219 - DNA, 120 bp, Artificial Sequence
  ENSG00000166233_68 (sequence is synthesized)
ggtattgtctactatctgtacatcattctcttacagctcttactgctgcttttcctgtcagttaccccatagctccaggtattacatgttaactgttcctgacacatgtagacagaacca

SEQ ID NO: 530220 - DNA, 120 bp, Artificial Sequence
  ENSG00000166233_69 (sequence is synthesized)
atcagatccatggggcaggatcatcaatacaaacatgggtgttgagagcttaacttaatcgggaaggagatcttggagatcatagttcgctgggttcacatcatggaaatcgtctttgac

SEQ ID NO: 530221 - DNA, 120 bp, Artificial Sequence
  ENSG00000166233_70 (sequence is synthesized)
aaaactgaaatgccctgaagttttaattttttaaatacatgtaatgaattggtatatggtagatactcgtggctacttagtatttaccaaatgctttgtttccatctcgtttatttttat

SEQ ID NO: 530222 - DNA, 120 bp, Artificial Sequence
  ENSG00000166233_71 (sequence is synthesized)
tccatctcgtttatttttattttttatttttttaagagacagtcttgctatgttgcccaggctggacttgaactcctagtctcagccaaccccttctgcctcagcctcctgagtagctgg

SEQ ID NO: 530223 - DNA, 120 bp, Artificial Sequence
  ENSG00000166233_72 (sequence is synthesized)
gctcctagctcttccatctcagtcttatgatgtagttactattttcattttataaataagaaaatagaagctcaaataaaatgggtagtttccttgaggtcatcctgttagtaagtggtg

SEQ ID NO: 530224 - DNA, 120 bp, Artificial Sequence
  ENSG00000166233_73 (sequence is synthesized)
gaatgaagttacaaacctaggttttattggtcagcacacacagtgccgggcactggcagtacagcagtgaacaaaaggtctgttggtttgtctgaagctctcaaccttgattctgcatag

SEQ ID NO: 530225 - DNA, 120 bp, Artificial Sequence
  ENSG00000166233_74 (sequence is synthesized)
actcggtggattgcccaaggccactcaaccagttaatatcagagccagctctgctgtttgaccagtatattattttcaccatgctgtatctgcttctcagtcaccaaaagcaccagctaa

SEQ ID NO: 530226 - DNA, 120 bp, Artificial Sequence
  ENSG00000166233_75 (sequence is synthesized)
aattgtatatagactgattaggggacttccaacctaagattgtcctggaaacttaattcttatcttggctcatctcttcaaaacagatgcctctttcgttggtgacctcagatacactgt

SEQ ID NO: 530227 - DNA, 120 bp, Artificial Sequence
  ENSG00000166233_76 (sequence is synthesized)
tcagaagtactcaaagtattccttttttctcacatttgagagtcactctagcattttaatgagttaagcaagccagccctgcatttccaaacccttcccagaagtctaaccttactttga

SEQ ID NO: 530228 - DNA, 88 bp, Artificial Sequence
  ENSG00000166233_77 (sequence is synthesized)
aatataatggctattcacaggcacagttagggtgcactactgccgtgaactccaggactcaagccatcttcctgccacagcctcctga

SEQ ID NO: 530229 - DNA, 89 bp, Artificial Sequence
  ENSG00000166233_78 (sequence is synthesized)
ggctattcacaggcacagttagggtgcactactgccgtgaactccaggactcaagccatcttcctgccacagcctcctgagtaacctag

SEQ ID NO: 530230 - DNA, 120 bp, Artificial Sequence
  ENSG00000166233_79 (sequence is synthesized)
tatgtcttatttggcacctgtaaaaccctcttcactgattatgcctgtttaaaggtttggtatttactccaagtcacctgcctttagccatggagtattcaagtttctttcagaatgaga

SEQ ID NO: 530231 - DNA, 120 bp, Artificial Sequence
  ENSG00000166233_80 (sequence is synthesized)
cctttagccatggagtattcaagtttctttcagaatgagaatttggagggtgctcatagaaatataaaacaaggctgggcatggcggcttacaccttgtaatcccagcactttaggaggc

SEQ ID NO: 530232 - DNA, 120 bp, Artificial Sequence
  ENSG00000166233_81 (sequence is synthesized)
aactctttatagtagacagtttatcccccagaaagctttttaggctgaaaacgtttctatagattttggatttccttctgatagctaaaatttgtttctgtataacagagtagtgcccta

SEQ ID NO: 530233 - DNA, 120 bp, Artificial Sequence
  ENSG00000166233_82 (sequence is synthesized)
taagccagttcagtgcacattaaatggctgttcttagaattatgaatctgaggcttatgcagtgaggctctagctctctggagtcagttggtcaagtgggattcctgaggactgagcaaa

SEQ ID NO: 530234 - DNA, 120 bp, Artificial Sequence
  ENSG00000166233_83 (sequence is synthesized)
cacacacagagcaggattttgtcctaagttttcttagggatcctatccaaaaacaccattacttgaatttcccagcttccttttacagggagacttccttgctatgtgtactcccacctc

SEQ ID NO: 530235 - DNA, 120 bp, Artificial Sequence
  ENSG00000166233_84 (sequence is synthesized)
ggtatgtcaaatcattttctcagaggaagtacagcataaaataataaccagcatttgtagagcacttcttgtgggccttcttgggcaaatagacattctcatggaatgctctaaaattgt

SEQ ID NO: 530236 - DNA, 120 bp, Artificial Sequence
  ENSG00000166233_85 (sequence is synthesized)
taagttcttgcacttgctctcaagtcatttataatctaattgctggtcttcctggtatgaacaaagatgtttgcttgttaataaattcctaccacatacccagacttgtggtttatttct

SEQ ID NO: 530237 - DNA, 120 bp, Artificial Sequence
  ENSG00000166233_86 (sequence is synthesized)
atctaactagggaaagcactaaagagttttccaataaggaagaatgatctgagtgtctacctgctttggaaaagatgtctgccatggataggaaatgattttgtatcccaaaatcctagt

SEQ ID NO: 530238 - DNA, 120 bp, Artificial Sequence
  ENSG00000166233_87 (sequence is synthesized)
actaatttggagtgttgtaaaggtcagggcagcaaatgctagagagtgggattaatgaaaagttatagtgttctgcatgcctttgaataattaatttttactccatttttactcgcttgc

SEQ ID NO: 530239 - DNA, 120 bp, Artificial Sequence
  ENSG00000166233_88 (sequence is synthesized)
ctaaccaatggaaataaatgactgttgtttccacaaaattgctttacagattctaaatgctatctctgggacactggattgtgtgctctttaagataaattccataatcaagggcctggc

SEQ ID NO: 530240 - DNA, 120 bp, Artificial Sequence
  ENSG00000166233_89 (sequence is synthesized)
cctgaatagattggagcccaaaaatctcactgaagcaaagagataataggccagtaaagagtgggagacaaacactcctggaataggaagccactactcacctttattttaaattgatat

SEQ ID NO: 530241 - DNA, 120 bp, Artificial Sequence
  ENSG00000166233_90 (sequence is synthesized)
atagaaattaatattacaaaatgcacacatcttaagtgtgaagtttgatgttttgacagttgtatacgtctgtgtaataactaccaaaagaagacataatatgttacaattaacccagaa

SEQ ID NO: 530242 - DNA, 120 bp, Artificial Sequence
  ENSG00000166233_91 (sequence is synthesized)
aattctcaagtacttttaaatcacccctgagcacctccccactccagtgatcacttcttgatttttatcactaaagatttgttgtacctgcttttggattacatataagtggaatcatat

SEQ ID NO: 530243 - DNA, 120 bp, Artificial Sequence
  ENSG00000166233_92 (sequence is synthesized)
aataatgtactcttttgcatctggcttctttcactgataatgctttaaagacacgcatactgtatgtattaggacattgttctttattgctgagtagtatttcattctataaatatacca

SEQ ID NO: 530244 - DNA, 120 bp, Artificial Sequence
  ENSG00000166233_93 (sequence is synthesized)
caatttgtttattcattctcctattgaaggacctttaggttgtttccagtttggggcaattatgaataaggatgctatcgatattcttacacagccttttgtttttgttttttgtggata

SEQ ID NO: 530245 - DNA, 120 bp, Artificial Sequence
  ENSG00000166233_94 (sequence is synthesized)
tacatcttcacttgtcttggataaataagagtagaaaattactgggtcatatggtaagtgcatgtttataagaaactgccctcttattctccaaagtggttttaccattttgtactccta

SEQ ID NO: 530246 - DNA, 120 bp, Artificial Sequence
  ENSG00000166233_95 (sequence is synthesized)
tcagtgatgtatgagagttacagttgcttcacatgtctgtcaacatttacactgtcactgttttttatattagccattttagcatatatgaaataactgattttaatttacattacattt

SEQ ID NO: 530247 - DNA, 120 bp, Artificial Sequence
  ENSG00000166233_96 (sequence is synthesized)
ccctgattaatgagttgagcactttttcatatgcttatttttcatttgtatatctttcaagaagtgtctttcatgtcttttctcattttaaagttgggtgtctttttattgtaggtgtta

SEQ ID NO: 530248 - DNA, 120 bp, Artificial Sequence
  ENSG00000166233_97 (sequence is synthesized)
ttctttgtattttgaatataaatcctttgatagatatgctatgattttttaaagactctatgtattcacttattgggatctttcgatgaacaaattttttttataaaatccactttatca

SEQ ID NO: 530249 - DNA, 120 bp, Artificial Sequence
  ENSG00000166233_98 (sequence is synthesized)
gttttttattttatggttttatgacctcaaagtcacaaagaatatattttcttctagaagttttatggtttgggattttatgtttaggtctgtgatccatctcaaattaatttttgtgaa

SEQ ID NO: 530250 - DNA, 120 bp, Artificial Sequence
  ENSG00000166233_99 (sequence is synthesized)
cagaatgaggtttggtttttttccaacatggatatacagttgttccagcaacatttacttaaaaagacttttctttacccattagattgacttggtagcttggttaaaaattgatcacgt

SEQ ID NO: 530251 - DNA, 120 bp, Artificial Sequence
  ENSG00000166233_100 (sequence is synthesized)
gtgtgtgtatttctacattttctgttctgttccattaatctatttgtgtatccttacatcagtaccacactttggattattgaaactttctagtaagtctttaaattagtaaatccttcc

SEQ ID NO: 530252 - DNA, 120 bp, Artificial Sequence
  ENSG00000166233_101 (sequence is synthesized)
tttttgttatttttcaagatcgctttggttattgtcgattctttggattgtcataaaagttttacaattagctcatcttgtttttcaaacgtagatgtgctgggttagctgtgttcatgc

SEQ ID NO: 530253 - DNA, 120 bp, Artificial Sequence
  ENSG00000166233_102 (sequence is synthesized)
cactgcattccagcttgggtgacagcaagaccctgtcaaaaaaaaaaaagaaaagaaaaaactgctagaatcttgatatggggttttgttgagtctataggtcaatttagaatgaacatt

SEQ ID NO: 530254 - DNA, 120 bp, Artificial Sequence
  ENSG00000166233_103 (sequence is synthesized)
ttaatagtattgagtcagctaattcatgaacatattaagtcttgtcatttatttaggtattaaatttttttctcagcaatgttttgtagcttcccttgcgtaacacttgcttatcttaca

SEQ ID NO: 530255 - DNA, 75 bp, Artificial Sequence
  ENSG00000166233_104 (sequence is synthesized)
gttttgtagcttcccttgcgtaacacttgcttatcttacattagactttttcttaagcatttgatttttaaaata

SEQ ID NO: 530256 - DNA, 85 bp, Artificial Sequence
  ENSG00000166233_105 (sequence is synthesized)
gacggggtttcaccatgttggtcagcctggtctcgagctcctgacctcgtgatccaaccaccttggcctcccaaagtgctgccca

SEQ ID NO: 530257 - DNA, 120 bp, Artificial Sequence
  ENSG00000166233_106 (sequence is synthesized)
aattttcatttttaagttgtttgctgctagtatctagaaatacaattgattttttgtttgtttctttagagatgggtctcactatgttgcccaggttggtcttaaactcctgagctcaag

SEQ ID NO: 530258 - DNA, 120 bp, Artificial Sequence
  ENSG00000166233_107 (sequence is synthesized)
ggattctcatgcctcagccacccaagtagctgggactttattcacgtgccagtgtgcctggctgatttttgtatgctgatcttgaatcgtgccaccttgctaaattcatttattctagaa

SEQ ID NO: 530259 - DNA, 120 bp, Artificial Sequence
  ENSG00000166233_108 (sequence is synthesized)
atagttcttgtagactccgtagagttttatattaaatagatacacaacagtgtagtctgcaaataatgtttttacttctttttctgattttatgccttttcttctttttttttttttttt

SEQ ID NO: 530260 - DNA, 120 bp, Artificial Sequence
  ENSG00000166233_109 (sequence is synthesized)
tttttttttttgtctttctccactggctacaatatctagtgcaatgtttaacgtgtggtgagagcagacaccttgccttgttttcttaatcttagggataaagattttaatgtttcatca

SEQ ID NO: 530261 - DNA, 120 bp, Artificial Sequence
  ENSG00000166233_110 (sequence is synthesized)
ctaagtataatgttaactgtaagtttttcacagaccagcccaaagaagttcctttctattcctaatttgttgataatttttattaggaagggttattaaattttgtgagatgcgttttta

SEQ ID NO: 530262 - DNA, 120 bp, Artificial Sequence
  ENSG00000166233_111 (sequence is synthesized)
gcttttaataagattattatgtatttctctttttattttgttaagatggtatgttacaggggttggcaaactgtggcccatgggccagatccagcccatggacagttttgttgttgctgt

SEQ ID NO: 530263 - DNA, 120 bp, Artificial Sequence
  ENSG00000166233_112 (sequence is synthesized)
ccagatccagcccatggacagttttgttgttgctgttttagagacagtctcactcttttgctcaggctgccaggctggagtgcaatgacatgatcatagctcactgcagccttgagctcc

SEQ ID NO: 530264 - DNA, 120 bp, Artificial Sequence
  ENSG00000166233_113 (sequence is synthesized)
gcctcagcctcctgagtagctaggaatacaggtgcatgtcaccacaccaggcaaatttaagaaattttttgtagatcttgccgtgttgcccatgatggtctcaaactcctggcctcaagc

SEQ ID NO: 530265 - DNA, 89 bp, Artificial Sequence
  ENSG00000166233_114 (sequence is synthesized)
ttggctctcatggactgtcacgcaggctggagtgtggtggcatgaacgtggctcactgcagcctcaactttcttggctccagcaatcat

SEQ ID NO: 530266 - DNA, 80 bp, Artificial Sequence
  ENSG00000166233_115 (sequence is synthesized)
gctaccacagctggctaatttttctttttcatttttgtagacatggagtcttgatatgttgcccagattgatctggaact

SEQ ID NO: 530267 - DNA, 120 bp, Artificial Sequence
  ENSG00000166233_116 (sequence is synthesized)
acatggagtcttgatatgttgcccagattgatctggaactgctaggctcaagtgatcttcctgccttgcactcccgaagtgttggcattacaggcatgagacacagtgcccagcctattg

SEQ ID NO: 530268 - DNA, 76 bp, Artificial Sequence
  ENSG00000166233_117 (sequence is synthesized)
gagactgagtcttgctctatctcccaggctgtggtgcagtggtgcaatctgcaacctccgcctcccaggtttaagc

SEQ ID NO: 530269 - DNA, 69 bp, Artificial Sequence
  ENSG00000166233_118 (sequence is synthesized)
gattctcctgcctcagcctcccaagtaagtgggattataggcacatgtcaccaagctcagctaactttt

SEQ ID NO: 530270 - DNA, 86 bp, Artificial Sequence
  ENSG00000166233_119 (sequence is synthesized)
actaggcgtagtagggctactacgcctggccctactgcagtttttaataagagatgagttctctcagcttttgtctataagagaat

SEQ ID NO: 530271 - DNA, 120 bp, Artificial Sequence
  ENSG00000166233_120 (sequence is synthesized)
ataagagatgagttctctcagcttttgtctataagagaatgtccttacttttatttttgaggggtattttagttggatataggactctatgttgaccttttatttcttctttcagtactt

SEQ ID NO: 530272 - DNA, 120 bp, Artificial Sequence
  ENSG00000166233_121 (sequence is synthesized)
taaagaagttattttattgtactcaggcctcatttgtttctggtgagaagtcattcatcattttaatttttatttcctttccgtaatgtgtggttgttctcaatggctgcatctgtgcat

SEQ ID NO: 530273 - DNA, 120 bp, Artificial Sequence
  ENSG00000166233_122 (sequence is synthesized)
tatatttacttttcagtagattgactagggaatgtctaggtatgtttttctttgtatagagtttactgaacttcttggatctgtgttgatgtctttcattaatattggttctttcttggc

SEQ ID NO: 530274 - DNA, 120 bp, Artificial Sequence
  ENSG00000166233_123 (sequence is synthesized)
cgttatccgtttacatttttctcttgtctcatactctcttgcttctcctcttctttggagattctagttacatgtatattagatgatttgatataaacctacagatctcagatgattttt

SEQ ID NO: 530275 - DNA, 120 bp, Artificial Sequence
  ENSG00000166233_124 (sequence is synthesized)
cccctgccctgttttctttttgttttcagtttggatactttccatttaaccatctttaagttttttgatgctttccaatgttaacctgttaaacttgtttattgaattctccatttaaaa

SEQ ID NO: 530276 - DNA, 120 bp, Artificial Sequence
  ENSG00000166233_125 (sequence is synthesized)
agttatttatggatacatagttgtactgaattattcatttctaatatttttatttctagcatttcattatatttgtatagttacaattttctgctgaaatttcctatttcttcatgcatg

SEQ ID NO: 530277 - DNA, 120 bp, Artificial Sequence
  ENSG00000166233_126 (sequence is synthesized)
tcttcatgcatgttttccacattttccattctactttttagcattttaatcagttattttattgggttttttctgttttttctttcatttttaatcagttattttaaggatccaaactga

SEQ ID NO: 530278 - DNA, 120 bp, Artificial Sequence
  ENSG00000166233_127 (sequence is synthesized)
taattcaacatctgggtcttttctagttctgcttctattgagcccttcctctcccttaccatgaatcttattttcttgcttttgcacgtcttgtatatttgattggatgatggacgtttt

SEQ ID NO: 530279 - DNA, 120 bp, Artificial Sequence
  ENSG00000166233_128 (sequence is synthesized)
atgttgaaaaaaaaaagaaattgaagaaaatgtttacttccaaaacagagcatgccctttgtttttttttcaggccacttgaatggtggctcaatctgatgtatatgaattctagactgg

SEQ ID NO: 530280 - DNA, 120 bp, Artificial Sequence
  ENSG00000166233_129 (sequence is synthesized)
ggcttcactgcagttttagtttgattcagtttgcctctagcttcaaatatttgaaggaacgtagaatcagaactctcatatcaccagggcctgagttttgggcattggcaagattccaga

SEQ ID NO: 530281 - DNA, 120 bp, Artificial Sequence
  ENSG00000166233_130 (sequence is synthesized)
gatctgactttgcttcatagctaagccaccagcttttatcaatgtgggagatctttccctactttacaaccttgctgccaggatttttttttttaatcaatgggctggggataggaggat

SEQ ID NO: 530282 - DNA, 120 bp, Artificial Sequence
  ENSG00000166233_131 (sequence is synthesized)
ctttctcagctctcatgtgtgccctgcccttttgtagaggaatgcccacaatgcctaggggatgggtttctcagcatttctgaccccatttaggctccaagagtgcctctgttggatttc

SEQ ID NO: 530283 - DNA, 120 bp, Artificial Sequence
  ENSG00000166233_132 (sequence is synthesized)
acaacaatcctgcctcccctttcatttttaaagggtattttgcccttgggagaagtcaagctctctcagcgttccttctattatccacacctttagtgtactacaccttcctgtacctgg

SEQ ID NO: 530284 - DNA, 120 bp, Artificial Sequence
  ENSG00000166233_133 (sequence is synthesized)
ttatcatctaaggggtaagattggtgggaagccttcctctgtggatttgggtcatctaggttctaatgtcaaaccagcctccaaggggttgtgaaaatgttgttaaatttcagcaggttt

SEQ ID NO: 530285 - DNA, 120 bp, Artificial Sequence
  ENSG00000166233_134 (sequence is synthesized)
ctcttttctcccccctgtagtattcctcttcctaccatagttcaactaggaataacaacagctagggggtctcttctctcctatgaaggacttggcactttctggagtttggatcattta

SEQ ID NO: 530286 - DNA, 120 bp, Artificial Sequence
  ENSG00000166233_135 (sequence is synthesized)
ggtttctttggtttttgtttttattttgagacagggtctcactcttacccagcctggagtacagcctgtagtgatctcagctcactacaacctctgccttcctggctcagttgatcctcc

SEQ ID NO: 530287 - DNA, 88 bp, Artificial Sequence
  ENSG00000166233_136 (sequence is synthesized)
tgagatagggttttaccatgttgcccaggctgatctcaaacttctgagctcaagcgatctgcctgcctcagcaccccaaagtcctggg

SEQ ID NO: 530288 - DNA, 120 bp, Artificial Sequence
  ENSG00000166233_137 (sequence is synthesized)
ctcaagcgatctgcctgcctcagcaccccaaagtcctggggttacaggcataaaccactgcacccaacctagatttctttgtgtccttagctttctgatgaattaaacatatgttttatt

SEQ ID NO: 530289 - DNA, 120 bp, Artificial Sequence
  ENSG00000166233_138 (sequence is synthesized)
ttctagctcatctggccttttgttgttgtttgctagagtgggaggtatattccttgtgactttgttcatatcactagtgaatttcagaagtaggagtttatttttttaataaaaaatttt

SEQ ID NO: 530290 - DNA, 62 bp, Artificial Sequence
  ENSG00000166233_139 (sequence is synthesized)
agtgaaaccccaactctactaaaaatactcaggagatttgcttgaacctgggaggcggaggt

SEQ ID NO: 530291 - DNA, 120 bp, Artificial Sequence
  ENSG00000166233_140 (sequence is synthesized)
actccctctcaaaaaaaaaaaaaaaaatttttttttaaacacgtctcactgccacccaggcttgagtgccatgacatgatcatagctcactgctggcttgaccttctgggctcaagtgat

SEQ ID NO: 530292 - DNA, 88 bp, Artificial Sequence
  ENSG00000166233_141 (sequence is synthesized)
ttcatgtgccaccatgcctggcttttttttttttgtagagtttgggtctcgctatgttgcctgtgatcctcccaccttggttttccaa

SEQ ID NO: 530293 - DNA, 120 bp, Artificial Sequence
  ENSG00000166233_142 (sequence is synthesized)
agtgctgggattaaaggcatgagccaccatgcctggttaggaatgggagtttaaacaatggttttatttacatatttcattagctagtatttttttcttttttgagacagagtctggctc

SEQ ID NO: 530294 - DNA, 120 bp, Artificial Sequence
  ENSG00000166233_143 (sequence is synthesized)
gctgggattacaggtgtgagccatcgctcctggcctcattaactgttttcaaaagtaaaagtacatggataatacaaagttaaattttgtagaatcataaagaaaagcaacaccttccca

SEQ ID NO: 530295 - DNA, 120 bp, Artificial Sequence
  ENSG00000166233_144 (sequence is synthesized)
agaaaagcaacaccttcccatcttaactcccctagtgcctctactccctccacagagacaaatatcttaccagttggttgtgttttcttttccaaactgtatttctaaaatgtgtcaata

SEQ ID NO: 530296 - DNA, 90 bp, Artificial Sequence
  ENSG00000166233_145 (sequence is synthesized)
tgttttcttttccaaactgtatttctaaaatgtgtcaatatctcttccttttattttttattttttgtagagacaggggtctcactgtgc

SEQ ID NO: 530297 - DNA, 120 bp, Artificial Sequence
  ENSG00000166233_146 (sequence is synthesized)
ctggcctcccccttattatttttttaaacatgaatggaagcatactatattttctacactttatttgttttatgtaactattttaacaacctgaggacttttacaggctgcataatatgt

SEQ ID NO: 530298 - DNA, 120 bp, Artificial Sequence
  ENSG00000166233_147 (sequence is synthesized)
cttaatatggatgtatcttagtttatttaaacagttactggtgatggacatttccatgtttccagtattttttctcacaaacaatgcagtattatgcctttgtccacattcaccattgat

SEQ ID NO: 530299 - DNA, 120 bp, Artificial Sequence
  ENSG00000166233_148 (sequence is synthesized)
tgctattgagtatatctgtagcatcaagaataggcatactgaaaatcctccatgaagtccagtgaagcttcatattattttgaagtgatatttcccagtgttggctggactctcaagcgt

SEQ ID NO: 530300 - DNA, 120 bp, Artificial Sequence
  ENSG00000166233_149 (sequence is synthesized)
ttgtggtataggttttgggaggactggacacttccaaagagaaataagatgttacagacttgtccagcaggtggcatcagaacaaagctggctatggaccttgtcagtacaaatgataaa

SEQ ID NO: 530301 - DNA, 120 bp, Artificial Sequence
  ENSG00000166233_150 (sequence is synthesized)
acattaaaaatgtaaaaactcaactgtagctccttgtttatacatatattgggggtgttgaaaagttaccgatgcctgattcctcttctatgtcctcagcccccaccataaaaatagata

SEQ ID NO: 530302 - DNA, 120 bp, Artificial Sequence
  ENSG00000166233_151 (sequence is synthesized)
aatgccattttttttgtatgcccagcacagctatatgatttgaataatcttgataagcagggtcacatttgaggagatttgctaagggaaatgaagatccatctgtgacacaagaaacat

SEQ ID NO: 530303 - DNA, 120 bp, Artificial Sequence
  ENSG00000166233_152 (sequence is synthesized)
gaagatccatctgtgacacaagaaacatgttctatgtgatttctgggattttcctgtgaacatacttcttgtttgtttgttttacagtggatctcactctgtcacccaggctggagttca

SEQ ID NO: 530304 - DNA, 120 bp, Artificial Sequence
  ENSG00000166233_153 (sequence is synthesized)
tgagctcctgggctcaggagagcctctctcctcagtctcccaagtagctaggactacagacacatgccatcatgccaggctcattttaaaattttttgtagagacgggtctcactatgtt

SEQ ID NO: 530305 - DNA, 120 bp, Artificial Sequence
  ENSG00000166233_154 (sequence is synthesized)
ggctcaagcaatcctcctgcctcagcatctcaaagtgttgggattacaggtgtgaaccatagtatccaacctattatgtttttttaaaaagagattgttctaattatgtatataattaaa

SEQ ID NO: 530306 - DNA, 120 bp, Artificial Sequence
  ENSG00000166233_155 (sequence is synthesized)
gttctaattatgtatataattaaagtacattaggtttagtgattgcaatttgagaaaccaatgtcctttcttattgaaaaaggccctggtacagaaagtgttctatcttcctcacaagat

SEQ ID NO: 530307 - DNA, 120 bp, Artificial Sequence
  ENSG00000166233_156 (sequence is synthesized)
ctgaggtcaaaggagagattttgaaacattatagcaatggcttctagttattgaataaagaatgtcatttgctcctcacaggacccctttcagggagatttcacatattgggaaacagcc

SEQ ID NO: 530308 - DNA, 120 bp, Artificial Sequence
  ENSG00000166233_157 (sequence is synthesized)
tcatgagctttctacaaacatctttgtccttaagtcttcccatttcagtaattggctgtaccactcatccagcagctttcaaagtaagaaacctggcaatcttcctttaacatccatttc

SEQ ID NO: 530309 - DNA, 120 bp, Artificial Sequence
  ENSG00000166233_158 (sequence is synthesized)
cctttccctcattcccccatatccaatcatgtgtattggaggtttttccacctctaaacttgagaacccatttactttttctccatctcctttgccatcacactagtccaagtgaagtgt

SEQ ID NO: 530310 - DNA, 120 bp, Artificial Sequence
  ENSG00000166233_159 (sequence is synthesized)
ttcatcatctcatttgcagcatcctttagtttaccctagattatcaatttttgtccccctcccaattcagtctctactcatgagctaacatgagtttattaagtgttcattctgaccatg

SEQ ID NO: 530311 - DNA, 120 bp, Artificial Sequence
  ENSG00000166233_160 (sequence is synthesized)
ccattccttgctcaaaattctctagtgccttcccaatgcccttaaaataaaattcctcatatggcctttgtggatctgcactcctacctcttctcctattgcaaccaaccctgttacctt

SEQ ID NO: 530312 - DNA, 120 bp, Artificial Sequence
  ENSG00000166233_161 (sequence is synthesized)
tttctcttttcacactggtcttcattctgtgctgcaaactggctgagattcttccatcctcagggcctttgcacaagttcttcctttgccttagaattctttcctggcctgcacatgtct

SEQ ID NO: 530313 - DNA, 120 bp, Artificial Sequence
  ENSG00000166233_162 (sequence is synthesized)
tcatcccctttccctaagctaatgccttaccctttaggtctcattttaaacatctcttacccaggaaaaatttccctgtccaaacaagtctagattggctccccattgtttgttctaact

SEQ ID NO: 530314 - DNA, 120 bp, Artificial Sequence
  ENSG00000166233_163 (sequence is synthesized)
gttctatatttctccttcttagcatttatcacaattcttggtatgttgtgcttttcactttcttagtcgctattattggagtaggtaatacatccatatagtacaaaattcaaaatgtat

SEQ ID NO: 530315 - DNA, 120 bp, Artificial Sequence
  ENSG00000166233_164 (sequence is synthesized)
taaaggtatagagtaaaaagtcttctcttccctgtccccccgctacccagttctcctctttagaaccacttttagcattttgaatatccttccagaaatattttctaagtatacaagcaa

SEQ ID NO: 530316 - DNA, 120 bp, Artificial Sequence
  ENSG00000166233_165 (sequence is synthesized)
acaagcaattatgtatataatattcctctttatttttgcctttttattaatacagatactatatgcattttctgcactttatctgttaataatatatcttggcaattattcaatattaat

SEQ ID NO: 530317 - DNA, 120 bp, Artificial Sequence
  ENSG00000166233_166 (sequence is synthesized)
agttgcctctttctttttcatgcgccatataatatggacttataatttatttaacctctatctaggttggttttaggcattggttattacaaataatgctgcattgaatacctttgtatg

SEQ ID NO: 530318 - DNA, 120 bp, Artificial Sequence
  ENSG00000166233_167 (sequence is synthesized)
taaagtcatttcccacatctatgcctatagaataaattactagaattgaaataattcagttaaagattatgtgcatttttaattttggtagttattgccaaactgctctcaatggaagtt

SEQ ID NO: 530319 - DNA, 120 bp, Artificial Sequence
  ENSG00000166233_168 (sequence is synthesized)
ttatgaattcccactagtgaatgcatttgtcctcacaattatgtcagtgaaatttttgttctttgccaatgcaagaaatggaaagtatctcttggaaactaatttgcatgttttttttcc

SEQ ID NO: 530320 - DNA, 120 bp, Artificial Sequence
  ENSG00000166233_169 (sequence is synthesized)
ttgcacagttatattttcatatgttaaagagccatttgtatttcttggtgaattgttcataaactttgcttacttattatctaatgtctgactaatttgctacactctaaattcccaatt

SEQ ID NO: 530321 - DNA, 120 bp, Artificial Sequence
  ENSG00000166233_170 (sequence is synthesized)
catacttaagtctcgcccttgcaatttagatgtacaatctgcctcttcagtggtttccacaccaaaaaatccacaggctcctgaattttatatgggcctaagagtcttactgaaaattgg

SEQ ID NO: 530322 - DNA, 120 bp, Artificial Sequence
  ENSG00000166233_171 (sequence is synthesized)
aagtcttaaggtgtagtctattttatgcagtgtgaggcctttcatgctctgaaatgtaccactcttgactgactttttcttcttcaccctgtccggcactgtgcccttattagccagaga

SEQ ID NO: 530323 - DNA, 120 bp, Artificial Sequence
  ENSG00000166233_172 (sequence is synthesized)
aatgttccccctttctcccaggaaacgttctgaccttaccctggtccctcaaggactctccttctcccccaaattaactttcaaggagtttctccaacccaaaatggcacccttcctgaa

SEQ ID NO: 530324 - DNA, 120 bp, Artificial Sequence
  ENSG00000166233_173 (sequence is synthesized)
aagatttctagtggatactgttttctgtacctcactacggatgtattttgctgcttggctccccgtctccattttgctatggcaaacatttttttccagaaatatatcagataaaatgaa

SEQ ID NO: 530325 - DNA, 120 bp, Artificial Sequence
  ENSG00000166233_174 (sequence is synthesized)
ggttatctttagtggagaaataatgactaaaaagccagcttttagcagtaaaggttttctcaagtaaagatgttcatttaaaattgatgcataaaacattgatatctgtatatgactaga

SEQ ID NO: 530326 - DNA, 120 bp, Artificial Sequence
  ENSG00000166233_175 (sequence is synthesized)
caataagactgactagcagatgggacttcagttgggtaacaggtacaaaactagccatagtggtaaaggatgatacaatttgaatcttccatacagtgttttcttataagaaataagtat

SEQ ID NO: 530327 - DNA, 120 bp, Artificial Sequence
  ENSG00000166233_176 (sequence is synthesized)
agccagatgtaagcaataataggtttctattttttctcatttacctttgagttttcagcaaagagcagctctcagaacgagaagattccaaaagacattttaaatcctttcaaatggtct

SEQ ID NO: 530328 - DNA, 120 bp, Artificial Sequence
  ENSG00000166233_177 (sequence is synthesized)
tcagtattcttccaaaagtaatgggtgaaatctttcgttcttttaacatttaaaaaattgttctggaaaagaacaaacaagttattagagatgaaagcccatagagctttacaggtgcag

SEQ ID NO: 530329 - DNA, 120 bp, Artificial Sequence
  ENSG00000166233_178 (sequence is synthesized)
ttaaaccacctatgaaagttacagaatgagtgttgagagcagtctgtagtcaacaaaacagtgaaaatggtttatcttttagctttattttgaagccaaaatttactttcattcttctta

SEQ ID NO: 530330 - DNA, 120 bp, Artificial Sequence
  ENSG00000166233_179 (sequence is synthesized)
cactatgtgctagttctactactaaattctaggtaattaactgtaaagcagacatgggttctctccttgtatttgccagtcactagaaactagtgacaatactgtggaactataaggcat

SEQ ID NO: 530331 - DNA, 120 bp, Artificial Sequence
  ENSG00000166233_180 (sequence is synthesized)
gaaatgattggcttatttacttgcttacagtaggtaggccttaattctattaactctttgtgtcacttaacagctttaactgtggagaaaattggcatgatcctgttaaatgtaagtggt

SEQ ID NO: 530332 - DNA, 120 bp, Artificial Sequence
  ENSG00000166233_181 (sequence is synthesized)
ccgctacgaggtgctcacggccgagcagattctacaacacatggtggaatgtatccgggaggtcaacgaggtcatccagtgcatattgggtacttccagaagtatgaattcagtgatgca

SEQ ID NO: 530333 - DNA, 120 bp, Artificial Sequence
  ENSG00000166233_182 (sequence is synthesized)
tcaagagtctccttctttctttatctttgccaagacttatctttcatctttttgataaaaaccattctaacaggtgtgaagtgagacttcattatggttttaatttgataatcagctttt

SEQ ID NO: 530334 - DNA, 120 bp, Artificial Sequence
  ENSG00000166233_183 (sequence is synthesized)
ctttctaatctatttttattcttggtttcaggcgcctgatcacagattcaaaagttaaattaaagtatcagcatttaataacaaatagctttgtagagcgatctagggcagccctgcaga

SEQ ID NO: 530335 - DNA, 120 bp, Artificial Sequence
  ENSG00000166246_0 (sequence is synthesized)
agtctagtaatgtaaagctccgctgagagggagagtgctgaagaaggggacagcctctgtacctgcggcgcggcccgaggggcggacgcgagcggagtgacgcgctggaggctgtttata

SEQ ID NO: 530336 - DNA, 120 bp, Artificial Sequence
  ENSG00000166246_1 (sequence is synthesized)
gcgctgtcaggacagcgcggggagtggaggcagaggcctgagagctccccggattatggtgcactgagaaggcatctggaagcctgggccctcatggcatccaacgataaaggcatggca

SEQ ID NO: 530337 - DNA, 120 bp, Artificial Sequence
  ENSG00000166246_2 (sequence is synthesized)
ccctcgctgggctctccctgggcctcccagatggggccctgggatgccatcctcaaggctgtcaaagaccagctcccgtctctggactcagactcccctttgtcggactatggggaagag

SEQ ID NO: 530338 - DNA, 120 bp, Artificial Sequence
  ENSG00000166246_3 (sequence is synthesized)
gagctgttcatcttccagcgaaaccaaacctccctgattccagacctgtcggaggagctggctgaagatcctgccgatggcgacaagtccagggcctgggtcgctgcagctgaagagtcc

SEQ ID NO: 530339 - DNA, 120 bp, Artificial Sequence
  ENSG00000166246_4 (sequence is synthesized)
cttcccgagccagttctggtgcctgcagaattggccacagaacctgggtgcagacagaacacaaggacaaaggatgcatcctctcaggaaggaagagaccctggcaggccttttgaaagc

SEQ ID NO: 530340 - DNA, 120 bp, Artificial Sequence
  ENSG00000166246_5 (sequence is synthesized)
tctggtgaggtcagcgctcttcttgggatggccgaggagccccccaggtggctggaaggcgaccttggaagcctgtctttcaacaccaaaggatcccagggtcctccctgggacccacag

SEQ ID NO: 530341 - DNA, 120 bp, Artificial Sequence
  ENSG00000166246_6 (sequence is synthesized)
gccgaagccactctctcctgccatgaaggagacccaaaggcagagcccctcagcactgcctcacaagaatctgtgaaccgccgggccctccgacaggagagaaggaagatgatagagacg

SEQ ID NO: 530342 - DNA, 120 bp, Artificial Sequence
  ENSG00000166246_7 (sequence is synthesized)
gacatcctccagaaagtcacccgggatgcctgcggcccgaccagcagtgacaaaggtggggtgaaggaggcgccctgccacgctgcggagtcagctcccagatccaaaatgcccctcgtg

SEQ ID NO: 530343 - DNA, 120 bp, Artificial Sequence
  ENSG00000166246_8 (sequence is synthesized)
gagcctccggagggaccaccagtgctctcgctccagcaacttgaagcgtgggatttggatgacatccttcagagtctggcgggacaagaagacaaccagggaaatcgtgcacctggaact

SEQ ID NO: 530344 - DNA, 120 bp, Artificial Sequence
  ENSG00000166246_9 (sequence is synthesized)
gtgtggtgggcagctgaccaccgccaagttcaagaccgcatggtgccgagcgcccacaacaggctcatggaacagctggccctcctgtgcaccacgcagtccaaggcctctgcttgtgcc

SEQ ID NO: 530345 - DNA, 120 bp, Artificial Sequence
  ENSG00000166246_10 (sequence is synthesized)
tgtgcctcaaggaagcagggctcccaggctgggccaggcccgcagctggcccagggcatgaggcttaacgcagagtcccccaccatctttattgacctgcggcagatggagctaccagac

SEQ ID NO: 530346 - DNA, 120 bp, Artificial Sequence
  ENSG00000166246_11 (sequence is synthesized)
cacctgtccccagaaagctccagccacagctcctctgacagtgaggaggaggaggaggaagagatggcagctctgggagacgcagagggggcatctccttcctccctggggctacggacc

SEQ ID NO: 530347 - DNA, 120 bp, Artificial Sequence
  ENSG00000166246_12 (sequence is synthesized)
tgtaccgggaaaagccagcttctccagcagctcagggcctttcagaaggggacagcccagcccgagctgcctgccagcaaggggcccgcgggtgggagggctcaggcccctgaagacaca

SEQ ID NO: 530348 - DNA, 120 bp, Artificial Sequence
  ENSG00000166246_13 (sequence is synthesized)
gctggatcacgaactgggaggaagcaacacatgaagctctgtgccaaggggcagagcgcccaggctcgactcccaagaggcaggcccagagccctgggggatgttcctgagccaggggca

SEQ ID NO: 530349 - DNA, 120 bp, Artificial Sequence
  ENSG00000166246_14 (sequence is synthesized)
gccagggaggccctgatgcctcctctggagcaactatagctgcctcaggatgtgtcctgctgtctgccccgtgggaagagcagagaaatcatcaccaccttgggccccacggtgccacgg

SEQ ID NO: 530350 - DNA, 120 bp, Artificial Sequence
  ENSG00000166246_15 (sequence is synthesized)
gctcaggcagcacagtagggcgccgggcctttgggacagtgtcccagcttcccctggggttcacccctggctgccaggccactgaggatgggcaggggtctcttctcatcaagccttgta

SEQ ID NO: 530351 - DNA, 120 bp, Artificial Sequence
  ENSG00000166246_16 (sequence is synthesized)
ccaggcaaaagacaggccctgcttggccgtggtcactggccgccaagatcagggctacagatgtctgctctctggaccccacgtgatctggccactggggacccccacccgaccccactc

SEQ ID NO: 530352 - DNA, 120 bp, Artificial Sequence
  ENSG00000166246_17 (sequence is synthesized)
ccaatgatgaggggcattttcattgcaagtcaaaggcaagacaggcttccataaagtcccaggaggtccctcctgtagggcacaaggccaggctgcctcccagcccccaggccctctccc

SEQ ID NO: 530353 - DNA, 120 bp, Artificial Sequence
  ENSG00000166246_18 (sequence is synthesized)
acctacagagaccctcccctgccccctccactccggggcctgtgccgccagaaccgggctctgcccccatacgctgccctcgcagcctggcggcctccgctgtggctgcctagctgtcaa

SEQ ID NO: 530354 - DNA, 120 bp, Artificial Sequence
  ENSG00000166246_19 (sequence is synthesized)
gagcaaaggctttttttttcttcaaccccattttcttccatttctcccacctttttaatgccagtaacctcactgagaatgttttacagtgatggaaaataaactctgttccaagttcaa

SEQ ID NO: 530355 - DNA, 120 bp, Artificial Sequence
  ENSG00000166246_20 (sequence is synthesized)
agtgactaccccataccagcctctactttgcagagttgcctgttgaccgcacagagcctctggtggatcctgatggggaggaacagggacttcaaaaggcttggatcaattctcaattga

SEQ ID NO: 530356 - DNA, 120 bp, Artificial Sequence
  ENSG00000166246_21 (sequence is synthesized)
aaagtgctggcctacagtccccctgggtccctgcagggagggaagaggggcatgaggcacacctcctcgggctgggctctatgcaatagagcccaacacgtctaggctggagggcatcac

SEQ ID NO: 530357 - DNA, 120 bp, Artificial Sequence
  ENSG00000166246_22 (sequence is synthesized)
ccacacctgtcctcacctcctggcaggacgtccaccggcctccagtgtggctgctgacctcttgcattgggtcaccagcaaagcccgagtgcttcaagccccaacaagagttggaacacc

SEQ ID NO: 530358 - DNA, 120 bp, Artificial Sequence
  ENSG00000166246_23 (sequence is synthesized)
acgcagagggggcatctccttcctccctggggctacggtaaccacccaggggcctctcgccacctgcagatgtcccacctctgctttctgcagcaagccctccacctggcacatttaccg

SEQ ID NO: 530359 - DNA, 120 bp, Artificial Sequence
  ENSG00000166246_24 (sequence is synthesized)
cctgtggtgaggtcttgctgcacccaccgcacagggtgagggggacggcacagctttcatcatcctgcccacgtccactgggtcccagcagtggcagcagtgatgggctgcctgaattgc

SEQ ID NO: 530360 - DNA, 120 bp, Artificial Sequence
  ENSG00000166246_25 (sequence is synthesized)
cagggaggccctgatgcctcctctggagcaactatagctgcctcagagatggggtctcacggtgttgcccaggttggtctggaactcctctcaatcctcctgcctaggccttccacagtg

SEQ ID NO: 530361 - DNA, 120 bp, Artificial Sequence
  ENSG00000166246_26 (sequence is synthesized)
ctgggattatagcactgtgagctgccagcctggcttttaatgaactttttgaaagaggagtaacgagaatttgctttctctttctcttctttacctaagatagaaaggcacacatagatt

SEQ ID NO: 530362 - DNA, 120 bp, Artificial Sequence
  ENSG00000166246_27 (sequence is synthesized)
ctcaaggcctttgacctttatgaatctagacagaatactggaaacccctggaaatgctgtcctgtgtagaatggagcagcggcctcacttgttgatcaccagcaaaaactggggacatct

SEQ ID NO: 530363 - DNA, 120 bp, Artificial Sequence
  ENSG00000166246_28 (sequence is synthesized)
gcttgccccctgccaagacccggcccctccacaggacaagcctggtcttcctgggtcctgttcctttgccagcaccgtcttgcagccccgtcttcacgggatgcttttgtaactgctgtg

SEQ ID NO: 530364 - DNA, 120 bp, Artificial Sequence
  ENSG00000166246_29 (sequence is synthesized)
gtgtggtgggcagctgaccaccgccaagttcaaggtctgaccttgaacactggagcccacgtgaatccccacaagcagcaccttcctgggcccctcagacacagagggctgcaggctggt

SEQ ID NO: 530365 - DNA, 120 bp, Artificial Sequence
  ENSG00000166246_30 (sequence is synthesized)
cgtgccaggcgtgggccaggtcctagggacaaaggagaggcctccgcaccccaccccatgacccatacctcctcttccccacctccctgggccagcctgccttccttctccctcctcctc

SEQ ID NO: 530366 - DNA, 120 bp, Artificial Sequence
  ENSG00000166246_31 (sequence is synthesized)
cttcctgggggaaggaagccccaccttctgtgcgcagtcagctcctaagcacgctcccgcttcccctggcctccccatttaaaaagggaggcaaaggatgtcaccactgtcactacactc

SEQ ID NO: 530367 - DNA, 120 bp, Artificial Sequence
  ENSG00000166246_32 (sequence is synthesized)
atggctttgctctgggaagtcctgcaaataaaatgaaagttctccaacccctccctatccactcgggccacaaaggcgaggggaggcaggtctgaggcagaggagccagggcaggtgcgg

SEQ ID NO: 530368 - DNA, 120 bp, Artificial Sequence
  ENSG00000166246_33 (sequence is synthesized)
cgcttccgcctctggtcccaaagcaaagactcccctgtgactgacagcccgtgttatgttaaatacattttgttggtttgtaattcaaatcccataaagcaggaggtagagagccaacca

SEQ ID NO: 530369 - DNA, 120 bp, Artificial Sequence
  ENSG00000166250_0 (sequence is synthesized)
actcctttttctttccaaacagggaaaagtgttccacgaagcggtagcgccttttcgcctcgcgttttcctccctgaccctggtcccggctcccgtccgggcgccagctggtggggcgag

SEQ ID NO: 530370 - DNA, 80 bp, Artificial Sequence
  ENSG00000166250_1 (sequence is synthesized)
gccggctcccgcccggcacatggctgcagccacctcgcgcgcaccccgaggcgccgcgcccagctcgcccgaggtccgtc

SEQ ID NO: 530371 - DNA, 120 bp, Artificial Sequence
  ENSG00000166250_2 (sequence is synthesized)
ggaggcgcccggccgccccggagccaagcagcagctgagcggggaagcgcccgcgtccggggatcgggatgtccctcctccttctcctcttgctagtttcctactatgttggaaccttgg

SEQ ID NO: 530372 - DNA, 120 bp, Artificial Sequence
  ENSG00000166250_3 (sequence is synthesized)
ggactcacactgagatcaagagagtggcagaggaaaaggtcactttgccctgccaccatcaactggggcttccagaaaaagacactctggatattgaatggctgctcaccgataatgaag

SEQ ID NO: 530373 - DNA, 120 bp, Artificial Sequence
  ENSG00000166250_4 (sequence is synthesized)
ggaaccaaaaagtggtgatcacttactccagtcgtcatgtctacaataacttgactgaggaacagaagggccgagtggcctttgcttccaatttcctggcaggagatgcctccttgcaga

SEQ ID NO: 530374 - DNA, 120 bp, Artificial Sequence
  ENSG00000166250_5 (sequence is synthesized)
ttgaacctctgaagcccagtgatgagggccggtacacctgtaaggttaagaattcagggcgctacgtgtggagccatgtcatcttaaaagtcttagtgagaccatccaagcccaagtgtg

SEQ ID NO: 530375 - DNA, 120 bp, Artificial Sequence
  ENSG00000166250_6 (sequence is synthesized)
agttggaaggagagctgacagaaggaagtgacctgactttgcagtgtgagtcatcctctggcacagagcccattgtgtattactggcagcgaatccgagagaaagagggagaggatgaac

SEQ ID NO: 530376 - DNA, 120 bp, Artificial Sequence
  ENSG00000166250_7 (sequence is synthesized)
gtctgcctcccaaatctaggattgactacaaccaccctggacgagttctgctgcagaatcttaccatgtcctactctggactgtaccagtgcacagcaggcaacgaagctgggaaggaaa

SEQ ID NO: 530377 - DNA, 120 bp, Artificial Sequence
  ENSG00000166250_8 (sequence is synthesized)
gctgtgtggtgcgagtaactgtacagtatgtacaaagcatcggcatggttgcaggagcagtgacaggcatagtggctggagccctgctgattttcctcttggtgtggctgctaatccgaa

SEQ ID NO: 530378 - DNA, 120 bp, Artificial Sequence
  ENSG00000166250_9 (sequence is synthesized)
ggaaagacaaagaaagatatgaggaagaagagagacctaatgaaattcgagaagatgctgaagctccaaaagcccgtcttgtgaaacccagctcctcttcctcaggctctcggagctcac

SEQ ID NO: 530379 - DNA, 120 bp, Artificial Sequence
  ENSG00000166250_10 (sequence is synthesized)
gctctggttcttcctccactcgctccacagcaaatagtgcctcacgcagccagcggacactgtcaactgacgcagcaccccagccagggctggccacccaggcatacagcctagtggggc

SEQ ID NO: 530380 - DNA, 120 bp, Artificial Sequence
  ENSG00000166250_11 (sequence is synthesized)
cagaggtgagaggttctgaaccaaagaaagtccaccatgctaatctgaccaaagcagaaaccacacccagcatgatccccagccagagcagagccttccaaacggtctgaattacaatgg

SEQ ID NO: 530381 - DNA, 120 bp, Artificial Sequence
  ENSG00000166250_12 (sequence is synthesized)
acttgactcccacgctttcctaggagtcagggtctttggactcttctcgtcattggagctcaagtcaccagccacacaaccagatgagaggtcatctaagtagcagtgagcattgcacgg

SEQ ID NO: 530382 - DNA, 120 bp, Artificial Sequence
  ENSG00000166250_13 (sequence is synthesized)
aacagattcagatgagcattttccttatacaataccaaacaagcaaaaggatgtaagctgattcatctgtaaaaaggcatcttattgtgcctttagaccagagtaagggaaagcaggagt

SEQ ID NO: 530383 - DNA, 120 bp, Artificial Sequence
  ENSG00000166250_14 (sequence is synthesized)
ccaaatctatttgttgaccaggacctgtggtgagaaggttggggaaaggtgaggtgaatatacctaaaacttttaatgtgggatattttgtatcagtgctttgattcacaattttcaaga

SEQ ID NO: 530384 - DNA, 120 bp, Artificial Sequence
  ENSG00000166250_15 (sequence is synthesized)
ggaaatgggatgctgtttgtaaattttctatgcatttctgcaaacttattggattattagttattcagacagtcaagcagaacccacagccttattacacctgtctacaccatgtactga

SEQ ID NO: 530385 - DNA, 120 bp, Artificial Sequence
  ENSG00000166250_16 (sequence is synthesized)
gctaaccacttctaagaaactccaaaaaaggaaacatgtgtcttctattctgacttaacttcatttgtcataaggtttggatattaatttcaaggggagttgaaatagtgggagatggag

SEQ ID NO: 530386 - DNA, 120 bp, Artificial Sequence
  ENSG00000166250_17 (sequence is synthesized)
aagagtgaatgagtttctcccactctatactaatctcactatttgtattgagcccaaaataactatgaaaggagacaaaaatttgtgacaaaggattgtgaagagctttccatcttcatg

SEQ ID NO: 530387 - DNA, 120 bp, Artificial Sequence
  ENSG00000166250_18 (sequence is synthesized)
atgttatgaggattgttgacaaacattagaaatatataatggagcaattgtggatttcccctcaaatcagatgcctctaaggactttcctgctagatatttctggaaggagaaaatacaa

SEQ ID NO: 530388 - DNA, 120 bp, Artificial Sequence
  ENSG00000166250_19 (sequence is synthesized)
catgtcatttatcaacgtccttagaaagaattcttctagagaaaaagggatctaggaatgctgaaagattacccaacataccattatagtctcttctttctgagaaaatgtgaaaccaga

SEQ ID NO: 530389 - DNA, 79 bp, Artificial Sequence
  ENSG00000166250_20 (sequence is synthesized)
caaggaaggataaaaggaagttcagtattgtaccacacttggaacttcctccatttcttccattttagaaggatatgaa

SEQ ID NO: 530390 - DNA, 120 bp, Artificial Sequence
  ENSG00000166250_21 (sequence is synthesized)
tggaacttcctccatttcttccattttagaaggatatgaacctggaacttttgatgattctaagccttaaactatcaaaaagatcagggattgccaatgcttctaatggcactgcaagta

SEQ ID NO: 530391 - DNA, 120 bp, Artificial Sequence
  ENSG00000166250_22 (sequence is synthesized)
tatgccataaccgttccctcctaaaagtgaaaaatgagagaaattcagtattttcccaggctcagcatccagaagtctagctctgggctggaagaaaagggtactaatatttagggaaga

SEQ ID NO: 530392 - DNA, 120 bp, Artificial Sequence
  ENSG00000166250_23 (sequence is synthesized)
gatgagaataagtagtgggtggcaggagagggctgagctagtgcctgctaacattttagttgtatcttggaaagatttagcaaaaataactcaccaggatagctgctgaagagttgatga

SEQ ID NO: 530393 - DNA, 120 bp, Artificial Sequence
  ENSG00000166250_24 (sequence is synthesized)
atgggagaagaaagatgtttgagaaataaagaaaacagcagcctgcaatacaataacttgcctttttaatagttttgattactcttgatacctacagcacaaatgctggacctgaatcag

SEQ ID NO: 530394 - DNA, 120 bp, Artificial Sequence
  ENSG00000166250_25 (sequence is synthesized)
ttgatacctacagcacaaatgctggacctgaatcagctcttcaaggaccctagcacaaatgtcaactgatcacctctgggagagtagaaaacttttttttttttgagacgaagtctcgct

SEQ ID NO: 530395 - DNA, 120 bp, Artificial Sequence
  ENSG00000166250_26 (sequence is synthesized)
cttgggttcaagtgattctcctgccttgtcctcctgagtcgctggtattacaggtgcctgccatcacacccagctaatttttggagttctgatagagacagggtttctccatgttggcca

SEQ ID NO: 530396 - DNA, 120 bp, Artificial Sequence
  ENSG00000166250_27 (sequence is synthesized)
gggtttctccatgttggccaggcttgtctcaagctcctgacctcaagtgacctacccacccttggcctcccacagtgctggaagccactgcacctggctcagaatacttttttttttgag

SEQ ID NO: 530397 - DNA, 90 bp, Artificial Sequence
  ENSG00000166250_28 (sequence is synthesized)
gaagccactgcacctggctcagaatacttttttttttgagatgcagtcttgctctcatcacgcaggctggagtgcagtggcgtagttcaa

SEQ ID NO: 530398 - DNA, 120 bp, Artificial Sequence
  ENSG00000166250_29 (sequence is synthesized)
aggtgtgagccaccatgcccggcccagaatactttttaaaagaagagcaggttagaggaaagaaaaaaattgatgctgaatgtggtgatgaaagcatgtttctaaaatgggaagcagatg

SEQ ID NO: 530399 - DNA, 120 bp, Artificial Sequence
  ENSG00000166250_30 (sequence is synthesized)
aaatgggaagcagatgcttaaagaggaaagactaatctgggattttgccccatttctctggtttttcactcctatatttaattctcacaatcgtgtcgtcacatagtgcaaaaaacaaaa

SEQ ID NO: 530400 - DNA, 120 bp, Artificial Sequence
  ENSG00000166250_31 (sequence is synthesized)
ttcttgtaaagtccccaggagtttatgcttgggtgaaagttttagcctgagtattttcttcctctaaaaaaggtgggaaatgagacattgaggaattaacatataaatgtctgctatggg

SEQ ID NO: 530401 - DNA, 120 bp, Artificial Sequence
  ENSG00000166250_32 (sequence is synthesized)
tttaagagaactggcgtatttggaatgcttcttacactaacactgtctcattgtaaaatataaaaccccttactctaactacatttttattcctctggtagtgtggtatccaggcaacat

SEQ ID NO: 530402 - DNA, 120 bp, Artificial Sequence
  ENSG00000166250_33 (sequence is synthesized)
atcacttctgctatgtaattctaagaattctcatttctagagtacctgagccaaacaaatacacaacggaagctgcagctgtatcatcactagcaatttgctcatcattatttactacct

SEQ ID NO: 530403 - DNA, 120 bp, Artificial Sequence
  ENSG00000166250_34 (sequence is synthesized)
ttgaacctaaggtttcctgcctatgcttttgaaagcaaaaatcagtctcctttgcatgaaaaagagccttagatttttaaacatgttagttaccagaatgctaaaataccagttgattac

SEQ ID NO: 530404 - DNA, 120 bp, Artificial Sequence
  ENSG00000166250_35 (sequence is synthesized)
ccaaattattttggaaatctatccataatggaagtctacaacaaacacataaaacagattacactaagagctgagaaattcaaaggaactgaagattctgagagataaactgttcaagtc

SEQ ID NO: 530405 - DNA, 120 bp, Artificial Sequence
  ENSG00000166250_36 (sequence is synthesized)
ttagcaatgatactgcacttctctttgacaggttctgggcttaagttagaggccctactggttccaaaccatattccactgactttgcaagtaaaataaatttgattctgaaataggaaa

SEQ ID NO: 530406 - DNA, 120 bp, Artificial Sequence
  ENSG00000166250_37 (sequence is synthesized)
caaaaaaaggagaaataaccgaatagtagaagaaaaactgtttgtaggaagacgatgcagatggaatgatgtggacattgagtaaccatgtcaataaaatatataaaccaaacttaaatt

SEQ ID NO: 530407 - DNA, 120 bp, Artificial Sequence
  ENSG00000166250_38 (sequence is synthesized)
tgtgaaataaggaagttggtacctttgttgttacagtgtataaaaacaatttcggaactgctgttgcaaaaagacatatatagttttgcttccttctggtgttaagctgtttatatttca

SEQ ID NO: 530408 - DNA, 120 bp, Artificial Sequence
  ENSG00000166250_39 (sequence is synthesized)
gtttcagttttaacttctaagttgccttgtaattgggactgtgtttcagcatcacaaaaaccaaatatttattatggatgcatctgtatcagcaattaaaaaataaacaagtaaaagtga

SEQ ID NO: 530409 - DNA, 120 bp, Artificial Sequence
  ENSG00000166257_0 (sequence is synthesized)
tgtcagggctgacagcacacacggcctgggggcctagagaagggttgctgatcacctgccacccagggtcggggccccgcaccatccgggggcgagctcccgggaaggggctccgcctct

SEQ ID NO: 530410 - DNA, 120 bp, Artificial Sequence
  ENSG00000166257_1 (sequence is synthesized)
acacccaccccccaacctctgacatcgccggccgaacgggagctgccgcttccttcccggccccgctgcacctccccagggagccgagggcgggcgtggacgggaccgacgtggaacgca

SEQ ID NO: 530411 - DNA, 120 bp, Artificial Sequence
  ENSG00000166257_2 (sequence is synthesized)
ttctgtagcccagacgggcggccccggcggcttcgggagtggggtcacgcccagctggagaagcagttagggcggacgaagcaggagccgcggggctgggaggattccagtcggaacgca

SEQ ID NO: 530412 - DNA, 120 bp, Artificial Sequence
  ENSG00000166257_3 (sequence is synthesized)
accgatcctggggaggcgagagccttggaagccgccagccccagaagatgcctgccttcaatagattgtttcccctggcttctctcgtgcttatctactgggtcagtgtctgcttccctg

SEQ ID NO: 530413 - DNA, 120 bp, Artificial Sequence
  ENSG00000166257_4 (sequence is synthesized)
tgtgtgtggaagtgccctcggagacggaggccgtgcagggcaaccccatgaagctgcgctgcatctcctgcatgaagagagaggaggtggaggccaccacggtggtggaatggttctaca

SEQ ID NO: 530414 - DNA, 120 bp, Artificial Sequence
  ENSG00000166257_5 (sequence is synthesized)
ggcccgagggcggtaaagatttccttatttacgagtatcggaatggccaccaggaggtggagagcccctttcaggggcgcctgcagtggaatggcagcaaggacctgcaggacgtgtcca

SEQ ID NO: 530415 - DNA, 120 bp, Artificial Sequence
  ENSG00000166257_6 (sequence is synthesized)
tcactgtgctcaacgtcactctgaacgactctggcctctacacctgcaatgtgtcccgggagtttgagtttgaggcgcatcggccctttgtgaagacgacgcggctgatccccctaagag

SEQ ID NO: 530416 - DNA, 120 bp, Artificial Sequence
  ENSG00000166257_7 (sequence is synthesized)
tcaccgaggaggctggagaggacttcacctctgtggtctcagaaatcatgatgtacatccttctggtcttcctcaccttgtggctgctcatcgagatgatatattgctacagaaaggtct

SEQ ID NO: 530417 - DNA, 120 bp, Artificial Sequence
  ENSG00000166257_8 (sequence is synthesized)
caaaagccgaagaggcagcccaagaaaacgcgtctgactaccttgccatcccatctgagaacaaggagaactctgcggtaccagtggaggaatagaacaggagcagtgtgacatgaggtg

SEQ ID NO: 530418 - DNA, 120 bp, Artificial Sequence
  ENSG00000166257_9 (sequence is synthesized)
gcctgaacacctgagggactggacatcccatgttcagcaatgtcaatggcatcaggagggcgccccaagggccccatcgcttcccttcatgcatccattgttctgttcattcattcatcc

SEQ ID NO: 530419 - DNA, 120 bp, Artificial Sequence
  ENSG00000166257_10 (sequence is synthesized)
atacatccacctgcctctgagctttcacctctgactccctaactccatcagacctctacgcaccataagactctgccagaactgagaagccaacatttctacatagactcaacctcaccc

SEQ ID NO: 530420 - DNA, 120 bp, Artificial Sequence
  ENSG00000166257_11 (sequence is synthesized)
tctcctagttttccaacaagacactccaaagccaactggatttctcccctgtgctccaaatgactttgtacaagtgctggagttagcacctccctctgcccttaactggctggaactggt

SEQ ID NO: 530421 - DNA, 120 bp, Artificial Sequence
  ENSG00000166257_12 (sequence is synthesized)
tcattctccattactgcaagagaatggaagtcttaatagaaggaagcaggagtgattagttcgggttaaagcaaaagtgtgtcatgaacttggattccctgaagtcagttttgtcaggtt

SEQ ID NO: 530422 - DNA, 120 bp, Artificial Sequence
  ENSG00000166257_13 (sequence is synthesized)
catggcccactttgctacagcatcagagtgaagcacgcctgtctaggttctccagtgacagaaagatcctgaagcatggactaacatgctctctggagcttagtactccagagctagatc

SEQ ID NO: 530423 - DNA, 120 bp, Artificial Sequence
  ENSG00000166257_14 (sequence is synthesized)
ctgatgggtctctaaggttccctccaagaagacaaggacaggagacttgggaaggaccaatggtaatttaagtggctcttaaaaagtcatgcaacatgtttctggacacgttcctgatcc

SEQ ID NO: 530424 - DNA, 120 bp, Artificial Sequence
  ENSG00000166257_15 (sequence is synthesized)
tattgcgataatgtatgtgtgccctccctgtgggcacaccacctgggcattaggactgaaattcctgagttcttcctctcaaaatttctgtgcaccagtattattcctcattttacatac

SEQ ID NO: 530425 - DNA, 120 bp, Artificial Sequence
  ENSG00000166257_16 (sequence is synthesized)
aggaggcaactaagactcatacagggctcaactgaataagaggcttaagaggataaactggagcagaaataagccttaggtgctgcccagtttacacttcctgggatggatgtttttgtt

SEQ ID NO: 530426 - DNA, 120 bp, Artificial Sequence
  ENSG00000166257_17 (sequence is synthesized)
tcccaaagtgctgagattacaggcgtgaggcactgcgcccggtggataactttgtttctgaaaagactgacattgaacttgtctatggcaatgcttctttcacaagcacggactgggctg

SEQ ID NO: 530427 - DNA, 120 bp, Artificial Sequence
  ENSG00000166257_18 (sequence is synthesized)
ctttcacaagcacggactgggctgaggtcaactctgatagattcagatgactagaaattggccaaaaaagcagggagaagaacatgaggtagacttaaagaacttcctttatgtaaagat

SEQ ID NO: 530428 - DNA, 120 bp, Artificial Sequence
  ENSG00000166257_19 (sequence is synthesized)
ctgtgactctgaaatatcctccaaaaggagagtgcatctgagactgatatttaaactaagaaaaatgtttagtctgagatggatcataagtaaatgagcagtgtgagaggggagggatgg

SEQ ID NO: 530429 - DNA, 120 bp, Artificial Sequence
  ENSG00000166257_20 (sequence is synthesized)
gtaggtgctttccaaatacttcgcctatgaatgcataattttcagatttttttcccctagattttgagggagcagagaaactggaaaaaactttagtcaatatctcgtgtttcattttaa

SEQ ID NO: 530430 - DNA, 120 bp, Artificial Sequence
  ENSG00000166257_21 (sequence is synthesized)
tccttcagcacccagggacaagagaggggaaagatgctttatggaatgtaagaagatgaaggtgactgggattcagcgagagagaggtccctcagacctgggacctccctttatagggaa

SEQ ID NO: 530431 - DNA, 120 bp, Artificial Sequence
  ENSG00000166257_22 (sequence is synthesized)
agaccatattccataggtttagggctttaccttaaaagctcatttttttcattcttccatccctaggaaagtacttaaaaccagacttttaaatttttatttatttattattattttttt

SEQ ID NO: 530432 - DNA, 71 bp, Artificial Sequence
  ENSG00000166257_23 (sequence is synthesized)
ctgtctgccccaggtttaagcaatcctcccacctcagcccccaggtaactgggactacaggcatgcaccac

SEQ ID NO: 530433 - DNA, 79 bp, Artificial Sequence
  ENSG00000166257_24 (sequence is synthesized)
catgcctggctaatttttgtattttatgtagagacaggggtcttgccatgtcagcctcagcctctcaaagtgctgggat

SEQ ID NO: 530434 - DNA, 120 bp, Artificial Sequence
  ENSG00000166257_25 (sequence is synthesized)
ctcaaagtgctgggattacaggcctgagcaactgtgcctggcccaaaaccagaccgttaacacattaaagagtctgattttgttgaagaaaatatttgcaataaattcaagactcttctt

SEQ ID NO: 530435 - DNA, 120 bp, Artificial Sequence
  ENSG00000166257_26 (sequence is synthesized)
attggtaattttccacacaatccctctgaaataagggagaggatatagacctttttaactttatagttagaaaaattggcctcagtgtgaaatttttccagtcccatagctcatggatgc

SEQ ID NO: 530436 - DNA, 120 bp, Artificial Sequence
  ENSG00000166257_27 (sequence is synthesized)
caccagcttgcggtagtagcaagatgcttactaccacaccgttttcctcggtggcccaatagctcgtgtatctaagttgaacccggcagtatgcatgattgcctttttctcttcttttta

SEQ ID NO: 530437 - DNA, 120 bp, Artificial Sequence
  ENSG00000166257_28 (sequence is synthesized)
aaaaaacccaactcagatgctgcttgcgtggcttttaatgaagctgaatggtatctatcacttatttatccttgacaggttatcttccccactcttcctttttctaacttctccattctt

SEQ ID NO: 530438 - DNA, 120 bp, Artificial Sequence
  ENSG00000166257_29 (sequence is synthesized)
ctcattcttgacactttcattagaactatatggtttacgaagtattttcacttaactattttatttcttctctataactggtcctgtgaggtcacattacaaaagaagaaactgagggtc

SEQ ID NO: 530439 - DNA, 120 bp, Artificial Sequence
  ENSG00000166257_30 (sequence is synthesized)
tctgaggttaagtagctttactaaattataaggaaacctagctggtaggtagacagcaagaatccaggtcttctgactcctctttcagttctctttccacttagaccatagctgcttcct

SEQ ID NO: 530440 - DNA, 120 bp, Artificial Sequence
  ENSG00000166257_31 (sequence is synthesized)
tttcttattttttagcttccatctaaccattgcctatcttgcctgtcctaatgttctccatcttctctcacccctaatcccactcactgcttctctaccactttgctttttggtggatgc

SEQ ID NO: 530441 - DNA, 120 bp, Artificial Sequence
  ENSG00000166257_32 (sequence is synthesized)
tagcaatgtgctttgagagtcagtcctattttggttctctttctagttggtttgtacatcattatttctcctgaattgcaattaaactccttcctgggagatttgataatgactgtaaat

SEQ ID NO: 530442 - DNA, 120 bp, Artificial Sequence
  ENSG00000166257_33 (sequence is synthesized)
caataaggtactgtgatcaccagcctacttccaatctccacccacctccctgtctcttcccataatcctacgaaagacccagactagatgtctgtttctctggaagctttatctggcatg

SEQ ID NO: 530443 - DNA, 120 bp, Artificial Sequence
  ENSG00000166257_34 (sequence is synthesized)
atgttgcttattaaagggcttagaagagttctcaagggctattaatatcactttagaaaccccatctgttgtcttggtgctggatatttcccatgtctgatcctcaataacacaattcac

SEQ ID NO: 530444 - DNA, 120 bp, Artificial Sequence
  ENSG00000166257_35 (sequence is synthesized)
taaaggccaagcttggctcaatctgattttcccattcttactacttcacagccatgaatgtgattgctcaatccagttggccctgagagcaccttgccctgctgaccttcactgtcacct

SEQ ID NO: 530445 - DNA, 120 bp, Artificial Sequence
  ENSG00000166257_36 (sequence is synthesized)
cggtcttgaatcagagccccaacccaaacactccctgcctgtccctaccccagcctttattctcaccacttgtttaacggcatgaccttttagtttctccattcccagacacccacacac

SEQ ID NO: 530446 - DNA, 120 bp, Artificial Sequence
  ENSG00000166257_37 (sequence is synthesized)
ccagacttccttctgagttgcaggtttctccttagatgtccaactagaaatattactaggaaagttacttttcaaagcaggaatgtgctgggaagtaggagacagcaactccctcctctc

SEQ ID NO: 530447 - DNA, 120 bp, Artificial Sequence
  ENSG00000166257_38 (sequence is synthesized)
tccccaaaattattggatcaaaaaagaaattccatccatctcagaatctgtgagtcctcctcacataaatctgagggaaaaggctgtgtcactgcatctttgcaggaagaaagagaagca

SEQ ID NO: 530448 - DNA, 120 bp, Artificial Sequence
  ENSG00000166257_39 (sequence is synthesized)
tcactgcatctttgcaggaagaaagagaagcaagagctagacacacttcagaatatatcttagtttcccctttcccagtttaacatgaaaatgaaaaaagaaaaaaatgaaaaacaaaaa

SEQ ID NO: 530449 - DNA, 120 bp, Artificial Sequence
  ENSG00000166257_40 (sequence is synthesized)
aatgaaaaatccctaattcagtgaattcacctagtcactgcaaatgtatctgaatagtgcttggtgtgcttgccagtctgatcatccactcattctactaacatctttttgcacccactc

SEQ ID NO: 530450 - DNA, 120 bp, Artificial Sequence
  ENSG00000166257_41 (sequence is synthesized)
tgtcaagctctagcctagacctttagtgtgccatgcagtcacaggtctgaaaagcagcatcatccaaaccttacttaatctctaaaatctcagctggtggacagctcatgattagttcag

SEQ ID NO: 530451 - DNA, 120 bp, Artificial Sequence
  ENSG00000166257_42 (sequence is synthesized)
cccacttcctcccccttagttgagtttgcagcaggacgcaggagataagcacttccaagcaagtctgatttatatatcaaactcggtctccatcccaggccagctgaccctcagagccag

SEQ ID NO: 530452 - DNA, 120 bp, Artificial Sequence
  ENSG00000166257_43 (sequence is synthesized)
caatgctctgtgcttcctccctgcgtcacggcttggcaagagctgcctctgctgagcagtgtgtgtgatggagacggaggccgctgaaggccgagtgcttgcaggcttgtgaactgccat

SEQ ID NO: 530453 - DNA, 120 bp, Artificial Sequence
  ENSG00000166257_44 (sequence is synthesized)
cgaacacaatccaaactctggaaatgttcctgaccacctaagccctcaacaacgtaatgcctgtatgtgctgtttttcagtaaactccttgttcatgtcaataaagtatccctgaaaacc

SEQ ID NO: 530454 - DNA, 120 bp, Artificial Sequence
  ENSG00000166257_45 (sequence is synthesized)
gatcctggggaggcgagaggtgaatcaacctggacccttccacagcctggctgctaggccagcagtgcgactcccttccgagctgagcttaccctgggcgcaaacgagcgaggcaggggc

SEQ ID NO: 530455 - DNA, 120 bp, Artificial Sequence
  ENSG00000166257_46 (sequence is synthesized)
gcgagtggaagctggagttccggggtgggcggggaggcgactgtccgtggtgctgagcgccggcgagagcgggcgcggagcggctgatcggctccctcgaactggggaggtccagtgggg

SEQ ID NO: 530456 - DNA, 120 bp, Artificial Sequence
  ENSG00000166257_47 (sequence is synthesized)
tcgcttagggcccaaagcccccacccggctccaaaagctcccagggcctccccaggcaccggtgctcggcccttccttcggtcagaaagtcgccccctgggggcagttcgtcccaaaggg

SEQ ID NO: 530457 - DNA, 120 bp, Artificial Sequence
  ENSG00000166257_48 (sequence is synthesized)
acctacaggaacatgggaggggaaggcagatgtggatggcaggttgtacaagtgactttgttgcccacaactgaagtgactttaaatttggtcccttaggtcactgtctaccctgcctgg

SEQ ID NO: 530458 - DNA, 120 bp, Artificial Sequence
  ENSG00000166257_49 (sequence is synthesized)
ggtccccgccctcagggtaattctttaagtcagaaagctctgtatgatgtcagcgcttcggaaggtgaactgctttgacctgagtgtcgaggcaatctgaacttgcccatggtaacagag

SEQ ID NO: 530459 - DNA, 120 bp, Artificial Sequence
  ENSG00000166257_50 (sequence is synthesized)
atcacacgtgcaacctcttccccatctgtggcatctcttattacataaattcattccctgctgggagaaggggacaggttgatagctctctagtcttgtttaaaatctttggactcctac

SEQ ID NO: 530460 - DNA, 120 bp, Artificial Sequence
  ENSG00000166257_51 (sequence is synthesized)
agctagttccgtgttcgtgagtgggaaggcctttcagcagcctaactcaggtgtttctgttgcaaccggagtcctgcatcctgaggggggagttccagcctttctcagtctatctccagc

SEQ ID NO: 530461 - DNA, 120 bp, Artificial Sequence
  ENSG00000166257_52 (sequence is synthesized)
attatcactgctagtgagcaggccaaagtgtggggcatgaaggaaaagatcaagttaaagacagggctcttcctagaaaaaaggatccaggaatcccaacctccaggccacaggtttatt

SEQ ID NO: 530462 - DNA, 120 bp, Artificial Sequence
  ENSG00000166257_53 (sequence is synthesized)
cattttttatcatgtcgttgtgataaaaataatgaagcggagattcagtcctcagagtgaatgaacaaaggagaaagagacataacggatcagacgatatgactaaaatggaagctggag

SEQ ID NO: 530463 - DNA, 120 bp, Artificial Sequence
  ENSG00000166257_54 (sequence is synthesized)
gagaactggaaggcatggggtctgggaggcgaagccaggaaccgcgtacggcgcgccttgcagatgacatcattgcctgaaagagctctggcccttctcttcccggagctacacccgcct

SEQ ID NO: 530464 - DNA, 120 bp, Artificial Sequence
  ENSG00000166257_55 (sequence is synthesized)
gggcttttgcctccagacaccctcgtgcatagctggtgggaagtgtggcaaggctgagctagttcgtctgccaggtaccagagcaagcctcgggtaaaaacagaaggaaaaacaagttta

SEQ ID NO: 530465 - DNA, 120 bp, Artificial Sequence
  ENSG00000166257_56 (sequence is synthesized)
ttatcagagccacagagcctcgtggatggtcgggtgtgaaggaagcgtggatatcatttatttaatccagggcctctggataaagggcagacatcagaatcgcccacattggcgtcctcc

SEQ ID NO: 530466 - DNA, 120 bp, Artificial Sequence
  ENSG00000166257_57 (sequence is synthesized)
attaaaaaggagtaattaaaggaaaagggagaactgcaaagaacctggggaagggaagaggagtcctcttgggcccccctccccttgcgctgacatttggatcacctcactgagtgatga

SEQ ID NO: 530467 - DNA, 120 bp, Artificial Sequence
  ENSG00000166257_58 (sequence is synthesized)
gagtgaggtcatatgcaagttgatgactccccaggtgattggagggtgtagctctggtgcccctctttttgtggctgggagaacagagttctctgcaagagcaaggggcttgctcaggga

SEQ ID NO: 530468 - DNA, 120 bp, Artificial Sequence
  ENSG00000166257_59 (sequence is synthesized)
cgtgcagcaaattcgcgctggaagcagggtgaaaatccagattgttcgcctgtctggagggcttgctttccactgtttctttccccacccccaccaccccaaccccctgccactttttct

SEQ ID NO: 530469 - DNA, 120 bp, Artificial Sequence
  ENSG00000166257_60 (sequence is synthesized)
tttttgcctctgtgacatcagatactccctgccctcatcttgctcagagctacgcacccaccccaccatgacacctgcccatcaaccccacatctcctccattcctgtggtcccacaagg

SEQ ID NO: 530470 - DNA, 120 bp, Artificial Sequence
  ENSG00000166257_61 (sequence is synthesized)
tctccctggttctctttgttcaagttgggtttattctggctttggctgtcacctcctggccctaaggcagaaacctgaggcctcttcacctagaggtaactaaaaatactgaggacagct

SEQ ID NO: 530471 - DNA, 120 bp, Artificial Sequence
  ENSG00000166257_62 (sequence is synthesized)
tcctgtattgccatttgtgggctactgcattttgaaagagagagcatgctttaagccaaacaaatcataaataatgcacgaggtggtagcaaggcggtgagatgtttgagctgtacggca

SEQ ID NO: 530472 - DNA, 120 bp, Artificial Sequence
  ENSG00000166257_63 (sequence is synthesized)
ttctcatgtgcctcacgctgcatctatgacctctagctccagttggaaacctgggtgatcctggagccttcggactgctctctgggctgaaagttatggcaggctgtgctgtgctcttaa

SEQ ID NO: 530473 - DNA, 120 bp, Artificial Sequence
  ENSG00000166257_64 (sequence is synthesized)
caaccaaggacttggggatgacttagatccaatggataactgcagatcataaatctgacttgctgttgagagctggcaaggggagaggtggctacaacatttctcccactagcaaggagt

SEQ ID NO: 530474 - DNA, 120 bp, Artificial Sequence
  ENSG00000166257_65 (sequence is synthesized)
agatatatcaggatatctgccatgtagtatgttttaatggtcctttttgttgatcatgaaacaaataagataatatttattttcactcattcaataagtacttattgagcactttaaata

SEQ ID NO: 530475 - DNA, 120 bp, Artificial Sequence
  ENSG00000166257_66 (sequence is synthesized)
ttctaagatttatacagcaggcagataatccagaaataaatatgttctcaataagcacacagtccacagaaaagaaagataagcacaatacaactcttataacagatggatgagaaaagt

SEQ ID NO: 530476 - DNA, 69 bp, Artificial Sequence
  ENSG00000166257_67 (sequence is synthesized)
aagcacaatacaactcttataacagatggatgagaaaagtgcatggggcaggaggatcacctgaggtga

SEQ ID NO: 530477 - DNA, 68 bp, Artificial Sequence
  ENSG00000166257_68 (sequence is synthesized)
acctgggcaacaagagcaaagctccatctcaaaaaaaaaagagaaaagaaaagtgcacggagaaggtt

SEQ ID NO: 530478 - DNA, 120 bp, Artificial Sequence
  ENSG00000166257_69 (sequence is synthesized)
tcaaaaaaaaaagagaaaagaaaagtgcacggagaaggttgtgaatagctccgcatgagaagttggggatggtttcacaaaggaggggacctcacaggaatctagaactactgcgagact

SEQ ID NO: 530479 - DNA, 120 bp, Artificial Sequence
  ENSG00000166257_70 (sequence is synthesized)
gcaaagcaggagaggatattagcacagaactagccgtgggtgaaagacacaattcaggaagagggaagaggaagaaaagttcacagattctaacataccacagtgtgtagcagaagtttt

SEQ ID NO: 530480 - DNA, 120 bp, Artificial Sequence
  ENSG00000166257_71 (sequence is synthesized)
tctggccaaccaaatggaaatgaggtgagaaagcccggattgtgaaggcccttgcatgtcacgtgaacagagttggggcttcatcctaaggggagtgtggagcattgaagagttttcagc

SEQ ID NO: 530481 - DNA, 120 bp, Artificial Sequence
  ENSG00000166257_72 (sequence is synthesized)
agggaaatggcaggatcctaactgtgtttcaaaagtacagccctggggacaatgcggttgatacactaaatcctccaatatttatgtttggttttggatgacctggaaggtcttgtttct

SEQ ID NO: 530482 - DNA, 120 bp, Artificial Sequence
  ENSG00000166257_73 (sequence is synthesized)
aacccagacttgtagagaacatgcgcatatctcatggaggctgtctttgttggccctgaatgagttttccaacgctctctccccaggaataccaccctccaccaccggcagctcaaaaga

SEQ ID NO: 530483 - DNA, 120 bp, Artificial Sequence
  ENSG00000166257_74 (sequence is synthesized)
cagaggcagttgaaataaggcatgttccttacatctgtgtagacttttaatctcacaagatgttctgaaatacattagataatgtaatattcacaaacccctgactggtgttattatcct

SEQ ID NO: 530484 - DNA, 120 bp, Artificial Sequence
  ENSG00000166257_75 (sequence is synthesized)
caacctacaaattaagaaactgagtctcaagtaagggaaatggttgtttacacacctgtaaatagcaaaatggacagccagctctagatatctcactttgaggccaggattccttccact

SEQ ID NO: 530485 - DNA, 120 bp, Artificial Sequence
  ENSG00000166257_76 (sequence is synthesized)
gctcggctacttcttccaggcatcccactccctcttccctggctcctgagcagctgatgacagtcagtgagaaagccaatgggcgggagagtcaggatttggaatacctttgacatcttc

SEQ ID NO: 530486 - DNA, 120 bp, Artificial Sequence
  ENSG00000166257_77 (sequence is synthesized)
ttgagtttctttactcagtctttatttaagctgtacttaaaaatatggctccaatgacggctctaggtttgctggatttgcatattctgaacctcattctctttctttcagctggagagg

SEQ ID NO: 530487 - DNA, 120 bp, Artificial Sequence
  ENSG00000166260_0 (sequence is synthesized)
cgactgcaagcgctgccacctgaggagcctggtagccaaggcagcggcaggctcaacccagatctcgcgagacggagcacgcctcgcgagatttgacctctcgtccctgagaggcgggtg

SEQ ID NO: 530488 - DNA, 120 bp, Artificial Sequence
  ENSG00000166260_1 (sequence is synthesized)
ggtgttagttcagagggttatgggagggctctggcgtcctggatggaggtgcgttcctttctgtggctggcgctggatccaccctgggtctccaaccagggctgcagagagggtagagcc

SEQ ID NO: 530489 - DNA, 120 bp, Artificial Sequence
  ENSG00000166260_2 (sequence is synthesized)
gtttcttaggccagagtggagtgggacaggaggtgccgagagaggactgaggtggcttgggacatggaagcgctgcagccttcgagcccggcatccagcattgcagccgccgcggcggcc

SEQ ID NO: 530490 - DNA, 120 bp, Artificial Sequence
  ENSG00000166260_3 (sequence is synthesized)
taagagctcgaaccctttcacacgcgcgcaggaggaggagcggcggcggcagaacaagacgaccctcacttacgtggccgctgtcgccgtgggcatgctgggggcgtcctacgctgccgt

SEQ ID NO: 530491 - DNA, 120 bp, Artificial Sequence
  ENSG00000166260_4 (sequence is synthesized)
acccctttatcggctctattgccagactactggacttggaggatcagcagttgcaggtcatgcctcagacaagattgaaaacatggtgcctgttaaagatcgaatcattaaaattagctt

SEQ ID NO: 530492 - DNA, 120 bp, Artificial Sequence
  ENSG00000166260_5 (sequence is synthesized)
taatgcagatgtgcatgcaagtctccagtggaactttagacctcagcaaacagaaatatatgtggtgccaggagagactgcactggcgttttacagagctaagaatcctactgacaaacc

SEQ ID NO: 530493 - DNA, 120 bp, Artificial Sequence
  ENSG00000166260_6 (sequence is synthesized)
agtaattggaatttctacatacaatattgttccatttgaagctggacagtatttcaataaaatacagtgcttctgttttgaagaacaaaggcttaatccccaagaggaagtagatatgcc

SEQ ID NO: 530494 - DNA, 120 bp, Artificial Sequence
  ENSG00000166260_7 (sequence is synthesized)
agtgtttttctacattgatcctgaatttgctgaagatccaagaatgattaaagttgatcttatcactctttcttacactttttttgaagcaaaggaagggcacaagttgccagttccagg

SEQ ID NO: 530495 - DNA, 120 bp, Artificial Sequence
  ENSG00000166260_8 (sequence is synthesized)
atataattgaagtcagcaactaagtcttccttcaaagttgtgatttttgggaaaatcatatatcctatcttctcaaaggagaaatattgtacaataatatgaaggcttatattttaaata

SEQ ID NO: 530496 - DNA, 120 bp, Artificial Sequence
  ENSG00000166260_9 (sequence is synthesized)
attattttttctcaactaatttttttcacttaaacttgagagaacaagttcagcttttatcataagaaactcatatgcctagctagaatatatgactgactattcaataccatactgaag

SEQ ID NO: 530497 - DNA, 120 bp, Artificial Sequence
  ENSG00000166260_10 (sequence is synthesized)
tacttacagcaatgaatctgacaatgtttttcaaaaatgtatgctcagggttatttgtttcaagtcataggccagaacttctaaccatgtttattgtgtctaaaagagttggttgctatt

SEQ ID NO: 530498 - DNA, 120 bp, Artificial Sequence
  ENSG00000166260_11 (sequence is synthesized)
ttccttcattatgaatagtcagtattttaaaagctcaaagtagaagaggagtcactaagccctaacagcttgtccaaagatttaaattcttatttcaaatttgatttgtcctttaaggtt

SEQ ID NO: 530499 - DNA, 120 bp, Artificial Sequence
  ENSG00000166260_12 (sequence is synthesized)
tagggctattttatattcagagttctgaataattactttgaaactgtagtatcataaaattgaaataaaatacatctactaggctgttagccaaagcatcaccattacaagtccatgaat

SEQ ID NO: 530500 - DNA, 120 bp, Artificial Sequence
  ENSG00000166260_13 (sequence is synthesized)
gttaaaatgtacaggtgggattgtgaagatttactgacatcaaaagttcttctggaaacaaacctttgttaaaaaaaaaaagtattaaattgttttaatagtgatttatttgtcatcaaa

SEQ ID NO: 530501 - DNA, 120 bp, Artificial Sequence
  ENSG00000166260_14 (sequence is synthesized)
tgtacaacttattctaaatattttcattttctgtgttctaaatagaaatattaagttgcagtaaaaagagaaaaaaaggctatttagcattacaaagaatcatatttaaaggctgcccaa

SEQ ID NO: 530502 - DNA, 120 bp, Artificial Sequence
  ENSG00000166260_15 (sequence is synthesized)
tgtagagtctagtgacctgttcaggacacctgaaatataattaaatgacaattatcaaggttttaacaatttataattctaaaccagaggattataaagaagtgcaaattgacttttaca

SEQ ID NO: 530503 - DNA, 120 bp, Artificial Sequence
  ENSG00000166260_16 (sequence is synthesized)
ttcaactttagttaaatgaaggcactcagtattcttcctgaataatacattcagtttctcacattttatgctttcatctattcagaattatttcatagtaaaataatctactcttatcac

SEQ ID NO: 530504 - DNA, 120 bp, Artificial Sequence
  ENSG00000166260_17 (sequence is synthesized)
agctgtgtgacgatttctaaatgtaggaaggcctgtgaaacatgacactgcagttaaattggttggcctaaggactaagtaatttttcttctgctgaagttttaagtgagtatttgttcc

SEQ ID NO: 530505 - DNA, 120 bp, Artificial Sequence
  ENSG00000166260_18 (sequence is synthesized)
aaacaagttctgttgaaatctcacgctgttgtcaggaatcagtgttatcctggaactgttattctatttaatcttcattatagcagaaatgtgccaccatggctttgacatgttggtagg

SEQ ID NO: 530506 - DNA, 120 bp, Artificial Sequence
  ENSG00000166260_19 (sequence is synthesized)
tattgtcttccaggcttcaaagctgcacagagtctacgttttagagagttggcacctttgatgtggtagtgagctgatcatccactttcttctaaaataaagagaagaaaatggccagta

SEQ ID NO: 530507 - DNA, 120 bp, Artificial Sequence
  ENSG00000166260_20 (sequence is synthesized)
ggagtgcagtggtgcaatcatggcttattgcagcttcgacctcccaggttcaagtgatccttccacttcagcctctcaaaatgttgggattagaggcataagccaccatgccaggcccat

SEQ ID NO: 530508 - DNA, 120 bp, Artificial Sequence
  ENSG00000166260_21 (sequence is synthesized)
tttatatgcgtcttacatatgtctgtagctggaaaatatacctgaaagcacaacattcatatatacagtatagcaaaacatggctgaggaaaaatctcaaaaatcacagcgctatgaaac

SEQ ID NO: 530509 - DNA, 120 bp, Artificial Sequence
  ENSG00000166260_22 (sequence is synthesized)
ttccttgataactctcttgtctttactgggaagctggagagtcacagtctagtagaagaaagattagaaaaatttcaactgtaggtgcctttgcaacctatcctgggagaccctaaaaca

SEQ ID NO: 530510 - DNA, 120 bp, Artificial Sequence
  ENSG00000166260_23 (sequence is synthesized)
tatttagttttagtgcctagagattttcactcctctaacatctctggatacagtgtccctggtcaacatgaagaagttacagaagaacgctttctgatcctggcccctaaagaatttact

SEQ ID NO: 530511 - DNA, 120 bp, Artificial Sequence
  ENSG00000166260_24 (sequence is synthesized)
ccaatagccaacccaaactgggaccccagtgataacaagaatcaagagtggcttcatcattataggaatatgcttctcagaggtatgagggaagcaagccagtccctggtcaattgggga

SEQ ID NO: 530512 - DNA, 120 bp, Artificial Sequence
  ENSG00000166260_25 (sequence is synthesized)
aatctcagagaaatagaacaaggccctaatgaaaatccatcagcattcctaaattgataataagaatgcctccagaattacaccccttgggacccagatgacccaaaagctgagtagtac

SEQ ID NO: 530513 - DNA, 120 bp, Artificial Sequence
  ENSG00000166260_26 (sequence is synthesized)
gtggcaataaatccacatactccccctttccaactggtagacatctcctttaaggtctatagtaaagagatgtggcatctgatgaaaaggaagacaagaagatgcggcagccctacagac

SEQ ID NO: 530514 - DNA, 120 bp, Artificial Sequence
  ENSG00000166260_27 (sequence is synthesized)
gaaacggtttagtatgaaacttagtgttttagtagatcttgtgatttctgaaaacgaatttcttctaaacatcaagctatttttcttcactatctatacctgctatgcagagattgagaa

SEQ ID NO: 530515 - DNA, 120 bp, Artificial Sequence
  ENSG00000166260_28 (sequence is synthesized)
ccaaaccaaatggatatctgcttttaagattagaatttgttcttcatccttaaagcagaactcattgagatgaaaagatgctcttaatttatcacagaactgtgtatttaatagtatgct

SEQ ID NO: 530516 - DNA, 120 bp, Artificial Sequence
  ENSG00000166260_29 (sequence is synthesized)
tattaaaatcacgaagtgtactggaatgctaagataaaagaactgtatagtttctgttatgtaatacgagaatagaaatgttattaaaatctttctataatttccagtgcttctgttttg

SEQ ID NO: 530517 - DNA, 120 bp, Artificial Sequence
  ENSG00000166260_30 (sequence is synthesized)
ttcaagctgagttgtgggatttgtgtcatcattaatctccagagtttggaagcccctcagactgtgtgcagagaccgtagaatgtcgtgaactaggtcttggaaggagagcttgttaggg

SEQ ID NO: 530518 - DNA, 120 bp, Artificial Sequence
  ENSG00000166260_31 (sequence is synthesized)
tgcctcctctggcaatggaaactgcatatccacccatgaccaaaaagcaaatgatatattactgtaatacagcctggctccagtattccctagatcagaagagatggtctgaatatgggt

SEQ ID NO: 530519 - DNA, 120 bp, Artificial Sequence
  ENSG00000166260_32 (sequence is synthesized)
cacttactgcaactctccaattggactttttttgcaagaaacatggtaaatgggaagaaatgccctatatgcaatgttttatggccctctatcaaaaccctgccttgcagatgaaatgca

SEQ ID NO: 530520 - DNA, 120 bp, Artificial Sequence
  ENSG00000166260_33 (sequence is synthesized)
gaatatgtaaattggccaaagggaactatattgccaattctagaagcctctggagaggaagcatcagtcatgtgggggcctatagggaagggaacaagtaagaagagtccctttactacc

SEQ ID NO: 530521 - DNA, 120 bp, Artificial Sequence
  ENSG00000166260_34 (sequence is synthesized)
ccctccaagagaagtgaggccctctaactctactcggggactggaaccttggccaatacaggggcatagtccaccttcttggaaatggtaccctctgcacctccagggaaaagcaagggc

SEQ ID NO: 530522 - DNA, 120 bp, Artificial Sequence
  ENSG00000166260_35 (sequence is synthesized)
ccgttctgtatttgccaggccctccaaactctgcagagccagctgtggctcctgctatggcaatagcaggcccctgttgcactcttctttgccagggagcaccactcatagtgggaacgc

SEQ ID NO: 530523 - DNA, 120 bp, Artificial Sequence
  ENSG00000166260_36 (sequence is synthesized)
atataaccctggagggtgactgttgccactcagagcatgcctgttggagaaagaggttttgctcgggtctatgtgttttttaaaactgttgacttgtataactggaaatcccatagtaag

SEQ ID NO: 530524 - DNA, 120 bp, Artificial Sequence
  ENSG00000166260_37 (sequence is synthesized)
ggcttatgggtgagcccacgagagttcgtaactctcatatggagaatattctccacacataaccctacctggccaggtgtgcagaccgtaacagcaaccctgctcacagcagaagataaa

SEQ ID NO: 530525 - DNA, 120 bp, Artificial Sequence
  ENSG00000166260_38 (sequence is synthesized)
cagaaaggatgctaggaaagggaatgtccaaatcatccccagagagggaaggaggaggacaagcccaaggtacctgttccctgtaactggacaagaaactgatggatggggacatggggc

SEQ ID NO: 530526 - DNA, 120 bp, Artificial Sequence
  ENSG00000166260_39 (sequence is synthesized)
tccctgcctggctcctcaaaacaagatccacatctcccccaaggagccccaggttacacagaagaaggggggcaaccagttggattttttttcgtttgtttgagacagggtctgtgttac

SEQ ID NO: 530527 - DNA, 120 bp, Artificial Sequence
  ENSG00000166260_40 (sequence is synthesized)
ccaggctggagtgcagcaccgtgatcatggcgcactgccgcctccaactcccaggctcaagcagtcctcccaccttagcctctcaagtagctgggactaaggcacacctggctgattttt

SEQ ID NO: 530528 - DNA, 78 bp, Artificial Sequence
  ENSG00000166260_41 (sequence is synthesized)
tctcaagtagctgggactaaggcacacctggctgatttttttgtttgtttgtggagacaaggtctcgttatgctgtca

SEQ ID NO: 530529 - DNA, 120 bp, Artificial Sequence
  ENSG00000166260_42 (sequence is synthesized)
ctcccggccaccagctgagtttttgatcaacactgtagccatgttttctgtgttgatcactaaaagtggaccctatccaggaagaaatgtatataaggggtgtgtctcataaaggaaata

SEQ ID NO: 530530 - DNA, 120 bp, Artificial Sequence
  ENSG00000166260_43 (sequence is synthesized)
aaagattcttggagcctctggtccatgaaatagtatctaaaactttcactcattctttcttctgttccccaaacatcccattctccttttgggaagggaccttctgactaagtttggagc

SEQ ID NO: 530531 - DNA, 120 bp, Artificial Sequence
  ENSG00000166260_44 (sequence is synthesized)
cacaatttctctaaatcaggacagaatagaggtgttctgagcccatggcactgccatgctggccctagttcctggggaagttccagacttggggcctcatatgactccttggctaatgcg

SEQ ID NO: 530532 - DNA, 120 bp, Artificial Sequence
  ENSG00000166260_45 (sequence is synthesized)
gtactagataattgtatagcattagactgcctcttagcagaacagggaggaggagagtgtgcagttattaattcctcttgctgtacctgaataaatacctcaggggaaataggaagttaa

SEQ ID NO: 530533 - DNA, 120 bp, Artificial Sequence
  ENSG00000166260_46 (sequence is synthesized)
acctgaataaatacctcaggggaaataggaagttaacattaggaaggtccatgcccaagcctcttggttccacacttttaatcagcagccatattttttttttttttttttttttgagac

SEQ ID NO: 530534 - DNA, 90 bp, Artificial Sequence
  ENSG00000166260_47 (sequence is synthesized)
agacagtctcgctctgttgcccaggttggaatgcagtggggcacgatctgtagcgatttttctgcctcaccttcctgagtagctgggact

SEQ ID NO: 530535 - DNA, 73 bp, Artificial Sequence
  ENSG00000166260_48 (sequence is synthesized)
tgaattcagggtgatctgcgtcaggcctaatagccatacttctaattctgtttgagaagttctcaaattagca

SEQ ID NO: 530536 - DNA, 120 bp, Artificial Sequence
  ENSG00000166260_49 (sequence is synthesized)
ccatacttctaattctgtttgagaagttctcaaattagcaataccaagtgttacttggtttcttcccctaatgaggccactaattttattgctcttactactgttgtttggtccctgcat

SEQ ID NO: 530537 - DNA, 120 bp, Artificial Sequence
  ENSG00000166261_0 (sequence is synthesized)
aaggccccacgtgttccgacccgctaggccccgcgcggctcggatccggcggcgctgtttcggtcgggagtgggtgggagagaagccggggcaggggaggagccgccggagctgtcggag

SEQ ID NO: 530538 - DNA, 120 bp, Artificial Sequence
  ENSG00000166261_1 (sequence is synthesized)
ccgtgacacccagggcagctacactcagaagccacaaggaatgctagtggagcccctcatccctcccagcttctcttccaagctgccccgtggggcttgatccaggaagctacttcagaa

SEQ ID NO: 530539 - DNA, 120 bp, Artificial Sequence
  ENSG00000166261_2 (sequence is synthesized)
aggttgtgggatagccttgggaggagggcccttggaagaaaatcctcgctgtgtccaggctgaggcggggggctaatgacagtgtgagctctagatggtgtgagaccaccccaaagccaa

SEQ ID NO: 530540 - DNA, 120 bp, Artificial Sequence
  ENSG00000166261_3 (sequence is synthesized)
gaaatggctacagccgtggaaccagaggaccaggatctttgggaagaagagggaattctgatggtgaaactggaagatgatttcacctgtcggccagagtctgtcttacagagggatgac

SEQ ID NO: 530541 - DNA, 120 bp, Artificial Sequence
  ENSG00000166261_4 (sequence is synthesized)
ccggtgctggaaacctcccaccagaacttccgacgcttccgctaccaggaggcagcaagccctagagaagctctcatcagactccgagaactttgtcaccagtggctgagaccagagagg

SEQ ID NO: 530542 - DNA, 120 bp, Artificial Sequence
  ENSG00000166261_5 (sequence is synthesized)
cggacaaaggagcagatcctagagctgcttgtgctggaacaatttcttaccgtcctacctggagaactacagagctgggtgcggggccaacggccagaaagtggcgaggaggcagtgacg

SEQ ID NO: 530543 - DNA, 120 bp, Artificial Sequence
  ENSG00000166261_6 (sequence is synthesized)
ctggtggagggtttgcagaaacaacccaggagaccaaggcggtgggtgactgtccatgttcacggccaggaagtcctgtcagaggagacggtgcatttaggagtggagcctgagtcacct

SEQ ID NO: 530544 - DNA, 120 bp, Artificial Sequence
  ENSG00000166261_7 (sequence is synthesized)
aatgagctgcaggatcctgtgcaaagctcgacccccgagcagtctcctgaggaaaccacacagagcccagatctgggggcaccggcagagcagcgtccacaccaggaagaggagctccag

SEQ ID NO: 530545 - DNA, 120 bp, Artificial Sequence
  ENSG00000166261_8 (sequence is synthesized)
accctgcaggagagcgaggtcccagtgcccgaggacccagaccttcctgcagagaggagctctggagactcagagatggttgctcttcttactgctctgtcacagggactggtaacgttc

SEQ ID NO: 530546 - DNA, 120 bp, Artificial Sequence
  ENSG00000166261_9 (sequence is synthesized)
aaggatgtggccgtatgcttttcccaggaccagtggagtgatctggacccaacacagaaagagttctatggagaatatgtcttggaagaagactgtggaattgttgtctctctgtcattt

SEQ ID NO: 530547 - DNA, 120 bp, Artificial Sequence
  ENSG00000166261_10 (sequence is synthesized)
ccaatccccagacctgatgagatctcccaggttagagaggaagagccttgggtcccagatatccaagagcctcaggagactcaagagccagaaatcctgagttttacctacacaggagat

SEQ ID NO: 530548 - DNA, 120 bp, Artificial Sequence
  ENSG00000166261_11 (sequence is synthesized)
aggagtaaagatgaggaagagtgtctggagcaggaagatctgagtttggaggatatacacaggcctgttttgggagaaccagaaattcaccagactccagattgggaaatagtctttgag

SEQ ID NO: 530549 - DNA, 120 bp, Artificial Sequence
  ENSG00000166261_12 (sequence is synthesized)
gacaatccaggtagacttaatgaaagaagatttggtactaatatttctcaagtgaatagttttgtgaaccttcgggaaactacacccgtccaccccctgttagggaggcatcatgactgt

SEQ ID NO: 530550 - DNA, 120 bp, Artificial Sequence
  ENSG00000166261_13 (sequence is synthesized)
tctgtgtgtggaaagagcttcacttgtaactcccaccttgttagacacctgaggactcacacaggagagaaaccctataaatgtatggaatgtggaaaaagttacacacgaagctcacat

SEQ ID NO: 530551 - DNA, 120 bp, Artificial Sequence
  ENSG00000166261_14 (sequence is synthesized)
cttgccaggcaccaaaaggttcacaagatgaacgcgccttacaaatatcccctaaaccggaagaatttggaagagacctcccctgtgacacaggctgagagaactccatcagtggagaaa

SEQ ID NO: 530552 - DNA, 120 bp, Artificial Sequence
  ENSG00000166261_15 (sequence is synthesized)
ccctatagatgtgatgattgcggaaagcacttccgctggacttcagaccttgtcagacatcagaggacacatactggagaaaaacccttcttttgtactatttgtggcaaaagcttcagc

SEQ ID NO: 530553 - DNA, 120 bp, Artificial Sequence
  ENSG00000166261_16 (sequence is synthesized)
cagaaatctgtgttaacaacacaccaaagaatccacctgggaggcaaaccctacttgtgtggagagtgtggtgaggacttcagtgaacacaggcggtacctggcgcaccggaagacgcac

SEQ ID NO: 530554 - DNA, 120 bp, Artificial Sequence
  ENSG00000166261_17 (sequence is synthesized)
cagcgcagcgttcgccaagcacttgagaggacacgcctcagtgaggccctgccgatgcaacgaatgtgggaagagcttcagtcgcagggaccacctcgtcaggcatcagagaacacacac

SEQ ID NO: 530555 - DNA, 120 bp, Artificial Sequence
  ENSG00000166261_18 (sequence is synthesized)
tggggagaaaccattcacgtgccctacctgtggaaaaagcttcagcagaggatatcacttaattaggcatcagaggacccactcagaaaagacctcctagctaggtccccatgtgaggag

SEQ ID NO: 530556 - DNA, 120 bp, Artificial Sequence
  ENSG00000166261_19 (sequence is synthesized)
atctgctttcagccctcacctaagggaggtgaggaagaggaaaagccctcttgtcagcctgggaagaccttttcgagggagtctccctgacctgctcagatctgacattacctcttcctg

SEQ ID NO: 530557 - DNA, 120 bp, Artificial Sequence
  ENSG00000166261_20 (sequence is synthesized)
caactaaacacgagcctgggcagaacctctcagccttcctctacgccttgaggggatgtttcatccaaagtacaacctgaattgaggcttctccttcactggagtgcacctgcctctacc

SEQ ID NO: 530558 - DNA, 120 bp, Artificial Sequence
  ENSG00000166261_21 (sequence is synthesized)
tcatgggtataaagtaggagaactaagagacttaagaggtcgtggttcctatatcgtccaaaaaataggctgttacatatcctaaagactgctcaacagcttcaagttgaaagtggccaa

SEQ ID NO: 530559 - DNA, 120 bp, Artificial Sequence
  ENSG00000166261_22 (sequence is synthesized)
ggacagccccttaggtttgggaagggacgagcctgaaggattctgtctttactggggtcaaatcttaaagcacacagctctggactcaagacaggaggtttgcgtcctgatggctttgcc

SEQ ID NO: 530560 - DNA, 120 bp, Artificial Sequence
  ENSG00000166261_23 (sequence is synthesized)
acacattcacaggataactgcatagatccctcgctgtctgattcacttcttaccatgcactttcctttgatgctgaggagaaatggaagtgggcgaaaaatctcaaggctgcttcatgtg

SEQ ID NO: 530561 - DNA, 120 bp, Artificial Sequence
  ENSG00000166261_24 (sequence is synthesized)
gaccttgtcaagctgctccctcccccagcgtcaaattgttatcaggtgccaaacactgctagaaaggagggcctagtcagaagcctctttccatacgagttttggttttgtttttaatat

SEQ ID NO: 530562 - DNA, 120 bp, Artificial Sequence
  ENSG00000166261_25 (sequence is synthesized)
ttttttctattaaaatactcatgcatttaaccttcccgttattcaaccagtctcttggttgcatccctagcacttctactacaagtgagatggtagtgtttgagtgcttattgagtaaag

SEQ ID NO: 530563 - DNA, 120 bp, Artificial Sequence
  ENSG00000166261_26 (sequence is synthesized)
cataattcggtcataatgaaatcgttcacattccctcatatgcacaagcccaccaaccccttcacaccccccttcacaggggtcgtatgagtaaggggatttggaaactgtcaacttaca

SEQ ID NO: 530564 - DNA, 120 bp, Artificial Sequence
  ENSG00000166261_27 (sequence is synthesized)
aaggcactataacaattacagaatcatgattgccatgggccactttatttacatgaagacaactggagaacgactaagaccaaattatggaaaataagaaaaagctgttgctggcaagac

SEQ ID NO: 530565 - DNA, 120 bp, Artificial Sequence
  ENSG00000166261_28 (sequence is synthesized)
catcaagactgttctgacaccctgtccccatcatccctgactgagtactctgacatcacggaaagtgttgaacctgggaccctgaggaattcaccaggagtaaatggctttcatgtattt

SEQ ID NO: 530566 - DNA, 120 bp, Artificial Sequence
  ENSG00000166261_29 (sequence is synthesized)
gtgttgtttgctttttcttacgtgattttatgttcatagagctagaaagtagcatctcatgatggcccaacaatctctgttgccagttaaaggttccttggagatgaggctgaataatta

SEQ ID NO: 530567 - DNA, 120 bp, Artificial Sequence
  ENSG00000166261_30 (sequence is synthesized)
tgaacctcaccttctctgattgtgggagtggcaagaactggggagacgtcctccataagtggagcacagggtatggggttaaagcatgacagggagagtcttctgtgcctggtttcttct

SEQ ID NO: 530568 - DNA, 120 bp, Artificial Sequence
  ENSG00000166261_31 (sequence is synthesized)
cctctatctcataatgcattatgggcccgaggaataggggagggttaataagactccaaccctaatggcccaacagggaaattctcattttggtcgatgatattctgatggactggtttg

SEQ ID NO: 530569 - DNA, 120 bp, Artificial Sequence
  ENSG00000166261_32 (sequence is synthesized)
gtcttaataccagtcaaccgttgtccttctggaaatatacatatatgaaataaataaaggtaacacttgcagccaagttccctggtttctgggacttcccatcttacccattccttttcc

SEQ ID NO: 530570 - DNA, 120 bp, Artificial Sequence
  ENSG00000166261_33 (sequence is synthesized)
agggcttcagtgtcctgatacttctgagggtggttcatactcaaatagatctgggagtacagagtatttttccttgaggaaaggaagggttgggatgattagcagagtccggtgaaacat

SEQ ID NO: 530571 - DNA, 120 bp, Artificial Sequence
  ENSG00000166261_34 (sequence is synthesized)
gcctggagtttgcagaagatactgtcctaataagcaggcatttctaaaccaagtatctaagcctaagcacagcttgtcctgggtgaaatgtctgccacaaaagatagtttctcctagctc

SEQ ID NO: 530572 - DNA, 120 bp, Artificial Sequence
  ENSG00000166261_35 (sequence is synthesized)
agacttaaccatttataaaggttggtaaaatactggcagtgacaacaaattgactttttaattttcttatttgcattattccaataaatgaaaatctgtcagagttctacatgagggaaa

SEQ ID NO: 530573 - DNA, 120 bp, Artificial Sequence
  ENSG00000166261_36 (sequence is synthesized)
gagaggacaggaatttttcctcctaggaccaaacgcctgggattcataatctttcaccctttctcctccagctataccctttttgtactctgtgtatatactatattgcagtagacaatc

SEQ ID NO: 530574 - DNA, 120 bp, Artificial Sequence
  ENSG00000166261_37 (sequence is synthesized)
attccaagggtacaacaaggtttaccacaatgtgagggactcagccattgcaaattctctagatggtgtgagaccaccccaaagccaagaaatggctacagccgtggaaccagaggacca

SEQ ID NO: 530575 - DNA, 120 bp, Artificial Sequence
  ENSG00000166261_38 (sequence is synthesized)
acaatcattccaagggtacaacaaggtttaccacaatgtgagggactcagccattgcaaattgtacagatgagtcttcagtggaaacctggtactcctcagattcctctggttcaacagg

SEQ ID NO: 530576 - DNA, 120 bp, Artificial Sequence
  ENSG00000166261_39 (sequence is synthesized)
cggggatcccatcccttatcatctcctcaaatgctaaaggacccttgagcaaagccaggaggaagtcatctagacgtgaaacagggagtatccacacaggctgtgttaatgacaaagcta

SEQ ID NO: 530577 - DNA, 120 bp, Artificial Sequence
  ENSG00000166261_40 (sequence is synthesized)
aaaacatagtaaatgacttttgaatttactgctgttatgaattatctatagcaacacctccggtcagctctgttatatatgttattgcgttatttcccattaaatgatggttcctctgac

SEQ ID NO: 530578 - DNA, 120 bp, Artificial Sequence
  ENSG00000166261_41 (sequence is synthesized)
aggggcttcacgttttgatcaaaatattacacctgtattctgggcttttgctgtgaattcctagtattgctaaaattctgcaatttcttaactacctgttaagttcctcaagggcccttg

SEQ ID NO: 530579 - DNA, 120 bp, Artificial Sequence
  ENSG00000166262_0 (sequence is synthesized)
gcgttcgtccgggacccgcctcaagcctcgcagcctttcacccagtttcctcccgattcttgctgggacaacaaaattgggaagcggttctcgaaacatactgtcaaggcgtagttgcat

SEQ ID NO: 530580 - DNA, 120 bp, Artificial Sequence
  ENSG00000166262_1 (sequence is synthesized)
ttggtcgcccaactcacattgaagcctaagacccagctgatttctcttcatttctgcaaagttactgtaccatggcaggccaacgaacatgtcaaaggaggagcagcagagctggccccg

SEQ ID NO: 530581 - DNA, 120 bp, Artificial Sequence
  ENSG00000166262_2 (sequence is synthesized)
ggaaaatgcaagaacctccaaagagcattgaagaattcttaaagtttcaaaattgggattattggccaagggaaatccattttagagatgatgataaatggtcatgcactctgaaaaaaa

SEQ ID NO: 530582 - DNA, 120 bp, Artificial Sequence
  ENSG00000166262_3 (sequence is synthesized)
taaaagaagatagttcatttgtttcaatttatacacacctatgggaaaatgttcctcgaatatttgaagcacttttgatcatggaatcaaaattaaaggaatattcacttattttgcaaa

SEQ ID NO: 530583 - DNA, 120 bp, Artificial Sequence
  ENSG00000166262_4 (sequence is synthesized)
accacacctctgaaatatttaagtggaaaagcatgatttctgagacaagttcttatagaaaattggaacgatatggggaatttctaaagaagtaccataagaaaaaaaagataatgcttt

SEQ ID NO: 530584 - DNA, 120 bp, Artificial Sequence
  ENSG00000166262_5 (sequence is synthesized)
cagatgaaatggagacagagaagaatatagagggttgcagcttcacaggattcaaagcaaatgaacttactcagctacccagacatttggatgctgaacaaatttatctttttattttaa

SEQ ID NO: 530585 - DNA, 120 bp, Artificial Sequence
  ENSG00000166262_6 (sequence is synthesized)
aagcccataattttgatgaaagagtttttaaaatctggaagactcattttctctcagaagcctccattgctcttttgcatgactccttttggtggtggtttctccataaatttaggcctg

SEQ ID NO: 530586 - DNA, 120 bp, Artificial Sequence
  ENSG00000166262_7 (sequence is synthesized)
acagagaaaaccaagattgcttattcgatagaatttcagaaagttatgtgacacttttcatgagcatacctctaagtcgaaaggatgcattttttcagatatatcctgattgtttggcac

SEQ ID NO: 530587 - DNA, 120 bp, Artificial Sequence
  ENSG00000166262_8 (sequence is synthesized)
aagccatatatgcaacgttccatgaagcatttccagaatcgagttacctctttaatgatgaatttaaagaagatctagggaataacatttttctttggtgttcaggtttaaaacctcaaa

SEQ ID NO: 530588 - DNA, 120 bp, Artificial Sequence
  ENSG00000166262_9 (sequence is synthesized)
aaggcttttggatccactggaaactgaaagaactctccacaaccaccattcatggtagcaaaaaagcacctgcaaaatcagtaaaggaaagaattgcagacagtcaagaacatatatcaa

SEQ ID NO: 530589 - DNA, 120 bp, Artificial Sequence
  ENSG00000166262_10 (sequence is synthesized)
ctagtatcgacttcaatattataaagattctgaacaacccaagagcatatacgttgcccatatccaaggaagaatcaagattatcaagactagcaacaaagtcgcactatagtagtactg

SEQ ID NO: 530590 - DNA, 120 bp, Artificial Sequence
  ENSG00000166262_11 (sequence is synthesized)
gtccagagtttaatcgtgttctcttcaattttggaggtcagagtccattgattttatattatcttaagatgcatgagctggctggtatttccaaagcacctaagaaaaccaagattaaac

SEQ ID NO: 530591 - DNA, 120 bp, Artificial Sequence
  ENSG00000166262_12 (sequence is synthesized)
tcactaagatattccaggaaccactacctgctccaacataccgtgatgttataaaggaggcaaaaagacaatttgcaaggaaccaaaaggattttaggatactccaagcaaaggctacca

SEQ ID NO: 530592 - DNA, 120 bp, Artificial Sequence
  ENSG00000166262_13 (sequence is synthesized)
atgtgtggcatcactatcgtcatcatcatcatcatcaccatcatcaacagacaactacaactttgaggaagaagaatactaagagaaaccagaaatgaactctattcaagaataatgcat

SEQ ID NO: 530593 - DNA, 120 bp, Artificial Sequence
  ENSG00000166262_14 (sequence is synthesized)
acaattcagtggtatcagtttaattgtaacaatatatttaattcaagtccaatccatgtaatcagtattaagagtgtgttttaccattcatctttaaaatcttcaaatcaataaatctca

SEQ ID NO: 530594 - DNA, 120 bp, Artificial Sequence
  ENSG00000166262_15 (sequence is synthesized)
gtaagttattcttaaaagatctgtccaagcatgatcttggctcttaatagtaaaaccatattttaagatggaaaaagaatcattatgaagcatagagagctttcaaccatttctttgaaa

SEQ ID NO: 530595 - DNA, 120 bp, Artificial Sequence
  ENSG00000166262_16 (sequence is synthesized)
atatatcttgatataatagcaaccgttcatcataatacaaaacagaaggaagattaatttactgtggcacagaaagtcctgccaattcctaagtgccctaagtagtttctctcagacttt

SEQ ID NO: 530596 - DNA, 120 bp, Artificial Sequence
  ENSG00000166262_17 (sequence is synthesized)
ttacattttttcaggcctcaagcaaaaccaaagccccacctccaggtttggtagcaaacaaactttgcttctccggtgctaagcttccatcactcctctggtaataagctttgtgcacat

SEQ ID NO: 530597 - DNA, 120 bp, Artificial Sequence
  ENSG00000166262_18 (sequence is synthesized)
ttgctagaaagctgggcagcttgtccgcaggtaccattgatactgtgcagcctccccatcctgctccagtaagtcgtgacccttgagccccaaacttcctaaaacagtgaggaaaaaaat

SEQ ID NO: 530598 - DNA, 120 bp, Artificial Sequence
  ENSG00000166262_19 (sequence is synthesized)
attagaacctataaatgaaaatacaagggatttgcttggtgtttgtagaacacatagcctatctaagttctaagaagaaaatacatgcggggtttttaggtgtcatcaaacattttagga

SEQ ID NO: 530599 - DNA, 120 bp, Artificial Sequence
  ENSG00000166262_20 (sequence is synthesized)
cattaagacatttatactgtttcagagagtgatttggaattttttcattgtatctaaatctagtccctggttttgactccaagtggtaagtcaacagtactcctcccatttcatgactgg

SEQ ID NO: 530600 - DNA, 120 bp, Artificial Sequence
  ENSG00000166262_21 (sequence is synthesized)
caataacccactgtaatattgattccataaagtagccacttgaagagttgtatagcaagcttacacgtaaatcaggaaggaggcgttaagataaaacaggcaatggtaaaagaaatgtag

SEQ ID NO: 530601 - DNA, 120 bp, Artificial Sequence
  ENSG00000166262_22 (sequence is synthesized)
gcaaccctgaatcagaaggtcactccaaatgaggacaaatcaaaatttaaaatgtacagtcttatacaagttttccccaatggctatttcagctgcattcttaaggccgggctgtttcaa

SEQ ID NO: 530602 - DNA, 120 bp, Artificial Sequence
  ENSG00000166262_23 (sequence is synthesized)
agaagaatcagtcccctagaacagatagcctagttcactgaataaacttatcaacaaaaagcgtgttattaaactccaggttgggtcggtggttggttgaatctctaatggaaaattaac

SEQ ID NO: 530603 - DNA, 120 bp, Artificial Sequence
  ENSG00000166262_24 (sequence is synthesized)
caagcctttccacaaagcagagggcagtccctagaggtccacaccaccttccctgtgccttctggagctagtctgattattggactcagaagttgacatcagatgagatatatctgattg

SEQ ID NO: 530604 - DNA, 120 bp, Artificial Sequence
  ENSG00000166262_25 (sequence is synthesized)
ggatgacaacaactatataaaggaccacacagctagagttaattttagttactgtaaaccaggcacagtttcaaacctaagatttcaaccaaagtgaaaggccctatcacaatgtacaca

SEQ ID NO: 530605 - DNA, 120 bp, Artificial Sequence
  ENSG00000166262_26 (sequence is synthesized)
gatcacttagctttaaaagatgcaatttatcctgacacgaaagttaacatgtacttacaattaattcttcttaataaaattcactccaaattactagtggattaaaggctctatgattaa

SEQ ID NO: 530606 - DNA, 83 bp, Artificial Sequence
  ENSG00000166262_27 (sequence is synthesized)
gtaccataagaaaaaaaagataatgctttcagatgaaatggagacagagaagaatatagagggggtgtggggaatggggcccg

SEQ ID NO: 530607 - DNA, 120 bp, Artificial Sequence
  ENSG00000166262_28 (sequence is synthesized)
aatatttcattttattgtaggatacattttgacagtatgatttaatgaatcagacctttacttaaagctatgataaattaggtgttcaacaagatttgatcctttgggcattaaatttgg

SEQ ID NO: 530608 - DNA, 120 bp, Artificial Sequence
  ENSG00000166262_29 (sequence is synthesized)
caggaaagaccagtgatgtgtctaaccgctaattaccagaaaagaatatattaaactctgtgttactgctttgggaccctgaggttgctagcgtacactggcttggcatgtaaccgtaac

SEQ ID NO: 530609 - DNA, 120 bp, Artificial Sequence
  ENSG00000166262_30 (sequence is synthesized)
ttttgagtcttcaagtgtctgtgggaattttggggtagtatccctgtagggtaaccaaacagtgaaaaactgcaggtgttgggaggtaattagatcaatagccagtgaatacgagggcta

SEQ ID NO: 530610 - DNA, 120 bp, Artificial Sequence
  ENSG00000166262_31 (sequence is synthesized)
aaatgagggtgggatggttacctggtaaaactggtcattttgccctctatttcagttttctgctctttgtgtttatgtacattacatatgttctttttcattaaaaagtattaaatccaa

SEQ ID NO: 530611 - DNA, 120 bp, Artificial Sequence
  ENSG00000166262_32 (sequence is synthesized)
caaaattgggaagcggttctcgaaacatactgtcaaggcgtagttgcagtgagttgtgaagaaatgttgatcccagagaaaagtttgcattttgcccacctcaaagatattttgattgaa

SEQ ID NO: 530612 - DNA, 120 bp, Artificial Sequence
  ENSG00000166262_33 (sequence is synthesized)
caaccaccattcatggtagcaaaaaagcacctgcaaaatcagtaaaggaaagaattgcagacagtcaagaacatatatcaactagaatggaccacgcagtatccctcaaggaagaatcaa

SEQ ID NO: 530613 - DNA, 120 bp, Artificial Sequence
  ENSG00000166262_34 (sequence is synthesized)
ccactgaaagccatgaattactcttattagaccctgtagaatcccagtttatggcagtgacattaaaaacacctagtttatgacttggatcaggcagcctgtaaaatggcttccagtgat

SEQ ID NO: 530614 - DNA, 120 bp, Artificial Sequence
  ENSG00000166262_35 (sequence is synthesized)
ccctgctttctggtatgtatgcccttgtataataccctcctcatgagtgtaggcagaggtaacatcgcttttgaaactaggctatatatattaaaataaaaaaacaaacctgtggcttcc

SEQ ID NO: 530615 - DNA, 82 bp, Artificial Sequence
  ENSG00000166262_36 (sequence is synthesized)
ctttttaagcccgtcagaaaagcacagtattcaggtgggagtgacacgattttccagtgagatgaacctggtacctcagatg

SEQ ID NO: 530616 - DNA, 120 bp, Artificial Sequence
  ENSG00000166262_37 (sequence is synthesized)
ctgttcctatttggccatcttggctcctcgcccccagttttggtatcgacttcaatattataaagattctgaacaacccaagagcatatacgttgcccatatccaaggaagaatcaagat

SEQ ID NO: 530617 - DNA, 120 bp, Artificial Sequence
  ENSG00000166262_38 (sequence is synthesized)
agagcatatacgttgcccatatccaaggaagaatcaagattatcaagactagcaacaaagactccaagcaaaggctaccaagaaacctcatgaagtgaaacaggactttgagaagttcct

SEQ ID NO: 530618 - DNA, 120 bp, Artificial Sequence
  ENSG00000166262_39 (sequence is synthesized)
aactttatagggaaaagctcagaattaatgaagaaataaaacttctaaaacagcagcaggaaagaattgacaaggagcttgatagactccaagcaaaggctaccaagaaacctcatgaag

SEQ ID NO: 530619 - DNA, 120 bp, Artificial Sequence
  ENSG00000166262_40 (sequence is synthesized)
gctgttccagagtctcagctgctacatttgtaaaattggtgtattggtctaatgcctctatggtgctttacaattctgtgatctgtgacttatactcactactaatataaggaacagggc

SEQ ID NO: 530620 - DNA, 120 bp, Artificial Sequence
  ENSG00000166262_41 (sequence is synthesized)
acctacttttaaaagctgttattctttaaaaaggaggaaatggtttcacattgattatcagtgtttgatttttgcctcaataagaatattggaacaataaatgttaatttagagatggaa

SEQ ID NO: 530621 - DNA, 120 bp, Artificial Sequence
  ENSG00000166262_42 (sequence is synthesized)
ctttgtcactgaaacaccaagggtttggtctaggtcttaatgctcgctgcacagatggccaatcactgagatgagtattgccaaggaagaaagctttaatagggtgctgcagccgaggag

SEQ ID NO: 530622 - DNA, 120 bp, Artificial Sequence
  ENSG00000166262_43 (sequence is synthesized)
atgggagatcagtctcaaatccatctccctgactgactaaaattagggttttatatagcaaggaagaaatgtaaccatgtgtgggaaaacagaaattagggagtggtggtaagaaggagg

SEQ ID NO: 530623 - DNA, 120 bp, Artificial Sequence
  ENSG00000166262_44 (sequence is synthesized)
tgatttttggcataattaatttttcaatagagataagtctagtacaaaaatgtttttctggatgcaactacagagattagtttttgagcattccacacattagaaatcctatatgatgtc

SEQ ID NO: 530624 - DNA, 120 bp, Artificial Sequence
  ENSG00000166262_45 (sequence is synthesized)
aatcctatatgatgtctagagttctttcagaggagttaaaactttaatatagatttcaaaagattctggatctttgaaattagacttcatatattatatctatcataatatatatcacat

SEQ ID NO: 530625 - DNA, 120 bp, Artificial Sequence
  ENSG00000166263_0 (sequence is synthesized)
aggtggcagcgcttgcagtcgggctacggaggccgggttgccagattacgggaaagccatttaagaagttcctggaataatattagtcagagtaatataggatctgcaggaagtgtctca

SEQ ID NO: 530626 - DNA, 120 bp, Artificial Sequence
  ENSG00000166263_1 (sequence is synthesized)
agatagttggaaaagaagaatttctagactcttcatcaagatcttcatttatacagctgttaaatccaaggctactttggtgaaagcatgaataaaaatacatctactgtagtatcaccc

SEQ ID NO: 530627 - DNA, 120 bp, Artificial Sequence
  ENSG00000166263_2 (sequence is synthesized)
agtctacttgaaaaggatcctgcctttcagatgattacaattgccaaggaaacaggccttggcctgaaggtactaggaggaattaaccggaatgaaggcccattggtatatattcaggaa

SEQ ID NO: 530628 - DNA, 120 bp, Artificial Sequence
  ENSG00000166263_3 (sequence is synthesized)
attattcctggaggagactgttataaggatggtcgtttgaagccaggagatcaacttgtctcagtcaacaaggaatctatgattggtgtatcatttgaagaagcaaaaagcataattacc

SEQ ID NO: 530629 - DNA, 120 bp, Artificial Sequence
  ENSG00000166263_4 (sequence is synthesized)
ggagccaagttgaggttagaatctgcttgggagatagcattcataagacaaaaatccgacaacattcagccagaaaatctgtcatgtacatcacttatagaagcttcaggagaatatgga

SEQ ID NO: 530630 - DNA, 120 bp, Artificial Sequence
  ENSG00000166263_5 (sequence is synthesized)
cctcaagcctcaacattaagtcttttttcttctcctcctgaaatactaatcccaaagacctcatccactcccaaaacaaataatgacattttatcttcttgtgagataaaaactggatac

SEQ ID NO: 530631 - DNA, 120 bp, Artificial Sequence
  ENSG00000166263_6 (sequence is synthesized)
aacaaaacagtacagattccaattacttcagaaaacagtactgtgggtttgtctaatacagatgttgcttctgcctggactgaaaattatgggctacaagaaaagatctccctaaatccc

SEQ ID NO: 530632 - DNA, 120 bp, Artificial Sequence
  ENSG00000166263_7 (sequence is synthesized)
tctgttcgctttaaggcagagaaactggaaatggctctaaattatcttggtattcagcccacaaaggaacaacaccaagccctgagacagcaagtacaagcagactcaaaagggacagtg

SEQ ID NO: 530633 - DNA, 120 bp, Artificial Sequence
  ENSG00000166263_8 (sequence is synthesized)
tcttttggagattttgtccaggttgccagaaacttgttttgcttgcagttggatgaagtaaatgttggtgcacatgaaatttccaatatattagattcacagcttcttccttgtgattct

SEQ ID NO: 530634 - DNA, 120 bp, Artificial Sequence
  ENSG00000166263_9 (sequence is synthesized)
tcagaagcagatgaaatggaaaggctcaagtgtgaaagagatgatgccttgaaagaagtaaatacacttaaggaaaaattattggaatcagataagcaaaggaaacaattgacagaagag

SEQ ID NO: 530635 - DNA, 120 bp, Artificial Sequence
  ENSG00000166263_10 (sequence is synthesized)
ctccagaatgtgaaacaagaagccaaagctgtagttgaagaaacaagagccctgcgtagtcggattcatcttgctgaagctgctcagagacaggcacatggaatggaaatggactatgaa

SEQ ID NO: 530636 - DNA, 120 bp, Artificial Sequence
  ENSG00000166263_11 (sequence is synthesized)
gaagtgatccgtctgttagaggccaagattacagagctaaaggctcagcttgctgattattctgaccaaaataaagaaagtgttcaggatttaaaaaagagaatcatggtactcgactgc

SEQ ID NO: 530637 - DNA, 120 bp, Artificial Sequence
  ENSG00000166263_12 (sequence is synthesized)
caattacgaaaatcagaaatggctcgaaaaacttttgaggcatccactgaaaagcttcttcattttgtagaggctattcaagaagtattttctgataattctactcctttatcaaattta

SEQ ID NO: 530638 - DNA, 120 bp, Artificial Sequence
  ENSG00000166263_13 (sequence is synthesized)
agtgaaagaagagctgtgttagcttctcagacttccctcacaccactgggaaggaatggacgtagcatcccagcaacgctggcgcttgaatctaaggaacttgttaaatctgttcgtgcc

SEQ ID NO: 530639 - DNA, 120 bp, Artificial Sequence
  ENSG00000166263_14 (sequence is synthesized)
ttacttgatatggattgtttaccttatgggtgggaggaagcttacacagcagatggaatcaagtacttcatcaatcatgtaacacagactacatcctggatccatcccgtgatgagtgtc

SEQ ID NO: 530640 - DNA, 120 bp, Artificial Sequence
  ENSG00000166263_15 (sequence is synthesized)
ctgaatctatctcgctcagaggagaatgaagaggattgctctagagaactccccaaccagaaaagttgatggttttccttaggaagtggagctacatggatgatgtgagcagagacgcat

SEQ ID NO: 530641 - DNA, 120 bp, Artificial Sequence
  ENSG00000166263_16 (sequence is synthesized)
aacatccaattctgagatgaaacagtctaaaataggagtaaagcatgcactacttgttgaagtgtgaaatggagactctggactttgggtatttttgtaaaacttttgatatttctgtat

SEQ ID NO: 530642 - DNA, 120 bp, Artificial Sequence
  ENSG00000166263_17 (sequence is synthesized)
ttgggtatttttgtaaaacttttgatatttctgtatacatttaaaaaatcaattgccactacagtagttccttaagaataatctagttatattttttgaaatcacatataattagacttt

SEQ ID NO: 530643 - DNA, 120 bp, Artificial Sequence
  ENSG00000166263_18 (sequence is synthesized)
tctttgtaatttcatatgtagttcttcatagggtctcagatacaatggtttttataattgacatattgaaaaagtatatgaacataatgaaacacctcatttatttgataattcactaat

SEQ ID NO: 530644 - DNA, 120 bp, Artificial Sequence
  ENSG00000166263_19 (sequence is synthesized)
gttttatattcatatattaggaaagtgaacttagcaagctttttggaatttaaggatcacatttagacatctcatgggctgatgaatacagctggtatctttgtggagctttctaattta

SEQ ID NO: 530645 - DNA, 120 bp, Artificial Sequence
  ENSG00000166263_20 (sequence is synthesized)
caaaatgctttgtagaccccattgtctttaaaccatacaacatgcccgtgaagctgatctggtgggtatgtttattcttggttttcagtagggaaatagcagttcagagagaggaagctc

SEQ ID NO: 530646 - DNA, 120 bp, Artificial Sequence
  ENSG00000166263_21 (sequence is synthesized)
tctgtcccagcaccgagactcactcctaagtcttctgattccatgagcagtcccccttcccccataccctgctgtctccacggagggaggtcacagcccatcacgcaggacactgtgatt

SEQ ID NO: 530647 - DNA, 120 bp, Artificial Sequence
  ENSG00000166263_22 (sequence is synthesized)
gtgttgatgcagctggctccacagctgtgcattccacagagattcagaaggcacctcttcggtcaaacatggcccctctataaccccactattcttctcctataaacccttcccccttct

SEQ ID NO: 530648 - DNA, 120 bp, Artificial Sequence
  ENSG00000166263_23 (sequence is synthesized)
ctgcacccaagccttcgccaagtaggcgcactctttgtgatattgtttcagcagacttctttcagcagctcgtgtttttctaaagtgaaaggcatggtttgtcctgcttaggttgccctt

SEQ ID NO: 530649 - DNA, 120 bp, Artificial Sequence
  ENSG00000166263_24 (sequence is synthesized)
cccagagggatggtttgaggggagctgatgagaagagaggtatctgttaaaacattactgctctactcgaaacaagatggaagcctaaagcccaagtcgagcagctcccagcactgctgt

SEQ ID NO: 530650 - DNA, 120 bp, Artificial Sequence
  ENSG00000166263_25 (sequence is synthesized)
gcagacctagaggtccttagaacatagtctaagaaccattcattgtagccattttatagttgagtaaactgagatcttaagtctcctagtctactgaatttcatatggtgtataatacag

SEQ ID NO: 530651 - DNA, 120 bp, Artificial Sequence
  ENSG00000166263_26 (sequence is synthesized)
atttatatggtaaagatatacatatacattgtgctcaactatacattcctgaatccatttaggatttgtgatttatgtcttgagtaataatataaagtcaactccagactgataggtagt

SEQ ID NO: 530652 - DNA, 120 bp, Artificial Sequence
  ENSG00000166263_27 (sequence is synthesized)
cattagccatgagaaatgtttcaggatggctagggaagacttgtgttttgcctgacagccatttgaatgttaggaagcttcggggagacaagttttgagagaagccccagagggagctat

SEQ ID NO: 530653 - DNA, 120 bp, Artificial Sequence
  ENSG00000166263_28 (sequence is synthesized)
ttccttgcaccccccagaggtgaatgaggtattctataagttagtgtctataattgtgaaagtacaaacttcttgtttttgtcaaattaatggtatgaaatttctctccccctgcttgaa

SEQ ID NO: 530654 - DNA, 120 bp, Artificial Sequence
  ENSG00000166263_29 (sequence is synthesized)
gagttttctaattcgtttctagtgagcaaaacaaagaaggtgcttgagtcactgaaatcaaagtactcaggcacacagcccactgacaagagacacctcatccattaactgctgttttgt

SEQ ID NO: 530655 - DNA, 120 bp, Artificial Sequence
  ENSG00000166263_30 (sequence is synthesized)
accacttgccgccctgtttctgtcaaatacctagtgaaaaaggcctaaacaattgtaatgatattatttattgggcattttgtgccatacatggtgatgagcagtttgcatatatttatt

SEQ ID NO: 530656 - DNA, 120 bp, Artificial Sequence
  ENSG00000166263_31 (sequence is synthesized)
tatgatcttcttaaaaccattccatgaaataggaactgtaattatccccaattctaaaagaaaaaacttagttttagagagttagtaatctttgcctaagggtcacaaagcacctatgtg

SEQ ID NO: 530657 - DNA, 120 bp, Artificial Sequence
  ENSG00000166263_32 (sequence is synthesized)
tagaagctagggttcaaggcagatctgtgattccagaagctgttctctaaaccactatggagaactgcttagattcattgtctatgggtacattttataaaaaggcagattctagttcag

SEQ ID NO: 530658 - DNA, 120 bp, Artificial Sequence
  ENSG00000166263_33 (sequence is synthesized)
tgtcataaggaactttctagtaattagagctgataagaaaagaattccccaggagaaaatggaaacactatcccagcaatctgaattccttacttggggaatgttgctgaggaggttcag

SEQ ID NO: 530659 - DNA, 120 bp, Artificial Sequence
  ENSG00000166263_34 (sequence is synthesized)
tgtgtgaatggactgaaccagttggccactctctcagattccctcttcataaagcttccgtgacttctaaaccatcaggtcggtgccataagagatgctcaaaaaagcatggtcagggct

SEQ ID NO: 530660 - DNA, 120 bp, Artificial Sequence
  ENSG00000166263_35 (sequence is synthesized)
tagcaagaatccttttccagtgcaaatacgaccctcatattatgttttggcgagtagccagtctttctttaacatcaatcaaccgtagcaatgtggtcatcacgaagtcttcattgactc

SEQ ID NO: 530661 - DNA, 120 bp, Artificial Sequence
  ENSG00000166263_36 (sequence is synthesized)
actggcttggattttagggttagaaaatctgaatgttcttatgtccttccgtctcactttactagagtgcccaagttgactcatccttactcactcattccctcaaaatatttattgagc

SEQ ID NO: 530662 - DNA, 120 bp, Artificial Sequence
  ENSG00000166263_37 (sequence is synthesized)
accaacaatgtcacaagcactgtgctaaacactgtggtgaagtagaacaattgctaatcatttcctgggttccacttactcttgatttaaaaaaaaaaaaacaacaaaagagtttgtgtg

SEQ ID NO: 530663 - DNA, 120 bp, Artificial Sequence
  ENSG00000166263_38 (sequence is synthesized)
tggccaggactaaacagctgcttcttaatttttgaattttaaaactaatctattttatttaaaaaaaatcaagtactttggaagtgaataaagtaagagatagcctgtctcactttccag

SEQ ID NO: 530664 - DNA, 120 bp, Artificial Sequence
  ENSG00000166263_39 (sequence is synthesized)
aggtagcagtcactaatactgtggtgagtgattttactcaaaggaaatcacactattaagcagcttggttttgacatgttatgttgtggtcatcttttcatgtcaatacatagattaatc

SEQ ID NO: 530665 - DNA, 120 bp, Artificial Sequence
  ENSG00000166263_40 (sequence is synthesized)
ttttatttcaaatgtctacataaaatatcactacccacataacctataatttgtgtggccagcaatttattgaacactaaaatgttttaagttttcttattgctaacaatgtcacagtga

SEQ ID NO: 530666 - DNA, 120 bp, Artificial Sequence
  ENSG00000166263_41 (sequence is synthesized)
acatttatatattcattaaatccttttcctcatgtatctttgcactcttgtgctagtatgtctatagtgtgaatacattcataaatttcttgatcaaagctaggtcaaagttacattcat

SEQ ID NO: 530667 - DNA, 120 bp, Artificial Sequence
  ENSG00000166263_42 (sequence is synthesized)
tttaattttggtacatatccataaattctccataaaagtaggaccaacttacattaccaccaatagtgtatgtgagccttatttttatgtatgataggactttttttagtccaaatgttc

SEQ ID NO: 530668 - DNA, 120 bp, Artificial Sequence
  ENSG00000166263_43 (sequence is synthesized)
ctatagattttctgggttttttttttttttttgtccttggaagaataaccttccttccaccaagtccaagaacctgagatttttaatcattaggttttagatttcctttagcagcagaga

SEQ ID NO: 530669 - DNA, 120 bp, Artificial Sequence
  ENSG00000166263_44 (sequence is synthesized)
ctgacttgctgtatagagggaagtcaagtagtgactaactcactatatgtcaaacacatcattactcttctcttttcctactttacatgtaatggttgcgaggaccaactttcaaatgag

SEQ ID NO: 530670 - DNA, 120 bp, Artificial Sequence
  ENSG00000166263_45 (sequence is synthesized)
ctaacttgggtgagacgttcactaaagtaccaagcacaatacaaatgcatcttcgagttctttgggcctcactttccctatctgaataataaggatagtaatcccttgccttttctcaaa

SEQ ID NO: 530671 - DNA, 120 bp, Artificial Sequence
  ENSG00000166263_46 (sequence is synthesized)
ccagttcaactcagcaaacacttcctgagcacctgctacatgccaggcaaaatgtgaaatttgcatgctatgaggctaaatggtactgattctcaaaacaaggagctcatagtctaaaac

SEQ ID NO: 530672 - DNA, 120 bp, Artificial Sequence
  ENSG00000166263_47 (sequence is synthesized)
catttttctttcttttttttccccctaaacaacctcttaaaggggtaagaagttagggggttgtttattaagaacccctgaagagcaaccctttaccactctcttaaatttgaaaaattc

SEQ ID NO: 530673 - DNA, 120 bp, Artificial Sequence
  ENSG00000166263_48 (sequence is synthesized)
caaaataatattaacacctcttgactagaaaaggaaaaaaaaggaacatgccgtatgaagagcctctccaataataaatgcaaagcagctgtcaaaatatagagtcaagtgatactttca

SEQ ID NO: 530674 - DNA, 120 bp, Artificial Sequence
  ENSG00000166263_49 (sequence is synthesized)
taaagtgtttgcacaattagaaaatgttatcctttttctcgggagaaatgggacatttttattttctctgctaagtgaaatgcaactttttgaagaatcaacacgcttgacatttttaca

SEQ ID NO: 530675 - DNA, 120 bp, Artificial Sequence
  ENSG00000166263_50 (sequence is synthesized)
atgtacataaagaactgaactattattaaaacaacttacacactccattgcttataacttttgagagaatgaaaagaaccttaaacagaatgtgcctgtggagcttcgctttagaaatga

SEQ ID NO: 530676 - DNA, 120 bp, Artificial Sequence
  ENSG00000166263_51 (sequence is synthesized)
aatacccaaggtgttttaactacaactgtctacatgtaatagtgtgtctgcataatgactttgtaaatattaactgcaattctgtatttgctttcttgatatgacttttaacatttaaac

SEQ ID NO: 530677 - DNA, 120 bp, Artificial Sequence
  ENSG00000166263_52 (sequence is synthesized)
ttatactgtttctgtctacttttttcaaaagttcaatttttacttttgggggttggactgttctgagggaaagggcgatcagatcaatagttctgtcccccattccattcccccatcacc

SEQ ID NO: 530678 - DNA, 64 bp, Artificial Sequence
  ENSG00000166263_53 (sequence is synthesized)
agatcaatagttctgtcccccattccattcccccatcacccaattattctctatatcactctac

SEQ ID NO: 530679 - DNA, 120 bp, Artificial Sequence
  ENSG00000166263_54 (sequence is synthesized)
cattatttatcagtttgccctaaccttgttttgtttgttatcttcctcaatagtgggagtaataatgggagtcagcttcgtgagggcagggattttgtcttcttgtattcatttactcac

SEQ ID NO: 530680 - DNA, 120 bp, Artificial Sequence
  ENSG00000166263_55 (sequence is synthesized)
ttacacacttaccgagagctactagaggccagacacttcactgagtagtagggatacaatgtgagatatatgtgtttctagcccttgtgtaattcgtattctatgcaaaggatatacgat

SEQ ID NO: 530681 - DNA, 120 bp, Artificial Sequence
  ENSG00000166263_56 (sequence is synthesized)
tgaaattaaccaaaactttttccatttattttctttctccgcattctttatcagatatttgaactactggaccatttaatgttcattacgttaacaaagagtgtgatatcagaaagcaga

SEQ ID NO: 530682 - DNA, 120 bp, Artificial Sequence
  ENSG00000166263_57 (sequence is synthesized)
aaaaagcatgttcttttgcatttcaaaaatttagctccttggggaactagaaaggatttatgatttaggtcaaagatttgagagcacatatgatgaggaagatgaggctttcttactcac

SEQ ID NO: 530683 - DNA, 120 bp, Artificial Sequence
  ENSG00000166263_58 (sequence is synthesized)
tgtctaggaaataattctcctggctgtgagaaggagaaaaaagaacaaaaatgttggtagggcacagagaaggacctgggcttaaccttctggaccaagttccagggagcagcaaaacct

SEQ ID NO: 530684 - DNA, 120 bp, Artificial Sequence
  ENSG00000166263_59 (sequence is synthesized)
caattacatttgtcccctagaatggaaatgattatgtggtatgtttaggcagtgggaccttggacaacgccagtgagcttcctccagcccaatgtggtcaacattggaggattagattga

SEQ ID NO: 530685 - DNA, 120 bp, Artificial Sequence
  ENSG00000166263_60 (sequence is synthesized)
tttctgtgaacccaaaaggatcacaggagtagcaataacacctgctggacctgaatgaggatcttttccattcaatccacatgttctctcaatggaaatcaattcggacaataacattag

SEQ ID NO: 530686 - DNA, 120 bp, Artificial Sequence
  ENSG00000166263_61 (sequence is synthesized)
accatcttaacccagagtgccttagcactagataagcctctgctgtggtctggatgtttgtgcccagcccctaatttcatatattgaaacctaacccccaaggtaccagtattaagaggt

SEQ ID NO: 530687 - DNA, 120 bp, Artificial Sequence
  ENSG00000166263_62 (sequence is synthesized)
tgcagcaagaagttgccatctttgaagcagagagcaagccctcaccagaagctaaatctgctggcatcttgatcgtacacttcccagcctccagagctgtgaacaatacatttatattgt

SEQ ID NO: 530688 - DNA, 120 bp, Artificial Sequence
  ENSG00000166263_63 (sequence is synthesized)
ttataaattacccagtctgagatattttgttatagcagctcctgaatggactaagacagcccacagagtttagcagtgaccccaaggaaaggaaagaactgcaagttgcctgagattaat

SEQ ID NO: 530689 - DNA, 120 bp, Artificial Sequence
  ENSG00000166263_64 (sequence is synthesized)
gttgctcaggatccatttattccctattcctggtgtttctttgtagagagtgctccattaaagtaacacttttgtcctgtctctgcttcttccttaggcagcgatttacctaattggtga

SEQ ID NO: 530690 - DNA, 120 bp, Artificial Sequence
  ENSG00000166263_65 (sequence is synthesized)
gtttaggattaaaaaaaggaatacatcctagaacatttcttaaatatattcccttttctctgtttcatgcaaacatggcttatttatttttcaagtctttctcatttcttacctggatgc

SEQ ID NO: 530691 - DNA, 120 bp, Artificial Sequence
  ENSG00000166263_66 (sequence is synthesized)
tttcaacacaggtgatatagcttcttccttctccaccacacctgtccccatcaatctacccatcacatttctgtcagaattatctttctataacacaaaattgcttctattcctcccttg

SEQ ID NO: 530692 - DNA, 120 bp, Artificial Sequence
  ENSG00000166263_67 (sequence is synthesized)
ctagtcttcagtagttccctagcaccttctactatctgagtccctggctttctccctagcctcatgtcttatcaccaacagttgctcagatatactgttttctgtctaggaaacttctct

SEQ ID NO: 530693 - DNA, 120 bp, Artificial Sequence
  ENSG00000166263_68 (sequence is synthesized)
tgccccattcctgcatcagatttcttctcatacatcaagattctgctctcattttacctcttctttgaagagctccttgacacatgctgccttccccatgcccagagctggcactctatg

SEQ ID NO: 530694 - DNA, 120 bp, Artificial Sequence
  ENSG00000166263_69 (sequence is synthesized)
gatgccatgcctgcatttttacacacctgcccaaccccacttcccactcaggagtggtagagcaagaacttccacctcaagagagttgctggcctgtttgtccggacactcatttggtta

SEQ ID NO: 530695 - DNA, 120 bp, Artificial Sequence
  ENSG00000166263_70 (sequence is synthesized)
ctatatttactaatttacttttatctactgagctgggttactgagtcttagaggcttgaaatctggttctaccttctctttctccatgtggtaatgaaaaccggaactctggttaaagct

SEQ ID NO: 530696 - DNA, 120 bp, Artificial Sequence
  ENSG00000166263_71 (sequence is synthesized)
aagtggtctctctcactgtggctgttccactcaacatcagtagctaggtgagtaaatcaggtggaggtgggaaggaaatgggaaaacagaatactggccaggatggtctgttgtttctta

SEQ ID NO: 530697 - DNA, 120 bp, Artificial Sequence
  ENSG00000166263_72 (sequence is synthesized)
tctgttgttggctttggggtattttattctaaaaccctagaggctgagaaggttaactggaaggcttccaactctgaaatcctaccgcagtcccctattgctgcataccttttaataaag

SEQ ID NO: 530698 - DNA, 120 bp, Artificial Sequence
  ENSG00000166263_73 (sequence is synthesized)
tatcaatcacactatatatgtaattaatttggataggaaagtagggcatgtgtcatctctcctagtagactgtgagtcctttattactgactcagagtccatatattattttttatttct

SEQ ID NO: 530699 - DNA, 120 bp, Artificial Sequence
  ENSG00000166263_74 (sequence is synthesized)
catgcaagacatgacacagtaaaatctaataaaagtttacaaaataaatttaaaatgtaacattaacataaaaaactcttttagctgtttcctgcttctggcagggaaacaaagattgaa

SEQ ID NO: 530700 - DNA, 120 bp, Artificial Sequence
  ENSG00000166263_75 (sequence is synthesized)
ttaagaaggaaatgaggtgggggtttaagtaagcatgtctgtactaactagttccactaatgtgggaacaatataatggattttgctgaagaaggaagtgtatgctacttaagttgggcc

SEQ ID NO: 530701 - DNA, 120 bp, Artificial Sequence
  ENSG00000166263_76 (sequence is synthesized)
ataaaactcacagtatgatcgcagtaaaaggattgtaaagcacatactcacacattgttgatttgcccaaggttctgaagaaataccacagaatgattttggtatagaagggtagataaa

SEQ ID NO: 530702 - DNA, 120 bp, Artificial Sequence
  ENSG00000166263_77 (sequence is synthesized)
gcctgaaaccaaaatacaaggttagtgcatttcagagcagcagcaaacttctgttcttatgggttaattaatcatgttactgaagaattgatttggcacaagggagctatgtattgccac

SEQ ID NO: 530703 - DNA, 120 bp, Artificial Sequence
  ENSG00000166263_78 (sequence is synthesized)
agaactctgaaattgcagaaattatctcatctataagtaaccccactggaattgcttgactgttctgtttcacagtggagaaattcatctttcatcagcacacacgagaagagacaacag

SEQ ID NO: 530704 - DNA, 120 bp, Artificial Sequence
  ENSG00000166263_79 (sequence is synthesized)
gaagacaaaacaaattgagtagataataaagttaccttataggaataggtaatatagacaggtaaggtcagaaatttctgtggaatggaatatgaaaagatgtttatgagcagattctat

SEQ ID NO: 530705 - DNA, 120 bp, Artificial Sequence
  ENSG00000166263_80 (sequence is synthesized)
ttctttaggcagttttatcattcagagaagtaatctatgcatttaatctaatgccagcttttatttttctttggtgattaccacacaaaaataagaagttggcaccaaattaaatgcatg

SEQ ID NO: 530706 - DNA, 120 bp, Artificial Sequence
  ENSG00000166263_81 (sequence is synthesized)
attaaatgcatggattacttctctgataaaagtactcgatataagggaaatttgaaggaaatagaatgcatacatacacacacatacacttagtatatgtgtgtgtgtgtgtgtgtatat

SEQ ID NO: 530707 - DNA, 120 bp, Artificial Sequence
  ENSG00000166263_82 (sequence is synthesized)
gtgtatatacacaccacacacacacacacacacacgtattggaggaataagaaatatttaataaaatctacacaatttcaaaaatatgaccaaatactggtggttcctcatttaccagta

SEQ ID NO: 530708 - DNA, 120 bp, Artificial Sequence
  ENSG00000166263_83 (sequence is synthesized)
gaactctctctacaaatggaaagtgagaagtctatgaagttaccttagtttttccaattaagactgttcattgattgtatttcttctgtctctataagtaccatattcccaattagtatt

SEQ ID NO: 530709 - DNA, 120 bp, Artificial Sequence
  ENSG00000166263_84 (sequence is synthesized)
tcatcagttataagacccatcattattttgtgtgtaactgaaaatgaaaaaaagatttaaaatatgacttagtagttagaatttttatcttatacgcctttaagtaaatacaagagaact

SEQ ID NO: 530710 - DNA, 120 bp, Artificial Sequence
  ENSG00000166263_85 (sequence is synthesized)
gtttcagcatagatttttaaaaatcatgtgtgtaaaagagaatgaaatattaattatgatatttacaaagctctgtacattcagaattgaactctttctgcatctcttttttgaatcaga

SEQ ID NO: 530711 - DNA, 120 bp, Artificial Sequence
  ENSG00000166263_86 (sequence is synthesized)
gttgtcataaaccacaatttttcacggtaacaccctctctgccatcaggataaataacatttcttaaaggaatattctactgcagtctctgagatttttttccctgtcttagacatccat

SEQ ID NO: 530712 - DNA, 120 bp, Artificial Sequence
  ENSG00000166263_87 (sequence is synthesized)
tctacaactctgatgctggcacattttttatcttggcaaaaggacttaatagaaaaattttagataacaatcaggattcatactcttctcaatagtccttaaatggtttattgaccaaaa

SEQ ID NO: 530713 - DNA, 120 bp, Artificial Sequence
  ENSG00000166263_88 (sequence is synthesized)
agtaaagaagtaacagtccagtcatatcatggaaagaacaaccaaattcatgcatgcacaggcaaagacaaccatatcactatgaccacctggctgacagtaactgcaggacatcaatta

SEQ ID NO: 530714 - DNA, 120 bp, Artificial Sequence
  ENSG00000166263_89 (sequence is synthesized)
ttgtaagacacttcctgtaatatgtttaattcctctgacataaggatttatgtgaattaggaagtggcccaagggtgaaaagtaatagggaaatagagaaatagaaccgatccaaaggaa

SEQ ID NO: 530715 - DNA, 120 bp, Artificial Sequence
  ENSG00000166263_90 (sequence is synthesized)
agggggaaaaaaacccacaaaaagtgtgatgtcaagcaaagcctattctggagatgactttggttcactcccacgggagagccctagagacaaaaaggttctacagtaggttcaagtcag

SEQ ID NO: 530716 - DNA, 120 bp, Artificial Sequence
  ENSG00000166263_91 (sequence is synthesized)
aggccagagaacccagagtatttatacctctgcaccatcagttattgaatgggggtgggggtgggggtgggtgtaaatttccaggtgcttccagcctgcaatgcagtcaaagcatgttcc

SEQ ID NO: 530717 - DNA, 120 bp, Artificial Sequence
  ENSG00000166263_92 (sequence is synthesized)
tgtagcctgaggacagccgtccaacaaagaggtgcaggtgctgaatgttgagagtgaaagcacagggagctgtcatgcatgagagtggtagagggatctgaaagtgctagcagtgcctat

SEQ ID NO: 530718 - DNA, 120 bp, Artificial Sequence
  ENSG00000166263_93 (sequence is synthesized)
tatacatccaaatactaaagacgcttagatgtgaaaaatgtgtgtcttagaatcgataaaatatggtatagagaatcaagtctccttgttcctggtttatctcatagcatacttaaaatt

SEQ ID NO: 530719 - DNA, 120 bp, Artificial Sequence
  ENSG00000166263_94 (sequence is synthesized)
cagctaaagatgaaatgccttaacaagtgaaatgggctttctgaaaaattatttcaatcaaaattgtgttaaaagctatttctaaaaaccctaacatgaaatacttagaagagatcaagt

SEQ ID NO: 530720 - DNA, 120 bp, Artificial Sequence
  ENSG00000166263_95 (sequence is synthesized)
ggtttgtccctggacattcaagcaattgaatgtctaaacaatccaagacagataattttgtagtatttactgtgtgaagtgaacctttaaggctgtggacaatgcaaactccctcatgta

SEQ ID NO: 530721 - DNA, 120 bp, Artificial Sequence
  ENSG00000166263_96 (sequence is synthesized)
ccttgctccttgccaatttcaaacaaaccttctcacctatgatataaggcttccttagaattattgattaattatttaagatacaataaaaccaaagtatttttaaaacacagtaattat

SEQ ID NO: 530722 - DNA, 120 bp, Artificial Sequence
  ENSG00000166263_97 (sequence is synthesized)
gttagtgcaggtacatgacatagatatcctcaaatattcttaggacatctataaatcaccacaaacattctggaaagcagtcttggaacatctatcaaaggccttaaaaatttcttcttc

SEQ ID NO: 530723 - DNA, 120 bp, Artificial Sequence
  ENSG00000166263_98 (sequence is synthesized)
tgtgaatttatcctcacaaatgaccccaagtttagaccaaaataaaaaaatgcttaaaaggcttattaaagcatgatttaaaatagaaatgattgcctaaattcctgaaaacaggggaat

SEQ ID NO: 530724 - DNA, 120 bp, Artificial Sequence
  ENSG00000166263_99 (sequence is synthesized)
gtctaaataaaatatggtatctaacatgatagaaaatgtttactaatgtttaatgataccaagaaagtatcacaataataacatcaagtggtaataacaggaaacagatctgtatacaat

SEQ ID NO: 530725 - DNA, 120 bp, Artificial Sequence
  ENSG00000166263_100 (sequence is synthesized)
ataaaaccaacagtattgtatatataaacaccatagaagatctgaaaaaaaattagatgacattatttgtgatatctattttatttattatatttttctgcatactactctacagtgagc

SEQ ID NO: 530726 - DNA, 120 bp, Artificial Sequence
  ENSG00000166263_101 (sequence is synthesized)
gagcctgtcctttataagaaaaaatgctaatgatttattgtgtatgaaaaaagtgtatctgatttgattatatatttttatttccacttatattttctaggattattttgctttagaatt

SEQ ID NO: 530727 - DNA, 120 bp, Artificial Sequence
  ENSG00000166263_102 (sequence is synthesized)
gtataatcctgtgaaaatttgtagtgttgtagggactggaaagatcagagattatgttatggccatgaatgaggcctgacctgcattgtcaataactaaattgattattgtggaaacaac

SEQ ID NO: 530728 - DNA, 120 bp, Artificial Sequence
  ENSG00000166263_103 (sequence is synthesized)
aaaaaaattcattttttgaaatgaaaatctttattgaaataactattttaccattgtgtggtcagattcactgcatttgatgctttttcaggatttgtttttcctgctagaaatgctaga

SEQ ID NO: 530729 - DNA, 120 bp, Artificial Sequence
  ENSG00000166263_104 (sequence is synthesized)
gttgtcacagatgtgatatttatgttttcattgtctggggagggccaagtttcatgacagagaaagactggggccaattctgtgattatggatgtcaacttatctcagagcagtatcatt

SEQ ID NO: 530730 - DNA, 120 bp, Artificial Sequence
  ENSG00000166263_105 (sequence is synthesized)
ggttgagcagtcctgcaggacatctaagtttaccgtctttatcttgccattgtcaaagatcctggacctatttttttctgccttgaaaacttttgtgcagtaaaaccagcaatggatttt

SEQ ID NO: 530731 - DNA, 120 bp, Artificial Sequence
  ENSG00000166263_106 (sequence is synthesized)
agcagagttgatgcatcattaggattttcacattaactctttggacttagagccatgtctaaagtgtccttcttttggatatagtgcctggtgcagaactctaccacaaaacatcaggtg

SEQ ID NO: 530732 - DNA, 120 bp, Artificial Sequence
  ENSG00000166263_107 (sequence is synthesized)
tgcctctgaatagtctttgcaagaagcacaaaatcctagaattgaggtgaatttgtaagttcctctagtccaaccacctttcaaatgaaagaatccttccaaagcacccctggccaatag

SEQ ID NO: 530733 - DNA, 120 bp, Artificial Sequence
  ENSG00000166263_108 (sequence is synthesized)
ctcatcaagattttgcttagatattcttattgagggggaacttactaactcctttaattcttattttgcttaaggctgagtttttaaaacatctaacatcagccaagattattgatttat

SEQ ID NO: 530734 - DNA, 120 bp, Artificial Sequence
  ENSG00000166263_109 (sequence is synthesized)
ctataaggaataatctgtgaattaaccttctgtagcttttccttgctgaccagggaatacctccccattgaagcctaggccagattccagtccgttttgaccataccccatcatggtatt

SEQ ID NO: 530735 - DNA, 120 bp, Artificial Sequence
  ENSG00000166263_110 (sequence is synthesized)
ttagagtacacctgaataagatacatggtgccatgtacatggaaactgactgctctcatgttacgggttgaactgtgtccccccaaaatttgtatgttgaagtcctaaaattggcactgt

SEQ ID NO: 530736 - DNA, 120 bp, Artificial Sequence
  ENSG00000166263_111 (sequence is synthesized)
tgccataagccagggaactacctaggagatgctaggagagaggcctagaatggaaccctccctcccccgcccctggggccttcagagggagcggtgcccagctgacaccttgaccttgga

SEQ ID NO: 530737 - DNA, 120 bp, Artificial Sequence
  ENSG00000166263_112 (sequence is synthesized)
cttctagcctccaaactgtgagacaatacatttctgttgcttaagccactcagttagtgtgctttattttggcagtcttagcaaactaatacatcccccaatccagaactgtcctccttt

SEQ ID NO: 530738 - DNA, 120 bp, Artificial Sequence
  ENSG00000166263_113 (sequence is synthesized)
ggataataaaaacagcaataattatagtgtcattaccctgagtgactggtcccactgttggtcattctttgtagatgtgagttattgccctattgagatcagaagtcctctcacttagag

SEQ ID NO: 530739 - DNA, 120 bp, Artificial Sequence
  ENSG00000166263_114 (sequence is synthesized)
gcatatctaagacttttttcttgtggagggagctcactcaactgtaggtaaggtttgactcatctgggttagtagtaagaacaaacttccaagtggcaccatcttaaaggtgcaagccca

SEQ ID NO: 530740 - DNA, 120 bp, Artificial Sequence
  ENSG00000166263_115 (sequence is synthesized)
tgtgggcgatgaccaggtctggtatattaagaggctcttggtagcacattagaaacacctggagagattttaaaatttacaaagcctagccaaaccccagacccattaaccctgactctc

SEQ ID NO: 530741 - DNA, 120 bp, Artificial Sequence
  ENSG00000166263_116 (sequence is synthesized)
tgagaataggaccctggcacctgtgttttaaggattctaggtgatttcaatgtgtagccaaggttcactgccatagcctgtcctggaatgcaggtaactaaaacttcagcagattatgaa

SEQ ID NO: 530742 - DNA, 120 bp, Artificial Sequence
  ENSG00000166263_117 (sequence is synthesized)
aaacaaaagttactttcttggatgcatatattcttatagcctcaaaactgaaactgcaaactgaacaatgctgcagtcagatacacacacatatttcaactgcataacttcctttaataa

SEQ ID NO: 530743 - DNA, 120 bp, Artificial Sequence
  ENSG00000166263_118 (sequence is synthesized)
tacttttatttttccaaatttgaagactgtccctaagtcatttcttctaaaagttagtaataatcccaccaactcacatttacatagaagttacagtttaaagtttgcatctcgtaataa

SEQ ID NO: 530744 - DNA, 120 bp, Artificial Sequence
  ENSG00000166263_119 (sequence is synthesized)
cttggtgagatagggcaagcattatttctaatttgcatatgagaaaaaactaaggctcggatgagttatgtgacttccctgagtcatgttagagtaactaactcctgatttgtaaactga

SEQ ID NO: 530745 - DNA, 120 bp, Artificial Sequence
  ENSG00000166263_120 (sequence is synthesized)
aggtcccaaatcctgggaactccctcagctctgggcaagccaggacaggtaggtcaccctgcacctacacaaggactgagctgagttctagttacctgctgtgaaggactgtagaggtta

SEQ ID NO: 530746 - DNA, 120 bp, Artificial Sequence
  ENSG00000166263_121 (sequence is synthesized)
tctaagccagctcctccttttactggaaaaggaaaagactgagataagtttccaaaacccctgctggagcaccttctacttctagaaagatgttgaggggcttccagggcacaaaggaaa

SEQ ID NO: 530747 - DNA, 120 bp, Artificial Sequence
  ENSG00000166263_122 (sequence is synthesized)
gagaagtaactgtgtctccttccccaaccatgtatgtgatacattcattctctaggattggaaattcccagaaagctgtgtcagcaatgagatttgtttcattgttttgccttgttttgt

SEQ ID NO: 530748 - DNA, 120 bp, Artificial Sequence
  ENSG00000166263_123 (sequence is synthesized)
cattgagttgttatagttaaagtttattattttttaatgcagaaaaaagtgacttttgggggagtgcagagttctatgaatttttaacacatgtctagttatttgaccacaaccgtaatc

SEQ ID NO: 530749 - DNA, 120 bp, Artificial Sequence
  ENSG00000166263_124 (sequence is synthesized)
aagatacagaacagttttatcatttcaagtgctctcctgctatgcttttataacacacccttccccaccccaactcctggcaattactgctctattctccgtaactgtagttttgccttt

SEQ ID NO: 530750 - DNA, 120 bp, Artificial Sequence
  ENSG00000166263_125 (sequence is synthesized)
tcgagaatatcatataaataatcatgtattatgtaacattctgagacaggcttctttcacccagcataatgcctttgagattcatccagatcgttgtgtgtatcagtagtttgtttttat

SEQ ID NO: 530751 - DNA, 120 bp, Artificial Sequence
  ENSG00000166263_126 (sequence is synthesized)
tactgggttatagttcattgtatggatataccacagtttctttagccattcacccactgaaagtcatttgggttgtttctaggctttggtgattatgaataaagctgctatcaacatcca

SEQ ID NO: 530752 - DNA, 120 bp, Artificial Sequence
  ENSG00000166263_127 (sequence is synthesized)
tttcatgtgcagggctattcttaagggacatcatgttttgctaacgtaatttggaattaatattattttagagaggaaaaaaacacacatatcccaaatatactgtaacatttttcttct

SEQ ID NO: 530753 - DNA, 120 bp, Artificial Sequence
  ENSG00000166263_128 (sequence is synthesized)
ctttttttgtttgtttggttttttgattcttgtttttgttttgtgtttttgagacagggtcgcactctgtcgcccaggctggagtgcaatactgcaatcacgtctcactgcagcctcaac

SEQ ID NO: 530754 - DNA, 120 bp, Artificial Sequence
  ENSG00000166263_129 (sequence is synthesized)
tgggttcaagtgattctcccacctcaacctcccaagtaactgggacaacatgtccatgccaccatgctcaactaatttttttttaaatttttattttgtagagatggtgtctcactattt

SEQ ID NO: 530755 - DNA, 86 bp, Artificial Sequence
  ENSG00000166263_130 (sequence is synthesized)
ttttttttaaatttttattttgtagagatggtgtctcactattttgttcagactggtctcaaacacctgggctcaaatgacccacc

SEQ ID NO: 530756 - DNA, 120 bp, Artificial Sequence
  ENSG00000166263_131 (sequence is synthesized)
tcattctgtttttagaagaatattacatttaaattatatcctaatttttatagaaagctatattttccaaatctttaggaaaagcaacataactacttgatttaccactaattcgtcata

SEQ ID NO: 530757 - DNA, 120 bp, Artificial Sequence
  ENSG00000166263_132 (sequence is synthesized)
aataaggtatagtatattgataattatttaatttttattaaatagaaaatatttacaccaaaaggaaagaaaatttgttttgctaccttagtttttataatctcaacctctagaggaagc

SEQ ID NO: 530758 - DNA, 120 bp, Artificial Sequence
  ENSG00000166263_133 (sequence is synthesized)
ttttataatctcaacctctagaggaagccattgttgcaaatatattatttatcttttcatagatttttctctacacagaaaattatattttttaaaaataggcagggcatgatggctgac

SEQ ID NO: 530759 - DNA, 120 bp, Artificial Sequence
  ENSG00000166263_134 (sequence is synthesized)
acctttaatcgcagtactttgggaggctgaggcaagaggattacttgagctcaggagtttaacatcagcctgggcaacatagcaggaccccatctctactatttaaaacataaaaacaaa

SEQ ID NO: 530760 - DNA, 120 bp, Artificial Sequence
  ENSG00000166263_135 (sequence is synthesized)
aataaataaatatatgtatatgtggggacagggagtatgtgagaaatttctgtactttcccttcaattttgctatgaatccaaaactgcttcaaaaaataataaagccttaaaaaatttt

SEQ ID NO: 530761 - DNA, 120 bp, Artificial Sequence
  ENSG00000166263_136 (sequence is synthesized)
tgaatttatatccactgtgaccatacctcagtgaaaaatacaaaggaattagaagataagactattgccctcaaggagctttaaactaagaaataaataggttcttcttctatgaaaata

SEQ ID NO: 530762 - DNA, 120 bp, Artificial Sequence
  ENSG00000166263_137 (sequence is synthesized)
tgacttgttatctttctactactttgagtttttattaagttggatcagtagaactttaattacattcatttagcctctactaaatgcaaaacaaaacagaaacagcaaacaaaatctaat

SEQ ID NO: 530763 - DNA, 120 bp, Artificial Sequence
  ENSG00000166263_138 (sequence is synthesized)
ttctgaattcgcagttcttgtagcttgagctaatgagttttatcactcattaaaaccagaaaatgtctttttttaggaattagaaagtcttactctcctcttcagtgtaagaaatatata

SEQ ID NO: 530764 - DNA, 120 bp, Artificial Sequence
  ENSG00000166263_139 (sequence is synthesized)
atgagctccctttcactttggttggtaggaagctcagacccaaatttgaaggacaaccccagcagtttaacaaactagttactatatttaaattctcattcttcttggatttcatttgct

SEQ ID NO: 530765 - DNA, 120 bp, Artificial Sequence
  ENSG00000166263_140 (sequence is synthesized)
tgctgtttctgttttactaaagtgattatgtgtcattttttgaaaattgcctccatttgattttggagagatatcagatataaagaatttaataaaattatattaataattaagaattaa

SEQ ID NO: 530766 - DNA, 120 bp, Artificial Sequence
  ENSG00000166263_141 (sequence is synthesized)
aataatgacattttatcttcttgtgagataaaaactggatacaacaaaacagtacagattccaattacttcagaaaacagtactgtgggtttgtctaatacaggctctaaattatcttgg

SEQ ID NO: 530767 - DNA, 120 bp, Artificial Sequence
  ENSG00000166263_142 (sequence is synthesized)
gagatgatgccttgaaagaagtaaatacacttaagtggccagggcagaattagatgaagagccaataaagcaagtcgtggcaattttggatcctgtgagttctttgggaaatacattttt

SEQ ID NO: 530768 - DNA, 120 bp, Artificial Sequence
  ENSG00000166263_143 (sequence is synthesized)
aaatataattcatgttttagagtgtcacttgtaaatctgatgtagtaggattcttttgccattttacatgtgccaaatcatataaactaagaaatagtttgatttttggttctaggacaa

SEQ ID NO: 530769 - DNA, 120 bp, Artificial Sequence
  ENSG00000166263_144 (sequence is synthesized)
tgtcataaatttggtattagctaaagtgctagtcttggggaaaaaatgaggtagtagtaaaatcaggaagctaatcttcaataggcacttaatccataaagagctgacttcccttgggtg

SEQ ID NO: 530770 - DNA, 120 bp, Artificial Sequence
  ENSG00000166265_0 (sequence is synthesized)
gcagtcgttgccacccgcggagatgaaatgtgagcctgggtggccaaggacgccggagtggccgccttccccgcgcctgagcgcagtggggcgagacaaagagacctgggcccccagcgc

SEQ ID NO: 530771 - DNA, 120 bp, Artificial Sequence
  ENSG00000166265_1 (sequence is synthesized)
agcccgtctcgggccacgggcgccccagctccgcggagtcccgcagtcgctggcccgggacgcgcccggcccgggctcccttggaaggctccctaggcaatggccgggtctctgctccac

SEQ ID NO: 530772 - DNA, 120 bp, Artificial Sequence
  ENSG00000166265_2 (sequence is synthesized)
ccggctctcaggagcgctgctctctccatctgatcgccctccatcctccccattccctccggttccgggctctcccttcgctccaagcctcaggccaccggcttggatggacgctccgag

SEQ ID NO: 530773 - DNA, 120 bp, Artificial Sequence
  ENSG00000166265_3 (sequence is synthesized)
gctacccgtgcgtccaggggtcttgcttccgaagttggtcctgctctttgtctacgcagatgattgccttgctcagtgtggcaaagattgcaaatcttactgctgtgatggaaccacgcc

SEQ ID NO: 530774 - DNA, 120 bp, Artificial Sequence
  ENSG00000166265_4 (sequence is synthesized)
ctactgttgctcctactacgcttatattgggaatatcctctcgggcactgcaattgcgggcattgtttttggaatagtatttatcatgggggtcattgctgggattgccatatgcatctg

SEQ ID NO: 530775 - DNA, 120 bp, Artificial Sequence
  ENSG00000166265_5 (sequence is synthesized)
catgtgcatgaagaaccacagggcgacccgcgtgggcatcctcaggacgactcacatcaacaccgtctcctcctatcctgcaggaccaccaccctacggtcacgaccacgagatggaata

SEQ ID NO: 530776 - DNA, 120 bp, Artificial Sequence
  ENSG00000166265_6 (sequence is synthesized)
ctgtgcagacttgcctcctccatactcccccaccccacagggtccagcacagcgttctccaccccctccttatcctggaaacgcaaggaaataatctatctcccagaacagaacatgtgc

SEQ ID NO: 530777 - DNA, 120 bp, Artificial Sequence
  ENSG00000166265_7 (sequence is synthesized)
caatgggcgatcttgcctggaataaaatgcctctactcagaaacaggcaggaaagaattgctccaaggaatactttttggggtcagataatgtgtcaggtggaatatccctgctaggaga

SEQ ID NO: 530778 - DNA, 120 bp, Artificial Sequence
  ENSG00000166265_8 (sequence is synthesized)
tataggatttctactctgctcaaagctgaccccatctggagtattaatgtttggttctatggaaccacattttaagagatctgctgatccacctaagcacattcagggaagagtaatgta

SEQ ID NO: 530779 - DNA, 120 bp, Artificial Sequence
  ENSG00000166265_9 (sequence is synthesized)
attgacaaaatatctgataatcatgttgtttaagggctaggtgaagaaagtttcagtattgatcctggaaaaaaagaagatctaagtaggatgggagaatgatttggcccacacaaggaa

SEQ ID NO: 530780 - DNA, 120 bp, Artificial Sequence
  ENSG00000166265_10 (sequence is synthesized)
gcaactttattctatatagctttaaaagtcagaactagaattgttcattctttcattcatcaataaatgtattttgagtgcctaagagtttactatgtgcctagcactgtttgaggtcct

SEQ ID NO: 530781 - DNA, 120 bp, Artificial Sequence
  ENSG00000166265_11 (sequence is synthesized)
gatggaagttacaggacgggtactctggttttagtacaagaaagagcaatgactagattgctttgtgaagctcttggtagagacacgctccagaagggataacaaaatcaaatagtagat

SEQ ID NO: 530782 - DNA, 120 bp, Artificial Sequence
  ENSG00000166265_12 (sequence is synthesized)
atttatttaattagggagttaaaacaagaccaaaaagactcaacagccgcttgaagccaagaactcttcaatgccagctactgccacctaaaaatcatctggctttatagtggatcagaa

SEQ ID NO: 530783 - DNA, 120 bp, Artificial Sequence
  ENSG00000166265_13 (sequence is synthesized)
taaaggttattctaactgtggggagaaaaaaaaaattgtatcaagttccacaggtagcagacacttcacttccaagtaaaagatgagaaatcaattattcccacaggattttaggtcagg

SEQ ID NO: 530784 - DNA, 120 bp, Artificial Sequence
  ENSG00000166265_14 (sequence is synthesized)
gagcaaaaatctcagaacttgaccatgaagatacacaacagactcgcaaaaataaagtgggaaatgaagttcagattcccttctgtagatttccttaaaactattatttttttcttcttc

SEQ ID NO: 530785 - DNA, 120 bp, Artificial Sequence
  ENSG00000166265_15 (sequence is synthesized)
gtaaaattttgataatctgttctcttaaaaaagttaatgacacaattaagatactgacatcaaattgttgccttttaccaaaatgcaaattttatgaagtgcctacctttatatgtataa

SEQ ID NO: 530786 - DNA, 120 bp, Artificial Sequence
  ENSG00000166265_16 (sequence is synthesized)
agcatttaataaataattctaatgtgccatattttgctgtgagtgaccttaacatttatatttttatatgaattgtttcatgtatttataaaaattgtatattgaacattggaaatagat

SEQ ID NO: 530787 - DNA, 120 bp, Artificial Sequence
  ENSG00000166265_17 (sequence is synthesized)
gattagatttttgtgtcattttacaattaaatctaaaatgcttaatccaatatcatcatcaaaattcagtgaaatcccaaaacagtgccaagaattttgctgaatgaaacaatcaaacaa

SEQ ID NO: 530788 - DNA, 120 bp, Artificial Sequence
  ENSG00000166265_18 (sequence is synthesized)
agcattttaaggtgtaagttatagtacctgtacttgcagataagaagcttactatatcattattataagtagcatatattactttcaaatacctatattagaaagatattgatctgactg

SEQ ID NO: 530789 - DNA, 120 bp, Artificial Sequence
  ENSG00000166265_19 (sequence is synthesized)
aaatataacctacctgccagtaaggtccaaaggctgaatttgttttgaatgagttccttgatctttaagcactgatgattttcttatatatgaggatgcaaagcattcaagagtttcagc

SEQ ID NO: 530790 - DNA, 120 bp, Artificial Sequence
  ENSG00000166265_20 (sequence is synthesized)
ctgttctggtgaggggctccctgacttacataaagttttcagtgcaattttaatagtacatatgctttaatttatttttcttctgcgtgtggtcagacccaattacactgtggctaagac

SEQ ID NO: 530791 - DNA, 120 bp, Artificial Sequence
  ENSG00000166265_21 (sequence is synthesized)
tctcaaagtgccagggtttctgtgatgattctgagaatgctgaatacaaatataccttatattctttaaggaaaacggaaaggaaagatcagcagaaatagggttttctcatcttcacca

SEQ ID NO: 530792 - DNA, 120 bp, Artificial Sequence
  ENSG00000166265_22 (sequence is synthesized)
tcaataaacatttattgcgtacctcctatattctgcaaattttccccaaatagaagccagttcagtccacaccatctcttctttgagttgtttatggcctcccttaaggcattttacaaa

SEQ ID NO: 530793 - DNA, 120 bp, Artificial Sequence
  ENSG00000166265_23 (sequence is synthesized)
cccataagcctacaatagatgagtatttttactatttgtattaagtgtcataatagcatcaatgtgcacattaccagtatagactgttggagttcactgattgttttcatagatgatgct

SEQ ID NO: 530794 - DNA, 120 bp, Artificial Sequence
  ENSG00000166265_24 (sequence is synthesized)
tcttggggaaaaatagtataggatgtgaaagttttgaattacggttatttaaaaactaacatttgctatggccaaagtgtttacaataagcaataaagtgaaagaacctattataacaca

SEQ ID NO: 530795 - DNA, 120 bp, Artificial Sequence
  ENSG00000166265_25 (sequence is synthesized)
actctattccaagcatgtaagaccaggcctggtacataatgggcactcagctgaatgaatgatgaacacaactcatgaaaagacctgaattaatcatatatcaataccctagggaattga

SEQ ID NO: 530796 - DNA, 120 bp, Artificial Sequence
  ENSG00000166266_0 (sequence is synthesized)
gcgcgtccccgccctcgcgtcacgtgacgtggccgcggaacctgagctgcggggcctaagccgagctaaattcgttgcaggtggccgcggcgggtgcaaccacaaaggctaatccgaagg

SEQ ID NO: 530797 - DNA, 120 bp, Artificial Sequence
  ENSG00000166266_1 (sequence is synthesized)
agtcggggaggctcgtggagtcgatgcttcctcttccaagtcaggtcggctcccgttaccttctcagcattcgccgttccggtcttcctgagcgcgtgcatgaggtctttcgcgtgggga

SEQ ID NO: 530798 - DNA, 120 bp, Artificial Sequence
  ENSG00000166266_2 (sequence is synthesized)
agctccggtgaccatgtaggggagaagagtgaggaagctcctggtgcttgggacgaggtcagcgctgtcggcgcgctgctccagcgcccaccacaccctggtgcgggccgacgggccctg

SEQ ID NO: 530799 - DNA, 120 bp, Artificial Sequence
  ENSG00000166266_3 (sequence is synthesized)
ggccctggtgggagctccggcctccggtcaaggcctggccgggagcgccacgaattctcgcgtcgtctcgcgagagtccaagttaaagaacatggcgacgtctaatctgttaaagaataa

SEQ ID NO: 530800 - DNA, 120 bp, Artificial Sequence
  ENSG00000166266_4 (sequence is synthesized)
aggttctcttcagtttgaagacaaatgggattttatgcgcccgattgttttgaagcttttacgccaggaatctgttacaaaacagcagtggtttgatctgttttcggatgtgcatgcagt

SEQ ID NO: 530801 - DNA, 120 bp, Artificial Sequence
  ENSG00000166266_5 (sequence is synthesized)
ctgtctttgggatgataaaggcccagcaaaaattcatcaggctttaaaagaagatattcttgagtttattaagcaagcacaggcacgagtactgagccatcaagatgatacggctttgct

SEQ ID NO: 530802 - DNA, 120 bp, Artificial Sequence
  ENSG00000166266_6 (sequence is synthesized)
aaaagcatatattgttgaatggcgaaagttctttacacaatgtgatattttaccaaaacctttttgtcaactagagattactttaatgggtaaacagggcagcaataaaaaatcaaatgt

SEQ ID NO: 530803 - DNA, 120 bp, Artificial Sequence
  ENSG00000166266_7 (sequence is synthesized)
ggaagacagtattgttcgaaagcttatgcttgatacatggaatgagtcaatcttttcaaacataaaaaacagactccaagatagtgcaatgaagctggtacatgctgagagattgggaga

SEQ ID NO: 530804 - DNA, 120 bp, Artificial Sequence
  ENSG00000166266_8 (sequence is synthesized)
agcttttgattctcagctggttattggagtaagagaatcctatgttaacctttgttctaatcctgaggataaacttcaaatttatagggacaattttgagaaggcatacttggattcaac

SEQ ID NO: 530805 - DNA, 120 bp, Artificial Sequence
  ENSG00000166266_9 (sequence is synthesized)
agagagattttatagaacacaagcaccctcgtatttacaacaaaatggtgtacagaattatatgaaatatgcagatgctaaattaaaagaagaagaaaaacgagcactacgttatttaga

SEQ ID NO: 530806 - DNA, 120 bp, Artificial Sequence
  ENSG00000166266_10 (sequence is synthesized)
aacaagacgagaatgtaactccgttgaagcactcatggaatgctgtgtaaatgccctggtgacatcatttaaagagactatcttagctgagtgccaaggcatgatcaagagaaatgaaac

SEQ ID NO: 530807 - DNA, 120 bp, Artificial Sequence
  ENSG00000166266_11 (sequence is synthesized)
tgaaaaattacatttaatgttttcattgatggacaaagttcctaatggtatagagccaatgttgaaagacttggaggaacatatcattagtgctggcctggcagatatggtagcagctgc

SEQ ID NO: 530808 - DNA, 120 bp, Artificial Sequence
  ENSG00000166266_12 (sequence is synthesized)
tgaaactattactactgactctgagaaatacgttgagcagttacttacactatttaatagatttagtaaactcgtcaaagaagcttttcaagatgatccacgatttcttactgcaagaga

SEQ ID NO: 530809 - DNA, 120 bp, Artificial Sequence
  ENSG00000166266_13 (sequence is synthesized)
taaggcgtataaagcagttgttaatgatgctaccatatttaaacttgaattacctttgaagcagaagggggtgggattaaaaactcagcctgaatcaaaatgccctgagctgcttgccaa

SEQ ID NO: 530810 - DNA, 120 bp, Artificial Sequence
  ENSG00000166266_14 (sequence is synthesized)
ttactgtgacatgttgctaagaaaaacaccattaagcaaaaaactaacctctgaagagattgaagcaaagcttaaagaagtgctcttggtacttaagtatgtacagaacaaagatgtttt

SEQ ID NO: 530811 - DNA, 120 bp, Artificial Sequence
  ENSG00000166266_15 (sequence is synthesized)
tatgaggtatcataaagctcatttgacacgacgtcttatattagacatctctgccgatagtgaaattgaagaaaacatggtagagtggctaagagaagttggtatgccagcggattatgt

SEQ ID NO: 530812 - DNA, 120 bp, Artificial Sequence
  ENSG00000166266_16 (sequence is synthesized)
aaacaagcttgctagaatgtttcaggacataaaagtatctgaagatttgaaccaagcttttaaggaaatgcacaaaaataataaattggcattaccagctgattcagttaatataaaaat

SEQ ID NO: 530813 - DNA, 120 bp, Artificial Sequence
  ENSG00000166266_17 (sequence is synthesized)
tctgaatgctggcgcctggtcaagaagttctgagaaagtctttgtctcacttcctactgaactggaggacttgataccggaagtagaagaattctacaaaaaaaatcatagtggtagaaa

SEQ ID NO: 530814 - DNA, 120 bp, Artificial Sequence
  ENSG00000166266_18 (sequence is synthesized)
attacattggcatcatctcatgtcaaatggaattataacatttaagaatgaagttggtcaatatgatttggaggtaaccacgtttcagctcgctgtattgtttgcatggaaccaaagacc

SEQ ID NO: 530815 - DNA, 120 bp, Artificial Sequence
  ENSG00000166266_19 (sequence is synthesized)
cagagagaaaatcagctttgaaaatcttaagcttgcaactgaactccctgatgctgaacttaggaggactttatggtctttagtagctttcccaaaactcaaacggcaagttttgttgta

SEQ ID NO: 530816 - DNA, 120 bp, Artificial Sequence
  ENSG00000166266_20 (sequence is synthesized)
tgaacctcaagtcaactcacccaaagactttacagaaggtaccctcttctcagtgaaccaggagttcagtttaataaaaaatgcaaaggttcagaaaaggggtaaaatcaacttgattgg

SEQ ID NO: 530817 - DNA, 120 bp, Artificial Sequence
  ENSG00000166266_21 (sequence is synthesized)
acgtttgcagctcactacagaaaggatgagagaagaagagaatgaaggaatagttcaactacgaatactaagaacccaggaagctatcatacaaataatgaaaatgagaaagaaaattag

SEQ ID NO: 530818 - DNA, 120 bp, Artificial Sequence
  ENSG00000166266_22 (sequence is synthesized)
taatgctcagctgcagactgaattagtagaaattttgaaaaacatgttcttgccacaaaagaaaatgataaaagagcaaatagagtggctaatagagcacaaatacatcagaagagatga

SEQ ID NO: 530819 - DNA, 120 bp, Artificial Sequence
  ENSG00000166266_23 (sequence is synthesized)
atctgatatcaacactttcatatatatggcataattttgaatatcatggacaatatttagaacccaaattttggagtgcttgggcagaaagttgtaaagtttgtgctggagaaaggttta

SEQ ID NO: 530820 - DNA, 120 bp, Artificial Sequence
  ENSG00000166266_24 (sequence is synthesized)
tttggactttgattacataaatattaaaatctctgccttaccttacaaaaacaactatattttgccaatcacattagttagcatgatggcattcccttcatgttgcacactctttgacag

SEQ ID NO: 530821 - DNA, 120 bp, Artificial Sequence
  ENSG00000166266_25 (sequence is synthesized)
ttaaaagtgaatttgatttgtacccaccaggagaaatacagttgggaagggtgagggtggggttcttgttgcttttttctcttttttcctctcttaaaaaatgtacttgcacaaggaagg

SEQ ID NO: 530822 - DNA, 120 bp, Artificial Sequence
  ENSG00000166266_26 (sequence is synthesized)
atcttcagatattcatgcactgaaaaatgctgttatcttttgtttttaaaaaatgcaattaaaactagaaatagcactcttggtttcttttgatgaaaagagtgagctggtcaatgcaac

SEQ ID NO: 530823 - DNA, 120 bp, Artificial Sequence
  ENSG00000166266_27 (sequence is synthesized)
attgggaaacggcagatgtaggtgagaagttaagtatttaatagtatcaaattgttcaaacattgctcagtataataactggattttaatggtgacctaaaaatggtattaaatattttc

SEQ ID NO: 530824 - DNA, 120 bp, Artificial Sequence
  ENSG00000166266_28 (sequence is synthesized)
aactttcaaatgttggttttctttaagcaggagactgctattttagttgttgttaaatgatgaggagtttttttttttttaaatatggctggaaagcttgttttgaaaaatgaagcttat

SEQ ID NO: 530825 - DNA, 120 bp, Artificial Sequence
  ENSG00000166266_29 (sequence is synthesized)
attaattgttgcttcaatagtttaaaaaatttatggagataggtaggtcattatgattgcagagccaaaatagcaaaacaaacatattaagtgtgtttactaaacatattgtgtgtttac

SEQ ID NO: 530826 - DNA, 120 bp, Artificial Sequence
  ENSG00000166266_30 (sequence is synthesized)
taacacacttaatgtttatatacctaatatttattatgccatatctgaatttattaaaaacaacacagaaatctcctgctctgatatagttatgtaactgatctcttaatctgtagcata

SEQ ID NO: 530827 - DNA, 120 bp, Artificial Sequence
  ENSG00000166266_31 (sequence is synthesized)
gaagtattttggtattttaaggtctcatgattagggatttgtagcctcaggtttgaatcagtcacctaggggtaagagaaaaaccacaacataagacctgaaaaacagaagcaaaattgt

SEQ ID NO: 530828 - DNA, 120 bp, Artificial Sequence
  ENSG00000166266_32 (sequence is synthesized)
tgcactcttaatacgagcagtaaacttgccaaatatatgtacatatatatttatatattttaaaaataaacattttttaaatcgtcagaaggcaacatttaccatgttcctttcagtcta

SEQ ID NO: 530829 - DNA, 120 bp, Artificial Sequence
  ENSG00000166266_33 (sequence is synthesized)
tccaaagtagcaacttaactagttgctggcaactgaatacccagagtagtggaaattttaggacttgaggacgtgaacaacttgaaagagaaaattgattccccttgaggaaagaatggc

SEQ ID NO: 530830 - DNA, 120 bp, Artificial Sequence
  ENSG00000166266_34 (sequence is synthesized)
tcaacgtggatttttattcattgtggtgcacgtttcaaattttcttgcaaattattttatatcttatttgatgttaagtaatatttttaaagtatggtttttgaagatagtaggaaatgg

SEQ ID NO: 530831 - DNA, 120 bp, Artificial Sequence
  ENSG00000166266_35 (sequence is synthesized)
agtacagaaaggcatacagtattatgttacagtggagtgctttcaagagcatttcgtaggatctgtccccatccgaagaggctttgtgaactgcctgctgaatggaaggaaagcaacttt

SEQ ID NO: 530832 - DNA, 120 bp, Artificial Sequence
  ENSG00000166266_36 (sequence is synthesized)
aaaacatttagagttttgctgagtatagccaaatgcctgttctgaaacttataggaaattggaattttgtttaaaattttacactttaaggtagcaaatgtcaattattagaccgagcat

SEQ ID NO: 530833 - DNA, 120 bp, Artificial Sequence
  ENSG00000166266_37 (sequence is synthesized)
attgtgaagaattaaactaaaattaatacgtacagttttctctaattaggtgactgttcataatgggtatatttggaatttagaagaaataattttgtagtaattgtggcccttatgttt

SEQ ID NO: 530834 - DNA, 120 bp, Artificial Sequence
  ENSG00000166266_38 (sequence is synthesized)
aacagataattcagcattggcgtatttgcttgtcccaatacaagaatgccaaaggaggaaacaggaaaaattgccgtccattttaaaaatttaggtttgttgttttaaaccataattgtt

SEQ ID NO: 530835 - DNA, 120 bp, Artificial Sequence
  ENSG00000166266_39 (sequence is synthesized)
ctcagaacttttttggaacttctaattttgggtcatttaatttaagaatgagagtcatgatgttttgatttatgaaggtgaatttaatgcaaaagtgggtaacactacattcatagcaaa

SEQ ID NO: 530836 - DNA, 120 bp, Artificial Sequence
  ENSG00000166266_40 (sequence is synthesized)
gttttttattaaattttataaatttttaatagccaattatgtcctaattgtattttggggaatgaacagcagcaaatactgtaaatgtacagttttcttttttttttttttttggttatg

SEQ ID NO: 530837 - DNA, 120 bp, Artificial Sequence
  ENSG00000166266_41 (sequence is synthesized)
tatacaaaagttttaactactttttggtgtttatgaaaatcatttagttgacaaggtgcctatgccattgttaaattttctttaagtaatttaacaacagatttgctaatttaaaaaaaa

SEQ ID NO: 530838 - DNA, 120 bp, Artificial Sequence
  ENSG00000166266_42 (sequence is synthesized)
atgaaaaaaaaaatcttaccagcagtttgtaaaggtctggaatcacagttggcatcctttattcaggtctcttctctccagcgtacacttaaaattggtgccgagcagggatataacctg

SEQ ID NO: 530839 - DNA, 120 bp, Artificial Sequence
  ENSG00000166266_43 (sequence is synthesized)
cagttaagtgaaaagaaaatccagcctccccctccaaaaaaaaaaaaaaaatttaatttttaaaaattagtggtatggcaataagacacttcagaggctatcttaacctctgaataccca

SEQ ID NO: 530840 - DNA, 120 bp, Artificial Sequence
  ENSG00000166266_44 (sequence is synthesized)
tcttctagtttaaagacagagacatcccatctggaaaatgttaacttgtgttgccatctcgttgccggagtaagtagacataagacagagtttaagaagtaaaaatatagaaaaattttg

SEQ ID NO: 530841 - DNA, 120 bp, Artificial Sequence
  ENSG00000166266_45 (sequence is synthesized)
atggtcacaatgagataaatattagaatattactattccaatgattaaatgaggatcttgaaataaattctgaagtcttccaatttttacatttattggaggggtccctgagttctgtca

SEQ ID NO: 530842 - DNA, 120 bp, Artificial Sequence
  ENSG00000166266_46 (sequence is synthesized)
acttttttatttaagtctcttgctcttattttgtgcataaatgttaaaccttccaaaaatgaaatgttagctttctttcttttactttttattaaatttaatagaaaatatgacctgagt

SEQ ID NO: 530843 - DNA, 120 bp, Artificial Sequence
  ENSG00000166266_47 (sequence is synthesized)
agttaaaaagtattttgcattatttgcagtaagatgtctctagcactgctcaaagggcaaattttaaaacttcagtctgggtgaaagatttgctagttttacagaaagatttgctatctt

SEQ ID NO: 530844 - DNA, 120 bp, Artificial Sequence
  ENSG00000166266_48 (sequence is synthesized)
aaactcaagctggtttttctgttctcatgtaagtgactgggatgctgtcttatgaattcttccaaggtcatgtttgtgaaataaacattacatgagagctttcctgtcatctacactata

SEQ ID NO: 530845 - DNA, 120 bp, Artificial Sequence
  ENSG00000166266_49 (sequence is synthesized)
tgttgtctggagtgttgaacaaatttattttagtttctaagttgtaatctatcctcatatggtctatacgattttgaatgtgtgccactacatactgagatgataatgctgtacaatttt

SEQ ID NO: 530846 - DNA, 120 bp, Artificial Sequence
  ENSG00000166266_50 (sequence is synthesized)
aagtggtagcagtttctgtatgcagtaggctgaaatattttgatgaactgcttaatttttggattttattttttaagttgtataatttattttcttgcaaaataaaaatgtaatataaaa

SEQ ID NO: 530847 - DNA, 120 bp, Artificial Sequence
  ENSG00000166266_51 (sequence is synthesized)
gttctacatgcttattttagacttgttttaaaactactcagataatatcatattttattattttgaaagtagaacttcttgaagtaatttcaaaatattgcattgacttttgacacattt

SEQ ID NO: 530848 - DNA, 120 bp, Artificial Sequence
  ENSG00000166266_52 (sequence is synthesized)
gactctgagaaatacgttgagcagttacttacactatttaatagatttagtaaactcgtcaaagaagcttttcaagatgatccacgatttcttactgcaagagataagacccagctcaaa

SEQ ID NO: 530849 - DNA, 120 bp, Artificial Sequence
  ENSG00000166266_53 (sequence is synthesized)
agcttccttgatgtcctgcctccctccacagctcatcaccagcagagttgattcctccatcctccgtcctttcatgggactccttcgggagttatgttatacttatccttgtttcccagg

SEQ ID NO: 530850 - DNA, 120 bp, Artificial Sequence
  ENSG00000166266_54 (sequence is synthesized)
gaagcatttgtattgcataccatctttttccatcctcactagtataggataatgataataaaacaccatactgtccttagcattgtatcttttttagtgtaataaacctataacaagaaa

SEQ ID NO: 530851 - DNA, 120 bp, Artificial Sequence
  ENSG00000166266_55 (sequence is synthesized)
ggatgtgcatgcagtctgtctttgggatgataaaggcccagcaaaaattcatcaggctttaaaagaagatattcttgagtttattaagcaagcacaggcacttatgcttgatacatggaa

SEQ ID NO: 530852 - DNA, 120 bp, Artificial Sequence
  ENSG00000166268_0 (sequence is synthesized)
agagtagaaacagttccttatattaagacagatgaatttgctacctcttccctcttcatgaattttttttaaatgtatggttgtatatccttccagttttataatcacatttgaaaactc

SEQ ID NO: 530853 - DNA, 120 bp, Artificial Sequence
  ENSG00000166268_1 (sequence is synthesized)
aaccatctttctgggcacaatttgatggctgaagatatgcttcactccaataaaaagaaaatgaagatttttcaagagcattcgtaggcttcgaatcaaaaggacagtacttatttcctg

SEQ ID NO: 530854 - DNA, 120 bp, Artificial Sequence
  ENSG00000166268_2 (sequence is synthesized)
aggtctgataaccgttgttttatgaggaaatagtactaggatcacagtaccatggatgtggtaggcgaaaatgaggccctgcagcagttctttgaagctcagggagccaatggtactctg

SEQ ID NO: 530855 - DNA, 120 bp, Artificial Sequence
  ENSG00000166268_3 (sequence is synthesized)
gagaacccagccctggacacaagtctgttggaggaatttctgggcaatgactttgatttgggggccttgcaacgccagctcccagacaccccgccctattctgcatccgactcatgctct

SEQ ID NO: 530856 - DNA, 120 bp, Artificial Sequence
  ENSG00000166268_4 (sequence is synthesized)
cctccgcaggtcaaaggtgcatgctacccaaccctgaggcccacagctgggaggactccagctccttttctccaccccacagctgctcctgcgatgccgcccatgcacccgctgcagagc

SEQ ID NO: 530857 - DNA, 120 bp, Artificial Sequence
  ENSG00000166268_5 (sequence is synthesized)
acctctggaatgggcgactcctgccaaatccacggaggctttcacagctgccactcaaacgccagtcatcttgccacccccctggaccaatccgtgtcctcccatctggggataggttgt

SEQ ID NO: 530858 - DNA, 120 bp, Artificial Sequence
  ENSG00000166268_6 (sequence is synthesized)
tcttaccctcagcagcctctgtgtcacagccctggagcctcattgcctccaaccaagaagagaaagtgcacgcaggcactggaggactccggggaatgccgagtgtgggcctgccactgc

SEQ ID NO: 530859 - DNA, 120 bp, Artificial Sequence
  ENSG00000166268_7 (sequence is synthesized)
agaccgatgacaagtaggagtcgcagcagtgaagtccaggaccctgacagtgagggacagaacagaatgcctacagaccagtgctctcctgctctgaagtggcaaccatgccatagtgtt

SEQ ID NO: 530860 - DNA, 120 bp, Artificial Sequence
  ENSG00000166268_8 (sequence is synthesized)
ccttggcacagcttattaaacagtcattatgaaaaactacctgatgtgggctatcgagttgtaacagacaaaggatttaatttttcaccagcagatgaagcttttgtttgccaaaagaag

SEQ ID NO: 530861 - DNA, 120 bp, Artificial Sequence
  ENSG00000166268_9 (sequence is synthesized)
aatcatttccagataaccattcacatccaagtttggggaagtccaaaatttgttgaaaccgagatgggcctaaagccaatagaaatgttttacttgaaagtttttggcactaaggtggaa

SEQ ID NO: 530862 - DNA, 120 bp, Artificial Sequence
  ENSG00000166268_10 (sequence is synthesized)
gctaccaatcaaataattgctattgaacagtcccaagcagataggagcaaaaagattttcaatcctgttaaaattgacctactggctgaccaggtcaccaaagtaacactgggacgatta

SEQ ID NO: 530863 - DNA, 120 bp, Artificial Sequence
  ENSG00000166268_11 (sequence is synthesized)
cacttcagcgaaaccacagcaaataatatgagaaaaaagggaaaaccaaatccagaccagagatacttcatgttggtggttggactgtatgctgctaaccaagaccagttctatctgttg

SEQ ID NO: 530864 - DNA, 120 bp, Artificial Sequence
  ENSG00000166268_12 (sequence is synthesized)
tctgcccacatctctgaaaggatcattgtaagggcctctaaccctgggcagtttgaaaatgacagtgatgcattgtggcagcgaggacaagttccagaatctattgtctgtcacggtcga

SEQ ID NO: 530865 - DNA, 120 bp, Artificial Sequence
  ENSG00000166268_13 (sequence is synthesized)
gtaggaatcaacacagatgcgccggacgaagccctggttgtctgtggcaacatgaaagtgatggggaccatcatgcatccctctgacagccgggcaaagcagaatatccaggaggttgac

SEQ ID NO: 530866 - DNA, 120 bp, Artificial Sequence
  ENSG00000166268_14 (sequence is synthesized)
tgcccaggaggtgcaagaaatcctgcccagagcagtaagagaggttggtgatgtcacctgcggaaacggagagaccttggagaacttcctcatggtggataaggaccagatctttatgga

SEQ ID NO: 530867 - DNA, 120 bp, Artificial Sequence
  ENSG00000166268_15 (sequence is synthesized)
aaatgtaggtgcagtgaagcaactgtgcaaactaactaacaaccttgaggaaagaatagaagagttagaaatatggaacagaaagctggcccggctaaagcggctcagtagttggaagtc

SEQ ID NO: 530868 - DNA, 120 bp, Artificial Sequence
  ENSG00000166268_16 (sequence is synthesized)
atcagccagtgaagcaagcacaatcagcaaatctagcagagccgttagtgcatcttctccaagaagggccgttcataaaaaaaacaacaaggtttatttttcaggaaaaagacaggcgtg

SEQ ID NO: 530869 - DNA, 120 bp, Artificial Sequence
  ENSG00000166268_17 (sequence is synthesized)
tcctaattgggttttccagaccttggttataactctgattgctgtgatggcattttgtgctttgacgatagttgccctctatatacttagcttaaaagatcaagaccgacgtgtcccaaa

SEQ ID NO: 530870 - DNA, 120 bp, Artificial Sequence
  ENSG00000166268_18 (sequence is synthesized)
tctccctccaagcaatatcacaagctcacaggagccagctctgctgcccacagcctcctcctcagcacctaatacatccctggtaaccacaccggcctccttacaagtacctgaaattac

SEQ ID NO: 530871 - DNA, 120 bp, Artificial Sequence
  ENSG00000166268_19 (sequence is synthesized)
tttctgtgaaatcctgccgtgtcaggagacttattgctgccccatccggggaatgaaagaagtctcttcaagtcctgtgcaaagacaatctgaggagaaggaattccatcagaggcgatg

SEQ ID NO: 530872 - DNA, 120 bp, Artificial Sequence
  ENSG00000166268_20 (sequence is synthesized)
gtcagaagacaaaagcaaatcagttttggcaagaaatgcactcagcggccctgactgggagagtgactggattgatacaaccatcagttctattcagattatggaaatccagcaaataat

SEQ ID NO: 530873 - DNA, 120 bp, Artificial Sequence
  ENSG00000166268_21 (sequence is synthesized)
agatcatcagtattgcattcaaagcctccagtgcggatctggaaattataattacaatattcctgttaataaacacacacccaccaatgtcaagttctctctggaaataaacacaacaga

SEQ ID NO: 530874 - DNA, 120 bp, Artificial Sequence
  ENSG00000166268_22 (sequence is synthesized)
gccattgatagtcttccagtgcaaattcacccttggaaatatatgtttccatagtaaaaggggaaccaaagggctggaaagccacagagaaatctcccaggagatgacacagggatatca

SEQ ID NO: 530875 - DNA, 120 bp, Artificial Sequence
  ENSG00000166268_23 (sequence is synthesized)
gcacatttggagcctccctgtagccccattttctgacagcatgttccatttccgtgtagctgcaccggatttagctgactgttcaactgatccttattttgctgggatattcttcaccga

SEQ ID NO: 530876 - DNA, 120 bp, Artificial Sequence
  ENSG00000166268_24 (sequence is synthesized)
ttacttcttttacttctatcgacgctgtgcctaatttgttcaagtttggggactttaccaaagaaaaatactcaggaatacatttaacagaaacgaacatcctcttgcaacttctttttt

SEQ ID NO: 530877 - DNA, 120 bp, Artificial Sequence
  ENSG00000166268_25 (sequence is synthesized)
cttctttgtaaaacatttacgtttattgctgaaggactttttcaggctttagcttccaacagttttgagacattaatgaggagaataaaatgtttgctgaaacttgaaataatgtgatgt

SEQ ID NO: 530878 - DNA, 120 bp, Artificial Sequence
  ENSG00000166268_26 (sequence is synthesized)
ttgattttgccatgactatgaagaaaacatttcctggagcaaacagttctgttgaatttaaaaatactattatttctggtattaaggaagttgtgagctcaaaataaggagatctagcct

SEQ ID NO: 530879 - DNA, 120 bp, Artificial Sequence
  ENSG00000166268_27 (sequence is synthesized)
ctattttgttttaatgtattttaaagcttttgaaaaaaccaaaagggccatgtcgacttcggcccactaaacatagactcttgagaatgtgtgatatggtatgtggaggagatgtggggg

SEQ ID NO: 530880 - DNA, 120 bp, Artificial Sequence
  ENSG00000166268_28 (sequence is synthesized)
gtggtatctgatactgagctcacatttaggcaaattgtcctatgtgtgtgtgtattgtataaacacatacactagagtacagaatgtagtttgttaatcaaatggatttaagagaaataa

SEQ ID NO: 530881 - DNA, 120 bp, Artificial Sequence
  ENSG00000166272_0 (sequence is synthesized)
tttactttgtctgctttgctaaagaaggccggtgaaccaggaccaccgcacacacaggcccaccaggggcaatgctcattccaagaccttaacttttaagagccctttgttccaacgtta

SEQ ID NO: 530882 - DNA, 85 bp, Artificial Sequence
  ENSG00000166272_1 (sequence is synthesized)
ccaagaccttaacttttaagagccctttgttccaacgttagtgtggacgatgctcttgcaggatgcctttccttttgggtcttag

SEQ ID NO: 530883 - DNA, 120 bp, Artificial Sequence
  ENSG00000166272_2 (sequence is synthesized)
tcagtgctgcaactactactatgaactctggtggttctggctggtgtggaccatcatcatcatcctgagctgctgctgtgtttgccaccaccgccgagccaagcaccgccttcaggccca

SEQ ID NO: 530884 - DNA, 120 bp, Artificial Sequence
  ENSG00000166272_3 (sequence is synthesized)
gcagcggcaacatgaaatcaacctgatcgcttaccgagaagcccacaattactcagcgctgccattttatttcaggtttttgccaaactatttactacctccttatgaggaagtggtgaa

SEQ ID NO: 530885 - DNA, 120 bp, Artificial Sequence
  ENSG00000166272_4 (sequence is synthesized)
ccgacctccaactcctcccccaccatacagtgccttccagctacagcagcagcagctgctgcctccacagtgtggccctgcaggtggcagtcccccgggcatcgatcccaccaggggatc

SEQ ID NO: 530886 - DNA, 120 bp, Artificial Sequence
  ENSG00000166272_5 (sequence is synthesized)
ccagggggcacagagcagccccttgtctgagcccagcagaagcagcacaagacccccaagcatcgctgaccctgatccctctgacctaccagttgaccgagcagccaccaaagccccagg

SEQ ID NO: 530887 - DNA, 120 bp, Artificial Sequence
  ENSG00000166272_6 (sequence is synthesized)
gatggagcccagtggctctgtggctggcctgggggagctggacccgggggccttcctggacaaagatgcagaatgtagggaggagctgctgaaagatgacagctctgaacacggcgcacc

SEQ ID NO: 530888 - DNA, 120 bp, Artificial Sequence
  ENSG00000166272_7 (sequence is synthesized)
cgacagcaaagagaagacgcctgggagacatcgccgcttcacaggtgactcgggcattgaagtgtgtgtgtgcaaccggggccaccatgacgatgacctcaaagagttcaacacactcat

SEQ ID NO: 530889 - DNA, 120 bp, Artificial Sequence
  ENSG00000166272_8 (sequence is synthesized)
cgatgatgctctggatgggcccctggacttctgcgacagctgccatgtgcggccccctggtgatgaggaggaaggcctctgtcagtcctctgaggagcaggctcgagagcctgggcaccc

SEQ ID NO: 530890 - DNA, 120 bp, Artificial Sequence
  ENSG00000166272_9 (sequence is synthesized)
gcacctgccacggccgcccgcatgcctgctgctgaacaccatcaacgagcaggactctcccaactcccagagcagcagctcccccagctagagcaggtcctgccagcacccagcaacttg

SEQ ID NO: 530891 - DNA, 120 bp, Artificial Sequence
  ENSG00000166272_10 (sequence is synthesized)
gcaaagcaaccagggtaggggagaaccacgagagaagcattaagtgactttcaaagactttcagagtacagccacttggttcctttttgtttgttttccttctcctctcctgcattttcc

SEQ ID NO: 530892 - DNA, 120 bp, Artificial Sequence
  ENSG00000166272_11 (sequence is synthesized)
tccatctccaggtacagttcggggtgtggatgcctcttcctccacaagggcacagtgttgtggagggctaagttggttctgtgactcattcctcataccctaactccatctcctttcttt

SEQ ID NO: 530893 - DNA, 120 bp, Artificial Sequence
  ENSG00000166272_12 (sequence is synthesized)
aaagtcaaatctcacctacctgtttgggtcagagagatgtgttttaaaagcccccaaggaaggaggctgggactgtgccctgacatgattcttggtgatggaataggtttgtgctctgat

SEQ ID NO: 530894 - DNA, 120 bp, Artificial Sequence
  ENSG00000166272_13 (sequence is synthesized)
tctagtttaagagaacgttgctgtatctcagtccaggagaggcagcccatcttggccctggatgaagaaggaaacccacagaggcccagggcttgtcattgggctgccagtgtctgccaa

SEQ ID NO: 530895 - DNA, 120 bp, Artificial Sequence
  ENSG00000166272_14 (sequence is synthesized)
gccagcattgagctaatcctgtgggaggatgagagctactgggccgttgtatgataggttggtaggggcttgttgatctgtcaaattccaggtgacaagatctatgcaccccatgcgtcc

SEQ ID NO: 530896 - DNA, 120 bp, Artificial Sequence
  ENSG00000166272_15 (sequence is synthesized)
ttgaggggcctcttccccgcaggctctggctggccgcaggctggttctggtgtgaaaggttatactgccttttctttgtttgtttgtttttttctctaaaaacaaacagcaaaagacagc

SEQ ID NO: 530897 - DNA, 120 bp, Artificial Sequence
  ENSG00000166272_16 (sequence is synthesized)
tgaaaacaagaacttcaccggtgggcaggcaagaattctcttctggaaaatgacgtttgtggctctttcccaagttggccttcaaagagcctgcctgctgttgagccagaagatgtctcg

SEQ ID NO: 530898 - DNA, 120 bp, Artificial Sequence
  ENSG00000166272_17 (sequence is synthesized)
ggaacctctgtgagcaggaggccctaagccgcagcagtggatagaggtgcagctctctgcctctctgccctttggtctgtgttcacaggtgacccgtgtcagcctgcatcgcaagcacac

SEQ ID NO: 530899 - DNA, 120 bp, Artificial Sequence
  ENSG00000166272_18 (sequence is synthesized)
accctgcgggccttcaagtctcactgttccgtatgaggaaacagacagcggactgaggaagcgatggccccagagaaagggcccctgtagcctggctctcacacagtattttatctttga

SEQ ID NO: 530900 - DNA, 120 bp, Artificial Sequence
  ENSG00000166272_19 (sequence is synthesized)
ttctgaataaatattttttgtggggttttttttttttttttggtggcagttgtttgttttaaactgaccacttggaagaaacaccttggttatctgtggttttcatgccttgtccctgcc

SEQ ID NO: 530901 - DNA, 120 bp, Artificial Sequence
  ENSG00000166272_20 (sequence is synthesized)
tctacccccaccccttttgagtcgggtgactcatttttctgtgtagagactcggtggcccaggcaggaggtgaaagcagccatccggaaggccctggggacccttgtgcctgttgctcgc

SEQ ID NO: 530902 - DNA, 120 bp, Artificial Sequence
  ENSG00000166272_21 (sequence is synthesized)
cttcaggtcaccagctgagctgcgataggaaaatctgaatggaggcagcaaacagccaaaacaaacattccccacccggccctgtgcatatgaagtctttcttcccccaactcttgaacg

SEQ ID NO: 530903 - DNA, 120 bp, Artificial Sequence
  ENSG00000166272_22 (sequence is synthesized)
atgatgatattcagacgaagcattgatgttatggaagaaagaaagaaacaaacaaaatatatatatatatgtccaaaaacagacaaatccaagggtgtgaggtaaacgagtgtctgcatt

SEQ ID NO: 530904 - DNA, 120 bp, Artificial Sequence
  ENSG00000166272_23 (sequence is synthesized)
tagattccacaaaaccaaaatccatgttgaacaaagttaagtccgtacacagtgactttttgggtgagccgtgtgtgtctgtctgttgtgtgtgtgcctcaagccctgttttcctgtgaa

SEQ ID NO: 530905 - DNA, 120 bp, Artificial Sequence
  ENSG00000166272_24 (sequence is synthesized)
gatactttgagtggcagccattctctccacgtgaaccacacgtctggagcacagacaggcctctcaaggtcattgatcttacgcatttactgtttaccgaacaaatgtctgactgtgtac

SEQ ID NO: 530906 - DNA, 120 bp, Artificial Sequence
  ENSG00000166272_25 (sequence is synthesized)
tcgggtgtactccgcagcattgtcgactgcagtcccctgtgtttgccagagatactgtgctcgaagtagaggttttactctactcatcactgcgatttgcacattgctccgtggacactc

SEQ ID NO: 530907 - DNA, 120 bp, Artificial Sequence
  ENSG00000166272_26 (sequence is synthesized)
ggaggcctgcgttctgttccctataaatggaagcgtgctctgagcctgtctgcctccctcggctgctgctggtcctcagtaccagcgcccgggggtgtccacaaccacttgggacagaag

SEQ ID NO: 530908 - DNA, 120 bp, Artificial Sequence
  ENSG00000166272_27 (sequence is synthesized)
aaggtggaatttcagacagaagcttgactgggtcttcaatgacaggcttggactagctgtggcccagacatcggccctgcccagaattgccaggaggaggctttgcaggctctagaggag

SEQ ID NO: 530909 - DNA, 120 bp, Artificial Sequence
  ENSG00000166272_28 (sequence is synthesized)
ccgcagggcctgcctgcctctggtgagtccaacaggcacaagcaagctggcgtgtggccagaggtagccggagtgtgtcacagcccctcagatgcctttccttccacctttttttatttt

SEQ ID NO: 530910 - DNA, 120 bp, Artificial Sequence
  ENSG00000166272_29 (sequence is synthesized)
ttaagaatcccaaataactcactgaagtgtctcaaaggcgaacaagttttaccaaaatgaatcctttttcagttaacagatcaaatggatgagttctgagcctctcaagttcctttcccc

SEQ ID NO: 530911 - DNA, 120 bp, Artificial Sequence
  ENSG00000166272_30 (sequence is synthesized)
agttagagtggggaactgggcaagtgttaactgtgggactcactgcagcgtcctatcctaaaggcacgagaagacggaaatgcaacctgcggagctgggcttggttcccaggtcacagtt

SEQ ID NO: 530912 - DNA, 120 bp, Artificial Sequence
  ENSG00000166272_31 (sequence is synthesized)
tggcccccgctacaggatgctgccctgctcagagagagatttaatagggagctgaaggaatcgttagggggccagggagatgtgactgaggctggctttccacgtgaatgagacggggtc

SEQ ID NO: 530913 - DNA, 120 bp, Artificial Sequence
  ENSG00000166272_32 (sequence is synthesized)
ggtggagggtttggtgctacagccagtcagaagatttgcaaatgcgaacacattcctgtgtgaggcacgttaccctttgtcagttattgtgaatatgtgtattttaagcaataagattca

SEQ ID NO: 530914 - DNA, 120 bp, Artificial Sequence
  ENSG00000166272_33 (sequence is synthesized)
gctggtcagacttttctgggcagtctcagtgacgcatttcctgtgctgtgattgttctgaagacagagtggctctaaccactgtgagaagcccaaataaaaattgatcccaaaaatgcta

SEQ ID NO: 530915 - DNA, 120 bp, Artificial Sequence
  ENSG00000166272_34 (sequence is synthesized)
gtcaaacaggaaaagaagggaagaaggaagaagagggtagaggaggagagggaggaggaggagggaggtggcggcgccgtggcggaggagcaggagcaggagggggatggagaggagaag

SEQ ID NO: 530916 - DNA, 120 bp, Artificial Sequence
  ENSG00000166272_35 (sequence is synthesized)
caagtgatcttcccacttcatcctccccaagcaggtgatgaaagtacagctttctgtgtttgtgaggggagaagaggatttttgtttgacctgaaatttctcctcactctgttttgtttg

SEQ ID NO: 530917 - DNA, 61 bp, Artificial Sequence
  ENSG00000166272_36 (sequence is synthesized)
tttgtttgacctgaaatttctcctcactctgttttgtttgtttttggcttttttttcttcc

SEQ ID NO: 530918 - DNA, 120 bp, Artificial Sequence
  ENSG00000166272_37 (sequence is synthesized)
gcctcggcctcccaaagtgctgagattacgggcatgagccaccacacctggcctctccttactctgttataagcctgttcctcaccatagcttcagattcccttcatttcatgttttttc

SEQ ID NO: 530919 - DNA, 120 bp, Artificial Sequence
  ENSG00000166272_38 (sequence is synthesized)
catttcatgttttttcaccaagaaggctcaagaaacccaatcccacagaaactgtgacggaacacctgtgctggagccagattgggtcttgctctaggatgcagtgcagtggcacgatct

SEQ ID NO: 530920 - DNA, 83 bp, Artificial Sequence
  ENSG00000166272_39 (sequence is synthesized)
ctggcgcaccttgatcttcactttgaaagagtcgatcagaaagaccaccttggggatgccttccagggagggcagctgcccat

SEQ ID NO: 530921 - DNA, 120 bp, Artificial Sequence
  ENSG00000166272_40 (sequence is synthesized)
accaccttggggatgccttccagggagggcagctgcccatcatctggcacctccaggtcgaacctctgcagcagccaggccatgatgaggaagagctcctggcgggccaggatctcacct

SEQ ID NO: 530922 - DNA, 120 bp, Artificial Sequence
  ENSG00000166272_41 (sequence is synthesized)
atacaggagcgaggtcctgctccgaagggcaaatagcttactgacgcaaactcaccgatgctgctccagagtggaagaggaaaagtgggtctgggacttcgtactcccttccttgctcag

SEQ ID NO: 530923 - DNA, 120 bp, Artificial Sequence
  ENSG00000166272_42 (sequence is synthesized)
cctcatgccccctcattcttccgccgtgaggaaaatgccctttactccctcattcccactcactcatgttttcctcagcttctgccagatcaaacctaaatccagcccttctccatccct

SEQ ID NO: 530924 - DNA, 120 bp, Artificial Sequence
  ENSG00000166272_43 (sequence is synthesized)
tccctcctaacaggcgcttctgtctgaacacctgtgtctgtggactttggtgtctggcagtgtatgtgggtgtgcgtttggagctgcagcgcatgttatgtgcgtgctgcagctggttgg

SEQ ID NO: 530925 - DNA, 120 bp, Artificial Sequence
  ENSG00000166272_44 (sequence is synthesized)
aacatggagctcccagcctttcatcccagaccacatgtctctgagggcagcaggaagctcctctgggaagtcaggcagatctgtggatgagtcaatgcgtgtctgtaggtggtagagaca

SEQ ID NO: 530926 - DNA, 78 bp, Artificial Sequence
  ENSG00000166272_45 (sequence is synthesized)
cgtgtctgtaggtggtagagacatggagccacggggctgggggcaggatgatttttatatttaattaattaattattt

SEQ ID NO: 530927 - DNA, 120 bp, Artificial Sequence
  ENSG00000166272_46 (sequence is synthesized)
ccgcctcgacctcccaaagtgttgggatgacaggtgtgagccaccgtgcccggccggcaggatgatttttagtagttgatggttgactgactttaggttggccagcaggggccgggggta

SEQ ID NO: 530928 - DNA, 120 bp, Artificial Sequence
  ENSG00000166272_47 (sequence is synthesized)
ttaggttggccagcaggggccgggggtagggggagccaggtgggctggcaagcagtgttgaatgcatcatggggctagatgtcactgggagggcaggcacacctggagtcaacgttggcc

SEQ ID NO: 530929 - DNA, 120 bp, Artificial Sequence
  ENSG00000166272_48 (sequence is synthesized)
ttgtgggggatgagcataggggccacgggcctgaggcgaagcacctctcggatggtggcctccagcaggaggagacggttacggtcactgatagttggtgtgcggctgaaacccacattc

SEQ ID NO: 530930 - DNA, 120 bp, Artificial Sequence
  ENSG00000166272_49 (sequence is synthesized)
tggtcaatctcctcgtagagcttcttcttcacctgaagaccagagtaggttggaggtgactagtgtgtgtaagcccaggagaagcaagggcttagagaagaatccaactgtgacatcgag

SEQ ID NO: 530931 - DNA, 120 bp, Artificial Sequence
  ENSG00000166272_50 (sequence is synthesized)
aagagcctgtccagtcccttcccagtagtggctctggggcccaggcccggcttccagaagatggggcagctctactctggggtcaaagccaactactgcttgggtaaggagcagggcagg

SEQ ID NO: 530932 - DNA, 120 bp, Artificial Sequence
  ENSG00000166272_51 (sequence is synthesized)
cctagtcttcctgcacagaaagcctgagagaattggctctccctttctctggagcccagagattgggctggctggggtctaggatcaatgagggggaagcacacctgaggattgtgcagc

SEQ ID NO: 530933 - DNA, 120 bp, Artificial Sequence
  ENSG00000166272_52 (sequence is synthesized)
aggaaggccagggtccatttaaccacagaggtggtggtctccacgccagccccaaagatgtcccctatggtggtgagaatgtggttatctgaaagcagctctgagtcttgatctgggcca

SEQ ID NO: 530934 - DNA, 120 bp, Artificial Sequence
  ENSG00000166272_53 (sequence is synthesized)
gcattgccattatctgagttcatcttggcttgcatcagtgtgtccagcatgttggtgatagagtcactccggaatttctcctgggttgggtgaggttgggagacattaataaggaaggag

SEQ ID NO: 530935 - DNA, 120 bp, Artificial Sequence
  ENSG00000166272_54 (sequence is synthesized)
ccccatctgtgacactcctgccatacttctgtccctgactagagataacaaggctccttccacttggaagtagagcaagtctgggcaggacctacgaacttgtggaggtaggaggcagcc

SEQ ID NO: 530936 - DNA, 120 bp, Artificial Sequence
  ENSG00000166272_55 (sequence is synthesized)
agccccgggccctctttaaatttggtggagaggttaggtctcttctaggatcctcttcagttcctcacttttcgatcccaactccttgagtcagttttttttttttttttgagacagaat

SEQ ID NO: 530937 - DNA, 120 bp, Artificial Sequence
  ENSG00000166272_56 (sequence is synthesized)
cagaacgggtttatcatgacgacgaagacaattctaaacaagggaggagggcgtggtctccacctctccttccccattcaatcaaacatcaagcgctgactctgctatgtgtccagccct

SEQ ID NO: 530938 - DNA, 120 bp, Artificial Sequence
  ENSG00000166272_57 (sequence is synthesized)
taggagtgagagagacatgagcctgaaggctcagacaagctccttaaccccgctaagcctgcttctcacctgcacaatggggataataaaacctacttccaaggggaattcagcgatgaa

SEQ ID NO: 530939 - DNA, 120 bp, Artificial Sequence
  ENSG00000166275_0 (sequence is synthesized)
gtcagtgcgcaaccgttcgctaactgaaatgatggcgactggaacgccagagtctcaagcgcggttcggtcagtccgtgaaggggcttctcacggagaaggtgaccacctgtggtactga

SEQ ID NO: 530940 - DNA, 120 bp, Artificial Sequence
  ENSG00000166275_1 (sequence is synthesized)
cgtaatcgcgctcaccaagcaggtgctgaaaggctcccggagctccgagctgctaggtcaggcagctcgaaacatggtactccaggaagatgccatcttgcactcagaagatagtttaag

SEQ ID NO: 530941 - DNA, 120 bp, Artificial Sequence
  ENSG00000166275_2 (sequence is synthesized)
gaagatggcaataataacaacacatcttcaataccagcaagaagctattcagaagaatgttgaacagtcatcggatctacaggaccagttgaatcatctgttgaaatagaatgacatgta

SEQ ID NO: 530942 - DNA, 120 bp, Artificial Sequence
  ENSG00000166275_3 (sequence is synthesized)
agagtgctgtaggactcctttgcctaatgctgaggagtaaataccttacacagctgtcctctgggtttggttttctattttcttctccaaaagttaagttagaaaagttctgtgttaggg

SEQ ID NO: 530943 - DNA, 88 bp, Artificial Sequence
  ENSG00000166275_4 (sequence is synthesized)
ctgtgttgatgtacagtttctcctaagaagaagcgaggtggttgaattttggaagcacttcttgaatcggattaacccatgctcttat

SEQ ID NO: 530944 - DNA, 120 bp, Artificial Sequence
  ENSG00000166275_5 (sequence is synthesized)
ttggaagcacttcttgaatcggattaacccatgctcttattgaattttttcatctgctctgtttagtttgatattaaagcaaaattaagaggtcttagtttttcctatagaacttttaat

SEQ ID NO: 530945 - DNA, 120 bp, Artificial Sequence
  ENSG00000166275_6 (sequence is synthesized)
atgtcaaaagctatattgtctaaatttcagtacttaagcaaatactgagtagtgttttaaattcagaaatagagcttctattatgaacacatgagaatgatttttttctcttaatcatta

SEQ ID NO: 530946 - DNA, 120 bp, Artificial Sequence
  ENSG00000166275_7 (sequence is synthesized)
tagcaaattcctaaatgaacattaggcaagtggtatcattatcaggccagctgcagcctcttgccttgacctgcattcctagaatttctttgttgctgtaattcttgattaagtgacctt

SEQ ID NO: 530947 - DNA, 120 bp, Artificial Sequence
  ENSG00000166275_8 (sequence is synthesized)
gactttcattttgtaattttgctaatcatcagcaaattcacttgcatgacgttactgccaaatatgaaggcagttgaattattatgagtgattgtggcagaggtttgtgccatggtgaaa

SEQ ID NO: 530948 - DNA, 120 bp, Artificial Sequence
  ENSG00000166275_9 (sequence is synthesized)
actttgatgtttgtctgtgttcattggatccatctttttaaatgacattaccatgagtctgttgtcaaacctaaatatctttgtttgaatttaaaatgggactctatattgttgtagttc

SEQ ID NO: 530949 - DNA, 120 bp, Artificial Sequence
  ENSG00000166275_10 (sequence is synthesized)
aggtcttcattgactaagagattgagagaaatctgacataagaaaatattgttttcactgcaggaataaagaggaagtaacagtgaatccaatatagttcatattgttattgtccaatca

SEQ ID NO: 530950 - DNA, 120 bp, Artificial Sequence
  ENSG00000166275_11 (sequence is synthesized)
tcaagttaactaagcattatcagattacgtttatttctcatacatatggatattaacttaaggtaaaaaagctggatgtgaaggatctgaaaaggcattaatttatgtactaattctata

SEQ ID NO: 530951 - DNA, 120 bp, Artificial Sequence
  ENSG00000166275_12 (sequence is synthesized)
aacatgtattaataattgcagtattattaaatacagatggactcaatgtacctttgaaaagaccactaatttagaaaacaaagctaagtgcagtcattacaagaagcaaagaaatactta

SEQ ID NO: 530952 - DNA, 120 bp, Artificial Sequence
  ENSG00000166275_13 (sequence is synthesized)
agttagaaaaaaattaaaatgaagggatggtctaagttttcttcatgctggaacaaatgttaaagaagcagtgattgcttacaatgtatgtgataaaataatacctttcacaatcaaaat

SEQ ID NO: 530953 - DNA, 120 bp, Artificial Sequence
  ENSG00000166275_14 (sequence is synthesized)
tttaatagtaaatataagataaaatttatattaaataatgaaaacgtatttgtactgaatttagtcactagagaacatcgtaacaaaatacatgaaacaaaagtagccagaaatgttaga

SEQ ID NO: 530954 - DNA, 120 bp, Artificial Sequence
  ENSG00000166275_15 (sequence is synthesized)
acaggtggaaatgtatacattatttgatggtttgtttttttatggaaataaacaacatacatagaattaaatggtgatcaaaaacatggaaaaaatacttcactaaataacgtctaagtt

SEQ ID NO: 530955 - DNA, 120 bp, Artificial Sequence
  ENSG00000166275_16 (sequence is synthesized)
gtagaggttgtgccggaagataatatttttaaaataacaaatgttcaaatgccataaaagaaaatttgtgtgataataccaaagcagtactataagaaaataagcatgctttaaatccct

SEQ ID NO: 530956 - DNA, 120 bp, Artificial Sequence
  ENSG00000166275_17 (sequence is synthesized)
ctggtctgctttcatggactttgtgcttcagcactttcctgtggaggccagagtgggagtaaaggtgggggtggccaaggatgactttctcgatggcaaagatgcctgagactacagaag

SEQ ID NO: 530957 - DNA, 120 bp, Artificial Sequence
  ENSG00000166275_18 (sequence is synthesized)
aagtgggggtaaaggatgagaatcaggagcagagtccaccctttatgaacctccccatgttaaattgagggctcctcagagagagactataaaccctgtaaaggcagggcccgtgccagg

SEQ ID NO: 530958 - DNA, 120 bp, Artificial Sequence
  ENSG00000166278_0 (sequence is synthesized)
ggctctctacctctcgccgcccctagggaggacaccatgggcccactgatggttcttttttgcctgctgttcctgtacccaggtctggcagactcggctccctcctgccctcagaacgtg

SEQ ID NO: 530959 - DNA, 120 bp, Artificial Sequence
  ENSG00000166278_1 (sequence is synthesized)
aatatctcgggtggcaccttcaccctcagccatggctgggctcctgggagccttctcacctactcctgcccccagggcctgtacccatccccagcatcacggctgtgcaagagcagcgga

SEQ ID NO: 530960 - DNA, 120 bp, Artificial Sequence
  ENSG00000166278_2 (sequence is synthesized)
cagtggcagaccccaggagccacccggtctctgtctaaggcggtctgcaaacctgtgcgctgtccagcccctgtctcctttgagaatggcatttataccccacggctggggtcctatccc

SEQ ID NO: 530961 - DNA, 120 bp, Artificial Sequence
  ENSG00000166278_3 (sequence is synthesized)
gtgggtggcaatgtgagcttcgagtgtgaggatggcttcatattgcggggctcgcctgtgcgtcagtgtcgccccaacggcatgtgggatggagaaacagctgtgtgtgataatggggct

SEQ ID NO: 530962 - DNA, 120 bp, Artificial Sequence
  ENSG00000166278_4 (sequence is synthesized)
ggccactgccccaacccaggcatttcactgggcgcagtgcggacaggcttccgctttggtcatggggacaaggtccgctatcgctgctcctcgaatcttgtgctcacggggtcttcggag

SEQ ID NO: 530963 - DNA, 120 bp, Artificial Sequence
  ENSG00000166278_5 (sequence is synthesized)
cgggagtgccagggcaacggggtctggagtggaacggagcccatctgccgccaaccctactcttatgacttccctgaggacgtggcccctgccctgggcacttccttctcccacatgctt

SEQ ID NO: 530964 - DNA, 120 bp, Artificial Sequence
  ENSG00000166278_6 (sequence is synthesized)
ggggccaccaatcccacccagaagacaaaggaaagcctgggccgtaaaatccaaatccagcgctctggtcatctgaacctctacctgctcctggactgttcgcagagtgtgtcggaaaat

SEQ ID NO: 530965 - DNA, 120 bp, Artificial Sequence
  ENSG00000166278_7 (sequence is synthesized)
gactttctcatcttcaaggagagcgcctccctcatggtggacaggatcttcagctttgagatcaatgtgagcgttgccattatcacctttgcctcagagcccaaagtcctcatgtctgtc

SEQ ID NO: 530966 - DNA, 120 bp, Artificial Sequence
  ENSG00000166278_8 (sequence is synthesized)
ctgaacgacaactcccgggatatgactgaggtgatcagcagcctggaaaatgccaactataaagatcatgaaaatggaactgggactaacacctatgcggccttaaacagtgtctatctc

SEQ ID NO: 530967 - DNA, 120 bp, Artificial Sequence
  ENSG00000166278_9 (sequence is synthesized)
atgatgaacaaccaaatgcgactcctcggcatggaaacgatggcctggcaggaaatccgacatgccatcatccttctgacagatggaaagtccaatatgggtggctctcccaagacagct

SEQ ID NO: 530968 - DNA, 120 bp, Artificial Sequence
  ENSG00000166278_10 (sequence is synthesized)
gactggagagaactgaatgagctagggtccaagaaggatggtgagaggcatgccttcattctgcaggacacaaaggctctgcaccaggtctttgaacatatgctggatgtctccaagctc

SEQ ID NO: 530969 - DNA, 120 bp, Artificial Sequence
  ENSG00000166278_11 (sequence is synthesized)
acagacaccatctgcggggtggggaacatgtcagcaaacgcctctgaccaggagaggacaccctggcatgtcactattaagcccaagagccaagagacctgccggggggccctcatctcc

SEQ ID NO: 530970 - DNA, 120 bp, Artificial Sequence
  ENSG00000166278_12 (sequence is synthesized)
gaccaatgggtcctgacagcagctcattgcttccgcgatggcaacgaccactccctgtggagggtcaatgtgggagaccccaaatcccagtggggcaaagaattccttattgagaaggcg

SEQ ID NO: 530971 - DNA, 120 bp, Artificial Sequence
  ENSG00000166278_13 (sequence is synthesized)
gtgatctccccagggtttgatgtctttgccaaaaagaaccagggaatcctggagttctatggtgatgacatagctctgctgaagctggcccagaaagtaaagatgtccacccatgccagg

SEQ ID NO: 530972 - DNA, 120 bp, Artificial Sequence
  ENSG00000166278_14 (sequence is synthesized)
cccatctgccttccctgcacgatggaggccaatctggctctgcggagacctcaaggcagcacctgtagggaccatgagaatgaactgctgaacaaacagagtgttcctgctcattttgtc

SEQ ID NO: 530973 - DNA, 120 bp, Artificial Sequence
  ENSG00000166278_15 (sequence is synthesized)
gccttgaatgggagcaaactgaacattaaccttaagatgggagtggagtggacaagctgtgccgaggttgtctcccaagaaaaaaccatgttccccaacttgacagatgtcagggaggtg

SEQ ID NO: 530974 - DNA, 120 bp, Artificial Sequence
  ENSG00000166278_16 (sequence is synthesized)
gtgacagaccagttcctatgcagtgggacccaggaggatgagagtccctgcaagggagaatctgggggagcagttttccttgagcggagattcaggttttttcaggtgggtctggtgagc

SEQ ID NO: 530975 - DNA, 120 bp, Artificial Sequence
  ENSG00000166278_17 (sequence is synthesized)
tggggtctttacaacccctgccttggctctgctgacaaaaactcccgcaaaagggcccctcgtagcaaggtcccgccgccacgagactttcacatcaatctcttccgcatgcagccctgg

SEQ ID NO: 530976 - DNA, 120 bp, Artificial Sequence
  ENSG00000166278_18 (sequence is synthesized)
ctgaggcagcacctgggggatgtcctgaattttttacccctctagccatggccactgagccctctgctgccctgccagaatctgccgcccctccatcttctacctctgaatggccaccct

SEQ ID NO: 530977 - DNA, 120 bp, Artificial Sequence
  ENSG00000166278_19 (sequence is synthesized)
tagaccctgtgatccatcctctctcctagctgagtaaatccgggtctctaggatgccagaggcagcgcacacaagctgggaaatcctcagggctcctaccagcaggactgcctcgctgcc

SEQ ID NO: 530978 - DNA, 120 bp, Artificial Sequence
  ENSG00000166278_20 (sequence is synthesized)
ccacctcccgctccttggcctgtccccagattccttccctggttgacttgactcatgcttgtttcactttcacatggaatttcccagttatgaaattaataaaaatcaatggtttccaca

SEQ ID NO: 530979 - DNA, 120 bp, Artificial Sequence
  ENSG00000166278_21 (sequence is synthesized)
atagatatattagcatcagggagacagggcaaaggtttcacccttcagttcagtccccaatccctgcttattatttccctaacagaagaccatcccccttgccactccctggtttttctt

SEQ ID NO: 530980 - DNA, 120 bp, Artificial Sequence
  ENSG00000166278_22 (sequence is synthesized)
gtgctcactatctctctctgtctccttcccctcctcagaaccccactcacagcccacctcctccaagaagtcttctcagattatactcatgccatgtaggaatcatgaattcaatttata

SEQ ID NO: 530981 - DNA, 120 bp, Artificial Sequence
  ENSG00000166278_23 (sequence is synthesized)
caatcataatttttattccacaagcactgttgggacactgtgctggggctgggcgacagcaaagatggaaaggctgaggtcttactttccaggaattcatcatctagaacagtggtctcc

SEQ ID NO: 530982 - DNA, 120 bp, Artificial Sequence
  ENSG00000166278_24 (sequence is synthesized)
acagaaaggtagtgagataacccacaggagtgaagcagaaaaatactggtgcccctgtggaataatttaaatcagattaataatttaatatttaataatttccttttaaaacttcaacat

SEQ ID NO: 530983 - DNA, 87 bp, Artificial Sequence
  ENSG00000166278_25 (sequence is synthesized)
taatttaatatttaataatttccttttaaaacttcaacattttgtgcaggctttaaaatgtgtgtgatagactgggcatggtggcta

SEQ ID NO: 530984 - DNA, 82 bp, Artificial Sequence
  ENSG00000166278_26 (sequence is synthesized)
gaaaccctgtctatactaaaaatacaaaattagccacatgtgatggcgcacgcctgtaagatccgggaggtggaggttgcag

SEQ ID NO: 530985 - DNA, 63 bp, Artificial Sequence
  ENSG00000166278_27 (sequence is synthesized)
ggcaggagaatcgcttggatcctagagcaaaactctgtctcaaaaaaataaataaaataaaat

SEQ ID NO: 530986 - DNA, 120 bp, Artificial Sequence
  ENSG00000166278_28 (sequence is synthesized)
cattttcccctgagagcggcctcggagatggctgtgactgtcctaagctgggagctgcaagggagaattcctgtcattcctggcctcagttctgcagggaccgagggcgagacacgcctg

SEQ ID NO: 530987 - DNA, 120 bp, Artificial Sequence
  ENSG00000166278_29 (sequence is synthesized)
acgatgtccctaacagcgaattccaaggcgcccgtgtagcaggagaggagcaagtcggccacgatgcgtgcactgtgcatcagggagacctgcagctccgagctggggttcagcaggaac

SEQ ID NO: 530988 - DNA, 120 bp, Artificial Sequence
  ENSG00000166278_30 (sequence is synthesized)
tataaaggtacgggtgtcatcacgtgatggtgatgagagaggagaagatggaccctctcagggcctgcaaacaaattctggatgagttaaaaagagagtgaggcctcttggtggcacctg

SEQ ID NO: 530989 - DNA, 120 bp, Artificial Sequence
  ENSG00000166278_31 (sequence is synthesized)
agtcccacgagtctggggtagtttcaacgtccagggttatggtgggggagtccagctgcccccagctcatagctcattctgagatgctgcaggtccaaagacactgtgcaggtcttcaat

SEQ ID NO: 530990 - DNA, 120 bp, Artificial Sequence
  ENSG00000166278_32 (sequence is synthesized)
tccttccagttgccaaaaccacactgtctggtttgcatggctgcacactgccatctccccatgtcattagccacccatacaccatgtaaagtgcctggttggcacttagcaaatggctga

SEQ ID NO: 530991 - DNA, 120 bp, Artificial Sequence
  ENSG00000166278_33 (sequence is synthesized)
gcaaatggctgaagccactcaaggttttggaaacctcatctttgaatcttgggactttagtgtggtcttggattggggttatgcaatgaacatttcttttttcttcttcttttttttttt

SEQ ID NO: 530992 - DNA, 120 bp, Artificial Sequence
  ENSG00000166278_34 (sequence is synthesized)
gggattacaggcgtgaaccaccttgcccggccctatgcaatgaacatttctaaggtggaaaggcttttaaagtttgaacaagcaatgatgccacatctctatctgaatggcaaatgtctg

SEQ ID NO: 530993 - DNA, 89 bp, Artificial Sequence
  ENSG00000166278_35 (sequence is synthesized)
agcaatgatgccacatctctatctgaatggcaaatgtctgagtttatcaaaacaatcgataaattgcattgtaatcccagcactttggg

SEQ ID NO: 530994 - DNA, 88 bp, Artificial Sequence
  ENSG00000166278_36 (sequence is synthesized)
ctctagcctgggtggattgcatttccaataattgggggaatagagtgattccctacccctaggtggtaggtgggaagtttctaagaga

SEQ ID NO: 530995 - DNA, 120 bp, Artificial Sequence
  ENSG00000166278_37 (sequence is synthesized)
ttccctacccctaggtggtaggtgggaagtttctaagagagtccttccttttggcatattccagatcatgaaaatggaactgggactaacacctatgcggccttaaacagtgtctatctc

SEQ ID NO: 530996 - DNA, 120 bp, Artificial Sequence
  ENSG00000166289_0 (sequence is synthesized)
actgcggtgtggactcgagggctgggcgcggggccggcgcagaagccgccagctggagacgatggtggaccacttggccaacacggagatcaacagccagcgcatcgcggcagtggagag

SEQ ID NO: 530997 - DNA, 120 bp, Artificial Sequence
  ENSG00000166289_1 (sequence is synthesized)
ctgcttcggggcctcggggcagccgctggcgctgccaggccgagtgctgctgggcgagggcgtgctgaccaaagagtgccgcaagaaggccaagccgcgcatcttcttcctctttaacga

SEQ ID NO: 530998 - DNA, 120 bp, Artificial Sequence
  ENSG00000166289_2 (sequence is synthesized)
catcctggtgtatggcagcatcgtgctcaacaagcgcaagtaccgcagccagcacatcatccccctggaggaggtcacactggagctgttgccggagacgctgcaggccaagaaccgctg

SEQ ID NO: 530999 - DNA, 120 bp, Artificial Sequence
  ENSG00000166289_3 (sequence is synthesized)
gatgatcaagacggccaagaagtcctttgtggtgtcggccgcctccgctacggagcgccaggaatggattagccacatcgaggagtgcgtgcggcggcaactgagggccacgggccgccc

SEQ ID NO: 531000 - DNA, 120 bp, Artificial Sequence
  ENSG00000166289_4 (sequence is synthesized)
gcccagcacggagcacgcggcaccctggatccccgacaaggccacggacatctgcatgcgctgcacgcagacgcgcttctctgccctcacgaggcgccaccactgccgcaagtgcggctt

SEQ ID NO: 531001 - DNA, 120 bp, Artificial Sequence
  ENSG00000166289_5 (sequence is synthesized)
cgtggtctgcgctgagtgctcgcgccagcgcttcctgctcccgcgcctgtcccccaagcccgtgcgcgtctgcagcctctgctaccgcgaactggccgcccagcagcggcaggaggaggc

SEQ ID NO: 531002 - DNA, 120 bp, Artificial Sequence
  ENSG00000166289_6 (sequence is synthesized)
ggaggagcagggcgcggggtccccagggcagccagcccacctggcccggcccatctgcggagcgtccagtggagatgacgatgactccgacgaggacaaggagggcagcagggacggcga

SEQ ID NO: 531003 - DNA, 120 bp, Artificial Sequence
  ENSG00000166289_7 (sequence is synthesized)
ttctacgcctcgggggtggcctggtctgccttccacagctgacccccggcctgcagaacatctgtccccaagccagctccactgcccaggcccccaagagggcagctccagaagctgccc

SEQ ID NO: 531004 - DNA, 120 bp, Artificial Sequence
  ENSG00000166289_8 (sequence is synthesized)
agggctccgggaccccatcccatggtggcaggtgcagcggtggggagtggctctttctggactcccagtgcctttttgctggacactgtgtccttatggcttcactgcaggtaatgcctt

SEQ ID NO: 531005 - DNA, 120 bp, Artificial Sequence
  ENSG00000166289_9 (sequence is synthesized)
tcccttcaggaagccccagaacacccacaggtcttggtaacaaacgccaccttacactctgcaggctgcagcggcagctccagatggcctcctgagctggacgaccccaggtctccagac

SEQ ID NO: 531006 - DNA, 120 bp, Artificial Sequence
  ENSG00000166289_10 (sequence is synthesized)
atctagggaccagagcaggtttgggaacacagagggaagacaggatgggagtgtagccacagaacccacctgcaccctgacaggcacaccccactgaagagcctgagtcccaggaggcct

SEQ ID NO: 531007 - DNA, 120 bp, Artificial Sequence
  ENSG00000166289_11 (sequence is synthesized)
cctggaagcccaggactgcccacccaccacgctggtgcccaccgcctggccagccaagccctgccgatcagacatgtgggctccccgaagcccagccagagactgccgtgctgtgggtgc

SEQ ID NO: 531008 - DNA, 120 bp, Artificial Sequence
  ENSG00000166289_12 (sequence is synthesized)
caccaggcccagggactgcagcctgagctccccgaggcccagggcagccgggtgaggactctgtcctgtgtcacctctctccaggtgtccagctgtctcatgcctttttgtcctgtcctc

SEQ ID NO: 531009 - DNA, 120 bp, Artificial Sequence
  ENSG00000166289_13 (sequence is synthesized)
agctctccgtgtggtcagcgaaaccattgttttctgttaggactcagttgcaagaacagaaaccctgcccccacttaataataaaaaagaaagtttattgatgggtggttgcaaaacaaa

SEQ ID NO: 531010 - DNA, 120 bp, Artificial Sequence
  ENSG00000166289_14 (sequence is synthesized)
ctactgcggtgtggactcgagggctgggcgcggggccggcgcagaaggtgagtccccccaccgtcccccggccgggctgcgggtcgcggggcaggcgcatgaggcgagtctcccatcacc

SEQ ID NO: 531011 - DNA, 120 bp, Artificial Sequence
  ENSG00000166289_15 (sequence is synthesized)
acccccggacaagcgagctctctcccgccgcgcggtcttggcggctcctgggccggcggggcgcagtgccgctgactccagcccaagaagaggcctgggaagggcgctcctgggcggctt

SEQ ID NO: 531012 - DNA, 120 bp, Artificial Sequence
  ENSG00000166289_16 (sequence is synthesized)
gcggggtgaacctgcagggagcctggggagagcggtcaggggtcagagcgtccgaggcggaatccccggggaaacgcgcagatgtaagctggtggagccgccagctggagacgatggtgg

SEQ ID NO: 531013 - DNA, 120 bp, Artificial Sequence
  ENSG00000166289_17 (sequence is synthesized)
ccggtctcttcccggaggagggccttccaggaatcacagggctggacagagcccaggggcggcccctctggagggagaggaggcttggcgcctgatgctgcagtctcaatgcacatggag

SEQ ID NO: 531014 - DNA, 120 bp, Artificial Sequence
  ENSG00000166289_18 (sequence is synthesized)
aaaacctcacatcctcacgctggcctgggagcctgcaggatgtctcctgccggcactgcaacctcatctgtcctccttgccccatcgctccttcctccgcagcctgacttcacccattcc

SEQ ID NO: 531015 - DNA, 120 bp, Artificial Sequence
  ENSG00000166292_0 (sequence is synthesized)
gtcatttaggaacagaggtagcctgaaagaagcaggaactccaggatcccaaaccagagcagaccctatagtaaagtatttttacatcttttcctttccccagaagagatccctaaccta

SEQ ID NO: 531016 - DNA, 120 bp, Artificial Sequence
  ENSG00000166292_1 (sequence is synthesized)
ttgttttattgacagccttgctgttagaggctctttcccagaagttggacgaagaggctcaggcgttgctgtttcttgtcttccaagtcaagtggttactctggtaatggattgcctctc

SEQ ID NO: 531017 - DNA, 120 bp, Artificial Sequence
  ENSG00000166292_2 (sequence is synthesized)
tccgagctttcaccctggtgagactgtccagatctagtctgtaaacccagcttagaagcactgttgtaaaaatgactgaagagcccatcaaggagatcctgggagccccaaaggctcaca

SEQ ID NO: 531018 - DNA, 120 bp, Artificial Sequence
  ENSG00000166292_3 (sequence is synthesized)
tggcagcgacgatggagaagagccccaagagtgaagttgtgatcaccacagtccctctggtcagtgagattcagttgatggctgctacagggggtaccgagctctcctgctaccgctgca

SEQ ID NO: 531019 - DNA, 120 bp, Artificial Sequence
  ENSG00000166292_4 (sequence is synthesized)
tcatcccctttgctgtggttgtcttcatcgccggcatcgtggtcaccgcggtggcttacagcttcaattcccatgggtctattatctccatctttggcctggttgttctgtcatctggac

SEQ ID NO: 531020 - DNA, 120 bp, Artificial Sequence
  ENSG00000166292_5 (sequence is synthesized)
tttttttactagcctccagtgccttgtgctggaaagtgagacaaaggagcaagaaagccaagagacgggagagtcaaacagctctcgtggcaaatcagagaagcttgtttgcttgagact

SEQ ID NO: 531021 - DNA, 120 bp, Artificial Sequence
  ENSG00000166292_6 (sequence is synthesized)
gaatacgaccaaatgggccattgggcctggaaaacgtgctctgactttgtcacccaattcacccagaaccatggtgggagagaacagacttggcgttggagcagactggaagaatggggg

SEQ ID NO: 531022 - DNA, 120 bp, Artificial Sequence
  ENSG00000166292_7 (sequence is synthesized)
tacttctgagactgaaaaatcagctttctatttacatgaaacactttgggggtcatgggagtgcacagcattagacagtatttggttcaccctgtaaagtagccaagaaaagatgagaaa

SEQ ID NO: 531023 - DNA, 120 bp, Artificial Sequence
  ENSG00000166292_8 (sequence is synthesized)
aatcaagataggcctggcacactagacatttgcctccaaaagaaataacctacagtcttaagatgtatcataaaaatgttctgccaaggatctaaattaccttgggtttcgcatatgtct

SEQ ID NO: 531024 - DNA, 120 bp, Artificial Sequence
  ENSG00000166292_9 (sequence is synthesized)
atgaaattctgtgataatttttttcaatacattgattcactggcgtctgttttcattttatacttttaataactcatcactggtggtactttatcttgaaaagtaatattttttatattt

SEQ ID NO: 531025 - DNA, 120 bp, Artificial Sequence
  ENSG00000166292_10 (sequence is synthesized)
taacattggacagtgttagccagttgtaatgatgtatcagaagtaaagaaaaacccattaaagttatagctaatagatgctgttgggggttaaattaatagtaaaataatccaatatagc

SEQ ID NO: 531026 - DNA, 120 bp, Artificial Sequence
  ENSG00000166292_11 (sequence is synthesized)
acttttgatgatttttatataaaagtcaactgtacatttcattcagaataataaatacttattgctgctaaaacttcttaaatggttgtttctgctatagttatttctattgcagttcca

SEQ ID NO: 531027 - DNA, 120 bp, Artificial Sequence
  ENSG00000166292_12 (sequence is synthesized)
aattgccatcttcccttgtctcatttgcaagttctcaattgtatttctctcaaatggacaggttccttctttactggaggatttttgtttttatcatattggtttttcattacttctgaa

SEQ ID NO: 531028 - DNA, 120 bp, Artificial Sequence
  ENSG00000166292_13 (sequence is synthesized)
tagtcttaattacgtttactaaattctaaaggatttctgtgctattataattaggaaatcaacgtctttggtcaggaactttataatgtgctattaaatgtatattacatttttgtggaa

SEQ ID NO: 531029 - DNA, 120 bp, Artificial Sequence
  ENSG00000166292_14 (sequence is synthesized)
cagttgcttctacaaaacccgtgaaagttctctgtccaaaagccttgttggtcccgcggtacatgcttcctgttcccagagagattcacccttgggctttcctatcagtcttccctaaag

SEQ ID NO: 531030 - DNA, 120 bp, Artificial Sequence
  ENSG00000166292_15 (sequence is synthesized)
ttggctgctcctgtgtcctgtcacataaaactgtgaaccgaggtctccgacttacgtcatgtcagtcacagcagggtgaggctccacaagtgtgagttctggcccctgctgctttccttt

SEQ ID NO: 531031 - DNA, 120 bp, Artificial Sequence
  ENSG00000166292_16 (sequence is synthesized)
caaatgcagtttacagtttattatggtattggacaccccatgctccttactgcattggctttgggtaagaaggagtgaaaattagtgtgcgaacctgaaaacctagaatttctgattggg

SEQ ID NO: 531032 - DNA, 120 bp, Artificial Sequence
  ENSG00000166292_17 (sequence is synthesized)
actgaagaaaacctttgtgctgcagtcagtccccgagccagacgcctgtgactctcttcacatggaaatagatgactatccacagtaaaagcaaaattaaaaagtgacttgtgaaaaata

SEQ ID NO: 531033 - DNA, 120 bp, Artificial Sequence
  ENSG00000166292_18 (sequence is synthesized)
tcctccatgctcctcttaccaagcctgcaacttaaaacctatggtttaaactgtgctttcaattatctggaggaggccagcactgatgagcccatcctgagccagtcattttaaggccag

SEQ ID NO: 531034 - DNA, 120 bp, Artificial Sequence
  ENSG00000166292_19 (sequence is synthesized)
gtagaaatgattcggactcatcatgtcactgagcaaagctgggggaagccaaaactcagaatctgctggcaaggaaaagaacgaaggaaaaaaaaaaatccttgctgttagaggctcttt

SEQ ID NO: 531035 - DNA, 120 bp, Artificial Sequence
  ENSG00000166292_20 (sequence is synthesized)
cccagaagttggacgaagaggctcaggcgttgctgtttcttgtcttccaagtcaagtggttactctggtaatggattgcctctctccgagcagattggaagatattgttacacttcagac

SEQ ID NO: 531036 - DNA, 120 bp, Artificial Sequence
  ENSG00000166292_21 (sequence is synthesized)
cactgtgtttaatagtaacacaataaagatttgttggctgtcattcaatggagaagaacatcatttgttgctggccacttgccttgacattgattttgtgggcagccaatgggtgatagt

SEQ ID NO: 531037 - DNA, 120 bp, Artificial Sequence
  ENSG00000166292_22 (sequence is synthesized)
ttgcaaagaatgcatgttatgcccagcaagattggcggagtctgagttgctgtaagttctgggattaatggtacgaaatattgtttgtaatgtattctcctcttgaatgagaccatcttt

SEQ ID NO: 531038 - DNA, 120 bp, Artificial Sequence
  ENSG00000166295_0 (sequence is synthesized)
acgccgccttcgccgctggctccgtctgttggggggcgaacacgccgcggtcctcgtcgtggtgagcgcagccactcaggctggtcctgggggtggggctgtaggggaaagtgctaaagc

SEQ ID NO: 531039 - DNA, 120 bp, Artificial Sequence
  ENSG00000166295_1 (sequence is synthesized)
cgctgagtgaagtaagaactctgctagagaggaaatggctgcttcatcatcatcctcctcagctggtggggtcagtggaagttctgtcactggatctggtttcagtgtctcagaccttgc

SEQ ID NO: 531040 - DNA, 120 bp, Artificial Sequence
  ENSG00000166295_2 (sequence is synthesized)
cccaccacggaaagcccttttcacctaccccaaaggagctggagagatgttagaagatggctctgagagattcctctgcgaatctgtttttagctatcaagtggcatccacgcttaaaca

SEQ ID NO: 531041 - DNA, 120 bp, Artificial Sequence
  ENSG00000166295_3 (sequence is synthesized)
ggtgaaacatgatcagcaagttgctcggatggaaaaactagctggtttggtagaagagctggaggctgacgagtggcggtttaagcccatcgagcagctgctgggattcaccccctcttc

SEQ ID NO: 531042 - DNA, 120 bp, Artificial Sequence
  ENSG00000166295_4 (sequence is synthesized)
aggttgatactgcctggatggtcacctctggtgcgcagcaagtgcaaagccagtgggggactttctcacagcttacatagccatccagagatccacagctacgtcactgaattgttaatg

SEQ ID NO: 531043 - DNA, 120 bp, Artificial Sequence
  ENSG00000166295_5 (sequence is synthesized)
cacatttgtacttggtttctctgtatctattcacaggcaacaaatacttatatgtgtgatctttcagggaatgttttgtttatttgtttttaaaagtattgggaatcagattaagacaat

SEQ ID NO: 531044 - DNA, 120 bp, Artificial Sequence
  ENSG00000166295_6 (sequence is synthesized)
cagtttcagagaaccaggaggtttggggttaagagatactcaaaaattttcacaagccaagtagggcatatatcagatttggccaactgaatggcgtctgtcctgtcatccatatggtgc

SEQ ID NO: 531045 - DNA, 120 bp, Artificial Sequence
  ENSG00000166295_7 (sequence is synthesized)
ctggaaatatttaccagtcaaggtcaaggtcagcatctgtggttaaaaatatagcattctgacctaaaaaagttattttgcagatgaatgtgttttcaactcaggacctatccaaatgag

SEQ ID NO: 531046 - DNA, 120 bp, Artificial Sequence
  ENSG00000166295_8 (sequence is synthesized)
gaatttttaaatattcttttttttttcctatttttagacatcaattctatagattctgactttttctaacctcttatagacatgccaaatgctggcaaaaagaagtgctttttggatatg

SEQ ID NO: 531047 - DNA, 120 bp, Artificial Sequence
  ENSG00000166295_9 (sequence is synthesized)
gcagcacttgtaaaaataaagcagtaagcaaaatccttttaaacacagaaatcctgagttcttctcattggtggactcaagcaattctgtagcaaataaatcctttgaaagagctccaaa

SEQ ID NO: 531048 - DNA, 120 bp, Artificial Sequence
  ENSG00000166295_10 (sequence is synthesized)
ttggtggcattatcctttcaaaatctcagggatttgggatgaagtgaagaggtcaaattactttttagaagaagggaatctaaaaaccatctctcctaaacaaatggtagactggcttta

SEQ ID NO: 531049 - DNA, 120 bp, Artificial Sequence
  ENSG00000166295_11 (sequence is synthesized)
aaccatctctcctaaacaaatggtagactggctttacttaagggatatttgtctttataggagtacataaatttatcttaatgatatttaagtagtttttttttttttttgagacgaagt

SEQ ID NO: 531050 - DNA, 73 bp, Artificial Sequence
  ENSG00000166295_12 (sequence is synthesized)
tacaggcgtgagccaccttgcccagccaatttttttttaaagagacaagatccccccaaccttggcctccaaa

SEQ ID NO: 531051 - DNA, 120 bp, Artificial Sequence
  ENSG00000166295_13 (sequence is synthesized)
agccaccgcgcctggcctcaagtaagtttttataccatgataggggaaaacctggaaggctaagagatgtgctgttttccttcatgggaccccactttccacagtaaacaactggtataa

SEQ ID NO: 531052 - DNA, 120 bp, Artificial Sequence
  ENSG00000166295_14 (sequence is synthesized)
tcatttattacgttgtatgcaaattttgccttagacaacatttgtctggttccttattaataacttgcatctgatctgcttagagttgcttaattataagtaaatataatcccagtagca

SEQ ID NO: 531053 - DNA, 120 bp, Artificial Sequence
  ENSG00000166295_15 (sequence is synthesized)
tttagccttaatctcaagagttcaaaatgtttaacacattctacctgacgggaggtggtgacctcattcagtcggttaagagcctgagccctgtgaagttaaacacctgctcatggtcac

SEQ ID NO: 531054 - DNA, 120 bp, Artificial Sequence
  ENSG00000166295_16 (sequence is synthesized)
atagcccaggcagaagaaaatctcggacttggaatagatcccagttgcctgataattcatctcattattgcctctaaagcaaattggagactgggcacagtggctcccacctttaatccc

SEQ ID NO: 531055 - DNA, 87 bp, Artificial Sequence
  ENSG00000166295_17 (sequence is synthesized)
aaattggagactgggcacagtggctcccacctttaatcccagcacctggggaggctgaggtgatctggccgacatggtgaaactcag

SEQ ID NO: 531056 - DNA, 68 bp, Artificial Sequence
  ENSG00000166295_18 (sequence is synthesized)
cagcctgatcagagcacaagaagtaccagtccaccaactcacattttctatattaataattcttaact

SEQ ID NO: 531057 - DNA, 120 bp, Artificial Sequence
  ENSG00000166295_19 (sequence is synthesized)
gtccaccaactcacattttctatattaataattcttaactaaaagaagttccatattcgacagcattttagttttttaatagtacttattagcatcaaccatcttgataatcaccaaggg

SEQ ID NO: 531058 - DNA, 120 bp, Artificial Sequence
  ENSG00000166295_20 (sequence is synthesized)
aaaaattaaaaatacctagactgcaataaacctttaaattggattttcagtgagaatttagaagcaatcactacctttctcgtttcatttgtgtaaccatgcagcataggcactgtgtta

SEQ ID NO: 531059 - DNA, 120 bp, Artificial Sequence
  ENSG00000166295_21 (sequence is synthesized)
catcatctttacgctttggtatttgaacttattacagaattttttctctaaattggatgtttctttatatgaccttggaaactgaagtgatcttagcattaaacaaaaatgctttttgaa

SEQ ID NO: 531060 - DNA, 60 bp, Artificial Sequence
  ENSG00000166295_22 (sequence is synthesized)
tggcctcaggtgacctaggttaatttttaatgagaaagccaatatgtatttcctaactag

SEQ ID NO: 531061 - DNA, 120 bp, Artificial Sequence
  ENSG00000166295_23 (sequence is synthesized)
taatttttaatgagaaagccaatatgtatttcctaactagttccccttccctgggaacagaacacagtgttattctggaatgttatttggaaaatattataatttattgttgtggcttga

SEQ ID NO: 531062 - DNA, 120 bp, Artificial Sequence
  ENSG00000166295_24 (sequence is synthesized)
tcaggatgtatccaagaaaaactgtcctatgaagtgtgatgcttttatcctcgtataacttatttcctctgtcaaatttctgccttggcactgccatatcaccccttcataactcataaa

SEQ ID NO: 531063 - DNA, 120 bp, Artificial Sequence
  ENSG00000166295_25 (sequence is synthesized)
tcacccacagtcaatcttagttgacataaacagttcgctaatggtaggaattcatgttttaagtagatatactattcttaagcatattttcagttcaaaacctgactgatattttggcct

SEQ ID NO: 531064 - DNA, 120 bp, Artificial Sequence
  ENSG00000166295_26 (sequence is synthesized)
gagacatcaataaaatattgtgaaagtagagagcatagaaaaaaggggagctaactctttacaaaactgtatgctggcccttacagcagctagaatgaaatgttgtcactctcacttcca

SEQ ID NO: 531065 - DNA, 120 bp, Artificial Sequence
  ENSG00000166311_0 (sequence is synthesized)
gtcagccgactacagagaagggtaatcgggtgtccccggcgccgcccggggccctgagggctggctagggtccaggccgggggggacgggacagacgaaccagccccgtgtaggaagcgc

SEQ ID NO: 531066 - DNA, 120 bp, Artificial Sequence
  ENSG00000166311_1 (sequence is synthesized)
gacaatgccccgctacggagcgtcactccgccagagctgccccaggtccggccgggagcagggacaagacgggaccgccggagcccccggactcctttggatgggcctggtgctggcgct

SEQ ID NO: 531067 - DNA, 120 bp, Artificial Sequence
  ENSG00000166311_2 (sequence is synthesized)
ggcgctggcgctggcgctggcgctggctctgtctgactctcgggttctctgggctccggcagaggctcaccctctttctccccaaggccatcctgccaggttacatcgcatagtgccccg

SEQ ID NO: 531068 - DNA, 120 bp, Artificial Sequence
  ENSG00000166311_3 (sequence is synthesized)
gctccgagatgtctttgggtgggggaacctcacctgcccaatctgcaaaggtctattcaccgccatcaacctcgggctgaaggaacccaatgtggctcgcgtgggctccgtggccatcaa

SEQ ID NO: 531069 - DNA, 120 bp, Artificial Sequence
  ENSG00000166311_4 (sequence is synthesized)
gctgtgcaatctgctgaagatagcaccacctgccgtgtgccaatccattgtccacctctttgaggatgacatggtggaggtgtggagacgctcagtgctgagcccatctgaggcctgtgg

SEQ ID NO: 531070 - DNA, 120 bp, Artificial Sequence
  ENSG00000166311_5 (sequence is synthesized)
cctgctcctgggctccacctgtgggcactgggacattttctcatcttggaacatctctttgcctactgtgccgaagccgccccccaaaccccctagccccccagccccaggtgcccctgt

SEQ ID NO: 531071 - DNA, 120 bp, Artificial Sequence
  ENSG00000166311_6 (sequence is synthesized)
cagccgcatcctcttcctcactgacctgcactgggatcatgactacctggagggcacggaccctgactgtgcagacccactgtgctgccgccggggttctggcctgccgcccgcatcccg

SEQ ID NO: 531072 - DNA, 120 bp, Artificial Sequence
  ENSG00000166311_7 (sequence is synthesized)
gccaggtgccggatactggggcgaatacagcaagtgtgacctgcccctgaggaccctggagagcctgttgagtgggctgggcccagccggcccttttgatatggtgtactggacaggaga

SEQ ID NO: 531073 - DNA, 120 bp, Artificial Sequence
  ENSG00000166311_8 (sequence is synthesized)
catccccgcacatgatgtctggcaccagactcgtcaggaccaactgcgggccctgaccaccgtcacagcacttgtgaggaagttcctggggccagtgccagtgtaccctgctgtgggtaa

SEQ ID NO: 531074 - DNA, 120 bp, Artificial Sequence
  ENSG00000166311_9 (sequence is synthesized)
cctccccccttcattgagggcaaccactcctcccgctggctctatgaagcgatggccaaggcttgggagccctggctgcctgccgaagccctgcgcaccctcagaattggggggttctat

SEQ ID NO: 531075 - DNA, 120 bp, Artificial Sequence
  ENSG00000166311_10 (sequence is synthesized)
gctctttccccataccccggtctccgcctcatctctctcaatatgaatttttgttcccgtgagaacttctggctcttgatcaactccacggatcccgcaggacagctccagtggctggtg

SEQ ID NO: 531076 - DNA, 120 bp, Artificial Sequence
  ENSG00000166311_11 (sequence is synthesized)
ggggagcttcaggctgctgaggatcgaggagacaaagtgcatataattggccacattcccccagggcactgtctgaagagctggagctggaattattaccgaattgtagccaggtatgag

SEQ ID NO: 531077 - DNA, 120 bp, Artificial Sequence
  ENSG00000166311_12 (sequence is synthesized)
aacaccctggctgctcagttctttggccacactcatgtggatgaatttgaggtcttctatgatgaagagactctgagccggccgctggctgtagccttcctggcacccagtgcaactacc

SEQ ID NO: 531078 - DNA, 120 bp, Artificial Sequence
  ENSG00000166311_13 (sequence is synthesized)
tacatcggccttaatcctggttaccgtgtgtaccaaatagatggaaactactccgggagctctcacgtggtcctggaccatgagacctacatcctgaatctgacccaggcaaacataccg

SEQ ID NO: 531079 - DNA, 120 bp, Artificial Sequence
  ENSG00000166311_14 (sequence is synthesized)
ggagccataccgcactggcagcttctctacagggctcgagaaacctatgggctgcccaacacactgcctaccgcctggcacaacctggtatatcgcatgcggggcgacatgcaacttttc

SEQ ID NO: 531080 - DNA, 120 bp, Artificial Sequence
  ENSG00000166311_15 (sequence is synthesized)
cagaccttctggtttctctaccataagggccacccaccctcggagccctgtggcacgccctgccgtctggctactctttgtgcccagctctctgcccgtgctgacagccctgctctgtgc

SEQ ID NO: 531081 - DNA, 120 bp, Artificial Sequence
  ENSG00000166311_16 (sequence is synthesized)
cgccacctgatgccagatgggagcctcccagaggcccagagcctgtggccaaggccactgttttgctagggccccagggcccacatttgggaaagttcttgatgtaggaaagggtgaaaa

SEQ ID NO: 531082 - DNA, 120 bp, Artificial Sequence
  ENSG00000166311_17 (sequence is synthesized)
agcccaaatgctgctgtggttcaaccaggcaagatcatccggtgaaagaaccagtccctgggccccaaggatgccggggaaacaggaccttctcctttcctggagctggtttagctggat

SEQ ID NO: 531083 - DNA, 120 bp, Artificial Sequence
  ENSG00000166311_18 (sequence is synthesized)
tgggcagacaagacaggagctgtcgccccaggcctgtgctgcccagccaggaaccctgtactgctgctgcgacctgatgctgccagtctgttaaaataaagataagagacttggactcca

SEQ ID NO: 531084 - DNA, 120 bp, Artificial Sequence
  ENSG00000166311_19 (sequence is synthesized)
tggtcactgttgaaagccttcattcagtccccctttctctagccagggctgcctggacccctggatgccctgattaccatccttaattctccctactaggtgcatataattggccacatt

SEQ ID NO: 531085 - DNA, 120 bp, Artificial Sequence
  ENSG00000166313_0 (sequence is synthesized)
atgttgtgatggagaagccgcggcggagcccgaaccccgcagcctgagccacctccgtcatctgggcccggggcctcaccgcgcaggagctgccaaggccatgtctgttccatcatcact

SEQ ID NO: 531086 - DNA, 120 bp, Artificial Sequence
  ENSG00000166313_1 (sequence is synthesized)
gagccagtcggccattaatgccaacagccacggaggccccgcactgagcctacccctgcctctgcacgctgcccacaaccagctgctcaacgccaagctgcaggccacagctgtgggacc

SEQ ID NO: 531087 - DNA, 120 bp, Artificial Sequence
  ENSG00000166313_2 (sequence is synthesized)
caaggacctgcgcagcgccatgggggagggtggtgggcctgagccaggccctgccaatgccaagtggctaaaagagggccagaaccagctccggcgggccgccacggcccaccgtgacca

SEQ ID NO: 531088 - DNA, 120 bp, Artificial Sequence
  ENSG00000166313_3 (sequence is synthesized)
gaatcgcaatgtgaccttgaccttggcggaggaggccagccaggagcctgagatggcacccttgggccccaaaggcctgatacacctgtactctgagctggagctctcagctcacaacgc

SEQ ID NO: 531089 - DNA, 120 bp, Artificial Sequence
  ENSG00000166313_4 (sequence is synthesized)
agccaaccgaggcctacgaggacctggcctgatcatcagcactcaagagcaggggccagatgagggagaggagaaggcggccggggaggccgaggaggaggaggaggatgatgatgatga

SEQ ID NO: 531090 - DNA, 120 bp, Artificial Sequence
  ENSG00000166313_5 (sequence is synthesized)
agaggaggaggaggacttatcttctcccccagggctgcctgagcccctggagagtgtggaggcccctcccaggccccaagcccttacagatggcccccgggaacacagcaagagtgccag

SEQ ID NO: 531091 - DNA, 120 bp, Artificial Sequence
  ENSG00000166313_6 (sequence is synthesized)
cctcctgtttggcatgcggaacagtgcagccagtgatgaggactcaagctgggctaccttatcccagggcagcccctcctatggctccccagaggacacagattccttctggaaccccaa

SEQ ID NO: 531092 - DNA, 120 bp, Artificial Sequence
  ENSG00000166313_7 (sequence is synthesized)
cgccttcgagacggattccgacctgccggctggatggatgagggtccaggacacctcagggacctattactggcacatcccaacagggaccacccagtgggaaccccccggccgggcctc

SEQ ID NO: 531093 - DNA, 120 bp, Artificial Sequence
  ENSG00000166313_8 (sequence is synthesized)
cccctcacaggggagcagcccccaagaggagtcccagctcacctggacaggttttgctcatggagaaggctttgaggatggagaattttggaaggatgaacccagtgatgaggccccaat

SEQ ID NO: 531094 - DNA, 120 bp, Artificial Sequence
  ENSG00000166313_9 (sequence is synthesized)
ggagctgggactgaaggaacctgaggaggggacgttgaccttcccagctcagagcctcagcccagagccgttgccccaagaggaggagaagcttcccccacggaataccaacccagggat

SEQ ID NO: 531095 - DNA, 120 bp, Artificial Sequence
  ENSG00000166313_10 (sequence is synthesized)
acaacctgcatgaccccatgtctgggggctggggggaaggaaaggatctgctactgcagctggaggatgagacactaaagctagtggagccacagagccaggcactgctgcacgcccaac

SEQ ID NO: 531096 - DNA, 120 bp, Artificial Sequence
  ENSG00000166313_11 (sequence is synthesized)
ccatcatcagcatccgcgtgtggggcgtcgggcgggacagtggaagggactttgcctacgtagctcgtgataagctgacccagatgctcaagtgccacgtgtttcgctgtgaggcacctg

SEQ ID NO: 531097 - DNA, 120 bp, Artificial Sequence
  ENSG00000166313_12 (sequence is synthesized)
ccaagaacatcgccaccagcctgcatgagatctgctctaagatcatggccgaacggcgtaatgcccgctgcttggtaaatggactctccctggaccactctaaacttgtggatgtccctt

SEQ ID NO: 531098 - DNA, 120 bp, Artificial Sequence
  ENSG00000166313_13 (sequence is synthesized)
tccaagtggaattcccagcgcctaagaatgagttggtccagaagttccaagtctattacctggggaatgtacctgttgctaaacctgttggggtagatgtgattaatggggccctcgagt

SEQ ID NO: 531099 - DNA, 120 bp, Artificial Sequence
  ENSG00000166313_14 (sequence is synthesized)
cagtcctgtcctccagcagccgtgaacaatggaccccaagtcatgtcagtgtggcccctgctaccctcaccatcttgcaccagcagacagaggcagtgctgggagagtgtcgggtgcgtt

SEQ ID NO: 531100 - DNA, 120 bp, Artificial Sequence
  ENSG00000166313_15 (sequence is synthesized)
tcctctccttcctggccgtgggcagagatgtccacacgtttgcattcatcatggctgccggcccagcctccttctgctgccacatgttctggtgcgagcccaatgctgccagcctctcag

SEQ ID NO: 531101 - DNA, 120 bp, Artificial Sequence
  ENSG00000166313_16 (sequence is synthesized)
aggctgtgcaggctgcgtgcatgcttcgctaccagaagtgtctggatgcccgttcccaggcctccacctcctgcctcccagcaccccctgctgagtctgtggcacggcgtgtagggtgga

SEQ ID NO: 531102 - DNA, 120 bp, Artificial Sequence
  ENSG00000166313_17 (sequence is synthesized)
ctgtccgcaggggtgttcagtcgctgtggggctccctgaagcccaaacggctgggggcccataccccatgaagaagcccccaccttccctccacctgcttgtgttgggccccagggaact

SEQ ID NO: 531103 - DNA, 120 bp, Artificial Sequence
  ENSG00000166313_18 (sequence is synthesized)
aaagggtgtgggtcagggaggggtctagaggctattcctaggcctcaggcctcccaaatatgcccctccccagtagctacggttccctgcctaggagctggggagggagagatctaatcc

SEQ ID NO: 531104 - DNA, 120 bp, Artificial Sequence
  ENSG00000166313_19 (sequence is synthesized)
cttcaaggaagtgataacactggagtggtaacaagaggagcaggaagcaaggccagccctggttctccatccccatgtgtttcaggtggaacaggaggaactggtccaggccaggcctca

SEQ ID NO: 531105 - DNA, 120 bp, Artificial Sequence
  ENSG00000166313_20 (sequence is synthesized)
tcctcctggacccagcaggggcagaaggaggaagggactggtccaggcatgggtcccttccccctgctccatgggcacctctgctgtattgatatcactaataaagtctgtctgcactgc

SEQ ID NO: 531106 - DNA, 120 bp, Artificial Sequence
  ENSG00000166313_21 (sequence is synthesized)
gcttttctctgcagcccagcaccaggctgtgagcccagctggctgggctggaggggctgtgaggagggagggtggaggcaggaggggccgggaatgagcgccatgttctcccaggacttt

SEQ ID NO: 531107 - DNA, 120 bp, Artificial Sequence
  ENSG00000166313_22 (sequence is synthesized)
ttgctctacaagggtgtgggtggggtcactgagtgctgtaggggggccccagggcaatgaggctctaatagattctccctggctcctcgcctcccttccttcctcagatcatggccgaac

SEQ ID NO: 531108 - DNA, 120 bp, Artificial Sequence
  ENSG00000166313_23 (sequence is synthesized)
tgggtgacccaaggaaaggcatgagctcctggacagcgctgatagaaaaatgaacacatgaagactgaatactccaatacgtggagggactccggttaaagggaggcaggggacgagatg

SEQ ID NO: 531109 - DNA, 120 bp, Artificial Sequence
  ENSG00000166313_24 (sequence is synthesized)
gcgcgctcctgggcgggggatgttgtgatggagaagccgcggcggagcccgaaccccgcagcctgagccacctccgtcatctgggcccggggcctcaccgcgcagattccttctggaacc

SEQ ID NO: 531110 - DNA, 120 bp, Artificial Sequence
  ENSG00000166313_25 (sequence is synthesized)
ggaagtaaggacctgagccgggggtagggggtggtactgtgagagtgtgaagggaattatgagagatgggaggtctgacctgcccacaagcaggctggggaagggggatattggcccatc

SEQ ID NO: 531111 - DNA, 120 bp, Artificial Sequence
  ENSG00000166313_26 (sequence is synthesized)
ctaagtggcagccctgtgggatggatgagcgaccccaggccaggaccttgggagatagtcgcctaacaacggtggagtcaatgtgagagatgacacgtgacctccactagagtgaggcct

SEQ ID NO: 531112 - DNA, 120 bp, Artificial Sequence
  ENSG00000166313_27 (sequence is synthesized)
gcagggcgggcggtctgacaccaaagcaggggccccagagctgtggctaacatcccctgagctgcaggggtcagagatcagccaccatcctggctggagtcccactgagtgcctgcttct

SEQ ID NO: 531113 - DNA, 120 bp, Artificial Sequence
  ENSG00000166313_28 (sequence is synthesized)
ggaactctccagttttgactcagatcctctacctcctgcccctcttctgtgtctggcagtgtttcgccgtgcgctccctaggctgggtagagatgaccgaggaggagctggcccctggac

SEQ ID NO: 531114 - DNA, 120 bp, Artificial Sequence
  ENSG00000166313_29 (sequence is synthesized)
gagacgctgcagcctagctgggccctggcaggtgaggggtggggggtggtgctgggaagccccaagcccagcctcaagcttgctggggctcaggacctcaaagcccacccttgggttcaa

SEQ ID NO: 531115 - DNA, 120 bp, Artificial Sequence
  ENSG00000166313_30 (sequence is synthesized)
actgctgtgcaggtcctggacaggggcgggatccctgaaggccttgaaaccacaccctatttatgctgacagctataggctctgcagggccccaggcagctggggtattccttaggggct

SEQ ID NO: 531116 - DNA, 120 bp, Artificial Sequence
  ENSG00000166313_31 (sequence is synthesized)
atgttctcccaggactttttcctggccattatcctgcaggacagcagcgcagtgtggccacattagccaccaacagggcccaggaggagacctgagccatgtcccctactggtggcccca

SEQ ID NO: 531117 - DNA, 120 bp, Artificial Sequence
  ENSG00000166313_32 (sequence is synthesized)
ttattgtggtgtgaagcaatgtgatgtctgagtgtgatgagcgctgagagagcatgatttggggaaatcagaactttgagaggtcagtcagttcagaagtgtggaggaataggcagagcc

SEQ ID NO: 531118 - DNA, 120 bp, Artificial Sequence
  ENSG00000166313_33 (sequence is synthesized)
ggtgaaaataacgagcctaggatccaagattttaaaaagtaggaaaatgtccagttactgaagccaggggaggagagccccagggaagggatacttggacagcgttgtccaaaatgtagg

SEQ ID NO: 531119 - DNA, 120 bp, Artificial Sequence
  ENSG00000166313_34 (sequence is synthesized)
ctggcaaagtggggatggggcaaaggccctgggtttgattgggtggaactagaggtccagggtagagctggggtatcctctgtctaccctcagtggtatcttgtgtccatatgttctagg

SEQ ID NO: 531120 - DNA, 120 bp, Artificial Sequence
  ENSG00000166313_35 (sequence is synthesized)
tttggaagctgaggatggtgaagcaccctgcctgaataactctcgtcaggtgtgcagccaccttggcgtaaccacgcccactcccagccctgctgtgtctggttgcccagcagcagggtc

SEQ ID NO: 531121 - DNA, 120 bp, Artificial Sequence
  ENSG00000166313_36 (sequence is synthesized)
ttgggactgcctgtcccttagtactgcctcttggaccagtcaggattcctggtttccctggtaacgggaagcacgtcagcagtctgggcgctcccagccggtcctggtgctgcggttgcc

SEQ ID NO: 531122 - DNA, 120 bp, Artificial Sequence
  ENSG00000166313_37 (sequence is synthesized)
agtggaagagagaggtactatgcctattttccccctcctacacctggaccagatgcctggaagcacccaagctcccctcttctgccctgccccttcccacccgctatgctccaccattac

SEQ ID NO: 531123 - DNA, 120 bp, Artificial Sequence
  ENSG00000166313_38 (sequence is synthesized)
cctccacctcagcatgcttgcctgtctacccctcccccccaagaaggcagcacctatgggggaccagctgtgggcagaagccctggaggagctgtgatgggcagggaggacgtgggtggg

SEQ ID NO: 531124 - DNA, 120 bp, Artificial Sequence
  ENSG00000166313_39 (sequence is synthesized)
catgtggtgactccagactataggctctaggcagaagcaggaactgtgttgtggtatagctcttccaccaccccttctcaaccatggggtctcagaggggaccgggcataggcaccagct

SEQ ID NO: 531125 - DNA, 120 bp, Artificial Sequence
  ENSG00000166313_40 (sequence is synthesized)
agggcctcggctgggcaagtgtccagcttatgccctgctggtggggctgcgggtgagcaaggtctgccaccatgatcaaccttctcttctttcccatagtggaattcccagcgcctaaga

SEQ ID NO: 531126 - DNA, 120 bp, Artificial Sequence
  ENSG00000166317_0 (sequence is synthesized)
agcaggagcaggacagccggacaggaagcccagacggggttcgagcacctcaacttctctcctggggacactgttcaaactccgggggccataggccaagctgagcgatgggtgctgagg

SEQ ID NO: 531127 - DNA, 120 bp, Artificial Sequence
  ENSG00000166317_1 (sequence is synthesized)
aggaggtgctggtcacactatcagggggagccccctggggcttccgacttcatgggggggccgagcagaggaaaccgttacaggtgtctaagattcgaagacggagccaggctggcagag

SEQ ID NO: 531128 - DNA, 120 bp, Artificial Sequence
  ENSG00000166317_2 (sequence is synthesized)
caggactccgagagagggaccagctcttggcaatcaatggggtctcttgcaccaacctctcccatgccagtgccatgagcctcatcgatgcctcaggaaatcagcttgtcctcactgtgc

SEQ ID NO: 531129 - DNA, 120 bp, Artificial Sequence
  ENSG00000166317_3 (sequence is synthesized)
agcggttagcagacgagggtcctgtgcaatctccatctccccatgagcttcaggtgctgtcacccttatctccactaagtcctgagccccctggtgctccagttcctcagcctcttcagc

SEQ ID NO: 531130 - DNA, 120 bp, Artificial Sequence
  ENSG00000166317_4 (sequence is synthesized)
ctgggagccttcgttcacctcctgatagtgaggcttactacggagagactgacagtgatgctgatggccctgccacccaggagaagccccgtcgacctcgccgccgaggccccacaaggc

SEQ ID NO: 531131 - DNA, 120 bp, Artificial Sequence
  ENSG00000166317_5 (sequence is synthesized)
ccacccctccgggtgccccacctgatgaggtctacctgtctgacagccctgcagagccagcacctactatccctggccctcccagccagggtgacagccgtgtgagctccccgtcttggg

SEQ ID NO: 531132 - DNA, 120 bp, Artificial Sequence
  ENSG00000166317_6 (sequence is synthesized)
aggatggggcagcccttcagccacccccagctgaggctctgctgttaccccatggccccctccgacctggtcctcatctcatccctatggtggggcctgttccccacccagtggcagaag

SEQ ID NO: 531133 - DNA, 120 bp, Artificial Sequence
  ENSG00000166317_7 (sequence is synthesized)
atcttactaccacctacacccagaaggccaagcaagccaaactgcaacgtgcagagagcctccaagagaagagcataaaagaggccaagaccaaatgcaggacaattgcatccctgctca

SEQ ID NO: 531134 - DNA, 120 bp, Artificial Sequence
  ENSG00000166317_8 (sequence is synthesized)
ctgcagcccccaacccccactccaaaggggtacttatgtttaagaaacggcggcagagagccaagaagtacaccctggtgagcttcggggctgctgctgggacaggcgctgaggaggagg

SEQ ID NO: 531135 - DNA, 120 bp, Artificial Sequence
  ENSG00000166317_9 (sequence is synthesized)
acggcgttccccccacgagtgagtccgagctggacgaagaagccttctctgacgcccgcagcctcaccaatcaatctgactgggacagtccctatctggacatggagcttgccagggcgg

SEQ ID NO: 531136 - DNA, 120 bp, Artificial Sequence
  ENSG00000166317_10 (sequence is synthesized)
gctcaagagcatcagagggccagggctctgggctgggagggcagctgagtgaggtctctgggcgaggggtgcagctctttgaacagcagcgccagcgcgcagactccagcacccaggaac

SEQ ID NO: 531137 - DNA, 120 bp, Artificial Sequence
  ENSG00000166317_11 (sequence is synthesized)
tggcacgggtcgaaccagcagccatgctcaacggggaaggcctgcagtcaccacctcgggcccagagtgctcccccagaggcagctgtgctcccacccagccccttgccggcgcctgtag

SEQ ID NO: 531138 - DNA, 120 bp, Artificial Sequence
  ENSG00000166317_12 (sequence is synthesized)
ccagccccagacccttccaaccaggtggtggagccccgaccccagctccaagcatctttaaccggtcagccaggccctttaccccgggcctacaagggcagcggccaactaccacctcgg

SEQ ID NO: 531139 - DNA, 120 bp, Artificial Sequence
  ENSG00000166317_13 (sequence is synthesized)
ttattttccggcctttagcccccaaaagggcgaacgacagcctggggggcctcagccccgccccaccccccttcttgtcttcgcaggggcccacccctctgcccagcttcacttcagggg

SEQ ID NO: 531140 - DNA, 120 bp, Artificial Sequence
  ENSG00000166317_14 (sequence is synthesized)
ttcccagccacgcgccagtctctggttcccccagcaccccacgctcctcgggccctgtgacagccaccagctccctgtacatcccagcccctagtcggcctgtcaccccaggtggagctc

SEQ ID NO: 531141 - DNA, 120 bp, Artificial Sequence
  ENSG00000166317_15 (sequence is synthesized)
cagagccccccgctcctcctagcgcagctgccatgacctccaccgcttctatcttcctatctgcgcctttgcgaccctctgcgcgcccagaggcgcctgccccaggcccaggggctcctg

SEQ ID NO: 531142 - DNA, 120 bp, Artificial Sequence
  ENSG00000166317_16 (sequence is synthesized)
agccccccagcgctcgcgagcagcgcatctctgtgccagctgcccgcacgggtatcctgcaggaggcccggcgccgggggacccggaagcagatgttccggccgggaaaggaggagacga

SEQ ID NO: 531143 - DNA, 120 bp, Artificial Sequence
  ENSG00000166317_17 (sequence is synthesized)
agaactcgcccaaccccgagctgctatcgctggtacagaacctggatgaaaagcctcgggccgggggtgcagaatctggtcctgaagaagatgctctgagcctcggggctgaagcctgca

SEQ ID NO: 531144 - DNA, 120 bp, Artificial Sequence
  ENSG00000166317_18 (sequence is synthesized)
acttcatgcagccagtaggggccaggagttacaagaccctgcctcacgtgacacctaagaccccccctccaatggctcccaagaccccgccccctatgactcctaagactccacccccag

SEQ ID NO: 531145 - DNA, 120 bp, Artificial Sequence
  ENSG00000166317_19 (sequence is synthesized)
tggctcctaagcccccatctcgagggctccttgatgggctcgtgaatggggcagcctcttcggctggaatccctgagccaccaaggctgcagggcaggggtggggagctgtttgctaagc

SEQ ID NO: 531146 - DNA, 120 bp, Artificial Sequence
  ENSG00000166317_20 (sequence is synthesized)
ttctcctaccccgtctctgcccccttcctggaaatattcacccaacatccgtgccccgcctcctattgcttacaacccactgctctctccctttttcccccaggcggcccgaactctccc

SEQ ID NO: 531147 - DNA, 120 bp, Artificial Sequence
  ENSG00000166317_21 (sequence is synthesized)
taaggcccaatcccaggggcctcgggcaacacccaagcagggcatcaaggctctagattttatgcggcatcagccctatcaacttaaaactgccatgttctgttttgatgaggttccccc

SEQ ID NO: 531148 - DNA, 120 bp, Artificial Sequence
  ENSG00000166317_22 (sequence is synthesized)
gactcctggccctatcgcctcagggtcccccaaaactgcccgagtccaggagattcgccggttttccactccggcaccccagcccactgcagaacccctggctcccactgtgcttgcccc

SEQ ID NO: 531149 - DNA, 120 bp, Artificial Sequence
  ENSG00000166317_23 (sequence is synthesized)
ccgagcagccactacactggatgagcccatctggagaacagaactggcctcagcccctgttcctagcccagcccctcctccagaggctcccaggggccttggggcttctcccagctcctg

SEQ ID NO: 531150 - DNA, 120 bp, Artificial Sequence
  ENSG00000166317_24 (sequence is synthesized)
cggtttccaggtagccaggccccgattttcagccaccagaacaggattgcaagctcatgtgtggaggcctggggcagggcaccagtgaacaggcacaggtcccaggaccaaggagaggtg

SEQ ID NO: 531151 - DNA, 120 bp, Artificial Sequence
  ENSG00000166317_25 (sequence is synthesized)
gaacatccagttcctaaagttgcttctcctaccctatcccatcccctgtcacgcatctggaagctaaattgcctcctgccagagatggtttccaagttgatgtccccttcccccaccttc

SEQ ID NO: 531152 - DNA, 120 bp, Artificial Sequence
  ENSG00000166317_26 (sequence is synthesized)
ctcctcactctctacctccctgccgctttccaaccaagtatgtctgctttggtatctttgcctctctttgtctctgcatttcctttcctggatctctgtctttatttccaggcttctcca

SEQ ID NO: 531153 - DNA, 120 bp, Artificial Sequence
  ENSG00000166317_27 (sequence is synthesized)
cccatattcctccacagatctctcttccttgacatttgtgcttttctccctgggcctcattttaatgttcagtgagaagtaaacagagcagaagtgaccactgggacttcaggcaagaag

SEQ ID NO: 531154 - DNA, 120 bp, Artificial Sequence
  ENSG00000166317_28 (sequence is synthesized)
ctcaccaccaggcacacagcaaagggactgaactgacccctgtttgcactaagccacccccaccccccactctgctttcccaagcttgactggcatatacctaggcctgtgtgtgtgtgt

SEQ ID NO: 531155 - DNA, 81 bp, Artificial Sequence
  ENSG00000166317_29 (sequence is synthesized)
tccgtctaaggcatgaataagaggggaggtcaaaataaagacccaatctgaggccgggcacggtggctcacgccggtaatc

SEQ ID NO: 531156 - DNA, 120 bp, Artificial Sequence
  ENSG00000166317_30 (sequence is synthesized)
ctcaaaacaaacaaacaaacaaaagacccaatctgagtcttatcgttgtactgatagaagggtcagatatccccacatggagttgagtgggagaaagagattcactagagaataactcct

SEQ ID NO: 531157 - DNA, 120 bp, Artificial Sequence
  ENSG00000166317_31 (sequence is synthesized)
tagagaccaatgtctgtagcaggtgtacagcatcttgtgaaagttatggagcatgaaaagactgaagggccaggacagtttgcatgggctgagttataccagctagaccaggaatagaac

SEQ ID NO: 531158 - DNA, 120 bp, Artificial Sequence
  ENSG00000166317_32 (sequence is synthesized)
aaagaattctatacctcaggatttcaaaaagttagcaacttgagaggccagtgctgagcaacccagtacccaggaaatgaaaaaaagaaagaaaattccctccgagaatgaacaaatcat

SEQ ID NO: 531159 - DNA, 120 bp, Artificial Sequence
  ENSG00000166317_33 (sequence is synthesized)
tggcttcattgcctcatgagcttgagagaaaggagaagagagccagagtgtggcaagtgaggccaaaatcagaagcatggcagaaatgagtgtaagtgattgagccacagacagaagtgt

SEQ ID NO: 531160 - DNA, 120 bp, Artificial Sequence
  ENSG00000166317_34 (sequence is synthesized)
ggcgagggacaatgccatattgggagaaggtaaagttgagtaacaagaaaccaaccgtgtgtgagagggggattggaaaaaaatttgagggagaagaatgttagaatggaagggaatgat

SEQ ID NO: 531161 - DNA, 120 bp, Artificial Sequence
  ENSG00000166317_35 (sequence is synthesized)
ggtggaagggaggtgtgagggtgtgtgctgagtgttgaaagaacggttggtgtctgtgtgattttccttgagtctgttcttcagtgtgtcttctgcagcttgccatgactgcctgggaaa

SEQ ID NO: 531162 - DNA, 120 bp, Artificial Sequence
  ENSG00000166317_36 (sequence is synthesized)
gagtagggaaatacccagagccaaaacctcctttcagtcccaccccatccctcaaaaccccagctattgcttcttttcagcttcaggtcctgatctccaatcttagtatggactcccttc

SEQ ID NO: 531163 - DNA, 120 bp, Artificial Sequence
  ENSG00000166317_37 (sequence is synthesized)
tcaccaagaccaccaccagctacgtttgctgtgtaatctggaaagtgataatttcctttgcttgttgggtgtgagtcacaatactttggtttgtgcacaagaataaatttatgccccata

SEQ ID NO: 531164 - DNA, 120 bp, Artificial Sequence
  ENSG00000166317_38 (sequence is synthesized)
agccaacaccgcctttctcagcatggagacctttgagcccatcagccaagagcccctcagccaagccagctatgacaaagccccagacccagttcctgagctccaagactcgttctatgc

SEQ ID NO: 531165 - DNA, 120 bp, Artificial Sequence
  ENSG00000166317_39 (sequence is synthesized)
ctcctagttcaccactgtctgctgccacacgatgttgggaggcctgggaaagctggctgccgagggcctggcccaccgcaccgagaaggccaccgagggagccaattcgaagacggagcc

SEQ ID NO: 531166 - DNA, 120 bp, Artificial Sequence
  ENSG00000166321_0 (sequence is synthesized)
agaagcagcaatggtccctccagggaacggaagccgttgaacgtgaacatttggagtttcctcttttgtgctgattcctgaggactaggaaggtgccccgaaaagaattcagagacctga

SEQ ID NO: 531167 - DNA, 120 bp, Artificial Sequence
  ENSG00000166321_1 (sequence is synthesized)
caatgtccctgtattgtggaatagcttgcaggagaaaatttttttggtgctataggctgctgtcaacctatgttactaagacacggtatttatttgaactgaaggaagatgatgatgcat

SEQ ID NO: 531168 - DNA, 120 bp, Artificial Sequence
  ENSG00000166321_2 (sequence is synthesized)
gtaaaaaagcccagcaaacaggagcgttttacctctttcatagtctggctcctctgcttcagacttcagcacatcaatacctggccccccggcacagcctgttagagttggaaaggctcc

SEQ ID NO: 531169 - DNA, 120 bp, Artificial Sequence
  ENSG00000166321_3 (sequence is synthesized)
tgggtaaatttggacaggatgcacaaagaatagaagattctgtgctgattggatgctctgagcagcaggaagcatggtttgctctggatctaggtctggatagctccttttccataagtg

SEQ ID NO: 531170 - DNA, 120 bp, Artificial Sequence
  ENSG00000166321_4 (sequence is synthesized)
cctccttacacaaacctgaaatggagacagagctcaaggggtctttcattgagctgagaaaggcactctttcaactcaatgcaagggatgcctccttgctgtccacggctcaagctcttc

SEQ ID NO: 531171 - DNA, 120 bp, Artificial Sequence
  ENSG00000166321_5 (sequence is synthesized)
tccgctggcatgatgctcatcagttctgcagcagaagtgggcagcccaccaagaagaacgtggctggcagcaagcgtgtgtgcccttccaataatataatctattatccacagatggctc

SEQ ID NO: 531172 - DNA, 120 bp, Artificial Sequence
  ENSG00000166321_6 (sequence is synthesized)
ctgtggcgatcacgctggtgtcagatgggacccgatgcctgcttgcccgccaaagctcctttcccaagggaatgtattctgccttggcaggtttttgtgatataggtgaaagtgtggaag

SEQ ID NO: 531173 - DNA, 120 bp, Artificial Sequence
  ENSG00000166321_7 (sequence is synthesized)
agaccatccgccgagaagttgcagaagaggtgggattggaggtggaaagcctgcagtactatgcatcccagcattggcccttccctagtggctcactcatgattgcttgccatgcaactg

SEQ ID NO: 531174 - DNA, 120 bp, Artificial Sequence
  ENSG00000166321_8 (sequence is synthesized)
cagtcatgatgaggtagccacagccctgaagagaaagggcccctatactcagcaacagaatgggactttcccattctggctgccccctaagttagccatctcccaccaactgattaagga

SEQ ID NO: 531175 - DNA, 120 bp, Artificial Sequence
  ENSG00000166321_9 (sequence is synthesized)
gtgggtggaaaaacagacctgttcttccctgcctgcttagcccggatcaagtcacttagatcgctccttggtattcctgagggacaaactagagatcagttgacaaaggagaagtgacaa

SEQ ID NO: 531176 - DNA, 120 bp, Artificial Sequence
  ENSG00000166321_10 (sequence is synthesized)
aagataagctgcagaaggacctcagaagggcagagcaaagggtgagcctacagtaagacacttctatcagcagtgttaatggaagaaattcctaccaatgggcaatcaaaaaagccagtg

SEQ ID NO: 531177 - DNA, 120 bp, Artificial Sequence
  ENSG00000166321_11 (sequence is synthesized)
tgagaagaaaactgatgagctgtcaactgtcaaaaatcagggggaagggggaagcattagtttggatgtaggcccttgttcagtcattttctctaaggccttggaagcaaacatcttctg

SEQ ID NO: 531178 - DNA, 120 bp, Artificial Sequence
  ENSG00000166321_12 (sequence is synthesized)
gcatatggcttgttaatgttgtgtttacactaactgccaaaatgtgcctgttgtaagtttggttaaaacttttatcttagtattgaaaatatatagcaagttttaagtcattactgagtt

SEQ ID NO: 531179 - DNA, 120 bp, Artificial Sequence
  ENSG00000166321_13 (sequence is synthesized)
acttgttacccttacagaattaagaaaaatagcacagtatgacattttaaaattcatgtacaggtgcattctagttacatgaacatgctagttaaataaaagtcacaattaagtcattat

SEQ ID NO: 531180 - DNA, 120 bp, Artificial Sequence
  ENSG00000166321_14 (sequence is synthesized)
gactcagagtactttataataaatcagatgccctgaggctctgttgaggaagtagaatcccaatgggactccagacagtaaatctttttcgctgttttcagctctgtcacatgctcagtt

SEQ ID NO: 531181 - DNA, 120 bp, Artificial Sequence
  ENSG00000166321_15 (sequence is synthesized)
tgtgacccagggaaaagactattgctttgccatgcctgttttcctaaataaaacagttgctggcatttgcacatccacaacgtgttgattaacaaagggattggtggagataaacagatg

SEQ ID NO: 531182 - DNA, 120 bp, Artificial Sequence
  ENSG00000166321_16 (sequence is synthesized)
ccaaacctgacctatttcttaaactttatggaataaactaaatttaggatttctcatcattcatatatgatgccataagggagaagagtttatttggggaaaataaaagaaatttccaca

SEQ ID NO: 531183 - DNA, 120 bp, Artificial Sequence
  ENSG00000166321_17 (sequence is synthesized)
tgttactaagacacgatttctacatggttgtcaatcatgcctatgtaatgaagccaccataaaaacccaaaaggacagggttcagagagcctctggatagctgaacacatggaagttcct

SEQ ID NO: 531184 - DNA, 120 bp, Artificial Sequence
  ENSG00000166321_18 (sequence is synthesized)
ggagggtggtgcacccagggagtcatggaagctctgcaccctccccccacatacctgacctaaatgcatctcttcatttgtatccttcgtaatatcctatataataaaccagtaaacatc

SEQ ID NO: 531185 - DNA, 120 bp, Artificial Sequence
  ENSG00000166323_0 (sequence is synthesized)
gtcatttccgcctgcgacgttacctaggagtccagcggcgcccgggccagcagcgattggaatttcaaatgccttggaaagaggaatcagaatttacaaagcaggataaggctgccagag

SEQ ID NO: 531186 - DNA, 120 bp, Artificial Sequence
  ENSG00000166323_1 (sequence is synthesized)
tcattcagcaggcctggaaaagtttccttaatgtcgctatatttcaacactttaaaagtctgattgatttaagaagacaaggagaaccacgtcagatagtgaaatatattaatcccaaag

SEQ ID NO: 531187 - DNA, 120 bp, Artificial Sequence
  ENSG00000166323_2 (sequence is synthesized)
aggcagagcttctagatgctgctgctggcattcatgtgcgattcagattaggtggagttaaatttccacctgatatatactataagatttttactcacagacctattgaagatctctgtg

SEQ ID NO: 531188 - DNA, 120 bp, Artificial Sequence
  ENSG00000166323_3 (sequence is synthesized)
ctaacagccctagaaattatgcaaaacttccagcaaagcatacatctcataataaaaatgatcatcttcaggaagaggatcatagtggctggtatcatcgtatagaaaacaatggctgga

SEQ ID NO: 531189 - DNA, 120 bp, Artificial Sequence
  ENSG00000166323_4 (sequence is synthesized)
ggccagtttctgatacattttggctatctactgatggtatggtggtggaagacaaaaaggaaagtgaattccatttctctaaactgaagagaaggcaagatttggaaaagaaaagaaaac

SEQ ID NO: 531190 - DNA, 120 bp, Artificial Sequence
  ENSG00000166323_5 (sequence is synthesized)
aggactaattcacactgcaacaaaggggctgattagagcttttgaagatggggggatagattctgtgatggaatgggaagtggatgaagtgctgaactggacaaatacactgaactttga

SEQ ID NO: 531191 - DNA, 120 bp, Artificial Sequence
  ENSG00000166323_6 (sequence is synthesized)
tgagtacattgccagctggaaggaaattgctacaagcaactcttcggctaacttcaaaggattcaggtttaatcaagcacagaaaaacatatataactatggaggagacatatcaaagat

SEQ ID NO: 531192 - DNA, 120 bp, Artificial Sequence
  ENSG00000166323_7 (sequence is synthesized)
gcaaatgggaataccagatgatacttactatgaaaatgtttatcaagaaccaaatgtaactagattaacgcctgattctacttatggactataaagtactttatttctattctgagttat

SEQ ID NO: 531193 - DNA, 120 bp, Artificial Sequence
  ENSG00000166323_8 (sequence is synthesized)
agccctttgagccttccatccatcagttatagccaagagatagtgtattctgactggaataacttgtgtatatattctgggcacagaatctagctcagttaagtaaggaagattgagcag

SEQ ID NO: 531194 - DNA, 120 bp, Artificial Sequence
  ENSG00000166323_9 (sequence is synthesized)
aaatagaacactggactgaatacaatgatcatggcaaatatagaaattattcctagtattctgagaaactgtagtattctaacagtcacacttaagtaaagagactacatttaggtgcaa

SEQ ID NO: 531195 - DNA, 120 bp, Artificial Sequence
  ENSG00000166323_10 (sequence is synthesized)
agtccagcggcgcccgggccagcagcgattggtctaattttaggttagggacctgcgcaattttgtggatgcaactctgtctctatgcacgttaagaaaggtttatttgaagtcatacaa

SEQ ID NO: 531196 - DNA, 120 bp, Artificial Sequence
  ENSG00000166323_11 (sequence is synthesized)
aatggcaaactgtaacaaatgacaacatgtatgaacagaatttgaaatcggtaaaagaaaaaagaatgtatttttaaccttgggaatagcacagccttggatttaattttaccaacgtat

SEQ ID NO: 531197 - DNA, 120 bp, Artificial Sequence
  ENSG00000166323_12 (sequence is synthesized)
tattgggacctatttcagcaaactccttgtagcaaaatctgtattaccatctgcagtccaaaggagatctataaagatgcctcggttcataaaggtgcacacaggaccaccctgatggac

SEQ ID NO: 531198 - DNA, 120 bp, Artificial Sequence
  ENSG00000166323_13 (sequence is synthesized)
taagacagttctcatatcctagttgaacagtaggagagatttttaaaaatgcacatattcctgccccatctctagaaacctggtttgaatttgatcagcatcaatgttttttaaatgcag

SEQ ID NO: 531199 - DNA, 120 bp, Artificial Sequence
  ENSG00000166323_14 (sequence is synthesized)
taaaagtaatactaacatgcagccagtccaacataaatcaggttaaaggaagaaaagctgagtagtggaaaagtggcaagcccatactgcactctacctgccatgcttccctggggaggc

SEQ ID NO: 531200 - DNA, 120 bp, Artificial Sequence
  ENSG00000166323_15 (sequence is synthesized)
cacactcctgatttcttgtctcacatacccttaccagattggtgaatgactggcataggtactaacagcacagacactgaaatttgtttgacttccttttttctgccctggatcaagaca

SEQ ID NO: 531201 - DNA, 120 bp, Artificial Sequence
  ENSG00000166323_16 (sequence is synthesized)
aggcagtgatcctgattacatgtgtttgctctgcaggcccaaaccctattcaggtgagctgtcccaaagttaagacagcagagaggtactgaggtagcaccagcagtaaactagtctggc

SEQ ID NO: 531202 - DNA, 120 bp, Artificial Sequence
  ENSG00000166323_17 (sequence is synthesized)
cctcattcctaagccatgttcctctagtaatgatgctgacaatttgatctccatttgtctgactaattagttctgaacctgagcagggaaaaaggagatataaatttctgatttttctta

SEQ ID NO: 531203 - DNA, 120 bp, Artificial Sequence
  ENSG00000166323_18 (sequence is synthesized)
aaccctaatggaaaccattctgaaaataataataccatatggaatatctaaatgtcaaagaattgatttatgaattgaaaactagagactacttacaatgctctaacattccaagaaact

SEQ ID NO: 531204 - DNA, 120 bp, Artificial Sequence
  ENSG00000166323_19 (sequence is synthesized)
caagggggctgaaggcatttctaaaccagtatttttggatgtgtgaaaaggctaagtgcacaatctcctcctttctgctgcccagccacatccccctatgttaaaatgaagcagtgctct

SEQ ID NO: 531205 - DNA, 120 bp, Artificial Sequence
  ENSG00000166323_20 (sequence is synthesized)
tcacatcagtgacttcctgatgagatacacagtctacctgagacacaaaaaaaatggagaaaagcctggttctagaaaataatgcatttctactctacaaatcttcctcatttgtttact

SEQ ID NO: 531206 - DNA, 120 bp, Artificial Sequence
  ENSG00000166323_21 (sequence is synthesized)
tacattattgaggacttcatgaaatcctaggcctcccatcatcttggtccccattctagcagccaattggtacataagaggcaaaaatttatatgttggaatcttcattccgtctctcta

SEQ ID NO: 531207 - DNA, 120 bp, Artificial Sequence
  ENSG00000166323_22 (sequence is synthesized)
ccattaaaaaaaagacacaaaattaagaaacaaggtatttcaaatattctcacatctaagcaagtaagttattttaagacagtgctcctctattagcacaagtggttaacaaaacttcac

SEQ ID NO: 531208 - DNA, 120 bp, Artificial Sequence
  ENSG00000166323_23 (sequence is synthesized)
taactatattgttttccttcatttcttttcttatctgaaggtctttctaatgggtactctagattaatgcattggtaaatcaaaatatttggtcctaaattaaactggattcagaactag

SEQ ID NO: 531209 - DNA, 120 bp, Artificial Sequence
  ENSG00000166323_24 (sequence is synthesized)
cagctggaaggaaattgctacaagcaactcttcggctaacttcaaaggaatattcttcaggatcttattcagcattaaaatggaatatgaagaatttttatcttctccaactcctgctaa

SEQ ID NO: 531210 - DNA, 120 bp, Artificial Sequence
  ENSG00000166323_25 (sequence is synthesized)
tgtcaacaccattctaccccaatggtaagtctgaaatgaatgactcaaaggtaaaactgcctcccaacaccaagaaaacaaatgctctccactacattaaagcttctgataggcctcctc

SEQ ID NO: 531211 - DNA, 120 bp, Artificial Sequence
  ENSG00000166323_26 (sequence is synthesized)
agaagataatctggtataaaactctaaggtaaaataaccagaagcaaagacactgaaaagcataaaacttctttttctactagagaagaagaatggtttaagactacataggaattaatt

SEQ ID NO: 531212 - DNA, 120 bp, Artificial Sequence
  ENSG00000166323_27 (sequence is synthesized)
ttttaagatattaatgcatttaggcttaaaaacatttcatttttcactcacctctccctctcattctttaccaaccacccctaccaccaccatacacacttatgagacatcgattcctac

SEQ ID NO: 531213 - DNA, 120 bp, Artificial Sequence
  ENSG00000166323_28 (sequence is synthesized)
ctattcaaattataggcctactacactatttcttcagagttctggtcaactctcaagcagtactcatcagtcagaccatccattctagcaatttctgtatgcactgttaaaaatctcatg

SEQ ID NO: 531214 - DNA, 120 bp, Artificial Sequence
  ENSG00000166323_29 (sequence is synthesized)
ggaacaaaattgtccatgagttggtaactgctgaaactgagtgacaagtacaagggggttcatgatgttattgtctccttttgtatgtttgaaattttccataataataaaagtaaaaag

SEQ ID NO: 531215 - DNA, 120 bp, Artificial Sequence
  ENSG00000166326_0 (sequence is synthesized)
gctgccgcgatctctccctggtagcgggaggctgagcgggcggcgcgacgcgggggccgacgggggcgccgggtggccgcgccggaagtgccttgcgcggcagaggaagcgcagggacag

SEQ ID NO: 531216 - DNA, 120 bp, Artificial Sequence
  ENSG00000166326_1 (sequence is synthesized)
acagagcggagcaggccgagccggcggaaagggtctttgctgctgcgcccgggcaggggctgccgcggccccaggtcccgcttcgagacgcggcgcggtccaggcgggaggcgactccct

SEQ ID NO: 531217 - DNA, 120 bp, Artificial Sequence
  ENSG00000166326_2 (sequence is synthesized)
aggaagggacccggggcgggaggaggaagtgaggccgcgcggaaggaaggcggcgagccccggggccccgaggccttggccgcgtcacagcacccacatggcctctggagtgggcgcggc

SEQ ID NO: 531218 - DNA, 120 bp, Artificial Sequence
  ENSG00000166326_3 (sequence is synthesized)
cttcgaggaactgcctcacgacggcacgtgtgacgagtgcgagcccgacgaggctccgggggccgaggaagtgtgccgagaatgcggcttctgctactgccgccgccatgccgaggcgca

SEQ ID NO: 531219 - DNA, 120 bp, Artificial Sequence
  ENSG00000166326_4 (sequence is synthesized)
caggcagaagttcctcagtcaccatctggccgaatacgtccacggctcccaggcctggaccccgccagctgacggagagggggcggggaaggaagaagcggaggtcaaggtggagcagga

SEQ ID NO: 531220 - DNA, 120 bp, Artificial Sequence
  ENSG00000166326_5 (sequence is synthesized)
gagggagatagaaagcgaggcaggggaagagagtgagtcggaggaagagagcgagtcagaggaagagagcgagacagaggaagagagtgaggatgagagcgatgaggagagtgaagaaga

SEQ ID NO: 531221 - DNA, 120 bp, Artificial Sequence
  ENSG00000166326_6 (sequence is synthesized)
cagcgaggaagaaatggaggatgagcaagaaagcgaggccgaagaagacaaccaagaagaaggggaatccgaggcggagggagaaactgaggcagaaagtgaatttgacccagaaataga

SEQ ID NO: 531222 - DNA, 120 bp, Artificial Sequence
  ENSG00000166326_7 (sequence is synthesized)
aatggaagcagagagagtggccaagaggaagtgtccggaccatgggcttgatttgagtacctattgccaggaagataggcagctcatctgtgtcctgtgtccagtcattggggctcacca

SEQ ID NO: 531223 - DNA, 120 bp, Artificial Sequence
  ENSG00000166326_8 (sequence is synthesized)
gggccaccaactctccaccctagacgaagcctttgaagaattaagaagcaaagactcaggtggactgaaggccgctatgatcgaattggtggaaaggttgaagttcaagagctcagaccc

SEQ ID NO: 531224 - DNA, 120 bp, Artificial Sequence
  ENSG00000166326_9 (sequence is synthesized)
taaagtaactcgggaccaaatgaagatgtttatacagcaggaatttaagaaagttcagaaagtgattgctgatgaggagcagaaggcccttcatctagtggacatccaagaggcaatggc

SEQ ID NO: 531225 - DNA, 120 bp, Artificial Sequence
  ENSG00000166326_10 (sequence is synthesized)
cacagctcatgtgactgagatactggcagacatccaatcccacatggataggttgatgactcagatggcccaagccaaggaacaacttgatacctctaatgaatcagctgagccaaaggc

SEQ ID NO: 531226 - DNA, 120 bp, Artificial Sequence
  ENSG00000166326_11 (sequence is synthesized)
agagggcgatgaggaaggacccagtggtgccagtgaagaagaggacacatgaaggcttgctacccccagtggaaaatcatcccctccccttgtgtgtatgtgacagcgtgtatgtaacgg

SEQ ID NO: 531227 - DNA, 120 bp, Artificial Sequence
  ENSG00000166326_12 (sequence is synthesized)
cttctgatttctgtgaaagctgctcagcaacaaacgtacttccaccagatgtgtccccagatccacagcaggcacatatctctccaagggatgaccagttttatgcttactgtgtgcttc

SEQ ID NO: 531228 - DNA, 120 bp, Artificial Sequence
  ENSG00000166326_13 (sequence is synthesized)
tcatcccctggttgtggtaggtcaaggaaaagagcccctttgatccaccaggagcaattaagaaaggtccttcaggtaatccctcaatggctgctttgaacttactcaggaaagccagcc

SEQ ID NO: 531229 - DNA, 120 bp, Artificial Sequence
  ENSG00000166326_14 (sequence is synthesized)
cccataatattgtattaccaaacagtatcgctttgttaggaaggatctggaataatcttgaagggaagtcagagttttctccctgcctattaacaaaaacccaattttgttcatattgaa

SEQ ID NO: 531230 - DNA, 120 bp, Artificial Sequence
  ENSG00000166326_15 (sequence is synthesized)
gcatgaaataaatgagagcaaggtagggccaaattaactcttgtggacagtccctaaaagtccagttctacatttgtgaaaattgtggtgccatgaattaagatggatgactggaaaaag

SEQ ID NO: 531231 - DNA, 120 bp, Artificial Sequence
  ENSG00000166326_16 (sequence is synthesized)
gtgttggagaaagagttaaagatgaggaagagatatttttagtatatgaagttatccaggacttgatattcataattcagtgctgtggaaatgaaaaaaatgattgaagaggtggaacgg

SEQ ID NO: 531232 - DNA, 120 bp, Artificial Sequence
  ENSG00000166326_17 (sequence is synthesized)
aaatgaccttagggggaaaaaaaaggaccaaagaagtctgattaaaagttgaaatcagtatttctgaattcaaattgcttgaatttccaaaatagtcagtaaaggatctaatagaaccag

SEQ ID NO: 531233 - DNA, 120 bp, Artificial Sequence
  ENSG00000166326_18 (sequence is synthesized)
aattatttgggtgaattctgcaggttttatgggcttgtcacaacgtgaagggctggaatgtatattaccaaatgggaatttccattgtaggtttttgctagtcccacccccattttagcc

SEQ ID NO: 531234 - DNA, 120 bp, Artificial Sequence
  ENSG00000166326_19 (sequence is synthesized)
taatttggcttaaacgcagtatggggagaattgttcccattccatgtgttctgaattcagctcatctcccagcatatagatatatcctcctttaactccgaccagaacccttcttcctgt

SEQ ID NO: 531235 - DNA, 120 bp, Artificial Sequence
  ENSG00000166326_20 (sequence is synthesized)
ggcactccccacccatagaccttcagatcatctcccacaccctggatctcactctcctcttagtaacagagacactcctgaggttggacttccttgcttttctctacttccaaatcacaa

SEQ ID NO: 531236 - DNA, 120 bp, Artificial Sequence
  ENSG00000166326_21 (sequence is synthesized)
tttcttacaaccaagctttgtgctcccgagtaagcagggatgtactaggggaatgtaaaactgcaaacttaaaaacctgcatcttcttgaagcatcagttttacttaccaaatggtttag

SEQ ID NO: 531237 - DNA, 120 bp, Artificial Sequence
  ENSG00000166326_22 (sequence is synthesized)
agtcataagatgacctatttttatataaaagttatattatagaataaaatgttcatacgcatagactgttaagataaaaaaataggaatcttgcaaggtaattcttatttgcaagtgggt

SEQ ID NO: 531238 - DNA, 120 bp, Artificial Sequence
  ENSG00000166326_23 (sequence is synthesized)
tatgtgttcactctcctctacctttatggtattttggtgttcacttacgaagcatacaactagaaccatatccaagcagactctgggttgctgttaacccagggcctagacttctagtgc

SEQ ID NO: 531239 - DNA, 120 bp, Artificial Sequence
  ENSG00000166326_24 (sequence is synthesized)
ctctgaggcagaaccaaaggagcctgcactgggggaaatcccttttcctgcctgcctgtctgcctgtgacctgtgtacgtattacaggctttaggaccagctgattgttatgcttgcagg

SEQ ID NO: 531240 - DNA, 120 bp, Artificial Sequence
  ENSG00000166326_25 (sequence is synthesized)
atggttttgaaacagaaacaatacttgtttactgtaggaatcctatttatattatttttcagtcctgtgaatgctgtgaaaagatttattcctttgaggccaggaagctcccaggcatat

SEQ ID NO: 531241 - DNA, 120 bp, Artificial Sequence
  ENSG00000166326_26 (sequence is synthesized)
atgcttctaggttaggattgtcctgactcactaaagatgccaggatattggggctgaggggagtttgaggtgttaaaaaaaaaaaaaaaaaagcatttttctctcaaactgatggccaag

SEQ ID NO: 531242 - DNA, 120 bp, Artificial Sequence
  ENSG00000166326_27 (sequence is synthesized)
aaatggctaggacaattttggtgctttacctatctctgcaaagactggagaatttggcataccattaattacaaccaccaatcatatccaacaaaagtaccctaaaagaaggaccagtgg

SEQ ID NO: 531243 - DNA, 120 bp, Artificial Sequence
  ENSG00000166326_28 (sequence is synthesized)
ccactctcgaaaaaatttaagtatcagaagattaaaaagattttaggatttggaagcttgtattgtctttccccaataatcattgtttgatctccaaatagtagccttatattagcaata

SEQ ID NO: 531244 - DNA, 120 bp, Artificial Sequence
  ENSG00000166326_29 (sequence is synthesized)
gacagatcattggttctccatatctgatcatatgttactactttgaatcagtatttgggaaattcaagcatttatgcagtggatataaatggaaatataaaaatatttgccaacctgtct

SEQ ID NO: 531245 - DNA, 120 bp, Artificial Sequence
  ENSG00000166326_30 (sequence is synthesized)
cagtaacttatcatatctctgtgatcctcaaggaaagcacttttgcttttacttagaaagcgtttcagatttgctttatagactcctgctgtcttcagtacctgataaaactttaaccag

SEQ ID NO: 531246 - DNA, 120 bp, Artificial Sequence
  ENSG00000166326_31 (sequence is synthesized)
ggaagcattaaacacagtgcagcagcttttgcccaggcttctaagttcctgccggcagcatttatcaatgtaagaactaggatgcttcctgcagtggcactaccttcccctagagctgga

SEQ ID NO: 531247 - DNA, 120 bp, Artificial Sequence
  ENSG00000166326_32 (sequence is synthesized)
gcatgctgcttggccttaagccccagcatgatgaggcttccctcctgccaggtcagtaaaagttagagagctcagaattgggtcttgcctgggtgcaggtggcagggtttgctgaaaccc

SEQ ID NO: 531248 - DNA, 120 bp, Artificial Sequence
  ENSG00000166326_33 (sequence is synthesized)
ctaaagagaagtcaccaagggaggcaggtaatgaatgtttccagaatcagtcggatactcatagcaatttctggctatctttcaaatgttgaatttctggatgctgagagggactttgat

SEQ ID NO: 531249 - DNA, 120 bp, Artificial Sequence
  ENSG00000166326_34 (sequence is synthesized)
ttgatatcattaaatccaggacagtcccaagaagtgcttggagtctcggctctgacagcccaagaagggaaataacttgtattaaggaacaactatgagccaggccctgagctgtctctt

SEQ ID NO: 531250 - DNA, 120 bp, Artificial Sequence
  ENSG00000166326_35 (sequence is synthesized)
agataataaaacagatggggagtggaagagtcatttgcttcaagttatacagctaggaaatactcaagccaaatcttgaacgcagctccccctaattctgtggacaggcactttgtacca

SEQ ID NO: 531251 - DNA, 120 bp, Artificial Sequence
  ENSG00000166326_36 (sequence is synthesized)
cacaccatggtccacctaaaaacagaaggataaaaagacttcaggttttcccactgtgtgctgaccatcccaatttatgaatcttcttcaaaatgacatttcacagttatagttagggct

SEQ ID NO: 531252 - DNA, 120 bp, Artificial Sequence
  ENSG00000166326_37 (sequence is synthesized)
cagaaatggcattgaggtagccttatttctcccctttagcagatgctttaagtacacattgctgacttgagcccacccccaggagttaggagaacatttcctttttcatgccatcttcca

SEQ ID NO: 531253 - DNA, 120 bp, Artificial Sequence
  ENSG00000166326_38 (sequence is synthesized)
taaataaggtgtttcttggccttcaaagatatagaactttgcagcagtagtaaaagtgaagggtgttctgctctctactcaactttatttgaaaatgtctgcagcttcactcctgtagaa

SEQ ID NO: 531254 - DNA, 120 bp, Artificial Sequence
  ENSG00000166326_39 (sequence is synthesized)
aaggaaatcttcatattttagtaaacttagccgccagtgtactctgtgaggatgtggcaattcaaagtccagtgaatctggactctcttactgattcctggttttagtgtgtgtgtcggg

SEQ ID NO: 531255 - DNA, 120 bp, Artificial Sequence
  ENSG00000166326_40 (sequence is synthesized)
ggagtgtgtacctatatataaaggacaagtgtgatatgtgtgtatatgtatatacatacatacatgtccgcacacacacacacaatatttgagagctaaggaaaactcaaagcagcccct

SEQ ID NO: 531256 - DNA, 120 bp, Artificial Sequence
  ENSG00000166326_41 (sequence is synthesized)
tcattatcttgcgtactacttcaaagatttctgtcagccctaattacaagtgtcaccatatagttggggcttaggtacttgcttacaggaagagcaattccctagcaaaggtcattagct

SEQ ID NO: 531257 - DNA, 120 bp, Artificial Sequence
  ENSG00000166326_42 (sequence is synthesized)
cctaaggcactgagtcaaagtgacagccctgaaggaaattgcactccagccctcctccaggatgtctaataagatgggaaacttggatgcccagccattttggtgacctgagagtctaac

SEQ ID NO: 531258 - DNA, 120 bp, Artificial Sequence
  ENSG00000166326_43 (sequence is synthesized)
tactccagttagacctaagggcacaaatgcagaattcatgaccttgtagttgtggcagggtctaggaagtcctctctccccaagtagaaaatattctcttgccattcctgaaattccaca

SEQ ID NO: 531259 - DNA, 120 bp, Artificial Sequence
  ENSG00000166326_44 (sequence is synthesized)
ttcatataatggctgtgcaatacatgcttctcaataagaaaattaactgcacgtttactgtgtgctgatcacatcagatttttatgtttaaaaaaatctcattatggattgagtccagcc

SEQ ID NO: 531260 - DNA, 120 bp, Artificial Sequence
  ENSG00000166326_45 (sequence is synthesized)
cagctctaagagaaaaagaaggcccatatgggagacttcagtctcattattattgcctttatccagcagtgcttatgaagccccctaccctgtcccattccagaaaccataagactcagg

SEQ ID NO: 531261 - DNA, 120 bp, Artificial Sequence
  ENSG00000166326_46 (sequence is synthesized)
cagttcttgattctggaggcctgcctggtaagataagatagtataatttggaactgagaacataccagaaacagcagaacgagggccagagcagaaaaatgaaaataagtggagacactt

SEQ ID NO: 531262 - DNA, 120 bp, Artificial Sequence
  ENSG00000166326_47 (sequence is synthesized)
atggatacattggtgcaaaaaaagccacggagcccatactgggcttgatatgactttgaggggacagcagattaatacttaatgagggttaaacctgaccagtctttctacagtgacagg

SEQ ID NO: 531263 - DNA, 120 bp, Artificial Sequence
  ENSG00000166326_48 (sequence is synthesized)
ccacactgcatgaatggggagaaccaatgaatccattgtcctctgcctattttcctgtgcacagtcacattccctccttaggaatcttccccttccaccctttacattaaacaagggaac

SEQ ID NO: 531264 - DNA, 120 bp, Artificial Sequence
  ENSG00000166326_49 (sequence is synthesized)
actgaatctttcaagggaattacacgtttgggttaatgtttcagtatatcattttcatactgtaaattattttgtaagagagatttactgctatcccaggatgttcggacttggtgcccc

SEQ ID NO: 531265 - DNA, 120 bp, Artificial Sequence
  ENSG00000166326_50 (sequence is synthesized)
tgtgcatttggaaatcaataaactattactggaaatgccatttgtctctcagagttgtgcacaaaggaccctgcaaggtgtaaatatttatgacgagctgcatacttgactgtggtaatg

SEQ ID NO: 531266 - DNA, 120 bp, Artificial Sequence
  ENSG00000166326_51 (sequence is synthesized)
ctggagatgatggtgttttggttactagatgtgggagtctaatttactcctgacttttccacagtgccttaggagagagctctgggaagtggcaaaagaacagacttaagatcattatta

SEQ ID NO: 531267 - DNA, 120 bp, Artificial Sequence
  ENSG00000166326_52 (sequence is synthesized)
tttagtgataagttttctcctcaaagtaaaatgatccaggcctagattacattttatgagcaacttagattataacctaaagaatacttggtgccaaattatgttttcaaataacattaa

SEQ ID NO: 531268 - DNA, 120 bp, Artificial Sequence
  ENSG00000166326_53 (sequence is synthesized)
agttttagaatttggatgaactagaaggaaggtaaaattgtaatttttgccatattttctagaaaaaaaaatgtcttttagagcaaattacagttaggccaacaaaatctttgttttgtg

SEQ ID NO: 531269 - DNA, 120 bp, Artificial Sequence
  ENSG00000166326_54 (sequence is synthesized)
gaaaacatagaatgagttgtaaatgaagcaattccaagctggtttgaaggaccagaggttgcattgaaatcagaagtcatatactcagaggccttcaggagccaaatgtgaagactcaag

SEQ ID NO: 531270 - DNA, 120 bp, Artificial Sequence
  ENSG00000166326_55 (sequence is synthesized)
atggtagatactgtgtgaattagaaaataccaagccctgcctaaatgcattaaaatttaatgtttaaaaatcctaaaacccaccagcaggtgtatctggagggacagtttgtggactctc

SEQ ID NO: 531271 - DNA, 120 bp, Artificial Sequence
  ENSG00000166326_56 (sequence is synthesized)
ctctaaattttcttttaacacatttatcttcatcagacccttttagttagctagggactgtgtgagaaccttgagaaaattgtccaagagagggagataagtcactcaaggtcacccaac

SEQ ID NO: 531272 - DNA, 120 bp, Artificial Sequence
  ENSG00000166326_57 (sequence is synthesized)
aagccaggctggtaaagcccaggacagcagactctctgtctccgagagcaatcattaggccctacttcctcttccccagttgcggaggacactgctgcctggtggggtggcactgcctgc

SEQ ID NO: 531273 - DNA, 120 bp, Artificial Sequence
  ENSG00000166326_58 (sequence is synthesized)
cactgtagcacttaggagtcttcagtgttttaacaaaccacaatgtgtttggaggttttcttccctgcttcctggtgccagtatctcaacaccacatccattgccccagccctttcttgt

SEQ ID NO: 531274 - DNA, 120 bp, Artificial Sequence
  ENSG00000166326_59 (sequence is synthesized)
tttatctttccctctgaaagctacaactctatattttattttattactctttgtttggtccaacatggccccatttcctttatactcataaaaaggtagaatttcagcttgtctggaata

SEQ ID NO: 531275 - DNA, 120 bp, Artificial Sequence
  ENSG00000166326_60 (sequence is synthesized)
tctcctggccttcacaaggcaccagagttagagacacccaacagaaagtcgtaataagagaagatgtcacagaaatagaaacaaaagcaaaagactgcttgaagtcagtaacagactgca

SEQ ID NO: 531276 - DNA, 120 bp, Artificial Sequence
  ENSG00000166326_61 (sequence is synthesized)
ctaagtgtctgtgcttgttaactattgtaatctccaggtttaaatcattcatttatgttaataagagctgtcacttagctctttctctgggccaggtactctcctgttgtttttcacatt

SEQ ID NO: 531277 - DNA, 120 bp, Artificial Sequence
  ENSG00000166326_62 (sequence is synthesized)
atcataatagtaacagcaccaatactatcattccccactttgttgctcaggaatcaaatttagagaattaagtactgtgaccacggttacaccctaataagcgggaagccagaatttaaa

SEQ ID NO: 531278 - DNA, 120 bp, Artificial Sequence
  ENSG00000166326_63 (sequence is synthesized)
cccaggtctagcagacttcacagcctctttccttaatctcttctctcctagctgcactgattccatcttgtattggtgaataacaacactgatccccctacaactacccccacacatgta

SEQ ID NO: 531279 - DNA, 120 bp, Artificial Sequence
  ENSG00000166326_64 (sequence is synthesized)
cagtatggccttggggcaaaggagtttgccttttgcaaagaaggtcttgctttgtatagcctgtaaaatgcaatgtacagtgagggaaagaaagtctaagggtagcagtcaaatcttctg

SEQ ID NO: 531280 - DNA, 120 bp, Artificial Sequence
  ENSG00000166326_65 (sequence is synthesized)
gcctgaaactgtacttttggaagggagaactgttagacttgctttatcttctttattccaaggccataaataagaaaatcaacgagaggcaaaaccatgtcttcttttgctatagcgtta

SEQ ID NO: 531281 - DNA, 120 bp, Artificial Sequence
  ENSG00000166326_66 (sequence is synthesized)
gaatcctgaaagtcagccagctctgacactgagtctgtgatttaattaaacatgttgaaggctctccaacagcttgacgtcaggccagcttcatattcttggaaagggacaacagcaaaa

SEQ ID NO: 531282 - DNA, 120 bp, Artificial Sequence
  ENSG00000166326_67 (sequence is synthesized)
ggagcttatctgttttaaagttcacttactgagttcagctgtcacggccacagcataccatttgccttataaaaatggcccacaaccttcacaatattttaggattcatggcaactcatt

SEQ ID NO: 531283 - DNA, 120 bp, Artificial Sequence
  ENSG00000166326_68 (sequence is synthesized)
tacctagggcttagccacctgatagctttacctatccctatttcctgaacacaaaatctaaaccagtggtttgacaatgagtaactgagacagaactagaaaaatctagaacctctgctg

SEQ ID NO: 531284 - DNA, 120 bp, Artificial Sequence
  ENSG00000166326_69 (sequence is synthesized)
aacccatcaaaagtgactgagaattaagaagtaagcaaacaaggcttccaaccaattgaaataaataccatgaagcaaacgcataagacaaaggccatacatctagtcatcaggcacctc

SEQ ID NO: 531285 - DNA, 120 bp, Artificial Sequence
  ENSG00000166326_70 (sequence is synthesized)
ctcagaacctatttgctcttccttcacacatatttctaactgtaaaggaaagaaacagacttttagaggaaacaagaaggaaaaaggaggacagcaatagagaaaatggaaattttgagt

SEQ ID NO: 531286 - DNA, 120 bp, Artificial Sequence
  ENSG00000166326_71 (sequence is synthesized)
agactgcaaagctccaaagccctgatatatgggttatttagtgtcaaaaacagtctatacacatctcaatctttaagagcctcactgtatcatgggacaatattctatttaaaatgatga

SEQ ID NO: 531287 - DNA, 120 bp, Artificial Sequence
  ENSG00000166326_72 (sequence is synthesized)
ccctgtgcaccatacataaaaaaactatgcttagaagacaaaaatatgtatatcaaacattttagaaatatttacatcccaatggttaaaaaaaaaaacttttaggaattaaaaggaata

SEQ ID NO: 531288 - DNA, 120 bp, Artificial Sequence
  ENSG00000166326_73 (sequence is synthesized)
aacctttgaccatccagaatatttagctaaatcaaacagtgtatatccccctagctgacttttattgtttcatgagcctctggtgttcagagagtttttttcacagctttgtaagtgact

SEQ ID NO: 531289 - DNA, 120 bp, Artificial Sequence
  ENSG00000166326_74 (sequence is synthesized)
ttcatgctacagtgctttgcatataatggcatgaacagtggaggtgccaactttccaatgtgatgaataaaactaataactagaatacagatcaaattctgttacaacaaatactgctac

SEQ ID NO: 531290 - DNA, 120 bp, Artificial Sequence
  ENSG00000166326_75 (sequence is synthesized)
cataaaagtcacttaagcatccctgttagttctaagcccctgtcgattgcccatttattttaggcaatagtcattcaacaaaattggagcataataaaaagaaactggacctcagcgcaa

SEQ ID NO: 531291 - DNA, 120 bp, Artificial Sequence
  ENSG00000166326_76 (sequence is synthesized)
gttgagtgttacacaatttaacctgtaataacaggttctcacttgtatttctccagctctttgctgtaagaagaataaacgttatgtagatataataccagcgtgacagcttgtggttgg

SEQ ID NO: 531292 - DNA, 120 bp, Artificial Sequence
  ENSG00000166326_77 (sequence is synthesized)
tggtttctagaagaaataattcagaagcaaaagacacatgaagttatgtggcagttcctcactagggaatttggtctccagggccacttttgaccttaatccatgttggagccatcaatc

SEQ ID NO: 531293 - DNA, 120 bp, Artificial Sequence
  ENSG00000166326_78 (sequence is synthesized)
aaagaattgcttgcatctaataatggtgtaatgccaatactaagccctggaacgaagataggattcatttctcatggattattgagcactctggggtaacctggccctgatctgatgacg

SEQ ID NO: 531294 - DNA, 120 bp, Artificial Sequence
  ENSG00000166326_79 (sequence is synthesized)
ctaagatttaaaaacccagatgcatgtgactagaactatcttttctcccatgatgcactgctttcaacactgcatgactgtaaaaacatgtgccacgctgattatatatagagatggtct

SEQ ID NO: 531295 - DNA, 120 bp, Artificial Sequence
  ENSG00000166326_80 (sequence is synthesized)
aaatcagctgcatcccatttggtacccaggcaaggatttttccatacctatctttttgctggtggtaatgatgagttttgtcacttgctataacattctctgtccgtcttttttctttta

SEQ ID NO: 531296 - DNA, 120 bp, Artificial Sequence
  ENSG00000166326_81 (sequence is synthesized)
tgtaaatacttttgtgacttcattgtaaccagcattttgtaatactcttaacagcagaggggattaaatcatgattcacttctgaacagtacaatcagcagtaggaaaacgaggagggag

SEQ ID NO: 531297 - DNA, 120 bp, Artificial Sequence
  ENSG00000166326_82 (sequence is synthesized)
ggagagggaaattgtccaccacttcccaatgataatgcctggctcggaccccagattcacatcatacttgaagttcataaattctgggcactgctcagcttgaggaggcaggcattgctc

SEQ ID NO: 531298 - DNA, 120 bp, Artificial Sequence
  ENSG00000166326_83 (sequence is synthesized)
cttcatatttcagggtgagacaaatgctctgttgaagccatgccactacaggatacattcacctctgcttgctttcctccctaagccagagtgtagttaaacatttatatgtcccaggcc

SEQ ID NO: 531299 - DNA, 120 bp, Artificial Sequence
  ENSG00000166326_84 (sequence is synthesized)
aggagatcaaattaagaggaggttagctactttccctggctcttaaaaacatttgagtccaagtatggttctctggcttgagggtggccatttgttgcctcactgtttttattaggacat

SEQ ID NO: 531300 - DNA, 120 bp, Artificial Sequence
  ENSG00000166326_85 (sequence is synthesized)
ctggagattagaggtgttaattggaagtaacttttctatatttggtttctctccacacattatgagaccttttagacccagttggatggctgtatcctagtatgaaattcagcttctaag

SEQ ID NO: 531301 - DNA, 120 bp, Artificial Sequence
  ENSG00000166326_86 (sequence is synthesized)
taggaagaactatgatagaggaacaagattgctctttgacttggtgatagtagggcaatagggagtgtcagtagggtagtttcaggtggggaggatgacaaaccactgataacaataaaa

SEQ ID NO: 531302 - DNA, 120 bp, Artificial Sequence
  ENSG00000166326_87 (sequence is synthesized)
atgggtatttctcaacactcaagccaatttcccatttgataacaagtaggttctgatctattttccccaaattaatattttccctggaagattctgacctgtctgatcaaataaaggcat

SEQ ID NO: 531303 - DNA, 120 bp, Artificial Sequence
  ENSG00000166326_88 (sequence is synthesized)
tcctctgagagtatacctagcccacttgtggccaaattatacttgactgttatgtactcaaaacaagctttcctgttaatctctttctcttacctctattatgaggacaagacgtggaag

SEQ ID NO: 531304 - DNA, 120 bp, Artificial Sequence
  ENSG00000166326_89 (sequence is synthesized)
aattaggtcaccggggcatctgccattgcatatgtttaagtggtataaagaagccaggattcctagaatggtctgtcttttgccatttctgggacaatgagaaaatccatctggagtgtt

SEQ ID NO: 531305 - DNA, 120 bp, Artificial Sequence
  ENSG00000166326_90 (sequence is synthesized)
tatgcccctctgaatagccaagtcatgggcttgtttgctttcagtcactgccttcagaaaaagacaattttacaatgacttacttctaataatcactgaaacagcctcatgaggacatgc

SEQ ID NO: 531306 - DNA, 120 bp, Artificial Sequence
  ENSG00000166326_91 (sequence is synthesized)
aaaactgctgtctatcttcagacctggcccattgtcaaatggcagacttgcagagcaaataagggacctggcctagttcacaaggcagtcagaagtgatccaaagttcaggctccccctc

SEQ ID NO: 531307 - DNA, 120 bp, Artificial Sequence
  ENSG00000166326_92 (sequence is synthesized)
ccttttatcactccaccctgcctctactcctccgcctcctattcttccggcctttccatctggaaaccatgagcctcatggattccaggcacaaattctcagatttcagatgtttgggaa

SEQ ID NO: 531308 - DNA, 120 bp, Artificial Sequence
  ENSG00000166326_93 (sequence is synthesized)
atttctcagcttgggtcattcttcaagagtaagaaattgaatttgtgagaaaaaaaaacagctgagactgtttcacagaagagaaaataaataaggtgtggtgcgtatccatcctcttcc

SEQ ID NO: 531309 - DNA, 120 bp, Artificial Sequence
  ENSG00000166326_94 (sequence is synthesized)
caactcagctccaaaaccacacacaatgtctaacttcaaaaagagtatttagatcccccctgggaaggaacagaatggaaaaacaatctccactcataaaaacacttttctgccttctac

SEQ ID NO: 531310 - DNA, 120 bp, Artificial Sequence
  ENSG00000166326_95 (sequence is synthesized)
agtataaacacaactggcatcagataatacaatgtaattgattttatgtgtgtaattggggaacagaagggtctctagagggtagacctaagagtaatggaatggagtgaaaagtaaaat

SEQ ID NO: 531311 - DNA, 120 bp, Artificial Sequence
  ENSG00000166326_96 (sequence is synthesized)
ttagactaaattgttgggaggaaactgttaacattgtgaaccacttgaccctagtgttgcatcttcacaaaaaagagcaatgtgccgtcttctgtctttggaaaatgggacaagcttgct

SEQ ID NO: 531312 - DNA, 120 bp, Artificial Sequence
  ENSG00000166326_97 (sequence is synthesized)
cctgatactaggttttagaagcatacagacttggttttagtactggctttgttctttactaactctgaacaattaaatgagcagatggtctacagggcttagtacagtgcctgacacata

SEQ ID NO: 531313 - DNA, 120 bp, Artificial Sequence
  ENSG00000166326_98 (sequence is synthesized)
gtaagcacttagaaatggtagcttctgactgttgtgctggagtcctgttagagattcagtagatggagccaccttcatgttgcccctcactgagctgctctgctcacctctagatgctcc

SEQ ID NO: 531314 - DNA, 120 bp, Artificial Sequence
  ENSG00000166326_99 (sequence is synthesized)
ccatggctgtttcatagccctctgtaccacatccccatgtactttttcatatcaacggtaagtacctcaaattaccgtatgtatttacttgttcataaggttgatgtctgtaactctttg

SEQ ID NO: 531315 - DNA, 120 bp, Artificial Sequence
  ENSG00000166326_100 (sequence is synthesized)
aaggttgtattagtcgtttgctcctatattactaatgatgacaaagtcgcctgacagagtagatgttcaaatttatggacttaaactgactgacatcttgataatgcccatatccagagg

SEQ ID NO: 531316 - DNA, 120 bp, Artificial Sequence
  ENSG00000166326_101 (sequence is synthesized)
tactccagatattatatcttcatgcagaaaactgaaagatacctttagctacatctaccccagaatgagtgtccaaagcaggtggcaccaccaaaaggcaccttcttttcccatgaaaag

SEQ ID NO: 531317 - DNA, 120 bp, Artificial Sequence
  ENSG00000166326_102 (sequence is synthesized)
agggaagagagttgagaagcctcactcccatccctgctctgccactgacaagttgtgtggcatttggcacatcatgttctctctctacatgcgcctaaaatgacgggtagggtcagagac

SEQ ID NO: 531318 - DNA, 120 bp, Artificial Sequence
  ENSG00000166326_103 (sequence is synthesized)
attggaggatctctcttttctcttccacctctaacacggtaagatcttagcaaagtaaaaaggacagtgataacagaaaaattgttcctctaagagtcccaagtcatcttttttctctcc

SEQ ID NO: 531319 - DNA, 120 bp, Artificial Sequence
  ENSG00000166326_104 (sequence is synthesized)
gtgtgtgttagcatttgtgtgtgtctgtgggtgtgtatgcatgtgtgtggaagctatacaaggaaagctgaatccatatgtagacttcatggagactagtactgctccaaatgtgcacaa

SEQ ID NO: 531320 - DNA, 84 bp, Artificial Sequence
  ENSG00000166326_105 (sequence is synthesized)
acctggtgggaagattggatcatgggggagttttctcatgatttaacaacatccgccctttgttgtcatgatagtgagttcttg

SEQ ID NO: 531321 - DNA, 120 bp, Artificial Sequence
  ENSG00000166326_106 (sequence is synthesized)
aacaacatccgccctttgttgtcatgatagtgagttcttgtgagatctggttgtttaaaaatatgtgacacctccccccaccttccttctgctctggccatgtaaagtgctcactccccc

SEQ ID NO: 531322 - DNA, 120 bp, Artificial Sequence
  ENSG00000166329_0 (sequence is synthesized)
ctctctttgtccaacgtagaagagacaatggaacccctctaccaggctgggtccattctcatgacggtgaataccctacaggggaaaaaaatgatagagagtggcctccagtctggagac

SEQ ID NO: 531323 - DNA, 120 bp, Artificial Sequence
  ENSG00000166329_1 (sequence is synthesized)
ttttccctgtcccagtcatggccctcctgcctcccaccacccgctgacttggagatcctgcagcagaaggtggccggggtgcaacgggaactggaggactttaagaaagaggcattgaag

SEQ ID NO: 531324 - DNA, 120 bp, Artificial Sequence
  ENSG00000166329_2 (sequence is synthesized)
tccattcattaccttgaagacgccttctgcgagatgaatggagccctggtgcaacaggaggagcaggcggctcgcgtgaggcagcggctaagggaggaggaggaccgtggcatcgtgcgc

SEQ ID NO: 531325 - DNA, 120 bp, Artificial Sequence
  ENSG00000166329_3 (sequence is synthesized)
gacgtgacgccctgcgtgccaccaagaagagccaggctgactgaacctcgtgggtggcactagccaagcaccaagttgaagattttttttaacggaaggagaaaccccaagtccctaccc

SEQ ID NO: 531326 - DNA, 120 bp, Artificial Sequence
  ENSG00000166329_4 (sequence is synthesized)
ccttgctttcccttcctcatttccattgctttccttctgcctaaataacaccttgctgagaggcaaaaagacttcaatattttttttggtgaaattccatttatccagcattctaaagga

SEQ ID NO: 531327 - DNA, 120 bp, Artificial Sequence
  ENSG00000166329_5 (sequence is synthesized)
aggaggcaccccagtactgagtcaggcccctgtaactttcacttgaactgttttcctgtttgtaatggtactattgctcaatgtatacctctttatttgtatagtatattcttaaactga

SEQ ID NO: 531328 - DNA, 120 bp, Artificial Sequence
  ENSG00000166333_0 (sequence is synthesized)
aagagcgccacgggcggggcggggccggcggcgggctgcgggcgcggccggacgggagttccccggagaaggatcctgcagcccgagtcccgaggataaagcttggggttcatcctcctt

SEQ ID NO: 531329 - DNA, 120 bp, Artificial Sequence
  ENSG00000166333_1 (sequence is synthesized)
ccctggatcactccacagtcctcaggcttccccaatccaggggactcggcgccgggacgctgctatggacgacattttcactcagtgccgggagggcaacgcagtcgccgttcgcctgtg

SEQ ID NO: 531330 - DNA, 120 bp, Artificial Sequence
  ENSG00000166333_2 (sequence is synthesized)
gctggacaacacggagaacgacctcaaccagggggacgatcatggcttctcccccttgcactgggcctgccgagagggccgctctgctgtggttgagatgttgatcatgcggggggcacg

SEQ ID NO: 531331 - DNA, 120 bp, Artificial Sequence
  ENSG00000166333_3 (sequence is synthesized)
gatcaatgtaatgaaccgtggggatgacacccccctgcatctggcagccagtcatggacaccgtgatattgtacagaagctattgcagtacaaggcagacatcaatgcagtgaatgaaca

SEQ ID NO: 531332 - DNA, 120 bp, Artificial Sequence
  ENSG00000166333_4 (sequence is synthesized)
cgggaatgtgcccctgcactatgcctgtttttggggccaagatcaagtggcagaggacctggtggcaaatggggcccttgtcagcatctgtaacaagtatggagagatgcctgtggacaa

SEQ ID NO: 531333 - DNA, 120 bp, Artificial Sequence
  ENSG00000166333_5 (sequence is synthesized)
agccaaggcacccctgagagagcttctccgagagcgggcagagaagatgggccagaatctcaaccgtattccatacaaggacacattctggaaggggaccacccgcactcggccccgaaa

SEQ ID NO: 531334 - DNA, 120 bp, Artificial Sequence
  ENSG00000166333_6 (sequence is synthesized)
tggaaccctgaacaaacactctggcattgacttcaaacagcttaacttcctgacgaagctcaacgagaatcactctggagagctatggaagggccgctggcagggcaatgacattgtcgt

SEQ ID NO: 531335 - DNA, 120 bp, Artificial Sequence
  ENSG00000166333_7 (sequence is synthesized)
aggtgctgaaggttcgagactggagtacaaggaagagcagggacttcaatgaagagtgtccccggctcaggattttctcgcatccaaatgtgctcccagtgctaggtgcctgccagtctc

SEQ ID NO: 531336 - DNA, 120 bp, Artificial Sequence
  ENSG00000166333_8 (sequence is synthesized)
cacctgctcctcatcctactctcatcacacactggatgccgtatggatccctctacaatgtactacatgaaggcaccaatttcgtcgtggaccagagccaggctgtgaagtttgctttgg

SEQ ID NO: 531337 - DNA, 120 bp, Artificial Sequence
  ENSG00000166333_9 (sequence is synthesized)
acatggcaaggggcatggccttcctacacacactagagcccctcatcccacgacatgcactcaatagccgtagtgtaatgattgatgaggacatgactgcccgaattagcatggctgatg

SEQ ID NO: 531338 - DNA, 120 bp, Artificial Sequence
  ENSG00000166333_10 (sequence is synthesized)
tcaagttctctttccaatgtcctggtcgcatgtatgcacctgcctgggtagcccccgaagctctgcagaagaagcctgaagacacaaacagacgctcagcagacatgtggagttttgcag

SEQ ID NO: 531339 - DNA, 120 bp, Artificial Sequence
  ENSG00000166333_11 (sequence is synthesized)
tgcttctgtgggaactggtgacacgggaggtaccctttgctgacctctccaatatggagattggaatgaaggtggcattggaaggccttcggcctaccatcccaccaggtatttcccctc

SEQ ID NO: 531340 - DNA, 120 bp, Artificial Sequence
  ENSG00000166333_12 (sequence is synthesized)
atgtgtgtaagctcatgaagatctgcatgaatgaagaccctgcaaagcgacccaaatttgacatgattgtgcctatccttgagaagatgcaggacaagtaggactggaaggtccttgcct

SEQ ID NO: 531341 - DNA, 120 bp, Artificial Sequence
  ENSG00000166333_13 (sequence is synthesized)
gaactccagaggtgtcgggacatggttgggggaatgcacctccccaaagcagcaggcctctggttgcctcccccgcctccagtcatggtactaccccagccatggggtccatccccttcc

SEQ ID NO: 531342 - DNA, 120 bp, Artificial Sequence
  ENSG00000166333_14 (sequence is synthesized)
cccatccctaccactgtggccccaagaggggcgggctcagagctttgtcacttgccacatggtgtctcccaacatgggagggatcagccccgcctgtcacaataaagtttattatgaaaa

SEQ ID NO: 531343 - DNA, 120 bp, Artificial Sequence
  ENSG00000166333_15 (sequence is synthesized)
agtcccggtgagtgcgagaggacccgcgccccctgtcacccctcacttctcctgagtcccaagtaaggaacggagccaaccctggggaggacccccggtcccctctcccagagtatacgg

SEQ ID NO: 531344 - DNA, 120 bp, Artificial Sequence
  ENSG00000166333_16 (sequence is synthesized)
agcctgaacctccccacttcccccaactctgttcgcggatagggtctagttgcctgctctcggacatccgttcagcagacactacctcttcgtcaccccctgcccaccctgacccgcctt

SEQ ID NO: 531345 - DNA, 120 bp, Artificial Sequence
  ENSG00000166333_17 (sequence is synthesized)
tacctcgcgtctagaggacacagccagggatcatcccgcagccccgaactccttcacagacccccactagccggggacgcagctcaggccccctacccccaacacaaacacttctctcct

SEQ ID NO: 531346 - DNA, 120 bp, Artificial Sequence
  ENSG00000166333_18 (sequence is synthesized)
gctgcccaagagcgccacgggcggggcggggccggcggcgggctgcgggcgcggccggacgggagttccccggagaaggatcctgcagcccgagtcccgtcctcaggcttccccaatcca

SEQ ID NO: 531347 - DNA, 120 bp, Artificial Sequence
  ENSG00000166333_19 (sequence is synthesized)
aatccagtgcaacaagtgctgaagtagggggacatataagatgtggtggaaaacagaaaggaccaatagatgttgcagaaggggtgcaagagaaaccaggggaagagcactaccacctaa

SEQ ID NO: 531348 - DNA, 120 bp, Artificial Sequence
  ENSG00000166333_20 (sequence is synthesized)
ggaaatgagatgtgggatatggtgaagataacacatttttttatagaggttgttgagatatctaggtggttggtttggtttgaagctcaggggaaggtctgaaatggacagctttgggag

SEQ ID NO: 531349 - DNA, 120 bp, Artificial Sequence
  ENSG00000166333_21 (sequence is synthesized)
gcgggcagagaagatgggccagaatctcaaccgtattccatacaaggacacattctggaaggggaccacccgcactcggccccctatggaagggccgctggcagggcaatgacattgtcg

SEQ ID NO: 531350 - DNA, 120 bp, Artificial Sequence
  ENSG00000166333_22 (sequence is synthesized)
gtggggggcagagggttttcacagaggacgcagtttgagctgaatcttgactgcagaataagagtttcacaggcagaggctacagagagctttccagcctcagtagactgcatggccaaa

SEQ ID NO: 531351 - DNA, 120 bp, Artificial Sequence
  ENSG00000166333_23 (sequence is synthesized)
ggctagggggcaaggcacagagcagagagaacaggaaattgtctggagttccatatggctggaggatagatgatctctgtgggtcggagcattgggtacaagaggaaaagaacaggacat

SEQ ID NO: 531352 - DNA, 120 bp, Artificial Sequence
  ENSG00000166333_24 (sequence is synthesized)
acaggcactgtaacatacagtagaaagcatgtgtgctcttcccccttttcccatgccctgacaccagtatctcatttggaactgactgtactttctgcctcttctttttgtctggccatg

SEQ ID NO: 531353 - DNA, 80 bp, Artificial Sequence
  ENSG00000166337_0 (sequence is synthesized)
ctgttcgccgcctctcccaccggcccgatgagctgcagcggctccggcgcggaccccgaggcggcgccggcctccgccgc

SEQ ID NO: 531354 - DNA, 80 bp, Artificial Sequence
  ENSG00000166337_1 (sequence is synthesized)
gcgctgccctccagcaccgccgcggagaacaaggccagccccgcggggacagcggggggacctggggctggagcagctgc

SEQ ID NO: 531355 - DNA, 120 bp, Artificial Sequence
  ENSG00000166337_2 (sequence is synthesized)
gctgagcggcgtggggcggctccggtgtcggcgggtggcgcggcgcccccggagggggccatatctaacggggtttacgtactgccgagcgcggccaacggagacgtgaagcccgtggtg

SEQ ID NO: 531356 - DNA, 120 bp, Artificial Sequence
  ENSG00000166337_3 (sequence is synthesized)
tccagcacgcctttggtggacttcttgatgcagctggaagattacacgcctacgatcccagatgcagtgactggttactacctgaaccgtgctggctttgaggcctcagacccacgcata

SEQ ID NO: 531357 - DNA, 120 bp, Artificial Sequence
  ENSG00000166337_4 (sequence is synthesized)
attcggctcatctccttagctgcccagaaattcatctcagatattgccaatgatgccctacagcactgcaaaatgaagggcacggcctccggcagctcccggagcaagagcaaggaccgc

SEQ ID NO: 531358 - DNA, 120 bp, Artificial Sequence
  ENSG00000166337_5 (sequence is synthesized)
aagtacactctaaccatggaggacttgacccctgccctcagcgagtatggcatcaatgtgaagaagccgcactacttcacctgagccacccaacctaaatgtacttatctgtccccatgt

SEQ ID NO: 531359 - DNA, 120 bp, Artificial Sequence
  ENSG00000166337_6 (sequence is synthesized)
ccccacaccagcctgttttcataataaactttattgtgacaggcggggctgatccctcccatgttgggagacaccatgtggcaagtgacaaagctctgagcccgcccctcttggggccac

SEQ ID NO: 531360 - DNA, 120 bp, Artificial Sequence
  ENSG00000166337_7 (sequence is synthesized)
agtggtagggatgggggaaggggatggaccccatggctggggtagtaccatgactggaggcgggggaggcaaccagaggcctgctgctttggggaggtgcattcccccaaccatgtcccg

SEQ ID NO: 531361 - DNA, 120 bp, Artificial Sequence
  ENSG00000166337_8 (sequence is synthesized)
acacctctggagttcaggcaaggaccttccagtcctacttgtcctgcatcttctcaaggataggcacaatcatgtcaaatttgggtcgctttgcagggtcttcattcatgcagatcttca

SEQ ID NO: 531362 - DNA, 120 bp, Artificial Sequence
  ENSG00000166337_9 (sequence is synthesized)
tgagcttacacacatgaggggaaatacctggtgggatggtaggccgaaggccttccaatgccacctgcgaatacaagaaaaaaagcagcctcacaatttgagtctgtcatgtagagagaa

SEQ ID NO: 531363 - DNA, 120 bp, Artificial Sequence
  ENSG00000166337_10 (sequence is synthesized)
gccactggcccttgggacaggattactgtatatccgaacaaatatgtgaggagccaaggcccactacagttattttcaccatcaccaaccactcccgcaacacaaatgtatgctgttgtg

SEQ ID NO: 531364 - DNA, 120 bp, Artificial Sequence
  ENSG00000166337_11 (sequence is synthesized)
ctctcaccttcattccaatctccatattggagaggtcagcaaagggtacctcccgtgtcaccagttcccacagaagcactgcaaaactccacatgtctgctgagcgtctgtttgtgtctt

SEQ ID NO: 531365 - DNA, 120 bp, Artificial Sequence
  ENSG00000166337_12 (sequence is synthesized)
caggcttcttctgcagagctggagagatagggcttgtctgttctggcccccttgcctgtcctgtctctgcccccttccactacttctgaggtggtccttttttacctcccgacatgatga

SEQ ID NO: 531366 - DNA, 120 bp, Artificial Sequence
  ENSG00000166337_13 (sequence is synthesized)
cttcactcaccttcgggggctacccaggcaggtgcatacatgcgaccaggacattggaaagagaacttgacatcagccatgctaattcgggcagtcatgtcctcatcaatctgaggaaga

SEQ ID NO: 531367 - DNA, 120 bp, Artificial Sequence
  ENSG00000166337_14 (sequence is synthesized)
gaaaacagatagaaggaggtaagtcatagataggcaaagggcttttggggcctgggccaggagtgagcttgtggcctcaccattacactacggctattgagtgcatgtcgtgggatgagg

SEQ ID NO: 531368 - DNA, 120 bp, Artificial Sequence
  ENSG00000166337_15 (sequence is synthesized)
ggctctagtgtgtgtaggaaggccatgccccttgccatgtccaaagcaaacttcacagcctggctctggtccacgacgaaatctgagaggaggcaaaagtcaaatagttcagagaggctc

SEQ ID NO: 531369 - DNA, 120 bp, Artificial Sequence
  ENSG00000166337_16 (sequence is synthesized)
cctctctgccatttcctccccaaggaaattcaacatccctactcactggtgccttcatgtagtacattgtagagggatccatacggcatccagtgtgtgatgagagtaggatgaggagca

SEQ ID NO: 531370 - DNA, 120 bp, Artificial Sequence
  ENSG00000166337_17 (sequence is synthesized)
ggtggagactggcaggcacctagcactgggagcacatttggatgcgagaaaatcctagaagagggagggagtggttgagacccagtacaaaagatctctttcagtgctattcagggttcc

SEQ ID NO: 531371 - DNA, 120 bp, Artificial Sequence
  ENSG00000166337_18 (sequence is synthesized)
ttggaactagcagcttccaggttacgccttgcactacctgagccggggacactcttcattgaagtccctgctcttccttgtactccagtctcgaaccttcagcaccttcacgacaatgtc

SEQ ID NO: 531372 - DNA, 120 bp, Artificial Sequence
  ENSG00000166337_19 (sequence is synthesized)
attgccctgccagcggcccttccatagctgcaggacaggtaggggttaggaggcttgaaatgttgctgccacttccttgcccactaactggaggaaaaacttaaaacaggtacaaagcaa

SEQ ID NO: 531373 - DNA, 120 bp, Artificial Sequence
  ENSG00000166337_20 (sequence is synthesized)
gtaatttatgggggtttagtgagggaagggcaagaagggcaggggtcacctctccagagtgattctcgttgagcttcgtcaggaagttaagctgtttgaagtcaatgccagagtgtttgt

SEQ ID NO: 531374 - DNA, 120 bp, Artificial Sequence
  ENSG00000166337_21 (sequence is synthesized)
tcagggttccatttcctaagagtgtgggcaggtcaggtacccagcttcaccctaacccagccccaagaggccaggattatttccttttacaacccttcttcccacagtggtgactcacgg

SEQ ID NO: 531375 - DNA, 120 bp, Artificial Sequence
  ENSG00000166337_22 (sequence is synthesized)
gtccttgtatggaatacggttgagattctggcccatcttctctgcccgctctagggaagaaaaacaacctaagctgtggtacagagggagaagacaggtgggaagggacgagaggacaca

SEQ ID NO: 531376 - DNA, 120 bp, Artificial Sequence
  ENSG00000166337_23 (sequence is synthesized)
agctaggggatggggagatggacctcggagaagctctctcaggggtgccttggctttgtccacaggcatctctccatacttgttacagatgctgacaagggccccatttgccaccaggtc

SEQ ID NO: 531377 - DNA, 120 bp, Artificial Sequence
  ENSG00000166337_24 (sequence is synthesized)
ctggaatgaaaaggccattatgatgagagccactgctacctcgctggcagtcactgaaccaaccatgaatgcacaaatgtagaacttaatcctgtaagtgtcacacagtagtactgacag

SEQ ID NO: 531378 - DNA, 120 bp, Artificial Sequence
  ENSG00000166337_25 (sequence is synthesized)
aatgggttgagggttccaaaatctcccaccaaggctcagactttacttcctacccatctcaggaattaagggctgagtactcacctctgccacttgatcttggccccaaaaacaggcata

SEQ ID NO: 531379 - DNA, 120 bp, Artificial Sequence
  ENSG00000166337_26 (sequence is synthesized)
gtgcaggggcacattcccgtgttcattcactgcattgatgtctgccttgtactgcaatagctggaccccatggccagacaaaaagaagaggcagaaagtacagtcagttccaaatgagat

SEQ ID NO: 531380 - DNA, 120 bp, Artificial Sequence
  ENSG00000166337_27 (sequence is synthesized)
actggtgtcagggcatgggaaaagggggaagagcacacatgctttctactgtatgttacagtgcctgtgactgaccctcatggcatgtatgtgatgtggatgacgaaggagtttgtacgt

SEQ ID NO: 531381 - DNA, 120 bp, Artificial Sequence
  ENSG00000166337_28 (sequence is synthesized)
accttctgtacaatatcacggtgtccatgactggctgccagatgcaggggggtgtcatccccacggttcattacattgatccgtgccccccgcatgatcaacatctcaaccacagcagag

SEQ ID NO: 531382 - DNA, 120 bp, Artificial Sequence
  ENSG00000166337_29 (sequence is synthesized)
cggccctctcggcaggcccagtgcaagggggagaagccatgatcgtccctttgaggaaggggcaatggtcattgagctggaggtgggatggggcaaaggttttgattcctgaaaaactga

SEQ ID NO: 531383 - DNA, 120 bp, Artificial Sequence
  ENSG00000166337_30 (sequence is synthesized)
taattacatactctctgggaaggcttacctctctaggactttgattctcattcatgccagcaactcccaaagctgtccatttcagaccttcccctgagcttcaaaccaaaccaaccacct

SEQ ID NO: 531384 - DNA, 120 bp, Artificial Sequence
  ENSG00000166337_31 (sequence is synthesized)
agatatctcaacaacctctataaaaaaatgtgttatcttcaccatatcccacatctcatttccttaggtggtagtgctcttcccctggtttctcttgcaccccttctgcaacatctattg

SEQ ID NO: 531385 - DNA, 120 bp, Artificial Sequence
  ENSG00000166337_32 (sequence is synthesized)
gtcctttctgttttccaccacatcttatatgtccccctacttcagcacttgttgcactggattgtaaaaatctgttaatggactgtcttgtctgttagacctttaagtttcttgagggaa

SEQ ID NO: 531386 - DNA, 120 bp, Artificial Sequence
  ENSG00000166337_33 (sequence is synthesized)
tggattgacagcagctgttcagtgcatgttagtgggggagaagggtgtcttggagaaggcaggccacaacttatagaagagggaacaaacttactatttggctctggtactgaaactaac

SEQ ID NO: 531387 - DNA, 120 bp, Artificial Sequence
  ENSG00000166337_34 (sequence is synthesized)
atctaaaaatggaatggaatttaaatgatgttttggaagggtttatgttgaaaaggagaaatgcttttgactactgatgaggtagataacaaaccaccatgcaaagcaggattcccctac

SEQ ID NO: 531388 - DNA, 120 bp, Artificial Sequence
  ENSG00000166337_35 (sequence is synthesized)
ttagcaatcctgtgcatagaaaacagaagaaaatgagaatggctgttttgggattaaaactatacctgatttttttcttttccaagaaatatgtattttataaagtaaagtatacaaaca

SEQ ID NO: 531389 - DNA, 120 bp, Artificial Sequence
  ENSG00000166337_36 (sequence is synthesized)
aaacaaaacaattggtttggagctgggcctgcctgacagcctggggccataaaaggaaattccctccagttcggggctgcagattcaaggggcggagcagggggcggtccgtggtctggg

SEQ ID NO: 531390 - DNA, 120 bp, Artificial Sequence
  ENSG00000166337_37 (sequence is synthesized)
ccagcagcctccggatgccttagtgttgtggtcacttcctgtgtgcgactctaggcaaggcctggagctgatcaggggtctggccatccagatgcccgtacagctgaaggggttgggggg

SEQ ID NO: 531391 - DNA, 120 bp, Artificial Sequence
  ENSG00000166337_38 (sequence is synthesized)
tgtggcctttaagttaatcattttcctccacaacttgctcgcatctgctaacacagaaatagccaaaagcttttccttgagatgggattatccccaggaagcattacgccccctgtttat

SEQ ID NO: 531392 - DNA, 120 bp, Artificial Sequence
  ENSG00000166337_39 (sequence is synthesized)
cagttggtcttgcctcctagacctttaatttgtgccctgacttatcagcttccagtactgcctgtggcgccagggcaggccaaactcggggggcaaaagtatgggcacaagggttctgtt

SEQ ID NO: 531393 - DNA, 120 bp, Artificial Sequence
  ENSG00000166337_40 (sequence is synthesized)
cactatcaggctgcctgccacctcagggcctggacttctatctcaagaagacctgcaaggaattaaccccctcttcatatccagcatatagccaactttggcccccatactttactcctc

SEQ ID NO: 531394 - DNA, 120 bp, Artificial Sequence
  ENSG00000166337_41 (sequence is synthesized)
aaaccagcaccacaaccttccagtttcattaattccaccccttttccttctggcagcatcttcctagagtcttcctagactcagctagagtcttcctagatgctaggcccactgggcaac

SEQ ID NO: 531395 - DNA, 120 bp, Artificial Sequence
  ENSG00000166337_42 (sequence is synthesized)
tgcctaagcctctatttcctcaccaacaaaacagtaacagtgcttactgtctttatcagggtaccctttgagaattatatgaaaaatggaacaaatgactttgcaaagtattaaagagaa

SEQ ID NO: 531396 - DNA, 120 bp, Artificial Sequence
  ENSG00000166337_43 (sequence is synthesized)
atagtgtagaacctaatgggaaccagtgaagtctagactaagatgacaggtgatcctgacctgtcaaacctaaaaactaaactccaccaattttaaaaaataaagaatttgattttgcca

SEQ ID NO: 531397 - DNA, 120 bp, Artificial Sequence
  ENSG00000166337_44 (sequence is synthesized)
cacctagcctgctgtcaaaactttcagccacatcgtgcttttcagcgttctcttccatttgctcccctagtcgctcttctgtgtttgccctctgctcacccaaactgtgagcttcctgat

SEQ ID NO: 531398 - DNA, 120 bp, Artificial Sequence
  ENSG00000166337_45 (sequence is synthesized)
aatcaggcctatccatttccctcaccctcctcccgctctgctgacagttctcttaattgatttctcagatcccagatgcagtgactggttactacctgaaccgtgctggctttgaggcct

SEQ ID NO: 531399 - DNA, 120 bp, Artificial Sequence
  ENSG00000166337_46 (sequence is synthesized)
gggacgggtgagggcgagggaagcgtcttgggctgggtccagcggcgggtgagggcagagggtatagacagacctagctggggccctgcgcctcccacctctgtgtctcattttgctggt

SEQ ID NO: 531400 - DNA, 120 bp, Artificial Sequence
  ENSG00000166337_47 (sequence is synthesized)
gccgcctcggccccgggccccgcgcccccggtctcggctcccgccgcgctgccctccagcaccgccgcggagaacaagatcccagatgcagtgactggttactacctgaaccgtgctggc

SEQ ID NO: 531401 - DNA, 120 bp, Artificial Sequence
  ENSG00000166337_48 (sequence is synthesized)
gggccataaacgtcgaagccaggtcttgagcgtcagacagaatgaggtgtcccagagcggcggaggagagccagacgcacgctggttccggtctggacggaatcgccgcggagcacggca

SEQ ID NO: 531402 - DNA, 120 bp, Artificial Sequence
  ENSG00000166340_0 (sequence is synthesized)
agcagatccgcggaagggcagaatgggactccaagcctgcctcctagggctctttgccctcatcctctctggcaaatgcagttacagcccggagcccgaccagcggaggacgctgccccc

SEQ ID NO: 531403 - DNA, 120 bp, Artificial Sequence
  ENSG00000166340_1 (sequence is synthesized)
aggctgggtgtccctgggccgtgcggaccctgaggaagagctgagtctcacctttgccctgagacagcagaatgtggaaagactctcggagctggtgcaggctgtgtcggatcccagctc

SEQ ID NO: 531404 - DNA, 120 bp, Artificial Sequence
  ENSG00000166340_2 (sequence is synthesized)
tcctcaatacggaaaatacctgaccctagagaatgtggctgatctggtgaggccatccccactgaccctccacacggtgcaaaaatggctcttggcagccggagcccagaagtgccattc

SEQ ID NO: 531405 - DNA, 120 bp, Artificial Sequence
  ENSG00000166340_3 (sequence is synthesized)
tgtgatcacacaggactttctgacttgctggctgagcatccgacaagcagagctgctgctccctggggctgagtttcatcactatgtgggaggacctacggaaacccatgttgtaaggtc

SEQ ID NO: 531406 - DNA, 120 bp, Artificial Sequence
  ENSG00000166340_4 (sequence is synthesized)
cccacatccctaccagcttccacaggccttggccccccatgtggactttgtggggggactgcaccgttttcccccaacatcatccctgaggcaacgtcctgagccgcaggtgacagggac

SEQ ID NO: 531407 - DNA, 120 bp, Artificial Sequence
  ENSG00000166340_5 (sequence is synthesized)
tgtaggcctgcatctgggggtaaccccctctgtgatccgtaagcgatacaacttgacctcacaagacgtgggctctggcaccagcaataacagccaagcctgtgcccagttcctggagca

SEQ ID NO: 531408 - DNA, 120 bp, Artificial Sequence
  ENSG00000166340_6 (sequence is synthesized)
gtatttccatgactcagacctggctcagttcatgcgcctcttcggtggcaactttgcacatcaggcatcagtagcccgtgtggttggacaacagggccggggccgggccgggattgaggc

SEQ ID NO: 531409 - DNA, 120 bp, Artificial Sequence
  ENSG00000166340_7 (sequence is synthesized)
cagtctagatgtgcagtacctgatgagtgctggtgccaacatctccacctgggtctacagtagccctggccggcatgagggacaggagcccttcctgcagtggctcatgctgctcagtaa

SEQ ID NO: 531410 - DNA, 120 bp, Artificial Sequence
  ENSG00000166340_8 (sequence is synthesized)
tgagtcagccctgccacatgtgcatactgtgagctatggagatgatgaggactccctcagcagcgcctacatccagcgggtcaacactgagctcatgaaggctgccgctcggggtctcac

SEQ ID NO: 531411 - DNA, 120 bp, Artificial Sequence
  ENSG00000166340_9 (sequence is synthesized)
cctgctcttcgcctcaggtgacagtggggccgggtgttggtctgtctctggaagacaccagttccgccctaccttccctgcctccagcccctatgtcaccacagtgggaggcacatcctt

SEQ ID NO: 531412 - DNA, 120 bp, Artificial Sequence
  ENSG00000166340_10 (sequence is synthesized)
ccaggaacctttcctcatcacaaatgaaattgttgactatatcagtggtggtggcttcagcaatgtgttcccacggccttcataccaggaggaagctgtaacgaagttcctgagctctag

SEQ ID NO: 531413 - DNA, 120 bp, Artificial Sequence
  ENSG00000166340_11 (sequence is synthesized)
cccccacctgccaccatccagttacttcaatgccagtggccgtgcctacccagatgtggctgcactttctgatggctactgggtggtcagcaacagagtgcccattccatgggtgtccgg

SEQ ID NO: 531414 - DNA, 120 bp, Artificial Sequence
  ENSG00000166340_12 (sequence is synthesized)
aacctcggcctctactccagtgtttggggggatcctatccttgatcaatgagcacaggatccttagtggccgcccccctcttggctttctcaacccaaggctctaccagcagcatggggc

SEQ ID NO: 531415 - DNA, 120 bp, Artificial Sequence
  ENSG00000166340_13 (sequence is synthesized)
aggactctttgatgtaacccgtggctgccatgagtcctgtctggatgaagaggtagagggccagggtttctgctctggtcctggctgggatcctgtaacaggctggggaacacccaactt

SEQ ID NO: 531416 - DNA, 120 bp, Artificial Sequence
  ENSG00000166340_14 (sequence is synthesized)
gaagactctactcaacccctgaccctttcctatcaggagagatggcttgtcccctgccctgaagctggcagttcagtcccttattctgccctgttggaagccctgctgaaccctcaacta

SEQ ID NO: 531417 - DNA, 120 bp, Artificial Sequence
  ENSG00000166340_15 (sequence is synthesized)
ttgactgctgcagacagcttatctccctaaccctgaaatgctgtgagcttgacttgactcccaaccctaccatgctccatcatactcaggtctccctactcctgccttagattcctcaat

SEQ ID NO: 531418 - DNA, 120 bp, Artificial Sequence
  ENSG00000166340_16 (sequence is synthesized)
aagatgctgtaactagcattttttgaatgcctctccctccgcatctcatctttctcttttcaatcaggcttttccaaagggttgtatacagactctgtgcactatttcacttgatattca

SEQ ID NO: 531419 - DNA, 120 bp, Artificial Sequence
  ENSG00000166340_17 (sequence is synthesized)
ttccccaattcactgcaaggagacctctactgtcaccgtttactctttcctaccctgacatccagaaacaatggcctccagtgcatacttctcaatctttgctttatggcctttccatca

SEQ ID NO: 531420 - DNA, 120 bp, Artificial Sequence
  ENSG00000166340_18 (sequence is synthesized)
tagttgcccactccctctccttacttagcttccaggtcttaacttctctgactactcttgtcttcctctctcatcaatttctgcttcttcatggaatgctgaccttcattgctccatttg

SEQ ID NO: 531421 - DNA, 120 bp, Artificial Sequence
  ENSG00000166340_19 (sequence is synthesized)
tagatttttgctcttctcagtttactcattgtcccctggaacaaatcactgacatctacaaccattaccatctcactaaataagactttctatccaataatgattgatacctcaaatgta

SEQ ID NO: 531422 - DNA, 120 bp, Artificial Sequence
  ENSG00000166340_20 (sequence is synthesized)
agatgcgtgatactcaacatttcatcgtccaccttcccaaccccaaacaattccatctcgtttcttcttggtaaatgatgctatgctttttccaaccaagccagaaacctgtgtcatctt

SEQ ID NO: 531423 - DNA, 120 bp, Artificial Sequence
  ENSG00000166340_21 (sequence is synthesized)
ttcaccccaccttcaatcaacaagtcctcaatcaacaagtcctactgactgcacatcttaaatatatctttatcagtccacaagtccttccaattatatttcccaagtatatctagaact

SEQ ID NO: 531424 - DNA, 120 bp, Artificial Sequence
  ENSG00000166340_22 (sequence is synthesized)
tatccacttatatccccactgctactaccttagtttagggctatattctcttgaaaaaaagtgtccttacttcctgccaatccccaagtcatcttccagagtaaaatgcaaatcccatca

SEQ ID NO: 531425 - DNA, 120 bp, Artificial Sequence
  ENSG00000166340_23 (sequence is synthesized)
ggccacttggatgaaaacccttcaaggattactggatagaattcaggctttcccctccagcccccaatcatagctcacaaaccttccttgctatttgttcttaagtaaaaaatcattttt

SEQ ID NO: 531426 - DNA, 120 bp, Artificial Sequence
  ENSG00000166340_24 (sequence is synthesized)
cctcctccctccccaaaccccaaggaactctcactcttgctcaagctgttccgtccccttaccacccctgatacaactgccaggttaatttccagaattcttgcaagactcagttcagaa

SEQ ID NO: 531427 - DNA, 120 bp, Artificial Sequence
  ENSG00000166340_25 (sequence is synthesized)
gtcaccttctttcgtgaatgttttgattccctgaggctactttattttggtatggctgaaaaatcctagattttctaaacaaaacctgtttgaatcttggttctgatatggactaggaga

SEQ ID NO: 531428 - DNA, 120 bp, Artificial Sequence
  ENSG00000166340_26 (sequence is synthesized)
gagactgggtcaagtaagcttatctccctgaggctgtttcctcgtctgttaagtgtgaatatcaatacctgcctttcataatcaccagggaataaagtggaataatgttgataacagtgc

SEQ ID NO: 531429 - DNA, 120 bp, Artificial Sequence
  ENSG00000166340_27 (sequence is synthesized)
ttggcacctggaagtaggtggcagatgttaacgcccttcctcccttgcactgcgccccctgtgcctacctctagcattgtaacgaccacgtagtattgaaatggccagtttacttgtctg

SEQ ID NO: 531430 - DNA, 120 bp, Artificial Sequence
  ENSG00000166340_28 (sequence is synthesized)
ccttcctttccaagaccgttggtgcctagaggactagaatcgtgtcctatttaactttgtgttcccaggtcctagctcaggagttggcaaataagaattaaatgtctgctacaccgaaaa

SEQ ID NO: 531431 - DNA, 120 bp, Artificial Sequence
  ENSG00000166340_29 (sequence is synthesized)
ccactctgcttcaaaacagtctctccaacagtcaaaatggattggttccttctcctggttaaagcccttcacagcagggggagtgtgtgcttgtgaactgcagaggctggggacggggca

SEQ ID NO: 531432 - DNA, 120 bp, Artificial Sequence
  ENSG00000166340_30 (sequence is synthesized)
gtgtgacactagtgtgcatggcaggaaacagtgactcaccatcgtgttaagcttaaaatcaacaagtatgcaaatttgagctaaactgaataactggtaccgaaagatttgaaaacattt

SEQ ID NO: 531433 - DNA, 120 bp, Artificial Sequence
  ENSG00000166340_31 (sequence is synthesized)
accggacataagcttaaaattaaaatggaaaatttatatgtattaacctcattcattttcatgatcatggcaatacatgctgtggtgcgacatttgcaacttactggcctttagggtaaa

SEQ ID NO: 531434 - DNA, 120 bp, Artificial Sequence
  ENSG00000166340_32 (sequence is synthesized)
tccatattattggccatggcatttcaagtctctccagccttttcttcctctgcttcccaagtacaccctacacctgcacacatagccctcctttaccctgttccaggctttgggaagtcc

SEQ ID NO: 531435 - DNA, 120 bp, Artificial Sequence
  ENSG00000166340_33 (sequence is synthesized)
ggtaacacctatggggtgaatgggggttggggcacacagatccaggggctgaggaagtttagatgccattggggactgggggtggggtgagttgtaaggtgggcattacagtctataaga

SEQ ID NO: 531436 - DNA, 120 bp, Artificial Sequence
  ENSG00000166340_34 (sequence is synthesized)
gacagtggggaagggggtgggagatgggtgttgatccctgctccctcaagggaatgctataagctggagagagatcctgacaacccccagtgactatctttgtgcccatccctcaaaaaa

SEQ ID NO: 531437 - DNA, 120 bp, Artificial Sequence
  ENSG00000166340_35 (sequence is synthesized)
gggctcgggagaaagggatcacgttggagggagcacacattgggagggtgggaacacaaggacaacgtagctcccactgaaacccacctgctgcccctacagcctcctagggctctttgc

SEQ ID NO: 531438 - DNA, 120 bp, Artificial Sequence
  ENSG00000166340_36 (sequence is synthesized)
gcagatccgcggaagggcagaatgggactccaagcctgcctcctagggctctttgccctcatcctctctggcaaatgcagttacagcccggagcccgaccagcggaggacgtgagttgac

SEQ ID NO: 531439 - DNA, 120 bp, Artificial Sequence
  ENSG00000166340_37 (sequence is synthesized)
ttagcacagactgcccccttccccataccctgttctgcctcccactgtcctggtcctagcttctctcacccccgtgccagctcctagtacgcactccatagcttcatctctatgttccta

SEQ ID NO: 531440 - DNA, 120 bp, Artificial Sequence
  ENSG00000166340_38 (sequence is synthesized)
ctgggagctttgactccacagtgatccctgagcctggtctctgactcataatctgaactcagaccttccagtagggaccactgacctgacctctacactctgacctcctacagtaacaaa

SEQ ID NO: 531441 - DNA, 120 bp, Artificial Sequence
  ENSG00000166340_39 (sequence is synthesized)
gccttttgggactgaggacaggatgtgggatgcggtggagggacacagggctgggttgggcatgggatggcgatcatgtcagagcctgccaagacacttgtgttcctcaggctagaaacc

SEQ ID NO: 531442 - DNA, 120 bp, Artificial Sequence
  ENSG00000166340_40 (sequence is synthesized)
taaaaggggatgtggttcagtatacaggctttatgatcaaatacgaactcaaattctgactctgctacttactagctaccaggcatctagtacaacttacgttccttcccctaccctcaa

SEQ ID NO: 531443 - DNA, 120 bp, Artificial Sequence
  ENSG00000166340_41 (sequence is synthesized)
atccattctaatttcctcttttgttcacatactaaggctgccagttctaactcccaaagagcctttggattaatctccttcttgccgtcttttgttacgaccaactccgttatttattcc

SEQ ID NO: 531444 - DNA, 120 bp, Artificial Sequence
  ENSG00000166340_42 (sequence is synthesized)
tgtgatcacacaggactttctgacttgctggctgagcatccggtgagaggaaatgattgctccatggagggcaccagtcatcccatcagtgagatggatgggagggagttgagagcttgc

SEQ ID NO: 531445 - DNA, 120 bp, Artificial Sequence
  ENSG00000166340_43 (sequence is synthesized)
tggggcttgtgggtgggagctaatgcatggggagacagtgactgactgcccagggatgctcagaggtagcttcttctgttccgttttgagctttctgacctctgttctctgacctccaga

SEQ ID NO: 531446 - DNA, 120 bp, Artificial Sequence
  ENSG00000166340_44 (sequence is synthesized)
gcctaccactcaggtataaccaccacctttcacttgtgatctcatgatgtagaacctttgtcttgaccccaccatgtgctcctgtggttcagccttaagctttgcctgccctggttgctg

SEQ ID NO: 531447 - DNA, 120 bp, Artificial Sequence
  ENSG00000166340_45 (sequence is synthesized)
tactcctgtctcttcttcctgcaggtcccaggccccaaatctcttgtgtgggatacagctcccattgttccttttcgtcagttcccaggcattttagtggaagatttggtgggtgttctg

SEQ ID NO: 531448 - DNA, 120 bp, Artificial Sequence
  ENSG00000166340_46 (sequence is synthesized)
tagagaaaagtgtgcacagtcacctcgggccatgccttgaaggctcaaaatctcttagtcaatcccatatacatgcttccccacagagtctagttcctccagcaagacctgggctatact

SEQ ID NO: 531449 - DNA, 120 bp, Artificial Sequence
  ENSG00000166340_47 (sequence is synthesized)
cccctatcattcacctcatgtgatctgtatctgctcctaggatcctccccaaggtctcagctcctaatctggaaccttccatgaccaatattttccatctccaccctaaccaaagccatg

SEQ ID NO: 531450 - DNA, 120 bp, Artificial Sequence
  ENSG00000166340_48 (sequence is synthesized)
ggccttcataccaggtacgtgtgtttgtgtggatggatgcagggtaagagtgaggatgggggatcctcagttcagctgactgctgggcaggccacatgccaatactcactcaaaaatgcc

SEQ ID NO: 531451 - DNA, 120 bp, Artificial Sequence
  ENSG00000166340_49 (sequence is synthesized)
cagttagggtggtgtggaatagcctttgaaatgtgagtacagggtgaggagatatactctttaagtactggtactagtaggcccagatctgatgccagcctcctccctaggtaacccgtg

SEQ ID NO: 531452 - DNA, 120 bp, Artificial Sequence
  ENSG00000166341_0 (sequence is synthesized)
cggggcggctgtgcaggaggcggcgcccgggcgtcagcggacggaccgatcgacggccaagggcgcgcggaccgacggcggctgcccggaggggatcgcgggcctcggagacagcgactg

SEQ ID NO: 531453 - DNA, 80 bp, Artificial Sequence
  ENSG00000166341_1 (sequence is synthesized)
ggcctcggagacagcgactgcggacgatgcgcggcctcaggccccgcgcgagcgggcgctgcccggggggctgaccgcgg

SEQ ID NO: 531454 - DNA, 120 bp, Artificial Sequence
  ENSG00000166341_2 (sequence is synthesized)
cgcggaggtcagggagcctgagctggagccagggccccagtgggacctgacccaaagtctgaggtcaagctgggcccagagcctggcctggagctggagcccaaggcacagctggactac

SEQ ID NO: 531455 - DNA, 120 bp, Artificial Sequence
  ENSG00000166341_3 (sequence is synthesized)
ccttgtcatgcagaaggagctgggcattgtgccttcctgccctggcatgaagagccccaggccccacctcctgctaccattgctgctgctgctgctgctgctgctgggggctggggtgcc

SEQ ID NO: 531456 - DNA, 120 bp, Artificial Sequence
  ENSG00000166341_4 (sequence is synthesized)
aggtgcctggggtcaggctgggagcctggacttgcagattgatgaggagcagccagcgggtacactgattggcgacatcagtgcggggcttccggcaggcacggcagctcctctcatgta

SEQ ID NO: 531457 - DNA, 120 bp, Artificial Sequence
  ENSG00000166341_5 (sequence is synthesized)
cttcatctctgcccaagagggcagcggcgtgggcacagacctggccattgacgaacacagtggggtcgtccgtacagcccgtgtcttggaccgtgagcagcgggaccgctaccgcttcac

SEQ ID NO: 531458 - DNA, 120 bp, Artificial Sequence
  ENSG00000166341_6 (sequence is synthesized)
tgcagtcactcctgatggtgccaccgtagaagttacagtgcgagtggctgacatcaacgaccatgctccagccttcccacaggctcgggctgccctgcaggtacctgagcatacagcttt

SEQ ID NO: 531459 - DNA, 120 bp, Artificial Sequence
  ENSG00000166341_7 (sequence is synthesized)
tggcacccgctacccactggagcctgctcgtgatgcagatgctgggcgtctgggaacccagggctatgcgctatctggtgatggggctggagagaccttccggctggagacacgccccgg

SEQ ID NO: 531460 - DNA, 120 bp, Artificial Sequence
  ENSG00000166341_8 (sequence is synthesized)
tccagatgggactccagtacctgagctggtagttactggggaactggaccgagagaaccgctcacactatatgctacagctggaggcctatgatggtggttcacccccccggagggccca

SEQ ID NO: 531461 - DNA, 120 bp, Artificial Sequence
  ENSG00000166341_9 (sequence is synthesized)
ggccctgctggacgtgacactgctggacatcaatgaccatgccccggctttcaatcagagccgctaccatgctgtggtgtctgagagcctggcccctggcagtcctgtcttgcaggtgtt

SEQ ID NO: 531462 - DNA, 120 bp, Artificial Sequence
  ENSG00000166341_10 (sequence is synthesized)
cgcatctgatgccgatgctggtgtcaatggggctgtgacttacgagatcaaccggaggcagagcgagggtgatggacccttctccatcgacgcacacacggggctgctgcagttagagcg

SEQ ID NO: 531463 - DNA, 120 bp, Artificial Sequence
  ENSG00000166341_11 (sequence is synthesized)
gccactggactttgagcagcggcgggtccatgaactggtggtgcaagcacgagatggtggggctcaccctgagctgggctcggcctttgtgactgtgcatgtgcgagatgccaatgacaa

SEQ ID NO: 531464 - DNA, 120 bp, Artificial Sequence
  ENSG00000166341_12 (sequence is synthesized)
tcagccctccatgactgtcatctttctcagtgcagatggctccccccaagtgtctgaggccgccccacctggacagctcgttgctcgcatctctgtgtcagacccagatgatggtgactt

SEQ ID NO: 531465 - DNA, 120 bp, Artificial Sequence
  ENSG00000166341_13 (sequence is synthesized)
tgcccatgtcaatgtgtccctggaaggtggagagggccactttgccctaagcacccaagacagcgtcatctatctggtgtgtgtggctcggcggctggatcgagaggagagggatgccta

SEQ ID NO: 531466 - DNA, 120 bp, Artificial Sequence
  ENSG00000166341_14 (sequence is synthesized)
taacttgagggttacagccacagactcaggctcacctccactgcgggctgaggctgcctttgtgctgcacgtcactgatgtcaacgacaatgcacctgcctttgaccgccagctctaccg

SEQ ID NO: 531467 - DNA, 120 bp, Artificial Sequence
  ENSG00000166341_15 (sequence is synthesized)
acctgagcccctgcctgaggttgcgctgcctggcagctttgtagtgcgggtgactgctcgggatcctgaccaaggcaccaatggtcaggtcacttatagcctagcccctggcgcccacac

SEQ ID NO: 531468 - DNA, 120 bp, Artificial Sequence
  ENSG00000166341_16 (sequence is synthesized)
ccactggttctccattgaccccacctcaggcattatcactacggctgcctcactggactatgagttggaacctcagccacagctgattgtggtggccacagatggtggcctgccccctct

SEQ ID NO: 531469 - DNA, 120 bp, Artificial Sequence
  ENSG00000166341_17 (sequence is synthesized)
agcctcctctgccacagttagcgtggccctgcaagatgtgaatgataatgagccccaattccagaggactttctacaatgcctcactgcctgagggcacccagcctggaacttgcttcct

SEQ ID NO: 531470 - DNA, 120 bp, Artificial Sequence
  ENSG00000166341_18 (sequence is synthesized)
gcaggtgacagccacagacgcggatagtggcccatttggcctcctctcctattccttgggtgctggacttgggtcctccggatctcccccattccgcattgatgcccacagcggtgatgt

SEQ ID NO: 531471 - DNA, 120 bp, Artificial Sequence
  ENSG00000166341_19 (sequence is synthesized)
gtgcacaacccggaccctggaccgtgaccaggggccctcaagctttgacttcacagtgacagctgtggatgggggaggcctcaagtccatggtatatgtgaaggtgtttctgtcagacga

SEQ ID NO: 531472 - DNA, 120 bp, Artificial Sequence
  ENSG00000166341_20 (sequence is synthesized)
gaatgacaaccctcctcagttttatccacgggagtatgctgccagtataagtgcccagagtccaccaggcacagctgtgctgaggttgcgtgcccatgaccctgaccagggatcccatgg

SEQ ID NO: 531473 - DNA, 120 bp, Artificial Sequence
  ENSG00000166341_21 (sequence is synthesized)
gcgactctcctaccatatcctggctggcaacagccccccactttttaccttggatgagcaatcagggctgttgacagtagcctggcccttggccagacgggccaattctgtggtgcagct

SEQ ID NO: 531474 - DNA, 120 bp, Artificial Sequence
  ENSG00000166341_22 (sequence is synthesized)
ggagatcggggctgaggacggaggtggcctacaggcagaacccagtgcccgagtggacatcagcattgtgcctggaacccccacaccacccatatttgagcaactacagtatgttttttc

SEQ ID NO: 531475 - DNA, 120 bp, Artificial Sequence
  ENSG00000166341_23 (sequence is synthesized)
tgtgccagaggatgtggcaccaggcaccagtgtgggcatagtccaggcacacaacccaccaggtcgcttggcacctgtgaccctttccctatcaggtggggatccccgaggactcttctc

SEQ ID NO: 531476 - DNA, 120 bp, Artificial Sequence
  ENSG00000166341_24 (sequence is synthesized)
cctagatgcggtatcaggactgttgcaaacacttcgccctctggaccgggagctactgggaccagtgttggagctggaggtgcgagcaggcagtggagtgcccccagctttcgctgtagc

SEQ ID NO: 531477 - DNA, 120 bp, Artificial Sequence
  ENSG00000166341_25 (sequence is synthesized)
tcgggtgcgtgtgctgctggatgatgtgaatgacaactcccctgcctttcctgcacctgaagacacggtattgctaccaccaaacactgccccagggactcccatctatacactgcgggc

SEQ ID NO: 531478 - DNA, 120 bp, Artificial Sequence
  ENSG00000166341_26 (sequence is synthesized)
tcttgaccccgactcaggtgttaacagtcgagtcacctttaccctgcttgctgggggtggtggagccttcaccgtggaccccaccacaggccatgtacggcttatgaggcctctggggcc

SEQ ID NO: 531479 - DNA, 120 bp, Artificial Sequence
  ENSG00000166341_27 (sequence is synthesized)
ctcaggagggccagcccatgagctggagctggaggcccgggatgggggctccccaccacgcaccagccactttcgactacgggtggtggtacaggatgtgggaacccgtgggctggctcc

SEQ ID NO: 531480 - DNA, 120 bp, Artificial Sequence
  ENSG00000166341_28 (sequence is synthesized)
ccgattcaacagccctacctaccgtgtggacctgccctcaggcaccactgctggaactcaggtcctgcaagtgcaggcccaagcaccagatgggggccctatcacctatcaccttgcagc

SEQ ID NO: 531481 - DNA, 120 bp, Artificial Sequence
  ENSG00000166341_29 (sequence is synthesized)
agagggagcaagtagcccctttggcctggagccacagagtgggtggctatgggtgcgggcagcactagaccgtgaggcccaggaattgtacatactgaaggtaatggcagtgtctgggtc

SEQ ID NO: 531482 - DNA, 120 bp, Artificial Sequence
  ENSG00000166341_30 (sequence is synthesized)
caaagctgagttggggcagcagacaggcacagccaccgtgagggtcagcatcctcaaccagaatgaacacagtccccgcttgtctgaggatcccaccttcctggctgtggctgagaacca

SEQ ID NO: 531483 - DNA, 120 bp, Artificial Sequence
  ENSG00000166341_31 (sequence is synthesized)
gcccccagggaccagcgtgggccgagtctttgccactgaccgagactcaggacccaatggacgtctgacctacagcctgcaacagctgtctgaagacagcaaggccttccgcatccaccc

SEQ ID NO: 531484 - DNA, 120 bp, Artificial Sequence
  ENSG00000166341_32 (sequence is synthesized)
ccagactggagaagtgaccacactccaaaccctggaccgtgagcagcagagcagctatcagctcctggtgcaggtgcaggatggagggagcccaccccgcagcaccacaggcactgtgca

SEQ ID NO: 531485 - DNA, 120 bp, Artificial Sequence
  ENSG00000166341_33 (sequence is synthesized)
tgttgcagtgcttgacctcaacgacaacagccccacgttcctgcaggcttcaggagctgctggtgggggcctccctatacaggtaccagaccgcgtgcctccgggaacactggtgacgac

SEQ ID NO: 531486 - DNA, 120 bp, Artificial Sequence
  ENSG00000166341_34 (sequence is synthesized)
tctgcaggcgaaggatccagatgagggggagaatgggaccatcttgtacacgctaactggtcctggctcagagcttttctctctgcaccctcactcaggggagctgctcactgcagctcc

SEQ ID NO: 531487 - DNA, 120 bp, Artificial Sequence
  ENSG00000166341_35 (sequence is synthesized)
cctgatccgagcagagcggccccactatgtgctgacactgagtgctcatgaccaaggcagccctcctcgaagtgccagcctccagctgctggtgcaggtgcttccctcagctcgcttggc

SEQ ID NO: 531488 - DNA, 120 bp, Artificial Sequence
  ENSG00000166341_36 (sequence is synthesized)
cgagccgcccccagatctcgcagagcgggacccagcggcaccagtgcctgtcgtgctgacggtgacagcagctgagggactgcggcccggctctctgttgggctcggtggcagcgccaga

SEQ ID NO: 531489 - DNA, 120 bp, Artificial Sequence
  ENSG00000166341_37 (sequence is synthesized)
gcccgcgggtgtgggtgcactcacctacacactggtgggcggtgccgatcccgagggcaccttcgcgctggatgcggcctcagggcgcttgtacctggcgcggcccctggacttcgaagc

SEQ ID NO: 531490 - DNA, 120 bp, Artificial Sequence
  ENSG00000166341_38 (sequence is synthesized)
tggcccgccgtggcgcgcgcttacggtacgcgctgaggggccgggaggcgcgggcgcgcggctgctgcgagtgcaggtgcaagtgcaggacgagaatgagcatgcgcccgcctttgcgcg

SEQ ID NO: 531491 - DNA, 120 bp, Artificial Sequence
  ENSG00000166341_39 (sequence is synthesized)
cgacccgctggcgctggcgctgccagagaacccggagcccggcgcagcgctgtacactttccgcgcgtcggacgccgacggccccggccccaatagcgacgtgcgctaccgcctgctgcg

SEQ ID NO: 531492 - DNA, 120 bp, Artificial Sequence
  ENSG00000166341_40 (sequence is synthesized)
ccaggagccgcccgtgccggcgcttcgcctggacgcgcgcaccggggcgctcagcgctccgcgcggcctggaccgagagaccactcccgcgctgctgctgctggtggaagccaccgaccg

SEQ ID NO: 531493 - DNA, 120 bp, Artificial Sequence
  ENSG00000166341_41 (sequence is synthesized)
gcccgccaacgccagccgccgtcgtgcagcgcgcgtttcagcgcgcgtcttcgtcacggatgagaatgacaacgcgcctgtcttcgcctcgccgtcacgcgtgcgcctcccagaggacca

SEQ ID NO: 531494 - DNA, 120 bp, Artificial Sequence
  ENSG00000166341_42 (sequence is synthesized)
gccgcctgggcccgcggccctgcacgtggtagcccgggacccggatctgggcgaggctgcacgcgtgtcctatcggctggcatctggcggggacggccacttccggctgcactcaagcac

SEQ ID NO: 531495 - DNA, 120 bp, Artificial Sequence
  ENSG00000166341_43 (sequence is synthesized)
tggagcgctgtccgtggtgcggccgttggaccgcgaacaacgagctgagcacgtactgacagtggtggcctcagaccacggctccccgccgcgctcggccacgcaggtcctgaccgtcag

SEQ ID NO: 531496 - DNA, 120 bp, Artificial Sequence
  ENSG00000166341_44 (sequence is synthesized)
ccagcagcaggagtacagcgtcctcttgcgtgagaacaaccctcctggcacatctctgctcaccctgcgagcaaccgaccccgacgtgggggccaacgggcaagtgacttatggaggcgt

SEQ ID NO: 531497 - DNA, 120 bp, Artificial Sequence
  ENSG00000166341_45 (sequence is synthesized)
ctctagcgaaagcttttctctggatcctgacactggtgttctcacgactcttcgggccctggatcgagaggaacaggaggagatcaacctgacagtgtatgcccaggacaggggctcacc

SEQ ID NO: 531498 - DNA, 120 bp, Artificial Sequence
  ENSG00000166341_46 (sequence is synthesized)
tcctcagttaacgcatgtcactgttcgagtggctgtggaggatgagaatgaccatgcaccaacctttgggagtgcccatctctctctggaggtgcctgagggccaggacccccagaccct

SEQ ID NO: 531499 - DNA, 120 bp, Artificial Sequence
  ENSG00000166341_47 (sequence is synthesized)
taccatgcttcgggcctctgatccagatgtgggagccaatgggcagttgcagtaccgcatcctagatggggacccatcaggagcctttgtcctagaccttgcttctggagagtttggcac

SEQ ID NO: 531500 - DNA, 120 bp, Artificial Sequence
  ENSG00000166341_48 (sequence is synthesized)
catgcggccactagacagagaagtggagccagctttccagctgaggatagaggcccgggatggaggccagccagctctcagtgccacgctgcttttgacagtgacagtgctggatgccaa

SEQ ID NO: 531501 - DNA, 120 bp, Artificial Sequence
  ENSG00000166341_49 (sequence is synthesized)
tgaccatgctccagcctttcctgtgcctgcctactcggtggaggtgccggaggatgtgcctgcagggaccctgctgctgcagctacaggctcatgaccctgatgctggagctaatggcca

SEQ ID NO: 531502 - DNA, 120 bp, Artificial Sequence
  ENSG00000166341_50 (sequence is synthesized)
tgtgacctactacctgggcgccggtacagcaggagccttcctgctggagcccagctctggagaactgcgcacagctgcagccttggacagagaacagtgtcccagctacaccttttctgt

SEQ ID NO: 531503 - DNA, 120 bp, Artificial Sequence
  ENSG00000166341_51 (sequence is synthesized)
gagtgcagtggatggtgcagctgctgggcccctaagcaccacagtgtctgtcaccatcacggtgcgcgatgtcaatgaccatgcacccaccttccccaccagtcctctgcgcctacgtct

SEQ ID NO: 531504 - DNA, 120 bp, Artificial Sequence
  ENSG00000166341_52 (sequence is synthesized)
gccccgcccaggccccagcttcagtaccccaaccctggctctggccacactgagagctgaagatcgtgatgctggtgccaatgcttccattctgtaccggctggcaggcacaccacctcc

SEQ ID NO: 531505 - DNA, 120 bp, Artificial Sequence
  ENSG00000166341_53 (sequence is synthesized)
tggcactactgtggactcttacactggtgaaatccgcgtggcccgctctcctgtagctctaggcccccgagatcgtgtcctcttcattgtggccactgatcttggccgtccagctcgctc

SEQ ID NO: 531506 - DNA, 120 bp, Artificial Sequence
  ENSG00000166341_54 (sequence is synthesized)
tgccactggtgtgatcattgttggactgcagggggaagctgagcgtggaccccgctttccccgggctagcagtgaggctacgattcgtgagaatgcgcccccagggactcctattgtctc

SEQ ID NO: 531507 - DNA, 120 bp, Artificial Sequence
  ENSG00000166341_55 (sequence is synthesized)
ccccagggccgtccatgcaggaggcacaaatggacccatcacctacagcattctcagtgggaatgagaaagggacattctccatccagcctagtacaggtgccatcacagttcgctcagc

SEQ ID NO: 531508 - DNA, 120 bp, Artificial Sequence
  ENSG00000166341_56 (sequence is synthesized)
agaggggctagacttcgaggtgagtccacggctgcgactggtgctgcaggcagagagtggaggagcctttgccttcactgtgctgaccctgaccctgcaagatgccaacgacaatgctcc

SEQ ID NO: 531509 - DNA, 120 bp, Artificial Sequence
  ENSG00000166341_57 (sequence is synthesized)
ccgtttcctgcggccccattatgtggccttccttcctgagtcccggcccttggaggggcccctgctgcaggtggaggcggatgacctggatcaaggctctggaggacagatttcctacag

SEQ ID NO: 531510 - DNA, 120 bp, Artificial Sequence
  ENSG00000166341_58 (sequence is synthesized)
tctggctgcatcccagccggcacgtggattgttccacgtagacccaaccacaggcactatcactaccacagccatcctggaccgtgagatctgggctgaaacacggttggtgctgatggc

SEQ ID NO: 531511 - DNA, 120 bp, Artificial Sequence
  ENSG00000166341_59 (sequence is synthesized)
cacagacagagggagcccagccctggtgggctcagctaccttgacggtgatggtcatcgacaccaatgacaatcgccccaccatcccccaaccctgggagctccgagtgtcagaagatgc

SEQ ID NO: 531512 - DNA, 120 bp, Artificial Sequence
  ENSG00000166341_60 (sequence is synthesized)
gttattgggctcagagattgcacaggtaacagggaatgatgtggactcaggacccgtgctgtggtatgtgctaagcccatctgggccccaggatcccttcagtgttggccgctatggagg

SEQ ID NO: 531513 - DNA, 120 bp, Artificial Sequence
  ENSG00000166341_61 (sequence is synthesized)
ccgtgtctccctcacggggcccctggactttgagcagtgtgaccgctaccagctgcagctgctggcacatgatgggcctcatgagggccgtgccaacctcacagtgcttgtggaggatgt

SEQ ID NO: 531514 - DNA, 120 bp, Artificial Sequence
  ENSG00000166341_62 (sequence is synthesized)
caatgacaatgcacctgccttctcacagagcctctaccaggtaatgctgcttgagcacacacccccaggcagtgccattctctccgtctctgccactgatcgggactcaggtgccaacgg

SEQ ID NO: 531515 - DNA, 120 bp, Artificial Sequence
  ENSG00000166341_63 (sequence is synthesized)
tcacatttcctaccacctggcttcccctgccgatggcttcagtgttgaccccaacaatgggaccctgttcacaatagtgggaacagtggccttgggccatgacgggtcaggagcagtgga

SEQ ID NO: 531516 - DNA, 120 bp, Artificial Sequence
  ENSG00000166341_64 (sequence is synthesized)
tgtggtgctggaagcacgagaccacggggctccaggccgggcagcacgagccacagtgcacgtgcagctgcaggaccagaacgaccacgccccgagcttcacattgtcacactaccgtgt

SEQ ID NO: 531517 - DNA, 120 bp, Artificial Sequence
  ENSG00000166341_65 (sequence is synthesized)
ggctgtgactgaagacctgccccctggctccactctgctcaccctggaggctacagatgctgatggaagccgcagccatgccgctgtggactacagcatcatcagtggcaactggggccg

SEQ ID NO: 531518 - DNA, 120 bp, Artificial Sequence
  ENSG00000166341_66 (sequence is synthesized)
agtcttccagctggaacccaggctggctgaggctggggagagtgctggaccaggcccccgggcactgggctgcctggtgttgcttgaacctctagactttgaaagcctgacacagtacaa

SEQ ID NO: 531519 - DNA, 120 bp, Artificial Sequence
  ENSG00000166341_67 (sequence is synthesized)
tctaacagtggctgcagctgaccgtgggcagccaccccaaagctcagtcgtgccagtcactgtcactgtactagatgtcaatgacaacccacctgtctttacccgagcatcctaccgtgt

SEQ ID NO: 531520 - DNA, 120 bp, Artificial Sequence
  ENSG00000166341_68 (sequence is synthesized)
gacagtacctgaggacacacctgttggagctgagctgctgcatgtagaggcctctgacgctgaccctggccctcatggcctcgtgcgtttcactgtcagctcaggcgacccatcagggct

SEQ ID NO: 531521 - DNA, 120 bp, Artificial Sequence
  ENSG00000166341_69 (sequence is synthesized)
ctttgagctggatgagagctcaggcaccttgcgactggcccatgccctggactgtgagacccaggctcgacatcagcttgtagtacaggctgctgaccctgctggtgcacactttgcttt

SEQ ID NO: 531522 - DNA, 120 bp, Artificial Sequence
  ENSG00000166341_70 (sequence is synthesized)
ggcaccagtgacaattgaggtccaggatgtgaatgatcatggcccagccttcccactgaacttactcagcaccagcgtggccgagaatcagcctccaggcactctcgtgaccactctgca

SEQ ID NO: 531523 - DNA, 120 bp, Artificial Sequence
  ENSG00000166341_71 (sequence is synthesized)
tgcaatcgacggggatgctggggcttttgggaggctccgttacagcctgttggaggctgggccaggacctgagggccgtgaggcatttgcactgaacagctcaacaggggagttgcgtgc

SEQ ID NO: 531524 - DNA, 120 bp, Artificial Sequence
  ENSG00000166341_72 (sequence is synthesized)
gcgagtgccctttgactatgagcacacagaaagcttccggctgctggtgggtgctgctgatgctgggaatctctcagcctctgtcactgtgtcggtgctagtgactggagaggatgagta

SEQ ID NO: 531525 - DNA, 120 bp, Artificial Sequence
  ENSG00000166341_73 (sequence is synthesized)
tgaccctgtatttctggcaccagctttccacttccaagtgcccgaaggtgcccggcgtggccacagcttgggtcacgtgcaggccacagatgaggatgggggtgccgatggcctggttct

SEQ ID NO: 531526 - DNA, 120 bp, Artificial Sequence
  ENSG00000166341_74 (sequence is synthesized)
gtattcccttgccacctcttccccctattttggtattaaccagactacaggagccctgtacctgcgggtggacagtcgggcaccaggcagcggaacagccacctctgggggtgggggccg

SEQ ID NO: 531527 - DNA, 120 bp, Artificial Sequence
  ENSG00000166341_75 (sequence is synthesized)
gacccggcgggaagcaccacgggagctgaggctggaggtgatagcacgggggcctctgcctggttcccggagtgccacagtgcctgtgaccgtggatatcacccacaccgcactgggcct

SEQ ID NO: 531528 - DNA, 120 bp, Artificial Sequence
  ENSG00000166341_76 (sequence is synthesized)
ggcacctgacctcaacctgctattagtaggggccgtggcagcctccttgggagttgtggtggtgcttgcactggcagccctggtcctaggacttgttcgggcccgtagccgcaaggctga

SEQ ID NO: 531529 - DNA, 120 bp, Artificial Sequence
  ENSG00000166341_77 (sequence is synthesized)
ggcagcccctggcccaatgtcacaggcagcacccctagccagtgactcactgcagaaactgggccgggagccacctagtccaccaccctctgagcacctctatcaccagactcttcccag

SEQ ID NO: 531530 - DNA, 120 bp, Artificial Sequence
  ENSG00000166341_78 (sequence is synthesized)
ctatggtgggccaggagctggaggaccctacccccgtggtggctccttggacccttcacattcaagtggccgaggatcagcagaggctgcagaggatgatgagatccgcatgatcaatga

SEQ ID NO: 531531 - DNA, 120 bp, Artificial Sequence
  ENSG00000166341_79 (sequence is synthesized)
gttcccccgtgtggccagtgtggcctcctctctggctgcccgtggccctgactcaggcatccagcaggatgcagatggtctgagtgacacatcctgcgaaccacctgcccctgacacctg

SEQ ID NO: 531532 - DNA, 120 bp, Artificial Sequence
  ENSG00000166341_80 (sequence is synthesized)
gtataagggccgaaaggcagggctgctgctgccaggtgcaggagccactctctacagagaggaggggcccccagccactgccacagccttcctggggggctgtggcctgagccctgcacc

SEQ ID NO: 531533 - DNA, 120 bp, Artificial Sequence
  ENSG00000166341_81 (sequence is synthesized)
cactggggactatggcttcccagcagatggcaagccatgtgtggcaggtgcgctgacagccattgtggccggcgaggaggagctccgtggcagctataactgggactacctgctgagctg

SEQ ID NO: 531534 - DNA, 120 bp, Artificial Sequence
  ENSG00000166341_82 (sequence is synthesized)
gtgccctcagttccaaccactggccagtgtcttcacagagatcgctcggctcaaggatgaagctcggccatgtcccccagctccccgtatcgacccaccacccctcatcactgccgtggc

SEQ ID NO: 531535 - DNA, 120 bp, Artificial Sequence
  ENSG00000166341_83 (sequence is synthesized)
ccacccaggagccaagtctgtgccccccaagccagcaaacacagctgcagcccgggccatcttcccaccagcttctcaccgctcccccatcagccatgaaggctccctgtcctcagctgc

SEQ ID NO: 531536 - DNA, 120 bp, Artificial Sequence
  ENSG00000166341_84 (sequence is synthesized)
catgtcccccagcttctcaccctctctgtctcctctggctgctcgctcacccgttgtctcaccatttggggtggcccagggtccctcagcctcagcactcagcgcagagtctggcctgga

SEQ ID NO: 531537 - DNA, 120 bp, Artificial Sequence
  ENSG00000166341_85 (sequence is synthesized)
gccacctgatgacacggagctgcacatctagctgtggcccaggctgggccccgacctgggatgcgcacagtgtccccaacgcaggccccactctgagcctgccctgggcagcctcggact

SEQ ID NO: 531538 - DNA, 120 bp, Artificial Sequence
  ENSG00000166341_86 (sequence is synthesized)
atgactggctacggggaggccaccaccaggccccagctctccaccctgaactccccagccccctcagagtactaggaccacagaagccctgttgctcactgacctgtgaccaggtccaat

SEQ ID NO: 531539 - DNA, 120 bp, Artificial Sequence
  ENSG00000166341_87 (sequence is synthesized)
gtggggagaaatatgaaggaggtagcagccctgggttctcctcagtgagggatccctgccctgcaccagcaccctgagatggagctgagactttatttattgggggtagggggatggagg

SEQ ID NO: 531540 - DNA, 120 bp, Artificial Sequence
  ENSG00000166341_88 (sequence is synthesized)
aggtccctccaacatgtttggacccagctcctttgggttccactgacacccctgcccctgcccctgcccagaaccaagtgccatttctcactctggagccttaataaactgcaatttgta

SEQ ID NO: 531541 - DNA, 120 bp, Artificial Sequence
  ENSG00000166342_0 (sequence is synthesized)
cgcaagatagcagaggtggcgcgcagcccggcgagccgatgacggaccccttcttcctgccttcaatgcctcagcggaagatccccaagggctggagcgaggagcgctgccgctggacat

SEQ ID NO: 531542 - DNA, 120 bp, Artificial Sequence
  ENSG00000166342_1 (sequence is synthesized)
ccaagggctggagcgaggagcgctgccgctggacatcctcccggggaggctgctccgacctgctgcgcggcgcgtctgagactggggactgagccaccccgccgccgccggcgccgccgc

SEQ ID NO: 531543 - DNA, 80 bp, Artificial Sequence
  ENSG00000166342_2 (sequence is synthesized)
cgccctgcgaccgccgcctcccgcgcgccgcgtcctcccgaccccgcggcggcgacgatgcccgggaggagggtcctgac

SEQ ID NO: 531544 - DNA, 120 bp, Artificial Sequence
  ENSG00000166342_3 (sequence is synthesized)
cccgggaggagggtcctgacggcggcggcgcggatggtggcggccggcgcccgggtgtgatgcgagcgtcacggtggggatgctgctggctgcgcggcgctgagggccagcgagagcgag

SEQ ID NO: 531545 - DNA, 120 bp, Artificial Sequence
  ENSG00000166342_4 (sequence is synthesized)
agcccgcccggggcggaggacggactcatccggatctggctgcagcgtgggctcggagctcccccttcctctcggtctccctctcggcccccctttatttccttcttgctttgcgtcttt

SEQ ID NO: 531546 - DNA, 120 bp, Artificial Sequence
  ENSG00000166342_5 (sequence is synthesized)
aacacctctcgaccctgtcctccccccgccactggaagtcttcccgtctctaaatggaattagtggagcccggagcctctggtgtaacgcacagacatgatccatgggcgcagcgtgctt

SEQ ID NO: 531547 - DNA, 120 bp, Artificial Sequence
  ENSG00000166342_6 (sequence is synthesized)
cacattgtagcaagtttaatcatcctccatttgtctggggcaaccaagaaaggaacagaaaagcaaaccacctcagaaacacagaagtcagtgcagtgtggaacttggacaaaacatgca

SEQ ID NO: 531548 - DNA, 120 bp, Artificial Sequence
  ENSG00000166342_7 (sequence is synthesized)
gagggaggtatctttacctctcccaactatcccagcaagtatccccctgaccgggaatgcatctacatcatagaagccgctccaagacagtgcattgaactttactttgatgaaaagtac

SEQ ID NO: 531549 - DNA, 120 bp, Artificial Sequence
  ENSG00000166342_8 (sequence is synthesized)
tctattgaaccgtcttgggagtgcaaatttgatcatattgaagttcgagatggaccttttggcttttctccaataattggacgtttctgtggacaacaaaatccacctgtcataaaatcc

SEQ ID NO: 531550 - DNA, 120 bp, Artificial Sequence
  ENSG00000166342_9 (sequence is synthesized)
agtggaagatttctatggattaaattttttgctgatggagagctggaatctatgggattttcagctcgatacaatttcacacctgatcctgactttaaggaccttggagctttgaaacca

SEQ ID NO: 531551 - DNA, 120 bp, Artificial Sequence
  ENSG00000166342_10 (sequence is synthesized)
ttaccagcgtgtgagtttgagatgggcggttccgaaggaattgtggagtctatacaaattatgaaggaaggcaaagctactgctagcgaggctgttgattgcaagtggtacatccgagca

SEQ ID NO: 531552 - DNA, 120 bp, Artificial Sequence
  ENSG00000166342_11 (sequence is synthesized)
cctccacggtccaagatttacttacgattcttggactatgagatgcagaattcaaatgagtgcaagaggaattttgtggctgtgtatgatggaagcagttccgtggaggatttgaaagct

SEQ ID NO: 531553 - DNA, 120 bp, Artificial Sequence
  ENSG00000166342_12 (sequence is synthesized)
aagttctgtagcactgtggctaatgatgtcatgctacgcacgggtcttggggtgatccgcatgtgggcagatgagggcagtcgaaacagccgatttcagatgctcttcacatcctttcaa

SEQ ID NO: 531554 - DNA, 120 bp, Artificial Sequence
  ENSG00000166342_13 (sequence is synthesized)
gaacctccttgtgaaggcaacacattcttctgccatagtaacatgtgtattaataatactttggtctgcaatggactccagaactgtgtgtatccttgggatgaaaatcactgtaaagag

SEQ ID NO: 531555 - DNA, 120 bp, Artificial Sequence
  ENSG00000166342_14 (sequence is synthesized)
aagaggaaaaccagcctgctggaccagctgaccaacaccagtgggactgtcattggcgtgacttcctgcatcgtgatcatcctcattatcatctctgtcatcgtacagatcaaacagcct

SEQ ID NO: 531556 - DNA, 120 bp, Artificial Sequence
  ENSG00000166342_15 (sequence is synthesized)
cgtaaaaagtatgtccaaaggaaatcagactttgaccagacagttttccaggaggtatttgaacctcctcattatgagttatgcactctcagagggacaggagctacagctgactttgca

SEQ ID NO: 531557 - DNA, 120 bp, Artificial Sequence
  ENSG00000166342_16 (sequence is synthesized)
gatgtggcagatgactttgaaaattaccataaactgcggaggtcatcttccaaatgcattcatgaccatcactgtggatcacagctgtccagcactaaaggcagccgcagtaacctcagc

SEQ ID NO: 531558 - DNA, 120 bp, Artificial Sequence
  ENSG00000166342_17 (sequence is synthesized)
acaagagatgcttctatcttgacagagatgcccacacagccaggaaaacccctcatcccacccatgaacagaagaaatatccttgtcatgaaacacagctactcgcaagatgctgcagat

SEQ ID NO: 531559 - DNA, 120 bp, Artificial Sequence
  ENSG00000166342_18 (sequence is synthesized)
gcctgtgacatagatgaaatcgaagaggtgccgaccaccagtcacaggctgtccagacacgataaagccgtccagcggttctgcctcattgggtctctaagcaaacatgaatctgaatac

SEQ ID NO: 531560 - DNA, 120 bp, Artificial Sequence
  ENSG00000166342_19 (sequence is synthesized)
aacacaactagggtctagaaagaaaattcaagagaagaactatttatacaaacatggggactgtgaaaagaaaattctatagtgaattgtgaaaagtggacatatttctaaattcattcc

SEQ ID NO: 531561 - DNA, 120 bp, Artificial Sequence
  ENSG00000166342_20 (sequence is synthesized)
actgcctttatccaaacttaagaattacagacatttgttattccttcggcaagacatccccgctgcacactgatatgttcatttcgtaatttggttgctggccaccaagtgctccttagt

SEQ ID NO: 531562 - DNA, 120 bp, Artificial Sequence
  ENSG00000166342_21 (sequence is synthesized)
ttttaaatacattttgagattaactggaaacttgaagaagaaattagttcccgattaagactatcccaactttatttttattgtcagtttcacttttgtttctatgttgttttatgtctt

SEQ ID NO: 531563 - DNA, 120 bp, Artificial Sequence
  ENSG00000166342_22 (sequence is synthesized)
tgttatataattgtacattgtgtgatatgtgaaaaaaaaacacgaatttggatgaaccttgtgttacatgtacattgttttcattatatagacagcttgagaatagtgcgttcctgaatg

SEQ ID NO: 531564 - DNA, 120 bp, Artificial Sequence
  ENSG00000166342_23 (sequence is synthesized)
attttgaacatgctacagtgaaaagtgacagtgtggaccatggaatcaccagctagaggttatggactatacacacctattattatattctgattaaatacaggaaaaagtaacaagtaa

SEQ ID NO: 531565 - DNA, 120 bp, Artificial Sequence
  ENSG00000166342_24 (sequence is synthesized)
aattactagattgcaataaaaaaattcattttttggtctttcctgtatacccctgatttcctttttgttttatatcaaagaaagtactgagtttcagaaatcctttttgaagtcaggtat

SEQ ID NO: 531566 - DNA, 120 bp, Artificial Sequence
  ENSG00000166342_25 (sequence is synthesized)
tttaccattcatactctacagtagaaatgtttttgattaagcactcagcaatatgaccaaattgacagtttgagaaaataccctgcatgtcagtactggatatttgagttgggaaaatat

SEQ ID NO: 531567 - DNA, 120 bp, Artificial Sequence
  ENSG00000166342_26 (sequence is synthesized)
cctttttgttagacacattgtgaaaagcatgcattgtcaaatactgttgttactcttccatttctttatgtcatatgcttgctacttacgactttttatataaatatatataaaatgtat

SEQ ID NO: 531568 - DNA, 120 bp, Artificial Sequence
  ENSG00000166342_27 (sequence is synthesized)
aataatttcctaatttgagttaagagaaatgttttcttccattagagtgattaaaaaactgactcacataaatacacattttatgtcaactctttccaccttttagggtacaggatgtcc

SEQ ID NO: 531569 - DNA, 120 bp, Artificial Sequence
  ENSG00000166342_28 (sequence is synthesized)
tcagtattgaggtttacttcccaaaatatttggcttctaaaagtttaggggaatattttcttcttttagaatagggaactctttttaaaactgctttaaaatcacaagcccttttatgaa

SEQ ID NO: 531570 - DNA, 120 bp, Artificial Sequence
  ENSG00000166342_29 (sequence is synthesized)
ttaaaccaccattatgaattattcttattctcaggtacacataatacacctgaaagcttagtgattatgatgtgtttaacataaagtaaaatcctaaaatatattttactgctattaaat

SEQ ID NO: 531571 - DNA, 120 bp, Artificial Sequence
  ENSG00000166342_30 (sequence is synthesized)
tatatacacactctgtaaagtttgatttggtgagtggttattttttaaaatattcaatgtgtaatcttacaaaataaatttttaaaataagaattactatcagtatatatgcttcccaac

SEQ ID NO: 531572 - DNA, 120 bp, Artificial Sequence
  ENSG00000166342_31 (sequence is synthesized)
attttcaaaactactgaattctccaggtttaaagaactctgtccttccactaacagagcagtctggtctactaaaatttggactttgcaattcaagcaggctttgcaaactagatgaatt

SEQ ID NO: 531573 - DNA, 120 bp, Artificial Sequence
  ENSG00000166342_32 (sequence is synthesized)
actgttatacttccctactaggaatacaatgtcatatatgttaaaaaataagcaaatagaaaataaatttttataatagaaaagtcaaagagttatcatagccattataaacactctatc

SEQ ID NO: 531574 - DNA, 120 bp, Artificial Sequence
  ENSG00000166342_33 (sequence is synthesized)
ttgaaaaaatgtcaagctacagaatcacttcaatgaatttgataaactagggaatcagaaaaggttttgaacatgacaaagattatttttcattgttatgctacatagttttatacacat

SEQ ID NO: 531575 - DNA, 120 bp, Artificial Sequence
  ENSG00000166342_34 (sequence is synthesized)
tgcttatgataaaatgtacccttttttatttggcttgactggtttatttattaccatggttccttttttgccctttaatttaaaattaatacaccaaagatttttttaaaggattaatca

SEQ ID NO: 531576 - DNA, 120 bp, Artificial Sequence
  ENSG00000166342_35 (sequence is synthesized)
tatcttatattgctttctccatttagaaatcttcagaggactcctttccctttgaatgataatctcaaaagtatgatataactgtcaagattttttatttgtaacagcaataaaaatagt

SEQ ID NO: 531577 - DNA, 120 bp, Artificial Sequence
  ENSG00000166342_36 (sequence is synthesized)
gaaataagttaggtgaacattttactattaatttgttctataactgtccggcatgtccgtcccctccagtttctcctgaatatacagaatgctgattccctgcttaaaaggtattttcac

SEQ ID NO: 531578 - DNA, 120 bp, Artificial Sequence
  ENSG00000166342_37 (sequence is synthesized)
cagaaatctaccaatgggactttaaaaaaaaacactaaatgaagtataataataagaatgaatagctcacatatatttaacacacagcagcttcatgggaaaacaactgtattttaaatg

SEQ ID NO: 531579 - DNA, 120 bp, Artificial Sequence
  ENSG00000166342_38 (sequence is synthesized)
aagaacaggcctcctcagtgataactctaaaatttctcaacaatgtacagacacagactaatcatgaaagaagataatgacgatgctgggcagtgtctggaggtagccttttctcctggc

SEQ ID NO: 531580 - DNA, 120 bp, Artificial Sequence
  ENSG00000166342_39 (sequence is synthesized)
attcactctagatgctcaaacttgggagtgcagcgctctggcagagttgggagatgttctctggagggctctggcggtgcttatttatcagccagtattgaaatttgtcaatatatcaaa

SEQ ID NO: 531581 - DNA, 120 bp, Artificial Sequence
  ENSG00000166342_40 (sequence is synthesized)
aacgatttagtagctatatcagaccttatcacctgaatgcagcctttggcccacattctaaaggtggtgacacacatagataaggaatgagatgtctcaagacttataagacatgttatt

SEQ ID NO: 531582 - DNA, 120 bp, Artificial Sequence
  ENSG00000166342_41 (sequence is synthesized)
ttaataaatgattatattttttgataaagtgaattcaaatattaccaacccaagtgctttattgatttaacaagatgatttcaaataatgcattaagttagcctgctgtgttaatttcat

SEQ ID NO: 531583 - DNA, 120 bp, Artificial Sequence
  ENSG00000166342_42 (sequence is synthesized)
aaagctattctttttcattttattttttcaagttttcattcacttttcaaaataatggtagcatataatcacatgcaatgccaatgaatccccatattaagcttcgtacttctgtccaaa

SEQ ID NO: 531584 - DNA, 120 bp, Artificial Sequence
  ENSG00000166342_43 (sequence is synthesized)
tgtattgtagttgcctaatttcaaggttctaatttggaaatctgatttattttgtatgtttttatatacataccaattttaagcattatcttgcaaagtagacataggtggtgtttgatt

SEQ ID NO: 531585 - DNA, 120 bp, Artificial Sequence
  ENSG00000166342_44 (sequence is synthesized)
tgccataattaacttgaatttgattttgtaaccaaaatgtggctgtccacataattggagatcagtgtctttgggcttttaatggagaacaaatcacattgtggtgttgctggtttttct

SEQ ID NO: 531586 - DNA, 120 bp, Artificial Sequence
  ENSG00000166342_45 (sequence is synthesized)
gtttcacatttacttttgctctagaagtatttccgtgagtctgatgactccataagttatgatcctcagtgttaagtaacttagacggttggcattactttaatattcacttaagcttct

SEQ ID NO: 531587 - DNA, 120 bp, Artificial Sequence
  ENSG00000166342_46 (sequence is synthesized)
gtatcatttttttctgtatttttcccttaggaatttaattcgggtcttcctcaaattttacagctttaaaaaaattccatgaatgggttttcctcaacctcagaatatcataataaatta

SEQ ID NO: 531588 - DNA, 120 bp, Artificial Sequence
  ENSG00000166342_47 (sequence is synthesized)
caagatatgaccccctggttcctattaccttgattaaagtggcggcaattaatttactgatgttttgtcagtgaaataaataatagcatcttatgaagtttgtgtatctctgatgaaaat

SEQ ID NO: 531589 - DNA, 120 bp, Artificial Sequence
  ENSG00000166342_48 (sequence is synthesized)
gagtcatgtcagattccctctctgaagggaagttaaataaacaacatttttaaaattctttgaattctaaataaatatgctttgaaaagtgagttagggttttgtctaattgcactgagg

SEQ ID NO: 531590 - DNA, 120 bp, Artificial Sequence
  ENSG00000166342_49 (sequence is synthesized)
cgagctagcttcggtgccatttttctctgtgcccttttccctccatggattcatttctatctattgcactctagcgtaaaggacccagccaagaaattgtaaaatagattcaacaacaaa

SEQ ID NO: 531591 - DNA, 120 bp, Artificial Sequence
  ENSG00000166342_50 (sequence is synthesized)
ataaacaggtcttgagttaattatcaatctctatgcacttaattaatatttcccaagcccatcttaaaggtgtaataaggtagaaaaataaaagtacactgttaaaatagccagaaatgt

SEQ ID NO: 531592 - DNA, 120 bp, Artificial Sequence
  ENSG00000166342_51 (sequence is synthesized)
ttttataaataatcctgctaaataaatctgaggccctttgttaatttacaattatgattcattttattaataaacttgtttgaattgtaccacaaatttaactgaattgtatcatcaaaa

SEQ ID NO: 531593 - DNA, 120 bp, Artificial Sequence
  ENSG00000166342_52 (sequence is synthesized)
taaataaaacagggtaataaaaataacaattagggtgactgatgtcagacactcatatcaactcatcattttcttgtagcctctgattctgtactttcttgtgtattattaaagaggtaa

SEQ ID NO: 531594 - DNA, 120 bp, Artificial Sequence
  ENSG00000166342_53 (sequence is synthesized)
atgctctcttaaaatgcctctagttcctcagaggtaggaaaaataaactcaacctgctttggacttgtgtatttacttgggttggtttccagaatctccttattcctgaaacagtatgat

SEQ ID NO: 531595 - DNA, 120 bp, Artificial Sequence
  ENSG00000166342_54 (sequence is synthesized)
catgtagttaaactactcctttatatctgtaagtactgtgcagccaacatgttcttttttgtccccaacttctgccatctttccaacctctgaggcatgctattttatagtggtttgctc

SEQ ID NO: 531596 - DNA, 120 bp, Artificial Sequence
  ENSG00000166342_55 (sequence is synthesized)
tttgaaaaattgtttttgtgccctctcttaatagtcacagatactgacacaaaacttaaaaatgaccagaaaacaatgtataaattatttaaaataaaacattctttttatatcacatta

SEQ ID NO: 531597 - DNA, 120 bp, Artificial Sequence
  ENSG00000166342_56 (sequence is synthesized)
agggtctagaaagaaaattcaagatgaggaaactgaagagttttagtaacttttttaagattacacaataaacaatgatgaatcaagctttgaagccaacctcaccaaccacaagatcaa

SEQ ID NO: 531598 - DNA, 120 bp, Artificial Sequence
  ENSG00000166342_57 (sequence is synthesized)
ccaacactcttcaccaatgtgtaatataaccacgttaatattcaacatagtacgtactgctgaaagaagttgatacttattcatattaaccccgtagttttgtgtttcctcatctgtaaa

SEQ ID NO: 531599 - DNA, 120 bp, Artificial Sequence
  ENSG00000166342_58 (sequence is synthesized)
agtatgtattataacaccttctctccaccttacagcgtgtgaggttcaaatgaccattcattggaagatattttttatatcctataatgcattataaaaataaatcatttttcctaaatc

SEQ ID NO: 531600 - DNA, 120 bp, Artificial Sequence
  ENSG00000166342_59 (sequence is synthesized)
atgtgtagacttcattttatgatcgacatggaacaaaagtatcatctataaagagtaacaatgtagagtaacccccctcagaacttgtccaccataaaatatatgactttccaaatccaa

SEQ ID NO: 531601 - DNA, 120 bp, Artificial Sequence
  ENSG00000166342_60 (sequence is synthesized)
acagccacactgcagtatgtcaggaacagtcatggagctgttctcattgtttgcctctccttttcctcctttttaccttctggcccctctcttcattcagagatgctggcagagccattc

SEQ ID NO: 531602 - DNA, 120 bp, Artificial Sequence
  ENSG00000166342_61 (sequence is synthesized)
gagtgtttcgtgatctctccttctccatcatctcatctctggatgctgtggtgcccagaacgttgatctaacaccatcttgaagcacacatgctgatctccaggtgcaccacgatttgtg

SEQ ID NO: 531603 - DNA, 120 bp, Artificial Sequence
  ENSG00000166342_62 (sequence is synthesized)
cccttgaaaatgctgtttgctcaatctttctggagaaagtttgccacatattcggacttagtaaattagaactcctaccttgaaacccagatgaaggttcaattttccccaggattcctt

SEQ ID NO: 531604 - DNA, 120 bp, Artificial Sequence
  ENSG00000166342_63 (sequence is synthesized)
tttattcttgtattacaatctttttattataatagtctccactctccccaaaatattgtgaattcttcagctgaggagttttgctttagtttcttatcgccatggactgggaattaacat

SEQ ID NO: 531605 - DNA, 120 bp, Artificial Sequence
  ENSG00000166342_64 (sequence is synthesized)
gtatttaacacattttgctcaaacaatcaaacagtaaaagctgaagagagcgtattattattcgcccattccgagagaaagttgaagatgactgaagaactaaaaatacataaatgaatt

SEQ ID NO: 531606 - DNA, 120 bp, Artificial Sequence
  ENSG00000166342_65 (sequence is synthesized)
aagtaattataaacataaatttcctgtagctccaacatgactttgatctgagtaatagtgttgtgaaatagattactacatgattttcattgcttttatattatatatagtaattaatat

SEQ ID NO: 531607 - DNA, 120 bp, Artificial Sequence
  ENSG00000166342_66 (sequence is synthesized)
tcagaatagttgattaactttcttaagtgtcacataatttaaaaatgaaattgctgtttgccccagatatgtttttctgtgttctttttaaatttcagtgaaattttcttatactccctt

SEQ ID NO: 531608 - DNA, 120 bp, Artificial Sequence
  ENSG00000166342_67 (sequence is synthesized)
cattaaatctattatctggtttctaaacctttacctatttaatgtctcttttcctttctttctaaaaagtaactggttaaactacagttttgtcatttatgaaattttttctgttattat

SEQ ID NO: 531609 - DNA, 120 bp, Artificial Sequence
  ENSG00000166342_68 (sequence is synthesized)
aggatagttaaaacttattttgcaattaatacgtattttacagtacactaatatgcatatatgttgtattttattaaaatattaaaatgttttttaaacaaaaatattgtccgaagctct

SEQ ID NO: 531610 - DNA, 120 bp, Artificial Sequence
  ENSG00000166342_69 (sequence is synthesized)
tttaaacaaaaatattgtccgaagctctaaataccagagtattgattttaaagtctgccaagacaataatacaagtaacacaactaagcctttctttaaataataaaacgagtatctaaa

SEQ ID NO: 531611 - DNA, 120 bp, Artificial Sequence
  ENSG00000166342_70 (sequence is synthesized)
ctacatcatagaagatttacttacgattcttggactatgagatgcagaattcaaatgagtgcaagaggaattttgtggctgtgtatgatggaagcagttccgtggaggatttgaaagcta

SEQ ID NO: 531612 - DNA, 120 bp, Artificial Sequence
  ENSG00000166342_71 (sequence is synthesized)
agtgcgcaggaaccccccgggggtggaggatagcgtgcagttcagggatggacacgtgcggcagagattggcccaagcgagggcgcaggtggaaagcgggagagcgcggatgatacctag

SEQ ID NO: 531613 - DNA, 120 bp, Artificial Sequence
  ENSG00000166342_72 (sequence is synthesized)
tggggccagaggagtcttcctcttctaggggctcccggagctcggcgggcccctgttcgcagtacaggaggtagcagaaggcacacctgaagccagcgctggagggaagggcgagggtca

SEQ ID NO: 531614 - DNA, 120 bp, Artificial Sequence
  ENSG00000166343_0 (sequence is synthesized)
atttcacttggaggaaagagagaaggaaggaagctgaggacttagcagggtatcactggacaggccatggctccacggtcccggcgacgaaggcacaagaaacctccctcatcagtggct

SEQ ID NO: 531615 - DNA, 120 bp, Artificial Sequence
  ENSG00000166343_1 (sequence is synthesized)
cccatcatcatggccccaaccacaattgtgacccctgtgcctctgaccccctcaaaacctggccctagcattgacacacttggcttcttctccttggatgataatgttcctggcctatcg

SEQ ID NO: 531616 - DNA, 120 bp, Artificial Sequence
  ENSG00000166343_2 (sequence is synthesized)
cagctgatccttcaaaagctgaacatgaaaagctatgaagaatataagttggtggtagatgggggtacccccgtatcaggctttggatttcgatgtcctcaagaaatgttccagaggatg

SEQ ID NO: 531617 - DNA, 120 bp, Artificial Sequence
  ENSG00000166343_3 (sequence is synthesized)
gaagacacatttcgattctgtgctcactgtagagcactccctagtgggctttcagactccaaggttctccggcactgtaagaggtgcagaaatgtctattactgtggtccagagtgccag

SEQ ID NO: 531618 - DNA, 120 bp, Artificial Sequence
  ENSG00000166343_4 (sequence is synthesized)
aagtcagactggcccgcacacaggagggtttgtcaagagcttcgtcttgtggctgtggaccgtctcatggaatggcttctggtcacaggtgattttgttctaccctcaggaccttggcca

SEQ ID NO: 531619 - DNA, 120 bp, Artificial Sequence
  ENSG00000166343_5 (sequence is synthesized)
tggccacctgaagctgtacaggactgggactcctggttttctatgaaggggttacacctagatgctacattggatgctgtgctagttagtcatgctgtgaccaccttatgggccagtgta

SEQ ID NO: 531620 - DNA, 120 bp, Artificial Sequence
  ENSG00000166343_6 (sequence is synthesized)
ggacggccaaggccagacccggatgtcctgcagggatctttgaagcggctgctgacagatgtcctgtcacggcccttgactctaggcctaggacttagggccttggggatagatgttagg

SEQ ID NO: 531621 - DNA, 120 bp, Artificial Sequence
  ENSG00000166343_7 (sequence is synthesized)
aggactgggggaagcacagtgcatgtggttggtgcttcccatgtggagacatttcttactcgcccaggggactatgatgagcttggttacatgtttcctgggcaccttggactccgtgtg

SEQ ID NO: 531622 - DNA, 120 bp, Artificial Sequence
  ENSG00000166343_8 (sequence is synthesized)
gtcatggtgggtgtagatgtagctactggcttttcacagagcacctcaacttcacccctggaacctggcacaattcagcttagtgcccacaggggcctctaccatgacttctgggaggag

SEQ ID NO: 531623 - DNA, 120 bp, Artificial Sequence
  ENSG00000166343_9 (sequence is synthesized)
caagtagagaccgggcagacacaccatccagatttggtggcggcattccatccaggttttcattcctccccagacttgatggaggcttggctgcccaccctgctgctacttcgtgactat

SEQ ID NO: 531624 - DNA, 120 bp, Artificial Sequence
  ENSG00000166343_10 (sequence is synthesized)
ttacagccatcaggagttggtatcctctttgcagattctggtggaactggatacacacatcactgcctttgggtctaatcctttcatgtccctcaaacctgaacaggtctattccagtcc

SEQ ID NO: 531625 - DNA, 120 bp, Artificial Sequence
  ENSG00000166343_11 (sequence is synthesized)
caacaagcagccagtatactgcagtgcatactatatcatgtttcttggaagctcctgtcagctggataataggcaattagaagagaaagtggacggcgggatttaaatagatcataactg

SEQ ID NO: 531626 - DNA, 120 bp, Artificial Sequence
  ENSG00000166343_12 (sequence is synthesized)
gacatctggaaaacggggagtttgtgatgaaattaccctgctaatgccaggttcttgcaaactttgaaaaacattatattctaaacctcatttactgtttgggtaaaaattctaagctga

SEQ ID NO: 531627 - DNA, 69 bp, Artificial Sequence
  ENSG00000166343_13 (sequence is synthesized)
ctaaacctcatttactgtttgggtaaaaattctaagctgaatgagagtttctgtataacataactggtt

SEQ ID NO: 531628 - DNA, 75 bp, Artificial Sequence
  ENSG00000166343_14 (sequence is synthesized)
gtaactggtttctaagagtttagccacagtagcttctagagataggaaattagatttagtgggtgggaagaggcc

SEQ ID NO: 531629 - DNA, 120 bp, Artificial Sequence
  ENSG00000166343_15 (sequence is synthesized)
ctagagataggaaattagatttagtgggtgggaagaggccctgatgctggtctttccagagcttatagttgctaacacttttctttgtaaagaagtttaccttttgactggaaccagatg

SEQ ID NO: 531630 - DNA, 120 bp, Artificial Sequence
  ENSG00000166343_16 (sequence is synthesized)
gcactgagaaaaagaatgagaaccaccttattcttctgaaaaagactttcttctcatccagtaatttgggctaaaaaatggaaagatgttgatgacttgaagtgatgcaagaatggacaa

SEQ ID NO: 531631 - DNA, 120 bp, Artificial Sequence
  ENSG00000166343_17 (sequence is synthesized)
gtcagggaagtcattgggaacatggatgaggttgtaagcattggtacagtgtcctgtttcctgacttttttgagagaaatgtctacttttcctgttttctcttggggacttttgacccta

SEQ ID NO: 531632 - DNA, 120 bp, Artificial Sequence
  ENSG00000166343_18 (sequence is synthesized)
gagtagccctggtgttatattttagatatcccaagctatatcagactttacctgaatatactggagttacttattatcccccattctataccccaataaactcagtttggggcttcttaa

SEQ ID NO: 531633 - DNA, 120 bp, Artificial Sequence
  ENSG00000166347_0 (sequence is synthesized)
gaatgtcccgggtggagctggctgagtcgcgcgctctgctccacccgacggggctgtgtgtgctgggcctggctcgcggcgaaccgagatggcagagcagtcggacgaggccgtgaagta

SEQ ID NO: 531634 - DNA, 120 bp, Artificial Sequence
  ENSG00000166347_1 (sequence is synthesized)
ctacaccctagaggagattcagaagcacaaccacagcaagagcacctggctgatcctgcaccacaaggtgtacgatttgaccaaatttctggaagagcatcctggtggggaagaagtttt

SEQ ID NO: 531635 - DNA, 120 bp, Artificial Sequence
  ENSG00000166347_2 (sequence is synthesized)
aagggaacaagctggaggtgacgctactgagaactttgaggatgtcgggcactctacagatgccagggaaatgtccaaaacattcatcattggggagctccatccagatgacagaccaaa

SEQ ID NO: 531636 - DNA, 120 bp, Artificial Sequence
  ENSG00000166347_3 (sequence is synthesized)
gttaaacaagcctccggaaactcttatcactactattgattctagttccagttggtggaccaactgggtgatccctgccatctctgcagtggccgtcgccttgatgtatcgcctatacat

SEQ ID NO: 531637 - DNA, 120 bp, Artificial Sequence
  ENSG00000166347_4 (sequence is synthesized)
ggcagaggactgaacacctcctcagaagtcagcgcaggaagagcctgctttggacacgggagaaaagaagccattgctaactacttcaactgacagaaaccttcacttgaaaacaatgat

SEQ ID NO: 531638 - DNA, 120 bp, Artificial Sequence
  ENSG00000166347_5 (sequence is synthesized)
tttaatatatctctttctttttcttccgacattagaaacaaaacaaaaagaactgtcctttctgcgctcaaatttttcgagtgtgcctttttattcatctactttattttgatgtttcct

SEQ ID NO: 531639 - DNA, 120 bp, Artificial Sequence
  ENSG00000166347_6 (sequence is synthesized)
taatgtgtaatttacttattataagcatgatcttttaaaaatatatttggcttttaaagtatgcaccgtgtttgcctgtttggtgtataattgtctttaatgtttagaatctggttattt

SEQ ID NO: 531640 - DNA, 120 bp, Artificial Sequence
  ENSG00000166347_7 (sequence is synthesized)
agaggattccttcaatgtgttactcatccagacccacagaggccatatgactggaggtgcgggaaataggtttgagtgtctcctttcacatcgtcacatctcattgagtaaccatgtatt

SEQ ID NO: 531641 - DNA, 120 bp, Artificial Sequence
  ENSG00000166347_8 (sequence is synthesized)
gtatgcttccgatatagtttctttttttcaaggaaattaagaaaggccagaaattatagtttaaggatttctaataattgtcctacttgaaatagatcttaaaaagaaagtagcggctgg

SEQ ID NO: 531642 - DNA, 120 bp, Artificial Sequence
  ENSG00000166347_9 (sequence is synthesized)
aactctgtctcaaaaaaaaaagaaagtagcctacagggcctataagagagacttcttatcttcactgattgaaaaacatcagcaacttaaaaacacatgaaccatgagagggcatcgcaa

SEQ ID NO: 531643 - DNA, 120 bp, Artificial Sequence
  ENSG00000166347_10 (sequence is synthesized)
atgaaccatgagagggcatcgcaactgtccattctctcagcttacacgtatcattgcaaaggcactcacagcttcataggttctaaagttttaagaattcctcattcagagagtagaatt

SEQ ID NO: 531644 - DNA, 120 bp, Artificial Sequence
  ENSG00000166347_11 (sequence is synthesized)
ttctggtgtggctctgtctcctcctgggggctctaaggggctgattcagtcatcttacttcccatttattattctctgccttatgtgttattcttttaaatgtggaaacttgaaagctga

SEQ ID NO: 531645 - DNA, 120 bp, Artificial Sequence
  ENSG00000166347_12 (sequence is synthesized)
atttgttagaacccagtacatgtgtcattggctgtgactgcatttgcactggcatgagctgacaaaccacgaggttcttcagaagtgaccgcgtgcagtggaaaggaattgtgttgttct

SEQ ID NO: 531646 - DNA, 120 bp, Artificial Sequence
  ENSG00000166347_13 (sequence is synthesized)
tacagagtacaacctttataatcaaataggatgcaccgcctttgccttctttagtcactgaaagttgacaagtagtttctatttcaaaataaattacaacacttgttaagggacctatgt

SEQ ID NO: 531647 - DNA, 120 bp, Artificial Sequence
  ENSG00000166347_14 (sequence is synthesized)
aaatatttcaatatttttggttgtgatttttagctataaagcttcacattttagtagtttttaaaacattgctcctaaatcaactatgaagtgaatcgaagtgggtcagtcgtaccttag

SEQ ID NO: 531648 - DNA, 120 bp, Artificial Sequence
  ENSG00000166347_15 (sequence is synthesized)
atgacattaaagggttaacttgtaaatcatttttaagatgttgagtaatagcatctgtatatcgttaagaaacataacagttgaactttgacatttttatcagtgactcagcaatttgct

SEQ ID NO: 531649 - DNA, 120 bp, Artificial Sequence
  ENSG00000166347_16 (sequence is synthesized)
gctgtggctggcaatgtttcttcatgtgttttgggaacaacatgtggagtaaaggagagtttacttcctaattttaacatttacagtttgtgcagccagactctcaaggaaagatatttg

SEQ ID NO: 531650 - DNA, 120 bp, Artificial Sequence
  ENSG00000166347_17 (sequence is synthesized)
acacttttttctctattgctttcccttcagagaggtgagagacttcagaggctgccctttcttttcatctgctgcttgtgaaaggaaaacatcttgggcccccagaatcactaaggaaaa

SEQ ID NO: 531651 - DNA, 78 bp, Artificial Sequence
  ENSG00000166347_18 (sequence is synthesized)
aaaactcaagctggaaactgcttagggccaacctgcctcccattctactcagtcaagcctctgctcactgagagagag

SEQ ID NO: 531652 - DNA, 120 bp, Artificial Sequence
  ENSG00000166347_19 (sequence is synthesized)
gaatgcaaccctttgtgtctcacctctctgtgacctggaagctccctcctgctttgagtcttcctgcctttgcttcaaggtgtcccgcctttccaaacagaaccaatgtacttcttacat

SEQ ID NO: 531653 - DNA, 120 bp, Artificial Sequence
  ENSG00000166347_20 (sequence is synthesized)
ccaagctgtgccctgaccaccttgggtacatgtcattaggacctcctgatgctttgtcacgggcatgtcctcaaccttggcaaagtaaactttcttttttttttttttttgtttttgaga

SEQ ID NO: 531654 - DNA, 64 bp, Artificial Sequence
  ENSG00000166347_21 (sequence is synthesized)
acctcctgatgctttgtcacgggcatgtcctcaaccttggcaaagtaaactttctttttttttt

SEQ ID NO: 531655 - DNA, 120 bp, Artificial Sequence
  ENSG00000166347_22 (sequence is synthesized)
ggctcggtgttaattaaccttttccagtcacgccttggcagccaggtgccgtgcttgactcctgagaccgcggtgtgtggctggagcaagaacacagaggccaggcagagcagcggacgt

SEQ ID NO: 531656 - DNA, 120 bp, Artificial Sequence
  ENSG00000166347_23 (sequence is synthesized)
caagcctccggtaagtgtgaccatctcaagtatctctggatgttctcgttgtatttaatacttgtcaaactgaaggcagagggtttttatttacctgactgatgccagcacaggtctttc

SEQ ID NO: 531657 - DNA, 120 bp, Artificial Sequence
  ENSG00000166347_24 (sequence is synthesized)
tagataaatgaatatgtaacctactggctcagcaagtattttttatttacggaaacctgtcagtatgatttgttaggatggcgtgtgtgtaatttttttaaggctgtcagtaaactactt

SEQ ID NO: 531658 - DNA, 120 bp, Artificial Sequence
  ENSG00000166347_25 (sequence is synthesized)
ttttcatcataattatcaatatataccatttgaagagctactttttatggtagcacgtgcttctgatctaaaagatttgacacaagccttattttcagagaacttaaaatctgaatggat

SEQ ID NO: 531659 - DNA, 120 bp, Artificial Sequence
  ENSG00000166347_26 (sequence is synthesized)
agtggttttattacttaaatctttaagggtgtgtctcatgtcttcttcatctttaagtctcttgggcatagtaggtgttcaataaatacttgtcagatgaatttaatgaaattaaataat

SEQ ID NO: 531660 - DNA, 120 bp, Artificial Sequence
  ENSG00000166347_27 (sequence is synthesized)
acccttttgacttacttttccttgggaaaggaaaataactctggcaatactagttttatgttctgattcactagcctttctctctgaactgaccatctcacttatatttgaagataaatg

SEQ ID NO: 531661 - DNA, 120 bp, Artificial Sequence
  ENSG00000166347_28 (sequence is synthesized)
tagggtgagaatggaagagcacagcctaagttcctgaaaagtacaagtaggcaaaatagtttctagtgtctaattaaaggactacaggggaaagttttgcttaaatcaaatgacaaaaaa

SEQ ID NO: 531662 - DNA, 120 bp, Artificial Sequence
  ENSG00000166347_29 (sequence is synthesized)
gaaagtataatttttcgttttggtgtaaattcttggtttcattagagaaagtgcaacagcaagaccccactgagcttgtgtcgagaactggtgagctgattttttgagctgttgctgcca

SEQ ID NO: 531663 - DNA, 120 bp, Artificial Sequence
  ENSG00000166347_30 (sequence is synthesized)
agacatcatctttaatctacaaaaggatcaaagcagttaatccaataatataagcataaaggccacatttacctcaacatccctgatagtacaataaaagtcttgtgtaatactatttag

SEQ ID NO: 531664 - DNA, 120 bp, Artificial Sequence
  ENSG00000166347_31 (sequence is synthesized)
tacaaagcaattttttttatattctctccttattcaagaaagacttaagttcaatgtgaatgatatgagtacttccaggagataaaaagttgacttcagaatttcaatggcctctgtgac

SEQ ID NO: 531665 - DNA, 120 bp, Artificial Sequence
  ENSG00000166347_32 (sequence is synthesized)
aattgcttagaatccttgctgtgagttcatttgactttagcatcttttttgaggctactttttggacagctgaaattctgtgttgcataaagtttttcctttttctctgaagtctcttaa

SEQ ID NO: 531666 - DNA, 120 bp, Artificial Sequence
  ENSG00000166347_33 (sequence is synthesized)
gggaagaatatatattttttttatcatgtgttcagcatgttaatcattttggtataagtcatttagctatagcaaaacaaaggtttaagattcattagatgaacttagatgaccgcaggg

SEQ ID NO: 531667 - DNA, 120 bp, Artificial Sequence
  ENSG00000166347_34 (sequence is synthesized)
ccagccgtctcgctaaccataaagactacaagcagaaaacacttgtaggtgtaagattgtacatgtgtctcctgccataactactttcagtttaaaggacaaagactttcttccttattt

SEQ ID NO: 531668 - DNA, 120 bp, Artificial Sequence
  ENSG00000166347_35 (sequence is synthesized)
gcttttagaacacgtgtattacagcctatactctgttggattaattgcccattactatttattgttcttattttctattttaaagtggcagttactttgatactgagaatattttgggaa

SEQ ID NO: 531669 - DNA, 120 bp, Artificial Sequence
  ENSG00000166347_36 (sequence is synthesized)
cagagcaagtttatgtggtaaattctgggactttagcttttagtatcaaagaaagctttcctgacaacattgaggcacagccctttgtgcgttaagacatggcttacttcattccagcat

SEQ ID NO: 531670 - DNA, 120 bp, Artificial Sequence
  ENSG00000166347_37 (sequence is synthesized)
tagcagttgatacttgatcagcttgttagatgtagaaggtctcactgaagtttgagaatcacactaactttttaaagtagatttttgtttgtttgtttttgagacggaattttgctcttg

SEQ ID NO: 531671 - DNA, 120 bp, Artificial Sequence
  ENSG00000166347_38 (sequence is synthesized)
ggtgtgagccacggcacccagcctaaagtagatgtttttactctcttcagagattttacagattaactaacttctgagtattttttaaacaactcttctttattgtgactttgcttcagt

SEQ ID NO: 531672 - DNA, 120 bp, Artificial Sequence
  ENSG00000166347_39 (sequence is synthesized)
gagagcagaaccggaagaatgtgggacaagaacttgctggcctttttgagaggccataagcagatgaaatgaaaggaaatacatgagcatttttctggatgtatctttcttgtgcttttg

SEQ ID NO: 531673 - DNA, 120 bp, Artificial Sequence
  ENSG00000166347_40 (sequence is synthesized)
gtttagtggaagtaaagagtgtccttagggatttcttttgtcatgtgtctgtataaccatcggccgatctccaggttgaagaatgtacactgtggtctaaagttttgagatgttgcctgc

SEQ ID NO: 531674 - DNA, 120 bp, Artificial Sequence
  ENSG00000166347_41 (sequence is synthesized)
ttaaaatatctagttgaatagtgaaataaaatgcagtaaagattattagcttgaacctgccctaaggaaagcatagtgttaagttaccaaattaagatatttgtagacttagaaatcatg

SEQ ID NO: 531675 - DNA, 120 bp, Artificial Sequence
  ENSG00000166347_42 (sequence is synthesized)
ttgcttacatagagaatattagtcgtagcaataccccttcttggttatagttttgaaagcattcttgtagaagttatttggtcctcacagtgtctccatgttagacctgccaagggaggt

SEQ ID NO: 531676 - DNA, 120 bp, Artificial Sequence
  ENSG00000166347_43 (sequence is synthesized)
aggtacattgcagctgggaagtgttaagcacccggctcacagacgtgctccagaaccatctagcacccatctcaggctggtcagttgcagtcccttaagcttctcctctaggttctgggc

SEQ ID NO: 531677 - DNA, 120 bp, Artificial Sequence
  ENSG00000166347_44 (sequence is synthesized)
ttgccgtgttagacatcactctgtcagtattttaagggagataggcttcccactaaagtttacgttagatgaacttataaatgagatgactctgattcacaaaagcttgttgggctttgc

SEQ ID NO: 531678 - DNA, 120 bp, Artificial Sequence
  ENSG00000166347_45 (sequence is synthesized)
ttgcatgcttttcataatttatggagcttactgtaatttacactgattcacatgacttttataagtcattatgcatgacatacttattttacttttttgagacggggtctcactctgttg

SEQ ID NO: 531679 - DNA, 81 bp, Artificial Sequence
  ENSG00000166347_46 (sequence is synthesized)
gacggggtctcactctgttgcccaggctgcaatgcagcggcatggatctggactcactgcaccatccacctcccggggcca

SEQ ID NO: 531680 - DNA, 70 bp, Artificial Sequence
  ENSG00000166347_47 (sequence is synthesized)
ccgagtagctggaccataggcacacagcactgtgcccagctaatttttgtatgctggactcaagcaaccc

SEQ ID NO: 531681 - DNA, 120 bp, Artificial Sequence
  ENSG00000166347_48 (sequence is synthesized)
agccaccatgcccagactttgacacactgatttaattgttaacctctttttactgaagttgaacctcgaagtcatggagtgaacaggtggcagagccaatcataaaaaccatattctttc

SEQ ID NO: 531682 - DNA, 120 bp, Artificial Sequence
  ENSG00000166347_49 (sequence is synthesized)
tccttgttcattgctgacattctttgatagtcacgtccctaaacccaagtgaggccctcagagcactgaccactaaagaccaattacttttccatcaaagtgcaaagtggtaattcaaac

SEQ ID NO: 531683 - DNA, 120 bp, Artificial Sequence
  ENSG00000166347_50 (sequence is synthesized)
ttcctttaactgtcaagcatcctgggctacagagccaagaagataatcaacaatcaaaaggtgatacgattatttcaagttcccctctttagagttcatggctgttgctgatgatgctgg

SEQ ID NO: 531684 - DNA, 120 bp, Artificial Sequence
  ENSG00000166347_51 (sequence is synthesized)
tgccagagtagtgttttaaccttagcgctctcccatggtaaccacaaaggcagcaggagggcaggtgggaggttccagagttgtcagcacgttggtgaaatgcctgccctcattttaacg

SEQ ID NO: 531685 - DNA, 120 bp, Artificial Sequence
  ENSG00000166347_52 (sequence is synthesized)
acgccgtggatgtttgtgtttgccttccgttggctgtttcaaacttaactttctagtttgacaatcatattttaccttcagtgattcttttgtttcagaactgattgtgtcctctaatag

SEQ ID NO: 531686 - DNA, 120 bp, Artificial Sequence
  ENSG00000166347_53 (sequence is synthesized)
ttgtgtcctctaatagctaactaatatttttgtatattttgattatttctagtaatttttgttaattttattcatatatacacaatttggaaaatcctcttgctgtagttatgaatactt

SEQ ID NO: 531687 - DNA, 120 bp, Artificial Sequence
  ENSG00000166347_54 (sequence is synthesized)
ttttaaaattgctggaatagataataaatttgcaattttatttttaaatgacttaccttttttcccctactgtgtcaggaaccttaaaggcggtgtttcaaggttggtgggtctcataac

SEQ ID NO: 531688 - DNA, 120 bp, Artificial Sequence
  ENSG00000166347_55 (sequence is synthesized)
tgctttgcttgcttttccctgaaaggggtctgtcttttcacgggagtttctctaacgtgctttgcagagtgatgcttgccttactgcaggccgctgattgttttgctaatgctttttatc

SEQ ID NO: 531689 - DNA, 120 bp, Artificial Sequence
  ENSG00000166347_56 (sequence is synthesized)
tttgctttgggaaactgcagatctgaagctgtcttatttatggcaacttctgtttgaggccctaatgcttatgttggtgtggaacatcaaaagaatgcttcttaacccattttcaagccc

SEQ ID NO: 531690 - DNA, 120 bp, Artificial Sequence
  ENSG00000166347_57 (sequence is synthesized)
caaaaagttgatatttcactagaccttagcttttcagctgttggagaagtatgcgtttttccagaaccattgtccattcactttagtgctactcaaaagagctgctcccagaaagctctg

SEQ ID NO: 531691 - DNA, 120 bp, Artificial Sequence
  ENSG00000166347_58 (sequence is synthesized)
gaggataaaaacagggcttccttatctggggatttgctgttaggctgacagtgaccagctggtgacaagtgtgacgccgggcacagcagtcctgtgaggctggtctggtgtcttgctggt

SEQ ID NO: 531692 - DNA, 120 bp, Artificial Sequence
  ENSG00000166347_59 (sequence is synthesized)
tccgtctggtcagaattaaagcagccccccgggaaagttggcctagaatgtagaacttaaaatggcagtcctcttttttctttttggttcacatatatttaatgtaatttaggtacactt

SEQ ID NO: 531693 - DNA, 120 bp, Artificial Sequence
  ENSG00000166347_60 (sequence is synthesized)
ttttacatctgtcagatttgaatgaaataactgatgtttttattgaacattgtgttcatgcttttgaagaattaaactgctttttctaaaggtgacgtgggattgtgtgtatgtgaacat

SEQ ID NO: 531694 - DNA, 120 bp, Artificial Sequence
  ENSG00000166347_61 (sequence is synthesized)
gaatgtctgttttcagtttctgcattatttagatgcctagcgtgtgcaagatattttatgtagcatattaattttgaatgtttttaaattattgaggttatgtccttaagtaaatataat

SEQ ID NO: 531695 - DNA, 120 bp, Artificial Sequence
  ENSG00000166347_62 (sequence is synthesized)
gattaaaatgttttactctggaagaaaacaaagttaggcattttagtgaaaagaagtttataattttccctttcgacatcttctgaagaatgcattgcataaaatattgtgttcttattt

SEQ ID NO: 531696 - DNA, 120 bp, Artificial Sequence
  ENSG00000166347_63 (sequence is synthesized)
tgagttgggaggtttgtttgattttgtttttggtggtaggagatatgtactttgagggagtaagcttcattcatctgacaagtttatttgccccgatattttcatcccatacttcacaaa

SEQ ID NO: 531697 - DNA, 120 bp, Artificial Sequence
  ENSG00000166347_64 (sequence is synthesized)
ggcaaagtgtcttagggtcatcagggaggcctgccgttacacatgcctgatcccatccttgtttccagctgtgggtcaggtttcaggccctgactgtggcacttctgcttcacctgccca

SEQ ID NO: 531698 - DNA, 120 bp, Artificial Sequence
  ENSG00000166347_65 (sequence is synthesized)
ctgggcttccccctggccagcctttaaacacactgtatttttgacagcttcagcctgaagttgaaatagtttatgactctaaaactgggagactgcagggcttaactgaagatatcatac

SEQ ID NO: 531699 - DNA, 120 bp, Artificial Sequence
  ENSG00000166347_66 (sequence is synthesized)
acgtaagagatacatgcacaatctcaaatggaatttgagaggacagaagggaagaatcagtcttcagctcctccctgaattacgtgtcgcaatctgagtctaataaatgtgtgtgcacat

SEQ ID NO: 531700 - DNA, 120 bp, Artificial Sequence
  ENSG00000166347_67 (sequence is synthesized)
gctgttaaatcagatggatcaaactttgtgtttaatagctaaatgttgaatctgaaatggtaattactgaattataattttaaaaagtctcaaagtcagcattttggaagtggtactttc

SEQ ID NO: 531701 - DNA, 120 bp, Artificial Sequence
  ENSG00000166348_0 (sequence is synthesized)
gtttacggagactcggaactggataaagggaccaggctacattgggaaagaagtgggaagaaatggggtacagcgacgaggagggctaaatgtgaacaataatgtcttggaagagaaatt

SEQ ID NO: 531702 - DNA, 120 bp, Artificial Sequence
  ENSG00000166348_1 (sequence is synthesized)
atttttcagggggtcgtggtagtgtacaagggatgtttgcacctcgaagctcaacctccatagcccccagcaaaggcctcagcaatgagccagggcaaaacagctgcttcctcaacagtg

SEQ ID NO: 531703 - DNA, 120 bp, Artificial Sequence
  ENSG00000166348_2 (sequence is synthesized)
ccctgcaggttttgtggcacttggatatcttccgacgtagctttaggcagcttacaactcacaagtgcatgggagattcctgcatcttttgcgctctcaagggaatctttaaccagtttc

SEQ ID NO: 531704 - DNA, 120 bp, Artificial Sequence
  ENSG00000166348_3 (sequence is synthesized)
agtgtagtagtgaaaaagtgcttccatctgacactctccgcagtgctctggcaaagactttccaggatgaacaacgtttccagctgggaattatggatgatgctgcagagtgctttgaaa

SEQ ID NO: 531705 - DNA, 120 bp, Artificial Sequence
  ENSG00000166348_4 (sequence is synthesized)
acctcctgatgagaattcacttccacattgctgatgaaaccaaagaggatatatgtactgcccaacactgcatttcccatcagaaatttgcaatgacattgtttgagcagtgtgtatgta

SEQ ID NO: 531706 - DNA, 120 bp, Artificial Sequence
  ENSG00000166348_5 (sequence is synthesized)
ctagctgtggtgccacttctgatccgctgcctttcatccagatggtacattatatctccaccacttccctttgcaatcaggctatttgtatgctggaaagacgagagaaaccttcaccaa

SEQ ID NO: 531707 - DNA, 120 bp, Artificial Sequence
  ENSG00000166348_6 (sequence is synthesized)
gcatgtttggtgagctgctgcagaatgccagcaccatgggggatctgcggaactgtccaagcaactgtggagagaggatcaggattcgccgtgtgttgatgaatgctccacagattatca

SEQ ID NO: 531708 - DNA, 120 bp, Artificial Sequence
  ENSG00000166348_7 (sequence is synthesized)
cgattgggctggtatgggactcagaccactcagacttagcagaagatgttatccacagcctgggaacctgccttaagctgggtgatctgtttttcagagtgacggatgaccgggccaagc

SEQ ID NO: 531709 - DNA, 120 bp, Artificial Sequence
  ENSG00000166348_8 (sequence is synthesized)
aatctgaactgtacttagttggaatgatctgttactatggcaaacattattctacattcttttttcaaacaaagattcgcaaatggatgtattttgatgatgctcatgtcaaggagattg

SEQ ID NO: 531710 - DNA, 120 bp, Artificial Sequence
  ENSG00000166348_9 (sequence is synthesized)
ggcccaaatggaaggatgtggtgaccaaatgcatcaaggggcattatcagcccctgctgctgctttatgcagatccccagggtaccccagtttccacccaggacctgcctccccaagctg

SEQ ID NO: 531711 - DNA, 120 bp, Artificial Sequence
  ENSG00000166348_10 (sequence is synthesized)
agttccagtcatacagcaggacatgctacgacagtgaagattcagggagggagccctccatctcaagtgacactcgaacagattcctcaacggagagctatccctacaaacattcccacc

SEQ ID NO: 531712 - DNA, 120 bp, Artificial Sequence
  ENSG00000166348_11 (sequence is synthesized)
atgagtctgtggtcagtcacttctcttctgattctcaggggacagtcatctataatgtggaaaatgattccatgtctcagagcagtcgggacacaggacacctgactgatagtgaatgta

SEQ ID NO: 531713 - DNA, 120 bp, Artificial Sequence
  ENSG00000166348_12 (sequence is synthesized)
atcagaaacacacatccaagaaagggtcactgatagagcgcaagaggagctctggtcgggttaggaggaaaggcgatgagccccaggcctcgggataccacagtgaaggagaaacactga

SEQ ID NO: 531714 - DNA, 120 bp, Artificial Sequence
  ENSG00000166348_13 (sequence is synthesized)
aagagaagcaggctcctagaaatgcctccaaaccatccagcagcaccaacaggctgagagattttaaagagacagtcagcaatatgatccataacagaccatccctggcttctcagacca

SEQ ID NO: 531715 - DNA, 120 bp, Artificial Sequence
  ENSG00000166348_14 (sequence is synthesized)
atgtaggctctcactgcaggggcagaggaggagaccagcctgacaaaaaacctcctaggaccctgcctttacactctcgtgactgggaaatagagagtaccagcagtgagtcaaaatcca

SEQ ID NO: 531716 - DNA, 120 bp, Artificial Sequence
  ENSG00000166348_15 (sequence is synthesized)
gttcttccagcaagtatcgtcccacatggagacccaaacgagaatctctgaatattgacagtatctttagtaaggacaaaaggaagcactgtggctatacccagcttagccccttttctg

SEQ ID NO: 531717 - DNA, 120 bp, Artificial Sequence
  ENSG00000166348_16 (sequence is synthesized)
aggattcagctaaagaatttataccagatgaaccaagcaagccaccttcttacgacattaaatttggtggaccaagcccccagtacaagcgctggggcccagcacggccaggctctcacc

SEQ ID NO: 531718 - DNA, 120 bp, Artificial Sequence
  ENSG00000166348_17 (sequence is synthesized)
ttttagagcagcacccccgactaatccagcgaatggaatctggctatgaaagcagtgagaggaacagcagcagccctgtcagcctggatgcagccctgcctgagagctcaaatgtctaca

SEQ ID NO: 531719 - DNA, 120 bp, Artificial Sequence
  ENSG00000166348_18 (sequence is synthesized)
gggatccaagtgctaagagatcagctgggttggttccttcctggcgtcatatcccaaagtcgcacagcagtagcatcctggaggtagactccacagcatccatgggtggctggacaaaga

SEQ ID NO: 531720 - DNA, 120 bp, Artificial Sequence
  ENSG00000166348_19 (sequence is synthesized)
gtcagcctttctctggtgaggagatatcttctaaaagtgaactggatgaattgcaggaagaggtggccaggagggcgcaggaacaggaacttcgaagaaaacgggagaaggagttagagg

SEQ ID NO: 531721 - DNA, 120 bp, Artificial Sequence
  ENSG00000166348_20 (sequence is synthesized)
cagcgaaagggtttaaccctcatcctagccgcttcatggacttggatgaactgcagaatcaggggaggagtgacggctttgagaggtccctgcaagaggcagagtcagtgtttgaagagt

SEQ ID NO: 531722 - DNA, 120 bp, Artificial Sequence
  ENSG00000166348_21 (sequence is synthesized)
cactacatctggaacagaaaggagactgtgctgcagctttggctctctgtaatgaagctatctctaaactaagacttgccctgcatggtgccagctgtagcacgcacagcagagccctag

SEQ ID NO: 531723 - DNA, 120 bp, Artificial Sequence
  ENSG00000166348_22 (sequence is synthesized)
tcgataagaagttgcaaatcagtattcgaaaagcacggagcctgcaggatcgcatgcagcagcagcaatcaccacagcagccgtcgcagccctcagcctgcctcccaacacaggcgggga

SEQ ID NO: 531724 - DNA, 120 bp, Artificial Sequence
  ENSG00000166348_23 (sequence is synthesized)
ctctctctcagccaacaagtgaacagcctatcccgctccaagtattgttaagccaagaggcccaactggaatccggcatggatacagagtttggggccagttctttcttccattcacctg

SEQ ID NO: 531725 - DNA, 120 bp, Artificial Sequence
  ENSG00000166348_24 (sequence is synthesized)
cttcctgccatgagtcacactcatcactatctccagagtcatctgccccacagcacagctcccccagtagatctgccttgaagcttctgacttcggttgaagtagacaacattgaaccct

SEQ ID NO: 531726 - DNA, 120 bp, Artificial Sequence
  ENSG00000166348_25 (sequence is synthesized)
ctgcattccacaggcaaggtttacctaaagcaccagggtggactgagaagaattctcatcatagttgggagccattggatgccccagagggtaagctgcaaggctctaggtgtgacaaca

SEQ ID NO: 531727 - DNA, 120 bp, Artificial Sequence
  ENSG00000166348_26 (sequence is synthesized)
cagcaagctccctccacaagaaggaagaggcattgctcaagaacagctgttccaagaaaagaaggatcctgctaacccctccccggtgatgcctggaatagccacctctgagaggggtga

SEQ ID NO: 531728 - DNA, 120 bp, Artificial Sequence
  ENSG00000166348_27 (sequence is synthesized)
tgaacacagcctaggctgtagtccttcaaattcatcagctcagcccagccttcccctgtatagaacctgccaccccataatgcctgttgcttcttcatttgtgcttcactgtcctgatcc

SEQ ID NO: 531729 - DNA, 120 bp, Artificial Sequence
  ENSG00000166348_28 (sequence is synthesized)
tgtgcagaaaactaaccaatgcctccaaggccaaagcctcaaaacttcattgactttaaaagtggacagaggcagtgaggagacctataggccagagtttcccagcacaaaggggcttgt

SEQ ID NO: 531730 - DNA, 120 bp, Artificial Sequence
  ENSG00000166348_29 (sequence is synthesized)
ccgttctctggctgagcagttccagaggatgcagggtgtctccatgagggatagtacaggtttcaaggatagaagtttgtcaggtagtctaaggaagaactcttccccttctgattctaa

SEQ ID NO: 531731 - DNA, 120 bp, Artificial Sequence
  ENSG00000166348_30 (sequence is synthesized)
gcctcctttctcacagggtcaagagaaaggccactggccatgggcaaagcaacaatcctctctggagggtggggatagaccactttcctgggaagagtccactgaacattcttctcttgc

SEQ ID NO: 531732 - DNA, 120 bp, Artificial Sequence
  ENSG00000166348_31 (sequence is synthesized)
cttaaactctgggctgcctaatggtgaaacttctagcggaggacagcccaggttggcagagccagacatataccaagagaagctgtcccaagtgagagatgttaggtctaaggatctggg

SEQ ID NO: 531733 - DNA, 120 bp, Artificial Sequence
  ENSG00000166348_32 (sequence is synthesized)
cagcagtactgacttggggacttccttgcctttggattcctgggtgaatatcacaaggttctgtgattctcagcttaagcatggggcacctaggccaggaatgaagtcctcccctcatga

SEQ ID NO: 531734 - DNA, 120 bp, Artificial Sequence
  ENSG00000166348_33 (sequence is synthesized)
ttcccatacgtgtgtaacctatccagagagaaatcacatccttttgcatccacattggaaccaagacacagagcaggagacctcagaattggagtctctgtatcaggccagtcttcaggc

SEQ ID NO: 531735 - DNA, 120 bp, Artificial Sequence
  ENSG00000166348_34 (sequence is synthesized)
ttctcaagctggctgttctggatgggggcagcaggataccgcctggcacccacttagccaaacaggctctgcagatggcatggggaggaggttgcactcagcccatgatcctggtctctc

SEQ ID NO: 531736 - DNA, 120 bp, Artificial Sequence
  ENSG00000166348_35 (sequence is synthesized)
aaagacttcaacagcagaaatggagcatggtctccatgaagccagaacagtgcgtacttctcaggctacaccttgccgaggcctcagcagggagtgtggggaggatgagcagtacagtgc

SEQ ID NO: 531737 - DNA, 120 bp, Artificial Sequence
  ENSG00000166348_36 (sequence is synthesized)
agagaatttacgtcgcatctcacgcagtctcagtggcaccgttgtctcagagagggaggaagctccggtttcttcccacagttttgattcatcaaacgtgaggaagcctttggaaaccgg

SEQ ID NO: 531738 - DNA, 120 bp, Artificial Sequence
  ENSG00000166348_37 (sequence is synthesized)
gcaccgttgttccagctcctcttccctccctgtcatccatgacccttctgtgtttctcctcggtccccaactctaccttccccaaccacagttcctgtccccagatgtcctgatgcccac

SEQ ID NO: 531739 - DNA, 120 bp, Artificial Sequence
  ENSG00000166348_38 (sequence is synthesized)
catggcaggggagcccaatagactcccaggaacttcaaggagtgtccagcagtttctggctatgtgtgacaggggtgaaacttcccaaggggccaagtacacaggaaggactttgaacta

SEQ ID NO: 531740 - DNA, 120 bp, Artificial Sequence
  ENSG00000166348_39 (sequence is synthesized)
ccagagcctcccccatcgctccagaacagacaactcctgggcaccctggtcagagaccaaccagcatattgggaccagattcctgactactccagggtgcaatcctcaactaacctacac

SEQ ID NO: 531741 - DNA, 120 bp, Artificial Sequence
  ENSG00000166348_40 (sequence is synthesized)
tgccacactaccagaaagaagcaagggccttcaggttcctcacactcagtcctggagtgatcttttccattcaccctcccaccctcccattgttcatcctgtgtacccaccatctagcag

SEQ ID NO: 531742 - DNA, 120 bp, Artificial Sequence
  ENSG00000166348_41 (sequence is synthesized)
tcttcatgtacccctgaggtcagcttggaattcagatcctgttccagggtcccgaacccctggtcctcgaagagtagatatgcccccagatgatgactggaggcaaagcagttatgcctc

SEQ ID NO: 531743 - DNA, 120 bp, Artificial Sequence
  ENSG00000166348_42 (sequence is synthesized)
ccactctggacacaggagaacagtgggagaggggtttctgtttgttctatcagatgctcccagaagagagcagatcagggctagagtcctgcagcacagtcaatggtaaaggttattcct

SEQ ID NO: 531744 - DNA, 79 bp, Artificial Sequence
  ENSG00000166348_43 (sequence is synthesized)
ctagagtcctgcagcacagtcaatggtaaaggttattcctttcctttcctggagctacacctttctttgtaaaactgta

SEQ ID NO: 531745 - DNA, 76 bp, Artificial Sequence
  ENSG00000166348_44 (sequence is synthesized)
caccactgcactccagctcaacaaaataaactactgtggcagcgttggtaccctgcatcactgccatggttgtgct

SEQ ID NO: 531746 - DNA, 120 bp, Artificial Sequence
  ENSG00000166348_45 (sequence is synthesized)
tggcagcgttggtaccctgcatcactgccatggttgtgctattctcatctcaacatagaattggtgggttctcctaagggtgtcaggaacctctaaaaagatgtgattctttgggagggg

SEQ ID NO: 531747 - DNA, 120 bp, Artificial Sequence
  ENSG00000166348_46 (sequence is synthesized)
atatttgaaattccaacttccattccccctagcaaaaggaagcagctgctgtttaagggttttatctgagccactttaaagatgaatccatggtattactctggatactagccattcctt

SEQ ID NO: 531748 - DNA, 120 bp, Artificial Sequence
  ENSG00000166348_47 (sequence is synthesized)
aggattttaaggtcacattttattcctggatgctttatgtccccacctccacctgagccctcatcctctgttccctactatactcccaacttctactctttgttttatccacctatccct

SEQ ID NO: 531749 - DNA, 120 bp, Artificial Sequence
  ENSG00000166348_48 (sequence is synthesized)
attacctgaccctttgtcttccctgtctcccatccttggggggacatgtagccctgtggtcatggttctgatgacatcatcagggcagcccccctgcccaggtattatggcctgtcagca

SEQ ID NO: 531750 - DNA, 120 bp, Artificial Sequence
  ENSG00000166348_49 (sequence is synthesized)
ttccctgtgccctccaaaccttaggcctagaatgcggagctgccaacataacattcacccttttgaacagatggagtcaggcacactaacacagccttctgtcctcaataacacagccat

SEQ ID NO: 531751 - DNA, 120 bp, Artificial Sequence
  ENSG00000166348_50 (sequence is synthesized)
tattgccacttgctcagtcgtcaatgtaaaccctcagagtcagctgaactattttaggccaaacatactgtttttgtaaagtatttttcattaataaatctataagacagttctatttaa

SEQ ID NO: 531752 - DNA, 120 bp, Artificial Sequence
  ENSG00000166348_51 (sequence is synthesized)
atgcggcgccaggagctgctaagagatgggctctcctgtgttgcccaggctgtactcgaactcctaggctcaagtaattccttcccacctcagcctcctgattggctgggactacagctc

SEQ ID NO: 531753 - DNA, 120 bp, Artificial Sequence
  ENSG00000166348_52 (sequence is synthesized)
tctgacacagctggctattctagtcccagaagaaagaggagagacttgctgaagatctggatgggacaatagaagtttggggcacattaaaaagaagcagcaagaacatcaacaaaaacc

SEQ ID NO: 531754 - DNA, 120 bp, Artificial Sequence
  ENSG00000166348_53 (sequence is synthesized)
tcagatgattcaaacaggcttcttcttggctttgtggaaccttttgcagttgctcagaatttgagtttttgcttcagaggatgatgagacaaggcaatagagggctaaatgtgaacaata

SEQ ID NO: 531755 - DNA, 120 bp, Artificial Sequence
  ENSG00000166348_54 (sequence is synthesized)
cagcaacattgtctcttgcagcaatgtgagccacctacttggggctttcaggcatggctgagacaagtggagggatggcctttgctattatctctatgtgctctttcaacttcctataac

SEQ ID NO: 531756 - DNA, 120 bp, Artificial Sequence
  ENSG00000166348_55 (sequence is synthesized)
taacaatagcagagcaagactgacaacaataattaaaataagagaataaagaagatgtagtcagaggccattctgaatgcattcagattctcagtgtgtatgaggaaggctgcctgtaat

SEQ ID NO: 531757 - DNA, 120 bp, Artificial Sequence
  ENSG00000166348_56 (sequence is synthesized)
aactttgtcatgaattgtcagtgctgagttcctggtagttggtaaaaagaattgccttctctctgatatcctgttctgcgggaagtccttgtggtttagattcacagtttctcattgttg

SEQ ID NO: 531758 - DNA, 120 bp, Artificial Sequence
  ENSG00000166348_57 (sequence is synthesized)
ctagctacagtcgtctcctccctcctagccttccctccccacagctctagctattcccatatccctccccattcttgtatcacttgccccacagataccctcgtgattagaggtcttttg

SEQ ID NO: 531759 - DNA, 120 bp, Artificial Sequence
  ENSG00000166348_58 (sequence is synthesized)
acaagcctgaagaacacatcttaccctgatcctggatgctgttggagttgagaattacatccacttcaccaggactttatggaggctgttcaagaaaaatagaaggaagcaatacttaag

SEQ ID NO: 531760 - DNA, 120 bp, Artificial Sequence
  ENSG00000166348_59 (sequence is synthesized)
gatttctctgtttgcattagtcctgtgccatgttacattttggagattgtttggaacaagtgagggagggctctgtcatcttgatctaggaggatacctgagtcccttgactacacagat

SEQ ID NO: 531761 - DNA, 120 bp, Artificial Sequence
  ENSG00000166348_60 (sequence is synthesized)
tactgtgtttatgggacactgagcctggtcaggggctttggtatagggggcagaggaagaaagtcaaatgtgtgagttaggaatgtacattaatgtttgatttagcagtaactaaataca

SEQ ID NO: 531762 - DNA, 65 bp, Artificial Sequence
  ENSG00000166348_61 (sequence is synthesized)
gacaccctcaggggggcggggccgggggttcacaaatgcattaattagaataatggctttgggca

SEQ ID NO: 531763 - DNA, 120 bp, Artificial Sequence
  ENSG00000166348_62 (sequence is synthesized)
ggtttcaccatattggccaggctagttttaaagtcctggcctcaactgatctgctgccttggcctcctaaagtgacgggattacagatgtgagccaccacagattagagatgaggtttct

SEQ ID NO: 531764 - DNA, 83 bp, Artificial Sequence
  ENSG00000166348_63 (sequence is synthesized)
aaggctgggcgcagtgattcacgtctgtaatcccagcaattttagaggccaaggtgagaggactgcagaatctttaaccagtt

SEQ ID NO: 531765 - DNA, 120 bp, Artificial Sequence
  ENSG00000166348_64 (sequence is synthesized)
atcagaagaaaataaggtctatgattgggcttcttttgaattagaggagattgttacatggccactatcttaccaatacatctaattcaggtgtctattactactgagtcttcccctact

SEQ ID NO: 531766 - DNA, 120 bp, Artificial Sequence
  ENSG00000166348_65 (sequence is synthesized)
ctttcccataccctgaggatactgtctgtgggaaaaccataagtctggtattatgtgtctgcctgtatgtgtctgtgtgtttgaaggctacaccttgccgaggcctcagcagggagtgtg

SEQ ID NO: 531767 - DNA, 120 bp, Artificial Sequence
  ENSG00000166348_66 (sequence is synthesized)
acaaggtagtgcttgggaaccatgttagtttatgaatgccaggggaagaaatgaccatgagtattctgtagcaagagctctcattgtcttggcgactgaaggggagagaggagtcctctg

SEQ ID NO: 531768 - DNA, 120 bp, Artificial Sequence
  ENSG00000166348_67 (sequence is synthesized)
aaaagattttcttctttcaggtcagacatacagtgaaaagctcattgtactgctggtccttatcttaataattcctaggatgcaaaaagtacagcataataagaccatttgtccacattt

SEQ ID NO: 531769 - DNA, 120 bp, Artificial Sequence
  ENSG00000166348_68 (sequence is synthesized)
cccatgggtaactttagccctggacttgtgtaataacgcgattattatatttgtatatattatgttcttagacatggcaatccaggctacatttcatgttgtagtagctaccatgtgatt

SEQ ID NO: 531770 - DNA, 120 bp, Artificial Sequence
  ENSG00000166348_69 (sequence is synthesized)
tattttgggatttcagtgcttcctatccttatggaagcagagaaagcagtctttcttgctctgattgcaccatagagaagagacacaaagattccctttgctttgcttctttatggtcag

SEQ ID NO: 531771 - DNA, 120 bp, Artificial Sequence
  ENSG00000166348_70 (sequence is synthesized)
gactaggaaagaagttccagtagtcattgttgtagttctcacatcttagccctggaatttggcttttacttagaatagatgaatttaaataaacattaatttggaccgttaataattctg

SEQ ID NO: 531772 - DNA, 80 bp, Artificial Sequence
  ENSG00000166348_71 (sequence is synthesized)
ataaacattaatttggaccgttaataattctgagtagttttcaaaatataaattagtaaaagcagttaacttttcaccca

SEQ ID NO: 531773 - DNA, 120 bp, Artificial Sequence
  ENSG00000166348_72 (sequence is synthesized)
ggctggagtgcagtggcacgatcacagcttactgcagcctcaacctcctgggttcaatgttcaaaaggcaaatgttcaaaaatagttaactgctaggcatggtagctcacgcctgtaatc

SEQ ID NO: 531774 - DNA, 90 bp, Artificial Sequence
  ENSG00000166348_73 (sequence is synthesized)
gagtttgagaccagcctgggcaacacggtaaaaccctgtctctacaaaaaacacaaaaaatttagctgggcataggaggcttgggtggaa

SEQ ID NO: 531775 - DNA, 120 bp, Artificial Sequence
  ENSG00000166348_74 (sequence is synthesized)
ggtgcatacctgtggtcccagctacttaggaggcttgggtggaagaatcggttagcccggcaggtcaaggctgcagtgagccgtgatggcactgccacactccagcctgggtgacagagc

SEQ ID NO: 531776 - DNA, 120 bp, Artificial Sequence
  ENSG00000166349_0 (sequence is synthesized)
gagagcagagaacacactttgccttctctttggtattgagtaatatcaaccaaattgcagacatctcaacactttggccaggcagcctgctgagcaaggtacctcagccagcatggcagc

SEQ ID NO: 531777 - DNA, 120 bp, Artificial Sequence
  ENSG00000166349_1 (sequence is synthesized)
ctctttcccacccaccttgggactcagttctgccccagatgaaattcagcacccacatattaaattttcagaatggaaatttaagctgttccgggtgagatcctttgaaaagacacctga

SEQ ID NO: 531778 - DNA, 120 bp, Artificial Sequence
  ENSG00000166349_2 (sequence is synthesized)
agaagctcaaaaggaaaagaaggattcctttgaggggaaaccctctctggagcaatctccagcagtcctggacaaggctgatggtcagaagccagtcccaactcagccattgttaaaagc

SEQ ID NO: 531779 - DNA, 120 bp, Artificial Sequence
  ENSG00000166349_3 (sequence is synthesized)
ccaccctaagttttcaaagaaatttcacgacaacgagaaagcaagaggcaaagcgatccatcaagccaaccttcgacatctctgccgcatctgtgggaattcttttagagctgatgagca

SEQ ID NO: 531780 - DNA, 120 bp, Artificial Sequence
  ENSG00000166349_4 (sequence is synthesized)
caacaggagatatccagtccatggtcctgtggatggtaaaaccctaggccttttacgaaagaaggaaaagagagctacttcctggccggacctcattgccaaggttttccggatcgatgt

SEQ ID NO: 531781 - DNA, 120 bp, Artificial Sequence
  ENSG00000166349_5 (sequence is synthesized)
gaaggcagatgttgactcgatccaccccactgagttctgccataactgctggagcatcatgcacaggaagtttagcagtgccccatgtgaggtttacttcccgaggaacgtgaccatgga

SEQ ID NO: 531782 - DNA, 120 bp, Artificial Sequence
  ENSG00000166349_6 (sequence is synthesized)
gtggcacccccacacaccatcctgtgacatctgcaacactgcccgtcggggactcaagaggaagagtcttcagccaaacttgcagctcagcaaaaaactcaaaactgtgcttgaccaagc

SEQ ID NO: 531783 - DNA, 120 bp, Artificial Sequence
  ENSG00000166349_7 (sequence is synthesized)
aagacaagcccgtcagcacaagagaagagctcaggcaaggatcagcagcaaggatgtcatgaagaagatcgccaactgcagtaagatacatcttagtaccaagctccttgcagtggactt

SEQ ID NO: 531784 - DNA, 120 bp, Artificial Sequence
  ENSG00000166349_8 (sequence is synthesized)
cccagagcactttgtgaaatccatctcctgccagatctgtgaacacattctggctgaccctgtggagaccaactgtaagcatgtcttttgccgggtctgcattctcagatgcctcaaagt

SEQ ID NO: 531785 - DNA, 120 bp, Artificial Sequence
  ENSG00000166349_9 (sequence is synthesized)
catgggcagctattgtccctcttgccgatatccatgcttccctactgacctggagagtccagtgaagtcctttctgagcgtcttgaattccctgatggtgaaatgtccagcaaaagagtg

SEQ ID NO: 531786 - DNA, 120 bp, Artificial Sequence
  ENSG00000166349_10 (sequence is synthesized)
caatgaggaggtcagtttggaaaaatataatcaccacatctcaagtcacaaggaatcaaaagagatttttgtgcacattaataaagggggccggccccgccaacatcttctgtcgctgac

SEQ ID NO: 531787 - DNA, 120 bp, Artificial Sequence
  ENSG00000166349_11 (sequence is synthesized)
tcggagagctcagaagcaccggctgagggagctcaagctgcaagtcaaagcctttgctgacaaagaagaaggtggagatgtgaagtccgtgtgcatgaccttgttcctgctggctctgag

SEQ ID NO: 531788 - DNA, 120 bp, Artificial Sequence
  ENSG00000166349_12 (sequence is synthesized)
ggcgaggaatgagcacaggcaagctgatgagctggaggccatcatgcagggaaagggctctggcctgcagccagctgtttgcttggccatccgtgtcaacaccttcctcagctgcagtca

SEQ ID NO: 531789 - DNA, 120 bp, Artificial Sequence
  ENSG00000166349_13 (sequence is synthesized)
gtaccacaagatgtacaggactgtgaaagccatcacagggagacagatttttcagcctttgcatgcccttcggaatgctgagaaggtacttctgccaggctaccaccactttgagtggca

SEQ ID NO: 531790 - DNA, 120 bp, Artificial Sequence
  ENSG00000166349_14 (sequence is synthesized)
gccacctctgaagaatgtgtcttccagcactgatgttggcattattgatgggctgtctggactatcatcctctgtggatgattacccagtggacaccattgcaaagaggttccgctatga

SEQ ID NO: 531791 - DNA, 120 bp, Artificial Sequence
  ENSG00000166349_15 (sequence is synthesized)
ttcagctttggtgtctgctttgatggacatggaagaagacatcttggaaggcatgagatcccaagaccttgatgattacctgaatggccccttcactgtggtggtgaaggagtcttgtga

SEQ ID NO: 531792 - DNA, 120 bp, Artificial Sequence
  ENSG00000166349_16 (sequence is synthesized)
tggaatgggagacgtgagtgagaagcatgggagtgggcctgtagttccagaaaaggcagtccgtttttcattcacaatcatgaaaattactattgcccacagctctcagaatgtgaaagt

SEQ ID NO: 531793 - DNA, 120 bp, Artificial Sequence
  ENSG00000166349_17 (sequence is synthesized)
atttgaagaagccaaacctaactctgaactgtgttgcaagccattgtgccttatgctggcagatgagtctgaccacgagacgctgactgccatcctgagtcctctcattgctgagaggga

SEQ ID NO: 531794 - DNA, 120 bp, Artificial Sequence
  ENSG00000166349_18 (sequence is synthesized)
ggccatgaagagcagtgaattaatgcttgagctgggaggcattctccggactttcaagttcatcttcaggggcaccggctatgatgaaaaacttgtgcgggaagtggaaggcctcgaggc

SEQ ID NO: 531795 - DNA, 120 bp, Artificial Sequence
  ENSG00000166349_19 (sequence is synthesized)
ttctggctcagtctacatttgtactctttgtgatgccacccgtctggaagcctctcaaaatcttgtcttccactctataaccagaagccatgctgagaacctggaacgttatgaggtctg

SEQ ID NO: 531796 - DNA, 120 bp, Artificial Sequence
  ENSG00000166349_20 (sequence is synthesized)
gcgttccaacccttaccatgagtctgtggaagaactgcgggatcgggtgaaaggggtctcagctaaacctttcattgagacagtcccttccatagatgcactccactgtgacattggcaa

SEQ ID NO: 531797 - DNA, 120 bp, Artificial Sequence
  ENSG00000166349_21 (sequence is synthesized)
tgcagctgagttctacaagatcttccagctagagataggggaagtgtataagaatcccaatgcttccaaagaggaaaggaaaaggtggcaggccacactggacaagcatctccggaagaa

SEQ ID NO: 531798 - DNA, 120 bp, Artificial Sequence
  ENSG00000166349_22 (sequence is synthesized)
gatgaacctcaaaccaatcatgaggatgaatggcaactttgccaggaagctcatgaccaaagagactgtggatgcagtttgtgagttaattccttccgaggagaggcacgaggctctgag

SEQ ID NO: 531799 - DNA, 120 bp, Artificial Sequence
  ENSG00000166349_23 (sequence is synthesized)
ggagctgatggatctttacctgaagatgaaaccagtatggcgatcatcatgccctgctaaagagtgcccagaatccctctgccagtacagtttcaattcacagcgttttgctgagctcct

SEQ ID NO: 531800 - DNA, 120 bp, Artificial Sequence
  ENSG00000166349_24 (sequence is synthesized)
ttctacgaagttcaagtataggtatgagggaaaaatcaccaattattttcacaaaaccctggcccatgttcctgaaattattgagagggatggctccattggggcatgggcaagtgaggg

SEQ ID NO: 531801 - DNA, 120 bp, Artificial Sequence
  ENSG00000166349_25 (sequence is synthesized)
aaatgagtctggtaacaaactgtttaggcgcttccggaaaatgaatgccaggcagtccaaatgctatgagatggaagatgtcctgaaacaccactggttgtacacctccaaatacctcca

SEQ ID NO: 531802 - DNA, 120 bp, Artificial Sequence
  ENSG00000166349_26 (sequence is synthesized)
gaagtttatgaatgctcataatgcattaaaaacctctgggtttaccatgaaccctcaggcaagcttaggggacccattaggcatagaggactctctggaaagccaagattcaatggaatt

SEQ ID NO: 531803 - DNA, 120 bp, Artificial Sequence
  ENSG00000166349_27 (sequence is synthesized)
actgctgtgtatggggcttcaccatccaagaggtggtaggttggagtaagatgctacagatgctctcaagtcaggaatagaaactgatgagctgattgcttgaggcttttagtgagttcc

SEQ ID NO: 531804 - DNA, 120 bp, Artificial Sequence
  ENSG00000166349_28 (sequence is synthesized)
gaaaagcaacaggaaaaatcagttatctgaaagctcagtaactcagaacaggagtaactgcaggggaccagagatgagcaaagatctgtgtgtgttggggagctgtcatgtaaatcaaag

SEQ ID NO: 531805 - DNA, 120 bp, Artificial Sequence
  ENSG00000166349_29 (sequence is synthesized)
ccaaggttgtcaaagaacagccagtgaggccaggaaagaaattggtcttgtggttttcatttttttcccccttgattgattatattttgtattgagatatgataagtgccttctatttca

SEQ ID NO: 531806 - DNA, 120 bp, Artificial Sequence
  ENSG00000166349_30 (sequence is synthesized)
tttttgaataattcttcatttttataattttacatatcttggcttgctatataagattcaaaagagctttttaaatttttctaataatatcttacatttgtacagcatgatgacctttac

SEQ ID NO: 531807 - DNA, 120 bp, Artificial Sequence
  ENSG00000166349_31 (sequence is synthesized)
aaagtgctctcaatgcatttacccattcgttatataaatatgttacatcaggacaactttgagaaaatcagtccttttttatgtttaaattatgtatctattgtaaccttcagagtttag

SEQ ID NO: 531808 - DNA, 120 bp, Artificial Sequence
  ENSG00000166349_32 (sequence is synthesized)
gaggtcatctgctgtcatggatttttcaataatgaatttagaatacacctgttagctacagttagttattaaatcttctgataatatatgtttacttagctatcagaagccaagtatgat

SEQ ID NO: 531809 - DNA, 120 bp, Artificial Sequence
  ENSG00000166349_33 (sequence is synthesized)
tctttatttttactttttcatttcaagaaatttagagtttccaaatttagagcttctgcatacagtcttaaagccacagaggcttgtaaaaatataggttagcttgatgtctaaaaatat

SEQ ID NO: 531810 - DNA, 120 bp, Artificial Sequence
  ENSG00000166349_34 (sequence is synthesized)
atttcatgtcttactgaaacattttgccagactttctccaaatgaaacctgaatcaatttttctaaatctaggtttcatagagtcctctcctctgcaatgtgttattctttctataatga

SEQ ID NO: 531811 - DNA, 120 bp, Artificial Sequence
  ENSG00000166349_35 (sequence is synthesized)
tcagtttactttcagtggattcagaattgtgtagcaggataaccttgtatttttccatccgctaagtttagatggagtccaaacgcagtacagcagaagagttaacatttacacagtgct

SEQ ID NO: 531812 - DNA, 120 bp, Artificial Sequence
  ENSG00000166349_36 (sequence is synthesized)
ttttaccactgtggaatgttttcacactcatttttccttacaacaattctgaggagtaggtgttgttattatctccatttgatgggggtttaaatgatttgctcaaagtcatttaggggt

SEQ ID NO: 531813 - DNA, 120 bp, Artificial Sequence
  ENSG00000166349_37 (sequence is synthesized)
aataaatacttggcttggaaatttaacacagtccttttgtctccaaagcccttcttctttccaccacaaattaatcactatgtttataaggtagtatcagaatttttttaggattcacaa

SEQ ID NO: 531814 - DNA, 120 bp, Artificial Sequence
  ENSG00000166349_38 (sequence is synthesized)
ctaatcactatagcacatgaccttgggattacatttttatggggcaggggtaagcaagtttttaaatcatttgtgtgctctggctcttttgatagaagaaagcaacacaaaagctccaaa

SEQ ID NO: 531815 - DNA, 120 bp, Artificial Sequence
  ENSG00000166349_39 (sequence is synthesized)
gggccccctaaccctcttgtggctccagttatttggaaactatgatctgcatccttaggaatctgggatttgccagttgctggcaatgtagagcaggcatggaattttatatgctagtga

SEQ ID NO: 531816 - DNA, 120 bp, Artificial Sequence
  ENSG00000166349_40 (sequence is synthesized)
gtcataatgatatgttagtgttaattagttttttcttcctttgattttattggccataattgctactcttcatacacagtatatcaaagagcttgataatttagttgtcaaaagtgcatc

SEQ ID NO: 531817 - DNA, 120 bp, Artificial Sequence
  ENSG00000166349_41 (sequence is synthesized)
ggcgacattatctttaattgtatgtatttggtgcttcttcagggattgaactcagtatctttcattaaaaaacacagcagttttccttgctttttatatgcagaatatcaaagtcatttc

SEQ ID NO: 531818 - DNA, 120 bp, Artificial Sequence
  ENSG00000166349_42 (sequence is synthesized)
taatttagttgtcaaaaacatatacatattttaacattagtttttttgaaaactcttggttttgtttttttggaaatgagtgggccactaagccacactttcccttcatcctgcttaatc

SEQ ID NO: 531819 - DNA, 120 bp, Artificial Sequence
  ENSG00000166349_43 (sequence is synthesized)
cttccagcatgtctctgcactaataaacagctaaattcacataatcatcctatttactgaagcatggtcatgctggtttatagattttttacccatttctactctttttctctattggtg

SEQ ID NO: 531820 - DNA, 120 bp, Artificial Sequence
  ENSG00000166349_44 (sequence is synthesized)
gcactgtaaatactttccagtattaaattatccttttctaacactgtaggaactattttgaatgcatgtgactaagagcatgatttatagcacaacctttccaataatcccttaatcaga

SEQ ID NO: 531821 - DNA, 120 bp, Artificial Sequence
  ENSG00000166349_45 (sequence is synthesized)
tcacattttgataaaccctgggaacatctggctgcaggaatttcaatatgtagaaacgctgcctatggttttttgcccttactgttgagactgcaatatcctagaccctagttttatact

SEQ ID NO: 531822 - DNA, 120 bp, Artificial Sequence
  ENSG00000166349_46 (sequence is synthesized)
agagttttatttttagcaatgcctattgcaagtgcaattatatactccagggaaattcaccacactgaatcgagcatttgtgtgtgtatgtgtgaagtatatactgggacttcagaagtg

SEQ ID NO: 531823 - DNA, 120 bp, Artificial Sequence
  ENSG00000166349_47 (sequence is synthesized)
caatgtatttttctcctgtgaaacctgaatctacaagttttcctgccaagccactcaggtgcattgcagggaccagtgataatggctgatgaaaattgatgattggtcagtgaggtcaaa

SEQ ID NO: 531824 - DNA, 120 bp, Artificial Sequence
  ENSG00000166349_48 (sequence is synthesized)
aggagccttgggattaataaacatgcactgagaagcaagaggaggagaaaaagatgtctttttcttccaggtgaactggaatttagttttgcctcagatttttttcccacaagatacaga

SEQ ID NO: 531825 - DNA, 120 bp, Artificial Sequence
  ENSG00000166349_49 (sequence is synthesized)
agaagataaagatttttttggttgagagtgtgggtcttgcattacatcaaacagagttcaaattccacacagataagaggcaggatatataagcgccagtggtagttgggaggaataaac

SEQ ID NO: 531826 - DNA, 120 bp, Artificial Sequence
  ENSG00000166349_50 (sequence is synthesized)
cattatttggatgcaggtggtttttgattgcaaatatgtgtgtgtcttcagtgattgtatgacagatgatgtattcttttgatgttaaaagattttaagtaagagtagatacattgtacc

SEQ ID NO: 531827 - DNA, 120 bp, Artificial Sequence
  ENSG00000166349_51 (sequence is synthesized)
cattttacattttcttattttaactacagtaatctacataaatatacctcagaaatcatttttggtgattattttttgttttgtagaattgcacttcagtttattttcttacaaataacc

SEQ ID NO: 531828 - DNA, 120 bp, Artificial Sequence
  ENSG00000166349_52 (sequence is synthesized)
ttacattttgtttaatggcttccaagagccttttttttttttgtatttcagagaaaattcaggtaccaggatgcaatggatttatttgattcaggggacctgtgtttccatgtcaaatgt

SEQ ID NO: 531829 - DNA, 120 bp, Artificial Sequence
  ENSG00000166349_53 (sequence is synthesized)
tgtgtttccatgtcaaatgttttcaaataaaatgaaatatgagtttcaatactttttatattttaatatttccattcattaatattatggttattgtcagcaattttatgtttgaatatt

SEQ ID NO: 531830 - DNA, 120 bp, Artificial Sequence
  ENSG00000166349_54 (sequence is synthesized)
attacctgctcttccccttcatccggtccaagggagtcagcccttgccttaaatatttctttgaatttcctgccaagaacaccagcgctttgtctttctctgtcatgggaaaactatttt

SEQ ID NO: 531831 - DNA, 120 bp, Artificial Sequence
  ENSG00000166349_55 (sequence is synthesized)
aaattccctgtttaactggtcataaacgtctagagaatgtaccacgcgttttgctggagaagcacaaaagagtttcatccacctctgcatatttggttcatcgtccacctcttaggggag

SEQ ID NO: 531832 - DNA, 120 bp, Artificial Sequence
  ENSG00000166349_56 (sequence is synthesized)
tttccaggatagtagtcatgcgtatgtatcctgaagccagaatgcttggttccaatccggtttttcctacaataaatgtgtgattcaggagtgcaatctgaagccacttcaaagaatcac

SEQ ID NO: 531833 - DNA, 120 bp, Artificial Sequence
  ENSG00000166349_57 (sequence is synthesized)
cttgttttcttgctgacattgcagtggggacgatgagacccaaggacattcagccaagagggaaatgcattcatctctttcagatctgctagaccaggtggatatctatcaagttctctt

SEQ ID NO: 531834 - DNA, 120 bp, Artificial Sequence
  ENSG00000166349_58 (sequence is synthesized)
gttaatgaagccaaagaagcacatgaaaggatatttctgaatacaggattctggccttaaaatacactgagtgcaatctgaagccacttcaaagaatcaccttgttttcttgctgacatt

SEQ ID NO: 531835 - DNA, 120 bp, Artificial Sequence
  ENSG00000166349_59 (sequence is synthesized)
gcagtggggacgatgagacccaaggacattcagccaagagggaaatatctgctagaccaggtggatatctatcaagttctctttctttcctgcagagttaactagacatccgtgttcctg

SEQ ID NO: 531836 - DNA, 120 bp, Artificial Sequence
  ENSG00000166349_60 (sequence is synthesized)
gatctcaggacttcgggcttggactgaattacactacggattttcctggttctccagcttgaagacagcagattgtgggacttcttgacctccataattgtgatccaagggaggtcttac

SEQ ID NO: 531837 - DNA, 120 bp, Artificial Sequence
  ENSG00000166349_61 (sequence is synthesized)
ttctcaataggagacaagtgacttgatttcaacacggatgggagaaattgggaggtgaaattgggagaaacatggaaatactggggaagcatgaacatctggccttttctttttcttcct

SEQ ID NO: 531838 - DNA, 120 bp, Artificial Sequence
  ENSG00000166349_62 (sequence is synthesized)
gtaagtccattggagatgcaagattttaaggagcaggaggatggggggggaaggacaccctcttgcatgttgcaggtgatgagattgaagttcctaaagtttaagtaatgaatcaaaggc

SEQ ID NO: 531839 - DNA, 120 bp, Artificial Sequence
  ENSG00000166349_63 (sequence is synthesized)
aacatcttcaagggaatgaatcatggattctgaaggtgattgattgaaatgtgtcaaattcatcatcaccatcaaaactatttgcttctgcactgaaacaaaattcttcagagtcttcaa

SEQ ID NO: 531840 - DNA, 120 bp, Artificial Sequence
  ENSG00000166349_64 (sequence is synthesized)
agggagtggaatcccctggatcttctgttgatgtttgactgtttgtgaatgttgtctgctcttcattagtatcatcttcagcacatttcaacatatagaaatagaatccttctgaaacaa

SEQ ID NO: 531841 - DNA, 120 bp, Artificial Sequence
  ENSG00000166351_0 (sequence is synthesized)
ggtagacgcgatctgttcgctactaccggcctcccctggctgttaaaagcagatggtggctgaggtttgttcaatgcccactgcctctactgtgaagaagccatttgatctcaggagcaa

SEQ ID NO: 531842 - DNA, 120 bp, Artificial Sequence
  ENSG00000166351_1 (sequence is synthesized)
gctgcagggggagcggcaagagcaacatgggcacttctggagaccacgacgactcctttatgaagatgctcaggagcaagatgggcaagtgttgccgccactgcttcccctgctgcaggg

SEQ ID NO: 531843 - DNA, 90 bp, Artificial Sequence
  ENSG00000166351_2 (sequence is synthesized)
ctgcttcccctgctgcagggggagcggcacgagcaacgtgggcacttctggagaccatgaaaactcctttatgaagatgcactgcttccc

SEQ ID NO: 531844 - DNA, 74 bp, Artificial Sequence
  ENSG00000166351_3 (sequence is synthesized)
gcttggggagactacgaccacagcgccttcatggagccgaggtaccacatccgtcgagaagatctggacaagct

SEQ ID NO: 531845 - DNA, 80 bp, Artificial Sequence
  ENSG00000166351_4 (sequence is synthesized)
cccagaaaggatctcatcgtcatgctcagggacactgacatgaacaagagggacaaggaaaagaagtagtacaactcctg

SEQ ID NO: 531846 - DNA, 120 bp, Artificial Sequence
  ENSG00000166351_5 (sequence is synthesized)
tggaaattcagaagtagtacaactcctgctggacagacgatgtcaacttaatgtccttgacaacaaaaaaaggacagctctgataaaggccatacaatgccaggaagatgaatgtgtgtt

SEQ ID NO: 531847 - DNA, 120 bp, Artificial Sequence
  ENSG00000166351_6 (sequence is synthesized)
tacaatgccaggaagatgaatgtgtgttaatgttgctggaacatggcgctgatcgaaatattccagatgagtatggaaataccgctctacactatgctatctacaatgaagataaattaa

SEQ ID NO: 531848 - DNA, 120 bp, Artificial Sequence
  ENSG00000166351_7 (sequence is synthesized)
cacaccacttttgcttggcgtacatgaacaaaaacagcaagtggtgaaatttttaatcaagaaaaaagctaatttaaatgtacttgatagatatggaagaactgccctcatacttgctgt

SEQ ID NO: 531849 - DNA, 69 bp, Artificial Sequence
  ENSG00000166351_8 (sequence is synthesized)
tcagaggaagagtcacaaaggcttaaagtcagtgaaaatagccagccagaagaagaaataaagaagcat

SEQ ID NO: 531850 - DNA, 120 bp, Artificial Sequence
  ENSG00000166351_9 (sequence is synthesized)
gtgggattaccagaaaacctgactaatggtgccagtgctggcaatggtgatgatggattaattccacaaaggaggagcagaaaacctgaaaatcagcaatttcctgacactgagaatgaa

SEQ ID NO: 531851 - DNA, 120 bp, Artificial Sequence
  ENSG00000166351_10 (sequence is synthesized)
aacaaaatgatacccggaaacaactttctgaagaacagaacactggaatatcacaagatgagattctgactaataaacaaaagcagatagaagtggctgaacagaaaatgaattctgagc

SEQ ID NO: 531852 - DNA, 120 bp, Artificial Sequence
  ENSG00000166351_11 (sequence is synthesized)
agtcataagaaagaagaagatctcttgcgtgaaaacagcgtgttgcaggaagaaattgccatgctaagactggaactagatgaaacaaaacatcagaaccagctaagggaaaataaaatt

SEQ ID NO: 531853 - DNA, 120 bp, Artificial Sequence
  ENSG00000166351_12 (sequence is synthesized)
ataaaattttggaggaaattgaaagtgtgaaagaaaagactgataaacttctaagggctatgcaattgaatgaagaagcattaacgaaaaccaatatttaagtacagtggacagcttagg

SEQ ID NO: 531854 - DNA, 120 bp, Artificial Sequence
  ENSG00000166351_13 (sequence is synthesized)
agtcgctttgcctggtgtttcttgcttggattggcgttttctccctcgcattcctttgctgggcctgaatttttctctgctgggtttggcattcccttgactgggctgggtgtttccttc

SEQ ID NO: 531855 - DNA, 120 bp, Artificial Sequence
  ENSG00000166351_14 (sequence is synthesized)
tcccttgactgggctgggtgtttccttcggagggggggcttggcctttcctggggtgggcctggggtccccctggtgggcgtgggctttccccgggtgggtgtgggttttccctgggtgg

SEQ ID NO: 531856 - DNA, 68 bp, Artificial Sequence
  ENSG00000166351_15 (sequence is synthesized)
ctgtttctagtcatcatcatgtaatttgtgaattactttctgactagaagcagaagaataatgtttgg

SEQ ID NO: 531857 - DNA, 120 bp, Artificial Sequence
  ENSG00000166351_16 (sequence is synthesized)
gaagaataatgtttggcagaaggaacacgcaacaagattgtgtgtttgccagaagaacatctaatgagattgcctgtttggcaggaagagcagcaagtgcaaaacacaagatgctgagtg

SEQ ID NO: 531858 - DNA, 71 bp, Artificial Sequence
  ENSG00000166351_17 (sequence is synthesized)
agtgaacttaccagaggttgggaataaggtgaatacttagctaagtgtgaaagccaccatgattatatgta

SEQ ID NO: 531859 - DNA, 120 bp, Artificial Sequence
  ENSG00000166351_18 (sequence is synthesized)
tgagctcctataaaactttatttacaaagccaaaaggcagattggatttggcctgtggcctatagtttgctgggattgatggaagataaccatgtaaagaaaccaggagaaaaaggaagc

SEQ ID NO: 531860 - DNA, 120 bp, Artificial Sequence
  ENSG00000166351_19 (sequence is synthesized)
gaaaaaggaagcttttgcagtagtcagctatagtttccatgtcacacatccttggactagtatcaatgtattctaaggttttcacctgcccatggcaaaataaagtttggaatctcagtt

SEQ ID NO: 531861 - DNA, 120 bp, Artificial Sequence
  ENSG00000166352_0 (sequence is synthesized)
tctctctgggatgtgtagctttggaaatctgtctttgttgctctgggagaggggactcctggaatgtgtctgtgaataaagactagccgaagatactgtggcctcatgaataggaatgtc

SEQ ID NO: 531862 - DNA, 120 bp, Artificial Sequence
  ENSG00000166352_1 (sequence is synthesized)
tgcccatatgtcaggattggaaataatggatgaagatcaattaatcaaagacgtcttggataaattccttaattgtcatgagcaaacatatgatgaagaatttctgaacacttttactca

SEQ ID NO: 531863 - DNA, 120 bp, Artificial Sequence
  ENSG00000166352_2 (sequence is synthesized)
tctttcacaagaggatcatgtgtccaaaaggggagtgtttggaactgattcttcagaaaacatttttacctcagcaaaagttactcataaaaatgaagcagatgactaccatcttagaaa

SEQ ID NO: 531864 - DNA, 120 bp, Artificial Sequence
  ENSG00000166352_3 (sequence is synthesized)
catcacaatgtttggaagaacaggtagataatttcctagatttagaagatttggacatggatgaagagattaaaccccaaatgagtgaggatttgctgctgcttccaggagaagtggagc

SEQ ID NO: 531865 - DNA, 120 bp, Artificial Sequence
  ENSG00000166352_4 (sequence is synthesized)
aggatgtaagcaccagcattccttcctgtatcccttttgtggcccagcctcctacctgtgaagtgaagccaaagcccagtgttaaaagaatggacaaacagacggaagagatacttggag

SEQ ID NO: 531866 - DNA, 120 bp, Artificial Sequence
  ENSG00000166352_5 (sequence is synthesized)
atgaagttcaacttttttcacttgatgaagaatttgattatgacaatgtgatgctaacctccaagtttagtcctgcagagatagagaacatcaaagagctatgcaagcagcagaagagaa

SEQ ID NO: 531867 - DNA, 120 bp, Artificial Sequence
  ENSG00000166352_6 (sequence is synthesized)
aggacaccagcccagacttagagaaatcctgtgactgattcacagaggcattttgtgtgtgtgtgcttattttaattttgttcttattctagcaacattagaataaaagataaacctact

SEQ ID NO: 531868 - DNA, 120 bp, Artificial Sequence
  ENSG00000166352_7 (sequence is synthesized)
gaatccgttctctctgggatgtgtagctttggaaatctgtctttgttgctctgggagaggggactcctggaatgtgtctgtgaataaagactagccgaaggtgcgaagtgactagacggg

SEQ ID NO: 531869 - DNA, 120 bp, Artificial Sequence
  ENSG00000166352_8 (sequence is synthesized)
agcaaaggaggaaaactagggaatgggaggtgagagtggctgacaccgacccaacgtccgggttgccggaaggctgcagcgcccggagcggtgtcgggcaaaccgctaccctggtattgc

SEQ ID NO: 531870 - DNA, 120 bp, Artificial Sequence
  ENSG00000166352_9 (sequence is synthesized)
acggtgtcctgcctgtctggatgcttaggagcgcgactcaaaactacacccctgacgaccctggagaaagatactgtactgtgaaacattaaatcttgctgatccgtgctggccatgttt

SEQ ID NO: 531871 - DNA, 120 bp, Artificial Sequence
  ENSG00000166352_10 (sequence is synthesized)
aggaagcacaactgcttctgttggagtgcggttacctggagaccgcagtctgaagggactcccggcagagatgtcgttacggtgtcctgcctgtctggatgcttaggagcgcgactcaaa

SEQ ID NO: 531872 - DNA, 120 bp, Artificial Sequence
  ENSG00000166352_11 (sequence is synthesized)
catcccttcaaagaaatgctgcatgcttctgtatttttctaacatttgggaaaatataaaattcaagttgcttaattggtccctctcacagccatctatctcaaatgcatacatttcttt

SEQ ID NO: 531873 - DNA, 120 bp, Artificial Sequence
  ENSG00000166359_0 (sequence is synthesized)
ggcgccaccgttcccatccaggcttgtcggcggccaccggcggaccgggcttcgagatggcctccccgccgcggtgctccccgacagcccatgacagggaatgcaagttgccgccaccct

SEQ ID NO: 531874 - DNA, 120 bp, Artificial Sequence
  ENSG00000166359_1 (sequence is synthesized)
ccgcccccgccagcgagtattgtcccggcaagctgtcctgggggaccatggcgagggccttaggccgcttcaagctgtcgatcccgcacacgcacctgctggccaccctcgaccccctgg

SEQ ID NO: 531875 - DNA, 120 bp, Artificial Sequence
  ENSG00000166359_2 (sequence is synthesized)
ccttggacagggaaccaccaccgcatctgttgcctgagaagcaccaggtgccggagaaattgatctggggcgaccaggaccctctctccaagatcccatttaaaattctgagtgggcacg

SEQ ID NO: 531876 - DNA, 120 bp, Artificial Sequence
  ENSG00000166359_3 (sequence is synthesized)
agcacgctgtgagcacctgccacttctgtgtggatgacacaaagctcctcagtggctcctatgactgcactgtgaagctgtgggatccggtggacggttctgtggttcgcgattttgagc

SEQ ID NO: 531877 - DNA, 120 bp, Artificial Sequence
  ENSG00000166359_4 (sequence is synthesized)
acaggcccaaagctcctgttgtagagtgcagcatcaccggcgacagcagcagagtcattgccgcatcctatgataagacagtgagggcctgggacctggagacaggcaagctgctgtgga

SEQ ID NO: 531878 - DNA, 120 bp, Artificial Sequence
  ENSG00000166359_5 (sequence is synthesized)
aggtcaggtatgataccttcatcgtctcctgtaagttttctcctgatggtaaatacgtggtctcaggcttcgacgtggatcatggaatctgcataatggacgccgagaacatcaccaccg

SEQ ID NO: 531879 - DNA, 120 bp, Artificial Sequence
  ENSG00000166359_6 (sequence is synthesized)
tttccgtcatcaaagatcatcacacaaggtccatcacgtcatgctgctttgaccccgacagccagagggtggcttctgtctcattggacaggtgcatcaagatctgggatgttacatccc

SEQ ID NO: 531880 - DNA, 120 bp, Artificial Sequence
  ENSG00000166359_7 (sequence is synthesized)
taaggcacattccaatgcaatctcaaactgctgttttaccttcagtggccatttcctgtgtacaagctcctgggataaaaacttaaaaatatggaacgtccacacaggggagtttcgaaa

SEQ ID NO: 531881 - DNA, 120 bp, Artificial Sequence
  ENSG00000166359_8 (sequence is synthesized)
ctgtggagcctgtgtgactctgatgcagggccatgaaggttctgtcagttcctgtcactttgccagagacagctcttttctcatttctggagggtttgataggactgtggctatttggga

SEQ ID NO: 531882 - DNA, 120 bp, Artificial Sequence
  ENSG00000166359_9 (sequence is synthesized)
tgtagcagaaggctaccggaagctctctttgaagggccataatgactgggtgatggatgttgccattagcaacaacaagaaatggatcctgtctgcttccaaggataggaccatgagact

SEQ ID NO: 531883 - DNA, 120 bp, Artificial Sequence
  ENSG00000166359_10 (sequence is synthesized)
gtggaatattgaagaaattgatgaaattcctttggtaatcaagtacaaaaaggccgtgggcttaaagttgaaacagtgcgaaagatgtgacaggcctttctccatcttcaagagtgacac

SEQ ID NO: 531884 - DNA, 120 bp, Artificial Sequence
  ENSG00000166359_11 (sequence is synthesized)
ctcttctgaaatgttcacccaatgcgtgttctgccggatagatacaaggggcttgccagcagatacttcatcgtcatcatcatcatcggaaagggagaactcaccgccgccaaggggaag

SEQ ID NO: 531885 - DNA, 120 bp, Artificial Sequence
  ENSG00000166359_12 (sequence is synthesized)
caaggatgactgacagccacaggcccctttgagtgactccagcacaggctacctagcatgtaggtttcggggctttgcaggggctttctcttgggcccctcccaggctcagcaggcctgt

SEQ ID NO: 531886 - DNA, 120 bp, Artificial Sequence
  ENSG00000166359_13 (sequence is synthesized)
cagactggggcaggacccaagccctggctggactcagcacagtgccacctcctcagctctcagcttggggagtgaacactttccgttttcatgcagaataaatctaattcctttggaaaa

SEQ ID NO: 531887 - DNA, 120 bp, Artificial Sequence
  ENSG00000166359_14 (sequence is synthesized)
atgagcctgctgcatttgacttgctctgaatcaatcaacatgagaagcctgaggccaggcttccccgaggcctgccccagtgcgaaagatgtgacaggcctttctccatcttcaagagtg

SEQ ID NO: 531888 - DNA, 120 bp, Artificial Sequence
  ENSG00000166359_15 (sequence is synthesized)
gcagcatcaccggcgacagcagcagtcattgccgcatcctatgataagacagtgagggcctgggacctggagacaggcaagctgctgtggaaggtcaggtatgataccttcatcgtctcc

SEQ ID NO: 531889 - DNA, 120 bp, Artificial Sequence
  ENSG00000166363_0 (sequence is synthesized)
ggaccacagctggggatttatgcccatacttatggctataggaaactggacagaaataagtgaatttatcctcatgagcttctcttccctacctactgaaatacagtcattgctcttcct

SEQ ID NO: 531890 - DNA, 120 bp, Artificial Sequence
  ENSG00000166363_1 (sequence is synthesized)
gacatttctaactatctatttggttactctgaagggaaacagcctcatcattctggttaccctagctgaccccatgctacacagccccatgtacttcttcctcagaaacttatctttcct

SEQ ID NO: 531891 - DNA, 120 bp, Artificial Sequence
  ENSG00000166363_2 (sequence is synthesized)
ggagattggcttcaacctagtcattgtgcccaaaatgctggggaccctgcttgcccaggacacaaccatctccttccttggctgtgccactcagatgtatttcttcttcttctttggggt

SEQ ID NO: 531892 - DNA, 120 bp, Artificial Sequence
  ENSG00000166363_3 (sequence is synthesized)
agctgaatgcttcctcctggctaccatggcatatgaccgctatgtggccatctgcagtcccttgcactacccagtcatcatgaaccaaaggacacgggccaaactggctgctgcttcctg

SEQ ID NO: 531893 - DNA, 120 bp, Artificial Sequence
  ENSG00000166363_4 (sequence is synthesized)
agcccgcctgtgctgaagctggtctgtgcagacacagcactgtttgagatctacgccatcgtcggaaccattctggtggtcatgatcccctgcttgctgatcttgtgttcctatactcgc

SEQ ID NO: 531894 - DNA, 120 bp, Artificial Sequence
  ENSG00000166363_5 (sequence is synthesized)
attgctgctgctatcctcaagatcccatcagctaaagggaagcataaagccttctctacgtgctcctcacacctccttgttgtctctcttttctatatatcttctagcctcacctacttc

SEQ ID NO: 531895 - DNA, 120 bp, Artificial Sequence
  ENSG00000166363_6 (sequence is synthesized)
tggcctaaatcaaataattctcctgagagcaagaagttgttatcattatcctacactgttgtgactcccatgttgaaccccattatctacagcttgagaaatagcgaggtgaagaatgcc

SEQ ID NO: 531896 - DNA, 120 bp, Artificial Sequence
  ENSG00000166363_7 (sequence is synthesized)
ctcagcaggaccttccacaaggtcctagccctcagaaactgtatcccatagaccttaggaagtaaggctaaattctattgaatgacaattagtttcatgtttgggacacctctctgcctc

SEQ ID NO: 531897 - DNA, 120 bp, Artificial Sequence
  ENSG00000166368_0 (sequence is synthesized)
ggcagttcctaagcctgcacttctgaattatataattttataggtatgcctgtctatggttagcacatagtgacttcttactgaaaaggacaacaaactatgagacagataaatcagaca

SEQ ID NO: 531898 - DNA, 120 bp, Artificial Sequence
  ENSG00000166368_1 (sequence is synthesized)
caagtgacagaattcctccttctgggactctctgatgggccacacaccgagcagctgctatttatcgtattattgggtgtctacctggtcactgtgcttggaaatctgcttctaatctcc

SEQ ID NO: 531899 - DNA, 120 bp, Artificial Sequence
  ENSG00000166368_2 (sequence is synthesized)
cttgttcatgttgactcccaacttcacacacccatgtatttttttctctgcaacttgtctctggctgacctctgtttctctaccaacatagttcctcaggcactagtccacctgctttcc

SEQ ID NO: 531900 - DNA, 120 bp, Artificial Sequence
  ENSG00000166368_3 (sequence is synthesized)
agaaagaaggtcattgcattcacactttgcgcagctcgacttctctttttcctcatttttgggtgtacccagtgcgcccttcttgcagtgatgtcctatgatcgctatgttgcaatctgc

SEQ ID NO: 531901 - DNA, 120 bp, Artificial Sequence
  ENSG00000166368_4 (sequence is synthesized)
tggaaagtgtgtgtccagctggcaacaggatcatggaccagtggcattctggtgtctgtggtagacaccaccttcatactgaggctaccctaccgaggcagtaacagcattgctcatttc

SEQ ID NO: 531902 - DNA, 120 bp, Artificial Sequence
  ENSG00000166368_5 (sequence is synthesized)
ttttgtgaggcccctgcactattgatcttagcatccacagacacccatgcatcagagatggccatttttcttatgggggttgtgattctcctcatacctgtttttctgattctggtatcc

SEQ ID NO: 531903 - DNA, 120 bp, Artificial Sequence
  ENSG00000166368_6 (sequence is synthesized)
tatggccgtatcatagtaactgtggtcaagatgaagtcaactgtggggagtctcaaggcattttctacctgtggctcccacctcatggtggtcatacttttttatggatcagcaattatc

SEQ ID NO: 531904 - DNA, 120 bp, Artificial Sequence
  ENSG00000166368_7 (sequence is synthesized)
acttacatgacacccaagtcttccaaacagcaggaaaaatcggtgtctgttttctatgcaatagtgactcccatgcttaatcccctcatctatagcctgagaaacaaggatgtgaaggca

SEQ ID NO: 531905 - DNA, 120 bp, Artificial Sequence
  ENSG00000166368_8 (sequence is synthesized)
gctctgaggaaagtagccacaaggaatttcccatgaaggcttggaatctcacactgacagtgagctcagagaaccttttggcttcctacttcaaagacttgctgggaagacatggaatca

SEQ ID NO: 531906 - DNA, 120 bp, Artificial Sequence
  ENSG00000166377_0 (sequence is synthesized)
aaaggggcggtcggaacatggcggaccagatcccgctttacccggtgcgtagcgcagcggcggccgcagccaaccgcaaacgcgcggcctactacagcgccgcggggcccaggccgggag

SEQ ID NO: 531907 - DNA, 120 bp, Artificial Sequence
  ENSG00000166377_1 (sequence is synthesized)
ccgaccggcacagcaggtaccagctggaggatgagtctgcgcatttggatgaaatgccactaatgatgtctgaagaaggctttgagaatgaggaaagtgattaccacaccttaccacgag

SEQ ID NO: 531908 - DNA, 120 bp, Artificial Sequence
  ENSG00000166377_2 (sequence is synthesized)
ccaggataatgcaaaggaaaagaggactggagtggtttgtctgtgatggctggaagttcctctgtaccagttgctgtggttggctgataaatatttgtcgaagaaagaaagagctgaaag

SEQ ID NO: 531909 - DNA, 120 bp, Artificial Sequence
  ENSG00000166377_3 (sequence is synthesized)
ctcgcacagtatggcttggatgtcctgaaaagtgtgaagaaaaacatcccaggaattctataaaaaatcaaaaatacaatgtgtttacctttatacctggggttttgtatgaacaattca

SEQ ID NO: 531910 - DNA, 120 bp, Artificial Sequence
  ENSG00000166377_4 (sequence is synthesized)
agtttttcttgaatctctattttctagtaatatcctgctcacagtttgtaccagcattgaaaataggctatctctacacctactgggctcctctgggatttgtcttggctgttactatga

SEQ ID NO: 531911 - DNA, 120 bp, Artificial Sequence
  ENSG00000166377_5 (sequence is synthesized)
cacgggaagcaattgatgaatttcggcgttttcagcgtgacaaggaagtgaattcacaactatatagcaagcttacagtaagaggtaaagtgcaagttaagagttcagacatacaagttg

SEQ ID NO: 531912 - DNA, 120 bp, Artificial Sequence
  ENSG00000166377_6 (sequence is synthesized)
gagacctcatcatagtggaaaagaatcaaagaattccatcggacatggtgtttcttaggacttcagaaaaagcaggttcgtgttttattcgaactgatcaactagatggtgaaactgact

SEQ ID NO: 531913 - DNA, 120 bp, Artificial Sequence
  ENSG00000166377_7 (sequence is synthesized)
ggaagctgaaggtggcagtgagctgcacgcaacagctgccggctctgggggaccttttttctatcagtgcttatgtttatgctcagaaaccacaaatggacattcacagtttcgaaggca

SEQ ID NO: 531914 - DNA, 120 bp, Artificial Sequence
  ENSG00000166377_8 (sequence is synthesized)
catttaccagggaagacagtgacccgcccattcatgaaagtctcagcatagaaaatacattgtgggcaagcaccattgttgcatcaggtactgtaataggtgttgtcatttataccggaa

SEQ ID NO: 531915 - DNA, 120 bp, Artificial Sequence
  ENSG00000166377_9 (sequence is synthesized)
aagagactcgaagtgtaatgaacacatccaatccaaaaaataaggttggtttgttggaccttgaactcaatcggctgacgaaagcgctatttttggctttagttgctctttccattgtta

SEQ ID NO: 531916 - DNA, 120 bp, Artificial Sequence
  ENSG00000166377_10 (sequence is synthesized)
tggtaaccttacaaggatttgtgggtccatggtaccgcaatctttttcggttccttctcctcttttcttacatcattcccataagtttgcgtgtgaacttggacatgggcaaagcggtgt

SEQ ID NO: 531917 - DNA, 120 bp, Artificial Sequence
  ENSG00000166377_11 (sequence is synthesized)
atggatggatgatgatgaaagatgagaacatccctggcacggtcgttcggaccagcactatcccagaggaacttgggcgcctggtgtatttattgacagacaaaacaggaaccctcaccc

SEQ ID NO: 531918 - DNA, 120 bp, Artificial Sequence
  ENSG00000166377_12 (sequence is synthesized)
agaatgaaatgatatttaagcggctgcacctgggcaccgtgtcctatggcgccgacacgatggatgagatccagagccatgtcagggactcctactcacagatgcagtctcaagctggtg

SEQ ID NO: 531919 - DNA, 120 bp, Artificial Sequence
  ENSG00000166377_13 (sequence is synthesized)
gaaacaatactggttcaactccactaagaaaagcccaatcttcagctcccaaagttaggaaaagtgtcagtagtcgaatccatgaagccgtgaaagccatcgtgctgtgtcacaacgtga

SEQ ID NO: 531920 - DNA, 120 bp, Artificial Sequence
  ENSG00000166377_14 (sequence is synthesized)
cccccgtgtatgagtctcgggccggcgttactgaggagactgagttcgcagaggctgaccaagacttcagtgatgagaatcgcacctaccaggcttccagcccggatgaggtcgctctgg

SEQ ID NO: 531921 - DNA, 120 bp, Artificial Sequence
  ENSG00000166377_15 (sequence is synthesized)
tgcagtggacagagagtgtgggcctcacgctggtcagcagggacctcacctccatgcagctgaagacccccagtggccaggtcctcagcttctgcattctgcagctgtttcccttcacct

SEQ ID NO: 531922 - DNA, 120 bp, Artificial Sequence
  ENSG00000166377_16 (sequence is synthesized)
ccgagagcaagcggatgggcgtcatcgtcagggatgaatccacggcagaaatcacattctacatgaagggcgctgacgtggccatgtctcctatcgtgcagtataatgactggctggaag

SEQ ID NO: 531923 - DNA, 120 bp, Artificial Sequence
  ENSG00000166377_17 (sequence is synthesized)
aggagtgcggaaacatggctcgcgaaggactgcggaccctcgtggttgcaaagaaggcgttgacagaggagcagtaccaggactttgagagccgatacactcaagccaagctgagcatgc

SEQ ID NO: 531924 - DNA, 120 bp, Artificial Sequence
  ENSG00000166377_18 (sequence is synthesized)
gagagggagatggaactgctgtgcctcaccggcgtggaggaccagctgcaggcagacgtgcggcccacgctggagatgctgcgcaacgccgggatcaagatatggatgctaacaggcgat

SEQ ID NO: 531925 - DNA, 120 bp, Artificial Sequence
  ENSG00000166377_19 (sequence is synthesized)
aaactcgagacagctacctgcattgccaaaagttcacatctcgtgtctagaacacaagatattcatattttcagacaggtaaccagtcggggagaggcacatttggagctgaatgcattt

SEQ ID NO: 531926 - DNA, 120 bp, Artificial Sequence
  ENSG00000166377_20 (sequence is synthesized)
cgaaggaagcatgattgtgcactagtcatatctggggactctctggaggtttgtctaaagtactacgagcatgaatttgtggagctggcctgccagtgccctgccgtggtttgctgccgc

SEQ ID NO: 531927 - DNA, 120 bp, Artificial Sequence
  ENSG00000166377_21 (sequence is synthesized)
tgctcacccacccagaaggcccgcattgtgacactgctgcagcagcacacagggagacgcacctgcgccatcggtgatggaggaaatgatgtcagcatgattcaggcagcagactgtggg

SEQ ID NO: 531928 - DNA, 120 bp, Artificial Sequence
  ENSG00000166377_22 (sequence is synthesized)
attgggattgagggaaaggagggtaaacaggcctcgctggcggccgacttctccatcacgcagttccggcacataggcaggctgctcatggtgcacgggcggaacagctacaagaggtcg

SEQ ID NO: 531929 - DNA, 120 bp, Artificial Sequence
  ENSG00000166377_23 (sequence is synthesized)
gcggcactcggccagttcgtcatgcacaggggccttatcatctccaccatgcaggctgtgttttcctcagtcttctacttcgcatccgtccctttgtatcagggcttcctcatggtgggg

SEQ ID NO: 531930 - DNA, 120 bp, Artificial Sequence
  ENSG00000166377_24 (sequence is synthesized)
tatgccaccatatacaccatgttcccagtgttctccttagtgctggaccaggacgtgaagccagagatggcgatgctctacccggagctgtacaaggacctcaccaagggaagatccttg

SEQ ID NO: 531931 - DNA, 120 bp, Artificial Sequence
  ENSG00000166377_25 (sequence is synthesized)
tccttcaaaaccttcctcatctgggttttaataagtatttaccaaggcggcatcctcatgtatggggccctggtgctcttcgagtctgagttcgtccacgtggtggccatctccttcacc

SEQ ID NO: 531932 - DNA, 120 bp, Artificial Sequence
  ENSG00000166377_26 (sequence is synthesized)
gcactgatcctgaccgagctgctgatggtggcgctgaccgtccgcacgtggcactggctgatggtggtggccgagttcctcagcttaggctgctacgtgtcctcactcgcttttctcaat

SEQ ID NO: 531933 - DNA, 120 bp, Artificial Sequence
  ENSG00000166377_27 (sequence is synthesized)
gaatattttggtataggcagagtgtcttttggagctttcttagatgttgcctttatcaccaccgtgaccttcctgtggaaagtgtcggcgatcaccgtggtcagctgcctcccgctgtat

SEQ ID NO: 531934 - DNA, 120 bp, Artificial Sequence
  ENSG00000166377_28 (sequence is synthesized)
gtcctcaagtacctgaggcgcaagctctctcctcccagctactgcaagctggcctcctaaggggctgtgcacccccagcgggctggccccagcaccttctgcccttcccagcaccttgtg

SEQ ID NO: 531935 - DNA, 120 bp, Artificial Sequence
  ENSG00000166377_29 (sequence is synthesized)
cccttgccagtgaacgcagggtttgccattgctaccaagcaagcaccacaagaaagggagggtacgccaggcgagcccagggcacagatgctgagacagcctctccttctcagtgcaggg

SEQ ID NO: 531936 - DNA, 120 bp, Artificial Sequence
  ENSG00000166377_30 (sequence is synthesized)
acgtcacccctgccaggcaagcccagggcacagatgccaggatggcttctccctctcagtgcgaggcttcacccctgccaggcaagcccagggcatagatgctgagacagcctctccctc

SEQ ID NO: 531937 - DNA, 120 bp, Artificial Sequence
  ENSG00000166377_31 (sequence is synthesized)
tcagtgcagggacgtcacccctgccaggcaagcccagggcacagaggccgggacggcctctccctctcagtgtgaggcttcacccatgctaggcaagcccagggcacagatgccgggatg

SEQ ID NO: 531938 - DNA, 120 bp, Artificial Sequence
  ENSG00000166377_32 (sequence is synthesized)
gcccctccctctcagtgcgggaacgtcacccctgccaggcaagcccagggcacagatgctgcgatggcctcttcctcttaagtgtggggcctcacccctgcttttctttctttttttgta

SEQ ID NO: 531939 - DNA, 120 bp, Artificial Sequence
  ENSG00000166377_33 (sequence is synthesized)
ttgtcaaaattgtatttccatattgaagcagcttgagtttctactgaaaatgagcccgaattatttcactattactgtaaagggttcatcttactctggcattctgagaattagactgaa

SEQ ID NO: 531940 - DNA, 120 bp, Artificial Sequence
  ENSG00000166377_34 (sequence is synthesized)
agtttaatttctgcagttccctcatattcagattctttctttgatgttataacacaaagtcattcctactcaaatgtaataaaattgaggctccacggaggcccgtgtccacatcagctg

SEQ ID NO: 531941 - DNA, 120 bp, Artificial Sequence
  ENSG00000166377_35 (sequence is synthesized)
cagctcccactcagacagacggcctgccccacagcctgccctttgctgaagataccctcgctttatacttgcatttcgcttttcagtaaaaacagtcaagttactgagttctcacataaa

SEQ ID NO: 531942 - DNA, 120 bp, Artificial Sequence
  ENSG00000166377_36 (sequence is synthesized)
gctggaccaggacgtgaagccagagatggcgatgctctacccggagctgtacaaggacctcaccaagttcgccaaggtagcacagactgcagcactctgcgttgttgtctgatgatcggg

SEQ ID NO: 531943 - DNA, 120 bp, Artificial Sequence
  ENSG00000166377_37 (sequence is synthesized)
gcagctggagactggatgtgccaacgcagtttatccacaccggtcagtgtcagtggacaccaagtccccagtccgtcggctcaagctcctgcgatgtaggacaacatagccctgctctca

SEQ ID NO: 531944 - DNA, 120 bp, Artificial Sequence
  ENSG00000166377_38 (sequence is synthesized)
tatagaggagcagtttatcgtagctttaatgtatgttttagctgtatgtggaaaactgcccaacctattccagcatgtagcctctgacgtagcctgggccttgcacatgcaaatgtgcgg

SEQ ID NO: 531945 - DNA, 120 bp, Artificial Sequence
  ENSG00000166377_39 (sequence is synthesized)
aacacatgaatttggaggggacaaaaacatttcaaccgtagcaccatttgtctcctttgctgctattggagggagagtcccaatttctcattagtttatgcagcttgctgcttagtaatg

SEQ ID NO: 531946 - DNA, 120 bp, Artificial Sequence
  ENSG00000166377_40 (sequence is synthesized)
acttatcaatgacagttgaaacttgtagttgtatttgatgaaggaaatatgcacatttctttatagcacttagttttttgctttgtttttctactttattaacatgcaggcaaagtggga

SEQ ID NO: 531947 - DNA, 120 bp, Artificial Sequence
  ENSG00000166377_41 (sequence is synthesized)
gtgtttatttttaaagaagctttgagcattagacatgttttaaatctatttcttcgtttaatatcagttgtcttctaagaagtgtttctcatcaaaatggaaacaataaggcttagatat

SEQ ID NO: 531948 - DNA, 120 bp, Artificial Sequence
  ENSG00000166377_42 (sequence is synthesized)
atggctcagtctgcaggaagacagtgacccgcccattcatgaaagtctcagcatagaaaatacattgtgggcaagcaccattgttgcatcagttctcttgatgaccttggcaagtgggcc

SEQ ID NO: 531949 - DNA, 120 bp, Artificial Sequence
  ENSG00000166377_43 (sequence is synthesized)
cgactagttggacactaatgaggcatcgtaacatgccggccccatcctgtccattctgttctctttgccatctagcattcagtgttgtgtcttcctagtgggcatgaagacggctttaaa

SEQ ID NO: 531950 - DNA, 120 bp, Artificial Sequence
  ENSG00000166377_44 (sequence is synthesized)
gatgcataaagaagggtgctagacccacgcctctcctccagcccttcctgccatccctgcagcctccagtccaacgtcaaatacaatcaactggatgaattaaaaagaaattgcaaataa

SEQ ID NO: 531951 - DNA, 120 bp, Artificial Sequence
  ENSG00000166377_45 (sequence is synthesized)
tcagtaagacagcacttgttgaatcaccattatagtttctgacaaattgttctcaaaaaggtaccagctggaggatgagtctgcgcatttggatgaaatgccactaatgatgtctgaaga

SEQ ID NO: 531952 - DNA, 120 bp, Artificial Sequence
  ENSG00000166377_46 (sequence is synthesized)
gcaggtgtgacaagggctggggcgtattggactagaaaggtatcagtggcttgaccggaggaagccattgaaggatctttagcttagaagagaaatgataaatacagatgttttaaaaag

SEQ ID NO: 531953 - DNA, 120 bp, Artificial Sequence
  ENSG00000166377_47 (sequence is synthesized)
tcagtgtgtgcaggcaaagtcatattttttctgaaataagatggttaactgcttaatgttgcattatcaagattattttatatcatcacagaattgtattcaaacctgttcataatactg

SEQ ID NO: 531954 - DNA, 120 bp, Artificial Sequence
  ENSG00000166377_48 (sequence is synthesized)
tgcttcagttttcagaacttcctcctacagggataatcatccctcaatatccatgagagggtagttccaggaccccaccaaggataccaaaatccacagatgctgaaatttcttatataa

SEQ ID NO: 531955 - DNA, 120 bp, Artificial Sequence
  ENSG00000166377_49 (sequence is synthesized)
ttccttctcctcttttcttacatcattcccataaggtaagtttaaaaatgaaaataaaacaaatgtctggtttcattgagtatgattttattgaatttatctttctcagtatgaaagaaa

SEQ ID NO: 531956 - DNA, 120 bp, Artificial Sequence
  ENSG00000166377_50 (sequence is synthesized)
ttacccaaacaaagctagagaagtaggagccagaagttctgaggaatcttgaggaattcttctgtggaaatgttgttgggggagacgtcatcagtgccggtagaatgatctagaggtgcc

SEQ ID NO: 531957 - DNA, 120 bp, Artificial Sequence
  ENSG00000166377_51 (sequence is synthesized)
caaaattagttttgttttttgctgatagacttttaaatgtccagtgccctttgatctgtgtggaatcactggcattttaaagttctgtttaatatatctaatatctgtcaagttagataa

SEQ ID NO: 531958 - DNA, 120 bp, Artificial Sequence
  ENSG00000166377_52 (sequence is synthesized)
aatattaaggctgtgttttagtagggactatcatttcagaatgttaacctatattataactacagattggaatataaatagttcatattagatgcctatttaatgtaaagactaatattt

SEQ ID NO: 531959 - DNA, 120 bp, Artificial Sequence
  ENSG00000166377_53 (sequence is synthesized)
taaaatattttaagaaagatattcttaatatatatgatttaaaattttcataggaatgagcaactgaaacctaatgatggataaagtatgaatctagaatatctaccttttgtaacagag

SEQ ID NO: 531960 - DNA, 120 bp, Artificial Sequence
  ENSG00000166377_54 (sequence is synthesized)
agtatgaatctagaatatctaccttttgtaacagagaatggactaaaacggtatagaatgcttaggctcaaggatgtagccactttgaagagaaagatatctctatttctaaaccagctt

SEQ ID NO: 531961 - DNA, 120 bp, Artificial Sequence
  ENSG00000166377_55 (sequence is synthesized)
tctccaaaatttgctctaaaaggtgatgtctcttccatttacttacgtcataaagtcagagctataatctgttcttgggatgtgtacacactgcactgccctcacaggcagtcaccagga

SEQ ID NO: 531962 - DNA, 120 bp, Artificial Sequence
  ENSG00000166377_56 (sequence is synthesized)
atgaatccagttgctctcacccagtctgttcgagaggtaggaaatcagcctcctttctgcccgtcacagtacagattcctgtggatgctgccttccatggtgttgctggttcacgggtgg

SEQ ID NO: 531963 - DNA, 120 bp, Artificial Sequence
  ENSG00000166377_57 (sequence is synthesized)
ccaggcctgtgcagagagcacgcagcaaatagcaacttctcattgcggctgtgtaacttgctgctgacatagattttctgcactccataaagctgactgcagagatggctgttccagcct

SEQ ID NO: 531964 - DNA, 120 bp, Artificial Sequence
  ENSG00000166377_58 (sequence is synthesized)
ggcttgtggattaaacctaataaggcccagcttccccgctctcctctcccaccacactgcagctatccccatgtgccagctgcttcccaccctagctgtgtcctctgcttcagtgctcct

SEQ ID NO: 531965 - DNA, 120 bp, Artificial Sequence
  ENSG00000166377_59 (sequence is synthesized)
ctacctcatcattccatggctgggcttgtcttgtcactcggctcttaccctaaatacctttcctcagagaggctgcgtttgtctgctcagtacagaccaagaaacagccagccacttgct

SEQ ID NO: 531966 - DNA, 120 bp, Artificial Sequence
  ENSG00000166377_60 (sequence is synthesized)
atcatagcagcctattgaattctgtgtagatctctatgacattcatcttgtttgttgcctgtttctctcttctcactaagccctgtgagaatagaggccttgtatgtcccgtttgttgtt

SEQ ID NO: 531967 - DNA, 120 bp, Artificial Sequence
  ENSG00000166377_61 (sequence is synthesized)
gtgtcctagttaggacctagaacggagcacgcttgggatgtggtagggcctctgtaagtatttgttgaatggacccattacaaaggccccatcctgctcagaggacccgagcgcagattg

SEQ ID NO: 531968 - DNA, 120 bp, Artificial Sequence
  ENSG00000166377_62 (sequence is synthesized)
tcacagttcttgtgccggcatgtattgagtgccacaggtggactctggagacacaatctttgtcctcaaaataccccccgcccactggctaagtggcaataaacaaactataaccagaaa

SEQ ID NO: 531969 - DNA, 120 bp, Artificial Sequence
  ENSG00000166377_63 (sequence is synthesized)
tccttactgaagaactgttacgttctgtatcttttgatctgaaaaaaccaaacagtaaatatagaagtatttgttgacaagaaataagggaaaatgtttttattgccaagagcctttccc

SEQ ID NO: 531970 - DNA, 120 bp, Artificial Sequence
  ENSG00000166377_64 (sequence is synthesized)
cctggttcactgaaatgtttgcttgtatacatcactcctggcttagtagagccaacaagacggcaggtcaaacagaagacaacatgaacgtctaacctcaggcaccagtggacacgtgtg

SEQ ID NO: 531971 - DNA, 120 bp, Artificial Sequence
  ENSG00000166377_65 (sequence is synthesized)
ggacccaggcagcttcttcaggattcgggtgtcaggaaaaggcgcccgaaatgctggtagaccaggtggctggggtggcatggatggggcttatggacctgggtctttcagaagtgaccc

SEQ ID NO: 531972 - DNA, 120 bp, Artificial Sequence
  ENSG00000166377_66 (sequence is synthesized)
attttcttattgttgcttctgaatacattgtgttaagttgtggatcatggtaaaacccatatcagaaagtgcctgctcttactgtccctgcaccacggatgaaggcgctgagccccgtcg

SEQ ID NO: 531973 - DNA, 120 bp, Artificial Sequence
  ENSG00000166377_67 (sequence is synthesized)
acgattctctgtccttgaagatgttttttatgtctcctaattgttgttggcattttctctttgagttaaacttcaaaaggggaaaaacatctcagggaaaaaaatttctcaaatgtttgc

SEQ ID NO: 531974 - DNA, 120 bp, Artificial Sequence
  ENSG00000166377_68 (sequence is synthesized)
aataaagctctaatatcatacatacaattagaattgtaaaagatattctaaccatttgtggaacttttgtgaagtgagctcaccaaatgtcagagaagatctcactgtgtaatttctgta

SEQ ID NO: 531975 - DNA, 120 bp, Artificial Sequence
  ENSG00000166377_69 (sequence is synthesized)
gaaaggctcccccggacagcgtcactgcacctgctgcagaaatagcattccaaagctggggaacccatgggctgcatgtttcctgtgtatttccaagtttgtcagtagttgtggatttca

SEQ ID NO: 531976 - DNA, 120 bp, Artificial Sequence
  ENSG00000166377_70 (sequence is synthesized)
gaattatccctgaaaagtgataacatgtgtctgtccctagggtccatagactatttttgcagtgatgtcaccaagaaaaaaatccaccccagaaaacttcagtcacctgaaactctgaga

SEQ ID NO: 531977 - DNA, 120 bp, Artificial Sequence
  ENSG00000166377_71 (sequence is synthesized)
aagatggatttatttggcttaaaactgtgctctgttaggattaaaggaggctttgaatttatcatattctttacgacagcatattttatagcatagaacgtgtaaggatacggggtagaa

SEQ ID NO: 531978 - DNA, 120 bp, Artificial Sequence
  ENSG00000166377_72 (sequence is synthesized)
gagaggctcagctctgcagacacaaatcatggtaactctggtattttccacaaagctagctgttttgaatcaacattgaaaacaaaatccactaaccgcaattaaatttagatttacaat

SEQ ID NO: 531979 - DNA, 120 bp, Artificial Sequence
  ENSG00000166377_73 (sequence is synthesized)
cgataaatgacaggtgtctgaaattatcaactcagatttttaaagcagtagctgtatggtaaagaaagaattagattaggcattaaaaaagaaagctaatgactacctagcaaacagatt

SEQ ID NO: 531980 - DNA, 120 bp, Artificial Sequence
  ENSG00000166377_74 (sequence is synthesized)
ctagtccagctaaccactaattaaccaactagattcttacctagctaaccacaaactgagaaactagactcctgtctgtctaactagtaactaacaaacgatactctatctaatacagct

SEQ ID NO: 531981 - DNA, 120 bp, Artificial Sequence
  ENSG00000166377_75 (sequence is synthesized)
ccactgacaaactagactctagtccagctataaccactcattagccagagaggtgctgggtaagtcatgttaactttttgatttcttgatgttattgaaatgaaataaagactttaaagt

SEQ ID NO: 531982 - DNA, 120 bp, Artificial Sequence
  ENSG00000166377_76 (sequence is synthesized)
ttcttgaaaaaaataaagaattctcattagtgttataatcaagacaaataaagctagttcaccagtatcacatgaaatataaataccaagcgttattatcatggtggcatcatcgtgact

SEQ ID NO: 531983 - DNA, 120 bp, Artificial Sequence
  ENSG00000166377_77 (sequence is synthesized)
actgggaagcatcgtcccaggtcacacctactataactagaagcaagaccgcttaagtatcttaaactgatgaaaccattgtgataaagtacagcagagtaaggagcaaagatccaaaaa

SEQ ID NO: 531984 - DNA, 120 bp, Artificial Sequence
  ENSG00000166377_78 (sequence is synthesized)
cttcgggaagctagtgtgaataatgatcattttagtagcatatgcatttcctcattcccagagactctaaaaatgtttacctaaatgctgccttacaaacatacgggaacaagcttttca

SEQ ID NO: 531985 - DNA, 120 bp, Artificial Sequence
  ENSG00000166377_79 (sequence is synthesized)
tgtacgaaggtaaacctcgatgcgctaccctcaaccctaggaaaccggcacgcaagcagggcagaggtcaccaggggtcttgtagccccagccggtgctcccggatcgctgtgctgggag

SEQ ID NO: 531986 - DNA, 120 bp, Artificial Sequence
  ENSG00000166377_80 (sequence is synthesized)
aaacttgtcataggactgtcatgccacagccatcttgaccggctattggagtggggcagtaacacgtttttactgttttcaaggatttagattgtacgcaccagtctctttctttgtgga

SEQ ID NO: 531987 - DNA, 120 bp, Artificial Sequence
  ENSG00000166377_81 (sequence is synthesized)
tatctaaatggctctagtaacaagaggttcatagggccacaggtgtctgacggagcagctaattatccgtaactgtggccatggaatccgtaagttctgtgttactggtgccgttgaacc

SEQ ID NO: 531988 - DNA, 120 bp, Artificial Sequence
  ENSG00000166377_82 (sequence is synthesized)
ctgttcacttctgattgtgttggatctcattaagggtattaaatttccgttttcgttaaggtgagcaacaatttagaatgttttagtatcctaaagtcaggtcaccatccctacattttt

SEQ ID NO: 531989 - DNA, 120 bp, Artificial Sequence
  ENSG00000166377_83 (sequence is synthesized)
ttttttttttggtcaagaatgcagtcactcattttctctaagcttcttttcttcaacatcttatctgcattgtaacttttttttaaatctactacacttcaaattctttgaaaagaaaat

SEQ ID NO: 531990 - DNA, 120 bp, Artificial Sequence
  ENSG00000166377_84 (sequence is synthesized)
agcactaaagtactgagccactaaagttaatttagttattttttcttattgaagctaaagaactattttgaagctttctgttccttctgaacagttcgccaaggtagcacagactgcagc

SEQ ID NO: 531991 - DNA, 120 bp, Artificial Sequence
  ENSG00000166377_85 (sequence is synthesized)
agcataaagggccgcggactgaaatgtgagtggctgaccggcgagtgccggtccagtcagttctgagtcacatatctcaggtcaccgtaaatttataaaataccttcagaggcgagccag

SEQ ID NO: 531992 - DNA, 120 bp, Artificial Sequence
  ENSG00000166377_86 (sequence is synthesized)
ggaggcaaggcatgcattccctgcacacaggagaagactcaattggaaagaaaatctcctcttttttatgtgtatttgataaccagtctttataatctaaaagtacaaataaggcacgca

SEQ ID NO: 531993 - DNA, 120 bp, Artificial Sequence
  ENSG00000166377_87 (sequence is synthesized)
ttataaatctcacttattgtcctaatgagttagccaacctcaagtataaacatttgtcccctgctgtgtctcgatggcctgagccacacatcgacacagtatctgttaagtaagtatttg

SEQ ID NO: 531994 - DNA, 120 bp, Artificial Sequence
  ENSG00000166377_88 (sequence is synthesized)
ataaacaaatgaggcagtgaatgaatcagttaaacaaagagtcaggatttccttcgctttcctaaaactgtgtagcttttattctttacagaaaatggtatatttgcaacactattttgt

SEQ ID NO: 531995 - DNA, 120 bp, Artificial Sequence
  ENSG00000166377_89 (sequence is synthesized)
tattcttttgaagctcaaattctgctttgaattattaaactttactcacgatgagttcaggcacttaattttctggatgccagtaagacgggaaactgacctactcatctctctcctaac

SEQ ID NO: 531996 - DNA, 120 bp, Artificial Sequence
  ENSG00000166377_90 (sequence is synthesized)
tctgcacatgtcttcattcattctgaatggtgtgtaaccgcttagggaagctagttactccaagatccaggcatcaggactagtaaggtgaccctggttaagtgagccagctcacgtggt

SEQ ID NO: 531997 - DNA, 120 bp, Artificial Sequence
  ENSG00000166377_91 (sequence is synthesized)
cccaaaatatctcagactgtggctgtgaattttgttaccaattcataatcttacattaccagctaactccagagacatttgatttgtagttgtgctaattgtaaagatatcaagtaggta

SEQ ID NO: 531998 - DNA, 120 bp, Artificial Sequence
  ENSG00000166377_92 (sequence is synthesized)
atatacagttcttcatgaaatctctggtgccattaggtattgaaccattcggaccccttcactaatttttattttctgtagaatactctcaaatggttttatcttttgaaatgtatattt

SEQ ID NO: 531999 - DNA, 120 bp, Artificial Sequence
  ENSG00000166377_93 (sequence is synthesized)
gtatacttatattcttttcaaaataatagtgaataagacaataaaaggaaatttaaaacattgagattaggaaggaggaaataaaaatatctctgtttgtggatgctataattttctatg

SEQ ID NO: 532000 - DNA, 120 bp, Artificial Sequence
  ENSG00000166377_94 (sequence is synthesized)
tagaaaattccaaggaatccacacacatacaacctcctatacttgtaaacttcataaagtttcaggatacaaggaataatttttcaaaatcatttttgattctgtacactagcaatgaat

SEQ ID NO: 532001 - DNA, 120 bp, Artificial Sequence
  ENSG00000166377_95 (sequence is synthesized)
aattggggtttgaaaaaatttgtaaacatttataataatacatttaagcatttataatacaagaaagtgagacactgaagtgtacctctaacaaaatacacccaagatctgtgtgctgga

SEQ ID NO: 532002 - DNA, 120 bp, Artificial Sequence
  ENSG00000166377_96 (sequence is synthesized)
aaccaacaacattgaggaaagaaactgtaaaaggcgtaaacagatgttcctggattgagagacgtaaacagatgttcctggaatgggaggcataaacagatgttcctggatcaagaggca

SEQ ID NO: 532003 - DNA, 120 bp, Artificial Sequence
  ENSG00000166377_97 (sequence is synthesized)
taaacagatgttcctggattgagagacgtaaacagatgttcatggattgagaggcataaacagatgttcatggattgagaggcgtaaactgatgttcctggattgagaggcgtaaaccca

SEQ ID NO: 532004 - DNA, 120 bp, Artificial Sequence
  ENSG00000166377_98 (sequence is synthesized)
tattcctggattgagaggcgtaagcagatgttcatggtttgagagacgtaaactgatgttcctggattgagagacataaacagatgttcctggattcggaggcataaacagatgttcatg

SEQ ID NO: 532005 - DNA, 120 bp, Artificial Sequence
  ENSG00000166377_99 (sequence is synthesized)
gattgagaggcataaacccatattcctggattgagaggcgtaagcagatgttcatggtttgagagacgtaaacagatattcctggattgggaggcgtaaacagatgatcctggaatgaga

SEQ ID NO: 532006 - DNA, 120 bp, Artificial Sequence
  ENSG00000166377_100 (sequence is synthesized)
ggcgtaaacagatgttcctgggttgggaggcgtaaacagatgttcctggattgagcctcaattagatgttcatggattgagagcctcagtattgcttcacattgacaagctcactctaga

SEQ ID NO: 532007 - DNA, 120 bp, Artificial Sequence
  ENSG00000166377_101 (sequence is synthesized)
ctcagtattgcttcacattgacaagctcactctagaatttatatggcaaggcaagggaactcgaattgccaaaataatttagaaaataacagagttgggccgggcgcggtggctcacgcc

SEQ ID NO: 532008 - DNA, 120 bp, Artificial Sequence
  ENSG00000166377_102 (sequence is synthesized)
gctcctttggttttagataataaccccagaacattccactgtgactctgcaaataatgccctgtttctctgtgcctgtaacttagacaacattttaatttgggattctttttctccctta

SEQ ID NO: 532009 - DNA, 120 bp, Artificial Sequence
  ENSG00000166377_103 (sequence is synthesized)
agtgcggaaacatggctcgcgaaggactgcggaccctcgtggttgcaaagaaggcgttgacagaggagcagtaccaggactttgaggtccctcaaggtggccgcggtagtcgagagcctg

SEQ ID NO: 532010 - DNA, 120 bp, Artificial Sequence
  ENSG00000166377_104 (sequence is synthesized)
ccccactcctgacttggtctgccctgacaccacctgggcaatggggagagtgtcttcctacggctggggcgtgtgggagtccaggcttcacgcactctttgctgttcaatgtaggtacca

SEQ ID NO: 532011 - DNA, 120 bp, Artificial Sequence
  ENSG00000166387_0 (sequence is synthesized)
agttggtcggtgggccagtggcccgtcgctcgcttctgggctctcatgtttgaaggtgggagggacacgggagcggcccgcacacctgagccgcccggagaggagcctcggccccgtacc

SEQ ID NO: 532012 - DNA, 120 bp, Artificial Sequence
  ENSG00000166387_1 (sequence is synthesized)
cagtaagaagaggaggaggccaggcaggcaaaaggagtcatggcttctgatgctagtcatgcgctggaagctgccctggagcaaatggacgggatcattgcaggcactaaaacaggtgca

SEQ ID NO: 532013 - DNA, 120 bp, Artificial Sequence
  ENSG00000166387_2 (sequence is synthesized)
gatcttagtgatggtacttgtgagcctggactggcttccccggcctcctacatgaaccccttcccggtgctccatctcatcgaggacttgaggctggccttggagatgctggagcttcct

SEQ ID NO: 532014 - DNA, 120 bp, Artificial Sequence
  ENSG00000166387_3 (sequence is synthesized)
caggagagagcagccctcctgagccagatccctggcccaacagctgcctacataaaggaatggtttgaagagagcttgtcccaggtaaaccaccacagtgctgctagtaatgaaacctac

SEQ ID NO: 532015 - DNA, 120 bp, Artificial Sequence
  ENSG00000166387_4 (sequence is synthesized)
caggaacgcttggcacgtctagaaggggataaggagtccctcatattgcaggtgagtgtcctcacagaccaagtagaagcccagggagaaaagattcgagacctggaagtgtgtctggaa

SEQ ID NO: 532016 - DNA, 120 bp, Artificial Sequence
  ENSG00000166387_5 (sequence is synthesized)
ggacaccaggtgaaactcaatgctgctgaagagatgcttcaacaggagctgctaagccgcacatctcttgagacccagaagctcgatctgatgactgaagtgtctgagctgaagctcaag

SEQ ID NO: 532017 - DNA, 120 bp, Artificial Sequence
  ENSG00000166387_6 (sequence is synthesized)
ctggttggcatggagaaggagcagagagagcaggaggagaagcagagaaaagcagaggagttactgcaagagctcaggcacctcaaaatcaaagtggaagagttggaaaatgaaaggaat

SEQ ID NO: 532018 - DNA, 120 bp, Artificial Sequence
  ENSG00000166387_7 (sequence is synthesized)
cagtatgaatggaagctaaaggccactaaggctgaagtcgcccagctgcaagaacaggtggccctgaaagatgcagaaattgagcgtctgcacagccagctctcccggacagcagctctc

SEQ ID NO: 532019 - DNA, 120 bp, Artificial Sequence
  ENSG00000166387_8 (sequence is synthesized)
cacagtgagagtcacacagagagagaccaagaaattcaacgtctgaaaatggggatggaaactttgctgcttgccaatgaagataaggaccgtcggatagaggagcttacggggctgtta

SEQ ID NO: 532020 - DNA, 120 bp, Artificial Sequence
  ENSG00000166387_9 (sequence is synthesized)
aaccagtaccggaaggtaaaggagattgtgatggtcactcaagggccttcggagagaactctctcaatcaatgaagaagaaccggagggaggtttcagcaagtggaacgctacaaataag

SEQ ID NO: 532021 - DNA, 120 bp, Artificial Sequence
  ENSG00000166387_10 (sequence is synthesized)
gaccctgaagaattatttaaacaagagatgcctccaagatgtagctctcctacagtggggccacctccattgccacagaaatcactggaaaccagggctcagaaaaagctctcttgtagt

SEQ ID NO: 532022 - DNA, 120 bp, Artificial Sequence
  ENSG00000166387_11 (sequence is synthesized)
ctagaagacttgagaagtgaatctgtggataagtgtatggatgggaaccagcccttcccggtgttagaacccaaggacagccctttcttggcggagcacaaatatcccactttacctggg

SEQ ID NO: 532023 - DNA, 120 bp, Artificial Sequence
  ENSG00000166387_12 (sequence is synthesized)
aagctttcaggagccacgcccaatggagaggctgccaaatctcctcccaccatctgccagcctgacgccacggggagcagcctgctgaggctgagagacacagaaagtggctgggacgac

SEQ ID NO: 532024 - DNA, 120 bp, Artificial Sequence
  ENSG00000166387_13 (sequence is synthesized)
ccaaaggcattaagaagttctggggaaaaatccgaagaactcagtcaggaaatttctacactgacacgctggggatggcagagtttcgacgaggtgggctccgggcaaccgcagggccaa

SEQ ID NO: 532025 - DNA, 120 bp, Artificial Sequence
  ENSG00000166387_14 (sequence is synthesized)
gactctctaggaccagggactccaagggacagaaaagtgacgccaatgccccctttgcccagtggagcacagagcgtgtgtgtgcatggctggaggactttggcctggctcagtatgtga

SEQ ID NO: 532026 - DNA, 120 bp, Artificial Sequence
  ENSG00000166387_15 (sequence is synthesized)
tctttgccaggcagtgggtatcttctggccacaccttattgacagccacccctcaggacatggaaaaggagctaggaattaagcacccactccacaggaagaagcttgttttagcagtga

SEQ ID NO: 532027 - DNA, 120 bp, Artificial Sequence
  ENSG00000166387_16 (sequence is synthesized)
aagccatcaacaccaaacaggaggagaagtctgcactgctagaccacatttgggtgacaaggtggcttgatgatattggcttaccccagtacaaagaccagtttcatgaatctagagttg

SEQ ID NO: 532028 - DNA, 120 bp, Artificial Sequence
  ENSG00000166387_17 (sequence is synthesized)
acagacgaatgctgcaatacctaactgtgaacgatttactcttcttaaaagtcaccagccaactacatcatctcagcatcaaatgtgccattcacgtgctgcatgtcaacaagttcaacc

SEQ ID NO: 532029 - DNA, 120 bp, Artificial Sequence
  ENSG00000166387_18 (sequence is synthesized)
cccactgcctgcaccggcggccagctgatgagagtaacctttctccttcagaagttgtacagtggtccaaccacagggtgatggagtggttacgatctgtggacctggcagagtatgcac

SEQ ID NO: 532030 - DNA, 120 bp, Artificial Sequence
  ENSG00000166387_19 (sequence is synthesized)
ccaatcttcgagggagtggagtccatggaggcctcattatcctggagccacgcttcactggggacaccctggctatgcttctcaacatccccccacaaaagacgctcctcaggcgccacc

SEQ ID NO: 532031 - DNA, 120 bp, Artificial Sequence
  ENSG00000166387_20 (sequence is synthesized)
tgaccaccaagttcaatgccttgattggtccggaggctgaacaggagaagcgagagaaaatggcctcaccagcttacacaccactgaccaccacagccaaagtccggccaaggaaactag

SEQ ID NO: 532032 - DNA, 120 bp, Artificial Sequence
  ENSG00000166387_21 (sequence is synthesized)
gattttcacacttcggaaacataagaaaaaagaagttcgatgaatcgacggactacatttgcccaatggagcccagtgacggtgtcagtgatagtcacagggtctacagtggctaccggg

SEQ ID NO: 532033 - DNA, 120 bp, Artificial Sequence
  ENSG00000166387_22 (sequence is synthesized)
gcctcagcccccttgatgcccctgaactggatgggctggaccaggtgggacagattagctgatgcccttgtcacctgccctctgtgcaccctgagagctcacagtaacactgtgtgtgtc

SEQ ID NO: 532034 - DNA, 120 bp, Artificial Sequence
  ENSG00000166387_23 (sequence is synthesized)
accatataactgcacctcacccccgcacgtgtgcatgactcgcagagaatattccagcaattgtgtacccctgggccagtctctttgaaccctgagggtggccaggatctggagctgcat

SEQ ID NO: 532035 - DNA, 120 bp, Artificial Sequence
  ENSG00000166387_24 (sequence is synthesized)
ctctaaggggccaggctttggggaccattgccaaaggtggactcaggaggaaagacacttaaagacacttttacatgtctagtaattcttgatgttcatcttcagcaccagtggaaacac

SEQ ID NO: 532036 - DNA, 120 bp, Artificial Sequence
  ENSG00000166387_25 (sequence is synthesized)
atgaacttcgatgcaggtccagagaccatggacactcccacgaggctcagctctcaggcaccccctacacttcagttgagggaaaagctcaagtgccttaggcccgtggaccacagtctt

SEQ ID NO: 532037 - DNA, 120 bp, Artificial Sequence
  ENSG00000166387_26 (sequence is synthesized)
ggctgagatcaaagggatgagcaacagggacttctgccacagtgacaatggaattgtgttgtgccttacttcagaggtggtctcttctttcttgtaataaaagcaatatttatgcggaaa

SEQ ID NO: 532038 - DNA, 120 bp, Artificial Sequence
  ENSG00000166387_27 (sequence is synthesized)
gttgcagaagtgctggcaagccagctgagatgtgccttgaggtcggggctgttctggaagaggaataaggagcaggagtccagcccagaggcagctcctgtggctgttgggtgttttact

SEQ ID NO: 532039 - DNA, 120 bp, Artificial Sequence
  ENSG00000166387_28 (sequence is synthesized)
aagaaattagaggttgagtgagcaagtgggacagatgaaaggtcagaagattgtggccagaggagagaatttcagagctgaagattttagaagcaaagcaaacacattctggatacacgt

SEQ ID NO: 532040 - DNA, 120 bp, Artificial Sequence
  ENSG00000166387_29 (sequence is synthesized)
gagatccaagtggtgactgtgctactgagaagctgaacgaaatggaaagcaaagcctgttggagctgaggtcaaagaatgtgaagccagagtggatactgaatgggaaagttaataacaa

SEQ ID NO: 532041 - DNA, 120 bp, Artificial Sequence
  ENSG00000166387_30 (sequence is synthesized)
gatgggaataggaggaggtggggggtggcatctagggagtgctggaggggccacctggagagcctgcatgtgacctgccctgaaaggaggaaaacagctgcagctccagtcccaggtaaa

SEQ ID NO: 532042 - DNA, 120 bp, Artificial Sequence
  ENSG00000166387_31 (sequence is synthesized)
ccctgaagaattatttaaacaagaggtactgtgtttccatccatgacgtagggtttcagcaggtcctccgagcttgccctgagcttgagggaggatctagtcagacacgtgtcaggtgca

SEQ ID NO: 532043 - DNA, 120 bp, Artificial Sequence
  ENSG00000166387_32 (sequence is synthesized)
catcttggcaggtgaatacttaaattaatatagtgcccctcaggctgtgatggggatgggcgagcaagaggctgaggctctggcctgtgctctggttggaggcagcatggtggatactgg

SEQ ID NO: 532044 - DNA, 120 bp, Artificial Sequence
  ENSG00000166387_33 (sequence is synthesized)
cacctgccttggtgcaaatgggatattcagaaacttatttattaaggacaaggcacaaaagctaacgaaaaaaaataggtacttcatctggaggtcttgcataatttgatgtctcaaagt

SEQ ID NO: 532045 - DNA, 120 bp, Artificial Sequence
  ENSG00000166387_34 (sequence is synthesized)
attttgataacttgtccttgagaattaatatacctcatggaagcaagatgccttctggcagcacctccttggcatgagacttgaggattctaggtcgatgggttgcatggagaccaacgc

SEQ ID NO: 532046 - DNA, 120 bp, Artificial Sequence
  ENSG00000166387_35 (sequence is synthesized)
ttacaaggcgagggaacagcagggctgaggaagggacggggaagccgtaaaaatgcagcttcccacttgctgcaataggatccctatcactactcagatctgtcagtggcaaagccagag

SEQ ID NO: 532047 - DNA, 120 bp, Artificial Sequence
  ENSG00000166387_36 (sequence is synthesized)
gggaaatgaggaagtgtggtggcttggatgtcatccagagaagatcctgagagacagcctcaccaaagaggtcccagttctctgctggtctgtgaaaacaaggtggtcagtcagcacatg

SEQ ID NO: 532048 - DNA, 120 bp, Artificial Sequence
  ENSG00000166387_37 (sequence is synthesized)
tgctagtatgtgctcagagccaggccctgtgccagccagtgagtggagtgggactcagaacaagtgactgagctcctgtccctcctctggaggcacccccagccccaacaggccagtctc

SEQ ID NO: 532049 - DNA, 120 bp, Artificial Sequence
  ENSG00000166387_38 (sequence is synthesized)
aatggatggtaccaccagtgccaaggacagcaaacgctctgtgctgggcccgtcgcacagcaggaccaagaacccagactggagctgcttttttttggaaacaacaggctttcctcaggg

SEQ ID NO: 532050 - DNA, 120 bp, Artificial Sequence
  ENSG00000166387_39 (sequence is synthesized)
cacagcccgtcactcgcctggaaaatgggtgggcgtgggcttcagggcgggggtcaggctgtgtgtgggaaccagtgagctcctccaagagcagcacttatttttagtcttctccccagt

SEQ ID NO: 532051 - DNA, 120 bp, Artificial Sequence
  ENSG00000166387_40 (sequence is synthesized)
cccaaataaactgagagcagctgggagccctgggtaaatgcagagtgaagcagagacaggaaatcggggctctcagtaatgagttccagccactccagaagggggaagccagacaaggaa

SEQ ID NO: 532052 - DNA, 120 bp, Artificial Sequence
  ENSG00000166387_41 (sequence is synthesized)
ttttcttcaggactgtttccctctggcaggctccggtattatcactgagaatggtcccgtgtgtgtgtgcgtgtgtgtcatgtttacaacttctgtccaagtcttctttcttttttctct

SEQ ID NO: 532053 - DNA, 120 bp, Artificial Sequence
  ENSG00000166387_42 (sequence is synthesized)
ctgtccaagtcttctttcttttttctctacctttgtgtgacatttgatttctccgcagggctctgaatcccagtcctggtgcgtgtgcgtgcatgtatgtgcgtgtgtgtgtgtgtgtgt

SEQ ID NO: 532054 - DNA, 120 bp, Artificial Sequence
  ENSG00000166387_43 (sequence is synthesized)
ggggaggacactgaagcagcacggtctgctctgtgtcgctgtgtgtctgaaactgtctagggagaggctgaaggacgcaggccagggaagtggggaaatttgaacacagcttggagttct

SEQ ID NO: 532055 - DNA, 120 bp, Artificial Sequence
  ENSG00000166387_44 (sequence is synthesized)
actggtctccagccaggaaaagggctttttccaccaaggcatctaactgctgacatgggtgcccagcatggatggggacattgatgtttacaagcatttctcgtggctgaagaggtccca

SEQ ID NO: 532056 - DNA, 120 bp, Artificial Sequence
  ENSG00000166387_45 (sequence is synthesized)
ggtaaaccaccacagtgctgctagtaatgaaacctaccaggaacgcttggcacgtctagaaggggataaggagtccctcatattgcaggagctgctaagccgcacatctcttgagaccca

SEQ ID NO: 532057 - DNA, 120 bp, Artificial Sequence
  ENSG00000166387_46 (sequence is synthesized)
agtttacagttctgcctgataagatgctgctgatttctggtaggcagcaggagtaacacctcagggggcctcagctcctttttcagccattccctcaagtacttggaattccagccagtc

SEQ ID NO: 532058 - DNA, 120 bp, Artificial Sequence
  ENSG00000166387_47 (sequence is synthesized)
attcagcaactctgatagcaacgttctcagcagcctggcccctctgtcctgctatggctcctctttgtcctgacaggatatctcgctgtgttgggctcctctgtcctgagggaaatttag

SEQ ID NO: 532059 - DNA, 120 bp, Artificial Sequence
  ENSG00000166387_48 (sequence is synthesized)
cacaatggccttgtccctcattgtgatataaagccagtgtctgtgggctctgccattgctctgaggagctgtcttcgcaggccaggtgtgcggcttctcctctccactgtcagatctgat

SEQ ID NO: 532060 - DNA, 120 bp, Artificial Sequence
  ENSG00000166387_49 (sequence is synthesized)
gaagcagagaaaagcagaggtaagggtgagtgtgtactgtcctaagctcagacctgggaaggctgtcataatgtgaatttaggccatctggtcaactcccagcctggaagctattgggtg

SEQ ID NO: 532061 - DNA, 120 bp, Artificial Sequence
  ENSG00000166387_50 (sequence is synthesized)
acatgatctcaggagggccatacaggctgccccattctctaagtagcctgagatttgaaattcagatcttgtgttattaagaaaactctagggtctacctcctatgagtgtgttgtagtg

SEQ ID NO: 532062 - DNA, 120 bp, Artificial Sequence
  ENSG00000166387_51 (sequence is synthesized)
gaaaactctagggtctacctcctatgagtgtgttgtagtggaattttgttcagcagaatcccatgatggaggttgtttgttaaaaaacaggttttttgttttgttttttcttttcttttc

SEQ ID NO: 532063 - DNA, 120 bp, Artificial Sequence
  ENSG00000166387_52 (sequence is synthesized)
ggtaaacggaatcccaaaggcattaagaagttctggggaaagtaagttggtgccgttgatcctaattatattgcttagaatttttctttttgattgggcaaagagtctatgtaagcccct

SEQ ID NO: 532064 - DNA, 120 bp, Artificial Sequence
  ENSG00000166387_53 (sequence is synthesized)
aaagacacccattgaatatatccagttgcctttcatgtcatgcatcctaagcacccacccattccacacaccctgaacataatctctgcagcttatattacattggatctggcacagaca

SEQ ID NO: 532065 - DNA, 120 bp, Artificial Sequence
  ENSG00000166387_54 (sequence is synthesized)
cagatgagactgtattctcccttcttaggagtcagtctgttttaagaaatctttgaaaaacctttgaaagccaagtacttgctggcccaactgatccactttgtgacatgaggcagaaac

SEQ ID NO: 532066 - DNA, 120 bp, Artificial Sequence
  ENSG00000166387_55 (sequence is synthesized)
tggggcctcctacaaggcatcaaactttgctttgacttctatggcaagtgaccaaatcccagaggcaggatccgaattgaggcttgagtctggccaaggagctgcgacaggttgtgatcc

SEQ ID NO: 532067 - DNA, 120 bp, Artificial Sequence
  ENSG00000166387_56 (sequence is synthesized)
gaatcgtggccggagtgtcagtgcccccgtattaggtactgtacccattccaggagacacagaaagtggctgggacgacactgctgtggtcaatgacctctcatccacatcatcgggcac

SEQ ID NO: 532068 - DNA, 120 bp, Artificial Sequence
  ENSG00000166387_57 (sequence is synthesized)
agagcaggaggagaagcagagaaaagcagagtcggttctgaatgtgatcagtgagctgcaggagcagatgtgtaggctgcagctggacatccacaggcagattcaagagcgcctgttact

SEQ ID NO: 532069 - DNA, 120 bp, Artificial Sequence
  ENSG00000166387_58 (sequence is synthesized)
cagtagggaccaccctgaggaggtggcggccagcgacggtgtggccgagccccagccctgcagccaggactgtgcctgttgggaggggtcacctgagttactgcaagagctcaggcacct

SEQ ID NO: 532070 - DNA, 120 bp, Artificial Sequence
  ENSG00000166387_59 (sequence is synthesized)
tgggctggaccagatggcaccttcggaaggtaccgtgacgcagatagggctcctctcccaagacattcaccgccttacgacaatgctgagccaggaccagctgctgaatgactctcgcct

SEQ ID NO: 532071 - DNA, 120 bp, Artificial Sequence
  ENSG00000166387_60 (sequence is synthesized)
gcctgcccccaactctgatgactggagatgactttcttcgtggctgagagcgtagggaggcatgtgtgggggccccggagcctttgcttctgtggggagcgggcacacagccccctctgc

SEQ ID NO: 532072 - DNA, 120 bp, Artificial Sequence
  ENSG00000166387_61 (sequence is synthesized)
aagcccagtccgggctggcagggtgtctcagacaggctgctgacaggcatgaagcagagctgtgggacaggtgtccaggggtggccccagggtccatgtgtgtcttcaaccatgctgcgc

SEQ ID NO: 532073 - DNA, 120 bp, Artificial Sequence
  ENSG00000166387_62 (sequence is synthesized)
tcttcaccgcaggcttcataccttttgtacttttatacgtggactgcagaccactttgtgggagggcagtgacatatcagcacacagactcgatggctcgtgatattcctggtgacagcc

SEQ ID NO: 532074 - DNA, 120 bp, Artificial Sequence
  ENSG00000166387_63 (sequence is synthesized)
actagagggacctccaccccaggttgcgagtgcagcgcggcgggacctgggatgattcgggggctttccgacctgcttagggagggcggctcagagacaacctcaattttgcctggattg

SEQ ID NO: 532075 - DNA, 120 bp, Artificial Sequence
  ENSG00000166387_64 (sequence is synthesized)
cttgtctgtctcccagatgtggggagtgcttgctccagacctggcacagggcctggcagggagtagatgttgctgatgtttgtcgggtgaccatatcaaatgggattttctcattgaaag

SEQ ID NO: 532076 - DNA, 120 bp, Artificial Sequence
  ENSG00000166387_65 (sequence is synthesized)
caacaaaatttggctctggctaacctaagccaaaaagaatgtttttaaaagagtctgcagtggctcgctgaatgaaaggaaaagctgaagaaccaagatcagaaagggaaggagcagaaa

SEQ ID NO: 532077 - DNA, 120 bp, Artificial Sequence
  ENSG00000166387_66 (sequence is synthesized)
aagcccaagaacccaggtctcaggactgtactactgggatatgaacatgatctaagctctagggtccaggaaggagaggcaagctggcccagatggactgataagcctaccacaccccct

SEQ ID NO: 532078 - DNA, 120 bp, Artificial Sequence
  ENSG00000166387_67 (sequence is synthesized)
cacccagggaggaaatgtctccctaaaaggaatcatgtgaagcagggggaaagatggtgggtggtccccaaacagactgtcctctaccgtgactcttctgtctctggtgcagatgcctcc

SEQ ID NO: 532079 - DNA, 120 bp, Artificial Sequence
  ENSG00000166387_68 (sequence is synthesized)
gggctgaccaggccggtcccccgggaacaggaaccctggtggacgggtcccagcaggcttcttcggtgcccgagagggagcgggtgcccaagggggtggtccctgtggcaggtcccgggg

SEQ ID NO: 532080 - DNA, 120 bp, Artificial Sequence
  ENSG00000166387_69 (sequence is synthesized)
tgcttcaacaggtaagggcgggtgcactgaaggcccttgggtgccgaagcagctcatgtgctgaagcccctttgtgtgcccaggctacagccctcgctgtctgctttcccatcctgcctg

SEQ ID NO: 532081 - DNA, 120 bp, Artificial Sequence
  ENSG00000166387_70 (sequence is synthesized)
ggggcgggattggctgctcagttgtacggtgtttatacagcaggtgaaaccaacctgaacgttgagagtggcagagggggtagggaagggaagggctgccctgagatgaataacctgctg

SEQ ID NO: 532082 - DNA, 120 bp, Artificial Sequence
  ENSG00000166387_71 (sequence is synthesized)
ggagttttagaaagtcaattctcagctgattctatgcccctttcccatctcgctctgcctcttcctactgtatatagtttttaaaataaaaatattatataaataaccttttagtataat

SEQ ID NO: 532083 - DNA, 120 bp, Artificial Sequence
  ENSG00000166387_72 (sequence is synthesized)
ttaatagatatcaaaatggaaaaagatatttaactgttccctaccattcaaataatgtcttctccttgttttctttttgtccttgttatgtgtacatgtactttccaaatctgtaatcac

SEQ ID NO: 532084 - DNA, 120 bp, Artificial Sequence
  ENSG00000166387_73 (sequence is synthesized)
aagagatatgcaatttagtcctcagattttgtatgcttaatattatatttttcccatttaaaatttttgctgtattgtcatctttactatcacctataatagattttcttagtaaaagta

SEQ ID NO: 532085 - DNA, 120 bp, Artificial Sequence
  ENSG00000166387_74 (sequence is synthesized)
tcagaattgacttaactttttttcaattcctaaatatttttactgtattataaataatgagctacaattttttaggaaggggtgttgaatttttattgtatcaaaacttcagaatttgtt

SEQ ID NO: 532086 - DNA, 120 bp, Artificial Sequence
  ENSG00000166391_0 (sequence is synthesized)
agaccacagcagagctcacagaacctgcgggagccaggctgacccgccagcatggtagagttcgcgcccttgtttatgccgtgggagcgcaggctgcagacacttgctgtcctacagttt

SEQ ID NO: 532087 - DNA, 120 bp, Artificial Sequence
  ENSG00000166391_1 (sequence is synthesized)
gtcttctccttcttggcactggccgagatctgcactgtgggcttcatagccctcctgtttacaagattctggctcctcactgtcctgtatgcggcctggtggtatctggaccgagacaag

SEQ ID NO: 532088 - DNA, 120 bp, Artificial Sequence
  ENSG00000166391_2 (sequence is synthesized)
ccacggcaggggggccggcacatccaggccatcaggtgctggactatatggaagtacatgaaggactatttccccatctcgctggtcaagactgctgagctggacccctctcggaactac

SEQ ID NO: 532089 - DNA, 120 bp, Artificial Sequence
  ENSG00000166391_3 (sequence is synthesized)
attgcgggcttccacccccatggagtcctggcagtcggagcctttgccaacctgtgcactgagagcacaggcttctcttcgatcttccccggtatccgcccccatctgatgatgctgacc

SEQ ID NO: 532090 - DNA, 120 bp, Artificial Sequence
  ENSG00000166391_4 (sequence is synthesized)
ttgtggttccgggcccccttcttcagagattacatcatgtctgcagggttggtcacatcagaaaaggagagtgctgctcacattctgaacaggaagggtggcggaaacttgctgggcatc

SEQ ID NO: 532091 - DNA, 120 bp, Artificial Sequence
  ENSG00000166391_5 (sequence is synthesized)
attgtagggggtgcccaggaggccctggatgccaggcctggatccttcacgctgttactgcggaaccgaaagggcttcgtcaggctcgccctgacacacggggcacccctggtgccaatc

SEQ ID NO: 532092 - DNA, 120 bp, Artificial Sequence
  ENSG00000166391_6 (sequence is synthesized)
ttctccttcggggagaatgacctatttgaccagattcccaactcttctggctcctggttacgctatatccagaatcggttgcagaagatcatgggcatctccctcccactctttcatggc

SEQ ID NO: 532093 - DNA, 120 bp, Artificial Sequence
  ENSG00000166391_7 (sequence is synthesized)
cgtggtgtcttccagtacagctttggtttaataccctaccgccggcccatcaccactgtggtggggaagcccatcgaggtacagaagacgctgcatccctcggaggaggaggtgaaccag

SEQ ID NO: 532094 - DNA, 120 bp, Artificial Sequence
  ENSG00000166391_8 (sequence is synthesized)
ctgcaccagcgttatatcaaagagctgtgcaacctcttcgaggcccacaaacttaagttcaacatccctgctgaccagcacttggagttctgctgagcccaaagggcagggccaacatta

SEQ ID NO: 532095 - DNA, 120 bp, Artificial Sequence
  ENSG00000166391_9 (sequence is synthesized)
gggagcccagcaggaggtgctgtgctgagaagacttcctggaggtgtttgttgaacatatctgcagagccttcccagactcctgcaaatccaacccatatcaggctgtaagtcagagcag

SEQ ID NO: 532096 - DNA, 120 bp, Artificial Sequence
  ENSG00000166391_10 (sequence is synthesized)
gcaatgcagaagaggagaccagaccaaggggtcagctggggctaggacagtgagggctgctagaggggctgggcctctctttgcacatggacactgggcccctctctatattgagtggtc

SEQ ID NO: 532097 - DNA, 120 bp, Artificial Sequence
  ENSG00000166391_11 (sequence is synthesized)
catctcttctactgcattctgttggtcgaagcaagtcacaacccagcagattcaaggagtaaggaataggatccccctctggatgggaggagcagcaatgtcatattacaaaagggtgtg

SEQ ID NO: 532098 - DNA, 120 bp, Artificial Sequence
  ENSG00000166391_12 (sequence is synthesized)
gacacatgcagggattcttactgccgtctttgcaaacaatccaccaaaacttaaaaactaaaagcctgaagcacaagcactctccaccccaggcacacacaccctggaattccctgtgtg

SEQ ID NO: 532099 - DNA, 120 bp, Artificial Sequence
  ENSG00000166391_13 (sequence is synthesized)
accatggtaccaccactgtgtgtcccgaggatcccagctcagctttgcatcgctgccctatctccctctcgctctcccctgttgatccctcatgcacagccacagcgagctgtctaaaac

SEQ ID NO: 532100 - DNA, 120 bp, Artificial Sequence
  ENSG00000166391_14 (sequence is synthesized)
acaaagctgaccgcgccatttcctactcagcatccttccatgaccctccattgctcctaggatagggtttggaccagtctgaatccagaggatcaggatccagcaggaaccagaggataa

SEQ ID NO: 532101 - DNA, 120 bp, Artificial Sequence
  ENSG00000166391_15 (sequence is synthesized)
tttgaggagggtttaaaaaggaaccattttttgaggtgtgtgcactgtttccaccctgaggcctggaaggatgaatggaagcagcagttcctgaaccaggaagactcatgtgtgggggcc

SEQ ID NO: 532102 - DNA, 120 bp, Artificial Sequence
  ENSG00000166391_16 (sequence is synthesized)
attgctggtcaaggggcacgaacaggtctggtgaccctgcaagggaggagccaggagcaagcattcccacttcaccttcctccattcagtctgctgccaagttccccactgcctgagccc

SEQ ID NO: 532103 - DNA, 120 bp, Artificial Sequence
  ENSG00000166391_17 (sequence is synthesized)
aactagaagctggagggaaggagggcctgtggctgcagtccaggcatgtaggcctcctgggaaagggagaatggcaaagacaggcagagtggatctggaggggtcaacggaagacggaac

SEQ ID NO: 532104 - DNA, 120 bp, Artificial Sequence
  ENSG00000166391_18 (sequence is synthesized)
atgtccacttccaggcccgagcttctcagcctgccgtttgccactctccagcatctggcccagcctgtccatcctcatctctcttcctcccttactccgtgctcccatcactcggaacca

SEQ ID NO: 532105 - DNA, 120 bp, Artificial Sequence
  ENSG00000166391_19 (sequence is synthesized)
tttgcatttctttgtctcagctatattgtctcacctctgagtttttgcccatgatgttggatgccatggaatgccatatcctccccattatctcccccttgtctggataattcctactca

SEQ ID NO: 532106 - DNA, 120 bp, Artificial Sequence
  ENSG00000166391_20 (sequence is synthesized)
tcctacaatactgattttatctgtgcaaagaagtcttccccagtgcctctggttgacaggggtttcctctggcttctccagactttctgttcctccaccacagcccttagcaccctgggg

SEQ ID NO: 532107 - DNA, 120 bp, Artificial Sequence
  ENSG00000166391_21 (sequence is synthesized)
aggaggtgttgctgtccaggtaaatgctgcgccaatgcccctgcctctagtgcactccctccagcctacccacaaacaggacctgcatcctgtctcacaaataaaactgaactcttgaaa

SEQ ID NO: 532108 - DNA, 120 bp, Artificial Sequence
  ENSG00000166391_22 (sequence is synthesized)
ctagaaaagtttccacaacggagactcagtgatctaagaaactaggtggcaatgaacatattccacaaagctggcatttgatctgagatctgtggtatctagaagagtgatatttggggt

SEQ ID NO: 532109 - DNA, 120 bp, Artificial Sequence
  ENSG00000166391_23 (sequence is synthesized)
acatttcagagctgttctccctccttggggtgaagcatccttgagaaacatgagccagctgaggtgggagatatttttctaggaaaaacaatgcagatttttatatctgggaggactctc

SEQ ID NO: 532110 - DNA, 120 bp, Artificial Sequence
  ENSG00000166391_24 (sequence is synthesized)
tgaagcattctggtctacctctcatggtgcaactgggaagttgtggccctgcaagggacctgcccaaggtcagagaatggggctgtgaaggtctgggagataacccaggcctccacctcc

SEQ ID NO: 532111 - DNA, 120 bp, Artificial Sequence
  ENSG00000166391_25 (sequence is synthesized)
agcccaggtggctgacctctgctccatttcttggtcactgagtccctgcaggaagctaaagggcctttcagctcgtgccttctctggggcctcccacatgccctctttcctctatttgtc

SEQ ID NO: 532112 - DNA, 120 bp, Artificial Sequence
  ENSG00000166391_26 (sequence is synthesized)
ttaaaattcattagggttggaaggaatggagtaagagcacttttctgcagggatgaaccatgggggtgggcacctgcaccgagggtcccttgcctaccctaggccactgcacacctctat

SEQ ID NO: 532113 - DNA, 120 bp, Artificial Sequence
  ENSG00000166391_27 (sequence is synthesized)
actgtgtagttcagagtggccacagacaagaggcaggagcgggagggacagggccagctctggggctcctggaggccaggctgagctacttggactgtgcccaaagttatggggaagtca

SEQ ID NO: 532114 - DNA, 120 bp, Artificial Sequence
  ENSG00000166391_28 (sequence is synthesized)
tgaagggcttgaataaggggaggcacctggctggatttatctctgggaaaatggggcagaggatgaacagaaagagagcaggaaagggtctccctttgctctgagatcccaaaagatgga

SEQ ID NO: 532115 - DNA, 120 bp, Artificial Sequence
  ENSG00000166391_29 (sequence is synthesized)
aactagaacagtttatccaaccagttgtccccattgattgagcacttaatgagtacaaacaactctcctggggagaaggaggacaggcaggggatggagtgaattaggcggcctggtgca

SEQ ID NO: 532116 - DNA, 120 bp, Artificial Sequence
  ENSG00000166391_30 (sequence is synthesized)
gtgggagaaagtgagctttggagttaggcctacctaggctcaacgcgtgctcccagtgacactgggctggccgtagtccctctcagggactttgtctcctctttgaatgccccggaagct

SEQ ID NO: 532117 - DNA, 120 bp, Artificial Sequence
  ENSG00000166391_31 (sequence is synthesized)
gctgtcttcctcctgggcccgaggattggacaggacagtgctgctagtgccaggcctatgggcagagttcagtctgagcaatctcacctgccttcctctcagacccctgtccctgacagc

SEQ ID NO: 532118 - DNA, 120 bp, Artificial Sequence
  ENSG00000166394_0 (sequence is synthesized)
gagactccagtgacccggcgggaggagaggcaactttccctgtcgggcttgagttgggagaggagcagggcggccttgtagggacccgtccctgctcctgaccatcaccgtcactggggt

SEQ ID NO: 532119 - DNA, 120 bp, Artificial Sequence
  ENSG00000166394_1 (sequence is synthesized)
cactgtgctcgtgttggtcctgaagagcatgaactccaggaggagagagccaatcaccttacaggaccctgaagccaagtacccgctgcccttgattgagaaagagaaaatcagccacaa

SEQ ID NO: 532120 - DNA, 120 bp, Artificial Sequence
  ENSG00000166394_2 (sequence is synthesized)
cacccggaggttccgctttggactgccttcgccggaccatgtcttagggcttcctgtaggtaactatgtccagctcttggcaaaaatcgataatgaattggtggtcagggcttacacccc

SEQ ID NO: 532121 - DNA, 120 bp, Artificial Sequence
  ENSG00000166394_3 (sequence is synthesized)
tgtctccagtgatgatgacagaggctttgtggacctaattataaagatctacttcaaaaatgtacacccccaatatcctgaaggtgggaagatgactcagtatttggagaacatgaaaat

SEQ ID NO: 532122 - DNA, 120 bp, Artificial Sequence
  ENSG00000166394_4 (sequence is synthesized)
cggggagaccatcttttttcgagggccaaggggacgcttgttttaccatgggccagggaatcttggaatcagaccagaccagacgagtgagcctaaaaaaacactggccgatcacctggg

SEQ ID NO: 532123 - DNA, 120 bp, Artificial Sequence
  ENSG00000166394_5 (sequence is synthesized)
cacatcaccaaggaccccagtgacaggaccaggatgtccctcatctttgccaaccagacagaggaggatatcttggtcagaaaagagcttgaagaaattgccaggactcacccagaccag

SEQ ID NO: 532124 - DNA, 120 bp, Artificial Sequence
  ENSG00000166394_6 (sequence is synthesized)
ttcaacctgtggtacaccctggacaggcctcccattggctggaagtacagctcaggcttcgttactgccgacatgatcaaggagcaccttcctcctccagcgaagtccacgctcatcctg

SEQ ID NO: 532125 - DNA, 120 bp, Artificial Sequence
  ENSG00000166394_7 (sequence is synthesized)
gtgtgtggcccgccaccactaatccagacggcggctcaccctaacctggagaagctgggttatacccaggacatgattttcacctactaacacctccacgtgctcagcaattttgcatgt

SEQ ID NO: 532126 - DNA, 120 bp, Artificial Sequence
  ENSG00000166394_8 (sequence is synthesized)
cccttttcatctgtttcagagtaagttcaatttcaccacggtaaactgggatgttttcaaaagtgccttgccatgtaccttcgcgcacacactggttctcctcttttgggtgtgggccta

SEQ ID NO: 532127 - DNA, 120 bp, Artificial Sequence
  ENSG00000166394_9 (sequence is synthesized)
acaaaaagggctcaaggggctggagactggctgctggggcctccttgcttggaggctggaaagagctccatttcagtatctttctccgtggttttgtgaaataaactcaagtacaaagca

SEQ ID NO: 532128 - DNA, 120 bp, Artificial Sequence
  ENSG00000166394_10 (sequence is synthesized)
attcgcgcgctctttgcagctgcctgaattcttccttccccagcatccccctccgcccggtcacccagacggccttctccagccttgccgagcttaagtaagctgaggggcgctcagtgt

SEQ ID NO: 532129 - DNA, 120 bp, Artificial Sequence
  ENSG00000166394_11 (sequence is synthesized)
ggcagctctgcgtgtgcagggaaggggccaggatgcagaggggcagcgcaggagcgaggacgccacggctcagcgccccgccagcctcatgatggagcgctgccctgggggcagggctga

SEQ ID NO: 532130 - DNA, 120 bp, Artificial Sequence
  ENSG00000166394_12 (sequence is synthesized)
cccagagccagcggctcgtgagtgagagccccccgaccacggcccttctcggggagcgggccagccgccggggtcccagcctgcggggtccgcccgcgcttttgtcctcccgggcgtgcg

SEQ ID NO: 532131 - DNA, 120 bp, Artificial Sequence
  ENSG00000166394_13 (sequence is synthesized)
tgcgtgtccgggtctcggccggttccccgtcggccaggcggagctgcggggcgacgccacgagtctgcgggcccgcggcggggagcggcccccggccaaccccagttcgacgacgtgttg

SEQ ID NO: 532132 - DNA, 120 bp, Artificial Sequence
  ENSG00000166394_14 (sequence is synthesized)
gaatgaatatattcgcgcgctctttgcagctgcctgaattcttccttccccagcatccccctccgcccggtcacccagacggccttctccagccttgccgagcttaagacccgtccctgc

SEQ ID NO: 532133 - DNA, 120 bp, Artificial Sequence
  ENSG00000166394_15 (sequence is synthesized)
gtaatgggtcagccctgtgggtggaaggcagtaagtggatgatggctgggatggcagggcatccagacagtcatctcatggcctccagttcactccccgccgccctgtgtgtgtgtgtgt

SEQ ID NO: 532134 - DNA, 120 bp, Artificial Sequence
  ENSG00000166394_16 (sequence is synthesized)
catcaccaaggaccccagtgacaggaccaggatgtccctcatctttgccaaccaggtcagttcctgctgagcttgcagtggtaggatggaatgtttgctgagctgggctcttgttttcat

SEQ ID NO: 532135 - DNA, 120 bp, Artificial Sequence
  ENSG00000166394_17 (sequence is synthesized)
ttctcctgcattgactgagctcatgctgcttgggtgcctgcatctgtgggagggcttagtgggatcaacagggctgctggcagctggagaagctgagtccaggcctgctttttgcatgta

SEQ ID NO: 532136 - DNA, 120 bp, Artificial Sequence
  ENSG00000166394_18 (sequence is synthesized)
gggagaccatcttttttcgagggccaaggggacgcttgttttaccatgggccaggtactggaggggttaatacttgggctcccagctgggaggaagattcctgcaatggttccattgttc

SEQ ID NO: 532137 - DNA, 120 bp, Artificial Sequence
  ENSG00000166394_19 (sequence is synthesized)
tcgtacactcctcagatttgagtcacatggggttgtccttagtcttcattcattcacacacaatgcataatgatcacacttgttacacattcacacacccacttcatgaggttgtcagct

SEQ ID NO: 532138 - DNA, 120 bp, Artificial Sequence
  ENSG00000166394_20 (sequence is synthesized)
aggaccaggatgtccctcatctttgccaaccaggtccctggtcggcagagggcgctaccctactgagcaattctgcgcagttccactaacaccaggccacaccctgccggacaactccag

SEQ ID NO: 532139 - DNA, 120 bp, Artificial Sequence
  ENSG00000166394_21 (sequence is synthesized)
gagcggcccccggccaaccccagttcgacgacgtgttgggcgtctcactccgggtgggttccgcggcggggtgtatttatggagtattgaagaaatatctccgtcgggacggccggaagg

SEQ ID NO: 532140 - DNA, 120 bp, Artificial Sequence
  ENSG00000166394_22 (sequence is synthesized)
ggcttgagttgggagaggagcagggcggccttgtagggtagggacagatgcggggaggctcccgagtctctggcagttgagtgcccaggcccccttcgccctgtccaggagactgttggg

SEQ ID NO: 532141 - DNA, 120 bp, Artificial Sequence
  ENSG00000166394_23 (sequence is synthesized)
gagtccccaggccctaagtcacggggcacctcttagagctacgcaccctagttctgtctttagggactgggcccctcattccggattgtgtgttaggggtgatgtcctcccccttcacct

SEQ ID NO: 532142 - DNA, 120 bp, Artificial Sequence
  ENSG00000166394_24 (sequence is synthesized)
caaggaagggacttccagtgtatgaacctttggctgtagccaggaggggcctagtgacctgagcaccccaggccatgtgtgctgcctgctccaggggcctgaaacatccttcctgtgtga

SEQ ID NO: 532143 - DNA, 120 bp, Artificial Sequence
  ENSG00000166394_25 (sequence is synthesized)
cctgcagctgacccctccctaccctctggtccacgacaggctctcccagccgccttctgtgtcactactgttctctttgcctatttcctgcaggcagagctcagctcctgtgcctttggt

SEQ ID NO: 532144 - DNA, 120 bp, Artificial Sequence
  ENSG00000166394_26 (sequence is synthesized)
gtggggagggtgttctgcgcctgagagctgccctgtccagggcgggcaagacctgaggtgctctgttcacattgtgtctgccaggacccgtccctgctcctgaccatcaccgtcactggg

SEQ ID NO: 532145 - DNA, 120 bp, Artificial Sequence
  ENSG00000166394_27 (sequence is synthesized)
ttaacagaaacacaggtttcccacgtcctgaggtgtggaagatgccctcttgctcctcctgagcctgtgagctcagggagatagatagggggatggatgtgggacagaaaatttcttttc

SEQ ID NO: 532146 - DNA, 120 bp, Artificial Sequence
  ENSG00000166394_28 (sequence is synthesized)
ttcattattccaattgggctgacacgagagtggtacctcagtgagcattgaaaagaactgaacctagagccaaaaggcctaaaatctcatggaaggctccttgctggggaacttaaggga

SEQ ID NO: 532147 - DNA, 120 bp, Artificial Sequence
  ENSG00000166394_29 (sequence is synthesized)
agtccttcaatctctctgagcctcagtctatgaaatgggatttcccaggcctgcctgtctacctcacttgggttgttgtgaaagtagagtgactgatggatatgaaaattcagaaactac

SEQ ID NO: 532148 - DNA, 120 bp, Artificial Sequence
  ENSG00000166394_30 (sequence is synthesized)
aaagtattgtgcacctgggagggatgggaggaaccagtggtcggggaaaggcccagaatgtgcgggtaggcaggaatgagtcaggtgtgccctgcccccaaggtcacttagattctctgc

SEQ ID NO: 532149 - DNA, 120 bp, Artificial Sequence
  ENSG00000166394_31 (sequence is synthesized)
aggggcctcagacccacataaggagggaccagccctacgagttgcagattccagccctaggagtcctagagttgagttatcccatttctaatctgtaacaccactagatagctgagtcag

SEQ ID NO: 532150 - DNA, 120 bp, Artificial Sequence
  ENSG00000166394_32 (sequence is synthesized)
tcttagtgcagtagaaaactgctagaatcagggattcagagcagctttgtataatctgctagtgctgcttgcctgcctggtggatcctactccgtggcctatttgtcttatatgcacagg

SEQ ID NO: 532151 - DNA, 120 bp, Artificial Sequence
  ENSG00000166394_33 (sequence is synthesized)
ccaaaaccttgacctcagctctatcaggtggtgagattacactctagccagctcgctgggcccctgagcctccttgctgttccctcactccatctctatgcacgagagctcagtgttgtg

SEQ ID NO: 532152 - DNA, 120 bp, Artificial Sequence
  ENSG00000166394_34 (sequence is synthesized)
cgtgccgtctctcagctccctgctcggcctgtcaggcaggtcctgttggcaggaagcctaaaagaatgaaaaactttgagatagagaattgcttagaaactgccttgacccactatctcc

SEQ ID NO: 532153 - DNA, 120 bp, Artificial Sequence
  ENSG00000166394_35 (sequence is synthesized)
tcagccttggcctaggccgtgcaaagttagtgggacaaggtaatgtagaggcctctgggagagtctaatatgaggcctcagagttcgctgcttcgtcccagcccagtggaagtgaagcaa

SEQ ID NO: 532154 - DNA, 120 bp, Artificial Sequence
  ENSG00000166394_36 (sequence is synthesized)
gttagagatggggcttgaaggaccagccagggagccccatttgccctggggacaccctcaggccaggcctaggtggctgcatatgaaagagcctttccaggtttccagtttcaggttctc

SEQ ID NO: 532155 - DNA, 120 bp, Artificial Sequence
  ENSG00000166394_37 (sequence is synthesized)
agaaggaagctaggtgtctcacttactcctggctatccctggtgcccagagggaccatgaccagagtcattgagcctgttctgagcccagagtgttggcacctcaaagacttggctcatc

SEQ ID NO: 532156 - DNA, 120 bp, Artificial Sequence
  ENSG00000166394_38 (sequence is synthesized)
cccttgaatcagcttcagggaccagcccctctagtgcctactctgcctgcttttttctcctcctgcctcctcctcctccctgcaccttaggtcttggtttctatccatctctctgttcca

SEQ ID NO: 532157 - DNA, 120 bp, Artificial Sequence
  ENSG00000166394_39 (sequence is synthesized)
tcttccttgtctcgactaatttcccgtatgtagtccactcagtttctgagcgagtagaaactgagggagtaaactgactacatacatacaggaagttagtcaagggttagggttacaaaa

SEQ ID NO: 532158 - DNA, 120 bp, Artificial Sequence
  ENSG00000166394_40 (sequence is synthesized)
ctttctcttgcctctagctcttagtatctcttgattgcactcctgtccctgccactaattgccttagtaatttgagtctcacattttggatccaacaggtcgtagctgcccagtgtgtca

SEQ ID NO: 532159 - DNA, 120 bp, Artificial Sequence
  ENSG00000166394_41 (sequence is synthesized)
tctgacagtgggatgtagtcatgatccataggtctctggccacacctggtttattgaattctacccaggaagggcagagttacatggttaaaaacttcactgctactcctcacaaggcca

SEQ ID NO: 532160 - DNA, 120 bp, Artificial Sequence
  ENSG00000166394_42 (sequence is synthesized)
taggccaggaagacatgatattgttgtttcatttgctccatgggtacccaaatcctagggccctgtagtatctgtgagcccaggcctgctctgtgcctagtaccaggatacagatggagt

SEQ ID NO: 532161 - DNA, 120 bp, Artificial Sequence
  ENSG00000166394_43 (sequence is synthesized)
agttgtaatttattcacagatctcagtgatacatccagtttaggaagaaaggagtttgtgaaggccacatatttttcttgaatagacaaatattcctttctaattttttttttttttttg

SEQ ID NO: 532162 - DNA, 72 bp, Artificial Sequence
  ENSG00000166394_44 (sequence is synthesized)
ttttgtagagatggggtttcgccatcctgggctgggattacaggcgtgagctaccatgtctgacccctttct

SEQ ID NO: 532163 - DNA, 120 bp, Artificial Sequence
  ENSG00000166394_45 (sequence is synthesized)
tgggattacaggcgtgagctaccatgtctgacccctttctgtaatttttaatactcactctccaactttaatgatcttttcctgctccaaaaagcagttacactaagatcacaggtgggc

SEQ ID NO: 532164 - DNA, 120 bp, Artificial Sequence
  ENSG00000166394_46 (sequence is synthesized)
agacatatcacccccattttacagatgaagagaccaaaacccagagaggtgaagtgacttgcctagggtagcacagggaggcagggcaggcctaggatccgggcatcccatatttgggtt

SEQ ID NO: 532165 - DNA, 120 bp, Artificial Sequence
  ENSG00000166394_47 (sequence is synthesized)
ccttccctgctctcttcttcccacccctcttaacattgtgcccccagtatttgctcccttcactgaagctcagtcctttattcctgggccttatttaagctaaatatgctttgactcagt

SEQ ID NO: 532166 - DNA, 120 bp, Artificial Sequence
  ENSG00000166394_48 (sequence is synthesized)
gcttgatgccttttctataggtaactatgtccagctcttggcaaaaatcgataatgaattggtggtcagggcttacacccctgtctccagtgatgatgacagaggctttgtggacctaat

SEQ ID NO: 532167 - DNA, 120 bp, Artificial Sequence
  ENSG00000166394_49 (sequence is synthesized)
tataaaggtaaatagtgcccaccatatctggctagctcgtgcttccaagcctactgagggtggtggggtggaggggcagtgctttttctctgagggcacatatgccctaggcagggcttt

SEQ ID NO: 532168 - DNA, 120 bp, Artificial Sequence
  ENSG00000166394_50 (sequence is synthesized)
cttgtggcagcttcatcttcagggattgcgtacaacaattcagagaggagaacactttctctgcaaagcttccagcagtaaatgcattttctagttgtacgtggctgtggcattgtgtct

SEQ ID NO: 532169 - DNA, 120 bp, Artificial Sequence
  ENSG00000166394_51 (sequence is synthesized)
aggggaatgacttggtgtttcctcgtcattgtatcaaaatctccagcacaatgcctgatacataaatggtgcctgctaatactgaaaaatggatggagggagtccatgctccttggttac

SEQ ID NO: 532170 - DNA, 120 bp, Artificial Sequence
  ENSG00000166394_52 (sequence is synthesized)
tcacatagccattgtttactcactggttcacctccgtgagtgagaatgctctttgagtctctgtgttaacttcagcttgcccctctttttcctcagaacagaaggcccggcgattccccg

SEQ ID NO: 532171 - DNA, 120 bp, Artificial Sequence
  ENSG00000166394_53 (sequence is synthesized)
accaagcccaggctctattcccactttgtgcactggagcaccagggctagctgaggagactgccctggcctgcttctccagcttaaaatggtgcagacagtcccttagctggacgtgcct

SEQ ID NO: 532172 - DNA, 120 bp, Artificial Sequence
  ENSG00000166394_54 (sequence is synthesized)
cctgggagtcctaaggaatgtcagtgatcttttgcagtctctttaggcaagaactgcagaggtcataagcattctctgtgtttccagggaatcttggaatcagaccagaccagacgagtg

SEQ ID NO: 532173 - DNA, 120 bp, Artificial Sequence
  ENSG00000166394_55 (sequence is synthesized)
taagcattccttttttccttaagatgtactgctgtatttttgctaagtgtaaaatcacagatgtcctcagtggacacttcagaaaatacagaatataaatatttacttactttttaaatc

SEQ ID NO: 532174 - DNA, 120 bp, Artificial Sequence
  ENSG00000166394_56 (sequence is synthesized)
ttttttctatatatgttatatatttgtaatttatatatgctttttttttttcactcagcattaccacaacaggcattttcttctctttaagatgctttataaatattttcatcatagttt

SEQ ID NO: 532175 - DNA, 120 bp, Artificial Sequence
  ENSG00000166394_57 (sequence is synthesized)
ttatcaagttgcactataatttactaacttccacattcaggctgttttcagttctaaataatatggtgatgaataattgtgcctacgcttgattacttttagattattttctaaaacaga

SEQ ID NO: 532176 - DNA, 120 bp, Artificial Sequence
  ENSG00000166394_58 (sequence is synthesized)
atcccagaagtggaatgactgggatgagaatcatgaggagttttaagatccaggtcttctgtgcagttatctttgaggctgtgacaggttatttttggctttggttccctttcccccaaa

SEQ ID NO: 532177 - DNA, 120 bp, Artificial Sequence
  ENSG00000166394_59 (sequence is synthesized)
tggggctccagactgttttcctctccttcacatatccagtgctgttctatcacaggactttctgagcccattacatttcttccagaagatcctgggcctgcactgagcttgttccagtta

SEQ ID NO: 532178 - DNA, 120 bp, Artificial Sequence
  ENSG00000166394_60 (sequence is synthesized)
ggtttgctgtgctagagctcagtgtagatgtaggaggcagggctggagctccgagtgaagccatcctggccagcgcttggctaaggtccttctagttggaggcggtcactgcagctccat

SEQ ID NO: 532179 - DNA, 120 bp, Artificial Sequence
  ENSG00000166394_61 (sequence is synthesized)
gggaacctacatcccatggaggttcttcatccacatggaggaacttcatccacaaaacaaagggtttgagcttcaggagcagcagcagaactcttgtttgccgtgggagttggcagcgag

SEQ ID NO: 532180 - DNA, 120 bp, Artificial Sequence
  ENSG00000166394_62 (sequence is synthesized)
cactccagctggagtggtggcagctttggccaggagtatgctgaccggtgtagtcagtccagggaacaagaggatggccctggaggggctttttcagtgttgcttcttttctagacagag

SEQ ID NO: 532181 - DNA, 120 bp, Artificial Sequence
  ENSG00000166394_63 (sequence is synthesized)
catgggtcagcaccaacccttgaccactttgaggactggtctctgtctctttgttttgttttagttttgtaggaccagatgtgggggttaagcctggggctctggctccagatgggaaat

SEQ ID NO: 532182 - DNA, 120 bp, Artificial Sequence
  ENSG00000166394_64 (sequence is synthesized)
gtgagaaattgagggagaaaggatttgggatggcctgcttttaagggcaatcgagagcaggtgtctaatacatcagcagcacctcacgctgcactgaacatcaaaagggacactgcccct

SEQ ID NO: 532183 - DNA, 120 bp, Artificial Sequence
  ENSG00000166394_65 (sequence is synthesized)
gtccactgtgaacacccacccattccacacagccatcacatacacatctaatatgggcactgaccccttcaccactcacccttctgcttacggccaccacaccccttaccgcccacctca

SEQ ID NO: 532184 - DNA, 120 bp, Artificial Sequence
  ENSG00000166394_66 (sequence is synthesized)
cctggacatgctgagcccccagacagctgctgcagcccagacagcatcccagcaaccactgtgcacagagcaccccacaggcgcgcctctcacactgctcccggctgtacctgcttgtca

SEQ ID NO: 532185 - DNA, 120 bp, Artificial Sequence
  ENSG00000166394_67 (sequence is synthesized)
tacaggtccctggtcggcagagggcgctaccctactgagcaattctgcgcagttccactaacaccaggccacaccctgccggacaactccagctggctgtactgattcacacacctcggt

SEQ ID NO: 532186 - DNA, 120 bp, Artificial Sequence
  ENSG00000166394_68 (sequence is synthesized)
atacctcgttgtgttctccttcctcgtcaatgctgacagctgacagacagcagcagggcttcagggtccctgcagtgagcctgggacctggggtgattgctgcagagggctgtttactag

SEQ ID NO: 532187 - DNA, 120 bp, Artificial Sequence
  ENSG00000166394_69 (sequence is synthesized)
ttctgaggctttttgcagggagcagtagtacagacttctaagcctttgtagagcagcttgtcacctcctccctggctgagggtgggtgtgcaggcggcctgggatcaggaactccacctg

SEQ ID NO: 532188 - DNA, 120 bp, Artificial Sequence
  ENSG00000166394_70 (sequence is synthesized)
gaagaaggatgtgttcacttcccctttcgccatgattttataagtttcctgaggcctccccagccaagctgaactgtcctgaggcaagaatttgcctttgcctgtaatcaagggcgagcc

SEQ ID NO: 532189 - DNA, 120 bp, Artificial Sequence
  ENSG00000166394_71 (sequence is synthesized)
gggcagccaaggttccgaaacgcaccgtgaagaccctctaactgtgcctactattctgctcccctccgatcggcgcggggctcttgtccttcctctctccacccagcgaatgaatgaacg

SEQ ID NO: 532190 - DNA, 120 bp, Artificial Sequence
  ENSG00000166394_72 (sequence is synthesized)
caggagcgctcggagtacacgtcttcaactcggcgacgcccctgcttcggccccaccccgcaaacacccgccccggaccaggcccagggtaggcgcccatgaggacccgtccctgctcct

SEQ ID NO: 532191 - DNA, 120 bp, Artificial Sequence
  ENSG00000166396_0 (sequence is synthesized)
gagaagtcttaggaggtaggaggcaggaggaactgaagcccagctgtgaaggccgcagactgcagtgagaggaggctgcactccattttgcaatggcctcccttgctgcagcaaatgcag

SEQ ID NO: 532192 - DNA, 120 bp, Artificial Sequence
  ENSG00000166396_1 (sequence is synthesized)
agttttgcttcaacctgttcagagagatggatgacaatcaaggaaatggaaatgtgttcttttcctctctgagcctcttcgctgccctggccctggtccgcttgggcgctcaagatgact

SEQ ID NO: 532193 - DNA, 120 bp, Artificial Sequence
  ENSG00000166396_2 (sequence is synthesized)
ccctctctcagattgataagttgcttcatgttaacactgcctcaggatatggaaactcttctaatagtcagtcagggctccagtctcaactgaaaagagttttttctgatataaatgcat

SEQ ID NO: 532194 - DNA, 120 bp, Artificial Sequence
  ENSG00000166396_3 (sequence is synthesized)
cccacaaggattatgatctcagcattgtgaatgggctttttgctgaaaaagtgtatggctttcataaggactacattgagtgtgccgaaaaattatacgatgccaaagtggagcgagttg

SEQ ID NO: 532195 - DNA, 120 bp, Artificial Sequence
  ENSG00000166396_4 (sequence is synthesized)
actttacgaatcatttagaagacactagacgtaatattaataagtgggttgaaaatgaaacacatggcaaaatcaagaacgtgattggtgaaggtggcataagctcatctgctgtaatgg

SEQ ID NO: 532196 - DNA, 120 bp, Artificial Sequence
  ENSG00000166396_5 (sequence is synthesized)
tgctggtgaatgctgtgtacttcaaaggcaagtggcaatcagccttcaccaagagcgaaaccataaattgccatttcaaatctcccaagtgctctgggaaggcagtcgccatgatgcatc

SEQ ID NO: 532197 - DNA, 120 bp, Artificial Sequence
  ENSG00000166396_6 (sequence is synthesized)
aggaacggaagttcaatttgtctgttattgaggacccatcaatgaagattcttgagctcagatacaatggtggcataaacatgtacgttctgctgcctgagaatgacctctctgaaattg

SEQ ID NO: 532198 - DNA, 120 bp, Artificial Sequence
  ENSG00000166396_7 (sequence is synthesized)
aaaacaaactgacctttcagaatctaatggaatggaccaatccaaggcgaatgacctctaagtatgttgaggtattttttcctcagttcaagatagagaagaattatgaaatgaaacaat

SEQ ID NO: 532199 - DNA, 120 bp, Artificial Sequence
  ENSG00000166396_8 (sequence is synthesized)
gggattgcttcggggggtcgtctgtatatatcaaggatgatgcacaaatcttacatagaggtcactgaggagggcaccgaggctactgctgccacaggaagtaatattgtagaaaagcaa

SEQ ID NO: 532200 - DNA, 120 bp, Artificial Sequence
  ENSG00000166396_9 (sequence is synthesized)
ctccctcagtccacgctgtttagagctgaccacccattcctatttgttatcaggaaggatgacatcatcttattcagtggcaaagtttcttgcccttgaaaatccaattggtttctgtta

SEQ ID NO: 532201 - DNA, 120 bp, Artificial Sequence
  ENSG00000166396_10 (sequence is synthesized)
tagcagtccccacaacatcaaagaaccaccacaagtcaatagatttgagtttaattggaaaaatgtggtgtttcctttgagtttatttcttcctaacattggtcagcagatgacactggt

SEQ ID NO: 532202 - DNA, 120 bp, Artificial Sequence
  ENSG00000166396_11 (sequence is synthesized)
gacttgacccttcctagacacctggttgattgtcctgatccctgctcttagcattctaccaccatgtgtctcacccatttctaatttcattgtctttcttcccacgctcatttctatcat

SEQ ID NO: 532203 - DNA, 120 bp, Artificial Sequence
  ENSG00000166396_12 (sequence is synthesized)
tctcccccatgacccgtctggaaattatggagagtgctcaactggtaaggagaacgtagaagtagccctagggatcctttttgaaactctacagttatcgcagatattctagcttcattg

SEQ ID NO: 532204 - DNA, 120 bp, Artificial Sequence
  ENSG00000166396_13 (sequence is synthesized)
taagcaatctaggaaataagccctgctgctttctagaaataagtgtgaaggataaattttctttgttgacctatgaagattttagagtttaccttcatatgtttgattttaaatcagtgt

SEQ ID NO: 532205 - DNA, 120 bp, Artificial Sequence
  ENSG00000166396_14 (sequence is synthesized)
ataatctagatggtaaaaaatgtgaaattgggattagggaccaaccaaaatatttcattaatgctttcaattgacaaattttggtctttctttgataagacaatatgtacatagtttttt

SEQ ID NO: 532206 - DNA, 120 bp, Artificial Sequence
  ENSG00000166396_15 (sequence is synthesized)
caaatattaaagatcttttaactgttggcagttgttatctacagaatcatatctcatatgctgtgtagtttataagttttttctctatttatcagaataaagaaatacaacatacctgta

SEQ ID NO: 532207 - DNA, 120 bp, Artificial Sequence
  ENSG00000166396_16 (sequence is synthesized)
atcaataagcagctgcctgtgcagagtgcaggctgcacctttggacagcctttaaaactgaattctcagaattttagaacaaatttttgtctagaaatgctgactttggttcattaggta

SEQ ID NO: 532208 - DNA, 120 bp, Artificial Sequence
  ENSG00000166396_17 (sequence is synthesized)
gtggtaaaacaggctcccttcgaagctctccttcatcaccttcctaagtgcatgggggaaaatacctagggctcaacagtcttgagaagtgtggaaacattttctttgtgagtgagaaca

SEQ ID NO: 532209 - DNA, 120 bp, Artificial Sequence
  ENSG00000166396_18 (sequence is synthesized)
attaaactcatcacacaacatccagatcggataatggtcctcttgtctgcttctccaccttacagcttgtctatgactgatttaagtggtgtcatgggagaatggcatgggaatcggatg

SEQ ID NO: 532210 - DNA, 120 bp, Artificial Sequence
  ENSG00000166398_0 (sequence is synthesized)
gtaacttccggtgtacacagccggtccaaggcggtgcgctgggggccggggcgcgtcgcaggaaaggacttagaagccttacaaatacatctgtgcattcttgcttcagactttacaact

SEQ ID NO: 532211 - DNA, 120 bp, Artificial Sequence
  ENSG00000166398_1 (sequence is synthesized)
gagggccagcccagtctggaagcatctcttattaatgttacaaggaaaccgctacctcagcaaacaaaaggaatggaggaggagacttacaacaaacgccatttaaaaaaaaaagaaaaa

SEQ ID NO: 532212 - DNA, 120 bp, Artificial Sequence
  ENSG00000166398_2 (sequence is synthesized)
cttgttttcaggaaacattagaggaaatttggagaatttcagcattgcatagaagcagccttacaggtaaacggatttgacgggcaggctctgtcaaaattctgcagaagtttgatcttc

SEQ ID NO: 532213 - DNA, 120 bp, Artificial Sequence
  ENSG00000166398_3 (sequence is synthesized)
cttcttaaggactttgtgtgaagtaattctttactgcttttaaattgctgttgatcagcttctgggtttttgggttctaacttttttgggtatattgaagacacagtgtattacattata

SEQ ID NO: 532214 - DNA, 120 bp, Artificial Sequence
  ENSG00000166398_4 (sequence is synthesized)
ttacatttttaaacgttaagttatttttctgccattgtaaatacaagtatcaaaatattcttgcaaagaagtaaacatttttctcagcaagcatatccttttagtaagagagtggaatgc

SEQ ID NO: 532215 - DNA, 120 bp, Artificial Sequence
  ENSG00000166398_5 (sequence is synthesized)
taaacagttcttatccagcattttggacatcttttattttttgtcagagatcctgtctacactgaaaatattaattatataaacctgttgtctctcacctctacattggatcacatggtc

SEQ ID NO: 532216 - DNA, 120 bp, Artificial Sequence
  ENSG00000166398_6 (sequence is synthesized)
acctgcctcatggaaatgccttttttaaaacttcgatttgcagaactccactatttttatacctagctacagttttgagaaagaagaatcagaaccctgacccacttacggttgctggga

SEQ ID NO: 532217 - DNA, 120 bp, Artificial Sequence
  ENSG00000166398_7 (sequence is synthesized)
caattccccctcccgcatgtattgctgcagtgcccaggacagtaaaatggactacaagcggcgcttcctgcttggcgggtccaagcagaaggtgcagcagcaccagcaatacccgatgcc

SEQ ID NO: 532218 - DNA, 120 bp, Artificial Sequence
  ENSG00000166398_8 (sequence is synthesized)
tgagctgggccgagcactgagtgctcccctggcatccacggccaccactgcccccctgggcagtctgaccgctgcaggcagctgccaccatgccatgccccacactactcctatcgccga

SEQ ID NO: 532219 - DNA, 120 bp, Artificial Sequence
  ENSG00000166398_9 (sequence is synthesized)
catccagcagggcatctccaagtatctggatgccctgaacgtcttctgccgtgccagtactttcctcacagatctcttcagcactgtgttcaggaactctcactactcaaaggcagccac

SEQ ID NO: 532220 - DNA, 120 bp, Artificial Sequence
  ENSG00000166398_10 (sequence is synthesized)
acagctcaaagatgtgcaggagcatgtcatggaagcagccagtcggctgacctcggccataaagcctgagatcgccaagatgctaatggaacttagtgctggggctgcaaattttacgga

SEQ ID NO: 532221 - DNA, 120 bp, Artificial Sequence
  ENSG00000166398_11 (sequence is synthesized)
tcagaaggaattcagtctccaggacattgaggtgttggggcgatgtttcctgactgtggtgcaagtccatttccagtttttgactcatgcgttacagaaggtccagccggtggctcactc

SEQ ID NO: 532222 - DNA, 120 bp, Artificial Sequence
  ENSG00000166398_12 (sequence is synthesized)
ttgctttgctgaggtcatcgtgccagaaaaaaagaacagcggcagtggcggcggcttatctggcatgggccacacacctgaagtagaggaagctgtgcggtcctggcggggggctgctga

SEQ ID NO: 532223 - DNA, 120 bp, Artificial Sequence
  ENSG00000166398_13 (sequence is synthesized)
ggcgacatctagactaagagaaagaggctgtgatggttgcctggcaggaattgaagttcaacaactcttttgttctcaaagtgcagcaattcctgagcaccagctaaaagaactgaacat

SEQ ID NO: 532224 - DNA, 120 bp, Artificial Sequence
  ENSG00000166398_14 (sequence is synthesized)
aaaaatcgacagtgctttgcaagcatataagatagctctggaaagcttaggacactgtgaatatgcaatgaaagccggcttccacctgaatccaaaggcgattgaagcaagtttgcaggg

SEQ ID NO: 532225 - DNA, 120 bp, Artificial Sequence
  ENSG00000166398_15 (sequence is synthesized)
ctgctgcagcgaggcggaagcccagcagacggggcggaggcagacacccccgcagcccatgcagtgtgagctccccaccgtccctgtgcagataggatcgcacttcctgaagggcgtctc

SEQ ID NO: 532226 - DNA, 120 bp, Artificial Sequence
  ENSG00000166398_16 (sequence is synthesized)
ctttaatgagtcggccgccgacaatctgaaacttaagacgcatacaatgttacagctgatgaaggaggcaggctgctataatggaatcacatccagggatgattttcctgtgactgaagt

SEQ ID NO: 532227 - DNA, 120 bp, Artificial Sequence
  ENSG00000166398_17 (sequence is synthesized)
gctgaaccaggtttgcccttccacatggcgaggtgcctgcaagacggcggtgcagctgctgtttggccaggctggactggtggtggttgacacagcacagattgagaataaagaagccta

SEQ ID NO: 532228 - DNA, 120 bp, Artificial Sequence
  ENSG00000166398_18 (sequence is synthesized)
tgccccccagatcagtttagaaggctctagaatcgtggttcaagtcccatccacatggtgcctgaaagaagaccctgctaccatgtccctgctgcagagaagccttgatcctgagaagac

SEQ ID NO: 532229 - DNA, 120 bp, Artificial Sequence
  ENSG00000166398_19 (sequence is synthesized)
cctgggtctagtggacgtgctctacacagctgtgctggacctaaaccgctggagggctggaagggagcaagctttaccctgcatacagatccagctgcaaagggagatctgtgattttgg

SEQ ID NO: 532230 - DNA, 120 bp, Artificial Sequence
  ENSG00000166398_20 (sequence is synthesized)
caaccaggctgacctgccttctggaaatggaaacaaatcttcaggtggcctgcagaagacattctccaaactgacatcccggttcaccaagaaagcttcatgtaccagctccagcagcag

SEQ ID NO: 532231 - DNA, 120 bp, Artificial Sequence
  ENSG00000166398_21 (sequence is synthesized)
cacaaattattccatccaaaataccccttccaaaaacatcttcatagctggatgttccgaagagaaggccaaaatgcctggcaatattgatacaaggttacaaagcattttgaacattgg

SEQ ID NO: 532232 - DNA, 120 bp, Artificial Sequence
  ENSG00000166398_22 (sequence is synthesized)
taatttccccaggactacagacccttcacagtcagctcagaattccagtaatacagtggccaatggctttctcatggagaggcgtgagaacttcctgcatggagatgacggcaaggatga

SEQ ID NO: 532233 - DNA, 120 bp, Artificial Sequence
  ENSG00000166398_23 (sequence is synthesized)
gaagggtatgaacttaccaactgatcaggaaatgcaagaggtgatagattttctctcgggctttaacatgggccagtcacatcagggctctccgttggtgacaaggcataattctgctgc

SEQ ID NO: 532234 - DNA, 120 bp, Artificial Sequence
  ENSG00000166398_24 (sequence is synthesized)
cacagccatggtgactgagcagaaggcaggagccatgcaaccacagcagccgtcactgcctgtgccccctccaccacgggcaccccaggctggggcacacacacctctgacaccccagcc

SEQ ID NO: 532235 - DNA, 120 bp, Artificial Sequence
  ENSG00000166398_25 (sequence is synthesized)
gggactggcacctcagcagcagtccccaaagcagcaacaacctcaagtccaatactaccaacacctactccagcccattggaccgcagcagcccccgccccagcctcgggcacctgggaa

SEQ ID NO: 532236 - DNA, 120 bp, Artificial Sequence
  ENSG00000166398_26 (sequence is synthesized)
atgggtacatggctcatcccagcagccagcgcaggctgttggagcaggtctgtctcctcttggtcagtggcctggcatatctgatctcagttctgacttgtacagcttgggtctggtgag

SEQ ID NO: 532237 - DNA, 120 bp, Artificial Sequence
  ENSG00000166398_27 (sequence is synthesized)
agtgatggagtctttggaatgctgggagagattctgccttttgatcctgcagtgggctcagacccagagtttgcacgctatgtggcaggagtgagccaggcgatgcagcagaagcggcag

SEQ ID NO: 532238 - DNA, 120 bp, Artificial Sequence
  ENSG00000166398_28 (sequence is synthesized)
gcccagcacggtcgccggccaggcaacccccggggcaactggccgcctatggatgacgcgcatcggacctggcccttccccgagttcttcacagaaggggatggcctgcacggtggctgg

SEQ ID NO: 532239 - DNA, 120 bp, Artificial Sequence
  ENSG00000166398_29 (sequence is synthesized)
tcgggtgctcagggagactctgccagctcgagtgatgagacatcctcagccaacggggacagcttgttctccatgttttcagggcctgacctcgttgctgctgtcaagcagagaaggaaa

SEQ ID NO: 532240 - DNA, 120 bp, Artificial Sequence
  ENSG00000166398_30 (sequence is synthesized)
cacagcagtggagagcaagacaccagcacgctgccctcaccacctctcctcaccacggtggaggatgtgaaccaggataacaaaaccaaaacgtggccacccaaagcaccctggcagcac

SEQ ID NO: 532241 - DNA, 120 bp, Artificial Sequence
  ENSG00000166398_31 (sequence is synthesized)
ccttccccgcttcccagcacgctgcccagccccagcgcaccactctatgcagtcaccagccctggcagccagtggaacgacaccatgcagatgctgcagtccccagtgtgggccgcaacc

SEQ ID NO: 532242 - DNA, 120 bp, Artificial Sequence
  ENSG00000166398_32 (sequence is synthesized)
aacgactgcagtgccgctgccttctcctatgtgcagaccccaccccagcccccacccccaccagcacacaaggcagcacccaagggcttcaaggccttccctgggaagggtgagcgcagg

SEQ ID NO: 532243 - DNA, 120 bp, Artificial Sequence
  ENSG00000166398_33 (sequence is synthesized)
ccagcctatctgccccagtactgaccccaggccagccagcctgcctgcctgcctgcctgcccgcccagagctgtggggatgagtgtccccaccccagggccacttagctgacaccagccc

SEQ ID NO: 532244 - DNA, 120 bp, Artificial Sequence
  ENSG00000166398_34 (sequence is synthesized)
ctcagaggaccagtgcgccccatcccagggagggttccttggggacaagggtggttggcagctccaagcctttaaacctggcttctgaaacgatggcatcagagccctggagagccagct

SEQ ID NO: 532245 - DNA, 120 bp, Artificial Sequence
  ENSG00000166398_35 (sequence is synthesized)
ggagacacaggcgtctggccttcaggggcttgctagggaacctgcatgcctagtaagcgccacaggtgactctgatgcaggcgccacagccacacttgaagaaacacagctcttgggttt

SEQ ID NO: 532246 - DNA, 120 bp, Artificial Sequence
  ENSG00000166398_36 (sequence is synthesized)
ttagtcctgctgtgtgttgggaagacatcaggcctgaaagctgagggcataactgaccattttttggaaaccctctcctccctcctccacaccttgagtgatgaccacaccaatcactgt

SEQ ID NO: 532247 - DNA, 120 bp, Artificial Sequence
  ENSG00000166398_37 (sequence is synthesized)
attttatagctttttttttcatgtaggtttttagttaaaacatctcctgcctaaaatgcattgaatattttaagataacagatatactggctggaggtttgtttaacactatctatattt

SEQ ID NO: 532248 - DNA, 120 bp, Artificial Sequence
  ENSG00000166398_38 (sequence is synthesized)
aagcttatacaaaatgggcaaaatatagaatatttgtgattggaagcagtcacctggggtttctgggggtggacagttcctcgccacccagcagcaccctgggactgcggcctttcccag

SEQ ID NO: 532249 - DNA, 120 bp, Artificial Sequence
  ENSG00000166398_39 (sequence is synthesized)
ctttattgaagcagaatggtggaacttgtgccggaggtacactgctgaaggtgcgtggcggtggaccagccagctgctgtccatgtgcagagcaaggctgcacctgctgcccttcgatcc

SEQ ID NO: 532250 - DNA, 120 bp, Artificial Sequence
  ENSG00000166398_40 (sequence is synthesized)
ttccacacatggccaggacactgccacaatcctcggggtgtggtcaaggggcactcagagacacctgcactagaaattgcattgacattgtgagctggctcagaagacaaaccaattaag

SEQ ID NO: 532251 - DNA, 120 bp, Artificial Sequence
  ENSG00000166398_41 (sequence is synthesized)
atgtagatagaaattaatttaaggtcttttcttaaaaaaaaaatccacctcattttcagttaacatgtgccattaaatagataacatcctgtggatttagggatattttccagccagaat

SEQ ID NO: 532252 - DNA, 120 bp, Artificial Sequence
  ENSG00000166398_42 (sequence is synthesized)
ggatccagaagaattgaatggtgcttaaattgagaaataataataaatatatctatatagaatagacatatcccactgtatattaattgaggttacagaaagttctttatataaaactta

SEQ ID NO: 532253 - DNA, 120 bp, Artificial Sequence
  ENSG00000166398_43 (sequence is synthesized)
gaggttacagaaagttctttatataaaacttatttaaatttttcatatttcatctttgaaaaagtctgagaaaaatccataatattttctggtatgaaagtttgacagtattaatatttt

SEQ ID NO: 532254 - DNA, 120 bp, Artificial Sequence
  ENSG00000166398_44 (sequence is synthesized)
aatatatgttaactactaataaatggtttattctttctaactccatataagcttttccagcaaagattgtaataacacatttatgttctcgtttttctacagatataagtaaatttatat

SEQ ID NO: 532255 - DNA, 120 bp, Artificial Sequence
  ENSG00000166398_45 (sequence is synthesized)
ggtgacagagtgagattccgtctcaacaagaaaaaaaaaaaagaatatatatatatgtatgtatgtatgtatgtaaacacacacactaatttgagaggacccgtagggtgtctgagccca

SEQ ID NO: 532256 - DNA, 120 bp, Artificial Sequence
  ENSG00000166398_46 (sequence is synthesized)
actaatttgagaggacccgtagggtgtctgagcccagccacctgagtttttagtactgtgttgtcaggctcttcccaggcctcaggtgttgtcttttgtgctgtgtggggatgcattgct

SEQ ID NO: 532257 - DNA, 120 bp, Artificial Sequence
  ENSG00000166398_47 (sequence is synthesized)
gcctgtatttatgatcttttgccgtggttctgagcattcacctcaccatgtttacaaagaactgttttgtatatagacattttcaggcacgtgctttgcaccaaccctgcgtggctcttg

SEQ ID NO: 532258 - DNA, 120 bp, Artificial Sequence
  ENSG00000166398_48 (sequence is synthesized)
tctgtgttagctgtcacggtgtgcacactaatctctgttaaagttgtctatggctgttctacttgtaagatagttttctatttccttcagtaatgtgtccacagtaccctgtatttcgag

SEQ ID NO: 532259 - DNA, 120 bp, Artificial Sequence
  ENSG00000166398_49 (sequence is synthesized)
ttccattatactgaagtactcatgttttaatagtgcctctccaaaggcctcaccttggacagaggtcaatccttgatgctccagcacaggtgacgtcactaattgtcactttccagtttg

SEQ ID NO: 532260 - DNA, 120 bp, Artificial Sequence
  ENSG00000166398_50 (sequence is synthesized)
tttttctctattaaggaagacattttctaattgcatctccatgggctgtgagactgtgtgaagccgtttgtgtggtctccatgtaggtgctgtgttcccggcaccgccttgctctgaaca

SEQ ID NO: 532261 - DNA, 120 bp, Artificial Sequence
  ENSG00000166398_51 (sequence is synthesized)
ctggtaattccaggtgctgcgcttggcagaggggtctcgccaaagcgcatgtgtgtgcatgtgtgaacgtgtgtgtcctttgcatggttgggcgtgggtgccttgctagggcatcagcag

SEQ ID NO: 532262 - DNA, 120 bp, Artificial Sequence
  ENSG00000166398_52 (sequence is synthesized)
gacattgtgtgtatagttacaatgcttccaaactggaactctacattttgtatcttttaaagctcctataagtaaaataactattggctttattaaaaatatacatttaataatactttg

SEQ ID NO: 532263 - DNA, 120 bp, Artificial Sequence
  ENSG00000166398_53 (sequence is synthesized)
acttcttttagtttgttgcctggacttgggagttgggcccagagctgcaggaagaaatgttcaatcatatacaacattggagcaagtgatatgatgcacctcatgtacccatcacctaac

SEQ ID NO: 532264 - DNA, 120 bp, Artificial Sequence
  ENSG00000166398_54 (sequence is synthesized)
gagagaattgcaaatttttattgtaaagacaactggggatttttttatatcccatattgctacatggttaataaatctggatgactaaagaccagctcaactttttgttttttcttattt

SEQ ID NO: 532265 - DNA, 68 bp, Artificial Sequence
  ENSG00000166398_55 (sequence is synthesized)
atttttaaatttttttttttacttaaaaattttttttcaaggttaatgtgtgccatggtggtttgctg

SEQ ID NO: 532266 - DNA, 120 bp, Artificial Sequence
  ENSG00000166398_56 (sequence is synthesized)
agcccagcatccattagctattcttccccatgctctccctcccttgctttttctaaaacaaatttcatatacaaaccataggcttcttagaggaataaagggaattgatgaatatgtatt

SEQ ID NO: 532267 - DNA, 120 bp, Artificial Sequence
  ENSG00000166398_57 (sequence is synthesized)
aaagggaattgatgaatatgtattacttttgaaataaggcaaaggaggaaaacctcacgttttaagaagggagagacaagagaccactatttggttatgggatgaatgcagggtaaggac

SEQ ID NO: 532268 - DNA, 120 bp, Artificial Sequence
  ENSG00000166398_58 (sequence is synthesized)
atagggcattacttcttttagtttgttgcctggacttgggagttgggcccagagctgcaggaaggaaaggacttagaagccttacaaatacatctgtgcattcttgcttcagactttaca

SEQ ID NO: 532269 - DNA, 120 bp, Artificial Sequence
  ENSG00000166401_0 (sequence is synthesized)
caagccagagcaatcgaacggttctgagtcatctgccggaagccttgccctcaatcaaggcggacgtgaagcatctacaaaggaggaatagtcaaagcagcagcggcggcggcggcggcg

SEQ ID NO: 532270 - DNA, 120 bp, Artificial Sequence
  ENSG00000166401_1 (sequence is synthesized)
gcagcagcagcagcagcaggaggtgggggcctctgccagaccttctctgatggatgacctctgtgaagcaaatggcacttttgccatcagcttatttaaaatattgggggaagaggacaa

SEQ ID NO: 532271 - DNA, 120 bp, Artificial Sequence
  ENSG00000166401_2 (sequence is synthesized)
ctcaagaaacgtattcttctctcccatgagcatctcctctgccctggccatggtcttcatgggggcaaagggaagcactgcagcccagatgtcccaggcactttgtttatacaaagacgg

SEQ ID NO: 532272 - DNA, 120 bp, Artificial Sequence
  ENSG00000166401_3 (sequence is synthesized)
agatattcaccgaggtttccagtcacttctcagtgaagttaacagaactggcactcagtacttgcttagaactgccaacagactctttggagaaaagacgtgtgatttccttccagactt

SEQ ID NO: 532273 - DNA, 120 bp, Artificial Sequence
  ENSG00000166401_4 (sequence is synthesized)
taaagaatactgtcagaagttctatcaggcagagctggaggagttgtcctttgctgaagacactgaagagtgcaggaagcatataaatgactgggtggcagagaagactgaaggtaagat

SEQ ID NO: 532274 - DNA, 120 bp, Artificial Sequence
  ENSG00000166401_5 (sequence is synthesized)
ttcagaggtactggatgctgggacagtcgatcccctgacaaagctggtccttgtgaatgccatttatttcaagggaaagtggaatgagcaatttgacagaaagtacacaaggggaatgct

SEQ ID NO: 532275 - DNA, 120 bp, Artificial Sequence
  ENSG00000166401_6 (sequence is synthesized)
ctttaaaaccaacgaggaaaaaaagacagtgcagatgatgtttaaggaagctaagtttaaaatggggtatgcggatgaggtacacacccaggtcctggagctgccctatgtggaagagga

SEQ ID NO: 532276 - DNA, 120 bp, Artificial Sequence
  ENSG00000166401_7 (sequence is synthesized)
gctgagcatggtcattctgcttcccgatgacaacacggacctcgccgtggtggaaaaagcacttacatatgagaaattcaaagcctggacaaattcagaaaagttgacaaaaagtaaggt

SEQ ID NO: 532277 - DNA, 120 bp, Artificial Sequence
  ENSG00000166401_8 (sequence is synthesized)
tcaagttttccttcccagattaaagctggaggagagttatgacttggagcctttccttcgaagattaggaatgatcgatgcttttgacgaagccaaggcagacttttctggaatgtcaac

SEQ ID NO: 532278 - DNA, 120 bp, Artificial Sequence
  ENSG00000166401_9 (sequence is synthesized)
tgagaagaatgtgcctctgtccaaggttgcccacaagtgcttcgtggaggtcaatgaggaaggcacagaggctgccgcagccactgctgtggtcaggaattcccggtgcagcagaatgga

SEQ ID NO: 532279 - DNA, 120 bp, Artificial Sequence
  ENSG00000166401_10 (sequence is synthesized)
gccaagattctgtgcagaccacccttttcttttcttcatcaggcaccacaaaaccaactgcatcttgttctgtggcaggttctcttctccgtaaagaggagcaattgctgtacataccct

SEQ ID NO: 532280 - DNA, 120 bp, Artificial Sequence
  ENSG00000166401_11 (sequence is synthesized)
cctttccttctacctatcttgccttaattaacattccctgtgacctagttggtgcagtggcttgaatgccaaaataaagcgtgtgcactggatagtgtgtgaaagtctttgctgaaagtt

SEQ ID NO: 532281 - DNA, 120 bp, Artificial Sequence
  ENSG00000166401_12 (sequence is synthesized)
ccagagccattgagaataactgaggccgcagatgcatgaaatttgggcctgggaaggctatgctggttttggagtgtttggggtgcctgccattgcctctgccttcacctaagtctgtgc

SEQ ID NO: 532282 - DNA, 120 bp, Artificial Sequence
  ENSG00000166401_13 (sequence is synthesized)
ccattgtttcaggggatcttatggagcatctcagggcttcaggagccagccctcttccatccgcccggctctgcccaccaccactgccaggctgaacaggggactagtgcccaggtgaca

SEQ ID NO: 532283 - DNA, 120 bp, Artificial Sequence
  ENSG00000166401_14 (sequence is synthesized)
atagagtaaagctgcagccaccctgtgtctcatgtgcagctgaaatagtgatctgcttctgtcactgtcacatagacagccctgcatgccccctgtctcacacagtttgtaatgaagaca

SEQ ID NO: 532284 - DNA, 120 bp, Artificial Sequence
  ENSG00000166401_15 (sequence is synthesized)
gctccttctcatctttccataagcctgagatacaagttcagggactcagcaatgcactttaggactgagctaggaggcaaatatctgaagcttgctatgctgttctttccattccttttc

SEQ ID NO: 532285 - DNA, 120 bp, Artificial Sequence
  ENSG00000166401_16 (sequence is synthesized)
cctctgaaacacacaaaataccaaaggaacttacgcaacacaccactgagtcctctaactaatcatatgtgctcagacacagctcaagcacaccccttagttaagaaagaacctccatat

SEQ ID NO: 532286 - DNA, 120 bp, Artificial Sequence
  ENSG00000166401_17 (sequence is synthesized)
acattaatttttttctgcctaaaaataaaattgcgttgtggcagcaatttggaaactacagcaaagtctccaaaaaaattgaagtcacccacaattccaacacacagcaatcactgctgt

SEQ ID NO: 532287 - DNA, 120 bp, Artificial Sequence
  ENSG00000166401_18 (sequence is synthesized)
taatagtgatatacatccttccctattatgtgtatgcaaatagaaatttataagcattttactacaagttaatcatatccttcagtagcttatttcttcccttatgaaaaacctccctta

SEQ ID NO: 532288 - DNA, 120 bp, Artificial Sequence
  ENSG00000166401_19 (sequence is synthesized)
agatctttccaggtcatcaatttgatgtgcatagtattccactgtgtggctggatttctataattgaatctaattttagacagtttgagtaattaaaattatttctattaacaaataata

SEQ ID NO: 532289 - DNA, 120 bp, Artificial Sequence
  ENSG00000166401_20 (sequence is synthesized)
gattgctaataatatatattatgctgttttggatatactaaatatttgctcacatccttaatatattttttaaaattcctaacaatagtactgttgagataaaagttgagcacattttga

SEQ ID NO: 532290 - DNA, 120 bp, Artificial Sequence
  ENSG00000166401_21 (sequence is synthesized)
gacttcttccaaattggtccctagaaagttacactggtttgtactctcacttatgtcactgtttataccaccactgactgctgcctgctttattatttctttaatgagttggactgaaca

SEQ ID NO: 532291 - DNA, 120 bp, Artificial Sequence
  ENSG00000166401_22 (sequence is synthesized)
gtggttaatcctgactctgtttttgactgacagttaacagttacatgaaccattcatattacagctcttacttaaatttgaccaagccaggatatatctgttaggccacattcatttagg

SEQ ID NO: 532292 - DNA, 120 bp, Artificial Sequence
  ENSG00000166401_23 (sequence is synthesized)
gatcatgttttccaaagcaggtttgggcaaaattaatccacaggactgaaaggtatacatctgtgagttttgttctcacttccacctctaatttgaagaacactttaattgacacagaat

SEQ ID NO: 532293 - DNA, 120 bp, Artificial Sequence
  ENSG00000166401_24 (sequence is synthesized)
acatttcacatatttaacctctacaataagttctgacacattttccatgaaacaaaccatcgctatattcaagataatgaacctatctatcatactcccaaattccttcttgcatctttg

SEQ ID NO: 532294 - DNA, 120 bp, Artificial Sequence
  ENSG00000166401_25 (sequence is synthesized)
taatttctcactcttccttctccctctccccgtcccatcccaaccactgatctgctcaggcaactaccaatcttctttctgtcactatagattaatttgcatttttaaagaaatttacat

SEQ ID NO: 532295 - DNA, 120 bp, Artificial Sequence
  ENSG00000166401_26 (sequence is synthesized)
acatggaaccatacatcatctatgctttgtagtatgactcctgtcactcagtacaattattttgagattcatttatgttattgtatgtatcaatagttcatcccttttattggtaagtaa

SEQ ID NO: 532296 - DNA, 120 bp, Artificial Sequence
  ENSG00000166401_27 (sequence is synthesized)
catttttttgtataggtataccatgatttgttgatgaacaaatttacctgttgatgaacatttacgttgttaccaagatttttgctattgaaaataaagtttttatgaatatttatatat

SEQ ID NO: 532297 - DNA, 120 bp, Artificial Sequence
  ENSG00000166401_28 (sequence is synthesized)
aatcaaggcggacgtgaagcatctacaaaggaggaatagtcaaagcagcagcggcggcggcggcggcggcagcagcagcagcagcaggagaccttctctgatggatgacctctgtgaagc

SEQ ID NO: 532298 - DNA, 120 bp, Artificial Sequence
  ENSG00000166401_29 (sequence is synthesized)
aaacaccagctgggtgaagatcaagggcggcccagatgcatgagtgccaactacatcatgactgtcacaatctttgtgctggtacagatttcatcttcaggtctggagctgtatagaaaa

SEQ ID NO: 532299 - DNA, 120 bp, Artificial Sequence
  ENSG00000166401_30 (sequence is synthesized)
ctgcctactggaaattgtccttcagatgtctgcaggcatttcacacttaactttctttcaaaataaagacattttccattcctgcatctgctgcaccccatacagccttcatctgattta

SEQ ID NO: 532300 - DNA, 120 bp, Artificial Sequence
  ENSG00000166401_31 (sequence is synthesized)
cctcctgtgattccagtctgtctgaacagcaccatcatccagtcagttctccaagccagaagcccagcagtcatcttagacttctccttactcttgcctcctgcatccagtcacttctgt

SEQ ID NO: 532301 - DNA, 120 bp, Artificial Sequence
  ENSG00000166401_32 (sequence is synthesized)
cttccttgcctacttgtactgtgtgtactgatacatctcataatctgtcttcatctctctgtacctagggccagtgctctaattcaagtcctcatcatttctctcctggaaaaaggctgt

SEQ ID NO: 532302 - DNA, 120 bp, Artificial Sequence
  ENSG00000166401_33 (sequence is synthesized)
tacttcttcattcttgctcccacttctcctcgactccatcctccagattattgccagaaccaatcacagaaatctaattgaacaatacatctgttcacaactttccagtagctaaccagt

SEQ ID NO: 532303 - DNA, 120 bp, Artificial Sequence
  ENSG00000166401_34 (sequence is synthesized)
agctataggataaaccactctctttcacgttatataagaaaagccttcagtatctaccccatgtttaatactacactacgctgttaagatttatgccacagcaacactgatctacccagt

SEQ ID NO: 532304 - DNA, 120 bp, Artificial Sequence
  ENSG00000166401_35 (sequence is synthesized)
aagtggtcagtacattttagttgaattaataaagataagtgacagtgtgatttgatggcccatgaactcccgtatcaacctcatcaattgtcacctcaccattaaaactatctccttcca

SEQ ID NO: 532305 - DNA, 120 bp, Artificial Sequence
  ENSG00000166401_36 (sequence is synthesized)
cagcacctgagtgtaagtacagaaacatcagacggcattgaattgagggatattctaccaaataattggctgaaactctctaaaagaggcaatgtcataaaagacaagcactgtggaagt

SEQ ID NO: 532306 - DNA, 120 bp, Artificial Sequence
  ENSG00000166401_37 (sequence is synthesized)
gccacaggaggatgtgtgataactaattgcaacctgcgagcttctttgggtcccacaaaacacctgaataaatacaaaagaagacattcaaatgtccaagaaggaaatataaaaggattt

SEQ ID NO: 532307 - DNA, 120 bp, Artificial Sequence
  ENSG00000166401_38 (sequence is synthesized)
aaaccactgacaacatcaagagtgggcaacgatgtagaacaactggaattctcctacatttttcttgggaataaattagtaaagacactcaaaaaattggccatatctacaaaagcctaa

SEQ ID NO: 532308 - DNA, 120 bp, Artificial Sequence
  ENSG00000166401_39 (sequence is synthesized)
tagtgttgaagcaaacgttgcactaagcaaagttaagcatgtcctataacctgaatgccgtcttccaccaaaatttatatgttgaaacccaacatccaatgtatcagtattaagaggtgg

SEQ ID NO: 532309 - DNA, 120 bp, Artificial Sequence
  ENSG00000166401_40 (sequence is synthesized)
gacctttgggaggtgattaggtcctgaggaaaaagccctcataaatgggattgatgtcctcataaaaggggccccagagaactaccttgcccctctgccatgtgagtacacagtgagaag

SEQ ID NO: 532310 - DNA, 120 bp, Artificial Sequence
  ENSG00000166401_41 (sequence is synthesized)
gtgccatctataaagcagagaataagcccttaccagacatcaaatataatggtactttgattttggacttcccagcctctaaaattgtacgaaataaatttatgttgtttataagccacc

SEQ ID NO: 532311 - DNA, 120 bp, Artificial Sequence
  ENSG00000166401_42 (sequence is synthesized)
gtgcgtgagagaggggaagggaggaaggccagagcaggaatcagagcgaggcaaaggcgggcaggaactaggagaatgacggcgggaggcggccgggaaagagagtcgcggggctgtggg

SEQ ID NO: 532312 - DNA, 120 bp, Artificial Sequence
  ENSG00000166401_43 (sequence is synthesized)
ccaggacaggcagaggacaaacaaggatgctgatgaagtcttcttgcattccccatttctcgtctcatgctcccttctcatgcctcccttcatcttcagatgaaacacaattccctctct

SEQ ID NO: 532313 - DNA, 120 bp, Artificial Sequence
  ENSG00000166401_44 (sequence is synthesized)
tttactctgagttgccctctgatttaaccctgaatagtcccctcattagactcagaagcagagttctgagccatgctctttgtcttttgtcaaacaatctctcccactcacagtagtatg

SEQ ID NO: 532314 - DNA, 120 bp, Artificial Sequence
  ENSG00000166401_45 (sequence is synthesized)
tattgcatgaagattaatgtaatgaattggttagaattttctaaactgttaaaaaatgtttttaacatttgaaaggagttaggtacaaattgtttttattaaaaatttctgcctgtctca

SEQ ID NO: 532315 - DNA, 120 bp, Artificial Sequence
  ENSG00000166402_0 (sequence is synthesized)
cttgaggattcagtctggtcctgaagggtttggggggagactgcgaccagaagatgtttccatgtcctaattaatgggtgatggtggttgttagtctgactgttgccacggtgatgaagg

SEQ ID NO: 532316 - DNA, 120 bp, Artificial Sequence
  ENSG00000166402_1 (sequence is synthesized)
gagacatccaagtgctggtttcagtactgaggcgaatacagggaatttcaacaggctccaggtcttactatgcagcctgaagtgggaccatcccttaaacccactccatcctgtggccac

SEQ ID NO: 532317 - DNA, 120 bp, Artificial Sequence
  ENSG00000166402_2 (sequence is synthesized)
gatgggggccaggacacctttgccttctttctgggtttctttctttgccgagacagggattttgttcccaggaggcactccctggcccatgggatctcagcattcaaagcagcacaggaa

SEQ ID NO: 532318 - DNA, 120 bp, Artificial Sequence
  ENSG00000166402_3 (sequence is synthesized)
acctgggcccctgaaacggggccaccgaagagatcggagaacaaccaggaggaagtactggaaggaaggaagggagatcgctcgtgtcttagatgatgagggcagaaacctgaggcagca

SEQ ID NO: 532319 - DNA, 120 bp, Artificial Sequence
  ENSG00000166402_4 (sequence is synthesized)
gaagcttgatcggcagcgggccctgctggagcagaagcagaagaagaagcgccaggagcccctgatggtgcaggccaatgcagatgggcggccccggagccggcgggcccggcagtcaga

SEQ ID NO: 532320 - DNA, 120 bp, Artificial Sequence
  ENSG00000166402_5 (sequence is synthesized)
ggaacaagcccccctggtggagtcctacctcagcagcagtggcagcaccagctaccaagttcaagaggccgactcactcgccagtgtgcagctgggagccacgcgcccaacagcaccagc

SEQ ID NO: 532321 - DNA, 120 bp, Artificial Sequence
  ENSG00000166402_6 (sequence is synthesized)
ttcagccaagagaaccaaggcggcagctacagcagggggccagggtggcgccgctaggaaggagaagaagggaaagcacaaaggcaccagcgggccagcagcactggcagaagacaagtc

SEQ ID NO: 532322 - DNA, 120 bp, Artificial Sequence
  ENSG00000166402_7 (sequence is synthesized)
tgaggcccaaggcccagtgcagattctgactgtgggccagtcagaccacgcccaggacgcaggggagacggcagctggtgggggcgaacggcccagcgggcaggatctccgtgccacgat

SEQ ID NO: 532323 - DNA, 120 bp, Artificial Sequence
  ENSG00000166402_8 (sequence is synthesized)
gcagaggaagggcatctccagcagcatgagctttgacgaggatgaggaggatgaggaggagaatagctccagctcctcccagctaaatagtaacacccgccccagctctgctactagcag

SEQ ID NO: 532324 - DNA, 120 bp, Artificial Sequence
  ENSG00000166402_9 (sequence is synthesized)
gaagtccgtcagggaggcagcctcagcccctagcccaacagctccagagcaaccagtggacgttgaggtccaggatcttgaggagtttgcactgaggccggccccccagggtatcaccat

SEQ ID NO: 532325 - DNA, 120 bp, Artificial Sequence
  ENSG00000166402_10 (sequence is synthesized)
caaatgccgcatcactcgggacaagaaagggatggaccggggcatgtaccccacctactttctgcacctggaccgtgaggatgggaagaaggtgttcctcctggcgggaaggaagagaaa

SEQ ID NO: 532326 - DNA, 120 bp, Artificial Sequence
  ENSG00000166402_11 (sequence is synthesized)
gaagagtaaaacttccaattacctcatctctgtggacccaacagacttgtctcgaggaggggacagctatatcgggaaactgcggtccaacttgatgggcaccaagttcactgtttatga

SEQ ID NO: 532327 - DNA, 120 bp, Artificial Sequence
  ENSG00000166402_12 (sequence is synthesized)
caatggagtcaaccctcagaaggcctcatcctccactttggaaagtggaaccttacgtcaggagctggcagctgtgtgctacgagacaaacgtcttaggcttcaaggggcctcggaagat

SEQ ID NO: 532328 - DNA, 120 bp, Artificial Sequence
  ENSG00000166402_13 (sequence is synthesized)
gagcgtgattgtcccaggcatgaacatggttcatgagagagtctctatccgcccccgcaacgagcatgagacactgctagcacgctggcagaataagaacacggagagtatcatcgagct

SEQ ID NO: 532329 - DNA, 120 bp, Artificial Sequence
  ENSG00000166402_14 (sequence is synthesized)
gcaaaacaagacacctgtctggaatgatgacacacagtcctatgtactcaacttccatgggcgcgtcacacaggcctccgtgaagaacttccagatcatccatggcaatgacccggacta

SEQ ID NO: 532330 - DNA, 120 bp, Artificial Sequence
  ENSG00000166402_15 (sequence is synthesized)
catcgtgatgcagtttggccgggtagcagaggatgtgttcaccatggattacaactacccgctgtgtgcactgcaggcctttgccattgccctgtccagcttcgacagcaagctggcgtg

SEQ ID NO: 532331 - DNA, 120 bp, Artificial Sequence
  ENSG00000166402_16 (sequence is synthesized)
cgagtagaggcctcttcgtgccctttggggttgcccagcctggagcggagcttgcctgcctgcctgtggagacagccctgcctatcctctgtatataggccttccgccagatgaagcttt

SEQ ID NO: 532332 - DNA, 120 bp, Artificial Sequence
  ENSG00000166402_17 (sequence is synthesized)
ggccctcagtgggctccctggcccagccagccaggaactggctcctttgcctctgctactgaggcaggggagtagtggagagcgggtgggtgggtgtgaagggatgagaataattctttc

SEQ ID NO: 532333 - DNA, 120 bp, Artificial Sequence
  ENSG00000166402_18 (sequence is synthesized)
catgccacgagatcaacacacactcccacccttggggtagtagtgtgttgtagtcgtacttaccaagctgagcaacctcttcagctgggaaggccgcaagaggcatagagggagaggaag

SEQ ID NO: 532334 - DNA, 120 bp, Artificial Sequence
  ENSG00000166402_19 (sequence is synthesized)
cacactgcagggctgctgtggcccagtcgtccgctcagccaaggagtcagatggcaatgggtactccagcaggtaggggcacagtgaatgtgtgtatgtatgaaggccacatcaacttta

SEQ ID NO: 532335 - DNA, 120 bp, Artificial Sequence
  ENSG00000166402_20 (sequence is synthesized)
tgtagcaaagggcttggtggccaagcctggcccttaaacaactgcagaaagcccttcaacttcagaaggcctcactcaagcctgagagaagttgggagggtggtggggacaggtaagtgg

SEQ ID NO: 532336 - DNA, 120 bp, Artificial Sequence
  ENSG00000166402_21 (sequence is synthesized)
caggaccctgtcaggattgcaggtgcctggcttgctgtggctatgggaatcagctggtggctaggtttctagcgcatttgatttctccaggtttgctgtgtctcacagaggcagtaggaa

SEQ ID NO: 532337 - DNA, 120 bp, Artificial Sequence
  ENSG00000166402_22 (sequence is synthesized)
cccagctctcagggctgtcttggtggatgggccctgcaagacacaggctcagcatgcagaagtgcatgaacagggtccctggatcagggttgttctgggagtcctgtcagcttccccagg

SEQ ID NO: 532338 - DNA, 120 bp, Artificial Sequence
  ENSG00000166402_23 (sequence is synthesized)
agctctctgctgagcagcccagcacaacccccaggaaacacaaatggggtccaggtcaccagcctgactgcacacagctaggcatgcctgggaatcctgctgccagagaaccattcccaa

SEQ ID NO: 532339 - DNA, 120 bp, Artificial Sequence
  ENSG00000166402_24 (sequence is synthesized)
gccatggcatgctccttgaagaatctctcctctctctctctctctggaaagacccaactttctcactgctgtcagccaagtcatggttggtaaccatgtaggttcttgggagggaatggg

SEQ ID NO: 532340 - DNA, 120 bp, Artificial Sequence
  ENSG00000166402_25 (sequence is synthesized)
acagggtgaataaagcagggaatattttagaaccacaagagatcagcagtggcaggacccttaggaatctagtacaaccttgttgctttaggtgagtcacactcagaaaatggggcttgc

SEQ ID NO: 532341 - DNA, 120 bp, Artificial Sequence
  ENSG00000166402_26 (sequence is synthesized)
gttcccactgtcccccaagaaactagtatctctggcctcctgggggcccattctgcatgccctccccacttcccccgattcagagacttagaagcatcagagttgataaattagattgaa

SEQ ID NO: 532342 - DNA, 120 bp, Artificial Sequence
  ENSG00000166402_27 (sequence is synthesized)
accattccagtaggaaatcaggcagttccctgttgaaagttgtctggctttttgcacgtgagtatgatccaggattggcctgtgtctggcccctccgcgagggctactcagcagtaagca

SEQ ID NO: 532343 - DNA, 120 bp, Artificial Sequence
  ENSG00000166402_28 (sequence is synthesized)
ggccttagtacggctgctgcacacttctcggtctaggtgggagagagtgcataaaggttctggggctgggcctgagcctaactccctccactaccgctatttctccttggatggcaccat

SEQ ID NO: 532344 - DNA, 120 bp, Artificial Sequence
  ENSG00000166402_29 (sequence is synthesized)
ccaccctgcaggcttgggaactgtaagctcaagcttttgctcatttgtcatttaccctggtggaggcttcttgcccagatagagatctgaaattggtgggaagcaagcaggggtcgtacc

SEQ ID NO: 532345 - DNA, 120 bp, Artificial Sequence
  ENSG00000166402_30 (sequence is synthesized)
ttgctttagagtagatgtttggaaaagctaagtagaaattttttaaaatagaagttgtattttaaacgtgttaggctttataggtgaaggacttgttttgacttaagtagaagtaatatg

SEQ ID NO: 532346 - DNA, 120 bp, Artificial Sequence
  ENSG00000166402_31 (sequence is synthesized)
ctctcatttctttgtaatctagattttcctatgttgaatgcttaaagcaaggcatacctgtcctagcaggatctgcccacacctcggccgtacatctctgtgagagaccccctccaacga

SEQ ID NO: 532347 - DNA, 120 bp, Artificial Sequence
  ENSG00000166402_32 (sequence is synthesized)
ttagcttttgcaacatggtccagtttctagagggcactagaactttgtgccagcgctggcgagataccatggtgccatcctcctttctatagttccagtttagcccttccctgcctttaa

SEQ ID NO: 532348 - DNA, 120 bp, Artificial Sequence
  ENSG00000166402_33 (sequence is synthesized)
ggagaagagatcttcatggtgacatttgagatgatggaaactagatcgtctctaatgttaggtcaagctatttctctggatctatgattttaagatagaacaggctggttctgagttctg

SEQ ID NO: 532349 - DNA, 120 bp, Artificial Sequence
  ENSG00000166402_34 (sequence is synthesized)
gtgagacggagaccccggtggcagtggaaaaatcagaagcacaaaggaaaactcttggcctctgctttctcctgtagcacaaagagggagttggctggatcttttggtggagtcaggaaa

SEQ ID NO: 532350 - DNA, 120 bp, Artificial Sequence
  ENSG00000166402_35 (sequence is synthesized)
gacaggctgagctttctagcctaagtgtggagaaggatagcctcagccacaaaactctgtcaggcattgaatgacaagcatcagtagctgagtgcactcctggtgatcctggttttcctt

SEQ ID NO: 532351 - DNA, 120 bp, Artificial Sequence
  ENSG00000166402_36 (sequence is synthesized)
gaccactggccctggggccatgggtgcatggactcgtaaagctgctagggcccctagaaaccacctgggttcagcctctcccacaataagagttcttgcccttcataccctctacctgga

SEQ ID NO: 532352 - DNA, 120 bp, Artificial Sequence
  ENSG00000166402_37 (sequence is synthesized)
tggatggtctttgggcagggaattaatgacagaatgagcagtccctaatggtattgggcagttgggagtgagtttaggcagcttctctgtaaccgcttctggggccacaccccaaaactc

SEQ ID NO: 532353 - DNA, 120 bp, Artificial Sequence
  ENSG00000166402_38 (sequence is synthesized)
tacaccctctgccccagaacaattctgcagagtggtgaagttcacttccccaactcttctccaagtctagctttcctttccttctggctccaaggtgctctgtgtccgtctgtgtatgtg

SEQ ID NO: 532354 - DNA, 120 bp, Artificial Sequence
  ENSG00000166402_39 (sequence is synthesized)
tgtgtctgtgcgtctgtgtgtttatttggggaaaagggcaatcagcaatcaactgaggtttcttaattgtgattatattcctgagaatgaatgagtaggaaaggaataaggatgttgtta

SEQ ID NO: 532355 - DNA, 120 bp, Artificial Sequence
  ENSG00000166402_40 (sequence is synthesized)
tgatcgcctgtggattttgtccattcatctcatgctctctgaacagaaggtatacctgggaagataccagctttttctctcagggttctgagtcagaggacaccatccaagaatgttgtt

SEQ ID NO: 532356 - DNA, 120 bp, Artificial Sequence
  ENSG00000166402_41 (sequence is synthesized)
agcttttcagttcccgctctgcattgcctgaaaaaactggtatgttgcacgtatgcttttggttgaaattgaacatactctagtgaatgtgccttaaaaatcaagacactagttcagagg

SEQ ID NO: 532357 - DNA, 120 bp, Artificial Sequence
  ENSG00000166402_42 (sequence is synthesized)
aagcacataatgtccagatctatggcgaacacaggtgttggaagccaggactgtgataatcagaagctataagagaactttcggagcctgcctccttcagtgacaagtagggcacaaaat

SEQ ID NO: 532358 - DNA, 120 bp, Artificial Sequence
  ENSG00000166402_43 (sequence is synthesized)
tctagaagcagaaggttgtttttttttttttttctccattctgaaaatagcaggacatttacctcttaaataaacttagcatttagaggtaattctaaatttaacaagtgacagggttgg

SEQ ID NO: 532359 - DNA, 120 bp, Artificial Sequence
  ENSG00000166402_44 (sequence is synthesized)
tttcaaagaaaaaggtccatgctttgcttacaatggagtctgcagtgaggggagatgctgggatagccatttccatggctctgttatgcaagcacaaatttcatctcctagatggacttc

SEQ ID NO: 532360 - DNA, 120 bp, Artificial Sequence
  ENSG00000166402_45 (sequence is synthesized)
ctggttttctcttactgcagtaacactggccttcccttctctaattccttaccccagctgcggcatccctgtgttaactcaggatgccaagtggccctcagattacacttctccagatag

SEQ ID NO: 532361 - DNA, 120 bp, Artificial Sequence
  ENSG00000166402_46 (sequence is synthesized)
ctgaatgagtctgctttcactgtgactgggacctgaatgacctgcagtcagggcccagagttgggactctatactaccctgggctctggtctgtaggtttgtagtagccaccggtaataa

SEQ ID NO: 532362 - DNA, 120 bp, Artificial Sequence
  ENSG00000166402_47 (sequence is synthesized)
gccaagggctaggctcttgtttgagtttatggccacctggaattttcagtcatctcatgatacaggcgggaggggcagaacagatagattacgacaggtttggtttttaaattttccaac

SEQ ID NO: 532363 - DNA, 120 bp, Artificial Sequence
  ENSG00000166402_48 (sequence is synthesized)
caagtggaaaggcaagttggtcttatagaaagcactactgcacttagtagctatgtgattttgagcaaaccacataatctctctaggtccattttcctaaccacaagataaagatgttac

SEQ ID NO: 532364 - DNA, 120 bp, Artificial Sequence
  ENSG00000166402_49 (sequence is synthesized)
attgtcaaagcttgccgtaggatttggggtgaatgaaaattattccttgctttcatcactacctttatagctctcatcactacctttatagctcatcactgtgcctttttttctttccta

SEQ ID NO: 532365 - DNA, 120 bp, Artificial Sequence
  ENSG00000166402_50 (sequence is synthesized)
agaaagacatcacatccctctcctctcctcctctgtgctcctgtccctccctccccctagcaaggtccaggcaaagctggagatgaggctgagatccagagtttcctagaacgcaactta

SEQ ID NO: 532366 - DNA, 120 bp, Artificial Sequence
  ENSG00000166402_51 (sequence is synthesized)
ggatggctaggaaagggaagcctgactgctcggtcaggagggtgcagtatctcttgctgggaacacagccagttttcacaatgcctagactgtgtatgtctatttgcacaagattgtctt

SEQ ID NO: 532367 - DNA, 120 bp, Artificial Sequence
  ENSG00000166402_52 (sequence is synthesized)
ttcctattttggagtggtcagacattttatttttgttcaagattatctggcgttttagacaaatttgcaaaactgtgcttttattgactttttgaataaactttggtattctggagcaaa

SEQ ID NO: 532368 - DNA, 80 bp, Artificial Sequence
  ENSG00000166402_53 (sequence is synthesized)
gggcccccgcgccggcccctccgggccccggcctccagagccgcagccaccgccccgcccccgagagacatgacttccaa

SEQ ID NO: 532369 - DNA, 120 bp, Artificial Sequence
  ENSG00000166402_54 (sequence is synthesized)
cagccccaagcccagcgccgccgccgcccgcggagccccgagcggagccggaggcggcgatggagggagtcagcagccaccggaccctgtcttacagccgctggagctatgacagtgtct

SEQ ID NO: 532370 - DNA, 120 bp, Artificial Sequence
  ENSG00000166405_0 (sequence is synthesized)
agcccgtgctccggttccggttccggttccggctggcgtctgcacctgcgaccaccgtgagcagtcatggcgtactccacagtgcagagagtcgctctggcttctgggcttgtcctggct

SEQ ID NO: 532371 - DNA, 120 bp, Artificial Sequence
  ENSG00000166405_1 (sequence is synthesized)
ctgtcgctgctgctgcccaaggccttcctgtcccgcgggaagcggcaggagccgccgccgacacctgaaggaaaattgggccgatttccacctatgatgcatcatcaccaggcaccctca

SEQ ID NO: 532372 - DNA, 120 bp, Artificial Sequence
  ENSG00000166405_2 (sequence is synthesized)
gatggccagactcctggggctcgtttccagaggtctcaccttgccgaggcatttgcaaaggccaaaggatcaggtggaggtgctggaggaggaggtagtggaagaggtctgatggggcag

SEQ ID NO: 532373 - DNA, 120 bp, Artificial Sequence
  ENSG00000166405_3 (sequence is synthesized)
attattccaatctacggttttgggatttttttatatatactgtacattctatttaagctctcaaaggggaaaacaactgcagaggatgggaaatgctatactgccatgcctggaaacacc

SEQ ID NO: 532374 - DNA, 120 bp, Artificial Sequence
  ENSG00000166405_4 (sequence is synthesized)
cacaggaaaattaccagttttgagcttgctcaactgcaagaaaaactgaaggagacagaagcagccatggaaaaattaatcaacagagtgggacctaatggtgagagagcacagactgtg

SEQ ID NO: 532375 - DNA, 120 bp, Artificial Sequence
  ENSG00000166405_5 (sequence is synthesized)
acttctgaccaagagaaacggttgctacatcagctccgagaaatcaccagggtcatgaaagaaggaaaattcattgacagattttctccagagaaagaagctgaggaggccccttacatg

SEQ ID NO: 532376 - DNA, 120 bp, Artificial Sequence
  ENSG00000166405_6 (sequence is synthesized)
gaggactgggaaggttaccctgaagagacttacccaatttatgacctttcagactgtatcaagcgtaggcaagaaacaatcttggtggattaccctgacccaaaagaactttctgctgaa

SEQ ID NO: 532377 - DNA, 120 bp, Artificial Sequence
  ENSG00000166405_7 (sequence is synthesized)
gaaatagctgaaagaatgggaatgatagaagaggaagaatcagatcatttgggttgggaaagtctgcccactgaccccagagcccaggaagataattctgttacctcgtgtgatccaaag

SEQ ID NO: 532378 - DNA, 120 bp, Artificial Sequence
  ENSG00000166405_8 (sequence is synthesized)
ccagaaacatgttcctgctgttttcatgaagacgaggatcctgctgtcttggcagagaatgctggattcagtgcagatagctaccctgagcaagaggaaaccaccaaagaagagtggtcc

SEQ ID NO: 532379 - DNA, 120 bp, Artificial Sequence
  ENSG00000166405_9 (sequence is synthesized)
caagactttaaagatgaagggttgggcatcagcaccgataaagcatatacaggcagcatgctgaggaagcgtaacccccagggtttagagtgaaaacagccagtctgaagtatccattac

SEQ ID NO: 532380 - DNA, 120 bp, Artificial Sequence
  ENSG00000166405_10 (sequence is synthesized)
tcaagtcccaaggtgacctctctctcctcagatttccttcttggccctgtgccctgcactttcttcactgtgttcaagtgtcatagctatcaggccactatcatggatatcatgtatcct

SEQ ID NO: 532381 - DNA, 120 bp, Artificial Sequence
  ENSG00000166405_11 (sequence is synthesized)
tcctggtgctcacacacctgtcaccttgtaaaacacggacattagtgtgaacacaggacagcttcgctctttctcttcctgcctttcctctatcagagaagttgatccattaagtaatta

SEQ ID NO: 532382 - DNA, 120 bp, Artificial Sequence
  ENSG00000166405_12 (sequence is synthesized)
gactcttcctggtaggtgtaacagatagttcacctgtgaacgaacatcagcttacagatgatgaggacttaaggttgcaagaatgaagatttcagactccaagatcccttattctttggg

SEQ ID NO: 532383 - DNA, 120 bp, Artificial Sequence
  ENSG00000166405_13 (sequence is synthesized)
ccttgagcaggttagtagtcccctggtgagaagagaacattttgtttgtggggctaatgggcccagaggagggtaagactctgctgtctaagctgaagcctcttcctcgcagcgagggtc

SEQ ID NO: 532384 - DNA, 120 bp, Artificial Sequence
  ENSG00000166405_14 (sequence is synthesized)
ttcctaggaacattgatgctgcctcagacatcctcttttctccagagtagggaagactcccactgatctgagaatgagcccagaggcttgtttggggactgttttactctgatactacct

SEQ ID NO: 532385 - DNA, 120 bp, Artificial Sequence
  ENSG00000166405_15 (sequence is synthesized)
ggatatctagcttcctttacccctgttctgcttaacagaactgccaagcccagaagtacctttgcactcctggttttcagtggacagaggaagctttagatagagactttagaccctgcc

SEQ ID NO: 532386 - DNA, 120 bp, Artificial Sequence
  ENSG00000166405_16 (sequence is synthesized)
ctgcagagtcaagacttgaggccattgaagctgcaggaagccctgcccagggatggtcctgccatgaggaggctgcaaccctataagagggctcaagattgtgaattctgctcctgccat

SEQ ID NO: 532387 - DNA, 120 bp, Artificial Sequence
  ENSG00000166405_17 (sequence is synthesized)
gaggagctcagaaggccaggaagccagcaataggggagagaatctgtgtgcttatggacagtccttacctaaagctgtttctgaatgttgcaccctttgagaaatttcttctcagaacca

SEQ ID NO: 532388 - DNA, 120 bp, Artificial Sequence
  ENSG00000166405_18 (sequence is synthesized)
taaattgaaacaaatgaggactgatcttgtatacaaagtgccaactcaagagggaagttggagtatgtctgttgcagagaaccaatatagcagtgcccaggggtagagaccatgtgttcc

SEQ ID NO: 532389 - DNA, 120 bp, Artificial Sequence
  ENSG00000166405_19 (sequence is synthesized)
atactcggatatttgggtctttttgagagagctggggaaagtagcagcaactagattaagactgggaggattttgaccaaactaaaggccttttctccttactgcatctgacgtgtgtct

SEQ ID NO: 532390 - DNA, 120 bp, Artificial Sequence
  ENSG00000166405_20 (sequence is synthesized)
tcttgagacaagatagcacccatgaattacatcatgaggtatgtgtgaattcagtttacatgtaagacctgagagttcgaagagggcacattcccaaagacattcccagtcatgaaatgt

SEQ ID NO: 532391 - DNA, 120 bp, Artificial Sequence
  ENSG00000166405_21 (sequence is synthesized)
agaagactggaaaattaagacattatgtaaaggtagatatggcttttagagttacattatgcttggcatgaataaggtgccaggaaaacagtttaaaattatacatcagcatacagactg

SEQ ID NO: 532392 - DNA, 120 bp, Artificial Sequence
  ENSG00000166405_22 (sequence is synthesized)
ctgttagaaggtatgggatcatattaagataatctgtcagctactactaggcatttattgttaattgagttacagaaagtcattcaagactgagtttatagaaagcatattgcatctatc

SEQ ID NO: 532393 - DNA, 120 bp, Artificial Sequence
  ENSG00000166405_23 (sequence is synthesized)
tctgtgtagaacatttgattcacattgtgaagaatgcagtttaaaatatactgaatgcaatctagatgtattgtacacgaaaggtgaaaaataacaggtgctctttactgtttagataaa

SEQ ID NO: 532394 - DNA, 120 bp, Artificial Sequence
  ENSG00000166405_24 (sequence is synthesized)
tctgtgttatttcccttcgttcactgtgaggggttgattcatgaggagagccctgggttcctggctcaggtttacttttggccttaggataggattcccttattagagataaatactgct

SEQ ID NO: 532395 - DNA, 120 bp, Artificial Sequence
  ENSG00000166405_25 (sequence is synthesized)
gttctcttctagctcattcattcatttagcagtcaattgctcagtgccaggtgctaggaacagaggctcaatctctaccctcagaaaactcagtgtgacgagagagagcctgacagataa

SEQ ID NO: 532396 - DNA, 120 bp, Artificial Sequence
  ENSG00000166405_26 (sequence is synthesized)
aatgaactatgaccctgtaagagggctcaggatcgtgaatcctgcaggcagagaaacatgagccataatctgtccctgcattttctagctgtggaatcttgggtcagctccttaactggt

SEQ ID NO: 532397 - DNA, 120 bp, Artificial Sequence
  ENSG00000166405_27 (sequence is synthesized)
ctgagctttggcttcagggtagtaaagggaggggtattaaaggtcctggttaaatgaaatcatcagtgtgtgtaaaacagcattggttctagctcatacatgataaccactcattaagtg

SEQ ID NO: 532398 - DNA, 120 bp, Artificial Sequence
  ENSG00000166405_28 (sequence is synthesized)
gtaattatgtttttattataagggctatgctgtaattcagacatgggcccaaaactacaggaaagataaattgtttttgctaaagtattgccaagaaacttcacagtttcttgggaggtg

SEQ ID NO: 532399 - DNA, 120 bp, Artificial Sequence
  ENSG00000166405_29 (sequence is synthesized)
ggccttgaggcatgcaaagaacttcttcaggtaggcaaagaagagaggacactcttggcagaaagagttgttgaaaaaagcagtagggtgtgaaaatacatggatgttcaagtattttgg

SEQ ID NO: 532400 - DNA, 120 bp, Artificial Sequence
  ENSG00000166405_30 (sequence is synthesized)
tgaggctgttatgtaaagtgttgttggtctttggggaaaattggcttatggaaattcctgccagaagtactaagcccttatggtggttcttcctgccctagctcttggttggtttatata

SEQ ID NO: 532401 - DNA, 120 bp, Artificial Sequence
  ENSG00000166405_31 (sequence is synthesized)
taaggaatatatttgtgtatttatatatcagacatttggatgtacctttcagttatttaggatttagaaaattctttttggattttccagaattattttatccttcggggatgacagtta

SEQ ID NO: 532402 - DNA, 120 bp, Artificial Sequence
  ENSG00000166405_32 (sequence is synthesized)
tatgtgtatatacaacccaggatgacaaaatcatgggtccggtttttgttgccagggctgctgtctcttttcttgcggtcttcatttctcacgagggtgctgggaacttgatcagtcccc

SEQ ID NO: 532403 - DNA, 120 bp, Artificial Sequence
  ENSG00000166405_33 (sequence is synthesized)
tggccttttggcactgtggcagagtacacaagtcatacctttatggacagttagctcacaaaacaactgcataatctgggatcactcttggtaaatcaggtgggtggtgcagccaggaga

SEQ ID NO: 532404 - DNA, 120 bp, Artificial Sequence
  ENSG00000166405_34 (sequence is synthesized)
tcccctttcctggtcacaacaggagcacaaagaaaccattatctccatgactagctccagaagctgggcccagggagtcgtgatgaggagtggaggtgtatttggcctgtagaatcaacg

SEQ ID NO: 532405 - DNA, 120 bp, Artificial Sequence
  ENSG00000166405_35 (sequence is synthesized)
gcctttgagaaccatacaatgcaccttatatggcttgggtgatcaaataacttaaggtccaaattcaaacactttggaaaaagggagctttaatataattatgccaaggtgataggcata

SEQ ID NO: 532406 - DNA, 120 bp, Artificial Sequence
  ENSG00000166405_36 (sequence is synthesized)
aactaagactgtcctggacgtagggtcacccctgtctatagccatttaagatttttgaacctgatgactaaacaaacaaaaccctctttcctttttagaatatcctgtatgcgctatttc

SEQ ID NO: 532407 - DNA, 120 bp, Artificial Sequence
  ENSG00000166405_37 (sequence is synthesized)
ccaccagaggcagaggccacaggagataggccatggttcaggtaggaaatgctcttggtcacatcagaactctagatctgggggaataaacaaacccgaattattaccacactctcaaag

SEQ ID NO: 532408 - DNA, 120 bp, Artificial Sequence
  ENSG00000166405_38 (sequence is synthesized)
ttctcttcaatctggactatttgtattccaaagaaaaatttagtgctttagctattcagcaatattgagaaaaaacatgaacacatttatgactttgccttgaccattgacttttctaaa

SEQ ID NO: 532409 - DNA, 120 bp, Artificial Sequence
  ENSG00000166405_39 (sequence is synthesized)
atgtgcttccttttcctttatttccctttttttatacaaagaaaatagcccaaatttctcctcttaggtcattccttaacctctcagagaaccagtttccccatgaattgggaataatgc

SEQ ID NO: 532410 - DNA, 120 bp, Artificial Sequence
  ENSG00000166405_40 (sequence is synthesized)
tctatttacagggctgtttggattaaataagatgctgtttataaagtgtctgtgccagggcaaagcatgtggtaggtgcttggtgacagcatgatccctgtcaccactctgtcaagtcca

SEQ ID NO: 532411 - DNA, 120 bp, Artificial Sequence
  ENSG00000166405_41 (sequence is synthesized)
gtgttgctgagatgtcacacctgacaccctctaaggctaccctgattgccaggagtggcccagggcccttctgcagtctccgggtgcctttagttataacctcttgtctgggtcagacca

SEQ ID NO: 532412 - DNA, 120 bp, Artificial Sequence
  ENSG00000166405_42 (sequence is synthesized)
ttagctttcatgtctgcttctagctacaactgtagcctcccttccttttgccttcaaatctgccacagctgcccggcaacaaaaaaagattcctaagcatctcgaggtcctgtttaaatg

SEQ ID NO: 532413 - DNA, 120 bp, Artificial Sequence
  ENSG00000166405_43 (sequence is synthesized)
ggttagggtccaagcaagccctgagacatcaagtggttgggtcttttatacctttttcatctctacagccctgttctcttcctaaggccaggcccacaggggatactgaggaaccaccag

SEQ ID NO: 532414 - DNA, 120 bp, Artificial Sequence
  ENSG00000166405_44 (sequence is synthesized)
ccccttcaggcggcacagcagaccctgaagagaactgctctaacttaagtaccttctgacttcaccatttttccagcctctgggtgtggttctgatgaaccttaaacttgaaaggcacag

SEQ ID NO: 532415 - DNA, 120 bp, Artificial Sequence
  ENSG00000166405_45 (sequence is synthesized)
gccagaggaaggacagtgttgacccacatgtcattggtgaggttatgatctctttgctattatcacctacttacccacctgaggctcctaggaaacaatgaatgaaaggtatagaaaaaa

SEQ ID NO: 532416 - DNA, 120 bp, Artificial Sequence
  ENSG00000166405_46 (sequence is synthesized)
attaggaagtaaacagggcttttttcccctttatgaaaaaagtacacagaagtgttgaaacgattcaagtttaatttgttgatatatgtgtgtacttagacaaacactaaattctacaac

SEQ ID NO: 532417 - DNA, 120 bp, Artificial Sequence
  ENSG00000166405_47 (sequence is synthesized)
atacataatgtcaacatgggaaaataccaagtttgtcattgcacataccaataaataaatacatttgctccagaataccaaagtttattcaaaaagtcaataaaagcacagttttgcaaa

SEQ ID NO: 532418 - DNA, 120 bp, Artificial Sequence
  ENSG00000166405_48 (sequence is synthesized)
ttactttttacacttgtgctttgataattttttacttggaaacctcatcttttggcgtttttttttttgagctatttctctagtgttgctatttgatttaatttctgaccttcatttttg

SEQ ID NO: 532419 - DNA, 120 bp, Artificial Sequence
  ENSG00000166405_49 (sequence is synthesized)
tttcccaaccttttttttttgtttgatatgaggggttccgtgactgaggttctgagctgctgttgatgtgctatacctccttcaattctcagctctcaaaggggaaaacaactgcagagg

SEQ ID NO: 532420 - DNA, 120 bp, Artificial Sequence
  ENSG00000166405_50 (sequence is synthesized)
ggagccgccgccgacacctgaagaaaactaagagtgagaactgacaaaaagccattggatttgacggttaaggaaaattgggccgatttccacctatgatgcatcatcaccaggcaccct

SEQ ID NO: 532421 - DNA, 120 bp, Artificial Sequence
  ENSG00000166405_51 (sequence is synthesized)
gaactacccaggctattatagacagttatgtctgaaaaaatatctttacactcacctgggccattggcaaccccaggccacacctaagggtcatgaaaaccaggaatccaacttacaagg

SEQ ID NO: 532422 - DNA, 120 bp, Artificial Sequence
  ENSG00000166405_52 (sequence is synthesized)
gcatgccagggcaaatatttaggctaaactgtgggagctaagaacagttgatttctttattatggctagcagatatctaagcatgttagcacaggttcttgaataaattttgcttctaag

SEQ ID NO: 532423 - DNA, 120 bp, Artificial Sequence
  ENSG00000166405_53 (sequence is synthesized)
ggataagggcttctgatttcccatgacttaggaaacagaattaagactgtttcattcattgaagatcagaatgccctgcgtacagtctggaaaagtaacatgtgccgcctgaagagacaa

SEQ ID NO: 532424 - DNA, 120 bp, Artificial Sequence
  ENSG00000166405_54 (sequence is synthesized)
atatactgtacattctatttaaggtaagtagaatcatcctaatcatattacatcaatgaaaatctaatatggcaataaaaatcattgtctacattaaaacttcttatagttcataaaatt

SEQ ID NO: 532425 - DNA, 120 bp, Artificial Sequence
  ENSG00000166405_55 (sequence is synthesized)
aattatttcaaatccatcatctctttaaatcctgcctcctcttcatgaggtacttaggatagccattatttcagtttcacataagaaatgtttactcaatgtttaagtgttttgccccaa

SEQ ID NO: 532426 - DNA, 120 bp, Artificial Sequence
  ENSG00000166405_56 (sequence is synthesized)
aaaaaaaaaaaaaaaaattaacatctttacaggccgaaaaggaataaagattttctaagaagagcttttattattgggattggcacagtgatttccaaatagccattgtaaggccaaata

SEQ ID NO: 532427 - DNA, 120 bp, Artificial Sequence
  ENSG00000166405_57 (sequence is synthesized)
atgacaccactttatcctgcttgtttctccacaggaatttgagatgctgtttttaatattatctccaataattctcctgagacagaactgtccctcctgaaattaagcctgatatttcct

SEQ ID NO: 532428 - DNA, 120 bp, Artificial Sequence
  ENSG00000166405_58 (sequence is synthesized)
agctctggggagacatgggtgtaggttctttaaagcagacccccagttgagttccacctccaggcaggcctttgcaggcccctggcccctgtactgtgaattagaggcagaagactcact

SEQ ID NO: 532429 - DNA, 120 bp, Artificial Sequence
  ENSG00000166405_59 (sequence is synthesized)
ttgccctcctgtctagagtaagcttaaataagatgagttctttctcgcccaggaattctgcaggcagtctgagttgagtctgtaagaatgcccatagggtgccacacatcccttttagat

SEQ ID NO: 532430 - DNA, 120 bp, Artificial Sequence
  ENSG00000166405_60 (sequence is synthesized)
gagcatgagcaaggaagatgacctgtagggagattttttttcccttgtgttagaaatgcttgttctctggtgccataaagaagcagcacttggacgtacatttaatttcctcagcaaggc

SEQ ID NO: 532431 - DNA, 120 bp, Artificial Sequence
  ENSG00000166407_0 (sequence is synthesized)
atacattgagggagaaaggcagcgggagacggccacgagattcccccatctctttgaatataattttagattgagattcagattaaatccgaggggaaaacactttatgaggctgaaagc

SEQ ID NO: 532432 - DNA, 120 bp, Artificial Sequence
  ENSG00000166407_1 (sequence is synthesized)
tgtgtcgttgccagagacagggttatgagctatcaaatgcaattacattaagacagattatactgggcaaattgagccatttagaaggtgagaatcaaagaaacggctctgatcctcttt

SEQ ID NO: 532433 - DNA, 120 bp, Artificial Sequence
  ENSG00000166407_2 (sequence is synthesized)
tcccccttctctctccctctccctctctctctaaattgcagttcgtagttccttccaattctgaggcacaaaagtaggtgagactgcttttgtatctgcgaagtgcttcactcctgaatg

SEQ ID NO: 532434 - DNA, 120 bp, Artificial Sequence
  ENSG00000166407_3 (sequence is synthesized)
taattctagctgagtgcaatctaggttaagagccggacaagcgggtaattagagcccgctagctgcccgaagaccggccgcccctccaaagcgcgccccgagtcggcgcccttctcccgg

SEQ ID NO: 532435 - DNA, 120 bp, Artificial Sequence
  ENSG00000166407_4 (sequence is synthesized)
ccgagcctagctgcggctggacacggagcgcccgagatgatggtgctggacaaggaggacggcgtgccgatgctctccgtccagcccaaagggaagcagaagggctgtgcgggctgtaac

SEQ ID NO: 532436 - DNA, 120 bp, Artificial Sequence
  ENSG00000166407_5 (sequence is synthesized)
aggtgggctccaccctctacaccaaggccaacctcatcctgtgccgacgcgactacctgaggctctttggcaccacagggaactgtgctgcttgcagcaagctgatcccagccttcgaga

SEQ ID NO: 532437 - DNA, 120 bp, Artificial Sequence
  ENSG00000166407_6 (sequence is synthesized)
tggtgatgcgggcccgggacaacgtgtatcacctcgactgcttcgcctgccagctctgcaaccagagattttgtgtgggagacaaattcttcctgaagaacaacatgatcttgtgtcaga

SEQ ID NO: 532438 - DNA, 120 bp, Artificial Sequence
  ENSG00000166407_7 (sequence is synthesized)
tggactatgaggaagggcagctcaatggcacctttgaatcccaagttcagtaacgcccggcgcctggcctccaggcccgtctgtccatctgcccgcctgcccacctgcctggccggccag

SEQ ID NO: 532439 - DNA, 120 bp, Artificial Sequence
  ENSG00000166407_8 (sequence is synthesized)
ccagccactctaccagtgcaggctggccagccgctctcctgccacattagaacttctccgtcctcgatgggagggatggcccttcctcctccaccaccgcccgtctgtgtgtgacccctc

SEQ ID NO: 532440 - DNA, 120 bp, Artificial Sequence
  ENSG00000166407_9 (sequence is synthesized)
ctggggccaggccgggcctgtacagtctgtcttctgtatataaatgggaacatttattttatgagaaatgtaatgcgattttattactggcgtggattaaacttatgaatgtttccggga

SEQ ID NO: 532441 - DNA, 120 bp, Artificial Sequence
  ENSG00000166407_10 (sequence is synthesized)
cctggccgtctcgcccccgcgccttccccccagtccctcctcctgcgctccctgcccgcggggctgcgctccggactccggtccgtctgcccccgtcggcggtcgcggctctccggactc

SEQ ID NO: 532442 - DNA, 80 bp, Artificial Sequence
  ENSG00000166407_11 (sequence is synthesized)
cgcggggccggcgggagcagcgcaggcggccggcggcgggagtcggagccacgcgcccctccgtatcctcggcgctagtc

SEQ ID NO: 532443 - DNA, 120 bp, Artificial Sequence
  ENSG00000166407_12 (sequence is synthesized)
cagacgccagcctgaggcctgctgggatgggccaggagcacggcggaggcgtgcacgcaaatgcgggttgcgtgtgtgtatgtggtgattttgtgtgggagacaaattcttcctgaagaa

SEQ ID NO: 532444 - DNA, 120 bp, Artificial Sequence
  ENSG00000166411_0 (sequence is synthesized)
actgccgctgcggctgttgctgcggagccaggaggggaagcgatggctgggcccgcgtggatctctaaggtctctcggctgctgggggcattccacaacccaaaacaggtgaccagaggt

SEQ ID NO: 532445 - DNA, 120 bp, Artificial Sequence
  ENSG00000166411_1 (sequence is synthesized)
tttactggtggtgttcagacagtaactttaattccaggagatggtattggcccagaaatttcagctgcagttatgaagatttttgatgctgccaaagcacctattcagtgggaggagcgg

SEQ ID NO: 532446 - DNA, 120 bp, Artificial Sequence
  ENSG00000166411_2 (sequence is synthesized)
aacgtcactgccattcaaggacctggaggaaagtggatgatcccttcagaggctaaagagtccatggataagaacaagatgggcttgaaaggccctttgaagaccccaatagcagccggt

SEQ ID NO: 532447 - DNA, 120 bp, Artificial Sequence
  ENSG00000166411_3 (sequence is synthesized)
cacccatctatgaatttactgctgcgcaaaacatttgacctttacgcgaatgtccgaccatgtgtctctatcgaaggctataaaaccccttacaccgatgtaaatattgtgaccattcga

SEQ ID NO: 532448 - DNA, 120 bp, Artificial Sequence
  ENSG00000166411_4 (sequence is synthesized)
gagaacacagaaggagaatacagtggaattgagcatgtgattgttgatggagtcgtgcagagtatcaagctcatcaccgagggggcgagcaagcgcattgctgagtttgcctttgagtat

SEQ ID NO: 532449 - DNA, 120 bp, Artificial Sequence
  ENSG00000166411_5 (sequence is synthesized)
gcccggaacaaccaccggagcaacgtcacggcggtgcacaaagccaacatcatgcggatgtcagatgggctttttctacaaaaatgcagggaagttgcagaaagctgtaaagatattaaa

SEQ ID NO: 532450 - DNA, 120 bp, Artificial Sequence
  ENSG00000166411_6 (sequence is synthesized)
tttaatgagatgtaccttgatacagtatgtttgaatatggtacaagatccttcccaatttgatgttcttgttatgccaaatttgtatggagacatccttagtgacttgtgtgcaggattg

SEQ ID NO: 532451 - DNA, 120 bp, Artificial Sequence
  ENSG00000166411_7 (sequence is synthesized)
atcggaggtctcggtgtgacaccaagtggcaacattggagccaatggggttgcaatttttgagtcggttcatgggacggctccagacattgcaggcaaggacatggcgaatcccacagcc

SEQ ID NO: 532452 - DNA, 120 bp, Artificial Sequence
  ENSG00000166411_8 (sequence is synthesized)
ctcctgctcagtgccgtgatgatgctgcgccacatgggactttttgaccatgctgcaagaattgaggctgcgtgttttgctacaattaaggacggaaagagcttgacaaaagatttggga

SEQ ID NO: 532453 - DNA, 120 bp, Artificial Sequence
  ENSG00000166411_9 (sequence is synthesized)
ggcaatgcaaaatgctcagacttcacagaggaaatctgtcgccgagtaaaagatttagattaacacttctacaactggcatttacatcagtcactctaaatggacaccacatgaacctct

SEQ ID NO: 532454 - DNA, 120 bp, Artificial Sequence
  ENSG00000166411_10 (sequence is synthesized)
gtttagaatacctacgtatgtatgcattggtttgcttgtttcttgacagtacatttttagatctggccttttcttaacaaaatctgtgcaaaagatgcaggtggatgtccctaggtctgt

SEQ ID NO: 532455 - DNA, 120 bp, Artificial Sequence
  ENSG00000166411_11 (sequence is synthesized)
tttcaaagaactttttccaagtgcttgttttatttattaagtgtctacctggtaaatgttttttttgtaaactctgagtggactgtatcatttgctattctaaaccattttacacttaag

SEQ ID NO: 532456 - DNA, 120 bp, Artificial Sequence
  ENSG00000166411_12 (sequence is synthesized)
ttaaaatagtttctcttcagctgtaaataacaggatacagaattaacaagagaaaatgtctaactttttaagaaaaaccttattttcttcggtttttgaaaaacataatggaaataaaac

SEQ ID NO: 532457 - DNA, 120 bp, Artificial Sequence
  ENSG00000166411_13 (sequence is synthesized)
aggatattgacataatagcacaaaatgacactcttctaaaactaaatgggcacaagagaattttcctgggaaagttcacatcaaaaagagtgaatgtggtatatttctaaatgatatgga

SEQ ID NO: 532458 - DNA, 120 bp, Artificial Sequence
  ENSG00000166411_14 (sequence is synthesized)
aaatagagacagatttgtcctttacagaaattactgagtgtgaataaaaacttcagatccaagaaatatataatgagagatataatttttgttaataagacaaaggtaatatattggata

SEQ ID NO: 532459 - DNA, 120 bp, Artificial Sequence
  ENSG00000166411_15 (sequence is synthesized)
caaagacacaaatgtattgtgtgttcaattattttgttgtcttgagatttaatattctttccaagagcttttaatgaagcagagagctagtacttcattttcactggatacattttcagc

SEQ ID NO: 532460 - DNA, 120 bp, Artificial Sequence
  ENSG00000166411_16 (sequence is synthesized)
atcatgagttgtcacagcctctgagcccctgatctgaagccagaagggctgagtgtattgtaaacttattcttgcatgttgctgtctgggaatggaccacactacagcaggtagttctgg

SEQ ID NO: 532461 - DNA, 120 bp, Artificial Sequence
  ENSG00000166411_17 (sequence is synthesized)
cgatactgccgaaaggcccgaacacatgtattttggctgcaattgaggaacttgggatgctattaattttgtatttcagcaactgccccttctcctatcccaaagcaccaattactgccc

SEQ ID NO: 532462 - DNA, 120 bp, Artificial Sequence
  ENSG00000166411_18 (sequence is synthesized)
tctgcctcagcagtaccagtataagatgacattccaaagactggaggcaactcagcctgagttaattcacaaaattatgccatgctggggcttgagcttgagcttgggcttaggcttggg

SEQ ID NO: 532463 - DNA, 120 bp, Artificial Sequence
  ENSG00000166411_19 (sequence is synthesized)
ctcagcttttgaccctcaggcatctcctttcccttcctgtcttcctctcccttctcctctgctgcagcatgattttcttaatcttcagacactcactattttcatgaacagttaccctct

SEQ ID NO: 532464 - DNA, 120 bp, Artificial Sequence
  ENSG00000166411_20 (sequence is synthesized)
gtccccacaaccaaagacaactcatggcctcctttggcccttgtgtaacattgcaaacctgtggctttgcaaaatgtacccaggtcacaaggggatttttttttttttagcaatgatatc

SEQ ID NO: 532465 - DNA, 120 bp, Artificial Sequence
  ENSG00000166411_21 (sequence is synthesized)
cctgtctgggtcactttttaagcttgtaaccgcccccccagacttataatcttaaatgtattttcctttgtttaagctgctgcttcctctgtttcattggattgtgccagttatcagtgg

SEQ ID NO: 532466 - DNA, 120 bp, Artificial Sequence
  ENSG00000166411_22 (sequence is synthesized)
ctcttgggttcaaagtaataaagaattccaaaactgagatgtttgctttctctacctgtttcctgttcagatgccttcggtcattttggctcagcttgctactgagaatggctgcttccc

SEQ ID NO: 532467 - DNA, 120 bp, Artificial Sequence
  ENSG00000166411_23 (sequence is synthesized)
gtattcagaatggaagtggggtggtctggtggcgacaggctaacgtagagctggctgcttttatgagaatgcgccacttgaccccatcctgcacctttgtttattccagggcactaatgg

SEQ ID NO: 532468 - DNA, 120 bp, Artificial Sequence
  ENSG00000166411_24 (sequence is synthesized)
tcactcgcatgcccgctgtgcacagtcctgtgagttaaatgcccactactctctgcactggtcccacctgctcaattgacaaaaaaaatcaggtccttgttgacagttctgttaaaaggt

SEQ ID NO: 532469 - DNA, 120 bp, Artificial Sequence
  ENSG00000166411_25 (sequence is synthesized)
ttaatattcaaattatacattaaatagaatcaaacaggcagcagcagttttattaagcatcaagtcagttggcatgtgggtggcggagtgcctggtaatggaataatagggtcggcgatg

SEQ ID NO: 532470 - DNA, 120 bp, Artificial Sequence
  ENSG00000166411_26 (sequence is synthesized)
cccgccaagattccagagtaagtcaggtcgctaggtgagttgtgactgattgcttttcctgcagcgcacgtgagcagtatcagccatctctctcctacccgctccacagcctactgctgg

SEQ ID NO: 532471 - DNA, 120 bp, Artificial Sequence
  ENSG00000166411_27 (sequence is synthesized)
ctgtcctgtatgtgagctagcagctttttaatctacctggaactaaggccaaaaattatcagccctttcgttctggaaggagagctgatctcatttgtcacctgaacaaaaagcaatact

SEQ ID NO: 532472 - DNA, 120 bp, Artificial Sequence
  ENSG00000166411_28 (sequence is synthesized)
taaactgaattaaaactacccacacgtgaagcttcttggaattgtcagctattgttggcgtaagacctggtaaatgtagagccagtgctgtgccctgacctggagatctaacagacttgg

SEQ ID NO: 532473 - DNA, 120 bp, Artificial Sequence
  ENSG00000166411_29 (sequence is synthesized)
cagaaatgcctgtgcccagactgaagagacctggggctcaggaagaggctcggaacgcctgccctctattctatagaaactgcaggcataggccctgattacattttttgctcttggtaa

SEQ ID NO: 532474 - DNA, 120 bp, Artificial Sequence
  ENSG00000166411_30 (sequence is synthesized)
aaggagtcaatgatacctttgtacttctccaaaactgtgagccgtttcagtttcatcgtgggacctaaaagggaaatgagaagaaatgagtgaggcccaggctctgagaactctgagaat

SEQ ID NO: 532475 - DNA, 120 bp, Artificial Sequence
  ENSG00000166411_31 (sequence is synthesized)
gtgtgtggtaaagactcacactcagtcctatatataactcaggaattaagccagataatcaggaccgtcagtagccagcctccaagacagtgatcgctcctggtattcatatggcttgtg

SEQ ID NO: 532476 - DNA, 120 bp, Artificial Sequence
  ENSG00000166411_32 (sequence is synthesized)
tgtagtctcctgtgttataccactggttgtggccagtggagtatagatgaagggttggtatgtcacctctgagaataggttataaaagatcagtttcttttatacacataggaaagtagt

SEQ ID NO: 532477 - DNA, 120 bp, Artificial Sequence
  ENSG00000166411_33 (sequence is synthesized)
gtaagctacatctgccttttccttgacctgtacccagttttgaccctcagtccattttctctgaaatggatttatttgttccatctcttgaatgaataaattgttgaagcaattaaaaaa

SEQ ID NO: 532478 - DNA, 120 bp, Artificial Sequence
  ENSG00000166411_34 (sequence is synthesized)
cctgagtaccaaaacagacctcagtaatattttggaaatgtgtctgaaaatgttttgcaagactgaagaagttgcatgagaagctttccaggatcacaatggaaaggaaaggaaaacact

SEQ ID NO: 532479 - DNA, 120 bp, Artificial Sequence
  ENSG00000166411_35 (sequence is synthesized)
tgttttatctgagtgaaagggacagtgacagataatagttctcaggcgggcccaagcatttgatgttgaacaaggattcttaacgtgggtcccagattgaacagggtatgtgtgcacatg

SEQ ID NO: 532480 - DNA, 120 bp, Artificial Sequence
  ENSG00000166411_36 (sequence is synthesized)
ggagacgctgcccggcacgaacccttggctcccgcggccggaagtgctgggggcgcgcgggggtctcggaggcggggacaaagacccggagcggcggcgactccgccccgcagcaggaag

SEQ ID NO: 532481 - DNA, 120 bp, Artificial Sequence
  ENSG00000166411_37 (sequence is synthesized)
cgcagcaggaagagagtgaagcacacctggattggatagtgcttgttattacagataagggtgcactttctagattcttctcctgagtggcaaagttttcccaccgtcttgtccaaacat

SEQ ID NO: 532482 - DNA, 120 bp, Artificial Sequence
  ENSG00000166411_38 (sequence is synthesized)
gttgctgcggagccaggaggggaagcgatggctgggcccgcgtggatctctaagaatagatataatgtataattgaaggagcactggaccaggagtcagaagacctgtatgtgggtttcc

SEQ ID NO: 532483 - DNA, 120 bp, Artificial Sequence
  ENSG00000166411_39 (sequence is synthesized)
attttgccaattattcgctgtgtgaccttaggcaaatgcttttctttgggaccagcatctccgcttatgaaataagcaagttgccaggtgtcgtggtgcacacctgtaatcccacctact

SEQ ID NO: 532484 - DNA, 120 bp, Artificial Sequence
  ENSG00000166411_40 (sequence is synthesized)
gagaccccatctcaaaaagcctaaaacaacaacaagaaataagtgagttgtgctctggatttcatgaggaacatcctggctctaaaattaatggtctctcggctgctgggggcattccac

SEQ ID NO: 532485 - DNA, 120 bp, Artificial Sequence
  ENSG00000166411_41 (sequence is synthesized)
ggaggggaagcgatggctgggcccgcgtggatctctaaggtctctcggctgctgggggcattccacaacccaaaacaggtgaccagaggttttactggtggtgtgagtataattatgtct

SEQ ID NO: 532486 - DNA, 120 bp, Artificial Sequence
  ENSG00000166411_42 (sequence is synthesized)
tttattttttccttttagaagtttctcaagaaagatgctctaacatatttattatatagcattttatctccattcatttagaatttgggaaaattggccatatttataatgtatgttgaa

SEQ ID NO: 532487 - DNA, 120 bp, Artificial Sequence
  ENSG00000166411_43 (sequence is synthesized)
gtcacattaatatcttgagggagccttgttaaaaatagaaagtacccttgagcctgttattttatttcacaatctcattttggtgagacagcttttttcaaaactagtacaagttgagag

SEQ ID NO: 532488 - DNA, 120 bp, Artificial Sequence
  ENSG00000166411_44 (sequence is synthesized)
aaaattgttgagaagcttcaaaacctgctttgcatttttattttatgggcttccctaaacccagtagattgagtgccaattaggaatgcctcgaacatctataagccttgtaggcttata

SEQ ID NO: 532489 - DNA, 120 bp, Artificial Sequence
  ENSG00000166411_45 (sequence is synthesized)
aggcgacagagcgggactctatctcaaaaacgaagttgaaaaagtttgttcatcattgcagtatgaatgccagtttcctttaagtctctccagctcactgtgctctgtgatgtggcatct

SEQ ID NO: 532490 - DNA, 120 bp, Artificial Sequence
  ENSG00000166411_46 (sequence is synthesized)
gttgctgcggagccaggaggggaagcgatggctgggcccgcgtggatctctaagattctactttgtcaccctcttcagacccagatttgcttgtgatgataactcttatgtcacatttgc

SEQ ID NO: 532491 - DNA, 120 bp, Artificial Sequence
  ENSG00000166411_47 (sequence is synthesized)
tcctaaaagtaaagcaacttctgtgtcactgtgaaaactgaactcagtcctttaatctctgaacttacatttaacacccaattcatctttggtctctcggctgctgggggcattccacaa

SEQ ID NO: 532492 - DNA, 120 bp, Artificial Sequence
  ENSG00000166411_48 (sequence is synthesized)
tctaaattttagtgagagaacattgttaattttttgttgttgttgtctttggtttaaaagatttgaattaattggtctctttgcagcttgtctgaaaagaaatatcaattaggaaatcta

SEQ ID NO: 532493 - DNA, 120 bp, Artificial Sequence
  ENSG00000166411_49 (sequence is synthesized)
cttggtagtttaatttattttcgttttatgtaaagagtatcatttggttctttttaaaacctctgaactcaggtaaagagtaggattgcagagtctctcctctgttgattcctgcctccc

SEQ ID NO: 532494 - DNA, 120 bp, Artificial Sequence
  ENSG00000166411_50 (sequence is synthesized)
ctttgatgacccccggggaggtatgtttgttttcttaacagcatttgaatcttcctgagacatctcataaagtggatttctctgtcaaaatattcttttttaagccttcaaaaacaaaaa

SEQ ID NO: 532495 - DNA, 120 bp, Artificial Sequence
  ENSG00000166411_51 (sequence is synthesized)
gctgcggctgttgctgcggagccaggaggggaagcgatggctgggcccgcgtggatctctaaggtctctcggctgctgggggcattccacaacccaaaacagatcaactttgccaagctt

SEQ ID NO: 532496 - DNA, 71 bp, Artificial Sequence
  ENSG00000166411_52 (sequence is synthesized)
actgccgctgcggctgttgctgcggagccaggaggggaagcgatggctgggcccgcgtggatctctaaggt

SEQ ID NO: 532497 - DNA, 120 bp, Artificial Sequence
  ENSG00000166415_0 (sequence is synthesized)
gcctctgccgctcctccgccccacggctcaggattcgcccaaaatgaggacttccctgcaggcagtggcactctggggacagaaggcccctccccacagcatcactgccatcatgatcac

SEQ ID NO: 532498 - DNA, 120 bp, Artificial Sequence
  ENSG00000166415_1 (sequence is synthesized)
tgatgaccagcgaacgattgtgactggaagtcaagagggtcagctctgtctctggaatctctcacatgaactaaagatttcagcgaaagaactcctatttggtcattcagcttcggtaac

SEQ ID NO: 532499 - DNA, 120 bp, Artificial Sequence
  ENSG00000166415_2 (sequence is synthesized)
atgtttggcaagagcaagggacttctctaaacagccctacattgttagtgctgctgaaaatggggagatgtgtgtttggaatgtcaccaatggacagtgcatggagaaggctacacttcc

SEQ ID NO: 532500 - DNA, 120 bp, Artificial Sequence
  ENSG00000166415_3 (sequence is synthesized)
ttacaggcacactgcaatctgttattaccactgctcattccggatgacaggagaaggctggcttctttgttgtggagaatatcaagatgtccttataattgatgccaaaactttggctgt

SEQ ID NO: 532501 - DNA, 120 bp, Artificial Sequence
  ENSG00000166415_4 (sequence is synthesized)
tgttcacagttttagatcatctcagtttcctgactggatcaactgcatgtgcattgttcactccatgagaattcaagaagattctctcttggtggtatcagtagctggtgagctcaaagt

SEQ ID NO: 532502 - DNA, 120 bp, Artificial Sequence
  ENSG00000166415_5 (sequence is synthesized)
atgggatctttcctcatctatcaacagcattcaggaaaagcaagatgtctatgaaaaagaatccaagtttcttgagtccttgaactgccagacaattcgattttgcacatatactgagag

SEQ ID NO: 532503 - DNA, 120 bp, Artificial Sequence
  ENSG00000166415_6 (sequence is synthesized)
acttctattggtggtattttctaaatgttggaaggtttatgattattgtgatttttcccttctgctgactgaagttagtagaaatgggcagttctttgctggtggagaagtgattgctgc

SEQ ID NO: 532504 - DNA, 120 bp, Artificial Sequence
  ENSG00000166415_7 (sequence is synthesized)
tcacagaatcctcatctggacagaagatggtcacagttacatctatcagctgctgaacagtgggctttcaaaaagcatataccctgctgatggaagagtgcttaaagagaccatttatcc

SEQ ID NO: 532505 - DNA, 120 bp, Artificial Sequence
  ENSG00000166415_8 (sequence is synthesized)
tcatttactgtgctctacttctgtgcaggaaaataaggaacagagccgtccctttgttatgggctacatgaatgaaaggaaagagcctttttacaaggtacttttctctggagaagtctc

SEQ ID NO: 532506 - DNA, 120 bp, Artificial Sequence
  ENSG00000166415_9 (sequence is synthesized)
aggaagaattactttgtggcacatccctgatgttcctgtatccaagtttgatggttctcctagagagataccagtaactgccacctggactcttcaagataattttgataagcatgatac

SEQ ID NO: 532507 - DNA, 120 bp, Artificial Sequence
  ENSG00000166415_10 (sequence is synthesized)
tatgtcacaaagtattattgactatttctctgggcttaaagatggggcaggaactgctgtagtcacttcatcagagtatattccaagtcttgataaactaatatgtggctgtgaagatgg

SEQ ID NO: 532508 - DNA, 120 bp, Artificial Sequence
  ENSG00000166415_11 (sequence is synthesized)
gacaattatcattacccaggctttgaatgctgccaaagcaagacttctggaaggtggttctttagtaaaagattctccccctcataaagttcttaaaggccaccaccaaagtgtcacttc

SEQ ID NO: 532509 - DNA, 120 bp, Artificial Sequence
  ENSG00000166415_12 (sequence is synthesized)
attactctatccacatggtctctcttcgaaattagaccaaagttggatgttgtctggggacctggactcatgtgtgatcttgtgggatatctttactgaagaaattttgcataaattctt

SEQ ID NO: 532510 - DNA, 120 bp, Artificial Sequence
  ENSG00000166415_13 (sequence is synthesized)
tttggaagctggtccagtaacaagtcttttgatgtcaccagagaagtttaaactaaggggtgagcagataatttgctgtgtgtgcggtgaccattccgtggctctccttcaccttgaggg

SEQ ID NO: 532511 - DNA, 120 bp, Artificial Sequence
  ENSG00000166415_14 (sequence is synthesized)
aaagagttgcctcctgcatgcccggaagcacctttttcctgtgaggatgataaaatggcacccggttgagaattttttaattgttggatgtgcagatgactcagtttatatctgggaaat

SEQ ID NO: 532512 - DNA, 120 bp, Artificial Sequence
  ENSG00000166415_15 (sequence is synthesized)
tgaaacaggcactttggaaagacatgagacaggagaaagagcacgaattattcttaattgttgtgatgattcacagcttgtgaagtctgtacttcccattgcctcagagacacttaagca

SEQ ID NO: 532513 - DNA, 120 bp, Artificial Sequence
  ENSG00000166415_16 (sequence is synthesized)
caaaagtatagaacagagatcctccagcccctaccagcttgggccattaccttgccctggtctgcaggtggagtcttcatgtaaggttactgatgccaaattttgcccaagaccttttaa

SEQ ID NO: 532514 - DNA, 120 bp, Artificial Sequence
  ENSG00000166415_17 (sequence is synthesized)
tgtcttgcctgtgaagacaaaatggagtaacgttggctttcatattcttctatttgatctggaaaaccttgttgaacttttgctaccaactccactcagtgatgttgactcttccagttc

SEQ ID NO: 532515 - DNA, 120 bp, Artificial Sequence
  ENSG00000166415_18 (sequence is synthesized)
attctatggtggtgaggtcctgagaagagccaagagcacagtggagaagaagacactgacactgagaaaaagtaaaactgcctgtggtcctctttcagcagaggcactagccaagcctat

SEQ ID NO: 532516 - DNA, 120 bp, Artificial Sequence
  ENSG00000166415_19 (sequence is synthesized)
tactgaaagcctggcccaaggagataataccatcaaattctcagaagaaaatgatggcattaaaaggcagaagaaaatgaagatctccaaaaaaatgcagcctaagccatcaagaaaagt

SEQ ID NO: 532517 - DNA, 120 bp, Artificial Sequence
  ENSG00000166415_20 (sequence is synthesized)
agatgccagtctcacaatagacacagcaaaattgtttctgtcttgccttttgccatggggagtggataaagatttagattatctttgcattaagcacctcaatattttaaagcttcaggg

SEQ ID NO: 532518 - DNA, 120 bp, Artificial Sequence
  ENSG00000166415_21 (sequence is synthesized)
tcctatttctttgggaatttctttgaatgaagataatttctcactgatgttgccaggttgggatttatgcaatagtggaatgataaaagactattcaggagtaaatttattttccaggaa

SEQ ID NO: 532519 - DNA, 120 bp, Artificial Sequence
  ENSG00000166415_22 (sequence is synthesized)
agttttggacttgtcagataaatacacagccactcttccaaatcaggttggaattccaagaggattggaaaataattgtgattctttgcgagagtcagatactatagtttatttgttgag

SEQ ID NO: 532520 - DNA, 120 bp, Artificial Sequence
  ENSG00000166415_23 (sequence is synthesized)
cagactatttttagttaataaattagttaacatgcctttagaattggcatgtagagttggcagttctttcagaatggaaagtatacataataagatgagaggtgctgggaatgacatttt

SEQ ID NO: 532521 - DNA, 120 bp, Artificial Sequence
  ENSG00000166415_24 (sequence is synthesized)
aaatatgtcaagcttctacagttgcttacgaaatggtaagaatgaatcccatgtacctgaggctgacctttcacttttgaagctaatttcctgttggagagaccagtctgtgcaggtaac

SEQ ID NO: 532522 - DNA, 120 bp, Artificial Sequence
  ENSG00000166415_25 (sequence is synthesized)
tgaagcaatacaagctgttctcttggcggaagttcaacaacacatgaagagtttgggaaagatacccgtcaatagtcaaccagtgtccatggcagagaatggtaactgtgagatgaagca

SEQ ID NO: 532523 - DNA, 120 bp, Artificial Sequence
  ENSG00000166415_26 (sequence is synthesized)
gatgctgccaaagctggaatggacagaagaactagagttacagtgtgttagaaacactttgcctctgcaaactccagtcagcccggtcaagcatgacagcaactcaaactcggcaaactt

SEQ ID NO: 532524 - DNA, 120 bp, Artificial Sequence
  ENSG00000166415_27 (sequence is synthesized)
ccaagacgtggaggacatgcctgacagatgtgccttggaagagtctgagagtccaggtgagccaaggcatcattcatggatagcaaaggtctgcccctgcaaggtgtcttaaatggaatc

SEQ ID NO: 532525 - DNA, 120 bp, Artificial Sequence
  ENSG00000166415_28 (sequence is synthesized)
tcatcagtaggagctgaatttggacaaattaagaaatccaaaagatgccatttgtttattactgtataaaagcattgttgttattggtcaagttattaggctgtagtggatttgctaata

SEQ ID NO: 532526 - DNA, 120 bp, Artificial Sequence
  ENSG00000166415_29 (sequence is synthesized)
ctttagccaacatgtattaaagtgattttaatacatgctgattacaatgcaatacatactgattgaaaatattcatattcatctaattttagaaaaatattgcctagatcattctctatt

SEQ ID NO: 532527 - DNA, 120 bp, Artificial Sequence
  ENSG00000166415_30 (sequence is synthesized)
aataaacaatgttaaaaccaatgtagtacacaatacttacttacaaatttaatactgcttcaaggtatttaatctaaaattttaccaactttgatttgtctggttaggatattttgtttt

SEQ ID NO: 532528 - DNA, 120 bp, Artificial Sequence
  ENSG00000166415_31 (sequence is synthesized)
agtggatatgctttaattcggatcaattactgcagtaaatctcatccctaagcatgaaatgttgtcaacaaatacccagttccatttagttatcaattagcccaaataagagatacaaag

SEQ ID NO: 532529 - DNA, 120 bp, Artificial Sequence
  ENSG00000166415_32 (sequence is synthesized)
tataacagtgaccaaccttgtactgttgagttaatttgaacttctaatgacattgaggctaatgtctttagctcaaggttgatcttgttggccatatagatgtgaactagggaaggggaa

SEQ ID NO: 532530 - DNA, 120 bp, Artificial Sequence
  ENSG00000166415_33 (sequence is synthesized)
tcaacttacagcatatcacaattgatccttattaagtataaactcttgtaggtcttttcccagaaagaagcttgactagcaggaattctaaaactgaaatatatcaaacagcataaatag

SEQ ID NO: 532531 - DNA, 120 bp, Artificial Sequence
  ENSG00000166415_34 (sequence is synthesized)
gaatagacataaagtgctcttctattaaagcctttggtgatctatttactatgatttatattgtacagttcctcgatttacagaaaatcatcaaaattattaatctacatatcttatgta

SEQ ID NO: 532532 - DNA, 120 bp, Artificial Sequence
  ENSG00000166415_35 (sequence is synthesized)
tataaatattgcctaatccatagaaaaaaggatataaagtattaaatatgtgatatatagctatatctatctatctatgtatctaatagggaagtccaagtcacttcaattgaagaaaca

SEQ ID NO: 532533 - DNA, 120 bp, Artificial Sequence
  ENSG00000166415_36 (sequence is synthesized)
tatctctgagcataggagcagcctcaggtcctatggtgggatgcagtggacaggagagggggaaattagaaaagagaactatataattgaaaaagggatataaagcattaaatatatgat

SEQ ID NO: 532534 - DNA, 120 bp, Artificial Sequence
  ENSG00000166415_37 (sequence is synthesized)
atatagctatatctatgtatgtatctaacagagaagttcaagtcacttcaattaaagaaacatttttgagcatgggaccagcctcaggtcttatgctgggatgcagtagacaggagatgg

SEQ ID NO: 532535 - DNA, 120 bp, Artificial Sequence
  ENSG00000166415_38 (sequence is synthesized)
ggaaattagaaaagagaactgtgtaattgaaatgacgtgggctgcacccttaaggaacttataattaatgatgatctgaataaacataccaggataaagatgtcaaatgagtgtgactcc

SEQ ID NO: 532536 - DNA, 120 bp, Artificial Sequence
  ENSG00000166415_39 (sequence is synthesized)
cttaaagtagattaaagtgtgcattctttgtttcctaaaatatgattttactgcttgaaattacatttgagttgaagtttagaaactaacatagcattaatatgaataatcatggaaaat

SEQ ID NO: 532537 - DNA, 120 bp, Artificial Sequence
  ENSG00000166415_40 (sequence is synthesized)
tattatcctttgaaaactgattgataaatatattccccctcctttagaaacagtcaaaagccacttcaaacaagtttcaaaataaaggaaggtagcaagttaggcgatggattatatttt

SEQ ID NO: 532538 - DNA, 120 bp, Artificial Sequence
  ENSG00000166415_41 (sequence is synthesized)
cttgcttgttgtataccagttgtcaaggacattataaggactcccaaaagcattttgaaggatggcaatatcaaataagtgtatgtcctctcaaatgaggcatttttaattgttaaaatc

SEQ ID NO: 532539 - DNA, 120 bp, Artificial Sequence
  ENSG00000166415_42 (sequence is synthesized)
tatttggacgctcaggttatgatatgtttatgaaaaataagcttcattatttttatagctacatcctattattcccttttagaaacaagaataacaataggttttaatagttgccatact

SEQ ID NO: 532540 - DNA, 120 bp, Artificial Sequence
  ENSG00000166415_43 (sequence is synthesized)
tagcatttatcagttctaatgaaaccaatattgaatctctgataaatattttctgatgttactagctatgggaaattagaactggcacaaccctgacattactaagtggaaatgttagga

SEQ ID NO: 532541 - DNA, 120 bp, Artificial Sequence
  ENSG00000166415_44 (sequence is synthesized)
tttttcggcatcgcatgttagaatctctaaaatttaaacattcctgttaaatgactaaggtttgcttttatcaatatgaattctgaaggccaatatcataccattaactatgaaagcttt

SEQ ID NO: 532542 - DNA, 120 bp, Artificial Sequence
  ENSG00000166415_45 (sequence is synthesized)
taattcctaaaaatagttttagagatattcaagcaatgctctcctaatatccatacgcaagtgtgtttatgacacaaattcactagtctgtttaaaaatgaattctttatattgactggt

SEQ ID NO: 532543 - DNA, 120 bp, Artificial Sequence
  ENSG00000166415_46 (sequence is synthesized)
gttccacatatttcagtaatttctgttatgagaggacttgaaatagcaaattgccacacagttaactggatagaccacgtacgtggtgatcataaccacttggtactacacccagaaact

SEQ ID NO: 532544 - DNA, 120 bp, Artificial Sequence
  ENSG00000166415_47 (sequence is synthesized)
caaaattgtctttctcctgatgagatatgggtgtccttttgtacgtctaggcctaggtaaccagtggagtgattatattagcaaatgtgtttgtatccggagtcttcctgtcattgtaat

SEQ ID NO: 532545 - DNA, 120 bp, Artificial Sequence
  ENSG00000166415_48 (sequence is synthesized)
aaaaaatttatttaaaaattttgtcttgtgtttcttttttggtaatcatcttggtgatatttatgaatgtatttgtgtgtgtgtgtgtgtgtgtatacatacatatatatgtgtgtatat

SEQ ID NO: 532546 - DNA, 120 bp, Artificial Sequence
  ENSG00000166415_49 (sequence is synthesized)
atatatgtgtgtatatatatatatatatggcatatcccccaaaggaatatcatattttcatttgcaagccttgattctttgacttgctgttgagtttcacattggctccattgtatattg

SEQ ID NO: 532547 - DNA, 120 bp, Artificial Sequence
  ENSG00000166415_50 (sequence is synthesized)
tcacattggctccattgtatattgcaggaaaaagtacctggaaagcctggagggttaaaagcagaggctcctcggcagcgtgtccaggccgtgtgtgcttgctgtgcttgtcagagcctc

SEQ ID NO: 532548 - DNA, 120 bp, Artificial Sequence
  ENSG00000166415_51 (sequence is synthesized)
attccctcccctgtgttggagagctttctcacagggctcatccagaggtgctagaaagcaatgtgagcactattaaacacttcaaatataaggaaaaatgtataatgttagaaacacaca

SEQ ID NO: 532549 - DNA, 120 bp, Artificial Sequence
  ENSG00000166415_52 (sequence is synthesized)
gttaaaaagtagccccaggtatcaaacattctgttactattttagaaactaaattaaggctgctttgaacatgatggtattagaaaaatggtagaatacagtttgttaaatattaatatt

SEQ ID NO: 532550 - DNA, 120 bp, Artificial Sequence
  ENSG00000166415_53 (sequence is synthesized)
ctatctttagatgatagcatttggtgacttttatttcttttctcatacattttttccagtgttctgtatttttaaaatcctttcataattattataatgaacactttagaaaagatacta

SEQ ID NO: 532551 - DNA, 120 bp, Artificial Sequence
  ENSG00000166415_54 (sequence is synthesized)
tttctcttccatccttagagggcacattataataattgagtattttaaaattaaattttatgccatgtatttaaaatgaaagttcaggttacattaattccaactgattttaaagcctta

SEQ ID NO: 532552 - DNA, 120 bp, Artificial Sequence
  ENSG00000166415_55 (sequence is synthesized)
ttttcacagagtggactcattcaattttttaaattttatattcatacattttgattgctcagttatataaaagcggtgttatagactcctttattctccacaaaatgttgtcttatatgt

SEQ ID NO: 532553 - DNA, 120 bp, Artificial Sequence
  ENSG00000166415_56 (sequence is synthesized)
aaagtgccaaaagttgtgtttaatttcctaagaaagtcattgctttgtaaacatttgcataatacttagtgttttttgtaattttaaaaaattagcttaaccaaaagagttgcaaaatta

SEQ ID NO: 532554 - DNA, 120 bp, Artificial Sequence
  ENSG00000166415_57 (sequence is synthesized)
aaacttacttgagtaggtatctttcagacaaagctgcatggcttcatgtacaatagtccccagatcacctcgcactgtagtttgctcaagaaggagcctacagatggcaggtaggagaag

SEQ ID NO: 532555 - DNA, 120 bp, Artificial Sequence
  ENSG00000166415_58 (sequence is synthesized)
gtaaactggaaattaacaggtctgtctgtaagagcatgccactggaaacacccatccaatttgggacccctggaagacagcatgtgtctaatgggaggcctgtcctagtacaactccttt

SEQ ID NO: 532556 - DNA, 120 bp, Artificial Sequence
  ENSG00000166415_59 (sequence is synthesized)
actcttttcaccttcatcttgaccttctcagataccatctttatgtaaaatgttgatgttgtggagtttttgcagtaatttaatttttataaatattgtattaaaatatatttatcttga

SEQ ID NO: 532557 - DNA, 120 bp, Artificial Sequence
  ENSG00000166415_60 (sequence is synthesized)
gttcttttgttcttttctctctgcccccattttgtgggcccccaaattattatgggtcctgggcaccgtccctaatggataagccagccctgatctgagacacagagaggctgagggtct

SEQ ID NO: 532558 - DNA, 120 bp, Artificial Sequence
  ENSG00000166415_61 (sequence is synthesized)
ctaagaccactaagctagctacagcagagctcagacaagagcaactaggtctagacctctttctacatttgcgactatgaaaactatggagaaggctctgctcaagaggattcgcccaaa

SEQ ID NO: 532559 - DNA, 120 bp, Artificial Sequence
  ENSG00000166415_62 (sequence is synthesized)
cctcatctggacagaagatggtcacagttacatctatcagctgctgaacaggtgggctcagatgggagcggcatacaaaacattcagtgggctttcaaaaagcatataccctgctgatgg

SEQ ID NO: 532560 - DNA, 69 bp, Artificial Sequence
  ENSG00000166415_63 (sequence is synthesized)
gtcttctgcgtcgctcacggcaattcttaaaaacagtagaatctcaacatttgcagaaaatcattgtta

SEQ ID NO: 532561 - DNA, 120 bp, Artificial Sequence
  ENSG00000166415_64 (sequence is synthesized)
aaaacagtagaatctcaacatttgcagaaaatcattgttaaaggcactttggaaagacatgagacaggagaaagagcacgaattattcttaattgttgtgatgattcacagcttgtgaag

SEQ ID NO: 532562 - DNA, 120 bp, Artificial Sequence
  ENSG00000166415_65 (sequence is synthesized)
cagatgtggcatcaggagtgaacaaagccgctcatctcgcagtatccctacctatgctcctgggaggagtctaccccagatacgctctgaccttcggcaagttacttatgttctccaaga

SEQ ID NO: 532563 - DNA, 120 bp, Artificial Sequence
  ENSG00000166415_66 (sequence is synthesized)
ctcattttcttcatgtttggaatagtgataataatgcatattgatattatgaggaccgcatgaagcagtgaacgtaatctaagcagcacagtgtctacaacttaacatatagtcagattc

SEQ ID NO: 532564 - DNA, 87 bp, Artificial Sequence
  ENSG00000166415_67 (sequence is synthesized)
tttaagccggtccgaaaagctctccagtcagcccggtcaagcatgacagcaactcaaactcggcaaacttccaagacgtggaggaca

SEQ ID NO: 532565 - DNA, 120 bp, Artificial Sequence
  ENSG00000166426_0 (sequence is synthesized)
agtctccgccttgcgagctcagagtgtgcccgctgcgccgccgctgtccgtacctgccgccgccgccaccgccaccatgcccaacttcgccggcacctggaagatgcgcagcagcgagaa

SEQ ID NO: 532566 - DNA, 120 bp, Artificial Sequence
  ENSG00000166426_1 (sequence is synthesized)
tttcgacgagctgctcaaggcactgggtgtgaacgccatgctgaggaaagtggccgtagcggctgcgtccaagccgcacgtggagatccgccaggacggggatcagttctacatcaagac

SEQ ID NO: 532567 - DNA, 120 bp, Artificial Sequence
  ENSG00000166426_2 (sequence is synthesized)
atccaccacggtgcgcaccactgagatcaacttcaaggtcggagaaggctttgaggaggagaccgtggacggacgcaagtgcaggagtttagccacttgggagaatgagaacaagatcca

SEQ ID NO: 532568 - DNA, 120 bp, Artificial Sequence
  ENSG00000166426_3 (sequence is synthesized)
tgaaggggacggccccaaaacctactggacccgtgagctggccaacgatgaacttatcctgacgtttggcgccgatgacgtggtctgcaccagaatttatgtccgagagtgaaggcagct

SEQ ID NO: 532569 - DNA, 120 bp, Artificial Sequence
  ENSG00000166426_4 (sequence is synthesized)
ggcttgctcctactttcaggaagggatgcaggctcccctgaggaatatgtcatagttctgagctgccagtggaccgcccttttcccctaccaatattaggtgatcccgttttccccatga

SEQ ID NO: 532570 - DNA, 120 bp, Artificial Sequence
  ENSG00000166426_5 (sequence is synthesized)
caatgttgtagtgtcccccacccccaccccccaggccttggtgcctcttgtatccctagtgctccatagtttggcatttgcacggtttcgaagtcattaaactggttagacgtgtctcaa

SEQ ID NO: 532571 - DNA, 120 bp, Artificial Sequence
  ENSG00000166426_6 (sequence is synthesized)
caaagagtttttaacagggcaataagtggccttattagtgatatgctttaaacatttttgcacaggcatctgcactgattggttttccttttcttcttctctgcagacgtttggcgccga

SEQ ID NO: 532572 - DNA, 120 bp, Artificial Sequence
  ENSG00000166428_0 (sequence is synthesized)
agaggaagtagctggaaggggaaggagccagctgcagagaggaggaggtgagctgcagagaagaggaggttggtgtggagcacaggcagcaccgagcctgccccgtgagctgagggcctg

SEQ ID NO: 532573 - DNA, 120 bp, Artificial Sequence
  ENSG00000166428_1 (sequence is synthesized)
cagtctgcggctggaatcaggatagacaccaaggcaggacccccagagatgctgaagcctctttggaaagcagcagtggcccccacatggccatgctccatgccgccccgccgcccgtgg

SEQ ID NO: 532574 - DNA, 120 bp, Artificial Sequence
  ENSG00000166428_2 (sequence is synthesized)
gacagagaggctggcacgttgcaggtcctgggagcgctggctgtgctgtggctgggctccgtggctcttatctgcctcctgtggcaagtgccccgtcctcccacctggggccaggtgcag

SEQ ID NO: 532575 - DNA, 120 bp, Artificial Sequence
  ENSG00000166428_3 (sequence is synthesized)
cccaaggacgtgcccaggtcctgggagcatggctccagcccagcttgggagcccctggaagcagaggccaggcagcagagggactcctgccagcttgtccttgtggaaagcatcccccag

SEQ ID NO: 532576 - DNA, 120 bp, Artificial Sequence
  ENSG00000166428_4 (sequence is synthesized)
gacctgccatctgcagccggcagcccctctgcccagcctctgggccaggcctggctgcagctgctggacactgcccaggagagcgtccacgtggcttcatactactggtccctcacaggg

SEQ ID NO: 532577 - DNA, 120 bp, Artificial Sequence
  ENSG00000166428_5 (sequence is synthesized)
cctgacatcggggtcaacgactcgtcttcccagctgggagaggctcttctgcagaagctgcagcagctgctgggcaggaacatttccctggctgtggccaccagcagcccgacactggcc

SEQ ID NO: 532578 - DNA, 120 bp, Artificial Sequence
  ENSG00000166428_6 (sequence is synthesized)
aggacatccaccgacctgcaggttctggctgcccgaggtgcccatgtacgacaggtgcccatggggcggctcaccaggggtgttttgcactccaaattctgggttgtggatggacggcac

SEQ ID NO: 532579 - DNA, 120 bp, Artificial Sequence
  ENSG00000166428_7 (sequence is synthesized)
atatacatgggcagtgccaacatggactggcggtctctgacgcaggtgaaggagcttggcgctgtcatctataactgcagccacctggcccaagacctggagaagaccttccagacctac

SEQ ID NO: 532580 - DNA, 120 bp, Artificial Sequence
  ENSG00000166428_8 (sequence is synthesized)
tgggtactgggggtgcccaaggctgtcctccccaaaacctggcctcagaacttctcatctcacttcaaccgtttccagcccttccacggcctctttgatggggtgcccaccactgcctac

SEQ ID NO: 532581 - DNA, 120 bp, Artificial Sequence
  ENSG00000166428_9 (sequence is synthesized)
ttctcagcgtcgccaccagcactctgtccccagggccgcacccgggacctggaggcgctgctggcggtgatggggagcgcccaggagttcatctatgcctccgtgatggagtatttcccc

SEQ ID NO: 532582 - DNA, 120 bp, Artificial Sequence
  ENSG00000166428_10 (sequence is synthesized)
accacgcgcttcagccaccccccgaggtactggccggtgctggacaacgcgctgcgggcggcagccttcggcaagggcgtgcgcgtgcgcctgctggtcggctgcggactcaacacggac

SEQ ID NO: 532583 - DNA, 120 bp, Artificial Sequence
  ENSG00000166428_11 (sequence is synthesized)
cccaccatgttcccctacctgcggtccctgcaggcgctcagcaaccccgcggccaacgtctctgtggacgtgaaagtcttcatcgtgccggtggggaaccattccaacatcccattcagc

SEQ ID NO: 532584 - DNA, 120 bp, Artificial Sequence
  ENSG00000166428_12 (sequence is synthesized)
agggtgaaccacagcaagttcatggtcacggagaaggcagcctacataggcacctccaactggtcggaggattacttcagcagcacggcgggggtgggcttggtggtcacccagagccct

SEQ ID NO: 532585 - DNA, 120 bp, Artificial Sequence
  ENSG00000166428_13 (sequence is synthesized)
ggcgcgcagcccgcgggggccacggtgcaggagcagctgcggcagctctttgagcgggactggagttcgcgctacgccgtcggcctggacggacaggctccgggccaggactgcgtttgg

SEQ ID NO: 532586 - DNA, 120 bp, Artificial Sequence
  ENSG00000166428_14 (sequence is synthesized)
cagggctgaggggggcctctttttctctcggcgaccccgccccgcacgcgccctcccctctgaccccggcctgggcttcagccgcttcctcccgcaagcagcccgggtccgcactgcgcc

SEQ ID NO: 532587 - DNA, 120 bp, Artificial Sequence
  ENSG00000166428_15 (sequence is synthesized)
aggagccgcctgcgaccgcccgggcgtcgcaaaccgcccgcctgctctctgatttccgagtccagccccccctgagccccacctcctccagggagccctccaggaagccccttccctgac

SEQ ID NO: 532588 - DNA, 120 bp, Artificial Sequence
  ENSG00000166428_16 (sequence is synthesized)
tcctggcccacaggccaggcctaaaaaaaactcgtggcttcccggtgcctctgtgtgagtcccgcgcgggcggcccttcatcctcttgccaagggcccgcctctatgcgcccgcccctgc

SEQ ID NO: 532589 - DNA, 120 bp, Artificial Sequence
  ENSG00000166428_17 (sequence is synthesized)
gaaactgcgccgcgcgaccgccgtggcagcgcctcagctagccccgggtccgcgagaacctggggcggggcggggcggggaccagacgggcctcccaggcggagcgaaccctccacctcc

SEQ ID NO: 532590 - DNA, 120 bp, Artificial Sequence
  ENSG00000166428_18 (sequence is synthesized)
caccccgcgccgggctgccgcgctccggaacccaaattcccgccccgaggctgccgggggaagcgagaggcgcggagcccacgcccgggactccagcggaggaaacgcagaccaaggcgc

SEQ ID NO: 532591 - DNA, 120 bp, Artificial Sequence
  ENSG00000166428_19 (sequence is synthesized)
gactccagcggaggaaacgcagaccaaggcgcagcgccgcgcacccaccgccagggggcagctcctacggcgccggacaggggcggcgcgggaggggagcggggctgaggggaccgggag

SEQ ID NO: 532592 - DNA, 120 bp, Artificial Sequence
  ENSG00000166428_20 (sequence is synthesized)
gggacagggagggcgggaggcgacccgcggctgagtgagggaagggcgggaggggacccgcggctgaggggaccgggagggcgggaggcgacccgcggctgagtgaggggagggtgggag

SEQ ID NO: 532593 - DNA, 120 bp, Artificial Sequence
  ENSG00000166428_21 (sequence is synthesized)
ggctgagtgaggggagggtgggaggggacccgcggctgaggggacagggagggcgggaggggacccgcggctgaggggaccgggagggcgggaggcgacccggggctgagtgaggggagg

SEQ ID NO: 532594 - DNA, 120 bp, Artificial Sequence
  ENSG00000166428_22 (sequence is synthesized)
gggcgggaggggacctgcgactgaggggacggggaggatgtgaggcgatccggggctgagtgaggggagggtgggaggggacccgcggctgaggggacggggagggcgggaggggacccg

SEQ ID NO: 532595 - DNA, 120 bp, Artificial Sequence
  ENSG00000166428_23 (sequence is synthesized)
gagggcgggaggcgacccggggctgaggggacggggagggcgggaggggacccgcggctgaggggacaggtcctgcgtgcgggctggggagacaggcgggcgagggtaggggtgcacaag

SEQ ID NO: 532596 - DNA, 120 bp, Artificial Sequence
  ENSG00000166428_24 (sequence is synthesized)
ggtaggggtgcacaaggctgtgtggtttgtgggctgttgtgcagggtgggtccaagcatgtgggggcaggcttgtcctggggatgcagtgcccagggttggtggatggggctgagaggac

SEQ ID NO: 532597 - DNA, 120 bp, Artificial Sequence
  ENSG00000166428_25 (sequence is synthesized)
cagcatttgagctggagggcaggaaggtgactccagtctgagaccaggacttggatgcagctccactggaactcaccctatcctgggagccacctgggcacctgtcctgcagatgcagga

SEQ ID NO: 532598 - DNA, 120 bp, Artificial Sequence
  ENSG00000166428_26 (sequence is synthesized)
tttgaacccaggtttggcaactcagttcccactcttctgctatgaatgctgggtcagaaggattctcaaaacaccctggcttatctcacctgatggttcctgaccaagaccacagggtac

SEQ ID NO: 532599 - DNA, 120 bp, Artificial Sequence
  ENSG00000166428_27 (sequence is synthesized)
ctggagttcagggatggctcagcggtatgaaggagcactggatgctgaatggaccccagggtgccccgaatgctctcccggtcttgaggcaccactttcctacccttctctacttctctc

SEQ ID NO: 532600 - DNA, 120 bp, Artificial Sequence
  ENSG00000166428_28 (sequence is synthesized)
cttttcctacccttctctacttttttctttcctacatttgtgtccctgccacactgtgaactcagccatatcttcctcttccctctttgctttggggaaagctagcaaagttcatctcag

SEQ ID NO: 532601 - DNA, 120 bp, Artificial Sequence
  ENSG00000166428_29 (sequence is synthesized)
gtacagtacaagttacttttctgttcgattagtgacctcatacttcccccatctaaaggacaccttagacttcagcattctgtctgtgcagaaatctcctacacccatcctgcctccctg

SEQ ID NO: 532602 - DNA, 120 bp, Artificial Sequence
  ENSG00000166428_30 (sequence is synthesized)
cccaagcttgtgaaaagcttgctgcagatgctgcagggggatagggatccacatagccctgcaaggccttcaggagcttctgggggctgctttgtgtgtgagctgcacttggccaagcca

SEQ ID NO: 532603 - DNA, 120 bp, Artificial Sequence
  ENSG00000166428_31 (sequence is synthesized)
agctctggcagttgcagtggctgctccctgtggcttcctatccctcattcatgctccatatctcctcagtaaccatctggcaaaaagcttcgtggcaacacctggctcagaagccgatat

SEQ ID NO: 532604 - DNA, 120 bp, Artificial Sequence
  ENSG00000166428_32 (sequence is synthesized)
catcccagactaagctctgccctccagggttgcacgtgtgggtttgctccctggttcttggccttatacctgaatgtgtctcagagcacttggcctgctctcttggcctgccaactatgt

SEQ ID NO: 532605 - DNA, 120 bp, Artificial Sequence
  ENSG00000166428_33 (sequence is synthesized)
tctaggagggctctgtgctccaggctgtgatttggacaactggctggtggccctcagccagtgaaaggcctctttccacacacctggggactggcagtcacacctcagtggcactgacag

SEQ ID NO: 532606 - DNA, 120 bp, Artificial Sequence
  ENSG00000166428_34 (sequence is synthesized)
aggcctgcttcaaggcagatgcctattccaaaggaaatccagcttgacaaggcttgggagaccccaggagggtgccacaatgtggccccttctgggctatagcagacagactctagaatg

SEQ ID NO: 532607 - DNA, 120 bp, Artificial Sequence
  ENSG00000166428_35 (sequence is synthesized)
gctcccttgacccccacctgctggtatgcatgcccttgtgtgatctcaccttgagtgtgtgcaggacctgtgccttgttgtaaccaatagaatacagaggtaaggggatgtcactcctgt

SEQ ID NO: 532608 - DNA, 120 bp, Artificial Sequence
  ENSG00000166428_36 (sequence is synthesized)
gacaccttgtgatcatgtgacataagattataacattatcaaggaatagcagtctatcccttgctagctttaaaaagtgagctgctaggctatgagctgtcctatgaagaggcccatgta

SEQ ID NO: 532609 - DNA, 120 bp, Artificial Sequence
  ENSG00000166428_37 (sequence is synthesized)
gcagggtactggggttgcctccagcccccaactagcaagaaactggggccctcaatcatcccatccacaaggagttgagtgtggctagcaacaacgtgagcttcagaagtggctgctttc

SEQ ID NO: 532610 - DNA, 120 bp, Artificial Sequence
  ENSG00000166428_38 (sequence is synthesized)
ctggtcatacctgaaggggagaccacagccccagctgacatcttgattgtagcctaatgggaccttgagcagagaacccaacaaagccacacttgggctcctgatccacagaaactggga

SEQ ID NO: 532611 - DNA, 120 bp, Artificial Sequence
  ENSG00000166428_39 (sequence is synthesized)
gatcataaatgtgtgttgttttaagttgctaatttgtagtgatgttcttatgcagcatagataactcatacacagagaaccaaggccacgcgagaaccctgtgggggcccctgctgctca

SEQ ID NO: 532612 - DNA, 120 bp, Artificial Sequence
  ENSG00000166428_40 (sequence is synthesized)
gccactcctcacatgctgggacagctgtctctctggcctctagcaccaaggtccccactatcccaggccttgactcttggatcagagagggacaaaagccccatggagccaagcagactc

SEQ ID NO: 532613 - DNA, 120 bp, Artificial Sequence
  ENSG00000166428_41 (sequence is synthesized)
ctccccctgggctgcactcacctagcttgtctggcacacacaagttggagtagagaaggcaggaagccctgggaagggagagggtgatggccttgcttaactgggatgagtgtccaccaa

SEQ ID NO: 532614 - DNA, 120 bp, Artificial Sequence
  ENSG00000166428_42 (sequence is synthesized)
atttcccttcccacttcccctgctcatgagcccccaggggacctgtgtcagttcactttctagaggcttctatgtgccctaacttggatgacacccacgggcctccccaactcagcacag

SEQ ID NO: 532615 - DNA, 120 bp, Artificial Sequence
  ENSG00000166428_43 (sequence is synthesized)
ggaacatatgcccatggtggcatggggaaagaacccagcctctcccctgcccaggctcctgcaccccatagctgtcacccctctggaacctctcagggcagcacgagtggtagcctcgga

SEQ ID NO: 532616 - DNA, 120 bp, Artificial Sequence
  ENSG00000166428_44 (sequence is synthesized)
gtggccttcaccctccaggcactgcggtcctccagattggctcacagcccagctcttgctcccatatccacagccatgagagcagccacctccccagggggccataagcgcttctcacca

SEQ ID NO: 532617 - DNA, 120 bp, Artificial Sequence
  ENSG00000166428_45 (sequence is synthesized)
ggagcccacctaggccaggagggagctgggggcaagttccaactgcccccttgaacactgcatacccatgaatctggcaggggcatctgggaagagatttgaccactgaaagactgtagg

SEQ ID NO: 532618 - DNA, 120 bp, Artificial Sequence
  ENSG00000166428_46 (sequence is synthesized)
gaaacccttgaacctcaatccgctacgccacgtggatttgcttcctgtgggctgcccaagagcgcctctgtggtgaaggaagcttctgaggatgggccactaaagatggccaaggtcacc

SEQ ID NO: 532619 - DNA, 120 bp, Artificial Sequence
  ENSG00000166428_47 (sequence is synthesized)
tttctgtgctgtccccactctgcactccatctcccatcccacactgcctccagctggagggagggagggagggttgtacgtctgtgtccctgccacactgtgaactcagccctatcttcc

SEQ ID NO: 532620 - DNA, 120 bp, Artificial Sequence
  ENSG00000166428_48 (sequence is synthesized)
ttgtcttcctcacagcctctggctcagaggaggacctggacaaatggatgataggtaggcaaccacccaaatgttcctcattgactgttctctagagctgcttagtagagaccaggagtg

SEQ ID NO: 532621 - DNA, 120 bp, Artificial Sequence
  ENSG00000166428_49 (sequence is synthesized)
tgtgggaggaaagccctggtaaacttcgaccctgagacagaagacctcagcagccttcagcatgggatgcagcactttctttattgcccatccagggaacagccaagccagctccatctg

SEQ ID NO: 532622 - DNA, 120 bp, Artificial Sequence
  ENSG00000166428_50 (sequence is synthesized)
cattctggctgcagcgtgtacattaggggactcaggggccacagtgtgggaccgtgcacactggcaaggcactggcggatgctggcaggccagtggacatggatagatgagaatgacaac

SEQ ID NO: 532623 - DNA, 120 bp, Artificial Sequence
  ENSG00000166428_51 (sequence is synthesized)
tcacagatgtcctagcttctgctggcccagctgccagccactggccatcacccttttgcccagcatgtgtgcattgtcacccaaaacatcttgaaacttgccattagtgaggcattcaac

SEQ ID NO: 532624 - DNA, 120 bp, Artificial Sequence
  ENSG00000166428_52 (sequence is synthesized)
aaagaagtaagctaagtgagtaggaaacagtgtttcctggaatataccgcactctgcctgaaataggaaaactatgtttgccgggaagcagcagcagcaggaaagaagttataccaaaaa

SEQ ID NO: 532625 - DNA, 120 bp, Artificial Sequence
  ENSG00000166428_53 (sequence is synthesized)
cgacttgtacaccacagacattataaccctttcctcaaagaaacagtcatgttctgttgggtattatggacaggtctctggaaatttatctaataaagaccaacaaacttccccagcagt

SEQ ID NO: 532626 - DNA, 120 bp, Artificial Sequence
  ENSG00000166428_54 (sequence is synthesized)
gcaagtggggaccagtcgggcagggactgcacctgccccaacatccctggcctgggtggagtggggtggaggccccacagaggggtttttctcccacagcgcctgactttggtccctgca

SEQ ID NO: 532627 - DNA, 120 bp, Artificial Sequence
  ENSG00000166428_55 (sequence is synthesized)
cccagctggtgcgccccgccctggccccaccgcatcctggtgctggaaacacagcaagtcaggctgcctatctatgcaggcgtctcgggcaccaggcccgggggctcagcttggtggtag

SEQ ID NO: 532628 - DNA, 120 bp, Artificial Sequence
  ENSG00000166428_56 (sequence is synthesized)
aacgtctctgtggacgtggtgagggcgtgctcccggccgggcgtgggaaaggcggccctcctgccgcccttcctgacgcgctgcctctgctcccctaagaaagtcttcatcgtgccggtg

SEQ ID NO: 532629 - DNA, 120 bp, Artificial Sequence
  ENSG00000166432_0 (sequence is synthesized)
ctcagcctcccaaatagctgggactacagacgccatttggaatgaacaggaaaaggctgaactttttacagataagttttgtcaagtatgtggagtgatgctacagtttgaatcacaaag

SEQ ID NO: 532630 - DNA, 120 bp, Artificial Sequence
  ENSG00000166432_1 (sequence is synthesized)
ctacagtttgaatcacaaagaatttcacattatgagggtgaaaaacatgctcaaaatgttagtttttattttcaaatgcatggggaacaaaatgaagtgcctggtaagaaaatgaagatg

SEQ ID NO: 532631 - DNA, 120 bp, Artificial Sequence
  ENSG00000166432_2 (sequence is synthesized)
catgttgagaattttcaggtgcataggtatgaaggagtggacaaaaacaaattttgtgatctctgcaacatgatgtttagctctccacttattgctcagtctcactatgtgggaaaggtc

SEQ ID NO: 532632 - DNA, 120 bp, Artificial Sequence
  ENSG00000166432_3 (sequence is synthesized)
catgctaaaaaactgaagcaattaatggaggaacatgatcaggcatctccatcaggatttcaaccagagatggcatttagtatgagaacctatgtttgccatatttgtagtattgctttt

SEQ ID NO: 532633 - DNA, 120 bp, Artificial Sequence
  ENSG00000166432_4 (sequence is synthesized)
acatctttagatatgttccggtcccacatgcaaggaagtgaacatcaaattaaagaatccattgttatcaatctagtgaagaattcaaggaagacacaagactcttaccaaaatgagtgt

SEQ ID NO: 532634 - DNA, 120 bp, Artificial Sequence
  ENSG00000166432_5 (sequence is synthesized)
gcagattacatcaatgtgcagaaagccagaggactagaggccaagacttgtttcagaaagatggaagagagttctttggaaacccgtagatacagagaagtggtcgattccagacccaga

SEQ ID NO: 532635 - DNA, 120 bp, Artificial Sequence
  ENSG00000166432_6 (sequence is synthesized)
catagaatgtttgaacaaagactcccatttgagactttccggacatacgcagcaccatacaatatttcacaagcaatggaaaagcagttacctcattcaaagaagacatatgactctttc

SEQ ID NO: 532636 - DNA, 120 bp, Artificial Sequence
  ENSG00000166432_7 (sequence is synthesized)
caagatgaacttgaagattacatcaaagtacagaaagccagaggactagatccaaagacttgtttcagaaagatgagagagaactctgtggatactcatgggtacagagaaatggttgat

SEQ ID NO: 532637 - DNA, 120 bp, Artificial Sequence
  ENSG00000166432_8 (sequence is synthesized)
tctggacccagatcaagaatgtgtgagcaaagattttcacatgaggcttcccagacctaccaacgaccataccatatttcaccagtggaaagccagttacctcagtggctaccaacccat

SEQ ID NO: 532638 - DNA, 120 bp, Artificial Sequence
  ENSG00000166432_9 (sequence is synthesized)
tcaaagaggacatatgattctttccaagatgaacttgaagattacataaaagtgcagaaagccagaggactagagccaaaaacttgtttcagaaagataggagatagctctgtagaaaca

SEQ ID NO: 532639 - DNA, 120 bp, Artificial Sequence
  ENSG00000166432_10 (sequence is synthesized)
cacaggaacagagaaatggttgatgtcagacccagacatagaatgttggagcaaaagctcccatgtgagactttccagacctattcaggaccatatagtatttcacaagtagtggaaaac

SEQ ID NO: 532640 - DNA, 120 bp, Artificial Sequence
  ENSG00000166432_11 (sequence is synthesized)
cagttacctcattgcttaccagctcatgatagcaaacagagactagattctattagctactgtcaactcaccagagactgtttcccagaaaaaccagtacccttgagccttaatcagcaa

SEQ ID NO: 532641 - DNA, 120 bp, Artificial Sequence
  ENSG00000166432_12 (sequence is synthesized)
tactgctgaccatcaagcaggtcataaacggaaacatcagaagagaaaacgacacctagaagaaggcaaagaaaggccagagaaagagcagtccaagcataaaaggaaaaagagttatga

SEQ ID NO: 532642 - DNA, 120 bp, Artificial Sequence
  ENSG00000166432_13 (sequence is synthesized)
agatacagatttagacaaagacaagagcatcagacaaaggaaaagagaggaggatagagtcaaggtcagttcaggaaagcttaagcatcgaaaaaagaaaaaaagccatgatgtaccctc

SEQ ID NO: 532643 - DNA, 120 bp, Artificial Sequence
  ENSG00000166432_14 (sequence is synthesized)
cgagaaagaagaacgtaagcacaggaaagagaaaaagaaatctgttgaagaaaggacagaagaggaaatgctttgggatgagtctattcttggattttgaatgtttagttttgtttaccc

SEQ ID NO: 532644 - DNA, 120 bp, Artificial Sequence
  ENSG00000166432_15 (sequence is synthesized)
aaggttgaattgaaaaaaaaaaacagtcaatatggatttagaaaaaggaacacctgatgaagaaaaggagaggtagatacagtcagtgtcacttcaggacacttaggttttttttgtata

SEQ ID NO: 532645 - DNA, 120 bp, Artificial Sequence
  ENSG00000166432_16 (sequence is synthesized)
aaaatttaaattgaattaaaagaaggaaaaaaaaagcccaaacttaacctctgagaaaagaacataagaactcaaggagaacataagagaaaaggaaacctgttacagaaaagacaagaa

SEQ ID NO: 532646 - DNA, 120 bp, Artificial Sequence
  ENSG00000166432_17 (sequence is synthesized)
tctgtgttttggaatgagtctattcttgggtattgaacttttagttttgtttgcccaaggattaattgaggaaatcagctaagaaaatggactttagacaaaagcaagaggatcagatga

SEQ ID NO: 532647 - DNA, 120 bp, Artificial Sequence
  ENSG00000166432_18 (sequence is synthesized)
agaaaaggagaggtagatacagtcagtgtcacttcaggaaagctatttaaaaaaacttgaaatttaattgaaagaagaaacaacaacaaaaaagcctaaacctagcctctgaacaacact

SEQ ID NO: 532648 - DNA, 120 bp, Artificial Sequence
  ENSG00000166432_19 (sequence is synthesized)
aacatgagaacacaagaacttaagagaaaaagaaacctactcaagaaaagacagaagagacagtgatttgggatgagtctactctaggattttcaactttttagttttgttccttcaaag

SEQ ID NO: 532649 - DNA, 120 bp, Artificial Sequence
  ENSG00000166432_20 (sequence is synthesized)
ttgaaggaaaaaaagtttggttttataaaattcatgttattgtaatttttctaggtggatggctactttaatctctaaaaaagccaagtgaagtaaaagtattcagtatgccttttcctc

SEQ ID NO: 532650 - DNA, 120 bp, Artificial Sequence
  ENSG00000166432_21 (sequence is synthesized)
aagttactttccttcattttcttaaaaaagaaaaaaaattattaaatgtttctcacatatctcacatataatgtaatttccctaaatgaagttgtctctacttctgctcatcaaattgct

SEQ ID NO: 532651 - DNA, 120 bp, Artificial Sequence
  ENSG00000166432_22 (sequence is synthesized)
gtgatagtgaattatttattcatgggagataatttattttaaaggacagaattaccaagcgttacaaaatcagttctttccttggttttgtgttagtgttggtggtattttattgttgtt

SEQ ID NO: 532652 - DNA, 120 bp, Artificial Sequence
  ENSG00000166432_23 (sequence is synthesized)
tttctgtgtttatgtgtctcagctttctccaaggaatatgtatgaaataacttaaactgattttttctttgttaaatctaatttgcagtgtatttttgcattttctagttctgaaagtgg

SEQ ID NO: 532653 - DNA, 120 bp, Artificial Sequence
  ENSG00000166432_24 (sequence is synthesized)
aaaatgaaacagtctataataaacttagatgatatatagttttaaaacggtctcaaaaagtactgatataaggtcagtctatattctggaaatgtttatattaaagtgttttaatttcta

SEQ ID NO: 532654 - DNA, 120 bp, Artificial Sequence
  ENSG00000166432_25 (sequence is synthesized)
aacggaaggcggggctaaaggagcttaacggaatcgagacgcaagtgcaattgtccgcgcgcctcgctgcgatggcggcggcgccgagcacagtcaccccgctggcggcggagtcttccc

SEQ ID NO: 532655 - DNA, 120 bp, Artificial Sequence
  ENSG00000166432_26 (sequence is synthesized)
ctcaggaagctaccgtctctgccgcctcctcctcctcctacaccgcctgcgcggcagcggcggcggcggcggcggcggcggcagtaattgttcctgcctcctccgccacctccgcccctg

SEQ ID NO: 532656 - DNA, 120 bp, Artificial Sequence
  ENSG00000166432_27 (sequence is synthesized)
cctgcccgcctgccggtggctgtggcgacggcggcggcggcggctttggcggctccactatggcggcggcggggagggggggcagtagttttaaagtagacacccgcccttgcctcagag

SEQ ID NO: 532657 - DNA, 120 bp, Artificial Sequence
  ENSG00000166432_28 (sequence is synthesized)
gagggcataattttttctcaattcatatttgcaaattgtttattgagagtcagtgttgtatagagggataaacatagatttggagatacagtcacttgccaagttgcaccgcagattcct

SEQ ID NO: 532658 - DNA, 120 bp, Artificial Sequence
  ENSG00000166432_29 (sequence is synthesized)
ctggtataaaatgaaaataatgtgactctacaggattgaataataattaactgaagtagtatatatagtacccatcacagaataggtttgtaacaaatgttaggtttgtaaaaatgtttt

SEQ ID NO: 532659 - DNA, 120 bp, Artificial Sequence
  ENSG00000166432_30 (sequence is synthesized)
gtcctgtcataattttaaaataggtaaattggacattttctgtttttctttataacataaatccgatattcacatgcagtttttttccaacttttattttaagttcatgggtgcatgtgc

SEQ ID NO: 532660 - DNA, 83 bp, Artificial Sequence
  ENSG00000166432_31 (sequence is synthesized)
ttttttccaacttttattttaagttcatgggtgcatgtgcagatgtgaaggttcgttatataagtaaatgtgtgccatggtgg

SEQ ID NO: 532661 - DNA, 120 bp, Artificial Sequence
  ENSG00000166432_32 (sequence is synthesized)
ttgattatgtgcagctctcaattggcttttccccgtttaagatgttagaccagtggttctcagccttgactaattagaatcatgtgaggagcttttagaactcccattgctcaggccaac

SEQ ID NO: 532662 - DNA, 120 bp, Artificial Sequence
  ENSG00000166432_33 (sequence is synthesized)
cctccaatcaattaaattaccatctctgggacttacacatttgtgttttgttttctcttttttgactccctaagtgatttttatatggagccaagattgaaaacagtgttagacacacac

SEQ ID NO: 532663 - DNA, 120 bp, Artificial Sequence
  ENSG00000166432_34 (sequence is synthesized)
tttcccaatttatgctttgaaaacaaagaccttagttcagagacttatgagatagggttatgattaggggaagagtaggccccacaagtttcagggtagtgaagattctgaagggtacaa

SEQ ID NO: 532664 - DNA, 120 bp, Artificial Sequence
  ENSG00000166432_35 (sequence is synthesized)
gcgataaaggagcctgagtttctgggtgaactcagaaacaaggaatcctagaagggctgagagcagaacagaacctcggaatagtctctgaaataaaagagtggagagtataagaaacag

SEQ ID NO: 532665 - DNA, 120 bp, Artificial Sequence
  ENSG00000166432_36 (sequence is synthesized)
aatggaggcaggccccaggaggattcaatcaggaattctgaccttggggccataaataggtttcatatcttcacagaaagggtttacacaacttttgtatatcattttctgagatgtctg

SEQ ID NO: 532666 - DNA, 120 bp, Artificial Sequence
  ENSG00000166432_37 (sequence is synthesized)
aatcctagaaaaagataaagaacatcagtatgtgaaaaagccaagggctaaggtaatggtaatcagactacagttctagaaatgcctctggatctttaatacatgactggcagctcttct

SEQ ID NO: 532667 - DNA, 120 bp, Artificial Sequence
  ENSG00000166432_38 (sequence is synthesized)
aaacctctatgttacctctattagaatattatttctgatgtagtttgtggagaaacaaagcaggaatggaggagaacactgtatacagtatactttataagcactaaataaatatgtaaa

SEQ ID NO: 532668 - DNA, 120 bp, Artificial Sequence
  ENSG00000166432_39 (sequence is synthesized)
aactctgaaatataatctgagtttatagtcataatgaagattattagctcaataatctagggtagaggtgtccaatctttcggcttccatgggccacgttggaagaagaattaccttggg

SEQ ID NO: 532669 - DNA, 120 bp, Artificial Sequence
  ENSG00000166432_40 (sequence is synthesized)
acataaaatacactaacactaacaataactgatgagttaaaaaaaatcacataaaaatctcataatgttttaagaacatttgtgaatttgtgttgagtcacattcaaagacaccttgggc

SEQ ID NO: 532670 - DNA, 120 bp, Artificial Sequence
  ENSG00000166432_41 (sequence is synthesized)
gggccacatgtggcctgtgggctgcaagttggacaagcttgatctagggcaagtgctcaacagtggctgcacagttaaatcgtgtgtaaagctttcaaaaagtaagggtgcctaattcca

SEQ ID NO: 532671 - DNA, 120 bp, Artificial Sequence
  ENSG00000166432_42 (sequence is synthesized)
ctcctagagattctgatttaattggtctgacatggagttgtaacatcaatatttttgaatttttccatatgattctaatgtgtaaccagcattgagaaccactaatccagaggaaaccag

SEQ ID NO: 532672 - DNA, 120 bp, Artificial Sequence
  ENSG00000166432_43 (sequence is synthesized)
gactcctgcttatcttgcacaacttgggtaccctcaaaatatatggtattggcaaagttaatctgagcctaagttccagcacctgtaaaagatggtacgaatttcctaaaagaggttgtt

SEQ ID NO: 532673 - DNA, 120 bp, Artificial Sequence
  ENSG00000166432_44 (sequence is synthesized)
gtgaatatgtactctcctgggtttagtccttagctttgcaagaagtccaaaatcttcaagatgatcagcctcaaatcagggactcactaaccgcaaacaaacttgaaagtggctgataac

SEQ ID NO: 532674 - DNA, 120 bp, Artificial Sequence
  ENSG00000166432_45 (sequence is synthesized)
taactggaaagatattactttaatatgtttctcacaaagcctgtgataatcatttgccatatttgtgatcatagaaatttcttgtccctgccctagaaacattgaatcatgttctccagg

SEQ ID NO: 532675 - DNA, 120 bp, Artificial Sequence
  ENSG00000166432_46 (sequence is synthesized)
ggagagcctgggaatctatatttttaactgacaccccagttgatttttatcaaagaagtctgggaaacattgtactttaagttattgtattgtcattctggtattgatttatggtaagag

SEQ ID NO: 532676 - DNA, 120 bp, Artificial Sequence
  ENSG00000166432_47 (sequence is synthesized)
gagatacatatttccatttcctagtttttcttgatgtctgtcatccagggtatccttttcttggtatcaaagaatatgaaaaaccaattataatcagaaagtgacttagtatgcatgaaa

SEQ ID NO: 532677 - DNA, 120 bp, Artificial Sequence
  ENSG00000166432_48 (sequence is synthesized)
ttagagcatagaaaaggatagttttgagggaacatttcattcatattttgacataacctgctgagttttcctgggcccgcaatagccagtagtgtgcagcctcattttcttcagagtcag

SEQ ID NO: 532678 - DNA, 120 bp, Artificial Sequence
  ENSG00000166432_49 (sequence is synthesized)
catctttctttccccttgcaagcagtctcctgtttctatgaatagtctttgctcagacaaggccaatatacttggtaataattaatttagcttctttgaaatgattaggtcactttttgg

SEQ ID NO: 532679 - DNA, 120 bp, Artificial Sequence
  ENSG00000166432_50 (sequence is synthesized)
tttaaaagattaccatggttgtccccaaaatctttgcatgtaccaatttatttcctcctccctagggtcagaatgattttatatttggcttatgaaatgtattaatttgcttcttctggt

SEQ ID NO: 532680 - DNA, 120 bp, Artificial Sequence
  ENSG00000166432_51 (sequence is synthesized)
gcttttgactcttttgaagtggtaactagtagttttgttttagaattttgctttcagcttttatcctgagagtggggctcactgaacctctctcctttctaaaatctgtggaaattactt

SEQ ID NO: 532681 - DNA, 120 bp, Artificial Sequence
  ENSG00000166432_52 (sequence is synthesized)
ttggtaactaaggcactgcagtgatctcaggtaagagagtaaaaaatttgcctttatttgtttttaatgttttgggacgtttcaggttttggttgggtggaaacagagttggggcaaaca

SEQ ID NO: 532682 - DNA, 120 bp, Artificial Sequence
  ENSG00000166432_53 (sequence is synthesized)
aaaagaggctggttaagagattcagaggcaaaggttggttggccatgctaaatttcaggtgcctgttgcacctccatgtagcaacagtaagtagacagatagcagattcttagggaagaa

SEQ ID NO: 532683 - DNA, 120 bp, Artificial Sequence
  ENSG00000166432_54 (sequence is synthesized)
gttaagctagagaagcagtgtggtgtggtgtaaagaattctgggcattcaattaagaggtgtgggctctgagaggctaacactactactaacttgctctgtgactttgaccaagtcattt

SEQ ID NO: 532684 - DNA, 120 bp, Artificial Sequence
  ENSG00000166432_55 (sequence is synthesized)
gacctctctgggccccatctttattggaaaatgtcaagtagatggtctctaataaatttttggtccagttctaacattatgtgattctaaatgtatttatactgaccttcttaacttgaa

SEQ ID NO: 532685 - DNA, 120 bp, Artificial Sequence
  ENSG00000166432_56 (sequence is synthesized)
agagtcaacattcctgaagccccttcctgtcaagcctcctacaggcaccttctcactactagtgtattttattcccctttcatattctctcttccacccacttcttttcctccactcact

SEQ ID NO: 532686 - DNA, 120 bp, Artificial Sequence
  ENSG00000166432_57 (sequence is synthesized)
attatttttcagttctttctttacccagcctttctccttcatgtgaaaatgttcattcttctctcctccttgaagctctattctttgtcatatgtaactctttatgctctggttcttctc

SEQ ID NO: 532687 - DNA, 120 bp, Artificial Sequence
  ENSG00000166432_58 (sequence is synthesized)
tatttctgtttcttttttgttttctctatgggctctttttttattcattacctaaatgtaggtattcccatggtttcatccttgaccttactctacaaacacgatttctatttccctgat

SEQ ID NO: 532688 - DNA, 120 bp, Artificial Sequence
  ENSG00000166432_59 (sequence is synthesized)
ttcatttctcatctgtatgcttatgacctttctgtcaagtattagattcacatatccaaatggcagctactgcttcacctggatgcctcatagccatttcaaatccacctagtcattcaa

SEQ ID NO: 532689 - DNA, 120 bp, Artificial Sequence
  ENSG00000166435_0 (sequence is synthesized)
gtcccggccgtcggttgccgcctacactgtctgccgtcgcgtcgcagttactaaggcgtggggaagatagcggcaggcaccgcagtggagcggctccgagatccccggggggctcgcagg

SEQ ID NO: 532690 - DNA, 120 bp, Artificial Sequence
  ENSG00000166435_1 (sequence is synthesized)
cgcgcatccctcctgactgggacgtcgcctccgcagacccctcggaggctgaagcgacgccggaggcaggcaaagaaacaagtgaagaaacaaaaaaaaaaggaagttaaggggccattc

SEQ ID NO: 532691 - DNA, 120 bp, Artificial Sequence
  ENSG00000166435_2 (sequence is synthesized)
ccaaagtcaaagatcaaggagatggccttctcaggaatctacaagctggatgatgggaagccttacctgaacaactgcttcccagccagaaatctgcttcgcgtgccggaggaaggccaa

SEQ ID NO: 532692 - DNA, 120 bp, Artificial Sequence
  ENSG00000166435_3 (sequence is synthesized)
ggacactggttagtggttcagaaaggtaacctcaagaagaagcccaagggtttggttggagcacaagctgaacgtcgggaaagcctgaaggcgacttcttttgagttcaaggggaagaaa

SEQ ID NO: 532693 - DNA, 120 bp, Artificial Sequence
  ENSG00000166435_4 (sequence is synthesized)
gagtctcggcgggaaaatcaggtggaccttcctggacatatcctggaccaggcttttctgctgaagcaccactgtgtgaggaagccatcagatctgtgcaccattaatgccaaggaaaat

SEQ ID NO: 532694 - DNA, 120 bp, Artificial Sequence
  ENSG00000166435_5 (sequence is synthesized)
gacttcaagcattttcattctgtgatttatatcaatgcctcagaaaacctgctgcctctagaggcatttcacacgtttccagccctaaaggaactggatctcgcatttaatggcatcaaa

SEQ ID NO: 532695 - DNA, 120 bp, Artificial Sequence
  ENSG00000166435_6 (sequence is synthesized)
actatctacgtgaaatatggagactttaagttattagaattcttggacctttccttcaacagcctgactgtggaggccatctgtgatttggggattctgccacacctccgtgtcctgctc

SEQ ID NO: 532696 - DNA, 120 bp, Artificial Sequence
  ENSG00000166435_7 (sequence is synthesized)
ctcacaggcaatggccttacctccctgccgcccaatttggccgtcgcagaacaggaggcatctgtaacatcgctgacaagcaagaggtacatcctgaggttcccagcgctggagacactg

SEQ ID NO: 532697 - DNA, 120 bp, Artificial Sequence
  ENSG00000166435_8 (sequence is synthesized)
atgctggatgacaacagactctccaaccccagttgctttgccagcctggctgggctcaggagactgaagaagttaagcttggatgaaaacaggattatcaggatcccatacctacagcaa

SEQ ID NO: 532698 - DNA, 120 bp, Artificial Sequence
  ENSG00000166435_9 (sequence is synthesized)
gttcagctctatgacgagtcagtagactggaatggaggcaggggaagtccccataaagagccccaattcatgctgcagtccaagccaaggatgcttgaggactcagatgagcaactggat

SEQ ID NO: 532699 - DNA, 120 bp, Artificial Sequence
  ENSG00000166435_10 (sequence is synthesized)
atagtaaagcctaagcatcatgttttgatgtctcggaaggaatcatggaaggtgaaaagcgaaatcccaaaggtgccgaagcagcctctggtgctccatcacccgcgcatgacgacaacc

SEQ ID NO: 532700 - DNA, 120 bp, Artificial Sequence
  ENSG00000166435_11 (sequence is synthesized)
aagtctccctcaaaggatatgctagagccagaggcagagctggctgaagatctgcccactaccaaaagcacttctgtggagtcagagatgcccactgagaacctggaaggccattccccg

SEQ ID NO: 532701 - DNA, 120 bp, Artificial Sequence
  ENSG00000166435_12 (sequence is synthesized)
tcttgccggaccttcgtgccactgcctcccatctgctccaactccactgtgcatagtgaagagaccctgtcccacctgagtgacacaactgtccgcctcagcccagagcgcccatcagat

SEQ ID NO: 532702 - DNA, 120 bp, Artificial Sequence
  ENSG00000166435_13 (sequence is synthesized)
gaggactccaagagcacagagtccatcttcctgacccaggtgagtgaactgccttcctccgtcatccataaggatgatttagagttaaaggagaaagaccaaaagaaaccaccaacggca

SEQ ID NO: 532703 - DNA, 120 bp, Artificial Sequence
  ENSG00000166435_14 (sequence is synthesized)
cccagagaggtgaaagggactcggaggaaactcccaactgccttccttcccagcaagtaccacggctatgaagaactgctgacagccaagcctgatccagccttcattgagccaaaggga

SEQ ID NO: 532704 - DNA, 120 bp, Artificial Sequence
  ENSG00000166435_15 (sequence is synthesized)
atccagaagaatgcacaagccctgcaacaaatgctgaagcacccactcctgtgccactcctccaagcccaagctggacactcttcagaaaccctatgttcacaaagagaaacgggtgctg

SEQ ID NO: 532705 - DNA, 120 bp, Artificial Sequence
  ENSG00000166435_16 (sequence is synthesized)
tcctgcaccagtggacagaacggcggctggtgaaccacaagcagtacctggaggccaagaggctgttgaaggagttccaggcacgttaccggcagctggtgagtggctctctgcgcacag

SEQ ID NO: 532706 - DNA, 120 bp, Artificial Sequence
  ENSG00000166435_17 (sequence is synthesized)
tgttcgggactaccccgctccccatggcctgcccagcgctgagtgagagccagcccaagttcggccacttcctcgagttcatggatgagttctgccaggagcccacagccagtgactcac

SEQ ID NO: 532707 - DNA, 120 bp, Artificial Sequence
  ENSG00000166435_18 (sequence is synthesized)
aaggctagagctgtgcatgggggctgtgtgcaccacccggcctgtgccccagctctccccgagggctctgtgccctggaccgcacctcaaggttgaccagccggccacaggcctcagagc

SEQ ID NO: 532708 - DNA, 120 bp, Artificial Sequence
  ENSG00000166435_19 (sequence is synthesized)
tcagctgggccccacttgctggccacaaggtggcatccccttgtcaggatctcccctccttggcccaggcatgacctggtgcctggcccagcggcaataaagagtgggtgcacagggcaa

SEQ ID NO: 532709 - DNA, 120 bp, Artificial Sequence
  ENSG00000166435_20 (sequence is synthesized)
tagctctcttcccatctctctgcgagttcgtctttcataacaaccctctggtggcccatacacgaggggtccctccactgctgaagagcttcctccaggagcgactgggaatccacttaa

SEQ ID NO: 532710 - DNA, 120 bp, Artificial Sequence
  ENSG00000166435_21 (sequence is synthesized)
cattctttcttggaacccaggccacagcagcattgtcacacttccctctaaaaatggttttccagttcagatgcaacagggatacatttgttctctgttgtatgagaaactgacaccaag

SEQ ID NO: 532711 - DNA, 120 bp, Artificial Sequence
  ENSG00000166435_22 (sequence is synthesized)
gggatcttaacaaattcctgaacaatggctccaaaaaagggtatttttaaaaaccagatcttgtgagtacagccctaatgtgcagggacagtgtcatcctgtatattcgttctttactca

SEQ ID NO: 532712 - DNA, 120 bp, Artificial Sequence
  ENSG00000166435_23 (sequence is synthesized)
gactctttcttggttccttcattaggagcatgaatggttgaatgtgaacatgacagtaaattggagcaaactgtaaactggacataacttatgccaaaagacgtagttgtacaccatgga

SEQ ID NO: 532713 - DNA, 120 bp, Artificial Sequence
  ENSG00000166435_24 (sequence is synthesized)
aaccccatccctgctcctaatctctactgccattctgaatgccaaagcaagacatccaacatggggcatctcccagagcacatacagcaccaaaaatccacacacagcctaagcttaacc

SEQ ID NO: 532714 - DNA, 120 bp, Artificial Sequence
  ENSG00000166435_25 (sequence is synthesized)
catgtttttgtctgagattgttcaccagagacaagactctgactataaacagaacatccactttcatgagtttcctttactgtattctcaacttgggccttgcttcaagcaggcaaacat

SEQ ID NO: 532715 - DNA, 120 bp, Artificial Sequence
  ENSG00000166435_26 (sequence is synthesized)
acattgaagaatgcactttggtactgtttaaataacaacacatcagcccacttgattccatgccatgtccttgctgacagaaacatccccaacagggcatgccctggtccaagtcctctg

SEQ ID NO: 532716 - DNA, 120 bp, Artificial Sequence
  ENSG00000166435_27 (sequence is synthesized)
tctttgtcaaaatgctcttctgatgagttggagaggaggcagccagcagtggcagtccacaaggatccaggtaccttctccaatcctaaagcagacagcaggttgaataaaaccaataca

SEQ ID NO: 532717 - DNA, 120 bp, Artificial Sequence
  ENSG00000166435_28 (sequence is synthesized)
caacctattttctaggcaggaggggaaaaggcccttaggacaataatatttgtacaaagagttgagagtaaacaaacagtgtatcaggttcaaaaaaaaaaaaactattcgttggcattt

SEQ ID NO: 532718 - DNA, 120 bp, Artificial Sequence
  ENSG00000166435_29 (sequence is synthesized)
aaatttttttcccttgcatagtatctattctctcactaggacttttaagtgctctgctggaggctcagcgttggtaataccatgtttgatgcaaacttgaacccaatgctctcattggtg

SEQ ID NO: 532719 - DNA, 120 bp, Artificial Sequence
  ENSG00000166435_30 (sequence is synthesized)
gcacagctttggagggtggtggccccaagaaggggcaatctgcctgctgctatattaatctggaaccagggccaacagctactcttgaactatggtatttgaagagcgagttcattgcct

SEQ ID NO: 532720 - DNA, 120 bp, Artificial Sequence
  ENSG00000166435_31 (sequence is synthesized)
gttttaccttaaatgacaggaaaggaagatgaacaaaccttgctttgccttggcttcaaactagttcttgatttaagacaccagaaagggagagagggagtctgcttagagtttgaggtt

SEQ ID NO: 532721 - DNA, 120 bp, Artificial Sequence
  ENSG00000166435_32 (sequence is synthesized)
gcctctcacaagatgacagttaaaagttgccaccttacttaaaaggcattaaggaggcatttactcacaaaggagagagagtaaatttttttcttaagaggaaaaaaatactgataatac

SEQ ID NO: 532722 - DNA, 120 bp, Artificial Sequence
  ENSG00000166435_33 (sequence is synthesized)
atagaacaatctgcacatccagtcttggcactttttccaatttgactgatctctaaactggtgacccttgcatatatcttagtctcttttctacaatcttcttcagaaagctacagcagc

SEQ ID NO: 532723 - DNA, 120 bp, Artificial Sequence
  ENSG00000166435_34 (sequence is synthesized)
taacaatcatgtataaagatgcatttcctagatcatcttcagaagaaaatctcttcagcactttccctagaatctgtctcctgaccaccccgccccagacctgctttctcttttgagaat

SEQ ID NO: 532724 - DNA, 120 bp, Artificial Sequence
  ENSG00000166435_35 (sequence is synthesized)
tcataaccaggtatgtttagataccagttcaaaagaccactctatgggttgatgaggaaaaggctgcctgaggacaatttaagaccataatgagtttccaatttttaaagaaaatttggc

SEQ ID NO: 532725 - DNA, 120 bp, Artificial Sequence
  ENSG00000166435_36 (sequence is synthesized)
tagctggcttttaattcttaattaaaatcattaaatttaattaaaattattccaatcaaaatatatcactttccaagattccacattcatattacttacttatactatggagactttctc

SEQ ID NO: 532726 - DNA, 120 bp, Artificial Sequence
  ENSG00000166435_37 (sequence is synthesized)
tacctgagcatgtattcaggggctataggtacatttaactctaactaactgaaaaaaatcaggaagaaaaaactattaaaataaaataacctcctaaatcatttgggggtatccccatca

SEQ ID NO: 532727 - DNA, 120 bp, Artificial Sequence
  ENSG00000166435_38 (sequence is synthesized)
cttcctggacatatcctggaccaggcttttctgctgaagcaccactgtgtgaggaagccatcagatctgtgcaccattaatgtgagtggcctgaagttctccaaggtgaggtcagccagc

SEQ ID NO: 532728 - DNA, 120 bp, Artificial Sequence
  ENSG00000166435_39 (sequence is synthesized)
aaagatgtgattggggtgagccagacttgaggtggcgcacctggctgttgtggtttgtctcttgcacctccagagtccctagggactggaaatctggtcacgaagaaggagggagaggag

SEQ ID NO: 532729 - DNA, 120 bp, Artificial Sequence
  ENSG00000166435_40 (sequence is synthesized)
gacacaaacttttgctacaaattttatattgcccttgtcctatttgatatgaattaaagaaaattgccttatgggccaggcgtggtggctcagggctgtaatcccagcactttgggaggc

SEQ ID NO: 532730 - DNA, 120 bp, Artificial Sequence
  ENSG00000166435_41 (sequence is synthesized)
ccactatgcccggcttcctaataatttttactgctgctctcaaagtttttgacaacgcacttgtgttgctggcaaacaacattttcaccgcaatgctgagccactgctaacagaccatta

SEQ ID NO: 532731 - DNA, 120 bp, Artificial Sequence
  ENSG00000166435_42 (sequence is synthesized)
gctaaaaatttacaaaagtgaaaaaaatcatgtatccatttaaatattcaaatgaatcatgttggtgttttctcaatatggagttctgtacaagtttttgtttctttgttttcattgctt

SEQ ID NO: 532732 - DNA, 120 bp, Artificial Sequence
  ENSG00000166435_43 (sequence is synthesized)
ttggttgttatttataaggatttgagaacttggtctctagaagagagtttttatactgaaaaagactaagggagggtgagaaagtagcattttaaatgtgaataaaaaatatcaattgct

SEQ ID NO: 532733 - DNA, 120 bp, Artificial Sequence
  ENSG00000166435_44 (sequence is synthesized)
tttcatcttaccctggattttcaacctcagagacaaccaagatatgttcacttcctcccatattcgagatccttcctgtgaagtcactgaaggccaggaaccagacgctggccccaccct

SEQ ID NO: 532734 - DNA, 120 bp, Artificial Sequence
  ENSG00000166435_45 (sequence is synthesized)
tggatcacaagttcgtttggttaaaaaaaaaaaaaaaaaaaagtgggggcggggggcagagaagaagtttaacttggatgatttccatgcccattccagctgtaacattctatgactgtg

SEQ ID NO: 532735 - DNA, 120 bp, Artificial Sequence
  ENSG00000166435_46 (sequence is synthesized)
acccagcctttgttctcttttctcactctcctactagacatttcaatgaaaagttaggcaggaaaaaggaaaggaatcccaagttgctgccagctctgatgagagatcaggttgggggag

SEQ ID NO: 532736 - DNA, 120 bp, Artificial Sequence
  ENSG00000166435_47 (sequence is synthesized)
agattaggtggttactgaattgaggtgtgggcctcccctgaccatgtcagtgatccacaacccacctcacttcttggggcttaagctaaaagcagcttctgaagagatgttaatgtcctg

SEQ ID NO: 532737 - DNA, 120 bp, Artificial Sequence
  ENSG00000166435_48 (sequence is synthesized)
taatcactagaggagaaaattcattctccttccataacattacttagtaaaggaaaagcggtggtgcaatcaaattcacaaataccaatggggtctctaaaatgtagaatgcagcttgct

SEQ ID NO: 532738 - DNA, 120 bp, Artificial Sequence
  ENSG00000166435_49 (sequence is synthesized)
gggtgctggtcagttttctaaatgggaccagaaatggctttcctaagaccataaatgaactctccagccacacatacattcaaatgcattccattagacattgagctcctcaagagcagg

SEQ ID NO: 532739 - DNA, 120 bp, Artificial Sequence
  ENSG00000166435_50 (sequence is synthesized)
gtctcggaaggaatcatggaaggtagggcttccaaggcaggactcccacccccaggaagagtgcagcctattataatgtatgcaaaccaacctggctgtagagctgctcactccacagtg

SEQ ID NO: 532740 - DNA, 120 bp, Artificial Sequence
  ENSG00000166435_51 (sequence is synthesized)
cctggaatctctccattaggttcagcattgccttctcctttccttgctttgggaagagcactggatgaaacaacagatatgaaaatatattttaaactcctaaaactcttaccattgaaa

SEQ ID NO: 532741 - DNA, 120 bp, Artificial Sequence
  ENSG00000166435_52 (sequence is synthesized)
ccgcccaatttggccgtcgcagaacaatagaggatctaggcccagagatgctcaacaccagccggaagtcacacagcaagcaaagcagcagcagcaccggagccagagctcagggatcct

SEQ ID NO: 532742 - DNA, 120 bp, Artificial Sequence
  ENSG00000166435_53 (sequence is synthesized)
tgtttttattcaggtgataattcttcccttttttatattgttaattttcctcaaatagtaggagattcttgattattcagtctttttgtgtaacaatcctcaatcagaagcttaaaatgc

SEQ ID NO: 532743 - DNA, 120 bp, Artificial Sequence
  ENSG00000166435_54 (sequence is synthesized)
agtaattcctgtgattgtggggagagcaggatgcgcgttcagacagcgtgcccatctttctagaggtgctgttgttttctagggttcattgcttagcactcacacttgcaaccatggccc

SEQ ID NO: 532744 - DNA, 120 bp, Artificial Sequence
  ENSG00000166435_55 (sequence is synthesized)
atcccccagggaattcctactttgttcattgcacaaagctttcccaaactcccttgcagaccctcatcacaggagaagttatttatgccatgttgttccatctcctattactgttttctt

SEQ ID NO: 532745 - DNA, 120 bp, Artificial Sequence
  ENSG00000166435_56 (sequence is synthesized)
cattttcatgtgacttgtctcattataatatcattaacatgtagaaggtgtcggttaactagggtaaaggtgagcaatgtctgcacaggatctagtcccagcagatgctatgctgtgtta

SEQ ID NO: 532746 - DNA, 120 bp, Artificial Sequence
  ENSG00000166435_57 (sequence is synthesized)
ggttgaactcagctgttagactcatctcattctgacggtcccaagaatgaaatcactctgcagcctcctccttatgactgtgtgctggttgttcttggtatctctcctgaattcactggc

SEQ ID NO: 532747 - DNA, 120 bp, Artificial Sequence
  ENSG00000166435_58 (sequence is synthesized)
tcaacacattctgtttctactaatataagaaatatttccaaatcctctgacagaatgtcttctatatacatttttctcttctaagacagttggttagctttctgctcagtatggactccc

SEQ ID NO: 532748 - DNA, 120 bp, Artificial Sequence
  ENSG00000166435_59 (sequence is synthesized)
cagtaattctgaggctcgaaagtgcttatgtgctttaaagtcagattgaaggtcagtcagtgtggctgaaatacagtgaatgagggagagtatcatgaaatgagactgaagaagtaggca

SEQ ID NO: 532749 - DNA, 120 bp, Artificial Sequence
  ENSG00000166435_60 (sequence is synthesized)
ggggcccaatcatgcaggacatcagaggactagataagcagtttgtattttatcctaagtgcaaagggacttattacctgatgcatgtcacagccagctcctcttcctagttagcactgg

SEQ ID NO: 532750 - DNA, 120 bp, Artificial Sequence
  ENSG00000166435_61 (sequence is synthesized)
ggctgaggaccaatgagaactccctctaggaggtgccctgctgcacacagtggatggcagacctatatcctgggtgctctaggcatcaatcagcggtctcaccaaccttcattctgtttc

SEQ ID NO: 532751 - DNA, 120 bp, Artificial Sequence
  ENSG00000166435_62 (sequence is synthesized)
gggtaaacatccagctcactgaatgtgtaaatggcccctgagtaccgcccacaattacagatgtggctgtcaccttgggaccctctgagggccatgctttcccagcacccccagatgccc

SEQ ID NO: 532752 - DNA, 120 bp, Artificial Sequence
  ENSG00000166435_63 (sequence is synthesized)
cccagcctgttgctgtgactgtatgaagttaggccagggaagtctgtgcataaacctgggataacaccctcctccatgaccttctgccaggcccagagaatcccgattccacccccaaag

SEQ ID NO: 532753 - DNA, 120 bp, Artificial Sequence
  ENSG00000166435_64 (sequence is synthesized)
aagactagagcccaacttctggatgacatcttcattcgcttgcgggatccccggaacattacagaggctccactaggtacggctctgccacagctgccaggatcccagatccagttcacg

SEQ ID NO: 532754 - DNA, 120 bp, Artificial Sequence
  ENSG00000166435_65 (sequence is synthesized)
cctgctggctaaaggcaaagaaagggcttgtgtcagtgcaggaaaggcccttagagagcaactgcctacatcagtctctacatgtagatggacaaaaggagagccagcgtgaggcaggga

SEQ ID NO: 532755 - DNA, 120 bp, Artificial Sequence
  ENSG00000166435_66 (sequence is synthesized)
gttgcctaaaatcacacagcatgttaaggtcctgaaccagggcttaagatagagtcaatgcataggggcagtaggaagtcagtgacttcccaagctggaaaggccatttttagcccctta

SEQ ID NO: 532756 - DNA, 120 bp, Artificial Sequence
  ENSG00000166435_67 (sequence is synthesized)
gcatcctcctgccacaccatcccattttccaagggtctctggacccaatcctcttgcttctggctaggtgagaaccaggatgagcttggtgcctctcctggcttcttttcctgcaggtgc

SEQ ID NO: 532757 - DNA, 120 bp, Artificial Sequence
  ENSG00000166435_68 (sequence is synthesized)
atgacaacagactctccaaccccagttgctttgccagcctggctgggctcaggaggtaaagccataagcctttctctgctgggcctcctctaatccccaggcttgctcacactctgagtg

SEQ ID NO: 532758 - DNA, 120 bp, Artificial Sequence
  ENSG00000166435_69 (sequence is synthesized)
ctgttctggaagccaaaaggtttgggtttaaagcctagctccacaatttatctctactgtgtggccatgggtaagtcatttctcccctctgagctttggctcctccataaaaatggccat

SEQ ID NO: 532759 - DNA, 120 bp, Artificial Sequence
  ENSG00000166435_70 (sequence is synthesized)
gagtgaggacatttctgatcacatgactgaattagaagcagcaaagagaaaggaaaacaggaggagattttacccaagataggattcggaccctgacagtagagacaggaaaatttttta

SEQ ID NO: 532760 - DNA, 120 bp, Artificial Sequence
  ENSG00000166435_71 (sequence is synthesized)
gtcctaccagtagctctcttcccatctctctgcgagttcgtctttcataacaaccctctggtggcccatacacgaggtgaaaagcgaaatcccaaaggtgccgaagcagcctctggtgct

SEQ ID NO: 532761 - DNA, 120 bp, Artificial Sequence
  ENSG00000166435_72 (sequence is synthesized)
cagacaaccaagatatgttcacttcctcccatattcgagatccttcctgtgaagtcactgaaggccaggaaccagacgctggccccacccttcccagagctgagataccttagcctggcc

SEQ ID NO: 532762 - DNA, 120 bp, Artificial Sequence
  ENSG00000166435_73 (sequence is synthesized)
aaaatcaggtggaccttcctggacatatcctggaccaggcttttctggccaaggaaaatgacttcaagcattttcattctgtgatttatatcaatgcctcagaaaacctgctgcctctag

SEQ ID NO: 532763 - DNA, 120 bp, Artificial Sequence
  ENSG00000166436_0 (sequence is synthesized)
ctttctgagggtggtgatcccccatcacggagtgtcctggtggcggtgtacggtttcgaacacttcagtccacaaggataacaaccaacattttcagagcacttggcaatttacaaaata

SEQ ID NO: 532764 - DNA, 120 bp, Artificial Sequence
  ENSG00000166436_1 (sequence is synthesized)
catctgcctgaaggtacagcactaccagcctcattttacgtgtgtgaaaactgaagcacagaagaattgggtgacttgtcagacgctgcataggtggtcagcattatggtcttcatccct

SEQ ID NO: 532765 - DNA, 120 bp, Artificial Sequence
  ENSG00000166436_2 (sequence is synthesized)
ccatcaaccttaatcacatactgcatgtgaccagcaggaagaggggtcttgagaataggaggggagatcaaagaagacatcgtcgtctatttgacatcaaaactggccagtaagtgcaca

SEQ ID NO: 532766 - DNA, 120 bp, Artificial Sequence
  ENSG00000166436_3 (sequence is synthesized)
agaaatgagctgggttacctggaacctaaccttgggaagatgatctgtcaatggagctgtatgtctgtgtgagactggattttcctcatatactgtgaacaaaacaacatataacagatt

SEQ ID NO: 532767 - DNA, 120 bp, Artificial Sequence
  ENSG00000166436_4 (sequence is synthesized)
gactgcagaaacaggtcaagcttgtctaccaataaggagaggcacaggtacgggacacttttgaagggtttgttcgccttcagacaaacagcagacacctccacgctttgttttccacgg

SEQ ID NO: 532768 - DNA, 120 bp, Artificial Sequence
  ENSG00000166436_5 (sequence is synthesized)
cagagatggctagactctctttttggtcccagggagtggagctggctcgctctacacgctgcttctcacctgaggatatcagtggaaaagccccagtcctgggcacaggcatggctgtgg

SEQ ID NO: 532769 - DNA, 120 bp, Artificial Sequence
  ENSG00000166436_6 (sequence is synthesized)
acatgggcatgagctttatggggctgccactagctggccagaaacactgccctaagagtggacagatggaggccatggtaatgacctgctcattgtgccatcaggacctgccaggtatgg

SEQ ID NO: 532770 - DNA, 120 bp, Artificial Sequence
  ENSG00000166436_7 (sequence is synthesized)
gctctcatctcctatcctgccagcatttgctccgtaaggactgcttccagggcttgatacaggagctagggcagattgccaaggctcatgagactgttgcagatgagctcatctcctgtc

SEQ ID NO: 532771 - DNA, 120 bp, Artificial Sequence
  ENSG00000166436_8 (sequence is synthesized)
ctgggtgtgaacgagtatatcttaccagggatgtaactgaacatttttttctgcattgtgttcctactgagcaacccaagatggccaggaactgctctgagtgcaaggagaagagggcag

SEQ ID NO: 532772 - DNA, 120 bp, Artificial Sequence
  ENSG00000166436_9 (sequence is synthesized)
cacatatcctctgcacctactgcaatcgctggctgtgcagctcttgcacagaggaacaccgacacagccctgtccccgggggcccattctttcctcgggcccagaagggatctccaggag

SEQ ID NO: 532773 - DNA, 120 bp, Artificial Sequence
  ENSG00000166436_10 (sequence is synthesized)
tgaatggtggtcccggagacttcaccttgtattgtcctctacacacacaggaagtactcaagctattctgtgagacatgtgatatgctcacttgccatagctgcctagtggtggaacaca

SEQ ID NO: 532774 - DNA, 120 bp, Artificial Sequence
  ENSG00000166436_11 (sequence is synthesized)
aagaacacaggtgcagacatgttgaagaagttttgcaaaaccagaggatgcttctggaaggtgtgactacacaggtggcacataagaaatccagtctacagacatctgcaaagcaaattg

SEQ ID NO: 532775 - DNA, 120 bp, Artificial Sequence
  ENSG00000166436_12 (sequence is synthesized)
aggacaggatttttgaagtgaagcatcagcataggaaggtggaaaaccagatcaaaatggccaagatggttctgatgaatgagctgaacaaacaggccaatgggctaatagaggaattag

SEQ ID NO: 532776 - DNA, 120 bp, Artificial Sequence
  ENSG00000166436_13 (sequence is synthesized)
aggggattactaatgagagaaagcggaagctggaacagcagttacagagcatcatggttctcaaccgtcagtttgagcatgtgcagaatttcatcaactgggctgtctgcagcaaaacca

SEQ ID NO: 532777 - DNA, 120 bp, Artificial Sequence
  ENSG00000166436_14 (sequence is synthesized)
gtgtcccttttcttttcagcaaagagctgattgtgtttcagatgcagcgattgctggagacaagttgtaacacagatcctggctccccttggagtatcagattcacctgggagcctaact

SEQ ID NO: 532778 - DNA, 120 bp, Artificial Sequence
  ENSG00000166436_15 (sequence is synthesized)
tctggaccaagcagctagcttctcttggctgcataactactgaaggtggacaaatgtccagggcagatgctcctgcttatggaggcttacaggggtcatcacccttttatcaaagccacc

SEQ ID NO: 532779 - DNA, 120 bp, Artificial Sequence
  ENSG00000166436_16 (sequence is synthesized)
agtctccagtggctcagcaagaggctcttagccacccctcacacaagttccagtctccagcagtgtgctcctcatctgtgtgctgctcccactgctccccagtctcgccttccctcaaag

SEQ ID NO: 532780 - DNA, 120 bp, Artificial Sequence
  ENSG00000166436_17 (sequence is synthesized)
gccaggtccccccacccagcatacacccagcccacagcttcaggcagccccctgagatggtgccccagcagctggggtctctgcagtgctctgccctgctgcccagggagaaagagctgg

SEQ ID NO: 532781 - DNA, 120 bp, Artificial Sequence
  ENSG00000166436_18 (sequence is synthesized)
cctgcagccctcatccaccaaagctgctgcagccctggctggaaacccagccccccgtggagcaggagagcacatcccagcggctggggcagcagctgacttcccagcccgtgtgcattg

SEQ ID NO: 532782 - DNA, 120 bp, Artificial Sequence
  ENSG00000166436_19 (sequence is synthesized)
tccccccacaggatgttcagcaaggagcccatgcccagcccaccttacagacaccctctatccaagtccagtttggccaccaccagaagctgaagctcagtcactttcagcagcagccac

SEQ ID NO: 532783 - DNA, 120 bp, Artificial Sequence
  ENSG00000166436_20 (sequence is synthesized)
agcagcagctaccacctccaccaccacccctcccccatcccccacctccccttccccctcccccacagcagccacacccacctcttcctccatcccagcatctggcttctagtcagcacg

SEQ ID NO: 532784 - DNA, 120 bp, Artificial Sequence
  ENSG00000166436_21 (sequence is synthesized)
agagccctcctggccctgcctgttctcagaacatggacataatgcatcacaagtttgagctggaggaaatgcagaaggacttggagcttcttctccaggctcaacagcccagcctgcaac

SEQ ID NO: 532785 - DNA, 120 bp, Artificial Sequence
  ENSG00000166436_22 (sequence is synthesized)
tgagtcagaccaaatctcctcagcatcttcagcaaaccattgtggggcagatcaactacatcgtgaggcagccagcacctgtccagtcccagagccaggaggagaccctgcaggctacag

SEQ ID NO: 532786 - DNA, 120 bp, Artificial Sequence
  ENSG00000166436_23 (sequence is synthesized)
atgagcccccagcatctcagggctcaaagccggctctccctcttgacaagaatactgctgctgccttgccccaggcgtctggggaagaaacccctctcagtgtccccccagtggacagca

SEQ ID NO: 532787 - DNA, 120 bp, Artificial Sequence
  ENSG00000166436_24 (sequence is synthesized)
ccatccagcactcctctccaaatgtggtgagaaagcactccacctcgctgagcatcatgggcttttccaacactctggagatggagttgtcatctaccaggttggagaggcccctagagc

SEQ ID NO: 532788 - DNA, 120 bp, Artificial Sequence
  ENSG00000166436_25 (sequence is synthesized)
cacagatccagagtgtgagcaacctgacagctggtgccccccaggcagtaccaagcctgctgagtgctccccccaaaatggtgtccagcctgacaagtgttcaaaaccaggccatgccca

SEQ ID NO: 532789 - DNA, 120 bp, Artificial Sequence
  ENSG00000166436_26 (sequence is synthesized)
gcctgacaaccagtcacctacagactgtgcccagccttgtgcatagcacattccagtccatgcccaacctgataagtgactcccctcaggctatggcaagcctggcaagtgatcaccctc

SEQ ID NO: 532790 - DNA, 120 bp, Artificial Sequence
  ENSG00000166436_27 (sequence is synthesized)
aggctgggcccagcctaatgtctggtcacacccaggctgtgccgagtctggcaacttgtcctctgcagagcatccctccagtttctgacatgcagccagaaactgggtccagctccagtt

SEQ ID NO: 532791 - DNA, 120 bp, Artificial Sequence
  ENSG00000166436_28 (sequence is synthesized)
ctggccgaacttcagggagcctgtgtcccagagatggggctgatccctccctggagaatgctctgtgtaagatggaaagtgaggattccactcgcttcactgacttactgggacaaggtc

SEQ ID NO: 532792 - DNA, 120 bp, Artificial Sequence
  ENSG00000166436_29 (sequence is synthesized)
ccatagtccccggtctggatgctcccaaggacttggccatcccctcagaactggaggagccaattaacctctctgtgaagaaacctccactggcgccagtggtcagcacgtctacagctc

SEQ ID NO: 532793 - DNA, 120 bp, Artificial Sequence
  ENSG00000166436_30 (sequence is synthesized)
tgcagcagtaccagaacccaaaagagtgtgagaattttgaacaaggagccctagagctggatgcaaaagagaaccagagcatcagagccttcaatagtgagcataagattccctatgtgc

SEQ ID NO: 532794 - DNA, 120 bp, Artificial Sequence
  ENSG00000166436_31 (sequence is synthesized)
gactggagcgactcaagatctgtgctgcctcctcaggagagatgcctgtgttcaaactgaagccacagaagaatgatcaggatgggagcttcctgctgatcatcgagtgtggcactgagt

SEQ ID NO: 532795 - DNA, 120 bp, Artificial Sequence
  ENSG00000166436_32 (sequence is synthesized)
cctccagcatgtccattaaggtcagccaggacagactgtctgaggccacccaggccccaggtctggagggaagaaaggtcactgtcacttctttggctgggcagcggccaccagaagtgg

SEQ ID NO: 532796 - DNA, 120 bp, Artificial Sequence
  ENSG00000166436_33 (sequence is synthesized)
agggcacatctcctgaagaacacagactcattcctcgaaccccaggagccaagaagggccccccagccccaatagagaatgaggacttctgtgctgtttgcctcaatggcggagagttac

SEQ ID NO: 532797 - DNA, 120 bp, Artificial Sequence
  ENSG00000166436_34 (sequence is synthesized)
tgtgctgtgaccgctgccccaaagtgttccacctctcctgccatgtgccagccttgctcagcttcccagggggagagtgggtgtgtaccttgtgccgcagcctgacccagcccgagatgg

SEQ ID NO: 532798 - DNA, 120 bp, Artificial Sequence
  ENSG00000166436_35 (sequence is synthesized)
agtacgactgtgagaatgcctgctataaccagcctggaatgcgggcatctcctggcctaagcatgtatgaccagaagaagtgtgagaagctggtattgtccttgtgctgcaataacctca

SEQ ID NO: 532799 - DNA, 120 bp, Artificial Sequence
  ENSG00000166436_36 (sequence is synthesized)
gcctgcccttccatgaacctgtcagccccctggcccggcattattaccagattatcaagaggcccatggacctgtcaatcatccggaggaagctgcaaaagaaggacccagctcactata

SEQ ID NO: 532800 - DNA, 120 bp, Artificial Sequence
  ENSG00000166436_37 (sequence is synthesized)
ccaccccagaggaggtggtatcagatgtgcgcctcatgttctggaactgtgctaagttcaattatcctgactccgaggttgcagaggctggccgctgcctggaagtgttctttgagggct

SEQ ID NO: 532801 - DNA, 120 bp, Artificial Sequence
  ENSG00000166436_38 (sequence is synthesized)
ggttgaaggagatctacccggagaaacggtttgcccagccaaggcaggaggactcagactccgaggaggtgtctagtgagagtggatgttccactccccagggcttcccgtggcctccct

SEQ ID NO: 532802 - DNA, 120 bp, Artificial Sequence
  ENSG00000166436_39 (sequence is synthesized)
acatgcaggagggcatccaacccaagaggcggcgacgacatatggagaatgaaagagcaaaaagaatgtcatttcgcctggccaacagcatctctcaggtgtgagagccaaaaggagact

SEQ ID NO: 532803 - DNA, 120 bp, Artificial Sequence
  ENSG00000166436_40 (sequence is synthesized)
gggcactctggcagctgttgtcccatactgtcgaccattcctccccatcttgcagcttatcctcttcagagtgtggatggtagatgagtcttgttgaactgtgtagtgctcttctttgcc

SEQ ID NO: 532804 - DNA, 120 bp, Artificial Sequence
  ENSG00000166436_41 (sequence is synthesized)
atttgcatctacagcatttatttgggagccgtagtacatccactacagagaagatttcagtaataaacaggaaagaggaaggtatttattattaccagagtaatcagatgtataggctcc

SEQ ID NO: 532805 - DNA, 120 bp, Artificial Sequence
  ENSG00000166436_42 (sequence is synthesized)
acttgacaagaccacacctggttaggctcgggaaaacctactttccttggtgaatttttttctgcctgggaaagcagacccgtctaaccttttagtgtccagggctcaggagccatgtat

SEQ ID NO: 532806 - DNA, 120 bp, Artificial Sequence
  ENSG00000166436_43 (sequence is synthesized)
acatctgaactcctcctgggctcagaagtgggtaaaagaagggagagaggtttagacatatggcaggactgtgatccctggcccagcacagccaaagactgtcactgtttgcctttgctt

SEQ ID NO: 532807 - DNA, 120 bp, Artificial Sequence
  ENSG00000166436_44 (sequence is synthesized)
tggatagaggcacctgccatgtgcagactagtggaggcttctagaggccataggtctcaatttgtgcctatttgggttctaacggttttcagggtatttgttttgcatagtcactttcct

SEQ ID NO: 532808 - DNA, 120 bp, Artificial Sequence
  ENSG00000166436_45 (sequence is synthesized)
gatgttgacataggtggctgctgtgaaaatgctgtggatggtgtgacattcttgactgagctgggtggctgtggagagaccacttaaatcttctggttcagatttcacttacagacttag

SEQ ID NO: 532809 - DNA, 120 bp, Artificial Sequence
  ENSG00000166436_46 (sequence is synthesized)
taagatgtccacttcagagcccgccctctgtgctacttactctgggctaatcacacttctttagggtgagaacctgccttcctagaagtgactgttggtgcttgtcagtggccataccct

SEQ ID NO: 532810 - DNA, 120 bp, Artificial Sequence
  ENSG00000166436_47 (sequence is synthesized)
tcatcatcctcattcagaggtatggatcgtgagttctgcttgtgaatactgtgagacagctgctgtctgcttcaggtccagagttccatgggtggagagagtaacccacaaccagctcac

SEQ ID NO: 532811 - DNA, 120 bp, Artificial Sequence
  ENSG00000166436_48 (sequence is synthesized)
tcctctgggcctctcctcctgcttaaagattctagttctcaacctctccaagttcatgagccaaagatcagaagtgagtcttctgaccagcccgcctccaggctgtctacagccccaaaa

SEQ ID NO: 532812 - DNA, 120 bp, Artificial Sequence
  ENSG00000166436_49 (sequence is synthesized)
aagccaacacttttctggcagccctttttgttggaggttagagaaggcctcagggaccaacaggggccagatctagacattcctgggggaagtttgtctaaggtggacagggggaaaaat

SEQ ID NO: 532813 - DNA, 120 bp, Artificial Sequence
  ENSG00000166436_50 (sequence is synthesized)
caagaggcaaaaagccagtgtcctttggtgaccatgaagcaacctcagagccttagttctcctagaatgcagagagaagcattctggaagccatgggaacaggagctcgaggctgcatcc

SEQ ID NO: 532814 - DNA, 120 bp, Artificial Sequence
  ENSG00000166436_51 (sequence is synthesized)
tgaatgcatctgcatggccctcgcagggtgtttgtgaggatactggaggtcaggctacctcccaagcaagggcttggttgagaaggaacccattgctcatattgttgggggagctatgaa

SEQ ID NO: 532815 - DNA, 120 bp, Artificial Sequence
  ENSG00000166436_52 (sequence is synthesized)
cctgacatgtcagtggccaggactgagacagctctccctggtcctgtcattgcatggctaatttcaggggagtctgaggtcatggctttatttttgctaacagatgaagttcaaggatgt

SEQ ID NO: 532816 - DNA, 120 bp, Artificial Sequence
  ENSG00000166436_53 (sequence is synthesized)
tcttgtttgtagggcctttgctaatgagcagttttttaattagaaaacatttcttctctctttgtgagttgatggtattgctcatttccttctctacccaacctgagagatcatcttcac

SEQ ID NO: 532817 - DNA, 120 bp, Artificial Sequence
  ENSG00000166436_54 (sequence is synthesized)
tttaaagcaaaccatgccccttggcttgccattctttcagcagcacatgccacgttctaagcagatgggcttccgtgatcccgttttctagtttggggtaactgagtcttgaatgcttta

SEQ ID NO: 532818 - DNA, 120 bp, Artificial Sequence
  ENSG00000166436_55 (sequence is synthesized)
ctagtccggcaatctttggacttaggcttctgccctttgagactcacatgactttctggtttggggtctggtcatttccctttcaatttttgaatctccttctctgttcagttggcttgg

SEQ ID NO: 532819 - DNA, 120 bp, Artificial Sequence
  ENSG00000166436_56 (sequence is synthesized)
caaagtaccctctgttctcatgtcactaattcctgctctaggtcatctttcctttgtgcagcccacattcccaccatcctgtgaactttgttgtacttggtgttgggcaactggtgagtg

SEQ ID NO: 532820 - DNA, 120 bp, Artificial Sequence
  ENSG00000166436_57 (sequence is synthesized)
ttgtgacaggctcagacctgatccttcctcaggagcaattggagaccacaaatttaaagcagaaatacctgttaaaagcttggctttccttatatgagtgaggctcccagcttgggtgtg

SEQ ID NO: 532821 - DNA, 120 bp, Artificial Sequence
  ENSG00000166436_58 (sequence is synthesized)
gcctcctgggctcacggatcagcttgctgggccagagggggtcttagtaatgtgctagagagacacatgctcccttctcatcgtagagagcctgcatgctgagaggctccctttacacac

SEQ ID NO: 532822 - DNA, 120 bp, Artificial Sequence
  ENSG00000166436_59 (sequence is synthesized)
ctgcctctcgctggcttttcctttagacctagccaccagtgttttgaatcatggttttgttttgtttttgcatgcaaaaaccagaacatgacttagaaattaaaaaaaaaaaaatcctac

SEQ ID NO: 532823 - DNA, 120 bp, Artificial Sequence
  ENSG00000166436_60 (sequence is synthesized)
tagccaagtgactgcctgcagaggctcttcattaacatttgggctgatcctgcttttgacttattcccataatggcccagttttgaagtcagccaagtccttttgtccttgacaacatca

SEQ ID NO: 532824 - DNA, 120 bp, Artificial Sequence
  ENSG00000166436_61 (sequence is synthesized)
tgcagtggaaatacggtgagttctagattcttatgggacagcatgcagccctagaggaaaaattgacttcttgggtatgctgagaaataagacagtaaaatggcttcagttgatgcaagg

SEQ ID NO: 532825 - DNA, 84 bp, Artificial Sequence
  ENSG00000166436_62 (sequence is synthesized)
tgagaaataagacagtaaaatggcttcagttgatgcaaggggattttagttaaaaattggttcaggatttttaaattttatttt

SEQ ID NO: 532826 - DNA, 120 bp, Artificial Sequence
  ENSG00000166436_63 (sequence is synthesized)
acttgcagagcactcttccacagaacatggttaggttagccctgcctgacttctagcaattgctaactatacaccttgcctgcctctaggacccctacctgagtggcaaccataccttcc

SEQ ID NO: 532827 - DNA, 120 bp, Artificial Sequence
  ENSG00000166436_64 (sequence is synthesized)
atatgctctgttccatggcagtccctgccatcccccaccagcggactctggctccctccctgtacccatttctagcaacagctccttgcctggctgctaagacggaggcgcctccttgtt

SEQ ID NO: 532828 - DNA, 120 bp, Artificial Sequence
  ENSG00000166436_65 (sequence is synthesized)
tgttcctgggctctgttctgctccctctctcactccatggagtcacttatagtcttcctttctgaacgccagaattgagcctttgctccttctggatcaccccttcctgggcttcttctc

SEQ ID NO: 532829 - DNA, 120 bp, Artificial Sequence
  ENSG00000166436_66 (sequence is synthesized)
catccctcagtactgctaaaattgccctgctcctttagtccatttccatgacctcagccctctctctcctctccttgtcttttaactttctcctggacttcttcctctccccagcatgaa

SEQ ID NO: 532830 - DNA, 120 bp, Artificial Sequence
  ENSG00000166436_67 (sequence is synthesized)
tctcctggacttcttcctctccccagcatgaacccagagcctatcacacactgatgtttttgtcagcatcctgaactttctcatgcccttcaactttatttatttatttatttatttatt

SEQ ID NO: 532831 - DNA, 120 bp, Artificial Sequence
  ENSG00000166436_68 (sequence is synthesized)
tatttattttttattttttgagagagagagtctcactctgtcatgcaggctggagtgcagtggtatgatgtcggctcattgcaacctctgccttctgggctcaggtgatcctcccatctc

SEQ ID NO: 532832 - DNA, 120 bp, Artificial Sequence
  ENSG00000166436_69 (sequence is synthesized)
ccatgcctggctaatttttctactttaggtagagatggagtttcgccatgttgctcaagctggtatcaacactcctgggctcaagcagtctgcttcccttggcctcccaaagtgctggga

SEQ ID NO: 532833 - DNA, 120 bp, Artificial Sequence
  ENSG00000166436_70 (sequence is synthesized)
aggcgtgagccactgcgccaggcgtatccccttcaattttgctgaaactatcagccattctccattttcggcatcatcatatttgctgcttccacctcctgggctgctatgcatgacaga

SEQ ID NO: 532834 - DNA, 120 bp, Artificial Sequence
  ENSG00000166436_71 (sequence is synthesized)
ttcacagttggcagcctcagttgagctctcagtgttgactggaaattctttaacttgttgtgatccctttttttttccccacccatgcctccatctttgtcctccacaaatgactgagct

SEQ ID NO: 532835 - DNA, 120 bp, Artificial Sequence
  ENSG00000166436_72 (sequence is synthesized)
cactgtctacttcacagaagacagcccctaaagcaagagcttccttgcctgctgttcctctctcccctctcattcatctgtgtctgtaactctccccaacccctccattcttgctcctat

SEQ ID NO: 532836 - DNA, 120 bp, Artificial Sequence
  ENSG00000166436_73 (sequence is synthesized)
ttaattctctatatcttgaatcctgttgtatgtcctccaagactgctccctcgcttactccactgctcccactccctggagtctccagcctctgtctccactggttacctccacacagcc

SEQ ID NO: 532837 - DNA, 120 bp, Artificial Sequence
  ENSG00000166436_74 (sequence is synthesized)
tgcaaacaagttctccacaagattaaaacagcatttctcagagtctgttaccccttacacattttccttgttaaccaagttacttttaaaaagatcctttttaaactgattcttcctcag

SEQ ID NO: 532838 - DNA, 120 bp, Artificial Sequence
  ENSG00000166436_75 (sequence is synthesized)
ctgttcttcagccctctatactttttcataaaagtcaccagtgactgcccagttgccaaatagaatgaatacctttcagtgctcagctgtcttgacctctccgcagcatttcacaccacc

SEQ ID NO: 532839 - DNA, 120 bp, Artificial Sequence
  ENSG00000166436_76 (sequence is synthesized)
caccaaccctcagtgaaacaacctcctcccttagcttttatgacaccacaagtctctggattctcagagaatccagaaaaacaagtctctggattctctcctcttacctctcagcccaca

SEQ ID NO: 532840 - DNA, 120 bp, Artificial Sequence
  ENSG00000166436_77 (sequence is synthesized)
caggctgagctgtccttgaaacctagatgggggaaatgtctgtggctgtctgtggtctcttcttttcaggagttgggtagggaggaagaatcacagctgctcctgcttcctctgtctgtc

SEQ ID NO: 532841 - DNA, 120 bp, Artificial Sequence
  ENSG00000166436_78 (sequence is synthesized)
tctctatttcctgagtcccttccttttcctgaactcagttctcctcatgccaaccatgtttatgagctcctgctgggaggacagcatctgtgagtccttccctctgtctctcccagacaa

SEQ ID NO: 532842 - DNA, 120 bp, Artificial Sequence
  ENSG00000166436_79 (sequence is synthesized)
cacagaggttttagcctgtttgctaagagaccccatctaagtcagcccaagggtgtggattaggttttacagcatccaggccgcagtctggctaaactggattaccaggctggtgggcag

SEQ ID NO: 532843 - DNA, 120 bp, Artificial Sequence
  ENSG00000166436_80 (sequence is synthesized)
ctcctcaccatgatcctgcaccagttagagcctgctgtagttgggaaggagcctgggattgtggtaagatgtgtttccgtgcatgtcagtgctgctaaccaggaggagaacctggcaggg

SEQ ID NO: 532844 - DNA, 120 bp, Artificial Sequence
  ENSG00000166436_81 (sequence is synthesized)
tgggtgcctgctgctgataacattcggatggagggagactagggagcgcggtggctgctcccttgctggggctcagctggagtcagcatgactccttatatcagggcctttcccacctgt

SEQ ID NO: 532845 - DNA, 120 bp, Artificial Sequence
  ENSG00000166436_82 (sequence is synthesized)
gctgatcaccaccacctgcttgctccagttgtttctggagttggaggcagctattggttgctttcttggaggtaaggaggtatatactagaaagatatctgatttgagagtctgaacacc

SEQ ID NO: 532846 - DNA, 120 bp, Artificial Sequence
  ENSG00000166436_83 (sequence is synthesized)
aaaatttttggctctttccattatgagctgtgtaaccttggatacagtttcctcatctataaagttgtggtgggagaatggctgagaacagtgatctctcagctctccagctgtaaagat

SEQ ID NO: 532847 - DNA, 120 bp, Artificial Sequence
  ENSG00000166436_84 (sequence is synthesized)
gttaattatgattttaactctcaagatcaggccacataaggaacaggggaattccaggggtgggacacagctgggggagtccagaccagggcagggaaaggagactcacaagccaaacag

SEQ ID NO: 532848 - DNA, 120 bp, Artificial Sequence
  ENSG00000166436_85 (sequence is synthesized)
agctgctttggggaaagttcttatcagctggtgctgcttcctgagccatatgcccattcctcaagctgtacccctttcttggctatgtaggatgagttcctcctaggcccttgttaggag

SEQ ID NO: 532849 - DNA, 120 bp, Artificial Sequence
  ENSG00000166436_86 (sequence is synthesized)
tggctattggattctaagcggttggggcatgagggaggatattttaaagggaagtatagctgattttaaaagaacctatacattcaagaacaaataaaaaacagcacttttctttaccaa

SEQ ID NO: 532850 - DNA, 120 bp, Artificial Sequence
  ENSG00000166436_87 (sequence is synthesized)
tgaggactggggagcagattctgggggcctgctgtggtgagtgtttaaaagctctctcccacactcaggccttagcatggactcaggaaaaaggggaggtactagtgagtggccatctgt

SEQ ID NO: 532851 - DNA, 120 bp, Artificial Sequence
  ENSG00000166436_88 (sequence is synthesized)
ggatacctgttggggtcacttctgctataagagctgctaccaaactagttttcctgagtcctaggagaaaaatgtcaagttccagacacctcaggacaccccgctaggctttgtgctctg

SEQ ID NO: 532852 - DNA, 120 bp, Artificial Sequence
  ENSG00000166436_89 (sequence is synthesized)
tgtagctcttgagggacccgaaagagatggactggtagaaacaggctagaccatcactgctctcctcccccatcagcctgactccgaggttgcagaggctggccgctgcctggaagtgtt

SEQ ID NO: 532853 - DNA, 120 bp, Artificial Sequence
  ENSG00000166436_90 (sequence is synthesized)
atttgctccgtaaggactgcttccagggcttgatacaggagctagggcagattgccaaggctcatgagactgttgcagatgccacagcctagctgagattctccccagcaactaggaaga

SEQ ID NO: 532854 - DNA, 120 bp, Artificial Sequence
  ENSG00000166436_91 (sequence is synthesized)
tgggtctgcgtcacctctcaggtactgaggagaccagctgggcaagatcttcaaaagctaatgatggggaccagagcaaagacatatgaacaggtatttaaaatgcaatgtgatattcgt

SEQ ID NO: 532855 - DNA, 120 bp, Artificial Sequence
  ENSG00000166436_92 (sequence is synthesized)
tgtactggaaggatgttcagggtgctgcgggaacccagaagagggactaattaactcatcccgggggaaattgatcttgctgctcaaaggtggaacatttgaacagagctcatctcctgt

SEQ ID NO: 532856 - DNA, 120 bp, Artificial Sequence
  ENSG00000166436_93 (sequence is synthesized)
ttcttttcagcaaagagctggaggtgataataagagggttaaaacattggtaagtagcaccaaagtaaagattttaaatggtcattgagtgcagtggaagagaaagatgacaagaaaaga

SEQ ID NO: 532857 - DNA, 120 bp, Artificial Sequence
  ENSG00000166436_94 (sequence is synthesized)
attggccactgggacccttattctgaccttagcttaacagttctgagaccactaatgacaaccatgtctgagttctttgattcttgtcgacatttcacttttgaaagatggaaagtgagg

SEQ ID NO: 532858 - DNA, 120 bp, Artificial Sequence
  ENSG00000166439_0 (sequence is synthesized)
gcaaccgactctcccttcaaacgggaaacaagatggcggctgcaggtccgagtactcgggcctcttccgcggcggcagcagccgctctgagtcggcggggccggcggggccgctgtgacg

SEQ ID NO: 532859 - DNA, 120 bp, Artificial Sequence
  ENSG00000166439_1 (sequence is synthesized)
agacggcggcagctaagactggggccccaggcccggcttctggaccttcgctgttggtgttgtcgccgccgttgctgcagccgccgctgccgccgcggccggaggaatcgggctgcgccg

SEQ ID NO: 532860 - DNA, 80 bp, Artificial Sequence
  ENSG00000166439_2 (sequence is synthesized)
ggtgcctggagccccccggagaagcagcggccctgccgtgcggccactcgctttgccgaggctgcgcccaacgcgccgcc

SEQ ID NO: 532861 - DNA, 80 bp, Artificial Sequence
  ENSG00000166439_3 (sequence is synthesized)
gcccaggctgggcccgccgtcgggcccgcgacgacggccaggccgactcagaggtgctgggcgagtgcgcccgccgcagc

SEQ ID NO: 532862 - DNA, 120 bp, Artificial Sequence
  ENSG00000166439_4 (sequence is synthesized)
ctgccgcggggcccaggccagagcaggagccgcgtgccgcgcctgcggagccagactttatattcagagcaccaatcaaattaagcaagcctggggaacttcgtgaggaatatgaaagct

SEQ ID NO: 532863 - DNA, 120 bp, Artificial Sequence
  ENSG00000166439_5 (sequence is synthesized)
tgagaaagctgagagaagaaaagttacaagaggaaaaaccctctgaagatcaaatccacaagctgttaccagaggatacagaaacagggaaaaggaaaatggatgaacagaaaaaaagag

SEQ ID NO: 532864 - DNA, 120 bp, Artificial Sequence
  ENSG00000166439_6 (sequence is synthesized)
atgaaccattagtactgaaaacaaatctggaacgttgtcctgcacgtctctcagattcagagaatgaagaaccttctcgaggccagatgacacagacacatcgctcggcatttgtttcca

SEQ ID NO: 532865 - DNA, 120 bp, Artificial Sequence
  ENSG00000166439_7 (sequence is synthesized)
agaacaactcctactccttagctttcctggcagggaagctaaactccaaggtggaaaggagtcagagctgtagtgacacagcccaggaaagagcgaagagcagagtcagagcagttccag

SEQ ID NO: 532866 - DNA, 120 bp, Artificial Sequence
  ENSG00000166439_8 (sequence is synthesized)
gcaacaaagccaaggtcacaactatgactccagcctccaaccccatcattggtgtcctcttgtcaactcaaaacaaccgctgcgtctcggcccctgacttaaccatcgaaaagcgtctac

SEQ ID NO: 532867 - DNA, 120 bp, Artificial Sequence
  ENSG00000166439_9 (sequence is synthesized)
ccttcagctccctttcatccttggcttccctgcataagccagagcgttctgtcagccctgagagcaatgacagcatctccgaagaactaaaccatttcaagcccattgtctgctcaccat

SEQ ID NO: 532868 - DNA, 120 bp, Artificial Sequence
  ENSG00000166439_10 (sequence is synthesized)
gtactcctcccaagagactccctgatggccgtgtgctaagtcctctcatcatcaaatcaactccacgcaacctaaacagaagcctgcagaagcagacttcttatgaggccagtccacgga

SEQ ID NO: 532869 - DNA, 120 bp, Artificial Sequence
  ENSG00000166439_11 (sequence is synthesized)
tcctcaaaaagtgggaacagatctttcaggagcggcagatcaaaaagaccctttcaaaagccactcttacctctctggctcctgaaatgggggaagagttactaggctctgaaggtatcc

SEQ ID NO: 532870 - DNA, 120 bp, Artificial Sequence
  ENSG00000166439_12 (sequence is synthesized)
attctagcaaggagaagccacttgtggctgtaaatacaagattatctggtgggcaggtcctctctgagtatactggacccacctctgctgatcttgatcatttcccctctgttagccaaa

SEQ ID NO: 532871 - DNA, 120 bp, Artificial Sequence
  ENSG00000166439_13 (sequence is synthesized)
caaaagcagaacaggacagtgataataaaagtagcactgagatcccactggaaacctgctgttcctcagaactcaaagggggaggcagtgggacttctttggagagggagcagtttgagg

SEQ ID NO: 532872 - DNA, 120 bp, Artificial Sequence
  ENSG00000166439_14 (sequence is synthesized)
ggttagggtcaactccagatgccaagttagacaaaacctgtataagcagagccatgaaaatcaccacagttaattcagtgctaccccaaaacagtgttttgggtggagtcctcaaaacaa

SEQ ID NO: 532873 - DNA, 120 bp, Artificial Sequence
  ENSG00000166439_15 (sequence is synthesized)
agcaacaattgaagacattaaatcattttgatctgactaatggtgttctagttgagagcctaagtgaagagccacttccttctttgcgtcgaggccggaaaagacactgcaagaccaagc

SEQ ID NO: 532874 - DNA, 120 bp, Artificial Sequence
  ENSG00000166439_16 (sequence is synthesized)
acttagaacaaaatggctcccttaaaaaactgcgacaaaccagtggggaggtgggtctggccccaacagacccagtcctgcgagagatggagcagaagcttcagcaagaggaagaagacc

SEQ ID NO: 532875 - DNA, 120 bp, Artificial Sequence
  ENSG00000166439_17 (sequence is synthesized)
gacagttggctctgcagttgcagcgcatgttcgacaatgagaggcggactgtgagccggcgaaaaggaagtgtggatcagtatctcctacggtccagcaacatggccggggccaagtagc

SEQ ID NO: 532876 - DNA, 120 bp, Artificial Sequence
  ENSG00000166439_18 (sequence is synthesized)
acctaatgaagtgttacctatttttaaaaggtcttaggccttgatcatttatcctgaagagctgagtgttctcactttggttttattttaatggcaaaacactgtctaatatggttctga

SEQ ID NO: 532877 - DNA, 120 bp, Artificial Sequence
  ENSG00000166439_19 (sequence is synthesized)
gaggttccagggcctttgtagtcaatatccaagggaaaagcatctccgtttctctgtgacccaggccagaagcctgagtgacccatccctaagggcttctgggccaaacctggcagcacc

SEQ ID NO: 532878 - DNA, 120 bp, Artificial Sequence
  ENSG00000166439_20 (sequence is synthesized)
cactgggaatgagatttggaacggcctcaggagcataatggccacagttagtaatggtaaagaggggataccttcttaaactgatagacttcctgacttctttcagcagggtattgtttt

SEQ ID NO: 532879 - DNA, 120 bp, Artificial Sequence
  ENSG00000166439_21 (sequence is synthesized)
aaatcagccttgcagataaaaattaattccatctttttcagacaagtgaacaatttagttccttggcagatccaaaatgatagatggttatgttacgctttctgctgtcccttgccaaaa

SEQ ID NO: 532880 - DNA, 120 bp, Artificial Sequence
  ENSG00000166439_22 (sequence is synthesized)
ataagtaaatatatcagttaagattatgcctttacaaaagttaatttacattctctgtttaaaaaataatatttggtgaatgctatatagttgacagagcacatttacagaccttattaa

SEQ ID NO: 532881 - DNA, 120 bp, Artificial Sequence
  ENSG00000166439_23 (sequence is synthesized)
tttagtctttccaagagacctctcatgtaactggcattagccccatttttagatgatgaaactgcagtgcagatgttctggttctctcaactaccaagtggcataacccatggattttct

SEQ ID NO: 532882 - DNA, 120 bp, Artificial Sequence
  ENSG00000166439_24 (sequence is synthesized)
aaaggtttcccaaatagatcacaacctaagggtgtgccaggggagcctaggggaagctaggctgggcattgaacactgatagtgcagaatccacatgcaaacaagatcgacagggtggat

SEQ ID NO: 532883 - DNA, 120 bp, Artificial Sequence
  ENSG00000166439_25 (sequence is synthesized)
aaacatatatgtgcattatccccatcccccacagtttagagccttctgcttttctgggggtttcagcctatgagacaaactataatcaggcttcattattacttttcaaatggccaaggg

SEQ ID NO: 532884 - DNA, 120 bp, Artificial Sequence
  ENSG00000166439_26 (sequence is synthesized)
ttatctgcaatgttgatctaaaatcctaaaaaatcaccctgaagtcaggcaaggaacaatacttaaactccatactatggaaacaaggtatctagctggatgcagctggtaaattcagtc

SEQ ID NO: 532885 - DNA, 120 bp, Artificial Sequence
  ENSG00000166439_27 (sequence is synthesized)
ccatggacctttgggggtttattttccttagcagctgacaccatgtgtcttttgcatccctggtggtgcttggtgcttctgcccatctgggctcattgagaatagggatgaagatatgat

SEQ ID NO: 532886 - DNA, 120 bp, Artificial Sequence
  ENSG00000166439_28 (sequence is synthesized)
tttagggaatttctgatgggctggcatgccccatgtagtatgagttactatataaagtcatgtgactggcattttaacagaccttccagagcttatatatcccaatatatgttgtttcct

SEQ ID NO: 532887 - DNA, 120 bp, Artificial Sequence
  ENSG00000166439_29 (sequence is synthesized)
ttgagtagccccagcaggatactgcttagtttttccagtgccattggtgaaagcatttctggaactgtcttcaaagactagaaacactgactcccaaaatgctagaactggaagggacct

SEQ ID NO: 532888 - DNA, 120 bp, Artificial Sequence
  ENSG00000166439_30 (sequence is synthesized)
taatggttatctattccagcctcctcctaaggtcctcctcagcttctagacctagaagccaaagtccagaacagtgacccattgatcaaggcagatagtataactccttttaagtgttct

SEQ ID NO: 532889 - DNA, 120 bp, Artificial Sequence
  ENSG00000166439_31 (sequence is synthesized)
cagatttgccttttctcagggcaaatcttcagtgttttgtggttatttgtggttgagagagagagagaatgtaatgtctgagactagccagcagctatttgaagcctctgggaaagaagg

SEQ ID NO: 532890 - DNA, 120 bp, Artificial Sequence
  ENSG00000166439_32 (sequence is synthesized)
gcagagccattttcttgtgcagctcatagttcccaaacagttcccaaacagaaattccagagatgtcttaaacattgtggtcatcattgagataggtggaatctctttggtgactacgtt

SEQ ID NO: 532891 - DNA, 120 bp, Artificial Sequence
  ENSG00000166439_33 (sequence is synthesized)
ggtggggaacatcactcacctgaatgtatgcattctgtgttctctgtgtgtgtgcacatatgcagatgtatgttttaaaaacatttaccaaactcatgattttgtagtcacaccacttca

SEQ ID NO: 532892 - DNA, 120 bp, Artificial Sequence
  ENSG00000166439_34 (sequence is synthesized)
gttctgggccctaccaacaatttatgtcctccaagagctgctggagggcatgtttgtgcccaaaacagaagagctggctctggtttacagaagacagggagggtgaccttactataaatg

SEQ ID NO: 532893 - DNA, 120 bp, Artificial Sequence
  ENSG00000166439_35 (sequence is synthesized)
cccttagaggaaacttatcagttactgccatttcacgcatttcctttttgatcttagtaaatattattggaaggctagtcttgttggtaggagcaaagacacttatttttccacttgcca

SEQ ID NO: 532894 - DNA, 120 bp, Artificial Sequence
  ENSG00000166439_36 (sequence is synthesized)
tctttctctatatctccagtaatttgaaaaacacttttcagttggaattgatttttgtctttggtaaaaagaaatatttttaatagataaaagatatatattttaaatatttccccaaat

SEQ ID NO: 532895 - DNA, 120 bp, Artificial Sequence
  ENSG00000166439_37 (sequence is synthesized)
taatactttcattttaagaattgcatagcagttgtaacaagtgcagaatgaagaacaaattcttgttaagcaaatagtccaaactctaggtccagcttactgccttccccccttgtacct

SEQ ID NO: 532896 - DNA, 120 bp, Artificial Sequence
  ENSG00000166439_38 (sequence is synthesized)
acagtgatgcctaggatggtattgacagttgttttctaaacttcctgctgagcaacagtccttcaaatataggtagagtggtctaggttaaggagggaggagggttgatctttaatcagg

SEQ ID NO: 532897 - DNA, 120 bp, Artificial Sequence
  ENSG00000166439_39 (sequence is synthesized)
ttggctttggaggaaggaaaaaccactaaggtattatctgaattttaagatgcttcccatccttaataactaaaacctgaatgcttttctttctgaaaaatctccctctctccttccatg

SEQ ID NO: 532898 - DNA, 120 bp, Artificial Sequence
  ENSG00000166439_40 (sequence is synthesized)
attctgaagttggttaaaagtcgatatgttgatgtgtattatttgggggaacagaaaaggacaaggaaggaaacagaacgatgggaagggtttgtgagctagaataagaggtgcaggatt

SEQ ID NO: 532899 - DNA, 120 bp, Artificial Sequence
  ENSG00000166439_41 (sequence is synthesized)
tcacaaaacaaattcctcacaaatcattgaagcccagttcaccatacaaattacccatgtcttactctgttccttgtatatatgcattctgggtttttttattattaaaggggaagttag

SEQ ID NO: 532900 - DNA, 120 bp, Artificial Sequence
  ENSG00000166439_42 (sequence is synthesized)
gggggagggtgaaggtcagtctgaggggaaatccaggaaatgtggtgcccttagaagggggctgtcagctcttttccatagagagggaaagaaactttgagaaaatgttcttgacccatt

SEQ ID NO: 532901 - DNA, 120 bp, Artificial Sequence
  ENSG00000166439_43 (sequence is synthesized)
gattgtatctgctggaagaagtcatctgggcctgttgggttggtatcagatcaggggattatgcatccagcccctggcccctttaatctatttgcctctttttaaaaaaggttaagtctt

SEQ ID NO: 532902 - DNA, 120 bp, Artificial Sequence
  ENSG00000166439_44 (sequence is synthesized)
cttgggtgaggcttgccagggaaactcctaagtggcttcacttattttttaaattttaatttaatttttaaatttttgcttggaagcagcactggtaataaatgttttattttttgttca

SEQ ID NO: 532903 - DNA, 120 bp, Artificial Sequence
  ENSG00000166439_45 (sequence is synthesized)
ttttccctaaaggaaaaatgtccttaagagattaaagctcttaattgattactgtctggttacaaactggcaaactgactaaaatgggaagctgccaccgtgcctgactcatgtagctga

SEQ ID NO: 532904 - DNA, 120 bp, Artificial Sequence
  ENSG00000166439_46 (sequence is synthesized)
tgaccgaaggctcatcctttcttttctatttgacagacatttactgagcttcagacttgagccaaccctgagctggactgtggagataaagcagttcctgctcttgaggagctcaatgtc

SEQ ID NO: 532905 - DNA, 120 bp, Artificial Sequence
  ENSG00000166439_47 (sequence is synthesized)
taatggaatgcatttgaatgtatgtgtggctggagagttcatttatggtcttaggaaagccatttctggtcccatttagaaaactgaccagcacccagcaagctgcattctacattttag

SEQ ID NO: 532906 - DNA, 120 bp, Artificial Sequence
  ENSG00000166439_48 (sequence is synthesized)
agaccccattggtatttgtgaatttgattgcaccaccgcttttcctttactaagtaatgttatggaaggagaatgaattttctcctctagtgattacaggacattaacatctcttcagaa

SEQ ID NO: 532907 - DNA, 120 bp, Artificial Sequence
  ENSG00000166439_49 (sequence is synthesized)
gctgcttttagcttaagccccaagaagtgaggtgggttgtggatcactgacatggtcaggggaggcccacacctcaattcagtaaccacctaatctctcccccaacctgatctctcatca

SEQ ID NO: 532908 - DNA, 120 bp, Artificial Sequence
  ENSG00000166439_50 (sequence is synthesized)
gagctggcagcaacttgggattcctttcctttttcctgcctaacttttcattgaaatgtctagtaggagagtgagaaaagagaacaaaggctgggtcacagtcatagaatgttacagctg

SEQ ID NO: 532909 - DNA, 120 bp, Artificial Sequence
  ENSG00000166439_51 (sequence is synthesized)
gaatgggcatggaaatcatccaagttaaacttcttctctgccccccgcccccacttttttttttttttttttttaaccaaacgaacttgtgatccagtgccctattttatagtgtggttt

SEQ ID NO: 532910 - DNA, 120 bp, Artificial Sequence
  ENSG00000166439_52 (sequence is synthesized)
tccagggtctgaataaataatcattaaagtttgacacacgcagacacacgcaccaatgatggggatacccccaaatgatttaggaggttattttattttaatagttttttcttcctgatt

SEQ ID NO: 532911 - DNA, 120 bp, Artificial Sequence
  ENSG00000166439_53 (sequence is synthesized)
tttttcagttagttagagttaaatgtacctatagcccctgaatacatgctcaggtagagaaagtctccatagtataagtaagtaatatgaatgtggaatcttggaaagtgatatattttg

SEQ ID NO: 532912 - DNA, 120 bp, Artificial Sequence
  ENSG00000166439_54 (sequence is synthesized)
attggaataattttaattaaatttaatgattttaattaagaattaaaagccagctagccaaattttctttaaaaattggaaactcattatggtcttaaattgtcctcaggcagccttttc

SEQ ID NO: 532913 - DNA, 120 bp, Artificial Sequence
  ENSG00000166439_55 (sequence is synthesized)
ctcatcaacccatagagtggtcttttgaactggtatctaaacatacctggttatgaattctcaaaagagaaagcaggtctggggcggggtggtcaggagacagattctagggaaagtgct

SEQ ID NO: 532914 - DNA, 120 bp, Artificial Sequence
  ENSG00000166439_56 (sequence is synthesized)
gaagagattttcttctgaagatgatctaggaaatgcatctttatacatgattgttagctgctgtagctttctgaagaagattgtagaaaagagactaagatatatgcaagggtcaccagt

SEQ ID NO: 532915 - DNA, 120 bp, Artificial Sequence
  ENSG00000166439_57 (sequence is synthesized)
ttagagatcagtcaaattggaaaaagtgccaagactggatgtgcagattgttctatgtattatcagtatttttttcctcttaagaaaaaaatttactctctctcctttgtgagtaaatgc

SEQ ID NO: 532916 - DNA, 120 bp, Artificial Sequence
  ENSG00000166439_58 (sequence is synthesized)
ctccttaatgccttttaagtaaggtggcaacttttaactgtcatcttgtgagaggcaacctcaaactctaagcagactccctctctccctttctggtgtcttaaatcaagaactagtttg

SEQ ID NO: 532917 - DNA, 120 bp, Artificial Sequence
  ENSG00000166439_59 (sequence is synthesized)
aagccaaggcaaagcaaggtttgttcatcttcctttcctgtcatttaaggtaaaacaggcaatgaactcgctcttcaaataccatagttcaagagtagctgttggccctggttccagatt

SEQ ID NO: 532918 - DNA, 120 bp, Artificial Sequence
  ENSG00000166439_60 (sequence is synthesized)
aatatagcagcaggcagattgccccttcttggggccaccaccctccaaagctgtgccaccaatgagagcattgggttcaagtttgcatcaaacatggtattaccaacgctgagcctccag

SEQ ID NO: 532919 - DNA, 120 bp, Artificial Sequence
  ENSG00000166439_61 (sequence is synthesized)
cagagcacttaaaagtcctagtgagagaatagatactatgcaagggaaaaaaatttaaatgccaacgaatagtttttttttttttgaacctgatacactgtttgtttactctcaactctt

SEQ ID NO: 532920 - DNA, 120 bp, Artificial Sequence
  ENSG00000166439_62 (sequence is synthesized)
tgtacaaatattattgtcctaagggccttttcccctcctgcctagaaaataggttgtgtattggttttattcaacctgctgtctgctttaggattggagaaggtacctggatccttgtgg

SEQ ID NO: 532921 - DNA, 120 bp, Artificial Sequence
  ENSG00000166439_63 (sequence is synthesized)
actgccactgctggctgcctcctctccaactcatcagaagagcattttgacaaagacagaggacttggaccagggcatgccctgttggggatgtttctgtcagcaaggacatggcatgga

SEQ ID NO: 532922 - DNA, 120 bp, Artificial Sequence
  ENSG00000166439_64 (sequence is synthesized)
atcaagtgggctgatgtgttgttatttaaacagtaccaaagtgcattcttcaatgtatgtttgcctgcttgaagcaaggcccaagttgagaatacagtaaaggaaactcatgaaagtgga

SEQ ID NO: 532923 - DNA, 120 bp, Artificial Sequence
  ENSG00000166441_0 (sequence is synthesized)
ctttttcgtctgggctgccaacatgccatccagactgaggaagacccggaaacttaggggccacgtgagccacggccacggccgcataggcaagcaccggaagcaccccggcggccgcgg

SEQ ID NO: 532924 - DNA, 120 bp, Artificial Sequence
  ENSG00000166441_1 (sequence is synthesized)
taatgctggtggtctgcatcaccaccggatcaacttcgacaaataccacccaggctactttgggaaagttggtatgaagcattaccacttaaagaggaaccagagcttctgcccaactgt

SEQ ID NO: 532925 - DNA, 120 bp, Artificial Sequence
  ENSG00000166441_2 (sequence is synthesized)
caaccttgacaaattgtggactttggtcagtgaacagacacgggtgaatgctgctaaaaacaagactggggctgctcccatcattgatgtggtgcgatcgggctactacaaagttctggg

SEQ ID NO: 532926 - DNA, 120 bp, Artificial Sequence
  ENSG00000166441_3 (sequence is synthesized)
aaagggaaagctcccaaagcagcctgtcatcgtgaaggccaaattcttcagcagaagagctgaggagaagattaagagtgttgggggggcctgtgtcctggtggcttgaagccacatgga

SEQ ID NO: 532927 - DNA, 120 bp, Artificial Sequence
  ENSG00000166441_4 (sequence is synthesized)
gggagtttcattaaatgctaactactttttccttgtggtgtgagtgtaggttcttcagtggcacctctacatcctgtgtgcattgggagcccaggttctagtacttagggtatgaagaca

SEQ ID NO: 532928 - DNA, 120 bp, Artificial Sequence
  ENSG00000166441_5 (sequence is synthesized)
tggggtcctctcctgacttccctcaaatatatggtaaacgtaagaccaacacagacgttggccagttaaacatttctgtttataaagtcagaataatacctgttgatcactgaaaggcct

SEQ ID NO: 532929 - DNA, 120 bp, Artificial Sequence
  ENSG00000166441_6 (sequence is synthesized)
gcatgtattgtactctgaattttacagtgaatgagagaatgtaccctaattgttcaacagggctcaaaaggaaagattccattttgatgggtcacattctaaagaggggcagtgtgatag

SEQ ID NO: 532930 - DNA, 120 bp, Artificial Sequence
  ENSG00000166441_7 (sequence is synthesized)
gaatgagatggtcctttaggacttaagttctcagcccaaggtttttccacgtggccccctcatcttttttttttttttaaacggagtctctcttgccaggctggagtgcagtggcacgat

SEQ ID NO: 532931 - DNA, 60 bp, Artificial Sequence
  ENSG00000166441_8 (sequence is synthesized)
gctcactgcagcctccgcctcccaggttaagcgattctcctgcctcagcttcctgactaa

SEQ ID NO: 532932 - DNA, 120 bp, Artificial Sequence
  ENSG00000166441_9 (sequence is synthesized)
ggtttcaccatgttggccatgctggtctctaactcctaacctcaagtgatctgcccacatcggcctccaaaagttctgggattatagtgtgagccactgcgcccggccatggctccttaa

SEQ ID NO: 532933 - DNA, 120 bp, Artificial Sequence
  ENSG00000166441_10 (sequence is synthesized)
ttaatcttgatccaaattattgttacatccagaatgtgatgaatcaaaatctcgagatgggggtccagcaatctgaaatttcagtatgccagggcttttctgtatgtcaaagtgggtttg

SEQ ID NO: 532934 - DNA, 120 bp, Artificial Sequence
  ENSG00000166441_11 (sequence is synthesized)
aaatagttaatttttcttctagtctgaaatgtatcgggaaaatttggaaatcctgaaggctggaaattgaaataagtttttctaggatttgtgtctcttgctattggaaaactgatggtg

SEQ ID NO: 532935 - DNA, 120 bp, Artificial Sequence
  ENSG00000166441_12 (sequence is synthesized)
accaattcatgtttacaaataagatcctcatagatctcggtaaattataatttgctacagttttatggttcttcctgtgattttgagctttttttgacccaaaataatacagtctaaaac

SEQ ID NO: 532936 - DNA, 120 bp, Artificial Sequence
  ENSG00000166441_13 (sequence is synthesized)
tatagacaaataagatggcacttagactcctgggttttagttagtggaggtttccttagtgcactgtggggtcataataagccgagaaccatggctgtctatgggacacatctgtcagga

SEQ ID NO: 532937 - DNA, 120 bp, Artificial Sequence
  ENSG00000166441_14 (sequence is synthesized)
caacctttagaggatgttggggatcaaatagaaggcacagagaagcactgaattggcttacataagaataggctagaattacaagtagtgaaacctcgattcagctggacaattttaaac

SEQ ID NO: 532938 - DNA, 120 bp, Artificial Sequence
  ENSG00000166441_15 (sequence is synthesized)
aaatgtatcatttggcttgtatcttctgttgtgctggagaagttagaaataagggctctccagaccagcctgaccaacctggagaaaccttgtctctactaaatacacaaaattagccag

SEQ ID NO: 532939 - DNA, 61 bp, Artificial Sequence
  ENSG00000166441_16 (sequence is synthesized)
aaaccttgtctctactaaatacccaggagaatctccaggaggcggaggttgctgtgagccg

SEQ ID NO: 532940 - DNA, 120 bp, Artificial Sequence
  ENSG00000166441_17 (sequence is synthesized)
gtgaaactctgtccaccccccccaaaaaaagtaagggctctccattagggcccatagaggacttgtaatatggaacctgaatccaaggatcccacaataagtggtcagtagttcatgatg

SEQ ID NO: 532941 - DNA, 79 bp, Artificial Sequence
  ENSG00000166441_18 (sequence is synthesized)
aatttcctcatctttaaaatttcagtgaaagtgcctacctgaggattgtgtagattaaaatggaaaccgtgcacttaat

SEQ ID NO: 532942 - DNA, 69 bp, Artificial Sequence
  ENSG00000166441_19 (sequence is synthesized)
cacttaatttttgtgtttgacttagtaacttaagtgcaaactattacgggagcagatggagtcaattgg

SEQ ID NO: 532943 - DNA, 120 bp, Artificial Sequence
  ENSG00000166441_20 (sequence is synthesized)
ttaagtgcaaactattacgggagcagatggagtcaattggccttcatgtgattgtcagtgggaaattggtccaagcagagggaatactggttcaggaaactggtttgggaaggttaggca

SEQ ID NO: 532944 - DNA, 120 bp, Artificial Sequence
  ENSG00000166441_21 (sequence is synthesized)
aacgggaagtgctatggtggagagaaagattactctggccgggctgtaaaggacggctacaatgggaggctgaaggcagaaccaagaaaatgggagtgagtatggaaaaggtacgattca

SEQ ID NO: 532945 - DNA, 120 bp, Artificial Sequence
  ENSG00000166441_22 (sequence is synthesized)
gacggcataatggacgggacttggagactgaattgtagtgggccgaccacaaaatgataaggcatggaaggaagtagagtttggggggaaggatccctagtcccttaatggctaccttct

SEQ ID NO: 532946 - DNA, 120 bp, Artificial Sequence
  ENSG00000166441_23 (sequence is synthesized)
tccccaggagttgttaggccatccgatcccctggcctgggaaagaaacactgatttcgttgctggcttgttcactcaccagaagctacagctactaacagttctaaaaactgtttcatgt

SEQ ID NO: 532947 - DNA, 120 bp, Artificial Sequence
  ENSG00000166441_24 (sequence is synthesized)
gatgaggaacagacgaaaatagttttgagccctaagtccgccgattccagtgctttcttgaacccgcatttactaaaatattttcatgactgccaagctttgaatagcctgctgtgttca

SEQ ID NO: 532948 - DNA, 120 bp, Artificial Sequence
  ENSG00000166441_25 (sequence is synthesized)
tggaggctcatactggcgatctctagtggctggctaaagcttgaattgcaaaagatctaatttctggtctaatgtatatatgccttaaatatagttgcgttcaaacgtgggagctgcagg

SEQ ID NO: 532949 - DNA, 120 bp, Artificial Sequence
  ENSG00000166441_26 (sequence is synthesized)
tgcaacttgattttatgacaaatggctgccacataatttgcacaagcagtgctcgtcaagggcagctaaatcaggcgagctttcaatcaaaataaatgtactactaaaccctacttagcg

SEQ ID NO: 532950 - DNA, 120 bp, Artificial Sequence
  ENSG00000166441_27 (sequence is synthesized)
gctaactagcccaagagcagacagcccacggacggactgcaagtcggaagcgcgggcggaagctgtgcagcgcccacctggtggctccatcggccgcgttcatcagtcagcacgacccga

SEQ ID NO: 532951 - DNA, 120 bp, Artificial Sequence
  ENSG00000166441_28 (sequence is synthesized)
cctcagtggcgtcctcacaacacagaccggaccttgggtcttaccccggcacctgagaaccacttccggtgagtagcttctacttccggagacgatgactcccccgcgtcccagaccgga

SEQ ID NO: 532952 - DNA, 120 bp, Artificial Sequence
  ENSG00000166441_29 (sequence is synthesized)
agaagcccggcggagaccggcctcgctcggccacttccggcaagggcggagccggccagtggtgcgcgagcgcagataactcccctggagaggcgggatgttcaactccacccctggtcc

SEQ ID NO: 532953 - DNA, 120 bp, Artificial Sequence
  ENSG00000166441_30 (sequence is synthesized)
ttgggcggccgtgggtccccttcgaagcggaggaatggccaacctcgccgcacttcgagcccctttagggtgcgtttaagaacagtgggcgtggcctttacgtaaatcttcgagatggga

SEQ ID NO: 532954 - DNA, 120 bp, Artificial Sequence
  ENSG00000166441_31 (sequence is synthesized)
acctccagaatttgtctcaattgtctaaaaggtaatgagcgtcagcgacattcaagggcactttgggctaaaaaagaaagtgcttgtacacggatggaaatattctagaagaacataaaa

SEQ ID NO: 532955 - DNA, 120 bp, Artificial Sequence
  ENSG00000166441_32 (sequence is synthesized)
ggaatttcctcttaggaggttagggaaatgagcacgaagtatgttttggtgcagttttttgttcaacccaatgcgtattttcatattgagaggcaatataaatggagcgaaagtatcttg

SEQ ID NO: 532956 - DNA, 120 bp, Artificial Sequence
  ENSG00000166441_33 (sequence is synthesized)
agaaaaaaaaaaaaactaccagaacttgccgttgctgaaaagtaatattttctctttcgagagttttcatggccttttaaattacacccccacctccacaggcaaataaatttgttttgg

SEQ ID NO: 532957 - DNA, 120 bp, Artificial Sequence
  ENSG00000166441_34 (sequence is synthesized)
aatgcataccacatcatctggctctagaaacgtattttgtgtagctcccctagcaagaatataggttaaagcgtaaatttaattcctggctctattttacatcccaatttttattttcct

SEQ ID NO: 532958 - DNA, 120 bp, Artificial Sequence
  ENSG00000166441_35 (sequence is synthesized)
ctcattcccactttacgttgtttcaaataacctagtttgtgtatccctgtaagtcattttggtataaagtaggttataagtgtacatgcgaaaagatgtttttaacaaaaatgtaactga

SEQ ID NO: 532959 - DNA, 120 bp, Artificial Sequence
  ENSG00000166441_36 (sequence is synthesized)
ctttttcgtctgggctgccaacatgccatccagactgaggaagacccggaaacttaggggccacgtgagccacggccacggccgcatagtagagtcgggggtttctccgtgttggccagg

SEQ ID NO: 532960 - DNA, 89 bp, Artificial Sequence
  ENSG00000166441_37 (sequence is synthesized)
cgtcctcctaaaaggccccacgtagctttgtattcctgcaggcaagcaccggaagcaccccggcggccgcggtaatgctggtggtctgc

SEQ ID NO: 532961 - DNA, 120 bp, Artificial Sequence
  ENSG00000166441_38 (sequence is synthesized)
caacatggtaggtgtttcgtttcttgcctcctcttccttgccggcggagacccctaagctgtattcccattgcccctagtcatccactccctaccatggtcggggcttccaggctgcgca

SEQ ID NO: 532962 - DNA, 120 bp, Artificial Sequence
  ENSG00000166441_39 (sequence is synthesized)
tggccgcctgcggggcagggtggccggcgcgggcccggggcggggctcccggagccgtgtgttaggcccgcggttcggatctctaggacacgcgggcccctgcgctaccgtggtgagacc

SEQ ID NO: 532963 - DNA, 120 bp, Artificial Sequence
  ENSG00000166441_40 (sequence is synthesized)
tcacggccctgagcggatcggtaccctcagctttcccaaacgctccagaagttaggtctttgacccacaggcttacaggaccatctcggctggcgggcatcgccccctgcccctaattcc

SEQ ID NO: 532964 - DNA, 120 bp, Artificial Sequence
  ENSG00000166441_41 (sequence is synthesized)
attgcctgagtgtgctagagtcctcgaagagtaactgctgaccttattcactggctgtgggccttatggcacagtcagtcaccaggttagagacatgcttcacattcacctacccacaaa

SEQ ID NO: 532965 - DNA, 120 bp, Artificial Sequence
  ENSG00000166441_42 (sequence is synthesized)
ctagtggatgataaattttggctattcagaagacgtttattataggagtatgtagattttccatagagtgctgttatgtgacttgaattttagtctcggccctgcctctgacattgtcgg

SEQ ID NO: 532966 - DNA, 120 bp, Artificial Sequence
  ENSG00000166441_43 (sequence is synthesized)
tggtttatcctggttccaggaaataagactagccttttcctcatgatagtctttggtggtttttaaaacagttgtttaagtcaacagatgtatcatatgcctgacactgctctacaccag

SEQ ID NO: 532967 - DNA, 120 bp, Artificial Sequence
  ENSG00000166441_44 (sequence is synthesized)
ttcctttttcgtctgggctgccaacatgccatccagactgaggaagacccggaaacttaggggccacgtgagccacggccacggccgcataggcatgagccatcacaccggccccacgta

SEQ ID NO: 532968 - DNA, 120 bp, Artificial Sequence
  ENSG00000166441_45 (sequence is synthesized)
cttcctttttcgtctgggctgccaacatgccatccagactgaggaagacccggaaacttaggggccacgtgagccacggccacggccgcataggtaagtgccggcttcccctcggggtgg

SEQ ID NO: 532969 - DNA, 120 bp, Artificial Sequence
  ENSG00000166441_46 (sequence is synthesized)
gccttgggctctcttcgggtgcttagctagtctggagatcggtagcctataagtgggttagaataagacctttttgtggtcaagttgcacagctgttgatttttttctgacgatcctcta

SEQ ID NO: 532970 - DNA, 120 bp, Artificial Sequence
  ENSG00000166441_47 (sequence is synthesized)
agttctaaggaatttcacatcagtggggtaataggaattgagcaggcacggtattgggttagttgaagacatggagtactgtgggaatgctgtgatgtggaacctgaaaagatgtttcac

SEQ ID NO: 532971 - DNA, 120 bp, Artificial Sequence
  ENSG00000166441_48 (sequence is synthesized)
ccggaatcctaaagtaatcgcattgctgaaaaccggcatcggtagggtgggaacagcgtaagcgggacacagaagtctgggaaacactctgcttttgtgcgaggaagtattgagatgcat

SEQ ID NO: 532972 - DNA, 89 bp, Artificial Sequence
  ENSG00000166441_49 (sequence is synthesized)
gaaacactctgcttttgtgcgaggaagtattgagatgcatgagaaggctgtgtggtgcatgtagcttttttgtgtgtgtgtgagactga

SEQ ID NO: 532973 - DNA, 120 bp, Artificial Sequence
  ENSG00000166441_50 (sequence is synthesized)
acaaaactctggcttaatctaatccacttatataatctgtacttcccagttacctaccagacattgatattcttcctgtggtagaattatcataggtagttccctatccgtagcagtgcc

SEQ ID NO: 532974 - DNA, 120 bp, Artificial Sequence
  ENSG00000166441_51 (sequence is synthesized)
tactgtcactgcccaggttgtatcaggtttgcatttcgtgcttgaactatagctggttttcactgagcacagctcttggcccttcatgttctccagataatagaatcctaatatgttcca

SEQ ID NO: 532975 - DNA, 120 bp, Artificial Sequence
  ENSG00000166441_52 (sequence is synthesized)
ttgatactcagtgccatgcattatctgaagagattttcccccaaaacagatgtattatgtctgtccttgcgggggttctggtccctgtgtcagtcttaactctcatgaatatagaggtag

SEQ ID NO: 532976 - DNA, 120 bp, Artificial Sequence
  ENSG00000166441_53 (sequence is synthesized)
tgttaagaggccagaaccctagggacgctttaaattcacttcccagcctatttaatgtccattgagtagttctggtggtcaggaaggtggttgtcttcttttgcttagcagggggtattt

SEQ ID NO: 532977 - DNA, 120 bp, Artificial Sequence
  ENSG00000166444_0 (sequence is synthesized)
cacttggctgcgaggagcgccacgaaaggtcagaggaaggagctgtgggaagctcgcagcaggtatcggagcttaagccagtggatttgggggccctgggctccctagccggctgcggtg

SEQ ID NO: 532978 - DNA, 120 bp, Artificial Sequence
  ENSG00000166444_1 (sequence is synthesized)
tgagaatggagtgggcaggaaagcagcgggactttcagggctctgggtttgcagagagccgaaatgaccatgactgccaacaagaattccagcatcacccacggagctggtggcactaaa

SEQ ID NO: 532979 - DNA, 120 bp, Artificial Sequence
  ENSG00000166444_2 (sequence is synthesized)
gcccctcgggggactctgagcaggtctcagtcagtctctccacctccagttctctccccaccaaggagtcccatctacccgctcagtgatagtgaaacctcagcctgcaggtaccccagc

SEQ ID NO: 532980 - DNA, 120 bp, Artificial Sequence
  ENSG00000166444_3 (sequence is synthesized)
cactccagctcccgggtgctcctcaaggaccggcaccccccagctccttcaccccagaatcctcaagatccctccccagatacttccccacccacctgtcccttcaagaccgccagcttc

SEQ ID NO: 532981 - DNA, 120 bp, Artificial Sequence
  ENSG00000166444_4 (sequence is synthesized)
ggttatttggacagaagcccttcggcgtgcaagagagacgcccaaaaggaaagtgtccaaggcgcagcccaggatgtagcaggggtcgctgcctgcctcccccttgcccagagcacgcca

SEQ ID NO: 532982 - DNA, 120 bp, Artificial Sequence
  ENSG00000166444_5 (sequence is synthesized)
ttcccggggccagcagctggcccccggggcgtcttgctgacccgtaccggtacccgcgcccacagcctgggcatccgggagaagatatcagcatgggaaggtcgccgagaggcgtcgccc

SEQ ID NO: 532983 - DNA, 120 bp, Artificial Sequence
  ENSG00000166444_6 (sequence is synthesized)
aggatgagcatgtgtggagagaagcgggagggctctgggagcgagtgggcggccagtgagggctgccccagcctgggctgtcccagcgtggtgccgtccccctgcagctctgaaaagacc

SEQ ID NO: 532984 - DNA, 120 bp, Artificial Sequence
  ENSG00000166444_7 (sequence is synthesized)
tttgatttcaagggcctccggaggatgagcaggaccttctccgagtgttcctacccagagactgaggaggagggagaggcgctccctgtccgggactctttctaccggctggagaaacgg

SEQ ID NO: 532985 - DNA, 120 bp, Artificial Sequence
  ENSG00000166444_8 (sequence is synthesized)
ctgggccggagtgagcccagcgccttcctcagggggcatggcagcaggaaggagagctcagcagtgctgagccggatccagaaaattgaacaggtcctgaaggagcagccgggccggggg

SEQ ID NO: 532986 - DNA, 120 bp, Artificial Sequence
  ENSG00000166444_9 (sequence is synthesized)
ctcccccagctccccagcagctgctacagcgtggaccgggggaaaaggaagactggaaccttgggctccttggaggagccggcagggggcgcgagtgtgagcgctggcagccgggcagtc

SEQ ID NO: 532987 - DNA, 120 bp, Artificial Sequence
  ENSG00000166444_10 (sequence is synthesized)
ggagtggctggtgttgcgggggaggcgggcccacccccagagagggaaggcagtggttccactaagcccgggacccctggaaatagccctagctcccagcggctgccatcgaagagttcc

SEQ ID NO: 532988 - DNA, 120 bp, Artificial Sequence
  ENSG00000166444_11 (sequence is synthesized)
ctcgatcccgctgtgaaccctgtccccaaacccaagcgcacctttgaatacgaggctgacaagaaccccaagagtaagcccagtaatggtctacctccttcacccacacctgctgctcca

SEQ ID NO: 532989 - DNA, 120 bp, Artificial Sequence
  ENSG00000166444_12 (sequence is synthesized)
cctcccttgccctccaccccagccccgccagtcacccggagacccaagaaggacatgcgtggtcaccgcaagtcccagagcagaaaatcctttgagtttgaggatgcatccagtctccag

SEQ ID NO: 532990 - DNA, 120 bp, Artificial Sequence
  ENSG00000166444_13 (sequence is synthesized)
tccctgtacccctcttctcccactgagaatggtactgagaaccaacccaagtttggatccaaaagcactttagaagaaaatgcctatgaagatattgtgggagatctgcccaaggagaat

SEQ ID NO: 532991 - DNA, 120 bp, Artificial Sequence
  ENSG00000166444_14 (sequence is synthesized)
ccatatgaggatgtggacttaaagagccgaagagcaggacgaaaatcccagcaactgtctgagaactccttggactctttgcacaggatgtggagtcctcaggacaggaagtacaacagc

SEQ ID NO: 532992 - DNA, 120 bp, Artificial Sequence
  ENSG00000166444_15 (sequence is synthesized)
ccgcccacacagctttccctgaaacccaacagccagtccctgcgcagtgggaactggtcagaaaggaagagccaccggctgccacgattacccaagaggcacagccatgacgacatgctg

SEQ ID NO: 532993 - DNA, 120 bp, Artificial Sequence
  ENSG00000166444_16 (sequence is synthesized)
ctgctggctcagctgagtctgccgtcctcaccctccagcctcaatgaagacagcctcagcaccaccagcgagctgctgtccagccgccgggcccgccgcattcccaagcttgtccaaaga

SEQ ID NO: 532994 - DNA, 120 bp, Artificial Sequence
  ENSG00000166444_17 (sequence is synthesized)
attaactccatctacaatgccaagagaggaaagaagagattaaaaaagttgtctatgtccagcattgaaacagcatcactgagagatgaaaacagtgagagcgagagcgactctgatgac

SEQ ID NO: 532995 - DNA, 120 bp, Artificial Sequence
  ENSG00000166444_18 (sequence is synthesized)
cgcctggtccacatccagtcgatgctgaagcgcgcccccagctatcgcacgctggagctggagctgctggagtggcaggagcgggagctttttgagtactttgtggtggtgtccctcaag

SEQ ID NO: 532996 - DNA, 120 bp, Artificial Sequence
  ENSG00000166444_19 (sequence is synthesized)
aagaagccatcgcgaaacacctacctccccgaagtctcctaccagtttcccaagctggaccgacccaccaagcagatgcgagaggcagaggaaaggctcaaagccattccccagttttgc

SEQ ID NO: 532997 - DNA, 120 bp, Artificial Sequence
  ENSG00000166444_20 (sequence is synthesized)
ttccctgatgccaaggactggcttcctgtgtcagagtatagcagtgagaccttttctttcatgctgactggggaagatggcagcagacgctttggctactgcaggcgcttactgccaagt

SEQ ID NO: 532998 - DNA, 120 bp, Artificial Sequence
  ENSG00000166444_21 (sequence is synthesized)
gggaaagggccccggttgccagaggtgtactgtgtcatcagccgccttggctgcttcggcttgttttccaaggtcctagatgaggtggagcgccggcgtgggatctccgctgcattggtc

SEQ ID NO: 532999 - DNA, 120 bp, Artificial Sequence
  ENSG00000166444_22 (sequence is synthesized)
tatcctttcatgagaagtctcatggagtcgcccttcccagccccagggaagaccatcaaagtgaagacattcctgccaggtgctggcaatgaggtgttagagctgcggcggcccatggac

SEQ ID NO: 533000 - DNA, 120 bp, Artificial Sequence
  ENSG00000166444_23 (sequence is synthesized)
tcaaggctggagcacgtggactttgagtgcctttttacctgcctcagtgtgcgccagctcatccgaatctttgcctcactgctgctggagcgccgggtcatttttgtggcagataagctc

SEQ ID NO: 533001 - DNA, 120 bp, Artificial Sequence
  ENSG00000166444_24 (sequence is synthesized)
agtaccctctccagctgctcccacgcggtggtggccttgctctaccccttctcctggcagcacaccttcattcctgtcctcccggcctccatgattgacatcgtctgctgtcccaccccc

SEQ ID NO: 533002 - DNA, 120 bp, Artificial Sequence
  ENSG00000166444_25 (sequence is synthesized)
ttcctggttggcctgctctccagctccctccccaaactgaaggagctgcctgtggaggaggcgctgatggtgaatctgggatctgaccgattcatccgacagatggacgacgaagacacg

SEQ ID NO: 533003 - DNA, 120 bp, Artificial Sequence
  ENSG00000166444_26 (sequence is synthesized)
ttgttacctaggaagttacaggcagctctggagcaggctctggagaggaagaatgagctgatctcccaggactctgacagcgactccgacgatgaatgtaataccctcaatgggctggtg

SEQ ID NO: 533004 - DNA, 120 bp, Artificial Sequence
  ENSG00000166444_27 (sequence is synthesized)
tcggaggtgtttatccggttctttgtggagaccgttgggcactactccctctttctgacacagagtgagaagggagagagggcctttcagcgagaggccttccgcaaatctgtggcctcc

SEQ ID NO: 533005 - DNA, 120 bp, Artificial Sequence
  ENSG00000166444_28 (sequence is synthesized)
aaaagcatccgccgctttcttgaggtttttatggagtctcagatgtttgctggcttcatccaagacagggagctaagaaagtgtcgggcaaagggcctttttgagcagcgagtggagcag

SEQ ID NO: 533006 - DNA, 120 bp, Artificial Sequence
  ENSG00000166444_29 (sequence is synthesized)
tacttagaagaactcccagacactgagcagagtggaatgaataagtttctccgaggtttgggcaacaaaatgaagtttctccacaagaagaattaagcctccttctcagtagcagagtcc

SEQ ID NO: 533007 - DNA, 120 bp, Artificial Sequence
  ENSG00000166444_30 (sequence is synthesized)
agtgccttgcagagcctgaagcctggggagaaggcccagcctgggaccctctgggctgctgtggctcctctgcccccacagatcctatcctccaagccagcccacctctgccttcatcat

SEQ ID NO: 533008 - DNA, 120 bp, Artificial Sequence
  ENSG00000166444_31 (sequence is synthesized)
atcccaggatactgtttgtaaataatctgctgtaagctttcttaactgttttttgtaacaagcaaagagaatatggcaaatatttgtatattcccaaggggccgggtgctttcctgtcct

SEQ ID NO: 533009 - DNA, 120 bp, Artificial Sequence
  ENSG00000166444_32 (sequence is synthesized)
gccagagcatggatgaagtttcgctgggtgctcgtgactggccagttttgtgcagctgactgtctcagccaaaccactgatcttccctggaggccttcggcctgcctgcctgcctgaggt

SEQ ID NO: 533010 - DNA, 120 bp, Artificial Sequence
  ENSG00000166444_33 (sequence is synthesized)
ccccgctgccagtcccgggccctggagagcagatgctgtcttgttatgtacaggaggaccttttaaaaaaatcaagtttctattttttgctggtagtccgcatacccataccctctgttt

SEQ ID NO: 533011 - DNA, 120 bp, Artificial Sequence
  ENSG00000166444_34 (sequence is synthesized)
ttgaaaggcaaaggccaatcagtccccatttgtagcatggcaccagggtcttaggcctagtcctctcattcctcccaccctccgagatggtcagtgtgtcatgggaagcccacccccagc

SEQ ID NO: 533012 - DNA, 120 bp, Artificial Sequence
  ENSG00000166444_35 (sequence is synthesized)
tctgccagtgctctctgggcctggctcccagtcagtggtggccacgatgcggtacagggcatccctccttcccatctacgggtgttctcaataaacaatgtacagttgtttgggcccaga

SEQ ID NO: 533013 - DNA, 120 bp, Artificial Sequence
  ENSG00000166444_36 (sequence is synthesized)
gggggtcgggggtcgggggctgggggctgaggactgagtcgagccagcagcccagggcatctgtccacgctgtcagaggagcctctgggcgtggggctggcccttagagggctactgcgc

SEQ ID NO: 533014 - DNA, 120 bp, Artificial Sequence
  ENSG00000166444_37 (sequence is synthesized)
tgcttaacttgcctttcacagaaaaccactggaggagatactcacaaaaatgaaggggaagaacaggaaacaggaagacatgagatgaaggaaacaggagattcaacatggatttcacac

SEQ ID NO: 533015 - DNA, 120 bp, Artificial Sequence
  ENSG00000166444_38 (sequence is synthesized)
cctttggagagtttctttcttggataattcaggaagatgagagactgcttaggcgccaccactagtaccatgagtccctgcactggttaaagccatcgccacaacctggacaggcagcaa

SEQ ID NO: 533016 - DNA, 120 bp, Artificial Sequence
  ENSG00000166444_39 (sequence is synthesized)
gaagaaaacaagtccactcactgtcttctcccttctcccctctgagctgttcaagcaagttcccaggagcagttcagagcccctgttggactggaagggaggtaggaggagtggaatgca

SEQ ID NO: 533017 - DNA, 120 bp, Artificial Sequence
  ENSG00000166444_40 (sequence is synthesized)
gttggactggaagggaggtaggaggagtggaatgcatgcaaaaaccgagctgatcaaaagacagtgctgtttcatggaagcctcccagaactgagagagagagagagagagagagagaga

SEQ ID NO: 533018 - DNA, 120 bp, Artificial Sequence
  ENSG00000166444_41 (sequence is synthesized)
agacccagacaactcttggtcggatggtgaggagcccggccgcagcccggggcgcggatgcctgcccgccgcccgccctctctgcaggagcggctcctcctccgggccgcgcggctcccg

SEQ ID NO: 533019 - DNA, 120 bp, Artificial Sequence
  ENSG00000166444_42 (sequence is synthesized)
gcgagaccccatccaggcgccgcgcccggcccggctggggaacgcagagggatggtgacagaatggatagtatagaaaatggattggaattgaggaggaaactagaagctaagaggagtt

SEQ ID NO: 533020 - DNA, 120 bp, Artificial Sequence
  ENSG00000166444_43 (sequence is synthesized)
acataatatccagtgcgtcctccctggcactccgattctcagtagtcatgaaccagctggcttctatatctctcaccaatcacaggtaatttaggtctccctcaggaagatgagagactg

SEQ ID NO: 533021 - DNA, 120 bp, Artificial Sequence
  ENSG00000166444_44 (sequence is synthesized)
tttttgctatttcatcagctcattcgagggctttttcatctcatcacaatttttctgtctaacctcagggttagtacttcttctgtcctctaatactatccatttagtataacaaccttt

SEQ ID NO: 533022 - DNA, 120 bp, Artificial Sequence
  ENSG00000166444_45 (sequence is synthesized)
ttggaacaacatggtagagttgtctgaaggaagctagagatgtccacttggggcagctctgaactgagaagcagcctcctcacctagtgcagcttgggaatgtgcatggggaggcagggt

SEQ ID NO: 533023 - DNA, 120 bp, Artificial Sequence
  ENSG00000166444_46 (sequence is synthesized)
cagcagcaaaccccggcaagatgtcactaatgatcgccttgatgagccagcccgaattctagtaagatgctcctgcaaattatcatcccagatgttttctttctccttttttggcatctg

SEQ ID NO: 533024 - DNA, 120 bp, Artificial Sequence
  ENSG00000166444_47 (sequence is synthesized)
gtgtatgagaaaatgacataaagtttcagaccccgttgtgctttgctccagacccagacaactcttggtcggatggtgaggagatttcacaccctttggagagtttctttcttggataat

SEQ ID NO: 533025 - DNA, 120 bp, Artificial Sequence
  ENSG00000166444_48 (sequence is synthesized)
acaccctttggagagtttctttcttggataattcagggtcttgctgtgttgctcgggctgctcttgaactcctgggctcaaacagtcctcttgcctcagcctcccaacgtgctgggatta

SEQ ID NO: 533026 - DNA, 120 bp, Artificial Sequence
  ENSG00000166444_49 (sequence is synthesized)
agtgctctgctcacttggctgcgaggagcgccacgaaaggtcagaggaaggagctgtgggaagctcgcagcagggctctgggtttgcagagagccgaaatgaccatgactgccaacaaga

SEQ ID NO: 533027 - DNA, 120 bp, Artificial Sequence
  ENSG00000166444_50 (sequence is synthesized)
atgaggttgatgatagttatgagggttactgggagagataaatgagattatctactcacgctcttctaacaggtcttagcacatagtaagtgctcagtgtcagctatgattgtcactgtg

SEQ ID NO: 533028 - DNA, 120 bp, Artificial Sequence
  ENSG00000166444_51 (sequence is synthesized)
attatgacttcaaggaagaatggaggtggggcgcatagctggcaagaaaccccgtgggaacaaagaagggctctgggtttgcagagagccgaaatgaccatgactgccaacaagaattcc

SEQ ID NO: 533029 - DNA, 120 bp, Artificial Sequence
  ENSG00000166444_52 (sequence is synthesized)
ttctcaggctctgctcaagtaggacctctttcaggaggtctgtccagacacctgcatggagcccctcccctgcccagcttgctctgctggaccgacccaccaagcagatgcgagaggcag

SEQ ID NO: 533030 - DNA, 120 bp, Artificial Sequence
  ENSG00000166444_53 (sequence is synthesized)
aggaaaggctcaaagccattccccagttttgcttccctgatgccaaggactggcttcctgtgtcagagtatagcagaccttttctttcatgctgactggggaagatggcagcagacgctt

SEQ ID NO: 533031 - DNA, 120 bp, Artificial Sequence
  ENSG00000166444_54 (sequence is synthesized)
gggacgatcccaaggtcttgttcttggcctggccgggtattcaagttctgccaatctggggtcttggaaaagatgtccttcctgttctgcctggggtctgcctctggctggagaggggag

SEQ ID NO: 533032 - DNA, 120 bp, Artificial Sequence
  ENSG00000166444_55 (sequence is synthesized)
gaatctataaacatggaacccatggacgcagaactcatggatatggaggacaggctgtatttaccatattgcattacaaagaggaatcccaggttcccacatacatcaggcaacaaaatg

SEQ ID NO: 533033 - DNA, 120 bp, Artificial Sequence
  ENSG00000166444_56 (sequence is synthesized)
gttgacactctgaatggtttgtgaaggcatcctctggcccctgaaggcattaccatccttaccaggtttaaaatctttcagagtgcacccagcatcatcagctcctgcaagcagaaaggg

SEQ ID NO: 533034 - DNA, 120 bp, Artificial Sequence
  ENSG00000166444_57 (sequence is synthesized)
gattactgtgctttgggattaaagtgtcctgccgtttctggaagagactgctagtcataaagacaggtagggctgaagggtggaggtagggtctccagctgcagttgtcaagaacccaac

SEQ ID NO: 533035 - DNA, 120 bp, Artificial Sequence
  ENSG00000166444_58 (sequence is synthesized)
gtgaaggctgactgagcagagaaactgctgctgcccagaaagaaagcacttttagcagtgggctctgggtttgcagagagccgaaatgaccatgactgccaacaagaattccagcatcac

SEQ ID NO: 533036 - DNA, 120 bp, Artificial Sequence
  ENSG00000166444_59 (sequence is synthesized)
ccactggagccgggcaggtgggcgggcaggcagccagcctttctctctctttcctggcttccttccttccctaatctggactgcttcctcgattccctttgaataaattctgggtccgtg

SEQ ID NO: 533037 - DNA, 120 bp, Artificial Sequence
  ENSG00000166444_60 (sequence is synthesized)
gtagcctccccactgcagacgggcagctgcatgactcatgagctgaggggccaggcagaagccattctctttggttcacaggaattctgcttgtttatttgtgtgtgtgtgagttcgtgt

SEQ ID NO: 533038 - DNA, 120 bp, Artificial Sequence
  ENSG00000166444_61 (sequence is synthesized)
acattcctgccaggtgctggcaatgagttttcaggaggcctgcacatctatgctgcacacacatgctgcgggaccaaggaggaggccaggcagaccccagggacagctgctttggcacgg

SEQ ID NO: 533039 - DNA, 120 bp, Artificial Sequence
  ENSG00000166444_62 (sequence is synthesized)
cctgagcgtcagcagttcctcctgccctcaccgctggagtcactcactaccttccacccctgtgactcccccagagaagtggctctctgagctgtggcactcaccttgggagcagccttt

SEQ ID NO: 533040 - DNA, 120 bp, Artificial Sequence
  ENSG00000166444_63 (sequence is synthesized)
gctgcctttgtaaggagggcctatggtctttgctgttgccatggacattccccagcaaggcagcagagatctgattcagcaggaatgactcttgctcttgttatccacagaaaatccttt

SEQ ID NO: 533041 - DNA, 120 bp, Artificial Sequence
  ENSG00000166444_64 (sequence is synthesized)
cagtcctgcttcctggcaaggctgcagaatggccagccctttgcttatgttttccttgtgactggcatgggacttagggtgatggagataaaggccaggatagcaggacaaacagcctct

SEQ ID NO: 533042 - DNA, 120 bp, Artificial Sequence
  ENSG00000166444_65 (sequence is synthesized)
ggaaggaaactctttctgcaggaaagggagggggacagggcaacaaggaccccagcattgcccttccagaggcaatggctgggattagagtcctgggatgcggagatgcctggagagcag

SEQ ID NO: 533043 - DNA, 120 bp, Artificial Sequence
  ENSG00000166444_66 (sequence is synthesized)
tggggtctagtcagcactgggggcttagacctttgtctggggaggtgggcaggaggaccctagagatgtggctgtgtggttcccttcttctccctatctctaagagcagtcagctctcct

SEQ ID NO: 533044 - DNA, 120 bp, Artificial Sequence
  ENSG00000166444_67 (sequence is synthesized)
ctcttcctgaggtcccgatggatggcccctcaactccttccttctggagccttccccgctttcacaggcagccctcttgcccacaggctgggtgttcgagtgctacgagagcagagctgt

SEQ ID NO: 533045 - DNA, 120 bp, Artificial Sequence
  ENSG00000166444_68 (sequence is synthesized)
agtccgagggatggagaagaggggtttactgcatagcagggtagacgagagacctggaaaagagcaggttggaaggggaaagcagctccagttgcttcgtggagggccagagggcagcac

SEQ ID NO: 533046 - DNA, 120 bp, Artificial Sequence
  ENSG00000166444_69 (sequence is synthesized)
ttctgcctgcttcctgaggagtggggtctgagttcctctggggcgtaaggcacattcagacatctgtagaacaagtgtgggactcagtggcacccaggctcaatcctgctgctgagcaga

SEQ ID NO: 533047 - DNA, 120 bp, Artificial Sequence
  ENSG00000166444_70 (sequence is synthesized)
ggtgctggagtgagtcctgctctgcagcaggaaaatagggaaaggggtgcagagagggctgtgttctgagttccccagggacctgttcaccccacggattctgccaccaggattgagcta

SEQ ID NO: 533048 - DNA, 120 bp, Artificial Sequence
  ENSG00000166444_71 (sequence is synthesized)
ggactgacccggcccatggtgttactctattttagaaaatgtgtgtgttggaggggtgggggcaggagatacagcttgtggaaaggagtgccactcaacatcttcaagggcagggattct

SEQ ID NO: 533049 - DNA, 120 bp, Artificial Sequence
  ENSG00000166444_72 (sequence is synthesized)
gttttggacttttctgagattttctggtaatgccaatacaatgcccgctgccagagattttagaactagtcctgagaagcaagaactcccctcacccccaccctttggcccagactcctt

SEQ ID NO: 533050 - DNA, 120 bp, Artificial Sequence
  ENSG00000166444_73 (sequence is synthesized)
ccaagcctttcacacctcccctgtgtcacagcaggagagtttgttccaaaaggggagtgttgatggttctctttttgctgagatcagcggtagagggaatagacactacagtaggagagt

SEQ ID NO: 533051 - DNA, 120 bp, Artificial Sequence
  ENSG00000166444_74 (sequence is synthesized)
catcgaacagatcattactgaacacttcctccttgctaatcactgttccgttccgaggttgcctcagtgaacaacacaaaaccctgccctaaaagacttgttgaacggcatcgtaggaga

SEQ ID NO: 533052 - DNA, 120 bp, Artificial Sequence
  ENSG00000166444_75 (sequence is synthesized)
ttgactttcacttccccaggcctcagtgcctcttcccacagaggctgggttttctccttgttgctgcctgagcaggtgaccttgggatggttcccacagagcagtgtggctccaggcact

SEQ ID NO: 533053 - DNA, 120 bp, Artificial Sequence
  ENSG00000166444_76 (sequence is synthesized)
gagcctggtacctggtgctgggagaccctgcagagctgaggcctgtcctgagagtggtggctgttccttcagggctctggttgcagagaggtttagaggaggcttaaagtcttcctccac

SEQ ID NO: 533054 - DNA, 120 bp, Artificial Sequence
  ENSG00000166444_77 (sequence is synthesized)
cttggtcggatggtgaggaggtgagggccgtccagtttgggggccaacttctcctccctgctgcccccggcccccgcctccctcacccctgtcccccaccctccctcgcacactctcggc

SEQ ID NO: 533055 - DNA, 120 bp, Artificial Sequence
  ENSG00000166444_78 (sequence is synthesized)
gcggctttctcgctgcctccggcgcctccgagcgctcccctccgccgggctccagcagcccaccctctctgtcttgggtggaggcgcacatcctccacgccccctccactcaaatctgcg

SEQ ID NO: 533056 - DNA, 120 bp, Artificial Sequence
  ENSG00000166444_79 (sequence is synthesized)
atggggatgggactaaacttagggggtctgccgtgtcccagggactgtgctcattttctgacaggagcaatattattaccgactgtgacagcagctcccactaagcctgcaccttagctg

SEQ ID NO: 533057 - DNA, 120 bp, Artificial Sequence
  ENSG00000166444_80 (sequence is synthesized)
gacaggcagcaaggtaagcagagaggccagtccaggcgagctcctgggatgtgagtgcatttccgccccaactgctgcccggaaaaatcccaagtgcacaaacaagtcaaggcagcgcat

SEQ ID NO: 533058 - DNA, 120 bp, Artificial Sequence
  ENSG00000166444_81 (sequence is synthesized)
cagggtccctcctacccgagctccaggacccagaggaagctgggtccccttcaagcgcttcagctagctccctcccccctggcagggattcttccaagttataaaaaatgagacactgga

SEQ ID NO: 533059 - DNA, 120 bp, Artificial Sequence
  ENSG00000166444_82 (sequence is synthesized)
caggaaagcagcgggactttcaggtaagggcagctccgggctgggatcatttggcctcctttcctggcccttctctccggctgttttctgggagtcaggcgagtgtctgtagtctctgct

SEQ ID NO: 533060 - DNA, 120 bp, Artificial Sequence
  ENSG00000166444_83 (sequence is synthesized)
cggggtttggggctcaggaatgatgtcatgctccaacagttggattctattagcttaaggaggagggaaacagccaattttcttgactttgcaaatctagctgatctcactcttgctgaa

SEQ ID NO: 533061 - DNA, 120 bp, Artificial Sequence
  ENSG00000166444_84 (sequence is synthesized)
tctgaggtgtttagacttcactctaaaaagcatcattttacttttatttagcacaaaggcacaggatatttttacaggaagaatcttttatatggaaaaatctgagttaacatcactccc

SEQ ID NO: 533062 - DNA, 120 bp, Artificial Sequence
  ENSG00000166444_85 (sequence is synthesized)
gtggtgtttgtagttcttacagggaaactccagtgccttttgagccgcttgttcgtcctagtgaacactgtctgttttgtctcttggtgctgctatgtctgacctgtaatggaaaaaaaa

SEQ ID NO: 533063 - DNA, 120 bp, Artificial Sequence
  ENSG00000166444_86 (sequence is synthesized)
aaaaaaaaaaggctaattaagctcagccaggagcctgtggtgagttccaagtccctctagagcatttattaggacagagggactgtcacagggatgcctgagctggggttttgcactctc

SEQ ID NO: 533064 - DNA, 120 bp, Artificial Sequence
  ENSG00000166444_87 (sequence is synthesized)
tctcttccaggcagcttggtaagaatcaagctgtcctcccacatcaaaaggtcgatcacagactttcctaagaggtggaggagggggctggcttggggttggggggcctgcaaacaggtt

SEQ ID NO: 533065 - DNA, 120 bp, Artificial Sequence
  ENSG00000166444_88 (sequence is synthesized)
tctcatccagatgtcccagagtgagctctcagcagcagctgctaagagctggggaacatgaggcactgtagttgtgccgggtggattcctttggttacattttgaccaaatctcagggca

SEQ ID NO: 533066 - DNA, 120 bp, Artificial Sequence
  ENSG00000166444_89 (sequence is synthesized)
ggtacatggtgagctgtgtggccttggaaaggagaccctcccagaaaggcagttttataggtgatagggtagtggggttgtcagtaatattatgaggaggatgaatgcagcaaacacttc

SEQ ID NO: 533067 - DNA, 120 bp, Artificial Sequence
  ENSG00000166444_90 (sequence is synthesized)
ctgcaacggagacccatcaggggttgtgcttccacttgagccatgttatgtcttaaattcacttcttggcctcagggaactttgcaaatgcctttggtttctctgtgggatgagggaaca

SEQ ID NO: 533068 - DNA, 120 bp, Artificial Sequence
  ENSG00000166444_91 (sequence is synthesized)
gctgctgtcctggttcttcagtttttcttcttgaactttctgaacagaatgtcttttgtattctggcaaacaatgagggggcattctgattaacttcggatcagcttgccaatgcaagca

SEQ ID NO: 533069 - DNA, 120 bp, Artificial Sequence
  ENSG00000166444_92 (sequence is synthesized)
ctggccatgtccccagttccggctccctaaaatgagtacatgtatacatcgtggttgtggcctgagggtccacaagggtgaactccatggccctggacctcagacggtccacttctgaag

SEQ ID NO: 533070 - DNA, 120 bp, Artificial Sequence
  ENSG00000166444_93 (sequence is synthesized)
ttattcctcttgctacatacactccagggatcctttgcttagttgaaacctacattttgctggagggatgtggcataacactgagccagtggccccttcagttggcagtgtaaatccaga

SEQ ID NO: 533071 - DNA, 120 bp, Artificial Sequence
  ENSG00000166444_94 (sequence is synthesized)
acctcagccttcttttctacttgtgtgtgtagttggagctcttcaattttaccatccccacatctgtgaagagggctagcagagacccagtttcaggagctgctgctccttctgttggta

SEQ ID NO: 533072 - DNA, 120 bp, Artificial Sequence
  ENSG00000166444_95 (sequence is synthesized)
tagcagaaagaataatggatttgggttgctagacttgagtcgacggctagattctgttcccatagggcggccacgggcaagtatcttaactaataggagcttcagattcttacctgtgag

SEQ ID NO: 533073 - DNA, 120 bp, Artificial Sequence
  ENSG00000166444_96 (sequence is synthesized)
atggaggtaataagaacaacttcacaggactgttgggaggagccagtgggataacttccatgaaagtagtttgaaacaagtcacgtcctatctaacgaaccgtgttgtgaattgaagctt

SEQ ID NO: 533074 - DNA, 120 bp, Artificial Sequence
  ENSG00000166444_97 (sequence is synthesized)
gaggaatgacccaactctctctggaaagtcactttgcctctctgttctggttctctcattttataaagtgccttcttcctttctgcatttataagtaaacatgagaaaaatctgaaaaga

SEQ ID NO: 533075 - DNA, 120 bp, Artificial Sequence
  ENSG00000166444_98 (sequence is synthesized)
cttcttcaggatgtttaaggaaacaaatgttgctttccttgggttgggtcgtttcataagagtgatgtttgccataaaactggagcctcatagacgatcctgcagggaggaagctttcct

SEQ ID NO: 533076 - DNA, 120 bp, Artificial Sequence
  ENSG00000166444_99 (sequence is synthesized)
tggtcacctgactcatgtgtttatatatagtatagaggagaggtattccaaaagacccgtcgcttttcctgtgtcccacagctgcctgtagagttgtggcaccataaactttagcagctg

SEQ ID NO: 533077 - DNA, 120 bp, Artificial Sequence
  ENSG00000166444_100 (sequence is synthesized)
gaaaagaggccaggcctggttccctcatcctgctgggtcctgctgggcacactctgcagtgggcaaaggggtctttctccttcattctgggtttagaaggcagggttctaactgggagaa

SEQ ID NO: 533078 - DNA, 120 bp, Artificial Sequence
  ENSG00000166444_101 (sequence is synthesized)
agtgttattgctccgaaaggcttcttgggggctgggcaggtctttcaggaactcataaggccacagcttatggggaaagaaaaagaaacaaggaagtgggaattccaagggcagagattc

SEQ ID NO: 533079 - DNA, 120 bp, Artificial Sequence
  ENSG00000166444_102 (sequence is synthesized)
ttgatatgccatgggactgtgccaaggaatggaagagcaggggaagggagactccaggcaaggagagtcccaggtctgtcctcattgagtcgaaagggcgtatggcatactagagcgcgt

SEQ ID NO: 533080 - DNA, 120 bp, Artificial Sequence
  ENSG00000166444_103 (sequence is synthesized)
cacccacagccccagctttactgtaggatggggaagacctgccagccatatcccggagtggtgtctgggaagaagcccttgagcagacccatagtaggcagattaaaaaaatgaaacaaa

SEQ ID NO: 533081 - DNA, 120 bp, Artificial Sequence
  ENSG00000166444_104 (sequence is synthesized)
agttgtcagaggcagggctggactcaaggcaggtgtttttccactgcccctcggggcctgcgactgtgcctgtttgtctggatgcagtttgtagaaaagttccagagggctctgggtttg

SEQ ID NO: 533082 - DNA, 120 bp, Artificial Sequence
  ENSG00000166444_105 (sequence is synthesized)
gggccatgagggctccaccctcatgaatggattaatgctgtcattgctagagtttgtttctgataaaaacaagtccggccccctcctgccctctctctcttttgtgtgtactgttgtgcc

SEQ ID NO: 533083 - DNA, 120 bp, Artificial Sequence
  ENSG00000166444_106 (sequence is synthesized)
cttctgcctttctgctatgggatgatgcaggaagaaggcccgcaccagattcagccatcaatcttaagacttccaagcctctggaaccgtaagaaataaatcctcacttcattagcataa

SEQ ID NO: 533084 - DNA, 120 bp, Artificial Sequence
  ENSG00000166444_107 (sequence is synthesized)
gctaaatagagctgtctgcatgctgttctgatgggctcaggctcagcctcagagaataggtggattggagcctgtgatgggggctctttcccccaccagagtgggtgaaagcagggagga

SEQ ID NO: 533085 - DNA, 120 bp, Artificial Sequence
  ENSG00000166444_108 (sequence is synthesized)
tgagaggaagatgagagactgcttaggcgccaccactagtaccatgagtccctgcactggttaaagccatcgccacaacctggacaggcagcaagggctctgggtttgcagagagccgaa

SEQ ID NO: 533086 - DNA, 120 bp, Artificial Sequence
  ENSG00000166444_109 (sequence is synthesized)
tattctaagccactaggccgtggtggcttctttgaaaggttgaagtcttgaaaggtaagaagaccccatctagctgggtttcatgtgctgccctcaccttacccctacaagtggcacagc

SEQ ID NO: 533087 - DNA, 120 bp, Artificial Sequence
  ENSG00000166444_110 (sequence is synthesized)
aagctgcctgcgatgtctggtggttgactctgctgcctgcatggttcaggtgagcagagcagttcatgttgaagcccctcccaccggtcaggagcctgtaggactgtgttgttttccttc

SEQ ID NO: 533088 - DNA, 120 bp, Artificial Sequence
  ENSG00000166444_111 (sequence is synthesized)
ctgtgtcctcagtgactgggctagtgtcttgcacaaggcaggtgcttggtcattgtttgtggattgaatggcttctcagcctgagcttcaggggaccttggcctgggccttggagcatac

SEQ ID NO: 533089 - DNA, 120 bp, Artificial Sequence
  ENSG00000166444_112 (sequence is synthesized)
gtgaacaacacaaaaccctgccctaaaagacttgttgaacggcatcgtaggtgagaagggggcctggcgaagccctgctccctacggttctgtgagttcctccatgcccaccctccaaag

SEQ ID NO: 533090 - DNA, 120 bp, Artificial Sequence
  ENSG00000166444_113 (sequence is synthesized)
gatgcttaggaaggtccactttgagggacacgctcagtgggggtcactttaaggaacacaaataaatcctcctttaagtctcctctgtggttcatgaaaaaggagagaaactccatcctc

SEQ ID NO: 533091 - DNA, 120 bp, Artificial Sequence
  ENSG00000166446_0 (sequence is synthesized)
cgtcgctgctgcccgcgctcgtgccgccgccgccgccgccgccgctgctgccggttacgccagccccgccgccgcccgctctgattctgcgcataggcagcccccaagcctgtcattctg

SEQ ID NO: 533092 - DNA, 120 bp, Artificial Sequence
  ENSG00000166446_1 (sequence is synthesized)
ctgattctgcgcataggcagcccccaagcctgtcattctgcaaaaacacagtttactcaacacaccacacacactcgcacacacacgcgcgcacacacacgcgcacaccggaccccgcgc

SEQ ID NO: 533093 - DNA, 120 bp, Artificial Sequence
  ENSG00000166446_2 (sequence is synthesized)
gcacacgcacggagggcgcgagcgagcagacgcgcacaccggcgagccaagttccgcagcctggcatggcttctggggacctttacgaggttgaaaggattgtagacaagaggaagaaca

SEQ ID NO: 533094 - DNA, 120 bp, Artificial Sequence
  ENSG00000166446_3 (sequence is synthesized)
agaaaggaaaatgggagtatcttatccgatggaaaggctacgggagcaccgaggacacgtgggagccggagcaccacctcttgcactgtgaggagtttattgatgaattcaatgggttgc

SEQ ID NO: 533095 - DNA, 120 bp, Artificial Sequence
  ENSG00000166446_4 (sequence is synthesized)
acatgtccaaggacaagaggatcaagtcagggaagcagtccagtacctccaagctgctgcgtgacagtcgaggcccgtcggttgagaaactgtcccacagaccttcagatcctggaaaga

SEQ ID NO: 533096 - DNA, 120 bp, Artificial Sequence
  ENSG00000166446_5 (sequence is synthesized)
gcaaggggacctcccataaacggaagcgaattaaccctcccctggccaagccaaaaaaagggtattcaggcaagccctcttcaggaggtgacagggccaccaagacggtgtcttacagga

SEQ ID NO: 533097 - DNA, 120 bp, Artificial Sequence
  ENSG00000166446_6 (sequence is synthesized)
ctacccccagtggtttgcaaataatgcccctgaaaaagtctcagaacgggatggaaaatggggacgccggctctgagaaggatgagaggcactttggaaatgggtcccatcagcctggct

SEQ ID NO: 533098 - DNA, 120 bp, Artificial Sequence
  ENSG00000166446_7 (sequence is synthesized)
tggatttgaatgatcatgttggagagcaagatatgggtgaatgtgacgtgaatcacgctacactggcggagaacgggctcggctctgctctgaccaacgggggattgaacctgcacagtc

SEQ ID NO: 533099 - DNA, 120 bp, Artificial Sequence
  ENSG00000166446_8 (sequence is synthesized)
cagtgaagaggaagctggaagcggagaaggactacgtctttgacaaaaggctcagatacagtgtccgccagaatgaaagcaactgtcggtttcgagacatcgttgtgcggaaggaagaag

SEQ ID NO: 533100 - DNA, 120 bp, Artificial Sequence
  ENSG00000166446_9 (sequence is synthesized)
ggttcacgcacatcctgctgtccagtcagacctcggataacaatgccctgacacctgagatcatgaaagaagtccggcgagcgctctgcaacgcagccacagacgacagcaaactgctgc

SEQ ID NO: 533101 - DNA, 120 bp, Artificial Sequence
  ENSG00000166446_10 (sequence is synthesized)
tcctcagcgcagtggggagcgtgttctgcagcggcctggattattcctacctaattggccggttgtccagcgaccggcgaaaggagagcactcggattgcagaagccatcagggactttg

SEQ ID NO: 533102 - DNA, 120 bp, Artificial Sequence
  ENSG00000166446_11 (sequence is synthesized)
tgaaggcctttatccagtttaagaagcctatcgtggtggccatcaatgggccggccctgggcctgggtgcctccatcctgcccctctgtgacatcgtgtgggccagtgagaaggcctggt

SEQ ID NO: 533103 - DNA, 120 bp, Artificial Sequence
  ENSG00000166446_12 (sequence is synthesized)
tccagacgccctacgccaccatccgcctcacgcctgctggctgctcctcctacaccttcccccagatcctgggcgtcgcgctggccaatgagatgctgttctgtgggcggaagctcaccg

SEQ ID NO: 533104 - DNA, 120 bp, Artificial Sequence
  ENSG00000166446_13 (sequence is synthesized)
cccaggaggcctgcagcagggggctggtgtcgcaggtcttctggcccaccacgttcagccaggaggtcatgctgcgggtcaaggagatggcatcctgcagtgccgtggtgttagaggagt

SEQ ID NO: 533105 - DNA, 120 bp, Artificial Sequence
  ENSG00000166446_14 (sequence is synthesized)
ccaaatgcctcgtgcggagcttcctgaaatcagtgctggaagacgtgaacgagaaggaatgcctcatgctcaagcagctctggagctcctccaaaggccttgactcccttttcagctacc

SEQ ID NO: 533106 - DNA, 120 bp, Artificial Sequence
  ENSG00000166446_15 (sequence is synthesized)
tgcaggacaaaatttatgaagtctgaggggccccagctcacgggcccccaacttccagctctgccctgtgtttcggaaaccagagcacagtgtctgccccggccaaggagtttgtcaagg

SEQ ID NO: 533107 - DNA, 120 bp, Artificial Sequence
  ENSG00000166446_16 (sequence is synthesized)
tgtctctttatacgtagggttgtgtccatttcctcgtgtcctttggttgctcctccttggtttgattttgtgtaatggatggaaaacgcagcatacttggcctcccccacctccctgccc

SEQ ID NO: 533108 - DNA, 120 bp, Artificial Sequence
  ENSG00000166446_17 (sequence is synthesized)
ttcctggccagagagctgtccaaggctgtatcttcccagggctccgccaagcaccgctgtcctttccccacttgctgaaatgcaccatgacggtccaggaaggggaagaccactttcaca

SEQ ID NO: 533109 - DNA, 120 bp, Artificial Sequence
  ENSG00000166446_18 (sequence is synthesized)
ttcttctgactcaggctgtgtctacacagtgcctctgacttggagacttggccatcatggctctctctggttgtatttagatcgggtgtcagaggacgaccaatcttagggaatttccag

SEQ ID NO: 533110 - DNA, 120 bp, Artificial Sequence
  ENSG00000166446_19 (sequence is synthesized)
accaatgagcaaaatgattgtgcacacctggcctcagtctcctttccgacgcaaatctgtgtgactattagggcttggtcttaaaacccaattgagtgatttgcaaacccagatattgta

SEQ ID NO: 533111 - DNA, 120 bp, Artificial Sequence
  ENSG00000166446_20 (sequence is synthesized)
catttagaaatgttttgttaaatatatatttttaaaacaatgtaagtggaaattctgataatttatgtgtattatatgtaaagctagttttgcaaaaacaaactactagggaaatgtttt

SEQ ID NO: 533112 - DNA, 120 bp, Artificial Sequence
  ENSG00000166446_21 (sequence is synthesized)
ttctttccttggacttgttttatttatttatttttgtttatatattgtgatgtctgttgttcacacagatactattttcatactaccctggaccaaatcccacacaaggttcatgccgtt

SEQ ID NO: 533113 - DNA, 120 bp, Artificial Sequence
  ENSG00000166446_22 (sequence is synthesized)
tggtgcattctagcaatgaaccatgtagaaataaagtttagagagatgaaaacagaaggatttctgtggacaaaaggaatagcgctgcacctctgtgtaaaacggttctcagctgtaata

SEQ ID NO: 533114 - DNA, 120 bp, Artificial Sequence
  ENSG00000166446_23 (sequence is synthesized)
atagaatactagttccttaggtttgtccttaggagacatcttgggagagttttttcttccctctgctgtctttaaggagttaaagggccctcttagcctgaatgatcctgaaacagaccc

SEQ ID NO: 533115 - DNA, 120 bp, Artificial Sequence
  ENSG00000166446_24 (sequence is synthesized)
agtcccaaattgcgtgatgttgggcaggagtggggataggccctacctgagaatagcatactgtctagaataagacttctttctttggggcaaatgactgaacttggatcctgcagtctg

SEQ ID NO: 533116 - DNA, 120 bp, Artificial Sequence
  ENSG00000166446_25 (sequence is synthesized)
ttgcttccatgtgatcagtgatttctggtattggccagggggatggggaagagttcccactctgctgagctgtctggaggtctgaatcttttccctccagaagctgaaatgactcatctg

SEQ ID NO: 533117 - DNA, 120 bp, Artificial Sequence
  ENSG00000166446_26 (sequence is synthesized)
ttttctagtttttttatgtacatagggagcaatgaccaggaatgagatctccttgcccctgtgcccctgggctgcaaggggactccagcagctgtgttagaccatcagattcaagtccct

SEQ ID NO: 533118 - DNA, 120 bp, Artificial Sequence
  ENSG00000166446_27 (sequence is synthesized)
ggattaactacagagaaggagggattgggggttgtggttttgagtggtgaggagaaagttcaggaaaacctgaagttgagagcagacaaatggaagggatgtgttctgcgtgaggtttaa

SEQ ID NO: 533119 - DNA, 120 bp, Artificial Sequence
  ENSG00000166446_28 (sequence is synthesized)
accatgggtcaagcacccagaaaaagctagattctcagattctcaggatggagggatttttttccgtttctatcacagcccctgcgtattcctggaggcccttggccctccccttcttcc

SEQ ID NO: 533120 - DNA, 120 bp, Artificial Sequence
  ENSG00000166446_29 (sequence is synthesized)
cctttcctgttgggcaccagcctttcttggcccttctttgaagagagtggaataaggcagcaagaagtgggcacagcttatggaggtgaggcaggcttagaagagagagttctggtgaca

SEQ ID NO: 533121 - DNA, 120 bp, Artificial Sequence
  ENSG00000166446_30 (sequence is synthesized)
gttctctaactctctgtggtcctttatcttttcctggcaatcaggtgcactgggcagggcaggtggaatgtattcgtggccctgagctttgagtttcaaagaacacgttgatagtctaca

SEQ ID NO: 533122 - DNA, 120 bp, Artificial Sequence
  ENSG00000166446_31 (sequence is synthesized)
ccagatctagagacatggtcctttaagcagtgaccctcaagttaatctggactgctggtccttctgatgaccttggttccctccctggaaagcgtgtctcctttaagagttcatgagggt

SEQ ID NO: 533123 - DNA, 120 bp, Artificial Sequence
  ENSG00000166446_32 (sequence is synthesized)
caggaaggaggggaaacctctccttcagccagaggaggatggaattaaagtcctgtgcaccctcccctttgtccatgtaggatcctgtaaggacttcggacctgtcctacagggagttac

SEQ ID NO: 533124 - DNA, 120 bp, Artificial Sequence
  ENSG00000166446_33 (sequence is synthesized)
tatagggagacacctgcttttgcccaaatgcctgttgtcacagctctatctggatcttatctcctcctttgagaaagcaaatgtgagctttccaaaacccttagatgaccctggttctta

SEQ ID NO: 533125 - DNA, 120 bp, Artificial Sequence
  ENSG00000166446_34 (sequence is synthesized)
actgctaaattttcattagaaagagccccctcttttctgttgaacttctgattgggcgcagttatattcagcatcggttgaagtggggtcaggattctccttggacatggaaggggatgt

SEQ ID NO: 533126 - DNA, 120 bp, Artificial Sequence
  ENSG00000166446_35 (sequence is synthesized)
ttagaaattcctttagatcagtgtccaccttcattccctgcttgaaagaactagaaatgcttcagctttggatgtactatcaaatccaaacttctaaacatttcaaggatctctgaagat

SEQ ID NO: 533127 - DNA, 120 bp, Artificial Sequence
  ENSG00000166446_36 (sequence is synthesized)
taaggtaggaatgtgaaaccatttctaaggtggaaatcttgctgttaagtcacaggtcctgggtgtaacgggggtggtgaaagtctgtattttggttgtttccatacagtcagttccacc

SEQ ID NO: 533128 - DNA, 120 bp, Artificial Sequence
  ENSG00000166446_37 (sequence is synthesized)
aattgggtgaaagcaggtgaaatctttttgctgcagggtggactgaatttttcactttctgggtagttgttttgatcatgtgtaggcgaattccaggtaacttacagcaaatagatttgg

SEQ ID NO: 533129 - DNA, 120 bp, Artificial Sequence
  ENSG00000166446_38 (sequence is synthesized)
gatggaaaataccagacctctggttgtgtcagggtttatcctaatagctttcctgagacagagctcagactttcatttttgatcttccaccccagggccccctctctgtctatgggatcc

SEQ ID NO: 533130 - DNA, 120 bp, Artificial Sequence
  ENSG00000166446_39 (sequence is synthesized)
tttctcccctctctctaccattttcccgtaccttcccccataagtcactcccaagagcctgggcaggtctttgaggaattgcggctcattttggcagccccgtcctgcaattacctttgg

SEQ ID NO: 533131 - DNA, 120 bp, Artificial Sequence
  ENSG00000166446_40 (sequence is synthesized)
gtttgaaagaatagctgtgggtgggcaattgaggacacctctttagtcagggacctttctagcaatccactccctcccatcctgttagccatgcagtggaactctccttccctctctgcc

SEQ ID NO: 533132 - DNA, 120 bp, Artificial Sequence
  ENSG00000166446_41 (sequence is synthesized)
ccaaccccggtgatggctcactctcagcatcttatgggaccatctgagttaacaaccctgttccaagaagactttgtgcagaacttttgttagggtggtcataccttctcaccaccattt

SEQ ID NO: 533133 - DNA, 120 bp, Artificial Sequence
  ENSG00000166446_42 (sequence is synthesized)
ggaagacacagcctaatgctgatgtacttaatgtgccccttccggcatagaaataatgtctgggtaacagccatcaaaatcactaagaatgacattggatagctatgagaaagtagtaga

SEQ ID NO: 533134 - DNA, 120 bp, Artificial Sequence
  ENSG00000166446_43 (sequence is synthesized)
gaattgatttaaaatatcattcttgtttggtatagattaaactaggaaatgttctctctgaagcatgaaaatgtttttcccatgtgaagtttagtacaaggatggaaaaataataatcac

SEQ ID NO: 533135 - DNA, 120 bp, Artificial Sequence
  ENSG00000166446_44 (sequence is synthesized)
agtagactttgaacaatgcaactgtatctctgaatatccacatttaaaaatagccttcactgaatgctgaattgcatttcccattaatttttggttttaaaaattttgtaaacttttttt

SEQ ID NO: 533136 - DNA, 120 bp, Artificial Sequence
  ENSG00000166446_45 (sequence is synthesized)
ttatttggaatttagtcacatccattaaattttccaatctagtttctgtggaaattttttaacagagagaaacaaatagaaacatcttcaaatcttcctaagtgaatatttaaaatgcag

SEQ ID NO: 533137 - DNA, 120 bp, Artificial Sequence
  ENSG00000166446_46 (sequence is synthesized)
aattgcttatcttctgtttttctgtattcagacacttatatctgttgtatatattagtttagacactctcactaatatacacagtatttaagactctaaatgagatttcttaagtatttt

SEQ ID NO: 533138 - DNA, 120 bp, Artificial Sequence
  ENSG00000166446_47 (sequence is synthesized)
attttattctctgtaaatggttttgtataatctttaaacatctacactttgcctttgtagatatttaagggaaaccatttggggttgtcttgcatgtatatttttgttgtagataagtgt

SEQ ID NO: 533139 - DNA, 120 bp, Artificial Sequence
  ENSG00000166446_48 (sequence is synthesized)
tgcttagttatttctgcaaattttggttgaaatgcttacagactttaatacagtatatattttcaaaatataaacttttatatttctgtgataagttaggatatgcgttttaggcaatat

SEQ ID NO: 533140 - DNA, 120 bp, Artificial Sequence
  ENSG00000166446_49 (sequence is synthesized)
ttttcattaatatcacttgttcttttgaaaaatagcatactggtttggtgccaattttttcattagaatataatgctcttatattgttggagagcaggttaatcttttttcgaagtaatt

SEQ ID NO: 533141 - DNA, 120 bp, Artificial Sequence
  ENSG00000166446_50 (sequence is synthesized)
gcgtttgaagtataatttcaaaatgtattgaatttgtgaataagccttaccattaggatcagtaaatttttcaactttgcaactacataagtagtttaagatctccccgtaaattctcac

SEQ ID NO: 533142 - DNA, 120 bp, Artificial Sequence
  ENSG00000166446_51 (sequence is synthesized)
tgtgtggcagttgatggagtttgtgaacagagccttaagcttgttgcaaaaaaatttaaaaagggtaatacgggttgtttcctccatgcaacgtaagccatgctgatggactgaatgcag

SEQ ID NO: 533143 - DNA, 120 bp, Artificial Sequence
  ENSG00000166446_52 (sequence is synthesized)
tctgtaattcatggctaatccgaagagtttgattgagttgatggcggcagggaccagatagacaccttggtgattgtctttggccataagaatagaccaaggataggttttccagagaca

SEQ ID NO: 533144 - DNA, 120 bp, Artificial Sequence
  ENSG00000166446_53 (sequence is synthesized)
ccttcatactgtaaacatggtttagacacggtcatagggaaggctgctggtccatcatttgttctgaacaaatggcatttcctgctcctgaccctggcagttggccccagattccttgtc

SEQ ID NO: 533145 - DNA, 120 bp, Artificial Sequence
  ENSG00000166446_54 (sequence is synthesized)
gatgacttggaaacgtccattctgggtaaggtcagcactccctgagagatgttaacaaagtttacctatgagtcttactgtgtagacaatctgaagtcaattttagttacacaatcagca

SEQ ID NO: 533146 - DNA, 120 bp, Artificial Sequence
  ENSG00000166446_55 (sequence is synthesized)
ttcccatgtgtcctcagtgtcttatcaatgaactatgtgtatcaagccatactaaactggagtttagcaggacaaaggcaaactaaatgtagaacataacatatcagctgaatatgtcta

SEQ ID NO: 533147 - DNA, 120 bp, Artificial Sequence
  ENSG00000166446_56 (sequence is synthesized)
tccaggactgtttttctagaacataaatcatggagctccttgacagtgtatccactgtttttggggtttaataaaaccaactagaatttagacttaaaaagaaattattattccttttgg

SEQ ID NO: 533148 - DNA, 120 bp, Artificial Sequence
  ENSG00000166446_57 (sequence is synthesized)
ttgtccacataaagtagtccagggctatcatatggctaaaatcaagttatttggttcatctctggtatgtatttataaagtcaacttatcagccattaagatggagatttgctttaaatt

SEQ ID NO: 533149 - DNA, 120 bp, Artificial Sequence
  ENSG00000166446_58 (sequence is synthesized)
tttgcagtgtgtgtggcagtcagaaaaacccatatctagttttcaacttcacctctggtgtttttatggcttaaccttatatcattgatccaacatctagcctgatgctggagctcttat

SEQ ID NO: 533150 - DNA, 120 bp, Artificial Sequence
  ENSG00000166446_59 (sequence is synthesized)
ttctagcctgatgctggagctcttatatctagcctgatgctggagctcttgaagctgactcttggaagtttggagggtgtagagtttcccatctagtatttaatttgtccctgtgccatt

SEQ ID NO: 533151 - DNA, 120 bp, Artificial Sequence
  ENSG00000166446_60 (sequence is synthesized)
agtcccagcttgaagtcatttgccagtgtcgatgttgacaggattgtgacaatattgcctttcataaaaccgagaaccaaagaattccattattctaacaaagcctgagtttcatagatt

SEQ ID NO: 533152 - DNA, 120 bp, Artificial Sequence
  ENSG00000166446_61 (sequence is synthesized)
gtgggcacatctagacagatatgtgcatgcttgatggtgcagagaaactgctgacttccaccaacctcatgctccccctggctggccatacagagggattcgttgtcatattgaaaaggc

SEQ ID NO: 533153 - DNA, 120 bp, Artificial Sequence
  ENSG00000166446_62 (sequence is synthesized)
tctgaaagatgagtttctaattgaagctcactatctcaggttggtgtttctactgtgtagtcccaagcctgtatccatatcataaaagtggaggcctggtactcctccaggttatctggc

SEQ ID NO: 533154 - DNA, 120 bp, Artificial Sequence
  ENSG00000166446_63 (sequence is synthesized)
cagtgtagactcctccatctgaatatgaacctccagggtaagaatttttcagacatgtctatactgaacagtaggatcctgcactttccaaatgtctgcctccttttgttcttcattgac

SEQ ID NO: 533155 - DNA, 120 bp, Artificial Sequence
  ENSG00000166446_64 (sequence is synthesized)
ccattctaattcctgttaggtgtgagaagaattgtcttcagttctctctccattctcattcatgatggaatcattgatccattgaccagttgagaaatgattgatgctgaagaagtggta

SEQ ID NO: 533156 - DNA, 120 bp, Artificial Sequence
  ENSG00000166446_65 (sequence is synthesized)
ttctattggtaaggcttattaccaaacttccgataatgaagcaggctaccaaaaacttatccagcccaccctaggagtgtttggatttgatcatggatgtagcatacaccaaaatccacc

SEQ ID NO: 533157 - DNA, 120 bp, Artificial Sequence
  ENSG00000166446_66 (sequence is synthesized)
gagacctttgcaaaattaggctacttgttttattttgccagattatcatgggagagtctttaactagttctgaatatttgtaagtctgagtacttcatagaattataaagaaggtacagc

SEQ ID NO: 533158 - DNA, 120 bp, Artificial Sequence
  ENSG00000166446_67 (sequence is synthesized)
tgaccccttctcaccatgttgtaaatatttactgagactgggtgcagtactgagggataataatcttctgatttatcaaatcctgactgtctagagcaaattgtacactctctttgtgaa

SEQ ID NO: 533159 - DNA, 120 bp, Artificial Sequence
  ENSG00000166446_68 (sequence is synthesized)
tggtcctgtaacgtgtatgaacacatttctgggtgccttagaagttgtatttttcatgtgtgctaatatgcagtatttatacattgtgagaagctgctttgaataaaaaggttgaaactt

SEQ ID NO: 533160 - DNA, 120 bp, Artificial Sequence
  ENSG00000166446_69 (sequence is synthesized)
tttgctcatcattttacatacattatcccatttgatctttatgaccgtgtaatgataccctctcatcttatggatgaagaccatggggagagggactcactgaactgatcgtggacacag

SEQ ID NO: 533161 - DNA, 120 bp, Artificial Sequence
  ENSG00000166446_70 (sequence is synthesized)
acttagccaaggggcagacccagaatccaaacatcacatcttgggcttttccagctaaactttgttgtcatcagcatgtcatatttgttggccgcagatataattcactcagttaatgta

SEQ ID NO: 533162 - DNA, 120 bp, Artificial Sequence
  ENSG00000166448_0 (sequence is synthesized)
cggcgcgcagcgacagagcgtcccccggcgaggacgagcgagcacggcgcccgcacctccccgcaccgcccgcgctgcgcgcccggaggagcgaccgccgcagttctcgagctccagctg

SEQ ID NO: 533163 - DNA, 120 bp, Artificial Sequence
  ENSG00000166448_1 (sequence is synthesized)
tccagctgcattccctccgcgtccgccccacgcttctcccgctccgggccccgcaatggcccaggcagtgtggtcgcgcctcggccgcatcctctggcttgcctgcctcctgccctgggc

SEQ ID NO: 533164 - DNA, 120 bp, Artificial Sequence
  ENSG00000166448_2 (sequence is synthesized)
cccggcaggggtggccgcaggcctgtatgaactcaatctcaccaccgatagccctgccaccacgggagcggtggtgaccatctcggccagcctggtggccaaggacaacggcagcctggc

SEQ ID NO: 533165 - DNA, 120 bp, Artificial Sequence
  ENSG00000166448_3 (sequence is synthesized)
cctgcccgctgacgcccacctctaccgcttccactggatccacaccccgctggtgcttactggcaagatggagaagggtctcagctccaccatccgtgtggtcggccacgtgcccgggga

SEQ ID NO: 533166 - DNA, 120 bp, Artificial Sequence
  ENSG00000166448_4 (sequence is synthesized)
attcccggtctctgtctgggtcactgccgctgactgctggatgtgccagcctgtggccaggggctttgtggtcctccccatcacagagttcctcgtgggggaccttgttgtcacccagaa

SEQ ID NO: 533167 - DNA, 120 bp, Artificial Sequence
  ENSG00000166448_5 (sequence is synthesized)
cacttccctaccctggcccagctcctatctcactaagaccgtcctgaaagtctccttcctcctccacgacccgagcaacttcctcaagaccgccttgtttctctacagctgggacttcgg

SEQ ID NO: 533168 - DNA, 120 bp, Artificial Sequence
  ENSG00000166448_6 (sequence is synthesized)
ggacgggacccagatggtgactgaagactccgtggtctattataactattccatcatcgggaccttcaccgtgaagctcaaagtggtggcggagtgggaagaggtggagccggatgccac

SEQ ID NO: 533169 - DNA, 120 bp, Artificial Sequence
  ENSG00000166448_7 (sequence is synthesized)
gagggctgtgaagcagaagaccggggacttctccgcctcgctgaagctgcaggaaacccttcgaggcatccaagtgttggggcccaccctaattcagaccttccaaaagatgaccgtgac

SEQ ID NO: 533170 - DNA, 120 bp, Artificial Sequence
  ENSG00000166448_8 (sequence is synthesized)
cttgaacttcctggggagccctcctctgactgtgtgctggcgtctcaagcctgagtgcctcccgctggaggaaggggagtgccaccctgtgtccgtggccagcacagcgtacaacctgac

SEQ ID NO: 533171 - DNA, 120 bp, Artificial Sequence
  ENSG00000166448_9 (sequence is synthesized)
ccacaccttcagggaccctggggactactgcttcagcatccgggccgagaatatcatcagcaagacacatcagtaccacaagatccaggtgtggccctccagaatccagccggctgtctt

SEQ ID NO: 533172 - DNA, 120 bp, Artificial Sequence
  ENSG00000166448_10 (sequence is synthesized)
tgctttcccatgtgctacacttatcactgtgatgttggccttcatcatgtacatgaccctgcggaatgccactcagcaaaaggacatggtggagaacccggagccaccctctggggtcag

SEQ ID NO: 533173 - DNA, 120 bp, Artificial Sequence
  ENSG00000166448_11 (sequence is synthesized)
gtgctgctgccagatgtgctgtgggcctttcttgctggagactccatctgagtacctggaaattgttcgtgagaaccacgggctgctcccgcccctctataagtctgtcaaaacttacac

SEQ ID NO: 533174 - DNA, 120 bp, Artificial Sequence
  ENSG00000166448_12 (sequence is synthesized)
cctccccaccccatctcagtgttaactgactgctgacttggagtttccagcagggtggtgtgcaccactgaccaggaggggttcatttgcgtggggctgttggcctggatcatccatcca

SEQ ID NO: 533175 - DNA, 120 bp, Artificial Sequence
  ENSG00000166448_13 (sequence is synthesized)
tctgtacagttcagccactgccacaagcccctccctctctgtcacccctgaccccagccattcacccatctgtacagtccagccactgacataagccccactcggttaccacccccttga

SEQ ID NO: 533176 - DNA, 120 bp, Artificial Sequence
  ENSG00000166448_14 (sequence is synthesized)
ccccctacctttgaagaggcttcgtgcaggactttgatgcttggggtgttccgtgttgactcccaggtgggcctggctgcccactgcccattcctctcatattggcacatctgctgtcca

SEQ ID NO: 533177 - DNA, 120 bp, Artificial Sequence
  ENSG00000166448_15 (sequence is synthesized)
ttgggggttctcagtttcctcccccagacagccctacctgtgccagagagctagaaagaaggtcataaagggttaaaaatccataactaaaggttgtacacatagatgggcacactcaca

SEQ ID NO: 533178 - DNA, 120 bp, Artificial Sequence
  ENSG00000166448_16 (sequence is synthesized)
acacacacacacacacacacacagaaatataaacacatgcgtcacatgggcatttcagatgatcagctctgtatctggttaagtcggttgctgggatgcaccctgcactagagctgaaag

SEQ ID NO: 533179 - DNA, 120 bp, Artificial Sequence
  ENSG00000166448_17 (sequence is synthesized)
aagtcggttgctgggatgcaccctgcactagagctgaaaggaaatttgacctccaagcagccctgacaggttctgggcccgggccctccctttgtgctttgtctctgcagttcttgcgcc

SEQ ID NO: 533180 - DNA, 120 bp, Artificial Sequence
  ENSG00000166448_18 (sequence is synthesized)
ctttataaggccatcctagtccctgctggctggcagggggctggatggggggcaggactaatactgagtgattgcagagtgctttataaatatcaccttattttatcgaaacccatctgt

SEQ ID NO: 533181 - DNA, 85 bp, Artificial Sequence
  ENSG00000166448_19 (sequence is synthesized)
gctttataaatatcaccttattttatcgaaacccatctgtgaaactttcactgaggaaaaggccttgcagcggtagaagaggttg

SEQ ID NO: 533182 - DNA, 120 bp, Artificial Sequence
  ENSG00000166448_20 (sequence is synthesized)
tcagcagggacttgggttccctgtgtgtgaggggggcattcttgcctgccagctgctcccgaggtggccttgagaaggaagaagcaggatgacagagcctgagcagcggaaccagcctgc

SEQ ID NO: 533183 - DNA, 120 bp, Artificial Sequence
  ENSG00000166448_21 (sequence is synthesized)
accctcccttctggcccagcgacctgggctgtggctgagacaataatgaggccagaagtagccggagcctgtcaggaagggcaggggaggactgtggggtctgggctctgtcgctgtaac

SEQ ID NO: 533184 - DNA, 120 bp, Artificial Sequence
  ENSG00000166448_22 (sequence is synthesized)
catctgctcccaggctgtgtgcagaaaatggcatttacactattgtgcagctcattctcatgaaatactgccattgttgctaaataaagcttgtgtgctctgaatatagccaagcataga

SEQ ID NO: 533185 - DNA, 120 bp, Artificial Sequence
  ENSG00000166448_23 (sequence is synthesized)
ttttaaatttttttttttgtagagaatgggtgtcgctgtgttgttcaggctgatctaaaactcctgggctcaagtgaccctctggcttcaaagcgctgtgattacaggtgtgagctgact

SEQ ID NO: 533186 - DNA, 120 bp, Artificial Sequence
  ENSG00000166448_24 (sequence is synthesized)
gggcccggcctcaaatgcctttataatttaagaaatggctctgaaaaaaaaggaaatacgtgatgtgggccaaagcagcgaacgtgtgaggtgggcctgaggaaaggtcggagctggagt

SEQ ID NO: 533187 - DNA, 120 bp, Artificial Sequence
  ENSG00000166448_25 (sequence is synthesized)
cccccacagggacaggtgatgttgctttgaagtgaatgagatgcgtctgaaaaaaataatctcagagttgcctgggcactagaaggggcttcccttgccccctcgattcctgcttctact

SEQ ID NO: 533188 - DNA, 120 bp, Artificial Sequence
  ENSG00000166448_26 (sequence is synthesized)
ccccgggctggccctgccctggaaaccacacgagggtggcccacgcatccgtcagatgtctggggaccatgtacctgctaagggaggggaggacgaggcagggacatggggatgtatcag

SEQ ID NO: 533189 - DNA, 120 bp, Artificial Sequence
  ENSG00000166448_27 (sequence is synthesized)
ggtcagtcatcgtgccacaacccccagcccccagggaacacgggatgggcagcatttttactttaaaatgttgcctcatctagaggggttttccaccctgttggtgctggctttggggag

SEQ ID NO: 533190 - DNA, 90 bp, Artificial Sequence
  ENSG00000166448_28 (sequence is synthesized)
tagaggggttttccaccctgttggtgctggctttggggagatatgattttatttgatttatgtatttatttatttgagatggaagtggcg

SEQ ID NO: 533191 - DNA, 78 bp, Artificial Sequence
  ENSG00000166448_29 (sequence is synthesized)
atctcccaggttcaagtattcgccaccacacccggctaattttgtattgttagtagagacggggtttcgccatgttgg

SEQ ID NO: 533192 - DNA, 86 bp, Artificial Sequence
  ENSG00000166448_30 (sequence is synthesized)
accgagatgcaattttagagcccaggaggccaggctgctatttcttccaggagtgatttcccaaaatggacctggagctgacaggt

SEQ ID NO: 533193 - DNA, 120 bp, Artificial Sequence
  ENSG00000166448_31 (sequence is synthesized)
ccaggagtgatttcccaaaatggacctggagctgacaggttcctggggggacttgtggggggaccttgtgcccactcggtcgtgcatctactgtccccacatccccatcgccagaaggcc

SEQ ID NO: 533194 - DNA, 120 bp, Artificial Sequence
  ENSG00000166448_32 (sequence is synthesized)
ctgggacagagcgagactctgtctcaagattaaaaaaaaaaaaaaaagaaaagaggaagcagcagcagcagcagcagcaagaggaatttcgaggcctttcgcccaacgcctggcgcacct

SEQ ID NO: 533195 - DNA, 120 bp, Artificial Sequence
  ENSG00000166450_0 (sequence is synthesized)
actccgcccccagccggactctcaggccccttgcttctcgcgagcggccgtccgagcaccagcctcgccgccgcagagacgctcgccacgccggtgccggagccggagcggggagccagg

SEQ ID NO: 533196 - DNA, 120 bp, Artificial Sequence
  ENSG00000166450_1 (sequence is synthesized)
ctgcgtgcgaccagccgcagagcagagagcgcccggggcgggggccgcagacggacaggggctctgggcggccggggagcatgcccgcgcggctacgctgaatggcgcctcctctgcgac

SEQ ID NO: 533197 - DNA, 120 bp, Artificial Sequence
  ENSG00000166450_2 (sequence is synthesized)
ccctcgcccggctgcgaccgccggggatgctgctccgcgcgctcctgctcctgctgctgctcagtcctttgccaggagtgtggtgctttagcgaactgtcttttgtaaaagaaccacagg

SEQ ID NO: 533198 - DNA, 120 bp, Artificial Sequence
  ENSG00000166450_3 (sequence is synthesized)
atgtaactgtcacaagaaaggacccagtcgttttagattgccaggctcacggagaagttcctattaaggtcacatggttgaaaaatggagcaaaaatgtctgaaaataaacggatcgagg

SEQ ID NO: 533199 - DNA, 120 bp, Artificial Sequence
  ENSG00000166450_4 (sequence is synthesized)
ttctttctaacggctctttatacatcagtgaggtggaaggcaggcgaggagagcagtccgatgaaggattttatcagtgcttggcaatgaacaaatatggagccattcttagtcaaaaag

SEQ ID NO: 533200 - DNA, 120 bp, Artificial Sequence
  ENSG00000166450_5 (sequence is synthesized)
ctcatcttgccttatcaactatttctgcatttgaagtccagccaatttccactgaggtccacgaaggtggagttgctcgatttgcatgcaagatttcatcccaccctcctgcagtcataa

SEQ ID NO: 533201 - DNA, 120 bp, Artificial Sequence
  ENSG00000166450_6 (sequence is synthesized)
catgggagttcaatcggacaactctacctatgactatggacaggataactgccctaccaacaggagtattgcagatctatgatgtcagccaaagggattctggaaattatcgttgtattg

SEQ ID NO: 533202 - DNA, 120 bp, Artificial Sequence
  ENSG00000166450_7 (sequence is synthesized)
ctgccactgtagcccaccgacgtaaaagtatggaggcctcgctaactgtgattccagctaaggagtcaaaatccttccacacaccaacaattatagcaggtccacagaacataacaacat

SEQ ID NO: 533203 - DNA, 120 bp, Artificial Sequence
  ENSG00000166450_8 (sequence is synthesized)
ctcttcatcagactgtagttttggaatgcatggccacaggaaatcccaaaccaatcatttcttggagccgccttgatcacaaatccattgatgtctttaatactcgggtacttggaaatg

SEQ ID NO: 533204 - DNA, 120 bp, Artificial Sequence
  ENSG00000166450_9 (sequence is synthesized)
gtaatctcatgatatctgatgtcaggctacaacatgctggagtatatgtttgtcgggccactacccctggcacacgcaactttacagttgctatggcaactttaactgtattagctcctc

SEQ ID NO: 533205 - DNA, 120 bp, Artificial Sequence
  ENSG00000166450_10 (sequence is synthesized)
cttcatttgttgaatggccagaaagtttaacaaggcctcgagctggcactgctcgatttgtgtgtcaggcagaaggaatcccctctcccaagatgtcatggttgaaaaatggaaggaaga

SEQ ID NO: 533206 - DNA, 120 bp, Artificial Sequence
  ENSG00000166450_11 (sequence is synthesized)
tacattcgaatggtagaattaaaatgtacaacagtaaattggtaattaaccagattattcctgaagatgatgctatttatcagtgcatggctgagaatagccaaggatctattttatcta

SEQ ID NO: 533207 - DNA, 120 bp, Artificial Sequence
  ENSG00000166450_12 (sequence is synthesized)
gagccagactgactgtagtgatgtcagaagacagacccagtgctccctataatgtacatgctgaaaccatgtcaagctcagccattcttttagcctgggagaggccactttataattcag

SEQ ID NO: 533208 - DNA, 120 bp, Artificial Sequence
  ENSG00000166450_13 (sequence is synthesized)
acaaagtcattgcctattctgtacactacatgaaagcagaaggtttaaataatgaagagtatcaagtagtcatcggaaatgacacaactcattatattattgatgacttagagcctgcca

SEQ ID NO: 533209 - DNA, 120 bp, Artificial Sequence
  ENSG00000166450_14 (sequence is synthesized)
gcaattatactttctacattgtagcatatatgccaatgggagccagccagatgtctgaccatgtgacacagaatactctagaggatgttcccctgagacctcctgaaattagtttgacaa

SEQ ID NO: 533210 - DNA, 120 bp, Artificial Sequence
  ENSG00000166450_15 (sequence is synthesized)
gtcgaagtcccactgatattctcatctcctggctgccaatcccagccaaatatcggcggggccaagtggtgctgtatcgcttgtctttccgcctaagtactgagaattcaatccaagttc

SEQ ID NO: 533211 - DNA, 120 bp, Artificial Sequence
  ENSG00000166450_16 (sequence is synthesized)
tggagctcccggggaccacgcatgagtaccttttggaaggcctgaaacctgacagtgtctacctggttcggattactgctgccaccagagtggggctgggagagtcatcagtatggactt

SEQ ID NO: 533212 - DNA, 120 bp, Artificial Sequence
  ENSG00000166450_17 (sequence is synthesized)
cacataggacgcccaaagctacaagcgtgaaagcccctaagtctccagagttgcatttggagcctctgaactgtaccaccatttctgtgaggtggcagcaagatgtagaggacacagctg

SEQ ID NO: 533213 - DNA, 120 bp, Artificial Sequence
  ENSG00000166450_18 (sequence is synthesized)
ctattcagggctacaagctgtactacaaggaagaagggcagcaggagaatgggcccattttcttggataccaaggacctactctatactctcagtggcttagaccccagaagaaaatatc

SEQ ID NO: 533214 - DNA, 120 bp, Artificial Sequence
  ENSG00000166450_19 (sequence is synthesized)
atgtgagactcctggcttacaacaacatagacgatggctatcaggcagatcagactgtcagcactccaggatgcgtgtctgttcgtgatcgcatggtccctcctccaccaccaccccacc

SEQ ID NO: 533215 - DNA, 120 bp, Artificial Sequence
  ENSG00000166450_20 (sequence is synthesized)
atctctatgcgaaggctaacacctcatcttccatcttcctgcactggaggaggcctgcattcaccgctgcacaaatcattaactacaccatccgctgtaatcctgttggcctgcagaatg

SEQ ID NO: 533216 - DNA, 120 bp, Artificial Sequence
  ENSG00000166450_21 (sequence is synthesized)
cttctttggttctgtaccttcaaacatcagaaactcacatgttggttcaaggtctagaaccaaacaccaaatacgaatttgccgttcgattacatgtggatcagctttccagtccttgga

SEQ ID NO: 533217 - DNA, 120 bp, Artificial Sequence
  ENSG00000166450_22 (sequence is synthesized)
gccctgtagtctaccattctactcttccagaagcaccagcaggcccaccagttggagtaaaagtgacattaatagaggatgacactgccctggtttcttggaaaccccctgatggcccag

SEQ ID NO: 533218 - DNA, 120 bp, Artificial Sequence
  ENSG00000166450_23 (sequence is synthesized)
aaacagttgtgacccgctatactatcttatatgcatctaggaaggcctggattgcaggagagtggcaggtcttacaccgtgaaggggcaataaccatggctttgctagaaaacttggtag

SEQ ID NO: 533219 - DNA, 120 bp, Artificial Sequence
  ENSG00000166450_24 (sequence is synthesized)
caggaaatgtgtacattgtcaagatatctgcatccaatgaggtgggagaaggacccttttcaaattctgtggagctggcagtacttccaaaggaaacctctgaatcaaatcagaggccca

SEQ ID NO: 533220 - DNA, 120 bp, Artificial Sequence
  ENSG00000166450_25 (sequence is synthesized)
agcgtttagattctgctgatgccaaagtttattcaggatattaccatctggaccaaaaatcaatgactggcattgctgtaggtgttggcatagccttgacctgcatcctcatctgtgttc

SEQ ID NO: 533221 - DNA, 120 bp, Artificial Sequence
  ENSG00000166450_26 (sequence is synthesized)
tcatcttgatataccgaagtaaagccaggaaatcatctgcttccaagacggcacagaatggaactcaacagttacctcgtaccagtgcctccttagctagtggaaatgaggtaggaaaga

SEQ ID NO: 533222 - DNA, 120 bp, Artificial Sequence
  ENSG00000166450_27 (sequence is synthesized)
acctggaaggagctgtaggaaatgaagaatctttaatgccaatgatcatgccaaacagcttcattgatgcaaagggaggaactgacctgataattaatagctatggtcctataattaaaa

SEQ ID NO: 533223 - DNA, 120 bp, Artificial Sequence
  ENSG00000166450_28 (sequence is synthesized)
acaactctaagaaaaagtggttttttttccaagactcaaagaagatacaagttgagcagcctcaaagaagatttactccagcggtctgcttttaccagccaggcaccactgtattaatca

SEQ ID NO: 533224 - DNA, 120 bp, Artificial Sequence
  ENSG00000166450_29 (sequence is synthesized)
gtgatgaagactcccctagctccccaggtcagacaaccagcttctcaagaccctttggtgttgcagctgatacagaacattcagcaaatagtgaaggcagccatgagactggggattctg

SEQ ID NO: 533225 - DNA, 120 bp, Artificial Sequence
  ENSG00000166450_30 (sequence is synthesized)
ggcggttttctcatgagtccaacgatgagatacatctgtcctcagttataagtaccacaccccccaacctctgattctttcactggcagtgattcaggtggagattccgcattgaggaag

SEQ ID NO: 533226 - DNA, 120 bp, Artificial Sequence
  ENSG00000166450_31 (sequence is synthesized)
tgtgaagaccctgctgtgtcatctgttagtgagcagacttcctccttagttctgcagccgccatctgccatgctatgctttgataaaaatgattttccaatctagacggccatgctcagg

SEQ ID NO: 533227 - DNA, 120 bp, Artificial Sequence
  ENSG00000166450_32 (sequence is synthesized)
tattctcaccattaaatctgttcgaaggacaatgaacagggaaccaaagccttttgtgaaaatcttaatatctttatggggtattttagctttttttgaatgtgttttgttttttatttt

SEQ ID NO: 533228 - DNA, 120 bp, Artificial Sequence
  ENSG00000166450_33 (sequence is synthesized)
taaacttgtgtaatttgaatgtttcattgtcagcaatgtgaaagaacggtcgagatgtttgactggattataaaatatatcactggagcaaagggaagacttttgaaagcccctttgctg

SEQ ID NO: 533229 - DNA, 120 bp, Artificial Sequence
  ENSG00000166450_34 (sequence is synthesized)
actatctacctcagtttgcctcccggcaaactctgaagacaactttgttacctcatttgttgttatagtttatctcagctacataaccaatgatacttcctagtagtattgtgttttcat

SEQ ID NO: 533230 - DNA, 120 bp, Artificial Sequence
  ENSG00000166450_35 (sequence is synthesized)
tgctgtacgtgtaatgtgtgtgatcaaaggagtcatataggtagatgagtaagaatgtttatctgaagctctgatttttttaaaaaaagaaactatgacatctgcatggtttggataagt

SEQ ID NO: 533231 - DNA, 120 bp, Artificial Sequence
  ENSG00000166450_36 (sequence is synthesized)
tcatacctctggctgtgaggaccgttaaaccactgagaagaggaaaagtggggctatttcttctaacgatgaccaaaacaagaaagtatatttcttttgagaacagaactattcaatacc

SEQ ID NO: 533232 - DNA, 120 bp, Artificial Sequence
  ENSG00000166450_37 (sequence is synthesized)
aggtagggatcattttgcttaaaaggcctttatgttttgggcattagagtctgagtgctttatctcctatatcccaaacctcaagctgcccagaactgtgccttttctaccttccccttt

SEQ ID NO: 533233 - DNA, 120 bp, Artificial Sequence
  ENSG00000166450_38 (sequence is synthesized)
gcctgacggttggccaaaggctgcactgtctagtttgcaaagcatcctcaactttgccagtattagttgcaaaaccccatgcagaatatggatttttaaagaaaatgggttaaggtggtt

SEQ ID NO: 533234 - DNA, 120 bp, Artificial Sequence
  ENSG00000166450_39 (sequence is synthesized)
ttttttctttttttaaatcccagtttggcttaaaggagtgaagacatttcatgaactattaagaatgaaggtaaatgcaacagtagacagtaaaatgaactcgaagttattatggtaaca

SEQ ID NO: 533235 - DNA, 120 bp, Artificial Sequence
  ENSG00000166450_40 (sequence is synthesized)
gtgcctttcagtataatgaaattctttgccttatacctttttaatattcatgaaattgtttaggaacaggagtacaaaaagttgccttaagagtttcttggattttatcagtaactattt

SEQ ID NO: 533236 - DNA, 120 bp, Artificial Sequence
  ENSG00000166450_41 (sequence is synthesized)
tgatgtatagtatcttaccaaggcattttttttaagtgcaggttttgtttagggataaatattcagagttctaccaccctacttgtgttttcttgaattctttagagaatatggtatcta

SEQ ID NO: 533237 - DNA, 120 bp, Artificial Sequence
  ENSG00000166450_42 (sequence is synthesized)
cttaatcttccttcagtgtcagtgctgtgaatgaggaatgctaactccaggagtgagttaatcctcttgcaggtttgaaatcagcaaattgtttactcagctacataacataggcctttt

SEQ ID NO: 533238 - DNA, 120 bp, Artificial Sequence
  ENSG00000166450_43 (sequence is synthesized)
ctccgtcatgagacagttacctaggtgccgagcagtgggagaggataaagaactaaacgcgtgtagagaaggggtcccatatccttttaaaagtattttttcaaattttctggaagtgac

SEQ ID NO: 533239 - DNA, 120 bp, Artificial Sequence
  ENSG00000166450_44 (sequence is synthesized)
ttttgattctcattttaaaaggaatcataatgggtttacacttgaaatgctttgttcctagaggaggcagggtcatgttcactgatgttctaaaatcaaaggaatattagcagataatag

SEQ ID NO: 533240 - DNA, 120 bp, Artificial Sequence
  ENSG00000166450_45 (sequence is synthesized)
tcccagcatcatctgctagtctaatgactgtagatataacatttttaatttttttaaatctgtaattttgtgccaaactggatgtgattaagactaaagttcaatgccagcaaccacttc

SEQ ID NO: 533241 - DNA, 120 bp, Artificial Sequence
  ENSG00000166450_46 (sequence is synthesized)
tgaactaaactcagagtcccccagttagttatctaagtacggaattcatcgcaaaacaaacaaaaaagcagagctttaggtgaacagtctgcagcaaggaaaaatgctgctcctgccttt

SEQ ID NO: 533242 - DNA, 120 bp, Artificial Sequence
  ENSG00000166450_47 (sequence is synthesized)
atagctcctgttttatactacctccttttaaagttattctagtgttattttttttcctgtactcagggaacgttttgttacttttgagctgcctcatggaagcataggcagattgacagg

SEQ ID NO: 533243 - DNA, 120 bp, Artificial Sequence
  ENSG00000166450_48 (sequence is synthesized)
gtatagcgctttgtggttggtaagtagaagtatatagggccaacttttatcagtatctaaaattaagtacagtgagatcattttatttttaagctttcattaaaaggcaaacaaaatcta

SEQ ID NO: 533244 - DNA, 120 bp, Artificial Sequence
  ENSG00000166450_49 (sequence is synthesized)
aagctgaaacatcatccatcatggttatggaagatgtgtctaggactacatgaattcgagtggttttaaatggctaaaaagacgagctaaagtccttgaggaaagtattttgtttgtttg

SEQ ID NO: 533245 - DNA, 120 bp, Artificial Sequence
  ENSG00000166450_50 (sequence is synthesized)
gttacaatagaactttaggctataactatttgataattatttaacagtacattttttaccttttcattttgttcttatacggactttttcataataattctgttaccaaagaattttcag

SEQ ID NO: 533246 - DNA, 120 bp, Artificial Sequence
  ENSG00000166450_51 (sequence is synthesized)
tagaaaataaaattttgattataattccccccaaattgaattaactagaagcatttatagatatgaaacttacacaagtagttactaacccaaaacaatagggtttatattgattgttgt

SEQ ID NO: 533247 - DNA, 120 bp, Artificial Sequence
  ENSG00000166450_52 (sequence is synthesized)
agttaaatagattagtaatgttaactaccttattgttaccagagcatttaaaataagttgtaatactttctttaccagcagatcgttccaaagaatttcaggtatagttttttcttcagc

SEQ ID NO: 533248 - DNA, 120 bp, Artificial Sequence
  ENSG00000166450_53 (sequence is synthesized)
aagtaaatcttcaactatacagtattaaagtatttttatattgttgaaactacttgttggagagaaaattttttttttttaccaaaaataaatactttggtctcattgaataagatattt

SEQ ID NO: 533249 - DNA, 120 bp, Artificial Sequence
  ENSG00000166450_54 (sequence is synthesized)
agtaatacagcaaagacttctttttacttgaccaaatcaagcttctttgaagtcttaagtatgaaattgtaattaaaatgtgaagattttcactcatttttcatagtggtattacttcat

SEQ ID NO: 533250 - DNA, 120 bp, Artificial Sequence
  ENSG00000166450_55 (sequence is synthesized)
ggtattgtacttcaaaggggctaatatgcaaatggtaactattttcttttccaaagatgtatttgctgtaagtactgatacctgcatgtcatttttatgccaaatattacaagatactgc

SEQ ID NO: 533251 - DNA, 120 bp, Artificial Sequence
  ENSG00000166450_56 (sequence is synthesized)
tcatcagtattttcataccaaagaccattaagatgtataggttagcctgtaagtaagtaaagatgagcagatttgaaataaatttatttagaggccgatagagaatctagctttagtagc

SEQ ID NO: 533252 - DNA, 120 bp, Artificial Sequence
  ENSG00000166450_57 (sequence is synthesized)
aaaaaatatcaaagggctaagtttacataattaaaagcaatacaattatattggtatttatcagtgtttttattcaagtactttttatcagcaaattaaaaagaaaaaaaccaaagatat

SEQ ID NO: 533253 - DNA, 120 bp, Artificial Sequence
  ENSG00000166450_58 (sequence is synthesized)
ttaaggttacctccgcatataggcaaatatagttgtacattaaactgttgtttcttgtttttatgttaaaccaaacatgtctcttcggaacacagtctgtatacaaataacatgcatgag

SEQ ID NO: 533254 - DNA, 120 bp, Artificial Sequence
  ENSG00000166450_59 (sequence is synthesized)
gactttccatttaatctgtgattcagccacatgatgtttttgccaaatgatgtgatactttccaaagcaccttgagtgtgaaatgtcaacagaaatatcagcaagcttttatgttgcaga

SEQ ID NO: 533255 - DNA, 120 bp, Artificial Sequence
  ENSG00000166450_60 (sequence is synthesized)
gtattatggtacctctgaattagcctgtatagttctcttcctgctttaagcattacctggttagctcagacggcttgaggcagtcccttaataatagggatgcttttcatctctaaggat

SEQ ID NO: 533256 - DNA, 120 bp, Artificial Sequence
  ENSG00000166450_61 (sequence is synthesized)
gtaagaggcaaacaaatcatgtcattctttaagtgggctatgctttgatagatgtgctctttaaaggtgtgagattggaatttagagttgttaaattgaaatgtttgcattgcaccaaag

SEQ ID NO: 533257 - DNA, 120 bp, Artificial Sequence
  ENSG00000166450_62 (sequence is synthesized)
gagctcagttttcaaactttaatggaaccttgggtaaagggaaaaaatttttaatgaaatctggggttttatattttgattagcctaaaagtaaaaatacagctttatccattaagtgac

SEQ ID NO: 533258 - DNA, 120 bp, Artificial Sequence
  ENSG00000166450_63 (sequence is synthesized)
ttttaaaaatcagttttgccataccaaagaaattagattcttagtgtcacatgctatacttttgtctgtgcttgaaacgagcaatgccaacattgggaacaatgacagaggtttgcatca

SEQ ID NO: 533259 - DNA, 120 bp, Artificial Sequence
  ENSG00000166450_64 (sequence is synthesized)
gtttgtcttggctttgttaaggacttctgccagaaatgtgctcgtggttgacaacccaggatcattgttcaagttcttatgcagacacctttgaaaacaattcagatcgtgtcacaagaa

SEQ ID NO: 533260 - DNA, 120 bp, Artificial Sequence
  ENSG00000166450_65 (sequence is synthesized)
tttggaattgaaaatatcatttattttttaatgcaagaatacccagatgtggtttcacttcagcagtagctatagtggttcacttatatacatttctgtttcactgaatgtaaattttga

SEQ ID NO: 533261 - DNA, 120 bp, Artificial Sequence
  ENSG00000166450_66 (sequence is synthesized)
atactgaatgtaaaaaaaaaactccagttatattgaaacagtcactaagactgcacatgtgttttgcagactttcttcctgaccatttgccacatgggtctctgataagattctgttggt

SEQ ID NO: 533262 - DNA, 120 bp, Artificial Sequence
  ENSG00000166450_67 (sequence is synthesized)
ttaatagtcaaaataatctttgcagtttgtgagcactgagtagcaggttctggagactaccatatacaaccagttgtctaattgtgatttttttattgatgtttagaagaatgtaaccgt

SEQ ID NO: 533263 - DNA, 120 bp, Artificial Sequence
  ENSG00000166450_68 (sequence is synthesized)
agagttctgtgttaagttgatttatgctcaggacataagatcacaggctaatgcaatgtgtatgtttcaggctttaatcttctcaatttccctttttaagccgttgatggtgtttaagat

SEQ ID NO: 533264 - DNA, 120 bp, Artificial Sequence
  ENSG00000166450_69 (sequence is synthesized)
taacatgacagtcttgtatttttaccagatactgtattatttttcctattgctgctgtaacacattaccatgaaggtggtggcttaaaataacacaaatttttcttaagttctgcagatc

SEQ ID NO: 533265 - DNA, 120 bp, Artificial Sequence
  ENSG00000166450_70 (sequence is synthesized)
agaagtctaacacaggtctccctgggacaaaatcaaggcgcttgcagggctgtttctttttgaggctttagggaaaaatctatttccttttctagttttttaaggctgggaacccctcct

SEQ ID NO: 533266 - DNA, 120 bp, Artificial Sequence
  ENSG00000166450_71 (sequence is synthesized)
tccatcttcaaagccagccatgtagcatctctctgaagctccttccgttatcatttctctttgtccaaccccagctgatacaggttatctaggtttaaggattccagtgatcacattgag

SEQ ID NO: 533267 - DNA, 120 bp, Artificial Sequence
  ENSG00000166450_72 (sequence is synthesized)
cccacctaaataatccaggataatctccccaactgaagttcctcaacttaatcacatctacagagttccttttgctatgtttggtaacatattcactggttccagggatttgggcatgga

SEQ ID NO: 533268 - DNA, 120 bp, Artificial Sequence
  ENSG00000166450_73 (sequence is synthesized)
cttctgtaggtggccagtattttgcccacaacaggtacattctttctgtggaattctgatccctgtaaaatgtctgtagcattaaagagattggaaatctgaggtcatgtgccccttggg

SEQ ID NO: 533269 - DNA, 120 bp, Artificial Sequence
  ENSG00000166450_74 (sequence is synthesized)
gatctttaaagattaaaagcatgaaaactttgacttgtagcctaccaaaattatacactaaactttctctccaaaatacttgtgaaacaatttatctttaaagtttctgaatatgtgctt

SEQ ID NO: 533270 - DNA, 120 bp, Artificial Sequence
  ENSG00000166450_75 (sequence is synthesized)
cataaaataacatctcatgtttatcagcaagtgtcctaaatatttgcgtctaactttatggaatttattcagaaaaagaattgaaaactcttcttatagttaccctttctccttttctct

SEQ ID NO: 533271 - DNA, 120 bp, Artificial Sequence
  ENSG00000166450_76 (sequence is synthesized)
tcagtggttatgttgctggggaagagttgggggaagacctcaaaacacaggaactcagagtgatgaacaggaccatgctcaagtttattctttgttttcttttaatgacatattcacaac

SEQ ID NO: 533272 - DNA, 120 bp, Artificial Sequence
  ENSG00000166450_77 (sequence is synthesized)
attcacaactttctgcctttaaatctggttcctctcttcagcttcaccaagccactgaatgcttttcagttttattaaccctcacattccccatccttctcagcaagagcctctccttat

SEQ ID NO: 533273 - DNA, 120 bp, Artificial Sequence
  ENSG00000166450_78 (sequence is synthesized)
gccatcagcatgtatatacatttcctaggaaatttgatctttcttgtcattcttttttggttccaatcggccttttcctggttctcaaagctctagtttcttctaatttctggatcatcg

SEQ ID NO: 533274 - DNA, 120 bp, Artificial Sequence
  ENSG00000166450_79 (sequence is synthesized)
caagtctggccctctttgaactttaaaacataatgtctaattccaccccaattttcagcatttcttcaactaaatcgataaagctgtctccattatgagaaaggccagaataatactccg

SEQ ID NO: 533275 - DNA, 120 bp, Artificial Sequence
  ENSG00000166450_80 (sequence is synthesized)
agtaagcataagaaagctggtcattttacaacttctcccgactctaggaagtaatatgatgccatttgttgagcatctacagtgtgccaagcacatggttcatctctgcaaactgctgct

SEQ ID NO: 533276 - DNA, 120 bp, Artificial Sequence
  ENSG00000166450_81 (sequence is synthesized)
acattctgtaaagcaagtattatccgcattttagggattaggaacagcttcctgatctcttgccaaaagtcacagctagtgagtggtttaggcaagatacaaaccctagttagttaatcc

SEQ ID NO: 533277 - DNA, 120 bp, Artificial Sequence
  ENSG00000166450_82 (sequence is synthesized)
ttactcagaagtgtataggactatgatacattgtctcagcttaaaaaaaaaaaaaaaaaaaaaaggtatttaatcacccagggtcatagtgccttccatagtgtgaccagatacaactgt

SEQ ID NO: 533278 - DNA, 120 bp, Artificial Sequence
  ENSG00000166450_83 (sequence is synthesized)
tttttccttgtatccacaaaagccaggttgtgtcagaacaacctttctacagagtaataaccaatcgaaaaagagaagactaccttatttaaatccacttattcacaggagggattaagg

SEQ ID NO: 533279 - DNA, 120 bp, Artificial Sequence
  ENSG00000166450_84 (sequence is synthesized)
cggctgtaactcatcccttatcatctcctaatttctctcctccaaaaccttccatttatctcagctaaaattgtgtctgaaggctgtttgtacttagagttacattacaaataaggtagg

SEQ ID NO: 533280 - DNA, 120 bp, Artificial Sequence
  ENSG00000166450_85 (sequence is synthesized)
catggtttctagagtccttttctagtcaagcatttccttattcgacaatgtcttcagaattgcattttatcttttgtaattttctgtagctcccatattccaaacaggaattcattgact

SEQ ID NO: 533281 - DNA, 120 bp, Artificial Sequence
  ENSG00000166450_86 (sequence is synthesized)
tgaaaaagtcaggtgtgtaaacagtaatcctttcttgttaggtctgaagagttcatgattttttatgaatataaactaatttattatttgcattaatgtaggagacagcaaagttaacgg

SEQ ID NO: 533282 - DNA, 120 bp, Artificial Sequence
  ENSG00000166450_87 (sequence is synthesized)
agagtcataaaacagaacaagtataagttaggctttggagcacctaagttctaatcttgacaattttgagaatcgtttggtacaaaaattcttaaactgtttctgtgccttctccatcca

SEQ ID NO: 533283 - DNA, 120 bp, Artificial Sequence
  ENSG00000166450_88 (sequence is synthesized)
tgaaatgaggataatttttttgtgcaaaatgaaacaatagtactttgaaaacttaagagaaaattcaagtgtaaataatcataatctgaaactcatttgtatgaggctgtgaaagatttt

SEQ ID NO: 533284 - DNA, 120 bp, Artificial Sequence
  ENSG00000166450_89 (sequence is synthesized)
acagactctttcttttcaagtcagcctttgcaattatattttgcctttgttgaaatgaaaaatgtttgcatctcccgtacgcatacacaaaaccaatagaagaaagtggttggtaaaaga

SEQ ID NO: 533285 - DNA, 120 bp, Artificial Sequence
  ENSG00000166450_90 (sequence is synthesized)
tatagctgaaatggaaacactcatatgttaggtggataaaatcataagagaaaatgggaattgactgtactttcaaagtactaaatttgaagtcatcttactccaatttaagtcatatat

SEQ ID NO: 533286 - DNA, 120 bp, Artificial Sequence
  ENSG00000166450_91 (sequence is synthesized)
atatatatatatatatatatatatattggcttttaaagagttaaagagagaatcagatctgtccagcaggatagatgggtgaggagaaaagtacatatttaggatttttctctaaaagat

SEQ ID NO: 533287 - DNA, 120 bp, Artificial Sequence
  ENSG00000166450_92 (sequence is synthesized)
aggatttttctctaaaagatctttttcaagattatggagtattttaatatttctgcaaactattccaaatgaatgcattttatatagggcaacacatactggcacctgattctggtttat

SEQ ID NO: 533288 - DNA, 120 bp, Artificial Sequence
  ENSG00000166450_93 (sequence is synthesized)
tcgagttcatatgtagggtttgttgggaagaattatatgattggcttctttttttagaggaaatattttcccttttttcttatccatatactattctgaacagctttgcagatttcctta

SEQ ID NO: 533289 - DNA, 120 bp, Artificial Sequence
  ENSG00000166450_94 (sequence is synthesized)
agttcatagcttgtaagtagttcatggtatatagacatagtcttgacttacaactgaaaaaaaatttatgttacagaagtttattttttctatggaactgtctttaaaaacaaaaatatt

SEQ ID NO: 533290 - DNA, 120 bp, Artificial Sequence
  ENSG00000166450_95 (sequence is synthesized)
acaaatcttgaccttgaaatattctgtttcctgttatcacattctggatatctattttgtttgcaaatgaaaattattactgatgattagcaacttgagcctgttaataggaaattgcaa

SEQ ID NO: 533291 - DNA, 120 bp, Artificial Sequence
  ENSG00000166450_96 (sequence is synthesized)
agcctgaatacacacacattgccttagcctatcagtagagtagaggacatatgttaagaaaatgtgtctgcttgttgctgttgttggacaaaattttatgtctgtgtgtatgattttttt

SEQ ID NO: 533292 - DNA, 120 bp, Artificial Sequence
  ENSG00000166450_97 (sequence is synthesized)
ttttctattttcttcaaagatgtgaattaaatgaaagtgtgggagccagttaaattattttgtattatgggtgttctggatcctttcactccgtataccattttcttgtaagggcagcat

SEQ ID NO: 533293 - DNA, 120 bp, Artificial Sequence
  ENSG00000166450_98 (sequence is synthesized)
ttgtagacttgctaatggactgtagagctgagctatattaattttatacttgactcaggggatcagttctgtgaatgccattgcacgaagaaagcaaatgtttgccttgattttgaatgt

SEQ ID NO: 533294 - DNA, 120 bp, Artificial Sequence
  ENSG00000166450_99 (sequence is synthesized)
atctttttaatgtcttcttaaaacatatttgtttaataatgtagatttgtttttttttttctagtatcatagtaaatattgcttagtacttgcccccaccccactgggtagtttatatac

SEQ ID NO: 533295 - DNA, 120 bp, Artificial Sequence
  ENSG00000166450_100 (sequence is synthesized)
taccctataggtcatgccaaaaatgaataaaagtttaaatgccaaaatgtttatgaaactgctgtctaaatactgattgattgcacaatttaaataaaagctttccttagttaaaaaaga

SEQ ID NO: 533296 - DNA, 120 bp, Artificial Sequence
  ENSG00000166450_101 (sequence is synthesized)
atgagaagatgaagcatttgtcatgaccacacattgtttccaggacctcctgagaagcctgatagaatcctagggcttccagaaacacttttggaaaaacacagagctttctaacttcat

SEQ ID NO: 533297 - DNA, 120 bp, Artificial Sequence
  ENSG00000166450_102 (sequence is synthesized)
aaataaaatgtgaatggtgtgtgataggtgtaacaaacaaaatgtcagaactggctttttaaatatctttagatttttgcatctctatagaaattatcactaataataaataattacatg

SEQ ID NO: 533298 - DNA, 120 bp, Artificial Sequence
  ENSG00000166450_103 (sequence is synthesized)
atttaggcttcccttctatctccatcacacctacacacatatccgtgtacctatttgccaatttaaaaatttaatctcttgattattgccacttgcactgcattcgcatgtggctatata

SEQ ID NO: 533299 - DNA, 120 bp, Artificial Sequence
  ENSG00000166450_104 (sequence is synthesized)
ttgttcttagttaagaaggatgataggtacatatattttaagtgtgtctatatagatgctctgaatagggaaatcatggaggaagtgaacactgagcaatgccgagaaaaggcacctgga

SEQ ID NO: 533300 - DNA, 120 bp, Artificial Sequence
  ENSG00000166450_105 (sequence is synthesized)
tactgttttaaagatagtgtgctttttatgcttatattctgttcattcagtttttgtccaatgtaaacttgttctatagagttgttattttcccaccttttagagtttgtagaatcctgt

SEQ ID NO: 533301 - DNA, 120 bp, Artificial Sequence
  ENSG00000166450_106 (sequence is synthesized)
ccatccttggagaagacaggaaaagagcaggagacagttctagatggagacacgatgtggagcgtgtaatcctggattcttgtggggaaaagcagttataaagaacattattggacaatt

SEQ ID NO: 533302 - DNA, 120 bp, Artificial Sequence
  ENSG00000166450_107 (sequence is synthesized)
ttggaaatttaaatacagactatatattagataaatgctgccattgttaaatttgttgggtataataatactgtgtttatgttggagaacatccctttttagggggaaaatgtcacagta

SEQ ID NO: 533303 - DNA, 120 bp, Artificial Sequence
  ENSG00000166450_108 (sequence is synthesized)
gtgtgatgtgaagtgtcatgattcaataaaaggaaagatgtgtataagtacacacacaaataaaagaataagaaataaagcaaatacattaaaatgtctataactaattttaaaggttta

SEQ ID NO: 533304 - DNA, 120 bp, Artificial Sequence
  ENSG00000166450_109 (sequence is synthesized)
aaaatgccctatactcttgtactgacaatttttagtctgtagtatctccaaattagataatggttttacaatgattaggcactgaaaggttaaaacaacagcacttctgaagtaattgct

SEQ ID NO: 533305 - DNA, 120 bp, Artificial Sequence
  ENSG00000166450_110 (sequence is synthesized)
tataaaaaaattctctaggaatgtggggatatttaaaagttgtatcagtcagtatatactataagtttgcctcttaagaaattaaggcacagaacatcagtttcttatactgtccagagc

SEQ ID NO: 533306 - DNA, 120 bp, Artificial Sequence
  ENSG00000166450_111 (sequence is synthesized)
ccgcctgttcatactgtccaaagtttatactgtctaaagttcatactgtccaaagttctgtcttattcttactgtccaaagcccacttgaggaactaaaggctgtttctgtaactgagtg

SEQ ID NO: 533307 - DNA, 120 bp, Artificial Sequence
  ENSG00000166450_112 (sequence is synthesized)
aaaaatattctgaactgaaattatttccttaaacaactgaataactcattcatgaaatgtttgtaaactgatatttataataatatatttcagattgaatataagaaacctagatctgtt

SEQ ID NO: 533308 - DNA, 120 bp, Artificial Sequence
  ENSG00000166450_113 (sequence is synthesized)
gatctgttgaatgttttatttatcagaaaatctttttggtttaattctatatgcttaatttgtttgaggttctgtgtcatacgtgttgaaaaccattttaagatatgttgaatacctttc

SEQ ID NO: 533309 - DNA, 120 bp, Artificial Sequence
  ENSG00000166450_114 (sequence is synthesized)
agtacccctaagcatcttcagtgtcttttaataactaaaaaatttctggttgaatagactgtttatagccagttaacacattaataatatgcagctgcttggatctaagaactcccagaa

SEQ ID NO: 533310 - DNA, 120 bp, Artificial Sequence
  ENSG00000166450_115 (sequence is synthesized)
ttcttttatttgctaacattaaaatctattgcagtgagtttacataagttgttgtaacatactgtttcttgtgagttttaaagaaggcataaataaataatcatggttttatcactgtga

SEQ ID NO: 533311 - DNA, 120 bp, Artificial Sequence
  ENSG00000166450_116 (sequence is synthesized)
cttctcgcgccattgtcccggctccggccgcgtccgcgcctccgcgaccggccggactccgggtcgccagcccgccggggccgccgcggctgcacgtggctttatttatattgtttcctt

SEQ ID NO: 533312 - DNA, 120 bp, Artificial Sequence
  ENSG00000166450_117 (sequence is synthesized)
agtggcagcctcgccgtgcagggggcgccgcggttcctcgcggcttcccgtgtctgttgtgggagttcccccactttttagggctgcgagagggaataggtgaactcataaccccaatcg

SEQ ID NO: 533313 - DNA, 120 bp, Artificial Sequence
  ENSG00000166451_0 (sequence is synthesized)
gagcgacgcccacggcctgtctcggccaccagcgtgttccagcgagcgcccagccacctcgctcgcagcctccccagcgcagcagcccggctgtgggcctgcggcagccgggtcttcctg

SEQ ID NO: 533314 - DNA, 120 bp, Artificial Sequence
  ENSG00000166451_1 (sequence is synthesized)
gtccccacctcctggggccgacgggcggcaggaaggggctcggcgggacgcgccatcagggacctgaggaggaacaacggaacgcgttcggaacggcctggactcccgagactcacccga

SEQ ID NO: 533315 - DNA, 120 bp, Artificial Sequence
  ENSG00000166451_2 (sequence is synthesized)
ctcgtggccacaccgggagaactgaagcggcagtagccggcggagacgcccgacccgaaggccggctgctagggagcagacagctgaaccgcttgccagacgccgaaacccagtgacgcc

SEQ ID NO: 533316 - DNA, 120 bp, Artificial Sequence
  ENSG00000166451_3 (sequence is synthesized)
ctccaccgctccaccgtgctcccggctcctcgcccccgccgcccgcgggccccaaggcgcatgcgccgcctgtcctggaggggcccatttccgtccgtcgtggggggaggcacagtgagt

SEQ ID NO: 533317 - DNA, 120 bp, Artificial Sequence
  ENSG00000166451_4 (sequence is synthesized)
ccactggggcacggcagcgtctaagccacaagccgagcacataagccaggtcctaacggagcctatgtgtaagtccactactggtgcaaggttgcacacttctaagaagagcggcgtggg

SEQ ID NO: 533318 - DNA, 120 bp, Artificial Sequence
  ENSG00000166451_5 (sequence is synthesized)
gggctcggcgaccttcgcttcagtcgctcccccgtgcagtcccctgtgcccaagacacagcctgatgcttgtgctccggtgggcggagcttggaggcggcgggaactgcaattggtggct

SEQ ID NO: 533319 - DNA, 120 bp, Artificial Sequence
  ENSG00000166451_6 (sequence is synthesized)
ttgaaggcgcggcgagcgggaacagctcttgaggagtgagactgcaggagatgtgggccgtgccaaagagatggatgagactgttgctgagttcatcaagaggaccatcttgaaaatccc

SEQ ID NO: 533320 - DNA, 120 bp, Artificial Sequence
  ENSG00000166451_7 (sequence is synthesized)
catgaatgaactgacaacaatcctgaaggcctgggattttttgtctgaaaatcaactgcagactgtaaatttccgacagagaaaggaatctgtagttcagcacttgatccatctgtgtga

SEQ ID NO: 533321 - DNA, 120 bp, Artificial Sequence
  ENSG00000166451_8 (sequence is synthesized)
ggaaaagcgtgcaagtatcagtgatgctgccctgttagacatcatttatatgcaatttcatcagcaccagaaagtttgggaagtttttcagatgagtaaaggaccaggtgaagatgttga

SEQ ID NO: 533322 - DNA, 120 bp, Artificial Sequence
  ENSG00000166451_9 (sequence is synthesized)
cctttttgatatgaaacaatttaaaaattcgttcaagaaaattcttcagagagcattaaaaaatgtgacagtcagcttcagagaaactgaggagaatgcagtctggattcgaattgcctg

SEQ ID NO: 533323 - DNA, 120 bp, Artificial Sequence
  ENSG00000166451_10 (sequence is synthesized)
ctcctccatgctgaggcgcaatacaccgcttctgggtcaggcgctgacaattgctagcaaacaccatcagattgtgaaaatggacctgagaagtcggtatctggactctcttaaggctat

SEQ ID NO: 533324 - DNA, 120 bp, Artificial Sequence
  ENSG00000166451_11 (sequence is synthesized)
tgtttttaaacagtataatcagacctttgaaactcacaactctacgacacctctacaggaaagaagccttggactagatataaatatggattcaaggatcattcatgaaaacatagtaga

SEQ ID NO: 533325 - DNA, 120 bp, Artificial Sequence
  ENSG00000166451_12 (sequence is synthesized)
aaaagagagagtccaacgaataactcaagaaacatttggagattatcctcaaccacaactagaatttgcacaatataagcttgaaacgaaattcaaaagtggtttaaatgggagcatctt

SEQ ID NO: 533326 - DNA, 120 bp, Artificial Sequence
  ENSG00000166451_13 (sequence is synthesized)
ggctgagagggaagaacccctccgatgcctaataaagttctctagcccacatcttctggaagcattgaaatccttagcaccagcgggtattgcagatgctccactttctccactgctcac

SEQ ID NO: 533327 - DNA, 120 bp, Artificial Sequence
  ENSG00000166451_14 (sequence is synthesized)
ttgcatacccaacaagagaatgaattattttaaaattagagataaataagacgtgcgtggtttcttaagcacagctcctccttcttgatattgcacatgcacttcagttcatggctagct

SEQ ID NO: 533328 - DNA, 120 bp, Artificial Sequence
  ENSG00000166451_15 (sequence is synthesized)
gtatagcttccgtctgtaaacttgtattttcaagaatccttggtattgaatttttagaaatgctcacataattgttgggactgattcattcctccacgatatgcctcctctctctgatat

SEQ ID NO: 533329 - DNA, 120 bp, Artificial Sequence
  ENSG00000166451_16 (sequence is synthesized)
cctgctaactgtagccgttgtggcatttgagatgacaggacatatatatatatggccccacacttgaccttgagtgcctgaatgctctgaaatcaagcatatggcacagcgctcaagact

SEQ ID NO: 533330 - DNA, 120 bp, Artificial Sequence
  ENSG00000166451_17 (sequence is synthesized)
tttgggtttgtgtccttttttctatggctgtctcttctcaattctggagaggtctggttccagtggctggtttccagggattgattcttaagctctggatcacagagagaagcaacaagg

SEQ ID NO: 533331 - DNA, 120 bp, Artificial Sequence
  ENSG00000166451_18 (sequence is synthesized)
aactatactcaactcaaaactttttaggagaatcatgaaattggtctattcaaaggatggagttgagtccattctgttattgttgcaagaggttgcatatttggtgagtcagttatataa

SEQ ID NO: 533332 - DNA, 120 bp, Artificial Sequence
  ENSG00000166451_19 (sequence is synthesized)
aatagtgttcttattgtaaatatgatacttctcataatctattttatcatgtgtataacattcaaactgacaaatatattgacttatgaataaaggtgtcaaaaaactggcacatcagtt

SEQ ID NO: 533333 - DNA, 120 bp, Artificial Sequence
  ENSG00000166451_20 (sequence is synthesized)
ccgagcagctggcagaaggacttgtaccttctgtttgtcccattgtatccaagatgttaaaatcatgatgtcacaacatttagacatttaaatggttaatcaaatgtatgtctctcctga

SEQ ID NO: 533334 - DNA, 120 bp, Artificial Sequence
  ENSG00000166451_21 (sequence is synthesized)
tatacagctaactgctatagactaatgcaggcctccttgttaaaatggaccctttgttactcaaatttgaccaatcttggaagcttggatgtgcactgacttgacaaccactttttgtgg

SEQ ID NO: 533335 - DNA, 120 bp, Artificial Sequence
  ENSG00000166451_22 (sequence is synthesized)
gacataacactctagacacaggtgcttctagctctaaggggaacagataactaatctgtggccaaccaaccaatgattaatcagctatgctgcctcggatcttgatcaaaaaaggaaaat

SEQ ID NO: 533336 - DNA, 120 bp, Artificial Sequence
  ENSG00000166451_23 (sequence is synthesized)
gtgaaaagtgatacacaaaatggcatcactttggttcagagctctaaaatggagttgggaagccattctaagaaggactgcctgcacaatctgcaacttgcaaaacacaaaaacaaaaaa

SEQ ID NO: 533337 - DNA, 120 bp, Artificial Sequence
  ENSG00000166451_24 (sequence is synthesized)
gactgcaggagatgtgggccggtaagagagccccgggcggcactggatcgggccccggagggtgtggggccttgaggaagccagatcccaggcctcgggggtggctttttcgcaattgtc

SEQ ID NO: 533338 - DNA, 120 bp, Artificial Sequence
  ENSG00000166451_25 (sequence is synthesized)
gcacgttgtgaggcgcaggattggcgctgggtctcgggctcggggcgaggaactacggttcgggccgagtgccaaagagatggatgagactgttgctgagttcatcaagaggaccatctt

SEQ ID NO: 533339 - DNA, 120 bp, Artificial Sequence
  ENSG00000166451_26 (sequence is synthesized)
gagttagaagctactgggaaaatctacctccgacaagaggagatcattttagatattaccgaaatgaagaaagcttgcaattagtgaacatgaaaggaaaataaaaattcctcacagtca

SEQ ID NO: 533340 - DNA, 89 bp, Artificial Sequence
  ENSG00000166451_27 (sequence is synthesized)
ttcaagtgattctccacagtgcaccaccatatatgcaatttcatcagcaccagaaagtttgggaagtttttcagatgagtaaaggacca

SEQ ID NO: 533341 - DNA, 120 bp, Artificial Sequence
  ENSG00000166452_0 (sequence is synthesized)
agcgttgcgcgcatgcgccttgacgagtgagccggggagccatggacaactgtttggcggccgcagcgctgaatggggtggaccgacgttccctgcagcgttcagcaaggctggctctag

SEQ ID NO: 533342 - DNA, 120 bp, Artificial Sequence
  ENSG00000166452_1 (sequence is synthesized)
aagtgctggagagggccaagaggagggcggtggactggcatgccctggagcgtcccaaaggctgcatgggggtccttgcccgggaggcgccccacctagagaaacagccggcagccggcc

SEQ ID NO: 533343 - DNA, 120 bp, Artificial Sequence
  ENSG00000166452_2 (sequence is synthesized)
cgcagcgcgttctcccgggagagagagaagagagacccccaacccttagtgcttccttcagaacaatggctgaattcatggactatacttcaagtcagtgtgggaaatattattcatctg

SEQ ID NO: 533344 - DNA, 120 bp, Artificial Sequence
  ENSG00000166452_3 (sequence is synthesized)
tgccagaggaaggaggggcaacccatgtctatcgttatcacagaggcgagtcgaagctgcacatgtgcttggacatagggaatggtcagagaaaagacagaaaaaagacatcccttggtc

SEQ ID NO: 533345 - DNA, 120 bp, Artificial Sequence
  ENSG00000166452_4 (sequence is synthesized)
ctggaggcagctatcaaatatcagagcatgctccagaggcatcccagcctgctgagaacatctctaaggacctctacatagaagtatatccagggacctattctgtcactgtgggctcaa

SEQ ID NO: 533346 - DNA, 120 bp, Artificial Sequence
  ENSG00000166452_5 (sequence is synthesized)
atgttgaccatcactgccatcacatcacctttttttaagtagtaagaataaagccactgtatgattctcttaatagctatacattaatcctgtttttagtgctgactgggtcagccttcc

SEQ ID NO: 533347 - DNA, 87 bp, Artificial Sequence
  ENSG00000166452_6 (sequence is synthesized)
acattaatcctgtttttagtgctgactgggtcagccttccgggaactggagtctgtctctttcagtgcttttttgtttgtttggttg

SEQ ID NO: 533348 - DNA, 120 bp, Artificial Sequence
  ENSG00000166452_7 (sequence is synthesized)
gtgtagaggtcctccacgcttgtttgcctgaaagtaatataatgatgctgtctgaacaggttttactgcttgctttccaagtaaaggttaattatgataataaagagatttggaaatgaa

SEQ ID NO: 533349 - DNA, 120 bp, Artificial Sequence
  ENSG00000166452_8 (sequence is synthesized)
cggtggtctccagggaggtcgaggctggggctcccacccggatttggagcagggtcgccgcggcccagctgacccgccggcgtttgtacgttgtgtgcccactcagggagccatggacaa

SEQ ID NO: 533350 - DNA, 120 bp, Artificial Sequence
  ENSG00000166452_9 (sequence is synthesized)
gttgcgcgcatgcgccttgacgagtgagccgggtgagggggctccctaagtagcggaaggggtagatgaaaatggaaggggcgggcgcgctaggcctagtcctggctgggctcccgctgg

SEQ ID NO: 533351 - DNA, 120 bp, Artificial Sequence
  ENSG00000166452_10 (sequence is synthesized)
cactgggtttcaccaccgttgcaactccatgaaccagttgacatggttcttagagggctatttgaattgagtctatagtatttttaagttgagatgttcttacacttaagaagggcacac

SEQ ID NO: 533352 - DNA, 120 bp, Artificial Sequence
  ENSG00000166452_11 (sequence is synthesized)
aagattttggttcagtgtaaaattaggttttcttggtattcttccttcactctaagcttcagggatactctttgtgcctgaactcatagttgtggttggaaagaatgtgaagtattcacc

SEQ ID NO: 533353 - DNA, 120 bp, Artificial Sequence
  ENSG00000166452_12 (sequence is synthesized)
tctcagttcctacagctcagctgggctggcactgggtcctgctggaattccaccatctgttcaagcagcaggaggggcacgatcctcctgctaacaaagtgaaaaccattgctgaaattc

SEQ ID NO: 533354 - DNA, 120 bp, Artificial Sequence
  ENSG00000166452_13 (sequence is synthesized)
catttggtgagatcaggttccaaaacatttgaaggcatttgttcttattttccacaaatgtttctctgtaaaaacatataatgagtttttcatttttaggataaagtactcattaggtca

SEQ ID NO: 533355 - DNA, 120 bp, Artificial Sequence
  ENSG00000166452_14 (sequence is synthesized)
tgaagccaggggatcctttttggaacttggaagggctagaattctgaggaaaggaacttcattcagcatggtgccgcaatacatttactttttgtttgtatacggtttgctacgagtcag

SEQ ID NO: 533356 - DNA, 120 bp, Artificial Sequence
  ENSG00000166452_15 (sequence is synthesized)
gatttggagtatactagagttagtgacaattaagaatattctgcttctagtacaaatataagttgttaaggcttagacgcctctcaacacttgctgacttttggtaatgctgatgttcca

SEQ ID NO: 533357 - DNA, 80 bp, Artificial Sequence
  ENSG00000166454_0 (sequence is synthesized)
cggcccgcgggggcgacgcagcagcccgctgtccccgcgccgccggcgggggagctgatccagccgtcggtgagcgagct

SEQ ID NO: 533358 - DNA, 120 bp, Artificial Sequence
  ENSG00000166454_1 (sequence is synthesized)
cgtcggtgagcgagctgtcccgggccgtgcggaccaacatcctgtgcaccgtgcgcggctgcggcaagatcctgcccaacagccccgcgctcaacatgcacctagtcaagagccaccgcc

SEQ ID NO: 533359 - DNA, 120 bp, Artificial Sequence
  ENSG00000166454_2 (sequence is synthesized)
tgcaggatggcatagtcaatccaacaataagaaaagatttgaaaactggaccgaaattctactgctgtccaattgaaggctgccccagaggccctgagagaccgttttctcagttttctc

SEQ ID NO: 533360 - DNA, 120 bp, Artificial Sequence
  ENSG00000166454_3 (sequence is synthesized)
tcgtaaaacagcactttatgaaaatgcatgctgagaagaagcacaaatgtagtaagtgcagcaattcgtacggtacagaatgggacctgaaaagacatgcagaggactgtggcaagacct

SEQ ID NO: 533361 - DNA, 120 bp, Artificial Sequence
  ENSG00000166454_4 (sequence is synthesized)
tccggtgcacatgcggctgtccctacgccagtagaacagcactgcagtctcacatctaccgaactgggcacgagatacctgcagaacacagggacccacctagtaagaaaaggaaaatgg

SEQ ID NO: 533362 - DNA, 120 bp, Artificial Sequence
  ENSG00000166454_5 (sequence is synthesized)
aaaactgtgcacaaaaccagaagttatccaacaagaccattgaatcattgaacaaccaaccaatccctagaccagacactcaagaactagaagcttcagaaataaagctagaaccatctt

SEQ ID NO: 533363 - DNA, 120 bp, Artificial Sequence
  ENSG00000166454_6 (sequence is synthesized)
ttgaagactcttgtggctctaacactgacaagcagactcttacaacaccaccgagatatcctcagaagttgcttttaccaaagcccaaagtggctttggttaaactacccgtgatgcagt

SEQ ID NO: 533364 - DNA, 120 bp, Artificial Sequence
  ENSG00000166454_7 (sequence is synthesized)
tttctgtcatgcctgtctttgtgcctacagccgactcctcagcccagcctgtggtgttaggtgttgatcagggctctgccacaggggctgtgcacttaatgcccttgtcagtaggaaccc

SEQ ID NO: 533365 - DNA, 120 bp, Artificial Sequence
  ENSG00000166454_8 (sequence is synthesized)
tgatcctcggcctagattcagaggcttgctctcttaaggagagcctacctcttttcaaaattgctaatcctattgctggtgagccaataagtactggtgttcaagtgaactttggtaaaa

SEQ ID NO: 533366 - DNA, 120 bp, Artificial Sequence
  ENSG00000166454_9 (sequence is synthesized)
gtccatctaatcctttacaagaactagggaacacgtgtcaaaagaatagcatttcttcaatcaacgtgcagacagatctgtcttatgcctcacaaaactttataccttctgcacagtggg

SEQ ID NO: 533367 - DNA, 120 bp, Artificial Sequence
  ENSG00000166454_10 (sequence is synthesized)
ccactgctgattcctctgtgtcgtcttgttctcaaactgatttgtcgtttgattctcaagtgtctcttcccattagtgttcacactcagacatttttgcccagctctaaggtaacttcat

SEQ ID NO: 533368 - DNA, 120 bp, Artificial Sequence
  ENSG00000166454_11 (sequence is synthesized)
ctatagctgctcagactgatgcatttatggacacctgtttccagtcaggtggggtctccagagaaactcaaaccagtgggatagaaagtccaacggatgaccatgtacagatggaccaag

SEQ ID NO: 533369 - DNA, 120 bp, Artificial Sequence
  ENSG00000166454_12 (sequence is synthesized)
ctggaatgtgcggagacatttttgagagtgttcattcatcatataatgttgctacaggtaacattataagcaacagtttagtagcagagacagtaactcatagtttgttacctcagaatg

SEQ ID NO: 533370 - DNA, 120 bp, Artificial Sequence
  ENSG00000166454_13 (sequence is synthesized)
agcctaagactttaaatcaagatattgagaaatctgcaccaattataaatttcagtgcacagaatagtatgcttccttcacagaacatgacagataatcagacccaaaccatagatttat

SEQ ID NO: 533371 - DNA, 120 bp, Artificial Sequence
  ENSG00000166454_14 (sequence is synthesized)
taagtgatttggaaaacatcttgtcaagtaatctgcctgctcagacattggatcatcgtagtcttttgtctgacacaaatcctggacctgacacccagctcccatctggcccagcccaga

SEQ ID NO: 533372 - DNA, 120 bp, Artificial Sequence
  ENSG00000166454_15 (sequence is synthesized)
accccggaatcgattttgatatcgaagagttcttttcggcctcaaatatccagactcaaactgaagagagtgaacttagcaccatgaccaccgagccagtcttggagtcactggacatag

SEQ ID NO: 533373 - DNA, 120 bp, Artificial Sequence
  ENSG00000166454_16 (sequence is synthesized)
agactcaaacggacttcttactcgcagatacctctgctcagtcctatgggtgtaggggaaattctaacttcttaggccttgagatgtttgacacacagacacagacagacttaaactttt

SEQ ID NO: 533374 - DNA, 120 bp, Artificial Sequence
  ENSG00000166454_17 (sequence is synthesized)
tcttagacagtagccctcatctgcctctgggaagtattctgaaacactccagcttttccgtgagtactgattcatctgacacagagacccaaactgaaggagtctccactgctaaaaata

SEQ ID NO: 533375 - DNA, 120 bp, Artificial Sequence
  ENSG00000166454_18 (sequence is synthesized)
tacctgctctagaaagcaaagttcagttgaacagtacagaaacacagaccatgagttctgggtttgaaaccctggggagcttgttcttcaccagcaacgaaactcagacagcaatggatg

SEQ ID NO: 533376 - DNA, 120 bp, Artificial Sequence
  ENSG00000166454_19 (sequence is synthesized)
acacagtctccaacttctaaaactaacggtggagtccatgtgtgaaatggcatctaccatttcctctggattaaaactacggactggggacaacagtattaattcgattgaatgtggctg

SEQ ID NO: 533377 - DNA, 120 bp, Artificial Sequence
  ENSG00000166454_20 (sequence is synthesized)
atgatgcagttgcttagcttctttgtgtttctttgccttttgtacttgtaaacagaaatttgcgtataaatgtgagtgtattataaagtttgagatgttgatctaaattgtttttgtgtt

SEQ ID NO: 533378 - DNA, 120 bp, Artificial Sequence
  ENSG00000166454_21 (sequence is synthesized)
gcctacatttgccttttcacagctagtcttttcatgttaaaaaaaaaaatgtatttcatatctataaaacctatatagccatttagctgaagcccagcttaccaggttcaagggtacaaa

SEQ ID NO: 533379 - DNA, 120 bp, Artificial Sequence
  ENSG00000166454_22 (sequence is synthesized)
cttctcaaatcttcaaaacattttagtcaaagtgtaatatacttaaactgcacctaaaatatctttggcactgcttgttagaaattcctgattcctgttactaatcactaaagaaaccgg

SEQ ID NO: 533380 - DNA, 120 bp, Artificial Sequence
  ENSG00000166454_23 (sequence is synthesized)
atgctgccaccgtaggatttaagcagtagtgcttccatgctcttaagactcctgctgcctggaccttcgtcagctttgacacctcttttctgatttaaagacaccaaggaaaactacaac

SEQ ID NO: 533381 - DNA, 120 bp, Artificial Sequence
  ENSG00000166454_24 (sequence is synthesized)
tgtctttagctttgaagcagttttcatgtaatcattgccacctcttcgctacatgaactactattgataccagcatacaagtgtacagcactttacacacaagaggtttattgatgtaaa

SEQ ID NO: 533382 - DNA, 78 bp, Artificial Sequence
  ENSG00000166454_25 (sequence is synthesized)
cgatcacttgagcccaggagttcaacaccagcttgggcaacgtaagaagaccgtgtctctggaatttttttttttttt

SEQ ID NO: 533383 - DNA, 120 bp, Artificial Sequence
  ENSG00000166454_26 (sequence is synthesized)
aacgtaagaagaccgtgtctctggaatttttttttttttttaattagccaggcacagtggcatgcgcctgtgatcccagctacttggaaggctgaggtgagaggatcactcgaggagatt

SEQ ID NO: 533384 - DNA, 120 bp, Artificial Sequence
  ENSG00000166454_27 (sequence is synthesized)
ggggctgccatgagccatggtcttggcactgtactccaacctgggtaacagggcaagaccctatctcaaaaaaaaaaaaagtcgccagcaacaagcacgtagtgtagtgttcctgctaaa

SEQ ID NO: 533385 - DNA, 120 bp, Artificial Sequence
  ENSG00000166454_28 (sequence is synthesized)
tgagcgtaggttatccaaaccttgggaacagggagttatggaaacatgcctatgacttcatcttggggtgtgtcctatgaagatcctttctggtctccacagtaggccagagttgggggc

SEQ ID NO: 533386 - DNA, 120 bp, Artificial Sequence
  ENSG00000166454_29 (sequence is synthesized)
tctggagctgtttccccaagtgcatccacaagctggatctgagttttgtcactctaaaattaaacaagaaaaaaagtgggaaaagggcatcccccattaggtttcaatactttgcacttc

SEQ ID NO: 533387 - DNA, 120 bp, Artificial Sequence
  ENSG00000166454_30 (sequence is synthesized)
tactaagcttgatagggcaggagtgcaatctacaattattttaaagtgaatttccttccattcaccattctttatcttttctttgaataagaaaaagtatctagcaaggatattacttgt

SEQ ID NO: 533388 - DNA, 120 bp, Artificial Sequence
  ENSG00000166454_31 (sequence is synthesized)
gccttgaggctagcaattataggatagattcatctaaaatatggtattctgcattttggttttttttcttaagtgaataataccagtcttcaaagaaaacaaggtgaagacctattgctt

SEQ ID NO: 533389 - DNA, 120 bp, Artificial Sequence
  ENSG00000166454_32 (sequence is synthesized)
caataatcaagaatgctttgtgtgttttgaggtaggagcatgatcaagtatgctttggggattttctgtatttaggagatcctggattcttaattgttggctaagttccagtcaagtagg

SEQ ID NO: 533390 - DNA, 120 bp, Artificial Sequence
  ENSG00000166454_33 (sequence is synthesized)
cacacacacacacacacacacgacatgctcctttctgtggcacatgcctgtattactgaaagctaaatcctcaaaacctagtaaggggactaatgattcattaaagtaaattgatggttt

SEQ ID NO: 533391 - DNA, 120 bp, Artificial Sequence
  ENSG00000166454_34 (sequence is synthesized)
gtaaggggactaatgattcattaaagtaaattgatggttttgctactaattcctatcccatacatttgacacaaaagaagtgttggtaatggataaataacatatcccgggcagatgagc

SEQ ID NO: 533392 - DNA, 120 bp, Artificial Sequence
  ENSG00000166454_35 (sequence is synthesized)
tcaacctagtaggtaagagtttggtttggtcacagttgcctatgagtgtgggtttcaaaagaaacataaagccttaacttagaatttcattatgttttagaatcatcactgccttaatat

SEQ ID NO: 533393 - DNA, 120 bp, Artificial Sequence
  ENSG00000166454_36 (sequence is synthesized)
tcaagcatctatttaagtcctaataaaggagaaatgcatgtttatggcttttttgtaaatataaatgcagtgatctatggcttaaaaaatttgtttctgtgacaatgtttgtaaatctag

SEQ ID NO: 533394 - DNA, 120 bp, Artificial Sequence
  ENSG00000166454_37 (sequence is synthesized)
ccaatagagtcatttacagaagaaaaatgagcatgtaataatacaagaactgtttccccctcaaaacctgaacctgaattatttgtaaaaactgaaatttaatgattaaagagaagccag

SEQ ID NO: 533395 - DNA, 120 bp, Artificial Sequence
  ENSG00000166454_38 (sequence is synthesized)
aattgtacccttttttgtgaattcttgaacgtactcataaatatgacttattgtattgccttaagttttcactcattgtcttttgaaagccatatgataaaatgattttatttaataata

SEQ ID NO: 533396 - DNA, 120 bp, Artificial Sequence
  ENSG00000166454_39 (sequence is synthesized)
tttattgaacatttattctgttcaaaacattcccaaaggcaacagaagatacaaataaatctctgcccatgtaaaggtgtggggggcattagaaggcgttctcttcggtgtaatgaagta

SEQ ID NO: 533397 - DNA, 120 bp, Artificial Sequence
  ENSG00000166454_40 (sequence is synthesized)
atgagagaagaaaaagtagtttgaagctatggagtaagggactttgagtatcccaggctcaaaaagttgggacttgaacagtacgggggtgctgctgaaaacgtttgagggaggtaatga

SEQ ID NO: 533398 - DNA, 120 bp, Artificial Sequence
  ENSG00000166454_41 (sequence is synthesized)
catgatcgaagctatacttgagaaaggtgaatctgataaagtatgagtgaaaaagagactgaaggtctagaaattagattgaggctaatgacaaaatccacataaataggaggacttgaa

SEQ ID NO: 533399 - DNA, 120 bp, Artificial Sequence
  ENSG00000166454_42 (sequence is synthesized)
cgaaggggcacttagaagaggacaggagatagtaaaaggcattcaatgatgagagcacacactacaggggagcatgagggaggttggaaaagataatgaaaggattaccgagcttcactg

SEQ ID NO: 533400 - DNA, 120 bp, Artificial Sequence
  ENSG00000166454_43 (sequence is synthesized)
acgatgtgtttgaaatgagcaggaatcttgtagtgatcctaatccgtggttttctggagcatttcacagcctaggaacatacaaggggggcatctccctggaatgtaaattgactaagag

SEQ ID NO: 533401 - DNA, 120 bp, Artificial Sequence
  ENSG00000166454_44 (sequence is synthesized)
gaattcagtaatggtcaaatgaatgcagaattttagagtcttgcttagtattctcaccacatttcgtttaatctactcatactctttttctcttactgctgacactagatggaaaaactc

SEQ ID NO: 533402 - DNA, 120 bp, Artificial Sequence
  ENSG00000166454_45 (sequence is synthesized)
cgtaaaacaggtactctctactctgaggatgagatacagatgctaaaaacctattgtgcattctgattacttagcagacataactacagaattgagtagacagctgcttgtgaggggaga

SEQ ID NO: 533403 - DNA, 120 bp, Artificial Sequence
  ENSG00000166454_46 (sequence is synthesized)
tgcctgcgtgtctcccagttggtataaacctgagtatgctgttacacaagtggagggaaaagcggcacggtctggagggaatatgtctagaactgagttaaaatacagagagagagagta

SEQ ID NO: 533404 - DNA, 120 bp, Artificial Sequence
  ENSG00000166454_47 (sequence is synthesized)
aggccagcagtgacataattcaaaagcgcaagtcattgaaagcagttctgcgaatatgtagcttttgatgatcaggagtaaatttagagtacccagaatattgcatgttctgtctgccca

SEQ ID NO: 533405 - DNA, 120 bp, Artificial Sequence
  ENSG00000166454_48 (sequence is synthesized)
tagtcaggcttctgataagaatttcacagcagaaaactctgaggttgtagtctctagtaggacagatgtgtcgccaatgaagagtgatctgctcttaccaccatctaaaccgggatgcaa

SEQ ID NO: 533406 - DNA, 120 bp, Artificial Sequence
  ENSG00000166455_0 (sequence is synthesized)
agcgtggtcgtaacccaaggcaacggcccatccggcagcgacctgagtagctcttgccagtaggccgggactagctgtctcggggccttccatccgcttggccccacaggaaaagacccc

SEQ ID NO: 533407 - DNA, 120 bp, Artificial Sequence
  ENSG00000166455_1 (sequence is synthesized)
aatattctcttttagtagcggagcgtgttgatcctgcctgaagtacaccagtgttccgaaggtgcatctggtgatctgcaagaagatgttaaaaactttaagcaagcatcacagtaatgg

SEQ ID NO: 533408 - DNA, 120 bp, Artificial Sequence
  ENSG00000166455_2 (sequence is synthesized)
atctctgtcagaaaaatgagactgacttagaaaatgctgaaaataatgaaattcagttcacagaagaaacagaaccaacctatacttgtccagatggaaaaagtgaaaaaaatcatgttt

SEQ ID NO: 533409 - DNA, 120 bp, Artificial Sequence
  ENSG00000166455_3 (sequence is synthesized)
attgtcttctcgatgtcagtgacattacgcttgaacaagatgaaaaagccaaagagtttattattggaactggatgggaagaggcagtccaagggtggggaaggacttctccagctgcct

SEQ ID NO: 533410 - DNA, 120 bp, Artificial Sequence
  ENSG00000166455_4 (sequence is synthesized)
gcatctggccgaggaagataccaaaaaaggcgagggtaggggaaggtgcctgcagcgactgcttggtgtgtgttaacctctcccactggagcctccagaccaagcctcctactgaggggg

SEQ ID NO: 533411 - DNA, 120 bp, Artificial Sequence
  ENSG00000166455_5 (sequence is synthesized)
gcccagagaaggatcagagcagcccctcccagactcaggcagccccccagggccccagcactgcttccagggcaattagcgacatctgctttcccacctactttcgagcagagaaaaaaa

SEQ ID NO: 533412 - DNA, 120 bp, Artificial Sequence
  ENSG00000166455_6 (sequence is synthesized)
tccccggcactaataggggcaaggcctctgggaatcccagtggaggggcccacagagggctgtccatcccaggccccctgacttccagggccctcctagttctgcctcccctgaaggctt

SEQ ID NO: 533413 - DNA, 120 bp, Artificial Sequence
  ENSG00000166455_7 (sequence is synthesized)
cactttcaaatgctttggatgttctgggtaagaagagtaagaactctttcttgcagtcagaagagaaggtgctggatgtggaaaaggatgggtgtgtggcttatgcatatggcttgaaaa

SEQ ID NO: 533414 - DNA, 120 bp, Artificial Sequence
  ENSG00000166455_8 (sequence is synthesized)
cagcagatgggaaaggtgaaaaaagagccagtgagctggccaaacaccctatggtcaacgacacgccatcctccccttccccagcggcccagatatccctgctgaccgatccggagcagc

SEQ ID NO: 533415 - DNA, 120 bp, Artificial Sequence
  ENSG00000166455_9 (sequence is synthesized)
gctgcctgcattggtccctcctgtctgagaaaaacctggcgtgccctccagaccccagcaacgttcgctaccttgctgccttgcagcttctgcagaaacggggagtgcaaagctacaaat

SEQ ID NO: 533416 - DNA, 120 bp, Artificial Sequence
  ENSG00000166455_10 (sequence is synthesized)
ccaaattcaaagccaaggagccaagatctcctgtgatcacccgaaagcatgttctcccaaaggccaagcaggaaaacaggccccaaatgctggagaccaaagttttcccaagacctgtct

SEQ ID NO: 533417 - DNA, 120 bp, Artificial Sequence
  ENSG00000166455_11 (sequence is synthesized)
tgccgtctctcacagtgagcagagttatcattcctgtctctacccacaggatcctctgagcggttgcggtagaacccctgggaataagcaccgtttgagatgcagccatcctttctcttt

SEQ ID NO: 533418 - DNA, 120 bp, Artificial Sequence
  ENSG00000166455_12 (sequence is synthesized)
cttctctctcatttcccacccaccccccactctctctttctctcctccccgtcagtctgtctttactcttcttttcctccattttttttttgtagtacaactgaagaaaactgaacctca

SEQ ID NO: 533419 - DNA, 120 bp, Artificial Sequence
  ENSG00000166455_13 (sequence is synthesized)
ccggcagcgacctgagtagctcttgccagtaggccgggactagctgtctcggggccttccatccgcttggccccacagcaagaagatgttaaaaactttaagcaagcatcacagtaatgg

SEQ ID NO: 533420 - DNA, 120 bp, Artificial Sequence
  ENSG00000166455_14 (sequence is synthesized)
cacacaggaaaaagaagataaagtaggagagggatcagtttcacattcagtcctaagcagcaacacggttgagatgtaatcataaaagcaaatatttcacccaggacatggaaaagcggc

SEQ ID NO: 533421 - DNA, 120 bp, Artificial Sequence
  ENSG00000166455_15 (sequence is synthesized)
ggatcaccagaaagcagagagtcaaacgctgcaagcagaagcagtaagaagacgccacgtttggagcaaggtcttatttacacctgccatggtcatcggctcgctcttttaggtctcccc

SEQ ID NO: 533422 - DNA, 120 bp, Artificial Sequence
  ENSG00000166455_16 (sequence is synthesized)
aacccggcccccaaaaagaggttatatgcagaggtaatataatatatgtacttttgaaaataacaaagtcaccgtggagataatttcaaaacaatttattttcattttcagatacattgg

SEQ ID NO: 533423 - DNA, 120 bp, Artificial Sequence
  ENSG00000166455_17 (sequence is synthesized)
actatttcactgatgttaaaaagagtatgacttgtttaaattttttgttgtttcttttttgcagcctaatgttctgtaatagtaacttgcttccaagtaaagtatgaaaagttagtggag

SEQ ID NO: 533424 - DNA, 120 bp, Artificial Sequence
  ENSG00000166455_18 (sequence is synthesized)
gggccatggctgtggtctctgataggtcaaactatactattttggaatgcgtggagttagaacaaagtttttattttgttattaattagtaaagcaataaataaaattgtcttactaata

SEQ ID NO: 533425 - DNA, 120 bp, Artificial Sequence
  ENSG00000166455_19 (sequence is synthesized)
gcgacagagcgagagtccctgcctcgttcgaaaggaagcgagagggagcgaaaggcagaggcactatgtgccggggcttccccagagcgggcggggtctggggaggggcggggcctgagg

SEQ ID NO: 533426 - DNA, 120 bp, Artificial Sequence
  ENSG00000166455_20 (sequence is synthesized)
acttccgccgcggtcccgcccccagcgtggtcgtaacccaaggcaacggcccatccggcagcgacctgagtagctcttgccagtaggccgggactagctgtctcggggccttccatccgc

SEQ ID NO: 533427 - DNA, 120 bp, Artificial Sequence
  ENSG00000166471_0 (sequence is synthesized)
gcagtactcgctgggctgaggtcgtctcgggtgaggaggtcgcgccggaagtggctctagccgtggcgcttcggcgtagtaaggagcctgcaacagagttttgttgtttagggggcgcgg

SEQ ID NO: 533428 - DNA, 120 bp, Artificial Sequence
  ENSG00000166471_1 (sequence is synthesized)
caccgcaccgctcccttcaccttgcagcagccatggcgaaaggcagagtcgccgaacgatcgcagttgggcgctcaccacacgacccccgtgggggacggggcagcggggacgcggggtc

SEQ ID NO: 533429 - DNA, 120 bp, Artificial Sequence
  ENSG00000166471_2 (sequence is synthesized)
tcgcggcgcctggcagcagagaccaccagaaggaaaaatcctgggtagaagctggatcagcaagaatgtcactccttatattggtgtccattttcttatctgcagcttttgttatgtttt

SEQ ID NO: 533430 - DNA, 120 bp, Artificial Sequence
  ENSG00000166471_3 (sequence is synthesized)
tggtatataaaaattttcctcagcttagtgaagaagaaagagtgaatatgaaggttcccagagatatggatgatgccaaggctctaggaaaagttttatccaaatacaaggacacctttt

SEQ ID NO: 533431 - DNA, 120 bp, Artificial Sequence
  ENSG00000166471_4 (sequence is synthesized)
atgttcaagtacttgtagcttattttgctacatatattttcttgcaaacatttgctattccaggctctatatttctcagtatactctcagggtttctttatccctttccactagccttat

SEQ ID NO: 533432 - DNA, 120 bp, Artificial Sequence
  ENSG00000166471_5 (sequence is synthesized)
ttcttgtttgtttgtgttctggacttggtgcctctttctgttatatgctttcctatttagttgggagaccagttgtatacaaatacctaacagagaaagcagtaaaatggtcacagcagg

SEQ ID NO: 533433 - DNA, 120 bp, Artificial Sequence
  ENSG00000166471_6 (sequence is synthesized)
ttgaacgtcatagagaacatctcattaactacattatatttttgagaataacaccatttctgcctaattggtttattaatatcacatctcctgtgataaacgtgccattgaaagtttttt

SEQ ID NO: 533434 - DNA, 120 bp, Artificial Sequence
  ENSG00000166471_7 (sequence is synthesized)
ttattggtacttttctaggtgtcgcacctccttcttttgtagccattaaggcaggaacaacactgtatcaacttacaacagcaggagaagctgtttcctggaactcaatatttattctga

SEQ ID NO: 533435 - DNA, 120 bp, Artificial Sequence
  ENSG00000166471_8 (sequence is synthesized)
tgatcttggctgttctttctattctgccagccatcttccaaaaaaaactaaagcagaaatttgagtaaaaataatcatctgatttttagttttgctgtcatcaccatctcaggattaaca

SEQ ID NO: 533436 - DNA, 120 bp, Artificial Sequence
  ENSG00000166471_9 (sequence is synthesized)
ggtgcatccatttatgttttaaaatcacctcttcagtaattaaacaaggaatttgtaaaataaaatttcctatcagatagttaaagtaatacatttaagtgacaaggggagaagaaagta

SEQ ID NO: 533437 - DNA, 120 bp, Artificial Sequence
  ENSG00000166471_10 (sequence is synthesized)
aaaatggaaattggtatactgtgaaaagtgctatcaatagttaaggtagacatcttagacatcttataaattattataccaagggtagctgtagataatagtagtgtggtaggaaattgt

SEQ ID NO: 533438 - DNA, 120 bp, Artificial Sequence
  ENSG00000166471_11 (sequence is synthesized)
tgatccagctaattcattcaatttaattgaatattttttatctttaataactaaaatagatatttttaaattctagattttttaaagtagtgttgcaggttttgttaatgttaggctttt

SEQ ID NO: 533439 - DNA, 78 bp, Artificial Sequence
  ENSG00000166471_12 (sequence is synthesized)
tttaaagtagtgttgcaggttttgttaatgttaggcttttttcagagcataaactggaaaacttaaaaagagatttac

SEQ ID NO: 533440 - DNA, 120 bp, Artificial Sequence
  ENSG00000166471_13 (sequence is synthesized)
aagttatctattttgttaattttatttttgttttttatcatctagatttttatcatggattagtctgaaatttaaagttctggccagtcggttttctttcatcttgtagtttttacagta

SEQ ID NO: 533441 - DNA, 120 bp, Artificial Sequence
  ENSG00000166471_14 (sequence is synthesized)
cagtcggttttctttcatcttgtagtttttacagtatttccactgtgcatatgcaaaatgggtattacataactgtatcatatttggtattgataattttttttttttttgagacggagt

SEQ ID NO: 533442 - DNA, 63 bp, Artificial Sequence
  ENSG00000166471_15 (sequence is synthesized)
gagtcttgctgttgcccaggctggagtggagtgcgcccagcctcctgagtagctgggattaca

SEQ ID NO: 533443 - DNA, 64 bp, Artificial Sequence
  ENSG00000166471_16 (sequence is synthesized)
actcctgacctcaggctatatgccctattgataatttatattcagataatttgttatggctctt

SEQ ID NO: 533444 - DNA, 120 bp, Artificial Sequence
  ENSG00000166471_17 (sequence is synthesized)
gtattgataatttatattcagataatttgttatggctctttaatatcccacaaggggctctaaaaagcaaacattcaagagtatgtagtttttagacattaagttaattattttaaacag

SEQ ID NO: 533445 - DNA, 120 bp, Artificial Sequence
  ENSG00000166471_18 (sequence is synthesized)
acagtgacagcaaaacacaagtgattaaatatagtttatttgttccaatgactaaattttacctcatttattaatctggtcattaaggaatatatttaataatattatgtaattattctt

SEQ ID NO: 533446 - DNA, 120 bp, Artificial Sequence
  ENSG00000166471_19 (sequence is synthesized)
tgcatgatacacctagaaaaatgccttttgtttctattgatggctttgttgtttggagctacttttgattacttattgcagtttcccaatttagtctttactttatctaactcacaaagt

SEQ ID NO: 533447 - DNA, 120 bp, Artificial Sequence
  ENSG00000166471_20 (sequence is synthesized)
aaaattaactgatcacatggcaactactgtatttaaatagttctggaaaaatgaaagtgctttttgctgcttggtaaatgggtaatgcccttgattccttgactgtaggacatagctgat

SEQ ID NO: 533448 - DNA, 120 bp, Artificial Sequence
  ENSG00000166471_21 (sequence is synthesized)
ctaaagtactctgtcagttttaccttcacccatgactgttattagttgtcaaagttgaaaagtactttagctgtgagaaatccttgtatgtttttattataagaggtataatcatcctca

SEQ ID NO: 533449 - DNA, 120 bp, Artificial Sequence
  ENSG00000166471_22 (sequence is synthesized)
aagcctgtttttattacatgatgtggactgattattttttctatcacagtgttaacagatggattttattgtaaatacaaagaaaacatattgattattgtagtattcttatgtcacctg

SEQ ID NO: 533450 - DNA, 120 bp, Artificial Sequence
  ENSG00000166471_23 (sequence is synthesized)
gccttttgcgtgagattatttattatttctagcaaggctttcttcctttcttattgcccagagactgactgatacatcttttgttatttttacacataaattaaacatagcctttttgga

SEQ ID NO: 533451 - DNA, 120 bp, Artificial Sequence
  ENSG00000166471_24 (sequence is synthesized)
caaattcactaaatattaatgtataaaatgtaattgagtaaatttttatcagaattttaaaaataaaagagcttagactcagtagaactcagtagaagcttcactatttactccagcgtg

SEQ ID NO: 533452 - DNA, 120 bp, Artificial Sequence
  ENSG00000166471_25 (sequence is synthesized)
tgtaaattgtacttactctattctcagagtatatttactgtccttaccattgattctttccctttgctaatttttttttttgttaatggtagctgcgactttaggtggggtatattttct

SEQ ID NO: 533453 - DNA, 120 bp, Artificial Sequence
  ENSG00000166471_26 (sequence is synthesized)
tctcctaagagaatagacagtttttccagattcatcatcattgactgtcaagaaaggacccttcagcaaggctgtaccctcaatgcagttgatggcctgtcttcacggatttacagactt

SEQ ID NO: 533454 - DNA, 120 bp, Artificial Sequence
  ENSG00000166471_27 (sequence is synthesized)
ggcctgatgcccatgtaaattcaagctttggcttgtggtaacaaccacaagaagacaagcatctgtggtgcggaggcaagcaggctaactaggagttgacaagctaagaaagtgaaactg

SEQ ID NO: 533455 - DNA, 120 bp, Artificial Sequence
  ENSG00000166471_28 (sequence is synthesized)
ttctttcttagttaactgtctttctctggagctctgttattttgagtataatatttccatgacacttagtaaatgcaagctaaaatgtaataataataaattgtattggagaaacctaaa

SEQ ID NO: 533456 - DNA, 120 bp, Artificial Sequence
  ENSG00000166471_29 (sequence is synthesized)
gcgtgagccaccgcgcctggcccattttcttcctcttttgaggtaatggatttgtttggagatggcatgttagtagacgactgaatatggaaaggatatcaagttatctattttgttaat

SEQ ID NO: 533457 - DNA, 120 bp, Artificial Sequence
  ENSG00000166471_30 (sequence is synthesized)
aaaagtgtaaaaggtctgctcttcatttatacataactattttccttttaaaatttgttattgcagtgtgacaatattaaataattgaaaaattaaaatggaaaaaaattatcactttaa

SEQ ID NO: 533458 - DNA, 120 bp, Artificial Sequence
  ENSG00000166471_31 (sequence is synthesized)
ttttattcttaggctaaagcctagcattaattatttggatatagtcactaggtgtaatcacaagtgccagtttgttttagctgatctcatttgaggtacattttggtctgagaaagtact

SEQ ID NO: 533459 - DNA, 120 bp, Artificial Sequence
  ENSG00000166471_32 (sequence is synthesized)
agatcatctctgcacaagagatgtcatgcagagtaccctccccacctctgaaagaagtaaattaattgagctttttactcaggtgaataaatcaatgtgagtaagacggaaaaatacaaa

SEQ ID NO: 533460 - DNA, 120 bp, Artificial Sequence
  ENSG00000166477_0 (sequence is synthesized)
ccctaaccgaggcagcagcggacgtgagcgataatggcggatatggaggatctcttcgggagcgacgccgacagcgaagctgagcgtaaagattctgattctggatctgactcagattct

SEQ ID NO: 533461 - DNA, 120 bp, Artificial Sequence
  ENSG00000166477_1 (sequence is synthesized)
gatcaagagaatgctgcctctggcagtaatgcctctggaagtgaaagtgatcaggatgaaagaggtgattcaggacaaccaagtaataaggaactgtttggagatgacagtgaggacgag

SEQ ID NO: 533462 - DNA, 120 bp, Artificial Sequence
  ENSG00000166477_2 (sequence is synthesized)
ggagcttcacatcatagtggtagtgataatcactctgaaagatcagacaatagatcagaagcttctgagcgttctgaccatgaggacaatgacccctcagatgtagatcagcacagtgga

SEQ ID NO: 533463 - DNA, 120 bp, Artificial Sequence
  ENSG00000166477_3 (sequence is synthesized)
tcagaagcccctaatgatgatgaagacgaaggtcatagatcggatggagggagccatcattcagaagcagaaggttctgaaaaagcacattcagatgatgaaaaatggggcagagaagat

SEQ ID NO: 533464 - DNA, 120 bp, Artificial Sequence
  ENSG00000166477_4 (sequence is synthesized)
aaaagtgaccagtcagatgatgaaaagatacaaaattctgatgatgaggagagggcacaaggatctgatgaagataagctgcagaattctgacgatgatgagaaaatgcagaacacagat

SEQ ID NO: 533465 - DNA, 120 bp, Artificial Sequence
  ENSG00000166477_5 (sequence is synthesized)
gatgaggagaggcctcagctttccgatgatgagagacaacagctatctgaggaggaaaaggctaattctgatgatgaacggccggtagcttctgataatgatgatgagaaacagaattct

SEQ ID NO: 533466 - DNA, 120 bp, Artificial Sequence
  ENSG00000166477_6 (sequence is synthesized)
gatgatgaagaacaaccacagctgtctgatgaagagaaaatgcaaaattctgatgatgaaaggccacaggcctcagatgaagaacacaggcattcagatgatgaagaggaacaggatcat

SEQ ID NO: 533467 - DNA, 120 bp, Artificial Sequence
  ENSG00000166477_7 (sequence is synthesized)
aaatcagaatctgcaagaggcagtgatagtgaagatgaagttttacgaatgaaacgcaagaatgcgattgcatctgattcagaagcggatagtgacactgaggtgccaaaagataatagt

SEQ ID NO: 533468 - DNA, 120 bp, Artificial Sequence
  ENSG00000166477_8 (sequence is synthesized)
ggaaccatggatttatttggaggtgcagatgatatctcttcagggagtgatggagaagacaaaccacctactccaggacagcctgttgatgaaaatggattgcctcaggatcaacaggaa

SEQ ID NO: 533469 - DNA, 120 bp, Artificial Sequence
  ENSG00000166477_9 (sequence is synthesized)
gccaattcctgagaccagaatagaagtagaaatacccaaagtaaacactgatttaggaaacgacttatattttgttaaactgcccaactttctcagtgtagagcccagaccttttgatcc

SEQ ID NO: 533470 - DNA, 120 bp, Artificial Sequence
  ENSG00000166477_10 (sequence is synthesized)
tcagtattatgaagatgaatttgaagatgaagaaatgctggatgaagaaggtagaaccaggttaaaattaaaggtagaaaatactataagatggaggatacgccgagatgaagaaggaaa

SEQ ID NO: 533471 - DNA, 120 bp, Artificial Sequence
  ENSG00000166477_11 (sequence is synthesized)
tgaaattaaagaaagcaatgctcggatagtcaagtggtcagatggaagcatgtccctgcatttaggcaatgaagtgtttgatgtgtacaaagccccactgcagggcgaccacaatcatct

SEQ ID NO: 533472 - DNA, 120 bp, Artificial Sequence
  ENSG00000166477_12 (sequence is synthesized)
ttttataagacaaggtactggtctacagggacaagcagtctttaaaacgaaactcaccttcagacctcactctacggacagtgccacacatagaaagatgactctgtcacttgcagatag

SEQ ID NO: 533473 - DNA, 120 bp, Artificial Sequence
  ENSG00000166477_13 (sequence is synthesized)
gtgttcaaagacacagaagattagaatcttgccaatggctggtcgtgatcctgaatgccaacgcacagaaatgattaagaaagaagaagaacgtttgagggcttccatacgtagggaatc

SEQ ID NO: 533474 - DNA, 120 bp, Artificial Sequence
  ENSG00000166477_14 (sequence is synthesized)
tcagcagcgccgaatgagagagaaacagcaccagcgggggctgagcgccagttacctggaacctgatcgatacgatgaggaggaggaaggcgaggagtccatcagcttggctgccattaa

SEQ ID NO: 533475 - DNA, 120 bp, Artificial Sequence
  ENSG00000166477_15 (sequence is synthesized)
aaaccgatataaagggggcattcgagaggaacgagccagaatctattcatcagacagtgatgagggatcagaagaagataaagctcaaagattactcaaagcaaagaaacttaccagtga

SEQ ID NO: 533476 - DNA, 120 bp, Artificial Sequence
  ENSG00000166477_16 (sequence is synthesized)
tgaggaaggtgaaccttccggaaagagaaaagcagaagatgatgataaagcaaataaaaagcataagaagtatgtgatcagcgatgaagaggaagaagatgatgattgaagtatgaaata

SEQ ID NO: 533477 - DNA, 120 bp, Artificial Sequence
  ENSG00000166477_17 (sequence is synthesized)
aagaagatgatgattgaagtatgaaatatgaaaacattttatatattttattgtacagttataaatatgtaaacatgagttattttgattgaaatgaatcgatttgcttttgtgtaattt

SEQ ID NO: 533478 - DNA, 120 bp, Artificial Sequence
  ENSG00000166477_18 (sequence is synthesized)
aaaaaaaatttctgcctcacatggactcaagttttatcgcctgacccttgtaattcttactgtcttaacacatctcggggttagtgtacatttagtatctgccatctgctcaaatgctct

SEQ ID NO: 533479 - DNA, 120 bp, Artificial Sequence
  ENSG00000166477_19 (sequence is synthesized)
ctcagaaattcacttaagcatatttttttccctgcttttaatttatccaacctctctaggtgattaaagagggtttcagtgttgttcattctcctgccacacatacatctgtcacctctg

SEQ ID NO: 533480 - DNA, 120 bp, Artificial Sequence
  ENSG00000166477_20 (sequence is synthesized)
tatgcttattctgtgattatgtgcctcttgaggaaaaacaagatgcatagagtcatttaaactataattttctaaagtacttgtgttgtgaaacaggtagaaaatactataagatggagg

SEQ ID NO: 533481 - DNA, 120 bp, Artificial Sequence
  ENSG00000166478_0 (sequence is synthesized)
acggctgtttcctgtcctggtgcatggtggtcggacgaaggaattgttggaaaattttctcggaggtagaagatgttgttagcccaaataaatcgagattctcagggaatgacagagttt

SEQ ID NO: 533482 - DNA, 120 bp, Artificial Sequence
  ENSG00000166478_1 (sequence is synthesized)
cctggaggagggatggaggcgcaacatgttacgctgtgcttgacagaggcagtcaccgtggcagatggtgacaacttagaaaatatggaaggcgtaagcttgcaagcagtaacacttgca

SEQ ID NO: 533483 - DNA, 120 bp, Artificial Sequence
  ENSG00000166478_2 (sequence is synthesized)
gatggttctactgcttacatacaacacaattctaaagatgcaaaactcatagatggccaggtcattcagttggaagatggttctgcggcctatgttcaacatgtacccatacctaaaagt

SEQ ID NO: 533484 - DNA, 120 bp, Artificial Sequence
  ENSG00000166478_3 (sequence is synthesized)
acaggggacagtttgcgtctagaggatggtcaagcagtacagttagaagatggtaccacagcatttattcaccacacctccaaagatagttatgaccagagtgcattacaggcggttcag

SEQ ID NO: 533485 - DNA, 120 bp, Artificial Sequence
  ENSG00000166478_4 (sequence is synthesized)
ctggaagatggtaccacagcttatatccaccatgcagtgcaagtcccgcagtctgacaccatcttggcaattcaggctgatgggacagtggcaggtctgcacactggggatgctacaatt

SEQ ID NO: 533486 - DNA, 120 bp, Artificial Sequence
  ENSG00000166478_5 (sequence is synthesized)
gaccctgacaccatcagtgctttggaacagtatgcagcaaaggtgtccattgatggaagtgaaagtgtagcaggtactggaatgattggagaaaatgagcaagagaaaaaaatgcagatt

SEQ ID NO: 533487 - DNA, 120 bp, Artificial Sequence
  ENSG00000166478_6 (sequence is synthesized)
gttttacaaggacatgctacaagagtaactgctaaatctcaacagagtggagagaaggcatttcgatgtgaatatgatggatgtggaaaattatatacaacagctcatcatctcaaggtc

SEQ ID NO: 533488 - DNA, 120 bp, Artificial Sequence
  ENSG00000166478_7 (sequence is synthesized)
catgagaggtcacacacaggagatcggccttatcagtgtgagcatgcaggctgtgggaaggcatttgcaacaggttatggattaaaaagtcacgtcagaactcatacaggagaaaagcca

SEQ ID NO: 533489 - DNA, 120 bp, Artificial Sequence
  ENSG00000166478_8 (sequence is synthesized)
tatcggtgttcggaagataattgtactaaatctttcaaaacttcaggagatctacagaaacacatcagaactcatacaggagaaaggccctttaagtgtcccttcgaaggctgcggtcgg

SEQ ID NO: 533490 - DNA, 120 bp, Artificial Sequence
  ENSG00000166478_9 (sequence is synthesized)
tcctttacaacatcaaatatcagaaaagtgcacgttaggacacacacaggagaaagaccttattactgcacagagccaggatgtgggagggcatttgccagtgcaacaaattataaaaac

SEQ ID NO: 533491 - DNA, 120 bp, Artificial Sequence
  ENSG00000166478_10 (sequence is synthesized)
catgtgaggatacacacaggagaaaagccatatgtttgtacagttcctgggtgtgacaaaaggtttacagaatattccagtttgtacaaacatcatgttgtccacactcattccaaacct

SEQ ID NO: 533492 - DNA, 120 bp, Artificial Sequence
  ENSG00000166478_11 (sequence is synthesized)
tacaactgtaaccactgtgggaagacatacaagcagatctccacgctggccatgcacaaacggacagcccacaacgacactgagcccatcgaggaggagcaggaagccttctttgagccg

SEQ ID NO: 533493 - DNA, 120 bp, Artificial Sequence
  ENSG00000166478_12 (sequence is synthesized)
tgttcttaaagggtcccagattacgtatgttacaggtgtagaaggggacgacgttgtttctacacaagtagccacagtaacccaatctggactgagtcaacaagttacactcatatccca

SEQ ID NO: 533494 - DNA, 120 bp, Artificial Sequence
  ENSG00000166478_13 (sequence is synthesized)
ggatgggactcagcatgtcaacatatctcaagctgacatgcaggccattggcaacaccatcacaatggtaacgcaggatggcacgcccatcacagtccccgcccatgatgcagtcatctc

SEQ ID NO: 533495 - DNA, 120 bp, Artificial Sequence
  ENSG00000166478_14 (sequence is synthesized)
ctcagcaggaacgcactctgttgctatggttactgctgagggtacagaaggggaacaggttgcaattgtagctcaagacttggcagcattccatactgcctcatcagaaatggggcacca

SEQ ID NO: 533496 - DNA, 120 bp, Artificial Sequence
  ENSG00000166478_15 (sequence is synthesized)
gcagcatagccatcacttagtaaccacagaaaccagacctctgaccttagtagcaacatccaatggcacccagattgcagttcagcttggagaacagccatctctggaagaagccatcag

SEQ ID NO: 533497 - DNA, 120 bp, Artificial Sequence
  ENSG00000166478_16 (sequence is synthesized)
aatagcgtctagaatccaacaaggagaaacgccagggttggatgattaatcctcagaacaatggagcaataaagcagaaggagtctttcatcttctggcagcagaaatccatgaagcccg

SEQ ID NO: 533498 - DNA, 120 bp, Artificial Sequence
  ENSG00000166478_17 (sequence is synthesized)
ggcccaggaaaattagaagttttccattcctgatacactgtacacatttttatgcgagagtggagaacattttattcttgacacttttgtgtatataacccttggaatagattctcagag

SEQ ID NO: 533499 - DNA, 120 bp, Artificial Sequence
  ENSG00000166478_18 (sequence is synthesized)
tgattcattgtgtacaaggaagtatgaaattagggcaatacagtaaattttcatgttactcttttatcagatcacaaactcctagagtctacatgcaagactagtaaagtcttatggagt

SEQ ID NO: 533500 - DNA, 120 bp, Artificial Sequence
  ENSG00000166478_19 (sequence is synthesized)
cttatgatggatttttaacttcccgtggaaaaaaaaataaaggctgtatctaaaatatcaaaggttctatatgtcacacaatcgtaattccaaaagccattatggataataaagggtgta

SEQ ID NO: 533501 - DNA, 120 bp, Artificial Sequence
  ENSG00000166478_20 (sequence is synthesized)
aagccttcagatatttccccagttagtagagtgtctgcggtttttgttctactatatgcttgtccatttttatttgtatctcatggtttgcagactgtttgaataatttatagtttccca

SEQ ID NO: 533502 - DNA, 120 bp, Artificial Sequence
  ENSG00000166478_21 (sequence is synthesized)
tccctgttaaaaaccagctcttcaagctgaaatgctaattatattggcattacattgaattatgtacaaaattataaaatttggttatttaaaattaaaaagttaaatccagtggttttg

SEQ ID NO: 533503 - DNA, 120 bp, Artificial Sequence
  ENSG00000166478_22 (sequence is synthesized)
ttaaagattttgcttagtattcaatttttattactgttttttaaaaataatgaatcatcaaagtttaaccacaggctggtgcccgggataacagtactgtaattggaaatggctttactc

SEQ ID NO: 533504 - DNA, 120 bp, Artificial Sequence
  ENSG00000166478_23 (sequence is synthesized)
tgaaaattaggttagtgggttggtgtaaattatttatttttgcttatgtacttttgttttaaagcttatttaccccaaagtttattattaattttgaatacagcaatttttaaaatgtta

SEQ ID NO: 533505 - DNA, 120 bp, Artificial Sequence
  ENSG00000166478_24 (sequence is synthesized)
cattcagcaatcgccagacaaagcccttctggtctgcagaacgcactccggcaagcccaccgggagaaccaaagccgcctcctcgcccctgtggggaaaatggcgctcgtcaccccggct

SEQ ID NO: 533506 - DNA, 120 bp, Artificial Sequence
  ENSG00000166478_25 (sequence is synthesized)
ccctcccgggtaatcacaaggaccagcctccctccctcgctacaaaatggcgcctcccgctggggccccagaatcggtatgactcgctagtcagtgaggcggggtccgtctgggataagc

SEQ ID NO: 533507 - DNA, 120 bp, Artificial Sequence
  ENSG00000166478_26 (sequence is synthesized)
ggttatgtcaaccagtcagacacaggagctttgattctgcactttgcgcgagccactcaggggcgggctgtaaagtcaggcttggctgacgtcagtagaagatgttgttagcccaaataa

SEQ ID NO: 533508 - DNA, 120 bp, Artificial Sequence
  ENSG00000166478_27 (sequence is synthesized)
tccaatggcacccagattgcagttcaggtgagtaccaaggcatactgtcctcagtcgacagcagtgctgctcatagctttcaactttgtacactgtgcttcgtgtataacctttacagga

SEQ ID NO: 533509 - DNA, 120 bp, Artificial Sequence
  ENSG00000166478_28 (sequence is synthesized)
gttggaaaattttctcggagaaacgtggcatggctgcattgaactgtgcctctactacatggttttatttttaaaataaaaaaccactccaccctcatagcatagttccatttctggaag

SEQ ID NO: 533510 - DNA, 120 bp, Artificial Sequence
  ENSG00000166478_29 (sequence is synthesized)
tttgaattgttgaattataagaagcatgccttggactttgggctaatactcttaccctacatattgagtgaaatttcatcttatttccaacaccattacatcctcagcagctttttgtgg

SEQ ID NO: 533511 - DNA, 120 bp, Artificial Sequence
  ENSG00000166478_30 (sequence is synthesized)
aaaaaaaggttactgaggtctaacatcggatattagaaatttacaattttatcctcccttttctccagttttggccaaaagagtgaacaaattcttataagtctctttgaaacgtattat

SEQ ID NO: 533512 - DNA, 120 bp, Artificial Sequence
  ENSG00000166478_31 (sequence is synthesized)
tgtggaacgcgaactagtttttattccttccccttttgctttggacatttgttttttccacataataacgaagttaaaaagaggaaagaagaataccattgccagcccattatttgttta

SEQ ID NO: 533513 - DNA, 120 bp, Artificial Sequence
  ENSG00000166478_32 (sequence is synthesized)
accgcatggcgatgcccgggagactggagaagctcaggcaggcttggaagccaatccccggcatacagcagctctcgggaatgcagagccctagagcaagaccaagggcctcggccgaca

SEQ ID NO: 533514 - DNA, 120 bp, Artificial Sequence
  ENSG00000166478_33 (sequence is synthesized)
atgcgggttgcggggcctgggggccggacggctgtttcctgtcctggtgcatggtggtcggacgaaggaattgttggaaaattttctcggagaagatgttgttagcccaaataaatcgag

SEQ ID NO: 533515 - DNA, 120 bp, Artificial Sequence
  ENSG00000166479_0 (sequence is synthesized)
agttagcgcggtgcttctcttccgctccgggtcggctccgtttccctttccgggcgggcaggcggcggaccccagtgtctttatccctcttttgcacagtcagcttctgcagctctcccg

SEQ ID NO: 533516 - DNA, 120 bp, Artificial Sequence
  ENSG00000166479_1 (sequence is synthesized)
ggctagcatggcagcgtggaagagttggacggccctgcggctctgcgccacagttgttgtacttgatatggtcgtctgtaaaggatttgtagaagatttagatgaatcgtttaaagaaaa

SEQ ID NO: 533517 - DNA, 120 bp, Artificial Sequence
  ENSG00000166479_2 (sequence is synthesized)
tcgaaatgatgacatttggcttgtagatttttatgcgccatggtgtggccattgtaaaaagctggaaccaatttggaatgaagttggtcttgagatgaaaagcattggttctccagttaa

SEQ ID NO: 533518 - DNA, 120 bp, Artificial Sequence
  ENSG00000166479_3 (sequence is synthesized)
ggttggaaagatggatgctacttcctattctagcattgcttcagagtttggagttcgaggttatccaacaattaagctattaaaaggggacttggcatataattatagaggaccacgaac

SEQ ID NO: 533519 - DNA, 120 bp, Artificial Sequence
  ENSG00000166479_4 (sequence is synthesized)
aaaagatgatattattgagtttgctcacagagtatctggggctctaattcggccacttccaagtcaacaaatgtttgaacatatgcagaagagacaccgtgtatttttcgtttatgtagg

SEQ ID NO: 533520 - DNA, 120 bp, Artificial Sequence
  ENSG00000166479_5 (sequence is synthesized)
tggagaatcacctttgaaagagaaatacatagatgctgcttcagaattgattgtatatacatacttcttttctgcctcagaagaagtggttcctgagtatgtgacactaaaagagatgcc

SEQ ID NO: 533521 - DNA, 120 bp, Artificial Sequence
  ENSG00000166479_6 (sequence is synthesized)
agctgtgcttgttttcaaagatgaaacttactttgtttatgatgagtatgaagatggtgatctgtcatcatggatcaacagggaaaggtttcagaattaccttgctatggatggcttcct

SEQ ID NO: 533522 - DNA, 120 bp, Artificial Sequence
  ENSG00000166479_7 (sequence is synthesized)
cttgtatgaacttggagacacaggaaagcttgtggctcttgcagttattgatgagaaaaatacatcagttgaacataccagattgaagtcaattattcaggaagttgcaagagattacag

SEQ ID NO: 533523 - DNA, 120 bp, Artificial Sequence
  ENSG00000166479_8 (sequence is synthesized)
agacctcttccatagggattttcagtttggccacatggatggaaatgactacataaataccttgctgatggatgaattgacagtcccaactgtagttgtactgaatacttcaaaccagca

SEQ ID NO: 533524 - DNA, 120 bp, Artificial Sequence
  ENSG00000166479_9 (sequence is synthesized)
atatttcttgctagatagacagattaagaatgttgaagacatggtccagtttattaataacattttggatggcacagtagaagcccaaggaggtgatagcattttgcagagattgaaaag

SEQ ID NO: 533525 - DNA, 120 bp, Artificial Sequence
  ENSG00000166479_10 (sequence is synthesized)
aatagtatttgatgccaaatctactattgtgtctatattcaagagctcaccactgatgggctgctttctctttggcctgccactgggtgtcatcagtatcatgtgctatggaatctacac

SEQ ID NO: 533526 - DNA, 120 bp, Artificial Sequence
  ENSG00000166479_11 (sequence is synthesized)
agccgacacagatggaggttatatagaagaacgatatgaagtgtctaaaagtgaaaatgaaaaccaagaacagatagaagagagcaaagaacagcaggagcccagcagtggaggatctgt

SEQ ID NO: 533527 - DNA, 120 bp, Artificial Sequence
  ENSG00000166479_12 (sequence is synthesized)
agtgcctacagtgcaggagcccaaggatgtattagaaaagaagaaagattgagacttgatgactataaaatatttgttaggacttcaaattattaaagagtctatttattgaatttagac

SEQ ID NO: 533528 - DNA, 120 bp, Artificial Sequence
  ENSG00000166479_13 (sequence is synthesized)
atttaatcatgatctttacagaaaagaacatgttattcgtattttgctaatatcaactgcatggattaaagtagtccctccatacatggggaagtgtttggagcaaagagatgaacagtt

SEQ ID NO: 533529 - DNA, 120 bp, Artificial Sequence
  ENSG00000166479_14 (sequence is synthesized)
tgtctgaaacaaacacagagcactccatcaaaatttacctgatctttgtgattagaacagaacaattctatttgcatgtttctctatctgaatattctgtgacaaaaagttaagattctt

SEQ ID NO: 533530 - DNA, 120 bp, Artificial Sequence
  ENSG00000166479_15 (sequence is synthesized)
gggcagaatatttaaattggtcagtcaggtagaagatacatgtgtgatatagaaaaataatgcctctcctgctgccatccgtttccctcatatattttggacaagatttatatggacaaa

SEQ ID NO: 533531 - DNA, 120 bp, Artificial Sequence
  ENSG00000166479_16 (sequence is synthesized)
attaagtctttaaaatttaggcactttaaggagaactaataactttttccatgtatcaagattatgaggttaaaaataatgtggttttatatagcatagtggttttattttgttagttat

SEQ ID NO: 533532 - DNA, 120 bp, Artificial Sequence
  ENSG00000166479_17 (sequence is synthesized)
ttttaaaggagaagaaatgttactttttaactttatactcagttgcattatcataaaattttcatatatgcctagataatggggaaaaaaagtcttgtgattgactttcgcaaaataaac

SEQ ID NO: 533533 - DNA, 120 bp, Artificial Sequence
  ENSG00000166479_18 (sequence is synthesized)
aggatttactgagtagaggtttcagcccattccttggaatactaacaggtatttcatcagtcattgtaggttgggaagggtctctgttaatcctactctgctttagccagaatagcctag

SEQ ID NO: 533534 - DNA, 120 bp, Artificial Sequence
  ENSG00000166479_19 (sequence is synthesized)
cttctgctttttgaaaagtggtatgtatcatatttttatgtttctggtgtgtgaactttatggtaacttctactctagaatacgtacgtatgcacccacagacacacacagtttattgac

SEQ ID NO: 533535 - DNA, 120 bp, Artificial Sequence
  ENSG00000166479_20 (sequence is synthesized)
acatctattatgtaatgctgtagacctgtccgtgtctgcttcataaggagtaacgactgacattagcatgtccagtgacaagtcacatccggtgtaaaaaaaagagatcagccagttacc

SEQ ID NO: 533536 - DNA, 120 bp, Artificial Sequence
  ENSG00000166479_21 (sequence is synthesized)
ttctccattgtcttagttctgtcacccatttcgtcaagtgacctctcatcttctataaactaatacaggaattctttccaaagcaatgtctaaaaactcttttttttaaagtaacagttt

SEQ ID NO: 533537 - DNA, 120 bp, Artificial Sequence
  ENSG00000166479_22 (sequence is synthesized)
ggtatgtttattgtagataaattatttttgaggccttcattttagctaagtttagaatttatattaggcaactatgatttgagtggttattcattgagtaattttccactataaagaatt

SEQ ID NO: 533538 - DNA, 120 bp, Artificial Sequence
  ENSG00000166479_23 (sequence is synthesized)
ttattgaacatttattaaaaaataatgtaatgcatggtcaaaaaatatgtaattcatggtctggacactgacgttgtttagggatttagtcatcaaggacagccctctgttgtttctaat

SEQ ID NO: 533539 - DNA, 120 bp, Artificial Sequence
  ENSG00000166479_24 (sequence is synthesized)
gccgtactaatcaagactgtatggacacttgcatcttaagtactaaggaattactagtgattgttttattttatccatgtactcttttagtatttaataattaaatacctattcttagtg

SEQ ID NO: 533540 - DNA, 120 bp, Artificial Sequence
  ENSG00000166479_25 (sequence is synthesized)
tttgacactccatatttcttttttttggaaatgaaacaaatatgcagtccaaaattcaggaactactagagtgaaatgatattaagtggaaaccagagataaatgctgttaatttaacaa

SEQ ID NO: 533541 - DNA, 120 bp, Artificial Sequence
  ENSG00000166479_26 (sequence is synthesized)
gtagattcttctccaaagaatgatgagtgattcttgggaagataaatgttaatgttcccaatagtcaagcttgttttgcagtagtgaaaagcttagatgagtacggatacctcatttgaa

SEQ ID NO: 533542 - DNA, 120 bp, Artificial Sequence
  ENSG00000166479_27 (sequence is synthesized)
actcagcctagtaaggaagtgaaaacttagcagtcagtgacatggggaaatagttatagaaaatgtcactgaattttttcatatttataattagtcatttacatatttttgtcttgttga

SEQ ID NO: 533543 - DNA, 120 bp, Artificial Sequence
  ENSG00000166479_28 (sequence is synthesized)
tcattacctgtaaatgaaagaccttaataggaaaaaaagagtaaagctcagtgtgaatgcaaacatccacaaaatatgatcttcgtttatattctgtgatgttgtttataaatgaatgcc

SEQ ID NO: 533544 - DNA, 120 bp, Artificial Sequence
  ENSG00000166479_29 (sequence is synthesized)
tcagttctctgctacccttttcacagctttgtactgtttgccttatattctatttgtgcttttaaagtgtgtctgttgggaaaacaaaatgtgtaggtggtttgtaagtgaataattttt

SEQ ID NO: 533545 - DNA, 120 bp, Artificial Sequence
  ENSG00000166479_30 (sequence is synthesized)
atttcttcttgtattaaaattttgtttttttctctactttgggagatgtttatttacattgtcagactattcacaaaacagattctaaaatttgtttgctcgtatgctgttcccttcaat

SEQ ID NO: 533546 - DNA, 120 bp, Artificial Sequence
  ENSG00000166479_31 (sequence is synthesized)
gtgatatcagagattactatgaatgttagtttcattccgtgaaacattacttccatataaagacagatctcttaataagtgaatctagtggaagaacataggtatcattctaattccatg

SEQ ID NO: 533547 - DNA, 120 bp, Artificial Sequence
  ENSG00000166479_32 (sequence is synthesized)
gtaaattttgtcatgattctatatgaataatggggtccttcaggaagttggaatttttgccttctcttttaattgcagtgaagttctctttataacttctaaaattcggaattctagatc

SEQ ID NO: 533548 - DNA, 120 bp, Artificial Sequence
  ENSG00000166479_33 (sequence is synthesized)
cttgcttttgcagaatttggtgctcagacaatatttaaggacatttcagcgagacaaagtgcatgtttttatcgagtaccctgtgcaccacattatatctggcaattctttttgtttcat

SEQ ID NO: 533549 - DNA, 120 bp, Artificial Sequence
  ENSG00000166479_34 (sequence is synthesized)
tatgtgcatcaatatttttctcagctactattacctgaaacttgtttaacatgtattagacctagaattttcattttctttctcacatagttgcttcctggtatctgatttagaaataac

SEQ ID NO: 533550 - DNA, 120 bp, Artificial Sequence
  ENSG00000166479_35 (sequence is synthesized)
atttaaatgccaagtatctgggggattgaaggaagggtctatatgagcaggtgaattagcagtactgtttttgtttagtggatattgttagtgactttttgtgtgtgttttgctttggga

SEQ ID NO: 533551 - DNA, 120 bp, Artificial Sequence
  ENSG00000166479_36 (sequence is synthesized)
cctttttattttggtgttgcaaaaagtaacatattttcatcattgcttcatacgacatggagttaggacagggaaaaatcattcaacactccttatgcattaaatgatcaaataaaccag

SEQ ID NO: 533552 - DNA, 120 bp, Artificial Sequence
  ENSG00000166479_37 (sequence is synthesized)
tgtaggatattaagactatcaattggtgggattaggcttgacattttatttttataaatatatattttttctgaatgtgtctgagtccaagagtgggcaaaaaataattttctactttgg

SEQ ID NO: 533553 - DNA, 120 bp, Artificial Sequence
  ENSG00000166479_38 (sequence is synthesized)
actaatctatagaggtttttgaaagtctgcattactaacttgttgaattcatgatattctgcctatggcacaaattgtaaacctttgtttttctaaaataaagtaattgaaaacctgcaa

SEQ ID NO: 533554 - DNA, 120 bp, Artificial Sequence
  ENSG00000166479_39 (sequence is synthesized)
ttttcattttatttacaaagtaatctgtgaggtaggtaataaggcagatagattaataccccaggattacaaaggatatagctaagaatgttagataaggagacaggtgtgtaattaaat

SEQ ID NO: 533555 - DNA, 120 bp, Artificial Sequence
  ENSG00000166479_40 (sequence is synthesized)
agcaggtttatcatatgcttattcagccatccattaattggatgtttattgaatgtctgtattagacgttgggcttataaaagaacttcagagaaacttgtgtatttgaaaatatgagaa

SEQ ID NO: 533556 - DNA, 120 bp, Artificial Sequence
  ENSG00000166479_41 (sequence is synthesized)
actaaaagagatgccagctgtgcttgttttcaaagatgaaacttactttgtttatgatgcttttattttagattcagagtctacatgtgcaggtttgttacatgggtgtattggatgatg

SEQ ID NO: 533557 - DNA, 120 bp, Artificial Sequence
  ENSG00000166479_42 (sequence is synthesized)
ctgaggtttggggtacaaatgatcccgtcacccaggtaataagcatagtacccaacaggtagtttttttagcccttgtcctcctccccatctccctagtgtctgttattcccatctttat

SEQ ID NO: 533558 - DNA, 120 bp, Artificial Sequence
  ENSG00000166479_43 (sequence is synthesized)
tgcaatctcgtagaaaatttgcttttagcatgcagtggacattgtggcccagtaatcaatttctagttttatgtttattttcctaatttataaatttaaatcaataaattctttgagatt

SEQ ID NO: 533559 - DNA, 120 bp, Artificial Sequence
  ENSG00000166479_44 (sequence is synthesized)
tgcattgcatcacttattttatgggtttgataacttgaaaatgttttgtttagcaatgcaagaaaaagcatacctttgaagaggtcattaaaatccattcttcaaccagatgtattggta

SEQ ID NO: 533560 - DNA, 120 bp, Artificial Sequence
  ENSG00000166479_45 (sequence is synthesized)
ggcttttatagacatttgctttacatcaccaccttttttatgcaattgtaataattttgaacaattacttgagaattacatttctaattaggatgtaatatttctcttagatattatatt

SEQ ID NO: 533561 - DNA, 71 bp, Artificial Sequence
  ENSG00000166479_46 (sequence is synthesized)
gttggaaagatggatgctacttcctattctaacagagttttgctcttattgcccaagctggagtgcaaagg

SEQ ID NO: 533562 - DNA, 120 bp, Artificial Sequence
  ENSG00000166479_47 (sequence is synthesized)
tatgctatttttaatgatgctataatgaagattgctttgtgcattaatccttctgtacatttgattgtatgcttgcaataaattcctaaaaacaatatttatggaagtatgattctctgt

SEQ ID NO: 533563 - DNA, 120 bp, Artificial Sequence
  ENSG00000166479_48 (sequence is synthesized)
caggcgttttatacctattatcagattaaagctattataactcttaaattcatatttatactgtaatttgtcaactttgtcttggttttaagagtatgaagatggtgatctgtcatcatg

SEQ ID NO: 533564 - DNA, 120 bp, Artificial Sequence
  ENSG00000166479_49 (sequence is synthesized)
taagacttttttttaatccacaaaaacagatgtattgtaatttaatttactctataatcaagacttcactagaaacgcagaacttattactctgcacttactggaaatattttcattcat

SEQ ID NO: 533565 - DNA, 120 bp, Artificial Sequence
  ENSG00000166479_50 (sequence is synthesized)
taaaaagtgagtaaatgttgcctgccttagcatttttttctgttattaacctggttatttaagtcttgtgttgctttttcaaattctgagtctttgagactgcagactttgtatgtgtgt

SEQ ID NO: 533566 - DNA, 120 bp, Artificial Sequence
  ENSG00000166479_51 (sequence is synthesized)
atacacacatatcttcctataatcatcaccatcattttgtctaatttataattaaatgaatacatacaaattgaacttgtgttatatttaatgaactttatttgcagaaagataaaagct

SEQ ID NO: 533567 - DNA, 120 bp, Artificial Sequence
  ENSG00000166479_52 (sequence is synthesized)
cttaattacgttggcctttgccttggaaacaattttatttgcttacatttcttctcttcacctaagaggatgtaaggtagcacattaaggtgatgactcttactacataaggtaactctc

SEQ ID NO: 533568 - DNA, 120 bp, Artificial Sequence
  ENSG00000166479_53 (sequence is synthesized)
ctcccgtcagcatggagtgccctcattctcactggggtccgctcacttaacaaccttttagagcccactctgtgtcaggcactgccgtgtaataagtattagagttgcagctcgactttc

SEQ ID NO: 533569 - DNA, 120 bp, Artificial Sequence
  ENSG00000166479_54 (sequence is synthesized)
taaactaaattgtgattttattacttgattaaattattgattttaatatcagatttatttactgtgatatgtttggaaaaagtaaacatgctgattctttactactggtattagattgct

SEQ ID NO: 533570 - DNA, 120 bp, Artificial Sequence
  ENSG00000166479_55 (sequence is synthesized)
tattagattgctttttattaataaataccatcagattcgtagcatttagggatttacattagtgcttcttgttttttaaaataaaagtagtgatgacaagtgatacctcaaactcctaaa

SEQ ID NO: 533571 - DNA, 120 bp, Artificial Sequence
  ENSG00000166479_56 (sequence is synthesized)
taaaatgtctgttatacaacttaggtgtaaagattatgtaaatgcttctactgttcaatgagaataacagttctcatgacttgaatgcctgatgttttgggttttttttcacccttcaac

SEQ ID NO: 533572 - DNA, 120 bp, Artificial Sequence
  ENSG00000166479_57 (sequence is synthesized)
ttataattgttagttatttttattctgagctttacctacacaacattctttttgttgttgtttgttaaattatatgcgtttttgaggaataaattctatgtgatttttatacattacttt

SEQ ID NO: 533573 - DNA, 120 bp, Artificial Sequence
  ENSG00000166482_0 (sequence is synthesized)
cggctggcgggggcccagcgcataactctgggcggttgcagtctggggccgcagacacccagccactctgagcagaactgacagcatgaaggcactcctggccctgccgctgctgctgct

SEQ ID NO: 533574 - DNA, 120 bp, Artificial Sequence
  ENSG00000166482_1 (sequence is synthesized)
tctctccacgcccccgtgtgccccccaggtctccgggatccgaggagatgctctggagaggttttgccttcagcaacccctggactgtgacgacatctatgcccagggctaccagtcaga

SEQ ID NO: 533575 - DNA, 120 bp, Artificial Sequence
  ENSG00000166482_2 (sequence is synthesized)
cggcgtgtacctcatctacccctcgggccccagtgtgcctgtgcccgtcttctgtgacatgaccaccgagggcgggaagtggacggttttccagaagagattcaatggctcagtaagttt

SEQ ID NO: 533576 - DNA, 120 bp, Artificial Sequence
  ENSG00000166482_3 (sequence is synthesized)
cttccgcggctggaatgactacaagctgggcttcggccgtgctgatggagagtactggctggggctgcagaacatgcacctcctgacactgaagcagaagtatgagctgcgagtggactt

SEQ ID NO: 533577 - DNA, 120 bp, Artificial Sequence
  ENSG00000166482_4 (sequence is synthesized)
ggaggactttgagaacaacacggcctatgccaagtacgctgacttctccatctccccgaacgcggtcagcgcagaggaggatggctacaccctctttgtggcaggctttgaggatggcgg

SEQ ID NO: 533578 - DNA, 120 bp, Artificial Sequence
  ENSG00000166482_5 (sequence is synthesized)
ggcaggtgactccctgtcctaccacagtggccagaagttctctaccttcgaccgggaccaggacctctttgtgcagaactgcgcagctctctcctcaggagccttctggttccgcagctg

SEQ ID NO: 533579 - DNA, 120 bp, Artificial Sequence
  ENSG00000166482_6 (sequence is synthesized)
ccactttgccaacctcaatggcttctacctaggtggctcccacctctcttatgccaatggcatcaactgggcccagtggaagggcttctactactccctcaaacgcactgagatgaaaat

SEQ ID NO: 533580 - DNA, 120 bp, Artificial Sequence
  ENSG00000166482_7 (sequence is synthesized)
cctctgctgcccctgatgcatgcttctgctgattcccgagcaccaactccttacaagggggccttgtggctctcagccatgccacatccctgtcacacacccagggcatccattcctaag

SEQ ID NO: 533581 - DNA, 120 bp, Artificial Sequence
  ENSG00000166482_8 (sequence is synthesized)
ccagacccggctcccctacacctgaagttacactgccagcagttccccaggcctcttccgagaggcacatggttctagcctggacctggctgggctccatgagaatgagttgcctccaac

SEQ ID NO: 533582 - DNA, 120 bp, Artificial Sequence
  ENSG00000166482_9 (sequence is synthesized)
ctgtcccaacagctgacagccaggagccactctcccagctgcaggcctttgtggtccatcttgtcctgcttcctcactgtggacccctgtctgggccaccctagtgtgctaagctgagca

SEQ ID NO: 533583 - DNA, 120 bp, Artificial Sequence
  ENSG00000166482_10 (sequence is synthesized)
gtgcagtgtgaacagggcccatggtgtattctaggccacagcccagcactcctctgggctgctctcaaaccatgtcccatcttcagcatccctcccaccaacttactcccctgtggtgag

SEQ ID NO: 533584 - DNA, 120 bp, Artificial Sequence
  ENSG00000166482_11 (sequence is synthesized)
taccgtggaaccccagcccacctcactatcatactcagcttcccctgatggcccatcccagcccctgaagctctatgccaagaacacagctaccgcacaccaccctgaaacagccacagc

SEQ ID NO: 533585 - DNA, 120 bp, Artificial Sequence
  ENSG00000166482_12 (sequence is synthesized)
caaggtaggcatgcatatgaggtcttccccataccctctgggtgttgagaggtttagccacatgagggagcagaggacaatctctgcagggctgggagtgggtagggactgaaggtctca

SEQ ID NO: 533586 - DNA, 120 bp, Artificial Sequence
  ENSG00000166482_13 (sequence is synthesized)
ataaaccttcagaacctgaatgaactggcttcatacacacaaacatatttgtttatcccccaaatgtaggcacctggctcctccttgctcccctgctgatggtgtcctaccccgaactcc

SEQ ID NO: 533587 - DNA, 120 bp, Artificial Sequence
  ENSG00000166482_14 (sequence is synthesized)
aaaaattacacctggagtcaggtgcagaagggaaccttgtatttcacaggcctcattttgatggcaaaaagacagtgtaataataacataataataataaaaatataatactgaaaagga

SEQ ID NO: 533588 - DNA, 120 bp, Artificial Sequence
  ENSG00000166482_15 (sequence is synthesized)
gcagacacccagccactctgagcagaactgacagcatgaaggtacggggcccagggtcgggggactcatagcatgggggaactgagcccactccagaggcccctggccacagagggcact

SEQ ID NO: 533589 - DNA, 120 bp, Artificial Sequence
  ENSG00000166482_16 (sequence is synthesized)
agtatgtgcatgcatggtgggggcaaatgcaaagagaacaggggatctctggagctgggaaggggctgtgctgaccctgtctgcccatcgccaggcactcctggccctgccgctgctgct

SEQ ID NO: 533590 - DNA, 120 bp, Artificial Sequence
  ENSG00000166483_0 (sequence is synthesized)
ggagcccgaacctgagactggacctgaggagacctcagcctcggtgctcgggccgccccgcctctgccggaaagtccgcgccgccgctgccgccaccgtccgcagcccgagcgccccgga

SEQ ID NO: 533591 - DNA, 120 bp, Artificial Sequence
  ENSG00000166483_1 (sequence is synthesized)
gctgcgactaggcgcgcccagccgcacgtggcggacccgcccccaggcccgcagtgtcctggaccccgcaggcctccgctctcctgtcctcggccccgtccccagggccgcgatgagctt

SEQ ID NO: 533592 - DNA, 120 bp, Artificial Sequence
  ENSG00000166483_2 (sequence is synthesized)
ctcggccccgtccccagggccgcgatgagcttcctgagccgacagcagccgccgccaccccgccgcgccggggcggcctgcaccttgcggcagaagctgatcttctcgccctgcagcgac

SEQ ID NO: 533593 - DNA, 120 bp, Artificial Sequence
  ENSG00000166483_3 (sequence is synthesized)
tgtgaggaggaggaagaagaggaggaggaggagggcagcggccacagcaccggggaggactcggcctttcaagagcccgactcgccgctgccgcccgcgcggagccccacggagcccggg

SEQ ID NO: 533594 - DNA, 120 bp, Artificial Sequence
  ENSG00000166483_4 (sequence is synthesized)
cggcagccccggcgagctggaggaggacctgttgctgcccggcgcctgcccgggcgcggacgaggcgggcggtggggcggagggcgactcgtgggaggaggagggcttcggctcctcgtc

SEQ ID NO: 533595 - DNA, 120 bp, Artificial Sequence
  ENSG00000166483_5 (sequence is synthesized)
tcgtgggaggaggagggcttcggctcctcgtcgccggtcaagtcgccggcggccccctacttcctgggtagctctttctcgccggtgcgctgcggcggcccaggagatgcgtcgccgcgg

SEQ ID NO: 533596 - DNA, 120 bp, Artificial Sequence
  ENSG00000166483_6 (sequence is synthesized)
ggttgcggggcgcgccgggcgggcgaaggccgccgctcgccgcggccggaccacccgggcaccccgccacacaagaccttccgcaagctgcgactcttcgacaccccgcacacgcccaag

SEQ ID NO: 533597 - DNA, 120 bp, Artificial Sequence
  ENSG00000166483_7 (sequence is synthesized)
agtttgctctccaaagctcggggaattgattccagctctgttaaactccggggtagttctctcttcatggatacagaaaaatcaggaaaaagggaatttgatgtgcgacagactcctcaa

SEQ ID NO: 533598 - DNA, 120 bp, Artificial Sequence
  ENSG00000166483_8 (sequence is synthesized)
gtgaatattaatccttttactccggattctttgttgcttcattcctcaggacagtgtcgtcgtagaaagagaacgtattggaatgattcctgtggtgaagacatggaagccagtgattat

SEQ ID NO: 533599 - DNA, 120 bp, Artificial Sequence
  ENSG00000166483_9 (sequence is synthesized)
gagcttgaagatgaaacaagacctgctaagagaattacaattactgaaagcaatatgaagtcccggtatacaacagaatttcatgagctagagaaaatcggctctggagaatttggttct

SEQ ID NO: 533600 - DNA, 120 bp, Artificial Sequence
  ENSG00000166483_10 (sequence is synthesized)
gtatttaagtgtgtgaagaggctggatggatgcatttatgccattaagcgatcaaaaaagccattggcgggctctgttgatgagcagaacgctttgagagaagtatatgctcatgcagtg

SEQ ID NO: 533601 - DNA, 120 bp, Artificial Sequence
  ENSG00000166483_11 (sequence is synthesized)
cttggacagcattctcatgtagttcgatatttctctgcgtgggcagaagatgatcatatgcttatacagaatgaatattgtaatggtggaagtttagctgatgctataagtgaaaactac

SEQ ID NO: 533602 - DNA, 120 bp, Artificial Sequence
  ENSG00000166483_12 (sequence is synthesized)
agaatcatgagttactttaaagaagcagagttgaaggatctccttttgcaagttggccgaggcttgaggtatattcattcaatgtctttggttcacatggatataaaacctagtaatatt

SEQ ID NO: 533603 - DNA, 120 bp, Artificial Sequence
  ENSG00000166483_13 (sequence is synthesized)
ttcatatctcgaacctcaatcccaaatgctgcctctgaagaaggagacgaagatgattgggcatccaacaaagttatgtttaaaataggtgatcttgggcatgtaacaaggatctccagt

SEQ ID NO: 533604 - DNA, 120 bp, Artificial Sequence
  ENSG00000166483_14 (sequence is synthesized)
tgtgctgctggtgctgaacctcttccgagaaatggagatcaatggcatgaaatcagacagggtagattacctcggataccacaagtgctttcccaagaatttacagagttgctaaaagtt

SEQ ID NO: 533605 - DNA, 120 bp, Artificial Sequence
  ENSG00000166483_15 (sequence is synthesized)
atgattcatccagatccagagagaagaccttcagcaatggcactggtaaagcattcagtattgctgtccgcttctagaaagagtgcagaacaattacgaatagaattgaatgccgaaaag

SEQ ID NO: 533606 - DNA, 120 bp, Artificial Sequence
  ENSG00000166483_16 (sequence is synthesized)
ttcaaaaattcacttttacaaaaagaactcaagaaagcacagatggcaaaagctgcagctgaggaaagagcactcttcactgaccggatggccactaggtccaccacccagagtaataga

SEQ ID NO: 533607 - DNA, 120 bp, Artificial Sequence
  ENSG00000166483_17 (sequence is synthesized)
acatctcgacttattggaaagaaaatgaaccgctctgtcagccttactatatactgagctactcctttcccacctccccctgaacactgtgacaagaggaagctaggttgaaatcactga

SEQ ID NO: 533608 - DNA, 120 bp, Artificial Sequence
  ENSG00000166483_18 (sequence is synthesized)
tagaatccagtttgcaattactttctcgattggtgtcagtagttttactgattaggacttttattgtgaattacagttgaaagctgtattttgatgattgctatgtcaggctttcatcta

SEQ ID NO: 533609 - DNA, 120 bp, Artificial Sequence
  ENSG00000166483_19 (sequence is synthesized)
atcttaccagtctgtcttctgtaggatgtgtcactgttggatgttacaccagcctttccagggttaaccactgtggtggtgtgctgcttatagtttgctgttgcattgtaataaaaggtg

SEQ ID NO: 533610 - DNA, 120 bp, Artificial Sequence
  ENSG00000166483_20 (sequence is synthesized)
tctttccctgtagtgacctgtaaaaagtactcaagggctttattacagacataccctccctttgaaaagggacatgctaaaagactcattactactcagccttcaatgtacctgtgtgtc

SEQ ID NO: 533611 - DNA, 120 bp, Artificial Sequence
  ENSG00000166483_21 (sequence is synthesized)
catcttatatttcttttttttttaattgtgaattagacttgtatatcccactgggagcactttgtaggcattgcatgaaccatgggatgatgattctgtggaggtattgccttgtgaatt

SEQ ID NO: 533612 - DNA, 120 bp, Artificial Sequence
  ENSG00000166483_22 (sequence is synthesized)
tgctgctattttagttttgtctttgctgtaaacttgtagcattaaacaatcattgttgttaataggtcttctttttgaaacaattatgtgaaatgtatagctgcttttgatgaaaagcag

SEQ ID NO: 533613 - DNA, 120 bp, Artificial Sequence
  ENSG00000166483_23 (sequence is synthesized)
ctatttgcctttttttttttttcctttgaactttgaagctagtgcattggaaaaatgcaccctttccctcctttggaatgctgtattaatgtagtataataattactggttttgtaactt

SEQ ID NO: 533614 - DNA, 120 bp, Artificial Sequence
  ENSG00000166483_24 (sequence is synthesized)
gttctggtaatgtccttcccggactctttttaaatgtctccccctaagttttatacttgattgtattattagtctgtttttaaatgttttgcccggtttttctcttcaatatttgtgtat

SEQ ID NO: 533615 - DNA, 120 bp, Artificial Sequence
  ENSG00000166483_25 (sequence is synthesized)
ataaaccgatcttcgtgatactgtacatagctgtttgaaatgccagaatgacttctgacattccaagtttttcacaaaatatattttatctgtgattagccatttgactaataatactgg

SEQ ID NO: 533616 - DNA, 120 bp, Artificial Sequence
  ENSG00000166483_26 (sequence is synthesized)
ctaacagatgttgaaaaaaattgtctgtttgttttctcattaattttggtctaaaacatgtttgcacttgtctttgacttgtgttttattaacattgattggcatattaaaagtcactct

SEQ ID NO: 533617 - DNA, 120 bp, Artificial Sequence
  ENSG00000166483_27 (sequence is synthesized)
gagcttaccttaattgtctaaatccttgtgatgcctgttttctaatattttatctctattattgctatactataaaatgtatagtgtgtataatgtactattataaaagcagagggcaca

SEQ ID NO: 533618 - DNA, 120 bp, Artificial Sequence
  ENSG00000166483_28 (sequence is synthesized)
ttttgattgaatatgaatatcacattgcatgttatgcatgtgacttgctagaaatgtagcatgatgtaatttaaaatatcttcaaattattaagtgaatataatatgattcataactttc

SEQ ID NO: 533619 - DNA, 120 bp, Artificial Sequence
  ENSG00000166483_29 (sequence is synthesized)
atgtaactgaacaatgggcctcgtctggaacttcatcttacaaaggggccgatcggcccgtccgggtggccaaggatttgccgcccgttgagtccgggccgccccgagcgtgtcagcccc

SEQ ID NO: 533620 - DNA, 120 bp, Artificial Sequence
  ENSG00000166483_30 (sequence is synthesized)
gagtgcggcaccgataacgcggttcgcgaggatgctggagggtgccggcccggccacctgacactcccgagccataggatgccttttaaacgcggcgatcgggcctgtaatttgggcggc

SEQ ID NO: 533621 - DNA, 120 bp, Artificial Sequence
  ENSG00000166483_31 (sequence is synthesized)
gcgggcagaaggagtttaaagaaaaataattgtcccgccctgatcgtgtcgtgtcgtgtggcgtggatgggggaaaggtctggggcatgcagggagactacgcttggacttgggagtaaa

SEQ ID NO: 533622 - DNA, 120 bp, Artificial Sequence
  ENSG00000166483_32 (sequence is synthesized)
ggctggccttccaagcatttacagtcctacagactcatcctaagtccaggcagtactgaggcctgtttctggacaaggtcttggcccagcatttgtttttatcgtgggtttgcggtgccc

SEQ ID NO: 533623 - DNA, 120 bp, Artificial Sequence
  ENSG00000166483_33 (sequence is synthesized)
agagtttggccggcctccgtgtgattaggaacatcctaccgtagataaggtatcttaaagaaggaggtgttcagcacctgtgttttgaaaggccttcgagtactgcgcagatgaccactt

SEQ ID NO: 533624 - DNA, 120 bp, Artificial Sequence
  ENSG00000166483_34 (sequence is synthesized)
aaaaacaaaaacaaacaaaaaaaaagccaacctgataatactggtttactctgagaaagaaacaggtggattgctgaggtgtatgattgagagagagactttacattttattttgtaccc

SEQ ID NO: 533625 - DNA, 120 bp, Artificial Sequence
  ENSG00000166483_35 (sequence is synthesized)
atgcaaatgtattacctattgaaaaaacaataaaattttgatttcacaagcaggttgaagggagaaggtcctataaaataacactttcttggttgagattggttggttgagactcatttg

SEQ ID NO: 533626 - DNA, 120 bp, Artificial Sequence
  ENSG00000166483_36 (sequence is synthesized)
aggggaggagtccagcggaggtggctatggaagccctatctagatgggggaggggagattttatggggctctcggactgctttctatttttggatgggttgaaagaatttgttaactttt

SEQ ID NO: 533627 - DNA, 120 bp, Artificial Sequence
  ENSG00000166483_37 (sequence is synthesized)
agccactagaatgaacttagttttaggcagcatttatattctttttagggttagaggcagattttacttggctatttttttcaagaaaagatagttaatatccagcttcagtcttcctaa

SEQ ID NO: 533628 - DNA, 120 bp, Artificial Sequence
  ENSG00000166483_38 (sequence is synthesized)
attagccacaatttattttgcttgaactctaacaaaggcttgtgtgttgctttcacctacgcattcagccctatgaaaggctcgttgaaggttaggttgagaaggctgactataggactt

SEQ ID NO: 533629 - DNA, 120 bp, Artificial Sequence
  ENSG00000166483_39 (sequence is synthesized)
atggtgagtgatgtaatggttttcttgtgagcttgagaaaatgaacatcgaggaaatatttatggttatctaaaatcttgctctatttctgtcacttttatcttttataaatttaaagat

SEQ ID NO: 533630 - DNA, 120 bp, Artificial Sequence
  ENSG00000166483_40 (sequence is synthesized)
cagagacctaacataaatttcaagtacaaggttaaaaaccttgtcctttctgaagcaccttgtacatatctcagtagtagaacttcgcatactatttatgtgcttgtcgctccaactgag

SEQ ID NO: 533631 - DNA, 120 bp, Artificial Sequence
  ENSG00000166483_41 (sequence is synthesized)
ctttttgacaagactatggcctcgacacatatattttggtgtccgtagtacctagcgtagtgtgtgaagcatatagtattatgaagtgttaagttgaatagattcttcctgtgtctggtc

SEQ ID NO: 533632 - DNA, 120 bp, Artificial Sequence
  ENSG00000166483_42 (sequence is synthesized)
tttgatttccatttcatgtgaggtgctgctaaaactgatgtttgttagtcactgagtctctgttgatctaaattcagctgtttctttaagcattctgtagtccggccctactcccacgta

SEQ ID NO: 533633 - DNA, 120 bp, Artificial Sequence
  ENSG00000166483_43 (sequence is synthesized)
tccaacctagtctaccctagaatccactaacgctttattatgttacattcttttagttctctagcttgtcgtctctccctcctctcccctaaggatgaaacaaaacaggcatgtatagat

SEQ ID NO: 533634 - DNA, 120 bp, Artificial Sequence
  ENSG00000166483_44 (sequence is synthesized)
tcaagtttggatgtcttgtatagctttcagtttcggtaagtccttcaagggccgacttatgtctctccttttctattaaaaacctttaccaaagtcttggtcagaattctggttcttatg

SEQ ID NO: 533635 - DNA, 120 bp, Artificial Sequence
  ENSG00000166483_45 (sequence is synthesized)
gacgtctgtcattattatataccaaatcttttatggattatttctcaacacttttgtagtttataagtgtgatgattgggttttcatactcaagtgtgaaatgtgcctccctcaaacctt

SEQ ID NO: 533636 - DNA, 120 bp, Artificial Sequence
  ENSG00000166483_46 (sequence is synthesized)
gttacgacatcagcacattaccagtctgaaatgaaaaatatctgtagtttgtttctatttctgtatatcttctgtgaatatagacaatttagagtttagtgaacacttgagaggagataa

SEQ ID NO: 533637 - DNA, 120 bp, Artificial Sequence
  ENSG00000166483_47 (sequence is synthesized)
caaaatttatttttgttgattcttattattccttaaataaacaagaccagttatctcataacttgtaaataaataagtggtgtaggtatggattcaggttccccatatttaaaaacagtg

SEQ ID NO: 533638 - DNA, 120 bp, Artificial Sequence
  ENSG00000166483_48 (sequence is synthesized)
aacaaaacagaagtaaaagatccatttttcaaacctgattcctcattatttaataaagttctccacacttgaaagaacttgagtgtctagtatacagccttgctgctagtttttttcaca

SEQ ID NO: 533639 - DNA, 120 bp, Artificial Sequence
  ENSG00000166483_49 (sequence is synthesized)
cagctcttgaaatgtttctattcataccatcaaaatatttatgtaactatcacaaccttatggattattctatttcttaaccttcatttttcaggtattgcatttaacctagaacaactt

SEQ ID NO: 533640 - DNA, 120 bp, Artificial Sequence
  ENSG00000166483_50 (sequence is synthesized)
gaccacaatgtcgtctccatttgatatttgttagacaccatctcttttcagtttccttctttctctttctcaccttcttgatgtgaataattctcttaacagaatagttcattagtagtc

SEQ ID NO: 533641 - DNA, 120 bp, Artificial Sequence
  ENSG00000166483_51 (sequence is synthesized)
caggaatgtcaaatatgtagcaacctaccaatacatggttgtgtaaatcagatgattctgagaaaactcacgtgggcctgggagatagggaactgagtgagtagtcttgctaccctctca

SEQ ID NO: 533642 - DNA, 87 bp, Artificial Sequence
  ENSG00000166483_52 (sequence is synthesized)
aataaagcaatataaaactcttgaagaaaataaatagtcctgcatgaaacaggactgcctctttgtgtggctatttgtcctacttag

SEQ ID NO: 533643 - DNA, 120 bp, Artificial Sequence
  ENSG00000166483_53 (sequence is synthesized)
aacaggactgcctctttgtgtggctatttgtcctacttagataaaagaaaatacgactatctggatgcatttgtgatctcttttgtttcctgtgtccaccgttcctctctccacataaag

SEQ ID NO: 533644 - DNA, 120 bp, Artificial Sequence
  ENSG00000166483_54 (sequence is synthesized)
ctttgaatataccaatagggctcatcttcacatcttttccacagtttcactggaaaaggattctgatatttatttgtacatgagtaactgattccctttattgtgatttaatttccttat

SEQ ID NO: 533645 - DNA, 120 bp, Artificial Sequence
  ENSG00000166483_55 (sequence is synthesized)
tatcttattcatttgcattataagccttttatcttggtttggtgatagattggaattaacctgtataaacaagtgtagaaaaatattgatggatagggaaagagaacctgaaatgtcaga

SEQ ID NO: 533646 - DNA, 120 bp, Artificial Sequence
  ENSG00000166483_56 (sequence is synthesized)
acctgttttgctctcatcacctttcttgcccttctagcaataagagaagaaatgggcacagctatggttgctggacctgctaaaaaagagaattagccatattctttcttagcacatttg

SEQ ID NO: 533647 - DNA, 120 bp, Artificial Sequence
  ENSG00000166483_57 (sequence is synthesized)
atctaggacttagcctatcttgtctgacagcgttattggtttgctcccttctagagcactctttcccctccctcagttcaagatttgtacaagtaaggagaacatacttaagactaagat

SEQ ID NO: 533648 - DNA, 120 bp, Artificial Sequence
  ENSG00000166483_58 (sequence is synthesized)
accgagatgtataatttattttaaaaacacatttgacgttatgttattttcttatttaaattataggacctccttttctgactaatacatcattgaccttcctaattttagtacccagct

SEQ ID NO: 533649 - DNA, 120 bp, Artificial Sequence
  ENSG00000166483_59 (sequence is synthesized)
ctgatttttttattcctaagccttaaacaggagatatttaaaacaattcctcattgcctttgagatgaaatacaaactttaaaagtttgaaaaaatataaacaaattaactgattgattt

SEQ ID NO: 533650 - DNA, 120 bp, Artificial Sequence
  ENSG00000166483_60 (sequence is synthesized)
aactaattctataaaagcaggttatggtctcattcatagtaagagtagtataaattataactatactaaaatactgtctttttacctataacatttatagacttgtcaagggtatgggga

SEQ ID NO: 533651 - DNA, 120 bp, Artificial Sequence
  ENSG00000166483_61 (sequence is synthesized)
taacatttatagacttgtcaagggtatggggaaacaggtatgctcatgcattgacaatgggcatatatattggtacagccttctctgtggagaagagtgtgtgtgtgtgtgtgtgtgtgt

SEQ ID NO: 533652 - DNA, 120 bp, Artificial Sequence
  ENSG00000166483_62 (sequence is synthesized)
tgtgcataccctttaacccagcaatttggcttctaggtgatatactaaatgtacgtgaaattaccaatgtacaaggttatttattaggccatagtatgtaatagcaaaggcttggaaata

SEQ ID NO: 533653 - DNA, 84 bp, Artificial Sequence
  ENSG00000166483_63 (sequence is synthesized)
ttattaggccatagtatgtaatagcaaaggcttggaaataattttaaaatgtccatcaaatgagggactgataaatgcggggac

SEQ ID NO: 533654 - DNA, 120 bp, Artificial Sequence
  ENSG00000166483_64 (sequence is synthesized)
tctactcaattatacaatggaattctataaagacaagaagaaatgggttgtctttgtatattggtatagagtgatctttaagataatgaacatatgctgttatttatgcaaaaagttgaa

SEQ ID NO: 533655 - DNA, 120 bp, Artificial Sequence
  ENSG00000166483_65 (sequence is synthesized)
aagaatacatagacctgagctgggcgtggtggcagtgcctgtagtcccagctgcttgggagtctgaagcagggaatttgaatttgggtttgggaattctaggctgtagtgccgatctatg

SEQ ID NO: 533656 - DNA, 120 bp, Artificial Sequence
  ENSG00000166483_66 (sequence is synthesized)
ttgagcatctatgccgatctatgccgatctaagttgagcatcagtatggtgacctctgtggagtggggcaccaccaggttgcctaaagaggggtaaactggcctaagttggaaacagcac

SEQ ID NO: 533657 - DNA, 120 bp, Artificial Sequence
  ENSG00000166483_67 (sequence is synthesized)
acccagaatgaccctaattttcagtgcaaattcaaaggtctctggagtaaggaaaaatatctatgtatgccctaggaagattcaccaggaaaagatggcatgttgtgtccaaacttcatt

SEQ ID NO: 533658 - DNA, 120 bp, Artificial Sequence
  ENSG00000166483_68 (sequence is synthesized)
aaactaagagtcaaagaaacttcggccagtccagcccatgaagaaaaatacctcaaaggaacatttacatcacagttcacattgtttagttttatatggttaataaacattttgaagagc

SEQ ID NO: 533659 - DNA, 120 bp, Artificial Sequence
  ENSG00000166483_69 (sequence is synthesized)
acattcttttagttctctagcttgtcgtctctccctcctctcccctaaggatgaaacaaaacaggcatgtatagattcaagtttggatgtcttgtatagctttcagtttcggtggaagtt

SEQ ID NO: 533660 - DNA, 120 bp, Artificial Sequence
  ENSG00000166484_0 (sequence is synthesized)
acagctcggttccagcgagggctccgcccacccgcgggctccgcagaggagcagaggttgggcggccgcctcggttaactccgctgcagcccaaagcacgggaatcgcgggacagacaaa

SEQ ID NO: 533661 - DNA, 120 bp, Artificial Sequence
  ENSG00000166484_1 (sequence is synthesized)
cgagcggagggaagatacctagaagccaggaaaccgcgagctgcagtccaacttggccggaagctgcggagaggctcagccaccggaagtcagtggagggttcggccggacgctctagaa

SEQ ID NO: 533662 - DNA, 120 bp, Artificial Sequence
  ENSG00000166484_2 (sequence is synthesized)
tcccggaggaccgggatctctgtggttggccgtgacgggcaccctctaccggggatgacacattcccagagctcctgggaccaagcaaatggcggacacaattccctgggcggaagggga

SEQ ID NO: 533663 - DNA, 120 bp, Artificial Sequence
  ENSG00000166484_3 (sequence is synthesized)
cttcgggagccagtagccaagacaccatggccgagcctctgaaggaggaagacggcgaggacggctctgcggagccccccgggcccgtgaaggccgaacccgcccacaccgctgcctctg

SEQ ID NO: 533664 - DNA, 120 bp, Artificial Sequence
  ENSG00000166484_4 (sequence is synthesized)
tagcggccaagaacctggccctgcttaaagcccgctccttcgatgtgacctttgacgtgggcgacgagtacgagatcatcgagaccataggcaacggggcctatggagtggtgtcctccg

SEQ ID NO: 533665 - DNA, 120 bp, Artificial Sequence
  ENSG00000166484_5 (sequence is synthesized)
cccgccgccgcctcaccggccagcaggtggccatcaagaagatccctaatgctttcgatgtggtgaccaatgccaagcggaccctcagggagctgaagatcctcaagcactttaaacacg

SEQ ID NO: 533666 - DNA, 120 bp, Artificial Sequence
  ENSG00000166484_6 (sequence is synthesized)
acaacatcatcgccatcaaggacatcctgaggcccaccgtgccctatggcgaattcaaatctgtctacgtggtcctggacctgatggaaagcgacctgcaccagatcatccactcctcac

SEQ ID NO: 533667 - DNA, 120 bp, Artificial Sequence
  ENSG00000166484_7 (sequence is synthesized)
agcccctcacactggaacacgtgcgctacttcctgtaccaactgctgcggggcctgaagtacatgcactcggctcaggtcatccaccgtgacctgaagccctccaacctattggtgaatg

SEQ ID NO: 533668 - DNA, 120 bp, Artificial Sequence
  ENSG00000166484_8 (sequence is synthesized)
agaactgtgagctcaagattggtgactttggtatggctcgtggcctgtgcacctcgcccgctgaacatcagtacttcatgactgagtatgtggccacgcgctggtaccgtgcgcccgagc

SEQ ID NO: 533669 - DNA, 120 bp, Artificial Sequence
  ENSG00000166484_9 (sequence is synthesized)
tcatgctctctttgcatgagtatacacaggctattgacctctggtctgtgggctgcatctttggtgagatgctggcccggcgccagctcttcccaggcaaaaactatgtacaccagctac

SEQ ID NO: 533670 - DNA, 120 bp, Artificial Sequence
  ENSG00000166484_10 (sequence is synthesized)
agctcatcatgatggtgctgggtaccccatcaccagccgtgattcaggctgtgggggctgagagggtgcgggcctatatccagagcttgccaccacgccagcctgtgccctgggagacag

SEQ ID NO: 533671 - DNA, 120 bp, Artificial Sequence
  ENSG00000166484_11 (sequence is synthesized)
tgtacccaggtgccgaccgccaggccctatcactgctgggtcgcatgctgcgttttgagcccagcgctcgcatctcagcagctgctgcccttcgccaccctttcctggccaagtaccatg

SEQ ID NO: 533672 - DNA, 120 bp, Artificial Sequence
  ENSG00000166484_12 (sequence is synthesized)
atcctgatgatgagcctgactgtgccccgccctttgactttgcctttgaccgcgaagccctcactcgggagcgcattaaggaggccattgtggctgaaattgaggacttccatgcaaggc

SEQ ID NO: 533673 - DNA, 120 bp, Artificial Sequence
  ENSG00000166484_13 (sequence is synthesized)
cagccttctctacagcctgtggctagtgagcctggctgtccagatgttgaaatgcccagtccctgggctcccagtggggactgtgccatggagtctccaccaccagccccgccaccatgc

SEQ ID NO: 533674 - DNA, 120 bp, Artificial Sequence
  ENSG00000166484_14 (sequence is synthesized)
cccggccctgcacctgacaccattgatctgaccctgcagccacctccaccagtcagtgagcctgccccaccaaagaaagatggtgccatctcagacaatactaaggctgcccttaaagct

SEQ ID NO: 533675 - DNA, 120 bp, Artificial Sequence
  ENSG00000166484_15 (sequence is synthesized)
gccctgctcaagtctttgaggagccggctcagagatggccccagcgcacccctggaggctcctgagcctcggaagccggtgacagcccaggagcgccagcgggagcgggaggagaagcgg

SEQ ID NO: 533676 - DNA, 120 bp, Artificial Sequence
  ENSG00000166484_16 (sequence is synthesized)
cggaggcggcaagaacgagccaaggagcgggagaaacggcggcaggagcgggagcgaaaggaacggggggctggggcctctgggggcccctccactgaccccttggctggactagtgctc

SEQ ID NO: 533677 - DNA, 120 bp, Artificial Sequence
  ENSG00000166484_17 (sequence is synthesized)
agtgacaatgacagaagcctgttggaacgctggactcgaatggcccggcccgcagccccagccctcacctctgtgccggcccctgccccagcgccaacgccaaccccaaccccagtccaa

SEQ ID NO: 533678 - DNA, 120 bp, Artificial Sequence
  ENSG00000166484_18 (sequence is synthesized)
cctaccagtcctcctcctggccctgtagcccagcccactggcccgcaaccacaatctgcgggctctacctctggccctgtaccccagcctgcctgcccaccccctggccctgcaccccac

SEQ ID NO: 533679 - DNA, 120 bp, Artificial Sequence
  ENSG00000166484_19 (sequence is synthesized)
cccactggccctcctgggcccatccctgtccccgcgccaccccagattgccacctccaccagcctcctggctgcccagtcacttgtgccaccccctgggctgcctggctccagcacccca

SEQ ID NO: 533680 - DNA, 120 bp, Artificial Sequence
  ENSG00000166484_20 (sequence is synthesized)
ggagttttgccttacttcccacctggcctgccgcccccagacgccgggggagcccctcagtcttccatgtcagagtcacctgatgtcaaccttgtgacccagcagctatctaagtcacag

SEQ ID NO: 533681 - DNA, 120 bp, Artificial Sequence
  ENSG00000166484_21 (sequence is synthesized)
gtggaggaccccctgccccctgtgttctcaggcacaccaaagggcagtggggctggctacggtgttggctttgacctggaggaattcttaaaccagtctttcgacatgggcgtggctgat

SEQ ID NO: 533682 - DNA, 120 bp, Artificial Sequence
  ENSG00000166484_22 (sequence is synthesized)
gggccacaggatggccaggcagattcagcctctctctcagcctccctgcttgctgactggctcgaaggccatggcatgaaccctgccgatattgagtccctgcagcgtgagatccagatg

SEQ ID NO: 533683 - DNA, 120 bp, Artificial Sequence
  ENSG00000166484_23 (sequence is synthesized)
gactccccaatgctgctggctgacctgcctgacctccaggacccctgaggcccccagcctgtgccttgctgccacagtagacctagttccaggatccatgggagcattctcaaaggcttt

SEQ ID NO: 533684 - DNA, 120 bp, Artificial Sequence
  ENSG00000166484_24 (sequence is synthesized)
agccctggacccagcaggtgaggctcggcttggattattctgcaggttcatctcagacccacctttcagccttaagcagccacctgagccaccaccgagccatggcaggatcgggagacc

SEQ ID NO: 533685 - DNA, 120 bp, Artificial Sequence
  ENSG00000166484_25 (sequence is synthesized)
ccaactccccctgaacaatccttttcagtattatatttttattattattatgttattattacactgtctttttgccatcaaaatgaggcctgtgaaatacaaggttcccttctgcacctg

SEQ ID NO: 533686 - DNA, 120 bp, Artificial Sequence
  ENSG00000166484_26 (sequence is synthesized)
agtgcgcatgcgtttgaaggcggtgcagggcggggagcacacccctgcgaagtgccgggcaccctttgggcggctcccgccggcgagctggacagcggcgcgcgccaggcgtggctttct

SEQ ID NO: 533687 - DNA, 120 bp, Artificial Sequence
  ENSG00000166484_27 (sequence is synthesized)
cggccggtgggctaggattggacgcagtaggtagaaggggcaggaccctccgcagcagtagctcagcgattggccaggagctggagggagcgtggccttgggaggcggggcggaggggga

SEQ ID NO: 533688 - DNA, 120 bp, Artificial Sequence
  ENSG00000166484_28 (sequence is synthesized)
agggcagctcaagacgctgaggtggtggctgcggcctttgaacaagtaagtgagccaccctcggagacccccgcgctggggacgggaggccggcgagcctcgggacctctgaaagccttg

SEQ ID NO: 533689 - DNA, 120 bp, Artificial Sequence
  ENSG00000166484_29 (sequence is synthesized)
tcaatcacagaacactttcctacagacagtggacaagcctggtcaattttcatcatagttcttcaagctgccactaccaaacaatggagatagccccaaaaggaaacctattggccagcc

SEQ ID NO: 533690 - DNA, 120 bp, Artificial Sequence
  ENSG00000166484_30 (sequence is synthesized)
ctggtgtagtccaaccccatcttttatctgatggggaaactaggtctggagacaaaagtgatttaaccaagttcatggaaaagtcgtagagaatctaaaacgtgatgctcttcttccata

SEQ ID NO: 533691 - DNA, 120 bp, Artificial Sequence
  ENSG00000166484_31 (sequence is synthesized)
ctatggcgaattcaaatctgtgtaagaagcgggatgggagagggagccagacttgggacttttctgaaggctgcaaccatgttgccgaagttctggaaaggcagctgaatctaatctgaa

SEQ ID NO: 533692 - DNA, 120 bp, Artificial Sequence
  ENSG00000166484_32 (sequence is synthesized)
gcaggctgggaaaattcccgcagttctaggaccagttctttagagttttgccagggacaactgttattcctcaagaagtgtacagatgattttacagttttatagaatcttagtatatag

SEQ ID NO: 533693 - DNA, 120 bp, Artificial Sequence
  ENSG00000166484_33 (sequence is synthesized)
gtagctagtctgccacgaaccagccgcgcgcttctgcccttgtcggtttaggaaactgggaagttccctggtcctgctccccagcccgcagaggggacactgaggcccacggtaggtggt

SEQ ID NO: 533694 - DNA, 120 bp, Artificial Sequence
  ENSG00000166484_34 (sequence is synthesized)
gtgacgggcaccctctaccggggatgacacattcccagagctcctgggaccaagcaaatggcggacacaattccctgggcggaaggggacttcgggagccagtagccaagatggccccag

SEQ ID NO: 533695 - DNA, 120 bp, Artificial Sequence
  ENSG00000166484_35 (sequence is synthesized)
catcctgaggcccaccgtgccctatggcgaattcaaatctgtgtctggagacaaaagtgatttaaccaagttcatggaaaagtcgtagagaatctaaaacgtgatgctcttcttccatac

SEQ ID NO: 533696 - DNA, 120 bp, Artificial Sequence
  ENSG00000166484_36 (sequence is synthesized)
cggcctttgaacaagtaagtgagccaccctcggagacccccgcgctggggacgggaggccggcgagcctcgggacctctgaaagccttgaggaggcgcgggggtgagtgcggccctgagg

SEQ ID NO: 533697 - DNA, 120 bp, Artificial Sequence
  ENSG00000166484_37 (sequence is synthesized)
accggtgagcttcctgagccgtcgcctcccagatgtggcagcgtcgcagggagtgggaaaccggcctgtcccagacagccgggaaggaaagcggggtgcgagttctggctccagtcaaca

SEQ ID NO: 533698 - DNA, 120 bp, Artificial Sequence
  ENSG00000166484_38 (sequence is synthesized)
cacactgaccagggccttctgcctgccaggctccggggaggctcggttctctgaaactccggcctggtggttttgccatcctgcctgcctacttcctccttaggaaaatgatagtcccag

SEQ ID NO: 533699 - DNA, 120 bp, Artificial Sequence
  ENSG00000166484_39 (sequence is synthesized)
ttagaccagaatggagagccagtccttcgtgtctaagagagaaatgtgttctggagccagacactggcataaggaactggtggtgggatgggtgaggtctgagatggagagggtgtaggc

SEQ ID NO: 533700 - DNA, 120 bp, Artificial Sequence
  ENSG00000166484_40 (sequence is synthesized)
ataagaggctgagctacaccactgggcatccgtgcaacctccaacaagttactaagccatatttccttctctttaacgttgacctattgggacctgccccgcaggggagttgtgaaggta

SEQ ID NO: 533701 - DNA, 120 bp, Artificial Sequence
  ENSG00000166484_41 (sequence is synthesized)
acatttaataatgtaggtaacatgcttagcacagggcttggcacatagtaggtacccaatacttggtagctgttgtcatttgcatcctagaagggaggtgttgataggggctgagtcgac

SEQ ID NO: 533702 - DNA, 80 bp, Artificial Sequence
  ENSG00000166501_0 (sequence is synthesized)
ggacgagcggcagcagctgggcgagtgacagccccggctccgcgcgccgcggccgccagagccggcgcaggggaagcgcc

SEQ ID NO: 533703 - DNA, 120 bp, Artificial Sequence
  ENSG00000166501_1 (sequence is synthesized)
gcacctctcgggctccggctccccgcgcgcaagatggctgacccggctgcggggccgccgccgagcgagggcgaggagagcaccgtgcgcttcgcccgcaaaggcgccctccggcagaag

SEQ ID NO: 533704 - DNA, 120 bp, Artificial Sequence
  ENSG00000166501_2 (sequence is synthesized)
caccgtgcgcttcgcccgcaaaggcgccctccggcagaagaacgtgcatgaggtcaagaaccacaaattcaccgcccgcttcttcaagcagcccaccttctgcagccactgcaccgactt

SEQ ID NO: 533705 - DNA, 120 bp, Artificial Sequence
  ENSG00000166501_3 (sequence is synthesized)
catctggggcttcgggaagcagggattccagtgccaagtttgctgctttgtggtgcacaagcggtgccatgaatttgtcacattctcctgccctggcgctgacaagggtccagcctccga

SEQ ID NO: 533706 - DNA, 120 bp, Artificial Sequence
  ENSG00000166501_4 (sequence is synthesized)
tgacccccgcagcaaacacaagtttaagatccacacgtactccagccccacgttttgtgaccactgtgggtcactgctgtatggactcatccaccaggggatgaaatgtgacacctgcat

SEQ ID NO: 533707 - DNA, 120 bp, Artificial Sequence
  ENSG00000166501_5 (sequence is synthesized)
gatgaatgtgcacaagcgctgcgtgatgaatgttcccagcctgtgtggcacggaccacacggagcgccgcggccgcatctacatccaggcccacatcgacagggacgtcctcattgtcct

SEQ ID NO: 533708 - DNA, 120 bp, Artificial Sequence
  ENSG00000166501_6 (sequence is synthesized)
cgtaagagatgctaaaaaccttgtacctatggaccccaatggcctgtcagatccctacgtaaaactgaaactgattcccgatcccaaaagtgagagcaaacagaagaccaaaaccatcaa

SEQ ID NO: 533709 - DNA, 120 bp, Artificial Sequence
  ENSG00000166501_7 (sequence is synthesized)
atgctccctcaaccctgagtggaatgagacatttagatttcagctgaaagaatcggacaaagacagaagactgtcagtagagatttgggattgggatttgaccagcaggaatgacttcat

SEQ ID NO: 533710 - DNA, 120 bp, Artificial Sequence
  ENSG00000166501_8 (sequence is synthesized)
gggatctttgtcctttgggatttctgaacttcagaaagccagtgttgatggctggtttaagttactgagccaggaggaaggcgagtacttcaatgtgcctgtgccaccagaaggaagtga

SEQ ID NO: 533711 - DNA, 120 bp, Artificial Sequence
  ENSG00000166501_9 (sequence is synthesized)
ggccaatgaagaactgcggcagaaatttgagagggccaagatcagtcagggaaccaaggtcccggaagaaaagacgaccaacactgtctccaaatttgacaacaatggcaacagagaccg

SEQ ID NO: 533712 - DNA, 120 bp, Artificial Sequence
  ENSG00000166501_10 (sequence is synthesized)
gatgaaactgaccgattttaacttcctaatggtgctggggaaaggcagctttggcaaggtcatgctttcagaacgaaaaggcacagatgagctctatgctgtgaagatcctgaagaagga

SEQ ID NO: 533713 - DNA, 120 bp, Artificial Sequence
  ENSG00000166501_11 (sequence is synthesized)
cgttgtgatccaagatgatgacgtggagtgcactatggtggagaagcgggtgttggccctgcctgggaagccgcccttcctgacccagctccactcctgcttccagaccatggaccgcct

SEQ ID NO: 533714 - DNA, 120 bp, Artificial Sequence
  ENSG00000166501_12 (sequence is synthesized)
gtactttgtgatggagtacgtgaatgggggcgacctcatgtatcacatccagcaagtcggccggttcaaggagccccatgctgtattttacgctgcagaaattgccatcggtctgttctt

SEQ ID NO: 533715 - DNA, 120 bp, Artificial Sequence
  ENSG00000166501_13 (sequence is synthesized)
cttacagagtaagggcatcatttaccgtgacctaaaacttgacaacgtgatgctcgattctgagggacacatcaagattgccgattttggcatgtgtaaggaaaacatctgggatggggt

SEQ ID NO: 533716 - DNA, 120 bp, Artificial Sequence
  ENSG00000166501_14 (sequence is synthesized)
gacaaccaagacattctgtggcactccagactacatcgcccccgagataattgcttatcagccctatgggaagtccgtggattggtgggcatttggagtcctgctgtatgaaatgttggc

SEQ ID NO: 533717 - DNA, 120 bp, Artificial Sequence
  ENSG00000166501_15 (sequence is synthesized)
tgggcaggcaccctttgaaggggaggatgaagatgaactcttccaatccatcatggaacacaacgtagcctatcccaagtctatgtccaaggaagctgtggccatctgcaaagggctgat

SEQ ID NO: 533718 - DNA, 120 bp, Artificial Sequence
  ENSG00000166501_16 (sequence is synthesized)
gaccaaacacccaggcaaacgtctgggttgtggacctgaaggcgaacgtgatatcaaagagcatgcatttttccggtatattgattgggagaaacttgaacgcaaagagatccagccccc

SEQ ID NO: 533719 - DNA, 120 bp, Artificial Sequence
  ENSG00000166501_17 (sequence is synthesized)
ttataagccaaaagcttgtgggcgaaatgctgaaaacttcgaccgatttttcacccgccatccaccagtcctaacacctcccgaccaggaagtcatcaggaatattgaccaatcagaatt

SEQ ID NO: 533720 - DNA, 120 bp, Artificial Sequence
  ENSG00000166501_18 (sequence is synthesized)
cgaaggattttcctttgttaactctgaatttttaaaacccgaagtcaagagctaagtagatgtgtagatctccgtccttcatttctgtcattcaagctcaacggctattgtggtgacatt

SEQ ID NO: 533721 - DNA, 120 bp, Artificial Sequence
  ENSG00000166501_19 (sequence is synthesized)
tttatgtttttcattgccaagttgcatccatgtttgattttctgatgagactagagtgacagtgtttcagaacccaaatgtcctcaggtagtttggagcatctctatgagatgggattat

SEQ ID NO: 533722 - DNA, 120 bp, Artificial Sequence
  ENSG00000166501_20 (sequence is synthesized)
gcagatggcctatggaaaatgcagctgcataattaacacattatcaaagtcctcttacaatttattttccgcagcatgtcagctaagtagacccaatggggagagaaaatgcctgctttc

SEQ ID NO: 533723 - DNA, 120 bp, Artificial Sequence
  ENSG00000166501_21 (sequence is synthesized)
tttccctctttttctgcactgccatattcacccccaaccatccaatctgtggataattggatgttagcggtactcttccacttccgggcctggagcttggcttgtatccaagtgtatggt

SEQ ID NO: 533724 - DNA, 120 bp, Artificial Sequence
  ENSG00000166501_22 (sequence is synthesized)
tgctttgcctaagaggaatccctctatttcacctgttctggaggcaccagaccttgaaaagaacatgctcaaaataaaatgttatctgttatttttgtaaactcaaagttaagatgatca

SEQ ID NO: 533725 - DNA, 120 bp, Artificial Sequence
  ENSG00000166501_23 (sequence is synthesized)
aagttctaaaattccaagaatgtgcttttagacggtctcaatctaaaagcacttcaaggggtcaaagggcaaccagcttgggtgctacctcagtgttgtagtttctgatactttatgtct

SEQ ID NO: 533726 - DNA, 120 bp, Artificial Sequence
  ENSG00000166501_24 (sequence is synthesized)
ttgctcaccctcatccccaaactacttgaaaagggcatttggcaccactctctgaaacaacacagtcactctagcaaggcccccaaagggccctggttttacattacatttcaaacttta

SEQ ID NO: 533727 - DNA, 120 bp, Artificial Sequence
  ENSG00000166501_25 (sequence is synthesized)
aaaaaagaaaaaaaaagaaaaaaaaaggtgactcacattgttacacatgctttaaaatatgtattcaaatgttattaaccacaatgacgacctgctttgatttaaccaagaagacggctg

SEQ ID NO: 533728 - DNA, 120 bp, Artificial Sequence
  ENSG00000166501_26 (sequence is synthesized)
acaatgacgacctgctttgatttaaccaagaagacggctgcggagcctagcagactcaggcctgtgggaatgggatttgttacaaatctaggtttgttactggcttcagaaagctaatta

SEQ ID NO: 533729 - DNA, 120 bp, Artificial Sequence
  ENSG00000166501_27 (sequence is synthesized)
agtgctctgaaaaagacaccgtttcttgaaacaaagatggttgtattcctcactttgatgttgttttgcaagatgtttgtggaaatgttcatttgtatctggatctctgttatgtgccat

SEQ ID NO: 533730 - DNA, 120 bp, Artificial Sequence
  ENSG00000166501_28 (sequence is synthesized)
aaaaaaaaaaaagaaaagaagaagaaatactatttcaaggaaaactgctctttttgagaaacgtggacctaaactacaaagtgggaactgaggagggaactcaggagaaaggaactaact

SEQ ID NO: 533731 - DNA, 120 bp, Artificial Sequence
  ENSG00000166501_29 (sequence is synthesized)
gagggaactcaggagaaaggaactaactgcggagctttaatcttggccccagtgttcagccactcggaggggcgggggctgtggcccattcaggggctgctggtgggctgtagtggggtg

SEQ ID NO: 533732 - DNA, 120 bp, Artificial Sequence
  ENSG00000166501_30 (sequence is synthesized)
ggatgacctggccagagccaacgaggatactggagcccaaagtcaagtttagagaccagctgggaacgtgaatggggctcttgattttcttatcaaaatcaccactcctcccagcttgga

SEQ ID NO: 533733 - DNA, 120 bp, Artificial Sequence
  ENSG00000166501_31 (sequence is synthesized)
ctaaatattctttctagcaagcagctttgtgagctccctgaagcccaaggaaacccttcggtgggagaaatttcatttctgtctgagaggattaaggcagcaggtgactccccctcctcg

SEQ ID NO: 533734 - DNA, 120 bp, Artificial Sequence
  ENSG00000166501_32 (sequence is synthesized)
cctgccgtgtcctgctattctcaggcagctctaaggagaattcttatcacagttcaagtgatttccagaagttccagggcttctgagagaccatcaagggaactttaacaacttgacaaa

SEQ ID NO: 533735 - DNA, 120 bp, Artificial Sequence
  ENSG00000166501_33 (sequence is synthesized)
cctcttcttgcttcaggcttggggaccgtccctgctgtccccactgtggtggcaatcaggacctaaggtgaagcaaacttgaagttctatctgacaagtttaggcagtaagagaaggagg

SEQ ID NO: 533736 - DNA, 120 bp, Artificial Sequence
  ENSG00000166501_34 (sequence is synthesized)
gaaatcggagcaaagctccctcactttattgttgagaaactggcatctggaaagaggaaggaatttgcccaaagtcagtcagctgggataaaaacctgggtgtcctgtccagaaagtgca

SEQ ID NO: 533737 - DNA, 120 bp, Artificial Sequence
  ENSG00000166501_35 (sequence is synthesized)
gggtgctttctgctctgtagcaaggcagcagacatctctgagccaggcccaccaacaggcccttatctggtggttggatcatgatcccattttgcttggacatgctctcaggaagataaa

SEQ ID NO: 533738 - DNA, 120 bp, Artificial Sequence
  ENSG00000166501_36 (sequence is synthesized)
aaccatggagaaacactaggccattgacaaatgatctgagacaactttagaaaacaatgtaggatgaatggaaagagaaagaaaggaaagaaagaagaaaaagaaagaaggaaagaaaga

SEQ ID NO: 533739 - DNA, 120 bp, Artificial Sequence
  ENSG00000166501_37 (sequence is synthesized)
aagagaaaggaaggaaggaaagaaggaaggaaaagaaggaaggaaggaaggaatatagtgttataaatactgcactcaacattttccaaattcttgccattatttttcaaaagtttaata

SEQ ID NO: 533740 - DNA, 120 bp, Artificial Sequence
  ENSG00000166501_38 (sequence is synthesized)
gtttgcagaaatagatactcaagccaaagtctgttttagagaaactttccatggaaagtcagaatttctaccacttccttttctatccacatttccagtgcagaagaaactgagaaacag

SEQ ID NO: 533741 - DNA, 120 bp, Artificial Sequence
  ENSG00000166501_39 (sequence is synthesized)
agctttttgaagagaggacagggccatagcaacaaggaccttcttgggggattaatgggaggtcagtagaattaataaccctccttggatgagtgctactgttttcacatggcttcagat

SEQ ID NO: 533742 - DNA, 120 bp, Artificial Sequence
  ENSG00000166501_40 (sequence is synthesized)
gctatcaacctcaaagaaatgatctcaacagagaagcttattctctcccaacttctacggtaaaatccaggagtattttctctggggatctgcccacaggacaaagtccataaaagcaag

SEQ ID NO: 533743 - DNA, 120 bp, Artificial Sequence
  ENSG00000166501_41 (sequence is synthesized)
tcctgtctggaccatgtggttatctgaagcattagccatcaccagcacaacaaacggggcagggctttccaaggtggggctggtcagaagggaatctttgataagaggcccacaggcagg

SEQ ID NO: 533744 - DNA, 120 bp, Artificial Sequence
  ENSG00000166501_42 (sequence is synthesized)
gaaagcgaaatagggttgatgagaccaggggagacctaaaaaaaaggcagctttgtgtcttctagctccaaatatacctgccttttagctcacacactgtcctggagttctcagaccttt

SEQ ID NO: 533745 - DNA, 120 bp, Artificial Sequence
  ENSG00000166501_43 (sequence is synthesized)
aggggccctaacacagttcagttcatacaggggttcaaaagggacagtggcccatttgggagacctttaggatcaatgggaatcaattccattgttttgcctcagagtaaagtttctggc

SEQ ID NO: 533746 - DNA, 120 bp, Artificial Sequence
  ENSG00000166501_44 (sequence is synthesized)
tcggggacaattataagttgcaaaaaggatagaggcatatcccaagtcttccttcattccacaaataattacaaacaacctactgtgtgccaggcactattcttagcactggaaatacac

SEQ ID NO: 533747 - DNA, 120 bp, Artificial Sequence
  ENSG00000166501_45 (sequence is synthesized)
tagtgaagaagcagatgaggaccctgtttattgtttctctccaagaaattctccaagaatattgtttcttggagagaaataataaataaacaagacaatttctgaaagcaataagtgcaa

SEQ ID NO: 533748 - DNA, 120 bp, Artificial Sequence
  ENSG00000166501_46 (sequence is synthesized)
tcaagataattaaaggatgctaaagtgtgacttgtggggattgggagagagatgcacagacaatattaaagaggaggcattcgagctttgttgtgaacaccggaagtaacatgccgagcg

SEQ ID NO: 533749 - DNA, 120 bp, Artificial Sequence
  ENSG00000166501_47 (sequence is synthesized)
cctgggggatggaaactcctatagcaccccacaggctaacagcaagcaggacaagacaaaaagggcaggtgggacatggtagagatggaccctacccaggaaacagctccatcagcatct

SEQ ID NO: 533750 - DNA, 120 bp, Artificial Sequence
  ENSG00000166501_48 (sequence is synthesized)
tagcctgccccactctagccacacatacccacgtgtgctcctgagttcagtgtgcccacctcactcccacaccctcacatagacttggcaagagtaaggagggaactccatagagacatt

SEQ ID NO: 533751 - DNA, 120 bp, Artificial Sequence
  ENSG00000166501_49 (sequence is synthesized)
ttacctatctcaggggagcagccacaaagaagcaagtcttgtaaaaggtcttttgcaaaggagagtgaacccagcaatgagagatccttaacagctagtgcccattagggggctaaacct

SEQ ID NO: 533752 - DNA, 120 bp, Artificial Sequence
  ENSG00000166501_50 (sequence is synthesized)
aaagcctgggtggtgatggctcaaacgctaatgagtcagtgaatccttaccgaccccctggcctttataatctgaggcaactttggctgcagcccgggaatgtgcagggcactagggaat

SEQ ID NO: 533753 - DNA, 120 bp, Artificial Sequence
  ENSG00000166501_51 (sequence is synthesized)
acaaggccttcttccctggttgtcttgtaataaaacagccatggggttgtccctccagtccgagagactgtgatgaggcctacatagcagcgatgtggtcaggtaaaaatcaggaaccca

SEQ ID NO: 533754 - DNA, 120 bp, Artificial Sequence
  ENSG00000166501_52 (sequence is synthesized)
ctgaaatcttgggcaagccaccctgcctgcttgtgcctcggttctctcatatgtcatatataggaggtgaggactccagctccacctgccccaggtgggtgtggtgatgatgaggaaaga

SEQ ID NO: 533755 - DNA, 120 bp, Artificial Sequence
  ENSG00000166501_53 (sequence is synthesized)
caagaggcttgcaaggaccctgaagaggtcggagcatcatacagattcctttattagcccacattctgatgttccctggtgagacttgccccaagcaattgctagtaaatgggggttaat

SEQ ID NO: 533756 - DNA, 120 bp, Artificial Sequence
  ENSG00000166501_54 (sequence is synthesized)
gctagtaaatgggggttaatttcttctccacctccctactgaacaaaaaaagaaatgccagacttactaggagaatcgagttgctttgagtttcttttgttttgttttgttttgttttgt

SEQ ID NO: 533757 - DNA, 120 bp, Artificial Sequence
  ENSG00000166501_55 (sequence is synthesized)
ccctcctttaagctttgggttttctctcttatagtttgttgacacatgctaaaaatgtctttggagagaacttctgcctgataaacacccaattctagactgtgggtggattttcgagct

SEQ ID NO: 533758 - DNA, 120 bp, Artificial Sequence
  ENSG00000166501_56 (sequence is synthesized)
gacggtggtcaattcctttcattaagcagtgatctgatttctccacatggccattctgccttcttgggggcagagtagatgggcagcagttcaccttttcagagaaagaggtcttctagc

SEQ ID NO: 533759 - DNA, 120 bp, Artificial Sequence
  ENSG00000166501_57 (sequence is synthesized)
cacctgggctgctactgaatggttttctccaggacgctctacctaatgattatttctataacattaagcatggtaataagtagcttccaattcaattcatcctaaagccaaagaaaatac

SEQ ID NO: 533760 - DNA, 120 bp, Artificial Sequence
  ENSG00000166501_58 (sequence is synthesized)
acacacacacacacacacaccactttatggcaattcttaactgacattcaatgacttacttcttttcttagaaaatttccaccacatttctatccccaagccaacatacaatgtgaaatg

SEQ ID NO: 533761 - DNA, 120 bp, Artificial Sequence
  ENSG00000166501_59 (sequence is synthesized)
tctatccccaagccaacatacaatgtgaaatgaaagccagtgcgtggagtgcagctgctaaaaattttcagcacagggctctttctgactctgctcatgagatggtatcagccacccaat

SEQ ID NO: 533762 - DNA, 120 bp, Artificial Sequence
  ENSG00000166501_60 (sequence is synthesized)
gactggcgtatcttggtcctgtgtctttcttcttacgctgtgttaatgtgtttactttccatttggcagagagacaagagagacacctccaacttcgacaaagagttcaccagacagcct

SEQ ID NO: 533763 - DNA, 120 bp, Artificial Sequence
  ENSG00000166501_61 (sequence is synthesized)
gtggaactgacccccactgataaactcttcatcatgaacttggaccaaaatgaatttgctggcttctcttatactaacccagagtttgtcattaatgtgtaggtgaatgcaaactccatc

SEQ ID NO: 533764 - DNA, 120 bp, Artificial Sequence
  ENSG00000166501_62 (sequence is synthesized)
gttgagcctggggtgtaagacttcaagccaagcgtatgtatcaattctagtcttccaggattcacggtgcacatgctggcattcaacatgtggaaagcttgtcttagagggcttttcttt

SEQ ID NO: 533765 - DNA, 120 bp, Artificial Sequence
  ENSG00000166501_63 (sequence is synthesized)
gtatgtgtagcttgctagtttgttttctacatttgaaaatgtttagtttagaataagcgcattatccaattatagaggtacaattttccaaacttccagaaactcatcaaatgaacagac

SEQ ID NO: 533766 - DNA, 120 bp, Artificial Sequence
  ENSG00000166501_64 (sequence is synthesized)
aatgtcaaaactactgtgtctgataccaaaatgcttcagtatttgtaatttttcaagtcagaagctgatgttcctggtaaaagtttttacagttattctataatatcttctttgaatgct

SEQ ID NO: 533767 - DNA, 120 bp, Artificial Sequence
  ENSG00000166501_65 (sequence is synthesized)
aagcatgagcgatatttttaaaaattgtgagtaagctttgcagttactgtgaactattgtctcttggaggaagttttttgtttaagaattgatatgattaaactgaattaatatatgcaa

SEQ ID NO: 533768 - DNA, 120 bp, Artificial Sequence
  ENSG00000166501_66 (sequence is synthesized)
ggaagtccctgctgtgtggatagcacccttctcgatttccagcaaagatacagatgctctcttgtttttatatttcttttggtaatttccgtggaattttggaagaaaatttggaatatt

SEQ ID NO: 533769 - DNA, 120 bp, Artificial Sequence
  ENSG00000166501_67 (sequence is synthesized)
aaatgtggaggcgtagaggctcaaattgtcttctctgctttgaatcacctagcccatttttggaagctgcgtaagaagattcgtgaatggagagaaaacattgtgatgaaaattttaaac

SEQ ID NO: 533770 - DNA, 120 bp, Artificial Sequence
  ENSG00000166501_68 (sequence is synthesized)
ttcaaaggaaaagaaagaacaggatgtggtcatggaattgtttggctttcaagagccactgaagggctttcagcattcaagtggcacagtcagagctgcattttcagaacagtcattagc

SEQ ID NO: 533771 - DNA, 120 bp, Artificial Sequence
  ENSG00000166501_69 (sequence is synthesized)
gtgtatgtattcacacatatgcacaaaatcactggttactaagatggacattttccattggcccagcttagtctctataaagatggaaacgacgatgcctattgaatttttgtttcttcg

SEQ ID NO: 533772 - DNA, 120 bp, Artificial Sequence
  ENSG00000166501_70 (sequence is synthesized)
attcaattattgtaactgtcttagctgacaactttctgagaatggttcttgggtgagcagagttcagatccatttttggactgtgataaaggatctaattttgccctcattctttctctt

SEQ ID NO: 533773 - DNA, 120 bp, Artificial Sequence
  ENSG00000166501_71 (sequence is synthesized)
ctgggcacagggctccagcgatggtcccaacaggtacaatgacctctggggaccaagttcagttcttggtgagttctccagtgcctctcgatgtaggatgaaccgttggcatgctccact

SEQ ID NO: 533774 - DNA, 120 bp, Artificial Sequence
  ENSG00000166501_72 (sequence is synthesized)
aagctattgtgtggtttagccattgttcttcccacctctgccacaagaccaagaaagggctgttgcctcagctgcgtcctgggatggaaaagacacaggaagtagaatcacagagccaca

SEQ ID NO: 533775 - DNA, 120 bp, Artificial Sequence
  ENSG00000166501_73 (sequence is synthesized)
ctccagaactaacttgggcatgtgttctgccaggcagcatcgcccactgccctggcaaagtttgggcagctctatatggtggtagaaaatctcggtggactgtgtcaccaatgatggttc

SEQ ID NO: 533776 - DNA, 120 bp, Artificial Sequence
  ENSG00000166501_74 (sequence is synthesized)
agagcctcaaacaggagactgtttgctctaagaggagactcacagagaggacctcagtacttctttctcttgcttgtggaccctacatttgaggagcaggcaaagaattttggctggcag

SEQ ID NO: 533777 - DNA, 120 bp, Artificial Sequence
  ENSG00000166501_75 (sequence is synthesized)
gggcttcgggaagcagggattccagtgccaaggattggatggaaatctgcattccttgatcactcagtctatagggtgaacttacaatggccctcatgcttaatcttgaaatacagggat

SEQ ID NO: 533778 - DNA, 120 bp, Artificial Sequence
  ENSG00000166501_76 (sequence is synthesized)
ggtctgatggagtgtgctggagaccctgctgagatctttggacaactcctctccagtccactacctgaatcctttctcttctcctcaaaaaaatctgagactatccaaatgaagagtaaa

SEQ ID NO: 533779 - DNA, 120 bp, Artificial Sequence
  ENSG00000166501_77 (sequence is synthesized)
taaagggagaagtaagaaggaaacatgagacagagaggcagcaggagcagaatgaaacttggggagcagagggagaagccaagaaaacttactggacttggagccaataaattggccatg

SEQ ID NO: 533780 - DNA, 120 bp, Artificial Sequence
  ENSG00000166501_78 (sequence is synthesized)
gcttaggctggtttaacagagattatgctaggaggattttctaacattcatgtcctgattaccccttatctgattccttagcagtagccttcagtggcctcagagaattccaggttcagc

SEQ ID NO: 533781 - DNA, 120 bp, Artificial Sequence
  ENSG00000166501_79 (sequence is synthesized)
tgtctgaacagttcaatgactgtttgtaagttctgacttacgatcaaggcaggaaatgtgaaaagcatttttaaaaaggaaaaaaaccatccggcgttgttaacatttttgttattccag

SEQ ID NO: 533782 - DNA, 120 bp, Artificial Sequence
  ENSG00000166501_80 (sequence is synthesized)
tattttcccatgcatataaatatgtgtacttcttttatttttcacaagagtactctcacaccataatattgttttataaccctcttttccactgtgctctagtgtaaacattttactgta

SEQ ID NO: 533783 - DNA, 120 bp, Artificial Sequence
  ENSG00000166501_81 (sequence is synthesized)
ccaaatctttttccacaaaaggatttttaattactgcatagatttctattgaacggatgtactaaaatttacctaaacagctcttattattcaacatgattcaaccattgttacaaataa

SEQ ID NO: 533784 - DNA, 120 bp, Artificial Sequence
  ENSG00000166501_82 (sequence is synthesized)
agggaagagcctcattaaggttagcaaggggcttgttcctgggaagttctaaggaccgcctggggctgccacataaggaactccccttttctcattttgtctccgtttgctgctttgtgg

SEQ ID NO: 533785 - DNA, 120 bp, Artificial Sequence
  ENSG00000166501_83 (sequence is synthesized)
tgttgcccagctagtgaaactataatccttcatccagttcatcatatcccatgtccccttctccactatacaattgctgaacttctgcctacccccagtttgtccttaaggcaaccccat

SEQ ID NO: 533786 - DNA, 120 bp, Artificial Sequence
  ENSG00000166501_84 (sequence is synthesized)
caccctctaaaccaccctttgaatccatctgtactttcagcactttatgagctatatagctgaccatccatgggttctttaatgtcctacacctagttcaatattgtattgaattctgag

SEQ ID NO: 533787 - DNA, 120 bp, Artificial Sequence
  ENSG00000166501_85 (sequence is synthesized)
acaaaggcggaagactcttgggcacccgcctgtggctgggagtttgcacctggggtacagaggcagggaggaaggcgggtgactctgtgggtaactagctggaggctgggccccccgggc

SEQ ID NO: 533788 - DNA, 120 bp, Artificial Sequence
  ENSG00000166503_0 (sequence is synthesized)
gagaaggaattcggagcagacgcgaggcccggcgctcgcgccgcgcccgggagcccgggagggagaccggcagcggcggcatgaggcaggcgacgcggcgctggtgagcagcgcgcgcgg

SEQ ID NO: 533789 - DNA, 80 bp, Artificial Sequence
  ENSG00000166503_1 (sequence is synthesized)
gggaccttggcgcggccggacgcgggcgagcgccgaacggccgggggctcccctcccccgctgccgggccgtgatttgcc

SEQ ID NO: 533790 - DNA, 120 bp, Artificial Sequence
  ENSG00000166503_2 (sequence is synthesized)
cgcttcccctcgtcggagcggccgctcgtccgcccggcttgaggcccgcggggagcgcggcgcaattcgtcggcccgcgggggggcggcctcccggcatcttcgcggcgaccaaggacta

SEQ ID NO: 533791 - DNA, 120 bp, Artificial Sequence
  ENSG00000166503_3 (sequence is synthesized)
ccggcatcttcgcggcgaccaaggactaccaggaaggggagcggctgggatggcgcgtccgcggccccgcgagtacaaagcgggcgacctggtcttcgccaagatgaagggctacccgca

SEQ ID NO: 533792 - DNA, 120 bp, Artificial Sequence
  ENSG00000166503_4 (sequence is synthesized)
ctggccggcccggattgatgaactcccagagggcgctgtgaagcctccagcaaacaagtatcctatcttcttttttggcacccatgaaactgcatttctaggtcccaaagacctttttcc

SEQ ID NO: 533793 - DNA, 120 bp, Artificial Sequence
  ENSG00000166503_5 (sequence is synthesized)
atataaggagtacaaagacaagtttggaaagtcaaacaaacggaaaggatttaacgaaggattgtgggaaatagaaaataacccaggagtaaagtttactggctaccaggcaattcagca

SEQ ID NO: 533794 - DNA, 120 bp, Artificial Sequence
  ENSG00000166503_6 (sequence is synthesized)
acagagctcttcagaaactgagggagaaggtggaaatactgcagatgcaagcagtgaggaagaaggtgatagagtagaagaagatggaaaaggcaaaagaaagaatgaaaaagcaggctc

SEQ ID NO: 533795 - DNA, 120 bp, Artificial Sequence
  ENSG00000166503_7 (sequence is synthesized)
aaaacggaaaaagtcatatacttcaaagaaatcctctaaacagtcccggaaatctccaggagatgaagatgacaaagactgcaaagaagaggaaaacaaaagcagctctgagggtggaga

SEQ ID NO: 533796 - DNA, 120 bp, Artificial Sequence
  ENSG00000166503_8 (sequence is synthesized)
tgcgggcaacgacacaagaaacacaacttcagacttgcagaaaaccagtgaagggacctaactaccataatgaatgctgcatattaagagaaaccacaagaaggttatatgtttggttgt

SEQ ID NO: 533797 - DNA, 120 bp, Artificial Sequence
  ENSG00000166503_9 (sequence is synthesized)
ctaatattcttggatttgatatgaaccaacacatagtccttgttgtcattgacagaaccccagtttgtatgtacattattcatattcctctctgttgtgtttcggggggaaaagacattt

SEQ ID NO: 533798 - DNA, 120 bp, Artificial Sequence
  ENSG00000166503_10 (sequence is synthesized)
tagccttttttaaaagttactgatttaatttcatgttatttggttgcatgaagttgcccttaaccactaaggattatcaagatttttgcgcagacttatacatgtctaggatccttttat

SEQ ID NO: 533799 - DNA, 120 bp, Artificial Sequence
  ENSG00000166503_11 (sequence is synthesized)
caaggcagttatgatcatcgttttcctgccttgaccccaccatcatcaaacactcagttaaatataaattaacattttttagatgaccactcaacataatgcttaagaatggaatttcct

SEQ ID NO: 533800 - DNA, 120 bp, Artificial Sequence
  ENSG00000166503_12 (sequence is synthesized)
ctctgtgacagaacccaggaattaattcctaaatacataacgttggtatattgaagacgaaattaaaattgtccttcagttttgaggccatgtgtaaagtttaaccatattgtaaaatat

SEQ ID NO: 533801 - DNA, 120 bp, Artificial Sequence
  ENSG00000166503_13 (sequence is synthesized)
ctattccgtattagaaatagctagttgacagcttatacttctcaaaattcatattgttatgtacacaaactaagtttctatatgtgaagttagtgagtctttttgtgttactccaaaata

SEQ ID NO: 533802 - DNA, 120 bp, Artificial Sequence
  ENSG00000166503_14 (sequence is synthesized)
aaggcaatgatttatttttttcccagtgccaatacaattttgagctaagcactcaaggtggatactttacattttaaagctggaatcagcaacagccctatgggaaaccagacaaagcat

SEQ ID NO: 533803 - DNA, 120 bp, Artificial Sequence
  ENSG00000166503_15 (sequence is synthesized)
tgacttttaaatgtagacttttaaaataaactgttttcttttggaactacaattagaatagttaatattcatccttaaaccattattatgtgtacattattgttgctattgtgataatag

SEQ ID NO: 533804 - DNA, 120 bp, Artificial Sequence
  ENSG00000166503_16 (sequence is synthesized)
agaattttatttatttttatgccagcttatattgtgagaacacatttagtcagtttgggttttatcaatcctgttaatgcttgtccttggaacatctttcgcgtattcacggtttgtagt

SEQ ID NO: 533805 - DNA, 120 bp, Artificial Sequence
  ENSG00000166503_17 (sequence is synthesized)
tgaaaagtttactgtaaaaaaatcaaaaacaaaaaaatgtattgtttttacagaataaatttattggaatgtgtactgggagtaagatttgaggttgtaagcaaactaagttagtgtaat

SEQ ID NO: 533806 - DNA, 120 bp, Artificial Sequence
  ENSG00000166503_18 (sequence is synthesized)
ttggcttcatatatgtaacgtgaggtattaatgtaattcatatattaaagcaaaaattgttcacagcaagctgacaatagaatcaagtgcaggtgagggtttttctttttctttcttttt

SEQ ID NO: 533807 - DNA, 120 bp, Artificial Sequence
  ENSG00000166503_19 (sequence is synthesized)
ttttttttaaacactctctgggttttagattatttgaaaacactgtaggggatgatggggagatgactacatgatttgcttacacttacatatttaccagcccagtggaccctagatttt

SEQ ID NO: 533808 - DNA, 120 bp, Artificial Sequence
  ENSG00000166503_20 (sequence is synthesized)
gtaatttgatattatccatgcattgatttgtatcccattttcttttggttttcttgatgagagctaataaaaacatgagaaaatgtgagcagacctaaaagcctagggccgttaataatg

SEQ ID NO: 533809 - DNA, 120 bp, Artificial Sequence
  ENSG00000166503_21 (sequence is synthesized)
atgatggtgatgatggcagctaagggtatgaaagcaccagtccatttatcattccagggcacagtgaggaggtggctgtttgtatttttggtgtgtttctttcatttagtgaatactgat

SEQ ID NO: 533810 - DNA, 120 bp, Artificial Sequence
  ENSG00000166503_22 (sequence is synthesized)
tttctctagtatactcaacatacaatcccaaacatgaaaagttcataaaaagatagtagggatgtcgatctaatacttcttccttaaaaggtcctttttaattttgaatatttgaatgta

SEQ ID NO: 533811 - DNA, 120 bp, Artificial Sequence
  ENSG00000166503_23 (sequence is synthesized)
ttttttaattaatgaaatttaattcatcaaaagacctcttcattgctcacactgaaacataaggggaatgtagatggcattttgaattggaatatacaactcacaaattttctttaaaag

SEQ ID NO: 533812 - DNA, 120 bp, Artificial Sequence
  ENSG00000166503_24 (sequence is synthesized)
cgttttatgtgtatatatgaaatgtttcaaatttaataagatttgtctttataagaggccaaaaataattttattaaaaatatacacagaaatacaatagaaatatttccagccaccaat

SEQ ID NO: 533813 - DNA, 120 bp, Artificial Sequence
  ENSG00000166503_25 (sequence is synthesized)
aaaacaaatgttcattaaggatagagataaagttactgatccctatttagctgtttaaattcacacaaaaaaatttagtaaaagtaattttcttgaaacagcagcaaataataaactttc

SEQ ID NO: 533814 - DNA, 120 bp, Artificial Sequence
  ENSG00000166503_26 (sequence is synthesized)
cttgggaaaacatttttcaaacaacatttaaaaatattctgatgatttgccttttatattgagtttaataatgaagcatattcatcttatttgcaaaagttactcctccagtctgcattc

SEQ ID NO: 533815 - DNA, 120 bp, Artificial Sequence
  ENSG00000166503_27 (sequence is synthesized)
actgttttgaattttttaatatgcacaggccatattctcttttgaatagtttcatttcatgctcactactgttggcactaaattgtaattttttacacttataattattttatatgtcaa

SEQ ID NO: 533816 - DNA, 120 bp, Artificial Sequence
  ENSG00000166503_28 (sequence is synthesized)
acaatattgagatggatgatcaagtttattcacaaatgattttgaatatatttctttaaacaaactgtttctcaagaatttccattttccttcaaaaaaaatttacacaataccatatag

SEQ ID NO: 533817 - DNA, 120 bp, Artificial Sequence
  ENSG00000166503_29 (sequence is synthesized)
ctcacacatacagtgcagagcaagaatgtacatattcttaagtactcacgtatgagaagagagtgaaatgggacaaaatatcagtaccagtataacaaaagttagtaatttagaaaggag

SEQ ID NO: 533818 - DNA, 120 bp, Artificial Sequence
  ENSG00000166503_30 (sequence is synthesized)
gaacatgaagtaatatttttattccactttttcttctgcctttgtttttatgaagaactctggtttgtagatacaacgataggccaagagctgaggaagaactccatatgctatgtttaa

SEQ ID NO: 533819 - DNA, 120 bp, Artificial Sequence
  ENSG00000166503_31 (sequence is synthesized)
tgctaaaaaaaggatttttgcttcttcagggactctgtagacataagcagttctagcatgaagagatgcaccaatgtgagaaaactgagcctgttgcatttaaaaaaaaaaaattgagta

SEQ ID NO: 533820 - DNA, 120 bp, Artificial Sequence
  ENSG00000166503_32 (sequence is synthesized)
agcatgaaacgtgttcagttggatgcatgatgagttctgaatggttcattcaggctacgtttctgtgccctcaaaaccagtctcacctgcaggcaaaataccttcaaacaatccagagtc

SEQ ID NO: 533821 - DNA, 120 bp, Artificial Sequence
  ENSG00000166503_33 (sequence is synthesized)
tttaatgtcagagtctttcattaaatttagtccttgattaaatttagggccattcttgatatgactgttcaaataaagtagatattatttagtgtagttttatcatgccagttgtgtttt

SEQ ID NO: 533822 - DNA, 120 bp, Artificial Sequence
  ENSG00000166503_34 (sequence is synthesized)
ttaaccatcaagtgccccttaccgaacattagtggctcaatctaatagaaaaatctgaataaaatctcaaatttttttctgatttgcgttctggagatcctgcatacagactcagttgtg

SEQ ID NO: 533823 - DNA, 120 bp, Artificial Sequence
  ENSG00000166503_35 (sequence is synthesized)
gttcacaaattgcgttccaataaaaatgaagaaagcgcagagttttaaaaaacaaatatttttagcataaactattgaaagggaagcactggggggacctcagcttcatttatcagtctt

SEQ ID NO: 533824 - DNA, 120 bp, Artificial Sequence
  ENSG00000166503_36 (sequence is synthesized)
tcatctactccttgcagcaagagctcataccctttccctatgtgttttttgtttattcatttattcatgtatttgttttttctgcagcttttaaaatattaagggttgtttgtaagataa

SEQ ID NO: 533825 - DNA, 120 bp, Artificial Sequence
  ENSG00000166503_37 (sequence is synthesized)
ggttgttaccaacttgggtggaggtaggagtacggttgctctttgtaaaatggcaaatgtacatgcaggcaacctttttaaatcaaattataatttatttagaagtacgacatgtcagca

SEQ ID NO: 533826 - DNA, 120 bp, Artificial Sequence
  ENSG00000166503_38 (sequence is synthesized)
ttatccgcatttgcaaaatggcctccctctctacttatatacttattcagaaaacacattcagaatgtgccaattggtcttttttgatatttttcgcaagcacagaggaaaaccgtattg

SEQ ID NO: 533827 - DNA, 120 bp, Artificial Sequence
  ENSG00000166503_39 (sequence is synthesized)
gaaagggtaaaacagaccacagcaggattaaaagctcctgtcagaaaatttcctcagaaggcttgtatcattacaaaatgtacccctggagtctgcattttcatatcttgctgaaattca

SEQ ID NO: 533828 - DNA, 120 bp, Artificial Sequence
  ENSG00000166503_40 (sequence is synthesized)
agatacacatgaataaaggattgggaatctaaatgtaataagtagtaaattatcagttcatcaggatcaaagagacaaaagactgcactatagagaaggcatagaagtaacaagaatgaa

SEQ ID NO: 533829 - DNA, 120 bp, Artificial Sequence
  ENSG00000166503_41 (sequence is synthesized)
gaactagataatttgctttaaatacatataagttattttacatttcttccatatgaaaccaatttattctgctgagtgatttcacagataaaggtgttacttacttgacttcaccatgac

SEQ ID NO: 533830 - DNA, 120 bp, Artificial Sequence
  ENSG00000166503_42 (sequence is synthesized)
aagaaaaggacaagtttttttaagcagcatctttatgaattttttatcagtggcagatattttaatgggctgcatttttacaaattcctgatatattctggagacctgtggtacattttt

SEQ ID NO: 533831 - DNA, 120 bp, Artificial Sequence
  ENSG00000166503_43 (sequence is synthesized)
gctactctggagatataaattaaattagcatgatgtattgccaaggaccagcacgtggattgtctacattgtgatccatgaggcactgagaggactcggccctcagatacaactcccctg

SEQ ID NO: 533832 - DNA, 120 bp, Artificial Sequence
  ENSG00000166503_44 (sequence is synthesized)
ggtagatgcccaggcagaacccagcaaatgtatatgcatctctgggctctgaggacaaaatgccttgagagtaaagggcactttcagggctgccctgaggaggtgctttctggacattct

SEQ ID NO: 533833 - DNA, 120 bp, Artificial Sequence
  ENSG00000166503_45 (sequence is synthesized)
aggaactctgagcaggagcatggctcccatactgtttttccttagggcctgttttgaataatagtgtttttctgaatatataaccaagcattttctctggactggaagccacatttgatc

SEQ ID NO: 533834 - DNA, 120 bp, Artificial Sequence
  ENSG00000166503_46 (sequence is synthesized)
cctggttctcagaaatctgggtttggtggttctgtctttatagatacttgtacacatcacaaaatcaccaaatttggggaaatgccaaccatactttgagagaataaatatgagcagttg

SEQ ID NO: 533835 - DNA, 120 bp, Artificial Sequence
  ENSG00000166503_47 (sequence is synthesized)
tgcctacttgcataggggagcctgtgtaaaaagtcagtgattccgtaggctcttttcctgcactaaccagtgcagttaatacctcactttcatgaacagcaaactcatggcaacattaag

SEQ ID NO: 533836 - DNA, 120 bp, Artificial Sequence
  ENSG00000166503_48 (sequence is synthesized)
agactctgtctttaaaaaaaaaaaaagattcatgtccttagattagattgtaagcccactgggcaggtactgtgtctaatgttttgtgtggcacctgtcacattgttagagctcaataaa

SEQ ID NO: 533837 - DNA, 120 bp, Artificial Sequence
  ENSG00000166503_49 (sequence is synthesized)
gttttgtgtggcacctgtcacattgttagagctcaataaacgttcaacaacaatggacttgtgactgtcaaaatacaaaaagggtctacaaagcatttctctagttttgtatgtatttta

SEQ ID NO: 533838 - DNA, 120 bp, Artificial Sequence
  ENSG00000166503_50 (sequence is synthesized)
aaaagaggcatttgtatgtgagagaagaactctaaggccagtggtgtgcagctcccagtactgctcatagtcctaatggatgtacttatggtggccacacttccagctgagtgagcacct

SEQ ID NO: 533839 - DNA, 120 bp, Artificial Sequence
  ENSG00000166503_51 (sequence is synthesized)
gaccatagctttctcctaaggcataggatgttaagtgttcagggttctgaagttcagaaaaacagtctcacctgaggaggtttctcttcccaagcacatagctaataaagggctgcaggt

SEQ ID NO: 533840 - DNA, 120 bp, Artificial Sequence
  ENSG00000166503_52 (sequence is synthesized)
tttctcctgggtgatgttcccagcagcacaaggcctctcatggcaggacctgaagagctcagcctgagcctgtgctggggtcaggtggctcagtgaactcaatgctgctgaattaacagg

SEQ ID NO: 533841 - DNA, 120 bp, Artificial Sequence
  ENSG00000166503_53 (sequence is synthesized)
aggcccaggattacagatatgagttgttgatcctagaaatttctccagaatttagcaatgtgaggttgagtccctaataatttttcttccacttcattctaaatcattttcaccttacag

SEQ ID NO: 533842 - DNA, 120 bp, Artificial Sequence
  ENSG00000166503_54 (sequence is synthesized)
aaataattaagagatatactctgatttttttttaagaatggatgattggaatggcaaatgagacaataaggtgaacaaaggttaaattttaagagctgttttcttacatgtatagagaca

SEQ ID NO: 533843 - DNA, 120 bp, Artificial Sequence
  ENSG00000166503_55 (sequence is synthesized)
atctgtaaaggataactaaaaaagttaatcgtggttccacaaggaggaactgaaagagtgttatatgtccatgtgaatgttataggcagaaaacttaggtgaccattgggatgatagcca

SEQ ID NO: 533844 - DNA, 120 bp, Artificial Sequence
  ENSG00000166503_56 (sequence is synthesized)
gggtcttttgctaatacagtataaatagctaatctagaactgtgttatcttttcttagagttttctgagcaacatagttcattggttcagaacactgactttggaactagacatccagag

SEQ ID NO: 533845 - DNA, 120 bp, Artificial Sequence
  ENSG00000166503_57 (sequence is synthesized)
tcaaatcacagctccaccacaaaccagccgtatggcctcgggtgaggtgtggaacccacctcataggttgttatgagggttcagtgaggtgatgtttgtgacatgcttagacagtgtcaa

SEQ ID NO: 533846 - DNA, 120 bp, Artificial Sequence
  ENSG00000166503_58 (sequence is synthesized)
gcacttggggctattctgtagacacaagtacaaaactgaaatacccattcatgatctggtgctcgactgtagaaaatctgggccctttgtttttagattctcttgaccttttgacctttt

SEQ ID NO: 533847 - DNA, 120 bp, Artificial Sequence
  ENSG00000166503_59 (sequence is synthesized)
tactgtgagtgtctccatgaaaggataagtacataaaagatgttaaatcagtataatttaatactaaataaagatgtttagcaatgaatcacaccagaagcaaatgaagaaaacaagatt

SEQ ID NO: 533848 - DNA, 120 bp, Artificial Sequence
  ENSG00000166503_60 (sequence is synthesized)
tgcattagtatcccaactatccgtgttcttcctaaactgttactttcagatttttcttaacgtctccatgagggaaaaaccgtatgaaatttacttccaggctgagcgtggtggctcata

SEQ ID NO: 533849 - DNA, 61 bp, Artificial Sequence
  ENSG00000166503_61 (sequence is synthesized)
aggcgggagggttaaaaaaaaaatgataaatttacttcagtaaactcttcacaaccaaatt

SEQ ID NO: 533850 - DNA, 120 bp, Artificial Sequence
  ENSG00000166503_62 (sequence is synthesized)
acttcagtaaactcttcacaaccaaattattcacacgtaagtttccatatctctttgtgagaaaaagacatgacatagcacctacatagccagggagttagagagtctgagggcagcacc

SEQ ID NO: 533851 - DNA, 120 bp, Artificial Sequence
  ENSG00000166503_63 (sequence is synthesized)
tgactgaagtaactgaacctccttcgctggctgtgggatggcaggctccttaccaagcccatggtgagtctgtcccaaagctttcacccagtttctttgttttcttggtaattatataca

SEQ ID NO: 533852 - DNA, 120 bp, Artificial Sequence
  ENSG00000166503_64 (sequence is synthesized)
atacacttaatttaattagtttgtcttcaggttaatcttcggaacaacataaggcatatctccaaattcttactgggaatcttctaccagtaatagtagcaacaaagggttacatagctg

SEQ ID NO: 533853 - DNA, 120 bp, Artificial Sequence
  ENSG00000166503_65 (sequence is synthesized)
ttatgtgccagacactgttttaagccctttacatgtattacctcatccaaccctaacagcaattccatgagaaagctactgttattatcctcactttacagaagaggaaactgaggatca

SEQ ID NO: 533854 - DNA, 120 bp, Artificial Sequence
  ENSG00000166503_66 (sequence is synthesized)
gagaggtaaagtagccaaggtcattgtgctcatcagcaacaggctagaatctgaaccagttcacctccagagcttatgttcctaactatatgaactctactggctttggctttttttcat

SEQ ID NO: 533855 - DNA, 120 bp, Artificial Sequence
  ENSG00000166503_67 (sequence is synthesized)
tttcattgatattttagcagagaaaatgcttcaattgataggaaatgctaataagtggatctaagcagcctataatgcctttcagattacacttgcagctttaatcctatggttagcatt

SEQ ID NO: 533856 - DNA, 120 bp, Artificial Sequence
  ENSG00000166503_68 (sequence is synthesized)
ttatatgaaaagatacctgggttatgagtaagtccccagtggaactctttggtctaaaatgtgtcctggtttcattttattcaatcttcttttactctttccttgatcttttgatttctg

SEQ ID NO: 533857 - DNA, 120 bp, Artificial Sequence
  ENSG00000166503_69 (sequence is synthesized)
ccttgatcttttgatttctgaaggcagcagatttggcagactcctacatggtctgaaatcaaggccccaataactactcactcttttttctttcttttttttgagacagtcttgctctgt

SEQ ID NO: 533858 - DNA, 83 bp, Artificial Sequence
  ENSG00000166503_70 (sequence is synthesized)
tcctcccaaagtgctagggttacatgtgtgagccactgcgcctggccactactcaatatttcttccattggcctatactgatc

SEQ ID NO: 533859 - DNA, 120 bp, Artificial Sequence
  ENSG00000166503_71 (sequence is synthesized)
ggccactactcaatatttcttccattggcctatactgatctagaacttttcaaaggtggtttttttttcccttactaagttgcatagattcttgagagtttactagatgtttcagtaaaa

SEQ ID NO: 533860 - DNA, 120 bp, Artificial Sequence
  ENSG00000166503_72 (sequence is synthesized)
gtaagttttagtaaagttagtgggatcatgaatgcataaggtttctaaataagaatggcaattttagcaagcaaagatgctgattaaagttacagaaaaatgcctatttttgttttgttt

SEQ ID NO: 533861 - DNA, 120 bp, Artificial Sequence
  ENSG00000166503_73 (sequence is synthesized)
cagaaaaatgcctatttttgttttgttttgtttttttgtggtggtgggagagacagggtctctctctgtcacctgggctggagagtgcagtgacacagtctcggctcactgcaacctctg

SEQ ID NO: 533862 - DNA, 82 bp, Artificial Sequence
  ENSG00000166503_74 (sequence is synthesized)
aacctctgcctcctggttcaagtgatcctcccacctcagccttcctagtagctgggactgcaggcatatgccatcacgccag

SEQ ID NO: 533863 - DNA, 120 bp, Artificial Sequence
  ENSG00000166503_75 (sequence is synthesized)
gggattacaggtgtgagccaccgtgccttgctggagagtgctttctgtgatgaatgtgtcagatactcccataagatgagactccatttcataagcgagtatttgctaagtacaaaacaa

SEQ ID NO: 533864 - DNA, 120 bp, Artificial Sequence
  ENSG00000166503_76 (sequence is synthesized)
tcataagcgagtatttgctaagtacaaaacaaataacgtaattcagtattctggtcatatctattgttttgttgcggcatggcttctaacttttccttagcctacacactataagtgggt

SEQ ID NO: 533865 - DNA, 120 bp, Artificial Sequence
  ENSG00000166503_77 (sequence is synthesized)
agatattaaagctcagccaagagctgtgggaatcagacccataattctttactcagtctgtcttcacctgctgggctgggagaaacatccttctgacatttacaggatctggtccttagc

SEQ ID NO: 533866 - DNA, 120 bp, Artificial Sequence
  ENSG00000166503_78 (sequence is synthesized)
cttaggctctggatctgggcattcaccatcaagagaggggcttcaggctgccttatcaactgggcagtgatggataagccccaggatgcctgacgtctgacatgaatgaggtaatgcccc

SEQ ID NO: 533867 - DNA, 120 bp, Artificial Sequence
  ENSG00000166503_79 (sequence is synthesized)
tgcggctgccagctgctctgtagtccacactgcccttctcagaaccacttggctggagtaataagtgcccacctgcaagcttagcttcaccaacagattagggtttgtcttattgctaca

SEQ ID NO: 533868 - DNA, 120 bp, Artificial Sequence
  ENSG00000166503_80 (sequence is synthesized)
ggcttaccacacccattttcctctaagctatgaccttcctaagcttcctgactgttgaccctggccatgtgactaggcttttgcctaggttttcctgctgtttccatttgtctcctgaga

SEQ ID NO: 533869 - DNA, 120 bp, Artificial Sequence
  ENSG00000166503_81 (sequence is synthesized)
cttgaccaggtccaacatctggtctctttaaccagcctgctggctgatgacacttagcattcctgcatcagggactggtaccaggccgaccaggcacatggcaggcagaggaggcctgat

SEQ ID NO: 533870 - DNA, 120 bp, Artificial Sequence
  ENSG00000166503_82 (sequence is synthesized)
tgtgcaggcaaagcacaattgacacaggtaataggtgtcaaactgaacagctgtcaaactgaacagtctaatcctctaaagaaagggctggcaagagtgaagtgggtatgcggccatctg

SEQ ID NO: 533871 - DNA, 120 bp, Artificial Sequence
  ENSG00000166503_83 (sequence is synthesized)
ttctgaaggatacaggagaataaggcagaggaaccaggccaaaaaaaaaggcaaggcttactctgccctcagacctgctgcatatgcccacacctcagtgtttccctgggttattccctg

SEQ ID NO: 533872 - DNA, 120 bp, Artificial Sequence
  ENSG00000166503_84 (sequence is synthesized)
gagaggctcagcctaataaagccccacttggccctcagagtccaactcggaatgtcactgccttccacccacaaggttctccagcacctcgtactacatacagtcttttgtgctgtagga

SEQ ID NO: 533873 - DNA, 120 bp, Artificial Sequence
  ENSG00000166503_85 (sequence is synthesized)
ctctgtgccatagttcattgtttgcatggggtgggtgagataacacaatggagaagaatatgagctttggagtcagacaggatttcataaacctattctgccatttaataactgtaatct

SEQ ID NO: 533874 - DNA, 120 bp, Artificial Sequence
  ENSG00000166503_86 (sequence is synthesized)
taggcaaataatttcaggtggactgagcctcagcctcctcatctttaaattggggtttttttcccagagctattacaaaagatattattatgtgtccattgtgctgtttattctgaggca

SEQ ID NO: 533875 - DNA, 120 bp, Artificial Sequence
  ENSG00000166503_87 (sequence is synthesized)
ggcaggaagaccacagtcaccagcctcccctcagttgacctggtgccaggcctggaccttgaaaatatcccacatgatctttgcataaaaaagaattaaaattttaattgtgttaagcta

SEQ ID NO: 533876 - DNA, 120 bp, Artificial Sequence
  ENSG00000166503_88 (sequence is synthesized)
ctctgagtatttgttacagcagcagagcacatagcctatccttagacaaataggtaagtaaaacttttaacgtggtttgcctggcatgaagtaaggtaatgagagctcagactagtgtag

SEQ ID NO: 533877 - DNA, 120 bp, Artificial Sequence
  ENSG00000166503_89 (sequence is synthesized)
aagtaaggtaatgagagctcagactagtgtaggggcagcggagctggaaaaaaaaaatgggttggagaatcactggagtaaaactaactggacctggttgggtgtggtggctcacacctg

SEQ ID NO: 533878 - DNA, 120 bp, Artificial Sequence
  ENSG00000166503_90 (sequence is synthesized)
ggattacttgaagcaggcatttgagaataagctgggcaacaaaataagatcccatctctttaaaaaatttaaaaattagctgtgtgcggtggtgtatgtctgtagtcccagctactctgg

SEQ ID NO: 533879 - DNA, 120 bp, Artificial Sequence
  ENSG00000166503_91 (sequence is synthesized)
gcaggaggattgcttgagcctaggagtccgaggctgcggtgagctatgactgtgccatcacactccagcctgggagatggagcaagaccctgtctctttaaaagaaaaaaaaaaggactt

SEQ ID NO: 533880 - DNA, 120 bp, Artificial Sequence
  ENSG00000166503_92 (sequence is synthesized)
aaggacttagtggtggtctagatgtagaggatgaggagtgtaaataattactccaagtttctggcttgagttgctggatgcaattggactatttaaacagataatgaaaaaatggaagag

SEQ ID NO: 533881 - DNA, 120 bp, Artificial Sequence
  ENSG00000166503_93 (sequence is synthesized)
aggttgtggggaggatcaggtcctattttatatattaaatctgaggtgctagtgaggcatgcaagtaaaaagactgagtttggaatgaaatacaggagtctgggaacggtgtgggccgaa

SEQ ID NO: 533882 - DNA, 120 bp, Artificial Sequence
  ENSG00000166503_94 (sequence is synthesized)
ggtagaaaactggaagttatcagcttatagttggtattgaaagatacaaagataaagacctaaaatacagaaataaaccccaaggactgaggaatcaggtatttagaggtctgcaaagga

SEQ ID NO: 533883 - DNA, 120 bp, Artificial Sequence
  ENSG00000166503_95 (sequence is synthesized)
aaaacaaccagcaaagagcaataaatgttagttctcttccttcttaagcccctcaaggaaaggacaggaaccattacttctggatgctacatcaactttttcgatactactatgctaatt

SEQ ID NO: 533884 - DNA, 120 bp, Artificial Sequence
  ENSG00000166503_96 (sequence is synthesized)
ttataattaagaattacctcaaactgaaaggatttaatgcattgaccccttaaatactatatttttcaaccgtgtgaattctagtatgtcttacgatcatgattattataccatgcatat

SEQ ID NO: 533885 - DNA, 120 bp, Artificial Sequence
  ENSG00000166503_97 (sequence is synthesized)
aattgactgtacaagcctacagtttctagatgaacctcattcttataactgcttgaaaagaacaagatgaagctaatgtttttaaatgataagttcatttgttttatttctagtaagaaa

SEQ ID NO: 533886 - DNA, 120 bp, Artificial Sequence
  ENSG00000166503_98 (sequence is synthesized)
aattaattttcttccttgttcagaagattgatttgttttgctaattatcttgtaaaaatgtgctttatgttatgtgtgaagttctccatagataatttcattttcagttaaacgcagtaa

SEQ ID NO: 533887 - DNA, 120 bp, Artificial Sequence
  ENSG00000166503_99 (sequence is synthesized)
gcattcactgaacacctactctaggccaaatatttggcaaggtgccagcggaaaaggaatgaaatgacaggcccagaacattttttaaaccagtttccctggttctgtatagcatagcgt

SEQ ID NO: 533888 - DNA, 120 bp, Artificial Sequence
  ENSG00000166503_100 (sequence is synthesized)
agtggaattctgaagtcttaaatttggatggacattttgaaggtgacagctctcaatccttttttagtagccatggtattcagagattgtgaaacagtccaataaaacaacaatgccaca

SEQ ID NO: 533889 - DNA, 120 bp, Artificial Sequence
  ENSG00000166503_101 (sequence is synthesized)
acccatgaaacgtaagttagcaaaaatagtttcaacagctctagcttgactctgctatgctacattgttatggatgatctctgacatcttacgtcttattaaaatcattataatcagtta

SEQ ID NO: 533890 - DNA, 120 bp, Artificial Sequence
  ENSG00000166503_102 (sequence is synthesized)
tataaaattgccaaagttaataatgtatttttgttaatgtaaatagttttcatgatagaagtctttatgactaaaagcgtatctttgcttttgaatgtcatttgtgtttctgcttaaatg

SEQ ID NO: 533891 - DNA, 120 bp, Artificial Sequence
  ENSG00000166503_103 (sequence is synthesized)
ttggcagaaagtcaaaactgtcttcatatctgtatccttagaaagaggaagacttctgtgaaaatgtgacacttcagcagagttggatgttctgaggaaaaagtaggaatgagctcagca

SEQ ID NO: 533892 - DNA, 120 bp, Artificial Sequence
  ENSG00000166503_104 (sequence is synthesized)
taatcaaggaaaagcaagaaggcaaatgaggcgcagagtgagcgagctaggacctgggggagaaggacagaagatgaattcagattgatgaactcccagagggcgctgtgaagcctccag

SEQ ID NO: 533893 - DNA, 120 bp, Artificial Sequence
  ENSG00000166503_105 (sequence is synthesized)
acaacttcagacttgcagaaaaccagtgaagggaagatgctgtggacaattatcgagatagactaacagaataccccttctacacacccagctggacctccacctgtgttcgcagctctc

SEQ ID NO: 533894 - DNA, 120 bp, Artificial Sequence
  ENSG00000166503_106 (sequence is synthesized)
cccatccctgcctaagtactctcatcaagggaacactcatcacaggagtggagaatgatggtcactgccggctcagtcacagaagattctagcaggccaactccacccatcctccactcc

SEQ ID NO: 533895 - DNA, 120 bp, Artificial Sequence
  ENSG00000166503_107 (sequence is synthesized)
cctacaagtggctgcccagaatcaaacccacatcccacatgggcagtgggagcaaagccagtaactgagtggccaaggaagcatagaagtgaccactaagtttaagacaatgattcaggc

SEQ ID NO: 533896 - DNA, 120 bp, Artificial Sequence
  ENSG00000166503_108 (sequence is synthesized)
acaagactctgtctcaaaaaaaaaaaaagacaatgacttgacgaagtgattcatctcaatgattcccaagcaggccacctcacagcgtgtccagtgtggttaccctattccacatggcgt

SEQ ID NO: 533897 - DNA, 120 bp, Artificial Sequence
  ENSG00000166503_109 (sequence is synthesized)
tggttaccctattccacatggcgtatcctagagacagacaggtggctgatgtgcaagtgacaatggctttcagaaaaaagactagtgatgttaaaaatgaatacaagagggtataattga

SEQ ID NO: 533898 - DNA, 120 bp, Artificial Sequence
  ENSG00000166503_110 (sequence is synthesized)
atatgacagaaggaaagctatacctgtcagagaatcttaccagagttgtgagcatctcctaaatgggcttaaaactactagcacaaataactaagaaataatactttttaaacagcaggt

SEQ ID NO: 533899 - DNA, 120 bp, Artificial Sequence
  ENSG00000166503_111 (sequence is synthesized)
gatcaaatttagtgcatgttagtttgtcaaagctgcattttcaagttgtaacagattggtgccttagactatgggatggacatggacagaagaaaaatctgatggtgaatataagaaaag

SEQ ID NO: 533900 - DNA, 120 bp, Artificial Sequence
  ENSG00000166503_112 (sequence is synthesized)
ctgtgaaaaaagaaatggagaggagtgtggggatggttaattcacagagaagggaagccggccttgcctggagtcagcagccaggagtccagcattcacattctccccagaaggaacaaa

SEQ ID NO: 533901 - DNA, 120 bp, Artificial Sequence
  ENSG00000166503_113 (sequence is synthesized)
aggccacatgtgccctgttttgcagatgtgccttccccacgcctccatgggggcctttggcccagttctcattggcagtgtcacttcctgatactcattttccagaagcctcccaggtga

SEQ ID NO: 533902 - DNA, 120 bp, Artificial Sequence
  ENSG00000166503_114 (sequence is synthesized)
cacataatctgccaatgattgctgatgacaacacaagtgtcagacactgtgttagcaatgacaaggacatggtctctgccttctagtacgtgaggagtctggccttgagcctcaccctga

SEQ ID NO: 533903 - DNA, 120 bp, Artificial Sequence
  ENSG00000166503_115 (sequence is synthesized)
ggctgcagtgtactcaaagttgtaacagaccaggacagagggctgagggtacaggagaaagggtgcccagccttgaagagtcaggagagacatcagtacagttaatacaggctccatgga

SEQ ID NO: 533904 - DNA, 120 bp, Artificial Sequence
  ENSG00000166503_116 (sequence is synthesized)
gtggggaggaacaggagggacagacagcagcaggaaactcatctggaaaggtgtgcaagggtcagagcacaggctagtggagagagccaggaaaaggcatgtgggccttgaaagcagacg

SEQ ID NO: 533905 - DNA, 120 bp, Artificial Sequence
  ENSG00000166503_117 (sequence is synthesized)
gacccagctcatctaatgactggctgtaaaaccttaggcaaattacatcatttctgaagcttcagagcttcttatatgtggattgggagaaactagttactcacaattcttccttcccac

SEQ ID NO: 533906 - DNA, 120 bp, Artificial Sequence
  ENSG00000166503_118 (sequence is synthesized)
cccacctttcccaaggcccactgtaggcagagaatgctccctatgctgttgctgatgggcttggccctatgcctcatctcagccattggaatatgggtgggagtaagatggggcagctcc

SEQ ID NO: 533907 - DNA, 120 bp, Artificial Sequence
  ENSG00000166503_119 (sequence is synthesized)
aagccaaggccttaagagccaccactttcttccttctagccccactgtgcctctgtatctgccatgagaagggcatgcctgggagctgctggtccaagaacaaggagtcagagaacagcc

SEQ ID NO: 533908 - DNA, 120 bp, Artificial Sequence
  ENSG00000166503_120 (sequence is synthesized)
ctgaaatcaacccacagcctgatgcagagtggccccaacccacagacctgtgagcaagaaaaataaatgtttgttgctgtaggacttggggtgcatttgatatgcagcattactgaagca

SEQ ID NO: 533909 - DNA, 120 bp, Artificial Sequence
  ENSG00000166503_121 (sequence is synthesized)
gaaactacagaacaaaatgcccagcaaggtacctggcacaggaagtgctcaaaggccggtagcagcttggctggggcagcatgcatgatggaagggcatgggctttaggggtcaacagcc

SEQ ID NO: 533910 - DNA, 120 bp, Artificial Sequence
  ENSG00000166503_122 (sequence is synthesized)
acacgacctttgccacatttcttagcatctccaagccagctgcttcactttcaagtggagggatggtgaggattaggtgaaagcctgctgctaaagtgctcagggtcatacaaggtgcac

SEQ ID NO: 533911 - DNA, 120 bp, Artificial Sequence
  ENSG00000166503_123 (sequence is synthesized)
tataggtgcttgtctctatggcaggttccattattttcctcttcatgcatatgtgcagacccagacaccacacagttaagttctgcactaagtgggggggactgctagtagcaggctgaa

SEQ ID NO: 533912 - DNA, 120 bp, Artificial Sequence
  ENSG00000166503_124 (sequence is synthesized)
gacaggaagcccaggaaggagctagcatgagagtcgaggtcagaggtcagaggtcaaagcatgctggggttggcagggtgccctgcctggcctggcagtaactctccaccgggatgccac

SEQ ID NO: 533913 - DNA, 120 bp, Artificial Sequence
  ENSG00000166503_125 (sequence is synthesized)
ctgggagagggtggagtccactgcctgagaggcaatagccagaggcgagggccagattgtcctgaaacacccctacacttgcagccactgttaccaaagggctcagagtattcacaacca

SEQ ID NO: 533914 - DNA, 120 bp, Artificial Sequence
  ENSG00000166503_126 (sequence is synthesized)
aggaggaatatgtgactgaggctgaaagtattgtgttattaatcagatacaaaagatttccctttgtggagacgtaccatagaacagtgggtcccggggtggttttcttttgacgaggac

SEQ ID NO: 533915 - DNA, 120 bp, Artificial Sequence
  ENSG00000166503_127 (sequence is synthesized)
acgagccagcagtgctaccaggaacaggatgagggcagcaacccctacaatagtccaggaactgcaacgaccagaacagggaggtggtcactatcaaaataaacacattggtgcctggaa

SEQ ID NO: 533916 - DNA, 120 bp, Artificial Sequence
  ENSG00000166507_0 (sequence is synthesized)
aggtagaggggaagagattgaactttgctgacctttgatgtgaggcgctcagccagggccaaggggagagcctggcaagatttgcagcctgaagccatgggccagggggccatggtgacc

SEQ ID NO: 533917 - DNA, 120 bp, Artificial Sequence
  ENSG00000166507_1 (sequence is synthesized)
tgagacaagtggactctgtatagttgccccctgcttccccttctacctcccctaccctatgctaaggggactcgtctccacctcgtaaaggaaactccccaagggaatccctgtccccta

SEQ ID NO: 533918 - DNA, 120 bp, Artificial Sequence
  ENSG00000166507_2 (sequence is synthesized)
ttttcctatccttctacccttccaagacagtcctagcctatagaactcctacctcccatcccctgaggtggtccccattcctccctcccttcctccccccgccatgctccagttgtggaa

SEQ ID NO: 533919 - DNA, 120 bp, Artificial Sequence
  ENSG00000166507_3 (sequence is synthesized)
ggtggtacgcccagctcggcagctggaactgcaccgcctcatactgctgctgatcgctttcagcctgggctccatgggcttcctggcttattatgtgtccaccagccctaaggccaagga

SEQ ID NO: 533920 - DNA, 120 bp, Artificial Sequence
  ENSG00000166507_4 (sequence is synthesized)
acccttgcccctgcccttgggagactgcagcagcggtggggcagctggtcctggccctgcacggcctccagttccacctcggccccccaggcctccagagacagctcgaactgaacccgt

SEQ ID NO: 533921 - DNA, 120 bp, Artificial Sequence
  ENSG00000166507_5 (sequence is synthesized)
ggtccttgtgtttgtggagagtgcatactcacagctggggcaggaaattgtggccatcctggagtctagtcgttttcgttatagcactgagttggcacctggccgaggggacatgcccac

SEQ ID NO: 533922 - DNA, 120 bp, Artificial Sequence
  ENSG00000166507_6 (sequence is synthesized)
attgactgataatacccatggccgctatgtcttggtcatttatgagaacctgctcaagtatgtcaacctggatgcctggagtcgggaactgctagaccggtactgcgtggagtatggtgt

SEQ ID NO: 533923 - DNA, 120 bp, Artificial Sequence
  ENSG00000166507_7 (sequence is synthesized)
gggcatcattggctttttccgagcccacgagcacagcctactgagcgcccagctcaagggctttcccctttttttacactcaaacttggggctccgggactaccaagtgaatccttctgc

SEQ ID NO: 533924 - DNA, 120 bp, Artificial Sequence
  ENSG00000166507_8 (sequence is synthesized)
cccgctactgcatctcacacgccccagccgcctagaaccagggccactgcctggtgatgactggaccatcttccaatccaatcatagtacatatgaaccagtgcttcttgccagccttcg

SEQ ID NO: 533925 - DNA, 120 bp, Artificial Sequence
  ENSG00000166507_9 (sequence is synthesized)
gccagctgagcccgcagtgccaggaccagttcttcgtcgggcccggcttcccactgtggtacaggacctggggcttcatgatggcatccagcgggtgctctttggacatggcctttcctt

SEQ ID NO: 533926 - DNA, 120 bp, Artificial Sequence
  ENSG00000166507_10 (sequence is synthesized)
ctggctccacaaacttatcttcgttgatgctgttgcatacctcactggcaagcgcctctgcctggaccttgaccgctacatcttggtagacatcgatgacatctttgtgggcaaggaagg

SEQ ID NO: 533927 - DNA, 120 bp, Artificial Sequence
  ENSG00000166507_11 (sequence is synthesized)
gacccgcatgaaggtggctgatgttgaggctctgttgaccacccagaacaaactcaggaccttagttcccaacttcaccttcaacttgggcttctcgggcaagttctatcatactgggac

SEQ ID NO: 533928 - DNA, 120 bp, Artificial Sequence
  ENSG00000166507_12 (sequence is synthesized)
agaggaggaggatgcaggggacgacatgctgctgaagcaccgcaaagagttctggtggttcccccacatgtggagccacatgcagccacacctgttccacaatcgctccgtgctggctga

SEQ ID NO: 533929 - DNA, 120 bp, Artificial Sequence
  ENSG00000166507_13 (sequence is synthesized)
ccagatgaggctcaacaaacagtttgctctggagcatgggattcccacggacctggggtatgctgtggccccccaccactcgggtgtgtaccccatccacacgcagctctatgaggcctg

SEQ ID NO: 533930 - DNA, 120 bp, Artificial Sequence
  ENSG00000166507_14 (sequence is synthesized)
cctgcccgctaccgccgtggcttcattcacaatggcattatggtgctgccccggcagacatgtggcctcttcactcacacaatcttctataatgagtatcctggaggctctcgtgaacta

SEQ ID NO: 533931 - DNA, 120 bp, Artificial Sequence
  ENSG00000166507_15 (sequence is synthesized)
gaccggagcatccgaggtggagagctctttctgacagtgctgcttaatccgatcagcatctttatgacccatctgtccaattatggaaatgaccggctgggcctatacacctttgagagc

SEQ ID NO: 533932 - DNA, 120 bp, Artificial Sequence
  ENSG00000166507_16 (sequence is synthesized)
ttggtgcgcttcctccagtgttggacacggctgcgcctacagacccttcctcctgtcccacttgcacagaagtactttgaacttttccctcaggagcgaagccccctttggcagaatccc

SEQ ID NO: 533933 - DNA, 120 bp, Artificial Sequence
  ENSG00000166507_17 (sequence is synthesized)
tgtgatgacaagaggcacaaagatatctggtccaaggagaaaacctgtgatcgtctcccgaagttcctcattgtgggaccccagaaaacagggactacagctattcacttcttcctgagc

SEQ ID NO: 533934 - DNA, 120 bp, Artificial Sequence
  ENSG00000166507_18 (sequence is synthesized)
ctgcacccagctgtaactagcagcttccctagccccagcacatttgaggagattcagttcttcaacagccctaattaccacaagggtattgactggtacatggatttcttccctgttcct

SEQ ID NO: 533935 - DNA, 120 bp, Artificial Sequence
  ENSG00000166507_19 (sequence is synthesized)
tccaatgccagcactgatttcctatttgaaaaaagtgccacctactttgactctgaagttgtaccacggcggggggctgccctcctgccacgagccaagatcatcacagtgctcaccaac

SEQ ID NO: 533936 - DNA, 120 bp, Artificial Sequence
  ENSG00000166507_20 (sequence is synthesized)
cctgctgacagggcctactcctggtaccagcatcagcgagcccatggagacccagttgctctgaactataccttctatcaggtgatttcagcctcctcccagacccctctggcactacgc

SEQ ID NO: 533937 - DNA, 120 bp, Artificial Sequence
  ENSG00000166507_21 (sequence is synthesized)
tccctgcagaaccgctgtcttgtccctggctactattctacccatctacaacgctggctgacttactacccctctggacagttgctgattgtggatgggcaagagctgcgtaccaaccca

SEQ ID NO: 533938 - DNA, 120 bp, Artificial Sequence
  ENSG00000166507_22 (sequence is synthesized)
gcagcctcaatggagagcatccagaagttcctgggtatcacaccctttctgaactacacacggaccctcaggtttgatgatgataagggattttggtgccagggacttgaaggtggtaag

SEQ ID NO: 533939 - DNA, 120 bp, Artificial Sequence
  ENSG00000166507_23 (sequence is synthesized)
actcgctgtctaggccggagcaaaggccggaggtatccagatatggacactgagtcccgtcttttccttacggattttttccggaaccataatttggagttgtcgaagctgctgagccgg

SEQ ID NO: 533940 - DNA, 120 bp, Artificial Sequence
  ENSG00000166507_24 (sequence is synthesized)
cttggacagccagtgccctcgtggcttcgggaagaactgcagcattccagtctgggctgatgtcccagcctcccataccagcaaaatgccccctgcttccctaaggggcaggtccagagc

SEQ ID NO: 533941 - DNA, 120 bp, Artificial Sequence
  ENSG00000166507_25 (sequence is synthesized)
agggcccacaagggggattagagtggcctggcccctccccctctacctcagtagcccccaggcctgagatggctgagaagggaagggtatccttttcccacagttctgggacaaataaag

SEQ ID NO: 533942 - DNA, 120 bp, Artificial Sequence
  ENSG00000166507_26 (sequence is synthesized)
gggcttcctttggtaccccacataatagtgctaggtacctttgacccatcatcttgggaggtggggaggaatgagagggtccaggcagggtgtaggggaatgtattagtccaatgagatt

SEQ ID NO: 533943 - DNA, 120 bp, Artificial Sequence
  ENSG00000166507_27 (sequence is synthesized)
tccctcttcatccgcagcagtgtatctattctatacctggctatgggagagaccccttgcatgggagggaccccttgctatggcccctttagccaggcagtgggatctacctgtggcccg

SEQ ID NO: 533944 - DNA, 120 bp, Artificial Sequence
  ENSG00000166507_28 (sequence is synthesized)
gcctccctaatgtcattcacattgaatggggatgaggtcggacagtggctcatagagccgagtatgagccctagctgtgggctagaaatgtccttaataaacatccttatttttctgttt

SEQ ID NO: 533945 - DNA, 120 bp, Artificial Sequence
  ENSG00000166507_29 (sequence is synthesized)
cggagatggcggagcagccgcgacgcggcccgtggccccgaaagcagggaagccgggcagccccgggacgcggcggagcccggggacagcggggacgccgcccagtcctccgggtatgaa

SEQ ID NO: 533946 - DNA, 120 bp, Artificial Sequence
  ENSG00000166507_30 (sequence is synthesized)
ggaactcctttcagagcaggcctgtttttagccttctaggatatttagcctcttgttgatgggagatttgttcctatcatttgcatatactgctccatctctgagctttgcttagagagg

SEQ ID NO: 533947 - DNA, 120 bp, Artificial Sequence
  ENSG00000166507_31 (sequence is synthesized)
agaatttggacattcatttgggtattctaagaaagggaaagggaacaagctgtgaagctaaggtataggactcagcttgtagattctcctagaggaaacttttttttttttttttttgag

SEQ ID NO: 533948 - DNA, 120 bp, Artificial Sequence
  ENSG00000166507_32 (sequence is synthesized)
ctgtgaggagctagtggtgggcatgaatttaggttcgcatgggtggctggatggcaagttggcagtggggcaaatagaaagtcttaggcaaggatcagggatggaaggtggtcagtgttg

SEQ ID NO: 533949 - DNA, 120 bp, Artificial Sequence
  ENSG00000166507_33 (sequence is synthesized)
ggcggggcgcggagcccgccgtctcggaggccgcggctcggcccggcactgcggagggccgcttgatttcccggaacccaggtcgcgcggctgctagggccggagccggtggatccgagc

SEQ ID NO: 533950 - DNA, 120 bp, Artificial Sequence
  ENSG00000166507_34 (sequence is synthesized)
gcaaggttctaagcttctctgagttactcatatgtgaaatggggataatggagcatgtaccttttccctacctcttagggctggtgtgaagattaaatatatgtgaagctcttagaagaa

SEQ ID NO: 533951 - DNA, 120 bp, Artificial Sequence
  ENSG00000166507_35 (sequence is synthesized)
ggccggagcaaaggccggaggtatccagatatggacactgaggtaagtaaagccaggggcaggggaatccctctccacttccaggatctgattctgtgtcccacttcttaccatttctgc

SEQ ID NO: 533952 - DNA, 120 bp, Artificial Sequence
  ENSG00000166508_0 (sequence is synthesized)
agtcccgtcagcttccggtagaagagctcggccacatcccggccgccactgtccccgcggactggcgggtggaaggactcagtgaaggatcctgcgacacaggctggccctgggcgcccc

SEQ ID NO: 533953 - DNA, 120 bp, Artificial Sequence
  ENSG00000166508_1 (sequence is synthesized)
tcccgcccggcccctccgccccttcccagccccaagggtctaggatacagtctttgtagatgagcgggtcccccttggaggacagaatgaagaattgggaaatcatggccgttctggaga

SEQ ID NO: 533954 - DNA, 120 bp, Artificial Sequence
  ENSG00000166508_2 (sequence is synthesized)
gtagacaagaagacggcgaaagtcgggcctgccccgccctgcggccccggaacaaaagaacgcgtgtgcgctggccctttaagagcgattctcctccgcccgcgccagctcggaccgcgg

SEQ ID NO: 533955 - DNA, 120 bp, Artificial Sequence
  ENSG00000166508_3 (sequence is synthesized)
gaaacccggcgcctgcactaccccgcccggagattcccttccgacgcccgcaccgcctccccgtcactcattctaggcccgcacggtgattggcttgcggctagcgggaggtgaagaagg

SEQ ID NO: 533956 - DNA, 120 bp, Artificial Sequence
  ENSG00000166508_4 (sequence is synthesized)
ccgccttgtccgattggcccgcacgcagtggcgccggtcacgtggggggcgacgtttcgcgccaatttcggttggccggccacagtccaccgcgcggagattctcagcttccccaggagc

SEQ ID NO: 533957 - DNA, 120 bp, Artificial Sequence
  ENSG00000166508_5 (sequence is synthesized)
aagacctctgagcccgccaagcgcggccgcacggccctcggcagcgatggcactgaaggactacgcgctagagaaggaaaaggttaagaagttcttacaagagttctaccaggatgatga

SEQ ID NO: 533958 - DNA, 120 bp, Artificial Sequence
  ENSG00000166508_6 (sequence is synthesized)
actcgggaagaagcagttcaagtatgggaaccagttggttcggctggctcatcgggaacaggtggctctgtatgtggacctggacgacgtagccgaggatgaccccgagttggtggactc

SEQ ID NO: 533959 - DNA, 120 bp, Artificial Sequence
  ENSG00000166508_7 (sequence is synthesized)
aatttgtgagaatgccaggcgctacgcgaagctctttgctgatgccgtacaagagctgctgcctcagtacaaggagagggaagtggtaaataaagatgtcctggacgtttacattgagca

SEQ ID NO: 533960 - DNA, 120 bp, Artificial Sequence
  ENSG00000166508_8 (sequence is synthesized)
tcggctaatgatggagcagcggagtcgggaccctgggatggtccgaagcccccagaaccagtaccctgctgaactcatgcgcagatttgagctgtattttcaaggccctagcagcaacaa

SEQ ID NO: 533961 - DNA, 120 bp, Artificial Sequence
  ENSG00000166508_9 (sequence is synthesized)
gcctcgtgtgatccgggaagtgcgggctgactctgtggggaagttggtaactgtgcgtggaatcgtcactcgtgtctctgaagtcaaacccaagatggtggtggccacttacacttgtga

SEQ ID NO: 533962 - DNA, 120 bp, Artificial Sequence
  ENSG00000166508_10 (sequence is synthesized)
ccagtgtggggcagagacctaccagccgatccagtctcccactttcatgcctctgatcatgtgcccaagccaggagtgccaaaccaaccgctcaggagggcggctgtatctgcagacacg

SEQ ID NO: 533963 - DNA, 120 bp, Artificial Sequence
  ENSG00000166508_11 (sequence is synthesized)
gggctccagattcatcaaattccaggagatgaagatgcaagaacatagtgatcaggtgcctgtgggaaatatccctcgtagtatcacggtgctggtagaaggagagaacacaaggattgc

SEQ ID NO: 533964 - DNA, 120 bp, Artificial Sequence
  ENSG00000166508_12 (sequence is synthesized)
gtttactctcagaaacctacctggaagcccatcggattgtgaagatgaacaagagtgaggatgatgagtctggggctggagagctcaccagggaggagctgaggcaaattgcagaggagg

SEQ ID NO: 533965 - DNA, 120 bp, Artificial Sequence
  ENSG00000166508_13 (sequence is synthesized)
atttctacgaaaagctggcagcttcaatcgccccagaaatatacgggcatgaagatgtgaagaaggcactgctgctcctgctagtcgggggtgtggaccagtctcctcgaggcatgaaaa

SEQ ID NO: 533966 - DNA, 120 bp, Artificial Sequence
  ENSG00000166508_14 (sequence is synthesized)
tccggggcaacatcaacatctgtctgatgggggatcctggtgtggccaagtctcagctcctgtcatacattgatcgactggcgcctcgcagccagtacacaacaggccggggctcctcag

SEQ ID NO: 533967 - DNA, 120 bp, Artificial Sequence
  ENSG00000166508_15 (sequence is synthesized)
gagtggggcttacggcagctgtgctgagagactccgtgagtggagaactgaccttagagggtggggccctggtgctggctgaccagggtgtgtgctgcattgatgagttcgacaagatgg

SEQ ID NO: 533968 - DNA, 120 bp, Artificial Sequence
  ENSG00000166508_16 (sequence is synthesized)
ctgaggccgaccgcacagccatccacgaggtcatggagcagcagaccatctccattgccaaggccggcattctcaccacactcaatgcccgctgctccatcctggctgccgccaaccctg

SEQ ID NO: 533969 - DNA, 120 bp, Artificial Sequence
  ENSG00000166508_17 (sequence is synthesized)
cctacgggcgctacaaccctcgccgcagcctggagcagaacatacagctacctgctgcactgctctcccggtttgacctcctctggctgattcaggaccggcccgaccgagacaatgacc

SEQ ID NO: 533970 - DNA, 120 bp, Artificial Sequence
  ENSG00000166508_18 (sequence is synthesized)
tacggttggcccagcacatcacctatgtgcaccagcacagccggcagcccccctcccagtttgaacctctggacatgaagctcatgaggcgttacatagccatgtgccgcgagaagcagc

SEQ ID NO: 533971 - DNA, 120 bp, Artificial Sequence
  ENSG00000166508_19 (sequence is synthesized)
ccatggtgccagagtctctggctgactacatcacagcagcatacgtggagatgaggcgagaggcttgggctagtaaggatgccacctatacttctgcccggaccctgctggctatcctgc

SEQ ID NO: 533972 - DNA, 120 bp, Artificial Sequence
  ENSG00000166508_20 (sequence is synthesized)
gcctttccactgctctggcacgtctgagaatggtggatgtggtggagaaagaagatgtgaatgaagccatcaggctaatggagatgtcaaaggactctcttctaggagacaaggggcaga

SEQ ID NO: 533973 - DNA, 120 bp, Artificial Sequence
  ENSG00000166508_21 (sequence is synthesized)
cagctaggactcagagaccagcagatgtgatatttgccaccgtccgtgaactggtctcagggggccgaagtgtccggttctctgaggcagagcagcgctgtgtatctcgtggcttcacac

SEQ ID NO: 533974 - DNA, 120 bp, Artificial Sequence
  ENSG00000166508_22 (sequence is synthesized)
ccgcccagttccaggcggctctggatgaatatgaggagctcaatgtctggcaggtcaatgcttcccggacacggatcacttttgtctgattccagcctgcttgcaaccctggggtcctct

SEQ ID NO: 533975 - DNA, 120 bp, Artificial Sequence
  ENSG00000166508_23 (sequence is synthesized)
tgttccctgctggcctgccccttgggaaggggcagtgatgcctttgaggggaaggaggagcccctctttctcccatgctgcacttactccttttgctaataaaagtgtttgtagattgtc

SEQ ID NO: 533976 - DNA, 120 bp, Artificial Sequence
  ENSG00000166508_24 (sequence is synthesized)
agagctgctgcctcagtacaaggagagggaagtgagtggttagagaacaatggcaaacaaagggcgaggcgtttaagcttctgtagagaggctgctcagatactgatgttttctgagcag

SEQ ID NO: 533977 - DNA, 120 bp, Artificial Sequence
  ENSG00000166508_25 (sequence is synthesized)
agagaggctgctcagatactgatgttttctgagcaggcagaaaggaggggcacttctgcctggtgttctctgtgctctcctttccccatcctgttgctcttttttttttttttttttgtt

SEQ ID NO: 533978 - DNA, 120 bp, Artificial Sequence
  ENSG00000166508_26 (sequence is synthesized)
tgccaatcctgcgcactgggttccgacaggtggtacaggtaaggaagagtttgacatgaggaatggatcatccccttttccctcacctactcattctacccacacagagaaaagagcagc

SEQ ID NO: 533979 - DNA, 120 bp, Artificial Sequence
  ENSG00000166508_27 (sequence is synthesized)
ccccgggggcgggcaggccggggccgctgcgcgccgggattggccgtttgaggccgccctccgagcggaagtggagccgggcggaagtggcgcgaggaggctggagggagtgtcgtgtaa

SEQ ID NO: 533980 - DNA, 120 bp, Artificial Sequence
  ENSG00000166508_28 (sequence is synthesized)
gtaaacagtgtccttccgcgcggcggccgcggagagagctgcggcccgggggggcgtgcctgggatccggagcttcgctcgggcccgggaaaggcggcagtgggctgggatcgcggtgtc

SEQ ID NO: 533981 - DNA, 120 bp, Artificial Sequence
  ENSG00000166508_29 (sequence is synthesized)
tctgggtgtgatggccaatggctggactggctcccgccctgggcggaggaatcccgagctgtgaagcggctggaatccgggcccatgtgcttctttgtttactaagagcggaagcgatgg

SEQ ID NO: 533982 - DNA, 120 bp, Artificial Sequence
  ENSG00000166508_30 (sequence is synthesized)
cgggagcgggggtggggtgcggtggcggggtgcggtggcggaggtcccggtgaaatcaggggctaaggggacccaaagaaggcgggggatcataggggtggaaagaaagctgagaacctt

SEQ ID NO: 533983 - DNA, 120 bp, Artificial Sequence
  ENSG00000166508_31 (sequence is synthesized)
gagaccggagtgtgaggggccaacggggaagggcgctagaattttaaactaaagtagggaccggaattcccctggggagatgttggatggccctgtgcactgccacgggctctttattct

SEQ ID NO: 533984 - DNA, 120 bp, Artificial Sequence
  ENSG00000166508_32 (sequence is synthesized)
ccctttgcagcaggggctggtccatggttctcagggaaatggtgggttggggctgaaatgctgatgaggatttcccgggaaagcttgtccctcctacactgtgaggaagtggcagagcca

SEQ ID NO: 533985 - DNA, 120 bp, Artificial Sequence
  ENSG00000166508_33 (sequence is synthesized)
acggccctcggcagcgatggcactgaaggactacgcgctagagaagggtacgggtctacgagcccgggagggcgtcctgcgcggggagcctcccggggaacacctgttggtaaaaggtta

SEQ ID NO: 533986 - DNA, 120 bp, Artificial Sequence
  ENSG00000166508_34 (sequence is synthesized)
taattagttcataggtcgtgttttaagcgaaaatgggtatctaagatttgtcttaaagtttgtgtcttacggttttacatttcatgttacagaaaaggttaagaagttcttacaagagtt

SEQ ID NO: 533987 - DNA, 120 bp, Artificial Sequence
  ENSG00000166508_35 (sequence is synthesized)
gggaacaggtggctctgtatgtggacctggacgacgtagccgaggatgaccccgagttggtggactcaatttgtgagaatgccagaccatctccattgccaaggccggcattctcaccac

SEQ ID NO: 533988 - DNA, 120 bp, Artificial Sequence
  ENSG00000166509_0 (sequence is synthesized)
aagatgtagctgtgtagtctccttccatagctgctctaagggggctggcaacatggctcagcaggcttgccccagagccatggcaaagaatggacttgtaatttgcatcctggtgatcac

SEQ ID NO: 533989 - DNA, 120 bp, Artificial Sequence
  ENSG00000166509_1 (sequence is synthesized)
cttactcctggaccagaccaccagccacacatccagattaaaagccaggaagcacagcaaacgtcgagtgagagacaaggatggagatctgaagactcaaattgaaaagctctggacaga

SEQ ID NO: 533990 - DNA, 120 bp, Artificial Sequence
  ENSG00000166509_2 (sequence is synthesized)
agtcaatgccttgaaggaaattcaagccctgcagacagtctgtctccgaggcactaaagttcacaagaaatgctaccttgcttcagaaggtttgaagcatttccatgaggccaatgaaga

SEQ ID NO: 533991 - DNA, 120 bp, Artificial Sequence
  ENSG00000166509_3 (sequence is synthesized)
ctgcatttccaaaggaggaatcctggttatccccaggaactccgacgaaatcaacgccctccaagactatggtaaaaggagcctgccaggtgtcaatgacttttggctgggcatcaatga

SEQ ID NO: 533992 - DNA, 120 bp, Artificial Sequence
  ENSG00000166509_4 (sequence is synthesized)
catggtcacggaaggcaagtttgttgacgtcaacggaatcgctatctccttcctcaactgggaccgtgcacagcctaacggtggcaagcgagaaaactgtgtcctgttctcccaatcagc

SEQ ID NO: 533993 - DNA, 120 bp, Artificial Sequence
  ENSG00000166509_5 (sequence is synthesized)
tcagggcaagtggagtgatgaggcctgtcgcagcagcaagagatacatatgcgagttcaccatccctcaataggtctttctccaatgtgtcctccaagcaagattcatcataacttatag

SEQ ID NO: 533994 - DNA, 120 bp, Artificial Sequence
  ENSG00000166509_6 (sequence is synthesized)
gttcatgatctctaagatcaagtaaaaatcataatttttacttattaaaaaattgcaacacaagatcaatgtccatagcaatatgatagcatcagccaattttgctaacacatttctttg

SEQ ID NO: 533995 - DNA, 120 bp, Artificial Sequence
  ENSG00000166509_7 (sequence is synthesized)
ggattttgcccttcctggggtataggggatcagaaatattgatccatgtgcacgcagataaaatggcttctgctaaacagactaaaatctttctctctagtctttctcacttgtacaaac

SEQ ID NO: 533996 - DNA, 120 bp, Artificial Sequence
  ENSG00000166509_8 (sequence is synthesized)
aaaaaatcacagtagcaatgcaactcatcactctagaaaagcaagcttaggctacctgaaagattttcccttggaagtttagcgtatgtttgactaacaaaaattccctacatcagagac

SEQ ID NO: 533997 - DNA, 120 bp, Artificial Sequence
  ENSG00000166509_9 (sequence is synthesized)
tctaggtgctatataatccaaaaacttttcagcctgttgctcattctgtcccatgctggcaataataccttgtcagcccattacccttattttgaattgctccatctcctggtgggactt

SEQ ID NO: 533998 - DNA, 120 bp, Artificial Sequence
  ENSG00000166509_10 (sequence is synthesized)
gtatcttgtctgccatatcagaacacaaacccctgaagaggttctgatttgattttttttttttcttcatgcctaccctttttttggaagtttccagccgcaatttgaaatgaaatgaca

SEQ ID NO: 533999 - DNA, 120 bp, Artificial Sequence
  ENSG00000166509_11 (sequence is synthesized)
aggtgtatatttgatcaattttcattcccaccattgcattacaacctctaacttaaatgggtaaccctaaggcatatcaaagaagcagattgcatgataaacggaaacagaaaaaaagaa

SEQ ID NO: 534000 - DNA, 120 bp, Artificial Sequence
  ENSG00000166509_12 (sequence is synthesized)
cctacatttattttgctttagcatccttactctcaccttttatgagattgagagtggacttacatttccttttttacattttcgtatacttattttttttagccatcattatatgtttaa

SEQ ID NO: 534001 - DNA, 120 bp, Artificial Sequence
  ENSG00000166509_13 (sequence is synthesized)
gtctattatgggcaaccaatctttggaagctgaaaactgaatttaaagaatgctatcttggaaaattgcatacgtctgtgcaattttttattctgcctagtgctattctgcttgtttaac

SEQ ID NO: 534002 - DNA, 120 bp, Artificial Sequence
  ENSG00000166509_14 (sequence is synthesized)
tagattgtacaaaataacttcattgcttaatatcaaattacaaagtttagacttggagggaaatgggctttttagaagcaaacaattttaaatatattttgttcttcaaataaatagtgt

SEQ ID NO: 534003 - DNA, 120 bp, Artificial Sequence
  ENSG00000166509_15 (sequence is synthesized)
ttaaacattgaatgtgttttgtgaacaatatcccactttgcaaactttaactacacatgcttggaattaagttttagctgttttcattgctcaataataaagcctgaattctgatcaata

SEQ ID NO: 534004 - DNA, 120 bp, Artificial Sequence
  ENSG00000166509_16 (sequence is synthesized)
cctccaaggggaacagaataaggggaagatccctggagatcagattctcagatccagtatcccgtgtgctgacctgccatgacaaacactggcagggagcctgccatagaggaaaagagt

SEQ ID NO: 534005 - DNA, 120 bp, Artificial Sequence
  ENSG00000166509_17 (sequence is synthesized)
aagaattggctgagttcacatatgggctccatcaataactagcggccaggtgagattaggtatcatcactgtgccatctttgggaagaatgagaaaatagccactgcaataattttctgg

SEQ ID NO: 534006 - DNA, 120 bp, Artificial Sequence
  ENSG00000166509_18 (sequence is synthesized)
agggctattttttcctatgggacactgatggaggaagaccacagcccattgactagaaaaaggcctggaatggagttcacgccctcagagctcgtgcaggagccatctatgaactacaag

SEQ ID NO: 534007 - DNA, 120 bp, Artificial Sequence
  ENSG00000166509_19 (sequence is synthesized)
ttgactccgtatcctcacatgagccctgggaggcagccactgttaatatcctcattttatggatgaggaaactgttgccctgttaaagcttaatcagctttattatttgcttcccatcac

SEQ ID NO: 534008 - DNA, 120 bp, Artificial Sequence
  ENSG00000166509_20 (sequence is synthesized)
tgctgtcacaacttgccacaaactcactgatgtcacacaacacaaagttattatcttatggtttgggaggtcagatgtccaaagttggtctccttgggctaaaatcaaggtgtcagtgag

SEQ ID NO: 534009 - DNA, 90 bp, Artificial Sequence
  ENSG00000166509_21 (sequence is synthesized)
aaagttggtctccttgggctaaaatcaaggtgtcagtgaggttggttccttctgaaattctgaggggagaatttgtttccttgccttttt

SEQ ID NO: 534010 - DNA, 89 bp, Artificial Sequence
  ENSG00000166509_22 (sequence is synthesized)
acagggtttcaccatgttggccaggctcgactcaaactcctgatctcaggtgacccccaacctcagccttgtgcctggccttccttgcc

SEQ ID NO: 534011 - DNA, 120 bp, Artificial Sequence
  ENSG00000166510_0 (sequence is synthesized)
gttgctattttgtgaattactgataggcatgttatttgttagcttatttgtttacagtatgctcaacattgaagggaagccagtcttaatatgatggaaacatctctgaacttctaaaag

SEQ ID NO: 534012 - DNA, 120 bp, Artificial Sequence
  ENSG00000166510_1 (sequence is synthesized)
accaaggttggcgttttagctctattaattttacttcgtcttggaattcacaatgacaacagtgacagtgaccacagaaattcccccaagggataagatggaagataattctgccttgta

SEQ ID NO: 534013 - DNA, 120 bp, Artificial Sequence
  ENSG00000166510_2 (sequence is synthesized)
tgagtctacgtccgctcacattattgaagaaaccgagtatgtgaaaaagattcgaactactctgcaaaagatcaggacccagatgtttaaagatgaaataagacatgacagtacaaatca

SEQ ID NO: 534014 - DNA, 120 bp, Artificial Sequence
  ENSG00000166510_3 (sequence is synthesized)
caaactagatgcaaagcactgtggaaaccttcaacagggctctgattctgaaatggatccttcttgttgcagtttggatttgcttatgaaaaagataaaaggaaaagacctacagctctt

SEQ ID NO: 534015 - DNA, 120 bp, Artificial Sequence
  ENSG00000166510_4 (sequence is synthesized)
agaaatgaacaaagagaatgaagtattgaaaatcaagctgcaagcctccagagaagcaggagcagcagctctgagaaacgtggcccagagattatttgaaaactaccaaacgcaatctga

SEQ ID NO: 534016 - DNA, 120 bp, Artificial Sequence
  ENSG00000166510_5 (sequence is synthesized)
agaagtgagaaagaagcaggaggacagtaaacaattactccaggttaacaagcttgaaaaagaacagaaattgaaacaacatgttgaaaatctgaatcaagttgctgaaaaacttgaaga

SEQ ID NO: 534017 - DNA, 120 bp, Artificial Sequence
  ENSG00000166510_6 (sequence is synthesized)
cagaattggagaaccttgtacagagaatggaaaaggaaaagagaacactactagaaagaaaactgtctttggaaaacaagctactgcaactcaaatccagtgctacatatggaaaaagtt

SEQ ID NO: 534018 - DNA, 120 bp, Artificial Sequence
  ENSG00000166510_7 (sequence is synthesized)
gccaggatcttcagagggagatttccattctccaggagcagatctctcatctgcagtttgtgattcactcccaacatcagaacctgcgcagtgtcatccaggagatggaaggattaaaaa

SEQ ID NO: 534019 - DNA, 120 bp, Artificial Sequence
  ENSG00000166510_8 (sequence is synthesized)
ataatttaaaagaacaagacaaaagaattgaaaatctcagagaaaaggttaacatacttgaagcccagaataaagaactaaaaacccaggtagcactttcatctgaaactcctaggacaa

SEQ ID NO: 534020 - DNA, 120 bp, Artificial Sequence
  ENSG00000166510_9 (sequence is synthesized)
aggtatctaaggctgtctctacaagtgaattgaagaccgaaggtgtttccccttatttaatgttgattaggttacggaaatgaactggctggatgaagatctgatttagaaagactgcgt

SEQ ID NO: 534021 - DNA, 120 bp, Artificial Sequence
  ENSG00000166510_10 (sequence is synthesized)
gagtcttatttattctctgaaacacagcccaagtttcatgttaaaatggcaaaatgccattatttaaatggaacttattacataccaatggctttgcaagaagatgacatttcagaaaat

SEQ ID NO: 534022 - DNA, 120 bp, Artificial Sequence
  ENSG00000166510_11 (sequence is synthesized)
caaacaaatctatatttaatggatggactcttcaaaacttaccaaatagttgaagaaaccaggtgccttctcatgatggaagacagattctgctttaaattaaaaaaaaaaaaaaatctg

SEQ ID NO: 534023 - DNA, 120 bp, Artificial Sequence
  ENSG00000166510_12 (sequence is synthesized)
tttatgaatatatacagataccaatgatttatagcttttctgctatatttgactatagtgataaaacaacttatttcagtttatgaaccatataatcatacaatcaaaacagtctgtttt

SEQ ID NO: 534024 - DNA, 120 bp, Artificial Sequence
  ENSG00000166510_13 (sequence is synthesized)
gaacatacatttcctgcatatatatgtatgaagggcatgtatatgtatgaatgagcaaacatatttgaaagttaacttttggatgataggaaagatcgtacagtgacataagttcatctc

SEQ ID NO: 534025 - DNA, 120 bp, Artificial Sequence
  ENSG00000166510_14 (sequence is synthesized)
ctgatccattgtttgtgggagaattatacttgactgaattatgggcaggagaaagagcagattccttttagctaattccccaacccatatgcccctctgaagttgagaatcatggctgcc

SEQ ID NO: 534026 - DNA, 120 bp, Artificial Sequence
  ENSG00000166510_15 (sequence is synthesized)
tcaccacacatcagagaatgactgttcttcttagttctgggattaaaaattggtttctagaggtaacctgtacacacaaacgcacagggatgcacatggtttcctctgcctttgtgacta

SEQ ID NO: 534027 - DNA, 120 bp, Artificial Sequence
  ENSG00000166510_16 (sequence is synthesized)
aaaataatgctgttagctcatacttccatgaaaatgtatatattataggctcaaaggaataatgactgctgtctgcagccagaaagaatctgaatttatgaattggaaagatatatatag

SEQ ID NO: 534028 - DNA, 120 bp, Artificial Sequence
  ENSG00000166510_17 (sequence is synthesized)
tgtatttgtgaaagtttgcttaaattctgatacatgccttctttgtaggtggagtttgtgattgcagtgaatagaacaaattctgacttgcagaaatgcagacatacagtcaggaaagaa

SEQ ID NO: 534029 - DNA, 120 bp, Artificial Sequence
  ENSG00000166510_18 (sequence is synthesized)
caaacttcaattaaatgtataatgagagaccttggtccccctaaaggatgaatttcctttaggcctttgatcttcctctctagtgtataactttaaatatttgctcagaaaagatgctga

SEQ ID NO: 534030 - DNA, 120 bp, Artificial Sequence
  ENSG00000166510_19 (sequence is synthesized)
ctctttcattatggaatgtgaaatatcagtgttgtctataaatatttgaaggtatataaaaatgagatgatgtaatgtatttataaatttatccaagtactgtaatccttgaattgttgt

SEQ ID NO: 534031 - DNA, 120 bp, Artificial Sequence
  ENSG00000166510_20 (sequence is synthesized)
gtaactgtgtgtgagttttacgcttcatggtatttttggaaacatttttattgcttgcttattttgaaggtatatttatctgttaacatttagggcatagttaccttataccagcaacaa

SEQ ID NO: 534032 - DNA, 120 bp, Artificial Sequence
  ENSG00000166510_21 (sequence is synthesized)
gtctaagcactttacttgtattaatttattttatcttccccaaggccctcagaagcagattattcctgttttacagagaaagatactgagagtggttgagtaatttgcccagctgctaac

SEQ ID NO: 534033 - DNA, 120 bp, Artificial Sequence
  ENSG00000166510_22 (sequence is synthesized)
tgtgaagcaaaaatttgaaccttttgacttggctattgatattcattctacttgctcacatggtggtctaagaaatttcccagctatagaaatctctctatttttgccactttaatcaac

SEQ ID NO: 534034 - DNA, 120 bp, Artificial Sequence
  ENSG00000166510_23 (sequence is synthesized)
acatagcttcctggatgactgcctgtgttattttgtggatgacagtaagaaacaacaaatactgataaaatcaatattttgctgaaatgagttgatctttcaccagctggactaccattg

SEQ ID NO: 534035 - DNA, 120 bp, Artificial Sequence
  ENSG00000166510_24 (sequence is synthesized)
tgagaactcagttcagacaaacttccctgctaaaaatctgtttatcatacatttattatttatgactttatgtcacattgaagaatttcttcatgatacattttcaggcacacttgtagg

SEQ ID NO: 534036 - DNA, 120 bp, Artificial Sequence
  ENSG00000166510_25 (sequence is synthesized)
aaaattaggatcatgagtcctgctttaagtatttgcagtgtagtaagagaatccatcttttactaggagaccagattccttttatacctcattcatcatgctggattgtaataaatttca

SEQ ID NO: 534037 - DNA, 120 bp, Artificial Sequence
  ENSG00000166510_26 (sequence is synthesized)
gattttggaatgggcttatttaactgacctgacaatcttgatgatttccattagaataacttattctaaggtcaaaagtggaaagacactgttggtttttattttgatttcactatactc

SEQ ID NO: 534038 - DNA, 120 bp, Artificial Sequence
  ENSG00000166510_27 (sequence is synthesized)
atttttgaacatggaaatacagtggtgaaaccacctatgcaaaaatgataacagtgaggaaattatgacagtgaaagagatctgacctaactatctatcttgcctcgaaactgcccttgg

SEQ ID NO: 534039 - DNA, 120 bp, Artificial Sequence
  ENSG00000166510_28 (sequence is synthesized)
aactgcccttggtcgttcctgagtgtgggccaagctaactttgggagaaatttactttataggttaaattataatagcccttcccaaaactaaacgattctcctgcctcagcctcccgag

SEQ ID NO: 534040 - DNA, 120 bp, Artificial Sequence
  ENSG00000166510_29 (sequence is synthesized)
taataccatcagccttatcatttattcgtcatgtatggattgtttcctatatccactatcataaaattatcatttgaaatatttttttatgaaaaaaaaaacacttctcagtgaaaaaac

SEQ ID NO: 534041 - DNA, 120 bp, Artificial Sequence
  ENSG00000166510_30 (sequence is synthesized)
aagattacaagggggaataatatttattcagctaaaatagtacttcacaggaaatataggaaaagaaacactagttcagttttattccaaataatgtacttctaattatactcttgaatt

SEQ ID NO: 534042 - DNA, 120 bp, Artificial Sequence
  ENSG00000166510_31 (sequence is synthesized)
tattggataagaaggtctgaggtgggtctgaaattcatacatgaagtcaggaaaagaaaagaaacttagttctaccttgattacatatgttgttacaaattatcattataaaatgtttaa

SEQ ID NO: 534043 - DNA, 120 bp, Artificial Sequence
  ENSG00000166510_32 (sequence is synthesized)
acaattagtatagtatatcttttgaataattgcttataatatgccttaccataaagaaaattgatgctacattgtgtgaattgtttggttttctttttatattaaaattatgcataaatg

SEQ ID NO: 534044 - DNA, 120 bp, Artificial Sequence
  ENSG00000166510_33 (sequence is synthesized)
gcggtggcggctgcactcgcagggccctggcagccgaccctggccccaaggtccgatcgcccaggggaggagcagcaccgggaccccgcgtcggctgggcgccccacaagggaagccagt

SEQ ID NO: 534045 - DNA, 120 bp, Artificial Sequence
  ENSG00000166510_34 (sequence is synthesized)
cacaagggaagccagtcttaatatgatggaaacatctctgaacttctaaaagaccaaggttggcgttttagctctattaattttacttcgtcttggccagaattcacaatgacaacagtg

SEQ ID NO: 534046 - DNA, 120 bp, Artificial Sequence
  ENSG00000166510_35 (sequence is synthesized)
cacaaggtaggcgagtctggccaccttcgggcccggtccctgcggcgcgcccccgcatcccctccatgtgtgtgggtgtccaggtgcctttccagcggcttccccagtggagttcctggc

SEQ ID NO: 534047 - DNA, 120 bp, Artificial Sequence
  ENSG00000166510_36 (sequence is synthesized)
tcaaggtatgacttttagaagtttcaaattttgtgttttgagccttcgagctaatagaatgggttgttagcatctgtggctctgtaaaagcagagagatgtccacacacatccataggtc

SEQ ID NO: 534048 - DNA, 120 bp, Artificial Sequence
  ENSG00000166510_37 (sequence is synthesized)
catctgcatgctcacttacatagagaagcatttttatatttcacaaatcatatctcactgttttatttttgaggcttcttttgttattgaaaatatcttacaaaagttcaacagttatac

SEQ ID NO: 534049 - DNA, 120 bp, Artificial Sequence
  ENSG00000166510_38 (sequence is synthesized)
aatttcagtcatgcaagatgaataagttctagaaatctactgcataacattgtgtctatagttaacaatactgtactgtacacttagtacatctcatgttaattgttcttaccacaatcc

SEQ ID NO: 534050 - DNA, 120 bp, Artificial Sequence
  ENSG00000166510_39 (sequence is synthesized)
aaataagtgtataagctgacagagcaccatggagttatgtgaacagtgaggactatcactgcaggacgttactatgcacagagctctggtttggtttgactatggcaaatctgcctgttc

SEQ ID NO: 534051 - DNA, 120 bp, Artificial Sequence
  ENSG00000166510_40 (sequence is synthesized)
aacagcccctctaaatagggagtttctcattttacattttcctcttaccaaataacagtgtcttctctcgtatccattgtctatgaggctgtaaatggtatagttatacctttggtgttc

SEQ ID NO: 534052 - DNA, 120 bp, Artificial Sequence
  ENSG00000166523_0 (sequence is synthesized)
attcattctccctgaatcttaccaacaaaacactcctgaggagaaagaaagagagggagggagagaaaaagagagagagagaaacaaaaaaccaaagagagagaaaaaatgaattcatct

SEQ ID NO: 534053 - DNA, 120 bp, Artificial Sequence
  ENSG00000166523_1 (sequence is synthesized)
aaatcatctgaaacacaatgcacagagagaggatgcttctcttcccaaatgttcttatggactgttgctgggatccccatcctatttctcagtgcctgtttcatcaccagatgtgttgtg

SEQ ID NO: 534054 - DNA, 120 bp, Artificial Sequence
  ENSG00000166523_2 (sequence is synthesized)
acatttcgcatctttcaaacctgtgatgagaaaaagtttcagctacctgagaatttcacagagctctcctgctacaattatggatcaggttcagtcaagaattgttgtccattgaactgg

SEQ ID NO: 534055 - DNA, 120 bp, Artificial Sequence
  ENSG00000166523_3 (sequence is synthesized)
gaatattttcaatccagctgctacttcttttctactgacaccatttcctgggcgttaagtttaaagaactgctcagccatgggggctcacctggtggttatcaactcacaggaggagcag

SEQ ID NO: 534056 - DNA, 120 bp, Artificial Sequence
  ENSG00000166523_4 (sequence is synthesized)
gaattcctttcctacaagaaacctaaaatgagagagttttttattggactgtcagaccaggttgtcgagggtcagtggcaatgggtggacggcacacctttgacaaagtctctgagcttc

SEQ ID NO: 534057 - DNA, 120 bp, Artificial Sequence
  ENSG00000166523_5 (sequence is synthesized)
tgggatgtaggggagcccaacaacatagctaccctggaggactgtgccaccatgagagactcttcaaacccaaggcaaaattggaatgatgtaacctgtttcctcaattattttcggatt

SEQ ID NO: 534058 - DNA, 120 bp, Artificial Sequence
  ENSG00000166523_6 (sequence is synthesized)
tgtgaaatggtaggaataaatcctttgaacaaaggaaaatctctttaagaacagaaggcacaactcaaatgtgtaaagaaggaagagcaagaacatggccacacccaccgccccacacga

SEQ ID NO: 534059 - DNA, 120 bp, Artificial Sequence
  ENSG00000166523_7 (sequence is synthesized)
gaaatttgtgcgctgaacttcaaaggacttcataagtatttgttactctgatataaataaaaataagtagttttaaatgttataattcatgttactggctgaagtgcattttctctctac

SEQ ID NO: 534060 - DNA, 120 bp, Artificial Sequence
  ENSG00000166523_8 (sequence is synthesized)
cctcattttttagtgttcgtatgaaagtacagggacacggagccaagacagagtctagcaaagaaggggattttggaaggtgccttccaaaaatctcctgaatccgggctctgtagcagg

SEQ ID NO: 534061 - DNA, 120 bp, Artificial Sequence
  ENSG00000166523_9 (sequence is synthesized)
tcctcttctttctagcttctgacaagtctgtcttctcttcttggtttcataccgttcttatctcctgcccaagcatatatcgtctctttactcccctgtataatgagtaagaagcttctt

SEQ ID NO: 534062 - DNA, 120 bp, Artificial Sequence
  ENSG00000166523_10 (sequence is synthesized)
caagtcatgaaacttattcctgctcagaataccggtgtggcctttctggctacaggcctccactgcaccttcttagggaagggcatgccagccatcagctccaaacaggctgtaaccaag

SEQ ID NO: 534063 - DNA, 120 bp, Artificial Sequence
  ENSG00000166523_11 (sequence is synthesized)
tccacccatccctggggcttcctttgctctgccttattttcaattgactgaatggatctcaccagattttgtatctattgctcagctaggacccgagtccaatagtcaatttattctaag

SEQ ID NO: 534064 - DNA, 120 bp, Artificial Sequence
  ENSG00000166523_12 (sequence is synthesized)
cgaacattcatctccacactttcctgtctcaagcccatccattatttcttaacttttattttagctttcgggggtacatgttaaaggctttttatataggtaaactcatgtcgtggaggt

SEQ ID NO: 534065 - DNA, 120 bp, Artificial Sequence
  ENSG00000166523_13 (sequence is synthesized)
ttcatcacccaggtattaagcccagtgcctaatattgtttttttcggctcctctccctcctcctaccttccgccctcaagtagactccagtgtctgttattcccttctttgtgtttatga

SEQ ID NO: 534066 - DNA, 120 bp, Artificial Sequence
  ENSG00000166523_14 (sequence is synthesized)
tcatcatttagctcccacttataagtgaggacatgcagtatttggttttctgttcccatgtttgctaaggataatggtctccagttctaccgatgttcccacaaaagacataatcttctt

SEQ ID NO: 534067 - DNA, 120 bp, Artificial Sequence
  ENSG00000166523_15 (sequence is synthesized)
acaaaagacataatcttcttttttaaggctgcttagtattccatggtatctatgtatcacattttctctatccaatctattgttgactcacatttagattgattccatgtttttgctatt

SEQ ID NO: 534068 - DNA, 120 bp, Artificial Sequence
  ENSG00000166523_16 (sequence is synthesized)
gtgaatagtgctgcaatgaacattcgtgtgcatgtgtctttatggtagaaagatttatatttctctgagtatgtatccagtaatagcccattcatttattgcataaaattctaccaatac

SEQ ID NO: 534069 - DNA, 120 bp, Artificial Sequence
  ENSG00000166523_17 (sequence is synthesized)
atcaaaatttacaaagcaacattttctggcttctagattgactttgggacaggtgagatatagctggattaggtcttatttttcaaaagcaaaatgtaaaatcctagaaatttggtgatg

SEQ ID NO: 534070 - DNA, 120 bp, Artificial Sequence
  ENSG00000166523_18 (sequence is synthesized)
caattagcattggggcagaaagtcttggggacattatagtaaacttttagaataaatttgaggggtatgtctgaacagtaaatctggaagtggaaggtattattcccaggagtgtacctt

SEQ ID NO: 534071 - DNA, 120 bp, Artificial Sequence
  ENSG00000166526_0 (sequence is synthesized)
gttctgtccccggtgtgtgggtctgtgacagggtccaacagggcctggtccgtgtccggtcccccaaatctgtcgtccctgcccccaggcattggcatcaacaaaagtcagaattcccgg

SEQ ID NO: 534072 - DNA, 120 bp, Artificial Sequence
  ENSG00000166526_1 (sequence is synthesized)
gaacttgaacagaggctgctaaattcccagtaattgctcctttggccttctagggactgacttcaaagaaggaaggaaagaatcaggcagtgcttcctcattctcttttaaaacccgctt

SEQ ID NO: 534073 - DNA, 120 bp, Artificial Sequence
  ENSG00000166526_2 (sequence is synthesized)
cccgctgagtctgcacccaggagaccagagagcaccttgcccttccatggaaactcaggctgatctcgtatctcaggaacctcaggccctgcttgacagtgctcttccttcaaaagttcc

SEQ ID NO: 534074 - DNA, 120 bp, Artificial Sequence
  ENSG00000166526_3 (sequence is synthesized)
tgccttttccgacaaggacagcctgggggatgagatgttggcggctgcgctcctaaaggccaagtcccaggagctggtaacctttgaggatgtagctgtgtacttcatccggaaggagtg

SEQ ID NO: 534075 - DNA, 120 bp, Artificial Sequence
  ENSG00000166526_4 (sequence is synthesized)
gaagcgtttggaacctgctcagagggacctctatagagatgtgatgctggagaattacgggaatgtgttctcactggatcgtgagaccaggactgaaaatgatcaagaaatttctgaaga

SEQ ID NO: 534076 - DNA, 120 bp, Artificial Sequence
  ENSG00000166526_5 (sequence is synthesized)
cacaagatcacatggggtcctactgggaagatttcaaaaggatatttctcagggtctcaagtttaaagaagcctatgaacgagaagtcagtctgaaaaggccgctggggaactcccctgg

SEQ ID NO: 534077 - DNA, 120 bp, Artificial Sequence
  ENSG00000166526_6 (sequence is synthesized)
agaaagactgaacaggaaaatgccagattttggtcaagtgacagttgaggagaagctaacccccaggggagagagaagcgagaaatataatgattttgggaacagcttcactgtgaattc

SEQ ID NO: 534078 - DNA, 120 bp, Artificial Sequence
  ENSG00000166526_7 (sequence is synthesized)
caaccttatctcacatcagagactccccgtgggagacagaccccataagtgtgatgaatgtagcaagagctttaatcgaacttcagaccttattcaacatcagagaatccacactgggga

SEQ ID NO: 534079 - DNA, 120 bp, Artificial Sequence
  ENSG00000166526_8 (sequence is synthesized)
aaagccctatgaatgtaatgagtgtgggaaggccttcagccagagctcacaccttattcagcatcagagaatccacactggggaaaaaccttatgaatgtagtgattgtgggaaaacctt

SEQ ID NO: 534080 - DNA, 120 bp, Artificial Sequence
  ENSG00000166526_9 (sequence is synthesized)
cagctgtagctctgccctcattctgcatcggaggatccacacgggggagaaaccctatgaatgtaatgagtgtgggaagaccttcagctggagctccaccctcacccaccatcagagaat

SEQ ID NO: 534081 - DNA, 120 bp, Artificial Sequence
  ENSG00000166526_10 (sequence is synthesized)
ccacactggtgagaaaccctacgcctgcaatgaatgtgggaaggccttcagcaggagctcaacccttattcaccatcagagaatccacactggagaaaaaccctatgaatgtaatgaatg

SEQ ID NO: 534082 - DNA, 120 bp, Artificial Sequence
  ENSG00000166526_11 (sequence is synthesized)
caccagagaatccacactggagagaagccctacgaatgtatggaatgtggaggaaagtttacctacagttcaggccttattcagcatcaaagaatccacaccggggagaacccctatgaa

SEQ ID NO: 534083 - DNA, 120 bp, Artificial Sequence
  ENSG00000166526_12 (sequence is synthesized)
tgtagtgagtgtgggaaagccttcaggtacagctcggctcttgttcgccatcagagaattcacactggagagaagcctttgaatgggatcggcatgagcaaaagctccctcagagttacg

SEQ ID NO: 534084 - DNA, 120 bp, Artificial Sequence
  ENSG00000166526_13 (sequence is synthesized)
accgagttaaatatcagagagtccacgtgaaagagccacacacccattttcctcactttccctgagtctcaagagctcttgccttaccctataaatctcaacagcttaggatgtgtccct

SEQ ID NO: 534085 - DNA, 120 bp, Artificial Sequence
  ENSG00000166526_14 (sequence is synthesized)
ttcaactcagacttttcattttagagaatggggcagatggggcaaatcgttgaattttcccagaaatcacaccagccttagaaagcgtcaaggcaagtggatggcgtgctgggaatagaa

SEQ ID NO: 534086 - DNA, 120 bp, Artificial Sequence
  ENSG00000166526_15 (sequence is synthesized)
agcagctctgggaccagttaccccatttaggaaaggagtttgcactaaactgtttttctcacagcagaggaacctttccaaggtggggatggaagcacagtcgggacagaattcgatgga

SEQ ID NO: 534087 - DNA, 120 bp, Artificial Sequence
  ENSG00000166526_16 (sequence is synthesized)
ttcctttagttggagtccgcgtagtcagcacagacagcagtggaaaggacgctctgggtcctgttatttgctagggagggtaaagggagactatttcaaagctactgttcctagtccagc

SEQ ID NO: 534088 - DNA, 120 bp, Artificial Sequence
  ENSG00000166526_17 (sequence is synthesized)
tttaagtttcggtaagaaacatgctgttttgtttcatgatttcgttaattatggaaatttggcattgagggattattttattgagggtagaagagattccagaatcatcatctgtgatga

SEQ ID NO: 534089 - DNA, 120 bp, Artificial Sequence
  ENSG00000166526_18 (sequence is synthesized)
tggtgtcctttagggctcttggagcagccagaccatgtttccaagagaaacctggtgatattgccagcagaccccctgccatcccccccagttgtcctggggctgaatgggcaaatctgt

SEQ ID NO: 534090 - DNA, 120 bp, Artificial Sequence
  ENSG00000166526_19 (sequence is synthesized)
ccaaacagctagtaaccggctgtgagggagagggtcagaagcacttagcgttggcctctgattgctgtcctctcttgtcctcttcccactccaatgatgaaaatgattttctctaaatgc

SEQ ID NO: 534091 - DNA, 120 bp, Artificial Sequence
  ENSG00000166526_20 (sequence is synthesized)
ctgggtaaggatgctttcaaggagctcacttggcctgcttgccctgccctctcacctctgacacccagccccaggagccagaccactcctgcctccacctctgactcttcagcagctgaa

SEQ ID NO: 534092 - DNA, 120 bp, Artificial Sequence
  ENSG00000166526_21 (sequence is synthesized)
aaaaaacaaaaaaacaaaaaaacgaagcccagagaaggcaggctgtgcctgagcctggtagcagagctcgttgctgggtgaggatggcactccccgagttttcccaaccgacgggatgac

SEQ ID NO: 534093 - DNA, 120 bp, Artificial Sequence
  ENSG00000166526_22 (sequence is synthesized)
aggatggcactccccgagttttcccaaccgacgggatgaccttccattgtgttttcccaaccctgctcatcctgtagcataaatgaagtgcactattaaacagaatagtttttcagaaga

SEQ ID NO: 534094 - DNA, 120 bp, Artificial Sequence
  ENSG00000166526_23 (sequence is synthesized)
gatatgatggttggctctgagacaccattgaagggaccctgctaggagggcgatggtggcaagaaggtgtgtcaccttgattgccagtggcctggcttgtgcctgagtcagtgctttcca

SEQ ID NO: 534095 - DNA, 120 bp, Artificial Sequence
  ENSG00000166526_24 (sequence is synthesized)
ctgtgtaagggctctggtattggacattctatatcccctgctacccgaagaccagagttgcccaaacttgcgactgactttcaaacaggacccctcttcctttgttctttttttttcttt

SEQ ID NO: 534096 - DNA, 120 bp, Artificial Sequence
  ENSG00000166526_25 (sequence is synthesized)
tattctctcaaacattctcttatccattcctcttcctttgatgccttatgtgagtgtaacagtctgtaattatgaagcacatactttttgcattcccgatttttttactccttgcagttg

SEQ ID NO: 534097 - DNA, 120 bp, Artificial Sequence
  ENSG00000166526_26 (sequence is synthesized)
tgagtggcaatagagttagccctcagcaaacatttgctatgtgagcaaatgagtaaagagataatgagaggtagatcaaatccagggttggttggtttgttttgttttgttttgttttgt

SEQ ID NO: 534098 - DNA, 67 bp, Artificial Sequence
  ENSG00000166526_27 (sequence is synthesized)
aggtggcagtgagtaaaaaaaataaagaaaatttaaaaataccgggcgcggtggctcacgcctgtaa

SEQ ID NO: 534099 - DNA, 120 bp, Artificial Sequence
  ENSG00000166526_28 (sequence is synthesized)
gcctgtaatcccagctctcagggaggcaacaggtgggaggatagcttgagcccaggagttccagacctgcctgggcaatatagcgagaccctgttctccacaaaaaggaaaaaaaaaatt

SEQ ID NO: 534100 - DNA, 120 bp, Artificial Sequence
  ENSG00000166526_29 (sequence is synthesized)
aaaaaattaaaaaataaaagaaaataaaagactagtcccagttgccacatttcttctcactgttcctgggtactcactgaaatactagctcccatctttctgtattcaggaggttttttt

SEQ ID NO: 534101 - DNA, 120 bp, Artificial Sequence
  ENSG00000166526_30 (sequence is synthesized)
aaccgacccggaagcgaaacgagggggaacttccgttctttgttctgtccccggtgtgtgggtctgtgacagggtccaacagggcctggtccgtgtccggtcccccaaatctgtcgtccc

SEQ ID NO: 534102 - DNA, 120 bp, Artificial Sequence
  ENSG00000166526_31 (sequence is synthesized)
ctgggggatgagatgttggcggctgcgctcctaaaggccaagtcccaggtgagctgtggttccgtttatccttttcctttccattttctgtgcaatgacatcccattcagagctttaaac

SEQ ID NO: 534103 - DNA, 120 bp, Artificial Sequence
  ENSG00000166526_32 (sequence is synthesized)
cctgatctcctccatcaggcccatggttctgtcctgctgaatcatggaccctcaccttctatcttggactcctgtctctcttcctccaccctgtcctcccttcctcccttcccaaatgtg

SEQ ID NO: 534104 - DNA, 120 bp, Artificial Sequence
  ENSG00000166526_33 (sequence is synthesized)
catttttcaccccatcctcagtgatttttttggtgccgccattcacattcctcaccctgaaattgcatgccagcacgtgttgtttcaggagctggtaacctttgaggatgtagctgtgta

SEQ ID NO: 534105 - DNA, 120 bp, Artificial Sequence
  ENSG00000166526_34 (sequence is synthesized)
accagctcttccttcaaaagttcctgccttttccgacaaggacagcctgggggatgagatgttggcggctgcgctcctaaaggccaagtcccaggagctggtaacctttgaggatgtagc

SEQ ID NO: 534106 - DNA, 120 bp, Artificial Sequence
  ENSG00000166526_35 (sequence is synthesized)
tggcatggcttactgggaccctaagtgtggcgaagggactctgctccagtgaactggcgagtgtggaacctcctgacaccttctgaggacctcctgcctgccatgttgctgtggagctcg

SEQ ID NO: 534107 - DNA, 120 bp, Artificial Sequence
  ENSG00000166526_36 (sequence is synthesized)
actcctcaggcatcccctgatgttgagtgatacaaactctatcaccggaatcgatgctgctgcaatgacaagacttctttctggttttcagattctaaagtttaaaacaacgacaacaac

SEQ ID NO: 534108 - DNA, 120 bp, Artificial Sequence
  ENSG00000166526_37 (sequence is synthesized)
aggagcgcttgaaagttacggtgcttctccctctccagtgtggactcgctgatgtttggaaagattggacttgctacagaaggtctttccacagtgatgacaccagtagggcttttcccc

SEQ ID NO: 534109 - DNA, 120 bp, Artificial Sequence
  ENSG00000166526_38 (sequence is synthesized)
ggtgtggattctgtggtgtttattgaagttggagctgtggttgaaggctttcccacactccttacacttatatggcttctctccggtgtggagtctctggtgggagctgaggcccgcatg

SEQ ID NO: 534110 - DNA, 120 bp, Artificial Sequence
  ENSG00000166526_39 (sequence is synthesized)
ctgactgaagctcttcccacattcgttacactgataaggcttctccccagtgtggatccgatagtgacgaatgaggctgcctttcccgctgaaagccttgccacaatctttgcactgata

SEQ ID NO: 534111 - DNA, 120 bp, Artificial Sequence
  ENSG00000166526_40 (sequence is synthesized)
tggcgcctcttctgtgtgcattctctgatgtttaagaaggtctgagctctgcccaaaagcttttccacacttacagtcatagggccggtccaccaagtgtgttctgtagtggagggtgag

SEQ ID NO: 534112 - DNA, 120 bp, Artificial Sequence
  ENSG00000166526_41 (sequence is synthesized)
gtttgagctgtggctgaaagctttcccacacttggtgcacacgtaaggtttctccccagtgtgtgttctcctgtgtttggtgagatttgagctattactaaaggctttgccacattcagc

SEQ ID NO: 534113 - DNA, 120 bp, Artificial Sequence
  ENSG00000166526_42 (sequence is synthesized)
gtgtgggtctgtgacagggtccaacagggcctggtccgtgtccggtcccccaaatctgtcgtccctgcccccaggggactgacttcaaagaaggaaggaaagaatcaggcagtgcttcct

SEQ ID NO: 534114 - DNA, 120 bp, Artificial Sequence
  ENSG00000166526_43 (sequence is synthesized)
atcatccattgaaatcgctcacttaccaggtactaggctaactactagaatccagatgtgaataagacacactcttcgccattcagtaactcacagcctagtggggaagctgaccgaaca

SEQ ID NO: 534115 - DNA, 81 bp, Artificial Sequence
  ENSG00000166526_44 (sequence is synthesized)
attcagtaactcacagcctagtggggaagctgaccgaacagtaatcaatgacagcttgataggtttgataattgaggcaga

SEQ ID NO: 534116 - DNA, 120 bp, Artificial Sequence
  ENSG00000166527_0 (sequence is synthesized)
gcctcatctcccggaatgtatcaaaggaaacccctgtctttgaaaaagacttcttttgagctaactttcttatactggtacctttctaatctcactacaatatgtaacattggtgttcga

SEQ ID NO: 534117 - DNA, 120 bp, Artificial Sequence
  ENSG00000166527_1 (sequence is synthesized)
tctcaagtatttctgaatatattcccctatccacagaaatatactctgggggaaaaaaaatagaacaaattcttgccgtcctgaccattgaacaagagactaattagacaatggggctag

SEQ ID NO: 534118 - DNA, 120 bp, Artificial Sequence
  ENSG00000166527_2 (sequence is synthesized)
aaaaacctcaaagtaaactggaaggaggcatgcatccccagctgataccttcggttattgctgtagttttcatcttacttctcagtgtctgttttattgcaagttgtttggtgactcatc

SEQ ID NO: 534119 - DNA, 120 bp, Artificial Sequence
  ENSG00000166527_3 (sequence is synthesized)
acaacttttcacgctgtaagagaggcacaggagtgcacaagttagagcaccatgcaaagctcaaatgcatcaaagagaaatcagaactgaaaagtgctgaagggagcacctggaactgtt

SEQ ID NO: 534120 - DNA, 120 bp, Artificial Sequence
  ENSG00000166527_4 (sequence is synthesized)
gtcctattgactggagagccttccagtccaactgctattttcctcttactgacaacaagacgtgggctgagagtgaaaggaactgttcagggatgggggcccatctgatgaccatcagca

SEQ ID NO: 534121 - DNA, 120 bp, Artificial Sequence
  ENSG00000166527_5 (sequence is synthesized)
cggaagctgagcagaactttattattcagtttctggatagacggctttcctatttccttggacttagagatgagaatgccaaaggtcagtggcgttgggtggaccagacgccatttaacc

SEQ ID NO: 534122 - DNA, 120 bp, Artificial Sequence
  ENSG00000166527_6 (sequence is synthesized)
cacgcagagtattctggcataagaatgaacccgacaactctcagggagaaaactgtgttgttcttgtttataaccaagataaatgggcctggaatgatgttccttgtaactttgaagcaa

SEQ ID NO: 534123 - DNA, 120 bp, Artificial Sequence
  ENSG00000166527_7 (sequence is synthesized)
gtaggatttgtaaaatacctggaacaacattgaactagaaactcagaaagtggtccttgtgatggaaagagaaaagaaaaaccaattagaataaggcagaatgtacgtgcgtcattggaa

SEQ ID NO: 534124 - DNA, 120 bp, Artificial Sequence
  ENSG00000166527_8 (sequence is synthesized)
ttttgtttgattcattcgagacaacatgtgtgtatgtgtgtgtgtgtgtgtgtagataatgtggtttttgtatggtgtttgatggaaggaataatctttctttgctttcttagtagtatt

SEQ ID NO: 534125 - DNA, 120 bp, Artificial Sequence
  ENSG00000166527_9 (sequence is synthesized)
tcaaggtgtttacttttcaattggtgtgcactgaatgcatgtatggaagaatagcgtgaataatgcaatctctttgtcatttttccccttctcagactcttagctcttaaaattcaaaga

SEQ ID NO: 534126 - DNA, 120 bp, Artificial Sequence
  ENSG00000166527_10 (sequence is synthesized)
tgggatattctaactggtagtggtgcatcatttttaacccaaatattgcaagcactttaaagatttgaaaccacatttttattgtttgatgtttcattttcagactttttaatgtcagtc

SEQ ID NO: 534127 - DNA, 120 bp, Artificial Sequence
  ENSG00000166527_11 (sequence is synthesized)
attacaattacattgcatgaggaaaatttttccagaacaacagtgtggaatagttctgaattatgctgttctacagatagaaaaaaagtccaaatgcctttaaaaatttacttcttactc

SEQ ID NO: 534128 - DNA, 120 bp, Artificial Sequence
  ENSG00000166527_12 (sequence is synthesized)
cacccaacacgtttttgcaaagcaagaagtctttgtaagacaccttaaacaaagtccttcaattctacagcagaggaaataaaatcccccagaagccaaagggctcaccttcacattgtt

SEQ ID NO: 534129 - DNA, 120 bp, Artificial Sequence
  ENSG00000166527_13 (sequence is synthesized)
agttcatgacagacccaggtgtgcttcattagagataacatacattccctttggtatcacaggaagttactggggattactcgacctcattacttagctaacgactggataaaatttctt

SEQ ID NO: 534130 - DNA, 120 bp, Artificial Sequence
  ENSG00000166527_14 (sequence is synthesized)
aattgtttgaagtaacattgtattcgtgtttgcattattaatttgaatagaaaataatcacattttcaacccatttatacaaattgttaatgtttctttagagctgtataactatagttt

SEQ ID NO: 534131 - DNA, 120 bp, Artificial Sequence
  ENSG00000166527_15 (sequence is synthesized)
gaactagcaaggaagttattgttttgacaaccagaaattatgcttttctggtgcatgaaacattaattgcaaagggcagtcacatccaactttaataaaatatggtggtctttcttaaaa

SEQ ID NO: 534132 - DNA, 120 bp, Artificial Sequence
  ENSG00000166529_0 (sequence is synthesized)
acttccgggtgcgcggtcccgaggtacgcggtgcggtctcccggtacccggagcggctctgattcatggtttaacttgtggccctaaagaactggaaacccaaaggaacgaatattcctg

SEQ ID NO: 534133 - DNA, 120 bp, Artificial Sequence
  ENSG00000166529_1 (sequence is synthesized)
ccccacagagtcccatctttggtgaggctgtttctggagtttacatgatgaccaaggtactaggcatggccccagttctgggccctaggcctccacaggagcaggtggggcctctgatgg

SEQ ID NO: 534134 - DNA, 120 bp, Artificial Sequence
  ENSG00000166529_2 (sequence is synthesized)
taaaagtcgaggagaaagaagagaaaggcaagtaccttcctagcctggagatgttccgccagcgcttcaggcagtttgggtaccatgatacccctggaccccgagaggccctgagccaac

SEQ ID NO: 534135 - DNA, 120 bp, Artificial Sequence
  ENSG00000166529_3 (sequence is synthesized)
tccgggtgctctgctgtgagtggctgaggcccgagatccacaccaaggagcagatcctggagctactggtgctggagcagttcctgaccatcctgccccaggagctccaggcctgggtgc

SEQ ID NO: 534136 - DNA, 120 bp, Artificial Sequence
  ENSG00000166529_4 (sequence is synthesized)
aggagcattgcccggagagcgctgaagaggctgtcactctcctcgaagatctggagcgggaactggatgagccaggacaccaggtctcaactcctccaaacgaacagaaaccggtgtggg

SEQ ID NO: 534137 - DNA, 120 bp, Artificial Sequence
  ENSG00000166529_5 (sequence is synthesized)
agaagatatcctcctcaggaactgcaaaggaatccccgagcagcatgcagccacagcccttggagaccagtcacaaatacgagtcttgggggcccctgtacatccaagagtctggtgagg

SEQ ID NO: 534138 - DNA, 120 bp, Artificial Sequence
  ENSG00000166529_6 (sequence is synthesized)
agcaggagttcgctcaagatccaagaaaggtccgagattgcagattgagtacccagcacgaggaatcagcagatgagcagaaaggttctgaagcagaggggctcaaaggggatataattt

SEQ ID NO: 534139 - DNA, 120 bp, Artificial Sequence
  ENSG00000166529_7 (sequence is synthesized)
ctgtgattatcgccaataaacctgaggccagcttagagaggcagtgcgtaaaccttgaaaatgaaaaaggaacaaaaccccctcttcaagaggcaggctccaagaaaggtagagaatcag

SEQ ID NO: 534140 - DNA, 120 bp, Artificial Sequence
  ENSG00000166529_8 (sequence is synthesized)
aggagaacacacactggggagaaaccttacgtgtgcaccaagtgtgggaaagctttcagccacagctcaaacctcaccctccactacagaacacacttggtggaccggccctatgactgt

SEQ ID NO: 534141 - DNA, 120 bp, Artificial Sequence
  ENSG00000166529_9 (sequence is synthesized)
aagtgtggaaaagcttttgggcagagctcagaccttcttaaacatcagagaatgcacacagaagaggcgccatatcagtgcaaagattgtggcaaggctttcagcgggaaaggcagcctc

SEQ ID NO: 534142 - DNA, 120 bp, Artificial Sequence
  ENSG00000166529_10 (sequence is synthesized)
attcgtcactatcggatccacactggggagaagccttatcagtgtaacgaatgtgggaagagcttcagtcagcatgcgggcctcagctcccaccagagactccacaccggagagaagcca

SEQ ID NO: 534143 - DNA, 120 bp, Artificial Sequence
  ENSG00000166529_11 (sequence is synthesized)
tataagtgtaaggagtgtgggaaagccttcaaccacagctccaacttcaataaacaccacagaatccacaccggggaaaagccctactggtgtcatcactgtggaaagaccttctgtagc

SEQ ID NO: 534144 - DNA, 120 bp, Artificial Sequence
  ENSG00000166529_12 (sequence is synthesized)
aagtccaatctttccaaacatcagcgagtccacactggagagggagaagcaccgtaactttcaagcgctcctgttgttgtcgttgttttaaactttagaatctgaaaaccagaaagaagt

SEQ ID NO: 534145 - DNA, 120 bp, Artificial Sequence
  ENSG00000166529_13 (sequence is synthesized)
cttgtcattgcagcagcatcgattccggtgatagagtttgtatcactcaacatcaggggatgcctgaggagtgcgagctccacagcaacatggcaggcaggaggtcctcagaaggtgtca

SEQ ID NO: 534146 - DNA, 120 bp, Artificial Sequence
  ENSG00000166529_14 (sequence is synthesized)
ggaggttccacactcgccagttcactggagcagagtcccttcgccacacttagggtcccagtaagccatgccagcattaccttttgcgtagttaaacagacgtgtatccagtctagttaa

SEQ ID NO: 534147 - DNA, 120 bp, Artificial Sequence
  ENSG00000166529_15 (sequence is synthesized)
ggaagaaacattaagattgtttaatttttaacatatattcaagaattttaatttgtaaagaattgagccacattgaacacaattgaatgagattcagaataaacttataacatcttgtaa

SEQ ID NO: 534148 - DNA, 120 bp, Artificial Sequence
  ENSG00000166532_0 (sequence is synthesized)
ggtctgagggagcggggcggtctccgccggcgtcgcgcgcgctgtgtgtgagcggggtcgcgcgcgcgcgcggcaggcgagtgagggaacgaggagcggccgggtgtgagtgtgtgggag

SEQ ID NO: 534149 - DNA, 120 bp, Artificial Sequence
  ENSG00000166532_1 (sequence is synthesized)
tgagagtgtgtgggagtggggtgagggagaagctgacgggacgcgaggctgtgagaaactgggcgagtgtgcgaggacgcccggccagcctgcgggagccgcagtcggcggaggagaaag

SEQ ID NO: 534150 - DNA, 120 bp, Artificial Sequence
  ENSG00000166532_2 (sequence is synthesized)
gaggcggctcccggtatcccgaccccctccccctcctctccttcccccacttccagccgcccggcggcccgcgcttcctcgaaggccccagcccggctcagtcggccgagagcgagggag

SEQ ID NO: 534151 - DNA, 120 bp, Artificial Sequence
  ENSG00000166532_3 (sequence is synthesized)
gagccccccgacccaggtgctggagtctgcttgtcagggaggggggcagtctgtgattctgagaacagagccaagaaggggaacagcaaattcagtcacagacaatcctccactcggtca

SEQ ID NO: 534152 - DNA, 120 bp, Artificial Sequence
  ENSG00000166532_4 (sequence is synthesized)
agagccacttttctcttcctgccttgcccccccgcagggggtaaggaactgagcgtttaatctttagccggttggctaccagctaaaattctacttatcttagtttctagtggatagctt

SEQ ID NO: 534153 - DNA, 120 bp, Artificial Sequence
  ENSG00000166532_5 (sequence is synthesized)
tcttattttgcccatgttttcttagaatccctgtttaatatacttttgtcagtagtagtatctaggagtagcagggagagtgacaataaattagccccttcttttttcccttgtcattca

SEQ ID NO: 534154 - DNA, 120 bp, Artificial Sequence
  ENSG00000166532_6 (sequence is synthesized)
ggccccttttcctctccagagggaaattaccagtaaactcttctaaatcttccaccccttctcagtcatactgtgaagaaacacactaaagtggacattatttgaccagtgaacacgaac

SEQ ID NO: 534155 - DNA, 120 bp, Artificial Sequence
  ENSG00000166532_7 (sequence is synthesized)
ccagcttcaggcattggtttgttgtggcacatggagaaacatctcttttaaaatatctcccaattacccttttcacaatttgtatccacctaggatttgctgctggggtaagtcactaga

SEQ ID NO: 534156 - DNA, 120 bp, Artificial Sequence
  ENSG00000166532_8 (sequence is synthesized)
tttatttctcaaagctcccctctctatgagctgaaagactgaccaaccatgaacactagtaggggatggggaaaggggacagagcagagccagttgttccacactttgggaagcaggagt

SEQ ID NO: 534157 - DNA, 120 bp, Artificial Sequence
  ENSG00000166532_9 (sequence is synthesized)
agcttttatcatcttcctctggggagcaggcatagagacataaactgagtgaaaatgggtggaggaagaacttctatacccacgaacaacatgtgaagagagagaaccaaacataaagta

SEQ ID NO: 534158 - DNA, 120 bp, Artificial Sequence
  ENSG00000166532_10 (sequence is synthesized)
aggagggtagacgttacatccaagaggaaataatccaggcaaggaagcacaagctgatcaagatgtgtagttctgtggctgccaagttgtggtttttgacagatcgtcgcatcagggaag

SEQ ID NO: 534159 - DNA, 120 bp, Artificial Sequence
  ENSG00000166532_11 (sequence is synthesized)
actatcctcaaaaagagattttacgagcattgaaggccaaatgttgtgaggaggaactggactttagggctgtggtgatggatgaggtggtgctgacaatcgagcaaggaaacctgggtc

SEQ ID NO: 534160 - DNA, 120 bp, Artificial Sequence
  ENSG00000166532_12 (sequence is synthesized)
tgcggatcaatggagagctaatcactgcctacccacaagtggtggtagtcagagtaccaaccccttgggtgcaaagtgatagtgacatcactgttttgcgccatctagagaagatgggat

SEQ ID NO: 534161 - DNA, 120 bp, Artificial Sequence
  ENSG00000166532_13 (sequence is synthesized)
gtcggttaatgaaccgacctcaagccatcctgaactgcgttaataagttctggacatttcaagagttggctggccatggtgttcctctgccggatactttctcttatggtggccacgaaa

SEQ ID NO: 534162 - DNA, 120 bp, Artificial Sequence
  ENSG00000166532_14 (sequence is synthesized)
attttgctaaaatgattgatgaggctgaagttctggagttcccaatggtagtaaagaatacgcggggtcacagaggtaaagctgttttcttggctcgagataagcaccatttggctgatc

SEQ ID NO: 534163 - DNA, 120 bp, Artificial Sequence
  ENSG00000166532_15 (sequence is synthesized)
taagccatcttattcgccatgaagcgccatacctgttccagaagtatgttaaagagtctcatggacgggatgtacgtgtcattgtcgtgggaggccgtgtggttggcaccatgttacgtt

SEQ ID NO: 534164 - DNA, 120 bp, Artificial Sequence
  ENSG00000166532_16 (sequence is synthesized)
gttcaacagatgggagaatgcaaagcaactgctcattaggtggtgtggggatgatgtgctcattgagtgaacaagggaagcagctagctatccaggtgtctaatatcctggggatggatg

SEQ ID NO: 534165 - DNA, 120 bp, Artificial Sequence
  ENSG00000166532_17 (sequence is synthesized)
tgtgtggcattgatctgctgatgaaagatgacggctccttctgcgtctgtgaggccaatgcaaatgtaggtttcatcgcctttgataaggcttgtaatctagatgtagctggtatcatag

SEQ ID NO: 534166 - DNA, 120 bp, Artificial Sequence
  ENSG00000166532_18 (sequence is synthesized)
cagactatgccgcctcccttctaccctctggccggctcacccggcgtatgtccctgctctccgtggtgtccactgccagtgagactagtgagccggagctgggtcccccagccagcactg

SEQ ID NO: 534167 - DNA, 120 bp, Artificial Sequence
  ENSG00000166532_19 (sequence is synthesized)
ctgttgacaacatgagtgcaagttccagctctgttgacagcgaccctgaaagcacggagcgagagctgctcaccaagctcccagggggcctgttcaacatgaaccagctgctagccaatg

SEQ ID NO: 534168 - DNA, 120 bp, Artificial Sequence
  ENSG00000166532_20 (sequence is synthesized)
aaatcaaactactggtggactgactccactggtaattaaccaacaaaacccttgtaaaactttctttcttcttttctatttttaaaaccaacttgcaatgctgttcatggaggatgctca

SEQ ID NO: 534169 - DNA, 120 bp, Artificial Sequence
  ENSG00000166532_21 (sequence is synthesized)
ggaagatgagagaaaattagtaggattagttggagagagtgggagatagatgagacctctgctagtaagatgttactttcatttacaaatcctacaaatagagaggcagaataggtgggg

SEQ ID NO: 534170 - DNA, 120 bp, Artificial Sequence
  ENSG00000166532_22 (sequence is synthesized)
tatagaaaaatgtcaggctctcatagttacccttttaaattgctaaaaaatgtgtatgctcataggccatgaggaacaaatactttttttttttcatggtcccttgcttttgtttttgta

SEQ ID NO: 534171 - DNA, 120 bp, Artificial Sequence
  ENSG00000166532_23 (sequence is synthesized)
caaaaaaaaatggttttgctacaaatatccaagtagcataacttcacattgtgttggaagatttgtcatcagtgaggaaaacatctgcataaattacaggaatttttgtattatacagct

SEQ ID NO: 534172 - DNA, 120 bp, Artificial Sequence
  ENSG00000166532_24 (sequence is synthesized)
tttactgggatttcttatttttttgttttttcccgcttaatttggtgggaggtcaaattgaatataacccaataaaggcttcttaatgacaaaattggcatgtttgcatgatgaaatgga

SEQ ID NO: 534173 - DNA, 120 bp, Artificial Sequence
  ENSG00000166532_25 (sequence is synthesized)
aatgaacagtattgcaatgtccggtatacaaaataacattaattcaatgtagataaaattacactagtttaaaatatgtgcattcacttgtatttgttagtgttttagtcttttttgaaa

SEQ ID NO: 534174 - DNA, 120 bp, Artificial Sequence
  ENSG00000166532_26 (sequence is synthesized)
gatgtgctctgttaatgttgcttttttttttttttttaatacatgctagtctaacatttcctgctctatgcctgcatctttaacaatggccaaagtgaagaaaatgctaccttttttgtt

SEQ ID NO: 534175 - DNA, 120 bp, Artificial Sequence
  ENSG00000166532_27 (sequence is synthesized)
aacaagacactgacttgaaacatgtacatttaaagccttttattttttccctttttgttttggtagttgggcatttaaataaggacaaggaaaaatatttttgggggcaaatcaagagcc

SEQ ID NO: 534176 - DNA, 120 bp, Artificial Sequence
  ENSG00000166532_28 (sequence is synthesized)
tatgagttctaagtataaagctgaagtgatttcgaatgccagcgttatatatttgcatttttcacattttacgagggagtatatgtgtatgtgtgtgcacgcatgcatgtgtatgtgttt

SEQ ID NO: 534177 - DNA, 120 bp, Artificial Sequence
  ENSG00000166532_29 (sequence is synthesized)
tgctttttgtttccatcaactaatcaaaaaggataatttagaaaatggagcatgatgggaaacagagtttttgactttaaaaaacagatgagttgttttcataagtagactccactgggg

SEQ ID NO: 534178 - DNA, 120 bp, Artificial Sequence
  ENSG00000166532_30 (sequence is synthesized)
tagaggtattcaccttaaaacatagggtgagtagatgcttttttaggcctttttgtgtatatgtacgttgtttgtttttttccttttgtttctagcctgttcagtgtacagtttattcaa

SEQ ID NO: 534179 - DNA, 120 bp, Artificial Sequence
  ENSG00000166532_31 (sequence is synthesized)
ggctacatgcttttctttaatgcttctggctatgcattttctctttttacatataggatttgggattgggggtgggttggatgtttttgtttggggacttatttagtagtattgagtctc

SEQ ID NO: 534180 - DNA, 120 bp, Artificial Sequence
  ENSG00000166532_32 (sequence is synthesized)
ttatagccctactcttaagccttcaatactgtccactctttatattcctttacttgcagaatttataaaagcccccaaactgcatataatatgagcctttaaaacatgggtaaaactaat

SEQ ID NO: 534181 - DNA, 120 bp, Artificial Sequence
  ENSG00000166532_33 (sequence is synthesized)
cccattgatgggtttggatggtatgttaagaaatggagatgctgcagagcccaacgtaattttttaaacagcaagttttccatctccctacgaatcctctgaagcttttacccaagccct

SEQ ID NO: 534182 - DNA, 120 bp, Artificial Sequence
  ENSG00000166532_34 (sequence is synthesized)
ttcttgcctctccagtgctattttccttcagatggaccttaaacataatttcttggacactactagagagacttcgaggcaataataaaagatcagtattaaccagctataacagaggtt

SEQ ID NO: 534183 - DNA, 120 bp, Artificial Sequence
  ENSG00000166532_35 (sequence is synthesized)
tgatcatgcttacttgtacagtttttcccccgttttaaaaaggaatgtaataaaatttgttttttccatagaattaaataatattaaaattgagtgaaaggttgattgttgatgaataga

SEQ ID NO: 534184 - DNA, 120 bp, Artificial Sequence
  ENSG00000166532_36 (sequence is synthesized)
atagtacctctcatctgtgcagtgtctcatttcacctcagagaaaaggatacataagaggagtttgtaatttatcttaggatattctaattgcatttaaaagaacttatcttgcgcaggg

SEQ ID NO: 534185 - DNA, 120 bp, Artificial Sequence
  ENSG00000166532_37 (sequence is synthesized)
taaatgggggactcacatacatatattaatacctctgactcattaacagaaagaaatacttggtacttctttcgctgaatgaccatactgtggaggatgcatactatttggtatagagaa

SEQ ID NO: 534186 - DNA, 120 bp, Artificial Sequence
  ENSG00000166532_38 (sequence is synthesized)
ataaatgaggaagaaagaactgcttaattaaattatcattcatatgttcatatagagaccatctggttgccatgtgtattatgacacatacactttgaatagttacatatcacaagtatg

SEQ ID NO: 534187 - DNA, 120 bp, Artificial Sequence
  ENSG00000166532_39 (sequence is synthesized)
tagttcatgtttgtgttggtggggtaaggcatcaggaaaaatgtagttagtcttttcttaacttataccaaattaaccaactatattataggaaatatgtgaaattagttcattagcttt

SEQ ID NO: 534188 - DNA, 120 bp, Artificial Sequence
  ENSG00000166532_40 (sequence is synthesized)
attcactattatgcattcacatgatattaaaacgtacactcacatgttagaatgaaaagagcagtagttatcttagattttaaaaacatggatatcttcttgaattccttcaagattgag

SEQ ID NO: 534189 - DNA, 120 bp, Artificial Sequence
  ENSG00000166532_41 (sequence is synthesized)
gtagagaataagagcaaatcattctggaagtaccttaaggaaacaaacagcagcagatatttaggttaaacttattttcataattgtttaataacttttgtataatcttcattgctatta

SEQ ID NO: 534190 - DNA, 120 bp, Artificial Sequence
  ENSG00000166532_42 (sequence is synthesized)
atgtgtaatgataaaatctgaattgtaaaatttttgtatattgttaaaattgtaattctaaattgtatttcaaaaatgattatttctgatattgtttttatgtcacccatgatgaaaact

SEQ ID NO: 534191 - DNA, 120 bp, Artificial Sequence
  ENSG00000166532_43 (sequence is synthesized)
tttatgtcacccatgatgaaaactggactttatatatctaaacatacaagtatgaactattctatttaaaatttttaatagtttttttcttttttggtgcctataattgattggtcattt

SEQ ID NO: 534192 - DNA, 120 bp, Artificial Sequence
  ENSG00000166532_44 (sequence is synthesized)
ctgctggcttttctccaatgaacattgaaatcttcctgtatatgttaccaataagaaaactaccctggaacagtagaaaaacccaacaagagacttggcattcatcaagcacattatcag

SEQ ID NO: 534193 - DNA, 120 bp, Artificial Sequence
  ENSG00000166532_45 (sequence is synthesized)
actttgagaacatattgaaggcattgactttgaaaatcatctctttttctcaagaagaaagcaatggagaagcaaatttgtttcattcagtgaatccccagtttggggcttgtggggctt

SEQ ID NO: 534194 - DNA, 120 bp, Artificial Sequence
  ENSG00000166532_46 (sequence is synthesized)
agagacattgtgaaatcaaatcttgtgttatacttttctcctggctcactttttttgagaaggtttatgggctatttggctggtgagacacgatcccctcctaagaaaatgtaggtgctc

SEQ ID NO: 534195 - DNA, 120 bp, Artificial Sequence
  ENSG00000166532_47 (sequence is synthesized)
agacaggtaaccactgctgctactgtttttatttgtttgtttgttcaattttatttaagatttgtttttgttgtactaggattttaaaaaatgtaatatattgcaggatttataaccagg

SEQ ID NO: 534196 - DNA, 120 bp, Artificial Sequence
  ENSG00000166532_48 (sequence is synthesized)
ttttcgctccccgcgcgcgatccatcgcctctcttcccccgaggccagcgatggctcgggtgcgggcgaggagctgggagggcggctctcgacgcagccgcccggcggcccgcgcttcct

SEQ ID NO: 534197 - DNA, 120 bp, Artificial Sequence
  ENSG00000166532_49 (sequence is synthesized)
gtttacgccggtttctagggggcagagctggcgctatccaccccgcctgtatctccaaacccgcttcagccaggaaatttatcatgtggttttaaatttgcctctcaatatacagaggta

SEQ ID NO: 534198 - DNA, 120 bp, Artificial Sequence
  ENSG00000166532_50 (sequence is synthesized)
gggaatttgaattggaatttacttccagctgcactcatgcaagaatttgtgatgtatactaaaaaataaaaaaaggctcattcaggagagccttgtactcagcaagagtggctaacatta

SEQ ID NO: 534199 - DNA, 120 bp, Artificial Sequence
  ENSG00000166532_51 (sequence is synthesized)
gagcatacagactatgtgattgtataaggcatggagagttaaacaacctccagtcagctgcctgtttgaataccactgacttgttaagaatgatcttgcttttagattttaccatattca

SEQ ID NO: 534200 - DNA, 120 bp, Artificial Sequence
  ENSG00000166532_52 (sequence is synthesized)
aacttattaggtgagccttatatagcatatatacctggctgctattgtggggtttgggaacatgaggggtggggtgaactgttgttgttttaggtttcagtcagacagacatccctgtgc

SEQ ID NO: 534201 - DNA, 120 bp, Artificial Sequence
  ENSG00000166532_53 (sequence is synthesized)
ctcagttcccagaagcacagcaggcctctaggagcatccgtgggaacggcgcagtcctgacatcaccaactctcctgctcaggctcatcccatatacagaggtcaaagggtggggtttga

SEQ ID NO: 534202 - DNA, 120 bp, Artificial Sequence
  ENSG00000166532_54 (sequence is synthesized)
gatcgggggaaggaatgagaaagtagaagcaatgtcacttcagtgccactgttgactagtctttggtgcttatgtcagtatttgttttatttcctgatttttttaaagttggcaaaacta

SEQ ID NO: 534203 - DNA, 120 bp, Artificial Sequence
  ENSG00000166532_55 (sequence is synthesized)
catatttttatcttgatgaaggcagtgggagggtggaacaaaaacaagccattactgctatttctagttcatttactggagactgtcccttaatagctaatgtagaataaatttgaaaca

SEQ ID NO: 534204 - DNA, 120 bp, Artificial Sequence
  ENSG00000166532_56 (sequence is synthesized)
tagacctagatgacaaaaagaatgggaatagaaatgaatctcaggatttgaacaaacagaagacgtttatgctgtgttgatgcccagttctacaactgctattacatttgtcattctgtc

SEQ ID NO: 534205 - DNA, 120 bp, Artificial Sequence
  ENSG00000166532_57 (sequence is synthesized)
tattactcttttgcaaaaaatatacccactgcttatatgggcatacaaatgctaccctattttaaatgtaggtggcgtatgtgttcgtgttttaatgtattcagagccattgggcaataa

SEQ ID NO: 534206 - DNA, 120 bp, Artificial Sequence
  ENSG00000166532_58 (sequence is synthesized)
gcagtccagaacattgaaaactcaagcaggtaaagcacctaacacccttagtttctagaattactttaaaaaacttttatattgctgcatcttccacagttctttgggtagtctctgaac

SEQ ID NO: 534207 - DNA, 120 bp, Artificial Sequence
  ENSG00000166532_59 (sequence is synthesized)
ttaaaatttgtaggagttgtagactacctaaatttttaagttatggtatttgttcataggttgtaggggtaggtaaagaaggaaacagacaagaaaatggcttcttgaggtggcagctgc

SEQ ID NO: 534208 - DNA, 120 bp, Artificial Sequence
  ENSG00000166532_60 (sequence is synthesized)
tgagtggctaaatcttaccactttctttctactttttttggaaattttcccagcttagcatgaacatggatcatacagtgtttgattttatgtgattgagatttttgttttttatttttg

SEQ ID NO: 534209 - DNA, 120 bp, Artificial Sequence
  ENSG00000166532_61 (sequence is synthesized)
gagggaaggtcttggagaaacattaaaaagttggtgtatgtgcaaaaatacgaaatgttaaacaaaggaattttttcttatttaatctgaatggtaagcaagaactttttctatataccc

SEQ ID NO: 534210 - DNA, 120 bp, Artificial Sequence
  ENSG00000166532_62 (sequence is synthesized)
ttctgctgcagcagacaactaaactggtaggtggcagcagaggaaggaattcttcagattgatggctactgacttaaagtctgcataggagaagagatagagcatgacataccaagtgaa

SEQ ID NO: 534211 - DNA, 120 bp, Artificial Sequence
  ENSG00000166532_63 (sequence is synthesized)
gcaagggggacaaaaatggaaacaggactaagattcctgcattttgactctaaatggttcttttgaagtaaccagtgatcttttttgcttaccctcatcaacagaatggatgaagataga

SEQ ID NO: 534212 - DNA, 120 bp, Artificial Sequence
  ENSG00000166532_64 (sequence is synthesized)
tttgactgtgtgctttttcaagtggagaatatgaatatacagaacaagaaagcaataactccaacctgtttgattccgtctgttttctaaataaagacactatgcgctggaaataacata

SEQ ID NO: 534213 - DNA, 120 bp, Artificial Sequence
  ENSG00000166532_65 (sequence is synthesized)
atggattcgtgggctgcttccacctgctaggagggtggtgtactctaactcagggacagaagcccctgtctgtgctcaggactcttgcagacctctttacctggctgttcatcttccata

SEQ ID NO: 534214 - DNA, 120 bp, Artificial Sequence
  ENSG00000166532_66 (sequence is synthesized)
atgacggctccttctgcgtctgtgaggccaatgcaaatccttttcaggagccaaaaaaacaaatacaaacaaacaaaaaaatacccagagaaaaaactttccttcttcccccttcctgat

SEQ ID NO: 534215 - DNA, 120 bp, Artificial Sequence
  ENSG00000166532_67 (sequence is synthesized)
gatgagtgagaagtattgagaactttcggggtcagtgcccttctaaactccccttcccccaataatgcagctgtataatgaatggtaaatgcaccggtttggattcaggcacagccccag

SEQ ID NO: 534216 - DNA, 120 bp, Artificial Sequence
  ENSG00000166535_0 (sequence is synthesized)
gaccctggaaaaatctgtctcacccacaaagatgtgggctcagctccttctaggaatgttggccctatcaccagccattgcagaagaacttccaaactacctggtgacattaccagcccg

SEQ ID NO: 534217 - DNA, 120 bp, Artificial Sequence
  ENSG00000166535_1 (sequence is synthesized)
gctaaatttcccctccgttcagaaggtttgtttggacctgagccctgggtacagtgatgttaaattcacggttactctggagaccaaggacaagacccagaagttgctagaatactctgg

SEQ ID NO: 534218 - DNA, 120 bp, Artificial Sequence
  ENSG00000166535_2 (sequence is synthesized)
actgaagaagaggcacttacattgtatctcctttcttgtaccacctcctgctggtggcacagaagaagtggccacaatccgggtgtcgggagttggaaataacatcagctttgaggagaa

SEQ ID NO: 534219 - DNA, 120 bp, Artificial Sequence
  ENSG00000166535_3 (sequence is synthesized)
gaaaaaggttctaattcagaggcaggggaacggcacctttgtacagactgacaaacctctctacaccccagggcagcaagtgtatttccgcattgtcaccatggatagcaacttcgttcc

SEQ ID NO: 534220 - DNA, 120 bp, Artificial Sequence
  ENSG00000166535_4 (sequence is synthesized)
agtgaatgacaagtactccatggtggaactacaggatccaaatagcaacaggattgcacagtggctggaagtggtacctgagcaaggcattgtagacctgtccttccaactggcaccaga

SEQ ID NO: 534221 - DNA, 120 bp, Artificial Sequence
  ENSG00000166535_5 (sequence is synthesized)
ggcaatgctgggcacctacactgtggcagtggctgagggcaagacctttggtactttcagtgtggaggaatatgtgctgccgaagtttaaggtggaagtggtggaacccaaggagttatc

SEQ ID NO: 534222 - DNA, 120 bp, Artificial Sequence
  ENSG00000166535_6 (sequence is synthesized)
aacggtgcaggaatctttcttagtaaaaatttgttgtaggtacacctatggaaagcccatgctaggggcagtgcaggtatctgtgtgtcagaaggcaaatacttactggtatcgagaggt

SEQ ID NO: 534223 - DNA, 120 bp, Artificial Sequence
  ENSG00000166535_7 (sequence is synthesized)
ggaacgggaacagcttcctgacaaatgcaggaacctctctggacagactgacaaaacaggatgtttctcagcacctgtggacatggccacctttgacctcattggatatgcgtacagcca

SEQ ID NO: 534224 - DNA, 120 bp, Artificial Sequence
  ENSG00000166535_8 (sequence is synthesized)
tcaaatcaatattgtggctactgttgtggaggaagggacaggtgtggaggccaatgccactcagaatatctacatttctccacaaatgggatcaatgacctttgaagacaccagcaattt

SEQ ID NO: 534225 - DNA, 120 bp, Artificial Sequence
  ENSG00000166535_9 (sequence is synthesized)
ttaccatccaaatttccccttcagtgggaagataagagttaggggccatgatgactccttcctcaagaaccatctagtgtttctggtgatttatggcacaaatggaaccttcaaccagac

SEQ ID NO: 534226 - DNA, 120 bp, Artificial Sequence
  ENSG00000166535_10 (sequence is synthesized)
cctggttactgataacaatggcctagctccctttaccttggagacatccggttggaatgggacagacgtttctctggagggaaagtttcaaatggaagacttagtatataatccggaaca

SEQ ID NO: 534227 - DNA, 120 bp, Artificial Sequence
  ENSG00000166535_11 (sequence is synthesized)
agtgccacgttactaccaaaatgcctacctgcacctgcgacccttctacagcacaacccgcagcttccttggcatccaccggctaaacggccccttgaaatgtggccagccccaggaagt

SEQ ID NO: 534228 - DNA, 120 bp, Artificial Sequence
  ENSG00000166535_12 (sequence is synthesized)
gctggtggattattacatcgacccggccgatgcaagccctgaccaagagatcagcttctcctactatttaatagggaaaggaagtttggtgatggaggggcagaaacacctgaactctaa

SEQ ID NO: 534229 - DNA, 120 bp, Artificial Sequence
  ENSG00000166535_13 (sequence is synthesized)
gaagaaaggactgaaagcctccttctctctctcactgaccttcacttcgagactggcccctgatccttccctggtgatctatgccatttttcccagtggaggtgttgtagctgacaaaat

SEQ ID NO: 534230 - DNA, 120 bp, Artificial Sequence
  ENSG00000166535_14 (sequence is synthesized)
tcagttctcagtcgagatgtgctttgacaatcaggtttcccttggcttctccccctcccagcagcttccaggagcagaagtggagctgcagctgcaggcagctcccggatccctgtgtgc

SEQ ID NO: 534231 - DNA, 120 bp, Artificial Sequence
  ENSG00000166535_15 (sequence is synthesized)
gctccgggcggtggatgagagtgtcttactgcttaggccagacagagagctgagcaaccgctctgtctatgggatgtttccattctggtatggtcactacccctatcaagtggctgagta

SEQ ID NO: 534232 - DNA, 120 bp, Artificial Sequence
  ENSG00000166535_16 (sequence is synthesized)
tgatcagtgtccagtgtctggcccatgggactttcctcagcccctcattgacccaatgccccaagggcattcgagccagcgttccattatctggaggccctcgttctctgaaggcacgga

SEQ ID NO: 534233 - DNA, 120 bp, Artificial Sequence
  ENSG00000166535_17 (sequence is synthesized)
ccttttcagctttttccgggacgtgggcctgaaaatactgtccaatgccaaaatcaagaagccagtagattgcagtcacagatctccagaatacagcactgctatgggtgcaggcggtgg

SEQ ID NO: 534234 - DNA, 120 bp, Artificial Sequence
  ENSG00000166535_18 (sequence is synthesized)
tcatccagaggcttttgagtcatcaactcctttacatcaagcagaggattctcaggtccgccagtacttcccagagacctggctctgggatctgtttcctattggtaactcggggaagga

SEQ ID NO: 534235 - DNA, 120 bp, Artificial Sequence
  ENSG00000166535_19 (sequence is synthesized)
ggcggtccacgtcacagttcctgacgccatcaccgagtggaaggcgatgagtttctgcacttcccagtcaagaggcttcgggctttcacccactgttggactaactgctttcaagccgtt

SEQ ID NO: 534236 - DNA, 120 bp, Artificial Sequence
  ENSG00000166535_20 (sequence is synthesized)
ctttgttgacctgactctcccttactcagtagtccgtggggaatcctttcgtcttactgccaccatcttcaattacctaaaggattgcatcagggttcagactgacctggctaaatcgca

SEQ ID NO: 534237 - DNA, 120 bp, Artificial Sequence
  ENSG00000166535_21 (sequence is synthesized)
agctgtcaaattgggtcacattaactttactattagtacaaagattctggacagcaatgaaccatgtgggggccagaaggggtttgttccccaaaagggccgaagtgacacgctcatcaa

SEQ ID NO: 534238 - DNA, 120 bp, Artificial Sequence
  ENSG00000166535_22 (sequence is synthesized)
gccagttctcgtcaaacctgagggagtcctggtggagaagacacacagctcattgctgtgcccaaaaggaaaggtggcatctgaatctgtctccctggagctcccagtggacattgttcc

SEQ ID NO: 534239 - DNA, 120 bp, Artificial Sequence
  ENSG00000166535_23 (sequence is synthesized)
tgactcgaccaaggcttatgttacggttctgggagacattatgggcacagccctgcagaacctggatggtctggtgcagatgcccagtggctgtggcgagcagaacatggtcttgtttgc

SEQ ID NO: 534240 - DNA, 120 bp, Artificial Sequence
  ENSG00000166535_24 (sequence is synthesized)
tcccatcatctatgtcttgcagtacctggagaaggcagggctgctgacggaggagatcaggtctcgggcagtgggtttcctggaaatagggtaccagaaggagctgatgtacaaacacag

SEQ ID NO: 534241 - DNA, 120 bp, Artificial Sequence
  ENSG00000166535_25 (sequence is synthesized)
caatggctcatacagtgcctttggggagcgagatggaaatggaaacacatggctgacagcgtttgtcacaaaatgctttggccaagctcagaaattcatcttcattgatcccaagaacat

SEQ ID NO: 534242 - DNA, 120 bp, Artificial Sequence
  ENSG00000166535_26 (sequence is synthesized)
ccaggatgctctcaagtggatggcaggaaaccagctccccagtggctgctatgccaacgtgggaaatctccttcacacagctatgaagggtggtgttgatgatgaggtctccttgactgc

SEQ ID NO: 534243 - DNA, 120 bp, Artificial Sequence
  ENSG00000166535_27 (sequence is synthesized)
gtatgtcacagctgcattgctggagatgggaaaggatgtagatgacccaatggtgagtcagggtctacggtgtctcaagaattcggccacctccacgaccaacctctacacacaggccct

SEQ ID NO: 534244 - DNA, 120 bp, Artificial Sequence
  ENSG00000166535_28 (sequence is synthesized)
gttggcttacattttctccctggctggggaaatggacatcagaaacattctccttaaacagttagatcaacaggctatcatctcaggagaatccatttactggagccagaaacctactcc

SEQ ID NO: 534245 - DNA, 120 bp, Artificial Sequence
  ENSG00000166535_29 (sequence is synthesized)
atcatcgaacgccagcccttggtctgagcctgcggctgtagatgtggaactcacagcatatgcattgttggcccagcttaccaagcccagcctgactcaaaaggagatagcgaaggccac

SEQ ID NO: 534246 - DNA, 120 bp, Artificial Sequence
  ENSG00000166535_30 (sequence is synthesized)
tagcatagtggcttggttggccaagcaacacaatgcatatgggggcttctcttctactcaggatactgtagttgctctccaagctcttgccaaatatgccactaccgcctacatgccatc

SEQ ID NO: 534247 - DNA, 120 bp, Artificial Sequence
  ENSG00000166535_31 (sequence is synthesized)
tgaggagatcaacctggttgtaaaatccactgagaatttccagcgcacattcaacatacagtcagttaacagattggtatttcagcaggataccctgcccaatgtccctggaatgtacac

SEQ ID NO: 534248 - DNA, 120 bp, Artificial Sequence
  ENSG00000166535_32 (sequence is synthesized)
gttggaggcctcaggccagggctgtgtctatgtgcagacggtgttgagatacaatattctccctcccacaaatatgaagacctttagtcttagtgtggaaataggaaaagctagatgtga

SEQ ID NO: 534249 - DNA, 120 bp, Artificial Sequence
  ENSG00000166535_33 (sequence is synthesized)
gcaaccgacttcacctcgatccttgactctcactattcacaccagttatgtggggagccgtagctcttccaatatggctattgtggaagtgaagatgctatctgggttcagtcccatgga

SEQ ID NO: 534250 - DNA, 120 bp, Artificial Sequence
  ENSG00000166535_34 (sequence is synthesized)
gggcaccaatcagttacttctccagcaacccctggtgaagaaggttgaatttggaactgacacacttaacatttacttggatgagctcattaagaacactcagacttacaccttcaccat

SEQ ID NO: 534251 - DNA, 120 bp, Artificial Sequence
  ENSG00000166535_35 (sequence is synthesized)
cagccaaagtgtgctggtcaccaacttgaaaccagcaaccatcaaggtctatgactactacctaccagatgaacaggcaacaattcagtattctgatccctgtgaatgaggataggagct

SEQ ID NO: 534252 - DNA, 120 bp, Artificial Sequence
  ENSG00000166535_36 (sequence is synthesized)
ggaaactcaattagtcctctgtgacatttactggagggtggaacattcttctgtcgcttgaagcagaactcattcaatcaaataatttaatttctctgactagtatatgggtaacaaatg

SEQ ID NO: 534253 - DNA, 120 bp, Artificial Sequence
  ENSG00000166535_37 (sequence is synthesized)
aatatgtctgaacctcagctataatactttctactacctttgcaaggagatgggataggaacaatcactcagaggaggcgttgcatgggcagggtcatagggggaagaaaggtggtttag

SEQ ID NO: 534254 - DNA, 120 bp, Artificial Sequence
  ENSG00000166535_38 (sequence is synthesized)
aaggtggtttagctgttttatttagccattcagggggctctccagagaggagacggtggtagagggtgaactagagaagataagaatgtcttcctaggccggatgcggtggctcacgcct

SEQ ID NO: 534255 - DNA, 75 bp, Artificial Sequence
  ENSG00000166535_39 (sequence is synthesized)
caatacaaagattagcctggtgtggtggcacgggcctgtaatcgcagccccttggaaggccaaggcaggagaatc

SEQ ID NO: 534256 - DNA, 89 bp, Artificial Sequence
  ENSG00000166535_40 (sequence is synthesized)
actaacaatacaaagattagcctggtgtggtggcacgggcctgtaatcgcagccccttggaaggccaaggcaggagaatcgcctcaaca

SEQ ID NO: 534257 - DNA, 120 bp, Artificial Sequence
  ENSG00000166535_41 (sequence is synthesized)
gtctcaaaaaataataaataataataataataatgtttttctagagtttcagtctaagggaaaatgtgatttagggctttggaaattggctaaaaaaataaaaatggaaaagaaaatctg

SEQ ID NO: 534258 - DNA, 120 bp, Artificial Sequence
  ENSG00000166535_42 (sequence is synthesized)
aatgtcagaagggctcagggtggtttaggatgaaattatttccactgaattttaaattgagctgtaattaaaaaacacttatgaggatagattttcgctgactttctgttacaaagatta

SEQ ID NO: 534259 - DNA, 120 bp, Artificial Sequence
  ENSG00000166535_43 (sequence is synthesized)
tctttctcttctctgtcagttgtggaagaggaagaatgagaatttggtggtacaccttgaagacagaagcaactctgagatcttggcccagagccccatgactctgcccagcaccgagcg

SEQ ID NO: 534260 - DNA, 120 bp, Artificial Sequence
  ENSG00000166535_44 (sequence is synthesized)
cccacatccacctaagctgtgcctgctttcttgcctctgccctcctagtctctcacacctacatttcagtagacaaggacaccagcctctgtaatgactacaccgctctctcattcccct

SEQ ID NO: 534261 - DNA, 120 bp, Artificial Sequence
  ENSG00000166535_45 (sequence is synthesized)
ctcagtacacaattgtgtggtccatgaacaatgacagcatagtggactctgtggcacggcacccagaaccaccccctttcaagacagaagcatttattccttcacttcctgggagtgtta

SEQ ID NO: 534262 - DNA, 120 bp, Artificial Sequence
  ENSG00000166535_46 (sequence is synthesized)
acaactgatagctaccagttgtgcccgctctggacttttgcccatagtggcctatcctctgtgattatgcatttgtaactgtgttcttcctcttctgaagacatcagtcacattggatta

SEQ ID NO: 534263 - DNA, 120 bp, Artificial Sequence
  ENSG00000166535_47 (sequence is synthesized)
gccacccttatggctgcatttcaccttgattaccactttaaaggccctgtctccaaatacagtcacattgggggttatggctccaacatactcatttggaagccaggtgtggtggctcat

SEQ ID NO: 534264 - DNA, 63 bp, Artificial Sequence
  ENSG00000166535_48 (sequence is synthesized)
ctagagatcagcctgggcaacacagggagactcatctctacaaaaaaatataaataaataaac

SEQ ID NO: 534265 - DNA, 75 bp, Artificial Sequence
  ENSG00000166535_49 (sequence is synthesized)
gtcctaaactcttgaaaatagtttacagaagaaaaagctaatgcttggtattaaaacaatacttttttctatcag

SEQ ID NO: 534266 - DNA, 120 bp, Artificial Sequence
  ENSG00000166535_50 (sequence is synthesized)
tgaggaacaatttctatgctgtcagactcctcccatccacctgcgtggttctcagccagacctccaactgcaggaggagccaccaggacccgttggcagcatcctgcatttgtcaagcta

SEQ ID NO: 534267 - DNA, 120 bp, Artificial Sequence
  ENSG00000166535_51 (sequence is synthesized)
gtggatgctggttaatagggaaaggaagtttggtgatggaggggcagaaacacctgaactctaagaagaaaggactgaaagcctccttctctctctcactgaccttcacttcgagactgg

SEQ ID NO: 534268 - DNA, 120 bp, Artificial Sequence
  ENSG00000166535_52 (sequence is synthesized)
agagcataattcctgagccctctggaactattccactacctctccccttaacccctttccttcttgcactcagtcttctacctctttaatactgtttatttcaccctcatggatggtcaa

SEQ ID NO: 534269 - DNA, 120 bp, Artificial Sequence
  ENSG00000166535_53 (sequence is synthesized)
gtccctcgatcttcctgagcttgtgcctcccctgttcttgtcctcattggtgcccattaatgcctctcttttctaggcctgctatggcatatgttccctcagctccccttctggaagtat

SEQ ID NO: 534270 - DNA, 120 bp, Artificial Sequence
  ENSG00000166535_54 (sequence is synthesized)
atttgtcaagctagtggatgctgggtgaggtattgacccggactctgaactgtgaaaggaacctctcctcatgaagggatgcagagatgctctggaagttggtccaaggtgaaattactg

SEQ ID NO: 534271 - DNA, 120 bp, Artificial Sequence
  ENSG00000166546_0 (sequence is synthesized)
ctggagccgaagctggagccggcactgcggcgcacggagcggagcgctgcagccaagccgatagcacgatacaaccgcaccagctacttctaccccacattctcagagagctcggagcac

SEQ ID NO: 534272 - DNA, 120 bp, Artificial Sequence
  ENSG00000166546_1 (sequence is synthesized)
agccatctgctcgtgtcccccgtgctggtggcgagtgccgtcataggtgtggtcatcatcctctcctgcatcaccatcattgtgggcagcatccgcagggacaggcaggcccggcttcag

SEQ ID NO: 534273 - DNA, 120 bp, Artificial Sequence
  ENSG00000166546_2 (sequence is synthesized)
cggcaccgccaccgccaccaccgccaccaccaccaccatcatcaccaccgccggcgtcgacaccgagagtacgagcacggctacgtgtcggacgagcacacatacagccgctcaagccgc

SEQ ID NO: 534274 - DNA, 120 bp, Artificial Sequence
  ENSG00000166546_3 (sequence is synthesized)
aggatgcgctatgcctgcagctcctcagaggactggcccccacccttggacatcagctctgacggggacgtggatgccacggtgctcagggagctgtacccagattctccaccaggggtc

SEQ ID NO: 534275 - DNA, 120 bp, Artificial Sequence
  ENSG00000166546_4 (sequence is synthesized)
ccaccttggagtctgagttctcactggtccaggccatcagcaaagagaatgtcaagcagatggtgttcaagatcttcctggtgagggtctcatgtgaagccgttctcagaaccgcgggca

SEQ ID NO: 534276 - DNA, 120 bp, Artificial Sequence
  ENSG00000166546_5 (sequence is synthesized)
cacggatgcttgagccgggcacagagaaactcgctaggacccacagcaggcacagctcagagaaaaggctggtgaagccctgcagctgcctcgagggggttcagccaggcccaggttccg

SEQ ID NO: 534277 - DNA, 120 bp, Artificial Sequence
  ENSG00000166546_6 (sequence is synthesized)
ggggaccacagcaaggtccctcagaaggggtggggtccgagacggccctggcagagggcactgctggccagagatctctgcccatggctctgagcccatctgaggtctcaacagccccca

SEQ ID NO: 534278 - DNA, 120 bp, Artificial Sequence
  ENSG00000166546_7 (sequence is synthesized)
acagcctccccagtggctctccagtcctctagggcccccagtgccatggcagcacatgcctggacagtgaggaggtcctgccttgcttcagtgaccctgtcttacactggatgccctggt

SEQ ID NO: 534279 - DNA, 120 bp, Artificial Sequence
  ENSG00000166546_8 (sequence is synthesized)
gacgcccgagcccgagcgcagtggcctccgagcgggaaccggactgggagccggagccggggcgggaaccggagctggagccgaagctggagccggcactgcggcgcacggagcggagcg

SEQ ID NO: 534280 - DNA, 120 bp, Artificial Sequence
  ENSG00000166546_9 (sequence is synthesized)
ctgcagccaagccgagtgagtggaggggccttccctgcgagaagtcagagctgtgcccgtgggcaggctggctccgctgttctgctccaaggattacatgtccttcaaacgtccctgccc

SEQ ID NO: 534281 - DNA, 120 bp, Artificial Sequence
  ENSG00000166546_10 (sequence is synthesized)
gcgtcgacaccgagagtacgagcacggctacgatgtacactgggagctttacctactgggtgcgatctatgctttccagacacaaactggacgccatcctgggcaggctgggctacacgg

SEQ ID NO: 534282 - DNA, 120 bp, Artificial Sequence
  ENSG00000166546_11 (sequence is synthesized)
gctggatggcacctccgactcaggcagcggccacagccctggccgacaccagcaggagcagaggaccccggcccaaggtggccttcacacggtctccatggacacccttcccccctacga

SEQ ID NO: 534283 - DNA, 120 bp, Artificial Sequence
  ENSG00000166546_12 (sequence is synthesized)
ggctgtgtgcggggctggccccccatcaggcctgctgccactgccgggcccagacccagggccaaggggctcccagggctcacccaccccaacccgggccccagcctctggcccagagag

SEQ ID NO: 534284 - DNA, 120 bp, Artificial Sequence
  ENSG00000166546_13 (sequence is synthesized)
gattgtgtgagggacccagccagccgggtcctgctggtccctacaggctgaaccacattctttaggcacacaaaggcgtgcacacacacacagagatgcacacgtgactcataacacaca

SEQ ID NO: 534285 - DNA, 120 bp, Artificial Sequence
  ENSG00000166546_14 (sequence is synthesized)
catagaccaaacttgtatacacacagacatctacactgacataccccatgtacacacacagatctagacgtgctccacatatgtgtgaatatgcgcacatacaggccccagtgaggttcc

SEQ ID NO: 534286 - DNA, 120 bp, Artificial Sequence
  ENSG00000166546_15 (sequence is synthesized)
gttgtgcgctgtgcctatctctcgattccagggcagatgagccacaacatcaccaccctgccacttacaaggtgggggacctgggtctggggtctcaggcgcaaactggaggccctcaca

SEQ ID NO: 534287 - DNA, 120 bp, Artificial Sequence
  ENSG00000166546_16 (sequence is synthesized)
ctgacgctgcaggccccaggtagatgggcagggccctccgtgggtgtgcagcggcggttccctcatcagtccagccactgcccaggactaagggtcttcaaggaagatgaggccattgcc

SEQ ID NO: 534288 - DNA, 120 bp, Artificial Sequence
  ENSG00000166546_17 (sequence is synthesized)
cttctccaggtggcttcaccacagtgctgcctgggcacctctctgaggcagagaagtggcccctccctcagtccctgcctggccgaccactgtggcctgcacgcgaatgggtcagagcca

SEQ ID NO: 534289 - DNA, 120 bp, Artificial Sequence
  ENSG00000166546_18 (sequence is synthesized)
gaccccggagctggtgctgtccttctaggtggctgctcatagctggggatggtgagtggctgtgttctggccttgcccacgtgggtgtttgcagagacaaaatgaaggggatatgctccc

SEQ ID NO: 534290 - DNA, 120 bp, Artificial Sequence
  ENSG00000166546_19 (sequence is synthesized)
cataaataccaccttgccaccacaagaggaccagaaggctactcagccttgctgccacagaaggggatttgtagggtcagcctggctgcagaaaggctggctcagatcttgaccaagaaa

SEQ ID NO: 534291 - DNA, 120 bp, Artificial Sequence
  ENSG00000166546_20 (sequence is synthesized)
ccccagcgatttccatcaaagaccacgcaggtaacagaggtgattcctgaagacccagcccacagagggtggcagccaagcatctctgagcagtgtccctgctagcatcgccagcggcca

SEQ ID NO: 534292 - DNA, 120 bp, Artificial Sequence
  ENSG00000166546_21 (sequence is synthesized)
tcactctgcctccctcccacctcttgtccctcgtcgttaaaaaacagcaccctatcctgcttccccacatttctgttcctccaatgaagggctaagactatttagtaatctctttcttaa

SEQ ID NO: 534293 - DNA, 120 bp, Artificial Sequence
  ENSG00000166546_22 (sequence is synthesized)
gcagaggagtggcaaggatggcaatcttgaattttattttctgtagagatagcatttcttctggtgcggagctgaaaggaatccacccagaagttctgtagcatcctgcgtgcagcctcc

SEQ ID NO: 534294 - DNA, 120 bp, Artificial Sequence
  ENSG00000166546_23 (sequence is synthesized)
tggagccccagactccatctgggggagggacttgtttacaagcagttctgaccaccttagtggtgtactgttttctaggcaaaaaatatctgtctgttgtactgtatagcctttaaaatg

SEQ ID NO: 534295 - DNA, 120 bp, Artificial Sequence
  ENSG00000166546_24 (sequence is synthesized)
cagtccaggaatgagactcttttaagaaacacatcctgcttctgcaattccagagagtgctgggggaaaaaaagggataaaaattcctacctactcatcagtgtttgaaagatggagctg

SEQ ID NO: 534296 - DNA, 120 bp, Artificial Sequence
  ENSG00000166546_25 (sequence is synthesized)
aatagcttttcttgttcctggactaggcaatgaataagcaacaatgtatcttttctgtgttcaaaataaatacataatatcaataaaatgtagcaagaagtaacactttcagagagtgca

SEQ ID NO: 534297 - DNA, 120 bp, Artificial Sequence
  ENSG00000166546_26 (sequence is synthesized)
tggcaccatctgaactgtgtggtggagtagaagagcatcccttgaaaaggaccctccactccctgccactctgagcctcattatccaactgcaagagtcagaaacccaacttgaatcttc

SEQ ID NO: 534298 - DNA, 120 bp, Artificial Sequence
  ENSG00000166546_27 (sequence is synthesized)
cttcggagagagaggcgaagtaggaagtgggattttctcttccctctcctgggcccgtttgcccctaccctcgcccagcaagctgcgcccaaattctattctgcctctggaaactgctgg

SEQ ID NO: 534299 - DNA, 120 bp, Artificial Sequence
  ENSG00000166546_28 (sequence is synthesized)
gaggctggagagcggtgagtggaggggccttccctgcgagaagtcagagctgtgcccgtgggcaggctggctccgctgttctgctccaaggattacatgtccttcaaacgtccctgcccc

SEQ ID NO: 534300 - DNA, 120 bp, Artificial Sequence
  ENSG00000166546_29 (sequence is synthesized)
gcttgaggtgtttggccaaagaactgcaggggtccaaccagaggctaatgtggcatgctgggtggggagagggcaacacggaagacccctgacgtctgcaagatgctccctgagaactga

SEQ ID NO: 534301 - DNA, 120 bp, Artificial Sequence
  ENSG00000166546_30 (sequence is synthesized)
aaatcgcactttggcccattcttctgtatcagcccttcccgaagtgtggatcggagttcctctgagggatgttaatgggatgacacacacccacacacaaataaaagactacatggccaa

SEQ ID NO: 534302 - DNA, 120 bp, Artificial Sequence
  ENSG00000166546_31 (sequence is synthesized)
ctcgagtccccgacgagcatcaaccgcatttggggaacccaagacagcctccccagcagcttgccctcggtttcggggacccctgaacaacccaaccaagaagggaaaactagggcgcac

SEQ ID NO: 534303 - DNA, 120 bp, Artificial Sequence
  ENSG00000166546_32 (sequence is synthesized)
tctcggtcggggtgggagaggaaaggggctggggcttcacggagtttggagtttgaacccacccgcacccctttgagctaggaagtttgacccttcgacgagcaggtcgcctggggtatg

SEQ ID NO: 534304 - DNA, 120 bp, Artificial Sequence
  ENSG00000166546_33 (sequence is synthesized)
cccctgtctccgtgcctctgtctcagcaccgagcgtcggagagagagcgcgccctccgcaccttctcccactttgggacagactttcccttgcgctgtcagagggacccgaggctgagta

SEQ ID NO: 534305 - DNA, 120 bp, Artificial Sequence
  ENSG00000166546_34 (sequence is synthesized)
cgaggcgaggcggcaggcagctcaggctggctgcgcagcgctgagtggcaccgccgccgctccccaggggcagggcccaccccacacccggctgactctcgctgcccttcctccttccct

SEQ ID NO: 534306 - DNA, 120 bp, Artificial Sequence
  ENSG00000166546_35 (sequence is synthesized)
gggctctgcggtctggaggctggagagcggtgaggaccagggactgccctgtccatctcgggcgggtgccggcgtgggtggcggggcgcaggctgggaaagggagggcgcaagtaactgg

SEQ ID NO: 534307 - DNA, 120 bp, Artificial Sequence
  ENSG00000166546_36 (sequence is synthesized)
tgtgagaggcaggggttcagggatccttgctcttgagccacgatttccgatgagcccctgccgagagcatgccgctctggactcactcctcaaacataactgctctgctggaacgagaga

SEQ ID NO: 534308 - DNA, 88 bp, Artificial Sequence
  ENSG00000166546_37 (sequence is synthesized)
ggtttataccttctgaaacttgtaagaaaaggaaacactaaatagcaacaaaatgaaaatacacctccggctagcaatctctacccat

SEQ ID NO: 534309 - DNA, 120 bp, Artificial Sequence
  ENSG00000166546_38 (sequence is synthesized)
caaaatgaaaatacacctccggctagcaatctctacccattcattacctctcaagattaagcaccattgaagccttgtcattttcctgttgatgtggatatttggatagtcagtgcctta

SEQ ID NO: 534310 - DNA, 120 bp, Artificial Sequence
  ENSG00000166546_39 (sequence is synthesized)
caggagttgcttttttttttttaacctcactgaaacttggcatcatttctctgagacatggctggtgtaacgtcatgaggatgggccatcaacttcaggacctgactctaggaacttcag

SEQ ID NO: 534311 - DNA, 120 bp, Artificial Sequence
  ENSG00000166546_40 (sequence is synthesized)
agactacacgttttactctaacaggagttggcttgtagcaccctgatggcttgtaccaccaggaaagagaggaaagtggcaatgaaactgaaatgagctgttgtctcaccctctgcagga

SEQ ID NO: 534312 - DNA, 120 bp, Artificial Sequence
  ENSG00000166546_41 (sequence is synthesized)
attcccctcttcctttccatgccctccacaacaccatggcttgggctattgatctcttagcggacagagcctgggccccttcctctgtcacatttccctcccaccagaactccaatagag

SEQ ID NO: 534313 - DNA, 120 bp, Artificial Sequence
  ENSG00000166546_42 (sequence is synthesized)
cccactaacatagtcctagatgcccccaagtgccttgaaagtggggtgcaatccaaaattcgaatagtccattaatatagtcttagaccccaagtgccttgaaagtggggtgcaatcctg

SEQ ID NO: 534314 - DNA, 120 bp, Artificial Sequence
  ENSG00000166546_43 (sequence is synthesized)
aaggagggtgcagcggggggaaagaccacgagataggctcatccttctggttctccagcccacgtccctgctggacaggccaaggctggctctgctgcgcctatcacccccaccctgagc

SEQ ID NO: 534315 - DNA, 120 bp, Artificial Sequence
  ENSG00000166546_44 (sequence is synthesized)
ccacactgccacctgccggctcgctgctgccactgctcaaagtgaacaagtcaggccctgaagaatgaggaagcccctcctctcaccttgaaacacaatacccaccagcactcataattg

SEQ ID NO: 534316 - DNA, 120 bp, Artificial Sequence
  ENSG00000166546_45 (sequence is synthesized)
tgttctatgaggttgaacccattcaagtattccatttttggggctcacccccgccccgccagcatcactctctggacaaagcctgacacttatgtccccctctctgtaagcaaaataatc

SEQ ID NO: 534317 - DNA, 120 bp, Artificial Sequence
  ENSG00000166546_46 (sequence is synthesized)
attttgcatgccctctgttctgaacatcactaggcatggctctggtgccacctcagtgctctggggctccacctcctgggaatgaatgcagaaacttccacagtgatggtgtccagccat

SEQ ID NO: 534318 - DNA, 120 bp, Artificial Sequence
  ENSG00000166546_47 (sequence is synthesized)
gtgctgcccccaaccgaaaccaccccacaccgacacccagctcccaccacaaagacttaggatcccacaggcctttgggactgtcacgctcttggcttttcctgctcctccatccacgac

SEQ ID NO: 534319 - DNA, 120 bp, Artificial Sequence
  ENSG00000166546_48 (sequence is synthesized)
atgccctatgctgtggtgtgtcacatatggcaccacattcaaggtcctttgcacattcctaaggagatgccgcctgtctgtgccaggggccaaggagaacaccccaggtacctgggctca

SEQ ID NO: 534320 - DNA, 120 bp, Artificial Sequence
  ENSG00000166546_49 (sequence is synthesized)
tcagaggcccaaggagatggaaggtgaagctgcatcacaggacgatggagacaggggccccagggccagaccctgggatgaggatgtgggtgagagtttggttagggaagtgttcccagg

SEQ ID NO: 534321 - DNA, 120 bp, Artificial Sequence
  ENSG00000166546_50 (sequence is synthesized)
agtaccagatggagtgaggcaggaaacaagaaaggcaaggaagccagtgagggggtcaccaagcaggtcaccactgcaggccactgagcgcagtcccactggtgactctgagacacagag

SEQ ID NO: 534322 - DNA, 120 bp, Artificial Sequence
  ENSG00000166546_51 (sequence is synthesized)
tagaacgcacctcaaagtgacgcccgccctcaggtgggagagacgggttgtttgtaccctgatgctcagcagacatttttggaggctgccctttggagaatgttcattcctgccccttgt

SEQ ID NO: 534323 - DNA, 120 bp, Artificial Sequence
  ENSG00000166546_52 (sequence is synthesized)
ggaggccaaatgggctcctctggccagaaaaaagtcttcaggggagtcaccgtgctggcgatgacgccatcgtgatagtccacaagagccatcattgggtccccgtgtatgggtgtggtg

SEQ ID NO: 534324 - DNA, 120 bp, Artificial Sequence
  ENSG00000166546_53 (sequence is synthesized)
aggtcccaggtctctgcaaagggctccagcagctgctgccacacacaagcaacaggcatcgcccagaagagggcggaaggagggttgatacagagtaaggctgttcacagccaccacgag

SEQ ID NO: 534325 - DNA, 120 bp, Artificial Sequence
  ENSG00000166546_54 (sequence is synthesized)
gaacatccattgtcacactggccaagcccacatgcacatacacacactggggcccctcccaagttcctagagatacccctggcacacactcacatgtagcatccctcagctccacctcct

SEQ ID NO: 534326 - DNA, 120 bp, Artificial Sequence
  ENSG00000166546_55 (sequence is synthesized)
gtggtttcgtggacatttgctcagacagctttggtgcacacacactagtgcccttctcacttagagcttgtgcacgtacacacttggtgttgcatactccagtgccactgacactcccac

SEQ ID NO: 534327 - DNA, 120 bp, Artificial Sequence
  ENSG00000166546_56 (sequence is synthesized)
tcagctgttcctatccatgcccacctgcatgtccaggctcttggcatgagcggtggagagacagtaagcttcatcgtctgaggaagtgaatcttctgtcctggtctctgctttgcttcac

SEQ ID NO: 534328 - DNA, 120 bp, Artificial Sequence
  ENSG00000166548_0 (sequence is synthesized)
ggaataagtgacatcatgagtgtgtgccaggtgtctgattacagaaggtgttcaattaatctgcaatcattaattaacccttcagtcgctggtattatttgccatccatcctccgagtgt

SEQ ID NO: 534329 - DNA, 120 bp, Artificial Sequence
  ENSG00000166548_1 (sequence is synthesized)
tgccaagttatgggtgcgttctgccagcgtcctagcagtggtaaggcttctggctgccagcggcgaacctctcccttcgagtatttctcctcttgctgagatgaaatgcgaccgggtctc

SEQ ID NO: 534330 - DNA, 120 bp, Artificial Sequence
  ENSG00000166548_2 (sequence is synthesized)
tttaagggccaggcgccgggatccaggcggcgcccaacggctggactagcagtcgtccgcgccgactcgcacaagaaggaaccccgggcctctggatccgctcgcccggctatgctgctg

SEQ ID NO: 534331 - DNA, 120 bp, Artificial Sequence
  ENSG00000166548_3 (sequence is synthesized)
ggctgggccgcccgggcgctgcgctgctttgggccgggaagtcgcgggagcccggcctcaggccccgggccgcggagggtgcagcgccgggcctggcctcccgataaagaacaggaaaaa

SEQ ID NO: 534332 - DNA, 120 bp, Artificial Sequence
  ENSG00000166548_4 (sequence is synthesized)
gaacaggaaaaagagaaaaaatcagtgatctgtgtcgagggcaatattgcaagtgggaagacgacatgcctggaattcttctccaacgcgacagacgtcgaggtgttaacggagcctgtg

SEQ ID NO: 534333 - DNA, 120 bp, Artificial Sequence
  ENSG00000166548_5 (sequence is synthesized)
tccaagtggagaaatgtccgtggccacaatcctctgggcctgatgtaccacgatgcctctcgctggggtcttacgctacagacttatgtgcagctcaccatgctggacaggcatactcgt

SEQ ID NO: 534334 - DNA, 120 bp, Artificial Sequence
  ENSG00000166548_6 (sequence is synthesized)
cctcaggtgtcatctgtacggttgatggagaggtcgattcacagcgcaagatacatttttgtagaaaacctgtatagaagtgggaagatgccagaagtggactatgtagttctgtcggaa

SEQ ID NO: 534335 - DNA, 120 bp, Artificial Sequence
  ENSG00000166548_7 (sequence is synthesized)
tggtttgactggatcttgaggaacatggacgtgtctgttgatttgatagtttaccttcggaccaatcctgagacttgttaccagaggttaaagaagagatgcagggaagaggagaaggtc

SEQ ID NO: 534336 - DNA, 120 bp, Artificial Sequence
  ENSG00000166548_8 (sequence is synthesized)
attccgctggaatacctggaagcaattcaccatctccatgaggagtggctcatcaaaggcagccttttccccatggcagcccctgttctggtgattgaggctgaccaccacatggagagg

SEQ ID NO: 534337 - DNA, 120 bp, Artificial Sequence
  ENSG00000166548_9 (sequence is synthesized)
atgttagaactctttgaacaaaatcgggatcgaatattaactccagagaatcggaagcattgcccataggaggcaaaaggtctatggctcatgtctgaaaaatgcctgctgctgccaagt

SEQ ID NO: 534338 - DNA, 120 bp, Artificial Sequence
  ENSG00000166548_10 (sequence is synthesized)
tagctattgggagcaatctggaaaaacttgctcccaggagggctttgtgtctggccagcttgattttcctaatggtctcatctcctttgctagtgtctttgtcatgcgtctctggccctc

SEQ ID NO: 534339 - DNA, 120 bp, Artificial Sequence
  ENSG00000166548_11 (sequence is synthesized)
gtgggtaaatgacaaacgggaccaatgggtttgccaagccctttgctgttcgcagcctcacattcccccggtgcctctcccatggctttgtgctgctgagtcgctctcatgaagccctta

SEQ ID NO: 534340 - DNA, 120 bp, Artificial Sequence
  ENSG00000166548_12 (sequence is synthesized)
gggagagcacctgttgtgtgcctgacaccacgctggagctgtgtaccaatcgtctcagccttcattaggaggccgaggtaggagtcttatatcccaggtgaggaatttgaagctcagaaa

SEQ ID NO: 534341 - DNA, 120 bp, Artificial Sequence
  ENSG00000166548_13 (sequence is synthesized)
ggttgaggggctccccagaggtcacacagcctgtgtgcagtggagctggcaccattcagactttcagccgactcagcaactttcccttgccctgggctgcctcctcctgagagctgttcc

SEQ ID NO: 534342 - DNA, 120 bp, Artificial Sequence
  ENSG00000166548_14 (sequence is synthesized)
ccaccgccctgcctcttccggttggaggctctcatgtctctttggggagagctggcagtgtgcggagctgataacattttcccaatattgagcagttcccaaggacagtcagcatttcta

SEQ ID NO: 534343 - DNA, 120 bp, Artificial Sequence
  ENSG00000166548_15 (sequence is synthesized)
gacttccacaaaattatgctgcatttggctggagcccggtgttcagtggtttccctgcccgaggtcgctgcagccccatctaccacatcttcatgtggacattgagattcacatgctggc

SEQ ID NO: 534344 - DNA, 120 bp, Artificial Sequence
  ENSG00000166548_16 (sequence is synthesized)
tcctgaagggtgctcagtctccttggtgattaaggtcctgcttgaactgctgccaactccatgtcagggaagtcgcttttggtgcctggctggtttgcccagagccaagctggggcaagg

SEQ ID NO: 534345 - DNA, 120 bp, Artificial Sequence
  ENSG00000166548_17 (sequence is synthesized)
ggcagccagccctggcttccaaggctcccgtactgtctgtgtccttgtataaggagctttgctcttggaattactgaaagtctgtggcccaagagagagacacaagtggccttaagtctt

SEQ ID NO: 534346 - DNA, 120 bp, Artificial Sequence
  ENSG00000166548_18 (sequence is synthesized)
tttgaagtgttatttcatccagggaaatgcctcgagccatagagcctgaaatcatctttgttggctcagaaaataccttagcttcactcagctggactgcattgaaggcgaggctgcccc

SEQ ID NO: 534347 - DNA, 120 bp, Artificial Sequence
  ENSG00000166548_19 (sequence is synthesized)
ttggatcaagcagaaaacaagagaaagaaagaacgttccctttggggatagtctggaaagttgggatttgcaaataaaggctctggaagcattgctggtcctgaagctttggaggtgggc

SEQ ID NO: 534348 - DNA, 120 bp, Artificial Sequence
  ENSG00000166548_20 (sequence is synthesized)
agagagagcttcaagaagactagatgcaaaccctggaaaggattaaggctcaactctggagaaacaggccacagcctctcagagcagctgttggctgtaaatagaggtagcaaggccgct

SEQ ID NO: 534349 - DNA, 120 bp, Artificial Sequence
  ENSG00000166548_21 (sequence is synthesized)
ggccagtcccagagagttaggaagtcaaggcctgcaactcctggttcttcctgtttggaccagttcttgtgccattggcaggatgagaggcagcagccaggcgggagctgtgtctagcag

SEQ ID NO: 534350 - DNA, 120 bp, Artificial Sequence
  ENSG00000166548_22 (sequence is synthesized)
cacctgtagcccacgtgctgctaattagctggaaaactggcgaaggcagaacctttgctaccaggaatcttgacatgtggggtctgtctttgagaatttgtaaatgaacagtccaatatt

SEQ ID NO: 534351 - DNA, 89 bp, Artificial Sequence
  ENSG00000166548_23 (sequence is synthesized)
tgcctaaggcacaatctcaagaggtcctgagaccacgtacccatgatttttttcttgctctgtgatacccaataactccttcacctaag

SEQ ID NO: 534352 - DNA, 120 bp, Artificial Sequence
  ENSG00000166548_24 (sequence is synthesized)
ttttcttgctctgtgatacccaataactccttcacctaagccctgttgttgattttgaagtgcttcctaggccagtgattttagcttctgccagctgcttttgccagtagattaacgtgt

SEQ ID NO: 534353 - DNA, 120 bp, Artificial Sequence
  ENSG00000166548_25 (sequence is synthesized)
ttttatttttcaaactccgtgtttcctaacgtggagtgtatgggtctaagagagcctgctgtcctccctgccttccaccttggagaggaggctggacgcatcagcagtggccagggcagg

SEQ ID NO: 534354 - DNA, 120 bp, Artificial Sequence
  ENSG00000166548_26 (sequence is synthesized)
tcgcaaaatctcccagcctagagaccacacctgaaacggctgaagccagcttgcacaagggctgctgtccctctgcggcaggcagagctggtgggggcaggggtcacagagcagtcatag

SEQ ID NO: 534355 - DNA, 120 bp, Artificial Sequence
  ENSG00000166548_27 (sequence is synthesized)
acaccatggaccagggcaggagaagggcagatggcacatgggcacaacagggccttgtccttagagcactggggggtcatggctgggaggggcatggcaggggctggcatccctgtagag

SEQ ID NO: 534356 - DNA, 120 bp, Artificial Sequence
  ENSG00000166548_28 (sequence is synthesized)
ccagaggggccacccagggcagtgacattccagatatgttgggctcacctcatccttgctgtgagactggagttccatggggacatgaagtcagtacaccgcagagctgctcagctgctc

SEQ ID NO: 534357 - DNA, 120 bp, Artificial Sequence
  ENSG00000166548_29 (sequence is synthesized)
tacctctcgctgacttttttgttgcacatatacattttctttcaattagcatttatttcagcttttatttaagctttttgacagtacatgtaaaatatatgattataaccatttaaaaat

SEQ ID NO: 534358 - DNA, 120 bp, Artificial Sequence
  ENSG00000166548_30 (sequence is synthesized)
accttatgtacctggttttttttggaaactagatagaaatatatttatcttttacataaaagaagtgtgtagtggggtggtccagggctttgtggtggcttagtggccatcggggtccca

SEQ ID NO: 534359 - DNA, 120 bp, Artificial Sequence
  ENSG00000166548_31 (sequence is synthesized)
ggctcttcccacctttctcttttgggtccacctcttggctcctggcttccttcctctggggcctgactgtccaggatggcagctggagctcctgctctgggcacggttggcatcagagcc

SEQ ID NO: 534360 - DNA, 120 bp, Artificial Sequence
  ENSG00000166548_32 (sequence is synthesized)
cactgctccccatccactctttaatccagatgctggtaatgtccctttccaaggcataactaagataagctggaaggttcttacgaggctttgctagaggccctgggaggtggggggaaa

SEQ ID NO: 534361 - DNA, 120 bp, Artificial Sequence
  ENSG00000166548_33 (sequence is synthesized)
ggcaagagggcagtgcccacccatagaccgggtcacatgacctggcatcagcgccgtggggtcctttgggcttcacctccctctcccctctgcccccacgtcatcccaccctcatcctca

SEQ ID NO: 534362 - DNA, 120 bp, Artificial Sequence
  ENSG00000166548_34 (sequence is synthesized)
ccctcaccattcccatcccgtaccgtaatgtcccttgcaaggcctaactctgtgaggaatgaaaccacctcatccttgttccaataacatgagtgaccgaatttacaaacgagtgaatgt

SEQ ID NO: 534363 - DNA, 120 bp, Artificial Sequence
  ENSG00000166548_35 (sequence is synthesized)
ggacctctggaaacattacccagcttgtttttacttttcactttctctttctgcccctttcatttccgtaggagccctttacctagatgagaagtgtccccccgcctggggaatatatca

SEQ ID NO: 534364 - DNA, 120 bp, Artificial Sequence
  ENSG00000166548_36 (sequence is synthesized)
gtcagaacaatcttcctgcagacatgcaccattagacccgagtgacggtggtgccatttaaacctcagagcaggtaaaaggtggtcctgaaacctgtctacccacagggtgctatggaat

SEQ ID NO: 534365 - DNA, 120 bp, Artificial Sequence
  ENSG00000166548_37 (sequence is synthesized)
ctgaatcacttcttttttcctagagccctggggtggggagctccctcaagtgttcacatgtgtgtggaatgaggaacacccatctccttggccctctccaccctgaagagttagttatta

SEQ ID NO: 534366 - DNA, 120 bp, Artificial Sequence
  ENSG00000166548_38 (sequence is synthesized)
aaataattggcaagctcttgcaaatgtcagtcatccattgttcagaatggaatagcaataatacatccctggctgccctgggcttggccaggattactcactgaaggcctcagggttact

SEQ ID NO: 534367 - DNA, 120 bp, Artificial Sequence
  ENSG00000166548_39 (sequence is synthesized)
ggcacacactttcttttcctaataatcccatcccctcagctttcctaaggctagagtgaatttcgtgttcctttagtttacataagatggtgaacttggcaaaagctatcattaaacaga

SEQ ID NO: 534368 - DNA, 120 bp, Artificial Sequence
  ENSG00000166548_40 (sequence is synthesized)
agctaagagaaagcctatgtcgtggaatccagaatgggtattgccattcactgctgtccacagaagctgtcttgaatttctttctgtgtcttttctttttttttctttaagactgttgtt

SEQ ID NO: 534369 - DNA, 120 bp, Artificial Sequence
  ENSG00000166548_41 (sequence is synthesized)
taccagactgggctctgtggaacacaggtgtcctgggagatggttaatcattacaaaatattggtaacaatctaaagatgcatacataagagagtggtcaaataaaccattttccattca

SEQ ID NO: 534370 - DNA, 120 bp, Artificial Sequence
  ENSG00000166548_42 (sequence is synthesized)
cagttacctccaacagcttcatcacaaatcactcacaaaaatggccttaatcctgaagtttatttacggagagcacacttgctaggtgtgtggcagatatacaggaagcacaagatgagg

SEQ ID NO: 534371 - DNA, 120 bp, Artificial Sequence
  ENSG00000166548_43 (sequence is synthesized)
ggggcaagcagcaaatgaggaagtggcaggaggcatctagatttctctcatcaaggccaaaggcttcagggcccactgggttccccaaagctgagaatcctgagtgggaagatgccagaa

SEQ ID NO: 534372 - DNA, 120 bp, Artificial Sequence
  ENSG00000166548_44 (sequence is synthesized)
gcccgagcccgaagcgcctcttccgaggcgcgggatttcctccccggctgcggctgggacgggggcggccatcggccgttacccgggcgcgagaccgcagcgagcgctgggggcgctcgg

SEQ ID NO: 534373 - DNA, 120 bp, Artificial Sequence
  ENSG00000166548_45 (sequence is synthesized)
agtaaaaagcaaaaatacaagaggatctccagggagaaggaagtctgtcaccctcctagaaggccacctctgttaccaatttcttgtatctttccccagagtctgcacagataggagcac

SEQ ID NO: 534374 - DNA, 120 bp, Artificial Sequence
  ENSG00000166548_46 (sequence is synthesized)
aaaacgctcattgtgttgtggggaaggcactcactatgtaaaagatgaaaaaaaaaaataacaaaaccaacaaaagtatatgaagtatgatcccaaatgaaaaaaaaaactgtccttagg

SEQ ID NO: 534375 - DNA, 120 bp, Artificial Sequence
  ENSG00000166548_47 (sequence is synthesized)
ttagagttccaatcccaagtgaattctcccatcactccgtgccatggcccttgcagcattgtgccataagccgctcccaggcagcaggaggtcgggaatgcttagggtccttgtcactgc

SEQ ID NO: 534376 - DNA, 120 bp, Artificial Sequence
  ENSG00000166548_48 (sequence is synthesized)
atgtccagtattgcacggatcacactgtgccctggtacccttggtgactcctttcattgagagccgtctcaagatccttttgggggaattgcatagcccagaagttttctcttaggtgaa

SEQ ID NO: 534377 - DNA, 120 bp, Artificial Sequence
  ENSG00000166548_49 (sequence is synthesized)
gcaggacggacacgctctgaacattccggcccaaactcggtcccccgacccatttcctgtcccgattctttcgaccttgggggcgatggggactgggagctgccttaagccgattctgct

SEQ ID NO: 534378 - DNA, 120 bp, Artificial Sequence
  ENSG00000166548_50 (sequence is synthesized)
gctctcgcgcatgcgccccaacgggatcccgcggccgtccgctctggcttgtgctgtctttcagttatcgcgtagcacattagcggacctagagctgggcacatattagcggacctagag

SEQ ID NO: 534379 - DNA, 120 bp, Artificial Sequence
  ENSG00000166548_51 (sequence is synthesized)
ggggttacgcccccggcgctctcctgccctccctgggagtggggacccacacagaaacgggtcactgttacacccgggttctggtgtccgccatatggctgttgagagacgcctcagaac

SEQ ID NO: 534380 - DNA, 120 bp, Artificial Sequence
  ENSG00000166548_52 (sequence is synthesized)
cacctgtgggacggatgggcagcgatgcccgccctgggcctagaggaacacctgggtcccaggcccaaaaccacgtccgccgcccactcttccccgtgcaccgcgagtggaggctgttct

SEQ ID NO: 534381 - DNA, 120 bp, Artificial Sequence
  ENSG00000166548_53 (sequence is synthesized)
gcctttccacttgcttaacatccagtctgtgaagatctaaataaataacgtggaaaatgcaaagtataatgtactaagtgaaagaactcgagcacactgggggtccacgaagctgcagct

SEQ ID NO: 534382 - DNA, 120 bp, Artificial Sequence
  ENSG00000166548_54 (sequence is synthesized)
gcagcccagggtggcacatcggcgagacggtggtgcgcgcctccaatctcggagggcgcccaaaatggaaaatgtttttaggccagggagtgagcataaacattagtgtttttgtggtca

SEQ ID NO: 534383 - DNA, 120 bp, Artificial Sequence
  ENSG00000166557_0 (sequence is synthesized)
cctcccggaagcgcagagctccgctggtgccacgtctatccccttacatcctcctaggacccggtcggtagtcgtcgccccagcccgccgggggcgcagcgcccgagccgcggccctcga

SEQ ID NO: 534384 - DNA, 120 bp, Artificial Sequence
  ENSG00000166557_1 (sequence is synthesized)
gacgggaccgagagcatcatgggcagcactgtcccgcgctccgcctccgtgctgcttctgctgctgctcctgcgccgggccgagcagccctgcggggccgagctcaccttcgagctgccg

SEQ ID NO: 534385 - DNA, 120 bp, Artificial Sequence
  ENSG00000166557_2 (sequence is synthesized)
gacaacgccaagcagtgcttccacgaggaggtggagcagggcgtgaagttctccctggattaccaggtcatcactggaggccactacgatgttgactgctatgtagaggacccccagggg

SEQ ID NO: 534386 - DNA, 120 bp, Artificial Sequence
  ENSG00000166557_3 (sequence is synthesized)
aacaccatctacagagaaacgaagaagcagtacgacagcttcacgtaccgggctgaagtcaagggcgtttatcagttttgcttcagtaatgagttttccaccttctctcacaagaccgtc

SEQ ID NO: 534387 - DNA, 120 bp, Artificial Sequence
  ENSG00000166557_4 (sequence is synthesized)
tactttgactttcaagtgggcgatgagcctcccattctcccagacatggggaacagggtcacagctctcacccagatggagtccgcctgcgtgaccatccatgaggctctgaaaacggtg

SEQ ID NO: 534388 - DNA, 120 bp, Artificial Sequence
  ENSG00000166557_5 (sequence is synthesized)
gattgccctgttcgtggtcagcttcagtcaggtgctactgttgaaaagcttcttcacagaaaaacgacccatcagcagggcagtccactcctagccccggcatcctgctctagggcccct

SEQ ID NO: 534389 - DNA, 120 bp, Artificial Sequence
  ENSG00000166557_6 (sequence is synthesized)
catgccccaggctggagcagctctcctaggtcacagcctgctgggctgggtcgcgtagcccagggtggaggcagaacgatgctgctgtggtagccctttgcctttcatgcccatgcttga

SEQ ID NO: 534390 - DNA, 120 bp, Artificial Sequence
  ENSG00000166557_7 (sequence is synthesized)
ttcttgcacctcagcagctgaaggtctcagagaccagtaatcagaaggcatccgactgcattaagtgtgcagcgctgaaaagacatttacaactaggccagggattagccactgtgggag

SEQ ID NO: 534391 - DNA, 120 bp, Artificial Sequence
  ENSG00000166557_8 (sequence is synthesized)
ggtggacaggcaatggttcagtggcctggctgttggcaggaactccaagtgcccaggcctcttgggcagcttagggccctgcctctgtttcatgatgcatgggtcatttgtcttgggtgt

SEQ ID NO: 534392 - DNA, 120 bp, Artificial Sequence
  ENSG00000166557_9 (sequence is synthesized)
cctatcccatatggagaagaaaggggctctaagttctggctcttctttctttggggttctctgtacctgaggaaaccaggccctgggtgactttgcagatctgctcaccctcggtgagca

SEQ ID NO: 534393 - DNA, 120 bp, Artificial Sequence
  ENSG00000166557_10 (sequence is synthesized)
acagtgtcagccatgcaagcaggacagaatggtgactgggtgcccttggtgagctgtgtatttcctaggaggtagaaaactgtgggaaactgtggctaataaaaactaagtgtgagcgtc

SEQ ID NO: 534394 - DNA, 120 bp, Artificial Sequence
  ENSG00000166557_11 (sequence is synthesized)
attctcccagacatggggaacagggtcacagctctcacccagagattcagaggagcttattggaaggaggtggacaagatggtcgactatatgcagccaggcggaacacctgccaccgag

SEQ ID NO: 534395 - DNA, 120 bp, Artificial Sequence
  ENSG00000166557_12 (sequence is synthesized)
ggactgggacgactggcaccctcctaacagattttcagcggggaggcactgagagtggatggagggaagacacagaagctacgctgaagtgggaggaagctgctgcacagagctaccatg

SEQ ID NO: 534396 - DNA, 120 bp, Artificial Sequence
  ENSG00000166557_13 (sequence is synthesized)
cactgggactagctcctggtccccagtgactccaggggaacaggtgagttaaactggcaaggaacaacctgctctcaccacaggcctctggaatcccggcaggaggagactccttgacca

SEQ ID NO: 534397 - DNA, 120 bp, Artificial Sequence
  ENSG00000166557_14 (sequence is synthesized)
ccacagacacttgagctggcagggagagttgcttggagaagtggtaggggcagcacttcagcctgggtggagcccagagggtttggtgtgggagcatttgcaataaagcatagccaggga

SEQ ID NO: 534398 - DNA, 120 bp, Artificial Sequence
  ENSG00000166557_15 (sequence is synthesized)
cagccatccctctaggctcgacttgctcccatggcagactttaaccctagggggactgttgaaactaaattcttcagggtggtcttgcctgtcagatgaggccagttcaataacctgagc

SEQ ID NO: 534399 - DNA, 120 bp, Artificial Sequence
  ENSG00000166557_16 (sequence is synthesized)
accccttggttttctggtctctcctggagccccagactggccgtgcctgcttgcagtgcagccttgggtagccctgggggcccgcatcacagctcctgtgctggcaaaccacaccatgtt

SEQ ID NO: 534400 - DNA, 120 bp, Artificial Sequence
  ENSG00000166557_17 (sequence is synthesized)
tgccagtgcagtagctgtgatgcgggcccccagggctacccaaagcagaaagctccagcacagcagcccctatggacatgcaccagcccagccacttccttcctctactgcagtttccgc

SEQ ID NO: 534401 - DNA, 120 bp, Artificial Sequence
  ENSG00000166557_18 (sequence is synthesized)
tgggcccatggccatcccccccaatcactgctggtgcacatgtgagcaggcagatcttgccttctctgccctgccagtgtgcatgtgtgcatgtgccctgccctgccactgctgctggca

SEQ ID NO: 534402 - DNA, 120 bp, Artificial Sequence
  ENSG00000166557_19 (sequence is synthesized)
tgagtgaactcagcctcctcctccccacaccatgccatcattgcagtcaaagccttggcaggcacagagtccaccagcctcaccttcaccagtgccttgcccctgcactaacactgctgc

SEQ ID NO: 534403 - DNA, 120 bp, Artificial Sequence
  ENSG00000166557_20 (sequence is synthesized)
tggagtgaaactaggcagggagaacagtggacttaccacaccctgagcagccacccttgcctgcaaaaactcagacagagggtgcacgcagaccagcacctgccagtctcccgctcccat

SEQ ID NO: 534404 - DNA, 120 bp, Artificial Sequence
  ENSG00000166557_21 (sequence is synthesized)
gctaacaccactaccagcgggacagcatgcgaagttgccattgggcgtgaggggcccaccttcccatgtcatgctgcctccactgctgctgccaatgcccacatggaggctggcacctgg

SEQ ID NO: 534405 - DNA, 120 bp, Artificial Sequence
  ENSG00000166557_22 (sequence is synthesized)
gcaccccctagcaccctgccatagccaatgagcatgcaccctgctgcgctgccactgccactaccactggcacatgtgaatgaggacagattccactgccactgccctacaaaatgcttt

SEQ ID NO: 534406 - DNA, 120 bp, Artificial Sequence
  ENSG00000166557_23 (sequence is synthesized)
ggctggcaccacccattggagtgttgtgaccagcagtcagggagcaccttggctgcacccagcacagtgggttcctaaccttgaggagccagagaacgaagttgggcctgataccaatcc

SEQ ID NO: 534407 - DNA, 120 bp, Artificial Sequence
  ENSG00000166557_24 (sequence is synthesized)
cctagggttagggtatgcagtctaggagttggaagcctagctttggctccctgaaattttccagaaatgaagccagtcatttgaactcatcttataacacaagcaaaccctcaaggtcat

SEQ ID NO: 534408 - DNA, 120 bp, Artificial Sequence
  ENSG00000166557_25 (sequence is synthesized)
caaataggatacaagagaaaaaaaaaccatcccaaggacagcaacttcaaagactgaaggaacatcagtctgcaaacatgagaaagacccagagcaagaactctgaaaacacaaaaaact

SEQ ID NO: 534409 - DNA, 120 bp, Artificial Sequence
  ENSG00000166557_26 (sequence is synthesized)
agagtaccttctttctccaaatgaccacactagctctccagccagggttctgaacccgcacatgtacccctaaacttaaaagatttttaaaaaagagattcagagaaggactgtagctgt

SEQ ID NO: 534410 - DNA, 120 bp, Artificial Sequence
  ENSG00000166557_27 (sequence is synthesized)
ggacccaagctcccttcaaagcactggcaggtcaatcgtttgcaacgcagacagctgtatgtagagctctgtgatccacccaattattggctcatcaaggagtgtgccacatgccagatg

SEQ ID NO: 534411 - DNA, 120 bp, Artificial Sequence
  ENSG00000166557_28 (sequence is synthesized)
ctctgcagaacccaacagaggggttgctcctccatggaaacaacaagaagctttgatcaaagagcctgtattgactccttcagtgaaattcttgactgaaataatcaccttcttaaaata

SEQ ID NO: 534412 - DNA, 120 bp, Artificial Sequence
  ENSG00000166557_29 (sequence is synthesized)
cacacatggtgaggtttgaagaggggaaattgccatccaggtaagaaaccttggccttgtcccaatttagtagtgctgaaggtgtgttcatttgaacatagatcatgtgctaggtactgg

SEQ ID NO: 534413 - DNA, 120 bp, Artificial Sequence
  ENSG00000166557_30 (sequence is synthesized)
gaggatacaggaatgagcatgggaataaactttacatagctcttgttcaagcaggaactttacaatctagttagaataaagaattatctgtgagtcctggttggacagtgtgtatcccag

SEQ ID NO: 534414 - DNA, 120 bp, Artificial Sequence
  ENSG00000166557_31 (sequence is synthesized)
cactatctaggggtaaggatgccttcataccaacctcgtcatgactgtgctaagtggcaggtctgatttggttatagaactggatacatcagacagttttaactttatgctattaaatat

SEQ ID NO: 534415 - DNA, 120 bp, Artificial Sequence
  ENSG00000166557_32 (sequence is synthesized)
ttgaacatatcactgtgcactatgatggatattaattgtttatggctgtctagcacctattccaccttctactgaaaatggcagccagcttttacttctcttctatgggatactgtctag

SEQ ID NO: 534416 - DNA, 120 bp, Artificial Sequence
  ENSG00000166557_33 (sequence is synthesized)
ggggaggtggggtatgtatttaattagatcttgcctttgtctagttgtgaaataggacacactaggctactgatacacccattccctgaatgttaatgatatggaaagaagcaaagggac

SEQ ID NO: 534417 - DNA, 120 bp, Artificial Sequence
  ENSG00000166557_34 (sequence is synthesized)
tgaaaatgtgggatgcctgcatttgttgctgtcagatatttgttatgtgctgtgctggggtttcctgcctttctttctctcctggaagcaacactacatccttcctataacttctctttc

SEQ ID NO: 534418 - DNA, 120 bp, Artificial Sequence
  ENSG00000166557_35 (sequence is synthesized)
aattcaagatagccagtttcagattctgtgagtgcacacaaagagccctaatatataggttaagatccctgtgcactgaattcctcctaccaagcaaccttctacttacatgcatgtttt

SEQ ID NO: 534419 - DNA, 120 bp, Artificial Sequence
  ENSG00000166557_36 (sequence is synthesized)
caatctttctattcccatgaacatggcacacaaaaaattctcaatgatttttgtggaacaaatgaatgagtaaaccacaagtacagaaaagtagtgatgtgtcaggatatgtgatgtagt

SEQ ID NO: 534420 - DNA, 120 bp, Artificial Sequence
  ENSG00000166557_37 (sequence is synthesized)
catggttgaaactatgaagaggacagaaagctgtaggtaagaggcaaaccgggggagaagctaaggtggaagtgtagctggagctgagttttgatggctaaatatggtttgaatggatgg

SEQ ID NO: 534421 - DNA, 120 bp, Artificial Sequence
  ENSG00000166557_38 (sequence is synthesized)
acagggaggttgaggtatggagataagaatgaggatggtatagctaaaaagaaggcagttttagcgtggttggagatgtaggtgacctccttggaacagtcacctgaatttcataaataa

SEQ ID NO: 534422 - DNA, 120 bp, Artificial Sequence
  ENSG00000166557_39 (sequence is synthesized)
ttattgagaaggtattgtgtgcttgtaatgtgcctagaggggcacttgggttcagagatgagtaagacccgatcaaattggggtgggatgggggaattaacctggagcatgcagataatt

SEQ ID NO: 534423 - DNA, 120 bp, Artificial Sequence
  ENSG00000166557_40 (sequence is synthesized)
atagctcaaggcataatgcagtgagcactccaagacgggtacaaaccagcacccttaggtcctcaaggggtttggatcttgagcatgtctaatctgtgataaaatgcagagctttccagc

SEQ ID NO: 534424 - DNA, 120 bp, Artificial Sequence
  ENSG00000166557_41 (sequence is synthesized)
aaggttaagaaaagacagtcacaaattttaacaatgggcctgtgttcagcgaccataggttgaatctttgaggttgtccatgtcaagataaggaataaacagtgatgctgtgttgggttc

SEQ ID NO: 534425 - DNA, 120 bp, Artificial Sequence
  ENSG00000166557_42 (sequence is synthesized)
ctcatgcagatgtgggaaacccagtgaggtgtcaggataagtttcacatgggggaaagccctacaggcctccagggtgaggggccctgccaagtaggacagagtgggaaagcacagggtg

SEQ ID NO: 534426 - DNA, 120 bp, Artificial Sequence
  ENSG00000166557_43 (sequence is synthesized)
ctcatggggaaccaagagttgctgttagtctggaatagggacaggcacacccagagactgataggcacctactgaaaggtcgtgactccagggctgaggggtcctgcatttaacaatgtc

SEQ ID NO: 534427 - DNA, 120 bp, Artificial Sequence
  ENSG00000166557_44 (sequence is synthesized)
agccacagggagccacaggtcagtggctggatgagaccatatgtcatttctaataagtcaataaatgtgccttctcaatatcctccaaagcacgaaggagctacagattacccaacttgg

SEQ ID NO: 534428 - DNA, 120 bp, Artificial Sequence
  ENSG00000166557_45 (sequence is synthesized)
gccttttaatcttatttgcaatttcttgatcgtatctgttaatctgatatcaggagggtattattatttttctgccaagggtggctgaattcttttgaagttgcagaccaaaatcggtag

SEQ ID NO: 534429 - DNA, 120 bp, Artificial Sequence
  ENSG00000166557_46 (sequence is synthesized)
tagttgcggtaaaacctttgcactgtggacctagttttgggaaattacgtgatgaatttggatgagggctctacttgattggattgtgaacagaggcaacttacagagggtgcattcagg

SEQ ID NO: 534430 - DNA, 120 bp, Artificial Sequence
  ENSG00000166557_47 (sequence is synthesized)
ccaggttccttagggctggctggatctttccctctacatcactctaggggctcacgtctgagtgtgtcaaagccataacaaaagcagcactcccagaaaaggtcaagaagcatgaaacag

SEQ ID NO: 534431 - DNA, 120 bp, Artificial Sequence
  ENSG00000166557_48 (sequence is synthesized)
aaattttaattacaggcctgtatgctgagaacatagagacctggagatagctcaggggtttaacaaacaaaattcccatggtgtggcaggaaaacttatttgtgtgtgtttagtaaggca

SEQ ID NO: 534432 - DNA, 120 bp, Artificial Sequence
  ENSG00000166557_49 (sequence is synthesized)
atacttttaaaaaattatagaaaaaatcatcaactattactttcccttctgctccataccttccaattcttgttcatatgccaaggtagatattttctttgttgcaatggtaatacacag

SEQ ID NO: 534433 - DNA, 120 bp, Artificial Sequence
  ENSG00000166557_50 (sequence is synthesized)
tatatgattcctttgaagtttttgttcacatagcgtatcttaaatttgtttctctttcagatattaatttcattttagtggtcgaggaacacatcatcttagtgaatatagcatactttt

SEQ ID NO: 534434 - DNA, 120 bp, Artificial Sequence
  ENSG00000166557_51 (sequence is synthesized)
caaaattcttttcttaacaccggaaacttgtttctatcatagccaaagctgccacagacaccactatggacagctttcagaaaatgtctctcttggcttcctattctgcctttttataaa

SEQ ID NO: 534435 - DNA, 120 bp, Artificial Sequence
  ENSG00000166557_52 (sequence is synthesized)
tcagtcttaaagttatcagttcagccctgaattggcagctggtatggaaatttcttgcctggcacatctggaaaggaggggcttgtttgtgatcgaacagatttcttggccaaaaatatt

SEQ ID NO: 534436 - DNA, 120 bp, Artificial Sequence
  ENSG00000166557_53 (sequence is synthesized)
ggccagccaggatccactgcccattatgagaaattcctagcttgccagcaatgtgatctctttccaggggtcgtaagtctcatcttaccaggacagaaccacttcattaataatggcaat

SEQ ID NO: 534437 - DNA, 120 bp, Artificial Sequence
  ENSG00000166557_54 (sequence is synthesized)
ccagtctgatggggccattttcttcagcttcatggtagtgtagagatcttcaaacatcttgtggagtttgatctcttcaaggcaaatacagggctgagggggaaactcattatgcaaata

SEQ ID NO: 534438 - DNA, 120 bp, Artificial Sequence
  ENSG00000166557_55 (sequence is synthesized)
atctgagctattgaagggcgttagaatagcaaacgggaaaagtgagactaaatctaacaatcgacccctgaatctgagtgccacaaattcacagcagtcagcgaggcaggccgagatcat

SEQ ID NO: 534439 - DNA, 120 bp, Artificial Sequence
  ENSG00000166557_56 (sequence is synthesized)
ggtggctggctgaggaacaccgtggttctaccttcttagcttgcaagaatacccagtctctaggaccattgactcccaatcagcatatggtaaaagaggccattagtgtccattgtgacc

SEQ ID NO: 534440 - DNA, 120 bp, Artificial Sequence
  ENSG00000166557_57 (sequence is synthesized)
tctgctcctcctctcagcatcctcactacatccatttggacacaggggaggccttgacaccagctgacaatgagccctttcctcagggctctggaaaatctctaccttcccagggatttg

SEQ ID NO: 534441 - DNA, 120 bp, Artificial Sequence
  ENSG00000166557_58 (sequence is synthesized)
tgaagttttcttttaggcagacagctgccaggcgtcacatgtgcaacacaggtaccgtgagctcacctgactttgtccacccacagagagggccagcaggctccaacacaagcaggtact

SEQ ID NO: 534442 - DNA, 120 bp, Artificial Sequence
  ENSG00000166557_59 (sequence is synthesized)
ctgtccaagttcacttcttggcaggaggctgctttcatcttctctgcccactcagacatagggatttgagttgcaaatattgccaggttcacatagttcaattacacctccttaacaatc

SEQ ID NO: 534443 - DNA, 120 bp, Artificial Sequence
  ENSG00000166557_60 (sequence is synthesized)
acaagaatgtagaatacacagtttaggaagctgttaatgtaagcatctgtctattaaattgcagatagttccaggcatcactgcaggatgagtcttattaaccaaggttaataatccttt

SEQ ID NO: 534444 - DNA, 120 bp, Artificial Sequence
  ENSG00000166557_61 (sequence is synthesized)
ctaatcagcacagtatttctccactagcggtgggcttagaaatcatctatggcacttgtaaaatatgtggatcccgaagacgggcttctcctccaaagctgcaggtcttcctgctgaaat

SEQ ID NO: 534445 - DNA, 120 bp, Artificial Sequence
  ENSG00000166557_62 (sequence is synthesized)
ggcttgttagtgtctgactttgtgtggtaaatggtacctgaaagggcttcctccttcattaattggagatctcctccctggccatctcctgtgtcttccatcagcttccctgcatccttt

SEQ ID NO: 534446 - DNA, 120 bp, Artificial Sequence
  ENSG00000166557_63 (sequence is synthesized)
ttatgaggctgcagcagctgtggttagaaatcatctgtttgctgctgcagaaccagagtttctctgttttactgtttgatcccctctgcagtgtgggctcttcgctcttccatctttaaa

SEQ ID NO: 534447 - DNA, 120 bp, Artificial Sequence
  ENSG00000166557_64 (sequence is synthesized)
agtatggagcaaacgcacacagcagggccaaagggaaagcagccaggcttagagccatcaagaggcctgaccatcaggctatttggtttaatgctgtggattaaaagttggttcctggta

SEQ ID NO: 534448 - DNA, 120 bp, Artificial Sequence
  ENSG00000166557_65 (sequence is synthesized)
gatacaaaagcacatgttggaaatgcctgcagagacttgaaaaatagctgcttcttaaggattttgaacacgggcttggccgtgctgttgacactgtttatctgcactttccatgaagcc

SEQ ID NO: 534449 - DNA, 120 bp, Artificial Sequence
  ENSG00000166557_66 (sequence is synthesized)
acgattttacgaagcgaagataaactttggtccagttacggaattatcatacattctaaatgagtgtcatccaagttaatgacaagtaaaactgtaatgcggagtgcaaatgcaaggact

SEQ ID NO: 534450 - DNA, 120 bp, Artificial Sequence
  ENSG00000166557_67 (sequence is synthesized)
gggaaaaggtagaattaatcacgtgattctccttggagataaaggatgggaaggctgtcagttgtttatgggaatcccagcagaaagccccactcctttgatcacacacagctgcattta

SEQ ID NO: 534451 - DNA, 120 bp, Artificial Sequence
  ENSG00000166557_68 (sequence is synthesized)
aggcagaaatgtggaattgcagactagagagaaatttaaagatcatcttgcccagatcttccatttataggtaaaaaaatgaaatcagagaggtgaaatgtttgttcaaagtcacagagc

SEQ ID NO: 534452 - DNA, 120 bp, Artificial Sequence
  ENSG00000166557_69 (sequence is synthesized)
aaagctattaagagctaaaaatagaagttatttaagtaagatgtttaggtgtaaactgtcttttaaaaacaccgctgtgaagattgatttagtggcattagcatggtttcgcagtcccct

SEQ ID NO: 534453 - DNA, 120 bp, Artificial Sequence
  ENSG00000166557_70 (sequence is synthesized)
gcacccactctgcctatccacaaactccatagaaatgatataaaataatgttttgtaagctattcacccttggaaaccacattgggtactctcagtgttgaatctgtgatgggtccttga

SEQ ID NO: 534454 - DNA, 120 bp, Artificial Sequence
  ENSG00000166557_71 (sequence is synthesized)
aagatgacagcagaaagccaccaaggaaagccctaagatagcagagggaaggacagctggggacaccataagtgaacaatttgggacagagaaatggggataacattgaggatgctcttt

SEQ ID NO: 534455 - DNA, 120 bp, Artificial Sequence
  ENSG00000166557_72 (sequence is synthesized)
gtcaaaaggtggcaaaagctgggggcaggagggagcccgagattagcagcaggaatgctgttttcctccagccggaagagtgggtatagatgcttggactggaaaggacaggcagggccc

SEQ ID NO: 534456 - DNA, 120 bp, Artificial Sequence
  ENSG00000166557_73 (sequence is synthesized)
tgggagaaaaggggacactaatgcccagatggacagctgccctaggagcccagccagctggcctcactccatgagcgcagtgcattctgcaggggtgattccttcatcttctcccagccc

SEQ ID NO: 534457 - DNA, 120 bp, Artificial Sequence
  ENSG00000166557_74 (sequence is synthesized)
agcaggagatccactaactgagtcttggctaagaaaacgagcctgcaattaaaggcagcaaacatttgcagagagcaaaccccatgtaaatgagtcaattcatccaaacaaaggaagagt

SEQ ID NO: 534458 - DNA, 120 bp, Artificial Sequence
  ENSG00000166557_75 (sequence is synthesized)
tggcatggtgagagggcaagacctcgcaggaaaagggatagcagggaagctgggaggcagagtatttcctgccccgggattattctcagactgagctgataaggtgggaactaactaatc

SEQ ID NO: 534459 - DNA, 120 bp, Artificial Sequence
  ENSG00000166557_76 (sequence is synthesized)
aggggagccctggaatagtttctggtgtcctggaactctcagaagcctcatgactcaagatagtctccactgatatttaaactgaagtggaccaccaccagtgtcagatggtgccagact

SEQ ID NO: 534460 - DNA, 120 bp, Artificial Sequence
  ENSG00000166557_77 (sequence is synthesized)
tcaagtgggatctgaatgggcttggactttgcagttgctgcctgtgactgtccactggccagctgcgtgggtgtcccccagcatgccctctagagataccaggtttctttttctatctag

SEQ ID NO: 534461 - DNA, 120 bp, Artificial Sequence
  ENSG00000166557_78 (sequence is synthesized)
aaatgactgcaagtggaagctggtaacatgtaaccctttatgaagaggggactttgctgtctatgtgcaacagcttcatgtcctctctccctcccccagacagcacatagttaggacaga

SEQ ID NO: 534462 - DNA, 120 bp, Artificial Sequence
  ENSG00000166557_79 (sequence is synthesized)
agaaagatattttataactaagaagatcttggaaatgaaaacatgaatgctaaaataaaatgttcaataaacgagctgaatagaatgactagaatcaaagagtaaattaataaaatatat

SEQ ID NO: 534463 - DNA, 120 bp, Artificial Sequence
  ENSG00000166557_80 (sequence is synthesized)
gactgaactgaggcattctctcaaatcatggtttaagagagaaaaaatacatagcataaagggaatgttcggagacatgcaggatgaatccaaaggcccccaaatctacttaataacaat

SEQ ID NO: 534464 - DNA, 120 bp, Artificial Sequence
  ENSG00000166557_81 (sequence is synthesized)
tttagaagaagagaatagaaagaatggtggtgagaagaatacaagatctgagaaaaaaaagcttaattgtctacaaccatagaaaagattgaacaggcctactgtttaccaactagggtg

SEQ ID NO: 534465 - DNA, 120 bp, Artificial Sequence
  ENSG00000166557_82 (sequence is synthesized)
aattaaaaaacaaaccaacaaacaacacctgaacaaattgtagtgaaattttaaaacatcaaagacaaagaaaattctttaaaattccagagaataaagatagactattatgtatgaatg

SEQ ID NO: 534466 - DNA, 120 bp, Artificial Sequence
  ENSG00000166557_83 (sequence is synthesized)
aaaatcaaatttgtctcagtaacactaggtggaagaagacaatgaggaaaaatctttaagatgctgagggagggaagaagaaaacttttgatgcttgaatgttatatccattagattatc

SEQ ID NO: 534467 - DNA, 120 bp, Artificial Sequence
  ENSG00000166557_84 (sequence is synthesized)
attctacagggagaacttaatatacacatttttaataaggactcaggtaatttgcctacatcattaggcaatgtgggtgttttatcgagcagtgattctcagactaactgatgtgaaata

SEQ ID NO: 534468 - DNA, 120 bp, Artificial Sequence
  ENSG00000166557_85 (sequence is synthesized)
ccagtattttaaaaaatgtccaatttactcaaatcaatacttttatacagtaaaataagaataaatttttggaaaaataattacaggaattacaaattatcgcaaaagtaattcagctgt

SEQ ID NO: 534469 - DNA, 120 bp, Artificial Sequence
  ENSG00000166557_86 (sequence is synthesized)
aggcttgggggaaacttggtggtccctctagagataccaggcttcttttttatctagaaatgactgcaagtggaagctggtaatatgtgggcactttgtaaattcatattgagtaaatga

SEQ ID NO: 534470 - DNA, 120 bp, Artificial Sequence
  ENSG00000166557_87 (sequence is synthesized)
atgaaattgtgacttcctgagaattgaaacttggtttcctaaccctaattgatatgaggcgaattgctctatggtggtgtacaaactcacctgaaaaggacttttatagacaaatcttca

SEQ ID NO: 534471 - DNA, 120 bp, Artificial Sequence
  ENSG00000166557_88 (sequence is synthesized)
tgacctgttcttgccccagttcatcacctcttttacaccaaaaggcctacagggtgtggtcactgtttcttttgggtcattttggggtggaaatggtggatgtaatgaagccaataattc

SEQ ID NO: 534472 - DNA, 120 bp, Artificial Sequence
  ENSG00000166557_89 (sequence is synthesized)
aggacttaattcctttcatgttgtggttttttgctcttgcactagagtacgaaatagcttccaggagctccagctctaagcttgaaagagtctgtatgattgtaatcacatggtgacgat

SEQ ID NO: 534473 - DNA, 120 bp, Artificial Sequence
  ENSG00000166557_90 (sequence is synthesized)
actcagaatctacattggacttctgttgtattctcatcactcagtttatcttttagcagtttaataggtacacttcagggtcttccattttgtgtggaattaaatcctcctcttcaaatg

SEQ ID NO: 534474 - DNA, 120 bp, Artificial Sequence
  ENSG00000166557_91 (sequence is synthesized)
ctgtaaataacatcagttaaaataaaacttgaataaaatattggaaaaaagtaatgcagtaaaaaaattacagtaacaaaatagacacacaaaaatataagccagcattgtttattatta

SEQ ID NO: 534475 - DNA, 120 bp, Artificial Sequence
  ENSG00000166557_92 (sequence is synthesized)
aattcaacatacataaaattactctgtcaaagtgctatgaaagtttctgaatacttaccctgatttgtgaatttctgctattgtgggcaggtagcagtttgtgggtcagcaccagcctag

SEQ ID NO: 534476 - DNA, 120 bp, Artificial Sequence
  ENSG00000166557_93 (sequence is synthesized)
gatgatgatagtgacctccttatggagggcacagtgacctgcctgaagatctatccagagtgagcagcaaaggaaggacttgatctcaggtcttctccctccaggtccaggaggtttttg

SEQ ID NO: 534477 - DNA, 120 bp, Artificial Sequence
  ENSG00000166557_94 (sequence is synthesized)
atcctcctgcatctttgccactgcacctacctgaaacctgtctctctcccttcagccacagcaggaaggtgtccctgaggtgggcagtagatctctctagacacagcagtcaagctccaa

SEQ ID NO: 534478 - DNA, 120 bp, Artificial Sequence
  ENSG00000166557_95 (sequence is synthesized)
ttgaacacctcttggatttgaatgaagttctagggtaaagggatgaagaggtcatgccacctccccctactcttagaaatggtctccaaaggggcaaaagcagttcagaatccatctttg

SEQ ID NO: 534479 - DNA, 120 bp, Artificial Sequence
  ENSG00000166557_96 (sequence is synthesized)
atgaaacatggagtaagtgaatgagggaggggcttccaaaggcagtgaaagccatatgaatgctaggggtaaaggaagacaccagaggggacacctgcccacctgcctgtacaaatccca

SEQ ID NO: 534480 - DNA, 120 bp, Artificial Sequence
  ENSG00000166557_97 (sequence is synthesized)
ggcaaagcgagcacttctccagggaaggcaacatatcctcaggccaaaacccggaaatgccttgtttagaggaaagggaaaagggtgggtcgcctggtggtgggaacttgcctgaagcta

SEQ ID NO: 534481 - DNA, 120 bp, Artificial Sequence
  ENSG00000166557_98 (sequence is synthesized)
gtttgacgtggagagaaatagtgggagtttgagtggatggagacacattgtatatgcagtcagcagcctgttgtcaaggtggggtaaggagagagactgcactatgagcagccggcagga

SEQ ID NO: 534482 - DNA, 120 bp, Artificial Sequence
  ENSG00000166557_99 (sequence is synthesized)
gctggcctctgcaaaggaaaggaactaagtgaatgctgaaacagcccccatccccagtgtctcacctcatatgaccttgtgaacagagagggggtctgccaacctccagtgaggccccag

SEQ ID NO: 534483 - DNA, 120 bp, Artificial Sequence
  ENSG00000166557_100 (sequence is synthesized)
ccctcatccccaaaccttcagtgaataacttttctcaaggagtaagttcttatttgttcacagtcaggaggcaccactgtaaaacatcccttctgagttaaaggcttcagatatgcaggc

SEQ ID NO: 534484 - DNA, 120 bp, Artificial Sequence
  ENSG00000166557_101 (sequence is synthesized)
aaactctgtctccaaaaaaaaaaaaaagggtttcagatatgcagagacaatatcactcagaaatgaataacaagatcagaaagagaggaatggaaaagaaaaaaaaacaaatggcaaatg

SEQ ID NO: 534485 - DNA, 120 bp, Artificial Sequence
  ENSG00000166557_102 (sequence is synthesized)
agaaaaaaaaacaaatggcaaatgaagaacattcactggaaaaatgttgccacaaaattgtgccaagtagatgccacagttcaaaaagtgtaatgaagctgccacttgtatataactaaa

SEQ ID NO: 534486 - DNA, 120 bp, Artificial Sequence
  ENSG00000166557_103 (sequence is synthesized)
gcttaaagggcagataagagagaaggtgagggaagtttggccagaccacagaagaaggtaaaacatgggcaggtagaacaagaggaaataaaaccattgcagaactgaagtctcagttgg

SEQ ID NO: 534487 - DNA, 120 bp, Artificial Sequence
  ENSG00000166557_104 (sequence is synthesized)
aggagagtgtatattggtgtaacctcaagggaaggtaaaatttcaatattgacaaattaaaatttcatatgccctttgattcagcagttccacttttaaggatttatcctacaggcattt

SEQ ID NO: 534488 - DNA, 120 bp, Artificial Sequence
  ENSG00000166557_105 (sequence is synthesized)
ccttgcaaatgtgtgaaataatatgttcaagtctgttaattgtattgacatttataacagcaaaacttttgaaatgacctatatattcccttatagagactcattaaataaattatggtt

SEQ ID NO: 534489 - DNA, 120 bp, Artificial Sequence
  ENSG00000166557_106 (sequence is synthesized)
atctctacaatggagtattatgcaaccataaaacataagataactgcatgtgactctatatgtatctcaaaataaaaagcttaattaaaaaataataaggcagccttataaatactgtta

SEQ ID NO: 534490 - DNA, 120 bp, Artificial Sequence
  ENSG00000166557_107 (sequence is synthesized)
gagtaatctctaaaatattatgttgatggtgaaacaaattaacatgtaagataatgtgtatagaatgttagcattgtataaaaaaataacagactatgctgaccttcttttatttcctta

SEQ ID NO: 534491 - DNA, 120 bp, Artificial Sequence
  ENSG00000166557_108 (sequence is synthesized)
gtctatctctggagggacatataagaaactggtaaagcagttgtctctggacaaggaaactagctggtttcttttgagtgttgtaacattttataccattgtattattacctattcaaaa

SEQ ID NO: 534492 - DNA, 120 bp, Artificial Sequence
  ENSG00000166557_109 (sequence is synthesized)
caataaattaaacaatttatttaacaataaccgacactcctatggctcctctatggcccaccctcttcagtgtccccacaccatcctgcactccctggtcaccctgagttataaggactt

SEQ ID NO: 534493 - DNA, 120 bp, Artificial Sequence
  ENSG00000166557_110 (sequence is synthesized)
tcttggcatctgcctttcccagtggacagtgagacttttgagggcagggactatgtgtcactcatctcagaatggtataaacattcaacacgtaggttctagaattaggctgcctgggct

SEQ ID NO: 534494 - DNA, 120 bp, Artificial Sequence
  ENSG00000166557_111 (sequence is synthesized)
gaaatccctgctccagctcttcttatctttgtaaccttagggaaataactaaacctttcattgcctcaatttttcatccataaagtgggaataatggcatgacctgccttataggatttt

SEQ ID NO: 534495 - DNA, 120 bp, Artificial Sequence
  ENSG00000166557_112 (sequence is synthesized)
tgtaaggattaagtaagataagtctcagaacacatacctggcatgtaacaaattctagataattgttagcttctgttgacatctctgcattcagatgcagctaacagagggcctgacata

SEQ ID NO: 534496 - DNA, 120 bp, Artificial Sequence
  ENSG00000166557_113 (sequence is synthesized)
ttggtagcactggtgttttcacagaatgaataaaatgcatgccaccctgtgatctggtgctaacagagctatctttcttctgcttagctggtagataattttggatgattcaagctgtct

SEQ ID NO: 534497 - DNA, 120 bp, Artificial Sequence
  ENSG00000166557_114 (sequence is synthesized)
accaacctaacatccctgacatcatgaaggaggtggttatttcagtggaaacctggaggcatgcccatcaatgccgaccctaaaaatatttttgtttatctcagtgatccagataactcc

SEQ ID NO: 534498 - DNA, 120 bp, Artificial Sequence
  ENSG00000166557_115 (sequence is synthesized)
atggaaataatgggactctcagaatgaggcttagttaccagacattcagatagagagaccaggctttatctgatcacaaaatagcacctgaagcaccagcaatcccttaagtaccctttt

SEQ ID NO: 534499 - DNA, 120 bp, Artificial Sequence
  ENSG00000166557_116 (sequence is synthesized)
cgattgagtttcctttcgttgaactttccttttcaggcaatattatttaggtatgctgaattgagatctaattctttttgaagttcagtctagtggagaaaatgttagaacagcattaga

SEQ ID NO: 534500 - DNA, 120 bp, Artificial Sequence
  ENSG00000166557_117 (sequence is synthesized)
gaactcccactctctgaacgacgtggtgaagtcatttcattcacagcactgtggctttcttctcccatctgtcaagtcatgataaaataacaaataaaccaaatccctgctgcagcgtga

SEQ ID NO: 534501 - DNA, 120 bp, Artificial Sequence
  ENSG00000166557_118 (sequence is synthesized)
ggatattataaggttaatgttaagcttgggctgggaagtgcccagataaaattgcatgaaagtacagagatgattctataaacatgtgctgagcacctattatgtgctgggtcttgcatt

SEQ ID NO: 534502 - DNA, 120 bp, Artificial Sequence
  ENSG00000166557_119 (sequence is synthesized)
tagttgtggggacttgaaaatgaaagagattcatgctcggtaatttttacaagaacatcgaactcacttggcaaatatttactgagcccctactgtatttcaggcactgttttagtgctt

SEQ ID NO: 534503 - DNA, 120 bp, Artificial Sequence
  ENSG00000166557_120 (sequence is synthesized)
gggatatatcagcgacccaaatccacaaaaattcattcttttgctttccaagtcacttggatgttattggatgcttgggtgctgtggagaagaaatagaaggaaggcctagatacttctt

SEQ ID NO: 534504 - DNA, 120 bp, Artificial Sequence
  ENSG00000166557_121 (sequence is synthesized)
cccaggatgcaagtttcaacactcatgtttcaacaaaaacaatgacatctataaattatataagcattagtgtgcaattattgtcgtaaaaaggaggagtcatggttcttcttttgtttg

SEQ ID NO: 534505 - DNA, 87 bp, Artificial Sequence
  ENSG00000166557_122 (sequence is synthesized)
tctatcgtccaggttagagtgcaggtcaggttcaagctattcccctacctccgtcccccaagtagctgggactatagtcatgcgcca

SEQ ID NO: 534506 - DNA, 89 bp, Artificial Sequence
  ENSG00000166557_123 (sequence is synthesized)
cactgcagcctctgcctctcaggttcaagctattcccctacctccgtcccccaagtagctgggactatagtcatgcgccaacacgcccg

SEQ ID NO: 534507 - DNA, 120 bp, Artificial Sequence
  ENSG00000166557_124 (sequence is synthesized)
tgggattacaggcctgagccaccgtgccaggcccatggttcttctttaacaatgtatataactgtcatcccatttgaacactgcaagttaataggtgactgtaagttaaatggtaatgcc

SEQ ID NO: 534508 - DNA, 120 bp, Artificial Sequence
  ENSG00000166557_125 (sequence is synthesized)
aggtgactgtaagttaaatggtaatgcccaaaatatattgatttccccacttacccctgtaccaggacagcatgtctcattcctccctcacctcacatgatgaaattagaatctcaaacc

SEQ ID NO: 534509 - DNA, 120 bp, Artificial Sequence
  ENSG00000166557_126 (sequence is synthesized)
atggacaaagctcctttcccctctccactgtttcctcctttatctctcattcatggcagctcaaccaacaagcctcactcgtttggaggtaaaaattggcagccaggatgactggggact

SEQ ID NO: 534510 - DNA, 120 bp, Artificial Sequence
  ENSG00000166557_127 (sequence is synthesized)
cttccccagacatccaggaatccttgagcattggagtggcaaaggtctctaggaaacatatggtgtagcctcttcattcgacagctgaggaaacagaagtccagagactgcagtgccttg

SEQ ID NO: 534511 - DNA, 120 bp, Artificial Sequence
  ENSG00000166557_128 (sequence is synthesized)
gccaaggtaccagagccagacacgagagagccgggcctggaacccaagcctcctgcctccttggtcagtacaccacactttagcccctgtgttgtacaataggccctgtatcctgcagag

SEQ ID NO: 534512 - DNA, 120 bp, Artificial Sequence
  ENSG00000166557_129 (sequence is synthesized)
gagagggaagcatcaggaagctcttgtggcctggtgagttctgtttcatcatggctggacactcggagctggatctcaacgcagctgtcctgtctgggacttccagggcatgatcatttc

SEQ ID NO: 534513 - DNA, 120 bp, Artificial Sequence
  ENSG00000166557_130 (sequence is synthesized)
caagagtcaaaagccaatctctcatgcaccagtcaggactctgggttgccaacatcagacactgactctggcgtgcttggagagtgaaggaatctactgaacggatatcaggagctgaca

SEQ ID NO: 534514 - DNA, 120 bp, Artificial Sequence
  ENSG00000166557_131 (sequence is synthesized)
gaatcagtggtggggccagagaatcagtatcggaaaatatgcatgcaggaactgaaggaaactgggggagttggggggctggaatcactgccaaggtcgtgccacaggaagaggctgttt

SEQ ID NO: 534515 - DNA, 120 bp, Artificial Sequence
  ENSG00000166557_132 (sequence is synthesized)
aggctctgttgctcccactactggactcagaccattgtaccctggatgccactaccactaggggtgggacgattttcagactgtcaccagattctttcacatcgtccctggcttcagatt

SEQ ID NO: 534516 - DNA, 120 bp, Artificial Sequence
  ENSG00000166557_133 (sequence is synthesized)
cacagcctcaggcaaaagcattgggttggccaagctcgggccacttgcccgtgcccatgctgtcaaggttcaggagaagagaggctcttgaaatttcactatggcagcttccattgaaat

SEQ ID NO: 534517 - DNA, 120 bp, Artificial Sequence
  ENSG00000166557_134 (sequence is synthesized)
agggagagaatttggaatctgggcagccaaataacaaaaaacgaatatcctctgcatctgccaaacaggccaccacagcagcctctgcttggaaaggccatttgcaaagcaggagagtag

SEQ ID NO: 534518 - DNA, 120 bp, Artificial Sequence
  ENSG00000166557_135 (sequence is synthesized)
aattcagtggagcatggattaactcaagctgtagtatgctcagcctggctccctgggaccagccttctgaaggggaccatgggtactgctatactcaccttcgtctagagaggcccctag

SEQ ID NO: 534519 - DNA, 120 bp, Artificial Sequence
  ENSG00000166557_136 (sequence is synthesized)
tctccagcctgactcaaggaagctcctagacagcatagagatgctctgaactccaggccgtattttaggaaatttaggaagtaaccctttgtgagcactgggctgcattcagaagaactc

SEQ ID NO: 534520 - DNA, 120 bp, Artificial Sequence
  ENSG00000166557_137 (sequence is synthesized)
agttctagtttcagattcatttataattcacagcatcacttagaagtttataattcctaccatttgtcccagcaatccattattgggtatagacccaaaggcaaataaatagttctacca

SEQ ID NO: 534521 - DNA, 120 bp, Artificial Sequence
  ENSG00000166557_138 (sequence is synthesized)
ataaatgggagctaaatgatgagaactcatggacacgaagaagggaacaatggaggctggggcctactggagggtggaggatgggaggaggtagaggatcaggaaaaataatgagtacta

SEQ ID NO: 534522 - DNA, 120 bp, Artificial Sequence
  ENSG00000166557_139 (sequence is synthesized)
atgggaggaggtagaggatcaggaaaaataatgagtactaggcctaatacctggatgacaaaataatctgtacaacaaaccctcatgacacgagtttacctatataacaaacctgcatat

SEQ ID NO: 534523 - DNA, 120 bp, Artificial Sequence
  ENSG00000166557_140 (sequence is synthesized)
ggagtcttgaggaggcactgatgaattcttccaggagtcaggaaggcttcacttgaaaatgtagaagcttggccttctaggtgaagagaacagatggagtccgcctgcgtgaccatccat

SEQ ID NO: 534524 - DNA, 120 bp, Artificial Sequence
  ENSG00000166557_141 (sequence is synthesized)
catggggaacagggtcacagctctcacccagggtcccagtgcttcaccaacaccaacgccaccactaagggttccagtgtgatcaccatctgggatctacctgttccaactgcttgttta

SEQ ID NO: 534525 - DNA, 120 bp, Artificial Sequence
  ENSG00000166557_142 (sequence is synthesized)
cctcctgtgcatgctccacgggacatggctctttgcctgtagatcgccaggtacccacagctttactgccatggtgcacttcacttcctgccttgtccactctcacctgcaccagttatt

SEQ ID NO: 534526 - DNA, 120 bp, Artificial Sequence
  ENSG00000166557_143 (sequence is synthesized)
gcttacgtggtaatcagtatagtcattgatcttcagggaccatccagctacccgatttccaatgtggctgcctttgctatcttgttttggaaaatgtcttaaggctgttgaagattatat

SEQ ID NO: 534527 - DNA, 120 bp, Artificial Sequence
  ENSG00000166557_144 (sequence is synthesized)
ctatttgatcctttgtgcccttagatggagaaaagaaatgtattgagtagaagctctgaaagtttggaaggtccctcacaccatcctcaggttcagagtttcactagatgaagtcacaga

SEQ ID NO: 534528 - DNA, 120 bp, Artificial Sequence
  ENSG00000166557_145 (sequence is synthesized)
actcagcaagccaatttacccatggttacagtttgttagagcagaagaatacatttgaaaatcaacaataagaaaaggtacaaaaggtaaagtctaggagagaccaggaatggagcttcc

SEQ ID NO: 534529 - DNA, 120 bp, Artificial Sequence
  ENSG00000166557_146 (sequence is synthesized)
tctcagtgtccagagattttattgaggaatcagtcacatagatatggctagccaccatacgactgactttgatctctagcccctccagagataaagctgatgttgtgttgtccaaggacc

SEQ ID NO: 534530 - DNA, 120 bp, Artificial Sequence
  ENSG00000166557_147 (sequence is synthesized)
tcaccataaatcttatggttagtacagactatctggcatggcccaaggtcctaggtttataaagacacttttgaaagccaggacattccaagggcttaaatgttaccttccagaaactgg

SEQ ID NO: 534531 - DNA, 120 bp, Artificial Sequence
  ENSG00000166557_148 (sequence is synthesized)
gggtaaagagccaaaactttctttgggttaatcctttactgcataagctctaagaccccaataattcatggccctatttctggggcatgattcagcccagagaagagatcggagaaacct

SEQ ID NO: 534532 - DNA, 120 bp, Artificial Sequence
  ENSG00000166557_149 (sequence is synthesized)
acctcccatcatcaaagagctcctggatgttccatcaagcaaaactgtgggaggaaattcagtgttcctatggagatggtggtgtgacctgagctggctcagaggttctaaaagcttctt

SEQ ID NO: 534533 - DNA, 120 bp, Artificial Sequence
  ENSG00000166557_150 (sequence is synthesized)
ctcaaacattggcaaggtcacaggtacccaataaggtacatcttccctttccttcaacagtccaaaacctccagaactctctcgaggcagtgattaatactaaacaaaggacttgaagga

SEQ ID NO: 534534 - DNA, 120 bp, Artificial Sequence
  ENSG00000166557_151 (sequence is synthesized)
taggagggattctgaacagggtagaaataaatagtagtgtgggatattcgtatagttttcttggaagaggtaatatttgagtaggatcttgaaaaatgagtagacgtgtaaatgccacaa

SEQ ID NO: 534535 - DNA, 120 bp, Artificial Sequence
  ENSG00000166557_152 (sequence is synthesized)
gtaaaggcaaagatatatacatcattgtcggaataggaaagagtgtggcacatctgggaatgatgaggggccttatgcagctgggggagtctattggtcagacatgaggctggaaatggt

SEQ ID NO: 534536 - DNA, 120 bp, Artificial Sequence
  ENSG00000166557_153 (sequence is synthesized)
gcaagggctagatagggaagggcttcatatgcgatgccaagaggcacagactatgctgtgattccctggcagtatagctggtgggacaaagagaaatcaaactcaaaaagttcccctctt

SEQ ID NO: 534537 - DNA, 120 bp, Artificial Sequence
  ENSG00000166557_154 (sequence is synthesized)
gtctaccatgtgtatactcaagtaggtgatgagattgtaggaagaaggtaggatataatagcagataattgggtagccatatagaaaaatcaaataaaatttgacctttaccttataaaa

SEQ ID NO: 534538 - DNA, 120 bp, Artificial Sequence
  ENSG00000166557_155 (sequence is synthesized)
ggggaacagggtcacagctctcacccagggcttcagggtcttctgcctgtagctgccaaaggaagagagaatgagaaaagcccatctacttcttaaaagcccaggcccagtgggaatacg

SEQ ID NO: 534539 - DNA, 120 bp, Artificial Sequence
  ENSG00000166558_0 (sequence is synthesized)
atggagggacagaccccaggaagcaggggccttccagaaaagcctcaccctgccacggctgctgccactctgtcctcgatgggcgctgtcttcatcctcatgaagtccgcgctgggagct

SEQ ID NO: 534540 - DNA, 120 bp, Artificial Sequence
  ENSG00000166558_1 (sequence is synthesized)
ggcctgctcaacttcccctgggccttctccaaagcgggcggagtggtccctgccttcctggtggagctggtctcgttggtcttcctgatcagcgggctggtcatcctgggctatgctgct

SEQ ID NO: 534541 - DNA, 120 bp, Artificial Sequence
  ENSG00000166558_2 (sequence is synthesized)
gctgtcagtggccaggccacctaccagggtgtggtcagggggctgtgtggccctgccattgggaagctgtgtgaggcctgcttcctcctcaacctgctcatgatctccgtggccttcctc

SEQ ID NO: 534542 - DNA, 120 bp, Artificial Sequence
  ENSG00000166558_3 (sequence is synthesized)
agggtgatcggggaccagctggagaagctgtgtgactccctcctgtctggcaccccgcccgccccgcagccgtggtacgcagaccagcgcttcaccctgcccctgctctccgtgctggtc

SEQ ID NO: 534543 - DNA, 120 bp, Artificial Sequence
  ENSG00000166558_4 (sequence is synthesized)
atcctgcccctgtctgccccgcgggagatcgccttccagaaatacacaagcatcctaggcactctggctgcctgttacctggccctggtcatcaccgtgcagtactacctctggccccag

SEQ ID NO: 534544 - DNA, 120 bp, Artificial Sequence
  ENSG00000166558_5 (sequence is synthesized)
tccatctactgcagcatgcgcaaacggagcctctcccactgggccctggtgtctgtgctgtccttgctggcctgctgcctcatctattcactgacgggggtttatggcttcctgactttt

SEQ ID NO: 534545 - DNA, 120 bp, Artificial Sequence
  ENSG00000166558_6 (sequence is synthesized)
gggacagaagtttctgctgacgtcttgatgtcctacccaggcaatgatatggtcatcattgtggcccgggtcctttttgctgtctccatcgtaactgtctaccccatcgtgctcttcctg

SEQ ID NO: 534546 - DNA, 120 bp, Artificial Sequence
  ENSG00000166558_7 (sequence is synthesized)
gggaggtcagtgatgcaggacttctggaggaggagctgcttggggggatgggggcccagcgccctggccgacccctcagggctgtgggtccggatgccgctgaccatcctgtgggtcacc

SEQ ID NO: 534547 - DNA, 120 bp, Artificial Sequence
  ENSG00000166558_8 (sequence is synthesized)
gtgacgctcgccatggcgctgtttatgcctgacctcagcgagatcgtcagcatcatcggaggcatcagttccttcttcatcttcatcttcccaggtttgtgcctcatctgtgcaatgggt

SEQ ID NO: 534548 - DNA, 120 bp, Artificial Sequence
  ENSG00000166558_9 (sequence is synthesized)
gtcgagcctataggaccaagagtcaagtgctgcctggaggtctggggagtggtctctgtgctggtcggcaccttcatctttgggcagagcacggcggcagcggtctgggagatgttctga

SEQ ID NO: 534549 - DNA, 120 bp, Artificial Sequence
  ENSG00000166558_10 (sequence is synthesized)
acggagtgagactctgtcttaaacacacaaaaacaaagctcgactcctgtgtgcagattgagcctaaaactggtgtgacactcccacactccccacacagagccgggccggccttgcctg

SEQ ID NO: 534550 - DNA, 120 bp, Artificial Sequence
  ENSG00000166558_11 (sequence is synthesized)
gtgtcggatgttccgctctcctgcctgccgggtgcaaagccagaattcccttttggggaagcgcggacgccgcgctcttctctttgctgcgggagagccactgatgagcacagctttatt

SEQ ID NO: 534551 - DNA, 120 bp, Artificial Sequence
  ENSG00000166562_0 (sequence is synthesized)
aggtgctccgcagccgtctgtgccacccagagccggcgggccgctaggtccccggagaccctgctatggtgcgtgcgggcgccgtgggggctcatctccccgcgtccggcttggatatct

SEQ ID NO: 534552 - DNA, 120 bp, Artificial Sequence
  ENSG00000166562_1 (sequence is synthesized)
tcggggacctgaagaagatgaacaagcgccagctctattaccaggttttaaacttcgccatgatcgtgtcttctgcactcatgatatggaaaggcttgatcgtgctcacaggcagtgaga

SEQ ID NO: 534553 - DNA, 120 bp, Artificial Sequence
  ENSG00000166562_2 (sequence is synthesized)
gccccatcgtggtggtgctgagtggcagtatggagccggcctttcacagaggagacctcctgttcctcacaaatttccgggaagacccaatcagagctggtgaaatagttgtttttaaag

SEQ ID NO: 534554 - DNA, 120 bp, Artificial Sequence
  ENSG00000166562_3 (sequence is synthesized)
tttctgactaaaggagataataatgaagttgatgatagaggcttgtacaaagaaggccagaactggctggaaaagaaggacgtggtgggaagagcaagagggtttttaccatatgttggt

SEQ ID NO: 534555 - DNA, 120 bp, Artificial Sequence
  ENSG00000166562_4 (sequence is synthesized)
atggtcaccataataatgaatgactatccaaaattcaagtatgctcttttggctgtaatgggtgcatatgtgttactaaaacgtgaatcctaaaatgagaagcagttcctgggaccagat

SEQ ID NO: 534556 - DNA, 120 bp, Artificial Sequence
  ENSG00000166562_5 (sequence is synthesized)
tgaaatgaattctgttgaaaaagagaaaaactaatatatttgagatgttccattttctgtataaaagggaacagtgtggagatgtttttgtcttgtccaaataaaagattcaccagtaaa

SEQ ID NO: 534557 - DNA, 120 bp, Artificial Sequence
  ENSG00000166562_6 (sequence is synthesized)
tgaagaagatgaacaagcgccaggtgacggaggagggtgcagctttcgtgtcacctgggaatgtgtctgaagtgcagtcctcaggcatcgccagctgatcctagtgcacgctgatgcttg

SEQ ID NO: 534558 - DNA, 120 bp, Artificial Sequence
  ENSG00000166562_7 (sequence is synthesized)
cgctgctgctgtaaagaactgtccggacactgagaagtcagaaccacgtagaaccacctggcaaagtctccatttggacttcccgagtgtctttcactccgacttttccaggccttgtgt

SEQ ID NO: 534559 - DNA, 120 bp, Artificial Sequence
  ENSG00000166562_8 (sequence is synthesized)
attttaaactgtatttaaactgtgtttaaaactgtattttaagttgtactcaatgctcaaaaagagttcataccaccacattccatctcagttaatattaaatttggatagttgaggaaa

SEQ ID NO: 534560 - DNA, 120 bp, Artificial Sequence
  ENSG00000166562_9 (sequence is synthesized)
cactgcctccaaaacactaaaactatattaatagcaaggagagtttagaagttatcagttactccaggatacgcccgggaaaaggaaacaagatcagccaaatactagaagctggaaaac

SEQ ID NO: 534561 - DNA, 120 bp, Artificial Sequence
  ENSG00000166562_10 (sequence is synthesized)
agatggaagaatgggaactggcacagccagagaaagccaggatgtgagcggcactgggggaggctgtggctcttcaggtttgtgaggcagagagagtcctcagagacccaggaattggtg

SEQ ID NO: 534562 - DNA, 120 bp, Artificial Sequence
  ENSG00000166562_11 (sequence is synthesized)
tccccagaactgaaggtgaaggggaccgtagggctgaaatcagtttgattgggtagaaaagcagagaagcagtgagacccctcgctctccttgtcttccacccagaggcctcaccctcct

SEQ ID NO: 534563 - DNA, 120 bp, Artificial Sequence
  ENSG00000166562_12 (sequence is synthesized)
cagcagaggtctgggagttcattccctggagaggggaacagaaatctctggaggaaaagctgccaggcctggtgggggttatggctcccaccctataagtgactgtgcacactgcatgct

SEQ ID NO: 534564 - DNA, 120 bp, Artificial Sequence
  ENSG00000166562_13 (sequence is synthesized)
gagggtataaaaacagaagtgaggggtgaaggacctcagatgtacacagaacacggtcctcaggtgtacacagaagtgagcacagatgccaggagaataggcacctgtggcccggtggaa

SEQ ID NO: 534565 - DNA, 120 bp, Artificial Sequence
  ENSG00000166562_14 (sequence is synthesized)
ttgaaggacgagacattccaatagttcacagagtaatcaaagttcatgaaaagtaaagaggctttatttccttttggttttgttatgtaaatttttggtagattcatggctaattagaaa

SEQ ID NO: 534566 - DNA, 120 bp, Artificial Sequence
  ENSG00000166562_15 (sequence is synthesized)
agcactggattatgttctgagttctgccattgactcactgggtgactttggaccaaatgcttaactctttctgtaggatgggagttgtagtagttaaacccatagtaactcacaaagtga

SEQ ID NO: 534567 - DNA, 120 bp, Artificial Sequence
  ENSG00000166562_16 (sequence is synthesized)
ttatgagaattaaatgaactaatgtttactaaagcaattcataaacttaaattgctgcacaaatataaggtatgatgtattatgacatgttagttatttgaaggagctcaaagaaaatca

SEQ ID NO: 534568 - DNA, 120 bp, Artificial Sequence
  ENSG00000166562_17 (sequence is synthesized)
agtcacattgcaacagaggatggttttgatatgaaaattattttctgaaatgcaaaaaaagctagctgtttttctatgttacttgggccaaagtggcattttcagcagtaatattagtcc

SEQ ID NO: 534569 - DNA, 120 bp, Artificial Sequence
  ENSG00000166562_18 (sequence is synthesized)
tggatggataaaaattcattttccaactcatctcatgatttggccgttgcatattctgcattacttttccaccgccccatcccctactccccaaacagccttgctgttaataccagctgt

SEQ ID NO: 534570 - DNA, 120 bp, Artificial Sequence
  ENSG00000166562_19 (sequence is synthesized)
gacttacttatgaagacccttttctggaaccggaaacatttacttcttgctcaaatatataaagttgccatgagagagtacttcacatgattagtaaaaatgttacatttcatatacttg

SEQ ID NO: 534571 - DNA, 120 bp, Artificial Sequence
  ENSG00000166562_20 (sequence is synthesized)
atgaagaaattaaatcaataggctaatgagtcgttaattacaaatatgacatatcaggagagttttaagcagttctagtttatcctgtgaagactaaatacaacttagaaattcctaaag

SEQ ID NO: 534572 - DNA, 120 bp, Artificial Sequence
  ENSG00000166562_21 (sequence is synthesized)
aatacaacttagaaattcctaaagacctaaaatctaaaactgaacccaattatattatctatatgatgggttcaaatctgtttcaaaataaatccagccaggcgcagtggctcacacctg

SEQ ID NO: 534573 - DNA, 120 bp, Artificial Sequence
  ENSG00000166562_22 (sequence is synthesized)
ttgagcccaggagttccagaccagcctgagtaacatagggataccccatctctattaataaaaattttaaaaaatttgttctaaaaaaagaagaaatataaatcctcactgagagattag

SEQ ID NO: 534574 - DNA, 120 bp, Artificial Sequence
  ENSG00000166562_23 (sequence is synthesized)
agttatttgtggattttaaataaccattacaagaaagtctcccagagataaccactgtttaacatttcagggaatgctgtaggtactctctgggctggtacagatgtgtgttatgcatat

SEQ ID NO: 534575 - DNA, 120 bp, Artificial Sequence
  ENSG00000166562_24 (sequence is synthesized)
atataattttacttagaatttgattatttttcacccaacaggaagttggaaatagcttttcgtgtcaaatctacatctgtatctttttaagtggctacaagctgttttattgcgaataat

SEQ ID NO: 534576 - DNA, 120 bp, Artificial Sequence
  ENSG00000166562_25 (sequence is synthesized)
tatttatttaaccaatccccttttggtggacacttagattatttcctgtttttcgcaactaaaaacatttctgtgatacatcttttagtattcatctttgtatagttgtccagcaatgag

SEQ ID NO: 534577 - DNA, 120 bp, Artificial Sequence
  ENSG00000166562_26 (sequence is synthesized)
ttctgcttctgattgacataacagagaatgtatcctcattaaaaaccaaacaagggaattcttcccctctcttggcaaccctttttatgtttaacagccattagaaatgtttttttatct

SEQ ID NO: 534578 - DNA, 120 bp, Artificial Sequence
  ENSG00000166562_27 (sequence is synthesized)
tacctaaatctcactagctttttaaggctggagagactggctcccattttgtcaggtttagcgttattagtcagattgtggcttacagcttcttcctcctcctttaaccatttttctttg

SEQ ID NO: 534579 - DNA, 120 bp, Artificial Sequence
  ENSG00000166562_28 (sequence is synthesized)
ttgcattttcacttgaacatctccggggggaccaggagggcttccagttagtccatcctgtctttccagacactctggtgaaaggctttggataagagagaggatggaactactgattta

SEQ ID NO: 534580 - DNA, 120 bp, Artificial Sequence
  ENSG00000166562_29 (sequence is synthesized)
taaaagactggagggtacctatgggtgtgttaccttgtttcccatgagcagagatgattgagacctgggtccatctgattacatattgctgttgattttgtgagcataatcgttggctgg

SEQ ID NO: 534581 - DNA, 120 bp, Artificial Sequence
  ENSG00000166562_30 (sequence is synthesized)
tttatgcactgaacctccttgctctgggatcataatcatatttgagtataagttatggtattcacatttgtatttgctacccaatacatttatttgttatatctgacaagcactgggaaa

SEQ ID NO: 534582 - DNA, 120 bp, Artificial Sequence
  ENSG00000166562_31 (sequence is synthesized)
tgaaaataattatttgcattacaaactcattattcatgtactttgaaagctttatctaacagcagtttttatatgggctatctgaatcttatcttctaaataaaaactagatttgtgaaa

SEQ ID NO: 534583 - DNA, 120 bp, Artificial Sequence
  ENSG00000166562_32 (sequence is synthesized)
ggacctgaagaagatgaacaagcgccagttgaggaaaatgatgttgcccagagccacgtgatccaggtcctcactccaaactcaattcaaaagtatgttctggaaagctggtagggagct

SEQ ID NO: 534584 - DNA, 120 bp, Artificial Sequence
  ENSG00000166569_0 (sequence is synthesized)
agcttacggccgacaaaccactcttctctatcagtatgcccttgaatagatgaggttgtgcaaagtcctttgctcttaaatgtattgctgtcattgagaatatttggaggttttctcttg

SEQ ID NO: 534585 - DNA, 120 bp, Artificial Sequence
  ENSG00000166569_1 (sequence is synthesized)
ggtttgtttggattttttttttcagcttttgtctgaattttggttttatttttctggggcagagaaaatggctttccttatgaaaagtatgataagtaaccaggtaaagaatttaggatt

SEQ ID NO: 534586 - DNA, 120 bp, Artificial Sequence
  ENSG00000166569_2 (sequence is synthesized)
tggtggtgggtctgaagaaaataaagaagaaggaggtgcatctgatcctgcagcagctcaagggatgactagagaggagtatgaggagtatcaaaagcaaatgattgaggagaagatgga

SEQ ID NO: 534587 - DNA, 120 bp, Artificial Sequence
  ENSG00000166569_3 (sequence is synthesized)
aagagatgctgcatttacacagaaaaaggcagaaagggcatgcctcagagttcatctcagagaaaaatacaggctcccaaagagtgaaatggatgagaatcaaatccagatggctggaga

SEQ ID NO: 534588 - DNA, 120 bp, Artificial Sequence
  ENSG00000166569_4 (sequence is synthesized)
tgatgtggatttacctgaagatctccggaaaatggtagatgaagatcaagaagaggaagaagataaagattctattcttgggcagatacagaatctccagaacatggacttggataccat

SEQ ID NO: 534589 - DNA, 120 bp, Artificial Sequence
  ENSG00000166569_5 (sequence is synthesized)
aaaagaaaaagcccaggccaccttcactgaaatcaagcagacagcggagcagaagtgttccgtgatgtgaggggtgggaggggtggagggagggaaccagccatccttggaaaagaccac

SEQ ID NO: 534590 - DNA, 120 bp, Artificial Sequence
  ENSG00000166569_6 (sequence is synthesized)
tctcttgtgggacgtttcaagcagtacatgttttaatgtagtgaacacagttaggaaaaccacgatgatccattgacagacaataatttggttgttctaaatattcctggcagagcattt

SEQ ID NO: 534591 - DNA, 120 bp, Artificial Sequence
  ENSG00000166569_7 (sequence is synthesized)
agctaacaccttgcagcgggaaccttactttccttttagttataaatgagataaactggaaaatttcagttgtaaatgatgatgcagaacacatatctgcttaaagaccttgagatgagc

SEQ ID NO: 534592 - DNA, 120 bp, Artificial Sequence
  ENSG00000166569_8 (sequence is synthesized)
ttggaggccaagttctcaccctgtccaactattcgcaggacaccaggtcccttcagagagaaatgtggagagtcaaggtgtctactgggagccgggtttcccacagggagctgagtctac

SEQ ID NO: 534593 - DNA, 120 bp, Artificial Sequence
  ENSG00000166569_9 (sequence is synthesized)
agactccagggcaatcaaaggtcaccacccccacccctcacctctaggatccttgaatttgtcaatgatactcatcaagtatgcttggatcctttggtccttggatgcttctcagccaag

SEQ ID NO: 534594 - DNA, 120 bp, Artificial Sequence
  ENSG00000166569_10 (sequence is synthesized)
tggcggtagcacagatgtggtgaacaatgacgaattgaggcagggaatagacctcactagccctttgcaatggagatcatcgttctagtggccatgtgaagaatggaaccaagggaggca

SEQ ID NO: 534595 - DNA, 120 bp, Artificial Sequence
  ENSG00000166569_11 (sequence is synthesized)
caattagaggcagagggaaaccaggcagacggctgctctttttgagttgagcttaactctccttgtctgaacttggtgatagcaatgggaacaaagtgggtagactaacagagagcatta

SEQ ID NO: 534596 - DNA, 120 bp, Artificial Sequence
  ENSG00000166569_12 (sequence is synthesized)
agaagttaaatcaatctctctctgtctcctcccaacctctctctctctttcatccccttctctccctatctctcttttttttttcttctcctgtcccttcccatcccacccctttagact

SEQ ID NO: 534597 - DNA, 120 bp, Artificial Sequence
  ENSG00000166569_13 (sequence is synthesized)
accttccagtaaatcacactgtcatttggtgccacaagctttcagggtagacactgatttttcccccctaatatctgctctctttcaaaaggaataattcaaaagacttaggacaattac

SEQ ID NO: 534598 - DNA, 120 bp, Artificial Sequence
  ENSG00000166569_14 (sequence is synthesized)
cactgaaacacttcgagctatttagctaaagcccaccaaaccaaaacaaaatactgatttttttttttttttttggtgactctgttcatacagtgaataaagatctatcaaaggaaaagg

SEQ ID NO: 534599 - DNA, 120 bp, Artificial Sequence
  ENSG00000166569_15 (sequence is synthesized)
aaactgagaccgaaaacttagggtctaagttgttctaaacccagggttctcaaatgtgttgtacaaaaagtttcatgtaataaaattaagcaaataaaacaaatgaatagaggtccaaaa

SEQ ID NO: 534600 - DNA, 120 bp, Artificial Sequence
  ENSG00000166569_16 (sequence is synthesized)
cccgtgttgtaggtgagactgttcatccagaatacttccagaaattggaccttctccatacagccacgatcaaggagtcgctttatactacaacttcctcacgtttggaaatgtgtgtct

SEQ ID NO: 534601 - DNA, 120 bp, Artificial Sequence
  ENSG00000166569_17 (sequence is synthesized)
cccaaccatccgaagtttaatggggctttagctgtgtctaaggttggccgcaggtgggggatggaaggaggggttttctttgatccatctaatgaattaatgaattaatcagaggtgggg

SEQ ID NO: 534602 - DNA, 120 bp, Artificial Sequence
  ENSG00000166569_18 (sequence is synthesized)
ttcagaagccaggctccttactgttgctgaagcagggctgattatgagctagcctaactgctggaaaaatgcagcttcatgctagaagaattagggacatggcccagtccattcatcttc

SEQ ID NO: 534603 - DNA, 120 bp, Artificial Sequence
  ENSG00000166569_19 (sequence is synthesized)
cctaatcgagttcttgggaaatacacacgtagattagcccctaacaatgacccccggctgattgcttggagtaccctccaccgtgcccacaatggtactgactagctctttatgtcctgc

SEQ ID NO: 534604 - DNA, 120 bp, Artificial Sequence
  ENSG00000166569_20 (sequence is synthesized)
ctctgaaacaaacagtaaataaaagctaacctcacctggacttattaggaggagctgggcagttccagaggaattaactttggaaaacaaggccataaaccccttagcagcgtgtgggca

SEQ ID NO: 534605 - DNA, 120 bp, Artificial Sequence
  ENSG00000166569_21 (sequence is synthesized)
ggagcttaaggaaacgctgccaatctttgtttagcggtgattatcgagatcaatttaatattggggaagtttgcataaaaagcattctcggtcagagggggaacaacaaataccaattaa

SEQ ID NO: 534606 - DNA, 120 bp, Artificial Sequence
  ENSG00000166569_22 (sequence is synthesized)
ttatccccacagctgccctctgatcaccaccacctcagcacgtcagccacctggtctatgtcactggcagtcagaccttttcgggtgccaccaggccatttgtgggccctggaaaggtgg

SEQ ID NO: 534607 - DNA, 120 bp, Artificial Sequence
  ENSG00000166569_23 (sequence is synthesized)
aggaggggcggaggaggaggcaaaacctggtctgtcaggggactttccagagggtttgttaatttgccctggatgccggtacccaaagcccactctctataggctctgactttatttctt

SEQ ID NO: 534608 - DNA, 120 bp, Artificial Sequence
  ENSG00000166569_24 (sequence is synthesized)
ctgggagctaaactgcttctacctccgcctcttagatgcagaatccagtctcagggaaggattaaagacagactgcaggctaagatgggctttgattcttttcaaaaagatcacacacta

SEQ ID NO: 534609 - DNA, 120 bp, Artificial Sequence
  ENSG00000166569_25 (sequence is synthesized)
caataataattacaaatgagctgcaggcagaaaacactggacaaggagtcagtggcctgagttctagtcctgacccttccacttaatagctgtatcactttgagcctcagtttcctcttc

SEQ ID NO: 534610 - DNA, 120 bp, Artificial Sequence
  ENSG00000166569_26 (sequence is synthesized)
tgtaaaatggggaccaatatgtctgtcctgctcacctcacaaggttgtgaagatcagatgacatgaagaatgtgagaagattctgaaacctacaaagtgacatgtcgagagaattgcttg

SEQ ID NO: 534611 - DNA, 84 bp, Artificial Sequence
  ENSG00000166569_27 (sequence is synthesized)
agcccaggagttccaggctgcagtgagccaccggaccctgtctctaaaataaacagacaaataaataataagtaaataaagtaa

SEQ ID NO: 534612 - DNA, 120 bp, Artificial Sequence
  ENSG00000166573_0 (sequence is synthesized)
atggagctggcggtcgggaacctcagcgagggcaacgcgagctggccggagccccccgccccggagcccgggccgctgttcggcatcggcgtggagaacttcgtcacgctggtggtgttc

SEQ ID NO: 534613 - DNA, 120 bp, Artificial Sequence
  ENSG00000166573_1 (sequence is synthesized)
ggcctgatcttcgcgctgggtgtgctgggcaacagcctagtgatcaccgtgctggcgcgcagcaagccgggcaagccgcggagcaccaccaacctgttcatcctcaacctgagcatcgcc

SEQ ID NO: 534614 - DNA, 120 bp, Artificial Sequence
  ENSG00000166573_2 (sequence is synthesized)
gacctggcctacctgctcttctgcatccccttccaggccaccgtgtacgcgctgcccacctgggtgctgggcgccttcatctgcaagttcatccactacttcttcaccgtgtccatgctg

SEQ ID NO: 534615 - DNA, 120 bp, Artificial Sequence
  ENSG00000166573_3 (sequence is synthesized)
gtgagcatcttcaccctggccgcgatgtccgtggaccgctacgtggccatcgtgcactcgcggcgctcctcctccctcagggtgtcccgcaacgcgctgctgggcgtgggctgcatctgg

SEQ ID NO: 534616 - DNA, 120 bp, Artificial Sequence
  ENSG00000166573_4 (sequence is synthesized)
gcgctgtccattgccatggcctcgcccgtggcctaccaccagggcctcttccacccgcgcgccagcaaccagaccttctgctgggagcagtggcccgaccctcgccacaagaaggcctac

SEQ ID NO: 534617 - DNA, 120 bp, Artificial Sequence
  ENSG00000166573_5 (sequence is synthesized)
gtggtgtgcaccttcgtcttcggctacctgctgccgctcctgctcatctgcttctgctatgccaaggtccttaatcacttgcataaaaagttgaagaacatgtcaaagaagtctgaagca

SEQ ID NO: 534618 - DNA, 120 bp, Artificial Sequence
  ENSG00000166573_6 (sequence is synthesized)
tccaagaaaaagactgcacagacagttctggtggtggttgtggtgtttggaatctcctggctgccgcaccacatcatccatctctgggctgagtttggagttttcccgctgacgccggct

SEQ ID NO: 534619 - DNA, 120 bp, Artificial Sequence
  ENSG00000166573_7 (sequence is synthesized)
tccttcctcttcagaatcaccgcccactgcctggcgtacagcaattcctccgtgaatcctatcatttatgcatttctctctgaaaatttcaggaaggcctataaacaagtgttcaagtgt

SEQ ID NO: 534620 - DNA, 120 bp, Artificial Sequence
  ENSG00000166573_8 (sequence is synthesized)
cacattcgcaaagattcacacctgagtgatactaaagaaagtaaaagtcgaatagacaccccaccatcaaccaattgtactcatgtgtgataaaagatagagtatccttatggttgagtt

SEQ ID NO: 534621 - DNA, 120 bp, Artificial Sequence
  ENSG00000166573_9 (sequence is synthesized)
tccatataagtggaccagacacagaaacaaacagaatgagctagtaagcgatgctgcaacttgttatcttaacaagaattcaagtcgttttaattaaatcccacgtgtgttaaaaagtac

SEQ ID NO: 534622 - DNA, 120 bp, Artificial Sequence
  ENSG00000166573_10 (sequence is synthesized)
tttgatccatttaggaaattcctaggtctagtgagaattatttttcaattttattttagttctaaattatgtttcagaaacaaaagacaatgctgtacagttttattcctcttcagacat

SEQ ID NO: 534623 - DNA, 120 bp, Artificial Sequence
  ENSG00000166573_11 (sequence is synthesized)
gaaagggaacatatatattccatatatatgttcaactcttcatagattgtgaactggcccatcaatatggtcaggaatatttgcagtctacattttaaagccaatttatttagaaaaaaa

SEQ ID NO: 534624 - DNA, 120 bp, Artificial Sequence
  ENSG00000166573_12 (sequence is synthesized)
aatttgagctttaattctttaattttaagagaagtaatattgtgaactatgtattttaaaatatgatcatggacacacaatgatgaattttttggccatttacatagacatatctattaa

SEQ ID NO: 534625 - DNA, 120 bp, Artificial Sequence
  ENSG00000166573_13 (sequence is synthesized)
gtggaaagaaggctttctgaagtctgtttgcacaggtggcatttgcttccaattgtagctagcgcacagagctttggaagcctgtcattatgagatacagtcggtttacctcaggagtca

SEQ ID NO: 534626 - DNA, 120 bp, Artificial Sequence
  ENSG00000166573_14 (sequence is synthesized)
attcagtgttgtactggtgacctgggatgcagtagtaggcactgttgattcaaatttatcctgtgaaactggctttatagagttaacaaaacagagtcagagaccactgtcttaacagtg

SEQ ID NO: 534627 - DNA, 120 bp, Artificial Sequence
  ENSG00000166573_15 (sequence is synthesized)
gaagatgcaaataagtttttgagaataaaactggattttgaaattttacattagtacttgacaaaagttttcattttgccttgaatggaacctactaaaaagagagatgaaaaaaaatca

SEQ ID NO: 534628 - DNA, 120 bp, Artificial Sequence
  ENSG00000166573_16 (sequence is synthesized)
gcgaggttgatgtagataataatttctatgggaccaaagactagacagaattcagtaagtcacatgaagtaatggtcatgcctgtacataaagcatatttcatgtttgatttagatgaca

SEQ ID NO: 534629 - DNA, 120 bp, Artificial Sequence
  ENSG00000166573_17 (sequence is synthesized)
ttcaaaaaaaatcatgggactgaatatacctggggtatcctatcttgtacaaatgcatgctttttcattaaatttgtaatgatgtttaatgaacatttccaccaaacattatttcctcta

SEQ ID NO: 534630 - DNA, 120 bp, Artificial Sequence
  ENSG00000166573_18 (sequence is synthesized)
aaaatgttaatttggggttaaaaccatcaccatttgaatttcaaatgtagttttcatgacaattttatattgatgtgtgtttacaatgagaaaatggcatgaaaatattaaattgtcttg

SEQ ID NO: 534631 - DNA, 120 bp, Artificial Sequence
  ENSG00000166573_19 (sequence is synthesized)
tatcggaaaagtacttttcagactgtaagactttgatatgttttaggaggcaacaaaagcaagaagttttttttttgtttgtttgttaaaaaggatttggccaagcacagtggctcatgc

SEQ ID NO: 534632 - DNA, 90 bp, Artificial Sequence
  ENSG00000166573_20 (sequence is synthesized)
cagctgtgtggaatgtacttgagctcaggagtttgagaccagtgtgggcaacatggcaaaactcggtctctactaaaaatacaaaaatta

SEQ ID NO: 534633 - DNA, 120 bp, Artificial Sequence
  ENSG00000166573_21 (sequence is synthesized)
ggtgtggtggcgcacgcctgtagtttcagctactctggaggctgatgtgggggatcacctgagcccgggaggtccaggatgcagtcagtcaagactgcaccactgcacttcagcctggat

SEQ ID NO: 534634 - DNA, 83 bp, Artificial Sequence
  ENSG00000166573_22 (sequence is synthesized)
cctctgtgccaaatcagcactccacatgaaacatcaaattttagataaaaatgcaaacttgacataagcctttggcatgctaa

SEQ ID NO: 534635 - DNA, 120 bp, Artificial Sequence
  ENSG00000166573_23 (sequence is synthesized)
gataaaaatgcaaacttgacataagcctttggcatgctaatttttttagctcattcacttactttcactaatcatatttcagtgactagtgtttacatttgcaatgttattaataactct

SEQ ID NO: 534636 - DNA, 120 bp, Artificial Sequence
  ENSG00000166573_24 (sequence is synthesized)
ctggataaaaggaaagaaaaacgttagaaagattttgaagtgatgtattatgtttgttgactagaagaagaaattgtgtttatgtgtaagtgagggtcttaaagaatatgtcctttgcat

SEQ ID NO: 534637 - DNA, 120 bp, Artificial Sequence
  ENSG00000166573_25 (sequence is synthesized)
cgaatgttttttgcactttattcaaatatataggagcagaaaaattttatcctgacgatgatacttcctgtgatttgtggaacttgaagttgctgttgcaaactccagaacaacttcttt

SEQ ID NO: 534638 - DNA, 120 bp, Artificial Sequence
  ENSG00000166573_26 (sequence is synthesized)
gggtgtgaactcacaaaactgtgtaaagaagtgccttcttgttgtgtttgagtttgcatgaatggaaatgatttcttgcaccatggctatttctttgttttctccttctgatctgtaagc

SEQ ID NO: 534639 - DNA, 120 bp, Artificial Sequence
  ENSG00000166573_27 (sequence is synthesized)
atataaatggaagtatttaaaaaaatactgtagctaatgttgctattttctagaggcatgccgaaaatgtgctgtgcctttggtccttcccagatgctactggcacgtctgaagcttgag

SEQ ID NO: 534640 - DNA, 120 bp, Artificial Sequence
  ENSG00000166573_28 (sequence is synthesized)
gcatggtacaaaaagtaatagcttgcgcttgaaacccccccccccccgccactttgctaaatgtaaatgctaattgttgcattttacagttagataggatatacttcctgcatattgtca

SEQ ID NO: 534641 - DNA, 120 bp, Artificial Sequence
  ENSG00000166573_29 (sequence is synthesized)
ttctaatcaattcctcttactcagagttttggctgagtctacttctaaaacaaattttgatagggataatgacatcttctgcaaagatctaaacctctacaaaattttctgaataaagag

SEQ ID NO: 534642 - DNA, 120 bp, Artificial Sequence
  ENSG00000166573_30 (sequence is synthesized)
tttcagaagaactcgtaaacagaatgaaattaaccagagaagtataggagtgtgttgcgtttgccaagcatctgcttcccagctagatttccccctaatatacaatgaccaattctgaag

SEQ ID NO: 534643 - DNA, 120 bp, Artificial Sequence
  ENSG00000166573_31 (sequence is synthesized)
caccttcttttccgtcactaaataaagacagcttcccaaggacacactttttctcccagcatcaggttgagggagaaatattgcttatacctttgaagtcaggctgcttgaaactcacat

SEQ ID NO: 534644 - DNA, 120 bp, Artificial Sequence
  ENSG00000166573_32 (sequence is synthesized)
tttcagtttacttcaaagaaaactgatgctttctaagcagatttggctgtctcagtgcccaaggcagctgttattttcctaggctttttgctttcacgtaaggagacaggctttgggata

SEQ ID NO: 534645 - DNA, 120 bp, Artificial Sequence
  ENSG00000166573_33 (sequence is synthesized)
tttagtagctgaaatgcttgctgtttcacatgcataagcaaccatttcagtgtcctgctgatgaatacagtgatgtggatggaaacgttttcttgtcctatatcctggggataggaaaca

SEQ ID NO: 534646 - DNA, 120 bp, Artificial Sequence
  ENSG00000166573_34 (sequence is synthesized)
gattctctgtgctcttctgaccgggtatgtactcagcaacatgggggactgaggccattttctgaatactttaggtaaattacttttgcttttaactaaattgttttattttacacattg

SEQ ID NO: 534647 - DNA, 120 bp, Artificial Sequence
  ENSG00000166573_35 (sequence is synthesized)
ggagtaaaaccatttccgccccatcccaatctcttgtgcttttatcttttttatcctaactcacttctatccagatttcctctcgataatatttaccacagataaattcatctttcagcg

SEQ ID NO: 534648 - DNA, 120 bp, Artificial Sequence
  ENSG00000166573_36 (sequence is synthesized)
cagatataacaaatcagagtggggaggagagatgcttaaggaactgcatgagtcatgcaaggctcagaacttcttgtggctcaactcgaaatcatattgcattcctgcattctcccagat

SEQ ID NO: 534649 - DNA, 120 bp, Artificial Sequence
  ENSG00000166573_37 (sequence is synthesized)
gctttgaggcagtgcagcgatcattctaatatgttaactgagacccaagatctcagcaggagaggacagcttatccaagcatccctttccttttcagtcatggccatggctatctgtaaa

SEQ ID NO: 534650 - DNA, 120 bp, Artificial Sequence
  ENSG00000166573_38 (sequence is synthesized)
caccaaaatgctcatgctgaagcagcattacattgaggaaaataacctattgggcagcttcatcatgttcttgctttaaatgatttatcaaatacatgtatgtaaactacatagtcacta

SEQ ID NO: 534651 - DNA, 120 bp, Artificial Sequence
  ENSG00000166573_39 (sequence is synthesized)
actgcgaaaatacatcaatgtggctacttcctctggaaagttactgtctaaaatttgtaaattttaatcttcactgttgcacatattttccatgtcttaaatttgtaagtgggtttctat

SEQ ID NO: 534652 - DNA, 120 bp, Artificial Sequence
  ENSG00000166573_40 (sequence is synthesized)
gaaaggtaatcgtattcttcttgaccattaaaaatgttgcatgtaaggctatttctcaagtagatgttaatgacttgtttaattattgacttacttattttaaaagctgtatgtagtaag

SEQ ID NO: 534653 - DNA, 120 bp, Artificial Sequence
  ENSG00000166573_41 (sequence is synthesized)
atttaaccatattttaatattttctcttttagaagtggaaaagttgagcctgaggaagaatttaaaatgcttaagacatctttgatgggggctgtatttgcattaggcagaggtgtctaa

SEQ ID NO: 534654 - DNA, 120 bp, Artificial Sequence
  ENSG00000166573_42 (sequence is synthesized)
ggagagtgtatcgtgtattgtgatgcattagcaggatgttttgttcatcgacttgtgaaagtgctgtggataatagatggtggtttcttttcttagtgtggcaggttcactcacattcat

SEQ ID NO: 534655 - DNA, 120 bp, Artificial Sequence
  ENSG00000166573_43 (sequence is synthesized)
gtttttgactttagctgccatcctggggttctgagggtagcatgtctgtttgactgggcaagaccctcacataccttggcaggccctggctttcgtttctctgtggtgcctggtgctact

SEQ ID NO: 534656 - DNA, 120 bp, Artificial Sequence
  ENSG00000166573_44 (sequence is synthesized)
cacagggctgactcacgggcagatgctccccatccttccccataggccctgttcccgcatccgatgattctcaggttttgttctaggtgcagaaatagtgggagaggccataatcgtgaa

SEQ ID NO: 534657 - DNA, 72 bp, Artificial Sequence
  ENSG00000166573_45 (sequence is synthesized)
ttctaggtgcagaaatagtgggagaggccataatcgtgaatgatgaataagaagggaaggtggggccgggca

SEQ ID NO: 534658 - DNA, 70 bp, Artificial Sequence
  ENSG00000166573_46 (sequence is synthesized)
gtggccagtgagggttttatctttgtattcactggaaataacctcagctgaattttctctctgaatcttt

SEQ ID NO: 534659 - DNA, 120 bp, Artificial Sequence
  ENSG00000166573_47 (sequence is synthesized)
actggaaataacctcagctgaattttctctctgaatcttttcaatgttggctccatttgccatactcagacaattgcttgaagagctgaactgttagctcaagatttcgttggcactgtt

SEQ ID NO: 534660 - DNA, 120 bp, Artificial Sequence
  ENSG00000166573_48 (sequence is synthesized)
ggatagaaagcctctccttttctgctggagaagagatttctcaggccaagttgtgtagctccaaattctccgcaattagagaaggcacagtaaagaaaagatcccttgctgatggaatgg

SEQ ID NO: 534661 - DNA, 120 bp, Artificial Sequence
  ENSG00000166573_49 (sequence is synthesized)
actggaactgagctccactgtttaaatttttgactctcaggtagtggtgatcgttatggtaacccatgaactcggatgaatttcggggcctgctgtgggttttctatgggacaccatata

SEQ ID NO: 534662 - DNA, 120 bp, Artificial Sequence
  ENSG00000166573_50 (sequence is synthesized)
ccacagtactgtatttcaaaatattggatattgattatgaacactggaactatttatgtgtcatcattccaaagaccattgtgatctatgaagctcctttatttgctggctagattgtcc

SEQ ID NO: 534663 - DNA, 120 bp, Artificial Sequence
  ENSG00000166573_51 (sequence is synthesized)
aaaaacaagctcacttgtttttgggcaatctagccaaggtgtcacataatggagaaaaatgcagatggtcctgtggctggtgtgaatgaagaatgacctgggcccaacatagaacttttc

SEQ ID NO: 534664 - DNA, 120 bp, Artificial Sequence
  ENSG00000166573_52 (sequence is synthesized)
cagtatggtgagcatcaaagtaggcagacatccaaaagccaagtgaagggcagatagatccccaggtgccacccaggctctgcaggcaaagctctcagggccccatttgtgtttgtgtgg

SEQ ID NO: 534665 - DNA, 120 bp, Artificial Sequence
  ENSG00000166573_53 (sequence is synthesized)
cctgcactgtgtaagtgtcgttcccctaggacttctgcaatgggataccaaagatgacgtgtaaggccttcagtatataatggacttgtgccaagtacctaagggttcactgccttgttt

SEQ ID NO: 534666 - DNA, 120 bp, Artificial Sequence
  ENSG00000166573_54 (sequence is synthesized)
gaggaatcgcagagcatcatttctgattggttcttagagcctgcatcttgtaccactgggacttctggagacctctggggaccgttgactatgctgggagggtgcagaaatgaagctgat

SEQ ID NO: 534667 - DNA, 120 bp, Artificial Sequence
  ENSG00000166573_55 (sequence is synthesized)
ggcagaagcaggctcccagctcctcttcttctgctcagccaggtgattcttacctccattggcctttggatgtctgcgtaataatttgttgagaatcattagagaacaactaatccaaaa

SEQ ID NO: 534668 - DNA, 120 bp, Artificial Sequence
  ENSG00000166573_56 (sequence is synthesized)
aatctatcatcctttatttgtgttgactttctgattatgccttcattcactctttttattacttatacacatgtctgtttttattcttccctactcttttcttaaagttggtcatatttc

SEQ ID NO: 534669 - DNA, 120 bp, Artificial Sequence
  ENSG00000166573_57 (sequence is synthesized)
tacacttgagatcttccagtttctgtgaatgttgaggggttcacaaagtggcttggcctcagacctctatatccttgttgttctgtttggacttaggacttttttcctggctatcctgcc

SEQ ID NO: 534670 - DNA, 120 bp, Artificial Sequence
  ENSG00000166573_58 (sequence is synthesized)
aatacttttccatctaacagaaacgcaagcttcaagagcaagttatttttataacagatcatgtgagcaattcctccatagcattggttgtagaacaggtcagttggcatgtggcctcct

SEQ ID NO: 534671 - DNA, 120 bp, Artificial Sequence
  ENSG00000166573_59 (sequence is synthesized)
gagggccttgcatggggttctggacccagcgggggccacatctctgagaattcgttccctgtgggtgtctggggtgcatcgttacttctgagatgttatgactcagcagatgagatttgt

SEQ ID NO: 534672 - DNA, 120 bp, Artificial Sequence
  ENSG00000166573_60 (sequence is synthesized)
ccgtctgctcagtgagaggaattccaatgctgggtcttgactcccgctgcagggagctctctgggcccgggcatgttggatggagttgtgatgggtgtgcctccctcggacttactctgg

SEQ ID NO: 534673 - DNA, 120 bp, Artificial Sequence
  ENSG00000166573_61 (sequence is synthesized)
ccaggaactgcatctgctcctctaaggagatttgagcaggtgaatggagtttctgtcattcctggtctagagttcatgtgtgaaggtcaaatataggtggggacttggcagcacacaact

SEQ ID NO: 534674 - DNA, 120 bp, Artificial Sequence
  ENSG00000166573_62 (sequence is synthesized)
ctgagtgaaagacacgatcagcgtgatagacaggtgtcttgctatgtgacttgccattgcggtcactggttatacaaagtctctgtttagaaatagcaaagatccaagaaagcagaagag

SEQ ID NO: 534675 - DNA, 120 bp, Artificial Sequence
  ENSG00000166573_63 (sequence is synthesized)
tgggggtgggagtggggctaaatgtgttgctcttcagtggaaatctgcccattttgttgaaaagaaaggaaacagggtacacaaatgctgtttgggaacattgtgtcaggatcacctagc

SEQ ID NO: 534676 - DNA, 120 bp, Artificial Sequence
  ENSG00000166573_64 (sequence is synthesized)
tttgacgatgagagtgttttttaaaacggaaaccatgtcattttccttctagagagaatttcctggtatgtcaatgtagcttcagaaataggtctcagtgttctggctcagggcgaggtt

SEQ ID NO: 534677 - DNA, 120 bp, Artificial Sequence
  ENSG00000166573_65 (sequence is synthesized)
acaaaagaggcttcggtagcgtcctcaggcccgcgtgccctgtgttcttaacagcctcatggggcctagaggaacttttacatggtagacactgagtgaatacacagattcctagatttg

SEQ ID NO: 534678 - DNA, 120 bp, Artificial Sequence
  ENSG00000166573_66 (sequence is synthesized)
agatattttcaaaatagggctagcatgtataaagaatcaaacttagtcattccattgaagtgaaattggattataatttagaaatatttataagccagaaatggttgtgtaaatgttagt

SEQ ID NO: 534679 - DNA, 120 bp, Artificial Sequence
  ENSG00000166573_67 (sequence is synthesized)
tttcatattttggttttctaagagtcacattttattgccatatagcacaaaatttgacaatgaggtatagaaatccaaaattttcttgggtacaattgaacaaatcttttaatctcttca

SEQ ID NO: 534680 - DNA, 120 bp, Artificial Sequence
  ENSG00000166573_68 (sequence is synthesized)
gttctatctgcctaagtgaggagagtagttgtggagcattgtagaaaggataaaatgaacattaggatactgagggtttggtctgaattctgttttttcattgctactggaagtgctgtc

SEQ ID NO: 534681 - DNA, 120 bp, Artificial Sequence
  ENSG00000166573_69 (sequence is synthesized)
tttggtatcctcatgcatacaagaaggatttggaaaatgtcagtgagtttgaaactggctgtacagttgaatgagctgggcagttgaaagtacccgtgatgctctggccttaccttagat

SEQ ID NO: 534682 - DNA, 120 bp, Artificial Sequence
  ENSG00000166573_70 (sequence is synthesized)
cagagattcttatattttatcaagcatcagaatcacctgcagagcttgttgaatgcagattgttggccacatctccagaatttctcattcagtagatttgggatggagcccaacgatttg

SEQ ID NO: 534683 - DNA, 120 bp, Artificial Sequence
  ENSG00000166573_71 (sequence is synthesized)
cagctggtccagagaccaccttgtgagatctactacctgatttaattggtttgaaggtgaaggtggagtccaggctttttaaaacagtgtctgtattttcagagcagataaccaatcaaa

SEQ ID NO: 534684 - DNA, 120 bp, Artificial Sequence
  ENSG00000166573_72 (sequence is synthesized)
ttgagcagatggtcttttaaagtctaagcttctatggttctgtgaaaaaaattgtttacatggaatttaaatcattcagaatttttattgcttacattgatcagatccataaaatatctg

SEQ ID NO: 534685 - DNA, 120 bp, Artificial Sequence
  ENSG00000166573_73 (sequence is synthesized)
tttaactattacattaccctagctacagaaatttgtaagttttcaaaagcatgaaggagtttaataacttgtaagactttcagagattgttataatttttgcctcaaaaaaataaaataa

SEQ ID NO: 534686 - DNA, 120 bp, Artificial Sequence
  ENSG00000166573_74 (sequence is synthesized)
aatagcttggtggaaaagagcacctatgcattcaatttgtttccctcaaatgctaagggttaaaatagtactcaaaattgttagatgtgaagttttgaacccagtgtttaaactcagtgt

SEQ ID NO: 534687 - DNA, 120 bp, Artificial Sequence
  ENSG00000166573_75 (sequence is synthesized)
ttaaatatttgcatgtctttctatgtgactgctaatttttaactacattattatctctaagagataaataaactttccctgtacttaaagtttttaaattaagtatcttctgataacata

SEQ ID NO: 534688 - DNA, 120 bp, Artificial Sequence
  ENSG00000166573_76 (sequence is synthesized)
agtttttaaattaagtatcttctgataacataagtagtatgagtaaggaaaaaaaatctatgtgtactgtatttttaaattttaataaggtttgatatggtttggctctgtgtctccacc

SEQ ID NO: 534689 - DNA, 120 bp, Artificial Sequence
  ENSG00000166573_77 (sequence is synthesized)
gtgtcaaggaccagcaggtggagataattgaattatggggccggtttctctcatactgttcttgcgatagtgagttctcaggagatctgatggttttataagcatctagcatttcccctg

SEQ ID NO: 534690 - DNA, 120 bp, Artificial Sequence
  ENSG00000166573_78 (sequence is synthesized)
atgtaagatgtgacttgctcctccttgctctctgccatgattgtgaggcttccccaccacttggaaatgtaagtcaattaaaccactttctttagtaaattgcccagtctcgggtatgtc

SEQ ID NO: 534691 - DNA, 120 bp, Artificial Sequence
  ENSG00000166573_79 (sequence is synthesized)
cagtctcgggtatgtctttatcagcaatgtgaaaacggactaatacaacgtgattgtttaaatgctgatatgaaagcagtgctgaatgtggatcttcttatgccagatactgttataatt

SEQ ID NO: 534692 - DNA, 120 bp, Artificial Sequence
  ENSG00000166573_80 (sequence is synthesized)
agatactgttataattattctctagagagctggccatacaatttatctcattatttatagatctagcatgaatgccagtaagctgacaaagccaaaagccaaaaactaagagtttgtatt

SEQ ID NO: 534693 - DNA, 120 bp, Artificial Sequence
  ENSG00000166573_81 (sequence is synthesized)
aatccagttaatgccaaatctagtcatcctccatcatcctacctctgtgttctgcatgaaatataattggcctttgtgatggaaccagttttcttgcattgaaaataaaatttgttcctc

SEQ ID NO: 534694 - DNA, 120 bp, Artificial Sequence
  ENSG00000166573_82 (sequence is synthesized)
ctgaaaaaacacagatggctaaaagggaacctgaggttatgatgctttaaataaacaaaaaaacttaagacaattgcattccagagttgccttttgcctccaaattctcacaagtttgta

SEQ ID NO: 534695 - DNA, 120 bp, Artificial Sequence
  ENSG00000166573_83 (sequence is synthesized)
tctgcccagtgccccctgaagagccctcccctctgctgctatggagctgttcttcaccaggtccttaatcacttgcataaaaagttgaagaacatgtcaaagaagtctgaagcatccaag

SEQ ID NO: 534696 - DNA, 120 bp, Artificial Sequence
  ENSG00000166575_0 (sequence is synthesized)
attccgcacctccgagtgctggccgggcgagaggctggcggctgggctctcgcgcccctccctgcagggctcaggctctccccctcctgtcttctccgcgctgttcctcgtcatggcggc

SEQ ID NO: 534697 - DNA, 120 bp, Artificial Sequence
  ENSG00000166575_1 (sequence is synthesized)
cctcagcaagtccatccctcataactgctatgagatcggccacacttggcacccttcctgccgggtctccttcctgcagatcaccgggggcgccctggaggagtccctgaagatctatgc

SEQ ID NO: 534698 - DNA, 120 bp, Artificial Sequence
  ENSG00000166575_2 (sequence is synthesized)
tcctctgtacttgattgcagcaattctccggaaacggaaattagactattatttacacaaactactccctgagatcctacaatccgcttcatttctaactgctaatggggccttgtatat

SEQ ID NO: 534699 - DNA, 120 bp, Artificial Sequence
  ENSG00000166575_3 (sequence is synthesized)
ggctttcttttgcattttaaggaagatacttggaaaattctactcatggactcctggctttggtgccgctctgccagcatcttatgtggccattctcattgaaagaaaaagcaggagagg

SEQ ID NO: 534700 - DNA, 120 bp, Artificial Sequence
  ENSG00000166575_4 (sequence is synthesized)
gctgctcacaatttatatggccaacttggccacagaaacactattcagaatgggtgtagcaagaggaaccatcacaacattaagaaatggagaagtccttttgttttgcatcacagctgc

SEQ ID NO: 534701 - DNA, 120 bp, Artificial Sequence
  ENSG00000166575_5 (sequence is synthesized)
catgtacatgttctttttcaggtgcaaggatggcttgaaaggatttacattttctgcacttaggttcattgtagggaaggaagaaattcccacacattctttttcaccagaggcagcata

SEQ ID NO: 534702 - DNA, 120 bp, Artificial Sequence
  ENSG00000166575_6 (sequence is synthesized)
tgcaaaagtggaacaaaagagagagcaacatgaggaaaaacccggaagaatgaatatgattggtctagtcaggaaatttgtggattcaatatgcaaacatggaccaaggcatagatgttg

SEQ ID NO: 534703 - DNA, 120 bp, Artificial Sequence
  ENSG00000166575_7 (sequence is synthesized)
caaacattatgaagataattgcatctcttattgcattaaaggtttcatcagaatgtttagcgtggggtacttgatccagtgctgcctccgaatcccttctgcatttaggcatctgtttac

SEQ ID NO: 534704 - DNA, 120 bp, Artificial Sequence
  ENSG00000166575_8 (sequence is synthesized)
acagccatctcggctactttctctcttctacaataaagaaaacttccagcttggagcttttcttggctcttttgttagtatatacaagggtactagttgcttcctgcgctggatcagaaa

SEQ ID NO: 534705 - DNA, 120 bp, Artificial Sequence
  ENSG00000166575_9 (sequence is synthesized)
cttagatgatgaactacatgctattatagctggatttttggcaggtatatcaatgatgttttataaaagcacaacaatttccatgtatttagcgtccaaattggtagagacaatgtattt

SEQ ID NO: 534706 - DNA, 120 bp, Artificial Sequence
  ENSG00000166575_10 (sequence is synthesized)
caaaggcattgaagcagggaaggttccctattttcctcatgcagatactatcatctattccatctctacagcaatttgcttccaggcagctgtcatggaagttcagactttgagaccatc

SEQ ID NO: 534707 - DNA, 120 bp, Artificial Sequence
  ENSG00000166575_11 (sequence is synthesized)
ttactggaagttccttttaagactcaccaagggcaaatttgctgtcatgaaccgaaaagtccttgatgtttttggtactggtgcatctaaacactttcaggatttcatccccaggttgga

SEQ ID NO: 534708 - DNA, 120 bp, Artificial Sequence
  ENSG00000166575_12 (sequence is synthesized)
tccaagatacacaactgtaacaccagagttgcccacagagttttcctgaagatgactgtaacttattaatgtgactaaatgtttcatcttgaagagttaattatgttgaacacaaaggag

SEQ ID NO: 534709 - DNA, 120 bp, Artificial Sequence
  ENSG00000166575_13 (sequence is synthesized)
ggggcccaagctcgaacttcagtgttatttcagttagagatactcttttcatttgttttgtttttcttatgaatcagaaattcagaagctttttaggaagatgttgcttaataattaagc

SEQ ID NO: 534710 - DNA, 120 bp, Artificial Sequence
  ENSG00000166575_14 (sequence is synthesized)
ttcctccatagccagaataagattctggatcactgtagtgactgacattatatattattgatcaaattatgtccacaagcaatattatataatctacgtagaagtgtaataacaaacaag

SEQ ID NO: 534711 - DNA, 120 bp, Artificial Sequence
  ENSG00000166575_15 (sequence is synthesized)
agtacacttaaaattactttaaaagatgtctttagttcattccaatataattcttgattaaaattaggattatttctacattttaggatttacaaaggatcacgggtacatggatttggt

SEQ ID NO: 534712 - DNA, 120 bp, Artificial Sequence
  ENSG00000166575_16 (sequence is synthesized)
ctatatatttttttaaagttttgaattggtatctgtagtagtggaatgttatagatttgaagtaactctccacggacagtgctgctttcgtgtagagcaatttaattggagaagtggcca

SEQ ID NO: 534713 - DNA, 120 bp, Artificial Sequence
  ENSG00000166575_17 (sequence is synthesized)
ttcttacttcagggatgcaaagatgggtctcataccatttggataaatgtcgtggtatccatgctttttttcaactaataacatcatctctcttcatgaccagttaattgggctatttgg

SEQ ID NO: 534714 - DNA, 120 bp, Artificial Sequence
  ENSG00000166575_18 (sequence is synthesized)
cagcccagtgaacctatgtactaatggcaagttaggggcaaatggaaatggacacatccgataaagttgaaatgtatgttttaatctttcacagaagtattacacttgaatatttaaaaa

SEQ ID NO: 534715 - DNA, 120 bp, Artificial Sequence
  ENSG00000166575_19 (sequence is synthesized)
caaaacttttaaacttcctataggtttatgatgtttgttttcatttatatggacataatccttcatagctcagtttatatgccattgttgtattagaagggatcaaaatcctatggaaca

SEQ ID NO: 534716 - DNA, 120 bp, Artificial Sequence
  ENSG00000166575_20 (sequence is synthesized)
aagtagtcttggcaagttggcagtttgtgtcctctcagctgtttaacttatgtaatggatgttttgcacctgaaaacactataaaaatccagtggttgtttaaaaagtccatttgtcact

SEQ ID NO: 534717 - DNA, 120 bp, Artificial Sequence
  ENSG00000166575_21 (sequence is synthesized)
aattccattcaggttctccaaccttcttcttgaatatcattgtcaccatttttactgttagaataaagaggtgacaccataaagtcctgctgataatgagagtagttcaggacagctgtg

SEQ ID NO: 534718 - DNA, 120 bp, Artificial Sequence
  ENSG00000166575_22 (sequence is synthesized)
attgaaatatggtcgctatttacagtttttcagggaaaagttatacttttctatgttaataaagagctgaagtggtctacagttaatgtgacatgtagggatgatgatatttttaaaata

SEQ ID NO: 534719 - DNA, 120 bp, Artificial Sequence
  ENSG00000166575_23 (sequence is synthesized)
cattttgttgctaaaaagtttttaggccagtgcaaattatgcagtagaacttgtgttgcaaaaggaattataacccatactttaaaaatgcttaatccctcatattcaatttcatcaagc

SEQ ID NO: 534720 - DNA, 120 bp, Artificial Sequence
  ENSG00000166575_24 (sequence is synthesized)
cttgtatacttctgcttaaatgtaattcaatccttggttgttatggcaaacagaaacccaacaaaaagacagactctggtactatggtaacagagccactttatcatttggtcaaaattt

SEQ ID NO: 534721 - DNA, 120 bp, Artificial Sequence
  ENSG00000166575_25 (sequence is synthesized)
ggcattatgattagctttgtagaactgacctgtttatttggcaatgctgttaaaggatcatttcggtttcagacttcaaagttgattaataaatttaatcttaactttttattcactgga

SEQ ID NO: 534722 - DNA, 120 bp, Artificial Sequence
  ENSG00000166575_26 (sequence is synthesized)
atcaaaacgatggttggtactgtgtttactgtttaaaatgaagtactaaagccctgagaactgcacctcattttctttatccagaaattgtgcttatatattttcctgtcaggtttaaaa

SEQ ID NO: 534723 - DNA, 120 bp, Artificial Sequence
  ENSG00000166575_27 (sequence is synthesized)
agatgttttaattcataaattattgttttcattgacattaaaagactgtgatattgaaagatgaattacgaaatttgctgagattgtttagtaaaattttgctggtcaaaaaggtgtatt

SEQ ID NO: 534724 - DNA, 120 bp, Artificial Sequence
  ENSG00000166575_28 (sequence is synthesized)
tctacaatttaccttttcatttttataaattgcagtcatttttttaaattttatgtaaaatgtaaaatgaaatagctatcatgaagcagaatacaatgatgaatgtataggttgagtgaa

SEQ ID NO: 534725 - DNA, 120 bp, Artificial Sequence
  ENSG00000166575_29 (sequence is synthesized)
taaccaatttgcagtggtggattgagaagtccagtttgatttcattgggacagactgcaaagtgtagttgtttgagcaaacacaaagaaactttgtgtttttgaagacaatcagaatgat

SEQ ID NO: 534726 - DNA, 120 bp, Artificial Sequence
  ENSG00000166575_30 (sequence is synthesized)
tacctttctacctctaactaatcaggtattgattgacaactttttggcattataaataaagtaaaatagatctctgcattccaaaatatgttttttagtttatttatatcctgaagaaat

SEQ ID NO: 534727 - DNA, 120 bp, Artificial Sequence
  ENSG00000166575_31 (sequence is synthesized)
ggtaagttttcactggaactgattacagtaaacaataatatgtccccttagtctttctgacatttttatatagattgagattgaaaaaccgtgcatttggggcagtggtattatggtcat

SEQ ID NO: 534728 - DNA, 120 bp, Artificial Sequence
  ENSG00000166575_32 (sequence is synthesized)
ttcgttgctattttctgttttaataaaatcctagaactagtagcaaccgagtaaagattgagtttgcaagataacagattgtctcaaatctattcaattctcagcagtttttcatcaaat

SEQ ID NO: 534729 - DNA, 120 bp, Artificial Sequence
  ENSG00000166575_33 (sequence is synthesized)
aatttcaggatccattttattactcatttttgaagtaacacctttggtttagttttattttcccataaattctgcttttgcttctgtaacttttttcttgaactataagcatagtcatca

SEQ ID NO: 534730 - DNA, 120 bp, Artificial Sequence
  ENSG00000166575_34 (sequence is synthesized)
ctcagttgatatctagtttattttttgccttcattcgttgtttagtcagttgttatttaatttagaattttatatttttttggctctcagattttataatgaacttttattagactgaac

SEQ ID NO: 534731 - DNA, 120 bp, Artificial Sequence
  ENSG00000166575_35 (sequence is synthesized)
atgtatgtttttgatggaatccaaactgagcaaatgtcacacagtattttcttgttgtgctcgagtgttcgtctccttgtagattgtatctaggctaacatttcatttagttgttaatgc

SEQ ID NO: 534732 - DNA, 120 bp, Artificial Sequence
  ENSG00000166575_36 (sequence is synthesized)
tgacgtaattgtttcctgcttatattttatcatatccctgagcttctgtgtgctctacatttcataggtaatgaaaagcaatgtcctttactctcagggagcttcgtccacttgcctgtg

SEQ ID NO: 534733 - DNA, 120 bp, Artificial Sequence
  ENSG00000166575_37 (sequence is synthesized)
attattagcccagagattccttaaattctccgtgtgatttatttttttattttttgagttgaggtctagctctgttgcccgggttggagtacagtggtgcaatcatagctcattgaaacc

SEQ ID NO: 534734 - DNA, 120 bp, Artificial Sequence
  ENSG00000166575_38 (sequence is synthesized)
tcaaattccttggttcaagcaattatttcccctcagtctctaatagctgggacaacaggcatgtgccaccatgcctggctaatatttattttatttattttttttttgtagaaacaaggt

SEQ ID NO: 534735 - DNA, 120 bp, Artificial Sequence
  ENSG00000166575_39 (sequence is synthesized)
ttaaactcctggcctcaagtgatcctcttgggttggcctcccgggactctgggattccaggtgtgagccacggtacctagccatatttttatttgtatgagtattaagtagtttgacaca

SEQ ID NO: 534736 - DNA, 120 bp, Artificial Sequence
  ENSG00000166575_40 (sequence is synthesized)
atgagtattaagtagtttgacacagcaacaaagttgtcctttgtttcccaaaggcaaaagtatacatttcttactaagatatcttataaacattctctctcctaacacctccttctagta

SEQ ID NO: 534737 - DNA, 120 bp, Artificial Sequence
  ENSG00000166575_41 (sequence is synthesized)
atcattttcacatagtagaatacttcactcagctgaaaatgagtggccaagaaaaaaatacaagaaaaggaataagaagtgattattttctttagggctgcactttgaatgtgatgagta

SEQ ID NO: 534738 - DNA, 120 bp, Artificial Sequence
  ENSG00000166575_42 (sequence is synthesized)
ataaggttaccttcattgtggaggtgatgtttacaattgcctccagccctttactattggtgctgaagccaccattggtgccagctctataatttcttcttcttgtggaattaacaaaga

SEQ ID NO: 534739 - DNA, 120 bp, Artificial Sequence
  ENSG00000166575_43 (sequence is synthesized)
aaggagtgtcaaggactgagatgaccctcagattggggggctgtcttagattctagggctttgtagtactatgtttctgtttaaagtagtggcctcaggtgactttgtaatagccctgta

SEQ ID NO: 534740 - DNA, 120 bp, Artificial Sequence
  ENSG00000166575_44 (sequence is synthesized)
gttgcaaaaagggtaactacaaagaaatgaaactgactctagtgtgtgtgacttctggaaacagaagtggggcagtaagttggccatgatatagctagtgtcataggactacagcagagt

SEQ ID NO: 534741 - DNA, 120 bp, Artificial Sequence
  ENSG00000166575_45 (sequence is synthesized)
agtgagtgaatggccttaagcttacagctgtggtgaataagaatgtgtgctattttacacacagaagaaaatgattgacttttggttggaggaaagaatttatatctggtcttttggaaa

SEQ ID NO: 534742 - DNA, 120 bp, Artificial Sequence
  ENSG00000166575_46 (sequence is synthesized)
tctctctctccctctctctctctctctgtctgtctctcttgctgctccctctccctgccaccttgtccattctctgcttgctggtgttactttatgttaactagtctccttggacttcat

SEQ ID NO: 534743 - DNA, 120 bp, Artificial Sequence
  ENSG00000166575_47 (sequence is synthesized)
tatgttaactagtctccttggacttcattgcaaccttttaagccagccgttcaagtgagaggctctggagtgatcataacggtgataacaatggagtaaacatttccagagacactgatt

SEQ ID NO: 534744 - DNA, 120 bp, Artificial Sequence
  ENSG00000166575_48 (sequence is synthesized)
ttttttttatatgctctgtttttcttaggcaggatgatgtagaagataattgcacagatatggaaggagatgtttctctgtatgtgaagcctttaaatccagaacaattaatttcttctc

SEQ ID NO: 534745 - DNA, 120 bp, Artificial Sequence
  ENSG00000166575_49 (sequence is synthesized)
ttcttaaaaccccgtaacatcacttgactctggaatttcctattttcttttactttctccattttttttccatctgtccctcctacgaatatgttttacatgaaataatgtattgggttt

SEQ ID NO: 534746 - DNA, 120 bp, Artificial Sequence
  ENSG00000166575_50 (sequence is synthesized)
tatcttttgtcccagcagacctgaaaatcccagtatattaccacagacacacataccatctggtcaccaacagggacatcagggccaagagcagtttatacttctttctttagctcacaa

SEQ ID NO: 534747 - DNA, 120 bp, Artificial Sequence
  ENSG00000166575_51 (sequence is synthesized)
actactatagcttgcctgttcagttttttttttttttaatattcagttttgtgccatactctcccccacccccagcctgctgcctctgcagagcataacattctaatcttgtcagaccgt

SEQ ID NO: 534748 - DNA, 120 bp, Artificial Sequence
  ENSG00000166575_52 (sequence is synthesized)
ggataataggatgttccctggtcttggcatagaggccataggcatacaacatgctttatctgccttgcttagactcagcatccctttctgtcttgagagattcaggcttccataaagtag

SEQ ID NO: 534749 - DNA, 120 bp, Artificial Sequence
  ENSG00000166575_53 (sequence is synthesized)
acctgtagacctatgttggctgaggtcaccctgcattactactttcctccatccctgaactaggaccagttaattttcgaagtctagttcttcagtgtctattaaactttttccagtagt

SEQ ID NO: 534750 - DNA, 120 bp, Artificial Sequence
  ENSG00000166575_54 (sequence is synthesized)
taatcgatctcttaaattaattttcttttcagattatttttggtcacctaagaggaccctgaagctatagtgccaaaggtttaaagcatgaagtacattctgtggttggtcattatggga

SEQ ID NO: 534751 - DNA, 120 bp, Artificial Sequence
  ENSG00000166575_55 (sequence is synthesized)
ttggatgccaaaaggaatgggagagaagagactataaacatattttaagccttatctcttttctcctattcttttctttacctttcctggcccatgctttcctgccatatctttgctatg

SEQ ID NO: 534752 - DNA, 120 bp, Artificial Sequence
  ENSG00000166575_56 (sequence is synthesized)
tatttcttcatcttgagctctcaagggaaaaaacaggagtccttatttttctatttatttcagggaaaattgaaggtaaataatatctgcaaagcttcaggaagaaattcagttgcatct

SEQ ID NO: 534753 - DNA, 120 bp, Artificial Sequence
  ENSG00000166575_57 (sequence is synthesized)
gaatctgagtcggcagtttttgatagcctgtcactgctcagggatagcactaaggctctcttcagaaccaaagggcaggataaataaatctatgaaactagaggcatcattgaatcatct

SEQ ID NO: 534754 - DNA, 120 bp, Artificial Sequence
  ENSG00000166575_58 (sequence is synthesized)
gaggacctttttttttttttttttttcactaaaacgcttcctataacttggattaaaattcaaaaatgggattgcagtcattgttaattgctcaactagtggcagtttttccttgctgag

SEQ ID NO: 534755 - DNA, 120 bp, Artificial Sequence
  ENSG00000166575_59 (sequence is synthesized)
ggaacactgatgttgtttaagacagttacatgcctagccccagggatgaatcataattgttctaggcctttcatgtctttcctttcttcttgtccagatacttttccaaccagcctttac

SEQ ID NO: 534756 - DNA, 120 bp, Artificial Sequence
  ENSG00000166575_60 (sequence is synthesized)
tcggaggtgttcatgtgaccctgttttggccaataaaatgtaatggaaaatctgggaaacacttgggaaaaatcttccctctctgcttaaaggaaagttctttttacctctttttctctt

SEQ ID NO: 534757 - DNA, 120 bp, Artificial Sequence
  ENSG00000166575_61 (sequence is synthesized)
gttcaaggtattagtattagtcagtagggtctgaatctgtggcagcaatcttgcagacatgaaatgaaaagtacaaacatgaaaaaccagcatattaaagatgccaggtcagaaaaatag

SEQ ID NO: 534758 - DNA, 120 bp, Artificial Sequence
  ENSG00000166575_62 (sequence is synthesized)
aaagaacctgcttctgtgagccactgaatggtgccattaaccatctgcatttgagcattttgagaaaataaacctctatttcttaaagttctgtatcagtcagggtttcccagagaggca

SEQ ID NO: 534759 - DNA, 120 bp, Artificial Sequence
  ENSG00000166575_63 (sequence is synthesized)
gaacaatagggatagagagatacatagagagagatatgagagggatagagagagacacagagagagatatgagaggggattaagggagttggctcatgtgattgtggaggctgagaaacc

SEQ ID NO: 534760 - DNA, 120 bp, Artificial Sequence
  ENSG00000166575_64 (sequence is synthesized)
ccaccacaggccattcataacctggagaccttgggatgctggtggtctggctcagtacaagtccaaaagccttggaaccagggaaactgatggtgtaattctcagtccaaggctgaattt

SEQ ID NO: 534761 - DNA, 120 bp, Artificial Sequence
  ENSG00000166575_65 (sequence is synthesized)
tcaagtctgagaacctgggggtgggatgggggagtgatagttttaagtcctggagtcccaaggttagaggatctggggtcctaatgtccatgggcagttggagaagagtgtatccctgct

SEQ ID NO: 534762 - DNA, 120 bp, Artificial Sequence
  ENSG00000166575_66 (sequence is synthesized)
gcaggggagagagagaagccaattctcctttcttctgtttttattctacccaggcctccagtggattggaggtgcctgcccatattgagggcagatcttctctgcctagtccacgctaac

SEQ ID NO: 534763 - DNA, 120 bp, Artificial Sequence
  ENSG00000166575_67 (sequence is synthesized)
tcacatgccaatctcctctggaaacaccctcacagacacaccccaaaataatgccttaccagttctctagatattccttaatccagtcaagttgatgcctaaaattaaccatcacaggct

SEQ ID NO: 534764 - DNA, 120 bp, Artificial Sequence
  ENSG00000166575_68 (sequence is synthesized)
ttatggctctattacccaagaattctgttactttcagctgaaaacatttctaatggacatattccaattctgtatagatcagatctcagtttcatttcccattatatccttctctctctt

SEQ ID NO: 534765 - DNA, 120 bp, Artificial Sequence
  ENSG00000166575_69 (sequence is synthesized)
gatttagaattctctttttctccactcttctgtgtatgctaaaatactgtcaatctcgtctttgaaggttttgctcatctttaaaaaatcttagttgattatgttttatgtgtcatttaa

SEQ ID NO: 534766 - DNA, 120 bp, Artificial Sequence
  ENSG00000166575_70 (sequence is synthesized)
ttaaggaatgaatttgcttatttttatttcagtagcttttggggtacaagtggtttttggttgcatggatgaattgtatattggtgaagtctgaaattttagtgcacctgtcaccagaat

SEQ ID NO: 534767 - DNA, 120 bp, Artificial Sequence
  ENSG00000166575_71 (sequence is synthesized)
agtgtgcattgtacccaatatatagctttttattccttccccttctgagtctccatagtccattatatcactctgtatacccttgtgtatccatagcttagctcccacttacagttgaga

SEQ ID NO: 534768 - DNA, 90 bp, Artificial Sequence
  ENSG00000166575_72 (sequence is synthesized)
tagaataatggcctccagctccatccaagatgctgcaaaagacattatttcatcttttattttttatggctgagtagtattccatggtgc

SEQ ID NO: 534769 - DNA, 86 bp, Artificial Sequence
  ENSG00000166575_73 (sequence is synthesized)
tccatggtgcctatgggcactttggttgattctgtatctttgcaattgtgaactgtgttaacaataaaaatatatatacgagtgtc

SEQ ID NO: 534770 - DNA, 120 bp, Artificial Sequence
  ENSG00000166575_74 (sequence is synthesized)
tgaaggcatatttacaaaaattcttgatagttaccaacttaaacatcaatacacctttgtgtatttcatcactttcagttttcatttatatttactaaaagaattctcaaatttaatact

SEQ ID NO: 534771 - DNA, 120 bp, Artificial Sequence
  ENSG00000166575_75 (sequence is synthesized)
tttcttttgcattttaaggagagggctgctcacaatttatatggccaacttggccacagaaacactattcagaatgggtgtagcaagaggaaccatcacaacattaagaaatggagaagt

SEQ ID NO: 534772 - DNA, 120 bp, Artificial Sequence
  ENSG00000166575_76 (sequence is synthesized)
agtaagatgagaattttgatatagttattagttgttaatttatagtttgcgattttaaaatataaaatgtgatgaaatctatgatgctttgtctaagaaatagagagatatctgatgtat

SEQ ID NO: 534773 - DNA, 120 bp, Artificial Sequence
  ENSG00000166575_77 (sequence is synthesized)
ataatattgagtgtacctgatgaacaaatccattttaattcatagtcatgttggaaccagatcttagattgaaaacaaattactgtctttttacctttagttatcaaatatctttactct

SEQ ID NO: 534774 - DNA, 120 bp, Artificial Sequence
  ENSG00000166575_78 (sequence is synthesized)
taaaaaatgacattttattagtaacttctacaaatgtttgtaatgaaaaaaagaattccttagcttttgctttctttctattttgtgttatacagaactgatacttatttcttaagataa

SEQ ID NO: 534775 - DNA, 120 bp, Artificial Sequence
  ENSG00000166575_79 (sequence is synthesized)
aataatcggaaatgttgaacatttactacacgtggagagaagggaaggaagagggagagggagagggagaaaaaagctggagaggattttgtctgcagatgctaagttttgactttttaa

SEQ ID NO: 534776 - DNA, 120 bp, Artificial Sequence
  ENSG00000166578_0 (sequence is synthesized)
agacaccgagtctcgccttctgagattggcgggtaacctagcaacgcagggaccgcggcggtaactgtggctagggaaacctggagcggtcagagcaggatggccagagacaataaaagc

SEQ ID NO: 534777 - DNA, 120 bp, Artificial Sequence
  ENSG00000166578_1 (sequence is synthesized)
acgagacccaagtagtctaccgaagtctccatctctgtggacctacagaggcacagagggctgctcacaagatggctttagacattctcgccatggcccctttgtatcaggcccctgcca

SEQ ID NO: 534778 - DNA, 120 bp, Artificial Sequence
  ENSG00000166578_2 (sequence is synthesized)
tcaacagaatagggccaaagacagacccatctaaaaggccagctgatccactaaaacccttggttctctctaggaccaaactcaccaccattgaggccaaaaggatcatgtccatcctgg

SEQ ID NO: 534779 - DNA, 120 bp, Artificial Sequence
  ENSG00000166578_3 (sequence is synthesized)
atgaggcgatctacaaggtggagctggtgaccttgctgtcgtatgtggcatccaacagagaggatatggaggggatgctgggggaggacgtcatgagggcagtgagagagcatgaggatc

SEQ ID NO: 534780 - DNA, 120 bp, Artificial Sequence
  ENSG00000166578_4 (sequence is synthesized)
tctgccaggtcctccttgaaaacgtcaggtgcctgaaagagaaagaaaggcaattgcaggagcagaaagaggctgaggaggaagggtggctcagagaccgcctcctttccatagagctgc

SEQ ID NO: 534781 - DNA, 120 bp, Artificial Sequence
  ENSG00000166578_5 (sequence is synthesized)
gaacgtccttagactcttgctcagcaacccccaggctgctaggctcctgcagatgcagacacagggtagaagtgcagaagcccagaattttattgacagcctgatagagctccgtggttt

SEQ ID NO: 534782 - DNA, 120 bp, Artificial Sequence
  ENSG00000166578_6 (sequence is synthesized)
cctgtttgaaaaactactcactagtcccatggaagcgagggataaggcccagttcttacaggatatcagtagacagaatagtaataaccaacaaatcattgatactcttgaaaaggaatt

SEQ ID NO: 534783 - DNA, 120 bp, Artificial Sequence
  ENSG00000166578_7 (sequence is synthesized)
ggcggagagaatgaagaacaggaatgcagaggaggagttggaggatctggacgctgttcacagggaggagaagatctcgctggaggagctcaggcggaggcacaaagtgctggtgggaga

SEQ ID NO: 534784 - DNA, 120 bp, Artificial Sequence
  ENSG00000166578_8 (sequence is synthesized)
gtttgcgcagatccgggaagagcgggagatcaactccaagaaaaggatggaggcagagcaggagatggtgcgcatggtacgggcggccacgctcatccaggccctatggaagggctatct

SEQ ID NO: 534785 - DNA, 120 bp, Artificial Sequence
  ENSG00000166578_9 (sequence is synthesized)
ggtgcgctccctgctcagatccaagaagaagcggggcaagggcaaagcaaaggacaaggagaagggcaagcagaaaggcaaggagaagggcaagggcaagaaatgagctctccacccagc

SEQ ID NO: 534786 - DNA, 120 bp, Artificial Sequence
  ENSG00000166578_10 (sequence is synthesized)
ccgctcctgacccttatcttcccagagaccaggccaggaaggcccgagatggagagcactaaattcacggctttcatgtttttatttaataaattaaaaagtatttgaagccacattgaa

SEQ ID NO: 534787 - DNA, 120 bp, Artificial Sequence
  ENSG00000166578_11 (sequence is synthesized)
ctgaaaaaccacctgcaccaggtgctcaagttctcagagaacagcctcgttcgcactaagcaggaggctgagaagcagcagaaggccgatttccgggcatcacaggccagggtggccaag

SEQ ID NO: 534788 - DNA, 120 bp, Artificial Sequence
  ENSG00000166578_12 (sequence is synthesized)
atccagcaggagatcctgcagctgcagtcacagttttacaacctggtcatggagaaccgggaggcagagcaggcgctgaggaagaagaaatataaagtggaaacggaaatcgagaactgg

SEQ ID NO: 534789 - DNA, 120 bp, Artificial Sequence
  ENSG00000166578_13 (sequence is synthesized)
tggctagggaaacctggagcggtcagagcagaatgctgtctgtatgcctggctggtccccgcctgacacatgtgcctgagatgcctccacacttggtcttcctgcccttgtggccctaac

SEQ ID NO: 534790 - DNA, 120 bp, Artificial Sequence
  ENSG00000166578_14 (sequence is synthesized)
accctcacaaagctgaaaactgcttccagtgaaaggttctgtgtaaaagcgacagaggacctaagatgaactcttgatgtcaacagttgtggtttctgcagccacactaaccacacagat

SEQ ID NO: 534791 - DNA, 120 bp, Artificial Sequence
  ENSG00000166578_15 (sequence is synthesized)
tgggactgttccatcactcctggaggtccagcagtgttgggcagggcaggactgcaccagctactcaggaagtggcttggtggaggggaagggcacaggagcagggaaggcccaaatcca

SEQ ID NO: 534792 - DNA, 120 bp, Artificial Sequence
  ENSG00000166578_16 (sequence is synthesized)
agccagtgtctcctgggaggcaggaaggggcagcacacaggcctggggacaggggacaaactgggatcctgtcccagcattgctgcatgccagctttgtgaccttgggcaagttcctcaa

SEQ ID NO: 534793 - DNA, 120 bp, Artificial Sequence
  ENSG00000166578_17 (sequence is synthesized)
ctcctgagaccccacagggataatacccacatcgtcagaggctgggtgccctgcaaaggaatgaagaagtagcatgtaaagctcaggctaattactcaactcctgcccagctgccgattt

SEQ ID NO: 534794 - DNA, 120 bp, Artificial Sequence
  ENSG00000166578_18 (sequence is synthesized)
cacacctcagaaatgaaaatgctaacattggtcttaatggttgttacatgagaattacatgagatggtagtgagagagctggtgcatagtaagtgttcaataaatatcatttctgaccgg

SEQ ID NO: 534795 - DNA, 120 bp, Artificial Sequence
  ENSG00000166579_0 (sequence is synthesized)
agaatggcctcggacacccaggcagtccctgacgtgtcggggaggagccgggcgcggaggtacgctgagtggagctcggggctgcgtaggggagctgagccgagcggctgggcgggcctg

SEQ ID NO: 534796 - DNA, 120 bp, Artificial Sequence
  ENSG00000166579_1 (sequence is synthesized)
gccgggccggcggaggggagacgtcggttgagcggcggcgaacatgcgcttttgacacattggaggctttcttgatcatggatggtgaagatataccagatttttcaagtttaaaggagg

SEQ ID NO: 534797 - DNA, 120 bp, Artificial Sequence
  ENSG00000166579_2 (sequence is synthesized)
aaactgcttattggaaggaactttccttgaagtataagcaaagcttccaggaagctcgggatgagctagttgaattccaggaaggaagcagagaattagaagcagagttggaggcacaat

SEQ ID NO: 534798 - DNA, 120 bp, Artificial Sequence
  ENSG00000166579_3 (sequence is synthesized)
tagtacaggctgaacaaagaaatagagacttgcaggctgataaccaaagactgaaatatgaagtggaggcattaaaggagaagctagagcatcaatatgcacagagctataagcaggtct

SEQ ID NO: 534799 - DNA, 120 bp, Artificial Sequence
  ENSG00000166579_4 (sequence is synthesized)
cagtgttagaagatgatttaagtcagactcgggccattaaggagcagttgcataagtatgtgagagagctggagcaggccaacgacgacctggagcgagccaaaagggcaacaatagttt

SEQ ID NO: 534800 - DNA, 120 bp, Artificial Sequence
  ENSG00000166579_5 (sequence is synthesized)
cactggaagactttgaacaaaggctaaaccaggccattgaacgaaatgcatttttagaaagtgaacttgatgaaaaggaatctttgttggtctctgtacagaggttaaaggatgaagcaa

SEQ ID NO: 534801 - DNA, 120 bp, Artificial Sequence
  ENSG00000166579_6 (sequence is synthesized)
gagatttaaggcaagaactagcagttcgggaaagacaacaggaagtaactagaaagtcggctcctagctctccaactctagactgtgaaaagatggactccgccgtccaagcatcacttt

SEQ ID NO: 534802 - DNA, 120 bp, Artificial Sequence
  ENSG00000166579_7 (sequence is synthesized)
ctttgccagctacccctgttggcaaaggaacggagaacacttttccttcaccgaaagctataccaaatggttttggtaccagtccactaactccctctgctaggatatcagcactaaaca

SEQ ID NO: 534803 - DNA, 120 bp, Artificial Sequence
  ENSG00000166579_8 (sequence is synthesized)
tcgtgggggatctcttacggaaagtaggggctttagaatccaaattagcagcttgcaggaattttgcaaaggaccaagcatcacgaaaatcctatatttcagggaatgttaactgtgggg

SEQ ID NO: 534804 - DNA, 120 bp, Artificial Sequence
  ENSG00000166579_9 (sequence is synthesized)
cctcctggtctgggctcctcgcgtccatcgtcagcgccgggtatgctgcctctcagtgtgtgagtgcctagcctccaggtgggggctcctgccctcctccaacaacccaggacacccacg

SEQ ID NO: 534805 - DNA, 120 bp, Artificial Sequence
  ENSG00000166579_10 (sequence is synthesized)
cctcacccctcggtgcctgggcccagccccgtgcccctccgtctgcctccgcacggctggcagagggcaggctgcatgcagtggcggctactgggccctgcccagccccggaactctgcg

SEQ ID NO: 534806 - DNA, 120 bp, Artificial Sequence
  ENSG00000166579_11 (sequence is synthesized)
cgatatcaatactggctattttctcttctcgccgtagtgccgttggtttcacatgattgcacttttgtgggtcgcaaggtgatacatacgtgtattacttggtcactggatgcagaagta

SEQ ID NO: 534807 - DNA, 120 bp, Artificial Sequence
  ENSG00000166579_12 (sequence is synthesized)
cccattcatcacacctgccccatagcccccactctgctgtactgataggatttagttgtgttttaggacattgcaaatcttctagaagttctcccccaaatcaggtcaatgtgtgccctc

SEQ ID NO: 534808 - DNA, 120 bp, Artificial Sequence
  ENSG00000166579_13 (sequence is synthesized)
ctgagctcccacccaggcatctccagtgctcatgatcatgtgtcccccaactccacccctcacagtttgggcctgtttctggcaaagagtcaggaaggttactgaattagggaacatttt

SEQ ID NO: 534809 - DNA, 120 bp, Artificial Sequence
  ENSG00000166579_14 (sequence is synthesized)
ctgcaccttctgattttacttaagcagctaccattccatggacttgcctcccagagcagcacaatgcccgtctgagccccacgtggcaggagcctctgggacggggcacacacaggccca

SEQ ID NO: 534810 - DNA, 120 bp, Artificial Sequence
  ENSG00000166579_15 (sequence is synthesized)
gcctctgtgctgtctcctcctccgtgcgcctcagactcggggtgagggaggcgggcagcctctcgccagccttcccgtccttcagttcaacgacatctttggagtgtttttgttttctct

SEQ ID NO: 534811 - DNA, 120 bp, Artificial Sequence
  ENSG00000166579_16 (sequence is synthesized)
tccaagggccgtcccgttgtgttaggaagggtgagtggctggttccagggtgggccggtgccagctccggggtggactgaacagcggcggctgtccctgtgcatcctttgattactctca

SEQ ID NO: 534812 - DNA, 120 bp, Artificial Sequence
  ENSG00000166579_17 (sequence is synthesized)
tgctgcatttactgtttacatttgttttattgtacataggtttgtaaacattattgcctgagatatttgtatataacttgggctttgtagcttttatttattcagaacgcatacggcatg

SEQ ID NO: 534813 - DNA, 120 bp, Artificial Sequence
  ENSG00000166579_18 (sequence is synthesized)
ttaatgactctgatggtgtcctcctctgggcagctgtataggatcatcatgtggttacaaaaaatacttccctcaaaaaaattcttttaatgtggaaacaataaatttcacagaaaaaaa

SEQ ID NO: 534814 - DNA, 120 bp, Artificial Sequence
  ENSG00000166579_19 (sequence is synthesized)
gacacattggagaagaccacgtggccttaaaccaactgctgcaactctgtgtgcaggatgattctgtgggcccaagtcacccagcgcctatgctgcaaccaaaagtgcctcctgtcgctt

SEQ ID NO: 534815 - DNA, 120 bp, Artificial Sequence
  ENSG00000166579_20 (sequence is synthesized)
taaccactggaatctctcatgttttattccctccaaaatgctgcagttcagtgttgtcccagattttatgcttgtgcttagatttctctgttctctaatttgttaagtttgtctttaata

SEQ ID NO: 534816 - DNA, 120 bp, Artificial Sequence
  ENSG00000166579_21 (sequence is synthesized)
gtgcgtcacagaatggcctcggacacccaggcagtccctgacgtgtcggggaggagccgggcgcggaggctttcttgatcatggatggtgaagatataccagatttttcaagtttaaagg

SEQ ID NO: 534817 - DNA, 120 bp, Artificial Sequence
  ENSG00000166579_22 (sequence is synthesized)
tttgggggagagacatcatcaaagtaggtttgtgtgtgtgtgcatgtgtgcgggtgtacatgtgttcaccttcccacccgctgaaacttcagatgcagtgaagccttctcacataaaaca

SEQ ID NO: 534818 - DNA, 120 bp, Artificial Sequence
  ENSG00000166579_23 (sequence is synthesized)
atataccttaactgggcgtattgctctgtgggattcaaaagtattttgtaaattctggtcacttgagggcttcttggaatcaggtttttgtctagtctgtgagcacttctgccagttcct

SEQ ID NO: 534819 - DNA, 120 bp, Artificial Sequence
  ENSG00000166579_24 (sequence is synthesized)
gaaacatgggctgccgtgcctgcttcccaggtgccgagctgtttccttcaaccatggtcaccctttgtctcaccatctgaaaggacacacatttcatgtggagtgtggtcgcttggagtc

SEQ ID NO: 534820 - DNA, 120 bp, Artificial Sequence
  ENSG00000166579_25 (sequence is synthesized)
tctcaaaaacactcttttttttcccataactttatgtagtttcttaggtaacatgtgctctatttttgtaagccactctgagttcttttgggctgtgtgtaggtgggcatggactaattt

SEQ ID NO: 534821 - DNA, 120 bp, Artificial Sequence
  ENSG00000166579_26 (sequence is synthesized)
tagggcgtgatgtggaaatagtattcgtattactgtttaatatgttctcctttcttttattaggcaagaaaaagtcatatttcccacgttgttcatggggcagtaaacggctttgacccc

SEQ ID NO: 534822 - DNA, 120 bp, Artificial Sequence
  ENSG00000166579_27 (sequence is synthesized)
aggcctgcccttggggagccttcccggcccggggccgtgtctgaggctccgccggggcgggccgggccgggttccggggcggccagcctgggggcaactgttccaaccgctctaactgtc

SEQ ID NO: 534823 - DNA, 120 bp, Artificial Sequence
  ENSG00000166579_28 (sequence is synthesized)
taactgtcccctcccttccctggtccgatgtgtggccccccaggggcgcctgcaagggaacgattccggtggcctccggaagatgtgccccgttccgggtagggtgagggctggcggtga

SEQ ID NO: 534824 - DNA, 120 bp, Artificial Sequence
  ENSG00000166579_29 (sequence is synthesized)
cggaggccgggacgtggcaccgtgggctggggcgctggcggcgcaaggagtggcccagtcggaggtggcagcggcgcgcccagcccgcctcctcctaccccctcttcgaaattccttcat

SEQ ID NO: 534825 - DNA, 120 bp, Artificial Sequence
  ENSG00000166579_30 (sequence is synthesized)
gcgagcagcccacgttgggctcggattggcattctcctgactcccgcccggaactgctaatcatcctccccctggagttcggcaaagtgtcaccaacgggctcgggttacttgtgctcga

SEQ ID NO: 534826 - DNA, 120 bp, Artificial Sequence
  ENSG00000166579_31 (sequence is synthesized)
tttgagagcctgcaccccttgttgtggaggccgcaccctctgccctacctgtttgatcagcagccgcttcttctcttcattctgctcatccctggtttgcaggtctctctcgaactgcgc

SEQ ID NO: 534827 - DNA, 120 bp, Artificial Sequence
  ENSG00000166579_32 (sequence is synthesized)
gtacaactctagaaacgctcacaatctctgaaagcagctgggattttctgccgtcctcaataattatggcacatgtgtaaaggagcagattcgacacacggtgcactctgaataggctct

SEQ ID NO: 534828 - DNA, 120 bp, Artificial Sequence
  ENSG00000166579_33 (sequence is synthesized)
tatccttgcagtggagtgttttggttgatctctgtccctgattttaccctggagaatatacatttcattaaggattttgtattaaaagcacatcctaaaacatcactatacaaattagaa

SEQ ID NO: 534829 - DNA, 120 bp, Artificial Sequence
  ENSG00000166579_34 (sequence is synthesized)
tttcccatccttgcgtatctttggtcggacggtgattctcactcttcctattgacttctactttgtgtcagcaagttcagcgtgggccccgtatgctgccgtggatctgatcagctgagg

SEQ ID NO: 534830 - DNA, 120 bp, Artificial Sequence
  ENSG00000166579_35 (sequence is synthesized)
cctgagacacaggaccaggactgttttgtcttggcaccaggtccacaggaaagccttcattcatcccctccctgtctgtgatctcatcagccagagcacagcttcacccagggaagcaga

SEQ ID NO: 534831 - DNA, 83 bp, Artificial Sequence
  ENSG00000166579_36 (sequence is synthesized)
tgcaacttccacctcccaggttcaagcggttctcaagcttcaccattcagctaatttttctatatttttagtagagacggggt

SEQ ID NO: 534832 - DNA, 69 bp, Artificial Sequence
  ENSG00000166579_37 (sequence is synthesized)
cagctaatttttgactcctggcctcaagtgatctacccgccccaggtctcccaaagtgctgagattaca

SEQ ID NO: 534833 - DNA, 120 bp, Artificial Sequence
  ENSG00000166579_38 (sequence is synthesized)
tttccttgaagtataagcaaagagtttactaagtcttatcaaaccttttactgccctttcattattatcaccgaagtcagttattctattgtgccagtggatatgaaagcttccaggaag

SEQ ID NO: 534834 - DNA, 120 bp, Artificial Sequence
  ENSG00000166579_39 (sequence is synthesized)
ttaaaggaggaaactgcttattggaaggaactttccttgaagtataagcaaagtaggcggggccatctttggcccgttttgcatgcactgattctgcctcatcattttggtcatttggag

SEQ ID NO: 534835 - DNA, 120 bp, Artificial Sequence
  ENSG00000166579_40 (sequence is synthesized)
tttttcaggtgcttaagagcagctggcgacaaaaaatagtttgaaaaaaacgcttaaagtgaatttttgaataaaatgttttctttcacggaaccaggggaaaaggtggtttagagttta

SEQ ID NO: 534836 - DNA, 120 bp, Artificial Sequence
  ENSG00000166579_41 (sequence is synthesized)
tatagctctggaaccttttttttacatatatgattcccagatctgtatcttcaagcctgccccatcactcttccttcagtcctgtcttgtgcactgggacattgccctgtggctctttgc

SEQ ID NO: 534837 - DNA, 120 bp, Artificial Sequence
  ENSG00000166579_42 (sequence is synthesized)
tgctccctgaaactgaatctgttgaatatagagtctcttctcttgcaaatcttttccccatgcacagctttgcaggcctctgaaggacttcactagacctgtcatcccatctagaaggcc

SEQ ID NO: 534838 - DNA, 120 bp, Artificial Sequence
  ENSG00000166579_43 (sequence is synthesized)
agctttcttctctctctgttctttaactttctactttttgagtcaggagagaggcgctaggtgagaccctggtggattgatgttccctctctactccacccaccttcacattaagcgttc

SEQ ID NO: 534839 - DNA, 120 bp, Artificial Sequence
  ENSG00000166579_44 (sequence is synthesized)
catttctgcccatgtagaaatttaccggttctctctttatagtctgggctgcaccacttacttttcccattagagccggcctgcattggagtgccgaagtggttgcttctgagggctgct

SEQ ID NO: 534840 - DNA, 120 bp, Artificial Sequence
  ENSG00000166579_45 (sequence is synthesized)
aggtggcctctgaccaggaggagactagaaaagggtcctggcctgggcatctggaggcagctgtggccccgacttccccatcagtggctcactaggtgagcctaggctaatggctggacc

SEQ ID NO: 534841 - DNA, 120 bp, Artificial Sequence
  ENSG00000166579_46 (sequence is synthesized)
ttctcttgctttggttgtcttggcagtggaacagtgggatgaacctgttgttccttacggtgcacttgaaaatgccagaatcccatcctcaacctgcttgaggagccatctcctagttgc

SEQ ID NO: 534842 - DNA, 120 bp, Artificial Sequence
  ENSG00000166579_47 (sequence is synthesized)
tgcttttgtacacccccgtggcccaggtgccagattcttcttggcatccaatggtgctccctttctgctgggttccgggcactgtctgcagtacaggtttaggggcttgcctgccactgt

SEQ ID NO: 534843 - DNA, 120 bp, Artificial Sequence
  ENSG00000166579_48 (sequence is synthesized)
gatgtgtgaggccaggaatctgaggttcacacgtgctgagagctgcaggcatttgtggggcctgcctggttgtccctgaggtttctaggagaagcaggtgtcagggactctgggactagc

SEQ ID NO: 534844 - DNA, 120 bp, Artificial Sequence
  ENSG00000166579_49 (sequence is synthesized)
cagacagatggagcctattatatgagggctaccgtggcaaataggatatggccttggccccagaagaggcacaggcctgtgaccttgggagagtgggaaggatgatttcaaacttgcaaa

SEQ ID NO: 534845 - DNA, 120 bp, Artificial Sequence
  ENSG00000166579_50 (sequence is synthesized)
tgtgttgaagctcaaaaatcagacctaacccagtgaggaaagagacaatctggctgtttgtcgtcgaagtaggacagtgtgcaacagggagaaatgacatttgtcagagcctttctcctg

SEQ ID NO: 534846 - DNA, 120 bp, Artificial Sequence
  ENSG00000166579_51 (sequence is synthesized)
gggctcttggtctctgtatgcgtggttggaatttaaactccacatatgtactctgagtttagtttctttagacatgaactttgtttcttccaagtaggcagggactatttgtcaagtctc

SEQ ID NO: 534847 - DNA, 120 bp, Artificial Sequence
  ENSG00000166579_52 (sequence is synthesized)
tgcatgcctgtttgtctgtgaggttatcctcaccccgtcagtgtacgaaacagctgtctctgcagggagtgtgtgtcggcattttttttttttaaggagaacctctctccatgagtctgt

SEQ ID NO: 534848 - DNA, 120 bp, Artificial Sequence
  ENSG00000166579_53 (sequence is synthesized)
atttagctccctggagccgtctgatgagtaggtgggggcagtagtgggcaggtgtggtgcagtgtggccccttgtcgtagttggctttatctcccaaattgctagtgggacaaattttcc

SEQ ID NO: 534849 - DNA, 120 bp, Artificial Sequence
  ENSG00000166579_54 (sequence is synthesized)
taggaagcgtttcaaggtggaaaggctgaagtggctcctgagagaggttccaggctgcacactccctccccctcttgctgcttcctgtggctgcgctgcatggtgcgtgagggggatgct

SEQ ID NO: 534850 - DNA, 120 bp, Artificial Sequence
  ENSG00000166579_55 (sequence is synthesized)
tggggggctccctgcatcgctgggctctgggtgcgtgatggggacgctggggggctccctgtgtcgctgggctccgggtgctgggtcctggctgcaggctattgggttgggctgggctgt

SEQ ID NO: 534851 - DNA, 120 bp, Artificial Sequence
  ENSG00000166579_56 (sequence is synthesized)
ctgcacacgagtctgcgttgaaaagcctactcatctggcgttgcttgctaaacaatttttaaaaggttatttttctccaccttattaagatattcgtgtattaatacattatatttggaa

SEQ ID NO: 534852 - DNA, 120 bp, Artificial Sequence
  ENSG00000166579_57 (sequence is synthesized)
aaattttctttttatgatatatatgatcctatgtacatatatgttggtgtgtgtatatatatatgtgtatgcgtatatataatgtatgtatatatacatttatttatacacactccccct

SEQ ID NO: 534853 - DNA, 120 bp, Artificial Sequence
  ENSG00000166579_58 (sequence is synthesized)
ccctctgtccctgctttgtggatttagctgcatggatagtaatgtctatctaaggggctatagtctagaatctagaatatatactatttgcttttttttctttcatatcattgaatctac

SEQ ID NO: 534854 - DNA, 120 bp, Artificial Sequence
  ENSG00000166579_59 (sequence is synthesized)
agagtttggtaacctgcatctttttccacttagtgttagttacattctgaatattttcccatgctattaaaaaacttgtggaatgtgtttttaatggctgtgcaatatcttattgttcag

SEQ ID NO: 534855 - DNA, 120 bp, Artificial Sequence
  ENSG00000166579_60 (sequence is synthesized)
ttgtaccattatttatttaactagttccctattgccaggcatttagacctgctttatggggaaagaatcaggactgtggcttccgtggccagtgtgcggcagttgccaaacaggtcatgt

SEQ ID NO: 534856 - DNA, 120 bp, Artificial Sequence
  ENSG00000166579_61 (sequence is synthesized)
ggtcctggttccccaggattcccaaaggctcaattctctaaccagctggtgctttccaggcagccagtgccccttgggccatcaggaccctacagcctgcgaggaatagttttagaaagc

SEQ ID NO: 534857 - DNA, 80 bp, Artificial Sequence
  ENSG00000166582_0 (sequence is synthesized)
gctgcgaggcctgcgcgccaggctgcgggagccatgcggcgatcgaggagctctgcggccgccaagctgcgcgggcagaa

SEQ ID NO: 534858 - DNA, 120 bp, Artificial Sequence
  ENSG00000166582_1 (sequence is synthesized)
gctgccttggcacccagcgccacccgcacacggcgctccgctagccaggccgggagcaagagccaggcggtggagaagccgccgtcggagaagccgcggctgaggcgctcgtcgccgcgg

SEQ ID NO: 534859 - DNA, 120 bp, Artificial Sequence
  ENSG00000166582_2 (sequence is synthesized)
cgccgcctgagctggcgttgctcccgccaccgccgccgccgccgccgactcccgcgaccccgacgtcctcggcgtccaacctggacctgggcgagcagcgggagcgctgggagacgttcc

SEQ ID NO: 534860 - DNA, 120 bp, Artificial Sequence
  ENSG00000166582_3 (sequence is synthesized)
gagcagcgggagcgctgggagacgttccagaagcggcagaagcttacctccgagggtgccgccaagctcctgctagacacctttgaataccagggcctggtgaagcacacaggaggctgc

SEQ ID NO: 534861 - DNA, 120 bp, Artificial Sequence
  ENSG00000166582_4 (sequence is synthesized)
ttgactgcaattgcagcatttgcaagaagaagcagaatagacacttcattgttccagcttctcgcttcaagctcctgaagggagctgagcacataacgacttacacgttcaatactcaca

SEQ ID NO: 534862 - DNA, 120 bp, Artificial Sequence
  ENSG00000166582_5 (sequence is synthesized)
aagcccagcataccttctgtaagagatgtggcgttcagagcttctatactccacgatcaaaccccggaggcttcggaattgccccccactgcctggatgagggcactgtgcggagtatgg

SEQ ID NO: 534863 - DNA, 120 bp, Artificial Sequence
  ENSG00000166582_6 (sequence is synthesized)
tcactgaggaattcaatggcagcgattgggagaaggccatgaaagagcacaagaccatcaagaacatgtctaaagagtgagcttctgcctctcctgccctgaaaaggaggaatgattggg

SEQ ID NO: 534864 - DNA, 120 bp, Artificial Sequence
  ENSG00000166582_7 (sequence is synthesized)
gccagcaactttgctctccctgccgtgcctcggtggtgctcctgaatgtggctgacctgggctgctggttccgttgactagggtcatcttgatctctgcagtttgctccagctaccagtt

SEQ ID NO: 534865 - DNA, 120 bp, Artificial Sequence
  ENSG00000166582_8 (sequence is synthesized)
tctttaggcagctctttgtcctccctctgcccagattttgatgtagtctaattgacatccttctcttcccaacttttgtgtgatcttttaggaaaaaaaataaatatttttaacattaaa

SEQ ID NO: 534866 - DNA, 120 bp, Artificial Sequence
  ENSG00000166582_9 (sequence is synthesized)
ttcgttttgaagtttgggcctcagcagacttgcatatatttgactgcaagtaccggaattatatatgaataataagcacatacgatggaattactcaaatggagaactgaccaggctact

SEQ ID NO: 534867 - DNA, 120 bp, Artificial Sequence
  ENSG00000166582_10 (sequence is synthesized)
aacaatagagtccagattggaaaagaagcactgtggaataacttgtgagaggattctgtgctaaattagaactttttcaaaggtggcctgaaaagaggggacttcagtttaattccagag

SEQ ID NO: 534868 - DNA, 120 bp, Artificial Sequence
  ENSG00000166582_11 (sequence is synthesized)
atggtaattctggggacgtgttttacttggagctggacttcttgtgacgtggtgatgaagaaagagggaaacctaaacttccttgtccatttttggtgtggatgtctcagagacatcagg

SEQ ID NO: 534869 - DNA, 120 bp, Artificial Sequence
  ENSG00000166582_12 (sequence is synthesized)
cctgtctgttggtcctgtgttctgagcattgcagaacctcgactgctgacttgggacccccctgggctctgctgtacctgcaaaccagaggcactgctatccaggcctttgccccagctc

SEQ ID NO: 534870 - DNA, 120 bp, Artificial Sequence
  ENSG00000166582_13 (sequence is synthesized)
ctcggccctggatggtgctgaaaggggcatcatctgtggggtcggctggctctcatggctgggccgctcaggcatagaggatgcaggtggctgctcacaatctggaatttgctctgtctt

SEQ ID NO: 534871 - DNA, 120 bp, Artificial Sequence
  ENSG00000166582_14 (sequence is synthesized)
gacttgcatatatttgactgcaagtgagtatttttttttccctaaattggcttaaaagaatttcagagttaaaatgcaatatttcaaaataatctggggagttggggtacagaggaaaca

SEQ ID NO: 534872 - DNA, 120 bp, Artificial Sequence
  ENSG00000166582_15 (sequence is synthesized)
ttggccttgggctggtaactgttgaagtcaggtgatggggacagaaaggttcattgttctatttttgttccttttatatggctcatcacagagcttcaacagcatggcccaggtgacaca

SEQ ID NO: 534873 - DNA, 120 bp, Artificial Sequence
  ENSG00000166582_16 (sequence is synthesized)
gaatttgctctgtctttctgtagttgcagcatttgcaagaagaagcagaatagacacttcattgttccagcttctcgcttcaagctcctgaaggtcagtgcttaagagcagggtcaagga

SEQ ID NO: 534874 - DNA, 120 bp, Artificial Sequence
  ENSG00000166582_17 (sequence is synthesized)
gtgcagaacccattggtgagatttacaggaccccccacccaactgttagcatgccgtctgtagcatgggaggggcctggagcatagcagggcctctcacgggctttggtttcaggttgac

SEQ ID NO: 534875 - DNA, 120 bp, Artificial Sequence
  ENSG00000166582_18 (sequence is synthesized)
aaataaaaggttgtgttattttttacctttattttttggaggcctatttggtattgtggaaacattttcaaattcagagaatcaaaaaacaataaaatcacccaaatcctgtcaactaaa

SEQ ID NO: 534876 - DNA, 120 bp, Artificial Sequence
  ENSG00000166582_19 (sequence is synthesized)
ggctgggtactgagtggaaagccttgggcagaatcttcatagaagtctagagttggggagagttggagggtatgttagtaaagggtgtatacacctggaggctccccaggccctccactc

SEQ ID NO: 534877 - DNA, 120 bp, Artificial Sequence
  ENSG00000166589_0 (sequence is synthesized)
agcctggccagagccccctggagaaggagctctcttcttgcttggcagctggaccaagggagccagtcttgggcgctggagggcctgtcctgaccatggtccctgcctggctgtggctgc

SEQ ID NO: 534878 - DNA, 120 bp, Artificial Sequence
  ENSG00000166589_1 (sequence is synthesized)
tttgtgtctccgtcccccaggctctccccaaggcccagcctgcagagctgtctgtggaagttccagaaaactatggtggaaatttccctttatacctgaccaagttgccgctgccccgtg

SEQ ID NO: 534879 - DNA, 120 bp, Artificial Sequence
  ENSG00000166589_2 (sequence is synthesized)
agggggctgaaggccagatcgtgctgtcaggggactcaggcaaggcaactgagggcccatttgctatggatccagattctggcttcctgctggtgaccagggccctggaccgagaggagc

SEQ ID NO: 534880 - DNA, 120 bp, Artificial Sequence
  ENSG00000166589_3 (sequence is synthesized)
aggcagagtaccagctacaggtcaccctggagatgcaggatggacatgtcttgtggggtccacagcctgtgcttgtgcacgtgaaggatgagaatgaccaggtgccccatttctctcaag

SEQ ID NO: 534881 - DNA, 120 bp, Artificial Sequence
  ENSG00000166589_4 (sequence is synthesized)
ccatctacagagctcggctgagccggggtaccaggcctggcatccccttcctcttccttgaggcttcagaccgggatgagccaggcacagccaactcggatcttcgattccacatcctga

SEQ ID NO: 534882 - DNA, 120 bp, Artificial Sequence
  ENSG00000166589_5 (sequence is synthesized)
gccaggctccagcccagccttccccagacatgttccagctggagcctcggctgggggctctggccctcagccccaaggggagcaccagccttgaccacgccctggagaggacctaccagc

SEQ ID NO: 534883 - DNA, 120 bp, Artificial Sequence
  ENSG00000166589_6 (sequence is synthesized)
tgttggtacaggtcaaggacatgggtgaccaggcctcaggccaccaggccactgccaccgtggaagtctccatcatagagagcacctgggtgtccctagagcctatccacctggcagaga

SEQ ID NO: 534884 - DNA, 120 bp, Artificial Sequence
  ENSG00000166589_7 (sequence is synthesized)
atctcaaagtcctatacccgcaccacatggcccaggtacactggagtgggggtgatgtgcactatcacctggagagccatcccccgggaccctttgaagtgaatgcagagggaaacctct

SEQ ID NO: 534885 - DNA, 120 bp, Artificial Sequence
  ENSG00000166589_8 (sequence is synthesized)
acgtgaccagagagctggacagagaagcccaggctgagtacctgctccaggtgcgggctcagaattcccatggcgaggactatgcggcccctctggagctgcacgtgctggtgatggatg

SEQ ID NO: 534886 - DNA, 120 bp, Artificial Sequence
  ENSG00000166589_9 (sequence is synthesized)
agaatgacaacgtgcctatctgccctccccgtgaccccacagtcagcatccctgagctcagtccaccaggtactgaagtgactagactgtcagcagaggatgcagatgcccccggctccc

SEQ ID NO: 534887 - DNA, 120 bp, Artificial Sequence
  ENSG00000166589_10 (sequence is synthesized)
ccaattcccacgttgtgtatcagctcctgagccctgagcctgaggatggggtagaggggagagccttccaggtggaccccacttcaggcagtgtgacgctgggggtgctcccactccgag

SEQ ID NO: 534888 - DNA, 120 bp, Artificial Sequence
  ENSG00000166589_11 (sequence is synthesized)
gatatcaatgatcacgcccctgagttcatcacttcccagattgggcctataagcctccctgaggatgtggagcccgggactctggtggccatgctaacagccattgatgctgacctcgag

SEQ ID NO: 534889 - DNA, 120 bp, Artificial Sequence
  ENSG00000166589_12 (sequence is synthesized)
cccgccttccgcctcatggattttgccattgagaggggagacacagaagggacttttggcctggattgggagccagactctgggcatgttagactcagactctgcaagaacctcagttat

SEQ ID NO: 534890 - DNA, 120 bp, Artificial Sequence
  ENSG00000166589_13 (sequence is synthesized)
gaggcagctccaagtcatgaggtggtggtggtggtgcagagtgtggcgaagctggtggggccaggcccaggccctggagccaccgccacggtgactgtgctagtggagagagtgatgcca

SEQ ID NO: 534891 - DNA, 120 bp, Artificial Sequence
  ENSG00000166589_14 (sequence is synthesized)
ccccccaagttggaccaggagagctacgaggccagtgtccccatcagtgccccagccggctctttcctgctgaccatccagccctccgaccccatcagccgaaccctcaggttctcccta

SEQ ID NO: 534892 - DNA, 120 bp, Artificial Sequence
  ENSG00000166589_15 (sequence is synthesized)
gtcaatgactcagagggctggctctgcattgagaaattctccggggaggtgcacaccgcccagtccctgcagggcgcccagcctggggacacctacacggtgcttgtggaggcccaggat

SEQ ID NO: 534893 - DNA, 120 bp, Artificial Sequence
  ENSG00000166589_16 (sequence is synthesized)
acagatgagccgagactgagcgcttctgcacccctggtgatccacttcctaaaggcccctcctgccccagccctgactcttgcccctgtgccctcccaatacctctgcacaccccgccaa

SEQ ID NO: 534894 - DNA, 120 bp, Artificial Sequence
  ENSG00000166589_17 (sequence is synthesized)
gaccatggcttgatcgtgagtggacccagcaaggaccccgatctggccagtgggcacggtccctacagcttcacccttggtcccaaccccacggtgcaacgggattggcgcctccagact

SEQ ID NO: 534895 - DNA, 120 bp, Artificial Sequence
  ENSG00000166589_18 (sequence is synthesized)
ctcaatggttcccatgcctacctcaccttggccctgcattgggtggagccacgtgaacacataatccccgtggtggtcagccacaatgcccagatgtggcagctcctggttcgagtgatc

SEQ ID NO: 534896 - DNA, 120 bp, Artificial Sequence
  ENSG00000166589_19 (sequence is synthesized)
gtgtgtcgctgcaacgtggaggggcagtgcatgcgcaaggtgggccgcatgaagggcatgcccacgaagctgtcggcagtgggcatccttgtaggcaccctggtagcaataggaatcttc

SEQ ID NO: 534897 - DNA, 120 bp, Artificial Sequence
  ENSG00000166589_20 (sequence is synthesized)
ctcatcctcattttcacccactggaccatgtcaaggaagaaggacccggatcaaccagcagacagcgtgcccctgaaggcgactgtctgaatggcccaggcagctctagctgggagcttg

SEQ ID NO: 534898 - DNA, 120 bp, Artificial Sequence
  ENSG00000166589_21 (sequence is synthesized)
gcctctggctccatctgagtcccctgggagagagcccagcacccaagatccagcaggggacaggacagagtagaagcccctccatctgccctggggtggaggcaccatcaccatcaccag

SEQ ID NO: 534899 - DNA, 120 bp, Artificial Sequence
  ENSG00000166589_22 (sequence is synthesized)
gcatgtctgcagagcctggacaccaactttatggactgcccatgggagtgctccaaatgtcagggtgtttgcccaataataaagccccagagaactgggctgggccctatgggattggta

SEQ ID NO: 534900 - DNA, 120 bp, Artificial Sequence
  ENSG00000166589_23 (sequence is synthesized)
tatacccgcaccacatggcccagtacctgctccaggtgcgggctcagaattcccatggcgaggactatgcggcccctctggagctgcacgtgctggtgatggatgagaatgacaacgtgc

SEQ ID NO: 534901 - DNA, 120 bp, Artificial Sequence
  ENSG00000166589_24 (sequence is synthesized)
gagcttcctcccagaggccctcactggcaacccccagccccaagcaggagaggcagatatgaagctgggttcaatgttcctctctgagaatggatctactcctccggtgggcaagtctgg

SEQ ID NO: 534902 - DNA, 120 bp, Artificial Sequence
  ENSG00000166589_25 (sequence is synthesized)
catctgcctcccctctctgatcattctcctagattgacacacaaaatctcccagccctgtcctttagccactggagggcctctcagggtgtcagcttcagggactggtatagggccgggg

SEQ ID NO: 534903 - DNA, 120 bp, Artificial Sequence
  ENSG00000166589_26 (sequence is synthesized)
aggtggcaggaggaccaggggctgcccctggggaaggagtgctggagtgaatgggccactggagccaggtgtggaggacactgaacactgctcaggacagagagctggccctggggtggg

SEQ ID NO: 534904 - DNA, 120 bp, Artificial Sequence
  ENSG00000166589_27 (sequence is synthesized)
gagccccgggaggcaggtttcaactctgagctgggctgtgatacagggcagacccagcagcagtgagctccgccaaagtcagggatgtccacagtggcatggggatgatgacaggtggag

SEQ ID NO: 534905 - DNA, 120 bp, Artificial Sequence
  ENSG00000166589_28 (sequence is synthesized)
agaagcatggagggagcatggcaggggagtctataaggcgaggctcatgggctgcgggagcagcccagggacctcagagctcaccctccccctggcaacacctggccagctcagcactgc

SEQ ID NO: 534906 - DNA, 120 bp, Artificial Sequence
  ENSG00000166592_0 (sequence is synthesized)
agtgcgggctgagaaggcggtggctgcagcagcagcggcggcggaaaccctaaagtccgagtccggactacgagtgcgtggcctcctaatccggatcctagtcctgagcgtgtctgtgtg

SEQ ID NO: 534907 - DNA, 120 bp, Artificial Sequence
  ENSG00000166592_1 (sequence is synthesized)
tctgtgtgcgagtggacggtcccggacgcgatgaccctgaacggcggcggcagcggagcgggcgggagccgcggtgggggccaggagcgcgagcgccgtcggggcagcacaccctggggc

SEQ ID NO: 534908 - DNA, 120 bp, Artificial Sequence
  ENSG00000166592_2 (sequence is synthesized)
agcatgccggtggacgagcgcgacctgcaggcggcgctgaccccgggtgccctgacggcggccgcggccgggacggggacccagggtcccaggctggactggcccgaggactccgaggac

SEQ ID NO: 534909 - DNA, 120 bp, Artificial Sequence
  ENSG00000166592_3 (sequence is synthesized)
cgaggactccgaggactcgctcagctcagggggcagcgactcagacgagagcgtttacaaggtgctgctgctgggggcgcccggcgtgggcaagagcgccctggcgcgcatcttcggcgg

SEQ ID NO: 534910 - DNA, 120 bp, Artificial Sequence
  ENSG00000166592_4 (sequence is synthesized)
tgtggaggacgggcctgaagcagaggcagcagggcacacctatgatcgctccattgtagtggacggagaagaggcatcactcatggtctacgacatttgggagcaggacgggggccgctg

SEQ ID NO: 534911 - DNA, 120 bp, Artificial Sequence
  ENSG00000166592_5 (sequence is synthesized)
gttgcccggccactgcatggccatgggggatgcctatgtcattgtgtactcagtgacggacaagggcagcttcgagaaggcctcagaactgcgggtccagctgcggcgtgcacggcaaac

SEQ ID NO: 534912 - DNA, 120 bp, Artificial Sequence
  ENSG00000166592_6 (sequence is synthesized)
tcgtgggcaacaagagcgacctggtgcgctctcgtgaggtctcggtggatgagggccgggcctgcgcggtggtctttgactgcaagttcattgagacatcagcggcattgcaccacaatg

SEQ ID NO: 534913 - DNA, 120 bp, Artificial Sequence
  ENSG00000166592_7 (sequence is synthesized)
tccaggcgctgtttgaaggtgtcgtgcgccagatacgcctgcgcagggacagcaaagaagccaacgcacgacggcaagcaggcacccggaggcgagagagccttggcaaaaaggcgaagc

SEQ ID NO: 534914 - DNA, 120 bp, Artificial Sequence
  ENSG00000166592_8 (sequence is synthesized)
gcttcttgggccgcatcgtagctcgtaacagccgcaagatggcctttcgcgccaaatccaagtcctgccacgacctctcggttctctaggtcccacccgctcccactatggtgggagacg

SEQ ID NO: 534915 - DNA, 120 bp, Artificial Sequence
  ENSG00000166592_9 (sequence is synthesized)
aacggaagggttggtgggctggcccagccaactgccccgggtgcctcagagcaggctcagactctgggtccctcggagctgccagccgggcacccccaacctcatggtcatggacagata

SEQ ID NO: 534916 - DNA, 120 bp, Artificial Sequence
  ENSG00000166592_10 (sequence is synthesized)
gacagtgctgccctgcgaagtggctctcaggggccagtgagggctgggcccacagagatgcatgcgcaggctcatatgcgtcccaagcagccgcagcgcagccgccgggcaggcctgcgt

SEQ ID NO: 534917 - DNA, 120 bp, Artificial Sequence
  ENSG00000166592_11 (sequence is synthesized)
gccgggagaggactctgccttttttcacagcccgggtgtgcctgccctggagggaggctcttcagtgcggtagctatttgtttacatgcagatttttgtaataaaggctatttcctgata

SEQ ID NO: 534918 - DNA, 120 bp, Artificial Sequence
  ENSG00000166592_12 (sequence is synthesized)
ttgtagtggacggagaagaggcatcactcatggtctacgacatttgggagcaggtagggtgcaagcagagacccagggcaggggagggaggagtgagttgggttagaggtctgggagtgc

SEQ ID NO: 534919 - DNA, 120 bp, Artificial Sequence
  ENSG00000166595_0 (sequence is synthesized)
agcgcacgcctgctaggatcagcggtggtggttccgcgatggtaggcggcggcggggtcggcggcggcctcctggagaatgccaaccccctcatctaccagcgctctggggagcggcctg

SEQ ID NO: 534920 - DNA, 120 bp, Artificial Sequence
  ENSG00000166595_1 (sequence is synthesized)
tgacggcaggcgaggaggacgagcaggttcccgacagcatcgacgcacgcgagatcttcgatctgattcgctccatcaatgacccggagcatccactgacgctagaggagttgaacgtag

SEQ ID NO: 534921 - DNA, 120 bp, Artificial Sequence
  ENSG00000166595_2 (sequence is synthesized)
ccgcactgcagcatggccacccttattggtctgtccatcaaggtcaagcttctgcgctcccttcctcagcgtttcaagatggacgtgcacattactccggggacccatgcctcagagcat

SEQ ID NO: 534922 - DNA, 120 bp, Artificial Sequence
  ENSG00000166595_3 (sequence is synthesized)
gcagtgaacaagcaacttgcagataaggagcgggtggcagctgccctggagaacacccacctcttggaggttgtgaatcagtgcctgtcagcccgctcctgagcctggcctttgacccct

SEQ ID NO: 534923 - DNA, 120 bp, Artificial Sequence
  ENSG00000166595_4 (sequence is synthesized)
cagcctgcatactggtatcctggtcccagctcctgccagggctgttaccgttgttttcttgaatcactcacaatgagaaactaacattttgctttttgtaataaagttaatttatattca

SEQ ID NO: 534924 - DNA, 120 bp, Artificial Sequence
  ENSG00000166595_5 (sequence is synthesized)
gagcagtgatatcgagcagctggtggagccgcatcccagcagggcgttcctggcagagggttctaagtgggcaagggcgcagagtcccttttccttcacttcccacatctgattcgctcc

SEQ ID NO: 534925 - DNA, 120 bp, Artificial Sequence
  ENSG00000166595_6 (sequence is synthesized)
tgagaccaggcattgagggtctactgctgaggatggggactgggagagcatgaacatggataggacatcagagtggggcctggaaggatccccattagcagagaggaaactgggaggaag

SEQ ID NO: 534926 - DNA, 120 bp, Artificial Sequence
  ENSG00000166596_0 (sequence is synthesized)
agaagacgctgcagccactagggaggagagcaaagtaatcagaacctcccaaggatggataacaaaatttcgccggaggcccaagtggcggagctggaacttgacgccgtgatcggcttc

SEQ ID NO: 534927 - DNA, 120 bp, Artificial Sequence
  ENSG00000166596_1 (sequence is synthesized)
aatggacatgtgcccactggtctcaaatgccatcctgaccaggagcatatgatttatcctcttggttgcacagtcctcattcaggcaataaatactaaagagcagaacttcctacagggt

SEQ ID NO: 534928 - DNA, 120 bp, Artificial Sequence
  ENSG00000166596_2 (sequence is synthesized)
catggcaacaacgtctcctgcttggccatctccaggtctggagagtacatcgcctccggacaagtcacattcatggggttcaaggcagacatcattttgtgggattataagaacagagag

SEQ ID NO: 534929 - DNA, 120 bp, Artificial Sequence
  ENSG00000166596_3 (sequence is synthesized)
ctgcttgctcggctgtcccttcacaaaggcaaaattgaagctctggccttttctccaaatgatttgtacttggtatcactaggaggcccagatgacggaagtgtggtggtgtggagcata

SEQ ID NO: 534930 - DNA, 120 bp, Artificial Sequence
  ENSG00000166596_4 (sequence is synthesized)
gccaagagagatgccatctgtggcagccctgcagccggcctcaatgttggcaatgccaccaatgtgatcttctccaggtgccgggatgagatgtttatgactgctggaaatgggacaatt

SEQ ID NO: 534931 - DNA, 120 bp, Artificial Sequence
  ENSG00000166596_5 (sequence is synthesized)
cgagtatgggaattggatcttccaaatagaaaaatctggccaactgagtgccaaacaggacagttgaaaagaatagtcatgagtattggagtggatgatgatgatagctttttctacctt

SEQ ID NO: 534932 - DNA, 120 bp, Artificial Sequence
  ENSG00000166596_6 (sequence is synthesized)
ggcaccacgactggagatattctaaaaatgaaccccaggactaaactgctgacagatgttgggcctgcgaaggacaaattcagtttgggagtgtcagctatcaggtgcctgaagatgggg

SEQ ID NO: 534933 - DNA, 120 bp, Artificial Sequence
  ENSG00000166596_7 (sequence is synthesized)
ggtttgttggtgggctctggagccggactgctggtcttctgtaaaagccctggctacaaacccatcaagaagattcagttacaaggcggcatcacttctatcacacttcgaggagaagga

SEQ ID NO: 534934 - DNA, 120 bp, Artificial Sequence
  ENSG00000166596_8 (sequence is synthesized)
caccagtttctcgtaggaacagaagaatcgcacatttatcgtgtcagcttcacggatttcaaagagacgctcatagcgacttgtcactttgatgctgtcgaggatattgtctttccattt

SEQ ID NO: 534935 - DNA, 120 bp, Artificial Sequence
  ENSG00000166596_9 (sequence is synthesized)
gctgagctatttgcaacctgtgccaagaaggatatcagggtgtggcacacatcatccaacagggagctgctgcggatcaccgtgcccaacatgacctgccacggcatcgacttcatgagg

SEQ ID NO: 534936 - DNA, 120 bp, Artificial Sequence
  ENSG00000166596_10 (sequence is synthesized)
gacggcaaaagcatcatttcagcatggaacgacggtaaaatccgagccttcgccccagagacaggccgactgatgtatgtcattaacaatgctcacaggatcggcgtcaccgccatcgcc

SEQ ID NO: 534937 - DNA, 120 bp, Artificial Sequence
  ENSG00000166596_11 (sequence is synthesized)
accaccagtgactgtaaaagggtcatcagtggcggtggggaaggggaggtgagggtatggcagataggctgtcagacccagaagctggaggaggccctgaaggaacacaagtcatcagtg

SEQ ID NO: 534938 - DNA, 120 bp, Artificial Sequence
  ENSG00000166596_12 (sequence is synthesized)
tcctgcattagggtgaagaggaacaacgaggagtgtgtcaccgccagcaccgatgggacttgtatcatttgggaccttgtgcgtctcaggaggaatcagatgatactagccaacacctta

SEQ ID NO: 534939 - DNA, 120 bp, Artificial Sequence
  ENSG00000166596_13 (sequence is synthesized)
ttccagtgtgtgtgctatcaccctgaggagttccagatcatcaccagcggaacagacagaaagattgcttactgggaagtatttgatgggacagtaatcagagaattggaaggttccctg

SEQ ID NO: 534940 - DNA, 120 bp, Artificial Sequence
  ENSG00000166596_14 (sequence is synthesized)
tctgggtcgataaatggcatggatatcacacaggaaggggtgcactttgtcacaggtggaaatgaccatctggtcaaagtttgggattataatgagggtgaagtgactcacgttggggtg

SEQ ID NO: 534941 - DNA, 120 bp, Artificial Sequence
  ENSG00000166596_15 (sequence is synthesized)
ggacacagtggcaacatcacacgcatccgcataagtccaggaaatcaatatattgttagtgtaagtgccgatggagccattttgcgatggaagtacccatatacctcctgaagctgatga

SEQ ID NO: 534942 - DNA, 120 bp, Artificial Sequence
  ENSG00000166596_16 (sequence is synthesized)
gatgtctctgagccttggcgttgcacgcagtcctgttgaagactgagtttagataactccaacactagtcttcatttctcacagctctgtttttgttcttgagtcaatttttctcttttt

SEQ ID NO: 534943 - DNA, 120 bp, Artificial Sequence
  ENSG00000166596_17 (sequence is synthesized)
ctttatagaatgcattttatattcttaaattgcatattaaaattgaagtatgttcaagaataatttgtgcagactctaattagaacttttaacattttgaataaattcttagttgttggt

SEQ ID NO: 534944 - DNA, 120 bp, Artificial Sequence
  ENSG00000166596_18 (sequence is synthesized)
tggagtaagtattaatttaagtattaagtaacaattagcacacgttcctgttagcagtgctgaccaaggtgtttgtgtgtgtgtacatggggctggggataggaaagtggggtatagaca

SEQ ID NO: 534945 - DNA, 66 bp, Artificial Sequence
  ENSG00000166596_19 (sequence is synthesized)
gtgtacatggggctggggataggaaagtggggtatagacataggggatgttgattgaagaagctca

SEQ ID NO: 534946 - DNA, 120 bp, Artificial Sequence
  ENSG00000166596_20 (sequence is synthesized)
ttttcttgcacagaaaacatggtcattctgatctgggggaacacgtctttagtcctggataaataccttacatcatagtttttgtgattttgtactcattaaaagttctcttcactggaa

SEQ ID NO: 534947 - DNA, 120 bp, Artificial Sequence
  ENSG00000166596_21 (sequence is synthesized)
actggagtagaattgctgtgcccaaaccggttatcactttgactaaattcagacagaaaggcaatagagctcctcatctctcagcactgtacttcatcaatacattaaaaatctacacac

SEQ ID NO: 534948 - DNA, 120 bp, Artificial Sequence
  ENSG00000166596_22 (sequence is synthesized)
ctggctacaaacccatcaatgtgtgtacattcccattatgatgaagataaactcaaagtaattatcaccaggaagattcagttacaaggcggcatcacttctatcacacttcgaggagaa

SEQ ID NO: 534949 - DNA, 81 bp, Artificial Sequence
  ENSG00000166596_23 (sequence is synthesized)
tgggacaattcgagtatgggaattggatcttccaaatagaaaaatctggccaactgagtgccaaacaggacagttgaaaag

SEQ ID NO: 534950 - DNA, 120 bp, Artificial Sequence
  ENSG00000166596_24 (sequence is synthesized)
agcaaagtaatcagaacctcccaaggatggataacaaaatttcgccggaggcccaagtggcggagctggaacttgacgccgtgatcggcttcaatggtcctgttctcctgaaactgtttt

SEQ ID NO: 534951 - DNA, 120 bp, Artificial Sequence
  ENSG00000166596_25 (sequence is synthesized)
tagtgaataaactaccaactcaagcaaaacaataattacattcaagcatacaaacttttctctaacatggaagcagtagtgttaccttggcagatatttggagtacgggagttgcctgtg

SEQ ID NO: 534952 - DNA, 120 bp, Artificial Sequence
  ENSG00000166598_0 (sequence is synthesized)
agtgggcggaccgcgcggctggaggtgtgaggatccgaacccaggggtggggggtggaggcggctcctgcgatcgaaggggacttgagactcaccggccgcacgccatgagggccctgtg

SEQ ID NO: 534953 - DNA, 120 bp, Artificial Sequence
  ENSG00000166598_1 (sequence is synthesized)
ggtgctgggcctctgctgcgtcctgctgaccttcgggtcggtcagagctgacgatgaagttgatgtggatggtacagtagaagaggatctgggtaaaagtagagaaggatcaaggacgga

SEQ ID NO: 534954 - DNA, 120 bp, Artificial Sequence
  ENSG00000166598_2 (sequence is synthesized)
tgatgaagtagtacagagagaggaagaagctattcagttggatggattaaatgcatcacaaataagagaacttagagagaagtcggaaaagtttgccttccaagccgaagttaacagaat

SEQ ID NO: 534955 - DNA, 120 bp, Artificial Sequence
  ENSG00000166598_3 (sequence is synthesized)
gatgaaacttatcatcaattcattgtataaaaataaagagattttcctgagagaactgatttcaaatgcttctgatgctttagataagataaggctaatatcactgactgatgaaaatgc

SEQ ID NO: 534956 - DNA, 120 bp, Artificial Sequence
  ENSG00000166598_4 (sequence is synthesized)
tctttctggaaatgaggaactaacagtcaaaattaagtgtgataaggagaagaacctgctgcatgtcacagacaccggtgtaggaatgaccagagaagagttggttaaaaaccttggtac

SEQ ID NO: 534957 - DNA, 120 bp, Artificial Sequence
  ENSG00000166598_5 (sequence is synthesized)
catagccaaatctgggacaagcgagtttttaaacaaaatgactgaagcacaggaagatggccagtcaacttctgaattgattggccagtttggtgtcggtttctattccgccttccttgt

SEQ ID NO: 534958 - DNA, 120 bp, Artificial Sequence
  ENSG00000166598_6 (sequence is synthesized)
agcagataaggttattgtcacttcaaaacacaacaacgatacccagcacatctgggagtctgactccaatgaattttctgtaattgctgacccaagaggaaacactctaggacggggaac

SEQ ID NO: 534959 - DNA, 120 bp, Artificial Sequence
  ENSG00000166598_7 (sequence is synthesized)
gacaattacccttgtcttaaaagaagaagcatctgattaccttgaattggatacaattaaaaatctcgtcaaaaaatattcacagttcataaactttcctatttatgtatggagcagcaa

SEQ ID NO: 534960 - DNA, 120 bp, Artificial Sequence
  ENSG00000166598_8 (sequence is synthesized)
gactgaaactgttgaggagcccatggaggaagaagaagcagccaaagaagagaaagaagaatctgatgatgaagctgcagtagaggaagaagaagaagaaaagaaaccaaagactaaaaa

SEQ ID NO: 534961 - DNA, 120 bp, Artificial Sequence
  ENSG00000166598_9 (sequence is synthesized)
agttgaaaaaactgtctgggactgggaacttatgaatgatatcaaaccaatatggcagagaccatcaaaagaagtagaagaagatgaatacaaagctttctacaaatcattttcaaagga

SEQ ID NO: 534962 - DNA, 120 bp, Artificial Sequence
  ENSG00000166598_10 (sequence is synthesized)
aagtgatgaccccatggcttatattcactttactgctgaaggggaagttaccttcaaatcaattttatttgtacccacatctgctccacgtggtctgtttgacgaatatggatctaaaaa

SEQ ID NO: 534963 - DNA, 120 bp, Artificial Sequence
  ENSG00000166598_11 (sequence is synthesized)
gtgcgccgtgtattcatcacagacgacttccatgatatgatgcctaaatacctcaattttgtcaagggtgtggtggactcagatgatctccccttgaatgtttcccgcgagactcttcag

SEQ ID NO: 534964 - DNA, 120 bp, Artificial Sequence
  ENSG00000166598_12 (sequence is synthesized)
caacataaactgcttaaggtgattaggaagaagcttgttcgtaaaacgctggacatgatcaagaagattgctgatgataaatacaatgatactttttggaaagaatttggtaccaacatc

SEQ ID NO: 534965 - DNA, 120 bp, Artificial Sequence
  ENSG00000166598_13 (sequence is synthesized)
aagcttggtgtgattgaagaccactcgaatcgaacacgtcttgctaaacttcttaggttccagtcttctcatcatccaactgacattactagcctagaccagtatgtggaaagaatgaag

SEQ ID NO: 534966 - DNA, 120 bp, Artificial Sequence
  ENSG00000166598_14 (sequence is synthesized)
gaaaaacaagacaaaatctacttcatggctgggtccagcagaaaagaggctgaatcttctccatttgttgagcgacttctgaaaaagggctatgaagttatttacctcacagaacctgtg

SEQ ID NO: 534967 - DNA, 120 bp, Artificial Sequence
  ENSG00000166598_15 (sequence is synthesized)
gatgaatactgtattcaggcccttcccgaatttgatgggaagaggttccagaatgttgccaaggaaggagtgaagttcgatgaaagtgagaaaactaaggagagtcgtgaagcagttgag

SEQ ID NO: 534968 - DNA, 120 bp, Artificial Sequence
  ENSG00000166598_16 (sequence is synthesized)
aaagaatttgagcctctgctgaattggatgaaagataaagcccttaaggacaagattgaaaaggctgtggtgtctcagcgcctgacagaatctccgtgtgctttggtggccagccagtac

SEQ ID NO: 534969 - DNA, 120 bp, Artificial Sequence
  ENSG00000166598_17 (sequence is synthesized)
ggatggtctggcaacatggagagaatcatgaaagcacaagcgtaccaaacgggcaaggacatctctacaaattactatgcgagtcagaagaaaacatttgaaattaatcccagacacccg

SEQ ID NO: 534970 - DNA, 120 bp, Artificial Sequence
  ENSG00000166598_18 (sequence is synthesized)
ctgatcagagacatgcttcgacgaattaaggaagatgaagatgataaaacagttttggatcttgctgtggttttgtttgaaacagcaacgcttcggtcagggtatcttttaccagacact

SEQ ID NO: 534971 - DNA, 120 bp, Artificial Sequence
  ENSG00000166598_19 (sequence is synthesized)
aaagcatatggagatagaatagaaagaatgcttcgcctcagtttgaacattgaccctgatgcaaaggtggaagaagagcccgaagaagaacctgaagagacagcagaagacacaacagaa

SEQ ID NO: 534972 - DNA, 120 bp, Artificial Sequence
  ENSG00000166598_20 (sequence is synthesized)
gacacagagcaagacgaagatgaagaaatggatgtgggaacagatgaagaagaagaaacagcaaaggaatctacagctgaaaaagatgaattgtaaattatactctcaccatttggatcc

SEQ ID NO: 534973 - DNA, 120 bp, Artificial Sequence
  ENSG00000166598_21 (sequence is synthesized)
tgtgtggagagggaatgtgaaatttacatcatttctttttgggagagacttgttttggatgccccctaatccccttctcccctgcactgtaaaatgtgggattatgggtcacaggaaaaa

SEQ ID NO: 534974 - DNA, 120 bp, Artificial Sequence
  ENSG00000166598_22 (sequence is synthesized)
gtgggttttttagttgaattttttttaacattcctcatgaatgtaaatttgtactatttaactgactattcttgatgtaaaatcttgtcatgtgtataaaaataaaaaagatcccaaata

SEQ ID NO: 534975 - DNA, 120 bp, Artificial Sequence
  ENSG00000166598_23 (sequence is synthesized)
cagaaaagaggtgagatgaactcataagtgttgtcagccattctggaaggtagctagggatttatagccaactcttgagggggagaaaaggaaaacttaattgtgtaactggagtagtta

SEQ ID NO: 534976 - DNA, 120 bp, Artificial Sequence
  ENSG00000166598_24 (sequence is synthesized)
taaggcctggtcagtcactgacaggaaggtcatttatattctctgaacctcttaattcttcacctgtaaaatggagtttttaataatgtataaacatagcagctgctaggataaacaaat

SEQ ID NO: 534977 - DNA, 120 bp, Artificial Sequence
  ENSG00000166598_25 (sequence is synthesized)
ttatgacctgcttctgtgtttatgatcttaagtgataaagtcttagacagttgaaagacaattgctcaatgaccttacctgttgatattaatttatatgacttgatttctttccctaaga

SEQ ID NO: 534978 - DNA, 120 bp, Artificial Sequence
  ENSG00000166598_26 (sequence is synthesized)
catcacagacgacttccatgatatgatgcctaaatacctcaattttgtcaagggtgtggtaagtatctgaagtttgggagaaggggtgattgttgtgggggtctggcagtgtagagtgtt

SEQ ID NO: 534979 - DNA, 120 bp, Artificial Sequence
  ENSG00000166598_27 (sequence is synthesized)
attcattggacgttttcccttagaggccaaggccgcccaggcaaaggggcggtcccacgtgtgaggggcccgcggagccatttgattggagaaaagctgcaaaccctgaccaatcggaag

SEQ ID NO: 534980 - DNA, 120 bp, Artificial Sequence
  ENSG00000166598_28 (sequence is synthesized)
gagccacgcttcgggcatcggtcaccgcacctggacagctccgattggtggacttccgccccccctcacgaatcctcattgggtgccgtgggtgcgtggtgcggcgcgattgggtcggtc

SEQ ID NO: 534981 - DNA, 120 bp, Artificial Sequence
  ENSG00000166598_29 (sequence is synthesized)
aaaagcacctgtagcagttctccccaacacagcactgagcacaagtctaggcagtcatcatggtctcctctgctcgactctgcccagaccttccagttctccgaccgaaagacttgtgat

SEQ ID NO: 534982 - DNA, 120 bp, Artificial Sequence
  ENSG00000166598_30 (sequence is synthesized)
ccagttttgctacaaagaacaaagtggttgacaacagtgacagtaattgctggagcaaaaccaaaagacataggtaaagaacatataaatgttaataaagcacactgctttcaacacaca

SEQ ID NO: 534983 - DNA, 120 bp, Artificial Sequence
  ENSG00000166598_31 (sequence is synthesized)
aaaactatattgcagaatactagcaccataaactttgtaagactttatagaagatactttcagttggatttgtattcattaactgtgtacaccgagtaagtttaaaaatgggatttctgt

SEQ ID NO: 534984 - DNA, 120 bp, Artificial Sequence
  ENSG00000166598_32 (sequence is synthesized)
cagttgaacaatattttaaaatttggcctcttgggacttattgacagttttgaagtcctcactgtggagcataaatgagtatgactttgctttttagtagaggaaagttgggattttttt

SEQ ID NO: 534985 - DNA, 120 bp, Artificial Sequence
  ENSG00000166598_33 (sequence is synthesized)
ttttctggcaattttaagaaccgagtatttccagtgtaatgttaaaggtagcctactgctgtgctaacataatgagacggtatatcagttatattttataaaggtttccattttaacccc

SEQ ID NO: 534986 - DNA, 120 bp, Artificial Sequence
  ENSG00000166598_34 (sequence is synthesized)
tattagtatcagcatttaagagaaagttattttgtgaacaaattaagctgcagctggttactttgtaaccattagaatggtaaaaatttaattaatgtaattaaattattgggagaaagc

SEQ ID NO: 534987 - DNA, 120 bp, Artificial Sequence
  ENSG00000166603_0 (sequence is synthesized)
aacactcaaagcaacgctcaggctggaaacagaagcttccgagaggcagccgatgtgagcatgtgcgcacagattcgtctcccaatggcatggcagcttcaaggaaaattattttgaaca

SEQ ID NO: 534988 - DNA, 120 bp, Artificial Sequence
  ENSG00000166603_1 (sequence is synthesized)
gacttgaatgcataagattaaagttaaagcagaagtgagaacaagaaagcaaagagcagactctttcaactgagaatgaatattttgaagcccaagattttaaagtgatgatgattagag

SEQ ID NO: 534989 - DNA, 120 bp, Artificial Sequence
  ENSG00000166603_2 (sequence is synthesized)
tcgtacctaaaagagactaaaaactccatgtcaagctctggacttgtgacatttactcacagcaggcatggcaattttagcctcacaactttcagacagataaagacttggaggaaataa

SEQ ID NO: 534990 - DNA, 120 bp, Artificial Sequence
  ENSG00000166603_3 (sequence is synthesized)
ctgagacgactccctgacccaggaggttaaatcaattcagggggacactggaattctcctgccagcatggtgaactccacccaccgtgggatgcacacttctctgcacctctggaaccgc

SEQ ID NO: 534991 - DNA, 120 bp, Artificial Sequence
  ENSG00000166603_4 (sequence is synthesized)
agcagttacagactgcacagcaatgccagtgagtcccttggaaaaggctactctgatggagggtgctacgagcaactttttgtctctcctgaggtgtttgtgactctgggtgtcatcagc

SEQ ID NO: 534992 - DNA, 120 bp, Artificial Sequence
  ENSG00000166603_5 (sequence is synthesized)
ttgttggagaatatcttagtgattgtggcaatagccaagaacaagaatctgcattcacccatgtactttttcatctgcagcttggctgtggctgatatgctggtgagcgtttcaaatgga

SEQ ID NO: 534993 - DNA, 120 bp, Artificial Sequence
  ENSG00000166603_6 (sequence is synthesized)
tcagaaaccattgtcatcaccctattaaacagtacagatacggatgcacagagtttcacagtgaatattgataatgtcattgactcggtgatctgtagctccttgcttgcatccatttgc

SEQ ID NO: 534994 - DNA, 120 bp, Artificial Sequence
  ENSG00000166603_7 (sequence is synthesized)
ctatcttctatgctctccagtaccataacattatgacagttaagcgggttgggatcatcataagttgtatctgggcagcttgcacggtttcaggcattttgttcatcatttactcagata

SEQ ID NO: 534995 - DNA, 120 bp, Artificial Sequence
  ENSG00000166603_8 (sequence is synthesized)
gtagtgctgtcatcatctgcctcatcaccatgttcttcaccatgctggctctcatggcttctctctatgtccacatgttcctgatggccaggcttcacattaagaggattgctgtcctcc

SEQ ID NO: 534996 - DNA, 120 bp, Artificial Sequence
  ENSG00000166603_9 (sequence is synthesized)
ccggcactggtgccatccgccaaggtgccaatatgaagggagcgattaccttgaccatcctgattggcgtctttgttgtctgctgggccccattcttcctccacttaatattctacatct

SEQ ID NO: 534997 - DNA, 120 bp, Artificial Sequence
  ENSG00000166603_10 (sequence is synthesized)
cttgtcctcagaatccatattgtgtgtgcttcatgtctcactttaacttgtatctcatactgatcatgtgtaattcaatcatcgatcctctgatttatgcactccggagtcaagaactga

SEQ ID NO: 534998 - DNA, 120 bp, Artificial Sequence
  ENSG00000166603_11 (sequence is synthesized)
ggaaaaccttcaaagagatcatctgttgctatcccctgggaggcctttgtgacttgtctagcagatattaaatggggacagagcacgcaatataggaacatgcataagagactttttcac

SEQ ID NO: 534999 - DNA, 120 bp, Artificial Sequence
  ENSG00000166603_12 (sequence is synthesized)
tcttaccctacctgaatattgtacttctgcaacagctttctcttccgtgtagggtactggttgagaatatccattgtgtaaatttaagcctatgatttttaatgagaaaaaatgcccagt

SEQ ID NO: 535000 - DNA, 120 bp, Artificial Sequence
  ENSG00000166603_13 (sequence is synthesized)
ctctgtattatttccaatgtcatgctacttttttggccataaaatatgaatctatgttataggttgtaggcactgtggatttacaaaaagaaaagtccttattaaaagcttaacaatgtc

SEQ ID NO: 535001 - DNA, 120 bp, Artificial Sequence
  ENSG00000166619_0 (sequence is synthesized)
cctgcggcgtcggtggcgagctgaggtggaggcaggctgcggcagacggcgacagtggcggcggcgccatggcagggcttgcaggatccctgctgccttggtgatcccgggctgacagcc

SEQ ID NO: 535002 - DNA, 120 bp, Artificial Sequence
  ENSG00000166619_1 (sequence is synthesized)
agagagcacagcggctcagctcctggagagtgagggttgaagaaagcggagggcagccgcctgcgcccgctggctcccattaggtcggttcctgcagcggtgcccggcagccttggtgaa

SEQ ID NO: 535003 - DNA, 120 bp, Artificial Sequence
  ENSG00000166619_2 (sequence is synthesized)
ggccctgcccggcagagatcatgtattgcctccagtggctgctgcccgtcctcctcatccccaagcccctcaaccccgccctgtggttcagccactccatgttcatgggcttctacctgc

SEQ ID NO: 535004 - DNA, 120 bp, Artificial Sequence
  ENSG00000166619_3 (sequence is synthesized)
tcagcttcctcctggaacggaagccttgcacaatttgtgccttggttttcctggcagccctgttccttatctgctatagctgctggggaaactgtttcctgtaccactgctccgattccc

SEQ ID NO: 535005 - DNA, 120 bp, Artificial Sequence
  ENSG00000166619_4 (sequence is synthesized)
cgcttccagaatcggcgcatgatcccggcgttgtgggcacctaacggcctgccctgttagctttccaaggaagcagaagacgggaggggaggcattgacataggtcataaagcattggag

SEQ ID NO: 535006 - DNA, 120 bp, Artificial Sequence
  ENSG00000166619_5 (sequence is synthesized)
tttcaaatcccgcagcctcgcgggtgtcacattcctgacggcgcctttttggcctgtgatgttttatccttacaatgtgaataatggcactgaccggtgcttttattgtaaagtcctata

SEQ ID NO: 535007 - DNA, 120 bp, Artificial Sequence
  ENSG00000166619_6 (sequence is synthesized)
gtcgtgggtggtcttgtggttgtgtgtgttctgtccccatctaggtcctggctggccgcatgaccacccctctcgcctcattactgtgaggagtctgggtccatcctggtcagctgcccc

SEQ ID NO: 535008 - DNA, 120 bp, Artificial Sequence
  ENSG00000166619_7 (sequence is synthesized)
aatgtgacctggggcagataaaatgccagtctcattgtcacctctgtgacccctccttgtcagggtctccttccttcccagaatgttactgactcctcagtccctcttctggtttccctt

SEQ ID NO: 535009 - DNA, 120 bp, Artificial Sequence
  ENSG00000166619_8 (sequence is synthesized)
agagcctcgctttttcatccttctttccttgttcagcaggctagacagaaacatgtcttgactgttagttgtccacaaatcttcagtattttctccacttcatttttaagaaaggaagca

SEQ ID NO: 535010 - DNA, 120 bp, Artificial Sequence
  ENSG00000166619_9 (sequence is synthesized)
acagatagatgttgctctttcacctgggtgtctgggctcaagctttcccgcccagcctcacttcctttgcccttcctcctgcctttctcaactgtcccaaggagggggcctcattgtgtc

SEQ ID NO: 535011 - DNA, 120 bp, Artificial Sequence
  ENSG00000166619_10 (sequence is synthesized)
tcccgtgcatgctctgcagcattgaagtatggtgtgttcacgtagttctagcagtccccagctgagtgagtgggagagtacctgtgtgtttcgtaacggccttgatccccttgatagatg

SEQ ID NO: 535012 - DNA, 120 bp, Artificial Sequence
  ENSG00000166619_11 (sequence is synthesized)
tttggatattttttggtgtgccctgtgtgtgtgtgtgtacaaatacatgtgtatattccttttaaagaagctttatcgaacgtggtctgattttgaggtttagcaatagctagctatata

SEQ ID NO: 535013 - DNA, 120 bp, Artificial Sequence
  ENSG00000166619_12 (sequence is synthesized)
tggtaggtgccgctacagtttttatttagcatggggattgcagagtgaccagcacactggactccgaggtggttcagacaagacagaggggagcagtggccatcatcctcccgccaggag

SEQ ID NO: 535014 - DNA, 120 bp, Artificial Sequence
  ENSG00000166619_13 (sequence is synthesized)
cttcttcgttcctgcgcatatagactgtacattatgaagaatacccaggaagactttgtgactgtcacttgctgctttttctgcgcttcagtaacaagtgttggcaaacgagactttctc

SEQ ID NO: 535015 - DNA, 120 bp, Artificial Sequence
  ENSG00000166619_14 (sequence is synthesized)
ctggcccctgcctgctggagatcagcatgcctgtcctttcagtctgatccatccatctctctcttgcctgaggggaaagagagatgggccaggcagagaacagaactggaggcagtccat

SEQ ID NO: 535016 - DNA, 120 bp, Artificial Sequence
  ENSG00000166619_15 (sequence is synthesized)
ctagggaatgggactgtgaggccatacttgtgaaacgtctggactgctattctagagcttttatttggtgtgttcgttgcacagctgtttgaaatgtttaataaagctttataaacttta

SEQ ID NO: 535017 - DNA, 120 bp, Artificial Sequence
  ENSG00000166619_16 (sequence is synthesized)
acataaagccagagacaaggctgaacaggcggcagggccatttggtgagacagtcagctgaccccgtgtagaaagagccctgactcactggggagtgggagaggaagacaagtccgaggc

SEQ ID NO: 535018 - DNA, 120 bp, Artificial Sequence
  ENSG00000166619_17 (sequence is synthesized)
cttctgggtcaccttaggcgtcgccgggtccccgtcactggggttttccttccgcataccccgggaaggcagggcgcccctgtccggcttcaggtgattgccgtgattggacctagcctg

SEQ ID NO: 535019 - DNA, 120 bp, Artificial Sequence
  ENSG00000166619_18 (sequence is synthesized)
atattgtcccttctgggtcaccttaggcgtcgccgggtccccgtcactggggttttccttccgcataccccgggaaggcagggcgcccctgtccggcttcaggatccctgctgccttggt

SEQ ID NO: 535020 - DNA, 120 bp, Artificial Sequence
  ENSG00000166619_19 (sequence is synthesized)
aggatgggtcctcggccggctcgactagaagactaagggggcgtctccccggcttcctgcggcgtcggtggcgagctgaggtggaggcaggctgcggcagacggcgacagtggcggcggc

SEQ ID NO: 535021 - DNA, 120 bp, Artificial Sequence
  ENSG00000166619_20 (sequence is synthesized)
gccatggcagggcttgcaggggcgcgagttgggaaccctctcccacccgaaaccccgtcagacttacctgcagcagcacgcggaagatgtaccagccgatgatgagcagttcagccgagg

SEQ ID NO: 535022 - DNA, 120 bp, Artificial Sequence
  ENSG00000166619_21 (sequence is synthesized)
ctgagtactgaagggtgtgccaccaggggacctgccctcatctgactctgggaggcttccctgaggaggtgatcctccaaaccaagatagaaagaagagaacaaagttgaccacaaagca

SEQ ID NO: 535023 - DNA, 120 bp, Artificial Sequence
  ENSG00000166619_22 (sequence is synthesized)
aattggaaagcattctgagcaaagggcctgactagagaggaaggagaggtgagaccagagagacaagcagttctggctatacagagcattggagaccagggctgagctcctgccaacatc

SEQ ID NO: 535024 - DNA, 120 bp, Artificial Sequence
  ENSG00000166619_23 (sequence is synthesized)
ctgagagcgagggaagcaggggatgtgacctgccctggtatgttgctgtaatctgcctgggactctggctgttctgtggagaaatcattagagcagcatgggtagacagggaggctagtt

SEQ ID NO: 535025 - DNA, 120 bp, Artificial Sequence
  ENSG00000166619_24 (sequence is synthesized)
cggaagctttgttgtagtggacaggatttggacatgatctgcatattctggttagtcttggtgctggatggaatgaagaggggctggaagagggcagcgttcaggatgacccctgagctt

SEQ ID NO: 535026 - DNA, 120 bp, Artificial Sequence
  ENSG00000166619_25 (sequence is synthesized)
ctggtttgccttactggtgagatggcaatgccattttcagagctggggagccctggaaaggggccaggtctgtaaggtagaccccaagtccagtggtaaaagctgagacatcccaatgca

SEQ ID NO: 535027 - DNA, 120 bp, Artificial Sequence
  ENSG00000166619_26 (sequence is synthesized)
gatggagaagaaacagctgaaggcacagctccagagcacaaggtgagaaattatggagaccagtccagggctccagggggctcccaaatggaaatatggatccagatgttgacaggcttc

SEQ ID NO: 535028 - DNA, 120 bp, Artificial Sequence
  ENSG00000166619_27 (sequence is synthesized)
tggggcatttttaggcgaggggatggctgaggacaaaaaaatcaagcccaaggagcaccaacatttggagattagaaaagagaagaagaatcctctgagagcactgaaaagaaagagccg

SEQ ID NO: 535029 - DNA, 120 bp, Artificial Sequence
  ENSG00000166619_28 (sequence is synthesized)
ggaggtgtctcagcagaaagacagggtggtcagcagtgggtgtgtgcagagaggtcaggaggaccagggcaatccctgaactactccagtgtgcacctgcacaacctccatggtgcctct

SEQ ID NO: 535030 - DNA, 120 bp, Artificial Sequence
  ENSG00000166619_29 (sequence is synthesized)
ggaattgggtagcatggtggccctgctgatgagcaccccaaggggccattgggggacctctgagaatctctgccagagcagtttgggtgggagtcgattaaggaaagaagcagcaagatc

SEQ ID NO: 535031 - DNA, 120 bp, Artificial Sequence
  ENSG00000166619_30 (sequence is synthesized)
caggacttttaatcttaaaagagagagaaatgctggcagatgaacattctgaggataaggagcctgagtaattgagcgattagggatggagacaattagtgagatgagctcccaaagggg

SEQ ID NO: 535032 - DNA, 120 bp, Artificial Sequence
  ENSG00000166619_31 (sequence is synthesized)
ctgggatcaactatggaggtggataaattagtttggggcaataatgtgtatttgactgaatggggcaaaattaaattatgtaccttttagagagtaacttgatctccatgttcttttggg

SEQ ID NO: 535033 - DNA, 120 bp, Artificial Sequence
  ENSG00000166619_32 (sequence is synthesized)
agcttttatctgacctgtgtaccgactatagttctaattagcaccagttttatcctgtcttttggctgggattatgtcttattattttgtgtgtttctcagcacctagcaacaggtagta

SEQ ID NO: 535034 - DNA, 120 bp, Artificial Sequence
  ENSG00000166619_33 (sequence is synthesized)
agctccttgggtgccgaatcagtattttctgccttggaatcaaatgtcagaagtcaacactcaaacttcttttgaccaaaaagattctacgacaattatccagaagttacaatgcaagga

SEQ ID NO: 535035 - DNA, 120 bp, Artificial Sequence
  ENSG00000166619_34 (sequence is synthesized)
agaagaattggatgttaagtcttgcgtagcaggggttatggggagtggatcaagacaaagtagaggtatctgctcccctcatccttgtaagctccatgccatttatccatgctcacattg

SEQ ID NO: 535036 - DNA, 120 bp, Artificial Sequence
  ENSG00000166619_35 (sequence is synthesized)
atcatctcatacgagcttcacatttccccacaagaaatggagcgtaaccccattacctactcatagaggaggaactggaagccagagagggagatgccttattgacacagagcacaagtg

SEQ ID NO: 535037 - DNA, 120 bp, Artificial Sequence
  ENSG00000166619_36 (sequence is synthesized)
gcaggagctggcttcagacctcagtccatccggtgtggcagtccctcttcccaggaccaggtggagctggagagaaggaggaagaggagtctgtgaggtccagatggagatgctcggcag

SEQ ID NO: 535038 - DNA, 120 bp, Artificial Sequence
  ENSG00000166619_37 (sequence is synthesized)
gccctttccaaaggtgggaggtgaggtcggcctggaaccctactggatgcttaagtgtcctgccgcactgctgatgaaagcaggtccccaccgcagtgtatatacattgtgtgtttgcat

SEQ ID NO: 535039 - DNA, 120 bp, Artificial Sequence
  ENSG00000166619_38 (sequence is synthesized)
aaacgtctatagttgtttgaaatgtttaaatctttaacccatctgagatgtgttttcatgtatggtgtgacacagagctctaatttgctctttttgcagatatccagtttgctaagcacc

SEQ ID NO: 535040 - DNA, 120 bp, Artificial Sequence
  ENSG00000166619_39 (sequence is synthesized)
atttattgttccaacaccatcttttctctcaattccctgtctagactccggttctgttgatctatttgtctatttctgagccaatagtacatattaatgagcaaagcttaataaagtgtc

SEQ ID NO: 535041 - DNA, 120 bp, Artificial Sequence
  ENSG00000166619_40 (sequence is synthesized)
ccaatagtacatattaatgagcaaagcttaataaagtgtcttatggcttgataagataagcactccacccttcccccaaggcctttattccttttttttctttttgagacggagtcttgc

SEQ ID NO: 535042 - DNA, 120 bp, Artificial Sequence
  ENSG00000166619_41 (sequence is synthesized)
ttaaaattgtcttggtcatattgcacatttactttttcaggtacattttataatcagcttgtcaaagttctgtgaacaaaatgtctgttggaagtttgagaagaattgcattgaagggga

SEQ ID NO: 535043 - DNA, 120 bp, Artificial Sequence
  ENSG00000166619_42 (sequence is synthesized)
aattaacatctttagaatataagttcttcccatctgtggacatggtgtctgtctctttttaatcagaattgtatttgttttgttttgttttgtttttaatgccttttaataaaggttggt

SEQ ID NO: 535044 - DNA, 120 bp, Artificial Sequence
  ENSG00000166619_43 (sequence is synthesized)
tgcttttgtcataaagatttttcacagttcttaataggtttattcctgaaaaccttattagttttgttgcttttgtgagtggaaaaactttcccttttttcattttgctttccaaatttt

SEQ ID NO: 535045 - DNA, 120 bp, Artificial Sequence
  ENSG00000166619_44 (sequence is synthesized)
aatcagtttactaatcactatgcttcattcacagacacacacacagcaaatgtgctttgtccctgggcacacaaatgaaaacacagcacacatgtaaatcagagctaattggctgaaaat

SEQ ID NO: 535046 - DNA, 120 bp, Artificial Sequence
  ENSG00000166619_45 (sequence is synthesized)
gaattagaatttttgaattaaattttaattatacaagtaatacatgaatacattttcctttaaataaaattagagcattttaggtaaagaagtctctactggcctccccagcctgacctc

SEQ ID NO: 535047 - DNA, 120 bp, Artificial Sequence
  ENSG00000166619_46 (sequence is synthesized)
aggccccttccccactttagaggcagctgctgttaggcatttgctgttgatccaaaatgttctcctatgcgcattgaaacatgtcctgtgttctattgttgcttttgtttgcttgcatag

SEQ ID NO: 535048 - DNA, 120 bp, Artificial Sequence
  ENSG00000166619_47 (sequence is synthesized)
atgtggtggtgtacacactggaggtgctgctcctgagctcagggcaccttacgggactctcctcatgtcgcgtgtcacctgccgcagctggctccactgcccctttcagctggccgctgg

SEQ ID NO: 535049 - DNA, 120 bp, Artificial Sequence
  ENSG00000166619_48 (sequence is synthesized)
caaccagaactgattgtgctatgatttatttagttgttgcttattgatcgactattaaaaggcttccagtcttgtttcaataagacaaacctgtaacagcatccttgtacatgccacttt

SEQ ID NO: 535050 - DNA, 120 bp, Artificial Sequence
  ENSG00000166619_49 (sequence is synthesized)
tgctcatgtacaagtgtttttctggagcagatacttagaaacagaattgatgggtcatagagtctacacatcttaaattctaatagtaactgctaaaatgttcttcaaagtacctttctg

SEQ ID NO: 535051 - DNA, 120 bp, Artificial Sequence
  ENSG00000166619_50 (sequence is synthesized)
atttaatttcatgccagcagtatgtgtgtccatttctccagaccatctccaagttttacattttaaccaatctggtgggtgaaaaataatatcttgttttagtttgcatttttctgaatt

SEQ ID NO: 535052 - DNA, 120 bp, Artificial Sequence
  ENSG00000166619_51 (sequence is synthesized)
accaggatggctgaagtctgtgtctcctatccatttatatttccttctctgcattacttgtccaaatcttttgcccatttcttttttttagggtacgttgtcttttccttattgattttt

SEQ ID NO: 535053 - DNA, 120 bp, Artificial Sequence
  ENSG00000166619_52 (sequence is synthesized)
tagaagttctttatgtattttgtatactttatgtgtattgcaaatattttctgtattgtgattcttgtcatttaattgtattgtgtctttggagaaatcttaaattttgatacagtcaaa

SEQ ID NO: 535054 - DNA, 120 bp, Artificial Sequence
  ENSG00000166619_53 (sequence is synthesized)
cttaccgcgtaggtcgctaaatgcctgggtgatcgtccgcagcggtcgcccgccgcgccccgagtctttgttccctggcaggcgcgggcgcactagggagggtcagcgcgaggaggacgg

SEQ ID NO: 535055 - DNA, 120 bp, Artificial Sequence
  ENSG00000166619_54 (sequence is synthesized)
cgcagggaatgggcagggggcgcgcggtgccggcagcggcacttgggcaggcaaggatcgcggcaatcggaataggacgggtccgggaagcggcaatcgcgacgcagtcttgcgggttct

SEQ ID NO: 535056 - DNA, 120 bp, Artificial Sequence
  ENSG00000166619_55 (sequence is synthesized)
gatctcagatacctggaaccactgacttttgaacttttcattacttgaaataaatgttcttgttgcttagccacttttaggtgatatattacgttctggtgaaagcattcttcctaatac

SEQ ID NO: 535057 - DNA, 120 bp, Artificial Sequence
  ENSG00000166619_56 (sequence is synthesized)
aagctgagagcttacagctaggagacaacctccaggagcagagatcacacactctcgggcagaaaaacagcttctgtattcttccctgtttaccattctggcatcaatttcaagtgctca

SEQ ID NO: 535058 - DNA, 120 bp, Artificial Sequence
  ENSG00000166619_57 (sequence is synthesized)
atgctgcaacaacccaaatcctgcaaagctctgactgaatcaggaaaaagtgaccttggtagctagtctccaaagatggccaccaccaatacttgccttcctgcgatatatatcatactc

SEQ ID NO: 535059 - DNA, 120 bp, Artificial Sequence
  ENSG00000166619_58 (sequence is synthesized)
cttgtatcaggaagagaagtgtaattccctccccatgaatctaggctggccttagtgactttcttggccaatagaatatagcagaaggcacattctgggatttgtaagactaggtcgcag

SEQ ID NO: 535060 - DNA, 120 bp, Artificial Sequence
  ENSG00000166619_59 (sequence is synthesized)
tcaagaactcatcttgcagcatggaggaatcgtgatgatggctgcagcccccagaaggtgaacttggcaggagctggctgagatgatttttctgctgatggtgaaatgtgctggcagagt

SEQ ID NO: 535061 - DNA, 120 bp, Artificial Sequence
  ENSG00000166619_60 (sequence is synthesized)
atctgtaggagggatacaggaaggattggcgcccttcgtatgcacggaaggaatgagctctacggagaagtggttggaatatgcttggggatagttttctgctggacaggtcgtttcgac

SEQ ID NO: 535062 - DNA, 120 bp, Artificial Sequence
  ENSG00000166619_61 (sequence is synthesized)
ttcctgcggcgtcggtggcgagctgaggtggaggcaggctgcggcagacggcgacagtggcggcggcgccatggcagggcttgcagacttacctgcagcagcacgcggaagatgtaccag

SEQ ID NO: 535063 - DNA, 120 bp, Artificial Sequence
  ENSG00000166634_0 (sequence is synthesized)
atggactctcttgttacagcaaacaccaaattttgctttgatctttttcaagagataggcaaagatgatcgtcataaaaacatatttttctctcccctgagcctctcagctgcccttggt

SEQ ID NO: 535064 - DNA, 120 bp, Artificial Sequence
  ENSG00000166634_1 (sequence is synthesized)
atggtacgcttgggtgctagaagtgacagtgcacatcagattgatgaggtactacacttcaacgaattttcccagaatgaaagcaaagaacctgacccttgtctgaaaagcaacaaacaa

SEQ ID NO: 535065 - DNA, 120 bp, Artificial Sequence
  ENSG00000166634_2 (sequence is synthesized)
aaagtgctggctgacagctctctggaggggcagaaaaaaacgacagagcctctggatcagcaggctgggtccttaaacaatgagagcggactggtcagctgctactttgggcagcttctc

SEQ ID NO: 535066 - DNA, 120 bp, Artificial Sequence
  ENSG00000166634_3 (sequence is synthesized)
tccaaattagacaggatcaagactgattacacactgagtattgccaacaggctttatggagagcaggaattcccaatctgtcaggaatacttagatggtgtgattcaattttaccacacg

SEQ ID NO: 535067 - DNA, 120 bp, Artificial Sequence
  ENSG00000166634_4 (sequence is synthesized)
acgattgaaagtgttgatttccaaaaaaaccctgaaaaatccagacaagagattaacttctgggttgaatgtcaatcccaaggtaaaatcaaggaactcttcagcaaggacgctattaat

SEQ ID NO: 535068 - DNA, 120 bp, Artificial Sequence
  ENSG00000166634_5 (sequence is synthesized)
gtggatgcacctttctgtctaaatgcgaatgaaaacaagagtgtgaagatgatgacgcaaaaaggcctctacagaattggcttcatagaggaggtgaaggcacagatcctggaaatgagg

SEQ ID NO: 535069 - DNA, 120 bp, Artificial Sequence
  ENSG00000166634_6 (sequence is synthesized)
tacaccaaggggaagctcagcatgttcgtgctgctgccatctcactctaaagataacctgaagggtctggaagagcttgaaaggaaaatcacctatgaaaaaatggtggcctggagcagc

SEQ ID NO: 535070 - DNA, 120 bp, Artificial Sequence
  ENSG00000166634_7 (sequence is synthesized)
tcagaaaacatgtcagaagaatcggtggtcctgtccttcccccggttcaccctggaagacagctatgatctcaattccattttacaagacatgggcattacggatatctttgatgaaacg

SEQ ID NO: 535071 - DNA, 120 bp, Artificial Sequence
  ENSG00000166634_8 (sequence is synthesized)
agggctgatcttactggaatctctccaagtcccaatttgtacttgtcaaaaattatccacaaaacctttgtggaggtggatgaaaacggtacccaggcagctgcagccactggggctgtt

SEQ ID NO: 535072 - DNA, 120 bp, Artificial Sequence
  ENSG00000166634_9 (sequence is synthesized)
gtctcggaaaggtcactacgatcttgggtggagtttaatgccaaccacccttttctctttttcattagacacaacaaaacccaaaccattctcttttatggcagggtctgctctccttaa

SEQ ID NO: 535073 - DNA, 120 bp, Artificial Sequence
  ENSG00000166664_0 (sequence is synthesized)
caggccgccacatagctcccgccaagtcctcggtgccccttgccattttccagccgcgctcccacgagggtcacggcggcggggagaggtggagccgcgagagctcggccgggggccccg

SEQ ID NO: 535074 - DNA, 120 bp, Artificial Sequence
  ENSG00000166664_1 (sequence is synthesized)
cctggtggtcgcggccatgacagcggctcgggacaggctccttttccgcgcccctcccgccggaggtgaggggaagatgtccatgtccgggttcaaggccaaaccgaagttactggcctc

SEQ ID NO: 535075 - DNA, 120 bp, Artificial Sequence
  ENSG00000166664_2 (sequence is synthesized)
tatcttccaggagaaccaggagccacagccgcggctcacgccccaccgcaacattaagattacaagtggacacctgagtcagcaggacctggaatcccagatgagagagcttatctacac

SEQ ID NO: 535076 - DNA, 120 bp, Artificial Sequence
  ENSG00000166664_3 (sequence is synthesized)
gactcagatcttgttgtcacccccattattgacaatccaaaggtgcagaaagcactctgacaaataatgaaacaaccaccatcggttaaatttgatgcaaaaatattgcatctaccagca

SEQ ID NO: 535077 - DNA, 120 bp, Artificial Sequence
  ENSG00000166664_4 (sequence is synthesized)
ttttcagttccaattgctaatccagcatttgtggatagctgcaaactgcgatattgctgatgagcgctttgacgccacattccacactaacgtgttggtgaattcttctgggcattgcca

SEQ ID NO: 535078 - DNA, 120 bp, Artificial Sequence
  ENSG00000166664_5 (sequence is synthesized)
gtacctgcctccaggcatattcaagagttcctgctacatcgatgtacgctggtttccctttgatgtgcagcactgcaaactgaagtttgggtcctggtcttacggaggctggtccttgga

SEQ ID NO: 535079 - DNA, 120 bp, Artificial Sequence
  ENSG00000166664_6 (sequence is synthesized)
tctgcagatgcaggaggcagatatcagtggctatatccccaatggagaatgggacctagtgggaatccccggcaagaggagtgaaaggttctatgagtgctgcaaagagccctaccctga

SEQ ID NO: 535080 - DNA, 120 bp, Artificial Sequence
  ENSG00000166664_7 (sequence is synthesized)
tgtcaccttcacagtgaccatgcgccgcaggacgctctactatggcctcaacctgctgatcccctgtgtgctcatctccgccctcgccctgctggtgttcctgcttcctgcagattccgg

SEQ ID NO: 535081 - DNA, 120 bp, Artificial Sequence
  ENSG00000166664_8 (sequence is synthesized)
ggagaagatttccctggggataacagtcttactctctcttaccgtcttcatgctgctcgtggctgagatcatgcccgcaacatccgattcggtaccattgatagcccagtacttcgccag

SEQ ID NO: 535082 - DNA, 120 bp, Artificial Sequence
  ENSG00000166664_9 (sequence is synthesized)
caccatgatcatcgtgggcctctcggtggtggtgacggtgatcgtgctgcagtaccaccaccacgaccccgacgggggcaagatgcccaagtggaccagagtcatccttctgaactggtg

SEQ ID NO: 535083 - DNA, 120 bp, Artificial Sequence
  ENSG00000166664_10 (sequence is synthesized)
cgcgtggttcctgcgaatgaagaggcccggggaggacaaggtgcgcccggcctgccagcacaagcagcggcgctgcagcctggccagtgtggagatgagtgccgtggcgccgccgcccgc

SEQ ID NO: 535084 - DNA, 120 bp, Artificial Sequence
  ENSG00000166664_11 (sequence is synthesized)
cagcaacgggaacctgctgtacatcggcttccgcggcctggacggcgtgcactgtgtcccgacccccgactctggggtagtgtgtggccgcatggcctgctcccccacgcacgatgagca

SEQ ID NO: 535085 - DNA, 120 bp, Artificial Sequence
  ENSG00000166664_12 (sequence is synthesized)
cctcctgcacggcgggcaaccccccgagggggacccggacttggccaagatcctggaggaggtccgctacattgccaaccgcttccgctgccaggacgaaagcgaggcggtctgcagcga

SEQ ID NO: 535086 - DNA, 120 bp, Artificial Sequence
  ENSG00000166664_13 (sequence is synthesized)
gtggaagttcgccgcctgtgtggtggaccgcctgtgcctcatggccttctcggtcttcaccatcatctgcaccatcggcatcctgatgtcggctcccaacttcgtggaggccgtgtccaa

SEQ ID NO: 535087 - DNA, 120 bp, Artificial Sequence
  ENSG00000166664_14 (sequence is synthesized)
agactttgcgtaaccacgcctggttctgtacatgtggaaaactcacagatgggcaaggcctttggcttggcgagatttgggggtgctaatccaggacagcattacacgccacaactccag

SEQ ID NO: 535088 - DNA, 120 bp, Artificial Sequence
  ENSG00000166664_15 (sequence is synthesized)
tgttcccttctggctgtcagtcgtgttgcttacggtttctttgttactttaggtagtagaatctcagcactttgtttcatattctcagatgggctgatagatatccttggcacatccgta

SEQ ID NO: 535089 - DNA, 120 bp, Artificial Sequence
  ENSG00000166664_16 (sequence is synthesized)
ccatcggtcagcagggccactgagtagtcattttgcccattagcccactgcctggaaagcccttcggagagctccccatggctcctcaccaccgagacagttggttttgcatgtctgcat

SEQ ID NO: 535090 - DNA, 120 bp, Artificial Sequence
  ENSG00000166664_17 (sequence is synthesized)
gaaggtctacctgaaaattcaacatttgctttttgcttgtgtacaaacccagattgaagctaaaataaaccagactcactaaatcctttccaataattgactggtggaaggaaaacaaaa

SEQ ID NO: 535091 - DNA, 120 bp, Artificial Sequence
  ENSG00000166664_18 (sequence is synthesized)
aacaaaaactaaaaacctcttagcttttctgcaattcaactttttatttttatttttatttctatcaaagacggtagagagaaacagcttgatgctgtttctacatcaaaaaaaaaaaaa

SEQ ID NO: 535092 - DNA, 120 bp, Artificial Sequence
  ENSG00000166664_19 (sequence is synthesized)
aaaaagacagactgttggtcttactaaggatgtttttaccagcctgcctgacttctgcaaacctaccctgtcaaggagatcaaagggacgcaggtttctgtttattctgaacaagggcca

SEQ ID NO: 535093 - DNA, 120 bp, Artificial Sequence
  ENSG00000166664_20 (sequence is synthesized)
ggccccgcggagtgtctttggtggatcccagataactcctaggtgctgctctcagacactgaggagttgagcaaatctgttctattctgcagaacccataggacaaataagagttctact

SEQ ID NO: 535094 - DNA, 120 bp, Artificial Sequence
  ENSG00000166664_21 (sequence is synthesized)
agaattaacagcccaaaagaatagctacagctaagtgaagccacttacgtgggctttaaaaaaataatgtgttagctgattcacatgcactggagttaattagtcttagaaatgtgtgca

SEQ ID NO: 535095 - DNA, 120 bp, Artificial Sequence
  ENSG00000166664_22 (sequence is synthesized)
tccatacaaatgcacaacataaagtgaacatattcctaggccctttctgcctgtgtcagggccaggaagtagaggctgggaactcttctggtccccagtatggcaggcgccagggagggg

SEQ ID NO: 535096 - DNA, 120 bp, Artificial Sequence
  ENSG00000166664_23 (sequence is synthesized)
atggtgtggcccatcccttctctggatacctggccagtggcaggcagcagggaggagctggccgaccctcagtgactgacaagccagcaattctgagttctggcctttgggagtctgcct

SEQ ID NO: 535097 - DNA, 120 bp, Artificial Sequence
  ENSG00000166664_24 (sequence is synthesized)
gctccaagccagtccaccccagctgcagccccaaaagctggctcaaagtccttgggtggattcactggagatgggcaacttaaaacaagagaaactttaatttttaaacctaagtgatga

SEQ ID NO: 535098 - DNA, 120 bp, Artificial Sequence
  ENSG00000166664_25 (sequence is synthesized)
taatgagatcagagggtaattcaccaagaaagacctctcctgttccattgtgtcatccaacaactgctcagagctcaaaattatagaaggcttctgagcccctagagatttttaatttgc

SEQ ID NO: 535099 - DNA, 120 bp, Artificial Sequence
  ENSG00000166664_26 (sequence is synthesized)
ttctaatccctgaggtgggaacatcatgagggaagatttgattttcagagttaaataaattgtatgtgcttttccagccatctggctcactcatttctgggtaatgcacatgactttgtt

SEQ ID NO: 535100 - DNA, 120 bp, Artificial Sequence
  ENSG00000166664_27 (sequence is synthesized)
tgcactggaggaagatggaagcttgcgtgtgtgcggtgtgtgtgtgtgtgtaagtgtgaggtaccttgtgtgtgacaagagacctcacttacgagaaagttggtggatcaggacattcca

SEQ ID NO: 535101 - DNA, 120 bp, Artificial Sequence
  ENSG00000166664_28 (sequence is synthesized)
gcctcaggcggcttggagcaggatcattcctcagcaggcattccttccacatgctatggatgaaccatgcacaagattttcggttttttttttctgttttgatatataaaaggaatgctt

SEQ ID NO: 535102 - DNA, 120 bp, Artificial Sequence
  ENSG00000166664_29 (sequence is synthesized)
catttcttatcattatcccaaaattgatccctcccacatttttgctttaaaaagaaacctttttggttttgtattttatacaggaacacaaaatgcaaacaagttgtgcatattttggac

SEQ ID NO: 535103 - DNA, 120 bp, Artificial Sequence
  ENSG00000166664_30 (sequence is synthesized)
tctcaaataactactctgtcctttaataaagtaataataaggaatagatgtgcacatagttagaaaagtatgagtggttaaaaacaacagtctcccatactgcctgttttctctctcaga

SEQ ID NO: 535104 - DNA, 120 bp, Artificial Sequence
  ENSG00000166664_31 (sequence is synthesized)
ggggaccactaatgagcttctaagggcatttctagaaaggaagaaaagaagataagaggccaaagaaggagggacgggggttatggagagagaccttccctttccagcactaacgctctg

SEQ ID NO: 535105 - DNA, 120 bp, Artificial Sequence
  ENSG00000166664_32 (sequence is synthesized)
tgaagggcgctgcaccttgcattcttcatgtggtgttttgtcttagaggtcgtcccataataacatataaagatctacctcattcctcctagtagctgcttagcattccattatctcagc

SEQ ID NO: 535106 - DNA, 120 bp, Artificial Sequence
  ENSG00000166664_33 (sequence is synthesized)
ggactatcatttatttgaatagccttttattggtgaacatatggatacttccagtttttatttttatatacaaatctataattggcatacttgtacatacatcttgacatagttttgtga

SEQ ID NO: 535107 - DNA, 120 bp, Artificial Sequence
  ENSG00000166664_34 (sequence is synthesized)
ctaaaacggtataaattccaacttagaaatggaattgctgggtttaaggctacatgtatttaaaattttgatagctattgccagattatcttctagaaactgatcgaaggatgtaactcc

SEQ ID NO: 535108 - DNA, 120 bp, Artificial Sequence
  ENSG00000166664_35 (sequence is synthesized)
atcaagagtacaataaaaggcccaatttctcagctttctataatagcactgggtattttcaaacttaatgtttttcccaatataattggtgaaacatgatatttacgaatattattctga

SEQ ID NO: 535109 - DNA, 120 bp, Artificial Sequence
  ENSG00000166664_36 (sequence is synthesized)
ttttggtttattttgtgtataaaatgggacatcttttaaaatttttttgtagttttaattttgatacatttatatattttacccagttcctaattgggttatttggctttttcttaattt

SEQ ID NO: 535110 - DNA, 120 bp, Artificial Sequence
  ENSG00000166664_37 (sequence is synthesized)
gctcatgcactttgggacatttttgtcttatgtctttaaaatatttttatcatttgtctttcgatgttatttattgatttccttatttattggcatagagtttaaatttttatgttgtca

SEQ ID NO: 535111 - DNA, 120 bp, Artificial Sequence
  ENSG00000166664_38 (sequence is synthesized)
atttgtgagtatttttctttgtcgatcgtgggatttgtttccagtttttaaaagccttcctcattctgagattataaatagacttactcgcattttcttctgaaactttatggttttatt

SEQ ID NO: 535112 - DNA, 120 bp, Artificial Sequence
  ENSG00000166664_39 (sequence is synthesized)
ggtttaccttcacatcttcagactccctggaattcatttgttgcaggacatgagggaaaaatccatactttttcctcgaaatggtggtcagcagtatcaataaatatgtaataatgcatt

SEQ ID NO: 535113 - DNA, 120 bp, Artificial Sequence
  ENSG00000166664_40 (sequence is synthesized)
tctaaaatacagtcatagtgttttccccagttgttcaaaatgcagccttatttgtaaactaaatttctttaagtgtttggttctgtttctgttctatttatctctatgaatgcctttcat

SEQ ID NO: 535114 - DNA, 120 bp, Artificial Sequence
  ENSG00000166664_41 (sequence is synthesized)
ttctaaagcattattcatactaatatcagtattttcaagtcaacactcccatcaactctgaatctctctctcatatgaatcttttttcaattagagtcacaatgaatttacagattgagt

SEQ ID NO: 535115 - DNA, 120 bp, Artificial Sequence
  ENSG00000166664_42 (sequence is synthesized)
cttcctattcaaaagcatgaaatcttgtgtttaagtctaattttatgtaacttagtagtgttttatgattttgttcactaaggtgctttgaatttatagtttatttctagatgttttatc

SEQ ID NO: 535116 - DNA, 120 bp, Artificial Sequence
  ENSG00000166664_43 (sequence is synthesized)
atttggctatcattttcaatggaatgatttattccactttattttctattttatcccattgtataagaaagtagttggtttttatgtatgaatgttataatcaaccacaaattgtgattc

SEQ ID NO: 535117 - DNA, 120 bp, Artificial Sequence
  ENSG00000166664_44 (sequence is synthesized)
ctacttgtttctaaggtatacttttgacttctcctttccaatgtgtctcttatttctttcttgtatctagttgatttgagatcagtgttgagtcacagtgattcaggtggcatgcttatc

SEQ ID NO: 535118 - DNA, 120 bp, Artificial Sequence
  ENSG00000166664_45 (sequence is synthesized)
ttgttcgtgacatcagtgggacgttttaatgtctcagcgtttaacttgtatgaagacatgtattttccttgccataataaaaaagtatctgtgtgttctcaaactattaagactctctgg

SEQ ID NO: 535119 - DNA, 120 bp, Artificial Sequence
  ENSG00000166664_46 (sequence is synthesized)
ggaaaatgtagatgttagatttttgtcaaagccttctcagtgtccagagggattatcagaaggtcttttcctttgctctagtagtatgtttaattatattaatagaatacttaagaccaa

SEQ ID NO: 535120 - DNA, 120 bp, Artificial Sequence
  ENSG00000166664_47 (sequence is synthesized)
atcattagtgtattcctgagatgttctttacttattagtatcatgactttggttatcaatatttataattaagattcatcattctacatcttgcttttatgtgttttttgtccagattta

SEQ ID NO: 535121 - DNA, 120 bp, Artificial Sequence
  ENSG00000166664_48 (sequence is synthesized)
actttatgctgacttaaaggaagaaatattataaaacaaaaacctctatattctacaatcatctattggttttggattattttctgcttaagtgtagaagaactagctggggctgtctgg

SEQ ID NO: 535122 - DNA, 120 bp, Artificial Sequence
  ENSG00000166664_49 (sequence is synthesized)
gcctgccgtggtatatttctggattttgctcatcaggcaagttaggtcctcgagcccttctagagtccattttaatgacatttttaaaaataaaattaattccatccacttttcaacata

SEQ ID NO: 535123 - DNA, 120 bp, Artificial Sequence
  ENSG00000166664_50 (sequence is synthesized)
gtctgtatacagatacgaatatgaaatttattcacaaatggaatatttgtatgtgaacaactaaatttattttgtcttgacaattggttatattcttgggtcagtgttatgtgaattgta

SEQ ID NO: 535124 - DNA, 120 bp, Artificial Sequence
  ENSG00000166664_51 (sequence is synthesized)
aataatctgtaattcatttgtgccagctgttgacatttctcagctgagtctgggctgccctgtcctcttgtgagtggggaggttcctgtagatctgggcaagttttcctgtagagtgggt

SEQ ID NO: 535125 - DNA, 120 bp, Artificial Sequence
  ENSG00000166669_0 (sequence is synthesized)
atgtcttaaattccaggatatgaaagatggcaagtccagatagaagtaaacggaagatattaaaagccaaaaagacaatgcccctaagttgccggaagcaagtagagatgctgaataagt

SEQ ID NO: 535126 - DNA, 120 bp, Artificial Sequence
  ENSG00000166669_1 (sequence is synthesized)
caaggaatgttgaagcgctgaaaacagcaattgggagtaatgttccaagcggtaatcagagtttcagtcctagtgtcataactaggacgactgaaataaccaaatgtagcccttctgaaa

SEQ ID NO: 535127 - DNA, 120 bp, Artificial Sequence
  ENSG00000166669_2 (sequence is synthesized)
atggtgcatcctcattggactctaataaaaattcaatatcagagaaaagtaaagtattctctcagaattgcataaaaccagtagaagaaattgttcattcagaaacaaaattggaacaag

SEQ ID NO: 535128 - DNA, 120 bp, Artificial Sequence
  ENSG00000166669_3 (sequence is synthesized)
ttgtttgttcgtaccaaaagccaagtagaacaacagaatcccccagcagagtcttcacagaagaggcaaaagattcactgaacacttctgaaaacgattctgagcatcagacaaatgtaa

SEQ ID NO: 535129 - DNA, 120 bp, Artificial Sequence
  ENSG00000166669_4 (sequence is synthesized)
caagatccctttttgagcatgagggggcttgtagtctaaagtccagttgctgtccacccagtgtattgagtggtgttgttcagatgccagagtctacagtaaccagtaccgtgggtgaca

SEQ ID NO: 535130 - DNA, 120 bp, Artificial Sequence
  ENSG00000166669_5 (sequence is synthesized)
agaaaactgaccagatggttttccatttagaaacaaactccaattcagaatcacatgataaaaggcaaagtgacaacattttatgttcagaagactcaggttttgtgcctgttgagaaaa

SEQ ID NO: 535131 - DNA, 120 bp, Artificial Sequence
  ENSG00000166669_6 (sequence is synthesized)
cacctaatttggtgaattcagtcacttctaacaactgtgctgatgacattttgaaaactgatgagtgtagtagaaccagtatttcaaattgtgaaagtgcagactcaacatggcagtcat

SEQ ID NO: 535132 - DNA, 120 bp, Artificial Sequence
  ENSG00000166669_7 (sequence is synthesized)
cacttgacactaataacaacagccattatcaaaagaagaggatgttttcagaaaacgaggaaaatgttaaacgcatgaaaacttcagagcaaattaatgaaaatatttgtgtaagtttgg

SEQ ID NO: 535133 - DNA, 120 bp, Artificial Sequence
  ENSG00000166669_8 (sequence is synthesized)
aaaggcaaacagcattcctggaacaggtcagacatttgattcagcaggagatctatagcataaattatgaactatttgataagaaactgaaagaattgaaccaacgcattgggaagacag

SEQ ID NO: 535134 - DNA, 120 bp, Artificial Sequence
  ENSG00000166669_9 (sequence is synthesized)
agtgcagaaataagcatgaaggaatagctgataaacttttggcaaaaatagcaaaacttcaaagacgtattaaaacagtattattatttcaaaggaattgtttgaaaccaaacatgttat

SEQ ID NO: 535135 - DNA, 120 bp, Artificial Sequence
  ENSG00000166669_10 (sequence is synthesized)
ccagtaatggagcctctaaggttgcaaattcagaggctatgattttggataagaatcttgagtcagttaatagtccaattgaaaagtcttctgtgaattatgagccttctaacccttccg

SEQ ID NO: 535136 - DNA, 120 bp, Artificial Sequence
  ENSG00000166669_11 (sequence is synthesized)
aaaaaggaagtaaaaaaattaatttgtcatcagatcaaaataagtctgtttctgaaagtaacaatgatgatgttatgttgatttctgtggaaagtcctaatttgacaactccaattacat

SEQ ID NO: 535137 - DNA, 120 bp, Artificial Sequence
  ENSG00000166669_12 (sequence is synthesized)
caaatccaacagataccagaaaaattacatcaggaaattctagcaattctcccaatgctgaagttatggctgtacagaagaaacttgattctataattgatttgacaaaagaaggcctat

SEQ ID NO: 535138 - DNA, 120 bp, Artificial Sequence
  ENSG00000166669_13 (sequence is synthesized)
ccaactgcaatacagaaagtccagtatcccccctggagtcacattcgaaagctgcttcaaactcaaaggaaacaaccccattggcacaaaatgcagtccaggttcctgagtcctttgagc

SEQ ID NO: 535139 - DNA, 120 bp, Artificial Sequence
  ENSG00000166669_14 (sequence is synthesized)
tttcagacccaatggcattgccctgacttggaatataaccaaaatcaatcccaagtgtgctcctgtagaaagctaccacctcttcctgtgtcatgagaactctaataataagttgatttg

SEQ ID NO: 535140 - DNA, 120 bp, Artificial Sequence
  ENSG00000166669_15 (sequence is synthesized)
gaagaagattggagaaattaaagctttaccactccccatggcctgtactttatctcagtttttagcttccaacagatactattttactgtccaatcaaaagatatttttggacgatatgg

SEQ ID NO: 535141 - DNA, 120 bp, Artificial Sequence
  ENSG00000166669_16 (sequence is synthesized)
accattctgtgatataaaatctatccctgggttttctgaaaatcttacgtaaaaggtgtttaataatgatatactactttttttttcatatttgtttgtttgcaatgttactgtaatact

SEQ ID NO: 535142 - DNA, 120 bp, Artificial Sequence
  ENSG00000166669_17 (sequence is synthesized)
atttgccattgtaaaaggccagctcagattgtgagccctttctattgggacagtcctcttctatatgttttaagtggccagtaatttaatgaatttctggtttgtattaaatatgtcctt

SEQ ID NO: 535143 - DNA, 120 bp, Artificial Sequence
  ENSG00000166669_18 (sequence is synthesized)
ccaatggataagttctaaaacatacgctatcattggcccatgttgctgaggtgcattgtgaacaatacctttagtgactgtggaactgctgcttctatcagaagacctaggatacaagca

SEQ ID NO: 535144 - DNA, 120 bp, Artificial Sequence
  ENSG00000166669_19 (sequence is synthesized)
gccactgtttcctccgttaacaatcagcttttagtaacctgctgtggtcagcatagctacaggaaaagtcagcccttgactgagggccagatcatccctggagtgcacctctactaagat

SEQ ID NO: 535145 - DNA, 120 bp, Artificial Sequence
  ENSG00000166669_20 (sequence is synthesized)
ctctactaagattttatgaaaagatgacatgttgggctgcatgataaaagttaattataaaaattaaaagatttttttttttgagatggaatattgctctgttgcccaggctggagtaca

SEQ ID NO: 535146 - DNA, 86 bp, Artificial Sequence
  ENSG00000166669_21 (sequence is synthesized)
ccatctccctggttcaagcaattctcctatgtcagcctcccaagtagctgggactatagtcacttgccaccatgcccggctaattt

SEQ ID NO: 535147 - DNA, 68 bp, Artificial Sequence
  ENSG00000166669_22 (sequence is synthesized)
ggccaaaaattaaaagattttatgaaacgaaatggcttcccattctttctattcagcttctaagtggg

SEQ ID NO: 535148 - DNA, 120 bp, Artificial Sequence
  ENSG00000166669_23 (sequence is synthesized)
gaaatggcttcccattctttctattcagcttctaagtgggctattcatttgtgctctcctcttttttgttttgttttgcactttgtcaatcatttggggaaatagcctggaggtctttcc

SEQ ID NO: 535149 - DNA, 120 bp, Artificial Sequence
  ENSG00000166669_24 (sequence is synthesized)
tgaatctgtttgtagacataataaaatttgtgtgctgtgtacacaaaaacataatgtatcttatgaaagcattacccaacctgtttgagttgagaatgcatttgtccacctttgatttga

SEQ ID NO: 535150 - DNA, 120 bp, Artificial Sequence
  ENSG00000166669_25 (sequence is synthesized)
ggctttagtttgctgatttcctaaatgctaccctttgatcatttcctggccaccatcacaatactaaggggctcagatgtgtcttgtgcccacctcttcctgagaagagatggaagtgga

SEQ ID NO: 535151 - DNA, 120 bp, Artificial Sequence
  ENSG00000166669_26 (sequence is synthesized)
gctgtgactagtacaagcagcccaagaaactctgaacggggcccaatggaggcaaacttgagcaaataattgggatgataagaaacaaaaataatcccaactgtttgaaagttcgaaaga

SEQ ID NO: 535152 - DNA, 120 bp, Artificial Sequence
  ENSG00000166669_27 (sequence is synthesized)
ggggcattcttttctggtacatggtgagagttcaggctccagagactcaaaacggaatggttttccttggcattttgtaaatgctctcacatctgtagcaataaagctgttattttctgc

SEQ ID NO: 535153 - DNA, 120 bp, Artificial Sequence
  ENSG00000166669_28 (sequence is synthesized)
agcattgttaacggctgcggttcgaagtggctgtgggtattgctgcggctggtgcgtcgtcgctctaggaatcctgctttttttttttctttgagacacggtctcactctgtcacccttg

SEQ ID NO: 535154 - DNA, 120 bp, Artificial Sequence
  ENSG00000166669_29 (sequence is synthesized)
gttaacggctgcggttcgaagtggctgtgggtattgctgcggctggtgcgtcgtcgctctagccagtaaatgacctgcgacataactatttgcaaaacaaatggggaagaccaagataaa

SEQ ID NO: 535155 - DNA, 120 bp, Artificial Sequence
  ENSG00000166669_30 (sequence is synthesized)
gataagttatatcacaggaaagcaattgaaaatgcaaaaatgaagcatctgaatgaaggactaataacactgaattcagcttttgtgaatcttatctgcagatatgtacagaccacatcc

SEQ ID NO: 535156 - DNA, 120 bp, Artificial Sequence
  ENSG00000166669_31 (sequence is synthesized)
tccatcttttatcagttttgcaagttatctttgtaaggaatttatccatgttatctaaattattgaattcactgtcataaagttatcagtaaaattcacttgtcctaggctgggcgcggt

SEQ ID NO: 535157 - DNA, 90 bp, Artificial Sequence
  ENSG00000166669_32 (sequence is synthesized)
tacaattggtaaaattcccttcaactgcttttttctcacctatttaataggttgcaaattcagaggctatgattttggataagaatcttg

SEQ ID NO: 535158 - DNA, 120 bp, Artificial Sequence
  ENSG00000166669_33 (sequence is synthesized)
aatttgtcatcagatcaaaataagtctgtttctgaaaggtaggtgtttctgcaaaaatgcataaatttatctaaatctataataatgaattttttcttcatcacagttttggatctttgt

SEQ ID NO: 535159 - DNA, 85 bp, Artificial Sequence
  ENSG00000166669_34 (sequence is synthesized)
cctcaacagaaatacatgagccagtgccttattggaaatgatttgcgtgttttaagaacttgctggttttcttccgccgtctgtg

SEQ ID NO: 535160 - DNA, 120 bp, Artificial Sequence
  ENSG00000166669_35 (sequence is synthesized)
catcttgaatgttctgctttccttgccttatgcctgtacttcacctcagccttcaattccattgtgtttccttgctacttggtatcttgaaatctggtacgaaactattgcatgatccct

SEQ ID NO: 535161 - DNA, 120 bp, Artificial Sequence
  ENSG00000166669_36 (sequence is synthesized)
gcacctttgcttctgcatatatcatagctctcttatagtgagtgtgcacaatctatttcatttgatgtaatcaaagtttaatatattggatagttaaaaataaaatacaactttaaatgc

SEQ ID NO: 535162 - DNA, 120 bp, Artificial Sequence
  ENSG00000166669_37 (sequence is synthesized)
agttactgggtaggggccactagaccagatgagccagtctatcgatctgggtggtaccagctgatccatcaggtacaagagatttttcagcaagcctttaagggacaaagtgccttggcc

SEQ ID NO: 535163 - DNA, 120 bp, Artificial Sequence
  ENSG00000166669_38 (sequence is synthesized)
cttcagagcaagcatggcccgaccaacaccttgaatgcagactccaagccttctaaacttgggcattcagtgaccacctgttgagtgagttcatggcatccaagtgcacagccacctaag

SEQ ID NO: 535164 - DNA, 83 bp, Artificial Sequence
  ENSG00000166669_39 (sequence is synthesized)
ttgagtgagttcatggcatccaagtgcacagccacctaaggcatcgggcctcatgaaatcacaagcagccaaggctggtgctg

SEQ ID NO: 535165 - DNA, 90 bp, Artificial Sequence
  ENSG00000166669_40 (sequence is synthesized)
agcattgttaacggctgcggttcgaagtggctgtgggtattgctgcggctggtgcgtcgtcgctctaggttttcttccgccgaatcctgc

SEQ ID NO: 535166 - DNA, 120 bp, Artificial Sequence
  ENSG00000166669_41 (sequence is synthesized)
gttaacggctgcggttcgaagtggctgtgggtattgctgcggctggtgcgtcgtcgctctaggtacgttggggccgggcgagtgtcctgcgagagcggcgattggcggggtggcggctct

SEQ ID NO: 535167 - DNA, 120 bp, Artificial Sequence
  ENSG00000166669_42 (sequence is synthesized)
aggagcgtcggtcgcctctctgagggccggccccggaggcctcggagcgccgggcctaccggacgtttgcggcgaagctgccctgactgaaaagcgtccgcggggccgtctgacaggtcc

SEQ ID NO: 535168 - DNA, 120 bp, Artificial Sequence
  ENSG00000166669_43 (sequence is synthesized)
gggaagaggcccctgaggggcggacgggcgcgtctccaccgttttcgcagagggatactggtgaagcgggagtggtgtgcggcctcaggtccgggcggcactggggttagggactgcgga

SEQ ID NO: 535169 - DNA, 120 bp, Artificial Sequence
  ENSG00000166669_44 (sequence is synthesized)
gggaagtggtgcgtgttttttgtcctgaggggtaagtaaaagctcgctcttgtccggaatgctttcagaaattaacggataaatctccacctccaccaattttagtgtcccattgccaaa

SEQ ID NO: 535170 - DNA, 120 bp, Artificial Sequence
  ENSG00000166669_45 (sequence is synthesized)
ttttcttgagttgttttaatcatctaatgaagtcaggtgccagaaggcaactggatctcgcctggcggccttgaagtttgttaaaaagtagggaccagagcatcaggaaaaatacaaaat

SEQ ID NO: 535171 - DNA, 120 bp, Artificial Sequence
  ENSG00000166669_46 (sequence is synthesized)
tctgagtaaaatgctgaaatcccgtacctctgagcttgccggtgtaaggatggtaggatttaaggaagacgatttccttaaggtagaagttcgtttttatgaatatgtttttaagaaaat

SEQ ID NO: 535172 - DNA, 120 bp, Artificial Sequence
  ENSG00000166669_47 (sequence is synthesized)
tccatcttatcgcccttctctaaccagttttctccaagtttggcaagcaagtttgagaaagagaggacgcaataattttttttgccttatttttgttaaaaccttaccgcacttaaggaa

SEQ ID NO: 535173 - DNA, 120 bp, Artificial Sequence
  ENSG00000166669_48 (sequence is synthesized)
cggactttctacctttccgtgtttctgtgttgaaaatgaagtttctaaccacgtgttccttcctttacgacacaatggctttttctgttctgaagacttgcatatggttaatatgtatgg

SEQ ID NO: 535174 - DNA, 120 bp, Artificial Sequence
  ENSG00000166669_49 (sequence is synthesized)
aagaagaggacagttgtactgaatagtccacattagaaaaattatgtcatattcacttaaattgttattctagattgcgacttaatactgtttttattatgattttgtcatatttattgt

SEQ ID NO: 535175 - DNA, 120 bp, Artificial Sequence
  ENSG00000166669_50 (sequence is synthesized)
ctaataacactgaattcagcttttgtgaagtatgcctttcttcttagctcgtttattctgcaatacgtttgtagaagtgttgactccgatcttaatcaaatttacttcactctcagtctt

SEQ ID NO: 535176 - DNA, 120 bp, Artificial Sequence
  ENSG00000166669_51 (sequence is synthesized)
ataacggaactggtaataaatggagtttttttgggtatttggttttatcatttctatttccccccacgattgttcaattaaaacattatgaaatgttaagttagaggactcctaaccact

SEQ ID NO: 535177 - DNA, 120 bp, Artificial Sequence
  ENSG00000166670_0 (sequence is synthesized)
agaagcccagtagacaaagaaggtaagggcagtgagaatgatgcatcttgcattccttgtgctgttgtgtctgccagtctgctctgcctatcctctgagtggggcagcaaaagaggagga

SEQ ID NO: 535178 - DNA, 120 bp, Artificial Sequence
  ENSG00000166670_1 (sequence is synthesized)
ctccaacaaggatcttgcccagcaatacctagaaaagtactacaacctcgaaaaggatgtgaaacagtttagaagaaaggacagtaatctcattgttaaaaaaatccaaggaatgcagaa

SEQ ID NO: 535179 - DNA, 120 bp, Artificial Sequence
  ENSG00000166670_2 (sequence is synthesized)
gttccttgggttggaggtgacagggaagctagacactgacactctggaggtgatgcgcaagcccaggtgtggagttcctgacgttggtcacttcagctcctttcctggcatgccgaagtg

SEQ ID NO: 535180 - DNA, 120 bp, Artificial Sequence
  ENSG00000166670_3 (sequence is synthesized)
gaggaaaacccaccttacatacaggattgtgaattatacaccagatttgccaagagatgctgttgattctgccattgagaaagctctgaaagtctgggaagaggtgactccactcacatt

SEQ ID NO: 535181 - DNA, 120 bp, Artificial Sequence
  ENSG00000166670_4 (sequence is synthesized)
ctccaggctgtatgaaggagaggctgatataatgatctcttttgcagttaaagaacatggagacttttactcttttgatggcccaggacacagtttggctcatgcctacccacctggacc

SEQ ID NO: 535182 - DNA, 120 bp, Artificial Sequence
  ENSG00000166670_5 (sequence is synthesized)
tgggctttatggagatattcactttgatgatgatgaaaaatggacagaagatgcatcaggcaccaatttattcctcgttgctgctcatgaacttggccactccctggggctctttcactc

SEQ ID NO: 535183 - DNA, 120 bp, Artificial Sequence
  ENSG00000166670_6 (sequence is synthesized)
agccaacactgaagctttgatgtacccactctacaactcattcacagagctcgcccagttccgcctttcgcaagatgatgtgaatggcattcagtctctctacggacctccccctgcctc

SEQ ID NO: 535184 - DNA, 120 bp, Artificial Sequence
  ENSG00000166670_7 (sequence is synthesized)
ttcgatgccatcagcactctgaggggagaatatctgttctttaaagacagatatttttggcgaagatcccactggaaccctgaacctgaatttcatttgatttctgcattttggccctct

SEQ ID NO: 535185 - DNA, 120 bp, Artificial Sequence
  ENSG00000166670_8 (sequence is synthesized)
cttccatcatatttggatgctgcatatgaagttaacagcagggacaccgtttttatttttaaaggaaatgagttctgggccatcagaggaaatgaggtacaagcaggttatccaagaggc

SEQ ID NO: 535186 - DNA, 120 bp, Artificial Sequence
  ENSG00000166670_9 (sequence is synthesized)
atccataccctgggttttcctccaaccataaggaaaattgatgcagctgtttctgacaaggaaaagaagaaaacatacttctttgcagcggacaaatactggagatttgatgaaaatagc

SEQ ID NO: 535187 - DNA, 120 bp, Artificial Sequence
  ENSG00000166670_10 (sequence is synthesized)
cagtccatggagcaaggcttccctagactaatagctgatgactttccaggagttgagcctaaggttgatgctgtattacaggcatttggatttttctacttcttcagtggatcatcacag

SEQ ID NO: 535188 - DNA, 120 bp, Artificial Sequence
  ENSG00000166670_11 (sequence is synthesized)
tttgagtttgaccccaatgccaggatggtgacacacatattaaagagtaacagctggttacattgctaggcgagatagggggaagacagatatgggtgtttttaataaatctaataatta

SEQ ID NO: 535189 - DNA, 120 bp, Artificial Sequence
  ENSG00000166670_12 (sequence is synthesized)
ttcatctaatgtattatgagccaaaatggttaatttttcctgcatgttctgtgactgaagaagatgagccttgcagatatctgcatgtgtcatgaagaatgtttctggaattcttcactt

SEQ ID NO: 535190 - DNA, 120 bp, Artificial Sequence
  ENSG00000166670_13 (sequence is synthesized)
gcttttgaattgcactgaacagaattaagaaatactcatgtgcaataggtgagagaatgtattttcatagatgtgttattacttcctcaataaaaagttttattttgggcctgttcctta

SEQ ID NO: 535191 - DNA, 120 bp, Artificial Sequence
  ENSG00000166676_0 (sequence is synthesized)
attcctcccactatctctgtccgcagttccccaggccgttgcctccctgccgccgctttctctcctgggcgcgtccccggcgagccgagccccctccccagcctgcgactgcgccttagg

SEQ ID NO: 535192 - DNA, 120 bp, Artificial Sequence
  ENSG00000166676_1 (sequence is synthesized)
ccccgagcgccccgccccacccgagaagctgcgctgaggctgccccacagggcgcaggccccgaccctcagcgtccaccgtctgctgcctacatccgcccgcccggcgtccgaccccttc

SEQ ID NO: 535193 - DNA, 120 bp, Artificial Sequence
  ENSG00000166676_2 (sequence is synthesized)
agcggcgacgggcggagctggagccccgggcctgggcgccaggtgggctcctgggagggtgatgaagcaggccctggtggacgataccgaggatgtgtccctggactttggaaacgagga

SEQ ID NO: 535194 - DNA, 120 bp, Artificial Sequence
  ENSG00000166676_3 (sequence is synthesized)
ggagctggcctttaggaaagccaagatcagacaccccttggccacctttttccacctgtttttccgagtgagtgccatcgtcacctacgtgagctgcgactggttcagcaagagctttgt

SEQ ID NO: 535195 - DNA, 120 bp, Artificial Sequence
  ENSG00000166676_4 (sequence is synthesized)
gggctgttttgtcatggtgctgctcctcctgtccctggacttctggtctgtgaagaatgtaaccggaagactcctggtgggccttcgatggtggaaccagatagatgaagatgggaagag

SEQ ID NO: 535196 - DNA, 120 bp, Artificial Sequence
  ENSG00000166676_5 (sequence is synthesized)
ccactggatctttgaagccaggaaggtctctccgaatagcattgctgccacagaagctgaagcacgaatcttctggctgggcctcataatctgccccatgatatggattgtgtttttttt

SEQ ID NO: 535197 - DNA, 120 bp, Artificial Sequence
  ENSG00000166676_6 (sequence is synthesized)
tagcaccttattttccttgaagctaaagtggctggctctggtggttgctgggatctctctccaagctgcaaacctgtatggctacatcctttgtaagatgggaggcaacagtgacattgg

SEQ ID NO: 535198 - DNA, 120 bp, Artificial Sequence
  ENSG00000166676_7 (sequence is synthesized)
caaggtcacagccagtttcctgtcccagacagtgttccagacggcctgcccaggtgactttcagaagcctggcctcgaggggctggagattcaccagcattaggaactgatgaggttctc

SEQ ID NO: 535199 - DNA, 120 bp, Artificial Sequence
  ENSG00000166676_8 (sequence is synthesized)
ttcttttgactgatggagattacaaaactcttggattcctggaaaacaagacgacaggcatagagtgctaatggcttgtctaccccttgacagccctgtcctgtgctggggagggctgtg

SEQ ID NO: 535200 - DNA, 120 bp, Artificial Sequence
  ENSG00000166676_9 (sequence is synthesized)
ttttgacaggggtggaatcctctggctagttccataaaaagacctgtgtctgtgatgccctgagtctttgaaagtgaccggaatacctcacactacccatcttgctcataaccagtggct

SEQ ID NO: 535201 - DNA, 120 bp, Artificial Sequence
  ENSG00000166676_10 (sequence is synthesized)
gcggccttcctcggaccatctatagatggaggattctgggaatgctgtttccttacccttgacatcattcttctaggcaagtaaaacccagccacaaactcagagaccacagctttaaca

SEQ ID NO: 535202 - DNA, 120 bp, Artificial Sequence
  ENSG00000166676_11 (sequence is synthesized)
aacactgacacctctgccctaactctggggcctctgatggctgccactggctgaatgtggcctgcacgtgggtttggtctggctcaacaaagtttttatttttattttttatttttttga

SEQ ID NO: 535203 - DNA, 76 bp, Artificial Sequence
  ENSG00000166676_12 (sequence is synthesized)
ggctcaacaaagtttttatttttattttttatttttttgagacacgccttactgcagcctccgcctcccaggttca

SEQ ID NO: 535204 - DNA, 61 bp, Artificial Sequence
  ENSG00000166676_13 (sequence is synthesized)
tttcaagcctcaagtgatctgcctgcctccttcacccaaagtgctgggattccaggtgtga

SEQ ID NO: 535205 - DNA, 120 bp, Artificial Sequence
  ENSG00000166676_14 (sequence is synthesized)
cactgcacctggccttttttttttttatcagttacttttaaaaatgaattactttatccctttattgggatgtatttcctaagccataaatttcaccctcaccatgttttttaaactatg

SEQ ID NO: 535206 - DNA, 120 bp, Artificial Sequence
  ENSG00000166676_15 (sequence is synthesized)
accatgttttttaaactatgaattaattcacaatactcacacattgagagatttctcatggactcctggcttcctcggctatgggggccactctgtggtcatcacagaccccaccaccca

SEQ ID NO: 535207 - DNA, 120 bp, Artificial Sequence
  ENSG00000166676_16 (sequence is synthesized)
cctgtccttccacacccctggctcctttatgttgcttcctgccccacaggcatctgcatttagtactcatggaaatacttactctgaattatacttctgtaggctaacgtggctggggaa

SEQ ID NO: 535208 - DNA, 120 bp, Artificial Sequence
  ENSG00000166676_17 (sequence is synthesized)
tctggggcgtcaatgaaaaaagactggcctttgtcacaattcttaccttaaaaaagaaacaaacggaagacaattcagtccaagaggaaaacagaatggccacaagatcttggggctctt

SEQ ID NO: 535209 - DNA, 120 bp, Artificial Sequence
  ENSG00000166676_18 (sequence is synthesized)
tccgtgctggtgacaatgggaagatcttgagcccgcttcactcgtaatgaagaacaaagtagaaaagaccagtggggtctcagggaccttccttccagcagggtccccagccagcatttc

SEQ ID NO: 535210 - DNA, 120 bp, Artificial Sequence
  ENSG00000166676_19 (sequence is synthesized)
agcgtggctaaataatcaggtggtgtacagaaaatgcaggttccagggccctacagagaactgattcagcagcttccacatgggcccaggagtctgcattttaagagattagcttttgag

SEQ ID NO: 535211 - DNA, 120 bp, Artificial Sequence
  ENSG00000166676_20 (sequence is synthesized)
tgaaaggatcatgaatgcacatggttaaaaaaagtacagaatgcaaaaggatatggcataaaaggccaagtccgaaaagggctactagtgttctaggtgtctttccagaaagattatgcg

SEQ ID NO: 535212 - DNA, 120 bp, Artificial Sequence
  ENSG00000166676_21 (sequence is synthesized)
catataaatgtgcacacttgcatgtgtgcgcacacacatacacacactctcatatacctaaaatacgaatgggagcacatgacacacacattctgcctgctgctttgtctgtgtataatt

SEQ ID NO: 535213 - DNA, 120 bp, Artificial Sequence
  ENSG00000166676_22 (sequence is synthesized)
ttatcttccaggtcatctgtgctggtgtctatcagtctgctagtctttccccgccatgtggccattgttccagtcccctcctatgcacacccaggtttctctaggaccatgttatcccag

SEQ ID NO: 535214 - DNA, 120 bp, Artificial Sequence
  ENSG00000166676_23 (sequence is synthesized)
agccaggtggacaggacacaaggggctaggggtcaatgggggtgttctcgcctccagtctgccctgccagcccccagtcgtgggtggacctgccatcagcttgctctgcccactccccag

SEQ ID NO: 535215 - DNA, 120 bp, Artificial Sequence
  ENSG00000166676_24 (sequence is synthesized)
gcctgagctgctggcgaaacaggcaagtgactgcactgcccatggccggtcaccagcctcaggtgaaccccaggaggggttcctacctagcactcatcatttcctcaacttcactactgt

SEQ ID NO: 535216 - DNA, 120 bp, Artificial Sequence
  ENSG00000166676_25 (sequence is synthesized)
gtcgccctgtgggacagggaagtccaagtcggggaagaagcctgtggggaggggttggtgggagatggggagcccatatggcccagtgagtcaggaaaatagggtccagaggcagggaac

SEQ ID NO: 535217 - DNA, 120 bp, Artificial Sequence
  ENSG00000166676_26 (sequence is synthesized)
ataaggccaattcgcacttgagccataacaggaaatgtcctctccataggacgtatgccgtaaatgactttgtaactttacttcatccttttcgtttatatagggcgtacctcaagtaga

SEQ ID NO: 535218 - DNA, 120 bp, Artificial Sequence
  ENSG00000166676_27 (sequence is synthesized)
gggtatttaaacacaaaaactctgtaatggggcctttgagcccctattctcaggcccgttctcctcccacaccgtggagttgactttcattttcaataaatcccttccttccttcctttc

SEQ ID NO: 535219 - DNA, 120 bp, Artificial Sequence
  ENSG00000166676_28 (sequence is synthesized)
ggctggcaggaatggatgtgccctgggctgctgcaagctcctgtccccaatcacatccattcatgcagcccaactgcctccaggggcctcagagggcagctctcatcaccacttccggcc

SEQ ID NO: 535220 - DNA, 120 bp, Artificial Sequence
  ENSG00000166676_29 (sequence is synthesized)
actgcaaaagctgcctgggaaagcagaaatagtttgcagagcagccttccgatcgtttcctcatccatgagagcaagatcttgctcgcctggcagccccacgcgccctcaccttgcactt

SEQ ID NO: 535221 - DNA, 120 bp, Artificial Sequence
  ENSG00000166676_30 (sequence is synthesized)
aggacagatgaagccactcatgttctccaccaccccgatgatgggcagcttcaccttgcggcagaagttgatttctttccggacatcctggagtgacacctcctacgaaggtgaaaagac

SEQ ID NO: 535222 - DNA, 120 bp, Artificial Sequence
  ENSG00000166676_31 (sequence is synthesized)
cagtgattccagcatcaaagtgcgagaaagggaatgtctgtgcaaccgaggggatggctgcaatgcagtggatctgcgatcataaagccttagaggtttctgccctgatagggtttggct

SEQ ID NO: 535223 - DNA, 120 bp, Artificial Sequence
  ENSG00000166676_32 (sequence is synthesized)
cagaggagactgaagtgctgtcctcatgccttcctgtctgttcctaggaagatgtttcccctgacaaacgtcctgcccaccaatcccatctcggcagagctgaactgtggcagaggtgca

SEQ ID NO: 535224 - DNA, 120 bp, Artificial Sequence
  ENSG00000166676_33 (sequence is synthesized)
ggctttcttatcttcacaggcagaaatggcttaaacgggagtttctacaatcgactaagcttccgacacagcagaatcccacgatcccacaacccatttgttttttacgtgaaacaggcc

SEQ ID NO: 535225 - DNA, 120 bp, Artificial Sequence
  ENSG00000166676_34 (sequence is synthesized)
tcgggggagagatttgagggggttttattcttaaaacggcacatttgtagagaatgccctttatatatgttctaaagaaaagtgtacaaatactcaatgattaaagtgtctctgagaaag

SEQ ID NO: 535226 - DNA, 120 bp, Artificial Sequence
  ENSG00000166676_35 (sequence is synthesized)
cttttgctgtgacccaccccatcccggagctggtcgggtctggctggatgtgctgcccagtgagtgcctcgctcggtaactgcttggtcctgaacattctctcgtttcaggaactgatga

SEQ ID NO: 535227 - DNA, 120 bp, Artificial Sequence
  ENSG00000166676_36 (sequence is synthesized)
agccaagatcaggaacacgcattccccgatgacatgagacacctgccccgtgggctgcgtgtgagcttggagctcagtgactggtggtggaaaaacccaacctttacctttagggaactg

SEQ ID NO: 535228 - DNA, 120 bp, Artificial Sequence
  ENSG00000166676_37 (sequence is synthesized)
gccgtcatctctgctaggcgggaaggcagtgactgctgtcacgtttcacttcaaagatgaccgtgtttcgaagagggcaagtgatatttggagtcaagtggcgggaaagtactggattct

SEQ ID NO: 535229 - DNA, 120 bp, Artificial Sequence
  ENSG00000166676_38 (sequence is synthesized)
tcgaaggggaggaaaaaaaacagtgtcagcatgactgtctggggactgctgacctaatgatgtgtccccagggctacagcctgagtttctgcgtcatatgcaccggggagaacattccat

SEQ ID NO: 535230 - DNA, 120 bp, Artificial Sequence
  ENSG00000166676_39 (sequence is synthesized)
tgagccacgctaacacccccagcaaagtctgaagtggtaaagggagttcagtgaccatccgcttagctcttggagtgagggcgccttctgggtcctttcctagacaccccttggccacct

SEQ ID NO: 535231 - DNA, 120 bp, Artificial Sequence
  ENSG00000166676_40 (sequence is synthesized)
acctggacatcctccgccgttaacgctgggcccatgagaccatgtggaactcgctagggaggcccctgagtgcacgttcgctgggccagacctgggaggttggggatcccagaatagtca

SEQ ID NO: 535232 - DNA, 120 bp, Artificial Sequence
  ENSG00000166676_41 (sequence is synthesized)
tgctggggctactttctgtccctgactttcacccaggtctcccttccccagagggctccccagcccccaacacacatatatgctctagtgttttcccttcctaactgcatttccccctgg

SEQ ID NO: 535233 - DNA, 120 bp, Artificial Sequence
  ENSG00000166676_42 (sequence is synthesized)
gctcccacctctccaagaacgggcagcattatcagaacagctggtgtgagcacagccctgttccaagagatcccaggcatcctctcaccccaccctggcagatccctctcactaggcacc

SEQ ID NO: 535234 - DNA, 120 bp, Artificial Sequence
  ENSG00000166676_43 (sequence is synthesized)
actgtcacctgcattttacacacggggccatcgaggctgagagcggaaatgactagcccaagtcccacagctagtggtggcggagcagggctctgaggccagcccttcctgtgatcctca

SEQ ID NO: 535235 - DNA, 120 bp, Artificial Sequence
  ENSG00000166676_44 (sequence is synthesized)
ggatcatgggggcagtttcccccatgctggtctcgatagtgagttttcacgagatctgatggttttgtaagtgtttgacagttcctcctacacactctctctctcactgctgccactgtg

SEQ ID NO: 535236 - DNA, 120 bp, Artificial Sequence
  ENSG00000166676_45 (sequence is synthesized)
ctcctacacactctctctctcactgctgccactgtgtaacatgtgcctgctttgccttccaccatgattgttaagtttcctggggccttcccagccatgcagaactgtgaatcaatgaaa

SEQ ID NO: 535237 - DNA, 120 bp, Artificial Sequence
  ENSG00000166681_0 (sequence is synthesized)
cggtggcgggtggggggaagggggagatcctgctgcactggccgcccaagttggggggcgagctcggtggtgacgcgcggccctcacgtgacccagagctgcagagcgacgcagccttcg

SEQ ID NO: 535238 - DNA, 120 bp, Artificial Sequence
  ENSG00000166681_1 (sequence is synthesized)
gtgcagtcgtcactcgcgtctggctaccagctccccgctgccctgagctcggcgggctggcattcggcccggggaaaagcggagcagaaaaacaaccagaaaaaaaaaatctcatcatgg

SEQ ID NO: 535239 - DNA, 120 bp, Artificial Sequence
  ENSG00000166681_2 (sequence is synthesized)
caaatattcaccaggaaaacgaagagatggagcagcctatgcagaatggagaggaagaccgccctttgggaggaggtgaaggccaccagcctgcaggaaatcgacggggacaggctcgcc

SEQ ID NO: 535240 - DNA, 120 bp, Artificial Sequence
  ENSG00000166681_3 (sequence is synthesized)
catggaggagatgagagaaatcagaagaaaacttagggagctgcagttgaggaattgtctgcgtatccttatgggggagctctctaatcaccatgaccatcatgatgaattttgccttat

SEQ ID NO: 535241 - DNA, 120 bp, Artificial Sequence
  ENSG00000166681_4 (sequence is synthesized)
gccttgactcctgccatttatcatgagattaatactgtgattcccgctgttttctttttccttgcattttcctaatatgcctttactgatccgtttgctgtgaaccctatgttatttcca

SEQ ID NO: 535242 - DNA, 120 bp, Artificial Sequence
  ENSG00000166681_5 (sequence is synthesized)
tgtgtcaagtgggtcttgtgttgccagcttctatttgaagattgcctttgcactcagtgtaagtttctgtcagcagtagtttcacccatttgcatggaaaaatttaaagctaataaagca

SEQ ID NO: 535243 - DNA, 120 bp, Artificial Sequence
  ENSG00000166681_6 (sequence is synthesized)
gaggggagcccgggctcggagcacggaaagggccgggcggcggcgggtcttcgctagcgttccgctgcagcagcccccaccccccacaacccccaccccggctcgactgcaggtctgcga

SEQ ID NO: 535244 - DNA, 120 bp, Artificial Sequence
  ENSG00000166682_0 (sequence is synthesized)
agctttaatcaatgctggcctgagaacaggagcggaacattgcctagtagaccctgaggctttacaacagtgccactgacccctatgagcctgatgctggatgaccaaccccctatggag

SEQ ID NO: 535245 - DNA, 120 bp, Artificial Sequence
  ENSG00000166682_1 (sequence is synthesized)
gcccagtatgcagaggagggcccaggacctgggatcttcagagcagagcctggagaccagcagcatcccatttctcaggcagtgtgctggcgttccatgcgacgtggctgtgcagtgctg

SEQ ID NO: 535246 - DNA, 120 bp, Artificial Sequence
  ENSG00000166682_2 (sequence is synthesized)
ggagccctggggctgctggccggtgcaggtgttggctcatggctcctagtgctgtatctgtgtcctgctgcctctcagcccatttccgggaccttgcaggatgaggagataactttgagc

SEQ ID NO: 535247 - DNA, 120 bp, Artificial Sequence
  ENSG00000166682_3 (sequence is synthesized)
tgctcagaggccagcgctgaggaagctctgctccctgcacttcccaaaacagtatctttcagaataaacagcgaagacttcttgctggaagcgcaagtgagggatcagccacgctggctc

SEQ ID NO: 535248 - DNA, 120 bp, Artificial Sequence
  ENSG00000166682_4 (sequence is synthesized)
ctggtctgccatgagggctggagccccgccctggggctgcagatctgctggagccttgggcatctcagactcactcaccacaagggagtaaacctcactgacatcaaactcaacagttcc

SEQ ID NO: 535249 - DNA, 120 bp, Artificial Sequence
  ENSG00000166682_5 (sequence is synthesized)
caggagtttgctcagctctctcctagactgggaggcttcctggaggaggcgtggcagcccaggaacaactgcacttctggtcaagttgtttccctcagatgctctgagtgtggagcgagg

SEQ ID NO: 535250 - DNA, 120 bp, Artificial Sequence
  ENSG00000166682_6 (sequence is synthesized)
cccctggcttcccggatagttggtgggcagtctgtggctcctgggcgctggccgtggcaggccagcgtggccctgggcttccggcacacgtgtgggggctctgtgctagcgccacgctgg

SEQ ID NO: 535251 - DNA, 120 bp, Artificial Sequence
  ENSG00000166682_7 (sequence is synthesized)
gtggtgactgctgcacattgtatgcacagtttcaggctggcccgcctgtccagctggcgggttcatgcggggctggtcagccacagtgccgtcaggccccaccaaggggctctggtggag

SEQ ID NO: 535252 - DNA, 120 bp, Artificial Sequence
  ENSG00000166682_8 (sequence is synthesized)
aggattatcccacaccccctctacagtgcccagaatcatgactacgacgtcgccctcctgaggctccagaccgctctcaacttctcagacactgtgggcgctgtgtgcctgccggccaag

SEQ ID NO: 535253 - DNA, 120 bp, Artificial Sequence
  ENSG00000166682_9 (sequence is synthesized)
ttttccgaagggctcgcggtgctgggtgtctggctggggccacacccaccctagccatacttacagctcggatatgctccaggacacggtggtgcccttgttcagcactcagctctgcaa

SEQ ID NO: 535254 - DNA, 120 bp, Artificial Sequence
  ENSG00000166682_10 (sequence is synthesized)
cagctcttgcgtgtacagcggagccctcaccccccgcatgctttgcgctggctacctggacggaagggctgatgcatgccagggagatagcgggggccccctagtgtgcccagatgggga

SEQ ID NO: 535255 - DNA, 120 bp, Artificial Sequence
  ENSG00000166682_11 (sequence is synthesized)
cacatggcgcctagtgggggtggtcagctgggggcgtggctgcgcagagcccaatcacccaggtgtctacgccaaggtagctgagtttctggactggatccatgacactgctcaggactc

SEQ ID NO: 535256 - DNA, 120 bp, Artificial Sequence
  ENSG00000166682_12 (sequence is synthesized)
cctcctctgagtcctgctgtttcctccagtctcactgcacaccactgcctcatgcttcctggggcctccagcagctccactaatggaggagaggcagtagcctccgacacagaacgcatg

SEQ ID NO: 535257 - DNA, 120 bp, Artificial Sequence
  ENSG00000166682_13 (sequence is synthesized)
gacctcctactactgtgtgtgaggaacagtcactacccactggccagccacccagccaacaggtctctcctcttgggccctgatttcagagtcctctttctcactagagactcaatgaca

SEQ ID NO: 535258 - DNA, 120 bp, Artificial Sequence
  ENSG00000166682_14 (sequence is synthesized)
gaagagaggctgggacttggttgggcatgctgtggttgctgagggatgagggggaggagagaggtaggagctggagatgaagaggctgctagaagcagcaggaagcctgcccttctgccc

SEQ ID NO: 535259 - DNA, 120 bp, Artificial Sequence
  ENSG00000166682_15 (sequence is synthesized)
tctcccctccctgcccctgtgtgagtcttttgggagggtgctgggaggtgccccccgtcccacctttttcctgtgctctaggtgggctaagtgcctccctagaggactccatggctgaga

SEQ ID NO: 535260 - DNA, 120 bp, Artificial Sequence
  ENSG00000166682_16 (sequence is synthesized)
ggctcctgggcagatggggtcaaggctgggccagcccagatgaagcctatgggagtcaggaccctctccactctccctctccactccccttcctgttctcacctggctgtggctggccct

SEQ ID NO: 535261 - DNA, 120 bp, Artificial Sequence
  ENSG00000166682_17 (sequence is synthesized)
gtgtggggtgggtacactggaaaacaagaaggttggagttggtctaggacattggttttaaatgacagttctgtgaactggtccaaggagttctgttattaaagtgatatatggtcttgg

SEQ ID NO: 535262 - DNA, 120 bp, Artificial Sequence
  ENSG00000166682_18 (sequence is synthesized)
accagcagcatcccagtaggccagactgggccataggggaatgacagggtggggacagtggagggcaatcatcctacattccccggatcctccttggggtcagccccacatgattgatgt

SEQ ID NO: 535263 - DNA, 120 bp, Artificial Sequence
  ENSG00000166682_19 (sequence is synthesized)
aatcaatgctggcctgagaacaggagcggaacattgcctagtagaccctgaggctttacaacagtgccactgacccctatgtatctttcagaataaacagcgaagacttcttgctggaag

SEQ ID NO: 535264 - DNA, 120 bp, Artificial Sequence
  ENSG00000166682_20 (sequence is synthesized)
atgacttggaggaatgaatgaatgatgagtgaatgagctctttgatcttctcttggtgccggacagggcagagagtgtaatccccattttaccgaggctgagagggagaagtgcctctcc

SEQ ID NO: 535265 - DNA, 120 bp, Artificial Sequence
  ENSG00000166685_0 (sequence is synthesized)
gctgacgagtgcaccatggccaccgcggcaacctcacccgcgctgaagcggctggatctgcgcgaccctgcggctcttttcgagacgcatggagcggaggagatccgcgggctggagcgc

SEQ ID NO: 535266 - DNA, 120 bp, Artificial Sequence
  ENSG00000166685_1 (sequence is synthesized)
caggttcgggccgagatcgagcacaagaaggaggagctgcggcagatggtgggcgaacggtaccgcgacctgatcgaggcggccgacaccatcggccagatgcgccgctgcgccgtgggg

SEQ ID NO: 535267 - DNA, 120 bp, Artificial Sequence
  ENSG00000166685_2 (sequence is synthesized)
ctagtggacgccgtgaaggccaccgaccagtactgcgcccgcctccgccaggccggctcggccgcgccccggccaccgcgggcccagcagccacagcagccatcccaggagaagttctac

SEQ ID NO: 535268 - DNA, 120 bp, Artificial Sequence
  ENSG00000166685_3 (sequence is synthesized)
agcatggctgcccagatcaagctactcttagaaattccggagaagatctggagctcgatggaagcctctcagtgtctccacgccacacagctctacctgctctgctgccacctccacagc

SEQ ID NO: 535269 - DNA, 120 bp, Artificial Sequence
  ENSG00000166685_4 (sequence is synthesized)
ctgctccagctggattcttctagttcccgatacagtcccgtcctctcccggtttcctatactcatccggcaggtggcagccgccagccacttccggtcaactattctgcatgaaagcaag

SEQ ID NO: 535270 - DNA, 120 bp, Artificial Sequence
  ENSG00000166685_5 (sequence is synthesized)
atgttgctcaaatgccaaggtgtgtctgaccaagctgtggccgaggccctgtgctctataatgctcttagaagagagttctcctcgccaagccctcacagacttcctgctggccagaaag

SEQ ID NO: 535271 - DNA, 120 bp, Artificial Sequence
  ENSG00000166685_6 (sequence is synthesized)
gcaactattcagaaacttctcaaccagccacaccatggtgctggtatcaaggctcagatttgctcattagtggagttgctggccaccactctgaagcaagctcatgcccttttctacact

SEQ ID NO: 535272 - DNA, 120 bp, Artificial Sequence
  ENSG00000166685_7 (sequence is synthesized)
ttgccagaaggactgctgccagatccagccctgccatgtggcttgctcttctctactctggagaccatcacaggccagcatcctgccggaaagggcactggtgtcctgcaggaagagatg

SEQ ID NO: 535273 - DNA, 120 bp, Artificial Sequence
  ENSG00000166685_8 (sequence is synthesized)
aaactctgcagctggtttaaacacctgccagcatccatcgtcgagttccagccaacactccgaacccttgcacatcccatcagtcaggaatacctgaaagacacgctgcagaaatggatc

SEQ ID NO: 535274 - DNA, 120 bp, Artificial Sequence
  ENSG00000166685_9 (sequence is synthesized)
cacatgtgtaatgaagacattaaaaatgggatcaccaacctgctcatgtacgtgaagagcatgaagggtctcgcgggaatccgggacgccatgtgggagttacttaccaatgagtccacc

SEQ ID NO: 535275 - DNA, 120 bp, Artificial Sequence
  ENSG00000166685_10 (sequence is synthesized)
aatcacagctgggatgtgctatgtcggcggcttctggagaagccgctcttgttctgggaagatatgatgcagcaactgttccttgaccgattacagactctgacaaaagaaggctttgac

SEQ ID NO: 535276 - DNA, 120 bp, Artificial Sequence
  ENSG00000166685_11 (sequence is synthesized)
tccatctccagtagctccaaggagctcttggtttcagctttgcaggaacttgaaagcagcaccagcaactccccttcaaataagcacatccactttgagtacaacatgtcgctcttcctc

SEQ ID NO: 535277 - DNA, 120 bp, Artificial Sequence
  ENSG00000166685_12 (sequence is synthesized)
taatgacctgccttccgatgcggcctgggtcagcgtggcaaaccggggtcagtttgccagtagcggcctctccatgaaagcacaagccatcagcccttgtgtacagaacttctgttctgc

SEQ ID NO: 535278 - DNA, 120 bp, Artificial Sequence
  ENSG00000166685_13 (sequence is synthesized)
cctggattctaagctgaaggttaaactagatgacctcctggcttacctcccctctgatgactcatcactgcccaaggacgtttctcccacacaggccaagagttctgcctttgacagata

SEQ ID NO: 535279 - DNA, 120 bp, Artificial Sequence
  ENSG00000166685_14 (sequence is synthesized)
cgcagatgcggggaccgtgcaggagatgctgcggactcagtccgtggcatgcatcaagcacatcgtggactgcatccgggcagagctacagagcattgaagagggtgtgcaagggcaaca

SEQ ID NO: 535280 - DNA, 120 bp, Artificial Sequence
  ENSG00000166685_15 (sequence is synthesized)
ggatgccctcaacagtgccaagctgcactcagttcttttcatggccagactctgccagtccctgggagagctgtgcccccatctgaagcagtgcatcctgggaaaatcagagagctcaga

SEQ ID NO: 535281 - DNA, 120 bp, Artificial Sequence
  ENSG00000166685_16 (sequence is synthesized)
gaaaccagcaagggagtttagggctctgagaaaacagggaaaggtgaaaactcaggaaatcattcctacacaggccaagtggcaagaggttaaagaagtactcctccagcagagcgtgat

SEQ ID NO: 535282 - DNA, 120 bp, Artificial Sequence
  ENSG00000166685_17 (sequence is synthesized)
gggctaccaggtctggagcagtgcagttgtgaaagttttgattcatggattcacccagtcattacttctagatgatgctggctcagttctggccacagccaccagctgggatgagctaga

SEQ ID NO: 535283 - DNA, 120 bp, Artificial Sequence
  ENSG00000166685_18 (sequence is synthesized)
aattcaggaggaggcagagtctggcagcagtgtcacatccaagatccgactccctgcacagccgtcctggtatgtacagtccttcctgtttagtttatgccaggaaattaatcgggttgg

SEQ ID NO: 535284 - DNA, 120 bp, Artificial Sequence
  ENSG00000166685_19 (sequence is synthesized)
aggccatgccttgccaaaggtgacattacaggagatgctgaaaagctgtatggttcaagtagtagctgcctatgagaaactctccgaagaaaaacagattaagaaagaaggtgcatttcc

SEQ ID NO: 535285 - DNA, 120 bp, Artificial Sequence
  ENSG00000166685_20 (sequence is synthesized)
agtcacccagaaccgggcgctgcagctgctttatgatctgcgttacctcaacattgttctgacagccaagggtgacgaggtgaagagtggccggagcaagccagactccagaattgagaa

SEQ ID NO: 535286 - DNA, 120 bp, Artificial Sequence
  ENSG00000166685_21 (sequence is synthesized)
agtgactgaccacctggaagccctcattgatccatttgacctggacgttttcacgccacacctcaacagcaaccttcatcgcctggtgcagcgaacttctgttctgtttggattggtgac

SEQ ID NO: 535287 - DNA, 120 bp, Artificial Sequence
  ENSG00000166685_22 (sequence is synthesized)
tggtacagagaatcagctcgccccccggagcagtacgttcaactcccaagaaccccataacatcctgccactggcatccagtcagatcaggtttggacttctcccactgagcatgacaag

SEQ ID NO: 535288 - DNA, 120 bp, Artificial Sequence
  ENSG00000166685_23 (sequence is synthesized)
cactcgaaaggctaaatcaaccagaaacatcgaaacaaaagctcaggttgtccccccggcacgctccacagctggtgacccgacagttcctggctccttgttcagacagcttgtcagtga

SEQ ID NO: 535289 - DNA, 120 bp, Artificial Sequence
  ENSG00000166685_24 (sequence is synthesized)
agaagacaacacgtctgcaccttcattattcaaacttggctggctctctagtatgactaagtaacatggcaacacatctgtctctccctaaataaatactaccacattatttcttctaaa

SEQ ID NO: 535290 - DNA, 120 bp, Artificial Sequence
  ENSG00000166685_25 (sequence is synthesized)
gcggctgcgcctgcgccaacgccgtcagtccgcggggcccgatcccgacacctaactccacagagaagctctgctcctaagggaaagggaagacttcagccacagtttcgcagccaacct

SEQ ID NO: 535291 - DNA, 120 bp, Artificial Sequence
  ENSG00000166685_26 (sequence is synthesized)
ggcgacctcacctctctggcgacctcacttcccagccggctccgtttaagaaaaccccgcgcaggaccgcgcccgcccccgccccctcgcgcccgccccctcgggtaacaaacatggccc

SEQ ID NO: 535292 - DNA, 120 bp, Artificial Sequence
  ENSG00000166685_27 (sequence is synthesized)
aaaagctcagtacgatgccaactgttaagcctgcaggaatcctcctgggtatttctgaattgtgctgtgtgcatgtgtgtttgaaagctcaaacagcttgtcttcttacagcatcgagtt

SEQ ID NO: 535293 - DNA, 120 bp, Artificial Sequence
  ENSG00000166685_28 (sequence is synthesized)
gtttgctttattgttagacacaatattagcagtgtatcctttccgtattccctaccatcgaacccattaagatctaaaatccttgtcaagtatctggctttaaaagttgggagatggtag

SEQ ID NO: 535294 - DNA, 120 bp, Artificial Sequence
  ENSG00000166685_29 (sequence is synthesized)
aaacaaacaaacaaacaaacaaaaacccaagaaggaacaaatcctgattttggaaagaattcagtaagtcttctctaatgagcctcctcaaaacacttctccttcaggcaaggagccttt

SEQ ID NO: 535295 - DNA, 120 bp, Artificial Sequence
  ENSG00000166685_30 (sequence is synthesized)
caaaacacttctccttcaggcaaggagcctttttttcccctttagaacaaccatttacagcatctgaggccttttttaagggccaggtctcttccctgctgttaggtttttaattttaag

SEQ ID NO: 535296 - DNA, 64 bp, Artificial Sequence
  ENSG00000166685_31 (sequence is synthesized)
cagatcaggtaaaggctgccaagaggcttctgcggggcacttcgggaggccaaggtggacggat

SEQ ID NO: 535297 - DNA, 120 bp, Artificial Sequence
  ENSG00000166685_32 (sequence is synthesized)
caccgagccacccatgatcagctcccttttaaataactgattaagaactgaatgacaaaatgcactaatgctgcttttaatggcggcgcaatagagaagtacaaggttttactagcttga

SEQ ID NO: 535298 - DNA, 120 bp, Artificial Sequence
  ENSG00000166685_33 (sequence is synthesized)
gctactagaaggtgtaaaagatgcccgctgacactaccaagtagcctcttaatagaaatgtagaaaatatacaggacagggtggagatgagctcttgaatttagtagggtgaaagagtta

SEQ ID NO: 535299 - DNA, 120 bp, Artificial Sequence
  ENSG00000166685_34 (sequence is synthesized)
actgccaacccggcactatcattgtacttgtttggagaaaatctgttttgttctggtgatgatggttttatcttcccttttagttgggtgggaagtaacagaaaatttgtttccccaaaa

SEQ ID NO: 535300 - DNA, 120 bp, Artificial Sequence
  ENSG00000166685_35 (sequence is synthesized)
ctttcagttctgcccacattaggttagcaggctgtggagagaagtgcctgtgtctacccttttcccaagacagtcctcatttccaaattctagttttgtcacaaaggctcatgctgttcc

SEQ ID NO: 535301 - DNA, 120 bp, Artificial Sequence
  ENSG00000166685_36 (sequence is synthesized)
gtgtcctcttcaaatctggaccgacagcaaagtcctctgactagagccatcgtgcttctcagctccgcttgtgtgtgccgtgtggactccgagtggcgtcgcgcggagggcgagtgggca

SEQ ID NO: 535302 - DNA, 120 bp, Artificial Sequence
  ENSG00000166685_37 (sequence is synthesized)
agtgccctccttatagacagaacgggggaaagggtggacttcacttagacatcatgcttgagggtgacttaagcactatcatcagtgacaaacgtactaagccagcaactaagtagaata

SEQ ID NO: 535303 - DNA, 120 bp, Artificial Sequence
  ENSG00000166689_0 (sequence is synthesized)
gctcggcgaacatggcggcggcgacggtcgggcgggacactttacctgagcattggtcctacggggtgtgccgggatggccgcgtcttcttcatcaatgaccagctccgctgcacgacct

SEQ ID NO: 535304 - DNA, 120 bp, Artificial Sequence
  ENSG00000166689_1 (sequence is synthesized)
ggctgcatccgcgcaccggggagcccgtcaactcgggccacatgatccgctcagacctgccccgcggctgggaggagggcttcacggaggagggcgccagctacttcatcgaccataacc

SEQ ID NO: 535305 - DNA, 120 bp, Artificial Sequence
  ENSG00000166689_2 (sequence is synthesized)
agcagaccacagcattcaggcatcctgtgacgggacagttttctccagaaaatagtgaattcattcttcaagaagagccgaatccacatatgtcgaagcaagacagaaaccaaagaccgt

SEQ ID NO: 535306 - DNA, 120 bp, Artificial Sequence
  ENSG00000166689_3 (sequence is synthesized)
ccagcatggtcagtgaaacatccacggctgggaccgcctccaccctggaggccaagcctggacccaagatcataaagtccagcagtaaagtccacagctttgggaagagagaccaggcca

SEQ ID NO: 535307 - DNA, 120 bp, Artificial Sequence
  ENSG00000166689_4 (sequence is synthesized)
ttcggaggaaccccaatgttcccgtggtggtgaggggctggctgcacaagcaggacagttctgggatgaggctgtggaaaaggaggtggtttgtgcttgctgattactgcttattttact

SEQ ID NO: 535308 - DNA, 120 bp, Artificial Sequence
  ENSG00000166689_5 (sequence is synthesized)
ataaagacagccgagaagaagcggtcctcgggagcatccccttgcccagctacgtgatctctcctgtggcccctgaggatcgcataagccgcaaatattcctttaaggctgtgcacacgg

SEQ ID NO: 535309 - DNA, 120 bp, Artificial Sequence
  ENSG00000166689_6 (sequence is synthesized)
ggatgcgagcgctcatctataacagctccacagcgggctctcaggccgagcagtcaggcatgaggacctactacttcagtgccgacacccaggaggacatgaacgcttgggtcagggcca

SEQ ID NO: 535310 - DNA, 120 bp, Artificial Sequence
  ENSG00000166689_7 (sequence is synthesized)
tgaaccaggctgcacaggtgctgtctcgatcgtcactgaagagggatatggagaaggtggagcggcaggctgtcccccaggccaaccacacagagtcctgtcacgaatgtggccgggtgg

SEQ ID NO: 535311 - DNA, 120 bp, Artificial Sequence
  ENSG00000166689_8 (sequence is synthesized)
gacccggacatacgagagattgtcctcatcgtggccatgatgacattgtcaacttcgagaggcaggagcaggagggagagcagtaccgttcccagagggacccactggagggcaagcggg

SEQ ID NO: 535312 - DNA, 120 bp, Artificial Sequence
  ENSG00000166689_9 (sequence is synthesized)
accggagcaaggccaggtctccgtactcgccagccgaggaggatgccttgtttatggatttacccactggcccaagaggccagcaggcacagccccaacgggcagagaagaatggaatgc

SEQ ID NO: 535313 - DNA, 120 bp, Artificial Sequence
  ENSG00000166689_10 (sequence is synthesized)
tgcctgcctcatatggcccaggagaacagaatgggactggtgggtaccagcgggcctttcctcccaggaccaaccctgaaaaacacagccaaaggaagagcaatctggcccaggtggagc

SEQ ID NO: 535314 - DNA, 120 bp, Artificial Sequence
  ENSG00000166689_11 (sequence is synthesized)
actgggcaagggcccagaaaggggatagcaggagtcttcccttggaccagacgcttcctcgccagggtcctggccaatccctgtccttcccagaaaactaccagactcttcccaagagca

SEQ ID NO: 535315 - DNA, 120 bp, Artificial Sequence
  ENSG00000166689_12 (sequence is synthesized)
cccgacacccctcggggggctcctcgccacctccccgaaacctgccaagtgactacaagtatgcgcaggaccgagccagccacctgaagatgtcgagtgaagagcgccgggcgcaccggg

SEQ ID NO: 535316 - DNA, 120 bp, Artificial Sequence
  ENSG00000166689_13 (sequence is synthesized)
atggcaccgtgtggcagctctacgagtggcagcagcgccagcagttccggcacggcagccccacagcgcccatctgccttggctccccagagttcaccgaccagggccggagcaggagca

SEQ ID NO: 535317 - DNA, 120 bp, Artificial Sequence
  ENSG00000166689_14 (sequence is synthesized)
tgctagaggtgccccgctccatctctgtgcctccatctccctcggacatccctcccccaggacccccaagggtcttcccaccccggcggccacacacaccagcagagcgagtcacagtga

SEQ ID NO: 535318 - DNA, 120 bp, Artificial Sequence
  ENSG00000166689_15 (sequence is synthesized)
agccaccggaccagaggaggagtgtggacatctcgctgggggattctccaaggagggcacggggccacgctgtcaagaactcatctcatgtggaccgacgctccatgccctccatgggtt

SEQ ID NO: 535319 - DNA, 120 bp, Artificial Sequence
  ENSG00000166689_16 (sequence is synthesized)
acatgacccacaccgtcagcgctcccagtttacatggaaaatcggctgatgatacctacctccagctgaagaaagacctggagtacctggatctaaagatgacaggccgggaccttctca

SEQ ID NO: 535320 - DNA, 120 bp, Artificial Sequence
  ENSG00000166689_17 (sequence is synthesized)
aggatcgaagtctgaagcctgtgaagatcgctgagagcgacactgacgtcaaactgagcatcttctgtgaacaagacagggtcctccaggacttggaagacaagatacgagcccttaaag

SEQ ID NO: 535321 - DNA, 120 bp, Artificial Sequence
  ENSG00000166689_18 (sequence is synthesized)
agaacaaagaccagctagaatctgtgctggaggtgttgcacagacagatggagcagtaccgagaccagccccagcacttggagaagattgcctaccagcagaagttgctgcaggaggacc

SEQ ID NO: 535322 - DNA, 120 bp, Artificial Sequence
  ENSG00000166689_19 (sequence is synthesized)
ttgtccatatccgagctgagctctccagagagtccactgagatggaaaatgcttggaacgaatacctgaagttggagaatgatgtggaacagctgaagcagaccctgcaggagcaacaca

SEQ ID NO: 535323 - DNA, 120 bp, Artificial Sequence
  ENSG00000166689_20 (sequence is synthesized)
atgtcactgcaggcctgagtgcaaataaagagaacttcagaattctagtggagtcagtaaaaaatccggagagaaaaacggtgcctttgtttcctcacccgcctgtgccttcactctcaa

SEQ ID NO: 535324 - DNA, 120 bp, Artificial Sequence
  ENSG00000166689_21 (sequence is synthesized)
cttctgagagcaagccgcccccacagcccagtcctcccaccagccctgtgcggacccctctggaggttcgactcttcccccagctgcaaacctacgtgccgtaccgacctcacccacccc

SEQ ID NO: 535325 - DNA, 120 bp, Artificial Sequence
  ENSG00000166689_22 (sequence is synthesized)
agctgaggaaagtgacatccccccttcagtcaccaactaaggcgaagcccaaagttgaagatgaagcacctcccaggcccccactccccgaactctacagcccagaggaccagcccccgg

SEQ ID NO: 535326 - DNA, 120 bp, Artificial Sequence
  ENSG00000166689_23 (sequence is synthesized)
ctgtgccgcctctgccaagagaggccaccatcatccggcacacatctgtgcggggcctcaagcggcagtcagacgagaggaagcgagaccgggagctggggcagtgtgtgaatggggatt

SEQ ID NO: 535327 - DNA, 120 bp, Artificial Sequence
  ENSG00000166689_24 (sequence is synthesized)
ccagggtggagctgcggtcgtatgtcagtgagcctgagctggcgaccctcagcggggacatggcccagccctccctaggacttgtgggccctgagagcaggtaccagacgctgccaggca

SEQ ID NO: 535328 - DNA, 120 bp, Artificial Sequence
  ENSG00000166689_25 (sequence is synthesized)
gagggctctcagggtccacgtcaaggctccagcagtcgtccaccattgctccctacgtcacactccggaggggtctcaatgccgaaagcagcaaggcgaccttccctagacctaagagtg

SEQ ID NO: 535329 - DNA, 120 bp, Artificial Sequence
  ENSG00000166689_26 (sequence is synthesized)
ccttggagcgcctgtactcaggggatcaccagcgaggcaagatgagtgcagaggagcagctggagcgcatgaagcgacaccagaaggccctggtccgagagcgcaagaggacactgggcc

SEQ ID NO: 535330 - DNA, 120 bp, Artificial Sequence
  ENSG00000166689_27 (sequence is synthesized)
aaggggagaggacgggcctgccctcatctcgctacctcagccggccgctccctggagatcttggctcagtatgttaggaggggccaggcagcggggcagggacagggagccgagtgcccc

SEQ ID NO: 535331 - DNA, 120 bp, Artificial Sequence
  ENSG00000166689_28 (sequence is synthesized)
tcagagtcccccaaacacaagcacatcacacctcccagtgagagagctgtccattgacctacatggttcagagaacaccccacggggctgtttgtccacgacccaggctggacgaatgcc

SEQ ID NO: 535332 - DNA, 120 bp, Artificial Sequence
  ENSG00000166689_29 (sequence is synthesized)
tggtcagagggtgacctgaaccagagctggagtgaggatcaaacaggcccaggagcctgaggaaatacccagtcagtcctcccagccgcgatggagaggggcctttgcaggcgttcggaa

SEQ ID NO: 535333 - DNA, 120 bp, Artificial Sequence
  ENSG00000166689_30 (sequence is synthesized)
tctcggctgaattcaggacctgggaatacagggttcagagaggagaggaggaagatggtgacatgatttggttagaagcacaagcaaactgatcagcctcccagacctgccagcagatgc

SEQ ID NO: 535334 - DNA, 120 bp, Artificial Sequence
  ENSG00000166689_31 (sequence is synthesized)
tgtgtgagggtgatggagcacggggtcacacccctgccccaagggccactggtctccctgggcttgcagtgcagaggcctcagggtgtctgggattgctggggaggcctgtgctgccccc

SEQ ID NO: 535335 - DNA, 120 bp, Artificial Sequence
  ENSG00000166689_32 (sequence is synthesized)
tggtggcgcttcctggcgctgcgccctgtccacagtcaccttaggtccctttggaaacattccatttgacttttccctgttgtttgaaatcccatgtttccctaaacctctagcctgatt

SEQ ID NO: 535336 - DNA, 120 bp, Artificial Sequence
  ENSG00000166689_33 (sequence is synthesized)
gttctttccctaattcattgcacaagctcctttgcttttagtgttaccgctcattgcctctctaatcctgcctgattgtgtttacagaagcttctgatttgcattgaacatgctctaact

SEQ ID NO: 535337 - DNA, 120 bp, Artificial Sequence
  ENSG00000166689_34 (sequence is synthesized)
ggcctgtgctacttattaccgggcttgtaatagcggttcttgtctccatagcctgttgagtgttcccagatgtgactcacctttctgctgccctcttcatgcaggcctactgactcataa

SEQ ID NO: 535338 - DNA, 120 bp, Artificial Sequence
  ENSG00000166689_35 (sequence is synthesized)
ttcacttgtcccaaaagccaccccacaagcctgagccaacctgctgcctgacgccacagtcattggcagaggtctgggcattattaatttataaaaatccatgctttacacctggacagt

SEQ ID NO: 535339 - DNA, 120 bp, Artificial Sequence
  ENSG00000166689_36 (sequence is synthesized)
agacagggacttcagagattgcacgtttgaatacattctcccaagactgaggttgttcggttttaattcctgtagtccaatcacacaatttcttatggaaaaccttttgtgtttctggta

SEQ ID NO: 535340 - DNA, 120 bp, Artificial Sequence
  ENSG00000166689_37 (sequence is synthesized)
tttaataacttgaagggatagcaaaatatactgtgtattcagagggcctctctgcagctgctagctcagacaccaaaggggtaaggcccaggacattcatatctttaaaagctgcaaacc

SEQ ID NO: 535341 - DNA, 120 bp, Artificial Sequence
  ENSG00000166689_38 (sequence is synthesized)
tggtaacctttaaacttttaaaacaaatgtcatatggggtaacactgaccttttataatttgatgtctcaaatgtagagattatctaaaaatcgtaacttgaataccttgtaatttttct

SEQ ID NO: 535342 - DNA, 120 bp, Artificial Sequence
  ENSG00000166689_39 (sequence is synthesized)
cttaaaaaagaagacttgtgtaagtctctgcatcaacgccaataaacatgttgcttaataataatggattggcgtggttcttccccaggataccttatagagtctagtgaacttttcctg

SEQ ID NO: 535343 - DNA, 120 bp, Artificial Sequence
  ENSG00000166689_40 (sequence is synthesized)
tttgtggaaacaatcaggctgggtttaaatgaggacttgtctctatttggagcatttgtgagcgtgtaaggaaatgagtgttttctttgtgaatcattaaattgattttttcatctttgg

SEQ ID NO: 535344 - DNA, 120 bp, Artificial Sequence
  ENSG00000166689_41 (sequence is synthesized)
tggaagcgtgagcaggactttgacctgcagttgctggaacgggtcgtgcaaggggaaaaaaaggacaaggaggagaatggctggttgaaagtgcaggccatgcctgtcactgagttggac

SEQ ID NO: 535345 - DNA, 120 bp, Artificial Sequence
  ENSG00000166689_42 (sequence is synthesized)
ctggagcctcaagactatgacttggacatcagcagagagctgtccaaaccagagaaggtgtcaatccctgagcgctacgtggagctagatcccgaagagccacccagccttgaggagctg

SEQ ID NO: 535346 - DNA, 120 bp, Artificial Sequence
  ENSG00000166689_43 (sequence is synthesized)
caggcgcggtaccgcaaagccgagaagatccgcaacatcctcgcccggtcaagcatgtgcaacctacagccgacctcaggccaggaccagaacagtgtggctgacctggacttgcagctg

SEQ ID NO: 535347 - DNA, 120 bp, Artificial Sequence
  ENSG00000166689_44 (sequence is synthesized)
caggagcaggagcgcatcatcaacatctcctacgccctggcctccgaggcctcccagcgtagcaagcaggtggcagcccaggcagtgactgacccgtgacccagcatgcaaagaagcctg

SEQ ID NO: 535348 - DNA, 120 bp, Artificial Sequence
  ENSG00000166689_45 (sequence is synthesized)
gagccaggggcccagtggaaccagcttcctccaaggagatgacctttctgcccccaaggaaaccccttccagctgagcagggaatccggccggaggaaggagcagcttaccgactgcggg

SEQ ID NO: 535349 - DNA, 120 bp, Artificial Sequence
  ENSG00000166689_46 (sequence is synthesized)
tgttcaccacaggccaggccctaatatgcacccactagtttagctcagactcctctctacatatgaatggcaaaggcacttttgatatacactgtaaaatacactgtattttagaatcgg

SEQ ID NO: 535350 - DNA, 120 bp, Artificial Sequence
  ENSG00000166689_47 (sequence is synthesized)
aatctattttctaatgttcccctcaagggctgagtggcaggaaggttgaggatgcaggactttgcagctgcacgtacagattcaggtacttctgggtgacaggtgttgtgggggcaggaa

SEQ ID NO: 535351 - DNA, 120 bp, Artificial Sequence
  ENSG00000166689_48 (sequence is synthesized)
gggcggggcaagccgaggctagtccaacttccaatgacctcaggagaaagtgagatttaaagaggtgttcccagtagactccagcaagaggctggttggcgtgctgtctgggagaagagg

SEQ ID NO: 535352 - DNA, 120 bp, Artificial Sequence
  ENSG00000166689_49 (sequence is synthesized)
ggcccttggctgcagagatcagctgtccctgacctgatgaccagctctgtgtgaaactccacgaggatcacacgtggagcccaagtctgtgccttgccccttgggtttggcttaggggca

SEQ ID NO: 535353 - DNA, 120 bp, Artificial Sequence
  ENSG00000166689_50 (sequence is synthesized)
ggcaacagtgtgttcaagaggactggggcccacaacctgcccccaggcttcctccagcaaaaggctcttgtcagaaagaaaaaagcagtttgctatctttttttttttttgagatggagt

SEQ ID NO: 535354 - DNA, 83 bp, Artificial Sequence
  ENSG00000166689_51 (sequence is synthesized)
ggtttcttcatgttggtgcgcttcagcatcccaaagtgttgggattacagccgtgagccaccacgcccagcctgctttcattt

SEQ ID NO: 535355 - DNA, 120 bp, Artificial Sequence
  ENSG00000166689_52 (sequence is synthesized)
attacagccgtgagccaccacgcccagcctgctttcatttttaacagtacacattgaaatacagaaaaggtgagaggaagcaactttcattgtatcgtagcaataaactccacactgggt

SEQ ID NO: 535356 - DNA, 120 bp, Artificial Sequence
  ENSG00000166689_53 (sequence is synthesized)
gacatctacctagaaatcccttccctctaaccaggccatgatgggaacctttgctgcctgcccttggagaaccccggattggcttccctgggactcaggtctggtggcaggagggcagca

SEQ ID NO: 535357 - DNA, 120 bp, Artificial Sequence
  ENSG00000166689_54 (sequence is synthesized)
gtgtgcccccaccatccctcatggcctgccgccagcagggccataatggcaggactttgatttgacttccagccccacatgaggaggggggctaccaagccaggtgcagtgtttgtggcc

SEQ ID NO: 535358 - DNA, 120 bp, Artificial Sequence
  ENSG00000166689_55 (sequence is synthesized)
ctttatttaagttgttttcttatattattctgcatataaacaatgacgtttaaatggaaaaaacaacaacaacgaaaacctccattgggtggagccacactttaaatgaaaatttctctt

SEQ ID NO: 535359 - DNA, 120 bp, Artificial Sequence
  ENSG00000166689_56 (sequence is synthesized)
tgactatgctcagaaaaaaaaatagaattttgaatatatctagcagttgttgtctatttttaactaactccatatgctgccagtatcgacttcatgacatttgccaaaataaaattttat

SEQ ID NO: 535360 - DNA, 120 bp, Artificial Sequence
  ENSG00000166689_57 (sequence is synthesized)
ttttgcctttataagattttcttggaaaaaatgaaatgaatattttgcaagaaaaagttaatttaaaaatgtaatggtttgcaaaaaaaatgtgatgtacagattaaaatattaacctga

SEQ ID NO: 535361 - DNA, 120 bp, Artificial Sequence
  ENSG00000166689_58 (sequence is synthesized)
gtgcttcctctgtggcccctgatgtgttggtctgctgtggttccttgttcccaaagctgcacgatgtaaataattcacatgtgaaacctcgagttatggaaactcttggtgttcataact

SEQ ID NO: 535362 - DNA, 120 bp, Artificial Sequence
  ENSG00000166689_59 (sequence is synthesized)
acatttctgatagaaaggccaggaggatgtagactctgtccttgttcaggtccccaccttgctgaaggcgccagagctcgtgtagggccaatgagccggctcaggctgagcactgctgag

SEQ ID NO: 535363 - DNA, 120 bp, Artificial Sequence
  ENSG00000166689_60 (sequence is synthesized)
actctaagtatgtcatacagtattttagcggaatggcacagtgtttacggcagtctgtttttaaattaggtaggcaagctggactgctgaaagctactctgaaatttctccctggatcgt

SEQ ID NO: 535364 - DNA, 120 bp, Artificial Sequence
  ENSG00000166689_61 (sequence is synthesized)
gggcattttccttgtctatgcttacctagaaagctatgaagcaggcttggttctagcactagtggggtttccagaggggatgctgcccctcagggcggggggctctgtctgaaatggtag

SEQ ID NO: 535365 - DNA, 120 bp, Artificial Sequence
  ENSG00000166689_62 (sequence is synthesized)
gttagtccacgggcgacttttccgcaaaagccccggagtgttggcgcaccagccaggttaccctgggtctgtaggatcagtccatgtcagattggggcgcagtaagtgaaggcgcgggtc

SEQ ID NO: 535366 - DNA, 120 bp, Artificial Sequence
  ENSG00000166689_63 (sequence is synthesized)
aggctcctatgccagtacaggctttgctttcccactccggcgggagtctgtgttgcagcgtgtttccctctgcctgctgagctccgggaggccagacactgcctttgaccccttgcccca

SEQ ID NO: 535367 - DNA, 120 bp, Artificial Sequence
  ENSG00000166689_64 (sequence is synthesized)
gacactgccccccatcagggacaaaggtcacccctgggctggcccccatcctctattggggaccttgctcctccatgccctggggaggaagaagagaaataagggtgggtcattgactgg

SEQ ID NO: 535368 - DNA, 120 bp, Artificial Sequence
  ENSG00000166689_65 (sequence is synthesized)
gtgagtgctccttggctgaggcagtcatgttctgtggctctgatgtggcctgttcctaccctttaaacctccactgtggcagtacctagcagtcctccctccagctccgtctcgctgacc

SEQ ID NO: 535369 - DNA, 120 bp, Artificial Sequence
  ENSG00000166689_66 (sequence is synthesized)
tctgggaatcccaccacactgcttccagccttcagctggtgcctcgtacccttctgcctgcagctctaggcctaggagtgagcagcagctgtcaggggggtctgggatgccaagagggag

SEQ ID NO: 535370 - DNA, 120 bp, Artificial Sequence
  ENSG00000166689_67 (sequence is synthesized)
gacctggcctgtcttcctctggcccacatcctgattctcttcctcttttgttacatctgtccccaggaacaatgataatagcagttactagaaagcctggcactgtttaagcactttata

SEQ ID NO: 535371 - DNA, 120 bp, Artificial Sequence
  ENSG00000166689_68 (sequence is synthesized)
tagacatgatattcacaacaatcctatgaggaaagtactgtcatccccattttagagacacagaaactaaggcccagagaaattaaataacttgccaattagctggtcattggtggaacc

SEQ ID NO: 535372 - DNA, 120 bp, Artificial Sequence
  ENSG00000166689_69 (sequence is synthesized)
ggaagacaatcccagtgctctggctccagagtcactgcaccctgtaggccggagtgctgggtggctgccaccaccttggccatctcagaccttccagagtgccactctaagactcagtga

SEQ ID NO: 535373 - DNA, 120 bp, Artificial Sequence
  ENSG00000166689_70 (sequence is synthesized)
gccctttccttaaatgctttcttgccagttgagtgtccttctcactgtcctcctcaccccaagttgggttgtgcagggtgcctaagaatggatcagggggtgaaaggcattcctgccccg

SEQ ID NO: 535374 - DNA, 120 bp, Artificial Sequence
  ENSG00000166689_71 (sequence is synthesized)
ccttcagccctggggatggcctctggggtggcctcagcccctcctgagctccctgtcacccactgtccaccaaggagggcatcctgcctttctctctggcctgtcagggtggcaggaggg

SEQ ID NO: 535375 - DNA, 120 bp, Artificial Sequence
  ENSG00000166689_72 (sequence is synthesized)
cgtgttgcttagaggaaatagttctctaaggccaagaggagcccaactagagtgtgcatgtgtgtgagagagagacaacgggaatgcagccagcagggtggctgtcctctgcgtgcccag

SEQ ID NO: 535376 - DNA, 120 bp, Artificial Sequence
  ENSG00000166689_73 (sequence is synthesized)
gtagcaagcaggtggcagcacagcagctggccctcctcccgcctaaaggccccctgtcttccaggacggtgccaccttaccccccttttaccaacggactccactacacctttgtctaac

SEQ ID NO: 535377 - DNA, 120 bp, Artificial Sequence
  ENSG00000166689_74 (sequence is synthesized)
aaggcggcaccaggccaagttggccagtgtgcgaaatttcgccatcagccagttactgcagcaccagctgacctttcccacctgccaggctgatgatacctacctccagctgaagaaaga

SEQ ID NO: 535378 - DNA, 120 bp, Artificial Sequence
  ENSG00000166689_75 (sequence is synthesized)
cccatgccaccccagcctgccaaatggggcatctggtgctgcaggagctgatgaggagtctaacacaccgcttaattcctgtgtgccccatctagcacagcagctggccctcctcccgcc

SEQ ID NO: 535379 - DNA, 120 bp, Artificial Sequence
  ENSG00000166689_76 (sequence is synthesized)
atgcccagctttgtgggtttacttagatatgttccccaaagcctgcagaaccctcgcttggttgcctgacccgttcttaccctttctcctcagtcttcccttggaccagacgcttcctcg

SEQ ID NO: 535380 - DNA, 120 bp, Artificial Sequence
  ENSG00000166689_77 (sequence is synthesized)
ctttaactcaaaggacttaccagcattactagaatcatcaaaaggttttggttttttcctaaaatgaaataggcatagaaatagcgaagtatggcccaagtttttgtccctctcatacta

SEQ ID NO: 535381 - DNA, 120 bp, Artificial Sequence
  ENSG00000166689_78 (sequence is synthesized)
tgaccctacctgccactgccaaggacttccacaccatccattataggatgaattttctttcctgagttctgatctcaaacaccatggttaaatctcttttaaattgttcgcctcccagat

SEQ ID NO: 535382 - DNA, 120 bp, Artificial Sequence
  ENSG00000166689_79 (sequence is synthesized)
cggaagaattggattctagagacatgaagtgcttgcctggttgattacctctagccactgctccccttggccacagtggggcagtgactcagagctggaactgtgttcctgcctggttgc

SEQ ID NO: 535383 - DNA, 120 bp, Artificial Sequence
  ENSG00000166689_80 (sequence is synthesized)
cagattttgtgtggggggtggagaggaacgagaatgaatgagcaggaacaagtggctgctggatttgtaacaccttgggaggcagctgctcaagaaccgaaattgagagacagcaggcag

SEQ ID NO: 535384 - DNA, 120 bp, Artificial Sequence
  ENSG00000166689_81 (sequence is synthesized)
gctgggaccgcctccaccctggaggccaagcctggacccaagttttgtgagagagacccataagaagtgttctccccaaatgacagatcaggaaactgaggccaagagggatatgtccct

SEQ ID NO: 535385 - DNA, 120 bp, Artificial Sequence
  ENSG00000166689_82 (sequence is synthesized)
tgtccagcagaacagatcataaagtccagcagtaaagtccacagctttgggaagagagaccaggccattcggaggaaccccaatgttcccgtggtggtgaggggctggctgcacaagcag

SEQ ID NO: 535386 - DNA, 120 bp, Artificial Sequence
  ENSG00000166689_83 (sequence is synthesized)
ctggagatcttggctcagggaagagaggctttgagcctgctctgttctcaacaacctgctcagcggtcaaaggcctgtgaggatgcaggtcctgggtcaacaggaagtcaccacggagct

SEQ ID NO: 535387 - DNA, 120 bp, Artificial Sequence
  ENSG00000166689_84 (sequence is synthesized)
ggacagtcatggttggatcttatcgtggaagcgtgagcaggactttgacctgcagttgctggaacgggtcgtgcaaggggaaaaaaaggacaaggaggagaatggctggttgaaagtgca

SEQ ID NO: 535388 - DNA, 120 bp, Artificial Sequence
  ENSG00000166704_0 (sequence is synthesized)
gaggaaaactcacagggtgcgtcgctggtaacccatgctcccataaagcctggcctctggaaagagacttgggaacgagccctgacgttctcagccgtcgagcttcacagagaagggtag

SEQ ID NO: 535389 - DNA, 120 bp, Artificial Sequence
  ENSG00000166704_1 (sequence is synthesized)
ctcgaattaggttccttatcttaaagagaataacagcagtcactttctcacaatcttgcgaacgccaaatggaaggatccctcgagagcgctgagaactcgccgagctcctcccgggaaa

SEQ ID NO: 535390 - DNA, 120 bp, Artificial Sequence
  ENSG00000166704_2 (sequence is synthesized)
cccggtaccacgaggcgccattttgcggatgggcaaaccgaggcccgcggggccgcgacttacccaggcctttttgcagtgggaggcgacggtggaggagggtggtctgggaccgggaca

SEQ ID NO: 535391 - DNA, 120 bp, Artificial Sequence
  ENSG00000166704_3 (sequence is synthesized)
acaaagtccatcctgccgccggcttcgacgcaggtgccagaaaggtcccaaccccgcccaggcagggcgaggcggcgcggcccaggaacctgtcatggcggcgccgctgcccgacgccgg

SEQ ID NO: 535392 - DNA, 120 bp, Artificial Sequence
  ENSG00000166704_4 (sequence is synthesized)
aagtgcccgcctggaactacagctcccagcagaccccgcggcgcgctccggtcgacgccggggaagcagccgccattgtccgcggctgaggttgggatttgctgtgttcctgggcaggtg

SEQ ID NO: 535393 - DNA, 120 bp, Artificial Sequence
  ENSG00000166704_5 (sequence is synthesized)
cctggtcaatcagtcctcgggatggcagccatcaacccgtgggcctcctggggtgcccttacggaccaatcttgggggatgacagctgttgacccatgggcctcctgggctctgtgtcct

SEQ ID NO: 535394 - DNA, 120 bp, Artificial Sequence
  ENSG00000166704_6 (sequence is synthesized)
cagtatcctgcctggcacgtggagggaagcctggaggaggggaggagggccactgggctcccagcagcccaggttcaggaaccagtgaccttcaaggacgtggccgtggacttcacccaa

SEQ ID NO: 535395 - DNA, 120 bp, Artificial Sequence
  ENSG00000166704_7 (sequence is synthesized)
gaagagtgggggcagctggaccttgttcagaggaccctgtaccgtgatgtgatgctggagacctatggtcacctgctctctgtgggaaatcagattgccaagcctgaggtcatctccctg

SEQ ID NO: 535396 - DNA, 120 bp, Artificial Sequence
  ENSG00000166704_8 (sequence is synthesized)
ttggagcaaggagaagagccgtggtcagtggagcaggcatgtcctcaacgcacttgtccagaatgggtgagaaatcttgaaagcaaagcattgatcccagcacagagcatttttgaggaa

SEQ ID NO: 535397 - DNA, 120 bp, Artificial Sequence
  ENSG00000166704_9 (sequence is synthesized)
gaacaatcccatggcatgaagttggaaagatatatatgggatgatccttggttctccaggttagaagttttgggatgtaaagaccaattagaaatgtaccacatgaaccagagtacagct

SEQ ID NO: 535398 - DNA, 120 bp, Artificial Sequence
  ENSG00000166704_10 (sequence is synthesized)
atgaggcagatggtcttcatgcaaaagcaagtactatcccagagaagctctgaattctgtggacttggggcagagtttagccagaacttaaactttgttccatctcagagagtttctcag

SEQ ID NO: 535399 - DNA, 120 bp, Artificial Sequence
  ENSG00000166704_11 (sequence is synthesized)
atagaacatttctataagcctgatacacatgctcaaagttggagatgtgactcagccataatgtatgcagataaggttacctgtgaaaataatgattatgacaaaactgtttatcagtcc

SEQ ID NO: 535400 - DNA, 120 bp, Artificial Sequence
  ENSG00000166704_12 (sequence is synthesized)
attcaacctatttaccctgcaagaatacaaactggagataatcttttcaaatgtactgatgctgttaaatctttcaatcatataatacattttggtgatcataaaggaattcacacagga

SEQ ID NO: 535401 - DNA, 120 bp, Artificial Sequence
  ENSG00000166704_13 (sequence is synthesized)
gaaaaactctatgaatataaggaatgccatcaaatctttaaccagagcccatcatttaatgaacacccaaggcttcatgttggagaaaaccagtataattacaaagaatatgagaatatc

SEQ ID NO: 535402 - DNA, 120 bp, Artificial Sequence
  ENSG00000166704_14 (sequence is synthesized)
ttttatttctcatcctttatggaacatcaaaaaattggtactgtagagaaagcgtataaatacaatgaatgggagaaagtctttgggtatgactctttccttactcaacatacaagcact

SEQ ID NO: 535403 - DNA, 120 bp, Artificial Sequence
  ENSG00000166704_15 (sequence is synthesized)
tacactgcagagaaaccctatgactacaatgaatgtgggacgtctttcatctggagctcttaccttattcaacataagaaaactcatactggagaaaaaccctatgaatgtgataaatgt

SEQ ID NO: 535404 - DNA, 120 bp, Artificial Sequence
  ENSG00000166704_16 (sequence is synthesized)
ggaaaagtttttaggaatcgctcagcccttacgaaacatgaacggactcacactggaataaaaccctatgaatgtaataaatgtggaaaagccttcagctggaattctcatcttattgta

SEQ ID NO: 535405 - DNA, 120 bp, Artificial Sequence
  ENSG00000166704_17 (sequence is synthesized)
gggaaatctttcaactggaactctcatcttattggacatcagaggactcatacaggagagaaaccttttgaatgtactgaatgtgggaaatcattcagctggagctcccatcttattgcc

SEQ ID NO: 535406 - DNA, 120 bp, Artificial Sequence
  ENSG00000166704_18 (sequence is synthesized)
catatgagaatgcatactggagagaaaccctttaaatgtgatgaatgtgaaaaagcttttagggactactcagcccttagtaaacatgaaagaactcattctggagcaaaaccatataaa

SEQ ID NO: 535407 - DNA, 120 bp, Artificial Sequence
  ENSG00000166704_19 (sequence is synthesized)
tgtactgaatgtggaaaatccttcagctggagctcccatcttattgcccatcagagaactcacacgggagagaaaccatataactgtcaggaatgtggcaaagcattcagagaacgctca

SEQ ID NO: 535408 - DNA, 120 bp, Artificial Sequence
  ENSG00000166704_20 (sequence is synthesized)
gccctcactaaacatgagataattcattctggaattaagccctatgaatgtaataaatgtggaaaatcctgtagccagatggctcaccttgttagacatcaaaggactcatactggagaa

SEQ ID NO: 535409 - DNA, 120 bp, Artificial Sequence
  ENSG00000166704_21 (sequence is synthesized)
aaaccctatgaatgcaataaatgtggaaaatccttcagtcagagctgtcaccttgttgctcatcggagaattcacactggtgagaaaccctataaatgtaatcagtgtgaaagatccttt

SEQ ID NO: 535410 - DNA, 120 bp, Artificial Sequence
  ENSG00000166704_22 (sequence is synthesized)
aactgtagttctcacctcattgcacaccggagaactcatactggagagaaaccatacaggtgtaatgaatgtgggaaagcatttaatgagagttcatcccttattgtacacctaagaaac

SEQ ID NO: 535411 - DNA, 120 bp, Artificial Sequence
  ENSG00000166704_23 (sequence is synthesized)
catactggagaaaagccctacaaatgtaatcattgtgaaaaagcattttgtaagaattcttcccttattattcatcagagaatgcatagtggagagaaacgctttatatgcagtgaatgt

SEQ ID NO: 535412 - DNA, 120 bp, Artificial Sequence
  ENSG00000166704_24 (sequence is synthesized)
ggaaaagcctttagtggtcactcagccctacttcaacaccagagaaatcacagtgaagagaaactgaattgaatttatgcgagtttttcgtttcttgtacatttgacaacacattgagga

SEQ ID NO: 535413 - DNA, 120 bp, Artificial Sequence
  ENSG00000166704_25 (sequence is synthesized)
aaaccctataaacataatcaagaggggacatttttcattaagagttcagtaagacttctcccacattatttactagaaaatatcatcttagaagaaaccccatgaaggaaaagaataggg

SEQ ID NO: 535414 - DNA, 120 bp, Artificial Sequence
  ENSG00000166704_26 (sequence is synthesized)
aaaagctttcagcagttatttagcccttactcaaaatcagataattaacaatgaaggaaactctaaactccccttatggtctaccagtaattcatacttgaggaccatgactgtggggaa

SEQ ID NO: 535415 - DNA, 120 bp, Artificial Sequence
  ENSG00000166704_27 (sequence is synthesized)
tgaggcatcttttagcaagagctctcaccaattgtagattggtgtgaattgctaagggaaaaaccttatgcagagaaaagtttttgactggaaatacactgttttgcatcaagctggagt

SEQ ID NO: 535416 - DNA, 120 bp, Artificial Sequence
  ENSG00000166704_28 (sequence is synthesized)
actggatggaaaactctacaataacattttgtgcataattgtagaaatacagattttgttgttataaggggagggtctgggtgcccaggagtagaatatgaagtgctaaatctgaatgta

SEQ ID NO: 535417 - DNA, 120 bp, Artificial Sequence
  ENSG00000166704_29 (sequence is synthesized)
agaaaaataatagtattgaatggggtatttactgttgattaacctccttagagaaaattaatgaatgagatgactaacggtagaaaagttattgcctaggagtgtgagactgatgttgct

SEQ ID NO: 535418 - DNA, 120 bp, Artificial Sequence
  ENSG00000166704_30 (sequence is synthesized)
ggacagaaagtgatccttagcccagtgtgtcagcgtccattgttactcatcactgcattgttgggcaattagtttgtaatttgttttaggcaatcactataaattataattatggacact

SEQ ID NO: 535419 - DNA, 120 bp, Artificial Sequence
  ENSG00000166704_31 (sequence is synthesized)
gcatcagtatacataacatgaaggaataaaaaggatacagaattgtatatacatacttactgtaacacatctaaaaaaatgtatatgggtaaggacctgaaagatccatggaaaagttaa

SEQ ID NO: 535420 - DNA, 120 bp, Artificial Sequence
  ENSG00000166704_32 (sequence is synthesized)
cccagttgagatttttaaaaagttttacaaatacatataacacttatgtgctgggctttcttttaaatgctttccaagtgttaacttgtttagtcccctttactctgagataggtactgt

SEQ ID NO: 535421 - DNA, 120 bp, Artificial Sequence
  ENSG00000166704_33 (sequence is synthesized)
taccccagttttacaaatggctaagctgaagcagagatgttgaaggatcctacctaaggggcacaactagtaagggagtagagctgagattggctccagagttcttgttttcagccacca

SEQ ID NO: 535422 - DNA, 120 bp, Artificial Sequence
  ENSG00000166704_34 (sequence is synthesized)
ttttatgctgcctctccagtgattttttttcccattttcttcagtgtttctatagcagagatttgataataaaaagaaaatcctaaacaatgagaaataaagttacctggtttctctgtc

SEQ ID NO: 535423 - DNA, 120 bp, Artificial Sequence
  ENSG00000166704_35 (sequence is synthesized)
agctgcggggcttggggggtcaggagagccggctgggagaggcggcgtcagggtgggtcctgcgcctgccctttccgcgccggctttgcgccgtcgttgccgtcggttctccagccagca

SEQ ID NO: 535424 - DNA, 120 bp, Artificial Sequence
  ENSG00000166704_36 (sequence is synthesized)
gcctgcctccggcctcccgcctccgggcgttcttcgttttctggtcggacgggcctgggtgaactctgctgcacgtcggctccgcgggcctttgtccccgaggccgcgccgggagctccc

SEQ ID NO: 535425 - DNA, 120 bp, Artificial Sequence
  ENSG00000166704_37 (sequence is synthesized)
tgtgtttctcctgggcctcccctatcattagctgctgcagtcatgggtcagagctggtgatgggctgaggacttttgaggatggaagggggtctgtctatcttggtacaaaattagaact

SEQ ID NO: 535426 - DNA, 120 bp, Artificial Sequence
  ENSG00000166704_38 (sequence is synthesized)
tgcggctctccagtttacaacagttggagtttgggtagggaaggaagcaactggaagttaatccttcctgagagcaggtagggagaattaggccgtttttagtgattcggagccttagtg

SEQ ID NO: 535427 - DNA, 120 bp, Artificial Sequence
  ENSG00000166704_39 (sequence is synthesized)
tcaaccagtctgtccacagtactgagctccaactctccctggcttgttgtggggcatgaagggcagcccttttggctggcagccccacttctctattgccaccttcactcatgtctttag

SEQ ID NO: 535428 - DNA, 120 bp, Artificial Sequence
  ENSG00000166704_40 (sequence is synthesized)
cacccgatttaggctgatgctgtgcagtgcctgctgtgcctgctgtgaagggaacaaggacaggtgtgagccttcaccctgaggagctcccagacccttttccagggttattcactcagc

SEQ ID NO: 535429 - DNA, 120 bp, Artificial Sequence
  ENSG00000166704_41 (sequence is synthesized)
taaggagatctcacggcctacctggagccacacgtgcagtgtgggacaggagaaacctgagacgggtagggtaggcctgcaggagcacagtcacctgatgagtcgggagatgggacagag

SEQ ID NO: 535430 - DNA, 120 bp, Artificial Sequence
  ENSG00000166704_42 (sequence is synthesized)
gcgcactcctgggccggacctcggcgcgggacaaaagccaaacgccccaggcgggcagaccccgatcctgctgcgccgccttcaagggggaccgccggccgcgagccaggttgggatttg

SEQ ID NO: 535431 - DNA, 120 bp, Artificial Sequence
  ENSG00000166704_43 (sequence is synthesized)
ctcctggggtgagtcaagagcctggtcagctgtgggctgccatattgtggcctctggctgtagtgctctgccacagctggggaatagaatggggaccaggtggggctttagggcaggtgg

SEQ ID NO: 535432 - DNA, 120 bp, Artificial Sequence
  ENSG00000166704_44 (sequence is synthesized)
aggggaaggctgcttcgtagacctgggccaagaggtgaaaagaatgcatcagccagttgggcacagcctggtgagtgggggtctggcctcctgcagcaccacaggggtcaggggtggcag

SEQ ID NO: 535433 - DNA, 120 bp, Artificial Sequence
  ENSG00000166704_45 (sequence is synthesized)
gcagcacactgtgtgaccagtgtttgagtgagactgactccagttagattttaggctggagaggccaggccctgaatgcttgctgcagaacctcagaagtcttgggatcaggcggcacca

SEQ ID NO: 535434 - DNA, 120 bp, Artificial Sequence
  ENSG00000166704_46 (sequence is synthesized)
gggtccaaaatgtggtgatgggtgtggaaagaagagggctgtgggaagcaggctggtgtttcaggcttcagtctgaccagggccttggagctatggaggagaggtataaggaaatcaaag

SEQ ID NO: 535435 - DNA, 120 bp, Artificial Sequence
  ENSG00000166704_47 (sequence is synthesized)
caggggcctttgtgattatggggacagggtggctcctgagagaaataggacaatggagttacttaggaaaggtgtcatctctctgccgtcctcctgcccagcctcctcaccagatgcagc

SEQ ID NO: 535436 - DNA, 120 bp, Artificial Sequence
  ENSG00000166704_48 (sequence is synthesized)
ctgacatattataaagtttatccttttaaagtgtgtaattcagtggtttctcgtatagtcacagaattgtgcaacaatcaccagtatctaattctagaacattttcatcaccctaaaaag

SEQ ID NO: 535437 - DNA, 120 bp, Artificial Sequence
  ENSG00000166704_49 (sequence is synthesized)
aaatcctgtacccattagtagtcactccctgtttcccctactccctcccaaccactagtgtactttctgtctctatgaatttgcctagtctggacatttcataaaaatggaatcataata

SEQ ID NO: 535438 - DNA, 120 bp, Artificial Sequence
  ENSG00000166704_50 (sequence is synthesized)
tggcacagccttttttgtctggcttttttcacttagcataatgtttgccttctcaagagttacccatattgtagcattgtgtcaatatttcttttaatgtaatgtaattacaatgtaaat

SEQ ID NO: 535439 - DNA, 120 bp, Artificial Sequence
  ENSG00000166704_51 (sequence is synthesized)
gtaataagtgtaattacaatgtaattacattgtaaaaaatgactgaggcagccatttttaacttcctgttttcagttttttagagttgtctctgtatttctaaatgggagattttttaaa

SEQ ID NO: 535440 - DNA, 120 bp, Artificial Sequence
  ENSG00000166704_52 (sequence is synthesized)
ttggttttttcctaattcattaaagttatatttactctgttaactccctgctatgaaagatgaagaaaaagagtttcattacttatttttaggtcttttatttttaagttaagataatga

SEQ ID NO: 535441 - DNA, 120 bp, Artificial Sequence
  ENSG00000166704_53 (sequence is synthesized)
atcaagcagatgtgagatacttggatataaaacaagatttaaaaatgatgtctctactttgtgcctccccctcaaattaaaaaatattattgaaaccgcccacagtttcaaatctggtgg

SEQ ID NO: 535442 - DNA, 120 bp, Artificial Sequence
  ENSG00000166704_54 (sequence is synthesized)
gtgaagtccatcataagtatgctgttcccacttggcagtgttgctatccctggtccaggtgagatgggaagcagaagggcctgaaccatatgatgcaaggtgattgttgcctggcatcag

SEQ ID NO: 535443 - DNA, 120 bp, Artificial Sequence
  ENSG00000166704_55 (sequence is synthesized)
aacttgggcaactatgaggtttgctgctcttacaatgtacagtcattattaaatcctaagacagaataatcagtagtgaagctagactagcctgaaagatggcccctgaatcagactctg

SEQ ID NO: 535444 - DNA, 120 bp, Artificial Sequence
  ENSG00000166704_56 (sequence is synthesized)
aggagtagaagttagctgtaataaaacactgcgaagaagccctgttaaccaccatgctacactctgctgttaatttatgctaggctttctgagaattatctaagttaatgctgagaaaat

SEQ ID NO: 535445 - DNA, 120 bp, Artificial Sequence
  ENSG00000166704_57 (sequence is synthesized)
aaaacagaattaaaaataacaacaccctccaatgtctgaagagttgtgatttctgataacatgctcctggctggcccccctccccacactctggattttttcctgtgggaaactcggatt

SEQ ID NO: 535446 - DNA, 120 bp, Artificial Sequence
  ENSG00000166704_58 (sequence is synthesized)
tgactgctgtgtgtttttaactaagtgagatcttcaggaatgcaaaagaaccctgtgtccctttattgttccctccaagttaagtatttattgaaataaagcatttatctggtgaaaaca

SEQ ID NO: 535447 - DNA, 120 bp, Artificial Sequence
  ENSG00000166707_0 (sequence is synthesized)
ccggcccgtcacgctcttttgtctcagtcgccagagactgaaagcaaccgcggctgcccggagggccgaactggagggtgggcgcagccttggctgccttgggaaccgtgctgcctcgac

SEQ ID NO: 535448 - DNA, 120 bp, Artificial Sequence
  ENSG00000166707_1 (sequence is synthesized)
tcggctacccctcgctgggcggtcgtgcgcactcgctaggtcgggcagccccgggtcgcttagcggccgaggaggcggcagagatcccgttcccctgcagagctacggggaccggaaggc

SEQ ID NO: 535449 - DNA, 120 bp, Artificial Sequence
  ENSG00000166707_2 (sequence is synthesized)
gaaacagagctgtggacgcgggagcacatgctgcccaccagtggagcacaagtaaagaaagaacgcgcgattgcccggcgcggagaggggtgggggaagccccgccaggactgggcggcg

SEQ ID NO: 535450 - DNA, 120 bp, Artificial Sequence
  ENSG00000166707_3 (sequence is synthesized)
cccggcttggagaatcagtaactgcgaggcaggggatggagcactcccttggcctggttgcgctgaggaaggagttgtggttcatctggatgctgccgactggataggatttaggatttg

SEQ ID NO: 535451 - DNA, 120 bp, Artificial Sequence
  ENSG00000166707_4 (sequence is synthesized)
cctggattaaggtgggtgggggtgttgtcgtaggtcgggggtgttgttgggtgtcgggggcggggtgtgttcggggaggtggcaaggggcgggaggagacgatcgcaagctgtcttgaac

SEQ ID NO: 535452 - DNA, 120 bp, Artificial Sequence
  ENSG00000166707_5 (sequence is synthesized)
cccttttgcatctcctcatctcttcctgggaaggaatatgagggtgggaggttatccaacttctagtctctttctccctggcaggtcatcaaagccgaatccgaacttgaattctgtgcg

SEQ ID NO: 535453 - DNA, 120 bp, Artificial Sequence
  ENSG00000166707_6 (sequence is synthesized)
gcggattgcagagctgtcttgaggccctgaggactgggatctgcgacacccagtggacaaaagtcggccgtaccccagaggctaattttctcacggcaggcacctgttgcagaggctgca

SEQ ID NO: 535454 - DNA, 120 bp, Artificial Sequence
  ENSG00000166707_7 (sequence is synthesized)
cgtaaaataaaggcgaacgctagtttccgagctcatgtaagaatctgagaaataacgggggaaacgttgacaagggggtgtgattgagacctgaggccatgaggttaatggtttcttatt

SEQ ID NO: 535455 - DNA, 120 bp, Artificial Sequence
  ENSG00000166707_8 (sequence is synthesized)
atcataaatctgtgacacacaaccattgagttccgttttgagggcccagtatcagctcccaacactatgtcatctagaattagaagcaacagttgtcgcccctcctggagtacaggcagg

SEQ ID NO: 535456 - DNA, 120 bp, Artificial Sequence
  ENSG00000166707_9 (sequence is synthesized)
aggggatggatgtggctctgaaaaactacctactagcccagggacacctgctagctctggaatgttgtaattgccagtctcctgcagggtattgttaaggcactgggcagatataaaatg

SEQ ID NO: 535457 - DNA, 120 bp, Artificial Sequence
  ENSG00000166707_10 (sequence is synthesized)
cactgcaaggctattcaggaagatagagaatgctactgcagactgcttccccacagcccactatcttattaaccttttttactttccttagaatccctactgaaatataaggcaggcaca

SEQ ID NO: 535458 - DNA, 120 bp, Artificial Sequence
  ENSG00000166707_11 (sequence is synthesized)
gcccaggaacgttgctttggagaatcctgcagataaggcttttccaaaaagcgcgagcatcttgttgtattcagataccctatcgtcgtcagtcatggctagcatcactgcgtgtgtggg

SEQ ID NO: 535459 - DNA, 120 bp, Artificial Sequence
  ENSG00000166707_12 (sequence is synthesized)
gccgccttgggcccattccatgttgaggtctctggggaggagtctctgtcctttagtggtcaaaatggcagagagaaacatgaagttgttctcaggaagagtggtgccagcccaggggaa

SEQ ID NO: 535460 - DNA, 120 bp, Artificial Sequence
  ENSG00000166707_13 (sequence is synthesized)
agaaacctttgaaaactggctgatccaagtcaatgaggtcctgccagattggagtatgtctgaggaggaaaaactcaagcgcttgatgaaaacacttaggggccctgcccgggaggtcat

SEQ ID NO: 535461 - DNA, 120 bp, Artificial Sequence
  ENSG00000166707_14 (sequence is synthesized)
gcgtttgcttcaggcggccaaccccaacctaagtgtagcagatttcttgcgggcaatgaaattggtgtttggggagtctgaaagcagtgtgactgcccatggtaaattttttaacaccct

SEQ ID NO: 535462 - DNA, 120 bp, Artificial Sequence
  ENSG00000166707_15 (sequence is synthesized)
gcaggcacaaggggagaaagcctccctttatgtgatccgtttagaggtgcagctccagaatgctattcaggcaggcatcctagctgagaaagatgcaaaccagactcgcttgcaacagct

SEQ ID NO: 535463 - DNA, 120 bp, Artificial Sequence
  ENSG00000166707_16 (sequence is synthesized)
tcttttaggcgctgagctgaatagggacctgcgcttcaggcttaagcatcttctcaggatgtatgcaaataagcaggagcggcttcccaatttcctggagttaatcaagatgataaggga

SEQ ID NO: 535464 - DNA, 120 bp, Artificial Sequence
  ENSG00000166707_17 (sequence is synthesized)
ggaagaggattgggatgatgcttttattaaacggaagcggccgaaaaggtctgagccaataatggagagggcagccagccctgtggcatttcagggcgcccagccaatagcaatcagcag

SEQ ID NO: 535465 - DNA, 120 bp, Artificial Sequence
  ENSG00000166707_18 (sequence is synthesized)
tgctgactgtaactgcaacgtgatagaaatagatgatacccttgatgactctgatgaggatgtgatcctggtggtgtctctgtacccttcactgacacctacaggtgcccctcccttcag

SEQ ID NO: 535466 - DNA, 120 bp, Artificial Sequence
  ENSG00000166707_19 (sequence is synthesized)
aggaagagccagacctctggatcaagtgctggttattgattcccccaacaattctggggctcagtctctttctaccagtggtggttctgggtataagaatgatggtcctgggaatattcg

SEQ ID NO: 535467 - DNA, 120 bp, Artificial Sequence
  ENSG00000166707_20 (sequence is synthesized)
tagagccaggaagcgaaaatacacaacccgctgctcatattgtggggaggagggccactcaaaagaaacctgtgacaatgagagcaacaaggcccaggtttttgagaatctgatcatcac

SEQ ID NO: 535468 - DNA, 120 bp, Artificial Sequence
  ENSG00000166707_21 (sequence is synthesized)
cctgcaggagctgacacatacagaggagaggtcaaaagaggtccctggagaacacagtgatgcttctgagccacagtaaggatctagtccagccctaaatgagtccttgactgtattcag

SEQ ID NO: 535469 - DNA, 120 bp, Artificial Sequence
  ENSG00000166707_22 (sequence is synthesized)
agtctggtaatgggaataacaggagaggggggtgggtttctaactgcatgaattaatccacaaagcagttttcctttgggaaggagaagaggtcttgcataccagcacagtggatgggga

SEQ ID NO: 535470 - DNA, 120 bp, Artificial Sequence
  ENSG00000166707_23 (sequence is synthesized)
atggtgtgacctctgtccctgctctcttctctgctggcttaagggtctattctccatgtgtctatttctttgatgactttatactttttatgaaaggagcatcttttcattaaaccttca

SEQ ID NO: 535471 - DNA, 120 bp, Artificial Sequence
  ENSG00000166707_24 (sequence is synthesized)
aataaaggaagatacaaaaactaaagtacaaattacctgaaactcagcacccttttgtaaccattgtcagccctttggtgaatgtccttccagatatctccctgtacctgtgtacccaga

SEQ ID NO: 535472 - DNA, 120 bp, Artificial Sequence
  ENSG00000166707_25 (sequence is synthesized)
tagatatatgtatagataagagtgaccaaatataagtgctgttctatactgtgtatttttcaccaaataatgtatctcgtggacttctatgtcgatgaatatatataaatatctaacttc

SEQ ID NO: 535473 - DNA, 120 bp, Artificial Sequence
  ENSG00000166707_26 (sequence is synthesized)
caaagccgaatccgaacttgaattctgtgcggcggattgcagagctggtagggcgagggtctcccggaggaaatgtaagggggatgcgcgggagggcaggaggcactttggcttgcgttc

SEQ ID NO: 535474 - DNA, 120 bp, Artificial Sequence
  ENSG00000166710_0 (sequence is synthesized)
gggcattcctgaagctgacagcattcgggccgagatgtctcgctccgtggccttagctgtgctcgcgctactctctctttctggcctggaggctatccagcgtactccaaagattcaggt

SEQ ID NO: 535475 - DNA, 120 bp, Artificial Sequence
  ENSG00000166710_1 (sequence is synthesized)
ttactcacgtcatccagcagagaatggaaagtcaaatttcctgaattgctatgtgtctgggtttcatccatccgacattgaagttgacttactgaagaatggagagagaattgaaaaagt

SEQ ID NO: 535476 - DNA, 120 bp, Artificial Sequence
  ENSG00000166710_2 (sequence is synthesized)
ggagcattcagacttgtctttcagcaaggactggtctttctatctcttgtactacactgaattcacccccactgaaaaagatgagtatgcctgccgtgtgaaccatgtgactttgtcaca

SEQ ID NO: 535477 - DNA, 120 bp, Artificial Sequence
  ENSG00000166710_3 (sequence is synthesized)
gcccaagatagttaagtgggatcgagacatgtaagcagcatcatggaggtaagtttttgaccttgagaaaatgtttttgtttcactgtcctgaggactatttatagacagctctaacatg

SEQ ID NO: 535478 - DNA, 120 bp, Artificial Sequence
  ENSG00000166710_4 (sequence is synthesized)
taaccctcactatgtggagaacattgacagagtaacattttagcagggaaagaagaatcctacagggtcatgttcccttctcctgtggagtggcatgaagaaggtgtatggccccaggta

SEQ ID NO: 535479 - DNA, 120 bp, Artificial Sequence
  ENSG00000166710_5 (sequence is synthesized)
tggccatattactgaccctctacagagagggcaaaggaactgccagtatggtattgcaggataaaggcaggtggttacccacattacctgcaaggctttgatctttcttctgccatttcc

SEQ ID NO: 535480 - DNA, 120 bp, Artificial Sequence
  ENSG00000166710_6 (sequence is synthesized)
acattggacatctctgctgaggagagaaaatgaaccactcttttcctttgtataatgttgttttattcttcagacagaagagaggagttatacagctctgcagacatcccattcctgtat

SEQ ID NO: 535481 - DNA, 120 bp, Artificial Sequence
  ENSG00000166710_7 (sequence is synthesized)
ggggactgtgtttgcctcttagaggttcccaggccactagaggagataaagggaaacagattgttataacttgatataatgatactataatagatgtaactacaaggagctccagaagca

SEQ ID NO: 535482 - DNA, 120 bp, Artificial Sequence
  ENSG00000166710_8 (sequence is synthesized)
agagagagggaggaacttggacttctctgcatctttagttggagtccaaaggcttttcaatgaaattctactgcccagggtacattgatgctgaaaccccattcaaatctcctgttatat

SEQ ID NO: 535483 - DNA, 120 bp, Artificial Sequence
  ENSG00000166710_9 (sequence is synthesized)
aagatagttaagtgggatcgagacatgtaagcagcatcatggaggtttgaagatgccgcatttggattggatgaattccaaattctgcttgcttgctttttaatattgatatgcttatac

SEQ ID NO: 535484 - DNA, 120 bp, Artificial Sequence
  ENSG00000166710_10 (sequence is synthesized)
acttacactttatgcacaaaatgtagggttataataatgttaacatggacatgatcttctttataattctactttgagtgctgtctccatgtttgatgtatctgagcaggttgctccaca

SEQ ID NO: 535485 - DNA, 120 bp, Artificial Sequence
  ENSG00000166710_11 (sequence is synthesized)
ggtagctctaggagggctggcaacttagaggtggggagcagagaattctcttatccaacatcaacatcttggtcagatttgaactcttcaatctcttgcactcaaagcttgttaagatag

SEQ ID NO: 535486 - DNA, 120 bp, Artificial Sequence
  ENSG00000166710_12 (sequence is synthesized)
gtcatataagattcatatttacttcttatacatttgataaagtaaggcatggttgtggttaatctggtttatttttgttccacaagttaaataaatcataaaacttgatgtgttatctct

SEQ ID NO: 535487 - DNA, 120 bp, Artificial Sequence
  ENSG00000166710_13 (sequence is synthesized)
tatatctcactcccactattacccctttattttcaaacagggaaacagtcttcaagttccacttggtaaaaaatgtgaaccccttgtatatagagtttggctcacagtgtaaagggcctc

SEQ ID NO: 535488 - DNA, 120 bp, Artificial Sequence
  ENSG00000166710_14 (sequence is synthesized)
agtgattcacattttccagattaggaatctgatgctcaaagaagttaaatggcatagttggggtgacacagctgtctagtgggaggccagccttctatattttagccagcgttctttcct

SEQ ID NO: 535489 - DNA, 120 bp, Artificial Sequence
  ENSG00000166710_15 (sequence is synthesized)
gcgggccaggtcatgaggagtatgcagactctaagagggagcaaaagtatctgaaggatttaatattttagcaaggaatagatatacaatcatcccttggtctccctgggggattggttt

SEQ ID NO: 535490 - DNA, 120 bp, Artificial Sequence
  ENSG00000166710_16 (sequence is synthesized)
caggaccccttcttggacaccaaatctatggatatttaagtcccttctataaaatggtatagtatttgcatataacctatccacatcctcctgtatactttaaatcatttctagattact

SEQ ID NO: 535491 - DNA, 120 bp, Artificial Sequence
  ENSG00000166710_17 (sequence is synthesized)
tgtaatacctaatacaatgtaaatgctatgcaaatagttgttattgtttaaggaataatgacaagaaaaaaaagtctgtacatgctcagtaaagacacaaccatccctttttttccccag

SEQ ID NO: 535492 - DNA, 120 bp, Artificial Sequence
  ENSG00000166710_18 (sequence is synthesized)
tgtttttgatccatggtttgctgaatccacagatgtggagcccctggatacggaaggcccgctgtactttgaatgacaaataacagatttaaaattttcaaggcatagttttatacctga

SEQ ID NO: 535493 - DNA, 120 bp, Artificial Sequence
  ENSG00000166710_19 (sequence is synthesized)
catctgatataaacaatctgcatattgggattgtcagggaatgttcttaaagatcagattagtggcacctgctgagatactgatgcacagcatggtttctgaaccagtagtttccctgca

SEQ ID NO: 535494 - DNA, 120 bp, Artificial Sequence
  ENSG00000166710_20 (sequence is synthesized)
gttgagcagggagcagcagcagcacttgcacaaatacatatacactcttaacacttcttacctactggcttcctctagcttttgtggcagcttcaggtatatttagcactgaacgaacat

SEQ ID NO: 535495 - DNA, 120 bp, Artificial Sequence
  ENSG00000166710_21 (sequence is synthesized)
ctcaagaaggtataggcctttgtttgtaagtcctgctgtcctagcatcctataatcctggacttctccagtactttctggctggattggtatctgaggctagtaggaagggcttgttcct

SEQ ID NO: 535496 - DNA, 120 bp, Artificial Sequence
  ENSG00000166710_22 (sequence is synthesized)
gctgggtagctctaaacaatgtattcatgggtaggaacagcagcctattctgccagccttatttctaaccattttagacatttgttagtacatggtattttaaaagtaaaacttaatgtc

SEQ ID NO: 535497 - DNA, 120 bp, Artificial Sequence
  ENSG00000166710_23 (sequence is synthesized)
aggtggatgatctgcccagtcacactgttagtaaattgtagagccaggacctgaactctaatatagtcatgtgttacttaatgacggggacatgttctgagaaatgcttacacaaaccta

SEQ ID NO: 535498 - DNA, 120 bp, Artificial Sequence
  ENSG00000166710_24 (sequence is synthesized)
ggtgttgtagcctactacacgcataggctacatggtatagcctattgctcctagactacaaacctgtacagcctgttactgtactgaatactgtgggcagttgtaacacaatggtaagta

SEQ ID NO: 535499 - DNA, 120 bp, Artificial Sequence
  ENSG00000166710_25 (sequence is synthesized)
tttgtgtatctaaacatagaagttgcagtaaaaatatgctattttaatcttatgagaccactgtcatatatacagtccatcattgaccaaaacatcatatcagcattttttcttctaaga

SEQ ID NO: 535500 - DNA, 120 bp, Artificial Sequence
  ENSG00000166710_26 (sequence is synthesized)
ttttgggagcaccaaagggatacactaacaggatatactctttataatgggtttggagaactgtctgcagctacttcttttaaaaaggtgatctacacagtagaaattagacaagtttgg

SEQ ID NO: 535501 - DNA, 120 bp, Artificial Sequence
  ENSG00000166710_27 (sequence is synthesized)
agaccagcctggccaacatggtgaagcctggtctctacaaaaaataataacaaaaattagccgggtgtggtggctcgtgcctgtggtcccagctgctccggtggctgaggcgggaggatc

SEQ ID NO: 535502 - DNA, 120 bp, Artificial Sequence
  ENSG00000166710_28 (sequence is synthesized)
gtggctgaggcgggaggatctcttgagcttaggcttttgagctatcatggcgccagtgcactccagcgtgggcaacagagcgagaccctgtctctcaaaaaagaaaaaaaaaaaaaaaga

SEQ ID NO: 535503 - DNA, 120 bp, Artificial Sequence
  ENSG00000166710_29 (sequence is synthesized)
aagagaaaagaaaagaaagaaagaagtgaaggtttgtcagtcaggggagctgtaaaaccattaataaagataatccaagatggttaccaagactgttgaggacgccagagatcttgagca

SEQ ID NO: 535504 - DNA, 120 bp, Artificial Sequence
  ENSG00000166710_30 (sequence is synthesized)
ctttctaagtacctggcaatacactaagcgcgctcaccttttcctctggcaaaacatgatcgaaagcagaatgttttgatcatgagaaaattgcatttaatttgaatacaatttatttac

SEQ ID NO: 535505 - DNA, 120 bp, Artificial Sequence
  ENSG00000166710_31 (sequence is synthesized)
aacataaaggataatgtatatatcaccaccattactggtatttgctggttatgttagatgtcattttaaaaaataacaatctgatatttaaaaaaaaatcttattttgaaaatttccaaa

SEQ ID NO: 535506 - DNA, 120 bp, Artificial Sequence
  ENSG00000166710_32 (sequence is synthesized)
gtaatacatgccatgcatagaccatttctggaagataccacaagaaacatgtaatgatgattgcctctgaaggtctattttcctcctctgacctgtgtgtgggttttgtttttgttttac

SEQ ID NO: 535507 - DNA, 120 bp, Artificial Sequence
  ENSG00000166710_33 (sequence is synthesized)
tgtgggcataaattaatttttcagttaagttttggaagcttaaataactctccaaaagtcataaagccagtaactggttgagcccaaattcaaacccagcctgtctgatacttgtcctct

SEQ ID NO: 535508 - DNA, 120 bp, Artificial Sequence
  ENSG00000166710_34 (sequence is synthesized)
tcttagaaaagattacagtgatgctctcacaaaatcttgccgccttccctcaaacagagagttccaggcaggatgaatctgtgctctgatccctgaggcatttaatatgttcttattatt

SEQ ID NO: 535509 - DNA, 120 bp, Artificial Sequence
  ENSG00000166710_35 (sequence is synthesized)
agaagctcagatgcaaagagctctcttagcttttaatgttatgaaaaaaatcaggtcttcattagattccccaatccacctcttgatggggctagtagcctttccttaatgatagggtgt

SEQ ID NO: 535510 - DNA, 120 bp, Artificial Sequence
  ENSG00000166710_36 (sequence is synthesized)
ttctagagagatatatctggtcaaggtggcctggtactcctccttctccccacagcctcccagacaaggaggagtagctgccttttagtgatcatgtaccctgaatataagtgtatttaa

SEQ ID NO: 535511 - DNA, 120 bp, Artificial Sequence
  ENSG00000166710_37 (sequence is synthesized)
aattttatacacatatatttagtgtcaatctgtatatttagtagcactaacacttctcttcattttcaatgaaaaatatagagtttataatattttcttcccacttccccatggatggtc

SEQ ID NO: 535512 - DNA, 120 bp, Artificial Sequence
  ENSG00000166710_38 (sequence is synthesized)
tagtcatgcctctcattttggaaagtactgtttctgaaacattaggcaatatattcccaacctggctagtttacagcaatcacctgtggatgctaattaaaacgcaaatcccactgtcac

SEQ ID NO: 535513 - DNA, 120 bp, Artificial Sequence
  ENSG00000166710_39 (sequence is synthesized)
atgcattactccatttgatcataatggaaagtatgttctgtcccatttgccatagtcctcacctatccctgttgtattttatcgggtccaactcaaccatttaaggtatttgccagctct

SEQ ID NO: 535514 - DNA, 120 bp, Artificial Sequence
  ENSG00000166710_40 (sequence is synthesized)
tgtatgcatttaggttttgtttctttgttttttagctcatgaaattaggtacaaagtcagagaggggtctggcatataaaacctcagcagaaataaagaggttttgttgtttggtaagaa

SEQ ID NO: 535515 - DNA, 71 bp, Artificial Sequence
  ENSG00000166710_41 (sequence is synthesized)
acctcagcagaaataaagaggttttgttgtttggtaagaacataccttgggttggttgggcacggtggctc

SEQ ID NO: 535516 - DNA, 61 bp, Artificial Sequence
  ENSG00000166710_42 (sequence is synthesized)
tggtgtgtgcctgtagtcccactgcactccagcctgggcaatggaatgagattccatccca

SEQ ID NO: 535517 - DNA, 90 bp, Artificial Sequence
  ENSG00000166710_43 (sequence is synthesized)
taccttgggttgatccacttaggaacctcagataataacatctgccacgtatagagcaattgctatgtcccaggcactctactagacact

SEQ ID NO: 535518 - DNA, 120 bp, Artificial Sequence
  ENSG00000166710_44 (sequence is synthesized)
atagagcaattgctatgtcccaggcactctactagacacttcatacagtttagaaaatcagatgggtgtagatcaaggcaggagcaggaaccaaaaagaaaggcataaacataagaaaaa

SEQ ID NO: 535519 - DNA, 120 bp, Artificial Sequence
  ENSG00000166710_45 (sequence is synthesized)
aaatggaaggggtggaaacagagtacaataacatgagtaatttgatgggggctattatgaactgagaaatgaactttgaaaagtatcttggggccaaatcatgtagactcttgagtgatg

SEQ ID NO: 535520 - DNA, 120 bp, Artificial Sequence
  ENSG00000166710_46 (sequence is synthesized)
tgttaaggaatgctatgagtgctgagagggcatcagaagtccttgagagcctccagagaaaggctcttaaaaatgcagcgcaatctccagtgacagaagatactgctagaaatctgctag

SEQ ID NO: 535521 - DNA, 120 bp, Artificial Sequence
  ENSG00000166716_0 (sequence is synthesized)
cagcccttgccagcatccagccatgggggatatgaaaaccccagattttgatgaccttctggctgcctttgacatcccagaccccaccagccttgatgccaaggaggccatccagacacc

SEQ ID NO: 535522 - DNA, 120 bp, Artificial Sequence
  ENSG00000166716_1 (sequence is synthesized)
cagtgaggagaatgagagtcccctcaaacctccaggcatatgtatggatgaaagtgtgtccttgtctcactcaggatcagcccccgatgtgccggccgtgagtgtcattgtcaagaacac

SEQ ID NO: 535523 - DNA, 120 bp, Artificial Sequence
  ENSG00000166716_2 (sequence is synthesized)
cagccgccaggagtcatttgaagcggagaaagaccacattactcccagtctcctacacaatggattccggggctcagatctgcctccagatccccacaactgtgggaaatttgattctac

SEQ ID NO: 535524 - DNA, 120 bp, Artificial Sequence
  ENSG00000166716_3 (sequence is synthesized)
ttttatgaatggagacagtgccaggagtttccctggcaaactggagcctcccaagtcagagccattacccaccttcaaccagttcagtccaatctccagcccagaacctgaggatcccat

SEQ ID NO: 535525 - DNA, 120 bp, Artificial Sequence
  ENSG00000166716_4 (sequence is synthesized)
caaagataacggatttgggataaagcccaaacactctgacagttatttcccaccccctcttgggtgcggggctgtgggaggcccagtcctggaggctctggctaagtttccggttccaga

SEQ ID NO: 535526 - DNA, 120 bp, Artificial Sequence
  ENSG00000166716_5 (sequence is synthesized)
gctgcatatgtttgatcatttttgtaagaaagaacccaagccagaacccctgcccttggggagccagcaggaacacgagcaaagtgggcagaacacagtggaacctcacaaggatccgga

SEQ ID NO: 535527 - DNA, 120 bp, Artificial Sequence
  ENSG00000166716_6 (sequence is synthesized)
tgccactcgattcttcggggaagctttggagttcaacagccatcctagcaacagtattggagagtccaaggggcttgcccgggagcttggtacctgctcatcagtcccccctaggcagcg

SEQ ID NO: 535528 - DNA, 120 bp, Artificial Sequence
  ENSG00000166716_7 (sequence is synthesized)
tctaaagccagctcattccaagctgtcctcttgtgtggcagccttggtggccttgcaggccaaaagagtggctagtgtcactaaggaggatcagcctggccacacaaaggatctctcagg

SEQ ID NO: 535529 - DNA, 120 bp, Artificial Sequence
  ENSG00000166716_8 (sequence is synthesized)
gcccactaaagagagttctaaaggtagccccaaaatgcccaagtcaccaaagagtccccggagccctctggaggccactagaaaaagtatcaagccatcggacagccctcgtagcatctg

SEQ ID NO: 535530 - DNA, 120 bp, Artificial Sequence
  ENSG00000166716_9 (sequence is synthesized)
cagtgacagcagcagcaaaggctcaccgtctgtggctgccagctccccaccagcaattcccaaagtgagaatcaaaaccattaagacatcatcaggggaaatcaaacggactgtcacaag

SEQ ID NO: 535531 - DNA, 120 bp, Artificial Sequence
  ENSG00000166716_10 (sequence is synthesized)
gatcctgccagatcctgatgatccaagtaagtcccctgttgggtcacctctagggagcgccattgcagaggcccccagcgagatgccaggggatgaggtgcctgtggaagagcactttcc

SEQ ID NO: 535532 - DNA, 120 bp, Artificial Sequence
  ENSG00000166716_11 (sequence is synthesized)
tgaggcaggcacaaattcagggagcccccagggggccaggaaaggggacgagagcatgacaaaggccagtgactcgtcatctcccagctgcagttctgggccccgggtcccaaagggggc

SEQ ID NO: 535533 - DNA, 120 bp, Artificial Sequence
  ENSG00000166716_12 (sequence is synthesized)
tgccccaggctcacagacaggcaagaagcaacagagcacagcactgcaggcatccaccctggcccctgccaacctcctgcccaaagccgtgcacttggccaacctgaacctcgtccccca

SEQ ID NO: 535534 - DNA, 120 bp, Artificial Sequence
  ENSG00000166716_13 (sequence is synthesized)
cagtgttgctgcatcagtgacagccaagtcttcagtgcaaagacggagccagccacagcttacacaaatgtcggtgcccctggtccaccaggtgaaaaaggctgccccactgattgtaga

SEQ ID NO: 535535 - DNA, 120 bp, Artificial Sequence
  ENSG00000166716_14 (sequence is synthesized)
ggtcttcaacaaggtccttcacagctccaaccccgtgcccctctatgcgccaaatctcagcccgcctgcggacagcaggatccacgtgccggccagtgggtactgctgcctggagtgtgg

SEQ ID NO: 535536 - DNA, 120 bp, Artificial Sequence
  ENSG00000166716_15 (sequence is synthesized)
agacgcatttgccttagagaagagcctgagccagcactatggccggcggagcgtccacattgaggtactgtgcacactgtgctccaagacgctgctcttcttcaacaagtgcagcctgct

SEQ ID NO: 535537 - DNA, 120 bp, Artificial Sequence
  ENSG00000166716_16 (sequence is synthesized)
ccggcacgcccgtgaccacaagagcaaggggctcgtcatgcagtgttcccagctgctggtgaagcctatctctgcggaccaaatgttcgtgtcggcccctgtgaactccacggcaccagc

SEQ ID NO: 535538 - DNA, 120 bp, Artificial Sequence
  ENSG00000166716_17 (sequence is synthesized)
agccccagccccttcatcctctcccaaacatggcctcacttcgggcagtgccagtccccctcctccagccttgccactctacccagaccctgtgaggctcatccggtactcaatcaagtg

SEQ ID NO: 535539 - DNA, 120 bp, Artificial Sequence
  ENSG00000166716_18 (sequence is synthesized)
tcttgaatgtcacaagcagatgcgggactacatggtcctggctgcacatttccagaggacaacagaggagacagaggggctgacctgccaggtatgccaaatgctgctgcccaaccagtg

SEQ ID NO: 535540 - DNA, 120 bp, Artificial Sequence
  ENSG00000166716_19 (sequence is synthesized)
cagtttctgtgcccaccagcggattcatgcacacaagtccccctactgctgcccggagtgtggggtcctctgccgctctgcctacttccagacccatgtaaaggagaattgcctgcacta

SEQ ID NO: 535541 - DNA, 120 bp, Artificial Sequence
  ENSG00000166716_20 (sequence is synthesized)
tgcccgcaaggtgggctacaggtgcatccactgtggtgtcgtccacctgaccttggccttgctgaaaagccacatccaggagcgacactgccaggttttccacaaatgtgcattctgccc

SEQ ID NO: 535542 - DNA, 120 bp, Artificial Sequence
  ENSG00000166716_21 (sequence is synthesized)
catggccttcaagactgccagcagcactgcagaccacagtgccacccagcaccccacccagccccacagaccctcccagctcatttataagtgctcctgtgaaatggtcttcaacaagaa

SEQ ID NO: 535543 - DNA, 120 bp, Artificial Sequence
  ENSG00000166716_22 (sequence is synthesized)
gaggcacattcagcagcatttttaccagaatgtcagcaagacgcaggtgggcgtcttcaagtgccctgagtgcccactcttgttcgtgcagaagccggagttgatgcaacacgtcaagag

SEQ ID NO: 535544 - DNA, 120 bp, Artificial Sequence
  ENSG00000166716_23 (sequence is synthesized)
cacccacggtgttccccgaaatgtggacgagctgtcaagcctccagtcttcagcggacacatcctcaagccgccctggctctcgagttcccactgagccaccagccactagtgtggctgc

SEQ ID NO: 535545 - DNA, 120 bp, Artificial Sequence
  ENSG00000166716_24 (sequence is synthesized)
tcggagcagctccctgccttctggccgctggggtaggcctgaagcccaccgcagggtggaagccaggccgcggctgaggaacactggctggacctgccaggagtgccaggagtgggttcc

SEQ ID NO: 535546 - DNA, 120 bp, Artificial Sequence
  ENSG00000166716_25 (sequence is synthesized)
agatcgggagagctacgtgtcccacatgaaaaagagccacggtcggacattgaagcggtacccatgccggcagtgtgaacagtccttccacacccccaacagcctgcgcaaacacatccg

SEQ ID NO: 535547 - DNA, 120 bp, Artificial Sequence
  ENSG00000166716_26 (sequence is synthesized)
caacaaccatgacacagtaaagaagttctacacctgcgggtactgcacagaggacagccccagctttcctcggccctcccttctggagagccacatcagccttatgcatggcatcagaaa

SEQ ID NO: 535548 - DNA, 120 bp, Artificial Sequence
  ENSG00000166716_27 (sequence is synthesized)
ccctgatttgagccagacgtccaaagtgaaacctccgggtggacattcccctcaggtgaaccatctgaaaagaccagtcagtggagtgggggacgctccaggcaccagcaatggcgcaac

SEQ ID NO: 535549 - DNA, 120 bp, Artificial Sequence
  ENSG00000166716_28 (sequence is synthesized)
tgtctcttccaccaaaaggcacaagtccctttttcagtgcgcgaaatgtagttttgccacagactcggggctcgagtttcagagccacatacctcagcaccaggtggacagctccacagc

SEQ ID NO: 535550 - DNA, 120 bp, Artificial Sequence
  ENSG00000166716_29 (sequence is synthesized)
ccaatgtctcctctgtggtttgtgctacacctctgccagctccctcagccgccacctcttcattgtccacaaggtgagagaccaggaggaggaggaggaagaggaggcggcggcagcgga

SEQ ID NO: 535551 - DNA, 120 bp, Artificial Sequence
  ENSG00000166716_30 (sequence is synthesized)
gatggcagtggaggtggcagagccagaggagggctccggggaggaggtgcccatggagactagagagaatggactggaagaatgtgccggtgagcctttgtcagctgacccagaggcgag

SEQ ID NO: 535552 - DNA, 120 bp, Artificial Sequence
  ENSG00000166716_31 (sequence is synthesized)
gagattgctgggcccggcccctgaggacgatggtggccacaatgatcacagtcaaccacaggcctctcaggaccaggacagccacacactgtcccctcaggtgtgaccggagactttgca

SEQ ID NO: 535553 - DNA, 120 bp, Artificial Sequence
  ENSG00000166716_32 (sequence is synthesized)
aaggctctgcccccagtgtgagtgtgaccggttgtaccctggagtagtgtctgccctgagctgccagtgctgggtatcccccagccccaggaaatgtggggtcggccaggaccctcacag

SEQ ID NO: 535554 - DNA, 120 bp, Artificial Sequence
  ENSG00000166716_33 (sequence is synthesized)
ctctgaatttgcttctgttatttatggcttttcgctgcttcttggtgccccatctcttgtctgtgtccttccaaccccaagctgcttatgtggcccaaccccactgctgtcaactaggct

SEQ ID NO: 535555 - DNA, 120 bp, Artificial Sequence
  ENSG00000166716_34 (sequence is synthesized)
tgaaccccacagcggctgtgctcttctgggaggttcccgcttgctgccttcagccagggcgctcctcagagctctattttcctgcagacaccagctctccttcctgcctttagatcctga

SEQ ID NO: 535556 - DNA, 120 bp, Artificial Sequence
  ENSG00000166716_35 (sequence is synthesized)
gaaggagggaaatgaggggtgctgacacagtccctctgggagagctctgcctagtctggtttggcgagggcccttgatcaccttgcccctcctccctgtcttctctgattcttttccctc

SEQ ID NO: 535557 - DNA, 120 bp, Artificial Sequence
  ENSG00000166716_36 (sequence is synthesized)
aaaatagtcctgagaactaattgtcacactggctcatcatgtctctgtgggtggggtgggagaaacctctgctgcacacctctgtttggaacctgggcagagcaggaggtaaggcaaagg

SEQ ID NO: 535558 - DNA, 120 bp, Artificial Sequence
  ENSG00000166716_37 (sequence is synthesized)
caggcaggcaccaagaaccagaccccttgagaaggcgctgtgggtgggtctttgttctgctgttctgcctttcctgacaggtggggttggggcacacagacattggaatatttgtactgc

SEQ ID NO: 535559 - DNA, 120 bp, Artificial Sequence
  ENSG00000166716_38 (sequence is synthesized)
tctcgtgccatttgagaggctgctgccccaggcaggccagcccctactcctcttggctacactcatgttgctcagactatatttcaaataaaaaatcttctcaccatgcaggtaggctct

SEQ ID NO: 535560 - DNA, 120 bp, Artificial Sequence
  ENSG00000166716_39 (sequence is synthesized)
tgtattcctctccaagtgagcctggccccaccctattccacccaagggtctttcccagacttcccctgtttgtcccatctctgagggagaacaatacttcctactgtctaaggaaggcct

SEQ ID NO: 535561 - DNA, 120 bp, Artificial Sequence
  ENSG00000166716_40 (sequence is synthesized)
tctctagattctggagcttgtggttaggaaaccgggagccctgtactacttagttctctagagaccttctgaaggggtgaggggagcggctccacaatggtcaagtcacctccaagatct

SEQ ID NO: 535562 - DNA, 120 bp, Artificial Sequence
  ENSG00000166716_41 (sequence is synthesized)
ccaggctagtgacattggctttagggcgtatcgaaattttctaggcaccttcatctttccttcagttgattttcaacataagagaaccccttactggtaaaaagggaaaagggggtggag

SEQ ID NO: 535563 - DNA, 120 bp, Artificial Sequence
  ENSG00000166716_42 (sequence is synthesized)
aagaggaattttataattttcttatagcattcaagaggtttcttatttcttacagcatcgctactgccacagagaactcaaatgtggcagaactgggattagacttgggagactggctgt

SEQ ID NO: 535564 - DNA, 120 bp, Artificial Sequence
  ENSG00000166716_43 (sequence is synthesized)
cttttcactgatggtggagtcagggcccacccaagcacgaggagcaggctgtgtggaggtgtcgtctgacctctaacccaggtggcatggggttgcgcccagcaggatgtagtggagtaa

SEQ ID NO: 535565 - DNA, 120 bp, Artificial Sequence
  ENSG00000166716_44 (sequence is synthesized)
agggaagagggtgctggccgggtgcttagaggtcatctttcaaggaggcattaaatatcaattataaattattaagtcagataaatatgcctgaccttttcacagttgaaaaaatacatt

SEQ ID NO: 535566 - DNA, 120 bp, Artificial Sequence
  ENSG00000166716_45 (sequence is synthesized)
ttttcccctctatcaaatgccaagtttttagtggaaatgctaatggcagtgggaaaggttgcctcactttcagagagactctcgctgtctgcacccttttaataattgctcttcctggca

SEQ ID NO: 535567 - DNA, 120 bp, Artificial Sequence
  ENSG00000166716_46 (sequence is synthesized)
aggctgccacttccctgcctccccagctggcagtggggcaacccaggcctgtttccagctacctgcaaagccagacctagacctgccgtagctgttgtcccatgcctaattctagttaca

SEQ ID NO: 535568 - DNA, 120 bp, Artificial Sequence
  ENSG00000166716_47 (sequence is synthesized)
ggaagccatccctgtaccctgggtccattcacaggaatgggttccagaggaggctgatagaagggtttgaaatgactggctggatcccttcctgctcagacacagtggtagctggagagc

SEQ ID NO: 535569 - DNA, 120 bp, Artificial Sequence
  ENSG00000166716_48 (sequence is synthesized)
aggcagagatggtagaattgcaggtttgaccacctgtcgtgaccccagatatacatctccttcctgggaagaacgtgagttggaaaaatgctgagccagtccctggaaaacctgggtcct

SEQ ID NO: 535570 - DNA, 120 bp, Artificial Sequence
  ENSG00000166716_49 (sequence is synthesized)
ggcctggattctgtccttagccagctcttaacaaatcccttaacctcactgtctcctctccttcacaatagagttagtaattcccatccaactggcttcacaggcttttgtgagcttatg

SEQ ID NO: 535571 - DNA, 120 bp, Artificial Sequence
  ENSG00000166716_50 (sequence is synthesized)
aatgtgaaagtattttctagtttataaaacactatatgaatgtggggaaatctttacttgaccttagggcatggagggtggagcacattttgtctgctgtttggacttggatgctgatta

SEQ ID NO: 535572 - DNA, 120 bp, Artificial Sequence
  ENSG00000166716_51 (sequence is synthesized)
gcagttatgaagtggcccagacacctagccattctttagtaagagtgaagatagcattttaagccctccttgtgtgcctagcatcttactgaacactttctggtgattctctcctttaat

SEQ ID NO: 535573 - DNA, 120 bp, Artificial Sequence
  ENSG00000166716_52 (sequence is synthesized)
cctcacaaagatctcacagttgtcctccattttacggagaagaaaccgaggctccgagaggttaaacgatgtgcagaggctacctgtagtgatggtgctgagtcaagcctgtcaaccact

SEQ ID NO: 535574 - DNA, 120 bp, Artificial Sequence
  ENSG00000166716_53 (sequence is synthesized)
gtgctcgttagtgaccaaggctgctttgacaggctgccagcttgtcagtggtttgcagccccccagacatttgctttcctacttcccatgcagttggggtgccctgccaagtgccaggtt

SEQ ID NO: 535575 - DNA, 120 bp, Artificial Sequence
  ENSG00000166716_54 (sequence is synthesized)
ctctttggagtccatctgtgccttgtcaccccaaggagggcctcgagcatcacaccgttgacatttcgaaacgtggtatctctacaacctttcattctcattgggatttaccttgccatt

SEQ ID NO: 535576 - DNA, 120 bp, Artificial Sequence
  ENSG00000166716_55 (sequence is synthesized)
tgaacaccatcattttttgaggactgtctagaaaaggttgcctaaccctcacagggaacacacagttccctcagagtccagcatcttctggtcttttctttttcaagatttttttaaatg

SEQ ID NO: 535577 - DNA, 120 bp, Artificial Sequence
  ENSG00000166716_56 (sequence is synthesized)
gttgtgctatcatttgtcatcatcagaaaatgcttgctgtaacaagcgtttatctgcacattatgctgcagtgaatgctctactgatcaagttaaacagataagatcccttcccttgtag

SEQ ID NO: 535578 - DNA, 120 bp, Artificial Sequence
  ENSG00000166716_57 (sequence is synthesized)
aaactacaacttaatacagtctaagacttgacaaattacttagtatttattttccaactgctttatctctgtaaaatgatatgctgaattattataagctaattgttgtagaaagaactt

SEQ ID NO: 535579 - DNA, 120 bp, Artificial Sequence
  ENSG00000166716_58 (sequence is synthesized)
tccccttaacttatgtaaacagtctggttttaaaaaatttgataattgtggcccagtaagctcaacactttgccttccccaagactggggaacctctgtcctgttcaccactgtatattc

SEQ ID NO: 535580 - DNA, 120 bp, Artificial Sequence
  ENSG00000166716_59 (sequence is synthesized)
tttttttgtttgtttgtttttttgttttgaaaaattaatacatatacatggtaagacattccacaatacaaaagggtatacaataaatggtaagcttccccatggaggtcagcctctagt

SEQ ID NO: 535581 - DNA, 120 bp, Artificial Sequence
  ENSG00000166716_60 (sequence is synthesized)
gaggtcagcctctagtcccctctccagagttaatcactgttatctatatgttgtgtatcctttcatagcaattctatgcatttacaagtttataaatatgtatatttatatatctatttt

SEQ ID NO: 535582 - DNA, 120 bp, Artificial Sequence
  ENSG00000166716_61 (sequence is synthesized)
taatacaaatagtagaattctatacacagtgttctgaagcttgctttcttatatagtattttggagattattccaaattcatacattgggtcagagtaattctttaaaagttccttgcat

SEQ ID NO: 535583 - DNA, 120 bp, Artificial Sequence
  ENSG00000166716_62 (sequence is synthesized)
ataacagtgattcaaaaagtatatggatgaatgagtgaatgctgcatgaatgaatgaatctgattcaattggtagctacagctgttctctcagggtctgatctgaccaagacagcacctt

SEQ ID NO: 535584 - DNA, 120 bp, Artificial Sequence
  ENSG00000166716_63 (sequence is synthesized)
ctagattctagaatgtgtcctcctgactaaggggttcaggatactgttcaccttctccaacagatgccaccggagccttaggaactgggcacaggaagccttgggcccctggaggaaaaa

SEQ ID NO: 535585 - DNA, 120 bp, Artificial Sequence
  ENSG00000166716_64 (sequence is synthesized)
gttgagactaggacgcaggtcccaagtatgggatttttttgggttcctacttaaaatgcttttttctttattggaaaatgatgtaacattttagagaaattaaaaagcacacatatttat

SEQ ID NO: 535586 - DNA, 120 bp, Artificial Sequence
  ENSG00000166716_65 (sequence is synthesized)
gtggctcccgcagccggcgctggggacgcgcgcggccgagactctggcctgcagtcgccgccgccgccgccaggtggtgtttggactctagaccatgtgcctaggtagaagtttttcctt

SEQ ID NO: 535587 - DNA, 120 bp, Artificial Sequence
  ENSG00000166716_66 (sequence is synthesized)
ccatgtgcctaggtagaagtttttcctttctccgcagctctgctcccctagcaacgctcgccacacccttgttttgagatcctctctaaggagcggagagtttaataggcaagaaggaag

SEQ ID NO: 535588 - DNA, 120 bp, Artificial Sequence
  ENSG00000166716_67 (sequence is synthesized)
caagcacgaggagcaggctgtgtggagggtggagcacattttgtctgctgtttggacttggatgctgattagcagttatgaagtggcccagacacctagccattctttagtaagagtgaa

SEQ ID NO: 535589 - DNA, 120 bp, Artificial Sequence
  ENSG00000166734_0 (sequence is synthesized)
cccgcctcccaaccgtgaggtgttgggtttgggggacgctggcagctgggttctcccggttcccttgggcaggtgcagggtcgggttcaaagcctccggaacgcgttttggcctgatttg

SEQ ID NO: 535590 - DNA, 120 bp, Artificial Sequence
  ENSG00000166734_1 (sequence is synthesized)
ctgatttgaggaggggggcggggagggacctgcggcttgcggccccgcccccttctccggctcgcagccgaccggtaagcccgcctcctccctcggccggccctggggccgtgtccgccg

SEQ ID NO: 535591 - DNA, 120 bp, Artificial Sequence
  ENSG00000166734_2 (sequence is synthesized)
cagccgaggcctgggcttctgcctgcaggtgtctgcggcgaggcccctagggtacagcccgatttggccccatggtgggtttcggggccaaccggcgggctggccgcctgccctctctcg

SEQ ID NO: 535592 - DNA, 120 bp, Artificial Sequence
  ENSG00000166734_3 (sequence is synthesized)
tgctggtggtgctgctggtggtgatcgtcgtcctcgccttcaactactggagcatctcctcccgccacgtcctgcttcaggaggaggtggccgagctgcagggccaggtccagcgcaccg

SEQ ID NO: 535593 - DNA, 120 bp, Artificial Sequence
  ENSG00000166734_4 (sequence is synthesized)
aagtggcccgcgggcggctggaaaagcgcaattcggacctcttgctgttggtggacacgcacaagaaacagatcgaccagaaggaggccgactacggccgcctcagcagccggctgcagg

SEQ ID NO: 535594 - DNA, 120 bp, Artificial Sequence
  ENSG00000166734_5 (sequence is synthesized)
ccagagagggcctcgggaagagatgcgaggatgacaaggttaaactacagaacaacatatcgtatcagatggcagacatacatcatttaaaggagcaacttgctgagcttcgtcaggaat

SEQ ID NO: 535595 - DNA, 120 bp, Artificial Sequence
  ENSG00000166734_6 (sequence is synthesized)
ttcttcgacaagaagaccagcttcaggactataggaagaacaatacttaccttgtgaagaggttagaatatgaaagttttcagtgtggacagcagatgaaggaattgagagcacagcatg

SEQ ID NO: 535596 - DNA, 120 bp, Artificial Sequence
  ENSG00000166734_7 (sequence is synthesized)
aagaaaatattaaaaagttagcagaccagtttttagaggaacaaaagcaagagacccaaaagattcaatcaaatgatggaaaggaattggatataaacaatcaagtagtacctaaaaata

SEQ ID NO: 535597 - DNA, 120 bp, Artificial Sequence
  ENSG00000166734_8 (sequence is synthesized)
ttccaaaagtagctgagaatgttgcagataagaatgaagaaccctcaagcaatcatattccacatgggaaagaacaaatcaaaagaggtggtgatgcagggatgcctggaatagaagaga

SEQ ID NO: 535598 - DNA, 120 bp, Artificial Sequence
  ENSG00000166734_9 (sequence is synthesized)
atgacctagcaaaagttgatgatcttccccctgctttaaggaagcctcctatttcagtttctcaacatgaaagtcatcaagcaatctcccatcttccaactggacaacctctctccccaa

SEQ ID NO: 535599 - DNA, 120 bp, Artificial Sequence
  ENSG00000166734_10 (sequence is synthesized)
atatgcctccagattcacacataaaccacaatggaaaccccggtacttcaaaacagaatccttccagtcctcttcagcgtttaattccaggctcaaacttggacagtgaacccagaattc

SEQ ID NO: 535600 - DNA, 120 bp, Artificial Sequence
  ENSG00000166734_11 (sequence is synthesized)
aaacagatatactaaagcaggctaccaaggacagagtcagtgatttccataaattgaagcaaagccgattctttgatgaaaatgaatcccctgttgatccgcagcatggctctaaactgg

SEQ ID NO: 535601 - DNA, 120 bp, Artificial Sequence
  ENSG00000166734_12 (sequence is synthesized)
cggattataatggggatgatggtaacgtaggtgagtatgaggcagacaagcaggctgagctggcttacaatgaggaagaagatggtgatggtggagaggaagacgtccaagatgatgaag

SEQ ID NO: 535602 - DNA, 120 bp, Artificial Sequence
  ENSG00000166734_13 (sequence is synthesized)
aacgagagcttcaaatggatcctgcagactatggaaagcaacatttcaatgatgtcctttaagtcctaaaggaatgcttcagaaaacctaaagtgctgtaaaatgaaatcattctacttt

SEQ ID NO: 535603 - DNA, 120 bp, Artificial Sequence
  ENSG00000166734_14 (sequence is synthesized)
gtcctttctgacttttgttgtaaagacgaattgtatcagttgtaaagatacattgagatagaattaaggaaaaactttaatgaaggaatgtacccatgtacatatgtgaactttttcata

SEQ ID NO: 535604 - DNA, 120 bp, Artificial Sequence
  ENSG00000166734_15 (sequence is synthesized)
ttgtattatcaaggtatagacttttttggttatgatacagttaagccaaaaacagctaatctttgcatctaaagcaaactaatgtatatttcacattttattgagccgacttatttccac

SEQ ID NO: 535605 - DNA, 120 bp, Artificial Sequence
  ENSG00000166734_16 (sequence is synthesized)
acaggacaaaatagttgtacaggttatatgtggcatagcataaccacagtaagaacagaacagatattcagcagaaaactttttatactctaattctttttttttttttttttgagacag

SEQ ID NO: 535606 - DNA, 120 bp, Artificial Sequence
  ENSG00000166734_17 (sequence is synthesized)
tcctgcattggcctcccaaagtgctggaattccaggcatgagccactgcgcccagtctacacactaattcttgttagcccaacagctgttctgttctatctacccctcatttcacgctca

SEQ ID NO: 535607 - DNA, 120 bp, Artificial Sequence
  ENSG00000166734_18 (sequence is synthesized)
aggagtcatacctagaatagttacacacaagagggaaactggaagccaaacactgtacagtattgtgtagaaagtcacctccctactccttttattttacatgagtgctgatgtgttttg

SEQ ID NO: 535608 - DNA, 120 bp, Artificial Sequence
  ENSG00000166734_19 (sequence is synthesized)
gcagatgagctttcagctgaggcctgatggaaattgagataacctgcaaagacataacagtatttatgagttatatcttagttcttgaaattgtggaatgcatgattgacaatatatttt

SEQ ID NO: 535609 - DNA, 120 bp, Artificial Sequence
  ENSG00000166734_20 (sequence is synthesized)
taatttttattttttcaagtaataccagtactgtttaactatagccagaactggctaaaatttttatattttcagagttgaagttggtgaagacattcatgatttaaacaccagatcctg

SEQ ID NO: 535610 - DNA, 120 bp, Artificial Sequence
  ENSG00000166734_21 (sequence is synthesized)
aaaggggttaaatctactttgaaatgaatctgcaatcagtatttcaaagcttttctggtaattttagtgatcttatttgattagactttttcagaagtactaaataaggaattttaacag

SEQ ID NO: 535611 - DNA, 120 bp, Artificial Sequence
  ENSG00000166734_22 (sequence is synthesized)
gtttttattaatgcacagataaatagaagtacagtgaggtctatagccattttattaaaatagcttaaaagtttgtaaaaaaatgaatctttgtaattacttaatatgttagttaagaac

SEQ ID NO: 535612 - DNA, 120 bp, Artificial Sequence
  ENSG00000166734_23 (sequence is synthesized)
ccgtcaagcttatatttgctagacttacaaattattttaaatgcatttatcttttttgacactattcagtggaatgtgtaagctagctaattcttgttttctgatttaaagcacttttaa

SEQ ID NO: 535613 - DNA, 120 bp, Artificial Sequence
  ENSG00000166734_24 (sequence is synthesized)
atcttatcctgccccctaaaaacaaaaggttttgatcacaaggggaaatttaagattgttaaccctgtttttcagaagggctactgttaattgcacataaacatgaaatgtgttttcccc

SEQ ID NO: 535614 - DNA, 120 bp, Artificial Sequence
  ENSG00000166734_25 (sequence is synthesized)
tgtgtactaacacattctaggcaaaattcaaacttatagtggtaaagaaacaggttgttcacttgctgaggtgcaaaaattcttaagacttctgtttgaaattgctcaatgactaggaaa

SEQ ID NO: 535615 - DNA, 120 bp, Artificial Sequence
  ENSG00000166734_26 (sequence is synthesized)
agatgtagtagtttactaaaattgtttttctaccatatcaaattaaacaattcatgcctttatagggtcaggcctacaatgaataggtatggtggtttcacagaattttaaaatagagtt

SEQ ID NO: 535616 - DNA, 120 bp, Artificial Sequence
  ENSG00000166734_27 (sequence is synthesized)
aaagggaagtgatgtacatttcgggggcattagggtagggagatgaatcaaaaaatacccctagtaatgctttatattttaatactgcaaaagctttacaaatggaaaccatgcaattac

SEQ ID NO: 535617 - DNA, 120 bp, Artificial Sequence
  ENSG00000166734_28 (sequence is synthesized)
ctgccttagttcttttgtcataaaaacaatcacttggttggttgtattgtagctattacttatacagcaacatttcttcaattagcagtctagacattttataaacagaaatcttggacc

SEQ ID NO: 535618 - DNA, 120 bp, Artificial Sequence
  ENSG00000166734_29 (sequence is synthesized)
gaccaattgataatatttctgactgtattaatattttagtgctataaaatactatgtgaatctcttaaaaatctgacattttacagtctgtattagacatactgtttttataatgtttta

SEQ ID NO: 535619 - DNA, 120 bp, Artificial Sequence
  ENSG00000166734_30 (sequence is synthesized)
tgccttaagatttaggttttttaaatgtatttttgccctgaattaagtgttaatttgatggaaactctgcttttaaaatcatcatttactgggttctaataaattaaaaattaaacttgt

SEQ ID NO: 535620 - DNA, 89 bp, Artificial Sequence
  ENSG00000166734_31 (sequence is synthesized)
agaacgagactctgtcttagtctagaatcaagagatagtctgtgtattgcttttcaagtcacttaaactctctgggccacaatttcttc

SEQ ID NO: 535621 - DNA, 120 bp, Artificial Sequence
  ENSG00000166734_32 (sequence is synthesized)
cttttcaagtcacttaaactctctgggccacaatttcttcatctgtatgaagactgctgaattagaataaatgatctttctcagttttaaaattctgtggccacattcaagttggaatca

SEQ ID NO: 535622 - DNA, 120 bp, Artificial Sequence
  ENSG00000166734_33 (sequence is synthesized)
ttatatataacacaagtattatgagaaaatatgtttcagatttcaggatgtctgaaacagatctattcccaaatccatgaaagaaagtagaaactttattgccactattgtgactctaca

SEQ ID NO: 535623 - DNA, 120 bp, Artificial Sequence
  ENSG00000166734_34 (sequence is synthesized)
aataggggctcttctctgctctctagtagtaggagtagtttcttaagttgtgaggtccctaggattagagattccagctgcaggataagattctggcttcacctaaatatactttggctt

SEQ ID NO: 535624 - DNA, 78 bp, Artificial Sequence
  ENSG00000166734_35 (sequence is synthesized)
caggataagattctggcttcacctaaatatactttggctttggtctccaaaattgtgtattatgaataacaggctcgg

SEQ ID NO: 535625 - DNA, 120 bp, Artificial Sequence
  ENSG00000166734_36 (sequence is synthesized)
gaagagatgcgaggatgacaagagatgagatctcactgtgtttccaggctggtcttgaattcctgagtttgaatgatcctcctgcctcagcctccaaaatgctgggattataggcatgag

SEQ ID NO: 535626 - DNA, 120 bp, Artificial Sequence
  ENSG00000166734_37 (sequence is synthesized)
caagatgatgaagaacgagagcttcaaatggatcctgcagactatggaaagcaacatttcaatgatgtcctttaagtcctaaaggaatgcttcagaaaacctaaaagttgaagttggtga

SEQ ID NO: 535627 - DNA, 80 bp, Artificial Sequence
  ENSG00000166734_38 (sequence is synthesized)
gcatccaggaaaagctttcgctctgttgtccaggctgaagtatagtagcgtgatcttggctcactgcaacctgcgcctcc

SEQ ID NO: 535628 - DNA, 120 bp, Artificial Sequence
  ENSG00000166734_39 (sequence is synthesized)
tcttcagcgtttaattccaggctcaaacttggacagtgaacccagaattcaaacagatatactaaagcaggctaccaaggacagagtcagtgatttccataaattgaagcaaagaaattc

SEQ ID NO: 535629 - DNA, 120 bp, Artificial Sequence
  ENSG00000166734_40 (sequence is synthesized)
gtatcttgaccaaagtattgtgtgaaaaacatttttattacaaagatttagctaacattttaaatataatgaaaaaatatttcctcaaaattgggttgggggattggcctgaaaacttac

SEQ ID NO: 535630 - DNA, 120 bp, Artificial Sequence
  ENSG00000166734_41 (sequence is synthesized)
ggctgcaggccagagagggcctcgggaagagatgcgaggatgacaagagtctggctctgtggcccaggctgaagtgcagtggtacgatctccgctcactgtaagctctgcctcccaggtt

SEQ ID NO: 535631 - DNA, 120 bp, Artificial Sequence
  ENSG00000166734_42 (sequence is synthesized)
ttgttcaaagtttattatatgcataagtcatttatttgggaaagttgaataccatgtggtatgtgatagggatagaaagatagtaagattcccgttctttgaagaagtgagggaggcaca

SEQ ID NO: 535632 - DNA, 120 bp, Artificial Sequence
  ENSG00000166734_43 (sequence is synthesized)
catagaaaaataatccataatgcatgattaaatgctatagtaaagctgcttacaaaggggtttgagaatacagaggaataactgattaacttcctcaggaagtcaagagcgaaataattc

SEQ ID NO: 535633 - DNA, 120 bp, Artificial Sequence
  ENSG00000166734_44 (sequence is synthesized)
actgaaaaggtgatctttagtaatttaacaaaatgagaaagggataaggacaggaggaacataaatgaggccaggaaagctggaaagtatgttgtaccttcacagaaggtcaagcagtag

SEQ ID NO: 535634 - DNA, 120 bp, Artificial Sequence
  ENSG00000166734_45 (sequence is synthesized)
aataggagagtgtaatataaggtacatggtattgagaagtaggggaaattatgtctgagttaaagctatttggggccagaataatgatgattattgttattactattttattgtggtaaa

SEQ ID NO: 535635 - DNA, 120 bp, Artificial Sequence
  ENSG00000166734_46 (sequence is synthesized)
acatctataacaaaatttactatttttaccattttaagtgtataatttagtggcattaagtacattcacaatgttgtgtaaccatgattactaccatctatttctagaactttttcacga

SEQ ID NO: 535636 - DNA, 120 bp, Artificial Sequence
  ENSG00000166734_47 (sequence is synthesized)
tcccaaaccaaacaaaacctctacccattaagcagtaattcccattgcccttccctccagcctgtggtaacctctattctagtttctgtgtctatgaatttgtctattctagatacctca

SEQ ID NO: 535637 - DNA, 120 bp, Artificial Sequence
  ENSG00000166734_48 (sequence is synthesized)
tataggaggattatacaatatttgtccttttttatctggcttatttcacctagcataatgttttcaagattcatttatgttgtagcatgtatcagaacttcattcctctttatggctgat

SEQ ID NO: 535638 - DNA, 120 bp, Artificial Sequence
  ENSG00000166734_49 (sequence is synthesized)
aatattttattatgtgtatataccatgttttgcttttcattcatctgttgatgaacacttgagttcttcccctctttcagttattgtgagtaatgcctctataaacggtggtgtacaagt

SEQ ID NO: 535639 - DNA, 120 bp, Artificial Sequence
  ENSG00000166734_50 (sequence is synthesized)
atcatctctgaacctgctgggggaatttgccaccctgaaaggaaggacacaagcccagctggcttcatcatctgctgattgtggagctctagggccttgagcaaacatatgtggtagcca

SEQ ID NO: 535640 - DNA, 120 bp, Artificial Sequence
  ENSG00000166734_51 (sequence is synthesized)
ggtagtggttacagcaggccttggtaagacccagtgctgtattggcttcaggtctaacccagcacagttctaatggtggtgccacagtggtacatgcctatagtcccagctactccagaa

SEQ ID NO: 535641 - DNA, 120 bp, Artificial Sequence
  ENSG00000166736_0 (sequence is synthesized)
ctctcagctgtcccctcccctttcctcccgcctgaaacatgatccagctgaaggactgattgcaggaaaacttggcagctccccaaccttggtggcccagggagtgtgaggctgcagcct

SEQ ID NO: 535642 - DNA, 120 bp, Artificial Sequence
  ENSG00000166736_1 (sequence is synthesized)
cagaaggtgtgagcagtggccacgagaggcaggctggctgggacatgaggttggcagagggcaggcaagctggcccttggtgggcctcgtcctgagcactcggaggcactcctatgcttg

SEQ ID NO: 535643 - DNA, 120 bp, Artificial Sequence
  ENSG00000166736_2 (sequence is synthesized)
gaaagctcgctatgctgctgtgggtccagcaggcgctgctcgccttgctcctccccacactcctggcacagggagaagccaggaggagccgaaacaccaccaggcccgctctgctgaggc

SEQ ID NO: 535644 - DNA, 120 bp, Artificial Sequence
  ENSG00000166736_3 (sequence is synthesized)
tgtcggattaccttttgaccaactacaggaagggtgtgcgccccgtgagggactggaggaagccaaccaccgtatccattgacgtcattgtctatgccatcctcaacgtggatgagaaga

SEQ ID NO: 535645 - DNA, 120 bp, Artificial Sequence
  ENSG00000166736_4 (sequence is synthesized)
atcaggtgctgaccacctacatctggtaccggcagtactggactgatgagtttctccagtggaaccctgaggactttgacaacatcaccaagttgtccatccccacggacagcatctggg

SEQ ID NO: 535646 - DNA, 120 bp, Artificial Sequence
  ENSG00000166736_5 (sequence is synthesized)
tcccggacattctcatcaatgagttcgtggatgtggggaagtctccaaatatcccgtacgtgtatattcggcatcaaggcgaagttcagaactacaagccccttcaggtggtgactgcct

SEQ ID NO: 535647 - DNA, 120 bp, Artificial Sequence
  ENSG00000166736_6 (sequence is synthesized)
gtagcctcgacatctacaacttccccttcgatgtccagaactgctcgctgaccttcaccagttggctgcacaccatccaggacatcaacatctctttgtggcgcttgccagaaaaggtga

SEQ ID NO: 535648 - DNA, 120 bp, Artificial Sequence
  ENSG00000166736_7 (sequence is synthesized)
aatccgacaggagtgtcttcatgaaccagggagagtgggagttgctgggggtgctgccctactttcgggagttcagcatggaaagcagtaactactatgcagaaatgaagttctatgtgg

SEQ ID NO: 535649 - DNA, 120 bp, Artificial Sequence
  ENSG00000166736_8 (sequence is synthesized)
tcatccgccggcggcccctcttctatgtggtcagcctgctactgcccagcatcttcctcatggtcatggacatcgtgggcttctacctgccccccaacagtggcgagagggtctctttca

SEQ ID NO: 535650 - DNA, 120 bp, Artificial Sequence
  ENSG00000166736_9 (sequence is synthesized)
cgctgccggccactgccatcggcactcctctcattggtaaggcccctcctggcagcagagctcagtctggtgagaaacccgccccctcccacctcctgcatgtgtctcttgcctctgccc

SEQ ID NO: 535651 - DNA, 120 bp, Artificial Sequence
  ENSG00000166736_10 (sequence is synthesized)
tgggctgcacaggtgtctactttgtggtgtgcatggctctgctggtgataagtttggccgagaccatcttcattgtgcggctggtgcacaagcaagacctgcagcagcccgtgcctgctt

SEQ ID NO: 535652 - DNA, 120 bp, Artificial Sequence
  ENSG00000166736_11 (sequence is synthesized)
ggctgcgtcacctggttctggagagaatcgcctggctactttgcctgagggagcagtcaacttcccagaggcccccagccacctcccaagccaccaagactgatgactgctcagccatgg

SEQ ID NO: 535653 - DNA, 120 bp, Artificial Sequence
  ENSG00000166736_12 (sequence is synthesized)
gaaaccactgcagccacatgggaggaccccaggacttcgagaagagcccgagggacagatgtagccctcccccaccacctcgggaggcctcgctggcggtgtgtgggctgctgcaggagc

SEQ ID NO: 535654 - DNA, 120 bp, Artificial Sequence
  ENSG00000166736_13 (sequence is synthesized)
tgtcctccatccggcaattcctggaaaagcgggatgagatccgagaggtggcccgagactggctgcgcgtgggctccgtgctggacaagctgctattccacatttacctgctagcggtgc

SEQ ID NO: 535655 - DNA, 120 bp, Artificial Sequence
  ENSG00000166736_14 (sequence is synthesized)
tggcctacagcatcaccctggttatgctctggtccatctggcagtacgcttgagtgggtacagcccagtggaggagggggtacagtcctggttaggtggggacagaggatttctgcttag

SEQ ID NO: 535656 - DNA, 120 bp, Artificial Sequence
  ENSG00000166736_15 (sequence is synthesized)
gcccctcaggacccagggaatgccagggacattttcaagacacagacaaagtcccgtgccctgtttccaatgccaattcatctcagcaatcacaagccaaggtctgaacccttccaccaa

SEQ ID NO: 535657 - DNA, 120 bp, Artificial Sequence
  ENSG00000166736_16 (sequence is synthesized)
aaactgggtgttcaaggcccttacacccttgtcccacccccagcagctcaccatggctttaaaacatgctgtcttagatcaggagaaactcgggcactccctaagtccactctagttgtg

SEQ ID NO: 535658 - DNA, 120 bp, Artificial Sequence
  ENSG00000166736_17 (sequence is synthesized)
gacttttccccattgaccctcacctgaataagggactttggaattctgcttctctttcacaactttgcttttaggttgaaggcaaaaccaactctctactacacaggcctgataactctg

SEQ ID NO: 535659 - DNA, 120 bp, Artificial Sequence
  ENSG00000166736_18 (sequence is synthesized)
tacgaggcttctctaacccctagtgtcttttttttcttcacctcacttgtggcagcttccctgaacactcatcccccatcagatgatgggagtgggaagaataaaatgcagtgaaaccct

SEQ ID NO: 535660 - DNA, 120 bp, Artificial Sequence
  ENSG00000166736_19 (sequence is synthesized)
acatacttgccaagggacatcaatgaaagcagcagcgtggtgcacctcccaggggtcaggctgcacccttgtctcatgggcttctgcagcccctgtccccacctaagttactccttgggg

SEQ ID NO: 535661 - DNA, 120 bp, Artificial Sequence
  ENSG00000166736_20 (sequence is synthesized)
gggactctcagttactgctgagggaattgggcgccactgacaccagcttctcccaggaagatgcccacctgttgcctgggcactgagggtgaagtctgcctgagttgcaggcgaccctca

SEQ ID NO: 535662 - DNA, 120 bp, Artificial Sequence
  ENSG00000166741_0 (sequence is synthesized)
gccagacactgggtcatggcagtggtcggtgaagctgcagttgcctagggcagggatggagagagagtctgggcatgaggagagggtctcgggatgtttggctggactagattttacaga

SEQ ID NO: 535663 - DNA, 120 bp, Artificial Sequence
  ENSG00000166741_1 (sequence is synthesized)
aagccttatccaggcttttaaaattactctttccagacttcatctgagactccttcttcagccaacattccttagccctgaatacatttcctatcctcatctttcccttcttttttttcc

SEQ ID NO: 535664 - DNA, 120 bp, Artificial Sequence
  ENSG00000166741_2 (sequence is synthesized)
tttcttttacatgtttaaatttaaaccattcttcgtgaccccttttcttgggagattcatggcaagaacgagaagaatgatggtgcttgttaggggatgtcctgtctctctgaactttgg

SEQ ID NO: 535665 - DNA, 120 bp, Artificial Sequence
  ENSG00000166741_3 (sequence is synthesized)
ggtcctatgcattaaataattttcctgacgagctcaagtgctccctctggtctacaatccctggcggctggccttcatcccttgggcaagcattgcatacagctcatggccctccctcta

SEQ ID NO: 535666 - DNA, 120 bp, Artificial Sequence
  ENSG00000166741_4 (sequence is synthesized)
ccataccctccacccccgttcgcctaagctcccttctccgggaatttcatcatttcctagaacagccagaacatttgtggtctatttctctgttagtgtttaaccaaccatctgttctaa

SEQ ID NO: 535667 - DNA, 120 bp, Artificial Sequence
  ENSG00000166741_5 (sequence is synthesized)
aagaagggctgaactgatggaaggaatgctgttagcctgagactcaggaagacaacttctgcagggtcactccctggcttctggaggaaagagaaggagggcagtgctccagtggtacag

SEQ ID NO: 535668 - DNA, 120 bp, Artificial Sequence
  ENSG00000166741_6 (sequence is synthesized)
ccattttaaccctcgggattacctagaaaaatattacaagtttggttctaggcactctgcagaaagccagattcttaagcaccttctgaaaaatcttttcaagatattctgcctagacgg

SEQ ID NO: 535669 - DNA, 120 bp, Artificial Sequence
  ENSG00000166741_7 (sequence is synthesized)
tgtgaagggagacctgctgattgacatcggctctggccccactatctatcagctcctctctgcttgtgaatcctttaaggagatcgtcgtcactgactactcagaccagaacctgcagga

SEQ ID NO: 535670 - DNA, 120 bp, Artificial Sequence
  ENSG00000166741_8 (sequence is synthesized)
gctggagaagtggctgaagaaagagccagaggcctttgactggtccccagtggtgacctatgtgtgtgatcttgaagggaacagagtcaagggtccagagaaggaggagaagttgagaca

SEQ ID NO: 535671 - DNA, 120 bp, Artificial Sequence
  ENSG00000166741_9 (sequence is synthesized)
ggcggtcaagcaggtgctgaagtgtgatgtgactcagagccagccactgggggccgtccccttacccccggctgactgcgtgctcagcacactgtgtctggatgccgcctgcccagacct

SEQ ID NO: 535672 - DNA, 120 bp, Artificial Sequence
  ENSG00000166741_10 (sequence is synthesized)
ccccacctactgcagggcgctcaggaacctcggcagcctactgaagccagggggcttcctggtgatcatggatgcgctcaagagcagctactacatgattggtgagcagaagttctccag

SEQ ID NO: 535673 - DNA, 120 bp, Artificial Sequence
  ENSG00000166741_11 (sequence is synthesized)
cctccccctgggccgggaggcagtagaggctgctgtgaaagaggctggctacacaatcgaatggtttgaggtgatctcgcaaagttattcttccaccatggccaacaacgaaggactttt

SEQ ID NO: 535674 - DNA, 120 bp, Artificial Sequence
  ENSG00000166741_12 (sequence is synthesized)
ctccctggtggcgaggaagctgagcagacccctgtgatgcctgtgacctcaattaaagcaattcctttgacctgtccagttgactttagtccttgtttctaactgccaagtcatgtgctg

SEQ ID NO: 535675 - DNA, 120 bp, Artificial Sequence
  ENSG00000166741_13 (sequence is synthesized)
taggcgctgtgctggggtcgcggcggcgcgggcgctgggggagaggagtgtggtcttcagcatagagtgagcttctagtgacacgagctggagggaaagaggaagtgcatcaggacggct

SEQ ID NO: 535676 - DNA, 120 bp, Artificial Sequence
  ENSG00000166741_14 (sequence is synthesized)
aggctcagtggttggggcccaatggttcatctaggacgggactagagaggtcagtctacaagcaatccattgaccacttacttggtgctgcacacaaatgttggtgctatgggacccaaa

SEQ ID NO: 535677 - DNA, 120 bp, Artificial Sequence
  ENSG00000166741_15 (sequence is synthesized)
gatgagcaattagtattccagtcttcattgcctgtgcttacaaaagaagacctcacttccctaaacatctagttatggcggctcaagcccgtacctgcctacagagaagtgtctgcagtt

SEQ ID NO: 535678 - DNA, 120 bp, Artificial Sequence
  ENSG00000166741_16 (sequence is synthesized)
actcactattagtttcctaagggggcactgctggctccttctctcccaggaatgggcttctcctattctttaactcttgccttctccctggagaggctaccaaaccctggcctctgccgc

SEQ ID NO: 535679 - DNA, 120 bp, Artificial Sequence
  ENSG00000166741_17 (sequence is synthesized)
tgttcaggctgccatgtgggtatagctgtttgctagactccactctggcctcaggggccagagaacagctgtccagcatttctgttcatcccagcaatccaaaaaaaaatttttttaagc

SEQ ID NO: 535680 - DNA, 120 bp, Artificial Sequence
  ENSG00000166741_18 (sequence is synthesized)
tacaaagatcactccattttcaaattcagactctgccacttattagctgtttctcattaggcaagttatataaccttgcagtgcctcactttcctcatctataaaatgagattaaaatag

SEQ ID NO: 535681 - DNA, 64 bp, Artificial Sequence
  ENSG00000166741_19 (sequence is synthesized)
taaaatagtctttttattaagagaattaaagtgaattgacagattgcttgagctcagaagttcg

SEQ ID NO: 535682 - DNA, 120 bp, Artificial Sequence
  ENSG00000166741_20 (sequence is synthesized)
ggttggcaaaagcaacagacagatagggaccaaagagaaatccaaatggagaatgagtggtaacgagagagcgagagcaagagagatgagataggcccatgtgtgtgcatgttagtaaat

SEQ ID NO: 535683 - DNA, 120 bp, Artificial Sequence
  ENSG00000166741_21 (sequence is synthesized)
ctcaatgtggtgctggagcagaagcaatgctttgatggttgtttcacagcccagagtatcgtaagcagagggagagtgatttcccttactcccgtctgagtgtatgagtttggtagtgtt

SEQ ID NO: 535684 - DNA, 120 bp, Artificial Sequence
  ENSG00000166743_0 (sequence is synthesized)
agccatctcttcccaaggcaggtggtgacttgagaactctgtgcctggtttctgaggactgtttcaccatgcagtggctaatgaggttccggaccctctggggcatccacaaatccttcc

SEQ ID NO: 535685 - DNA, 120 bp, Artificial Sequence
  ENSG00000166743_1 (sequence is synthesized)
acaacatccaccctgccccttcacagctgcgctgccggtctttatcagaatttggagccccaagatggaatgactatgaagtaccggaggaatttaactttgcaagttatgtactggact

SEQ ID NO: 535686 - DNA, 120 bp, Artificial Sequence
  ENSG00000166743_2 (sequence is synthesized)
actgggctcaaaaggagaaggagggcaagagaggtccaaatccagctttttggtgggtgaatggccaaggggatgaagtaaagtggagcttcagagagatgggagacctaacccgccgtg

SEQ ID NO: 535687 - DNA, 120 bp, Artificial Sequence
  ENSG00000166743_3 (sequence is synthesized)
tagccaacgtcttcacacagacctgtggcctacaacagggagaccatctggccttgatgctgcctcgagttcctgagtggtggctggtggctgtgggctgcatgcgaacagggatcatct

SEQ ID NO: 535688 - DNA, 120 bp, Artificial Sequence
  ENSG00000166743_4 (sequence is synthesized)
tcattcctgcgaccatcctgttgaaggccaaagacattctctatcgactacagttgtctaaagccaagggcattgtgaccatagatgcccttgcctcagaggtggactccatagcttctc

SEQ ID NO: 535689 - DNA, 120 bp, Artificial Sequence
  ENSG00000166743_5 (sequence is synthesized)
agtgcccctctctgaaaaccaagctcctggtgtctgatcacagccgtgaagggtggctggacttccgatcgctggttaaatcagcatccccagaacacacctgtgttaagtcaaagacct

SEQ ID NO: 535690 - DNA, 120 bp, Artificial Sequence
  ENSG00000166743_6 (sequence is synthesized)
tggacccaatggtcatcttcttcaccagtgggaccacaggcttccccaagatggcaaaacactcccatgggttggccttacaaccctccttcccaggaagtaggaaattacggagcctga

SEQ ID NO: 535691 - DNA, 120 bp, Artificial Sequence
  ENSG00000166743_7 (sequence is synthesized)
agacatctgatgtctcctggtgcctgtcggactcaggatggattgtggctaccatttggaccctggtagaaccatggacagcgggttgtacagtctttatccaccatctgccacagtttg

SEQ ID NO: 535692 - DNA, 120 bp, Artificial Sequence
  ENSG00000166743_8 (sequence is synthesized)
atcatacagacattgttgaaataccccattaaccacttttggggggtatcatctatatatcgaatgattctgcagcaggatttcaccagcatcaggttccctgccctggagcactgctat

SEQ ID NO: 535693 - DNA, 120 bp, Artificial Sequence
  ENSG00000166743_9 (sequence is synthesized)
actggcggggaggtcgtgttgcccaaggatcaggaggagtggaaaagacggacgggccttctgctctacgagaactatgggcagtcggaaacgggactaatttgtgccacctactgggga

SEQ ID NO: 535694 - DNA, 120 bp, Artificial Sequence
  ENSG00000166743_10 (sequence is synthesized)
atgaagatcaagccgggtttcatggggaaggccactccaccctacgacgtccaggtcattgatgacaagggcagcatcctgccacctaacacagaaggaaacattggcatcagaatcaaa

SEQ ID NO: 535695 - DNA, 120 bp, Artificial Sequence
  ENSG00000166743_11 (sequence is synthesized)
cctgtcaggcctgtgagcctcttcatgtgctatgagggtgacccagagaagacagctaaagtggaatgtggggacttctacaacactggggacagaggtaagatggatgaagagggctac

SEQ ID NO: 535696 - DNA, 120 bp, Artificial Sequence
  ENSG00000166743_12 (sequence is synthesized)
atttgtttcctggggaggagtgatgacatcattaatgcctctgggtatcgcatcgggcctgcagaggttgaaagcgctttggtggagcacccagcggtggcggagtcagccgtggtgggc

SEQ ID NO: 535697 - DNA, 120 bp, Artificial Sequence
  ENSG00000166743_13 (sequence is synthesized)
agcccagacccgattcgaggggaggtggtgaaggcctttattgtcctgaccccacagttcctgtcccatgacaaggatcagctgaccaaggaactgcagcagcatgtcaagtcagtgaca

SEQ ID NO: 535698 - DNA, 120 bp, Artificial Sequence
  ENSG00000166743_14 (sequence is synthesized)
gccccatacaagtacccaaggaaggtggagtttgtctcagagctgccaaaaaccatcactggcaagattgaacggaaggaacttcggaaaaaggagactggtcagatgtaatcggcagtg

SEQ ID NO: 535699 - DNA, 120 bp, Artificial Sequence
  ENSG00000166743_15 (sequence is synthesized)
aactcagaacgcactgcacacctaaggcaaatccctggccactttagtctccccactatggtgaggacgagggtggggcattgagagtgttgatttgggaaagtatcaggagtgccatga

SEQ ID NO: 535700 - DNA, 120 bp, Artificial Sequence
  ENSG00000166743_16 (sequence is synthesized)
ttccaatgttttccttcttttaaattaaattcagttgctctgcttcctccaagtcctctgtatctttagaatttcccaggtgagcactcataacgcaagtaataaaatactgatatcaac

SEQ ID NO: 535701 - DNA, 120 bp, Artificial Sequence
  ENSG00000166743_17 (sequence is synthesized)
aatcctgcggatcacctgatcagagagaactgaacctacaaaagagagctcaacctccttttccatacctaccagggacctagttcagctacgtcctaaacagtaccaggcaggtggtga

SEQ ID NO: 535702 - DNA, 120 bp, Artificial Sequence
  ENSG00000166743_18 (sequence is synthesized)
taacaaacaaatgaagaagcaaagaaaacaccctgggaggtcccccttcgctgtggccagaagccaagttctgctgggtgcacaatcctgcggatcacctgatcagagagaactgaacct

SEQ ID NO: 535703 - DNA, 120 bp, Artificial Sequence
  ENSG00000166743_19 (sequence is synthesized)
ccactccaccctacgacgtccaggtctggtcctaagggcattggcagggagcagttagggctcagcgggggttggacaatttgacaccaggtgacaacaccagccgcacttccctgctcc

SEQ ID NO: 535704 - DNA, 120 bp, Artificial Sequence
  ENSG00000166743_20 (sequence is synthesized)
agtcatccttcctcctctcttctcatttatcccttcagtttcatatggaggcctcagttgaaaactgcattattgtgagcatgaacaccgctgaccctggcagccagggcatcacacaca

SEQ ID NO: 535705 - DNA, 120 bp, Artificial Sequence
  ENSG00000166743_21 (sequence is synthesized)
ctctctagcaagtggtgcttttcattttttttgatcactgttttccaacttgaagacacattggtgacatctactaactcatgaaacatagacccttggcttgagtttcacatttgcgta

SEQ ID NO: 535706 - DNA, 120 bp, Artificial Sequence
  ENSG00000166743_22 (sequence is synthesized)
ttttaaaggcttttgacagttttattccattttctgatgtttcctctgttatttcatccacactggtgtcccatgcataaaccagacagtgcttgggtggggcagaagggctgcggcctc

SEQ ID NO: 535707 - DNA, 120 bp, Artificial Sequence
  ENSG00000166747_0 (sequence is synthesized)
aagcggaaccaatgtccgtccgctacggggtaggccggatctttctcgctcagactcatcgcagcggtgactcggcagcagcgtctcgcgtcatcagtgacagccccgatccttgctacg

SEQ ID NO: 535708 - DNA, 120 bp, Artificial Sequence
  ENSG00000166747_1 (sequence is synthesized)
tttgcgtcgctctgccaggagcagtcgcctcctccttggcaaatagtcctcggcagggtccgagttcttggataattcgagagaaaaggcacgataagttgcagtacgaggacacggaaa

SEQ ID NO: 535709 - DNA, 120 bp, Artificial Sequence
  ENSG00000166747_2 (sequence is synthesized)
cgaccaggagaggaggacagggagcgaagtttcctcaatagtgtgtgaagttagttaaaaactccctccttcctcaggatccctccgcctgcggtagcggtggtgaggccgagggagccg

SEQ ID NO: 535710 - DNA, 120 bp, Artificial Sequence
  ENSG00000166747_3 (sequence is synthesized)
ccattttggatgttcggttcctgctgccactgctgccgccgcccccggagctgctggtttcattcgaggtttcgggccgaggatgccagcccccatcagattgcgggagctgatccggac

SEQ ID NO: 535711 - DNA, 120 bp, Artificial Sequence
  ENSG00000166747_4 (sequence is synthesized)
catccggacagcccgaacccaagctgaagaacgagaaatgatccagaaagaatgtgctgcaatccggtcatcttttagagaagaagacaatacataccgatgtcggaatgtggcaaaatt

SEQ ID NO: 535712 - DNA, 120 bp, Artificial Sequence
  ENSG00000166747_5 (sequence is synthesized)
actgtatatgcacatgctgggctaccctgctcactttggacagttggagtgcctcaagcttattgcctctcaaaaatttacagacaaacgcattggctatttaggggcaatgctgctgtt

SEQ ID NO: 535713 - DNA, 120 bp, Artificial Sequence
  ENSG00000166747_6 (sequence is synthesized)
agatgaaagacaagatgtccatcttctcatgaccaactgtatcaagaatgatcttaatcatagcacgcaattcgtacaggggttagcactttgtaccctcggctgcatgggctcctcaga

SEQ ID NO: 535714 - DNA, 120 bp, Artificial Sequence
  ENSG00000166747_7 (sequence is synthesized)
gatgtgcagagatcttgcaggagaggtagagaagctcctgaaaacctccaactcttacttaagaaaaaaggcagcactgtgtgctgttcatgtcatcaggaaagttcctgaacttatgga

SEQ ID NO: 535715 - DNA, 120 bp, Artificial Sequence
  ENSG00000166747_8 (sequence is synthesized)
gatgtttttaccagcaacaaaaaatttattgaatgagaagaaccatggtgtcctccacacatctgtagtcctcctcacagaaatgtgtgagcgaagcccagacatgcttgcgcatttcag

SEQ ID NO: 535716 - DNA, 120 bp, Artificial Sequence
  ENSG00000166747_9 (sequence is synthesized)
aaagcttgtgccccaattagttcgtattttaaagaacctcatcatgtccggatattcaccagaacatgatgtttctggtatcagtgacccctttttgcaggtacgaattttgcggttatt

SEQ ID NO: 535717 - DNA, 120 bp, Artificial Sequence
  ENSG00000166747_10 (sequence is synthesized)
aagaattttaggacgaaatgatgatgattcaagtgaagctatgaatgatatattagcacaggttgccactaatactgagactagtaaaaatgtaggaaatgctattctttatgaaacggt

SEQ ID NO: 535718 - DNA, 120 bp, Artificial Sequence
  ENSG00000166747_11 (sequence is synthesized)
tttgactatcatggatattaagtcagagagtggattgcgagtcctagccataaatatcctgggtcgtttcttattgaacaatgacaagaatattagatatgtggctctgacatctttgtt

SEQ ID NO: 535719 - DNA, 120 bp, Artificial Sequence
  ENSG00000166747_12 (sequence is synthesized)
gaagactgtacagacagatcataatgcagtacagaggcacagaagcacaattgtggactgtcttaaagatttggatgtctcaataaaacggcgtgcaatggaattgagttttgccctggt

SEQ ID NO: 535720 - DNA, 120 bp, Artificial Sequence
  ENSG00000166747_13 (sequence is synthesized)
aaatgggaataatatccgaggcatgatgaaagaattactttattttctggattcgtgtgagccagaatttaaagcagactgtgcatctggaatctttcttgctgcagaaaagtatgcacc

SEQ ID NO: 535721 - DNA, 120 bp, Artificial Sequence
  ENSG00000166747_14 (sequence is synthesized)
ttccaaacgatggcatatagacacaattatgcgtgttttgacaacggcaggaagttatgttcgtgatgatgcagtccccaatttaatccagttaataactaatagtgtggagatgcatgc

SEQ ID NO: 535722 - DNA, 120 bp, Artificial Sequence
  ENSG00000166747_15 (sequence is synthesized)
ctatactgtccagcgcctgtacaaagcaattcttggtgattattctcaacaacctttggtacaagtggctgcatggtgtataggtgaatatggtgatcttcttgtatctggccagtgtga

SEQ ID NO: 535723 - DNA, 120 bp, Artificial Sequence
  ENSG00000166747_16 (sequence is synthesized)
agaggaagagcctattcaggtaacagaggatgaagtgttggatattttagaaagtgtcctaatctctaatatgtccacctctgtgacacgaggttatgccctcactgccattatgaagct

SEQ ID NO: 535724 - DNA, 120 bp, Artificial Sequence
  ENSG00000166747_17 (sequence is synthesized)
ttccactcgattcacttgtactgtaaaccgaattaagaaagtggtttccatctacggaagcagcattgatgtggaactccagcagagggcagtagaatataatgcacttttcaagaaata

SEQ ID NO: 535725 - DNA, 120 bp, Artificial Sequence
  ENSG00000166747_18 (sequence is synthesized)
tgaccacatgaggtctgccctacttgagagaatgcctgtcatggaaaaagtgaccacaaatggccctactgagattgtgcagacaaatggagagacagaaccagctccactagagaccaa

SEQ ID NO: 535726 - DNA, 120 bp, Artificial Sequence
  ENSG00000166747_19 (sequence is synthesized)
accgccaccctctgggccacagcccaccagccaggccaatgatttattggatttgttgggaggaaatgacataacacctgttattccaactgcgcctacaagcaaaccatcttctgctgg

SEQ ID NO: 535727 - DNA, 120 bp, Artificial Sequence
  ENSG00000166747_20 (sequence is synthesized)
tggagaacttcttgatttgctgggagacatcaaccttacaggtgctccagctgctgctcctgcccctgcctcagtcccacagatatcccagccccccttcttgttggatgggctttcatc

SEQ ID NO: 535728 - DNA, 120 bp, Artificial Sequence
  ENSG00000166747_21 (sequence is synthesized)
acagcctctcttcaatgatattgctgcaggcatcccctccatcacagcatacagtaagaatggcttgaagatagaattcacctttgaacggtcaaataccaaccccagtgtaacagtgat

SEQ ID NO: 535729 - DNA, 120 bp, Artificial Sequence
  ENSG00000166747_22 (sequence is synthesized)
aacgatacaggcctccaacagcacagagctagatatgacggactttgttttccaagctgcagtaccaaagacattccagctgcagctcttgtctcctagcagcagcattgtcccagcatt

SEQ ID NO: 535730 - DNA, 120 bp, Artificial Sequence
  ENSG00000166747_23 (sequence is synthesized)
taacacggggaccatcacacaagtcattaaagttctgaaccctcagaagcaacagctgcgaatgcggatcaagcttacatataatcacaagggctcagcaatgcaagatctagcagaggt

SEQ ID NO: 535731 - DNA, 120 bp, Artificial Sequence
  ENSG00000166747_24 (sequence is synthesized)
gaacaactttccccctcagtcctggcaatgagggtttggcaccattctcattctttatcccactcaatcaaaggaactctgggaaggaggttgtgattgctggcaagtcccccccaactg

SEQ ID NO: 535732 - DNA, 120 bp, Artificial Sequence
  ENSG00000166747_25 (sequence is synthesized)
taccacgggcatgaggagctgaagagaactgctgaggaggattttcctaaagttactgctgaccttgaagcattgttaaagactaatgtcctctcctccactgttgaggctggctgcttc

SEQ ID NO: 535733 - DNA, 120 bp, Artificial Sequence
  ENSG00000166747_26 (sequence is synthesized)
tggaggctactttgcactcttcctcttctcctttttccgcacttctccacccctcccacatttacagccagaatcaacattccctgggcccctgaggaaataagcagctggtctggagga

SEQ ID NO: 535734 - DNA, 120 bp, Artificial Sequence
  ENSG00000166747_27 (sequence is synthesized)
gaggactgcaatccatggcgaaaaaacactcactttgtctctgcagcaaagagttgccccttctttctactgttgtttctctgtggactgggcaaggtggggtatttattcctcactagc

SEQ ID NO: 535735 - DNA, 120 bp, Artificial Sequence
  ENSG00000166747_28 (sequence is synthesized)
tgggttaccatcttcaggcacttttaacatctggcattcggaatggaaatgtaataatggacattagggagccctgcctttttctactggttcccccaatgtttgaaagaggcattaggc

SEQ ID NO: 535736 - DNA, 120 bp, Artificial Sequence
  ENSG00000166747_29 (sequence is synthesized)
ccttttctgtgcattgctgtatacacacagacacacacatgtatgtttgttaccaagaactggtcagaccttgcgagtttatttgtaaacactggacagatggagttaaaaagagctttt

SEQ ID NO: 535737 - DNA, 120 bp, Artificial Sequence
  ENSG00000166747_30 (sequence is synthesized)
gttgagatttggcatgaaggatatggtgctctatttgtaatagaaacttccaaggctcttccagctcccctttctcgccattctttagctgtagtcatgaatagtctccatgattttcaa

SEQ ID NO: 535738 - DNA, 120 bp, Artificial Sequence
  ENSG00000166747_31 (sequence is synthesized)
aattgattccctttaaagtgcaaaatggtcaccttctaaaagatatattcatagttattaatgaccctattcccaccacaaattttaaagtgctcctaagcccataacttgcctgtttga

SEQ ID NO: 535739 - DNA, 120 bp, Artificial Sequence
  ENSG00000166747_32 (sequence is synthesized)
actatggtaatgggtggaagaggagttcaccagtttcaaagatcagactctgtatcaaaagtacctttgcccttaggaagagtgagtattggagtcatcttatctattactccaaacctc

SEQ ID NO: 535740 - DNA, 120 bp, Artificial Sequence
  ENSG00000166747_33 (sequence is synthesized)
cctttttatttcttgagcctggcttggaccttggcattccgtttgaattccttctaactggaacatttgtgttgtatctgtaacactggcactgaaataaagaccacacggttaaagaaa

SEQ ID NO: 535741 - DNA, 120 bp, Artificial Sequence
  ENSG00000166747_34 (sequence is synthesized)
tctttccatattgtactttatggtgttggagtgaagccttgtagcttccatacccctatgtcagaggaggtcttacggacaccatagggtaggaatagcctttcctcagtctgagaaatt

SEQ ID NO: 535742 - DNA, 120 bp, Artificial Sequence
  ENSG00000166747_35 (sequence is synthesized)
ggtctcttttaaaagacgaatctcatgaatattcacatcaaagacttgagctttttaaactagtgagagtgccaagtgctttttagaaaggacccatatgttatcaaactttgaaattga

SEQ ID NO: 535743 - DNA, 120 bp, Artificial Sequence
  ENSG00000166747_36 (sequence is synthesized)
gttgctggaatgaagtagaggtgactctctctgtggtacacattgaatgtactatgtatgttcaagtattcaggcgccatgtcttatatactgaagaaagaaaaagtgaggcccaccttg

SEQ ID NO: 535744 - DNA, 120 bp, Artificial Sequence
  ENSG00000166747_37 (sequence is synthesized)
ctcttacaatgtttgcaattgttactgtattgaatacagtataatgactactatggcttcaatcttaaacctggaaacaaatatccctttttttccccttcatttcaccaagcctttact

SEQ ID NO: 535745 - DNA, 120 bp, Artificial Sequence
  ENSG00000166747_38 (sequence is synthesized)
taaaatcttcagtgtcttgtcaaatctagctctgtatcagatgctggaatattcctaacatttgacaaactggagttgaactaaaggctccacgggaaagtttctggtcttactagtgtg

SEQ ID NO: 535746 - DNA, 120 bp, Artificial Sequence
  ENSG00000166747_39 (sequence is synthesized)
tatgagcaagatctgctaaaacttactccactgggtaaatggttgactgagtcaagaacaggataatatctcctgcatagttttcagtaatgtaagtgtggactagtgcatatttcagac

SEQ ID NO: 535747 - DNA, 120 bp, Artificial Sequence
  ENSG00000166747_40 (sequence is synthesized)
aactgctctgcctgtgcaatgaaaaatagcctttaagggtttctttgcagactgatttcattggatggatacttaatgctgtgaaacatgataggattaacataatgttggtggatttct

SEQ ID NO: 535748 - DNA, 120 bp, Artificial Sequence
  ENSG00000166747_41 (sequence is synthesized)
tgaatagaatttgtcttaacattcctctttgtgtagaggctttattttctctcttatatttgtagctaaccagctcaggtttttttatttgaactgggttgaatctctgaagaaatctgt

SEQ ID NO: 535749 - DNA, 120 bp, Artificial Sequence
  ENSG00000166747_42 (sequence is synthesized)
tcaagaccatgctataagacactgtcagctaatggagctgggaagggtctactctgctgacagagcatttccttgggtgatcatagtttcgaggtagagtttatgatcattcatagcttt

SEQ ID NO: 535750 - DNA, 120 bp, Artificial Sequence
  ENSG00000166747_43 (sequence is synthesized)
gtctagaaggagtaaaatatcatggccttaacacaaagggtgctgcgtagaatatgaattgattttggaatcagaacacaagcaccatactgaaggactagcagccaaataactgcctag

SEQ ID NO: 535751 - DNA, 120 bp, Artificial Sequence
  ENSG00000166747_44 (sequence is synthesized)
gatactgatggttgtgaagactgtttcaaatgattggatctttgaaagcttcagcgtgccttagtttctaggatcagaattagttttcctctcacttggccttgcagctaaatggagaaa

SEQ ID NO: 535752 - DNA, 120 bp, Artificial Sequence
  ENSG00000166747_45 (sequence is synthesized)
tgtttcaatttctttgaatacttgcacatttcaataattcctttcccgagtataaccactcaagggggagcaaatttggatggatttacgacttcacaggcattgtgaggaaagagcatt

SEQ ID NO: 535753 - DNA, 120 bp, Artificial Sequence
  ENSG00000166747_46 (sequence is synthesized)
ttccaaggctgttttgataaccctggggtgataagcagtgagccctcacacacttactttgacaatttcacatgcacttgtacttcattatttccctcttcaagagtcgtttctattcta

SEQ ID NO: 535754 - DNA, 120 bp, Artificial Sequence
  ENSG00000166747_47 (sequence is synthesized)
gtttctgccccatcccggggaatcctaaaggagaattaattcatctaagtaatctcaaaaaactgtaggaagggtgctctccctgagaagcttctcccacagtgctttggtgctgttacc

SEQ ID NO: 535755 - DNA, 120 bp, Artificial Sequence
  ENSG00000166747_48 (sequence is synthesized)
ttgaggtggtttggacagtcacggaagttttaggctgtgcatagtgatcatctgttaattttaaggtctttatcatttaaagaaacattcctcagtgtaacatttgggaggggattcttt

SEQ ID NO: 535756 - DNA, 120 bp, Artificial Sequence
  ENSG00000166747_49 (sequence is synthesized)
cctcttgctagtttaaaggtgtgatttgtactccttgtttgtcccattcatatatgaaaatagacttttaaaactgtccaacactaatggtttatataacatgcttcccattttttttat

SEQ ID NO: 535757 - DNA, 120 bp, Artificial Sequence
  ENSG00000166747_50 (sequence is synthesized)
gtcgtagaaattggaagttagggagtactgctttcaaggttcaacttcattatcttctgcattggaaaatatttgggccatgagaactaggggaaaggagtttgaatgtgtctatttttt

SEQ ID NO: 535758 - DNA, 120 bp, Artificial Sequence
  ENSG00000166747_51 (sequence is synthesized)
tctagtgaatgtattttaaccacagtgtcctaaactgagaaaactagagaggaaaaagtgggtgttcatgaactttgtagttgggagagtggttttacatgtctgtgtattcatgacttt

SEQ ID NO: 535759 - DNA, 120 bp, Artificial Sequence
  ENSG00000166747_52 (sequence is synthesized)
gggagtgggtaggatcattggagagagaattgcacagaaagtcctgaagtttaaaacacttttgaccagctttggctcgggagagtggggctgcttgtagaactggaagtgaataacttt

SEQ ID NO: 535760 - DNA, 120 bp, Artificial Sequence
  ENSG00000166747_53 (sequence is synthesized)
ttcaagcaatatcagtgagtgggtcccatcgacagggttccaggacctggaacactttaacagaaggaaatgccgaagcagcttgcacagttgctttacagacttccaagaggctgattc

SEQ ID NO: 535761 - DNA, 120 bp, Artificial Sequence
  ENSG00000166747_54 (sequence is synthesized)
tggcttcaagatggagccttggagttggtttttttttttttttttttcttccctcaaagaacctgcggttgcgctttgtgtgttttgtttttgttttccatttgggggccccatgggaaa

SEQ ID NO: 535762 - DNA, 120 bp, Artificial Sequence
  ENSG00000166747_55 (sequence is synthesized)
gagcttctgaactctttcctttatgaactcccactgtgttcctataaaggcccttttctttcttagtgttgtaagttacattttcattatgccccatcacatcttctttactgtaaaaat

SEQ ID NO: 535763 - DNA, 120 bp, Artificial Sequence
  ENSG00000166747_56 (sequence is synthesized)
attaaaaagctgtttccaagtgggacagctaatgaagctctaattattgcagacatatttttgagatgtaaaaaaaaaaatttaaagttaaatgataagtcttagaggcgagtgaggaat

SEQ ID NO: 535764 - DNA, 120 bp, Artificial Sequence
  ENSG00000166747_57 (sequence is synthesized)
aaaatggatgtaaacatttacatgggatgcattagaattctgctgtgtgtactgtcttttggttgaaacaaattatgaacagtgactaataataaaaagtcaatacccaatgatttaaaa

SEQ ID NO: 535765 - DNA, 120 bp, Artificial Sequence
  ENSG00000166747_58 (sequence is synthesized)
ggctgtgggtgttgagaagagaagacagagaagctgggccaggagaggccgggagccccaggggctgctccgacttctggagggccgaccccgaggcctcggaccgggaggttccgcgcg

SEQ ID NO: 535766 - DNA, 120 bp, Artificial Sequence
  ENSG00000166747_59 (sequence is synthesized)
ccgcggcgttccgtgttgtggcgttgccccgccgctcctggccctgcggacgtcagcgtctaataattctcccggtcttcctgattgcctgaaagagtcgggacggttcggttgattgtg

SEQ ID NO: 535767 - DNA, 120 bp, Artificial Sequence
  ENSG00000166747_60 (sequence is synthesized)
tttcccggttaggactcggtgtaggagatccatcgaaccactcgctcagggtaatgtttatgaagcagattatgtttatgaagcagattaaatggcttttgggaggcaagagctgtcaaa

SEQ ID NO: 535768 - DNA, 120 bp, Artificial Sequence
  ENSG00000166747_61 (sequence is synthesized)
tgttttctcatatgtggattccctccctgtgctgaatacttagctttttggtgcttactgacacttgtgtggtatttttttttctcccctattatatatccctgagcacggaaatctgtc

SEQ ID NO: 535769 - DNA, 120 bp, Artificial Sequence
  ENSG00000166747_62 (sequence is synthesized)
cagactgtgcatctggaatctttcttgctgcagaaaagtatgcaccttccaaacgatggcatatagacacaattatgcgtgttttgacaacggtaagtagcttctttcagacagcatata

SEQ ID NO: 535770 - DNA, 120 bp, Artificial Sequence
  ENSG00000166747_63 (sequence is synthesized)
aaaacctaaagcagcatggaggaatataatgatggcaggataaggtgggatatagggcaactggccaagtgttttagattagagttagtcagggaggtctctcagaggagataacatttg

SEQ ID NO: 535771 - DNA, 88 bp, Artificial Sequence
  ENSG00000166747_64 (sequence is synthesized)
gacatcaaccttacagtgattatctcggctcacttcaacctctgcctcctgcgttcaagtgagcctcctgcctcagcctcctgagtag

SEQ ID NO: 535772 - DNA, 120 bp, Artificial Sequence
  ENSG00000166747_65 (sequence is synthesized)
atttttagtagagacggggttttgctgtcttctttaagaggataatgaagagttaaagcacacatgaccttgagtaaaaaatagacataggataacaagttggatggttagctaagctca

SEQ ID NO: 535773 - DNA, 120 bp, Artificial Sequence
  ENSG00000166747_66 (sequence is synthesized)
acataggataacaagttggatggttagctaagctcattcccacaggctgatttttttttttcctaatacagtggagtcacagagtataggatttatgtctgtgtcttaacaaaatttcaa

SEQ ID NO: 535774 - DNA, 120 bp, Artificial Sequence
  ENSG00000166747_67 (sequence is synthesized)
aatgttacttgtcatgtacttatgaatcatttacaaatggtcaatttcaaatcctcaaatgtcaaagctgtactggataaccggcaaagaaaaaacaaccccacagttaaaccatagcat

SEQ ID NO: 535775 - DNA, 120 bp, Artificial Sequence
  ENSG00000166747_68 (sequence is synthesized)
atacttcacctaatatgttagtatttccatgttaatatatatagccttcataattataattttaggtgactaatactttatcaacaaatttgctctgtttactcagttcgttagtattgg

SEQ ID NO: 535776 - DNA, 120 bp, Artificial Sequence
  ENSG00000166747_69 (sequence is synthesized)
gtttactcagttcgttagtattgggtagtttggcttttttttttggtttttttgaaacggaatcttgctttgttgcccgggctggagtgcaacagcacgatctcggctcactgcaacctc

SEQ ID NO: 535777 - DNA, 86 bp, Artificial Sequence
  ENSG00000166747_70 (sequence is synthesized)
agtatggggtattttgtttctagatttttcttacctagcggcctcaacaaatattacatcaatttgttcttattttagattaattt

SEQ ID NO: 535778 - DNA, 120 bp, Artificial Sequence
  ENSG00000166747_71 (sequence is synthesized)
acaaatattacatcaatttgttcttattttagattaatttgttagactaagtgacttagtctttctgaatctggttaaaattaggatgattaatacttactccataagatatttgtgagg

SEQ ID NO: 535779 - DNA, 120 bp, Artificial Sequence
  ENSG00000166747_72 (sequence is synthesized)
cccattgacctattcagtgcatgatacatagtaggcacttggtaaatattatttaccttttcctcaatttatatgtttaaccgcacagtcataagcattgtatattatcattttaaaaag

SEQ ID NO: 535780 - DNA, 120 bp, Artificial Sequence
  ENSG00000166747_73 (sequence is synthesized)
ccctattgggtgaaaatttggtcctattatattttatttttattattattttttaaattttgtagccctctgccaggcttggtcagcagagagaggccctattattttttgatcacagag

SEQ ID NO: 535781 - DNA, 120 bp, Artificial Sequence
  ENSG00000166747_74 (sequence is synthesized)
cttgaacccttgactttctcaggctgcgatctttgagggctcattcagggagcctggggtttagcggggcgggccccacccccgcgtgtcttctctgagccacgtatcagcgttcttgtg

SEQ ID NO: 535782 - DNA, 84 bp, Artificial Sequence
  ENSG00000166747_75 (sequence is synthesized)
tattattattattgttggtagtgatggagtcttgctgtgtggcccaggcttgtgtcaaactcctggcctcaagcaatcgcgcta

SEQ ID NO: 535783 - DNA, 120 bp, Artificial Sequence
  ENSG00000166747_76 (sequence is synthesized)
ctcaaaaaaagaaaggaaaaaacacacagtaataataatagctaacacttgttatcatcatttctgtgtgtttctaggggtaattgtctgcatttccttttaggcaggaagttatgttcg

SEQ ID NO: 535784 - DNA, 120 bp, Artificial Sequence
  ENSG00000166747_77 (sequence is synthesized)
atgttcggttcctgctgccactgctgccgccgcccccggagctgctggtttcattcgaggtttcgggccggtgagtgtcactcccggcgctgagagcatattgctgcttttgccccgccg

SEQ ID NO: 535785 - DNA, 120 bp, Artificial Sequence
  ENSG00000166747_78 (sequence is synthesized)
ccgtcctctcggaaccggacatcggcctcgcctctctctaaccttccgaccaacttctttcccaatttttcgtgtgtgtgtgtatatgttgttgttttgtttttttcaacctacctgcga

SEQ ID NO: 535786 - DNA, 84 bp, Artificial Sequence
  ENSG00000166747_79 (sequence is synthesized)
tctcatgaccaactgtatcaagaagtaagtcttacttttctttcttctaacaactgttaactactttgttcttttttgtatttt

SEQ ID NO: 535787 - DNA, 120 bp, Artificial Sequence
  ENSG00000166747_80 (sequence is synthesized)
cagactggtctcgaactcctgaccttgtaatctggccaaggttttggtttattatattttgacaagtcttaataggaataaaatcatgaatgttttggtgattaaatcttttaattctcc

SEQ ID NO: 535788 - DNA, 120 bp, Artificial Sequence
  ENSG00000166747_81 (sequence is synthesized)
aattctcctctttgcttttttgaataaagtagattctcaggtcactttcccacccaagcatatttaaggccaacgtagttcttgtagtctttctgcttcacttttaaatgtgaagtctta

SEQ ID NO: 535789 - DNA, 120 bp, Artificial Sequence
  ENSG00000166747_82 (sequence is synthesized)
taaaaaatggtattgaattacttttaaaattctgaactggaagaatttggggtcaacattttgaggctctgacccttttatagattaaaaattatttaaaaattatcaaagaagagaatg

SEQ ID NO: 535790 - DNA, 120 bp, Artificial Sequence
  ENSG00000166747_83 (sequence is synthesized)
aacagtacaaatttcttttgtggcaaagtaatagttggtacttttgtctagcaaagtttagggagtggcatatatatatgtgttttttccacaccatcattgttgctgaatggggatggc

SEQ ID NO: 535791 - DNA, 120 bp, Artificial Sequence
  ENSG00000166747_84 (sequence is synthesized)
atatttaacagacaaaaatctagtgttacaatgagaatagtataatgcgaatgtcagataaatggatgaaagtaaagtgttttgtttttgaaaaactatataaattaagaaaaaatgagt

SEQ ID NO: 535792 - DNA, 120 bp, Artificial Sequence
  ENSG00000166747_85 (sequence is synthesized)
atttcagtattttaaccagaaaattctggcttattaaacattatctctgcttatttgtgaattttcttttgggtattttatttcgtttgtcattttatctatagccgaattaagaaagtg

SEQ ID NO: 535793 - DNA, 120 bp, Artificial Sequence
  ENSG00000166750_0 (sequence is synthesized)
ctctgctctggacttgggaggctccgttgcctgctcccggagggagacgcgctgccgaggagaacccagcgggagaacatttcaggataggaataggccaagtgctgagaagatgagtct

SEQ ID NO: 535794 - DNA, 120 bp, Artificial Sequence
  ENSG00000166750_1 (sequence is synthesized)
taggattgatgtggatacaaactttcctgagtgtgttgtagatgcaggaaaagtcacccttgggactcagcagaggcaggagatggaccctcgcctgcgggagaaacagaatgaaatcat

SEQ ID NO: 535795 - DNA, 120 bp, Artificial Sequence
  ENSG00000166750_2 (sequence is synthesized)
cctgcgagcagtatgtgctctgctgaattctggtgggggcataatcaaggctgagattgagaacaaaggctacaattatgaacgtcatggagtaggattggatgtgcctccaattttcag

SEQ ID NO: 535796 - DNA, 120 bp, Artificial Sequence
  ENSG00000166750_3 (sequence is synthesized)
aagccatttagataagatgcagaaggaaaaccactttttgatttttgtgaaatcatggaacacagaggctggtgtgccacttgctaccttatgctccaatttgtaccacagagagagaac

SEQ ID NO: 535797 - DNA, 120 bp, Artificial Sequence
  ENSG00000166750_4 (sequence is synthesized)
atccaccgatgtcatggattctcaggaagctctggcattcctcaaatgcaggactcagactccaacgaatattaatgtttccaattcattaggtccacaggcagctcagggtagtgtaca

SEQ ID NO: 535798 - DNA, 120 bp, Artificial Sequence
  ENSG00000166750_5 (sequence is synthesized)
atatgaaggtaacataaatgtgtcagctgctgctttatttgatagaaagcggcttcagtatctggaaaaactcaaccttcctgagtccacacatgttgaatttgtaatgttctcgacaga

SEQ ID NO: 535799 - DNA, 120 bp, Artificial Sequence
  ENSG00000166750_6 (sequence is synthesized)
cgtgtcacactgtgttaaagacagacttccgaagtgtgtttctgcatttgcaaatactgaaggaggatatgtattttttggtgtgcatgatgagacttgtcaagtgattggatgtgaaaa

SEQ ID NO: 535800 - DNA, 120 bp, Artificial Sequence
  ENSG00000166750_7 (sequence is synthesized)
agagaaaatagaccttacgagcttgagggcttctattgatggctgtattaagaagctacctgtccatcatttctgcacacagaggcctgagataaaatatgtccttaacttccttgaagt

SEQ ID NO: 535801 - DNA, 120 bp, Artificial Sequence
  ENSG00000166750_8 (sequence is synthesized)
gcatgataagggggccctccgtggatatgtctgtgcaatcaaggtggagaaattctgctgtgcggtgtttgccaaagtgcctagttcctggcaggtgaaggacaaccgtgtgagacaatt

SEQ ID NO: 535802 - DNA, 120 bp, Artificial Sequence
  ENSG00000166750_9 (sequence is synthesized)
gcccacaagagaatggactgcttggatgatggaagctgacccagacctttccaggtgtcctgagatggttctccagttgagtttgtcatctgccacgccccgcagcaagcctgtgtgcat

SEQ ID NO: 535803 - DNA, 120 bp, Artificial Sequence
  ENSG00000166750_10 (sequence is synthesized)
tcataagaattcggaatgtctgaaagagcagcagaaacgctactttccagtattttcagacagagtggtatatactccagaaagcctctacaaggaactcttctcacaacataaaggact

SEQ ID NO: 535804 - DNA, 120 bp, Artificial Sequence
  ENSG00000166750_11 (sequence is synthesized)
cagagacttaataaatacagaaatgcgccctttctctcaaggaatattgattttttctcaaagctgggctgtggatttaggtctgcaagagaagcagggagtcatctgtgatgctcttct

SEQ ID NO: 535805 - DNA, 120 bp, Artificial Sequence
  ENSG00000166750_12 (sequence is synthesized)
aatttcccagaacaacacccctattctctacaccatcttcagcaagtgggatgcggggtgcaagggctattctatgatagttgcctattctttgaagcagaagctggtgaacaaaggcgg

SEQ ID NO: 535806 - DNA, 120 bp, Artificial Sequence
  ENSG00000166750_13 (sequence is synthesized)
ctacactgggaggttatgcatcacccccttggtctgtgtgctgaattctgatagaaaagcacagagcgtttacagttcgtatttacaaatttaccctgaatcctataacttcatgacccc

SEQ ID NO: 535807 - DNA, 120 bp, Artificial Sequence
  ENSG00000166750_14 (sequence is synthesized)
ccagcacatggaagccctgttacagtccctcgtgatagtcttgcttgggttcaaatccttcttaagtgaagagctgggctctgaggttttgaacctactgacaaataaacagtatgagtt

SEQ ID NO: 535808 - DNA, 120 bp, Artificial Sequence
  ENSG00000166750_15 (sequence is synthesized)
gctttcaaagaaccttcgcaagaccagagagttgtttgttcatggcttacctggatcagggaagactatcttggctcttaggatcatggagaagatcaggaatgtgtttcactgtgaacc

SEQ ID NO: 535809 - DNA, 120 bp, Artificial Sequence
  ENSG00000166750_16 (sequence is synthesized)
ggctaacattctctacatctgtgaaaaccagcccctgaagaagttggtgagtttcagcaagaaaaacatctgccagccagtgacccggaaaaccttcatgaaaaacaactttgaacacat

SEQ ID NO: 535810 - DNA, 120 bp, Artificial Sequence
  ENSG00000166750_17 (sequence is synthesized)
ccagcacattatcattgatgacgctcagaatttccgtactgaagatggggactggtatgggaaagcaaagttcatcactcagacagcaagggatggcccaggagttctctggatctttct

SEQ ID NO: 535811 - DNA, 120 bp, Artificial Sequence
  ENSG00000166750_18 (sequence is synthesized)
ggactactttcagacctatcacttgagttgcagtggcctcccccctccctcagaccagtatccaagagaagagatcaacagagtggtccgcaatgcaggtccaatagctaattacctaca

SEQ ID NO: 535812 - DNA, 120 bp, Artificial Sequence
  ENSG00000166750_19 (sequence is synthesized)
acaagtaatgcaggaagcccgacaaaatcctccacctaacctcccccctgggtccctggtgatgctctatgaacctaaatgggctcaaggtgtcccaggcaacttagagattattgaaga

SEQ ID NO: 535813 - DNA, 120 bp, Artificial Sequence
  ENSG00000166750_20 (sequence is synthesized)
cttgaacttggaggagatactgatctatgtagcgaataaatgccgttttctcttgcggaatggttattctccgaaggatattgctgtgcttttcaccaaagcaagtgaagtggaaaaata

SEQ ID NO: 535814 - DNA, 120 bp, Artificial Sequence
  ENSG00000166750_21 (sequence is synthesized)
taaagacaggcttctaacagcaatgaggaagagaaaactgtctcagctccatgaggagtctgatctgttactacagatcggtgatgcgtcggatgttctaaccgatcacattgtgttgga

SEQ ID NO: 535815 - DNA, 120 bp, Artificial Sequence
  ENSG00000166750_22 (sequence is synthesized)
cagtgtctgtcgattttcaggcctggaaagaaatatcgtgtttggaatcaatccaggagtagccccaccggctggggcctacaatcttctgctctgtttggcttctagggcaaaaagaca

SEQ ID NO: 535816 - DNA, 120 bp, Artificial Sequence
  ENSG00000166750_23 (sequence is synthesized)
tctgtatattctgaaggcttctgtgtgacaggaaacccaagcctaagaaacaattaagtggttctcatctctaattaactgtgaaaccatttaatccaaacatgtaagcacacactcact

SEQ ID NO: 535817 - DNA, 120 bp, Artificial Sequence
  ENSG00000166750_24 (sequence is synthesized)
tattaagtcacatacttttctaggtgctggggattgagaacgaatcgatgtaagattcctcctttagggcagagacagaccactgacaaatacacagatagacaaggaatttcccatggt

SEQ ID NO: 535818 - DNA, 76 bp, Artificial Sequence
  ENSG00000166750_25 (sequence is synthesized)
cactgacaaatacacagatagacaaggaatttcccatggtaaaaagggatatcagtaattagaggaccgtgagact

SEQ ID NO: 535819 - DNA, 120 bp, Artificial Sequence
  ENSG00000166750_26 (sequence is synthesized)
gattattttgggtggtcagggaagtgctcagtgagggaagaacttgtcatgagaatctctgagcgtgccaggcagactcggatatttttataaatttttaacatggccacttgcagaaga

SEQ ID NO: 535820 - DNA, 120 bp, Artificial Sequence
  ENSG00000166750_27 (sequence is synthesized)
gcttgaatgggacgtgcagcgagaatgtgaaggatggagcaggtagctcatctggccttgtaggtgccgggaacgggcaagacatgttttgaaatgtaagatcacagactgttttttgca

SEQ ID NO: 535821 - DNA, 120 bp, Artificial Sequence
  ENSG00000166750_28 (sequence is synthesized)
agaccacattatattactttattattttctgctttttcttttaacgacattagtgtttttgatcactatattttaaaatgctttttgtgagccttttggttatgtggaatctgttcctta

SEQ ID NO: 535822 - DNA, 120 bp, Artificial Sequence
  ENSG00000166750_29 (sequence is synthesized)
gctctgattttttattcttatggagcgtcttaggttactacatgaaggtaagactgccacagtcccccagggaggcacactgtgttttactgattgatttgaagatgatagagagcctag

SEQ ID NO: 535823 - DNA, 120 bp, Artificial Sequence
  ENSG00000166750_30 (sequence is synthesized)
ggggatgagtctattggactcaaaggttacattttgtttttccatttaatttaataatcaacaaaacgacaaagtcagtttaatatctttcttctgctgagtcttcaggatgttagctag

SEQ ID NO: 535824 - DNA, 120 bp, Artificial Sequence
  ENSG00000166750_31 (sequence is synthesized)
tctttcaaaagccattgctacaaaagtgcaaatttctcatttcctgtgggtctctagaaactctctcaatatttaaagccaaacaaatccatcttttctgagagacagaaactaaaaaat

SEQ ID NO: 535825 - DNA, 120 bp, Artificial Sequence
  ENSG00000166750_32 (sequence is synthesized)
tcagagttaattcactattaaaaacagcaaggccctgctatttcccaagaataaagaaatttaaaattctcattgtaagaagtatgaacttgaagctagaattggtttatttctggcagc

SEQ ID NO: 535826 - DNA, 120 bp, Artificial Sequence
  ENSG00000166750_33 (sequence is synthesized)
tacttacaatattaagaactttactttttaaatttgagacaatttcacaggaaagcaagaaattagtctattgtgaaatgtttttacaactaacttggaatatactgcaaatcactagta

SEQ ID NO: 535827 - DNA, 120 bp, Artificial Sequence
  ENSG00000166750_34 (sequence is synthesized)
agtagagacacatttaagataaaatgattaataaaacaattggtaattctgaataaggatctgaataaatccagatcacagactgttcctttaccaatatgtaaaagaatgtgcaaaatt

SEQ ID NO: 535828 - DNA, 120 bp, Artificial Sequence
  ENSG00000166750_35 (sequence is synthesized)
agtaaaaatatacccaaaaatttaccagcaacagagaagcaaagaatggagttcaaccttacactataaacatctaatagatatgtatgaaaatttaaaaactagaaaaggttgggcatg

SEQ ID NO: 535829 - DNA, 79 bp, Artificial Sequence
  ENSG00000166750_36 (sequence is synthesized)
atatgtatgaaaatttaaaaactagaaaaggttgggcatggtggctcatgcttgtgatcccaggactttaggaggcctt

SEQ ID NO: 535830 - DNA, 120 bp, Artificial Sequence
  ENSG00000166750_37 (sequence is synthesized)
acaaacaaacaaataaataaataaataaaattagctgggaatggtgatgcacacctggagtcctagctactcagaaggctgaggcaggacgatcacttgacctcagaagtctgaggttac

SEQ ID NO: 535831 - DNA, 120 bp, Artificial Sequence
  ENSG00000166750_38 (sequence is synthesized)
agtgagctatgatcataccagtgcactccagtctgggtgacagaacaagaccctgtctccaaaaattaaataaataaaacaaaaaaaaagaatttaaaagttttatataaaggcatagct

SEQ ID NO: 535832 - DNA, 120 bp, Artificial Sequence
  ENSG00000166750_39 (sequence is synthesized)
actatctcatctgcccagtgtagtcatgaatagatgtcacataaagaaaagaaaaccagaattcttgttaatatggccagtttgaagggtggtggcggaggtattgagcaggcagctcag

SEQ ID NO: 535833 - DNA, 120 bp, Artificial Sequence
  ENSG00000166750_40 (sequence is synthesized)
ggaaatgccagggagacccttgagcacagaaactcctgattgtccccagggactctccgtggacacaggagggattttccaggatttcacatgaattcaatgaagggggctgtgtcttat

SEQ ID NO: 535834 - DNA, 120 bp, Artificial Sequence
  ENSG00000166750_41 (sequence is synthesized)
tcctggatgctttgcctccttcatggaattcagtggatttaatggaagttcctaggcaacaataaagagtagaaaccaggttaacagcgagggcctcatctcacaccagatcatatcagg

SEQ ID NO: 535835 - DNA, 120 bp, Artificial Sequence
  ENSG00000166750_42 (sequence is synthesized)
ctacacaaaagtagatggaagacaccacccaggcctccagctatacactggagaagaagccaaactagtctacttcatctaagaaagttgtcaaagagagcccttctatactatcttaag

SEQ ID NO: 535836 - DNA, 120 bp, Artificial Sequence
  ENSG00000166750_43 (sequence is synthesized)
gatgaagaacccatcctgaaaggatatataactcaggggacaaaagacaactcaccataagttgggcgcagtggatcacgcctgtaatctcagcattttggtaggccaaggcaggtggat

SEQ ID NO: 535837 - DNA, 120 bp, Artificial Sequence
  ENSG00000166750_44 (sequence is synthesized)
gaggcagaggttacagtgagccaagatcaggccattgtacttcagcctgggcgacaaagtgagaccctgtctcaaaaaacaaacaaagcctccccatagatgtctcctgccatagaagaa

SEQ ID NO: 535838 - DNA, 120 bp, Artificial Sequence
  ENSG00000166750_45 (sequence is synthesized)
cccatagatgtctcctgccatagaagaatttaagaagttcataaattcaataaaacaagagttgaaggcctgtcccactgtacccaatttctccctctctgaactgcagcctagaaactc

SEQ ID NO: 535839 - DNA, 120 bp, Artificial Sequence
  ENSG00000166750_46 (sequence is synthesized)
tctacaggcagtaagctggggcagtcacagaggtgacctcatctgtttcccacatcctgcattaggacagtgatcagggatcagtatccttcattgactgatttccaatatctcgagacc

SEQ ID NO: 535840 - DNA, 120 bp, Artificial Sequence
  ENSG00000166750_47 (sequence is synthesized)
tgttgtttcatatattttgccttattttgcaattgtttcatatattttgtcttattttgcaattgtttcaggagggaggataaatatggtccctgttcctctatcttgaccagaagcatc

SEQ ID NO: 535841 - DNA, 120 bp, Artificial Sequence
  ENSG00000166750_48 (sequence is synthesized)
taagaaggcagtgaagcaacatgtgtacagttcttagggaaacaaattttgacctaaaaatattaaacctagtcaaaatattattctagtacaaaggcagcacatgggtatttttgaaca

SEQ ID NO: 535842 - DNA, 120 bp, Artificial Sequence
  ENSG00000166750_49 (sequence is synthesized)
taaaagagttctagaaatacaggacccatgaatcattcttgaagaaaagttactcagtaaggaaatctagctaagcaagcaacatgtacaaataaaagattattataattggaccaaagt

SEQ ID NO: 535843 - DNA, 120 bp, Artificial Sequence
  ENSG00000166750_50 (sequence is synthesized)
aatccattcacatgtatataattaagatatataggaattataattacagaaaagaatgttacaaaccttcacaaagtaaaaatatttttatatcagatagattcttctgtttcaatccat

SEQ ID NO: 535844 - DNA, 120 bp, Artificial Sequence
  ENSG00000166750_51 (sequence is synthesized)
caatccataaaaccagggtttggatcattttaaaaaaacaaacaaaaataatttattggaatcattagggaggacctgatagaataaaatgacaagctgaccaaataggccttagaaggg

SEQ ID NO: 535845 - DNA, 120 bp, Artificial Sequence
  ENSG00000166750_52 (sequence is synthesized)
agaggtgcctgggcagttacaaggacctaggtagcaggggtgacttggccacagtcattttctttacttgatttaaggaggttaaattacagtgagagagttgcacttatttagtttgca

SEQ ID NO: 535846 - DNA, 120 bp, Artificial Sequence
  ENSG00000166750_53 (sequence is synthesized)
taccgtactcaactcttagctagcatagggcaggttccttagttgaaaaatttccacaaaacatgatgtaaagtggaaagatcagttcccccaaagaatatcagttaccaaagtaggatg

SEQ ID NO: 535847 - DNA, 120 bp, Artificial Sequence
  ENSG00000166750_54 (sequence is synthesized)
aaaggatgttgggtagatcaaaacaacaaatgtccattacagcaattaacaaaagttagggagtggggaagtctgagtgctaatatggatttcaaaacaactttaaaaatggcttcaaac

SEQ ID NO: 535848 - DNA, 120 bp, Artificial Sequence
  ENSG00000166750_55 (sequence is synthesized)
attttatgctttttgtaatttagtcattttaatattagataaatcttcctgtaactgaaagttcttgagttaaagaaaaatattcggtagttcagctcttccttcaattttattagttgc

SEQ ID NO: 535849 - DNA, 120 bp, Artificial Sequence
  ENSG00000166750_56 (sequence is synthesized)
tcttccttcaattttattagttgctttttcttttgttcaagtgaaataaacataaaaataattttaaaatattatgtatcatatccttcgatttaacataattctatctagctgttctta

SEQ ID NO: 535850 - DNA, 120 bp, Artificial Sequence
  ENSG00000166750_57 (sequence is synthesized)
agctttctggaatattattaaccttgaatatttctagttgatgagtttatgagtgatttattgcttccttttctctttcagtattgctagaattaattttattgactttgcccctttgca

SEQ ID NO: 535851 - DNA, 120 bp, Artificial Sequence
  ENSG00000166750_58 (sequence is synthesized)
taaagaccttgaaggtcacatgctgaaatcgccctctactaaaacaaactcatagaaataatggggaagatatttcaaaacattgccatatgcatagccatcctcacaaccaagaaaagc

SEQ ID NO: 535852 - DNA, 120 bp, Artificial Sequence
  ENSG00000166750_59 (sequence is synthesized)
gcctctccatgaactaaaacctatgagtcattggtacaggtagggaaaatctaggtaaaccacggtaatacactgaggctggcaccaccacaggccaggacaaccgttgtcacaaagcca

SEQ ID NO: 535853 - DNA, 120 bp, Artificial Sequence
  ENSG00000166750_60 (sequence is synthesized)
ggacagaatctcccagccagaaagtgttgccctgaggctgaagccaaattcattttgcccccagttggccagaccaaagcctagaactaaaaaacccatacctcagggtttgtcagcatt

SEQ ID NO: 535854 - DNA, 120 bp, Artificial Sequence
  ENSG00000166750_61 (sequence is synthesized)
ggcactgctggctttttgggctggacaaccatttattgtgagaggcttctctatgcactgtaggatgtttagcagcatccttggccctactccctagacgccagtagcaaatccaccacc

SEQ ID NO: 535855 - DNA, 120 bp, Artificial Sequence
  ENSG00000166750_62 (sequence is synthesized)
ctccctcccctaccccagggttggttgtcagttgtgacaaccaaaaatgtctccagacatcgccaaatgtcccttggggggtaaaatcaccaccaccatacctcttttgactaaaagagt

SEQ ID NO: 535856 - DNA, 120 bp, Artificial Sequence
  ENSG00000166750_63 (sequence is synthesized)
ttccagaatagtggcagaatatataggtcaagcataacacattacaatcaagattcagaacatcaaagattcttttttaatcctaaaagaaaaagtttggaaaatctacaaaaagaagtg

SEQ ID NO: 535857 - DNA, 120 bp, Artificial Sequence
  ENSG00000166750_64 (sequence is synthesized)
tgaatttgacaataactatttcactagcaagggtagacgtaagcagaatacaggtagcatattcaaactgctgtggaaaaacaacatcaaacctagacttctctccccaaactatcattc

SEQ ID NO: 535858 - DNA, 120 bp, Artificial Sequence
  ENSG00000166750_65 (sequence is synthesized)
agagtcgagggcaaaataaatagattttctgacttggaacaagtaggaataatgtacttatagtattcatcttcatacagggatggactataagtgatttttaaaaaacttcctacttgt

SEQ ID NO: 535859 - DNA, 120 bp, Artificial Sequence
  ENSG00000166750_66 (sequence is synthesized)
tccaagtcagaaaaactattcatatagggatgggctattagcaagagtatatgaataacgtactataacaagaaaaaatgaattgagaagaaagtagtggttttaagaaggaaaggagaa

SEQ ID NO: 535860 - DNA, 120 bp, Artificial Sequence
  ENSG00000166750_67 (sequence is synthesized)
caaataaattagtgaaacataaggttaagtctatacatattattttctaattgcctattatgtcagactacatgtagttagaaaatacgatgaaagaaaaagccatattataattccaac

SEQ ID NO: 535861 - DNA, 120 bp, Artificial Sequence
  ENSG00000166750_68 (sequence is synthesized)
aaaaagataaaataattaagaataactgcaacaagaaaatataagttctgcaacaataaaactatacaatgaaactaaagagcacaaaaaagaacttaaacagataaaaagcagaccacg

SEQ ID NO: 535862 - DNA, 120 bp, Artificial Sequence
  ENSG00000166750_69 (sequence is synthesized)
tttttggataagaagattaaaaattataaatatatcaattttcactgttaatctataaattcagtgtaatcccaataaaaatgccaacaggttttccccaatagcattgaaatgatttta

SEQ ID NO: 535863 - DNA, 62 bp, Artificial Sequence
  ENSG00000166750_70 (sequence is synthesized)
atgccaacaggttttccccaatagcattgaaatgattttaaaatttaatgaaggccaactga

SEQ ID NO: 535864 - DNA, 78 bp, Artificial Sequence
  ENSG00000166750_71 (sequence is synthesized)
tggtgtgcacccaagccttgggaggtcgaggctgtagtgagccaaaatcacatcactgcactccagtctgggcagcca

SEQ ID NO: 535865 - DNA, 89 bp, Artificial Sequence
  ENSG00000166750_72 (sequence is synthesized)
tattggaaactacgaggcaagaatatccaagaaaaatctagaaaagaagaaacctgagtgagtcagcatgaccaaatattaaaacatct

SEQ ID NO: 535866 - DNA, 120 bp, Artificial Sequence
  ENSG00000166750_73 (sequence is synthesized)
aaacctgagtgagtcagcatgaccaaatattaaaacatcttataaagctacaataattaaaacaatgtggtgctgatatgtggagggtcaatggaacaagatgaaatggccaaaaataaa

SEQ ID NO: 535867 - DNA, 120 bp, Artificial Sequence
  ENSG00000166750_74 (sequence is synthesized)
tttaaaatacatgttgaaatgtattaacagcatatgttaaagttaagttatgttaactttatatgttaaattcaagttaattggggaaagatggattattcaatatatgatgaacaactc

SEQ ID NO: 535868 - DNA, 120 bp, Artificial Sequence
  ENSG00000166750_75 (sequence is synthesized)
tgtcacccagctaaaaaaaattaagcttgggccatatgccagactagataccaaaataaattccaggaggaccaagtttttaaaagtaaaaatatggaatcatggaagtgcatgaagaag

SEQ ID NO: 535869 - DNA, 120 bp, Artificial Sequence
  ENSG00000166750_76 (sequence is synthesized)
aagtagcacttaaaaaaataataatctcagcatggggaaggtctaagtatggccctcaatcagaaaccaggaaggaaaatattgactattttaaacaaaattatctctgtaccaaaaaca

SEQ ID NO: 535870 - DNA, 120 bp, Artificial Sequence
  ENSG00000166750_77 (sequence is synthesized)
gcataaaaggtcaagaaacaacacactggaaaaagaattgcaatgaatatcacagccaaatagttaatttcttattttcaaaaaatagcttctacaaatcgaagagaaaaattctaaggt

SEQ ID NO: 535871 - DNA, 120 bp, Artificial Sequence
  ENSG00000166750_78 (sequence is synthesized)
ctcaaaggaaaaatgagcaaaggatttgacaggtggtagaatacagaaaaagaatttaaaatagctcctaaagatatggaaacattactcatgatagcagaagtatcaattgacaaaatt

SEQ ID NO: 535872 - DNA, 120 bp, Artificial Sequence
  ENSG00000166750_79 (sequence is synthesized)
actcagattggtaacaaactttaagggggaaagcacttccatgcattgctgtaaattggtacatcttctactgagaacaatccggcagtagttaacaaaattgtgaatgcatatatctct

SEQ ID NO: 535873 - DNA, 120 bp, Artificial Sequence
  ENSG00000166750_80 (sequence is synthesized)
ttctctagaaatttctcttttgggaatttattctacatatatattcaaacgtgtgaaatacttctatacaggtgattgaatttcactttattcctaagagcagaagactgcaaaatagta

SEQ ID NO: 535874 - DNA, 120 bp, Artificial Sequence
  ENSG00000166750_81 (sequence is synthesized)
aatatatacccaaaagggtctaatggattagtttttggcatatcagcacatgataatactatgaagccataaaaaagagagatctctatatgtattgatgggggaccatctttaagatat

SEQ ID NO: 535875 - DNA, 120 bp, Artificial Sequence
  ENSG00000166750_82 (sequence is synthesized)
actgtggtgttgaacaaaacaacatgctgaaaatgtctcttattcttttagaatcaatataagtctgtgcttgtaaatgcagtaagtatctttggaagtatacctaaaaattggtaatag

SEQ ID NO: 535876 - DNA, 120 bp, Artificial Sequence
  ENSG00000166750_83 (sequence is synthesized)
tgtttgactccagggaagaacagatgggtgccagagtgaaaaaaagatagcttttgctttttatgacttttggattctgtaccacgtaataattttgatgtaaattttgctgtgtgtgtt

SEQ ID NO: 535877 - DNA, 120 bp, Artificial Sequence
  ENSG00000166750_84 (sequence is synthesized)
tttacttgttcatgtagtgattttataaattactcttttaattttctatcaatgaatatcctgggataaacccctcatgatcataatgaataatgatgtgtggagagtggggagggttta

SEQ ID NO: 535878 - DNA, 120 bp, Artificial Sequence
  ENSG00000166750_85 (sequence is synthesized)
agggtttacatatgaaaaatgtagaaaatacaaaaagtgtctatatatacaaaaatgtaagtgttaacatttttatatttgcttcaagctttttttttaaataaaagaaatgcaatattg

SEQ ID NO: 535879 - DNA, 120 bp, Artificial Sequence
  ENSG00000166750_86 (sequence is synthesized)
aggttagggagcaatatccacaatggttgtaatgtttgctggcagcaaggcagggcgggtcagagaggaaagagggatatggtattccttggaatctggggaaagagatttactctctga

SEQ ID NO: 535880 - DNA, 120 bp, Artificial Sequence
  ENSG00000166762_0 (sequence is synthesized)
gttgctccgcatggtcctgggctgtgggtaggggctagggccgggtcccggggtgagccgaaacctgggggtcgagcggggcggggaatggggcgcagtgaggctgggagccggccctga

SEQ ID NO: 535881 - DNA, 120 bp, Artificial Sequence
  ENSG00000166762_1 (sequence is synthesized)
gctcgtcttgcataggggtagccaggctcggggcacctgagctggaggcggaagcgtgaaataaggactgagtgggcaaagagaacctgggctgagacatggccgcttaccaacaagaag

SEQ ID NO: 535882 - DNA, 120 bp, Artificial Sequence
  ENSG00000166762_2 (sequence is synthesized)
agcagatgcagcttccccgagctgatgccattcgttcacgtctcatcgatactttctctctcattgagcatttgcaaggcttgagccaagctgtgccgcggcacactatcagggagttac

SEQ ID NO: 535883 - DNA, 120 bp, Artificial Sequence
  ENSG00000166762_3 (sequence is synthesized)
ttgatccttcccgccagaagaaacttgtattgggagatcaacaccagctagtgcgtttctctataaagcctcagcgtatagaacagatttcacatgcccagaggctgttgagcaggcttc

SEQ ID NO: 535884 - DNA, 120 bp, Artificial Sequence
  ENSG00000166762_4 (sequence is synthesized)
atgtgcgctgcagtcagaggccacctctttctttgtgggccggatgggtccttgagtgtcctctcttcaaaaacttcatcatcttcctggtctttttgaatacgatcatattgatggttg

SEQ ID NO: 535885 - DNA, 120 bp, Artificial Sequence
  ENSG00000166762_5 (sequence is synthesized)
aaatagaattgctggaatccacaaataccaaactatggccattgaagctgaccttggaggtggcagcttggtttatcttgcttattttcatcctggagatccttcttaagtggctatcca

SEQ ID NO: 535886 - DNA, 120 bp, Artificial Sequence
  ENSG00000166762_6 (sequence is synthesized)
acttttctgttttctggaagagtgcctggaatgtctttgactttgttgttaccatgttgtccctgcttcccgaggttgtggtattggtaggggtaacaggccaatcggtgtggcttcagc

SEQ ID NO: 535887 - DNA, 120 bp, Artificial Sequence
  ENSG00000166762_7 (sequence is synthesized)
ttctgaggatctgccgggtgctgaggtctctcaaactccttgcacaattccgtcaaattcaaattattattttggtcctggtcagggccctcaagagcatgaccttcctcttgatgttgc

SEQ ID NO: 535888 - DNA, 120 bp, Artificial Sequence
  ENSG00000166762_8 (sequence is synthesized)
tgctcatcttcttctacatttttgctgtgactggtgtctacgtcttctcagagtacacccgttcacctcgtcaggacctggagtaccatgtgttcttctcggacctcccgaattccctgg

SEQ ID NO: 535889 - DNA, 120 bp, Artificial Sequence
  ENSG00000166762_9 (sequence is synthesized)
taacagtgttcattctcttcaccttggatcattggtatgcactgcttcaggacgtctggaaggtgcctgaagtcagtcgcatcttcagcagcatctatttcatcctttggttgttgcttg

SEQ ID NO: 535890 - DNA, 120 bp, Artificial Sequence
  ENSG00000166762_10 (sequence is synthesized)
gctccattatctttcgaagtatcatagtagccatgatggttactaactttcagaatatcaggaaagagctgaatgaggagatggcgcgtcgggaggttcagctcaaagctgacatgttca

SEQ ID NO: 535891 - DNA, 120 bp, Artificial Sequence
  ENSG00000166762_11 (sequence is synthesized)
agcggcagatcatccagaggagaaaaaacatgtcacatgaagcactgacgtcaagccatagcaaaatagaggacagttcaagaggagctagtcaacaaagggaaagtttggacttatcag

SEQ ID NO: 535892 - DNA, 120 bp, Artificial Sequence
  ENSG00000166762_12 (sequence is synthesized)
aagtgtctgaagtagagtctaattatggtgccactgaagaggatttaataacatctgcatcaaaaacagaagagaccttgtcaaaaaagagagagtaccagtcttcctcctgtgtctcct

SEQ ID NO: 535893 - DNA, 120 bp, Artificial Sequence
  ENSG00000166762_13 (sequence is synthesized)
ccacatcctcttcctattcttcctcttctgaatccagattttctgaatctattggtcgtttggactgggagactcttgtgcacgaaaatctgcccgggctaatggaaatggatcaggatg

SEQ ID NO: 535894 - DNA, 120 bp, Artificial Sequence
  ENSG00000166762_14 (sequence is synthesized)
accgtgtttggcccagagactcactcttccgatattttgagttgctagaaaagcttcagtataacctagaggaacgtaagaagttacaagagtttgcagtgcaggcactgatgaacttgg

SEQ ID NO: 535895 - DNA, 120 bp, Artificial Sequence
  ENSG00000166762_15 (sequence is synthesized)
aagacaagtaaagcaatggatggcttcaatatccttgggcccagcaaaagataatgaagggaattgttggaaatagagaattgaaaatataaacattcagatagaacaatgtctgttcat

SEQ ID NO: 535896 - DNA, 120 bp, Artificial Sequence
  ENSG00000166762_16 (sequence is synthesized)
agcctgggcaacagagtgagactctgtataagtgtcttataaatactcctgatagctgctcagtagtgtgaccctgagataagggatattgaaaggcataaggtcaagtaaaagagttag

SEQ ID NO: 535897 - DNA, 120 bp, Artificial Sequence
  ENSG00000166762_17 (sequence is synthesized)
aggtcaagtaaaagagttagttcaagctgagtgtggtgatgtgtgcctctagtcccagctatgggctgaggcaggattgtttgaggcagggagttcgaggctacagcaagctaggatcat

SEQ ID NO: 535898 - DNA, 120 bp, Artificial Sequence
  ENSG00000166762_18 (sequence is synthesized)
atcactgcattccagcctgggcaacatagcgagaccctatctctaaaaaagaacaaaacaagttagctcagatgccagtggagtctgtgctccttagctttctaccctttccacagctcc

SEQ ID NO: 535899 - DNA, 120 bp, Artificial Sequence
  ENSG00000166762_19 (sequence is synthesized)
tgaatctgactcatttcttgactttatcattatagcttccacccttcctgcaacctctactgcctgattagagtcctaattttaccctctccctccctgatgcataggtaaaggcccctc

SEQ ID NO: 535900 - DNA, 120 bp, Artificial Sequence
  ENSG00000166762_20 (sequence is synthesized)
tgtggagtaaggagatcttcagagctgttagtgtaactaattgagaagtattgtttccattgcgtgttccactcatgttgcttctcttgtgaaccattaactttaattggatattatttt

SEQ ID NO: 535901 - DNA, 120 bp, Artificial Sequence
  ENSG00000166762_21 (sequence is synthesized)
tacctgtttctggaccggaagtctctttatttcattttgccatagctcagggcagtgttcaaatcagtaagtgttgtacaggtttttagtgttagaagggatttcagagttaatctatct

SEQ ID NO: 535902 - DNA, 120 bp, Artificial Sequence
  ENSG00000166762_22 (sequence is synthesized)
cccatcaaagcaggaacaccttttagaacatcactgaaaggaggattatccaggtaatgcttaatgtttctagttatttgggatttattatctagaagggatcccattccatcgttagaa

SEQ ID NO: 535903 - DNA, 120 bp, Artificial Sequence
  ENSG00000166762_23 (sequence is synthesized)
agggatcccattccatcgttagaagacttaagtctttagacatgtttattattaaaaattatatcacttattgagtgtttaacatgtatgaggttatttatatatttagtatatatatac

SEQ ID NO: 535904 - DNA, 120 bp, Artificial Sequence
  ENSG00000166762_24 (sequence is synthesized)
taaaataatcatatatggaagatagcgtcacatttttagagatcagaaaactaaggcctaaagaaattaagtaagttaagtagcttgcccaagagcacataccaagtaagaggtagagct

SEQ ID NO: 535905 - DNA, 120 bp, Artificial Sequence
  ENSG00000166762_25 (sequence is synthesized)
aaggttctaactcaggttaaaaattctgagttgagaaaaaaatcagttgaagccatttaaacaataaaatagcttactggagactggaaaattcaaaggtagtatagcttcaggattgat

SEQ ID NO: 535906 - DNA, 120 bp, Artificial Sequence
  ENSG00000166762_26 (sequence is synthesized)
ttaatgtaaaaattcactgttgttagatctgtggttttgtttctctggaattttcctgtctgcgctctcctccacgtgttcttgttattctcagactggcttcacttgggtagccagaca

SEQ ID NO: 535907 - DNA, 120 bp, Artificial Sequence
  ENSG00000166762_27 (sequence is synthesized)
attttctgaagcgcctaggcttgcatacctatttccccatatgcaggggaagagagccggtgactcctttctcagtcaatgaacaaaatttttgagctttgggtcacaataatggttatt

SEQ ID NO: 535908 - DNA, 120 bp, Artificial Sequence
  ENSG00000166762_28 (sequence is synthesized)
cttggagtgaagatactgatggggaggaagcatgaagcatctggagtgctatagatatgttccatatcttgatctgcatggtggttacaccggtatatacagatgtaaaaattcaacaaa

SEQ ID NO: 535909 - DNA, 120 bp, Artificial Sequence
  ENSG00000166762_29 (sequence is synthesized)
atgtacacttaaaatttgggcattaactgcaggtaagtcaacctccactcctctaaagatatcctgaccaccactctgattggaccaagaagttaggtcatatgcttacgtctgaacaaa

SEQ ID NO: 535910 - DNA, 120 bp, Artificial Sequence
  ENSG00000166762_30 (sequence is synthesized)
ttgttgaggtaaggtggtggttgtgatgaaatcactaattaaggctttctcctgaactggaggtaaggtcagtaacacccaaccttaagtaagggctgctacccaagtggggaagagatg

SEQ ID NO: 535911 - DNA, 120 bp, Artificial Sequence
  ENSG00000166762_31 (sequence is synthesized)
gaagggggcaatagggtggtaattataaagtcctcacctaagagtatgtctggcaaaaaggccaagatggggaaaaggcaaatgaattgaatgtccagaataaacaaatctatgaagaca

SEQ ID NO: 535912 - DNA, 120 bp, Artificial Sequence
  ENSG00000166762_32 (sequence is synthesized)
gttgctccgcatggtcctgggctgtgggggtagccaggctcggggcacctgagctggaggcggaagcgtgaaataaggactgagtgggcaaagagaacctgggctgagcagacatggccg

SEQ ID NO: 535913 - DNA, 120 bp, Artificial Sequence
  ENSG00000166762_33 (sequence is synthesized)
gtactttctgagacttcatcctcgaggcctggtggctaccggctcttttcatcttcacggccacccacagaaatgaagcagagtggcctaggctcacagtgcacagggctgttcagcacc

SEQ ID NO: 535914 - DNA, 120 bp, Artificial Sequence
  ENSG00000166762_34 (sequence is synthesized)
acagtgctgggtggctcctccagtgccccgaatcttcaggactacgcccgcagccatggcaaaaagctaccacctgccagtctgaagcaccgagatgaggtatctgccggtactgagatg

SEQ ID NO: 535915 - DNA, 120 bp, Artificial Sequence
  ENSG00000166762_35 (sequence is synthesized)
actgacgtcaagccatagcaaaatagaggacagatcctaagttaaggatcttgagatgagatcatcctagattatccagttcaagaggagctagtcaacaaagggaaagtttggacttat

SEQ ID NO: 535916 - DNA, 120 bp, Artificial Sequence
  ENSG00000166762_36 (sequence is synthesized)
agaacaagttaacatgataataggaagaaacaaaaatttacttaacttctttcttttgattttttttccctaaaactaaacatcaatcattgcaggagttgttggtattaggagcaaagt

SEQ ID NO: 535917 - DNA, 120 bp, Artificial Sequence
  ENSG00000166762_37 (sequence is synthesized)
agactaactacaacatcaatgccaacaagagcatctgccggttactgagcacttactaagtgccaagcattattttaagtgttttccttacattatctcatttatgctccacaacaaccc

SEQ ID NO: 535918 - DNA, 120 bp, Artificial Sequence
  ENSG00000166762_38 (sequence is synthesized)
aattaaataaccatgaattttatccccctttttatatctgaacaagtttaagtatagtgtttaagcaacttaatatagaaaggctgaatagtaagcacttctcagagaatgctattcaag

SEQ ID NO: 535919 - DNA, 120 bp, Artificial Sequence
  ENSG00000166762_39 (sequence is synthesized)
ggataacgcccagggaacaatgaagaggataagatgaagaagctgcaattctgcctgggtgccttggggtgtattttacttataacctgtgtgttttccacagtccctgcttcccgaggt

SEQ ID NO: 535920 - DNA, 120 bp, Artificial Sequence
  ENSG00000166762_40 (sequence is synthesized)
cctggtcagggccctcaaggtgatttgactgttgcaagctaaagcagggggcaaggtagataaatgtgagggcttaacatagaatatgaaacaaattggccgggtgcggtggctcacgcc

SEQ ID NO: 535921 - DNA, 120 bp, Artificial Sequence
  ENSG00000166762_41 (sequence is synthesized)
acagcttaggccagagtggtggcagtgagttattgagaaaagatatatttcgaaggtagagtcagcaggatttcttgatggactggatatgggaggggagagaagagttaaggatgacac

SEQ ID NO: 535922 - DNA, 120 bp, Artificial Sequence
  ENSG00000166762_42 (sequence is synthesized)
atgaatgattgaggttggaagtgcctgagtttagagtttgggagtagtttggccctcattgtcttatgccccagctttagggggtggccaggggcagaaccagaataatgagtggactag

SEQ ID NO: 535923 - DNA, 120 bp, Artificial Sequence
  ENSG00000166762_43 (sequence is synthesized)
agaggacaggttaggagtatgtatgtgaactgggatagaaacacatgaaggaggagagggtggaaaactaaagatgaagattggctttgagagataattcattcatttaataactgcata

SEQ ID NO: 535924 - DNA, 120 bp, Artificial Sequence
  ENSG00000166762_44 (sequence is synthesized)
ttgtagtaggttgactagtggcacccgaaataatatgtccatgtctttgctccctggaacctgtgaatgtgaccttatttggaaaaaaaaaaagatcctaagttaaggatcttgagatga

SEQ ID NO: 535925 - DNA, 120 bp, Artificial Sequence
  ENSG00000166762_45 (sequence is synthesized)
gatcatcctagattatccaggtaggtcctaaatccaatggcaagggtccttataaaagatgaaagaggagaagacacagagaataggagaaggcgatgtgaagacggagatagaggttgg

SEQ ID NO: 535926 - DNA, 120 bp, Artificial Sequence
  ENSG00000166762_46 (sequence is synthesized)
ggctaatgccaccgcaagccaagggaagctgaggaatgccaggcagctgccagaaggtagaagaggcaaggaacttctcccctaaagcctccagagggaatatggccctgccaacacctt

SEQ ID NO: 535927 - DNA, 120 bp, Artificial Sequence
  ENSG00000166762_47 (sequence is synthesized)
catttcagactctagcctctagaattgtgacggaatatatttctgtcattttaagctaccaagtttatagtaatttgttatggcagccacaggacactaatacaaataccttccatgaaa

SEQ ID NO: 535928 - DNA, 120 bp, Artificial Sequence
  ENSG00000166762_48 (sequence is synthesized)
cagatatgattctagaccccaagtgtttagcagtggacaaaaaaagcagaagcggaagtaaactcattcacttattaacaaataattactggctagatgaggtggattatacttgtaatc

SEQ ID NO: 535929 - DNA, 120 bp, Artificial Sequence
  ENSG00000166762_49 (sequence is synthesized)
atacttgtaatcccaacactttgagaggtgaaggcaagaggattgcttgaagttcaagccagaagttcaagactgcattgagacatgattgcaccactatactccagcctgggcaacaga

SEQ ID NO: 535930 - DNA, 120 bp, Artificial Sequence
  ENSG00000166762_50 (sequence is synthesized)
ctcaaaaatttagcagggtgggtgcggtgactcatgcctgtaataccagcattttggaaaactggtgggcagatgacttgagctcaggagttcgagactaaactaggcaatatggtaaaa

SEQ ID NO: 535931 - DNA, 76 bp, Artificial Sequence
  ENSG00000166762_51 (sequence is synthesized)
gaggctgaggtgggaggactgcttgagctgagaggttgaggctgtggtgagccgtgattgtgccactgccaaacaa

SEQ ID NO: 535932 - DNA, 120 bp, Artificial Sequence
  ENSG00000166762_52 (sequence is synthesized)
acaaacaaaaaacaataaagaacaaataattattgaatacttagtaggtgcttgggatgttatcagtgaacaaaatagacaataatgcctgcttcatggagcttacatattagtagtggt

SEQ ID NO: 535933 - DNA, 120 bp, Artificial Sequence
  ENSG00000166762_53 (sequence is synthesized)
aaagagataataagcagtgaatatattaagtaaattaatctgttaaaatatgataagcattatgggaaaattaaaagtagaacaggttaagggagattgggagtagaaggtgggattgca

SEQ ID NO: 535934 - DNA, 63 bp, Artificial Sequence
  ENSG00000166762_54 (sequence is synthesized)
aacaggttaagggagattgggagtagaaggtgggattgcaaatgggttgtaggtttttttttc

SEQ ID NO: 535935 - DNA, 90 bp, Artificial Sequence
  ENSG00000166762_55 (sequence is synthesized)
tcagcctccaaaagtgttatgcagatgggttgtagttttaaacagggtagtcacggtgacctcattgaaaaggtaatgtgagcaaagact

SEQ ID NO: 535936 - DNA, 120 bp, Artificial Sequence
  ENSG00000166762_56 (sequence is synthesized)
tcacggtgacctcattgaaaaggtaatgtgagcaaagactcgaaggaggtaaggggattaccatgtggatatctgtaagaagattgttaataggcagatgaaacggtgcaaagctccgaa

SEQ ID NO: 535937 - DNA, 120 bp, Artificial Sequence
  ENSG00000166762_57 (sequence is synthesized)
gctggaagcatgcttggtttgtttgagaaacagcagaggccattgtgactggagtagagtgagcagggggaagagtgctgggaaatgaagtcagagagagaatggtgacctgatcctgta

SEQ ID NO: 535938 - DNA, 120 bp, Artificial Sequence
  ENSG00000166762_58 (sequence is synthesized)
gggttatgggtgccattgtagggactttgaaatggcaagcagaacagaggagtgacatgaagtgacttacgtttaagaaggattactctggttgctgtgttgatagaagaacaagggaag

SEQ ID NO: 535939 - DNA, 120 bp, Artificial Sequence
  ENSG00000166762_59 (sequence is synthesized)
gactcctctttaagacatcttagtcttaacaggagctctcctagtatatctcctttccaattttctggtcttaattactttgtttttgcttcttaatttcccctgtacttcttcttcact

SEQ ID NO: 535940 - DNA, 120 bp, Artificial Sequence
  ENSG00000166762_60 (sequence is synthesized)
tcgggtaagtgtggctgtggccctctttgctcgttgtaaaaagtggtttcttactgatgcaccctttccctccttgcttcctgttacctctttccaccccacctttccacccacaccata

SEQ ID NO: 535941 - DNA, 120 bp, Artificial Sequence
  ENSG00000166762_61 (sequence is synthesized)
ggatttaccagctcttacccaacttttacaaatctagacgtgcttttctgaagcattcctccctgcaggtcgtttggactgggagactcttgtgcacgaaaatctgcccgggctaatgga

SEQ ID NO: 535942 - DNA, 120 bp, Artificial Sequence
  ENSG00000166780_0 (sequence is synthesized)
ctccctgcagcccgcaacgggaatggagtaaagggagacccgtcgacctggccacggggatcagcgatggaattaaagcaatctttgtccacccatctggaagccgagaagcctctgagg

SEQ ID NO: 535943 - DNA, 120 bp, Artificial Sequence
  ENSG00000166780_1 (sequence is synthesized)
cgctatggggcggtggaggagacggcttggaaaacggagagactggggagaaatcagctggacatcatctccatggcggagacaaccatgatgccagaggagattgagctggagatggca

SEQ ID NO: 535944 - DNA, 120 bp, Artificial Sequence
  ENSG00000166780_2 (sequence is synthesized)
aaaattcagcgtctccgggaagtcttggtccgccgggagtctgagctcaggttcatgatggatgacatccagctctgcaaggacatcatggacttgaagcaggagctgcagaacttggtc

SEQ ID NO: 535945 - DNA, 120 bp, Artificial Sequence
  ENSG00000166780_3 (sequence is synthesized)
gccatcccagaaaaagaaaaaaccaaactgcagaagcagagagaggatgagctaatccagaagatccacaaactggtgcagaagagagacttcctggtggacgatgcggaggtcgagcgg

SEQ ID NO: 535946 - DNA, 120 bp, Artificial Sequence
  ENSG00000166780_4 (sequence is synthesized)
ttaagggagcaagaagaagacaaggaaatggctgatttcctgagaatcaagttaaaacctctagacaaagtaaccaaatctccagccagctcccgggcagagaagaaagcagagccccca

SEQ ID NO: 535947 - DNA, 120 bp, Artificial Sequence
  ENSG00000166780_5 (sequence is synthesized)
cctagcaagcccacggtggccaagacggggctggcactgatcaaggattgttgcggggccacccagtgcaacatcatgtagcccccacgtggggtgccctgggccatggggacccccccc

SEQ ID NO: 535948 - DNA, 120 bp, Artificial Sequence
  ENSG00000166780_6 (sequence is synthesized)
caccctcttgtctttatagcccccatttcaccggggcccaagagctctccaaggcagaaggggttgaaggcaagcccgtgactgtcaccagaggccatgggcacggcaggcgggcctggc

SEQ ID NO: 535949 - DNA, 120 bp, Artificial Sequence
  ENSG00000166780_7 (sequence is synthesized)
caccctgtacagagtgtagcagtagggagtctctcaccgtcgcatggtcctccccagagcatgccgaacccaggagtctgtctcactgtttatccaaacaccaggaaaggtcctccctca

SEQ ID NO: 535950 - DNA, 120 bp, Artificial Sequence
  ENSG00000166780_8 (sequence is synthesized)
tccccagctgtgtgtagtcgtgacttctcaacaatctagcaccatgtcggacacgttccccatccaccctcctagctctgctctcagagctaggcacatgggcacaggtcccctcccgtc

SEQ ID NO: 535951 - DNA, 120 bp, Artificial Sequence
  ENSG00000166780_9 (sequence is synthesized)
tgtcctctcccagcaactgtgccctggagggctccacatggcccccgtgtctctcgggcaccacccatatagcagtcccagagggcccatctgtaaagatcgagcttgtgtgtggtgtcg

SEQ ID NO: 535952 - DNA, 120 bp, Artificial Sequence
  ENSG00000166780_10 (sequence is synthesized)
tggtcacatctcccgcttccccccatcctgtgtctgggcacagttcacatcaggacagcgtccattgtgctctcagtctgcctcaggtgtgtgcctggagggggcctggactggcatgga

SEQ ID NO: 535953 - DNA, 120 bp, Artificial Sequence
  ENSG00000166780_11 (sequence is synthesized)
tccagtgtgcagaagagccagcagggaaccggaagctctgatgtcaaggccagagcagttgagaatgggacccagagtagatgctgacctgggcactccaccattccggggccaccacag

SEQ ID NO: 535954 - DNA, 120 bp, Artificial Sequence
  ENSG00000166780_12 (sequence is synthesized)
agatgccagcaggatgccactttgccagcccgacacacggacctttgtaaagaacagcaacaggcaggagaggcagcgtgtgaccagattgtgtcccgtcattgggtggcatatgttaac

SEQ ID NO: 535955 - DNA, 120 bp, Artificial Sequence
  ENSG00000166780_13 (sequence is synthesized)
tagctgccaaacaacttcaacccgtgtaattcatgtacatttgcaacagccagcccggtacagcctgtgtgacttctctgtatgtgtgtgtgtgtcgtgaccagcctaagtagttagcat

SEQ ID NO: 535956 - DNA, 120 bp, Artificial Sequence
  ENSG00000166780_14 (sequence is synthesized)
aactcaagatgctgatgtgcagtcacccatcagagaaaataaaaatggaaaccacgttcacagcattttaaaagtttttactttttttcttgattatggaagtaatccatgtacatagta

SEQ ID NO: 535957 - DNA, 120 bp, Artificial Sequence
  ENSG00000166780_15 (sequence is synthesized)
aatcattttaaaagtacaaaaagtatgaagaagtttgtcttaaaaaaaaaaaaaattattcctccaactagagaccactctgatgtttcgacgttttaaaaaagtctttttttgtgcatt

SEQ ID NO: 535958 - DNA, 120 bp, Artificial Sequence
  ENSG00000166780_16 (sequence is synthesized)
ttttcatcgttgacatcatattgtggtatcatttataaccagttttttcctacttattataccaccatcttccacatcattaaaagctctttgtaaacattaaacactcttcataaatca

SEQ ID NO: 535959 - DNA, 120 bp, Artificial Sequence
  ENSG00000166780_17 (sequence is synthesized)
tagccatgcatccagtatctcgcagggtggtcatgaggagtaaaagagatcaagcatattaagtgctcagtccagtgcctgctaccacgatggatgacatccagctctgcaaggacatca

SEQ ID NO: 535960 - DNA, 120 bp, Artificial Sequence
  ENSG00000166780_18 (sequence is synthesized)
ttaaatagccatgcatccagtatctcgcagggtggtcatgaggagtaaaagagatcaagcatattaagtgctcagtccagtgcctgctaccaccctttacagaagtagccagaagttgga

SEQ ID NO: 535961 - DNA, 120 bp, Artificial Sequence
  ENSG00000166780_19 (sequence is synthesized)
ggggcctggtcttacagccagagtcttgtctagttgttccaaggcatagcctggtcattgagagtcttagaagcaggtaggctgatgccccctcacctcccacggcacagacatcccctc

SEQ ID NO: 535962 - DNA, 120 bp, Artificial Sequence
  ENSG00000166780_20 (sequence is synthesized)
acctcttcgctggctgaaatagaagaaccctagtgtccatcagctgcttatagatgactcatcttcttaatcctttcttgacgaaaacttgcttcagatgttaataaaaagtacaaaatc

SEQ ID NO: 535963 - DNA, 120 bp, Artificial Sequence
  ENSG00000166780_21 (sequence is synthesized)
ccaaatctccagccaatgaggaagtagcagtaaatccattacccttttcaagcggaggttgcaagaggttgcaagcggaggcagaataaacacttgaaacagagaactggtaacacttcg

SEQ ID NO: 535964 - DNA, 120 bp, Artificial Sequence
  ENSG00000166780_22 (sequence is synthesized)
ggcactgaggttctcctttctaacagaaggggaaaattgaaggcaaaaggtcatatgtcttccttcacattcaagaagcagctatgagaaagagtagtttcacatacttctgactggttt

SEQ ID NO: 535965 - DNA, 120 bp, Artificial Sequence
  ENSG00000166780_23 (sequence is synthesized)
taacaatcatagccaggatgtgaagcctgtcagtttcctcagccgcaaattcttccatgtggggcgacctcacagagacgggatgtatgggacggcggagtgcaaagaaagatcagctgg

SEQ ID NO: 535966 - DNA, 120 bp, Artificial Sequence
  ENSG00000166780_24 (sequence is synthesized)
atcctcagagcaaagagggttttatatgaaataagtttgagaaatgctgtttacttgaccctgtatttggagagtcccagtgtccattaggatattaaagtgatgatggatcctgctgtc

SEQ ID NO: 535967 - DNA, 120 bp, Artificial Sequence
  ENSG00000166783_0 (sequence is synthesized)
gcggaagcggaagtgaagggtgcgcttggcggcggcggcgggagctgcggagtcgggaatcaaaacaaagggcctggggggggcggggggaaggcggcggggccggaatgtgagcggagg

SEQ ID NO: 535968 - DNA, 120 bp, Artificial Sequence
  ENSG00000166783_1 (sequence is synthesized)
tggagccggcggcagagggtggaagaatgaaagaaaagaaagatgaaaggatgttgaatcactttgcatggctgtatgatggaaggaaacggaactgagaactcctgcagtagaacacgt

SEQ ID NO: 535969 - DNA, 120 bp, Artificial Sequence
  ENSG00000166783_2 (sequence is synthesized)
ggatggcttcaacaagataatgatgctaagccatggctttggaaattctctaattgcttttctcgtcctgagcagacgctgccacatagtccccaaacgaaagagtacatggagaacaag

SEQ ID NO: 535970 - DNA, 120 bp, Artificial Sequence
  ENSG00000166783_3 (sequence is synthesized)
aaagttgctgtggaactaaaggatgtaccatcaccccttcatgctggctctaagctttttccagcagtcccacttcctgatattcgttctcttcagcagcctaaaatacagctttcttct

SEQ ID NO: 535971 - DNA, 120 bp, Artificial Sequence
  ENSG00000166783_4 (sequence is synthesized)
gtccccaaagtaagctgctgtgctcattgccctaatgaaccctccacttcgccaatgcgttttggtggtggtggtggcggtagcggaggtaccagtagcttgattcacccgggcgcactg

SEQ ID NO: 535972 - DNA, 120 bp, Artificial Sequence
  ENSG00000166783_5 (sequence is synthesized)
ttagactcgcaaagcaccaggacaatcacgtgtcaggtagggtcagggtttgctttccagtctgcatcttcactccagaatgcctcagctaggaacaatttggcaggcattgcaagtgac

SEQ ID NO: 535973 - DNA, 120 bp, Artificial Sequence
  ENSG00000166783_6 (sequence is synthesized)
tttcccagcatgtgtctagagagtaacctgtcttcctgcaaacacctgccctgttgtggaaaactccacttccagtcatgtcatggtaatgtgcacaagctgcatcagtttccgagtctg

SEQ ID NO: 535974 - DNA, 120 bp, Artificial Sequence
  ENSG00000166783_7 (sequence is synthesized)
cagggctgcacctccgctggctatttcccctgttctgatttcacaagcggggctccagggcatttggaagagcacatttcacagtcggagctaacgcctcacttgtgcaccaactctttg

SEQ ID NO: 535975 - DNA, 120 bp, Artificial Sequence
  ENSG00000166783_8 (sequence is synthesized)
caccttaatgtggtacctccggtttgtttaaagggctcactttactgcgaagactgtctaaacaagccagcaagaaatagcataatcgatgcggctaaagtctggccaaatataccacct

SEQ ID NO: 535976 - DNA, 120 bp, Artificial Sequence
  ENSG00000166783_9 (sequence is synthesized)
ccaaatactcaacctgcacctcttgctgtccctctgtgtaatggctgtggaaccaaaggaacagggaaggagaccacgttgttattggcgaccagtctaggcaaagctgcttcaaaattt

SEQ ID NO: 535977 - DNA, 120 bp, Artificial Sequence
  ENSG00000166783_10 (sequence is synthesized)
gggtcaccagaagttgcagtagctggacaggtgctagaaaacttaccccccattggagttttttgggatattgaaaactgctccgttccctctggccggtcagcaactgctgttgtgcaa

SEQ ID NO: 535978 - DNA, 120 bp, Artificial Sequence
  ENSG00000166783_11 (sequence is synthesized)
agaatccgtgagaagttttttaaaggccacagagaagcagaattcatctgtgtatgtgacatcagtaaagaaaacaaggaagttattcaagagctgaataattgccaggtaaccgttgcc

SEQ ID NO: 535979 - DNA, 120 bp, Artificial Sequence
  ENSG00000166783_12 (sequence is synthesized)
cacatcaatgctactgcaaagaatgccgctgatgataaactgcggcagagtctccgcagatttgcaaatacacacactgctccagccacagtggttcttgtgtcaactgatgtcaatttt

SEQ ID NO: 535980 - DNA, 120 bp, Artificial Sequence
  ENSG00000166783_13 (sequence is synthesized)
gcattggaacttagtgacctgagacacaggcatggtttccacattattttggtccataaaaaccaggcctcagaagcactgctgcatcatgctaacgagctgatcagatttgaagagttc

SEQ ID NO: 535981 - DNA, 120 bp, Artificial Sequence
  ENSG00000166783_14 (sequence is synthesized)
atttccgacttgccccccaggttaccactaaaaatgccacagtgccacactctgctctatgtttataacctaccagcaaataaggatggcaagagcgtcagcaacaggctcagacgcctg

SEQ ID NO: 535982 - DNA, 120 bp, Artificial Sequence
  ENSG00000166783_15 (sequence is synthesized)
tccgataattgtggtgggaaagtgctgagtatcacaggctgcagtgcaattctccgcttcataaaccaagatagtgcagagcgcgctcagaagcgaatggaaaacgaagatgtctttggt

SEQ ID NO: 535983 - DNA, 120 bp, Artificial Sequence
  ENSG00000166783_16 (sequence is synthesized)
aataggatcattgtgtcatttactccaaaaaatagagaactctgtgaaacaaagagttcaaatgcaattgctgataaagtgaagtctcccaaaaaacttaagaatccaaaattgtgcctc

SEQ ID NO: 535984 - DNA, 120 bp, Artificial Sequence
  ENSG00000166783_17 (sequence is synthesized)
atcaaagatgcaagtgaacaatcttccagtgccaaagccacgcctggaaaagggtcacaggcaaattctggatctgctacaaaaaatacaaatgttaaaagtttacaggagctgtgccgc

SEQ ID NO: 535985 - DNA, 120 bp, Artificial Sequence
  ENSG00000166783_18 (sequence is synthesized)
atggagtcaaaaactggtcatagaaacagtgagcaccagcaaggtcacctgaggctggtcgtacccactcacggtaactcaagtgctgcagtgtcgacgccgaaaaactcgggggtggca

SEQ ID NO: 535986 - DNA, 120 bp, Artificial Sequence
  ENSG00000166783_19 (sequence is synthesized)
gaacccgtttacaaaaccagtcagaaaaaggagaacctcagtgcccgaagtgttaccagttctcctgtagagaaaaaagataaagaggagactgtattccaagtgagttacccgtctgct

SEQ ID NO: 535987 - DNA, 120 bp, Artificial Sequence
  ENSG00000166783_20 (sequence is synthesized)
tttagcaagttagttgcatccaggcaagtcagtcctctgctcgcatctcagtcttggtcttctaggagtatgtctccaaaccttttaaacagagcatccccgcttgctttcaacattgca

SEQ ID NO: 535988 - DNA, 120 bp, Artificial Sequence
  ENSG00000166783_21 (sequence is synthesized)
aattcgagcagcgaagccgactgcccagacccatttgcaaatggtgctgatgtccaagtcagcaacatagactacagattatcccggaaggagctgcagcagctcctgcaggaagcattt

SEQ ID NO: 535989 - DNA, 120 bp, Artificial Sequence
  ENSG00000166783_22 (sequence is synthesized)
gccaggcatggcaaggtgaagagtgttgagctcagcccccatacagattatcaactcaaggctgttgtgcaaatggaaaacttacaagatgcgatcggtgcagtgaatagcctccacaga

SEQ ID NO: 535990 - DNA, 120 bp, Artificial Sequence
  ENSG00000166783_23 (sequence is synthesized)
tacaaaattggcagcaaaaagatcctggtctcacttgccaccggggctgccagcaaatcactctctttactgagtgcagaaacaatgtctgttcttcaggatgcccctgcctgttgcctg

SEQ ID NO: 535991 - DNA, 120 bp, Artificial Sequence
  ENSG00000166783_24 (sequence is synthesized)
cctctgtttaaatttacagatatctatgaaaaaaagtttggacacaagttgaatgtgtcagatctatataaattaacagacacggtcgcaatccgtgaacaaggaaacggacggctggtg

SEQ ID NO: 535992 - DNA, 120 bp, Artificial Sequence
  ENSG00000166783_25 (sequence is synthesized)
tgtctcctacccagcagtcaggcccgccagagccccttggggtcttcccagtcacacgacggctcctccacgaattgcagcccaattatatttgaagagttagaatatcacgagcctgtc

SEQ ID NO: 535993 - DNA, 120 bp, Artificial Sequence
  ENSG00000166783_26 (sequence is synthesized)
tgcagacagcattgttccaataaggatttcagcgaacatgaatttgatccagactcttacaagattccttttgtgattctttctttgaagacatttgcgccccaggttcacagtcttctc

SEQ ID NO: 535994 - DNA, 120 bp, Artificial Sequence
  ENSG00000166783_27 (sequence is synthesized)
cagacccacgagggcaccgtgcctttattgagctttccagattgttacattgcagagtttggcgatctagaagtagtgcaagaaaaccaaggaggtgttcccttagaacacttcattacc

SEQ ID NO: 535995 - DNA, 120 bp, Artificial Sequence
  ENSG00000166783_28 (sequence is synthesized)
tgtgttccaggtgtaaacattgccactgctcagaatggcatcaaagtggttaaatggattcacaacaagcccccgcctcccaacactgacccttggcttctgcgttcgaagagtcctgta

SEQ ID NO: 535996 - DNA, 120 bp, Artificial Sequence
  ENSG00000166783_29 (sequence is synthesized)
ggtaacccccagctgatccagttcagtagagaagtgattgacttgctgaaaagccagccatcttgtgtcatacccatcagtcatttcatcccatcctatcaccatcattttgcaaagcag

SEQ ID NO: 535997 - DNA, 120 bp, Artificial Sequence
  ENSG00000166783_30 (sequence is synthesized)
tgccgagtgtcagactacggatactccaagctgattgagttattagaagcagtgcctcatgtattgcagattcttggaatgggctccaaacgtctgctgacccttacccacagggcccag

SEQ ID NO: 535998 - DNA, 120 bp, Artificial Sequence
  ENSG00000166783_31 (sequence is synthesized)
gtgaagcgctttactcaggatttactaaaacttctcaaatcccaggccagcaaacaggtcattgtgagagaattctcacaggcttatcactggtgtttctcaaaggactgggatgtcact

SEQ ID NO: 535999 - DNA, 120 bp, Artificial Sequence
  ENSG00000166783_32 (sequence is synthesized)
aaccatctgcttgtcccaacaagataatgaaatggtgatttgtatccccaaaagagaacgcactcaggatgaaatagaaaggacaaaacagttctccaaggatgtcgttgatttgctgcg

SEQ ID NO: 536000 - DNA, 120 bp, Artificial Sequence
  ENSG00000166783_33 (sequence is synthesized)
tcaccaaccccatttccggatgccctttaataaatttatcccttcttaccatcaccactttggccggcagtgcaaacttgcgtactatgggtttaccaaactacttgaactttttgaagc

SEQ ID NO: 536001 - DNA, 120 bp, Artificial Sequence
  ENSG00000166783_34 (sequence is synthesized)
catacctgatactttacaagtattggaatgtggagaagaaaagatccttactctgacagaggtggagcggttcaaagctctagctgcccagtttgttaaactccttcggtcccaaaaaga

SEQ ID NO: 536002 - DNA, 120 bp, Artificial Sequence
  ENSG00000166783_35 (sequence is synthesized)
taactgccttatgatgacagatctccttacagaatatgctaaaacttttggttatacatttcgtctccaagactatgatgtcagttccatttcggctttaactcagaaactctgccatgt

SEQ ID NO: 536003 - DNA, 120 bp, Artificial Sequence
  ENSG00000166783_36 (sequence is synthesized)
cgtgaaggttgccgatatagaatctggcagacagattcagctgatcaaccgaaagtctctgcgatctctcactgcccagttgctggtattgttgatgtcttgggaaggaaccacccatct

SEQ ID NO: 536004 - DNA, 120 bp, Artificial Sequence
  ENSG00000166783_37 (sequence is synthesized)
ttctgttgaggagctcaagagacattacgaaagtacccacaacactccccttaacccctgtgaatatggattcatgaccttgaccgaactgctgaagagcctgccatacttggttgaggt

SEQ ID NO: 536005 - DNA, 120 bp, Artificial Sequence
  ENSG00000166783_38 (sequence is synthesized)
tttcactaatgataagatggaagaatgtgtgaagctcacaagtctgtatttgtttgcaaagaatgtgcggtctttacttcatacttaccactaccagcagattttccttcatgagttttc

SEQ ID NO: 536006 - DNA, 120 bp, Artificial Sequence
  ENSG00000166783_39 (sequence is synthesized)
catggcctataccaagtatgtcggagaaactctgcagcccaagacctacggccacagcagcgtggaggagctcttgggagcaattccacaggtggtctggataaaaggacatggtcataa

SEQ ID NO: 536007 - DNA, 120 bp, Artificial Sequence
  ENSG00000166783_40 (sequence is synthesized)
gagaattgtagtgttaaaaaatgacatgaaaagtcgtttgagttcactcagtctctcccctgccaatcatgaaaaccagccctcggagggcgagcgcatcctggaggtgcccgaatcgca

SEQ ID NO: 536008 - DNA, 120 bp, Artificial Sequence
  ENSG00000166783_41 (sequence is synthesized)
cacagcctcggaactcaagcttggagctgacggcagtgggcccagtcacacagagcaggagcttctccgcctgaccgacgactcccccgtcgacctcctgtgtgcgcctgtcccctcgtg

SEQ ID NO: 536009 - DNA, 120 bp, Artificial Sequence
  ENSG00000166783_42 (sequence is synthesized)
cctgccgtcccctcagctgagaccagaccccgttatcctccaatctgctgatctcattcagtttgaggagcgccctcaagagccttctgaaattatgattttaaaccaagaagaaaaaat

SEQ ID NO: 536010 - DNA, 120 bp, Artificial Sequence
  ENSG00000166783_43 (sequence is synthesized)
ggagattccaataccaggaaagagcaaaactctgacctctgactccagctcgtcctgcatctcagcagctgtccccgtgcctccctgcccctcctcggaaacctccgagtcactgctcag

SEQ ID NO: 536011 - DNA, 120 bp, Artificial Sequence
  ENSG00000166783_44 (sequence is synthesized)
caaggaccccgtggaaagcccggccaaaaagcaacccaaaaatagagtcaaattggcagccaacttttccttagcacctataaccaagctttaactcccatttggaatatagaattagga

SEQ ID NO: 536012 - DNA, 120 bp, Artificial Sequence
  ENSG00000166783_45 (sequence is synthesized)
tgggaaaacactgtctgattctgcacacaaaagtgggtttcaaaaatacatccttttctgtgtcatgaaaaccccccgaagccattgacttcatcttacctgtgttctatcatgtttttc

SEQ ID NO: 536013 - DNA, 120 bp, Artificial Sequence
  ENSG00000166783_46 (sequence is synthesized)
ttttccattgaacacagctttgagctgaagtctttcttttcttcttcctttttctttcttttttcaattatttgaagaacttgtggcatttgttaaagaatccttaatatattttaccaa

SEQ ID NO: 536014 - DNA, 120 bp, Artificial Sequence
  ENSG00000166783_47 (sequence is synthesized)
atttttagtaactattatgaaatacaatggtgttccaaaagaagaaagcactaaaaactcaactagcaggaagcggttttgcttccattgagccacgtcggtggtgtcatcctacatgta

SEQ ID NO: 536015 - DNA, 120 bp, Artificial Sequence
  ENSG00000166783_48 (sequence is synthesized)
gcataatagagtctctcagcctttgcttactggtgtttccgacagtattaacccagtgcgtggcatgtctttgaagcaaagcctgtcccgctagcctgtgtgttcacacaccaaaggaga

SEQ ID NO: 536016 - DNA, 120 bp, Artificial Sequence
  ENSG00000166783_49 (sequence is synthesized)
agggtaggcgaggggttcggagtgtattttcaggttggaatgtgaaggttcctggcttccatgtgacttgtaagtgtgccttgttttttatttaaactatgtctgtagttgacaaaagtg

SEQ ID NO: 536017 - DNA, 120 bp, Artificial Sequence
  ENSG00000166783_50 (sequence is synthesized)
gcttcatcacaaatttttttaaacgtttctactttggggttccatttaggagctttctagaaagttgaggatgtttgaagcttcccttctgtgttccagtttgatatgggttaggttaag

SEQ ID NO: 536018 - DNA, 120 bp, Artificial Sequence
  ENSG00000166783_51 (sequence is synthesized)
gaaaaggagatggtctcgatgtcatggatttaaagtcagcatttggattacaacacacattattgtgtgtcgagaggcagcattggaaagagcctgattttctaaaatatgcatcaagtg

SEQ ID NO: 536019 - DNA, 120 bp, Artificial Sequence
  ENSG00000166783_52 (sequence is synthesized)
cataaattacaaatcagagctgagtggggaggtgcttcagcagcagcgggatcaatacgatttccactgggaagagacaggaattctacctacacataggaaggccaaggttgatccact

SEQ ID NO: 536020 - DNA, 120 bp, Artificial Sequence
  ENSG00000166783_53 (sequence is synthesized)
taaccttgttattgtaattttaaagctggtatcggtagctgggaagctttatgtgtgtgtatgtcagctcagcatcttttaatcgtgtctgattttactctcgttacttctcgctgttgg

SEQ ID NO: 536021 - DNA, 120 bp, Artificial Sequence
  ENSG00000166783_54 (sequence is synthesized)
aagcatctctgggtttcttgtggcgtctggtgtggaatggccttcctctctaggtgcctgaggtgtccgctgacgggtggcctctcacccccctctagagaaacctgacatttacaatgg

SEQ ID NO: 536022 - DNA, 120 bp, Artificial Sequence
  ENSG00000166783_55 (sequence is synthesized)
attgtatttgtccggcaaaaaaggcggattcattcatagagcagaaagaacctgttggcgtaaggtcttccactagttagatggtttcttttggggaaatgtttatatttggtaacttct

SEQ ID NO: 536023 - DNA, 120 bp, Artificial Sequence
  ENSG00000166783_56 (sequence is synthesized)
agaaagccagaaaatggactctgatttcatagcattttgataaaatgccacaaaataagggctatagagagatttttacaagtcagattttttgttccccaaatcttttaaatgaagcca

SEQ ID NO: 536024 - DNA, 120 bp, Artificial Sequence
  ENSG00000166783_57 (sequence is synthesized)
gtgactcccagttctcaacacatggccccagtcaagacagaacaccatggaaaaaaccctgtaagtattatggcactctccgaatcctcctgaaggcatttcctctacagacatagtgtt

SEQ ID NO: 536025 - DNA, 120 bp, Artificial Sequence
  ENSG00000166783_58 (sequence is synthesized)
acaggaagtgaaatgcaaatgtgcaattttttttaaaggagcttttaaacaaagtaataataattggtgttgagaacatcagttgccttattctaagatttcataaggctgagtttgcac

SEQ ID NO: 536026 - DNA, 120 bp, Artificial Sequence
  ENSG00000166783_59 (sequence is synthesized)
gcttggacttcagttctgctagcatgtaaagagtggtggactttaaaaccgtaagaggtatcattacaagtcacctggaacagactcaaagaacaggttctttgggcaacagacaaagaa

SEQ ID NO: 536027 - DNA, 120 bp, Artificial Sequence
  ENSG00000166783_60 (sequence is synthesized)
gaatcaagttctgtgctgtcccgtgagtgtgtctgagtaccattcactggagttgctgcttaggtctgggacgtgtgtgtgactcttaacaattgctgtctgaaaatgagagagaagact

SEQ ID NO: 536028 - DNA, 120 bp, Artificial Sequence
  ENSG00000166783_61 (sequence is synthesized)
tcggaagcacattgtgttcataatgtactccacaatggccagtccaattgctatctatttttttatccagaggcttaattaaatgatgtggtaaaatgatgtttgagcattaagacaatg

SEQ ID NO: 536029 - DNA, 120 bp, Artificial Sequence
  ENSG00000166783_62 (sequence is synthesized)
taattctttatttctgggtggaaagatataccggattaaatttatctgtttaaaaaaatgacaaaagttatcaccaaaaccccctttcccatcttgcactgtttgttttggattgggttt

SEQ ID NO: 536030 - DNA, 120 bp, Artificial Sequence
  ENSG00000166783_63 (sequence is synthesized)
gggggaaagagatgtttttcttagttgtctactttgtttgaacacttttgttgtggttcaagtgctgttttgtgtgttgggaccaaacagttgtcaataaactttacaagcgagcatcta

SEQ ID NO: 536031 - DNA, 120 bp, Artificial Sequence
  ENSG00000166783_64 (sequence is synthesized)
ttgcttttgcaagtgggatgctcaggaggtttgaatgatttatgttggatggggtaatgacaggtttgcactgtgaccctggagatgggtgtctgcagtgaaattgaacacaggaggatg

SEQ ID NO: 536032 - DNA, 120 bp, Artificial Sequence
  ENSG00000166783_65 (sequence is synthesized)
tcgtcggagatgacagaggcaaggcattgaaaggctatacggctgtggtgtgggacaggtccctgggtgttcagttgcccaggatgatgaaaggggtggactcaggtggataggaagacc

SEQ ID NO: 536033 - DNA, 120 bp, Artificial Sequence
  ENSG00000166783_66 (sequence is synthesized)
ataatgccctagttctgctttttataggaagcctgccctttctgcccacatctctttacaaataagtactctacaatgcttcatcctcatgtgtttagccttcagtcaaagtacagtcat

SEQ ID NO: 536034 - DNA, 120 bp, Artificial Sequence
  ENSG00000166783_67 (sequence is synthesized)
gcaccacataacaaaattttggccaaccatggactgtatataggacagtggtcccataagattataatcacatattttcactagacctttcgatgattagatacacaaataccattgtgt

SEQ ID NO: 536035 - DNA, 120 bp, Artificial Sequence
  ENSG00000166783_68 (sequence is synthesized)
ctggtgtttggaagacagtctttttaagaattataaaggatatttctgaaactgtgtctcatgatttttgaactactctgctttttataggggtatgtttctgtcagcttctgttgcttt

SEQ ID NO: 536036 - DNA, 120 bp, Artificial Sequence
  ENSG00000166783_69 (sequence is synthesized)
aaaagctaaggagagagtagagaaacatgcttcttggcagtaactcagctcctaaattctagcctaaggcaggctccgtaggtcacactcttcctgaatgttagggcttctgtcccctcc

SEQ ID NO: 536037 - DNA, 120 bp, Artificial Sequence
  ENSG00000166783_70 (sequence is synthesized)
cctcggaactcaagcttggagctgacggcagtggcttagaaggaaaacttcaggtgtgagcccagggtgtgtgctgggggtgggcgtggaggtcctgtggtgtcacggccctccttgttt

SEQ ID NO: 536038 - DNA, 120 bp, Artificial Sequence
  ENSG00000166783_71 (sequence is synthesized)
ttatatttgaagagttagaatatcacgagcctgtctgcagacagcattgttccaataaggatttcaggtgtgccgttcgttttcctttagaagtaattcttttctataagattgtggaac

SEQ ID NO: 536039 - DNA, 120 bp, Artificial Sequence
  ENSG00000166783_72 (sequence is synthesized)
gtacctccggtttgtttaaagggctcactttactgcgaagactgtctaaacaaggttcgtatctttttatttcttaagttgggtgcagctgaggattgaggaatgacttttgaagtggat

SEQ ID NO: 536040 - DNA, 120 bp, Artificial Sequence
  ENSG00000166783_73 (sequence is synthesized)
ttatcttgaaaagtattatacatggggttgaagattctcccatggtataggggaatctccccatcagcataatttttgctggttctgaaagaaacaaagggtaagatgggagatcattca

SEQ ID NO: 536041 - DNA, 120 bp, Artificial Sequence
  ENSG00000166783_74 (sequence is synthesized)
agagtcattatttttgtagtttatacttttagagcctcttgttgcaaacaagaggttggcaaagccttcgtgttctatgtttaaaggctaaagcacgatggattttttataacttacatt

SEQ ID NO: 536042 - DNA, 120 bp, Artificial Sequence
  ENSG00000166783_75 (sequence is synthesized)
cagcttacacatgggcccattcatgtaaggtagataactgcatgttgtctttttgcaataatgtgggaaacctgaagcttggcctcagtcacattggtgttcaagtgagactttgctacc

SEQ ID NO: 536043 - DNA, 120 bp, Artificial Sequence
  ENSG00000166783_76 (sequence is synthesized)
ctttatgtaaaatatgtgtgaggtcttcgttgcagcagactcatgccccagaatgtaaagatctgaccacgtgaatatctttcttgatcatgtcaagtcacttctggaaatgaatttatg

SEQ ID NO: 536044 - DNA, 120 bp, Artificial Sequence
  ENSG00000166783_77 (sequence is synthesized)
aactgatagctaatggttcttggaaagattatttgaaagtcctttttattagaggctagcaagtggaaaggtaaaacacttagagtgtattttcagttgttgtatataactccagcttct

SEQ ID NO: 536045 - DNA, 120 bp, Artificial Sequence
  ENSG00000166783_78 (sequence is synthesized)
caggttaccactaaaaatgccagtaagtgggtttgcgttatttttgccattttccaatattacattgtggaggctgaaagacagcccataataagggggttgccaggcccagatggggct

SEQ ID NO: 536046 - DNA, 120 bp, Artificial Sequence
  ENSG00000166783_79 (sequence is synthesized)
catactgttggtctaaagtaaatgattttagcatttctccttgattctttctgtaaacctttattaaatccctatatgccaggtgagtaagtttcaggctgtaactctagaaaggtgttg

SEQ ID NO: 536047 - DNA, 120 bp, Artificial Sequence
  ENSG00000166783_80 (sequence is synthesized)
gttaatgggagagtcaagacccccaagcaggcaactagtcagggcggtcagggcagtgggcgcgctgaggagggccgtgtcagggcccacttcccaagcctggggagcctgttgcaaaac

SEQ ID NO: 536048 - DNA, 120 bp, Artificial Sequence
  ENSG00000166783_81 (sequence is synthesized)
cttcaaggatgtgcctgagggaagcacgtgacaaggaggggagagagcattctgggcaaaggggatgatgacatgagcagatgcagggttgtgacaagtggcatggagtgtcgagaggct

SEQ ID NO: 536049 - DNA, 120 bp, Artificial Sequence
  ENSG00000166783_82 (sequence is synthesized)
aagagggagctgagagctcggttagggagggcgtggctcctccaggtaaggagggaggactgtgttggagagagctggagcccaggtttgcatttgaaaagcaccccagtggtgctgtcc

SEQ ID NO: 536050 - DNA, 120 bp, Artificial Sequence
  ENSG00000166783_83 (sequence is synthesized)
atggtagagccgagagaagcaggcatggagaagggaactgggctaggatcctggccactgcagaggtctgggtcagtgttagatggagggattgagccagagtaaaaatagtagaataga

SEQ ID NO: 536051 - DNA, 120 bp, Artificial Sequence
  ENSG00000166783_84 (sequence is synthesized)
ggaagtaggaaggacccaggcaaagcttgcctgggagctgagatcagtgacctggcgacggtgtgcacatgtagggggcctgggagcctagctccactactaccactctgcttggctgag

SEQ ID NO: 536052 - DNA, 120 bp, Artificial Sequence
  ENSG00000166783_85 (sequence is synthesized)
atggagagcggcaccatcagggagaggactttaagatgctgataatgaacttagtttaaagggtctgagagattgctcttaattcttttaggtggttgttcagtttctgcaaaaaaatgg

SEQ ID NO: 536053 - DNA, 120 bp, Artificial Sequence
  ENSG00000166783_86 (sequence is synthesized)
agtgttaaaaaatgacatgaaaagtaagtaagcacccatcccctccccccttaaaaaatcacggttctctcactgacatttctctctgacgggtgctctttgtcctgtaggtcgtttgag

SEQ ID NO: 536054 - DNA, 120 bp, Artificial Sequence
  ENSG00000166783_87 (sequence is synthesized)
gtaagaaacaagcaagctgtttatttcaggaaataacatttgacccagaaacaattttagaaataataaaaatagattcaatcacattcccacccccttgtgatgattgcatgtggaata

SEQ ID NO: 536055 - DNA, 120 bp, Artificial Sequence
  ENSG00000166783_88 (sequence is synthesized)
atgcttattctagattgatacagttagaaacaagccatttgactcttgtctaagtcattaatcaaagctggaatacagcttaaacttgacaggcacttgggagtaaaataatacgcaaca

SEQ ID NO: 536056 - DNA, 120 bp, Artificial Sequence
  ENSG00000166788_0 (sequence is synthesized)
agcttccggcacggccttcaagcgcgggacgcgacaaagtcatggaccgcaacccctcgccgccgccgccgggtcgcgacaaggaggaggaggaggaggtggccggtggagactgcatag

SEQ ID NO: 536057 - DNA, 120 bp, Artificial Sequence
  ENSG00000166788_1 (sequence is synthesized)
ggagcacggtctacagcaaacactggctcttcggcgtcctcagcggactcatccagattgttagccctgaaaacaccaaatctagctcagatgatgaggagcagctgacggagcttgatg

SEQ ID NO: 536058 - DNA, 120 bp, Artificial Sequence
  ENSG00000166788_2 (sequence is synthesized)
aagaaatggagaatgaaatttgcagagtatgggatatgtcaatggatgaggacgtggctttatttctccaagaatttaatgctcctgatatattcatgggagtactggccaagtccaagt

SEQ ID NO: 536059 - DNA, 120 bp, Artificial Sequence
  ENSG00000166788_3 (sequence is synthesized)
gtcctcgattaagagaaatctgtgtgggaattttaggtaatatggcctgtttccaggagatatgtgtgtccatcagcagtgataaaaatcttgggcaggtgttattgcactgtttgtatg

SEQ ID NO: 536060 - DNA, 120 bp, Artificial Sequence
  ENSG00000166788_4 (sequence is synthesized)
attcagacccacctactctgctggaaacaagcaggttgttgcttacttgcctttcccaggcagaagtggccagtgtttgggttgaaaggatccaggaacatccagctatttatgatagca

SEQ ID NO: 536061 - DNA, 120 bp, Artificial Sequence
  ENSG00000166788_5 (sequence is synthesized)
tttgcttcattatgtcaagttcaacaaatgttgacttgctggtgaaggtgggggaggttgtggacaagctctttgatttggatgagaaactaatgttagaatgggtcagaaatggggctg

SEQ ID NO: 536062 - DNA, 120 bp, Artificial Sequence
  ENSG00000166788_6 (sequence is synthesized)
ccaaccccaggaagagtctgaagagcagccagtgtttcggcttgtgccctgtatacttgaagctgccaaacaagtacgttctgaaaatccagaatggcttgatgtttacatgcacatttt

SEQ ID NO: 536063 - DNA, 120 bp, Artificial Sequence
  ENSG00000166788_7 (sequence is synthesized)
acaactgcttactacagtggatgatggaattcaagcaattgtacattgtcctgacactggaaaagacatttggaatttactttttgacctggtctgccatgaattctgccagtctgatga

SEQ ID NO: 536064 - DNA, 120 bp, Artificial Sequence
  ENSG00000166788_8 (sequence is synthesized)
tccacccatcattcttcaagaacagaaaacagtgctagcctctgttttttcagtgttgtctgccatctatgcctcacagactgagcaagagtatctaaagatagaaaaagtagatcttcc

SEQ ID NO: 536065 - DNA, 120 bp, Artificial Sequence
  ENSG00000166788_9 (sequence is synthesized)
tctaattgacagcctcattcgggtcttacaaaatatggaacagtgtcagaaaaaaccagagaactcggcagagtctaacacagaggaaactaaaaggactgatttaacccaagatgattt

SEQ ID NO: 536066 - DNA, 120 bp, Artificial Sequence
  ENSG00000166788_10 (sequence is synthesized)
ccacttgaaaatcttaaaggatattttatgtgaatttctttctaatatttttcaggcattaacaaaggagacggtggctcagggagtaaaggaaggccagttgagcaaacagaagtgttc

SEQ ID NO: 536067 - DNA, 120 bp, Artificial Sequence
  ENSG00000166788_11 (sequence is synthesized)
ctctgcatttcaaaaccttcttcctttctatagccctgtggtggaagattttattaaaatcctacgtgaagttgataaggcgcttgctgatgacttggaaaaaaacttcccaagtttgaa

SEQ ID NO: 536068 - DNA, 120 bp, Artificial Sequence
  ENSG00000166788_12 (sequence is synthesized)
ggttcagacttaaaacctgaattggaattacttctgtacaagaaataaactttatttttctcactgacagttgaaattgacttattggaaatattaactaaagcccatattagaccataa

SEQ ID NO: 536069 - DNA, 120 bp, Artificial Sequence
  ENSG00000166788_13 (sequence is synthesized)
atgtgaatttctttctaatatttttcaggcattaacaaaggtaggaaagaagtattgatgatgtcataagcaaaagaaagtgtgggttgcttaacgcttcaaactttatttttttttaaa

SEQ ID NO: 536070 - DNA, 120 bp, Artificial Sequence
  ENSG00000166788_14 (sequence is synthesized)
tatgaaagtaatatataatttgggaaaataaagtaaaatcttaatatcaccatgagtttataatcttaaaaacaactagctgatgtggtttggtatatttacgtgtgacagacatatgcc

SEQ ID NO: 536071 - DNA, 120 bp, Artificial Sequence
  ENSG00000166788_15 (sequence is synthesized)
tatgtttgcatgcatgtgtttttataaatgcatttttcatatactttaacccagcatatgcaatttttatagactactgttttcccttaacactgtattataaacatttttcttgattct

SEQ ID NO: 536072 - DNA, 120 bp, Artificial Sequence
  ENSG00000166788_16 (sequence is synthesized)
ccttcttcctttctatagccctgtggtggaagattttattaaaatcctacgtgaagttgataaggcgcttgctgatgacttggaaaaaaacttcccaagtttgaaggaaccttatgcaaa

SEQ ID NO: 536073 - DNA, 120 bp, Artificial Sequence
  ENSG00000166788_17 (sequence is synthesized)
acgtggtctgccaggaagttgcctacttgctaaaaggtgtaccctgagcatttgtgactccgagggaaaccaggaacatcatgctgcagaaaccctttggaggaacgtgccaactgctcc

SEQ ID NO: 536074 - DNA, 120 bp, Artificial Sequence
  ENSG00000166788_18 (sequence is synthesized)
gtaaccatgagctggctctcctttgatggagagattaatagtttccataattatatcatcctggttgttctggggccagagtttacttagacttgaaagaaattgaagttaattgaaaaa

SEQ ID NO: 536075 - DNA, 120 bp, Artificial Sequence
  ENSG00000166788_19 (sequence is synthesized)
tttatttcatatgttgtctcccctccttgactgtcttcatgaatccaaataacctcccagattatgtctatttattcagcatgtcctcttaatccttttacctgcagtataaagcaacac

SEQ ID NO: 536076 - DNA, 120 bp, Artificial Sequence
  ENSG00000166788_20 (sequence is synthesized)
caaaatatataaaataataaaactatagtgcaaagtaaggaaatgattgctggaaaaatcagaatggtcatcatttctaggtgggaaagagaattgtgatttggaatggacacatggtga

SEQ ID NO: 536077 - DNA, 120 bp, Artificial Sequence
  ENSG00000166788_21 (sequence is synthesized)
tattaactatagatttgtatcttttgagcttttctgaatatatgctgtatttcacaataaagatgttcaaaaaattaaatgaaaactctgatattttaaatgcgagaagtgaggcatatc

SEQ ID NO: 536078 - DNA, 120 bp, Artificial Sequence
  ENSG00000166788_22 (sequence is synthesized)
ccaagtttgtagtctgtgtagcagggtggatggtggtgcccttcactaaagtaaagacgacagtggagaacatgtttgggttacataagcctccttgatgttggtgggttcaggtgggac

SEQ ID NO: 536079 - DNA, 120 bp, Artificial Sequence
  ENSG00000166788_23 (sequence is synthesized)
cttgaaagctaggagtcaagttcaactgctttctcctttatcctcacactggattattttgctttcaccttgagagtcttcctcagcttcatccttttccatgcctgagggccctcctcc

SEQ ID NO: 536080 - DNA, 120 bp, Artificial Sequence
  ENSG00000166788_24 (sequence is synthesized)
catcagcagtgataaaaatcttgggtgttattgcactgtttgtatgattcagacccacctactctgctggaaacaagcagaagtggccagtgtttgggttgaaaggatccaggaacatcc

SEQ ID NO: 536081 - DNA, 120 bp, Artificial Sequence
  ENSG00000166793_0 (sequence is synthesized)
acattcacccacagaccgaggtacagaacgagagacaacctctgcccccccagcagctggccagctttgcagccccagtcttgagcccccaactaccctccccccacccacccccatccc

SEQ ID NO: 536082 - DNA, 120 bp, Artificial Sequence
  ENSG00000166793_1 (sequence is synthesized)
cttcccaattgaaggagcggaaagagaagagagaagagtgagcagagagattgagagattgagagagagagagagagatagacggagatctctggagcagacctcaaggtgacttctatt

SEQ ID NO: 536083 - DNA, 120 bp, Artificial Sequence
  ENSG00000166793_2 (sequence is synthesized)
tctatctggttctcgtctgggggggccctggccgggcagccccccaacacttctcctgccctgaaacacggctctagccaacctgctccgctgcttcacctgcgaccgtctctgcggggg

SEQ ID NO: 536084 - DNA, 120 bp, Artificial Sequence
  ENSG00000166793_3 (sequence is synthesized)
ctgcacggcgccagcccctccagcccaccagggcattgtcctccagcccgtcatgcccagctgtgaccccggtccgggccctgcctgcctccccaccaagactttccgcagctatctgcc

SEQ ID NO: 536085 - DNA, 120 bp, Artificial Sequence
  ENSG00000166793_4 (sequence is synthesized)
ccgctgtcaccgcacttacagctgtgtccactgccgtgcacacctggccaaacacgatgagcttatttccaagtccttccaagggagccatggccgagcctacctgtttaactccgtggt

SEQ ID NO: 536086 - DNA, 120 bp, Artificial Sequence
  ENSG00000166793_5 (sequence is synthesized)
caacgtgggttgcgggccagctgaacagcgcctcttgctcacggggctccactcggtagctgacattttctgtgagagctgcaaaaccacactgggctggaaatatgagcaagcttttga

SEQ ID NO: 536087 - DNA, 120 bp, Artificial Sequence
  ENSG00000166793_6 (sequence is synthesized)
gacgagccagaagtacaaggaagggaaatacatcattgaaatgtcacacatggtgaaggacaacggctgggactgaggggctcaggcagggtgtgcccttcctccgcatgcccctccctc

SEQ ID NO: 536088 - DNA, 120 bp, Artificial Sequence
  ENSG00000166793_7 (sequence is synthesized)
tgccaagcagtctataccagcatgagtactgccccacccctgggggaaacctggctccaaccaacccctcccctgcctccaccatatccactaccaggcaccctttagaacaggggtctg

SEQ ID NO: 536089 - DNA, 120 bp, Artificial Sequence
  ENSG00000166793_8 (sequence is synthesized)
ggggtaccccaggggtgttaaggctcaggagtgggcagcagtcagggagagacagaactgggggaaagggatggttgtgggtctttctgttcccaagatcctgaacatggaagcgatggc

SEQ ID NO: 536090 - DNA, 120 bp, Artificial Sequence
  ENSG00000166793_9 (sequence is synthesized)
agggcatagactcaggcagagaggattgtgggaggaatccgtttttgctccacctctttttgagtgaacagaggacaaaccttgggtcacagggcaagtagatcatggaccacagaacag

SEQ ID NO: 536091 - DNA, 120 bp, Artificial Sequence
  ENSG00000166793_10 (sequence is synthesized)
cagatgagaaaagacttgggttggagtgaaattctggtctcagacaccaggagaccagagtctctgaggatgaagtttcctacccctatttgtagggaaaaggacttgagtgcagggaaa

SEQ ID NO: 536092 - DNA, 120 bp, Artificial Sequence
  ENSG00000166793_11 (sequence is synthesized)
actcaaatcccaggccctgggaaatagtaaaataatcaaagggttttccatttcactccacttgttagtttatcttggcactgaagaggcactttcgagtatctaacttttgccattggg

SEQ ID NO: 536093 - DNA, 120 bp, Artificial Sequence
  ENSG00000166793_12 (sequence is synthesized)
tggggtggggacagctgctcgcggaacagcccctagtcggctgcttccagagtaagcagtctttatgggctttctctgaggcccagtcactgctcctgggacccagtcccctggagggga

SEQ ID NO: 536094 - DNA, 120 bp, Artificial Sequence
  ENSG00000166793_13 (sequence is synthesized)
ggtggaaaatcagtgctacggggccagtctttcccgtggctgccaccagcgaatgaaacttttgtatgatacataaagtgcttgagtctatttttaataaaaagggaaaaagcaacttga

SEQ ID NO: 536095 - DNA, 120 bp, Artificial Sequence
  ENSG00000166793_14 (sequence is synthesized)
agtgttatgatgcagttccacaacacacagccacattcacccacagaccgaggagcggaaagagaagagagaagagtgagcagagagattgagagattgagagagagagagagagataga

SEQ ID NO: 536096 - DNA, 120 bp, Artificial Sequence
  ENSG00000166793_15 (sequence is synthesized)
cggagatctctggagcagacctcaaggtgagggggcagcccttctccaaatgaatttttttctctttgcaaatttcctcctcctgctgcgtgttgctttctcccctttgcaaaagcatta

SEQ ID NO: 536097 - DNA, 120 bp, Artificial Sequence
  ENSG00000166793_16 (sequence is synthesized)
ttcatccaccctttgtcctcccttccccctccccgctgcctccgctcctctctctcggttcctccatccctctccaagctctgacgattcccgcacttatttcccggcaactttggctgc

SEQ ID NO: 536098 - DNA, 120 bp, Artificial Sequence
  ENSG00000166793_17 (sequence is synthesized)
agcatcaggcatcactgtttattgttttgctgctggtgcagacccccaaagcctgccctgggagctggcggtgctgctaattatttggaccataccatactgagaataccagcctggggg

SEQ ID NO: 536099 - DNA, 120 bp, Artificial Sequence
  ENSG00000166793_18 (sequence is synthesized)
gtgccaaaacctcagagcagatgagaaaatccattgtgagcaggtgtccccccccttttcttttcccccctgagaagcacgagattcgcacctggttcctccagcctccgcctcggcgcc

SEQ ID NO: 536100 - DNA, 120 bp, Artificial Sequence
  ENSG00000166793_19 (sequence is synthesized)
tctgctgtcagctgtcagttgcccccgccagccctccctctcccctttctcctacggtccagccccgtctcacttcaggggaacatctctccccagcactcggcttgcctttgttttttc

SEQ ID NO: 536101 - DNA, 120 bp, Artificial Sequence
  ENSG00000166793_20 (sequence is synthesized)
tccagtcatttgcccaacttgcttctccctgtgatccgagatgggtgaaaaaatgacccctactcccctttgtgattctctggccttctgtgcagcctttccttggcttgactgggaatt

SEQ ID NO: 536102 - DNA, 120 bp, Artificial Sequence
  ENSG00000166793_21 (sequence is synthesized)
aggggagagggagggaggcgtgacggccggaggctggagaaggagctcaggattggggacccaagctgccccattctccatgccccttgaagaaggtgtttcaaggtggtgcatgtcaga

SEQ ID NO: 536103 - DNA, 120 bp, Artificial Sequence
  ENSG00000166793_22 (sequence is synthesized)
ggggaactcgctggcaaagttgaaggcaaacctgtgaagcagagactgaaaggtggtctcttggcaaggagggcccgtttcctgcagccggagcccaatgtcaccctgaactcagcccaa

SEQ ID NO: 536104 - DNA, 120 bp, Artificial Sequence
  ENSG00000166793_23 (sequence is synthesized)
ggtgtcttcctgggacccagcccggaggagaggacctgaaactgaagatagtctctatggaggttttgcggagagactgcctggcggccttcagagagagtggaacagctgggtgcctgt

SEQ ID NO: 536105 - DNA, 120 bp, Artificial Sequence
  ENSG00000166793_24 (sequence is synthesized)
ggccactgcggaggacaggacgaggagagcctgtatgccctggctaaccagagccaacactgcctcttctctgcttagtgctctagcattgccagagtgcccagctggcatctctgaacc

SEQ ID NO: 536106 - DNA, 120 bp, Artificial Sequence
  ENSG00000166793_25 (sequence is synthesized)
agacttaggctaaccacccacagtgggctgggaagccctatgaaggagaaagcagcagctcacctgcttatcggagccaacaggggccacctcccttcttatcctctgcctccagcacct

SEQ ID NO: 536107 - DNA, 120 bp, Artificial Sequence
  ENSG00000166793_26 (sequence is synthesized)
tcagccactcggaggctggcgcgtgggcagaaggcaatcttcctctattcctaatcagaacccagcaattacttcatcttcagtcacccacagagtcactgctgtttgtccctgcccctg

SEQ ID NO: 536108 - DNA, 120 bp, Artificial Sequence
  ENSG00000166793_27 (sequence is synthesized)
ggagaaggtagaaagaaacattttctgccttgtgccccaaagcacagctgttaaaaataagagtcccccttctgctgttcgttgtggccgttgctctcaccctaccacacagccctgccc

SEQ ID NO: 536109 - DNA, 120 bp, Artificial Sequence
  ENSG00000166793_28 (sequence is synthesized)
agcccaggaatcaggctcctctgacatgctacccatttcccattggctccagctgtcagattgcctgaagaaaatgtattttctgcctaagtctttaaccaagggctaaggcaacagtta

SEQ ID NO: 536110 - DNA, 120 bp, Artificial Sequence
  ENSG00000166793_29 (sequence is synthesized)
gtaaagactaggagagagaaagaccaaggggcccacaggctgggaagacaggcaggtgcttattctgggccagaatgagtgaaccaaggtgcgagaatgggcggccacacgtgagggctt

SEQ ID NO: 536111 - DNA, 120 bp, Artificial Sequence
  ENSG00000166793_30 (sequence is synthesized)
cccagagcacaggaccctgacctcaggagagaaccgaatcagggtttgtatacctgcctgcatgctctccctcccctcaccttacacctcctgcccccctccccaaaatgtataaaggac

SEQ ID NO: 536112 - DNA, 120 bp, Artificial Sequence
  ENSG00000166793_31 (sequence is synthesized)
caattgtattgcaaacaaagaccatgtaaaagaaagaccttcaggcatccccaactcttaaaaggctctgatcccctgagacacagtgcctgtgcgatgcagagcctcacgaagaactga

SEQ ID NO: 536113 - DNA, 120 bp, Artificial Sequence
  ENSG00000166793_32 (sequence is synthesized)
aaaccaaggagagggcacttgcagatgacgttgctcccatggcagcgtctgtgcccgtgggcttctctctgtggaaaatggtggaggctgcttctgccccaggagggagaaacaccgact

SEQ ID NO: 536114 - DNA, 120 bp, Artificial Sequence
  ENSG00000166793_33 (sequence is synthesized)
ccctggctttggcgccagaagcctggatcggctgccaggtttgccagagcagaatggggatccaggggacagggcgacaatgcaactggatgctgtgggggggtcgatggtgatggggaa

SEQ ID NO: 536115 - DNA, 120 bp, Artificial Sequence
  ENSG00000166793_34 (sequence is synthesized)
ctacctctttccttgtgcgtgtgcttgtgcttgtgtgtgagtgagtaattttcctctgtggagaaaggggggaatccatcaggtgatcttgtgccttcagtctttgcctccccttttgca

SEQ ID NO: 536116 - DNA, 120 bp, Artificial Sequence
  ENSG00000166793_35 (sequence is synthesized)
aagagggtctcaatctgaagttctcacatggggagccgggggagaattgaaatcataacggtggaaaaagaaggcccaggctctagtcttaaaggggtggattatcaaaggcaggggctg

SEQ ID NO: 536117 - DNA, 80 bp, Artificial Sequence
  ENSG00000166794_0 (sequence is synthesized)
gtggcaaccacccacgagcccgcgtcggtgcccgccccgcagggggacctactatccggcgccgagccggaggggggaaa

SEQ ID NO: 536118 - DNA, 120 bp, Artificial Sequence
  ENSG00000166794_1 (sequence is synthesized)
tcccccccacccgcgcgtggcggcgccggctccctagccaccgcggccccaccctcttccggcctcagctgtccgggctgctttcgcctccgcctgtggatgctgcgcctctccgaacgc

SEQ ID NO: 536119 - DNA, 120 bp, Artificial Sequence
  ENSG00000166794_2 (sequence is synthesized)
aacatgaaggtgctccttgccgccgccctcatcgcggggtccgtcttcttcctgctgctgccgggaccttctgcggccgatgagaagaagaaggggcccaaagtcaccgtcaaggtgtat

SEQ ID NO: 536120 - DNA, 120 bp, Artificial Sequence
  ENSG00000166794_3 (sequence is synthesized)
tttgacctacgaattggagatgaagatgtaggccgggtgatctttggtctcttcggaaagactgttccaaaaacagtggataattttgtggccttagctacaggagagaaaggatttggc

SEQ ID NO: 536121 - DNA, 120 bp, Artificial Sequence
  ENSG00000166794_4 (sequence is synthesized)
acaaaaacagcaaattccatcgtgtaatcaaggacttcatgatccagggcggagacttcaccaggggagatggcacaggaggaaagagcatctacggtgagcgcttccccgatgagaact

SEQ ID NO: 536122 - DNA, 120 bp, Artificial Sequence
  ENSG00000166794_5 (sequence is synthesized)
tcaaactgaagcactacgggcctggctgggtgagcatggccaacgcaggcaaagacaccaacggctcccagttcttcatcacgacagtcaagacagcctggctagatggcaagcatgtgg

SEQ ID NO: 536123 - DNA, 120 bp, Artificial Sequence
  ENSG00000166794_6 (sequence is synthesized)
tgtttggcaaagttctagagggcatggaggtggtgcggaaggtggagagcaccaagacagacagccgggataaacccctgaaggatgtgatcatcgcagactgcggcaagatcgaggtgg

SEQ ID NO: 536124 - DNA, 120 bp, Artificial Sequence
  ENSG00000166794_7 (sequence is synthesized)
agaagccctttgccatcgccaaggagtagggcacagggacatctttctttgagtgaccgtctgtgcaggccctgtagtccgccacagggctctgagctgcactggccccggtgctggcat

SEQ ID NO: 536125 - DNA, 120 bp, Artificial Sequence
  ENSG00000166794_8 (sequence is synthesized)
ctggtggagcggacccactcccctcacattccacaggcccatggactcacttttgtaacaaactcctaccaacactgaccaataaaaaaaaatgtgggtttttttttttttaatatataa

SEQ ID NO: 536126 - DNA, 120 bp, Artificial Sequence
  ENSG00000166794_9 (sequence is synthesized)
ggggagatggcacaggaggtaaccacaggtcctctgggccaaggagtatgtcagtgtagcctccacagtgggagggccaggttctgctggggagaccaggcctctttcttccccagctct

SEQ ID NO: 536127 - DNA, 120 bp, Artificial Sequence
  ENSG00000166794_10 (sequence is synthesized)
agaggcaggcctacttattacttacctactttgagaccagcggcacccttctttgaagagggaacccagtacaaaggagagagaataatggggtggacctgatggtagatctaagagaat

SEQ ID NO: 536128 - DNA, 120 bp, Artificial Sequence
  ENSG00000166794_11 (sequence is synthesized)
ggtgaccgtcctgctgatccaggcctatagcctggtgacctttcctgatacctcttcagaatggggattggggagagaggcgtgtggaagcaaagtgaagacatgtgggtacgcgattct

SEQ ID NO: 536129 - DNA, 120 bp, Artificial Sequence
  ENSG00000166794_12 (sequence is synthesized)
aggtcagatgcccaaagcctgtccaggctaccctggaagccccagcaagagtgagagggccaggcgtggtgactctgtgatcccagcactttggaaggccaaggtggctggatcacttga

SEQ ID NO: 536130 - DNA, 120 bp, Artificial Sequence
  ENSG00000166794_13 (sequence is synthesized)
cagttactttccttgacagtctttcaccagagaccactctgtgagggccgaccctcaccttggcattaacttgcacacataggacagaaagacccccggacgcctgcatgagtctcactg

SEQ ID NO: 536131 - DNA, 120 bp, Artificial Sequence
  ENSG00000166796_0 (sequence is synthesized)
ggcaaccgtcgacgggcttagcgcctcaactgtcgttggtgtatttttctggtgtcacttctgtgccttccttcaaaggtggtgctttgtccctgtgggtcatctgtactgattgcgcca

SEQ ID NO: 536132 - DNA, 120 bp, Artificial Sequence
  ENSG00000166796_1 (sequence is synthesized)
agcaaagcatttgttctccaaatgtcaactgtcaaggagcagctaattgagaagctaattgaggatgatgaaaactcccagtgtaaaattactattgttggaactggtgccgtaggcatg

SEQ ID NO: 536133 - DNA, 120 bp, Artificial Sequence
  ENSG00000166796_2 (sequence is synthesized)
gcttgtgctattagtatcttactgaaggatttggctgatgaacttgcccttgttgatgttgcattggacaaactgaagggagaaatgatggatcttcagcatggcagtcttttctttagt

SEQ ID NO: 536134 - DNA, 120 bp, Artificial Sequence
  ENSG00000166796_3 (sequence is synthesized)
acttcaaagattacttctggaaaagattacagtgtatctgcaaactccagaatagttattgtcacagcaggtgcaaggcagcaggagggagaaactcgccttgccctggtccaacgtaat

SEQ ID NO: 536135 - DNA, 120 bp, Artificial Sequence
  ENSG00000166796_4 (sequence is synthesized)
gtggctataatgaaatcaatcattcctgccatagtccattatagtcctgattgtaaaattcttgttgtttcaaatccagtggatattttgacatatatagtctggaagataagtggctta

SEQ ID NO: 536136 - DNA, 120 bp, Artificial Sequence
  ENSG00000166796_5 (sequence is synthesized)
cctaattggagaaaagttgggtgtccaccccacaagctgccatggttggattattggagaacatggtgattctagtgtgcccttatggagtggggtgaatgttgctggtgttgctctgaa

SEQ ID NO: 536137 - DNA, 120 bp, Artificial Sequence
  ENSG00000166796_6 (sequence is synthesized)
gactctggaccctaaattaggaacggattcagataaggaacactggaaaaatatccataaacaagttattcaaagtgcctatgaaattatcaagctgaaggggtatacctcttgggctat

SEQ ID NO: 536138 - DNA, 120 bp, Artificial Sequence
  ENSG00000166796_7 (sequence is synthesized)
tggactgtctgtgatggatttggtaggatccattttgaaaaatcttaggagagtgcacccagtttccaccatggttaagggattatatggaataaaagaagaactctttctcagtatccc

SEQ ID NO: 536139 - DNA, 120 bp, Artificial Sequence
  ENSG00000166796_8 (sequence is synthesized)
ttgtgtcttggggcggaatggtgtctcagatgttgtgaaaattaacttgaattctgaggaggaggcccttttcaagaagagtgcagaaacactttggaatattcaaaaggatctaatatt

SEQ ID NO: 536140 - DNA, 120 bp, Artificial Sequence
  ENSG00000166796_9 (sequence is synthesized)
ttaaattaaagccttctaatgttccactgtttggagaacagaagatagcaggctgtgtattttaaattttgaaagtattttcatttgatctttaaaaaataaaaacaaattggagacctg

SEQ ID NO: 536141 - DNA, 120 bp, Artificial Sequence
  ENSG00000166796_10 (sequence is synthesized)
tacaggtgtaagttatacttctgaggtatgtcacatatgttagagtgccttcagatgtagtagaatatgtataatcactataatacagagctttgattcttttcacaaaccaagcccttt

SEQ ID NO: 536142 - DNA, 120 bp, Artificial Sequence
  ENSG00000166796_11 (sequence is synthesized)
ttctagtattacaattttatcttgtactttcatccgttagagtaccagcatattcacttcattacattagcgtcatatgtttatgtataatcattataaatgtggccgggcactgcagcc

SEQ ID NO: 536143 - DNA, 120 bp, Artificial Sequence
  ENSG00000166796_12 (sequence is synthesized)
tgggtgaaagagtgaggctctgtctcaaaaaaaatcattataaatgcttatttttaagaccatatatatcaaaaagaaataaaaagctgagtgctgtggctcatggctgtaatcccagtg

SEQ ID NO: 536144 - DNA, 120 bp, Artificial Sequence
  ENSG00000166796_13 (sequence is synthesized)
ctttgggagggtgaggcaagaggatcacatgagtccaggagtttgagaccagccttggcaacatagcaacaccccatctctacaaaaataaagaaattagatgtggtggcctgcatctgt

SEQ ID NO: 536145 - DNA, 120 bp, Artificial Sequence
  ENSG00000166796_14 (sequence is synthesized)
agtccagctacttgggagactgagaccagtagataacttgagcccaggagttcaaggctatgattgtgtcactgcactccagcctgggccacagaggaagactcagactcaaaagaagaa

SEQ ID NO: 536146 - DNA, 120 bp, Artificial Sequence
  ENSG00000166796_15 (sequence is synthesized)
gaagaacacagaagaaaagcagaaacaagaagaagatacagatgtaactttacgatgtaaaaaatctaaataagattgtattcaactctgcaagtattatactagtcatataaactcaaa

SEQ ID NO: 536147 - DNA, 120 bp, Artificial Sequence
  ENSG00000166797_0 (sequence is synthesized)
gatcaatcccgaggctgctgagagacggtggcgcgattgggacagtcgccagggatggctgagcgtgaagatgcagcgggtgtccgggctgctctcctggacgctgagcagagtcctgtg

SEQ ID NO: 536148 - DNA, 120 bp, Artificial Sequence
  ENSG00000166797_1 (sequence is synthesized)
gctctccggcctctctgagccgggagctgcccggcagccccggatcatggaagagaaagcgctagaagtttatgatttgattagaactatccgggacccagaaaagcccaatactttaga

SEQ ID NO: 536149 - DNA, 120 bp, Artificial Sequence
  ENSG00000166797_2 (sequence is synthesized)
agaactggaagtggtctcggaaagttgtgtggaagttcaggagataaatgaagaagaatatctggttattatcaggttcacgccaacagtacctcattgctctttggcgactcttattgg

SEQ ID NO: 536150 - DNA, 120 bp, Artificial Sequence
  ENSG00000166797_3 (sequence is synthesized)
tcaacagaagaagacatcaataagcagataaatgacaaagagcgagtggcagctgcaatggaaaaccccaacttacgggaaattgtggaacagtgtgtccttgaacctgactgatagctg

SEQ ID NO: 536151 - DNA, 120 bp, Artificial Sequence
  ENSG00000166797_4 (sequence is synthesized)
ttttaagagccactggcctgtaattgtttgatatatttgtttaaactctttgtataatgtcagagactcatgtttaatacataggtgatttgtacctcagagtattttttaaaggattct

SEQ ID NO: 536152 - DNA, 120 bp, Artificial Sequence
  ENSG00000166797_5 (sequence is synthesized)
ttccaagcgagatttaattataaggtagtacctaatttgttcaatgtataacattctcaggatttgtaacacttaaatgatcagacagaataatattttctagttattatgtgcaagatg

SEQ ID NO: 536153 - DNA, 120 bp, Artificial Sequence
  ENSG00000166797_6 (sequence is synthesized)
agttgctatttttctgatgctcattctgatacaactatttttcgtgtcaaatatctactgtgcccaaatgtactcaatttaaatcattactctgtaaaataaataagcagatgattctta

SEQ ID NO: 536154 - DNA, 120 bp, Artificial Sequence
  ENSG00000166797_7 (sequence is synthesized)
cagtaagtgaatgttgaaacataattgaaaaacaacttcagatagtattttatcttggatactggattcttctgccagccaagaatctactgggttactttcaaaaaagtgcacaattgg

SEQ ID NO: 536155 - DNA, 120 bp, Artificial Sequence
  ENSG00000166797_8 (sequence is synthesized)
ttattggctcttccttcctaggtgaggaaacctaggcatttcaaagaagtaatttttgcagtggactccgagtgcactagagcccacggatgttgactggtttaggccagtggctacaca

SEQ ID NO: 536156 - DNA, 120 bp, Artificial Sequence
  ENSG00000166797_9 (sequence is synthesized)
tctgtaaagaatatccagtgctggggaccttgacttatgagctctaagtaggcttcttttctttggtgacaggatagagagctgtgtacttgaaattgaaggtctagcaagtagagcttt

SEQ ID NO: 536157 - DNA, 120 bp, Artificial Sequence
  ENSG00000166797_10 (sequence is synthesized)
aaatcaatcagtagctacttaaaaatagcagaagtggggtttgggaaaagcaaaaaacaaaatgttctgtatgatccctgtgttacattaaaaacataattttaatgtttttaatctaca

SEQ ID NO: 536158 - DNA, 120 bp, Artificial Sequence
  ENSG00000166797_11 (sequence is synthesized)
aatgatagagtgcaaataatgagaaatacatttaaaaggcatgttgtacttaagtttcatcactaagtaaattgagaaggtgggaaaaaatagcagaggaatggaagaaagagctaatag

SEQ ID NO: 536159 - DNA, 120 bp, Artificial Sequence
  ENSG00000166797_12 (sequence is synthesized)
aggaagagcaacagtgagatagataccaagaagactcagaaaggcatacacagggctggagagagacacacaaaatctcctacataaaagagagctatagagagggaagcctgctgcttc

SEQ ID NO: 536160 - DNA, 120 bp, Artificial Sequence
  ENSG00000166797_13 (sequence is synthesized)
cagaggaacagcctatccaggaaactttttaggtactgtcatgaaaactgttaaaaaccatgccctatttatagttctagacatgtagattattatactctttgtgggctgaatttcttt

SEQ ID NO: 536161 - DNA, 120 bp, Artificial Sequence
  ENSG00000166797_14 (sequence is synthesized)
aaaccccacgagctgagggcttctacctgtaatttagaaaaataagagtttaggtaccctaaatccactcaggttatcgttttgaaattccttgaatgataggattttacagcagcaata

SEQ ID NO: 536162 - DNA, 120 bp, Artificial Sequence
  ENSG00000166797_15 (sequence is synthesized)
gtattaagtcttatgagtcttgtttttcatttagtaagtatttattaagtgccttctatgtgtgggtacagttcagcctttgagatacattcctgcctttgtggagcctacattgtagta

SEQ ID NO: 536163 - DNA, 120 bp, Artificial Sequence
  ENSG00000166800_0 (sequence is synthesized)
gcttccggcctcacacctgccaagcatcacacctgccaagcatcacacctgccaagcatcacacctgccaagcatcacacctgcgatgcctgcacgagctgggtgcggtccgcgcagctg

SEQ ID NO: 536164 - DNA, 120 bp, Artificial Sequence
  ENSG00000166800_1 (sequence is synthesized)
cagtaagggggcgacccggcgtctgttagtcggcggttcatctccttcgtgcctcgatgagctttaacgccattttcctccattctctttcttcacctcttgagtgagtggccatgagct

SEQ ID NO: 536165 - DNA, 120 bp, Artificial Sequence
  ENSG00000166800_2 (sequence is synthesized)
gggctgcaagagtcctggggagcagccagagagcgggcgccgcgggagcgaattgtttttgcccaaggatggttctgtgtctccgccaggcggcatgtgacctgctcgggcgcgggtggc

SEQ ID NO: 536166 - DNA, 120 bp, Artificial Sequence
  ENSG00000166800_3 (sequence is synthesized)
ccttcacccctgtgagtgtggccagaagtacctctcacctggacctgcggaccccgggcgcagtcctggagctgagaactggaggttgggggaacagcagggtaaaggggagagaaaagg

SEQ ID NO: 536167 - DNA, 120 bp, Artificial Sequence
  ENSG00000166800_4 (sequence is synthesized)
gggtcagctgcgggacggagtgccgtcccagctgtagtttcatgtttggtggagcaacccctgttcctttcctctctctctctcttaattcctcttaactgtactcacgcttccttctcc

SEQ ID NO: 536168 - DNA, 120 bp, Artificial Sequence
  ENSG00000166800_5 (sequence is synthesized)
ttcccctggtccgcttcatggatgctgagctgcctggccagaacctacccagcttctttgctggtcagatttgtcggtcttttgtgtgtctgcagcacctccttccacacgggcccagga

SEQ ID NO: 536169 - DNA, 120 bp, Artificial Sequence
  ENSG00000166800_6 (sequence is synthesized)
gttctctatacgcgctctcaccgcaggtcttggaattccaagccatttccaattccaggtcttggaaatggctgtgcaatttgtcttcactgttaggtttccaagatggcaactatcaag

SEQ ID NO: 536170 - DNA, 120 bp, Artificial Sequence
  ENSG00000166800_7 (sequence is synthesized)
agtgaacttattaagaatttcgcggaagaggaggccattcatcacaataagatctccattgtaggaactggatcggttggtgtggcttgtgctatcagcatcttattaaaaggtttgagt

SEQ ID NO: 536171 - DNA, 120 bp, Artificial Sequence
  ENSG00000166800_8 (sequence is synthesized)
gatgaacttgtccttgtggatgttgatgaaggcaaactgaagggtgagacaatggatcttcaacatggcagcccttttatgaaaatgccaaatattgtctccagcaaagattacctggtc

SEQ ID NO: 536172 - DNA, 120 bp, Artificial Sequence
  ENSG00000166800_9 (sequence is synthesized)
actgcaaactccaatctagtgattatcacagcaggtgcacgccagaaaaaaggagaaacacgccttgatttagtccagcgaaatgtatccatctttaaattaatgattcccaatattacc

SEQ ID NO: 536173 - DNA, 120 bp, Artificial Sequence
  ENSG00000166800_10 (sequence is synthesized)
taatccagtggatatcttaacttatgtagcctggaagttgagtggatttcccaaaaaccgtgttattggaagtggttgtaatctggactctgctcgttttcgttactttattgggcaaag

SEQ ID NO: 536174 - DNA, 120 bp, Artificial Sequence
  ENSG00000166800_11 (sequence is synthesized)
gcttggcatccactctgaaagctgtcatgggctgatccttggagagcatggcgactcaagtgttcctgtgtggagtggtgtgaacattgctggcgtccctctgaaggatctgaacccaga

SEQ ID NO: 536175 - DNA, 120 bp, Artificial Sequence
  ENSG00000166800_12 (sequence is synthesized)
tataggaactgataaagatcctgagcagtgggaaaatgtccacaaaaaagtgatttccagtggctatgagatggtcaaaatgaaaggttatacttcttggggcattagcctatctgtagc

SEQ ID NO: 536176 - DNA, 120 bp, Artificial Sequence
  ENSG00000166800_13 (sequence is synthesized)
tgatttaacagaaagtattttgaagaatcttaggagagtgcatccagtttctaccctaagtaagggcctctatggaataaatgaagacatattccttagtgtcccatgtatcctgggaga

SEQ ID NO: 536177 - DNA, 120 bp, Artificial Sequence
  ENSG00000166800_14 (sequence is synthesized)
gaatggtatcacagacctcataaaagtaaaactgactcttgaagaggaggcctgcttgcaaaagagtgcagaaacactttgggaaattcagaaggagctcaagctttaaagttgcttaaa

SEQ ID NO: 536178 - DNA, 120 bp, Artificial Sequence
  ENSG00000166800_15 (sequence is synthesized)
gctaattctgtagattgaagatgaaatagtagttatggaattgtatatgtcaaacttttgaataaatttgaatttctaaaagttggaaaaatagaggaaagagtgacctatttagtatag

SEQ ID NO: 536179 - DNA, 70 bp, Artificial Sequence
  ENSG00000166800_16 (sequence is synthesized)
agttggaaaaatagaggaaagagtgacctatttagtatagccttccagcttttttttttttcttttttgg

SEQ ID NO: 536180 - DNA, 120 bp, Artificial Sequence
  ENSG00000166800_17 (sequence is synthesized)
acttcagcctccagagtaggtgggaccacatgcgtgtgcctccatgcctgcctaatttttgtatctttttgtagagatggggttttgccatgtcatccaagctggttttgaactcccaaa

SEQ ID NO: 536181 - DNA, 120 bp, Artificial Sequence
  ENSG00000166800_18 (sequence is synthesized)
gtgctgagattacaggggtgagccactgtgcctggccttagctttgatttagtatccagatgatagatgacacttttttttttttttttttaaagtgacggcatcaaagatgtttttggt

SEQ ID NO: 536182 - DNA, 120 bp, Artificial Sequence
  ENSG00000166800_19 (sequence is synthesized)
acttctcagtacttgccttgtatgtatacgtaattgccatctggtccacaagaatgtgtttactgtgttacacaaatcctgattcttttcatcaggtgcatagtaattcttctctatggc

SEQ ID NO: 536183 - DNA, 120 bp, Artificial Sequence
  ENSG00000166800_20 (sequence is synthesized)
ttaatacctatgttcatttacatgctatctctacaatgtaaaaataaaagtgtatatatatacacacacacacagagagtaatctaaatgttcctaacactagataaaacattgatttga

SEQ ID NO: 536184 - DNA, 120 bp, Artificial Sequence
  ENSG00000166800_21 (sequence is synthesized)
ctgataaagatcctgagcagtgggaaaatgtccacaaaaagtgatttccagtggctatgagatggtcaaaatgaaaggttatacttcttggggcattagcctatctgtagctgatttaac

SEQ ID NO: 536185 - DNA, 120 bp, Artificial Sequence
  ENSG00000166801_0 (sequence is synthesized)
ctagccccacctgctccgtttcccgcccagctggagctctggagcctttgcttcctcaaatacgagcgggaactgcgttgagcgctggattccaggccgagtgctggcgaggcgcgcagt

SEQ ID NO: 536186 - DNA, 120 bp, Artificial Sequence
  ENSG00000166801_1 (sequence is synthesized)
tctctgctgtttaaaaagtatccctgtgctttgaagatactgctataatttgaaaatttgaaattagtgtttcagctgaaccatccgttcatcttcaagccatcatgagctgtaagaagc

SEQ ID NO: 536187 - DNA, 120 bp, Artificial Sequence
  ENSG00000166801_2 (sequence is synthesized)
agaggtcacggaagcactcagtcaatgaaaaatgtaatatgaaaatcgagcactatttttctccggtctctaaagagcaacagaataattgcagtacttctctaatgaggatggagtcta

SEQ ID NO: 536188 - DNA, 120 bp, Artificial Sequence
  ENSG00000166801_3 (sequence is synthesized)
gaggagacccaagagccacaactaatacccaggctcaaagattccattcacctaagaaaaatccagaagaccagaccatgccccaaaataggacaatatatgttaccttgaaggtaaacc

SEQ ID NO: 536189 - DNA, 120 bp, Artificial Sequence
  ENSG00000166801_4 (sequence is synthesized)
acaggagaaaccaagatatgaaacttaagctcacacatagtgagaatagtagcttatatatggctctcaacactctccaggctgtcagaaaagagatagaaactcaccaaggccaagaaa

SEQ ID NO: 536190 - DNA, 120 bp, Artificial Sequence
  ENSG00000166801_5 (sequence is synthesized)
tgcttgtgcgtggcacagaaggaatcaaagagtacataaaccttggaatgcccctcagttgtttccctgaaggtggccaggtggtcattacattttcccaaagtaaaagtaagcagaagg

SEQ ID NO: 536191 - DNA, 120 bp, Artificial Sequence
  ENSG00000166801_6 (sequence is synthesized)
aagataaccacatatttggcaggcaggacaaagcatcgactgaatgtgtcaaattttacattcatgcaattggaattgggaagtgtaaaagaaggattgttaaatgtgggaagcttcaca

SEQ ID NO: 536192 - DNA, 120 bp, Artificial Sequence
  ENSG00000166801_7 (sequence is synthesized)
aaaaggggcgcaaactctgtgtttatgctttcaaaggagaaaccatcaaggatgcactgtgcaaggatggcagatttctttcctttctggagaatgatgattggaaactcattgaaaaca

SEQ ID NO: 536193 - DNA, 120 bp, Artificial Sequence
  ENSG00000166801_8 (sequence is synthesized)
atgacaccattttagaaagcacccagccagttgatgaattagaaggcagatactttcaggttgaggttgagaaaagaatggtccccagtgcagcagcttctcagaatcctgagtcagaga

SEQ ID NO: 536194 - DNA, 120 bp, Artificial Sequence
  ENSG00000166801_9 (sequence is synthesized)
aaagaaacacctgtgtgttgagagaacaaatcgtggctcagtaccccagtttgaaaagagaaagtgaaaaaatcattgaaaacttcaagaaaaaaatgaaagtaaaaaatggggaaacat

SEQ ID NO: 536195 - DNA, 120 bp, Artificial Sequence
  ENSG00000166801_10 (sequence is synthesized)
tatttgaattgcatagaacaacgtttgggaaagtaacaaaaaattcttcttcgattaaagtagtgaaacttcttgtacgtctcagtgactcagttgggtacttattctgggacagtgcaa

SEQ ID NO: 536196 - DNA, 120 bp, Artificial Sequence
  ENSG00000166801_11 (sequence is synthesized)
ctacgggttacgccacctgctttgtttttaaaggattgttcattttaacttgtcggcatgtaatagatagcattgtgggagacggaatagagccaagtaagtgggcaaccataattggtc

SEQ ID NO: 536197 - DNA, 120 bp, Artificial Sequence
  ENSG00000166801_12 (sequence is synthesized)
aatgtgtaagggtgacatttggttatgaagagctaaaagacaaggaaacaaactacttttttgttgaaccttggtttgagatacataatgaagagcttgactatgctgtcctgaaactga

SEQ ID NO: 536198 - DNA, 120 bp, Artificial Sequence
  ENSG00000166801_13 (sequence is synthesized)
aggaaaatggacaacaagtacctatggaactatataatggaattactcctgtgccacttagtgggttgatacatattattggccatccatatggagaaaaaaagcagattgatgcttgtg

SEQ ID NO: 536199 - DNA, 120 bp, Artificial Sequence
  ENSG00000166801_14 (sequence is synthesized)
agttcacaaccctgatgtgattacctatgacactgaatttttctttggggcttccggctcccctgtgtttgattcaaaaggttcattggtggccatgcatgctgctggctttgcttatac

SEQ ID NO: 536200 - DNA, 120 bp, Artificial Sequence
  ENSG00000166801_15 (sequence is synthesized)
ttaccaaaatgagactcgtagtatcattgagtttggctctaccatggaatccatcctccttgatattaagcaaagacataaaccatggtatgaagaagtatttgtaaatcagcaggatgt

SEQ ID NO: 536201 - DNA, 120 bp, Artificial Sequence
  ENSG00000166801_16 (sequence is synthesized)
agaaatgatgagtgatgaggacttgtgagaattcagtctactggatttaagggaatggcttatggagttgttatttcataggcattgaaaatggttttctaaactccaaaatggtcatct

SEQ ID NO: 536202 - DNA, 120 bp, Artificial Sequence
  ENSG00000166801_17 (sequence is synthesized)
tatcaataataataatattgaccatttcctatctgccaggcatttttctaagcacatgaagaaattagtcctaacaacactatgagatggactataacttgcccaaattttttttttttt

SEQ ID NO: 536203 - DNA, 65 bp, Artificial Sequence
  ENSG00000166801_18 (sequence is synthesized)
atgcctcagtctcctgagcagctgggattacaggcaaacgccaccacacccagctaaattttttt

SEQ ID NO: 536204 - DNA, 70 bp, Artificial Sequence
  ENSG00000166801_19 (sequence is synthesized)
gttcaagcgattcttatgcctcagtctcctgagcagctgggattacaggcaaacgccaccacacccagct

SEQ ID NO: 536205 - DNA, 120 bp, Artificial Sequence
  ENSG00000166801_20 (sequence is synthesized)
ggccttccaaagtgctgggattacaagtttgagccactgcacctggctaacttgccctattttaaagtcaagcaatgggaagaataacaagattatatagtaatcagtttcatgacacta

SEQ ID NO: 536206 - DNA, 120 bp, Artificial Sequence
  ENSG00000166801_21 (sequence is synthesized)
tgacactaaaagtcatatagtcatagggttttttcatctttcatatctttgcctaaattcatttgctacagtgcaggaaccaaaacttgttcatctcatgattccctacatctgacataa

SEQ ID NO: 536207 - DNA, 120 bp, Artificial Sequence
  ENSG00000166801_22 (sequence is synthesized)
ggaaagtaagtgctcagaaaaatgtgcaggtcaataagttgcaaaagttggggctgcaattaatgctaacataagagctaaatgcttgattagaaatgatctcaaaaccttttagaattt

SEQ ID NO: 536208 - DNA, 120 bp, Artificial Sequence
  ENSG00000166801_23 (sequence is synthesized)
ccaaaatcttcatattactgaaactgtcggaatatatgggtcttgaaattcagaagatgatagtcactcttcccatatttataggctattaaggcaagggatatcttaaacatcatatta

SEQ ID NO: 536209 - DNA, 120 bp, Artificial Sequence
  ENSG00000166801_24 (sequence is synthesized)
ctttatttagatttctactactccaattattaatgttatgtatttctcattgttttacttcttcatggtattatgaagactatatagatgattcaaccaagcctgcaaatctccctcttg

SEQ ID NO: 536210 - DNA, 120 bp, Artificial Sequence
  ENSG00000166801_25 (sequence is synthesized)
tggaattccactggacccaatctgttttccatttccattgcaatactactaaagccatacaatatcaagcaccctccctctaggtccagggactatcacagaagaagcaggcatgtaaga

SEQ ID NO: 536211 - DNA, 120 bp, Artificial Sequence
  ENSG00000166801_26 (sequence is synthesized)
ttttaaggactggtttcgaggggtcgagtgtaggaaaacagcctgttgcattgtaagagtgatgtcatcttgaagagcagctggcatgatgactgctgtttgactcctgcataccaagat

SEQ ID NO: 536212 - DNA, 120 bp, Artificial Sequence
  ENSG00000166801_27 (sequence is synthesized)
attctgcagcaatgtctttaaacagtgccggtagtacagataacccctcataaagatgcttatctaacctccccagtgttcaggtgtttcacaagaaagtctgagatatgactagctaca

SEQ ID NO: 536213 - DNA, 120 bp, Artificial Sequence
  ENSG00000166801_28 (sequence is synthesized)
cgttttgccaaaaatgcttgttatataaagggtacttttgggagggtgagtgccgccatttagtggctgctagaaacattgcttctgtttgtaagttcctattaaatgtttctttctgag

SEQ ID NO: 536214 - DNA, 120 bp, Artificial Sequence
  ENSG00000166801_29 (sequence is synthesized)
ctccagcccggcccaggccagcctaccggcgactaggatgctttcgctttcgctctcgctttccaatactcgggactggggaaaccgggagaatagaagcaggcaaggaccgccgtgggc

SEQ ID NO: 536215 - DNA, 120 bp, Artificial Sequence
  ENSG00000166801_30 (sequence is synthesized)
acggggtgtccccagcgcagccaatcggcttccgaagtaggtgagttgctgcctgaagagaaaagacaaactccagtatctttcattccattggccagacgcgccattccccaagtgagt

SEQ ID NO: 536216 - DNA, 120 bp, Artificial Sequence
  ENSG00000166801_31 (sequence is synthesized)
ctccgcttcctgcgcgcgcgagactcaagctgccacagtggctctgccgccagcgtcccagctcctcccacacccgagtttttatttcctgctccctctccagcccggcccaggccagcc

SEQ ID NO: 536217 - DNA, 120 bp, Artificial Sequence
  ENSG00000166801_32 (sequence is synthesized)
agtccctaaaaatcacgagttcaggcgtctgagacttggtgggaacggaccttcctcttagtgcccaagcctgttctaatttttaaaaactgatgtctattaagacccaatgttaacttt

SEQ ID NO: 536218 - DNA, 120 bp, Artificial Sequence
  ENSG00000166801_33 (sequence is synthesized)
atgaaaatggttcctaaggagattcacatctctgtgtccgaattctgtgtgcagcaaacatcatctcaagtgcgttttcccaactacgcttctttccaggataaaatactctaagtgaca

SEQ ID NO: 536219 - DNA, 120 bp, Artificial Sequence
  ENSG00000166801_34 (sequence is synthesized)
aatgttgagtacattatcaggtatgttcactattgtgagaactgaagccatctacactcacatagcttgccaactacattaacctgacttcttattccattattttcatcaacatacatt

SEQ ID NO: 536220 - DNA, 120 bp, Artificial Sequence
  ENSG00000166801_35 (sequence is synthesized)
tactatttcaagaaacttttgccagggaccggaaagttgcaaatatctttattgcttaatccagtatcttcttcaaagatccaaccactcttcaatggaaaacatcaaagaacagtttac

SEQ ID NO: 536221 - DNA, 120 bp, Artificial Sequence
  ENSG00000166801_36 (sequence is synthesized)
attctaagactttgaacctttacctcaaaatcctagccttgttttatctaccaatcctaaacttttacccgtagctgactcaattctaaccaattcccctcattaaatattagacttaca

SEQ ID NO: 536222 - DNA, 120 bp, Artificial Sequence
  ENSG00000166801_37 (sequence is synthesized)
atgggacttcaaaatctcaatacatatagcccaaacttgctcttccctctctgagacaccacttaaattctgtcaagttattgttctccattacctaagtgagcaagaaacttagctttg

SEQ ID NO: 536223 - DNA, 120 bp, Artificial Sequence
  ENSG00000166801_38 (sequence is synthesized)
tcttatcaacaggttgctttgatattactgggagccaacatttgacattcttggaggctccagcaagacctaatcaacctcccaaccctcaactcagaatcagtgtgtgccctgaagtcc

SEQ ID NO: 536224 - DNA, 120 bp, Artificial Sequence
  ENSG00000166801_39 (sequence is synthesized)
cttcaaccttcttgaggctctccctgatctcaaaggtggagaaagtagatcttgcatcaggttgaactccagtttctttttgctcagtttttcaagcgctgagtttattttgtccctagg

SEQ ID NO: 536225 - DNA, 120 bp, Artificial Sequence
  ENSG00000166801_40 (sequence is synthesized)
cataaagaaatctttctaggaacccctttggttatgggaccagatttttaaaagctttttaggcttggtgaaaaatctgccttatcactagcaacactacgacttgtctctgttcttgtt

SEQ ID NO: 536226 - DNA, 120 bp, Artificial Sequence
  ENSG00000166801_41 (sequence is synthesized)
ttttgttgtactcgtgtaaaagaaaagttcaagggaagagaacaggctcaagtctacttctcacgctggctctggggattaggaaattcagaaagttttgtttcagactggcagtgctgt

SEQ ID NO: 536227 - DNA, 120 bp, Artificial Sequence
  ENSG00000166801_42 (sequence is synthesized)
ctgatataaacacagcgtcaagtactgcacgctgtagctacctgaggtttaggccggaagaggcacggctgatttaaaagtgaaagaaagtaaccaattggttcgcagacaaccttttcc

SEQ ID NO: 536228 - DNA, 120 bp, Artificial Sequence
  ENSG00000166801_43 (sequence is synthesized)
gtcaggaagccggggactgacagcgccacccatctggggagccgggaggacacaggttttattttggtagtgctgcaagtccccttgtgtgctggggggagcggggcggcgtggtaggat

SEQ ID NO: 536229 - DNA, 120 bp, Artificial Sequence
  ENSG00000166801_44 (sequence is synthesized)
tggaagaggcttagagttggcctcgacccctgcccttgcccctggaaaggcagaaagtgggggttggggtgcggagaagcaggaagagagggagagtgaaggaggggaggaaagggagag

SEQ ID NO: 536230 - DNA, 120 bp, Artificial Sequence
  ENSG00000166801_45 (sequence is synthesized)
aggaagagggagagtgaaggaggggaggaaagggagagaggcagagagggggaaggagagagggaaggaaggagagattgagagacagagaaattcctaaggggagctgtcaggtgggct

SEQ ID NO: 536231 - DNA, 120 bp, Artificial Sequence
  ENSG00000166801_46 (sequence is synthesized)
ggacatgggccccaggctgcactgctttatccctttgctgtaggaagtcaagcaagttctttaggtaagtagaaccttgatgtcaagtataaaacaggggttggtataggatagctaaga

SEQ ID NO: 536232 - DNA, 120 bp, Artificial Sequence
  ENSG00000166801_47 (sequence is synthesized)
gcactttatattttgatataatctgatttatcctggatactgaaaacaatgtagggagacggaggatattggagtgttttcttaacctcttgcccctttccactgtgattgctcaagtac

SEQ ID NO: 536233 - DNA, 120 bp, Artificial Sequence
  ENSG00000166801_48 (sequence is synthesized)
atgcaaaattaatgtttctttctgcccattttattttcctttttttgtctgtgtctattaatcattcctaaagcacccggatcctctctcaaacttcgtaagatgagacatcatgaacag

SEQ ID NO: 536234 - DNA, 120 bp, Artificial Sequence
  ENSG00000166801_49 (sequence is synthesized)
acacagtgaatccctagattttcttaatagttgggcaacaagttcttgcatttagggatgttgcaacatagcccagttccgcaattgtacattttctattttttttcctaggttctctgc

SEQ ID NO: 536235 - DNA, 120 bp, Artificial Sequence
  ENSG00000166801_50 (sequence is synthesized)
gactatcatccctagcaaactttccagatttctttttaaaatctcattccaagtttctttcctcagctctatcctcaccacttccctgtaattttatctccccttgccatcttcatctta

SEQ ID NO: 536236 - DNA, 120 bp, Artificial Sequence
  ENSG00000166801_51 (sequence is synthesized)
aatgaataacagattttaacatcaatgtaactagaacagctttttgaaatttccaactgaaaattattctattatttatacttgcatttgaattccatctctgccacatagctctggcct

SEQ ID NO: 536237 - DNA, 120 bp, Artificial Sequence
  ENSG00000166801_52 (sequence is synthesized)
tgggcagttcgtctaccttctctaagctatactttccccatcagcaaagtgtagctatacctaatttgcatagcatccgcaggaatttgcagctagagataattttcataaagtgtttag

SEQ ID NO: 536238 - DNA, 120 bp, Artificial Sequence
  ENSG00000166801_53 (sequence is synthesized)
tataattttcatgaagtgcctgacacgcagtgttctcgaaaagagagcttttattgttaaggtgattatagttggtgaataaactatctatttgctaaggtaccatctccagggagagca

SEQ ID NO: 536239 - DNA, 120 bp, Artificial Sequence
  ENSG00000166801_54 (sequence is synthesized)
tcccgcccagctggagctctggagcctttgcttcctcaaatacgagcgggaactgcgttgagcgctggattccaggccgagtgctggcgaggcgcgcatgtttcagctgaaccatccgtt

SEQ ID NO: 536240 - DNA, 120 bp, Artificial Sequence
  ENSG00000166801_55 (sequence is synthesized)
tctctgctgtttaaaaagtatccctgtggtaccatctccagggagagcaaggttggagcctaaggggaaagatgggacgcaggacaccagctaatcttttcctctgtacaattaatgaca

SEQ ID NO: 536241 - DNA, 120 bp, Artificial Sequence
  ENSG00000166801_56 (sequence is synthesized)
actatttttctccggtatgtctgtaaattctacttatgtaatctagtcatcccttggtatccatgtgagatttgttccaggacctctcttggataccaaaatccatgaatgctcaaattc

SEQ ID NO: 536242 - DNA, 120 bp, Artificial Sequence
  ENSG00000166801_57 (sequence is synthesized)
ttcacataacatggcatagtattggcatataatgtatcatatcctcctgtatactttaaatcatctctggattatttgtattacctaatacaaggtaaatgctctgtaaaatgttgatat

SEQ ID NO: 536243 - DNA, 120 bp, Artificial Sequence
  ENSG00000166801_58 (sequence is synthesized)
agttactctttggttctggggctgacctggagttttgccaggattcattggccgcagcaggatgctggtggggacagggtaaataaaatctgcactcctgcgggcttttattgttgaaag

SEQ ID NO: 536244 - DNA, 120 bp, Artificial Sequence
  ENSG00000166801_59 (sequence is synthesized)
gggcactgacgctctccctggaaacttaaaaagaacagccaagtgaacggatgtgtctttcttttgcagtgcccaagcctgttctaatttttaaaaactgatgtctattaagacccaatg

SEQ ID NO: 536245 - DNA, 120 bp, Artificial Sequence
  ENSG00000166803_0 (sequence is synthesized)
ccttgtccagtgaaacaccctcggctgggaagtcagttcgttctctcctctcctctcttcttgtttgaacatggtgcggactaaagcagacagtgttccaggcacttacagaaaagtggt

SEQ ID NO: 536246 - DNA, 120 bp, Artificial Sequence
  ENSG00000166803_1 (sequence is synthesized)
ggctgctcgagcccccagaaaggtgcttggttcttccacctctgccactaattcgacatcagtttcatcgaggaaagctgaaaataaatatgcaggagggaaccccgtttgcgtgcgccc

SEQ ID NO: 536247 - DNA, 120 bp, Artificial Sequence
  ENSG00000166803_2 (sequence is synthesized)
aactcccaagtggcaaaaaggaattggagaattctttaggttgtcccctaaagattctgaaaaagagaatcagattcctgaagaggcaggaagcagtggcttaggaaaagcaaagagaaa

SEQ ID NO: 536248 - DNA, 120 bp, Artificial Sequence
  ENSG00000166803_3 (sequence is synthesized)
agcatgtcctttgcaacctgatcacacaaatgatgaaaaagaatagaactttctcattcatctttgaataacgtctccttgtttaccctggtattctagaatgtaaatttacataaatgt

SEQ ID NO: 536249 - DNA, 120 bp, Artificial Sequence
  ENSG00000166803_4 (sequence is synthesized)
gtttgttccaattagctttgttgaacaggcatttaattaaaaaatttaggtttaaatttagatgttcaaaagtagttgtgaaatttgagaatttgtaagactaattatggtaacttagct

SEQ ID NO: 536250 - DNA, 120 bp, Artificial Sequence
  ENSG00000166803_5 (sequence is synthesized)
tagtattcaatataatgcattgtttggtttcttttaccaaattaagtgtctagttcttgctaaaatcaagtcattgcattgtgttctaattacaagtatgttgtatttgagatttgctta

SEQ ID NO: 536251 - DNA, 120 bp, Artificial Sequence
  ENSG00000166803_6 (sequence is synthesized)
gattgttgtactgctgccatttttattggtgtttgattattggaatggtgccatattgtcactccttctacttgctttaaaaagcagagttagatttttgcacattaaaaaattcagtat

SEQ ID NO: 536252 - DNA, 120 bp, Artificial Sequence
  ENSG00000166803_7 (sequence is synthesized)
taattaaacattacttattctaccctcttttttggcaaggaggacaaatacgcaatgttggaaaaccttggatggatatcttctctttaaaaaaatgtaaagataatttggtcttgaggg

SEQ ID NO: 536253 - DNA, 120 bp, Artificial Sequence
  ENSG00000166803_8 (sequence is synthesized)
tctcaggaggctgaggagggaggtttgcttgagtccaggagttggagaccagcccaggcaacatagcgtaaaccctatctctaaaacaatttttagccgggtgcggtggctcacgcctgt

SEQ ID NO: 536254 - DNA, 84 bp, Artificial Sequence
  ENSG00000166803_9 (sequence is synthesized)
cagattgtgccactgcactccagcctgaacaacagagtgagacaatgtctatttatatatgaacaataaaaaattagcctggca

SEQ ID NO: 536255 - DNA, 120 bp, Artificial Sequence
  ENSG00000166803_10 (sequence is synthesized)
atatgaacaataaaaaattagcctggcatggtggcacacacagtggaaccagatcccatctcttaaaagaaattttcctaggatttgcatttgattcgctatcataaaatataattttaa

SEQ ID NO: 536256 - DNA, 120 bp, Artificial Sequence
  ENSG00000166803_11 (sequence is synthesized)
agttggaagtcaatataacatgaaaggcaaatcatgccataaacccataggcatggcaaaactcctaagagctactatgacatttttcaacataaccagaggtataattgaagaagtggg

SEQ ID NO: 536257 - DNA, 120 bp, Artificial Sequence
  ENSG00000166803_12 (sequence is synthesized)
tataatattcctcatcaccctttttgcagcagcctgttgtcaaaagtaatcatattttagtaggcatatttttctgaaatacgtttgtaataaatgcatacttatttttacaatacacta

SEQ ID NO: 536258 - DNA, 120 bp, Artificial Sequence
  ENSG00000166803_13 (sequence is synthesized)
ccttgtccagtgaaacaccctcggctgggaagtcagttcgttctctcctctcctctcttcttgtttgaacatggtgcggactaaagcagacagtgttccaggcacttacagaaaagctga

SEQ ID NO: 536259 - DNA, 120 bp, Artificial Sequence
  ENSG00000166803_14 (sequence is synthesized)
gcaccagccaggagccacccatcctccagcacactgagcagcaagctggacacacggcacactgatccaaatgggtaaggggatggtggcgatgctcattctgggtctgctacttctggc

SEQ ID NO: 536260 - DNA, 120 bp, Artificial Sequence
  ENSG00000166803_15 (sequence is synthesized)
gctgctcctacccgtgcaggtttcttcatttgttcctttaaccagtatgccggaagctactgcagccgaaaccacaaagccctccaacagtgccctacagcctacagccggtctccttgt

SEQ ID NO: 536261 - DNA, 120 bp, Artificial Sequence
  ENSG00000166803_16 (sequence is synthesized)
ggtcttgcttgcccttctacatctctaccattaagaggcaggtcaagaaacagctacagttctccaacccatacactaaaaccgaatccaaatggtgcctagaagttcaatgtggcaagg

SEQ ID NO: 536262 - DNA, 120 bp, Artificial Sequence
  ENSG00000166803_17 (sequence is synthesized)
taatttcactccttattaacagagaaacgcttgagagtctcaaactggactggtttaaagagcatctgaaggatttgactagatgataaatgccaatattaaatctgttggagtttcacg

SEQ ID NO: 536263 - DNA, 120 bp, Artificial Sequence
  ENSG00000166803_18 (sequence is synthesized)
gtctacttccttgtgccctccggagtcgagctctgtcagtgcatgattcttgccaatcgctaaacgtaggactcgaggaaggccattggcaattctgctaagaagacagtgcaagtgcct

SEQ ID NO: 536264 - DNA, 120 bp, Artificial Sequence
  ENSG00000166803_19 (sequence is synthesized)
ataaaaacgacagtttagggggaaaacaaaccaatacccggaaagctgagaggccagctttttaatcgtcatggttttatgtaaaataaaacagcacgtggaaggtattgtaagcgcttg

SEQ ID NO: 536265 - DNA, 120 bp, Artificial Sequence
  ENSG00000166803_20 (sequence is synthesized)
aaggttatcctgctgttctggatcgccaggctctcctctccaagctgctggggtccaggactcggtgtcggaaccctcctgccccttctgaacacccttttttgcctctcttcacagtgg

SEQ ID NO: 536266 - DNA, 68 bp, Artificial Sequence
  ENSG00000166803_21 (sequence is synthesized)
gattctgttttatgtatggtatttagagagtgaaaatcactccccaggggtgttgtgagtaattagaa

SEQ ID NO: 536267 - DNA, 120 bp, Artificial Sequence
  ENSG00000166803_22 (sequence is synthesized)
agtgaaaatcactccccaggggtgttgtgagtaattagaaggtaagcataaagatagaaaaaaattatgaccctttatcctagagttatgctcactgtgtgacagcgatgtggtcttacc

SEQ ID NO: 536268 - DNA, 120 bp, Artificial Sequence
  ENSG00000166803_23 (sequence is synthesized)
gtcttaccacatttggcagggtcttttcgtttcgtttcgtttcatttcatttccttgccttgccttgcctttcttttcttttttcttttcttttctttctttcttttcttttctttcttt

SEQ ID NO: 536269 - DNA, 120 bp, Artificial Sequence
  ENSG00000166813_0 (sequence is synthesized)
atcggagcgcgccgcactggggatggaaacctgactgcctggcccgggacggcgcttgcagccaggcagggcccagagcagtcctccctcggcatggggctggaggctcagaggctgcca

SEQ ID NO: 536270 - DNA, 120 bp, Artificial Sequence
  ENSG00000166813_1 (sequence is synthesized)
ggggctgaggaggccccagtgcgggttgccctgcgagttcgaccactgctgcccaaggagctgctgcacgggcatcagagctgcctgcaggtggagccagggcttggccgcgtcactctg

SEQ ID NO: 536271 - DNA, 120 bp, Artificial Sequence
  ENSG00000166813_2 (sequence is synthesized)
ggccgtgaccgacactttggcttccacgtggtgctggccgaggatgcggggcaggaggccgtgtaccaggcctgcgttcagcccctccttgaggccttcttcgagggcttcaatgccact

SEQ ID NO: 536272 - DNA, 120 bp, Artificial Sequence
  ENSG00000166813_3 (sequence is synthesized)
gtctttgcctatggtcagacgggctcagggaagacatacaccatgggggaggccagtgtggcctccctccttgaggatgagcagggcattgtcccgagggccatggccgaggccttcaag

SEQ ID NO: 536273 - DNA, 120 bp, Artificial Sequence
  ENSG00000166813_4 (sequence is synthesized)
ctcatcgatgagaacgacctgcttgactgtctggtacatgtgtcctacctggaagtgtacaaggaggagttccgagacctgctcgaggtgggcactgccagccgtgacatccagctccgg

SEQ ID NO: 536274 - DNA, 120 bp, Artificial Sequence
  ENSG00000166813_5 (sequence is synthesized)
gaagatgagcgcgggaatgttgtgctgtgcggggtgaaggaggtcgacgtggagggcctggatgaggtgctgagcctcctggagatgggcaacgcggcgcggcacacgggagccacgcac

SEQ ID NO: 536275 - DNA, 120 bp, Artificial Sequence
  ENSG00000166813_6 (sequence is synthesized)
ctcaaccacctgtctagccgctcacacacggtcttcaccgtgaccctggagcagcgggggcgcgcccccagccgcctaccccgccccgccccgggccagctgctcgtctccaagttccac

SEQ ID NO: 536276 - DNA, 120 bp, Artificial Sequence
  ENSG00000166813_7 (sequence is synthesized)
ttcgtggacctggcgggctcagagagggtgctcaagacgggcagcaccggcgagcggctcaaggagagcatccagatcaacagcagcctcctggcgctgggcaacgtcatcagcgccctg

SEQ ID NO: 536277 - DNA, 120 bp, Artificial Sequence
  ENSG00000166813_8 (sequence is synthesized)
ggggaccctcagcgccggggcagccacataccctaccgcgactccaagatcacccggatcctcaaagactcgctgggcgggaacgccaagacggtgatgatcgcctgcgtcagcccttcc

SEQ ID NO: 536278 - DNA, 120 bp, Artificial Sequence
  ENSG00000166813_9 (sequence is synthesized)
tcctccgacttcgacgagaccctcaacaccctcaactacgccagccgcgcccagaacatccgcaaccgcgccacggtcaactggcggcccgaggccgagcggccacccgaagagacggcg

SEQ ID NO: 536279 - DNA, 80 bp, Artificial Sequence
  ENSG00000166813_10 (sequence is synthesized)
agacggcgagcggcgcgcggggtccgccacggcaccgctccgagacccgcatcatccaccgcggccggcgcgccccaggc

SEQ ID NO: 536280 - DNA, 120 bp, Artificial Sequence
  ENSG00000166813_11 (sequence is synthesized)
cgacgccgcctacagcctcttgcgcgagctgcaggccgagcccgggctgcccggcgccgccgcccgcaaggtgcgcgactggctgtgcgccgtcgagggcgagcgcagcgccctgagctc

SEQ ID NO: 536281 - DNA, 120 bp, Artificial Sequence
  ENSG00000166813_12 (sequence is synthesized)
gagcgcagcgccctgagctccgcctccgggcccgatagcggcatcgagagcgcctccgtcgaggaccaggcggcgcagggggccggcgggcgaaaggaggatgagggggcgcagcagctg

SEQ ID NO: 536282 - DNA, 120 bp, Artificial Sequence
  ENSG00000166813_13 (sequence is synthesized)
ctgaccctgcagaaccaggtggcgcggctggaggaggagaaccgagactttctggctgcgctggaggacgccatggagcagtacaaactgcagagcgaccggctgcgtgagcagcaggag

SEQ ID NO: 536283 - DNA, 120 bp, Artificial Sequence
  ENSG00000166813_14 (sequence is synthesized)
gagatggtggaactgcggctgcggttagagctggtgcggccaggctgggggggcccgcggctcctgaatggcctgcctcccgggtcctttgtgcctcgacctcatacagcccccctgggg

SEQ ID NO: 536284 - DNA, 120 bp, Artificial Sequence
  ENSG00000166813_15 (sequence is synthesized)
ggtgcccacgcccatgtgctgggcatggtgccgcctgcctgcctccctggagatgaagttggctctgagcagaggggagagcaggtgacaaatggcagggaggctggagctgagttgctg

SEQ ID NO: 536285 - DNA, 120 bp, Artificial Sequence
  ENSG00000166813_16 (sequence is synthesized)
actgaggtgaacaggctgggaagtggctcttcagctgcttcagaggaggaagaggaggaggaggagccgcccaggcggaccttacacctgcgcagaaataggatcagcaactgcagtcag

SEQ ID NO: 536286 - DNA, 120 bp, Artificial Sequence
  ENSG00000166813_17 (sequence is synthesized)
agggcgggggcacgcccagggagtctgccagagaggaagggcccagagctttgccttgaggagttggatgcagccattccagggtccagagcagttggtgggagcaaggcccgagttcag

SEQ ID NO: 536287 - DNA, 120 bp, Artificial Sequence
  ENSG00000166813_18 (sequence is synthesized)
gcccgccaggtcccccctgccacagcctcagagtggcggctggcccaggcccagcagaagatccgggagctggctatcaacatccgcatgaaggaggagcttattggcgagctggtccgc

SEQ ID NO: 536288 - DNA, 120 bp, Artificial Sequence
  ENSG00000166813_19 (sequence is synthesized)
aggcagctcaggccctgaaccgccagcacagccagcgtatccgggagctggagcaggaggcagagcaggtgcgggccgagctgagtgaaggccagaggcagctgcgggagctcgagggca

SEQ ID NO: 536289 - DNA, 120 bp, Artificial Sequence
  ENSG00000166813_20 (sequence is synthesized)
aggagctccaggatgctggcgagcggtctcggctccaggagttccgcaggagggtcgctgcggcccagagccaggtgcaggtgctgaaggagaagaagcaggctacggagcggctggtgt

SEQ ID NO: 536290 - DNA, 120 bp, Artificial Sequence
  ENSG00000166813_21 (sequence is synthesized)
cactgtcggcccagagtgagaagcgactgcaggagctcgagcggaacgtgcagctcatgcggcagcagcagggacagctgcagaggcggcttcgcgaggagacggagcagaagcggcgcc

SEQ ID NO: 536291 - DNA, 120 bp, Artificial Sequence
  ENSG00000166813_22 (sequence is synthesized)
tggaggcagaaatgagcaagcggcagcaccgcgtcaaggagctggagctgaagcatgagcaacagcagaagatcctgaagattaagacggaagagatcgcggcattccagaggaagaggc

SEQ ID NO: 536292 - DNA, 120 bp, Artificial Sequence
  ENSG00000166813_23 (sequence is synthesized)
gcagtggcagcaacggctctgtggtcagcctggaacagcagcagaagattgaggagcagaagaagtggctggaccaggagatggagaaggtgctacagcagcggcgggcgctggaggagc

SEQ ID NO: 536293 - DNA, 120 bp, Artificial Sequence
  ENSG00000166813_24 (sequence is synthesized)
tgggggaggagctccacaagcgggaggccatcctggccaagaaggaggccctgatgcaggagaagacggggctggagagcaagcgcctgagatccagccaggccctcaacgaggacatcg

SEQ ID NO: 536294 - DNA, 120 bp, Artificial Sequence
  ENSG00000166813_25 (sequence is synthesized)
tgcgagtgtccagccggctggagcacctggagaaggagctgtccgagaagagcgggcagctgcggcagggcagcgcccagagccagcagcagatccgcggggagatcgacagcctgcgcc

SEQ ID NO: 536295 - DNA, 120 bp, Artificial Sequence
  ENSG00000166813_26 (sequence is synthesized)
aggagaaggactcgctgctcaagcagcgcctggagatcgacggcaagctgaggcaggggagtctgctgtcccccgaggaggagcggacgctgttccagttggatgaggccatcgaggccc

SEQ ID NO: 536296 - DNA, 120 bp, Artificial Sequence
  ENSG00000166813_27 (sequence is synthesized)
tggatgctgccattgagtataagaatgaggccatcacatgccgccagcgggtgcttcgggcctcagcctcgttgctgtcccagtgcgagatgaacctcatggccaagctcagctacctct

SEQ ID NO: 536297 - DNA, 120 bp, Artificial Sequence
  ENSG00000166813_28 (sequence is synthesized)
catcctcagagaccagagccctcctctgcaagtattttgacaaggtggtgacgctccgagaggagcagcaccagcagcagattgccttctcggaactggagatgcagctggaggagcagc

SEQ ID NO: 536298 - DNA, 120 bp, Artificial Sequence
  ENSG00000166813_29 (sequence is synthesized)
agaggctggtgtactggctggaggtggccctggagcggcagcgcctggagatggaccgccagctgaccctgcagcagaaggagcacgagcagaacatgcagctgctcctgcagcagagtc

SEQ ID NO: 536299 - DNA, 120 bp, Artificial Sequence
  ENSG00000166813_30 (sequence is synthesized)
gagaccacctcggtgaagggttagcagacagcaggaggcagtatgaggcccggattcaagctctggagaaggaactgggccgttacatgtggataaaccaggaactgaaacagaagctcg

SEQ ID NO: 536300 - DNA, 120 bp, Artificial Sequence
  ENSG00000166813_31 (sequence is synthesized)
gcggtgtgaacgctgtaggccacagcaggggtggggagaagaggagcctgtgctcggagggcagacaggctcctggaaatgaagatgagctccacctggcacccgagcttctctggctgt

SEQ ID NO: 536301 - DNA, 120 bp, Artificial Sequence
  ENSG00000166813_32 (sequence is synthesized)
cccccctcactgagggggccccccgcacccgggaggagacgcgggacttggtccacgctccgttacccttgacctggaaacgctcgagcctgtgtggtgaggagcaggggtcccccgagg

SEQ ID NO: 536302 - DNA, 120 bp, Artificial Sequence
  ENSG00000166813_33 (sequence is synthesized)
aactgaggcagcgggaggcggctgagcccctggtggggcgggtgcttcctgtgggtgaggcaggcctgccctggaactttgggcctttgtccaagccccggcgggaactgcgacgagcca

SEQ ID NO: 536303 - DNA, 120 bp, Artificial Sequence
  ENSG00000166813_34 (sequence is synthesized)
gcccggggatgattgatgtccggaaaaaccccctgtaagccctcggggcagaccctgccttggagggagactccgagcctgctgaaaggggcagctgcctgttttgcttctgtgaagggc

SEQ ID NO: 536304 - DNA, 120 bp, Artificial Sequence
  ENSG00000166813_35 (sequence is synthesized)
agtccttaccgcacaccctaaatccaggccctcatctgtaccctcactgggatcaacaaatttgggccatggcccaaaagaactggaccctcatttaacaaaataatatgcaaattccca

SEQ ID NO: 536305 - DNA, 120 bp, Artificial Sequence
  ENSG00000166813_36 (sequence is synthesized)
ccacttacttccatgaagctgtggtacccaattgccgccttgtgtcttgctcgaatctcaggacaattctggtttcaggcgtaaatggatgtgcttgtagttcaggggtttggccaagaa

SEQ ID NO: 536306 - DNA, 120 bp, Artificial Sequence
  ENSG00000166813_37 (sequence is synthesized)
tcatcacgaaagggtcggtggtaaccaggttgtggtttaaatggtcttatgtatataggggaaactgggagactttaggatcttaaaaaaccatttaataaaaaaaaatctttgaaggga

SEQ ID NO: 536307 - DNA, 120 bp, Artificial Sequence
  ENSG00000166813_38 (sequence is synthesized)
caggcagcttctcacttaacaagatcacaaagatcacagggtctgataacaccagtgctgctattctgaaatgtggtacctttgttcttcttgaagttgtcaagtttatcctctagacca

SEQ ID NO: 536308 - DNA, 120 bp, Artificial Sequence
  ENSG00000166813_39 (sequence is synthesized)
tccacagctgacacagaatggcttctaggcaacccccgctttagtgatctctttgaaggggaaagcaattcctggttgaaaagatttcttcgaactttggtcacttctgaaagcatcaaa

SEQ ID NO: 536309 - DNA, 120 bp, Artificial Sequence
  ENSG00000166813_40 (sequence is synthesized)
agacgggctcagggaagacatacaccatgggggaggccagtgtggagcaccatcctccagctctggcaggggcctatgagcttccgggcctgggggccatgggccgtgtccagctgaagt

SEQ ID NO: 536310 - DNA, 120 bp, Artificial Sequence
  ENSG00000166816_0 (sequence is synthesized)
gactggtcaccctgccacccagtgctcacaccctctggccagtgcctggctatggcccgactgctcaggtctgcaacctgggagctgttcccctggaggggctactgctcccagaaggca

SEQ ID NO: 536311 - DNA, 120 bp, Artificial Sequence
  ENSG00000166816_1 (sequence is synthesized)
aagggagagctctgcagggacttcgtagaggctctgaaggccgtggtgggcggctcccacgtgtccactgccgcggtggtccgagagcagcacgggcgcgatgagtcggtgcacaggtgc

SEQ ID NO: 536312 - DNA, 120 bp, Artificial Sequence
  ENSG00000166816_2 (sequence is synthesized)
gaacctcctgatgctgtggtgtggccccagaacgtggagcaggtcagccggctggcagccctgtgctatcgccaaggtgtgcccatcatcccattcggcaccggcaccgggcttgagggt

SEQ ID NO: 536313 - DNA, 120 bp, Artificial Sequence
  ENSG00000166816_3 (sequence is synthesized)
ggcgtctgtgctgtgcagggcggcgtctgcgttaacctgacgcatatggaccgaatcctggagctgaaccaggaggacttctctgtggtggtggagccaggtgtcacccgcaaagccctc

SEQ ID NO: 536314 - DNA, 120 bp, Artificial Sequence
  ENSG00000166816_4 (sequence is synthesized)
aacgcccacctgcgggacagcggcctctggtttcccgtggacccaggcgcggacgcctctctctgtggcatggcggccaccggggcgtcggggaccaacgcggtccgctacggcaccatg

SEQ ID NO: 536315 - DNA, 120 bp, Artificial Sequence
  ENSG00000166816_5 (sequence is synthesized)
cgggacaacgtgctcaacctggaggtggtgctgcccgacgggcggctgctgcacacggcgggccgaggccggcatttccggaagagtgcagccggctacaacctcacggggctcttcgtg

SEQ ID NO: 536316 - DNA, 120 bp, Artificial Sequence
  ENSG00000166816_6 (sequence is synthesized)
ggctccgaggggacgctgggcctcatcacagccaccaccctgcgcctgcaccctgcccctgaggccacagtggccgccacgtgtgcgttccccagtgtccaggctgctgtggacagcact

SEQ ID NO: 536317 - DNA, 120 bp, Artificial Sequence
  ENSG00000166816_7 (sequence is synthesized)
gtacacatcctccaggctgcagtgcccgtagcccgcattgagttcctggatgaagtcatgatggatgcctgcaacaggtacagcaagctgaattgcttagtggcgcccacactcttcctg

SEQ ID NO: 536318 - DNA, 120 bp, Artificial Sequence
  ENSG00000166816_8 (sequence is synthesized)
cagaggagatagtccagcagaacggagcctctgacttctcctgggccaaggaggccgaggagcgcagccggctttggacagcacggcacaatgcctggtacgcagccctggccacgcggc

SEQ ID NO: 536319 - DNA, 120 bp, Artificial Sequence
  ENSG00000166816_9 (sequence is synthesized)
caggctgcaagggctactccacggatgtgtgtgtgcccatctcccggctgccggagatcgtggtgcagaccaaggaggatctgaatgcctcaggactcacaggaagcattgtcgggcatg

SEQ ID NO: 536320 - DNA, 120 bp, Artificial Sequence
  ENSG00000166816_10 (sequence is synthesized)
tgggtgacggcaacttccactgcatcctgctggtcaaccctgatgacgccgaggaactgggcagggtcaaggcttttgcagaacagctgggcaggcgggcactggctctccacggaacgt

SEQ ID NO: 536321 - DNA, 120 bp, Artificial Sequence
  ENSG00000166816_11 (sequence is synthesized)
gcacgggggagcatggcatcggaatgggcaagcggcagctgctgcaggaggaggtgggcgccgtgggcgtggagaccatgcggcagctcaaggccgtgctagacccccaaggcctcatga

SEQ ID NO: 536322 - DNA, 120 bp, Artificial Sequence
  ENSG00000166816_12 (sequence is synthesized)
atccaggcaaagtgctgtgaagggggtctgagcacttagcccacaagttccctgactacggagccggttctggaacttttcttcatgccacggcccctgcaaggaaatagatgctgaggc

SEQ ID NO: 536323 - DNA, 120 bp, Artificial Sequence
  ENSG00000166816_13 (sequence is synthesized)
agtcttcctgccagcgagcccactgtatctgggcccaaggccagagggcccagagagaagcctgagcaccgtgttacctccctggccctctggctggccccaggagcctttggttcagta

SEQ ID NO: 536324 - DNA, 120 bp, Artificial Sequence
  ENSG00000166816_14 (sequence is synthesized)
aacgacccagggtggttcccagcaaagctgcttcctctctgctcctacgcatcctgtcctggcgggaagagagcgtctgggtccattcaagactctgatgacacccctccccgaggcctc

SEQ ID NO: 536325 - DNA, 120 bp, Artificial Sequence
  ENSG00000166816_15 (sequence is synthesized)
ccactgccggggtcccaggacccttcccccttcacctggtgacaggaacactcctttcctggtatggaacgtgagctcccgtgacatgatgataggtcttctccttggggcctcccccaa

SEQ ID NO: 536326 - DNA, 120 bp, Artificial Sequence
  ENSG00000166816_16 (sequence is synthesized)
acccagtgctcacaccctctggccagtgcctggctatggcccgactgctcaggtctgcaacctgggagctgttcccctggaggggctactgctcccagaaggcaaaggtaccgggagaga

SEQ ID NO: 536327 - DNA, 120 bp, Artificial Sequence
  ENSG00000166816_17 (sequence is synthesized)
cacctgtggctgcctcccccgccacacacggcaccttgggtctgctcccgcccgtgggctgcctgcctctgggggtctggtctggctgctggggggacacccgcggggtgtggtccgggg

SEQ ID NO: 536328 - DNA, 120 bp, Artificial Sequence
  ENSG00000166819_0 (sequence is synthesized)
actctgcagcctgggctctgtgagactgaggtggcggtcagccggagtgagtgttggggtcctggggcacctgccttacatggcttgtttatgaacattaaagggaagaagttgaagctt

SEQ ID NO: 536329 - DNA, 120 bp, Artificial Sequence
  ENSG00000166819_1 (sequence is synthesized)
gaggagcgaggatggcagtcaacaaaggcctcaccttgctggatggagacctccctgagcaggagaatgtgctgcagcgggtcctgcagctgccggtggtgagtggcacctgcgaatgct

SEQ ID NO: 536330 - DNA, 120 bp, Artificial Sequence
  ENSG00000166819_2 (sequence is synthesized)
tccagaagacctacaccagcactaaggaagcccaccccctggtggcctctgtgtgcaatgcctatgagaagggcgtgcagagcgccagtagcttggctgcctggagcatggagccggtgg

SEQ ID NO: 536331 - DNA, 120 bp, Artificial Sequence
  ENSG00000166819_3 (sequence is synthesized)
tccgcaggctgtccacccagttcacagctgccaatgagctggcctgccgaggcttggaccacctggaggaaaagatccccgccctccagtacccccctgaaaagattgcttctgagctga

SEQ ID NO: 536332 - DNA, 120 bp, Artificial Sequence
  ENSG00000166819_4 (sequence is synthesized)
aggacaccatctccacccgcctccgcagtgccagaaacagcatcagcgttcccatcgcgagcacttcagacaaggtcctgggggccgctttggccgggtgcgagcttgcctggggggtgg

SEQ ID NO: 536333 - DNA, 120 bp, Artificial Sequence
  ENSG00000166819_5 (sequence is synthesized)
ccagagacactgcggaatttgctgccaacactcgagctggccgactggcttctggaggggccgacttggccttgggcagcattgagaaggtggtggagtacctcctccctccagacaagg

SEQ ID NO: 536334 - DNA, 120 bp, Artificial Sequence
  ENSG00000166819_6 (sequence is synthesized)
aagagtcagcccctgctcctggacaccagcaagcccagaagtctcccaaggccaagccaagcctcttgagcagggttggggctctgaccaacaccctctctcgatacaccgtgcagacca

SEQ ID NO: 536335 - DNA, 120 bp, Artificial Sequence
  ENSG00000166819_7 (sequence is synthesized)
tggcccgggccctggagcagggccacaccgtggccatgtggatcccaggcgtggtgcccctgagcagcctggcccagtggggtgcctcagtggccatgcaggcggtgtcccggcggagga

SEQ ID NO: 536336 - DNA, 120 bp, Artificial Sequence
  ENSG00000166819_8 (sequence is synthesized)
gcgaagtgcgggtaccctggctgcacagcctcgcagccgcccaggaggaggatcatgaggaccagacagacacggagggagaggacacggaggaggaggaagaattggagactgaggaga

SEQ ID NO: 536337 - DNA, 120 bp, Artificial Sequence
  ENSG00000166819_9 (sequence is synthesized)
acaagttcagtgaggtagcagccctgccaggccctcgaggcctcctgggtggtgtggcacataccctgcagaagaccctccagaccaccatctcggctgtgacatgggcacctgcagctg

SEQ ID NO: 536338 - DNA, 120 bp, Artificial Sequence
  ENSG00000166819_10 (sequence is synthesized)
tgctgggcatggcagggagggtgctgcacctcacaccagcccctgctgtctcctcaaccaaggggagggccatgtccctatcagatgccctgaagggcgttactgacaacgtggtggaca

SEQ ID NO: 536339 - DNA, 120 bp, Artificial Sequence
  ENSG00000166819_11 (sequence is synthesized)
cagtggtgcattacgtgccgctccccaggctgtcgctgatggagcccgagagcgaattccgggacatcgacaacccaccagccgaggtcgagcgccgggaggcggagcgcagagcgtctg

SEQ ID NO: 536340 - DNA, 80 bp, Artificial Sequence
  ENSG00000166819_12 (sequence is synthesized)
cggcccgggcctggaggacgaagtcgccacgcccgcagcgccgcgcccgggcttcccggccgtgccccgcgagaagccaa

SEQ ID NO: 536341 - DNA, 120 bp, Artificial Sequence
  ENSG00000166819_13 (sequence is synthesized)
gcgagaagccaaagcgcagggtcagcgacagcttcttccggcccagcgtcatggagcccatcctgggccgcacgcattacagccagctgcgcaagaagagctgagtcgccgcaccagccg

SEQ ID NO: 536342 - DNA, 120 bp, Artificial Sequence
  ENSG00000166819_14 (sequence is synthesized)
ccgcgccccgggccggcgggtttctctaacaaataaacagaacccgcactgcccaggcgagcgttgccactttcaaagtggtcccctggggagctcagcctcatcctgatgatgctgcca

SEQ ID NO: 536343 - DNA, 120 bp, Artificial Sequence
  ENSG00000166819_15 (sequence is synthesized)
tttattttatttttattttttttttagcatccttttggggcttcactctcagagccagtttttaagggacaccagagccgcagcctgctctgattctatggcttggttgttactataaga

SEQ ID NO: 536344 - DNA, 120 bp, Artificial Sequence
  ENSG00000166819_16 (sequence is synthesized)
ggttgttactataagagtaattgcctaacttgatttttcatctctttaaccaaacttgtggccaaaagatatttgaccgtttccaaaattcagattctgcctctgcggataaatatttgc

SEQ ID NO: 536345 - DNA, 120 bp, Artificial Sequence
  ENSG00000166819_17 (sequence is synthesized)
cacgaatgagtaactcctgtcaccactctgaaggtccagacagaaggttttgacacattcttagcactgaactcctctgtgatctaggatgatctgttccccctctgatgaacatcctct

SEQ ID NO: 536346 - DNA, 120 bp, Artificial Sequence
  ENSG00000166819_18 (sequence is synthesized)
gatgatctaggctcccagcaggctactttgaagggaacaatcagatgcaaaagctcttgggtgtttatttaaaatactagtgtcactttctgagtacccgccgcttcacaggctgagtcc

SEQ ID NO: 536347 - DNA, 120 bp, Artificial Sequence
  ENSG00000166819_19 (sequence is synthesized)
aggcctgtgtgctttgtagagccagctgcttgctcacagccacatttccatttgcatcattactgccttcacctgcatagtcactcttttgatgctggggaaccaaaatggtgatgatat

SEQ ID NO: 536348 - DNA, 120 bp, Artificial Sequence
  ENSG00000166819_20 (sequence is synthesized)
atagactttatgtatagccacagttcatccccaaccctagtcttcgaaatgttaatatttgataaatctagaaaatgcattcatacaattacagaattcaaatattgcaaaaggatgtgt

SEQ ID NO: 536349 - DNA, 120 bp, Artificial Sequence
  ENSG00000166819_21 (sequence is synthesized)
gtctttctccccgagctcccctgttccccttcattgaaaaccaccacggtgccatctcttgtgtatgcagggctatgcacctgcaggcacgtgtgtatgcactccccgcttgtgtttaca

SEQ ID NO: 536350 - DNA, 120 bp, Artificial Sequence
  ENSG00000166819_22 (sequence is synthesized)
caagctgtggggtgttacgcatgcctgcttttttcacttaataatacagcttggagagatttttgtatcacattataaatcccactcgctctttttgatggccacataataactactgca

SEQ ID NO: 536351 - DNA, 120 bp, Artificial Sequence
  ENSG00000166819_23 (sequence is synthesized)
taatatggatacgccttatttgatttaactagttccctaatgatggacttttaagttgtttcctttttttttcttttttgctactgcaaacgatgctataataaatgtccttatcaaaaa

SEQ ID NO: 536352 - DNA, 120 bp, Artificial Sequence
  ENSG00000166819_24 (sequence is synthesized)
acaaaggcctcaccttgctggatggagacctccctgtaagtaacttgggctcatctgtgacaggggatggacaactgagggaggaggaagaagcagggaggggagatgcaggggacttag

SEQ ID NO: 536353 - DNA, 120 bp, Artificial Sequence
  ENSG00000166819_25 (sequence is synthesized)
agcaagatattcccagattataatcctagttcattgactaccatggcttagttattcttgccctcaccaccttttgtagggggcagttggaggatctgggaggggaaaaaaagatgccta

SEQ ID NO: 536354 - DNA, 120 bp, Artificial Sequence
  ENSG00000166819_26 (sequence is synthesized)
ttaaaaattaagcaccttgaaaaaaagggacagaaatcctggcttagggacggggggagtggagaggaaggaaactactgtttaaaccctgacgcagaagcccatgctctgtccaccacc

SEQ ID NO: 536355 - DNA, 120 bp, Artificial Sequence
  ENSG00000166819_27 (sequence is synthesized)
ttcagtgcagagccactgtattctgtgtctccagcatcattcataacggcaaatgtcacctgtcggagttagacggtgcacagcctgtgctgctgtgtggggggaagggtgggatattcc

SEQ ID NO: 536356 - DNA, 120 bp, Artificial Sequence
  ENSG00000166819_28 (sequence is synthesized)
atgtgtctggtgttctatctctgacctggttttcactgtgacttgaagtgatttgatacttttagggatgcttgatggctcctggcaaggcatctcagatttgggcacagttcggatagt

SEQ ID NO: 536357 - DNA, 120 bp, Artificial Sequence
  ENSG00000166819_29 (sequence is synthesized)
gaaacttaaaaattatgaacctgtgcaatatccaccttgcccaagttacgcttttactaactcctgcactaggaatcactttgttttgtattgaatcatagaacagagagaggcgtaaaa

SEQ ID NO: 536358 - DNA, 120 bp, Artificial Sequence
  ENSG00000166819_30 (sequence is synthesized)
tggtcaagtacatggttaagccattctaacagacggtggtttattcccttcccaggatctctttcctccttcggttttgtgtaaaacaacctctgaagcctcgtccaaaatgttaaaaag

SEQ ID NO: 536359 - DNA, 120 bp, Artificial Sequence
  ENSG00000166821_0 (sequence is synthesized)
gagagactcagcccctccccctcagcggataacctgggactgaccgttccctggggatccgacgggccccagaggacccacgcctgagccccgtgcgactcgtggcctttgggctagaag

SEQ ID NO: 536360 - DNA, 120 bp, Artificial Sequence
  ENSG00000166821_1 (sequence is synthesized)
ccatggacgccttcacccgcttcaccaaccagacccagggccgggaccgactcttcagagccactcagtacacatgcatgttgcttagatatttgttagagcccaaagctggcaaagaga

SEQ ID NO: 536361 - DNA, 120 bp, Artificial Sequence
  ENSG00000166821_2 (sequence is synthesized)
aggtggtaatgaagctcaagaaactggagtccagtgtgagcactggtcgtaaatggttcagactaggcaatgtggtacatgctatacaggcaactgagcagagcattcatgccactgacc

SEQ ID NO: 536362 - DNA, 120 bp, Artificial Sequence
  ENSG00000166821_3 (sequence is synthesized)
tggtacctcgcttatgcttaacattagccaacctgaaccgtgtgatttatttcatctgtgacaccatcctctgggtgaggagcgtaggtctcacctctggcatcaacaaagagaaatggc

SEQ ID NO: 536363 - DNA, 120 bp, Artificial Sequence
  ENSG00000166821_4 (sequence is synthesized)
gaacgagggctgctcaccactactactattctcttctgctgagcctggtcagggatctgtatgaaatctccctgcagatgaaacgagttacatgtgacagggcaaagaaagagaaatcag

SEQ ID NO: 536364 - DNA, 120 bp, Artificial Sequence
  ENSG00000166821_5 (sequence is synthesized)
catcccaggatcctctttggttcagcgtggctgaggaggaaacagaatggctccaatcctttctacttcttttattccgatctctgaagcagcatcctcccttgctcctggacacagtga

SEQ ID NO: 536365 - DNA, 120 bp, Artificial Sequence
  ENSG00000166821_6 (sequence is synthesized)
agaacctttgtgatatcctgaaccctttggaccagctggggatctataaatccaatcctggcatcattggacttggaggtcttgtgtcctctatagcaggcatgatcactgtggcatatc

SEQ ID NO: 536366 - DNA, 120 bp, Artificial Sequence
  ENSG00000166821_7 (sequence is synthesized)
ctcagatgaagctgaagacccgttagggtgtttttaggcttggaactagtacctactttaaaagatggcctcttggtgggacagacatttgtataagtcacaggccatgtcatactgtgc

SEQ ID NO: 536367 - DNA, 120 bp, Artificial Sequence
  ENSG00000166821_8 (sequence is synthesized)
ttaagttcttgttcatgtgagcatttaacaacctgtgatgtgggcagagatgaggccaagaacggagaagggaggagcatgaagagttgtatgtttttggagtgctggagtgacttgtga

SEQ ID NO: 536368 - DNA, 120 bp, Artificial Sequence
  ENSG00000166821_9 (sequence is synthesized)
atttctgaatattttcccttcatctaacattgattgaacatctcttatgtgcatagtgggagcttagtatttgctgaatgaataaaaattgaaaggaaaaaatttaaaaagacccaatcg

SEQ ID NO: 536369 - DNA, 120 bp, Artificial Sequence
  ENSG00000166821_10 (sequence is synthesized)
cactgatcattgaacaccagtatacaataactttagggtcatatggatcattggtttcacgattacagtaggtctggtgcatggcactctcagatctagtagaggctctgatgtcagtag

SEQ ID NO: 536370 - DNA, 120 bp, Artificial Sequence
  ENSG00000166821_11 (sequence is synthesized)
tccttgctctgtgcagaagtagaatcagaaaagcatcaggcaccttcatggtataaattgtgtctatgggtgcagtgaataagcaaaaatcagaagcagaccggagggacttataaaaat

SEQ ID NO: 536371 - DNA, 120 bp, Artificial Sequence
  ENSG00000166821_12 (sequence is synthesized)
aggtacagggtcacaatgggtgcctatatgtagcctgtgacagataagaagctgacagtgagacaaacaaaaaactgaggctagagcctcattcctctgactcctaatccagtgttctct

SEQ ID NO: 536372 - DNA, 120 bp, Artificial Sequence
  ENSG00000166821_13 (sequence is synthesized)
ccatgctctcccactgtcttcagaattgagtagaaatgtgatcccctcctgaatcctgttttttgcctcttactctcccataatttggaaatttccttgtccagtggtttatattctttt

SEQ ID NO: 536373 - DNA, 69 bp, Artificial Sequence
  ENSG00000166821_14 (sequence is synthesized)
taatttggaaatttccttgtccagtggtttatattcttttctagaaaaactaaaactgggtggaggatt

SEQ ID NO: 536374 - DNA, 120 bp, Artificial Sequence
  ENSG00000166821_15 (sequence is synthesized)
agcctgggcaatgtagtgagactccttctctacaacaaagtgttaaaaaattagccaggcatggtggagtatgcctgtagtcccagatactctggaggctgaagcaggaggatcacttga

SEQ ID NO: 536375 - DNA, 120 bp, Artificial Sequence
  ENSG00000166821_16 (sequence is synthesized)
ctgcagtgagcttccaccgcactccagcccgggtgatagagcaagaccctgtgtcttaaaaaaaaattaagacagtatttagacttatcagttagattgttttatttaaatccttctaac

SEQ ID NO: 536376 - DNA, 120 bp, Artificial Sequence
  ENSG00000166821_17 (sequence is synthesized)
aatttaggcaattctacattaattttcatcaaaatttatccagtcaaaaaaatttcatgaatactccagatgtaagagagtcacaattttctacgataaatcagacatcttatttctagg

SEQ ID NO: 536377 - DNA, 120 bp, Artificial Sequence
  ENSG00000166821_18 (sequence is synthesized)
gtgattgagggaggtggaaagcgcaggaggaagccagtgaagaggacaatggaatgctgagtcaatgacattgacttgtgttcctatctgccatcttgggtgtgggtctttatatgtggt

SEQ ID NO: 536378 - DNA, 120 bp, Artificial Sequence
  ENSG00000166821_19 (sequence is synthesized)
tacagatcctttagtttgagggaggtgaggtagagaaataggatgccagcaggtaggaggccgatgtcagtcctcccagcaaagctgtgtcatttatctgaatggaaatgagaaaataaa

SEQ ID NO: 536379 - DNA, 120 bp, Artificial Sequence
  ENSG00000166821_20 (sequence is synthesized)
tatgtactcaataagtcacatttcccagaaatgtgattgagattctcaaaaaatagactcagattcttggctgtctgtttaaccaatcacgatatgggatttgagaaataaaatttaggg

SEQ ID NO: 536380 - DNA, 120 bp, Artificial Sequence
  ENSG00000166821_21 (sequence is synthesized)
aattttaagagacatgaaagctactaggtcagggaaaataaaaagcttaaataactatttttattgtccagatcctctactgtaatagattaactatgttcaataaatttctagacaaaa

SEQ ID NO: 536381 - DNA, 120 bp, Artificial Sequence
  ENSG00000166821_22 (sequence is synthesized)
atcagcctacacagttggtacagcgagctctgggctagaagatccaggctgaggaggaggatggagaaagattgagatgtagagcctctgggttgagagggacctctgaaatgaactcat

SEQ ID NO: 536382 - DNA, 120 bp, Artificial Sequence
  ENSG00000166821_23 (sequence is synthesized)
tcatctagactgctgccatggagatggtgctctacagtagccctgtcaatcgctggctggcttctgcctaggtaaaaaaaaaaaaaaaaactagccgggcgtggtggtgggcgcctgtaa

SEQ ID NO: 536383 - DNA, 120 bp, Artificial Sequence
  ENSG00000166822_0 (sequence is synthesized)
gacgctgaggcggcgagggtgagtcggcgccggccgctaccgcacttcgggcgctcgtccctcatttctctgtggtgaatggcgacgggatggagcgcgaggggagcggcggcagcggcg

SEQ ID NO: 536384 - DNA, 120 bp, Artificial Sequence
  ENSG00000166822_1 (sequence is synthesized)
ggtcggccgggctcctgcagcagatcctgagcctgaaggttgtgccgcgggtgggcaacgggaccctgtgccccaactctacttccctctgctccttcccagagatgtggtatggtgtat

SEQ ID NO: 536385 - DNA, 120 bp, Artificial Sequence
  ENSG00000166822_2 (sequence is synthesized)
tcctgtgggcactggtgtcttctctcttctttcatgtccctgctggattactggccctcttcaccctcagacatcacaaatatggtaggttcatgtctgtaagcatcctgttgatgggca

SEQ ID NO: 536386 - DNA, 120 bp, Artificial Sequence
  ENSG00000166822_3 (sequence is synthesized)
tcgtgggaccaattactgctggaatcttgacaagtgcagctattgctggagtttaccgagcagcagggaaggaaatgataccatttgaagccctcacactgggcactggacagacatttt

SEQ ID NO: 536387 - DNA, 120 bp, Artificial Sequence
  ENSG00000166822_4 (sequence is synthesized)
gcgtcttggtggtctcctttttacggattttagctactctatagcatacatccttatgctgagatgttgaacttaaactttatggaatcctccaaaagaatacattatggagtgtagtgt

SEQ ID NO: 536388 - DNA, 120 bp, Artificial Sequence
  ENSG00000166822_5 (sequence is synthesized)
tttcttagttcttcaaagggaagcaacttggatgaacaggaacatgaaggacaacacatctcagccttttcttcattttgaagctcctagaattgaagacttatgtggactcctattgtt

SEQ ID NO: 536389 - DNA, 120 bp, Artificial Sequence
  ENSG00000166822_6 (sequence is synthesized)
ctcaaccaaaacaagtcttttggctttcttttttgtagatatttgatttaagcagttttcatgtgtacctttacccaagccaagtcaacagtgtctctggggtggcatcctttgcactga

SEQ ID NO: 536390 - DNA, 120 bp, Artificial Sequence
  ENSG00000166822_7 (sequence is synthesized)
aatttacagtattctgtgagatgtcgcatattttgaagaaaccgtggaagatactggtttatttcaaatgagcagagtatgttgtattaaaatcttatctaatcttgattaaaatttggc

SEQ ID NO: 536391 - DNA, 120 bp, Artificial Sequence
  ENSG00000166822_8 (sequence is synthesized)
aaactcttttctttgctacatcttagtgacaataaatgccaaataggttttggttgagtatagttttgaaaacaaatttggtgaaataaagcaggaaaaaaaatttaagtataactcaag

SEQ ID NO: 536392 - DNA, 120 bp, Artificial Sequence
  ENSG00000166822_9 (sequence is synthesized)
tagtggctttggttccactgtttataaataaaaagtagataacaatgaataatgtgacattttctggacaactgtcttgacttctgattaagatattttaagagatgtgaatttgttatt

SEQ ID NO: 536393 - DNA, 120 bp, Artificial Sequence
  ENSG00000166822_10 (sequence is synthesized)
ttgtatgttttatcaaaataagctagctaatttagactttttagattttctgtaccacctttccctatcacttttaattctcttaattttatttcatttaattggaaacatacataccct

SEQ ID NO: 536394 - DNA, 120 bp, Artificial Sequence
  ENSG00000166822_11 (sequence is synthesized)
attaaatggcttgagttggaaattttaagccagatttgtttggacattgaggcacacataagatactttaggcattctgtcatagtttttcttagtgactttggtatactaatgaccctt

SEQ ID NO: 536395 - DNA, 120 bp, Artificial Sequence
  ENSG00000166822_12 (sequence is synthesized)
gagaaactatagaagtgcatctgaaactagagttagtggttattgattttttagcttaatgtgtttacctagtggtaactcttcagcccacttttacagtattgggtatcaactcccaga

SEQ ID NO: 536396 - DNA, 120 bp, Artificial Sequence
  ENSG00000166822_13 (sequence is synthesized)
aagtgcctaaagtttaatgttcagatatgtacccactctcccctttacatttttattcaaaagaatttatatctttaaagagatttaaatatcaagagtttttttaaaacttaattttag

SEQ ID NO: 536397 - DNA, 120 bp, Artificial Sequence
  ENSG00000166822_14 (sequence is synthesized)
ctatttaaatttttattctactgcctaactttctttttcattaaaaggcctgaaaactgtgactctttgagagggaaagaatcgcagaaattaagtatttaatgtgatcctttccaccta

SEQ ID NO: 536398 - DNA, 120 bp, Artificial Sequence
  ENSG00000166822_15 (sequence is synthesized)
aactgttttgtatggaatacaatcagtgtggtggtagtggtggtggttatctgcaaaatagtttctggtgattaaatctgacttttttttttttttttcttttaaatgagacggagcctc

SEQ ID NO: 536399 - DNA, 120 bp, Artificial Sequence
  ENSG00000166822_16 (sequence is synthesized)
gcgtgagccaccgcgcctggccataaatctgacatctttaaaggaaagttttcattgtgagattaaggcttaacagcccatgaggtcatatacacatgaacgtatctattccatttaaag

SEQ ID NO: 536400 - DNA, 120 bp, Artificial Sequence
  ENSG00000166822_17 (sequence is synthesized)
aaagcaatacacactctggcttctgattaaaaatagccaggaggagagtctctgaatctactgtgattctggagtctgcccaatttggaaaaaaaaaaaaaagaaaaaagtcaggaggac

SEQ ID NO: 536401 - DNA, 88 bp, Artificial Sequence
  ENSG00000166822_18 (sequence is synthesized)
tataatcccagcactttgggaggtcgatgtgggaggattgcttgagcccaagagttcaagactgtacaaaataaaaaaaaattagctg

SEQ ID NO: 536402 - DNA, 120 bp, Artificial Sequence
  ENSG00000166822_19 (sequence is synthesized)
ggcgtggcctcagctacccaagaggctaaagtgggaggatcacttgtgcctgggaggttcaggctgctgtgagccgagaccacgccactgaactccagcttaggccacagggcaagaccc

SEQ ID NO: 536403 - DNA, 120 bp, Artificial Sequence
  ENSG00000166822_20 (sequence is synthesized)
tgtcttaaaataatattactaattttggtaattaacttatcaaaactatagtgacatatacacgggcagaaacttataagtagagttgtaatgcagccaaatattcttacaaattcccta

SEQ ID NO: 536404 - DNA, 120 bp, Artificial Sequence
  ENSG00000166822_21 (sequence is synthesized)
acaagaagctcaaatctttctcacaggcaaattgtaaaaattctagttttttgtttaaagagctgtgattttcaaaagtatcccttcagtttaagaaatctggggaattggtaacttttc

SEQ ID NO: 536405 - DNA, 120 bp, Artificial Sequence
  ENSG00000166822_22 (sequence is synthesized)
ttatgggaaatgattgccatcatctctactgaaggatgcctcttactgaaaaatgtcttttgaaggagttcttgcctaaagcattctttggatgtaatttcatacactaaacatatagac

SEQ ID NO: 536406 - DNA, 120 bp, Artificial Sequence
  ENSG00000166822_23 (sequence is synthesized)
cagtagttagtgggcccctcctcttaaacagtaacttttgaagtactgatacatgattaaaatgttagatatttttcactggagctaagacttaaaattagggcattttgaaaggtgtat

SEQ ID NO: 536407 - DNA, 120 bp, Artificial Sequence
  ENSG00000166822_24 (sequence is synthesized)
ttgtttctgtttcttgtttgatatattttggttatctactcttttaaaaaactaaacgtataaaaggtatcttcaaattactgagtgtttcatccatcccagtaggtgaagtattctcca

SEQ ID NO: 536408 - DNA, 120 bp, Artificial Sequence
  ENSG00000166822_25 (sequence is synthesized)
gtgaataaatctatatatatatatagattttaaatagcttgagcggtgtagcttgaaatgttttcagggaaagactatttgaatcataaggaatagctttgattttcttttttatgtctc

SEQ ID NO: 536409 - DNA, 120 bp, Artificial Sequence
  ENSG00000166822_26 (sequence is synthesized)
aaatatagaattatttgggggtggtcactcagatggaagaatattggcaattgtgttgaacattttaccttatatagttttgagaatttttgccaaaaactgatttcttagaaatatcct

SEQ ID NO: 536410 - DNA, 66 bp, Artificial Sequence
  ENSG00000166822_27 (sequence is synthesized)
tgagaatttttgccaaaaactgatttcttagaaatatcctcccccagctgtgctttggttttttgg

SEQ ID NO: 536411 - DNA, 90 bp, Artificial Sequence
  ENSG00000166822_28 (sequence is synthesized)
gctttgttttttaaaaaaaaagaaatgcaagagagggagggaggcagcctcctgaccataaaagctgatttcttgatttttttttctttt

SEQ ID NO: 536412 - DNA, 89 bp, Artificial Sequence
  ENSG00000166822_29 (sequence is synthesized)
ttaaaaaaaaagaaatgcaagagagggagggaggcagcctcctgaccataaaagctgatttcttgatttttttttctccaaggctggag

SEQ ID NO: 536413 - DNA, 120 bp, Artificial Sequence
  ENSG00000166822_30 (sequence is synthesized)
catggtctcagctcactgcagcctccgtttcctgggttcaagtgattgtcctgccttggccgctgagtagctaggattactggcacccgccacaaggcccagctaatttttgtattttta

SEQ ID NO: 536414 - DNA, 120 bp, Artificial Sequence
  ENSG00000166822_31 (sequence is synthesized)
tgatccacccgcctcggcctcccaacgtgatgggactatagacatgagccatcatgcttggccttcttgattcttgaatacggggttttgaggtgaaagcatttcatgaaaacttaagtt

SEQ ID NO: 536415 - DNA, 120 bp, Artificial Sequence
  ENSG00000166822_32 (sequence is synthesized)
aagcatttcatgaaaacttaagttcatacacaagagcatcatgaatattctaaaagaggtatctgtgctttttttgtgaccacaaaatattacttcttatgaaatgtttacactaggtga

SEQ ID NO: 536416 - DNA, 120 bp, Artificial Sequence
  ENSG00000166822_33 (sequence is synthesized)
ggaaaagttcattaattacctttaaaccgttccttattttttttaagattttaaattgtattttggcttttgcctccagtatcctttctggttgctctggtttgaattaagttcctatta

SEQ ID NO: 536417 - DNA, 120 bp, Artificial Sequence
  ENSG00000166822_34 (sequence is synthesized)
tgctgcagcacatatcaaccttccctaagtaaccatttcctggaatgtgaagcatcggtgccattagcagaccatatgcagaaatgtcgtgtacttgcatttcttttttgtgcactctat

SEQ ID NO: 536418 - DNA, 120 bp, Artificial Sequence
  ENSG00000166822_35 (sequence is synthesized)
aaggctggttgtgactcagatcagcttaactttttatattatgttatttcactaactgctacagtcaaaatgatcaaatctttgtacaatagaaaattatttaaattttatttttctact

SEQ ID NO: 536419 - DNA, 120 bp, Artificial Sequence
  ENSG00000166822_36 (sequence is synthesized)
gacatttctaattctagtgtaaatgtttatcaataaaaaattactttcaattctgagttggaattatatttctttttggtggctaatgagtttaatcttttgtaataaaattgacttcag

SEQ ID NO: 536420 - DNA, 120 bp, Artificial Sequence
  ENSG00000166822_37 (sequence is synthesized)
ttttcattttttaaataacttaatatctagcatgtgtaactttttttatgttctacttcttactaatttatgataaaattcttgttcaaagttgtgattaaaccgtacttaacatgtgaa

SEQ ID NO: 536421 - DNA, 120 bp, Artificial Sequence
  ENSG00000166822_38 (sequence is synthesized)
gtgctgtgggcgccccgagtctgggcggggtcccgggtgcgcagcctgctggcggcgtgggcgctgtcctccgggaggggggccgtgctgctcgcccggagcccctttccccatcacttc

SEQ ID NO: 536422 - DNA, 120 bp, Artificial Sequence
  ENSG00000166822_39 (sequence is synthesized)
ttgacaagtatgttagacattaaaataccagtcaaaaatgtttaatatgactagtcaatttcaggacctattctagaaaacatatctgagtaggatgaaggaaagagtgccttttaactg

SEQ ID NO: 536423 - DNA, 120 bp, Artificial Sequence
  ENSG00000166822_40 (sequence is synthesized)
caagtccagacagggtctccctatgtcaccaaggccggagtgcagtggttgcaatattggctcactgcagcctccacctcttgggctcaagtaatcctcctccatcagcctcccaagaag

SEQ ID NO: 536424 - DNA, 120 bp, Artificial Sequence
  ENSG00000166823_0 (sequence is synthesized)
ctggaaggggccacttcacacctcgggctcggcataaagcggccgccggccgccggcccccagacgcgccgccgctgccatggcccagcccctgtgcccgccgctctccgagtcctggat

SEQ ID NO: 536425 - DNA, 120 bp, Artificial Sequence
  ENSG00000166823_1 (sequence is synthesized)
gctctctgcggcctggggcccaactcggcggccgccgccctccgacaaggactgcggccgctccctcgtctcgtccccagactcatggggcagcaccccagccgacagccccgtggcgag

SEQ ID NO: 536426 - DNA, 120 bp, Artificial Sequence
  ENSG00000166823_2 (sequence is synthesized)
gcgcggccaggcaccctccgggacccccgcgccccctccgtaggtaggcgcggcgcgcgcagcagccgcctgggcagcgggcagaggcagagcgccagtgagcgggagaaactgcgcatg

SEQ ID NO: 536427 - DNA, 120 bp, Artificial Sequence
  ENSG00000166823_3 (sequence is synthesized)
catgcgcacgctggcccgcgccctgcacgagctgcgccgctttctaccgccgtccgtggcgcccgcgggccagagcctgaccaagatcgagacgctgcgcctggctatccgctatatcgg

SEQ ID NO: 536428 - DNA, 120 bp, Artificial Sequence
  ENSG00000166823_4 (sequence is synthesized)
ccacctgtcggccgtgctaggcctcagcgaggagagtctccagcgccggtgccggcagcgcggtgacgcggggtcccctcggggctgcccgctgtgccccgacgactgccccgcgcagat

SEQ ID NO: 536429 - DNA, 120 bp, Artificial Sequence
  ENSG00000166823_5 (sequence is synthesized)
gacgactgccccgcgcagatgcagacacggacgcaggctgaggggcaggggcaggggcgcgggctgggcctggtatccgccgtccgcgccggggcgtcctggggatccccgcctgcctgc

SEQ ID NO: 536430 - DNA, 120 bp, Artificial Sequence
  ENSG00000166823_6 (sequence is synthesized)
cgagccgcgcgacccgcctgcgctgttcgccgaggcggcgtgccctgaagggcaggcgatggagccaagcccaccgtccccgctccttccgggcgacgtgctggctctgttggagacctg

SEQ ID NO: 536431 - DNA, 120 bp, Artificial Sequence
  ENSG00000166823_7 (sequence is synthesized)
gatgcccctctcgcctctggagtggctgcctgaggagcccaagtgacaagggacaactgacgccgtctctgtgagcaccgaggctttttggcctcagcaccttcgaagtggttccttggc

SEQ ID NO: 536432 - DNA, 120 bp, Artificial Sequence
  ENSG00000166823_8 (sequence is synthesized)
agactgcctttcctggaagagggcacgggcgatcccgacgggggcattcctgcgggtgagagccgtccccaccgcggcggcccttctcagcccctccctccatggagggacccatagggc

SEQ ID NO: 536433 - DNA, 120 bp, Artificial Sequence
  ENSG00000166823_9 (sequence is synthesized)
cttcctacccgtggacacagagctccctctctccctccaaagaagagcatgggagaggtgggaggggttcttgcaatctttagccccccgacccccacaggcccagacccctttggcctt

SEQ ID NO: 536434 - DNA, 120 bp, Artificial Sequence
  ENSG00000166823_10 (sequence is synthesized)
acccccagccctggctcagcatctagtccagatgggtcagcctggaatgggtggggagggacgtcctgtgagaaggcagcggcaagtagaatctgctcatcttttctttgaacctggtgg

SEQ ID NO: 536435 - DNA, 120 bp, Artificial Sequence
  ENSG00000166823_11 (sequence is synthesized)
ggaactggttaaaaccaaaatatctgtgtagaaatacaactccattattgagtatttattgtatgtacatcaggtacctattatactcaagtaaccattttacagaaggatgaggatcag

SEQ ID NO: 536436 - DNA, 120 bp, Artificial Sequence
  ENSG00000166823_12 (sequence is synthesized)
cgctcaagcccaggtaggcctccagagtcccagcgctcagctcttgtgggattttgccagctccatacatgttggggcctgagggataacagctccaaggggttattttcttgcatcctg

SEQ ID NO: 536437 - DNA, 120 bp, Artificial Sequence
  ENSG00000166823_13 (sequence is synthesized)
tggtcttattctccatgcacgggagcatcctggccttggaactcccccaccctccgccggcattttcccatctgccttttctctggtttccccaccttgtggcttagagacataaataat

SEQ ID NO: 536438 - DNA, 120 bp, Artificial Sequence
  ENSG00000166823_14 (sequence is synthesized)
ggtgtggcggtcctgagtttatataaccatgacctcctacaggcctagatggggtgagatgaggggcccatggggttgcatcggaatccacacaggcagttgcgtgcctgtctgcattgg

SEQ ID NO: 536439 - DNA, 120 bp, Artificial Sequence
  ENSG00000166823_15 (sequence is synthesized)
ctggattcacatcagggagcaagaaacgggaggcttgagcccagaaagtgtgtcctcatccagccagggtgtctgggcaacagtcatgattagagggtgcggtggggagaagggatgtgt

SEQ ID NO: 536440 - DNA, 120 bp, Artificial Sequence
  ENSG00000166823_16 (sequence is synthesized)
agcctctctgccaagcgtcctttaccctctatggatagatacccagttctcccctcctctccttcaagtgtctgaaacacaggcttcagtgtctgtttttataagagctttattaggata

SEQ ID NO: 536441 - DNA, 120 bp, Artificial Sequence
  ENSG00000166823_17 (sequence is synthesized)
caattcacataccataaaattcactcttttaacaactgaatggctttagtacatccacagagttgtgcaagcattgccactaattttagaacgttttcaccccccaaaagaaaccgtata

SEQ ID NO: 536442 - DNA, 120 bp, Artificial Sequence
  ENSG00000166823_18 (sequence is synthesized)
cctgttaacatcactcctcactattccctactcccagtccctggcactcactcttctagtctctgtctctataggtttgctttttcaggacatttcatataaaaggaatcgcaaaatacg

SEQ ID NO: 536443 - DNA, 120 bp, Artificial Sequence
  ENSG00000166823_19 (sequence is synthesized)
gcggccgctccctcgtctcgtccccagactcatggggcagcaccccagccgacagccccgtggcgagccccgcgcggccaggcaccctccgggacccccgcgccccctccgtagctcctt

SEQ ID NO: 536444 - DNA, 120 bp, Artificial Sequence
  ENSG00000166825_0 (sequence is synthesized)
gctggaggggcagggacggcggcggcgcagctcggaacccgccagggtccagggtccaggttccagcgcccggcggcccaggcaccccccgagcccagctccacacaccgttcctggatc

SEQ ID NO: 536445 - DNA, 120 bp, Artificial Sequence
  ENSG00000166825_1 (sequence is synthesized)
tcctctccccaggcggagcgtgcccctgcccagtccagtgaccttcgcctgttggagccctggttaatttttgcccagtctgcctgttgtggggctcctcccctttggggatataagccc

SEQ ID NO: 536446 - DNA, 120 bp, Artificial Sequence
  ENSG00000166825_2 (sequence is synthesized)
ggcctggggctgctccgttctctgcctggcctgaggctccctgagccgcctccccaccatcaccatggccaagggcttctatatttccaagtccctgggcatcctggggatcctcctggg

SEQ ID NO: 536447 - DNA, 120 bp, Artificial Sequence
  ENSG00000166825_3 (sequence is synthesized)
cgtggcagccgtgtgcacaatcatcgcactgtcagtggtgtactcccaggagaagaacaagaacgccaacagctcccccgtggcctccaccaccccgtccgcctcagccaccaccaaccc

SEQ ID NO: 536448 - DNA, 120 bp, Artificial Sequence
  ENSG00000166825_4 (sequence is synthesized)
cgcctcggccaccaccttggaccaaagtaaagcgtggaatcgttaccgcctccccaacacgctgaaacccgattcctaccgggtgacgctgagaccgtacctcacccccaatgacagggg

SEQ ID NO: 536449 - DNA, 120 bp, Artificial Sequence
  ENSG00000166825_5 (sequence is synthesized)
cctgtacgtttttaagggctccagcaccgtccgtttcacctgcaaggaggccactgacgtcatcatcatccacagcaagaagctcaactacaccctcagccaggggcacagggtggtcct

SEQ ID NO: 536450 - DNA, 120 bp, Artificial Sequence
  ENSG00000166825_6 (sequence is synthesized)
gcgtggtgtgggaggctcccagccccccgacattgacaagactgagctggtggagcccaccgagtacctggtggtgcacctcaagggctccctggtgaaggacagccagtatgagatgga

SEQ ID NO: 536451 - DNA, 120 bp, Artificial Sequence
  ENSG00000166825_7 (sequence is synthesized)
cagcgagttcgagggggagttggcagatgacctggcgggcttctaccgcagcgagtacatggagggcaatgtcagaaaggtggtggccactacacagatgcaggctgcagatgcccggaa

SEQ ID NO: 536452 - DNA, 120 bp, Artificial Sequence
  ENSG00000166825_8 (sequence is synthesized)
gtccttcccatgcttcgatgagccggccatgaaggccgagttcaacatcacgcttatccaccccaaggacctgacagccctgtccaacatgcttcccaaaggtcccagcaccccacttcc

SEQ ID NO: 536453 - DNA, 120 bp, Artificial Sequence
  ENSG00000166825_9 (sequence is synthesized)
agaagaccccaactggaatgtcactgagttccacaccacgcccaagatgtccacgtacttgctggccttcattgtcagtgagttcgactacgtggagaagcaggcatccaatggtgtctt

SEQ ID NO: 536454 - DNA, 120 bp, Artificial Sequence
  ENSG00000166825_10 (sequence is synthesized)
gatccggatctgggcccggcccagtgccattgcggcgggccacggcgattatgccctgaacgtgacgggccccatccttaacttctttgctggtcattatgacacaccctacccactccc

SEQ ID NO: 536455 - DNA, 120 bp, Artificial Sequence
  ENSG00000166825_11 (sequence is synthesized)
aaaatcagaccagattggcctgccagacttcaacgccggcgccatggagaactggggactggtgacctaccgggagaactccctgctgttcgaccccctgtcctcctccagcagcaacaa

SEQ ID NO: 536456 - DNA, 120 bp, Artificial Sequence
  ENSG00000166825_12 (sequence is synthesized)
ggagcgggtggtcactgtgattgctcatgagctggcccaccagtggttcgggaacctggtgaccatagagtggtggaatgacctgtggctgaacgagggcttcgcctcctacgtggagta

SEQ ID NO: 536457 - DNA, 120 bp, Artificial Sequence
  ENSG00000166825_13 (sequence is synthesized)
cctgggtgctgactatgcggagcccacctggaacttgaaagacctcatggtgctgaatgatgtgtaccgcgtgatggcagtggatgcactggcctcctcccacccgctgtccacacccgc

SEQ ID NO: 536458 - DNA, 120 bp, Artificial Sequence
  ENSG00000166825_14 (sequence is synthesized)
ctcggagatcaacacgccggcccagatcagtgagctgtttgacgccatctcctacagcaagggcgcctcagtcctcaggatgctctccagcttcctgtccgaggacgtattcaagcaggg

SEQ ID NO: 536459 - DNA, 120 bp, Artificial Sequence
  ENSG00000166825_15 (sequence is synthesized)
acctgcaggaggctgtgaacaaccggtccatccaactccccaccaccgtgcgggacatcatgaaccgctggaccctgcagatgggcttcccggtcatcacggtggataccagcacgggga

SEQ ID NO: 536460 - DNA, 120 bp, Artificial Sequence
  ENSG00000166825_16 (sequence is synthesized)
ccctttcccaggagcacttcctccttgaccccgattccaatgttacccgcccctcagaattcaactacgtgtggattgtgcccatcacatccatcagagatggcagacagcagcaggact

SEQ ID NO: 536461 - DNA, 120 bp, Artificial Sequence
  ENSG00000166825_17 (sequence is synthesized)
actggctgatagatgtaagagcccagaacgatctcttcagcacatcaggcaatgagtgggtcctgctgaacctcaatgtgacgggctattaccgggtgaactacgacgaagagaactgga

SEQ ID NO: 536462 - DNA, 120 bp, Artificial Sequence
  ENSG00000166825_18 (sequence is synthesized)
ggaagattcagactcagctgcagagagaccactcggccatccctgtcatcaatcgggcacagatcattaatgacgccttcaacctggccagtgcccataaggtccctgtcactctggcgc

SEQ ID NO: 536463 - DNA, 120 bp, Artificial Sequence
  ENSG00000166825_19 (sequence is synthesized)
tgaacaacaccctcttcctgattgaagagagacagtacatgccctgggaggccgccctgagcagcctgagctacttcaagctcatgtttgaccgctccgaggtctatggccccatgaaga

SEQ ID NO: 536464 - DNA, 120 bp, Artificial Sequence
  ENSG00000166825_20 (sequence is synthesized)
actacctgaagaagcaggtcacacccctcttcattcacttcagaaataataccaacaactggagggagatcccagaaaacctgatggaccagtacagcgaggttaatgccatcagcaccg

SEQ ID NO: 536465 - DNA, 120 bp, Artificial Sequence
  ENSG00000166825_21 (sequence is synthesized)
cctgctccaacggagttccagagtgtgaggagatggtctctggccttttcaagcagtggatggagaaccccaataataacccgatccaccccaacctgcggtccaccgtctactgcaacg

SEQ ID NO: 536466 - DNA, 120 bp, Artificial Sequence
  ENSG00000166825_22 (sequence is synthesized)
ctatcgcccagggcggggaggaggagtgggacttcgcctgggagcagttccgaaatgccacactggtcaatgaggctgacaagctccgggcagccctggcctgcagcaaagagttgtgga

SEQ ID NO: 536467 - DNA, 120 bp, Artificial Sequence
  ENSG00000166825_23 (sequence is synthesized)
tcctgaacaggtacctgagctacaccctgaacccggacttaatccggaagcaggacgccacctctaccatcatcagcattaccaacaacgtcattgggcaaggtctggtctgggactttg

SEQ ID NO: 536468 - DNA, 120 bp, Artificial Sequence
  ENSG00000166825_24 (sequence is synthesized)
tccagagcaactggaagaagctttttaacgattatggtggtggctcgttctccttctccaacctcatccaggcagtgacacgacgattctccaccgagtatgagctgcagcagctggagc

SEQ ID NO: 536469 - DNA, 120 bp, Artificial Sequence
  ENSG00000166825_25 (sequence is synthesized)
agttcaagaaggacaacgaggaaacaggcttcggctcaggcacccgggccctggagcaagccctggagaagacgaaagccaacatcaagtgggtgaaggagaacaaggaggtggtgctcc

SEQ ID NO: 536470 - DNA, 120 bp, Artificial Sequence
  ENSG00000166825_26 (sequence is synthesized)
agtggttcacagaaaacagcaaatagtccccagcccttgaagtcacccggcccccatgcaaggtgcccacatgtgtccatcccagcggctggtgcagggcctccattcctggagcccgag

SEQ ID NO: 536471 - DNA, 120 bp, Artificial Sequence
  ENSG00000166825_27 (sequence is synthesized)
gcaccagtgtcctcccctcaaggacaaagtctccagcccacgttctctctgcctgtgagccagtctagttcctgatgacccaggctgcctgagcacctcccagcccctgcccctcatgcc

SEQ ID NO: 536472 - DNA, 120 bp, Artificial Sequence
  ENSG00000166825_28 (sequence is synthesized)
aaccccgccctaggcctggcatggcacctgtcgcccagtgccctggggctgatctcagggaagcccagctccagggccagatgagcagaagctctcgatggacaatgaacggccttgctg

SEQ ID NO: 536473 - DNA, 120 bp, Artificial Sequence
  ENSG00000166825_29 (sequence is synthesized)
ggggccgccctgtaccctctttcacctttccctaaagaccctaaatctgaggaatcaacagggcagcagatctgtatatttttttctaagagaaaatgtaaataaaggatttctagatga

SEQ ID NO: 536474 - DNA, 120 bp, Artificial Sequence
  ENSG00000166825_30 (sequence is synthesized)
actgccacaccctcctgccttcccccagaggccgccgctcctctccctcccccagggttggagtccacctcctctccatcctgcccccatcatttccgctgacatcatttccctgacagc

SEQ ID NO: 536475 - DNA, 120 bp, Artificial Sequence
  ENSG00000166825_31 (sequence is synthesized)
tgccccctaccccttccctgcagctctgcccaatgctagcgtcttaagccagaggacagacatgtcctctcctcaccgacagcccctccagagttccgagcctcaaattcccgtccagct

SEQ ID NO: 536476 - DNA, 120 bp, Artificial Sequence
  ENSG00000166825_32 (sequence is synthesized)
gaggagtccagtgctggaggggcagggacggcggcggcgcagctcggaacccgccagggtccagggtccaggttccagcgcccggcggcccagctctcaagcagatcaatgcaatgccac

SEQ ID NO: 536477 - DNA, 120 bp, Artificial Sequence
  ENSG00000166825_33 (sequence is synthesized)
ctggccgcttgctttgcccactgggcctacagccggaagcctgcccttcagccctcgggcctgatcccaggccgcctgcagcctgtaaccagacactgtttgcttccagcaggcaccccc

SEQ ID NO: 536478 - DNA, 120 bp, Artificial Sequence
  ENSG00000166825_34 (sequence is synthesized)
cagacagacggtggctatgatgattgttattctccaaaggcccttctctaggacccacagcctccagaccccagtagcgttcccctctgctgaccaggcctctaggtttagcttgattgg

SEQ ID NO: 536479 - DNA, 120 bp, Artificial Sequence
  ENSG00000166825_35 (sequence is synthesized)
gcatggtagggttcaagaaccagttcgccccagtgcctgaaagtgcactattaggaagttaatagactattgcctactggactcctggtcagggaaccttcaaaagcaaaacaaaaaacc

SEQ ID NO: 536480 - DNA, 120 bp, Artificial Sequence
  ENSG00000166825_36 (sequence is synthesized)
gagcgagactctgtctcaaaaacaaataaaggaaaaagaaaaaaatgagaagcgcgtgttcccgactccggtgctttttcgcaaggtcgtgctactgcgccttctgaactacgagtccca

SEQ ID NO: 536481 - DNA, 120 bp, Artificial Sequence
  ENSG00000166828_0 (sequence is synthesized)
gatgctagcccgagagcgagcagaggagcagcgcacccgcacgagccttggaccctttggaaccgaaagcacgcccgtcctcagagtcccgtcctcaaagtcccatcctcgccatggcac

SEQ ID NO: 536482 - DNA, 120 bp, Artificial Sequence
  ENSG00000166828_1 (sequence is synthesized)
ccggagagaagatcaaagccaaaatcaagaagaatctgcccgtgacgggccctcaggcgccgaccattaaagagctgatgcggtggtactgcctcaacaccaacacccatggctgtcgcc

SEQ ID NO: 536483 - DNA, 120 bp, Artificial Sequence
  ENSG00000166828_2 (sequence is synthesized)
gcatcgtggtgtcccgcggccgtctgcgccgcctcctctggatcgggttcacactgactgccgtggccctcatcctctggcagtgcgccctcctcgtcttctccttctatactgtctcag

SEQ ID NO: 536484 - DNA, 120 bp, Artificial Sequence
  ENSG00000166828_3 (sequence is synthesized)
tttccatcaaagtccacttccggaagctggattttcctgcagtcaccatctgcaacatcaacccctacaagtacagcaccgttcgccaccttctagctgacttggaacaggagaccagag

SEQ ID NO: 536485 - DNA, 120 bp, Artificial Sequence
  ENSG00000166828_4 (sequence is synthesized)
aggccctgaagtccctgtatggctttccagagtcccggaagcgccgagaggcggagtcctggaactccgtctcagagggaaagcagcctagattctcccaccggattccgctgctgatct

SEQ ID NO: 536486 - DNA, 120 bp, Artificial Sequence
  ENSG00000166828_5 (sequence is synthesized)
ttgatcaggatgagaagggcaaggccagggacttcttcacagggaggaagcggaaagtcggcggtagcatcattcacaaggcttcaaatgtcatgcacatcgagtccaagcaagtggtgg

SEQ ID NO: 536487 - DNA, 120 bp, Artificial Sequence
  ENSG00000166828_6 (sequence is synthesized)
gattccaactgtgctcaaatgacacctccgactgtgccacctacaccttcagctcgggaatcaatgccattcaggagtggtataagctacactacatgaacatcatggcacaggtgcctc

SEQ ID NO: 536488 - DNA, 120 bp, Artificial Sequence
  ENSG00000166828_7 (sequence is synthesized)
tggagaagaaaatcaacatgagctattctgctgaggagctgctggtgacctgcttctttgatggagtgtcctgtgatgccaggaatttcacgcttttccaccacccgatgcatgggaatt

SEQ ID NO: 536489 - DNA, 120 bp, Artificial Sequence
  ENSG00000166828_8 (sequence is synthesized)
gctatactttcaacaacagagaaaatgagaccattctcagcacctccatggggggcagcgaatatgggctgcaagtcattttgtacataaacgaagaggaatacaacccattcctcgtgt

SEQ ID NO: 536490 - DNA, 120 bp, Artificial Sequence
  ENSG00000166828_9 (sequence is synthesized)
cctccactggagctaaggtgatcatccatcggcaggatgagtatcccttcgtcgaagatgtgggaacagagattgagacagcaatggtcacctctataggaatgcacctgacagagtcct

SEQ ID NO: 536491 - DNA, 120 bp, Artificial Sequence
  ENSG00000166828_10 (sequence is synthesized)
tcaagctgagtgagccctacagtcagtgcacggaggacgggagtgacgtgccaatcaggaacatctacaacgctgcctactcgctccagatctgccttcattcatgcttccagacaaaga

SEQ ID NO: 536492 - DNA, 120 bp, Artificial Sequence
  ENSG00000166828_11 (sequence is synthesized)
tggtggagaaatgtgggtgtgcccagtacagccagcctctacctcctgcagccaactactgcaactaccagcagcaccccaactggatgtattgttactaccaactgcatcgagcctttg

SEQ ID NO: 536493 - DNA, 120 bp, Artificial Sequence
  ENSG00000166828_12 (sequence is synthesized)
tccaggaagagctgggctgccagtctgtgtgcaaggaagcctgcagctttaaagagtggacactaaccacaagcctggcacaatggccatctgtggtttcggagaagtggttgctgcctg

SEQ ID NO: 536494 - DNA, 120 bp, Artificial Sequence
  ENSG00000166828_13 (sequence is synthesized)
ttctcacttgggaccaaggccggcaagtaaacaaaaagctcaacaagacagacttggccaaactcttgatattctacaaagacctgaaccagagatccatcatggagagcccagccaaca

SEQ ID NO: 536495 - DNA, 120 bp, Artificial Sequence
  ENSG00000166828_14 (sequence is synthesized)
cccgccgccagtggcagaaagccaaggagtggtgggcctggaaacaggctcccccatgtccagaagctccccgtagcccacagggccaggacaatccagccctggatatagacgatgacc

SEQ ID NO: 536496 - DNA, 120 bp, Artificial Sequence
  ENSG00000166828_15 (sequence is synthesized)
tacccactttcaactctgctttgcacctgcctccagccctaggaacccaagtgcccggcacaccgccccccaaatacaataccttgcgcttggagagggccttttccaaccagctcacag

SEQ ID NO: 536497 - DNA, 120 bp, Artificial Sequence
  ENSG00000166828_16 (sequence is synthesized)
atacccagatgctggatgagctctgaggcagggttgagaagacagatctagtcaggaccaccagccatggtctaaggacatggatcgggtgcccccagacgtgtgcacaggggaccctct

SEQ ID NO: 536498 - DNA, 120 bp, Artificial Sequence
  ENSG00000166828_17 (sequence is synthesized)
gccccactctgggcttttcagatactctgaccaaaaagcctgctttaaaccgcaagatggggcctgggcatgcgcaggaggagccatcgggtactacgcagcaacactcacaactgtcca

SEQ ID NO: 536499 - DNA, 120 bp, Artificial Sequence
  ENSG00000166828_18 (sequence is synthesized)
ggctgagataaatcccgggacctgaactattagcacgtcactagagactgggagccgaggcagtggtgctggcccaagtgaaggccagagtgaggactgatgcagctctttacgggtctt

SEQ ID NO: 536500 - DNA, 120 bp, Artificial Sequence
  ENSG00000166828_19 (sequence is synthesized)
gagagggaaggactcttccaaagccccaaagccgagggtttcacccacactgccagcctgggttggggcccaaggatgtgaccttgagtgtcaaggctggacagctactgccagatgcca

SEQ ID NO: 536501 - DNA, 120 bp, Artificial Sequence
  ENSG00000166828_20 (sequence is synthesized)
aagataggagaaagtgccagccctgaagctggagccgtttgtgaataaactgttcttcatcattgacactggagaaaggtgtcctccatgccctcaggcagcagagaactggcccagagc

SEQ ID NO: 536502 - DNA, 120 bp, Artificial Sequence
  ENSG00000166828_21 (sequence is synthesized)
ccttggagtgttggtggagatcagagtgccgtggtggaggtctgggactatgtcagagtgtcctcactttggggcatgggtgggtccaggagatggatttagttattcaattttgtggat

SEQ ID NO: 536503 - DNA, 120 bp, Artificial Sequence
  ENSG00000166828_22 (sequence is synthesized)
gaataaattgaggcacagaaagattaagttaccggcccaaggtgacacagtgaggaggtggcagagctaggatttgaacccagacaatctgacttcatgattttgcatccaattcgtgtc

SEQ ID NO: 536504 - DNA, 120 bp, Artificial Sequence
  ENSG00000166828_23 (sequence is synthesized)
tgtgccttttaaagggtgaggtctgtgtcactttgggtggggagggggagcatggtgggccatgctctgggcagctgttccaagacagagctgacccttccattaccaatggcctgtccc

SEQ ID NO: 536505 - DNA, 120 bp, Artificial Sequence
  ENSG00000166828_24 (sequence is synthesized)
tcaccaacaagccaactgccacagatgacccacttcataccacattcacatctttccacctgaaatggctaacaggtattaaatccttggttggtgtttaaagccaacccaagaacaggg

SEQ ID NO: 536506 - DNA, 120 bp, Artificial Sequence
  ENSG00000166828_25 (sequence is synthesized)
tgttaggtactgttttaagcacctagataggttagcataggggactgcaaatggtgttccgcaaagcaaatcctgtttttgaccatgaactaagaattttattttattttattttttatt

SEQ ID NO: 536507 - DNA, 120 bp, Artificial Sequence
  ENSG00000166828_26 (sequence is synthesized)
attttattttattttttattttttgtagaaataggatctcactatgttgcccaggctgttcttgaactcctggcctcaaatgatcttcccacttcagcctcccaaagtgcagggattaca

SEQ ID NO: 536508 - DNA, 120 bp, Artificial Sequence
  ENSG00000166828_27 (sequence is synthesized)
gccaagaatttttatttttgcttttaaatagcaaaagaagaagattctgtgactcatgaaaatgatatgagattcgaattccagtgtctataaataaagttttattggtacacagccaca

SEQ ID NO: 536509 - DNA, 120 bp, Artificial Sequence
  ENSG00000166831_0 (sequence is synthesized)
gcactcgccggtcgcagtgaaaaggcggaggcggcggcccctccggctcccactgcctcccccgccgcaccccctccccaccttccgcacccgccaaacttgatgtgaccctggcccgac

SEQ ID NO: 536510 - DNA, 120 bp, Artificial Sequence
  ENSG00000166831_1 (sequence is synthesized)
aacttgatgtgaccctggcccgacgcggaggctgcccctctcactgccccgtgggtcccccgccacccgctccgcacccgcgagcgcaccgctccccgcgccccttcccacttcccgcgg

SEQ ID NO: 536511 - DNA, 120 bp, Artificial Sequence
  ENSG00000166831_2 (sequence is synthesized)
gttccttcccgccgccccctcccccgcaccatgagcaacctgaagccggacggcgagcacggcggcagcaccggcaccggctccggcgcgggctccggcggcgccctggaggaggaggtc

SEQ ID NO: 536512 - DNA, 120 bp, Artificial Sequence
  ENSG00000166831_3 (sequence is synthesized)
cggacactgtttgtcagcggcctccctgtggacattaaacccagagaactctacttgctcttccggccgttcaaggggtatgaagggtccctgatcaagctcactgcaagacagcctgtt

SEQ ID NO: 536513 - DNA, 120 bp, Artificial Sequence
  ENSG00000166831_4 (sequence is synthesized)
ggttttgtgatctttgacagccgtgcaggagcagaagcggccaagaatgcgctgaacggtattcgctttgatcccgaaaatccacagactctgaggctagagtttgccaaagccaacacc

SEQ ID NO: 536514 - DNA, 120 bp, Artificial Sequence
  ENSG00000166831_5 (sequence is synthesized)
aagatggccaagagcaagctaatggcaactccaaatcccagcaacgtgcaccccgccctaggagcacacttcatcgcacgggacccctatgacctgatgggggctgctctgatccctgca

SEQ ID NO: 536515 - DNA, 120 bp, Artificial Sequence
  ENSG00000166831_6 (sequence is synthesized)
tccccagaggcctgggccccctaccctttgtacaccacagagctgaccccagccatctcccatgctgcgttcacctacccaactgccactgccgctgccgccgccctccacgctcaggtg

SEQ ID NO: 536516 - DNA, 120 bp, Artificial Sequence
  ENSG00000166831_7 (sequence is synthesized)
cgctggtacccttcctctgacaccacccagcaaggatggaagtaccgtcagttctgttagtttttcagtctggtcaccggggaggtggttctggtaatctgtggtggtgccgggacaggc

SEQ ID NO: 536517 - DNA, 120 bp, Artificial Sequence
  ENSG00000166831_8 (sequence is synthesized)
ccctccctcctcttcctcaccttgttctgcaccctcaagcctttctccaatgcctcccaggaggatttggggactttctccctggggcgcccagatccagctcggaggcctcactgggac

SEQ ID NO: 536518 - DNA, 120 bp, Artificial Sequence
  ENSG00000166831_9 (sequence is synthesized)
ctggcaaggcctgacctcccgcccaaacttgcttctgtagctccccctcgaggaagtgaggtgtttaattttgcatgttttctggcatgaattaagacacttatacttgtatatatgagt

SEQ ID NO: 536519 - DNA, 120 bp, Artificial Sequence
  ENSG00000166831_10 (sequence is synthesized)
gtacagtttgttctcacactgtcaccatagcgacaggtcctggctcccagtggttcatcctgcctgcccctctctcctcgccccgcccctgcacccaccccgcttcagggaggcccaagt

SEQ ID NO: 536520 - DNA, 120 bp, Artificial Sequence
  ENSG00000166831_11 (sequence is synthesized)
tccgtggccccacacgcttccaggctcagctcccacctccacccaacagatagatggggtttgctttttcatttcacatggggctcctccgctcctgccttctcggatgggccaacagtc

SEQ ID NO: 536521 - DNA, 120 bp, Artificial Sequence
  ENSG00000166831_12 (sequence is synthesized)
gtaagaaagccctctctgcccgttctgttcacctctccacagcgcaccccgcccgccgctgctcctcattctttccaaacctcgaaaccaaccaaaacgtgagaagtatttttgtaccct

SEQ ID NO: 536522 - DNA, 120 bp, Artificial Sequence
  ENSG00000166831_13 (sequence is synthesized)
gtgtaacaaaatatttatgcatcataaaggatttttcatgtgcgtaccattaattattaaagcgacctcgttcgccctgtcagataagtttaatgtttagtttgaggcatgaagaagaaa

SEQ ID NO: 536523 - DNA, 120 bp, Artificial Sequence
  ENSG00000166831_14 (sequence is synthesized)
agggtttccattcttcagcagtacgcctttgtgtctggcatttgtttaagaaaatgaaatgaaggaaacactgtgcaatgttttttgttttgagcatatcagtgctttactgtcagccgc

SEQ ID NO: 536524 - DNA, 120 bp, Artificial Sequence
  ENSG00000166831_15 (sequence is synthesized)
agctgtgaccgtctggccatttcagacttgggagatgaggcggctgttgtcattgctgatcctgtgagaatgtgaaactggataatatatgaaatgcaaaataaaacaaaaccaaaatga

SEQ ID NO: 536525 - DNA, 120 bp, Artificial Sequence
  ENSG00000166833_0 (sequence is synthesized)
tctcatgatgccggcagcagtcaccctcattgcaaaggcagtggtgccgagtgaggttcccgagtggattttaagaagacaggaagacctttgaagaggtggtgctgatttccttggctg

SEQ ID NO: 536526 - DNA, 120 bp, Artificial Sequence
  ENSG00000166833_1 (sequence is synthesized)
gcgggaactctgtctggctgttgcatgcatcacttttgtgtgggttattttgttcctctgtggatttggaagcatcgctgaaggagagagaggattttatttctgggaaatggaatcggt

SEQ ID NO: 536527 - DNA, 120 bp, Artificial Sequence
  ENSG00000166833_2 (sequence is synthesized)
ttctgagtccagccaacagcagaagagaaagccagttatccacggactggaagatcaaaagaggatctacacagactgggccaatcattacctagccaaatccggccacaagcgtctcat

SEQ ID NO: 536528 - DNA, 120 bp, Artificial Sequence
  ENSG00000166833_3 (sequence is synthesized)
cagggatctccagcaagatgtgacagatggcgtcctcctggcccagattatccaggttgtggcaaatgaaaagattgaagacatcaatggctgtccgaagaacagatcccaaatgattga

SEQ ID NO: 536529 - DNA, 120 bp, Artificial Sequence
  ENSG00000166833_4 (sequence is synthesized)
aaacatagatgcctgcttgaatttcctggcagctaagggaataaacatccaggggctgtctgcagaagagatcaggaatggaaacctcaaggccattctaggcctcttcttcagcctctc

SEQ ID NO: 536530 - DNA, 120 bp, Artificial Sequence
  ENSG00000166833_5 (sequence is synthesized)
ccgatacaagcagcagcagcagcagccccagaagcagcacctctcctcacctctgccgcccgccgtatcccaggtggccggggccccctcccagtgccaggctggcacccctcagcagca

SEQ ID NO: 536531 - DNA, 120 bp, Artificial Sequence
  ENSG00000166833_6 (sequence is synthesized)
ggtgccagtcactccccaagccccgtgccagcctcaccagccagcgccacatcagcagtcaaaagcacaagctgaaatgcagtccagacttccaggtcctaccgcgagggtatccgctgc

SEQ ID NO: 536532 - DNA, 120 bp, Artificial Sequence
  ENSG00000166833_7 (sequence is synthesized)
aggcagcgaggccaaaacacgcggagggtcaactactgctaacaaccgacgcagccagagctttaacaactatgataaatccaaaccagtcacctccccacccccaccgccaagcagcca

SEQ ID NO: 536533 - DNA, 120 bp, Artificial Sequence
  ENSG00000166833_8 (sequence is synthesized)
cgagaaagagcctttggcaagttcagcctcctcccaccccggaatgagtgacaatgcacctgcttccttggagagcggcagcagctccacccctactaattgcagtacctcctcggccat

SEQ ID NO: 536534 - DNA, 120 bp, Artificial Sequence
  ENSG00000166833_9 (sequence is synthesized)
cccgcagcccggtgcagccaccaagccttggcgcagcaaatccctcagcgtgaagcacagtgccacggtatccatgctctcggtcaagcctcctgggcctgaggcccccaggcccacacc

SEQ ID NO: 536535 - DNA, 120 bp, Artificial Sequence
  ENSG00000166833_10 (sequence is synthesized)
tgaagccatgaagccggcccccaacaatcagaagtccatgctggaaaagctgaaacttttcaacagtaaagggggctcaaaggcaggtgaggggccggggtcccgggacacaagctgtga

SEQ ID NO: 536536 - DNA, 120 bp, Artificial Sequence
  ENSG00000166833_11 (sequence is synthesized)
gcggctggagactctgcccagcttcgaagagagcgaggagctggaggccgccagtcgcatgctcaccaccgtgggccctgcttccagcagccccaagattgcactcaagggcattgccca

SEQ ID NO: 536537 - DNA, 120 bp, Artificial Sequence
  ENSG00000166833_12 (sequence is synthesized)
gaggacttttagccgggcactgaccaacaagaagagttctctgaaaggcaatgagaaagagaaggagaaacaacagcgggagaaggataaggagaaaagcaaggaccttgccaagagagc

SEQ ID NO: 536538 - DNA, 120 bp, Artificial Sequence
  ENSG00000166833_13 (sequence is synthesized)
ctctgtgacggagaggctggacctcaaggaggagccaaaagaagaccccagtggagcagctgtgcccgagatgccaaaaaagtcctccaagattgccagcttcatccccaaaggggggaa

SEQ ID NO: 536539 - DNA, 120 bp, Artificial Sequence
  ENSG00000166833_14 (sequence is synthesized)
gctcaacagtgccaagaaggagcccatggccccttcccacagtggaataccaaaaccaggaatgaaaagcatgcccgggaaatccccaagtgccccagcgccttccaaggaaggggagcg

SEQ ID NO: 536540 - DNA, 120 bp, Artificial Sequence
  ENSG00000166833_15 (sequence is synthesized)
gagccggagtgggaagctgagctcaggactcccccagcagaagccccagctggacggcagacactccagttcctcttccagcctggcgtcctcagaaggaaaaggcccaggagggaccac

SEQ ID NO: 536541 - DNA, 120 bp, Artificial Sequence
  ENSG00000166833_16 (sequence is synthesized)
cctgaaccacagcatcagcagccagactgtcagtgggtctgtcgggaccacccagaccacaggaagcaataccgtcagtgttcagctacctcagccccagcagcaatacaaccatcccaa

SEQ ID NO: 536542 - DNA, 120 bp, Artificial Sequence
  ENSG00000166833_17 (sequence is synthesized)
cactgccacggttgcacctttcctgtacaggtctcagacggacactgaagggaatgttactgccgagtcaagctcaacaggtgtgagcgtggagcccagccacttcaccaagactggaca

SEQ ID NO: 536543 - DNA, 120 bp, Artificial Sequence
  ENSG00000166833_18 (sequence is synthesized)
gcctgctctggaagaactcactggggaagatcctgaggctcggcggctgcggacagtgaagaacatcgctgatctgcggcagaatttggaggaaaccatgtccagtttaaggggaactca

SEQ ID NO: 536544 - DNA, 120 bp, Artificial Sequence
  ENSG00000166833_19 (sequence is synthesized)
ggttacacacagcacattggaaaccacgtttgacaccaatgtcaccacggagatgagtggccgtagcatactcagcttgacagggaggcccacacctctgtcctggagactgggccagtc

SEQ ID NO: 536545 - DNA, 120 bp, Artificial Sequence
  ENSG00000166833_20 (sequence is synthesized)
cagccctcggctccaagcaggagacgccccctcaatgggcaatgggtatccccctcgagccaacgccagcaggttcatcaacactgagtcaggtcgctatgtgtactccgcccctctgag

SEQ ID NO: 536546 - DNA, 120 bp, Artificial Sequence
  ENSG00000166833_21 (sequence is synthesized)
aaggcagctggcctcccggggcagtagtgtctgccatgtggacgtctcagacaaggcaggagatgagatggacctggaaggcatcagcatggatgcccccggctacatgagcgacgggga

SEQ ID NO: 536547 - DNA, 120 bp, Artificial Sequence
  ENSG00000166833_22 (sequence is synthesized)
tgttctgagcaagaacatccggaccgatgacattacaagcggatacatgactgatggtggacttggcctctatacccgtcgcctgaaccggctccctgatgggatggctgtggtacggga

SEQ ID NO: 536548 - DNA, 120 bp, Artificial Sequence
  ENSG00000166833_23 (sequence is synthesized)
gaccctgcaacgaaatacctccctgggcctcggagacgctgacagctgggacgacagcagctccgtcagcagcggcatcagcgacaccatagacaacctcagcactgatgacatcaacac

SEQ ID NO: 536549 - DNA, 120 bp, Artificial Sequence
  ENSG00000166833_24 (sequence is synthesized)
cagctcctccatcagctcttatgccaacacacctgcctcctctcgaaaaaacctggatgtgcagactgatgctgagaagcactcacaggtggagaggaattccctgtggtctggtgatga

SEQ ID NO: 536550 - DNA, 120 bp, Artificial Sequence
  ENSG00000166833_25 (sequence is synthesized)
tgtcaagaaatcagacggaggctcagacagcggcataaaaatggagccaggttccaagtggaggcggaatccttctgatgtgtctgacgagtccgacaaaagcacgtcgggcaagaagaa

SEQ ID NO: 536551 - DNA, 120 bp, Artificial Sequence
  ENSG00000166833_26 (sequence is synthesized)
tcctgtcatctcccagacaggctcatggcggcgaggcatgacagctcaggtgggcatcaccatgccaaggacgaagccttcagccccggcaggcgcactgaagaccccaggaactggaaa

SEQ ID NO: 536552 - DNA, 120 bp, Artificial Sequence
  ENSG00000166833_27 (sequence is synthesized)
aacagacgacgcaaaggtgtctgagaaaggaaggctttctcctaaagcctcccaggtgaagcgctccccatcagatgcaggccggagcagtggtgacgaatccaaaaagcccctccccag

SEQ ID NO: 536553 - DNA, 120 bp, Artificial Sequence
  ENSG00000166833_28 (sequence is synthesized)
cagctctaggacacctactgccaatgccaacagctttgggttcaagaagcagagtggttccgccgccggcctggccatgatcacagccagcggggtgactgtcaccagcaggtcagccac

SEQ ID NO: 536554 - DNA, 120 bp, Artificial Sequence
  ENSG00000166833_29 (sequence is synthesized)
actgggcaaaatcccaaagtcatctgcactcgtcagtcggtctgctggtcggaagtcaagtatggatggggctcagaatcaggatgacgggtatctagccctaagctcccggacaaacct

SEQ ID NO: 536555 - DNA, 120 bp, Artificial Sequence
  ENSG00000166833_30 (sequence is synthesized)
tcagtaccggagtttgccgaggcccagtaagtccaacagccggaacggggctgggaacaggtctagcaccagcagcatagattccaacattagcagcaagtccgcaggcctgccagtgcc

SEQ ID NO: 536556 - DNA, 120 bp, Artificial Sequence
  ENSG00000166833_31 (sequence is synthesized)
caaactgagggagccttccaaaacagccctaggcagctctctaccaggtctggtcaaccaaacagacaaggagaaaggcatctcatcagacaacgagagtgtggcttcctgtaactcggt

SEQ ID NO: 536557 - DNA, 120 bp, Artificial Sequence
  ENSG00000166833_32 (sequence is synthesized)
gaaagtgaatccggcagcccagcctgtgtccagtccggctcagaccagtctccagcctggagccaagtacccagatgtggcctctcccacactccgcagactctttggtgggaagcctac

SEQ ID NO: 536558 - DNA, 120 bp, Artificial Sequence
  ENSG00000166833_33 (sequence is synthesized)
caagcaagtgcccatcgccacagctgaaaacatgaaaaattcggtggtcatctccaatcctcatgccaccatgactcagcaaggtaacctagactccccgtcaggcagtggcgtcctgag

SEQ ID NO: 536559 - DNA, 120 bp, Artificial Sequence
  ENSG00000166833_34 (sequence is synthesized)
cagtgggagcagcagtcctctctacagcaagaatgtggacctcaaccagtctccgctagcctccagccccagctcagcccactcggccccttccaacagcctcacctggggcaccaacgc

SEQ ID NO: 536560 - DNA, 120 bp, Artificial Sequence
  ENSG00000166833_35 (sequence is synthesized)
cagcagctcctccgcagttagcaaggatggcctgggctttcagtctgtcagcagcctccacaccagctgtgagtccatcgacatctccctcagcagtggaggggtccccagccacaattc

SEQ ID NO: 536561 - DNA, 120 bp, Artificial Sequence
  ENSG00000166833_36 (sequence is synthesized)
ttccactggcctcatcgcctcctccaaggacgactccttgactccctttgtcagaactaacagtgtgaagaccacactgtcagaaagccctctctcttcccctgctgctagccctaagtt

SEQ ID NO: 536562 - DNA, 120 bp, Artificial Sequence
  ENSG00000166833_37 (sequence is synthesized)
ctgcagaagtactctgcccaggaaacaggacagtgacccgcaccttgataggaacactttgcctaagaaaggactcaggtatactcccacctcccagcttcgcacgcaagaagatgcaaa

SEQ ID NO: 536563 - DNA, 120 bp, Artificial Sequence
  ENSG00000166833_38 (sequence is synthesized)
agaatggttacggtcccattctgcaggaggccttcaggacaccgctgccaattcccccttttcctctggctccagcgtgacttctccctccggaacaagattcaacttttcccagcttgc

SEQ ID NO: 536564 - DNA, 120 bp, Artificial Sequence
  ENSG00000166833_39 (sequence is synthesized)
gagtcccaccactgtcacccagatgagcttgtccaacccgaccatgctgaggactcacagcctctccaatgctgatgggcagtatgatccatacactgacagccgcttccggaatagctc

SEQ ID NO: 536565 - DNA, 120 bp, Artificial Sequence
  ENSG00000166833_40 (sequence is synthesized)
catgtccctggatgagaagagcagaaccatgagccgttcaggctcattccgggatgggtttgaagaagttcatggatcctcactctccttggtttccagcacatcgtcagtttattctac

SEQ ID NO: 536566 - DNA, 120 bp, Artificial Sequence
  ENSG00000166833_41 (sequence is synthesized)
accagaagaaaaatgccagtcagagattcgcaagctgcggcgggaactggatgcctcccaggagaaagtttcagctttgaccacccagctgacagcaaatgctcaccttgtggcagcctt

SEQ ID NO: 536567 - DNA, 120 bp, Artificial Sequence
  ENSG00000166833_42 (sequence is synthesized)
tgaacagagtcttggtaacatgacaatcaggctccagagtctgaccatgacagctgagcagaaggactcagaactgaatgagttaagaaaaaccattgagctgctaaagaaacagaacgc

SEQ ID NO: 536568 - DNA, 120 bp, Artificial Sequence
  ENSG00000166833_43 (sequence is synthesized)
agctgcccaggctgccattaatggagtaattaacacacctgagctcaactgcaaaggaaacggcactgcccagtctgcagacctccgcatccgcaggcagcactcctcagacagcgtctc

SEQ ID NO: 536569 - DNA, 120 bp, Artificial Sequence
  ENSG00000166833_44 (sequence is synthesized)
tcgggaagaagaagtccccaaaatctgcgtcctctcattcagatattgaggagatgacggattcttctttgccttcctcaccaaagttaccgcacaatgggtccacaggttccaccccac

SEQ ID NO: 536570 - DNA, 120 bp, Artificial Sequence
  ENSG00000166833_45 (sequence is synthesized)
tgctgaggaattctcactccaactctctaatttcagaatgcatggatagtgaagctgagaccgtcatgcagctccgaaatgagttaagagacaaggagatgaagctgacggatatccgct

SEQ ID NO: 536571 - DNA, 120 bp, Artificial Sequence
  ENSG00000166833_46 (sequence is synthesized)
tagaagctctcagttctgcccaccagctggaccagctccgggaggccatgaacaggatgcagagtgaaatagagaagctgaaagctgagaatgatcggctgaagtcagagtctcaaggca

SEQ ID NO: 536572 - DNA, 120 bp, Artificial Sequence
  ENSG00000166833_47 (sequence is synthesized)
gtggctgcagccgggctccttcccaagtgtccatctctgcctccccgaggcagtccatgggcctctcccagcacagcttgaacctcactgagtcaaccagcctggacatgttgctggatg

SEQ ID NO: 536573 - DNA, 120 bp, Artificial Sequence
  ENSG00000166833_48 (sequence is synthesized)
acactggtgaatgctcggctcggaaggaaggaggcaggcatgttaagatagttgtcagctttcaggaggaaatgaagtggaaggaggattccagaccacatctctttcttattggctgca

SEQ ID NO: 536574 - DNA, 120 bp, Artificial Sequence
  ENSG00000166833_49 (sequence is synthesized)
ttggagttagtggcaagacgaagtgggatgtgctcgatggggtggttagacggctgttcaaagaatacatcattcatgtcgacccagtgagtcagctagggctgaattcagacagcgttc

SEQ ID NO: 536575 - DNA, 120 bp, Artificial Sequence
  ENSG00000166833_50 (sequence is synthesized)
ttggctacagcattggagaaatcaagcgcagcaacacttccgaaacaccggagctgcttccttgtggctatctggttggagagaacacgaccatctcagtgactgtgaaagggctcgcag

SEQ ID NO: 536576 - DNA, 120 bp, Artificial Sequence
  ENSG00000166833_51 (sequence is synthesized)
aaaacagcctggactcactggtgtttgagtccttgattcccaagcccatcctgcagcgctacgtctccctcctgatagagcaccgtcggatcattctctctggccccagcggcactggga

SEQ ID NO: 536577 - DNA, 120 bp, Artificial Sequence
  ENSG00000166833_52 (sequence is synthesized)
aaacctacctggccaaccggctgtctgagtatatagtgcttcgagagggacgggagttgacagacggggttatcgccacctttaacgtggaccataagtccagcaaggaattgcgccagt

SEQ ID NO: 536578 - DNA, 120 bp, Artificial Sequence
  ENSG00000166833_53 (sequence is synthesized)
acctgtccaaccttgctgaccagtgcaacagtgagaacaatgctgtggacatgcccctcgtcatcatcctggacaacctacaccacgtgagctctctgggagagatcttcaatgggctgc

SEQ ID NO: 536579 - DNA, 120 bp, Artificial Sequence
  ENSG00000166833_54 (sequence is synthesized)
tcaactgcaagtaccacaaatgcccttacataattggcacaatgaaccaggctacctcttcgactcccaacctgcagcttcaccataacttcagatgggtgctttgtgccaaccacacgg

SEQ ID NO: 536580 - DNA, 120 bp, Artificial Sequence
  ENSG00000166833_55 (sequence is synthesized)
agcctgtgaagggtttccttggccgattcctgaggaggaagctcatggaaacagagatcagtgggcgggtgcgcaatatggagctggtaaaaatcattgactggattcccaaggtctggc

SEQ ID NO: 536581 - DNA, 120 bp, Artificial Sequence
  ENSG00000166833_56 (sequence is synthesized)
atcacctcaaccgcttcctggaggctcacagttcctcggacgtcaccatcggcccccggctcttcctgtcatgccccatcgatgtggacggctcgagagtgtggttcaccgacttgtgga

SEQ ID NO: 536582 - DNA, 120 bp, Artificial Sequence
  ENSG00000166833_57 (sequence is synthesized)
actattccattatcccctatctcctggaagccgtcagagaaggactccagctctatggaaggcgcgccccctgggaggatcctgccaagtgggtgatggacacatatccatgggcagcca

SEQ ID NO: 536583 - DNA, 120 bp, Artificial Sequence
  ENSG00000166833_58 (sequence is synthesized)
gcccacaacagcacgagtggcctcccctgctgcagttacggcctgaggatgtcggcttcgacggctactccatgcctcgggagggatcgacaagcaagcagatgccccccagtgatgctg

SEQ ID NO: 536584 - DNA, 120 bp, Artificial Sequence
  ENSG00000166833_59 (sequence is synthesized)
aaggtgacccgctgatgaacatgctgatgaggctgcaggaggcagccaactactccagcccccagagctatgacagcgactccaacagcaacagccatcacgatgacatcttggactcct

SEQ ID NO: 536585 - DNA, 120 bp, Artificial Sequence
  ENSG00000166833_60 (sequence is synthesized)
ctttggagtccactctgtgacaggggcccggagcccagcgccctcctcttctcctcaccgcattccacctgcatcccccacatcaccctgaagatgacttcctgagccagcccccagcca

SEQ ID NO: 536586 - DNA, 120 bp, Artificial Sequence
  ENSG00000166833_61 (sequence is synthesized)
cagccttagagctgcgggaacaccgagaccccccgtccttcagcctcgacctgggtgcaggcatcccgggccagctgcctgcggaccgcttccttccacagcgagaactgcactaccttc

SEQ ID NO: 536587 - DNA, 120 bp, Artificial Sequence
  ENSG00000166833_62 (sequence is synthesized)
tgttgtactttaattattgttttgccttgttgctgtgacctccctaagacactgaagatacttctcgggaaaggatcatcgccgttgaaatgaaaagagagacagagagaaaaaaaaaaa

SEQ ID NO: 536588 - DNA, 120 bp, Artificial Sequence
  ENSG00000166833_63 (sequence is synthesized)
gagaacccacatgaagctctgaaaccaaacagcatcctgccatgagcttcccagagacagaagagactggagcaaagtcggaaacacagagaagcacggcttcccctcagcacagaccct

SEQ ID NO: 536589 - DNA, 120 bp, Artificial Sequence
  ENSG00000166833_64 (sequence is synthesized)
ccagactgggtctcagagccgtgccacccaccctcccacacagccggccacagggagaactggtgctaaccagggtgcttgctttggtcacgttcaacgcactacagagctacgacacag

SEQ ID NO: 536590 - DNA, 120 bp, Artificial Sequence
  ENSG00000166833_65 (sequence is synthesized)
ggaaaccttaggagcaaataaaccgtgctttcatgttttttaaatggtgctttccttacccgagaggtattttgcctgttccaatcaaaccaccccattcaggtccatcagcctctgatt

SEQ ID NO: 536591 - DNA, 120 bp, Artificial Sequence
  ENSG00000166833_66 (sequence is synthesized)
aatatccgtgagagtgagtgacggagtgagagtgtgagcgagtggatgtggctgtcagtgcagaacagcatgtgtctctttccttctgatatatgaatgaatcaggtttttttttttttt

SEQ ID NO: 536592 - DNA, 120 bp, Artificial Sequence
  ENSG00000166833_67 (sequence is synthesized)
tttctgcaaacactgtgtatagtgagacttgttctactttggagaacaggttaccttttgaaaatgaggttgagtttcttcctttctgatgcattgatttttgaagatttttttttcccc

SEQ ID NO: 536593 - DNA, 120 bp, Artificial Sequence
  ENSG00000166833_68 (sequence is synthesized)
cttcccctcttggtcagaatcaatcctttggtgaaagtaagaaccgcaggagttgagttttggtttggtcctgctcagttttggtttttagttgtccatcctcacagtcctacacactcg

SEQ ID NO: 536594 - DNA, 120 bp, Artificial Sequence
  ENSG00000166833_69 (sequence is synthesized)
cctcctcctgctagggctgggggtatctgtgtcctttaaaatggatgaggacctggtcctcgacatgtgggtgagccatggaccttgccttcccttctcgtccttgagggtttagaacac

SEQ ID NO: 536595 - DNA, 120 bp, Artificial Sequence
  ENSG00000166833_70 (sequence is synthesized)
acaccaacacctccagcgtccccgccccagcttccggtggggtgatgcggtcaccctgcaaaagacttgcactttcctcagaaccaacatgacgcagctcaataagggtgagggtcactc

SEQ ID NO: 536596 - DNA, 120 bp, Artificial Sequence
  ENSG00000166833_71 (sequence is synthesized)
cctcccagaagccccgtctggacgagccttgcctgacctcttcggtgctgaccttcccaaagtgatgccttactggttttgtactaactgtgttcattttacataagtgtcgtgcctgcc

SEQ ID NO: 536597 - DNA, 120 bp, Artificial Sequence
  ENSG00000166833_72 (sequence is synthesized)
tggggtttgttttttttgtcattgttttccccattgaaacaaacagggctaaaaagtcatctgttcattaggagaactcaagttgctgtgacttttctcatccaaaagactcatttgtgt

SEQ ID NO: 536598 - DNA, 120 bp, Artificial Sequence
  ENSG00000166833_73 (sequence is synthesized)
ggatgcgtgaccatgggaaaaagaaaaaaaaaaagatccattttttaggttcttttcggtctccagctgacaacccaactggacaatgatctgtctggtgcaggagaaggcaaaagtttc

SEQ ID NO: 536599 - DNA, 120 bp, Artificial Sequence
  ENSG00000166833_74 (sequence is synthesized)
tacaagtctacatgaccttgctgatacttgttctaatagaaacccagtctgctgtgtcttcaacatactggtattttcattacaaagtatggtaaatttttgagttgtttgtttctgttt

SEQ ID NO: 536600 - DNA, 120 bp, Artificial Sequence
  ENSG00000166833_75 (sequence is synthesized)
tgtaaagagaatccttattggacaccagtgaaggtgtctctgttttaatgatcagggtttttattccatcttttgcatttcttctatttctgaaggtttgtctcttggcatcttttttta

SEQ ID NO: 536601 - DNA, 120 bp, Artificial Sequence
  ENSG00000166833_76 (sequence is synthesized)
gtttcttaccataagagtttgacccgaaactgctcacttcacattggatgacaccatgttcttcctctttgaaaagaaaaggggaatgtgtcccactagtgaaaggaaaacttttcaaca

SEQ ID NO: 536602 - DNA, 120 bp, Artificial Sequence
  ENSG00000166833_77 (sequence is synthesized)
ctatccctgctttagtctcagcaaactcagactattctgcttagccttcattagtcatctgggtgtgagtgtgtcttgttctgtttttctttttaataaaacttttaaaccatatattta

SEQ ID NO: 536603 - DNA, 120 bp, Artificial Sequence
  ENSG00000166833_78 (sequence is synthesized)
gcctgtgaccaggggggccaaaccctaagatttctggtaaacctgaagggtggccctcctcagacaatttatctcccagcaatgaccctactacactcgcgtactgtgaatttgggagga

SEQ ID NO: 536604 - DNA, 120 bp, Artificial Sequence
  ENSG00000166833_79 (sequence is synthesized)
ggtaaagttgacttctcctcgtgggcagttttccaatcaccttgtgagtagacacctgccaatattgtttgaaacctttttttaatatgacatcctctcttgtcattctcttctcccctt

SEQ ID NO: 536605 - DNA, 120 bp, Artificial Sequence
  ENSG00000166833_80 (sequence is synthesized)
tcccacagacttccctcctgggtccaggttcagaaccaagacttctgtacctagtgctgcctgattggtgaacattgacttcaagtagcatagcccttgtgtgactcacaactccgtgtc

SEQ ID NO: 536606 - DNA, 120 bp, Artificial Sequence
  ENSG00000166833_81 (sequence is synthesized)
cttcctaaagtttcgggaagcagggttgtctaatatgcacatttcttattttggtcatatttttactttagtgtcactcaccttttacaaagtgactttgtactcatttagggctctatc

SEQ ID NO: 536607 - DNA, 120 bp, Artificial Sequence
  ENSG00000166833_82 (sequence is synthesized)
ggaaatgcttccattttgccttttctacagttaggccaattttgaaatatataaattctatgcaacatttatgttgagttaccaatggaagccaaaagttctcttcccaaactgccaaga

SEQ ID NO: 536608 - DNA, 120 bp, Artificial Sequence
  ENSG00000166833_83 (sequence is synthesized)
atgatacaggccataattgaaatgggaataccttttaagtttcattaggggtggggtgggagtgggacaggaacaagacttgcctagatctttgttgtatcttggggacttttactttgt

SEQ ID NO: 536609 - DNA, 120 bp, Artificial Sequence
  ENSG00000166833_84 (sequence is synthesized)
tgtttgatgcttaaacttcaaaattctctgtattcaaatttgattgtggcgaatctacttcaaaaaggaaaaataatccaactttgtggatattaaatggaaggtttgctgttttgatct

SEQ ID NO: 536610 - DNA, 120 bp, Artificial Sequence
  ENSG00000166833_85 (sequence is synthesized)
agttgtttccagtggagcagttttatgaaatatgttctataagatgtacattttttcattgtaacatagaaattgtaaataattgattaaagtgctgcattttgatgaattttttctagc

SEQ ID NO: 536611 - DNA, 120 bp, Artificial Sequence
  ENSG00000166833_86 (sequence is synthesized)
catttttaaagagaaaactaggaattgagtattttgtgtacggtatgtttccatcctccctccccttcctcctcccctcctctctctctcttcctacctatttaattttcatttgtcatg

SEQ ID NO: 536612 - DNA, 120 bp, Artificial Sequence
  ENSG00000166833_87 (sequence is synthesized)
aggtttttggatttgccaatgatctgctggacatcatgccccatgtcatagagaataaagctgatgattgtaccagtcttaaattattcatgattcaataaaattgatgcttatttattc

SEQ ID NO: 536613 - DNA, 120 bp, Artificial Sequence
  ENSG00000166833_88 (sequence is synthesized)
agacactcccagagagggcatgggacgttgactgctgaggactgcgctgctgctgtgggttgagccatgcctgtaagcatcaacttatgggttcccgctcggggtcaaagtcgggattcc

SEQ ID NO: 536614 - DNA, 120 bp, Artificial Sequence
  ENSG00000166833_89 (sequence is synthesized)
tgatctacacagactgggccaatcattacctagccaaatccggccacaagcgtctcatcagggatctccagcaagatgtgacagatggcgtcctcctggcccagattatccaggttgtgg

SEQ ID NO: 536615 - DNA, 120 bp, Artificial Sequence
  ENSG00000166833_90 (sequence is synthesized)
cttcccgggaagcgcggcggccgctcccgagcgcagccctgcccggcccgccagccgcgcgtcccggcgcccgcgccccacggccacagccttgcctctatctagctcacggagcatgtg

SEQ ID NO: 536616 - DNA, 120 bp, Artificial Sequence
  ENSG00000166833_91 (sequence is synthesized)
cacagccttgcctctatctagctcacggagcatgtgcagacccgcaggcgctaaggtgctctcagtccgggggccttctgggcagcggtgactgtcaccccaagagagacctttcggggg

SEQ ID NO: 536617 - DNA, 120 bp, Artificial Sequence
  ENSG00000166833_92 (sequence is synthesized)
ctcttgccgcacctctgctgcgtcgcgggtgacactgcggtgctcgcgagcagggtggcagctgcctctcggtggagacgtcttgggacccttgcgcccttcttctctccttccttcgct

SEQ ID NO: 536618 - DNA, 120 bp, Artificial Sequence
  ENSG00000166833_93 (sequence is synthesized)
gctgtctcctttccttccttggctgctcgctctttctctcgccggctcagacccgtagcctccggaacgggactcgtgggtcgccgccgcctctgtctcttccaaaggggcctcctcact

SEQ ID NO: 536619 - DNA, 120 bp, Artificial Sequence
  ENSG00000166833_94 (sequence is synthesized)
tcggagatgcagtgacaagttaatatgggcgtccaagcctctgtttcccaggaggaaatttgcaagaggcggcagcccctgagcgcccagagctcttgaaaggccacccaggagaggtgt

SEQ ID NO: 536620 - DNA, 120 bp, Artificial Sequence
  ENSG00000166833_95 (sequence is synthesized)
gagacccggcggcagcatccgtccaggtgggacccgctgagcgccgtggccagtcccccattcccatcccggcaccccaaaggcgcgctcgcccgattgcttcgagttccccgacctggg

SEQ ID NO: 536621 - DNA, 120 bp, Artificial Sequence
  ENSG00000166833_96 (sequence is synthesized)
gattttttttttagccgctggtggtgggcgcctcgtgggctaaggcccggcgcctgctctgctacccgcgctgcctttagcggtcgcccccgccgccgctgccagggacgtgctgggaaa

SEQ ID NO: 536622 - DNA, 120 bp, Artificial Sequence
  ENSG00000166833_97 (sequence is synthesized)
gcccaagccccgggagaagatgccggccatcctggtcgcctccaaaatgaagtcgggactgcccaaacccgtgcacagcgccgcgcccatcctgcacgtgcccccggcccgggcgggccc

SEQ ID NO: 536623 - DNA, 120 bp, Artificial Sequence
  ENSG00000166833_98 (sequence is synthesized)
ccagccctgctacctgaagttgggaagcaaggtggaggtgagcaagaccacctatcctagccagatccccctgaaatcgcaggtgctgcaggggctgcaggagccagcgggggaggggct

SEQ ID NO: 536624 - DNA, 120 bp, Artificial Sequence
  ENSG00000166833_99 (sequence is synthesized)
tcaaaagcacaagctgaaatgcagtccagtgcatcatccaaggactcatctcaaagcaaaatcatccgcttcactctgggtcagaaaaagatctctagacttccaggtcctaccgcgagg

SEQ ID NO: 536625 - DNA, 120 bp, Artificial Sequence
  ENSG00000166833_100 (sequence is synthesized)
catgggagaaaagttctgtggacaactttgtcagccgtcttcacagctcacttcatttctctcttcctttgttccatcacgcaaggtatgagttagttcatggatcctcactctccttgg

SEQ ID NO: 536626 - DNA, 120 bp, Artificial Sequence
  ENSG00000166833_101 (sequence is synthesized)
cgtgagccactgcgcatgggcttccatttttaaaaatcaagattagtgatgccacagtgagcatcttccccataaagcctttcctggaggagggagacccccaggtggaatcagggatca

SEQ ID NO: 536627 - DNA, 120 bp, Artificial Sequence
  ENSG00000166833_102 (sequence is synthesized)
agggctagtatacctgcgttcaggcctcagccctgccatccctcagaacgtctagggtccctcctgtgaagggtgctcggaccatggcttcacctgatgccccatcacccatgcccattt

SEQ ID NO: 536628 - DNA, 120 bp, Artificial Sequence
  ENSG00000166833_103 (sequence is synthesized)
cccgctgccatagcaccacgctggtgctctctcatggccaggatgtgggaggggctgttcacctcggttgtgctagattgcattgctgcctgattgacatcaccaaacaccccttgcccc

SEQ ID NO: 536629 - DNA, 120 bp, Artificial Sequence
  ENSG00000166833_104 (sequence is synthesized)
atattgaatctcagttgactccacctctcctgcctgggcccttagaggtggatgtgaaggtgtctcctgggctaggacccccggctcatttccactggccattctatgggcatctctgag

SEQ ID NO: 536630 - DNA, 120 bp, Artificial Sequence
  ENSG00000166833_105 (sequence is synthesized)
ggagatctattgaaagtgggtctgtatgtaattaccagagaaatgttgactcctccagcacactgagagcatggctcacctctgcatttaggctgtcctggtcttgttcatgctttcccc

SEQ ID NO: 536631 - DNA, 120 bp, Artificial Sequence
  ENSG00000166833_106 (sequence is synthesized)
taattatccctcaagtccatcgtcctcctctttccccctatcactgccccatcatcacccagcacaccattgccatcacctagctggtacgtctgcttgcagctttccccctgcactctg

SEQ ID NO: 536632 - DNA, 120 bp, Artificial Sequence
  ENSG00000166833_107 (sequence is synthesized)
tagccaatcctctgcactgtggcagccagaccagagtgagcattctagagtacacatctgaccatagaactctcgtgcttaaagtccttcagtagctccagctccctatggcctgcagga

SEQ ID NO: 536633 - DNA, 120 bp, Artificial Sequence
  ENSG00000166833_108 (sequence is synthesized)
tgaaatccagactccgttggttggcaggtcaagtatgaacttcagctacactaaacctctggtagtttccccaaacatccatgctatttcccatgcctttgcaaaggctgcagcatcacc

SEQ ID NO: 536634 - DNA, 120 bp, Artificial Sequence
  ENSG00000166833_109 (sequence is synthesized)
ccactcctgaccccaacaactgctcctgcctttccttatgttgctgcccattatctgtccagtctcagcccagacatcccctcctctaaggagccttccctgattcccttaggcttcatc

SEQ ID NO: 536635 - DNA, 120 bp, Artificial Sequence
  ENSG00000166833_110 (sequence is synthesized)
atatttcatttctttctttgcctgtctgcctcctccaccagactgtgagctcctgggaaccaggacggtgtcttagtcatagtgatagttccatagcctagcaccgggcctgacatcaag

SEQ ID NO: 536636 - DNA, 120 bp, Artificial Sequence
  ENSG00000166833_111 (sequence is synthesized)
cacaagaggcagtttgtctcagtggttagagcctagcctctggagccaggcttcttggttctcatcttagctcttcaattaactagctgtttgatcctggaaaagttacatgacctgtct

SEQ ID NO: 536637 - DNA, 120 bp, Artificial Sequence
  ENSG00000166833_112 (sequence is synthesized)
catttctgtccgtaaaacggaggtggagataatatctatgttagagggttggtatcaggaactgtgagttaatacatagttacaatgtttagaagagtgttcggtgcatagctaatccaa

SEQ ID NO: 536638 - DNA, 120 bp, Artificial Sequence
  ENSG00000166833_113 (sequence is synthesized)
tttgttgcattagcatatacaccttctgtttctaacgtgctttggttcctgaggtcagccatcatttggatcaccatcatcagcttgaaaagtgtttctgacttcctccagatgggtgct

SEQ ID NO: 536639 - DNA, 120 bp, Artificial Sequence
  ENSG00000166833_114 (sequence is synthesized)
acttttcacagctgacttgataccagcactgaggcctgacctctcgatccttcagcacttcagaggttaattttgttgggggatcggatttctttcctggcctggggaatggtgatccct

SEQ ID NO: 536640 - DNA, 120 bp, Artificial Sequence
  ENSG00000166833_115 (sequence is synthesized)
gctagctagtcctttagttacagagttgctgggtgcctgggattccctggcccagtgtgggctggctcagctggctaaaggacttgccatcctgtgagattcattcagcttctttgtccg

SEQ ID NO: 536641 - DNA, 120 bp, Artificial Sequence
  ENSG00000166833_116 (sequence is synthesized)
tctcttggattgcacacgctgggattgtctcctacgagcatgtctgcgccctcacagcctgtcccgggacagcgtggtccgcgtcccccgagcccccattgtgtcttgatactttggggt

SEQ ID NO: 536642 - DNA, 120 bp, Artificial Sequence
  ENSG00000166833_117 (sequence is synthesized)
tctagaccactgggtcatgctgccttcagccttagcacctcgaactgtctgcatcttggatgacttcctgagcatggaatagaagtggaattactccatcagggaaggcatgatgctgga

SEQ ID NO: 536643 - DNA, 120 bp, Artificial Sequence
  ENSG00000166833_118 (sequence is synthesized)
tttggggagtttttcagaaagctgcaaaactggggctacgagagagatctgggccacttccagactgttccttctttgcctgttttcagctctatggaaggcgcgccccctgggaggatc

SEQ ID NO: 536644 - DNA, 120 bp, Artificial Sequence
  ENSG00000166833_119 (sequence is synthesized)
acagctgacttgataccagcactgaggcctgacctctcgatccttcagcacttcagagggccgcaatgtagtgaaatgctctggcctaggaaccttacaagctgggacgacagcagctcc

SEQ ID NO: 536645 - DNA, 120 bp, Artificial Sequence
  ENSG00000166833_120 (sequence is synthesized)
agactgtttccaaggacagtaagggcctcctggaagcagacccagcctttggagtttggggaggattaggatccttgctttgtgaagactgcttttcagaaccgtagttagagaacctca

SEQ ID NO: 536646 - DNA, 120 bp, Artificial Sequence
  ENSG00000166833_121 (sequence is synthesized)
aatcttttcaatcgaatgctttgccttcagacgtcaatggaatgagctaagaaatgttatagtcaatgatttttgcatcattaaaagtagcacttagggctggaaagactttctgcaatg

SEQ ID NO: 536647 - DNA, 120 bp, Artificial Sequence
  ENSG00000166833_122 (sequence is synthesized)
tttctgtgcagtctgtgaggatttaaagtagtttttcattcttagattttcttcaatttgacccgctgttgcaaactcccctgggaccacatggagggcccttccattcagtgctttacg

SEQ ID NO: 536648 - DNA, 120 bp, Artificial Sequence
  ENSG00000166833_123 (sequence is synthesized)
agttaggcttgctcactcatccacaccaaaggatctcgttccgctcgggccccggggtttcacgggaacaattgccttgaacaatagccagaaaacgagttccaccagtctggacttttt

SEQ ID NO: 536649 - DNA, 120 bp, Artificial Sequence
  ENSG00000166833_124 (sequence is synthesized)
tgcaactgaatgcagctgtctggcggggggcatgggccagccctgtaaatgggctgtgccttgattctggagcagaactggaaaattgagcagctgggacgacagcagctccgtcagcag

SEQ ID NO: 536650 - DNA, 120 bp, Artificial Sequence
  ENSG00000166839_0 (sequence is synthesized)
agcgcgcgcaggggctgcggagcggcaggatgcaggaggagctggcgtgggagaccgacggcctgcttcctctggagaggcagctccacgaggccgcccgccagaacaatgtcggcagga

SEQ ID NO: 536651 - DNA, 120 bp, Artificial Sequence
  ENSG00000166839_1 (sequence is synthesized)
tgcaggagctgattgggaggagggttaacaccagggccagaaaccacgtgggcagggtggccctgcactgggctgcaggtgcagggcacgagcaggctgtgcgtctgcttctggagcacg

SEQ ID NO: 536652 - DNA, 120 bp, Artificial Sequence
  ENSG00000166839_2 (sequence is synthesized)
aggctgctgtggacgaggaggatgcggtaggggccctcacagaggcacgtctgtgttttgggatgaatgcgcttctcctgtctgcctggttcggccacttacgaatcctccagatcttgg

SEQ ID NO: 536653 - DNA, 120 bp, Artificial Sequence
  ENSG00000166839_3 (sequence is synthesized)
taaactcaggggccaagatccactgtgagagcaaggatggcctgaccttactgcactgcgcagcccaaaaaggccatgtgcctgtgctggcgttcataatggaggacctggaggatgtgg

SEQ ID NO: 536654 - DNA, 120 bp, Artificial Sequence
  ENSG00000166839_4 (sequence is synthesized)
ccctggaccacgtagacaagctggggaggacggcgtttcacagggcagctgagcacgggcagctggatgctctggacttcctcgtgggctctggctgtgaccacaatgtcaaagacaagg

SEQ ID NO: 536655 - DNA, 120 bp, Artificial Sequence
  ENSG00000166839_5 (sequence is synthesized)
aggggaacactgcccttcatctggctgctggtcggggccatatggctgtgctgcagcgacttgtggacatcgggctggacctggaggagcagaatgcggaaggtctgactgccctgcatt

SEQ ID NO: 536656 - DNA, 120 bp, Artificial Sequence
  ENSG00000166839_6 (sequence is synthesized)
cggctgctggaggatcccaccctgactgtgtgcagctcctcctcagggctgggagcaccgtgaatgccctcacccagaaaaacctaagctgccttcactatgcagccctcagtggctcgg

SEQ ID NO: 536657 - DNA, 120 bp, Artificial Sequence
  ENSG00000166839_7 (sequence is synthesized)
aggatgtgtctcgggtcctcatccacgcaggaggctgcgccaacgtggttgatcatcagggtgcctctcctctgcacctcgctgtgaggcacaacttccctgccttggtccggctcctca

SEQ ID NO: 536658 - DNA, 120 bp, Artificial Sequence
  ENSG00000166839_8 (sequence is synthesized)
tcaactccgacagtgacgtgaatgccgtggacaataggcagcagacgccccttcacctggctgcagagcacgcctggcaggacatagcagatatgctcctcattgctggggttgacttaa

SEQ ID NO: 536659 - DNA, 120 bp, Artificial Sequence
  ENSG00000166839_9 (sequence is synthesized)
acctgagagataagcagggaaaaaccgccctggcagtggccgtccgcagcaaccatgtcagcctggtggacatgatcataaaagctgatcgtttctacagatgggagaaggaccacccca

SEQ ID NO: 536660 - DNA, 120 bp, Artificial Sequence
  ENSG00000166839_10 (sequence is synthesized)
gtgatccctctgggaagagcttgtcctttaagcaggaccatcggcaggaaacacagcagctccgttctgtgctgtggcggctggcctccaggtatctgcagccccgtgagtggaagaagc

SEQ ID NO: 536661 - DNA, 120 bp, Artificial Sequence
  ENSG00000166839_11 (sequence is synthesized)
tggcatattcctgggagttcacggaggcacatgtcgacgccatcgagcaacagtggacaggcaccaggagctatcaggagcacggccaccgaatgctgctcatttggctgcatggcgtgg

SEQ ID NO: 536662 - DNA, 120 bp, Artificial Sequence
  ENSG00000166839_12 (sequence is synthesized)
ttggccatgatggccaggctggaaaattgaaacataatttcacaattattcctttttccaccttaaataataagagtagaatactttctgtgtttttatcttatacacatgaataaatgc

SEQ ID NO: 536663 - DNA, 120 bp, Artificial Sequence
  ENSG00000166839_13 (sequence is synthesized)
tatggcttatcacagttacaatgtgttttctgaaagtaaagattattttaccttgaaattacaaaaattattttcagttttccaaaattctatctttaaacctaaataattcaatttcat

SEQ ID NO: 536664 - DNA, 120 bp, Artificial Sequence
  ENSG00000166839_14 (sequence is synthesized)
ggatgcacaaatgtttattgagagtctcatattcatgcttttcttcacagcactataaagttggacttggaaaatttggacagccatttgccattgtaatttttattcttttttctcctg

SEQ ID NO: 536665 - DNA, 120 bp, Artificial Sequence
  ENSG00000166839_15 (sequence is synthesized)
attatttgacaaaacttgtatccacattgtagctgttcatgtgtctgcttctattgcatattgtaaaattattaactacttcccaaaatagtatttctctcagcagatatttctttggta

SEQ ID NO: 536666 - DNA, 120 bp, Artificial Sequence
  ENSG00000166839_16 (sequence is synthesized)
ctaccatgtattgtgtaacttttgggaaagtaaggtggcttccctgctctcagtgaagcattttattaaaagaataattataattaaaaaaacacgatacagatcagtgcatatagtata

SEQ ID NO: 536667 - DNA, 120 bp, Artificial Sequence
  ENSG00000166839_17 (sequence is synthesized)
ttactaatagtatgctgttaattgtgtaagaaagaaaggaaattagaaaacatatttgcataaataaaagctagacaaaggctaagaaactaatcaggtggtttccctggggtagtagga

SEQ ID NO: 536668 - DNA, 120 bp, Artificial Sequence
  ENSG00000166839_18 (sequence is synthesized)
taatggggaacagtggggctgggaccgggtgggagaaagagttctcagtggttcctttctatacagttttaacttttgaaatgtgtgagagtgttacttactgaaaactgaaaggatatg

SEQ ID NO: 536669 - DNA, 120 bp, Artificial Sequence
  ENSG00000166839_19 (sequence is synthesized)
acatgctggaacaggcaaaactacaaagacagtaaaaagatcagtgatttccaggagctgcaagggcagtgagaggaagggagggatgaggaggtggagcgcaggggatgttagggcagt

SEQ ID NO: 536670 - DNA, 120 bp, Artificial Sequence
  ENSG00000166839_20 (sequence is synthesized)
gaaaggttctgtatgacactgtgatggtgggtacatgacattgggcattggtcaaaacccatagcatgtacagcacaaagcgtttgctctaatgtgagctatggactttagttaatagta

SEQ ID NO: 536671 - DNA, 120 bp, Artificial Sequence
  ENSG00000166839_21 (sequence is synthesized)
acgtgtcaatattggttcatcagttgtatcaaatgtaccacactgatgccagatgttaataatcggggaaactgtgtgtgctgaagagtacgtgggagctctctgtgctatctgctcaat

SEQ ID NO: 536672 - DNA, 120 bp, Artificial Sequence
  ENSG00000166839_22 (sequence is synthesized)
ttttctctaaacctaaaactgttctaaaatagaaagtctgtgaaaaaaaacaaaagtaaagttataaaaggaaaagaaaacagaggctttaaattaaatcatctattccttgggaaaggt

SEQ ID NO: 536673 - DNA, 120 bp, Artificial Sequence
  ENSG00000166839_23 (sequence is synthesized)
attttgtaccatatgggactgaaatcatttatctggatgaattttataaaatgaattttgtaatttttttctgagaaaaaaaagttcttaaatacaataaaattgaaatgttgaaatata

SEQ ID NO: 536674 - DNA, 120 bp, Artificial Sequence
  ENSG00000166839_24 (sequence is synthesized)
agcaaagcgctgttcgagggcctcgtggccattggcaggagggacctggctgaaaatatcaggaagaaagcaaacgcagccccgagtgcccccaggaggtgcacagccatgtaaccggag

SEQ ID NO: 536675 - DNA, 120 bp, Artificial Sequence
  ENSG00000166839_25 (sequence is synthesized)
gggccagaccttcaggcacgtgggacctcagcgtgtggagccacctgaacagaagatgaccatcatttaagggctttttaaaaaatcactgttaacagacctccaggtgattctactgaa

SEQ ID NO: 536676 - DNA, 120 bp, Artificial Sequence
  ENSG00000166839_26 (sequence is synthesized)
atgcacagtcatgcagagcccaggaggcaaatgtttgtacactgatctttttcatgaggatgggtccaagggcctgtaatcccgtccaacaggtatggtccttttgagctcttggcacac

SEQ ID NO: 536677 - DNA, 120 bp, Artificial Sequence
  ENSG00000166839_27 (sequence is synthesized)
catgtcggcagtaacggccacagggattcctgaaccctgagtgaatagaggcttcgaggcagcagacaaggttctgatcttggcttctccactgctgagccctgtgacctggagcaagtt

SEQ ID NO: 536678 - DNA, 120 bp, Artificial Sequence
  ENSG00000166839_28 (sequence is synthesized)
tgcagtgacatttacttttttacattgttgtgaggattaaatacctaacacagtgcccaggacataatagggcccaacacctcaatacctgttagtgtttttttgttttaatttttttga

SEQ ID NO: 536679 - DNA, 77 bp, Artificial Sequence
  ENSG00000166839_29 (sequence is synthesized)
gttttcctgactcagcctcccaagaggctgggactacaggtgtgtgccactacccccggctcatttttgtatttttt

SEQ ID NO: 536680 - DNA, 75 bp, Artificial Sequence
  ENSG00000166839_30 (sequence is synthesized)
gcagttttcctgactcagcctcccaagaggctgggactacaggtgtgtgccactacccccggctcatttttgtat

SEQ ID NO: 536681 - DNA, 120 bp, Artificial Sequence
  ENSG00000166839_31 (sequence is synthesized)
caaagtgttgggattataggcgggatagccattgcacctggccctgttagtgtcttctatttgttgagctcttgatcgttcacaaagccccttcataactgttaccccagaaaaattcca

SEQ ID NO: 536682 - DNA, 120 bp, Artificial Sequence
  ENSG00000166839_32 (sequence is synthesized)
cccattttgcagatgagaaaactggagctttgagggcactttctcagggtcacaagctagtacgaggcaaagctgagtctcaaaagccttttcccctgactccagagctcccacccactg

SEQ ID NO: 536683 - DNA, 120 bp, Artificial Sequence
  ENSG00000166839_33 (sequence is synthesized)
atgaagcttttcccctgacagagctggggcttgaggtgtgaccctggatgaacctcttctctctctccccgttgtactcatcagttctgccagtaaaaattctcctctatgacctggaaa

SEQ ID NO: 536684 - DNA, 74 bp, Artificial Sequence
  ENSG00000166839_34 (sequence is synthesized)
agcgcgcgcaggggctgcggagcggcaggatgcaggaggagctggcgtgggagaccgacggtcccaggttgaag

SEQ ID NO: 536685 - DNA, 120 bp, Artificial Sequence
  ENSG00000166839_35 (sequence is synthesized)
tgcggtaggggccctcacagaggcacgtctgtgtgcccttggtcctctccttgccttggccccagcctctgcttccctcctctctccagtgctgtccttgtctgcaccacccgcctcctg

SEQ ID NO: 536686 - DNA, 120 bp, Artificial Sequence
  ENSG00000166839_36 (sequence is synthesized)
cctccaaattcccgcctgtttctaaagcaaagcagtgcaactctctttggatgctcgggagcctgctgatcatttgggatgaatgcgcttctcctgtctgcctggttcggccacttacga

SEQ ID NO: 536687 - DNA, 120 bp, Artificial Sequence
  ENSG00000166839_37 (sequence is synthesized)
ggggttgtggcctttctttaggtagtgagttggtgttttgggtttgctttttatttttgaatcagtgacaaataacctttctggctggttgaatggcttcaggttctggaattcttgctt

SEQ ID NO: 536688 - DNA, 120 bp, Artificial Sequence
  ENSG00000166839_38 (sequence is synthesized)
gctttgttctaaatgtcaatagtatagcaaaaatattaataataaataatacaatataaataataatagcaaaaacacacaggcagttcaaaaacagagaattaaaatgttatgctaaaa

SEQ ID NO: 536689 - DNA, 120 bp, Artificial Sequence
  ENSG00000166839_39 (sequence is synthesized)
agagaccctgctacgaatgccccctccctcctccttctcagggtgttcaaggactgtcatcctttctataccagctcaaatgcagcctcctccaggaagccttcctgaccttccaccacc

SEQ ID NO: 536690 - DNA, 120 bp, Artificial Sequence
  ENSG00000166839_40 (sequence is synthesized)
tttgggatgaatgcgcttctcctgtctgcctggttcggccacttacgaatcctccagatcttggtaaactcaggggccaagatccactgtgagagcaagcccaaaaaggccatgtgcctg

SEQ ID NO: 536691 - DNA, 120 bp, Artificial Sequence
  ENSG00000166840_0 (sequence is synthesized)
agtgttggccaatcccagcagccatacttcaactactcatagactgctgaatgttcaaactgtgttcaaataagatggtgtcacaagaaggatctgaagtggagcttctagtatccccag

SEQ ID NO: 536692 - DNA, 120 bp, Artificial Sequence
  ENSG00000166840_1 (sequence is synthesized)
gagcgcgaagtgaacacggaaggtacctgcaggatccaattgtgtccattgatctctcagagtggctgaggataatagagtttcttcttcaaggtctcaaggtgtatggctctgtgtatc

SEQ ID NO: 536693 - DNA, 120 bp, Artificial Sequence
  ENSG00000166840_2 (sequence is synthesized)
acatcaatcacgggaaccccttcaacatggaggtgctggtggattcctggcctgaatatcagatggttattatccggcctcaaaagcaggagatgactgatgacatggattcatacacaa

SEQ ID NO: 536694 - DNA, 120 bp, Artificial Sequence
  ENSG00000166840_3 (sequence is synthesized)
acgtatatcgtatgttctccaaagagcctcaaaaatcagaagaagttttgaaaaattgtgagatcgtaaactggaaacagagactccaaatccaaggtcttcaagaaagtttaggtgagg

SEQ ID NO: 536695 - DNA, 120 bp, Artificial Sequence
  ENSG00000166840_4 (sequence is synthesized)
ggataagagtggctacattttcaaagtcagtgaaagtagagcattcgagagcactcctcttggttacggaagatattctgaagctcaatgcctccagtaaaagcaagcttggaagctggg

SEQ ID NO: 536696 - DNA, 120 bp, Artificial Sequence
  ENSG00000166840_5 (sequence is synthesized)
ctgagacaggccacccagatgatgaatttgaaagtgaaactcccaactttaagtatgcccagctggatgtctcttattctgggctggtaaatgacaactggaagcgagggaagaatgaga

SEQ ID NO: 536697 - DNA, 120 bp, Artificial Sequence
  ENSG00000166840_6 (sequence is synthesized)
ggagcctgcattacatcaagcgctgcatagaagacctgccagcagcctgtatgctcggcccagagggagtcccggtctcatgggtaaccatggacccttcttgtgaagtaggaatggcct

SEQ ID NO: 536698 - DNA, 120 bp, Artificial Sequence
  ENSG00000166840_7 (sequence is synthesized)
acagcatggaaaaataccgaaggacaggcaacatggcacgagtgatggtgcgatacatgaaatatctgcgtcagaagaatattccattttacatctctgtgttggaagaaaatgaagact

SEQ ID NO: 536699 - DNA, 120 bp, Artificial Sequence
  ENSG00000166840_8 (sequence is synthesized)
ctttgaggcctcctgtgagtggcaccaatggacttgctacccacagaatctagttccattttagacaatgaagctgcttagtaatctctgccaagccatctcttaatattaaagcagaca

SEQ ID NO: 536700 - DNA, 120 bp, Artificial Sequence
  ENSG00000166840_9 (sequence is synthesized)
ccacagaatagatttcttcacttacaaatgcatattgggcacttataatacagcaggaactcttctcacctggagccttgatgttaaaagacacagccatgctcttgaggagcttacaat

SEQ ID NO: 536701 - DNA, 120 bp, Artificial Sequence
  ENSG00000166840_10 (sequence is synthesized)
cctggctggaggcaggggagggtatattctttaaatatgcttaagtgttatagggaaagacggggttaccagtaaacatgtaactagaaagccaggctcagttcttacctctgggaatca

SEQ ID NO: 536702 - DNA, 120 bp, Artificial Sequence
  ENSG00000166840_11 (sequence is synthesized)
gaactctttatgcaacttggttaatagaatctactatctggaagataaatgaaggattttaataaaattttcaatagaataaacctaatctgtatggatactttatcaaaaatgaatgtc

SEQ ID NO: 536703 - DNA, 120 bp, Artificial Sequence
  ENSG00000166840_12 (sequence is synthesized)
cctgctatttctggatttatgaggcaatggtacactaaagaatggaatcagttcagtgagtagaaaggtatccaaggtgaagcctgagacgaatggctttcccaggctaccttccatcac

SEQ ID NO: 536704 - DNA, 120 bp, Artificial Sequence
  ENSG00000166840_13 (sequence is synthesized)
tgttgtacagaaaagaaatccagagaatcaaatggactggccttgggggtctctgctatggaaatgccattttttgtgtctcctttctcctactctttctcacatcctcttcatgattga

SEQ ID NO: 536705 - DNA, 120 bp, Artificial Sequence
  ENSG00000166840_14 (sequence is synthesized)
agcatggcacaaggcaaggtgttgcctgcgagtctggttgtaagttcagcctttggtgtttgcactactgctatcataaggggtcagggacattccggggagaagtgaccactaaggtga

SEQ ID NO: 536706 - DNA, 120 bp, Artificial Sequence
  ENSG00000166840_15 (sequence is synthesized)
ggattagagagtgagtagaagtgagccagacaaaaaaagcagaaaatgcagatgatggaaaggacatgtgccatgcactatcataagaacttcctaactgaacactgatactacaattct

SEQ ID NO: 536707 - DNA, 120 bp, Artificial Sequence
  ENSG00000166840_16 (sequence is synthesized)
gaatccctgatcttaaaaaataattatacttcaccaacaaaacttggcctcttttggttccactctgccaccctgccattggaacttggattactgtgaacattgcagctatagcaaaat

SEQ ID NO: 536708 - DNA, 120 bp, Artificial Sequence
  ENSG00000166840_17 (sequence is synthesized)
gatcgctttgccaattttgcgttactgggcaggctaagagatcttcttttaattcagcctgcttaagacgggaactgataactgtagtgtatcctctgccttttttcttatctattggag

SEQ ID NO: 536709 - DNA, 120 bp, Artificial Sequence
  ENSG00000166840_18 (sequence is synthesized)
agtaacagcttttggtttcccgaccaggaacactttggctcagttgccatgggccaggagtctcacagaactactaagcagctgcttacccaattttggctggagagataagtaccctct

SEQ ID NO: 536710 - DNA, 120 bp, Artificial Sequence
  ENSG00000166840_19 (sequence is synthesized)
ggggccaccacagctggccccaaccatggtcctgattgccttggaagaactgcctttggaatttcacatcggcatccagataggtgaagaaatggagttgccatcaactaagttgagaaa

SEQ ID NO: 536711 - DNA, 120 bp, Artificial Sequence
  ENSG00000166840_20 (sequence is synthesized)
ggttcctgtacatcactttaccttttttgtctataaattcattttgaccacgaggcacccccggagcctcggtgaatctgctgtgattttatggtgtcacaagaaggatctgaagtggag

SEQ ID NO: 536712 - DNA, 120 bp, Artificial Sequence
  ENSG00000166840_21 (sequence is synthesized)
aatattcacttttaattctttccacaagggaggaagggcatgggttttggagacagtcatatatggtttcaaaatctgactctggcatttatctctaagaacttgagaaatttacttagt

SEQ ID NO: 536713 - DNA, 120 bp, Artificial Sequence
  ENSG00000166840_22 (sequence is synthesized)
ccctctgagatttggtgtattcagaatgaatatgatactaacagtacctacatcacgagtgttacttgaatggagatgtataaagtgcattttaaattcatttgtttccttaacattttc

SEQ ID NO: 536714 - DNA, 120 bp, Artificial Sequence
  ENSG00000166840_23 (sequence is synthesized)
ccttcatttcttatcttttcagagtttcttcttcaaggtctcaaggtctgaagcatcccacagaatgatcctactgaataactcccataagctgctggccctatacaaatccttggccag

SEQ ID NO: 536715 - DNA, 120 bp, Artificial Sequence
  ENSG00000166840_24 (sequence is synthesized)
gagcatccctgagtccctgaaggtcagggaacagtgggaggtcagggtatgggagtaggggtgttgaggatgagaaaatagcaggcttgtgattctagtccttcctgactgtttgcagag

SEQ ID NO: 536716 - DNA, 120 bp, Artificial Sequence
  ENSG00000166840_25 (sequence is synthesized)
ggttggagctgggaaacaggatgggactgggggcacaggctgcatatcaagagctgctgcttctctttgggaagaggcagctaggtccactctgcaggttttgccactcatttggagagg

SEQ ID NO: 536717 - DNA, 120 bp, Artificial Sequence
  ENSG00000166840_26 (sequence is synthesized)
cagtggagcatggtggctacgaacatggtttggagcctgtctgaatggatatgcattccaaggctgccattttctagtcagatggctttgtggatgtttctttccctttctctgacttta

SEQ ID NO: 536718 - DNA, 120 bp, Artificial Sequence
  ENSG00000166840_27 (sequence is synthesized)
cgtttggtttttccatcaatgagatgggaataacgttagcacctaccgcttaaagttgctatggacactgaataaatctatacaatataaatgctaagagcattgccaagtgcccagcta

SEQ ID NO: 536719 - DNA, 120 bp, Artificial Sequence
  ENSG00000166840_28 (sequence is synthesized)
gtacacagtagctctttggtatcacaaggacagtcctacctgtgagttctgcctgcttgctggtaacttcacgtccatcagtatggtcctctccaggaccatactgctcatctcaccatc

SEQ ID NO: 536720 - DNA, 120 bp, Artificial Sequence
  ENSG00000166840_29 (sequence is synthesized)
actgacttggtctcagtaccttctcttaatctccatttttctcttcctcttcacaaccagatcctcatctctggggatctcaacctctcctggtccctttcatccctccttcaggtgtat

SEQ ID NO: 536721 - DNA, 120 bp, Artificial Sequence
  ENSG00000166840_30 (sequence is synthesized)
atcagcggcagaagggcagcaatggccacacaccgaagcaccttggcgggctattccccttgcagctctcctcagcgcgctgctcccactcgcaatcaaaaggcggaaaaagcgcgaaac

SEQ ID NO: 536722 - DNA, 120 bp, Artificial Sequence
  ENSG00000166840_31 (sequence is synthesized)
cgccaggcatctcccatacccacccggctgccgcgcaacccctccttggcttccactgggagacaggggacgccgatgagcaggaagaagcagggcagtgactgcttagtttatcctggt

SEQ ID NO: 536723 - DNA, 120 bp, Artificial Sequence
  ENSG00000166840_32 (sequence is synthesized)
cacccgccaggtttgtggcctgtgatctcttgtcaccttggtctctcagctttgtcttctgaaatctggacttccaattgtctttgtcttgctgcccttccttgcgacactggcctggaa

SEQ ID NO: 536724 - DNA, 120 bp, Artificial Sequence
  ENSG00000166840_33 (sequence is synthesized)
tccctcacggtagtctgctggagtggaatttaggacgcatctcagttgtcaccatctttaattgcatgatgtctagttccttgcaaaccattatttcatgtatttcgctcttttttgttt

SEQ ID NO: 536725 - DNA, 120 bp, Artificial Sequence
  ENSG00000166840_34 (sequence is synthesized)
gttttgttttgttttgttttcaggctaggggaaaatccagtccctgttactccattttggccagaaattcaaggtaatgacttttaatgttcctgactactagttctatcatctctctca

SEQ ID NO: 536726 - DNA, 120 bp, Artificial Sequence
  ENSG00000166840_35 (sequence is synthesized)
cttctggatctgtctctattcactgatgtttctagtcattgtgggtcatattttttccacgttttaaatacttcctgatttttgactagatatcaagctttgttaatttcacaactttgg

SEQ ID NO: 536727 - DNA, 120 bp, Artificial Sequence
  ENSG00000166840_36 (sequence is synthesized)
agctttgttccagtacgttgttattttacatggaaaccatttcatactttcaaagcttgcatttatttgttaggtgggaccagaacaagggctaatgttgtcccactatggaagcaatac

SEQ ID NO: 536728 - DNA, 120 bp, Artificial Sequence
  ENSG00000166840_37 (sequence is synthesized)
tttctgagtagtctccctgatacttcatgaattatgaagttttctagtcggattttggggaactgaaaccattttctgtcctgtatgagcctcagaaattgttacatctgctcctttccg

SEQ ID NO: 536729 - DNA, 120 bp, Artificial Sequence
  ENSG00000166840_38 (sequence is synthesized)
atagttcttttcctgttccttttcaacagtttcattatactcatgcattgaccaagctgaaatctcaagggttgcccactgcacatctctgatcctctgtgctcctgtggcgctcttcat

SEQ ID NO: 536730 - DNA, 120 bp, Artificial Sequence
  ENSG00000166840_39 (sequence is synthesized)
cctagtactctgccatacaggctccagtcatcttggcctcccacaactcccagcttgtcttctcaactcagggaaactgccaggttctgcctgtttcccctccctgagatatgccttgga

SEQ ID NO: 536731 - DNA, 120 bp, Artificial Sequence
  ENSG00000166840_40 (sequence is synthesized)
aatgccatacagtaagctagatagccataggggttaccgcatatgattttcttctcagatatcagagatgagatcccacacagcctgatgtccagtgtttgaaagtggttatttcataga

SEQ ID NO: 536732 - DNA, 120 bp, Artificial Sequence
  ENSG00000166840_41 (sequence is synthesized)
tcttgtttttttgtttttttagacatttaaggtggcagaataaattcaatccttggttctccattttttccactagtagaagttagttatattgtctttgaactcatcatgaattccatg

SEQ ID NO: 536733 - DNA, 120 bp, Artificial Sequence
  ENSG00000166840_42 (sequence is synthesized)
aagactgaagggaacaagtcatttagtgctacagaggatgaccagagggctagacctgaagtttcaaaggcatatctacttttttacaactcctcactggagagatagtctaaccgtggt

SEQ ID NO: 536734 - DNA, 120 bp, Artificial Sequence
  ENSG00000166840_43 (sequence is synthesized)
aaataaggcaagcgcccagttgtaaccaatctctttgtttctgtacctgatttctggttcctgtacatcactttaccttttttgtctataaattcattttgaccacgaggcacccccgga

SEQ ID NO: 536735 - DNA, 120 bp, Artificial Sequence
  ENSG00000166840_44 (sequence is synthesized)
gcctcggtgaatctgctgtgattttgtaggctgccggattcacaaattgtttgttgcttaatgaaactcctttaagtttaattcagctgaagtttttcttttatcagatggtgtcacaag

SEQ ID NO: 536736 - DNA, 120 bp, Artificial Sequence
  ENSG00000166845_0 (sequence is synthesized)
tgcgcactgctggagacgggcgaccttcgctggccggtcggtgggttcctggttttctgctgccgagtaaacaaacgttccctttcctaacttagcagtcacagagctatttccaagagt

SEQ ID NO: 536737 - DNA, 120 bp, Artificial Sequence
  ENSG00000166845_1 (sequence is synthesized)
tgttcttaatttcctgtgcgatattcccattggctatttaacactgaacattctgtttttgaatcaaagttagttaaaatttgttgtcaataagtttaacattctgttcttccgcgtgat

SEQ ID NO: 536738 - DNA, 120 bp, Artificial Sequence
  ENSG00000166845_2 (sequence is synthesized)
ggattttcttttggagattcgaactgaagcctgtacggaggaaatgttgtttttaagggaaatgaatagaaacaatccactttgaagaagccatggcgaaatcaaagacaaaacatagac

SEQ ID NO: 536739 - DNA, 120 bp, Artificial Sequence
  ENSG00000166845_3 (sequence is synthesized)
tttgttctcaggaatcttcagtatctgccctgctggcaagctgcaccctgagtggtagtaattcctctaattctgatggctcgtttcactataaagataagctgtacagatctgcttctc

SEQ ID NO: 536740 - DNA, 120 bp, Artificial Sequence
  ENSG00000166845_4 (sequence is synthesized)
aagctctacaggcttatattgatgattttgatctaggccaaatatatcctggtgcaagcactggaaaaattaacattgatgaggattttactaatatgtcacagttctgcaactatattt

SEQ ID NO: 536741 - DNA, 120 bp, Artificial Sequence
  ENSG00000166845_5 (sequence is synthesized)
acaaaccaaacaatgcttttgaaaaccttgatcacaaaaagcactcaaacttcatatcctgtagaagacacaccgttaatgacatagactccatgagcctaacaactgatgatctattaa

SEQ ID NO: 536742 - DNA, 120 bp, Artificial Sequence
  ENSG00000166845_6 (sequence is synthesized)
gactcccagcagatggatcattttcttatacttatgttggaccgagtcaccgaacgagcaagaaaaacaagaaatgccgtggaagactgggttcattggacattgagaagaatccacatt

SEQ ID NO: 536743 - DNA, 120 bp, Artificial Sequence
  ENSG00000166845_7 (sequence is synthesized)
ttcaaggaccctacacttccatgggcaaggataactttgttactcctgttatacgctcaaatataaatggaaagcaatgtggtaggctgaaaaacccaaaacttatgaataggactaata

SEQ ID NO: 536744 - DNA, 120 bp, Artificial Sequence
  ENSG00000166845_8 (sequence is synthesized)
attgcatttctgaatcatctttgtcttttcccaagaaatcgtctttcaaggacagttcagaacacagtcttgaaaagaattacccaagatggctcactagccagaaatctgaccttaatg

SEQ ID NO: 536745 - DNA, 120 bp, Artificial Sequence
  ENSG00000166845_9 (sequence is synthesized)
tttcagggataactagtatacctgatttcaaatacccagtctggctgcacaatcaagacttgctacctgatgcaaatagtcaaagggtttatcagatatttaaagatgatcagtgttccc

SEQ ID NO: 536746 - DNA, 120 bp, Artificial Sequence
  ENSG00000166845_10 (sequence is synthesized)
ctagacatagtcatcaggcacaaggaacttctcggcttatcaataaattagattgttttgaatatgcttttgaaccctcaaacttttcaaattccttgagtgatgataaagaattagtta

SEQ ID NO: 536747 - DNA, 120 bp, Artificial Sequence
  ENSG00000166845_11 (sequence is synthesized)
atgaatacaaatgtgattttgaacatagccagtgtcaatgtgagaatccacttctcccaggacaatccacaaagccattcagtggtgacaaaattgaattgcttatcttgaaggccaaga

SEQ ID NO: 536748 - DNA, 120 bp, Artificial Sequence
  ENSG00000166845_12 (sequence is synthesized)
gaaatctagagcagtgtactgaagaattaccaaagtccatgaaaaaggatgacagtccttgctcattagataaacttgaagcagacagatcatgggaaaatattcctgttactttcaaat

SEQ ID NO: 536749 - DNA, 120 bp, Artificial Sequence
  ENSG00000166845_13 (sequence is synthesized)
ctcctgttcccgttaactctgatgatagtcctcaacaaacttcaagggcaaagagtgctaaaggggttcttgaagactttctaaataatgataatcagagctgtactctctctggaggca

SEQ ID NO: 536750 - DNA, 120 bp, Artificial Sequence
  ENSG00000166845_14 (sequence is synthesized)
aacatcatggtcctgttgaagccctgaaacaaatgttatttaaccttcaagcagtacaagaacgttttaatcaaaataagaccacagatccaaaagaagagattaaacaagtttcagaag

SEQ ID NO: 536751 - DNA, 120 bp, Artificial Sequence
  ENSG00000166845_15 (sequence is synthesized)
atgatttctctaaattacagttgaaggaaagtatgattcctattactaggtcacttcagaaggctttgcaccatttatctcgcctgagagacctggttgatgatacgaatggagaacggt

SEQ ID NO: 536752 - DNA, 120 bp, Artificial Sequence
  ENSG00000166845_16 (sequence is synthesized)
aaatataagccatacattattttgtggttggttcaaggattatatatttctaaaacactaaacttgaaaatacccataggttttgggacctatctttattttgtgccaacatactagaat

SEQ ID NO: 536753 - DNA, 120 bp, Artificial Sequence
  ENSG00000166845_17 (sequence is synthesized)
gtgaactgcaaggacccacaatatatcctgaagtcttactttcgccttctggccagcaaatgtctaatatttaaagatggatgacttctgttcttgaagcttacctggatttaaccttct

SEQ ID NO: 536754 - DNA, 120 bp, Artificial Sequence
  ENSG00000166845_18 (sequence is synthesized)
tcagcatcctcaacattttattacctggttcaggatcattaagaaacttactggtttttatccaaaatcttttacgttaaatagacttttttaaagatatagttagcatcacttttaaac

SEQ ID NO: 536755 - DNA, 120 bp, Artificial Sequence
  ENSG00000166845_19 (sequence is synthesized)
agcttaaaggaatatcaaaattgttattgtgtatctcatctataaggaagtctgttactttgaaattttcataaatttaatatttaagatacattgtatttgaaaattgcattaatagtg

SEQ ID NO: 536756 - DNA, 120 bp, Artificial Sequence
  ENSG00000166845_20 (sequence is synthesized)
gggtgatactgtgttaaaaggaatgttgtgttgtgacattcaagagaacctcctcatttaattagtactttgattctgtgtaagataatcttggtagtgcttgacagtttccaaaccttt

SEQ ID NO: 536757 - DNA, 120 bp, Artificial Sequence
  ENSG00000166845_21 (sequence is synthesized)
ttttggagagatatttaagaatttaatattttgatattagattgtttcccagattttaattttggggttggctcaaactagtgaaaactatgactcaatggccaattgctttatcaaatt

SEQ ID NO: 536758 - DNA, 120 bp, Artificial Sequence
  ENSG00000166845_22 (sequence is synthesized)
tgataactaaaacttaaaatgaatatggaaaatcagaaagcaactctattttagagctattttgtaagagttgtgctttctttaacaccatctgtagtcttaagtttgtctctagctaga

SEQ ID NO: 536759 - DNA, 120 bp, Artificial Sequence
  ENSG00000166845_23 (sequence is synthesized)
actgaacaaagctctataatttttaccaagcacttattattaatacttcttataagtagtaagcatctttactaacacaactgagaattaagtcataaaacataactaatacagcacatt

SEQ ID NO: 536760 - DNA, 120 bp, Artificial Sequence
  ENSG00000166845_24 (sequence is synthesized)
actgcctgacaaaattaaagagtactgtgtgtatgtataactactacaggttaacacttcacccaaatgatagcgtttttcctcagtagattattgtcaaataggaatttctaagcacat

SEQ ID NO: 536761 - DNA, 120 bp, Artificial Sequence
  ENSG00000166845_25 (sequence is synthesized)
tgagtcaaagcattttttccaagttaataaagtgttatttactatctttgttagaggtgacatgtcaaacactacagtgagctctgtggggttttttttttttttttttgcccgtgagtt

SEQ ID NO: 536762 - DNA, 120 bp, Artificial Sequence
  ENSG00000166845_26 (sequence is synthesized)
ttttaccatgctgctctgaccagtttgagtggcaattaccaatagatttgttttctttattctatggagatgtttttaccactgacactgttttctgattatagtctgcttcatagaaaa

SEQ ID NO: 536763 - DNA, 120 bp, Artificial Sequence
  ENSG00000166845_27 (sequence is synthesized)
tagcctgcataatcaaacaaggagttactttgaaattaaagtatgcctggctattaaaaatgcagattttaggtgggtaaacatcaggtaggtctgggtgggtcatgttctaggcctaga

SEQ ID NO: 536764 - DNA, 120 bp, Artificial Sequence
  ENSG00000166845_28 (sequence is synthesized)
aaaatacactattagacaagttctaaagaaggcaaggagataaaggcatcaggtggtaacttctaattgaatattatatgttgatcatacataatatatactatgcctggaaattatgac

SEQ ID NO: 536765 - DNA, 120 bp, Artificial Sequence
  ENSG00000166845_29 (sequence is synthesized)
tgaaaagcacctattcggttagtgctcctattcatgagaacatatctccaatactaaatgagataagcctgttctaaaatcttatagccagtattttaagaaacttgattatacttacca

SEQ ID NO: 536766 - DNA, 120 bp, Artificial Sequence
  ENSG00000166845_30 (sequence is synthesized)
aaggaacattgtttgttttctcttgttttaaatatggagaggtttaatcctttacataacaaaggaattaattttagcaaaatgattcattccaaccttcttataagaaatatctaggag

SEQ ID NO: 536767 - DNA, 120 bp, Artificial Sequence
  ENSG00000166845_31 (sequence is synthesized)
agtcaagtaagaaaaataacgaatctaagtgataaacattcaagaaattctctaaataagagatttatttataattttaatatctcagggttctttttaggtttccaggggaaaagagca

SEQ ID NO: 536768 - DNA, 120 bp, Artificial Sequence
  ENSG00000166845_32 (sequence is synthesized)
ggataacagtgtggagactgctaagttgagaatttaaaacaaatgagaacataagatttttaaaattgcattgtgaatgtaaaatttttatcaatcctttgctctcttttagacatattg

SEQ ID NO: 536769 - DNA, 120 bp, Artificial Sequence
  ENSG00000166845_33 (sequence is synthesized)
gccatgttggggcggtttgaaagcgagcgcgggtgtcgagctctgctgtgactgcggaggaagctgcgagtgagccgagcctgaggcggggcggtgtccgggttggggatgctttgtggt

SEQ ID NO: 536770 - DNA, 120 bp, Artificial Sequence
  ENSG00000166845_34 (sequence is synthesized)
tcaagggacaatggtgtgaccaatatgaagggtcaagactgaaatgtattgtctttactatcaagaactctactttcagttgtttctcagacagttaatttcagcttcatagagatttct

SEQ ID NO: 536771 - DNA, 120 bp, Artificial Sequence
  ENSG00000166845_35 (sequence is synthesized)
gagcaaattaagaaacactgttttcctgggtttgttttgggtatatgtcattatagttatgttatttcttgttgaaatttataattgtaggttttttgtattgttttagtatttaatggt

SEQ ID NO: 536772 - DNA, 120 bp, Artificial Sequence
  ENSG00000166845_36 (sequence is synthesized)
gtataatgtgttattacattatatgtagttataccaaaatattgcctgaagataaatcatgacaaggtcccctgtttattcctgtgttacagacgcatggaattgctcctgtagatttga

SEQ ID NO: 536773 - DNA, 120 bp, Artificial Sequence
  ENSG00000166845_37 (sequence is synthesized)
atttttgtttcatttttttctgtcccacccttcactctctctgtttcagaacatttttggtagaagtgctatccagaagtgaacttgtcaaaaggcaagtagcatgaaagaagacagaag

SEQ ID NO: 536774 - DNA, 120 bp, Artificial Sequence
  ENSG00000166845_38 (sequence is synthesized)
aagcaaaaggctaatacagtggataatttctgagcacttgaagtttcttcaaatgtgcaagactgtgtgtcttcctattagatgtataaattggatatttcatgcctaattaaatgttgc

SEQ ID NO: 536775 - DNA, 120 bp, Artificial Sequence
  ENSG00000166845_39 (sequence is synthesized)
gttggattgcagtgcctatcatacagtgattggagtaaattgaggcctaatcctgaacacatatagagcatattgttagatatttttcctgtgacatttgaagttattattctcccattt

SEQ ID NO: 536776 - DNA, 120 bp, Artificial Sequence
  ENSG00000166845_40 (sequence is synthesized)
cctttttctttttttgtttataatcatatgtccctaagattgttttccttttttggaccaaaaaaaagaaaaaaaaaatcttagcttttcatcctcccagtgtattctgcattgtcctta

SEQ ID NO: 536777 - DNA, 120 bp, Artificial Sequence
  ENSG00000166845_41 (sequence is synthesized)
ccctagatcagccccttctgtgttaacagtttttctcacaatgtagcaacttttatccacccttcaggaccttcactgggactagttcattcattttcaaatagctatttcaacctttaa

SEQ ID NO: 536778 - DNA, 120 bp, Artificial Sequence
  ENSG00000166845_42 (sequence is synthesized)
catctactgtcttagtcttttacacagaagccagagtgactggtcttggcaagactctgttgtgtatcaccactctaaccttactgatttgtttcagcaaatttgctttagttaaattgc

SEQ ID NO: 536779 - DNA, 120 bp, Artificial Sequence
  ENSG00000166845_43 (sequence is synthesized)
tttactcagattcccccaaactttatatgtgtattgtcatctttgtgcatattatttctcatgcatgaaatactcaatttttattcttttatctaacgcttactcttacatttctttaaa

SEQ ID NO: 536780 - DNA, 120 bp, Artificial Sequence
  ENSG00000166845_44 (sequence is synthesized)
gctctggccaagtattttatttcgtccctaaacattctaactatccaccaaactggtaagttggcttttctttttcctccccctgtcattcatttagctgttatatttcattttaatgtt

SEQ ID NO: 536781 - DNA, 120 bp, Artificial Sequence
  ENSG00000166845_45 (sequence is synthesized)
ttgggtggtgcctcttatactatgttgtattcctagacaaggaaatgtatatcaaaatatgttagatgattgattgttttatctccttgatgatagcacctcttatactgctttacagaa

SEQ ID NO: 536782 - DNA, 120 bp, Artificial Sequence
  ENSG00000166845_46 (sequence is synthesized)
tcaggaaaaagtaaactgcattttacatagtggttttaaatattgattgattgatattctaaacctggtttcctatataaagttgtaagttcaagataaagagaccacattctttactca

SEQ ID NO: 536783 - DNA, 120 bp, Artificial Sequence
  ENSG00000166845_47 (sequence is synthesized)
gaacaaataggcattttttctattacttaaactgacaaaaacatttttggtagaagtgctatccagaagtgaacttgtcaaaagctctggccaagtattttatttcgtccctaaacattc

SEQ ID NO: 536784 - DNA, 120 bp, Artificial Sequence
  ENSG00000166845_48 (sequence is synthesized)
taactatccaccaaactggggccctctgatccatccaaaaagcccggcatcaggaaagacaatttcaaaactgaagtttgattttgggaagcctattaaatatgttagaagttcaaacca

SEQ ID NO: 536785 - DNA, 120 bp, Artificial Sequence
  ENSG00000166847_0 (sequence is synthesized)
ggaagtagccggaatctctgaaagactgaccgactgactctgacaggatccggggctgagggaaggaggcggcggccatggagttgggcgagctgctctacaacaagtctgagtacatcg

SEQ ID NO: 536786 - DNA, 120 bp, Artificial Sequence
  ENSG00000166847_1 (sequence is synthesized)
agacggcatctgggaacaaagtcagtcgccagtcagtgttgtgtggaagccagaacatcgttctcaatggcaagaccattgtgatgaatgactgtattatccgaggggatctggcaaatg

SEQ ID NO: 536787 - DNA, 120 bp, Artificial Sequence
  ENSG00000166847_2 (sequence is synthesized)
taagagttggacgtcattgtgttgtgaaaagtcgtagtgtcataaggccaccattcaagaagttcagcaaaggtgttgcattctttcctttacatattggagaccatgtctttattgagg

SEQ ID NO: 536788 - DNA, 120 bp, Artificial Sequence
  ENSG00000166847_3 (sequence is synthesized)
aagattgtgtggtcaacgcagcacagattggttcctatgttcatgttgggaagaactgtgtgattgggcgccgatgtgtgttgaaagactgctgcaaaattcttgacaacacagtattac

SEQ ID NO: 536789 - DNA, 120 bp, Artificial Sequence
  ENSG00000166847_4 (sequence is synthesized)
ctccagaaactgtggttccaccattcactgtcttctcaggctgcccaggactcttctcaggggagctcccggagtgcactcaggagctgatgattgacgtcaccaagagctactaccaga

SEQ ID NO: 536790 - DNA, 120 bp, Artificial Sequence
  ENSG00000166847_5 (sequence is synthesized)
agtttttgcccctgacgcaagtctagcatctctgcctcatgtcttgaatctgcttgagctctaagatgaacctggggacaaagtgagccagtcagcacctacaaagagcttttgtgtctt

SEQ ID NO: 536791 - DNA, 120 bp, Artificial Sequence
  ENSG00000166847_6 (sequence is synthesized)
tgacatctaccaccctcctccttttaaaaaatttctttagaatttctcaatcttcaaggctctaagtgcttaagaattcactaacagacagaccatctggaggagctgtcttcaaatgct

SEQ ID NO: 536792 - DNA, 120 bp, Artificial Sequence
  ENSG00000166847_7 (sequence is synthesized)
gtgcttacaccttatctatgaacagtcactttgtaccattatctgtggaacacagaatcatctgttcccaacactccagccccttggtcctgtggatggctggatcccgcctgaaacgga

SEQ ID NO: 536793 - DNA, 120 bp, Artificial Sequence
  ENSG00000166847_8 (sequence is synthesized)
cctgcagagcagcagcacccttccggtgtggaggctatgtagctggtgcgctgctcacggccattcactgcccatgctgagcgcctctcacacaggtaatgcccagcttttctgctgcta

SEQ ID NO: 536794 - DNA, 120 bp, Artificial Sequence
  ENSG00000166847_9 (sequence is synthesized)
acacatttggccagttgttgcagttgctcatcatcttgggaaaggtgtttgtgacttttcagagcccagattcctgttgtctattaaaacttgaagggaggggtgaatagtgtttctctc

SEQ ID NO: 536795 - DNA, 120 bp, Artificial Sequence
  ENSG00000166847_10 (sequence is synthesized)
ttcttcccaaaatgaccttagctgtcctaggatagttagtaaaagactttttagcattttgacctagggcctttggctttcactaaaagtggggacctcagtatcccagattgtaatttt

SEQ ID NO: 536796 - DNA, 120 bp, Artificial Sequence
  ENSG00000166847_11 (sequence is synthesized)
gccaagtgttagatttgagtctctcatgtggatgcattagtcaggtggttactccttgcttcaaggtacttaccttatttcattgaagacaccgcatttgtgaactcttgcttcctggcc

SEQ ID NO: 536797 - DNA, 120 bp, Artificial Sequence
  ENSG00000166847_12 (sequence is synthesized)
tagaaccattcagcctaccctgtatttgccataaactccacaattcacaccaaaatgtctgtacttagagctaattcgcatatatacaggaagggctcttagaatcagtttgtgggcaca

SEQ ID NO: 536798 - DNA, 120 bp, Artificial Sequence
  ENSG00000166847_13 (sequence is synthesized)
gagcctcaggagtaaatgaagttactagggctgttcttaccatctccttctggccaaatagcacaacatttcctcgttctgctctgacctcttagcttagaaggaagattcagaagtgag

SEQ ID NO: 536799 - DNA, 120 bp, Artificial Sequence
  ENSG00000166847_14 (sequence is synthesized)
gggctaagaaggttgtccttgcctaatgctctgatctgtaagtgaatagggcagaacagttcagccttgaggttagaatttagcaggagctatcctgacttaatatccagttgtggggtt

SEQ ID NO: 536800 - DNA, 120 bp, Artificial Sequence
  ENSG00000166847_15 (sequence is synthesized)
tgcaaaacaaaacagctgtatgtaatcattgccactagttccatctagaactcctttctagtttgttatttttaaaatgtttatacataaaaccaccaaaatacatagcttcgacaagat

SEQ ID NO: 536801 - DNA, 120 bp, Artificial Sequence
  ENSG00000166847_16 (sequence is synthesized)
ggaagtttatttctctctcccataacagtgcagtgatagtcagctggtccaggccaggcaaggggctggtccatgatgtcatcaggcacccaggttcctactgtcttgccatgtggccac

SEQ ID NO: 536802 - DNA, 120 bp, Artificial Sequence
  ENSG00000166847_17 (sequence is synthesized)
agttagcaacaaaggaggctgtaaatttagtttctacttgggcagccaaaactctgaggaaggagattctgctagtaaaaaggagtgggggaagaatggccattgggagacaacaagcag

SEQ ID NO: 536803 - DNA, 120 bp, Artificial Sequence
  ENSG00000166847_18 (sequence is synthesized)
actcaaccaggcctctttgttggcttcctttcctcctgctgcacatgagccttcgccgtgcatttggagccatgacagctgatagctccagacctgcatcctcctagcttgggggctctg

SEQ ID NO: 536804 - DNA, 120 bp, Artificial Sequence
  ENSG00000166847_19 (sequence is synthesized)
aatgaaaggtttcttcccttccagttcgaatttggaaactcccaaagttctcaatggtttgttgtgagttccatgtcctcttggatcagtcactgtggccatgcatgtttggccacatga

SEQ ID NO: 536805 - DNA, 120 bp, Artificial Sequence
  ENSG00000166847_20 (sequence is synthesized)
ttaatccagtctgggtcatgaccttttcttcatccaaaacaaggtgatgggaagacaaaaacaatagctactacaaacaataggagtttataattatgtgctgatgtattcgaagatgtg

SEQ ID NO: 536806 - DNA, 120 bp, Artificial Sequence
  ENSG00000166847_21 (sequence is synthesized)
ttgacagtcgtgagtgtgtatcctaggaaaggcgagctggactctgtctccatggtggctctcaccccagggacctaggaacagcctgtcaccacacaattacttttataaccctggaga

SEQ ID NO: 536807 - DNA, 120 bp, Artificial Sequence
  ENSG00000166847_22 (sequence is synthesized)
tgaaaatctccttgtcctcaaaatacttccagaagaacaaccagatgggaaggaccttggttgggactctttccagttcacttggggcagagggaatttaatggctcacgtagctgaaaa

SEQ ID NO: 536808 - DNA, 120 bp, Artificial Sequence
  ENSG00000166847_23 (sequence is synthesized)
ggatgggctagattgggcttcaggctgcatcccaggactccaaacagggatctgtctctttggctctcagctctgctttcatttgagttggctttattcttgggcttcacagtgtggccc

SEQ ID NO: 536809 - DNA, 120 bp, Artificial Sequence
  ENSG00000166847_24 (sequence is synthesized)
cacagcaccagttattgataaaaagagctcccctttgctgacagaactgctggatttggttctcattggtccagacgaggaaggtatccagcctcaagtcatcattgtggccaggaagat

SEQ ID NO: 536810 - DNA, 120 bp, Artificial Sequence
  ENSG00000166847_25 (sequence is synthesized)
ggaatacaccaaatggacaggcctggcatgtacccacagagactgagagttggtgctggtggttgtggtggcagatgatattacctgaagaagggacgaatgggtgctgggcaggacaaa

SEQ ID NO: 536811 - DNA, 120 bp, Artificial Sequence
  ENSG00000166847_26 (sequence is synthesized)
gcatcagctgtccagttcaggcctctcctctttccctggtgtcttcattttcctccgtctccctgctgtcccttaccctctgcccaatctctcattactcctggtcttgggagttgcctt

SEQ ID NO: 536812 - DNA, 120 bp, Artificial Sequence
  ENSG00000166847_27 (sequence is synthesized)
ctgaggatactccactgggggtacctgagcctggattagagggcagggggaggatattgcctagccaaagtgggtgttcaataaagaaccatttggagatggtcttctgtctggaactgc

SEQ ID NO: 536813 - DNA, 120 bp, Artificial Sequence
  ENSG00000166847_28 (sequence is synthesized)
ttcctttttgttttattatttttccccagatgagctgactgggccatggaactgcatccttatggttcccatagcaccttaccgaggcgcccttatcaatagagttttagttatgtacct

SEQ ID NO: 536814 - DNA, 120 bp, Artificial Sequence
  ENSG00000166847_29 (sequence is synthesized)
gtgttcttgtctgaacccctactaactgtgagctcctgaggagtcaggcctgagtctgtgggtcatctagcacatccttaatagaatgattgcctggatgtgaccaccctcacccccaac

SEQ ID NO: 536815 - DNA, 120 bp, Artificial Sequence
  ENSG00000166847_30 (sequence is synthesized)
cctcacacaccctgccagcatgcctcagaccttaccccagctcaagataagtctcagattgcaggatacctgctgcagggaacaaaggtgaatgattgtcttgtgagcctcctgttgact

SEQ ID NO: 536816 - DNA, 120 bp, Artificial Sequence
  ENSG00000166847_31 (sequence is synthesized)
gattctgttttacatggctgcacagagcccttgtggttatttggggttggggtggtggcttctgtattagtcacttctgcatgaaccatttcactcaggatctgaggccacagttccttt

SEQ ID NO: 536817 - DNA, 120 bp, Artificial Sequence
  ENSG00000166847_32 (sequence is synthesized)
cttagtcactgatacatctggcagacttgaaattaatcagacaaacattgttcatagttaacatatccttggaagtttctcagctataaggaagaggtcttggtggctagggaggccttt

SEQ ID NO: 536818 - DNA, 120 bp, Artificial Sequence
  ENSG00000166847_33 (sequence is synthesized)
ctctgtatcctgttctatccagtgagagcctagagggtgctgcccagccatattctggctagcctcagcggttctcctgaaaaaaaattggcatctgacaacctggatggtgactatagg

SEQ ID NO: 536819 - DNA, 120 bp, Artificial Sequence
  ENSG00000166847_34 (sequence is synthesized)
tagtcaaatccagctggctggtctcctgggggttagcttccatggagctgcaagtcccctgaaatgatactggcagtgttgggacagcgtgtccgaaggcctggttttttcagaactggt

SEQ ID NO: 536820 - DNA, 120 bp, Artificial Sequence
  ENSG00000166847_35 (sequence is synthesized)
ctcagcaaaatgtctcgccaacttctacagttcccataagtacatgataactgaaacacttctagagccccccagcaatgggcttgtgcttttagtagaatatgtgcttgcttccattta

SEQ ID NO: 536821 - DNA, 120 bp, Artificial Sequence
  ENSG00000166847_36 (sequence is synthesized)
ggggtaagaaggtgggcccctcaccatatgctgcacagagaagagagacaccatcactcatttattcatttaacaagtgctttccaagccactactaggtgccaagcacttcctaggtcc

SEQ ID NO: 536822 - DNA, 120 bp, Artificial Sequence
  ENSG00000166847_37 (sequence is synthesized)
tggggatacagtggagactaagatggagccagttctttctcatagggatctcacagcttagtgagtgagaaagccaaagagtcaaaatacagagagggtctgaggggcccattttgagag

SEQ ID NO: 536823 - DNA, 120 bp, Artificial Sequence
  ENSG00000166847_38 (sequence is synthesized)
ccatcatagtggtgaggagtgtgagtgctagagtcaggctgatcaaatcccagcctgccattggctagccttgtgactttgagcaagttatcttacttcgtggaacctcaggtttctcat

SEQ ID NO: 536824 - DNA, 120 bp, Artificial Sequence
  ENSG00000166847_39 (sequence is synthesized)
ccataaaatggggaagttggatagggtattatgatgattgaaatgcatttatacatgtaaagcataagtactggctcagggtgagcactcaataaacggcagtttattaggcacttttat

SEQ ID NO: 536825 - DNA, 120 bp, Artificial Sequence
  ENSG00000166847_40 (sequence is synthesized)
taggaagtgatacaccttgagcaaaaccccttagagtataaggcatagcattcttacatatttttaaaatttaaaataaaatttaaaacatcttgccctttataatcagtccgccacaaa

SEQ ID NO: 536826 - DNA, 120 bp, Artificial Sequence
  ENSG00000166847_41 (sequence is synthesized)
caagagatggagaaatcacccttccttgttttgtatctatggggtgcaaacatttaatcctcccaactgtcaaaaaagtgagagtttcacagcctgttttacagcagaggaaactgatat

SEQ ID NO: 536827 - DNA, 120 bp, Artificial Sequence
  ENSG00000166847_42 (sequence is synthesized)
tcagagaggttaagtaaatttgcccaatgccacacatctaataaatggctgagctggaatcaaggccagctcttacttggctgcaaaatccatgttttatgcagctcctccactatcttg

SEQ ID NO: 536828 - DNA, 120 bp, Artificial Sequence
  ENSG00000166847_43 (sequence is synthesized)
gcctccaaggcagctggctttgaacactacccttgcagcccagtcagccaatcccttgctctcctgaagcttttgctggtgggccagccccacctgctttccttgtgcactctgacttgg

SEQ ID NO: 536829 - DNA, 120 bp, Artificial Sequence
  ENSG00000166847_44 (sequence is synthesized)
accctgaagtgagaagagttggcacaggacatcttacttccctgaaaacagtacctggacttttctgtatcttcacatccattgggcattgggcaaatgggtcatgcagatgaaaaccat

SEQ ID NO: 536830 - DNA, 120 bp, Artificial Sequence
  ENSG00000166847_45 (sequence is synthesized)
cactctggctttcataccatgggtctgaacattagcccatggtgtttcttggccatactgacctgtgccatttcagctgcattcatctcagttggtgttgtctgctggctgctctttctg

SEQ ID NO: 536831 - DNA, 120 bp, Artificial Sequence
  ENSG00000166847_46 (sequence is synthesized)
atttcccacaggagcagtaagaacctgaggaagagtagggtcagaggagtctgggagaatgaggaaatatgagagccccaggaactgaaaaggcctgtgagagactctgagcttcctggg

SEQ ID NO: 536832 - DNA, 120 bp, Artificial Sequence
  ENSG00000166847_47 (sequence is synthesized)
aacaggtataggttctttttatttcaataataacagaaacaactgtcaaaaccatgtgcctgtactatttggagtgctgtccttgcagaatctcattataagaaccttaggaaataggca

SEQ ID NO: 536833 - DNA, 120 bp, Artificial Sequence
  ENSG00000166847_48 (sequence is synthesized)
catcatctcctggatagaatcctaggaaatgggcactataatgggcactttatcccattttataaacatggaaattgaggcacagagagattaagtactttcccaaggtcatacagctag

SEQ ID NO: 536834 - DNA, 120 bp, Artificial Sequence
  ENSG00000166847_49 (sequence is synthesized)
tgatggaggagctagcatttgaacccggagtttttagtctattgagtttaaccgacagatcatactgtgttttggtagggagggagggaggaagcaagcaagtgaacaaatgagtctggg

SEQ ID NO: 536835 - DNA, 120 bp, Artificial Sequence
  ENSG00000166847_50 (sequence is synthesized)
atttaggacttgccagacaaacaaggcccaagaggcaagtgtgcaggtgggtgtagttgggagtcagcagagttgggttggaattcaagctttgccacctgctggctataaaccttggtt

SEQ ID NO: 536836 - DNA, 120 bp, Artificial Sequence
  ENSG00000166847_51 (sequence is synthesized)
gggtaagtaacccaaggtaaatgagatcatctctgtaaaactcttagccttgtgcctggcacatagtaaatgcttaataagggttcactgttagtattactgttactgataacatacaaa

SEQ ID NO: 536837 - DNA, 120 bp, Artificial Sequence
  ENSG00000166847_52 (sequence is synthesized)
gggttcactgttagtattactgttactgataacatacaaatagattgtattaatggaccataattgcaactgtataaaacaaattccatgtttggccaggcgcagtggctcaagcctgta

SEQ ID NO: 536838 - DNA, 120 bp, Artificial Sequence
  ENSG00000166847_53 (sequence is synthesized)
acaacaacaaaaattccatgttgacaaggatgggaatatgagaacatggaaacagctatgaaaagacataagagaattaggaggattttctttaatatatcattttttaaaaaaaaactt

SEQ ID NO: 536839 - DNA, 120 bp, Artificial Sequence
  ENSG00000166847_54 (sequence is synthesized)
gaggattttctttaatatatcattttttaaaaaaaaacttgcttgtatttgtttattttttaaatagagacagggttttaccatgttgcccagactagtcttgaactcctgggctcaagc

SEQ ID NO: 536840 - DNA, 120 bp, Artificial Sequence
  ENSG00000166847_55 (sequence is synthesized)
cactgtgccccgccattttttaataaacctttctaatggaacaagtaaaacacatgcagtggatgctcagcaggccttgagtgtgtgaatgaaaaatatttgaacttgtttttactggtt

SEQ ID NO: 536841 - DNA, 120 bp, Artificial Sequence
  ENSG00000166847_56 (sequence is synthesized)
ggcgtgcgcctgtagtcccagctactcatctcttaaaaaaaaagttttatgcttgttaatttcataaatgctagagggatcaccctaatcaaataaagctactcaaaaataaaatatgaa

SEQ ID NO: 536842 - DNA, 120 bp, Artificial Sequence
  ENSG00000166847_57 (sequence is synthesized)
caccctaatcaaataaagctactcaaaaataaaatatgaaaggtgttagtgggatacagctttctagttttttgccactagtggataggttggaatttaaattcttcggatattggaacc

SEQ ID NO: 536843 - DNA, 120 bp, Artificial Sequence
  ENSG00000166847_58 (sequence is synthesized)
agaacaggctgtaactgattatttttgctgtgattcgtgcttactggagcctcgggaaagagggagacaacatgtaaagagaagcaatctgtttggaaaatgaaaatacagttaaattgc

SEQ ID NO: 536844 - DNA, 120 bp, Artificial Sequence
  ENSG00000166847_59 (sequence is synthesized)
taatgaacccttgtcaaaatcaaatgtctccccttagaggctgatgattgtctagtctaatatgcattttttttgagtgggtcaattggactctaagaccaacaagataaaaaggcagcc

SEQ ID NO: 536845 - DNA, 120 bp, Artificial Sequence
  ENSG00000166847_60 (sequence is synthesized)
ttgcatgtcacttggaccacagctgtctggccatgcagcatgccttcactgctgctgaagaaaagcagctgcttgttgagaatctcaaattctcagatcctaattgcctggccctgactc

SEQ ID NO: 536846 - DNA, 120 bp, Artificial Sequence
  ENSG00000166847_61 (sequence is synthesized)
taagctgaaacctgctactgtctgccttgagctgttttagcctcaacacgagctatgctgaactgaaagcaggcacaggctcaatgaccaggactcagacgttggggccgttggagatta

SEQ ID NO: 536847 - DNA, 120 bp, Artificial Sequence
  ENSG00000166847_62 (sequence is synthesized)
aggaccccctccgtggagcgctaaactatgaaaacgtcctggaacctggctgaaaagggcttattctctaatgggaccatctaagatcaagctgctgataggctctttgtctctaataca

SEQ ID NO: 536848 - DNA, 120 bp, Artificial Sequence
  ENSG00000166847_63 (sequence is synthesized)
gaggctaattgcattcctaacttctaatatttgccaaacgctccaagctggggaagggcacatcgcaaggactatgacctctcctcctgcttttgacagaccagactcaaaccttctctg

SEQ ID NO: 536849 - DNA, 120 bp, Artificial Sequence
  ENSG00000166847_64 (sequence is synthesized)
gggcttctctcactgctgttgacttgttgcattcagcttttgggattagttgcagcttgcaacagtggactgacagcctgactctacttccctcacttttctcccagcacacacagctta

SEQ ID NO: 536850 - DNA, 120 bp, Artificial Sequence
  ENSG00000166847_65 (sequence is synthesized)
gtaaggtaggtggattattaaaacgtagctgtccccagaaaggtattaggcttttctagtctgctcattgaataatcaggacaaaaggggtagaagattatgtaaacacattttgaaatt

SEQ ID NO: 536851 - DNA, 120 bp, Artificial Sequence
  ENSG00000166847_66 (sequence is synthesized)
tttaaaaattcagggtttcatcctttattagtttgctaaggataccataacaaagtaccacaaactgagtgacttacacaatagaaacttattttcctgcagttctggaggctgaaagtc

SEQ ID NO: 536852 - DNA, 120 bp, Artificial Sequence
  ENSG00000166847_67 (sequence is synthesized)
caggacaaggtgtcgacagctttagattcttctgaggcctctctgcttggcttgcagatggctgccttcttactgtgtccttgtatggtccctctgtctgggtgtctgtgtcctaatctt

SEQ ID NO: 536853 - DNA, 120 bp, Artificial Sequence
  ENSG00000166847_68 (sequence is synthesized)
ctcttttaataaggataccactcaggttggattagggcccatcctaacaatcccattttaacttagttacctcttcagggcctatcttcaaatatactcacattttgaggtacaggtaga

SEQ ID NO: 536854 - DNA, 120 bp, Artificial Sequence
  ENSG00000166847_69 (sequence is synthesized)
tggttagggcttcagcatgaatttttgtggggacataattcaaccctccacacataattaccaatttctgaatgtctttctggttaagttgcataaaaacgtttatctacttgaactcta

SEQ ID NO: 536855 - DNA, 120 bp, Artificial Sequence
  ENSG00000166847_70 (sequence is synthesized)
tggttaagttgcataaaaacgtttatctacttgaactctaggatgatagttaaaaaaaaaaatgttggccaggcgcagtgatggatgcatatgatcccagcactttgggaggccgaggtg

SEQ ID NO: 536856 - DNA, 120 bp, Artificial Sequence
  ENSG00000166847_71 (sequence is synthesized)
gaccagcctggcaacatggtgaaatcctgtgtctacaaaaaatgcaaaaattagctggacatgatggcatgtgcctttggttccagctacttaggaggctgaggtaggaggatggcttga

SEQ ID NO: 536857 - DNA, 120 bp, Artificial Sequence
  ENSG00000166847_72 (sequence is synthesized)
gaggttgcagtgagccaaaatcgtgccaccgcactctagcctgggcaacagagccagaccatatctcaaaaaaaaaaaaaaaaaagtttatctacaaaaatgcttttgtgcctcttacat

SEQ ID NO: 536858 - DNA, 120 bp, Artificial Sequence
  ENSG00000166847_73 (sequence is synthesized)
acaacccttccagaggaaaggcctagctgagagtaagagatggttgaaaaaatgcaatgttatgattgctgaacagggcacgactgtttttgtaatattggagaaaataattaaagcctg

SEQ ID NO: 536859 - DNA, 120 bp, Artificial Sequence
  ENSG00000166847_74 (sequence is synthesized)
gcacctggggaggcttgatccctggaagcctcctcttgctgaaggaaaattcccagtgctgcctttccatgtgctgtgagtgctttgagttcagactgacaacagagtgggtctagcttc

SEQ ID NO: 536860 - DNA, 120 bp, Artificial Sequence
  ENSG00000166847_75 (sequence is synthesized)
tatgctttccatgaagatctcccacaaatgtcatccatgctcatgagatggatcaacttgtatcctgaacaagcaaaactgtttgggactcactgccttcaggcagtcccttggaagcca

SEQ ID NO: 536861 - DNA, 120 bp, Artificial Sequence
  ENSG00000166847_76 (sequence is synthesized)
aggactctgggaacttttcagatgggactggaaacacttgggcaggagttcccctggtaggaggtctgttcacctgtacagcctaatggatgtcctgcttgaggtgccctaatattgcaa

SEQ ID NO: 536862 - DNA, 120 bp, Artificial Sequence
  ENSG00000166847_77 (sequence is synthesized)
attctttgtttacaggggtaccacctgtgcccctgggactgtgcttctgtacatgaccacaactctcatgatgtcccctcagccctggaaagcatttgggttagcttccgcttactggtc

SEQ ID NO: 536863 - DNA, 120 bp, Artificial Sequence
  ENSG00000166847_78 (sequence is synthesized)
tgggttagcttccgcttactggtcagagttatactgtgcctgaattgatgcctcaggtcaggttgaaaaaaaaaaaaaaggttcagacagcaattaagggctgggcacggtggctcatgc

SEQ ID NO: 536864 - DNA, 120 bp, Artificial Sequence
  ENSG00000166847_79 (sequence is synthesized)
agactccatctcaacaacaacaacaaaaaggaattaaggaggaagccacctggcttcctaagatagactttatggttaatgggatttattttagctggttaagtccaggacccctaccag

SEQ ID NO: 536865 - DNA, 120 bp, Artificial Sequence
  ENSG00000166847_80 (sequence is synthesized)
ttttagctggttaagtccaggacccctaccaggaagaactgaggtccatatttgaggttggtctcacccttttgcatgtggtcctactaataataattttgctgtaaagaagcctcaata

SEQ ID NO: 536866 - DNA, 120 bp, Artificial Sequence
  ENSG00000166847_81 (sequence is synthesized)
aggagatggactgtgtgaaaagagatgagaaagcaggcctgtttgcaaggctggcccttggctggcatctgaaagcttggatttcaggagggttctcattactccctaaatgataagagt

SEQ ID NO: 536867 - DNA, 120 bp, Artificial Sequence
  ENSG00000166847_82 (sequence is synthesized)
ggctcactgtgcctaaactgttcgtacaaacaatgtgggttatgcccaacatctgctttccttctgggagtcagattttcatatgtgttaggcagaggatgaggtgagcagctcccaatg

SEQ ID NO: 536868 - DNA, 120 bp, Artificial Sequence
  ENSG00000166847_83 (sequence is synthesized)
agaaccctgaacactgagtctgtaatgagcttcccttgtatacaacattgcacatgggttgtcacaactgattgctggaggaattgtgtcctatgtgactctgctgggagaggactgtgg

SEQ ID NO: 536869 - DNA, 120 bp, Artificial Sequence
  ENSG00000166847_84 (sequence is synthesized)
gaggcttacacctggtttccctggactttgtccatgcgcttttttcctttgctgattttgcttcctagcctttcgctgtagtaaaacatagccatgagtatgactacaggctgagtctgt

SEQ ID NO: 536870 - DNA, 120 bp, Artificial Sequence
  ENSG00000166847_85 (sequence is synthesized)
gaatctcctagtacatcatcagactaggaggtggtggtgttggcaccccccagcacagggcacaagggagacttgcagggtgtttgtcatgttccctttctcaatctgggtgtggtttac

SEQ ID NO: 536871 - DNA, 120 bp, Artificial Sequence
  ENSG00000166847_86 (sequence is synthesized)
agatttgttcagtttgtgaaaattcactgagctctatgaacaattataatatgtacatttttttctgtaagtgtattaaatttcaataaaaagaattcacactataggggtacaaaataa

SEQ ID NO: 536872 - DNA, 65 bp, Artificial Sequence
  ENSG00000166847_87 (sequence is synthesized)
atctgggaacaaagtcagtcgccagtcagtgttgtgtggaagccagaacatcgttctcaatggca

SEQ ID NO: 536873 - DNA, 120 bp, Artificial Sequence
  ENSG00000166847_88 (sequence is synthesized)
tacttctctcagaaaacttggaaaacactgaaaagcagaaggaaggagaaaacctcacattcccttagccctaccccaagacagtatcttcttctccatgttgttttacacagctgaaat

SEQ ID NO: 536874 - DNA, 120 bp, Artificial Sequence
  ENSG00000166847_89 (sequence is synthesized)
catgtagcatatacagaggcacgtcataaattcacagatggaaaataatatgaacagagagatttgacagtatatgatacctaccactgagtggtttaattgtttttccaattaaaaaat

SEQ ID NO: 536875 - DNA, 120 bp, Artificial Sequence
  ENSG00000166847_90 (sequence is synthesized)
aaatctcatctctcagatcattgaatctgagtttctaagatgaacaaaatcatcactcagattcttcggggaggcatttggccattctaccgtgtcatgcatctctgcttttgcagagga

SEQ ID NO: 536876 - DNA, 120 bp, Artificial Sequence
  ENSG00000166847_91 (sequence is synthesized)
ggaaggagagacttttgtttagtaatttctccatattggggtcctgctgtgaaaaagtttagctgttcttagcaagcactggaccagaacagcctcagcgattatttaagtgattgtcag

SEQ ID NO: 536877 - DNA, 120 bp, Artificial Sequence
  ENSG00000166847_92 (sequence is synthesized)
acatgcatctgattgaggtgagaaggatattgccagagaaatatcttaacttcttgtaacttcttcaagctccttagagctgggtctttctttccccaggactcttctcaggggagctcc

SEQ ID NO: 536878 - DNA, 89 bp, Artificial Sequence
  ENSG00000166847_93 (sequence is synthesized)
atcctctagcctcagccttctgaggagctgggactacagacacgcgccaccatgcccggctaattaaaaaattttttttttgttgagaa

SEQ ID NO: 536879 - DNA, 87 bp, Artificial Sequence
  ENSG00000166847_94 (sequence is synthesized)
ctcagccatagtttcctaatccatcattgcttttttgatatcctggactcactccattgtggacagcaccccactttatgttttttt

SEQ ID NO: 536880 - DNA, 120 bp, Artificial Sequence
  ENSG00000166847_95 (sequence is synthesized)
ctcactccattgtggacagcaccccactttatgtttttttctctcaaatgggagctttcttgatggaaacctgtagtccagaaacctattaagtttgctttccccggttttccgttgttt

SEQ ID NO: 536881 - DNA, 120 bp, Artificial Sequence
  ENSG00000166847_96 (sequence is synthesized)
tcaatggcaagaactttgtcatttctgttttcctgagcccatatatcagatgtcacagtgcctgcagggatagaaagagatcagatgagtcagtaagactgagtgtgaacaatagagagt

SEQ ID NO: 536882 - DNA, 120 bp, Artificial Sequence
  ENSG00000166847_97 (sequence is synthesized)
agctggttgttactgtgtgggaatacaggcccacgtggcaacaatcagctttccagagcgtctgattctttttcaaaagcaactggaaatctcactttttaaaatgcaagatgttccact

SEQ ID NO: 536883 - DNA, 120 bp, Artificial Sequence
  ENSG00000166847_98 (sequence is synthesized)
actcaaatagtaatgtttaattttaaatgatttgttaaaatgccacgtgtccttcctgtaggagatagctaaaaaaaattaaaagaaataaataataaaaatgctgcatgagccaaacaa

SEQ ID NO: 536884 - DNA, 120 bp, Artificial Sequence
  ENSG00000166847_99 (sequence is synthesized)
gtattttccatcgcaaaagtaatgcttacgattcctatctctggcaatatgttgatagagctaacttagaaattcacctgtacaaagtacctagaaatgctacctaacatataacaagca

SEQ ID NO: 536885 - DNA, 120 bp, Artificial Sequence
  ENSG00000166847_100 (sequence is synthesized)
tctgtttaaatgcataattgggttcaccagaaaataaggaaattatgaagggccaaacacaaagaggaaactaagcccaagctgtgagattgcacgggttaatgctgtcttcataataga

SEQ ID NO: 536886 - DNA, 120 bp, Artificial Sequence
  ENSG00000166848_0 (sequence is synthesized)
agtgctgcgcttcgcggcagaggcgtctgcggtgacagctcagtcagttgagctctgtgtgccaggcgctcgcgagggggtagctcttctagtagtgctcggcgtcagacatggcggagg

SEQ ID NO: 536887 - DNA, 120 bp, Artificial Sequence
  ENSG00000166848_1 (sequence is synthesized)
cgatggatttgggcaaagaccccaacgggcccacccattcctcgactctgttcgtgagggacgacggcagctccatgtccttctacgtgcggcccagcccggccaagcgtcggctgtcga

SEQ ID NO: 536888 - DNA, 120 bp, Artificial Sequence
  ENSG00000166848_2 (sequence is synthesized)
cgctcatcctgcacggcggcggcaccgtgtgccgagtgcaggagcccggggccgtgctgctggcccagcccggggaggcgctggccgaggcctcgggtgatttcatctccacgcagtaca

SEQ ID NO: 536889 - DNA, 120 bp, Artificial Sequence
  ENSG00000166848_3 (sequence is synthesized)
tcctggactgcgtggagcgcaacgagaggctggagctggaggcctatcggctgggccccgcctcggcggcggacaccggctcggaagcaaagcccggggccctggccgagggcgccgcgg

SEQ ID NO: 536890 - DNA, 120 bp, Artificial Sequence
  ENSG00000166848_4 (sequence is synthesized)
agccggagccgcagcggcacgccgggcggatcgccttcacggatgcggacgacgtagccatccttacctacgtgaaggaaaatgcccgctcgcccagctccgtcaccggtaacgccttgt

SEQ ID NO: 536891 - DNA, 120 bp, Artificial Sequence
  ENSG00000166848_5 (sequence is synthesized)
ggaaagcgatggagaagagctcgctcacgcagcactcgtggcagtccctgaaggaccgctacctcaagcacctgcggggccaggagcataagtacctgctgggggacgcgccggtgagcc

SEQ ID NO: 536892 - DNA, 120 bp, Artificial Sequence
  ENSG00000166848_6 (sequence is synthesized)
cctcctcccagaagctcaagcggaaggcggaggaggacccggaggccgcggatagcggggaaccacagaataagagaactccagatttgcctgaagaagagtatgtgaaggaagaaatcc

SEQ ID NO: 536893 - DNA, 120 bp, Artificial Sequence
  ENSG00000166848_7 (sequence is synthesized)
aggagaatgaagaagcagtcaaaaagatgcttgtggaagccacccgggagtttgaggaggttgtggtggatgagagccctcctgattttgaaatacatataactatgtgtgatgatgatc

SEQ ID NO: 536894 - DNA, 120 bp, Artificial Sequence
  ENSG00000166848_8 (sequence is synthesized)
cattaagatcattcggcagttaatggagaagtttaacttggatctatcaacagttacacaggccttcctaaaaaatagtggtgagctggaggctacttccgccttcttagcgtctggtca

SEQ ID NO: 536895 - DNA, 120 bp, Artificial Sequence
  ENSG00000166848_9 (sequence is synthesized)
gagagctgatggatatcccatttggtcccgacaagatgacatagatttgcaaaaagatgatgaggataccagagaggcattggtcaaaaaatttggtgctcagaatgtagctcggaggat

SEQ ID NO: 536896 - DNA, 120 bp, Artificial Sequence
  ENSG00000166848_10 (sequence is synthesized)
tgaatttcgaaagaaataattggcaagataatgagaaaagaaaaaagtcatggtaggtgaggtggttaaaaaaaattgtgaccaatgaactttagagagttcttgcattggaactggcac

SEQ ID NO: 536897 - DNA, 120 bp, Artificial Sequence
  ENSG00000166848_11 (sequence is synthesized)
ttattttctgaccatcgctgctgttgctctgtgagtcctagatttttgtagccaagcagagttgtagagggggataaaaagaaaagaaattggatgtatttacagctgtccttgaacaag

SEQ ID NO: 536898 - DNA, 120 bp, Artificial Sequence
  ENSG00000166848_12 (sequence is synthesized)
tatcaatgtgtttatgaaaggaagatctaaatcagacaggagttggtctacatagtagtaatccattgttggaatggaacccttgctatagtagtgacaaagtgaaaggaaatttaggag

SEQ ID NO: 536899 - DNA, 120 bp, Artificial Sequence
  ENSG00000166848_13 (sequence is synthesized)
gcataggccatttcaggcagcataagtaatctcctgtcctttggcagaagctcctttagattgggatagattccaaataaagaatctagaaataggagaagatttaattatgaggccttg

SEQ ID NO: 536900 - DNA, 120 bp, Artificial Sequence
  ENSG00000166848_14 (sequence is synthesized)
aacacggattatccccaaacccttgtcatttcccccagtgagctctgatttctagactgctttgaaaatgctgtattcattttgctaacttagtatttgggtaccctgctctttggctgt

SEQ ID NO: 536901 - DNA, 120 bp, Artificial Sequence
  ENSG00000166848_15 (sequence is synthesized)
tctttttttggagcccttctcagtcaagtctgccggatgtctttctttacctacccctcagttttccttaaaacgcgcacacaactctagagagtgttaagaataatgttacttggttaa

SEQ ID NO: 536902 - DNA, 120 bp, Artificial Sequence
  ENSG00000166848_16 (sequence is synthesized)
tgtgttatttattgagtattgtttgtgctaagcattgtgttagatttaaaaaattagtggattgactccactttgttgtgttgttttcattgttgaaaataaatataactttgtattcga

SEQ ID NO: 536903 - DNA, 120 bp, Artificial Sequence
  ENSG00000166848_17 (sequence is synthesized)
gtttctcaaccagaggtgtccatctcttcacagtcatggctgatcttgtcatccacttttgggagattctcctgtatctgggcagggtatgccttctctacatcaggatctcattcccat

SEQ ID NO: 536904 - DNA, 120 bp, Artificial Sequence
  ENSG00000166848_18 (sequence is synthesized)
ggcagggtatgccttctctacatcaggatctcattcccatcacccagaatgcagtgctgtggcacgatcacagctctctgcagcctcaatttcccaggctcaagcaattctcccacctca

SEQ ID NO: 536905 - DNA, 120 bp, Artificial Sequence
  ENSG00000166848_19 (sequence is synthesized)
gaactacaggaatgtgccaccgcatcgggctaatgttttgtatttttggtagagacagggtttagccatgttgcccaggctggtctcgaattcttgggctcaagcaatcctctcacctca

SEQ ID NO: 536906 - DNA, 120 bp, Artificial Sequence
  ENSG00000166848_20 (sequence is synthesized)
ggtgcaaatcaccatgcctgaccctttatctctacttttggccagaagcaatccagttaacactctatcatatattattcctcctactgttttctcctctctaaattcttcagctttggc

SEQ ID NO: 536907 - DNA, 120 bp, Artificial Sequence
  ENSG00000166848_21 (sequence is synthesized)
attaagatgggtcctcatccgatgtaactggcgttcttacaagaagcagggaaatgacgtggcggagacacaggagggggaaataccgcgtgatgatggagttaaagacaggagttatgc

SEQ ID NO: 536908 - DNA, 120 bp, Artificial Sequence
  ENSG00000166848_22 (sequence is synthesized)
agctgcaagccaagaacaccaagggctgctggtgacagcaagcgaggagggagcctggccctgctggcatcttgattcagacttccagcccctaccactctgagagaataaattcctgtt

SEQ ID NO: 536909 - DNA, 120 bp, Artificial Sequence
  ENSG00000166848_23 (sequence is synthesized)
gttttaagccacccagtttagggtgctttgttgcagccgccttaagaaaggaatacatcgtatcattcccagaaactgcttgagtcccagggtttgagactggaaagtgctgagcctccc

SEQ ID NO: 536910 - DNA, 120 bp, Artificial Sequence
  ENSG00000166848_24 (sequence is synthesized)
tcactaccagatgccaccttggcgagggtgagtaggtaggaaaggctgagcagtgaccccacattcatgtgctatggcacatttgagaacataccaaacaggaaatgaaactgatgtgaa

SEQ ID NO: 536911 - DNA, 120 bp, Artificial Sequence
  ENSG00000166848_25 (sequence is synthesized)
acagaaatttccgtcataaaaacaatttgcatgaaacgttcactgtactaaaaaagtagatgatttaggacaattttaacttttaccctgaaaataaatgtttaaaccattcatgatgaa

SEQ ID NO: 536912 - DNA, 120 bp, Artificial Sequence
  ENSG00000166848_26 (sequence is synthesized)
aaggcggaggaggacccggaggccgcggatagcgggggtgaggaggctgagcgcggggcctcgcggatatctgcgcgggtggggttgggatctttctcctggctgcctggcgtccatctt

SEQ ID NO: 536913 - DNA, 120 bp, Artificial Sequence
  ENSG00000166848_27 (sequence is synthesized)
aaatacatataactatgtgtgatgatgatccacccacacctgaggaagactcagaaacacagcctgatgaggaggaagaagaagaagaagaaaaagtttctcaaccagaggcacttcctg

SEQ ID NO: 536914 - DNA, 120 bp, Artificial Sequence
  ENSG00000166848_28 (sequence is synthesized)
catggcaagtttatcttactaaatgtttgcttagaaattctaatgaccaaatgttgaaccaaaccaggcaccctctggaactcctcccgaccaggagaatgcatagagacaatggggcct

SEQ ID NO: 536915 - DNA, 120 bp, Artificial Sequence
  ENSG00000166848_29 (sequence is synthesized)
gagcttgctggtctggtttctactggagagggcatatggctgcctgtgaacaccagctgcttatggctagctgaccccatggctggaacattaggaatttctctgaagctgccaagatgc

SEQ ID NO: 536916 - DNA, 120 bp, Artificial Sequence
  ENSG00000166848_30 (sequence is synthesized)
ttttgtttttgggaaactgtctttcacttcctggcatgatgcctgcggctttcaaagcttcgttggtacaaagaaaatgaactctgaagaaggcaaactttggaactgggtgagcaagtt

SEQ ID NO: 536917 - DNA, 120 bp, Artificial Sequence
  ENSG00000166848_31 (sequence is synthesized)
gatttggctgccagaaacaacatttgagctttttctgcatttgtgtttgtatgtgaatcacccttgaggcatggcttggtttggactcggtcatctggaagagctatttggaactgaggc

SEQ ID NO: 536918 - DNA, 120 bp, Artificial Sequence
  ENSG00000166848_32 (sequence is synthesized)
aggagatttaggactaaacccagcctcttaactggggatctgtttggaagcactccatttgttcatgcctttgtgtatactccatttgtatgacctttgtgtataggccctaattgcttc

SEQ ID NO: 536919 - DNA, 120 bp, Artificial Sequence
  ENSG00000166848_33 (sequence is synthesized)
ctttccttttcactttatcttcctgattatctcagagagccacctacagccttaatcttcttggccaaaggcacccttagctctgtttaccttgaccagtgatttacggaggtgggaggg

SEQ ID NO: 536920 - DNA, 120 bp, Artificial Sequence
  ENSG00000166848_34 (sequence is synthesized)
attcatcccacaccgtgcaggtctaggatactgtggctcttcctgatgggagataaatgggagtggtgaaggtaccgcccacacaccacttagtggctttaaggctcataaatctccttt

SEQ ID NO: 536921 - DNA, 120 bp, Artificial Sequence
  ENSG00000166848_35 (sequence is synthesized)
tctttctttctcttcttttcccttcctttaaagcctggctcctttgctgaggcctgccaggaacttcatactctcatcctctttgggattccagctagttacatattatgacccattttt

SEQ ID NO: 536922 - DNA, 120 bp, Artificial Sequence
  ENSG00000166851_0 (sequence is synthesized)
ggaggctctgctcggatcgaggtctgcagcgcagcttcgggagcatgagtgctgcagtgactgcagggaagctggcacgggcaccggccgaccctgggaaagccggggtccccggagttg

SEQ ID NO: 536923 - DNA, 120 bp, Artificial Sequence
  ENSG00000166851_1 (sequence is synthesized)
cagctcccggagctccggcggcggctccaccggcgaaagagatcccggaggtcctagtggacccacgcagccggcggcgctatgtgcggggccgctttttgggcaagggcggctttgcca

SEQ ID NO: 536924 - DNA, 120 bp, Artificial Sequence
  ENSG00000166851_2 (sequence is synthesized)
agtgcttcgagatctcggacgcggacaccaaggaggtgttcgcgggcaagattgtgcctaagtctctgctgctcaagccgcaccagagggagaagatgtccatggaaatatccattcacc

SEQ ID NO: 536925 - DNA, 120 bp, Artificial Sequence
  ENSG00000166851_3 (sequence is synthesized)
gcagcctcgcccaccagcacgtcgtaggattccacggctttttcgaggacaacgacttcgtgttcgtggtgttggagctctgccgccggaggtctctcctggagctgcacaagaggagga

SEQ ID NO: 536926 - DNA, 120 bp, Artificial Sequence
  ENSG00000166851_4 (sequence is synthesized)
aagccctgactgagcctgaggcccgatactacctacggcaaattgtgcttggctgccagtacctgcaccgaaaccgagttattcatcgagacctcaagctgggcaaccttttcctgaatg

SEQ ID NO: 536927 - DNA, 120 bp, Artificial Sequence
  ENSG00000166851_5 (sequence is synthesized)
aagatctggaggtgaaaataggggattttggactggcaaccaaagtcgaatatgacggggagaggaagaagaccctgtgtgggactcctaattacatagctcccgaggtgctgagcaaga

SEQ ID NO: 536928 - DNA, 120 bp, Artificial Sequence
  ENSG00000166851_6 (sequence is synthesized)
aagggcacagtttcgaggtggatgtgtggtccattgggtgtatcatgtataccttgttagtgggcaaaccaccttttgagacttcttgcctaaaagagacctacctccggatcaagaaga

SEQ ID NO: 536929 - DNA, 120 bp, Artificial Sequence
  ENSG00000166851_7 (sequence is synthesized)
atgaatacagtattcccaagcacatcaaccccgtggccgcctccctcatccagaagatgcttcagacagatcccactgcccgcccaaccattaacgagctgcttaatgacgagttcttta

SEQ ID NO: 536930 - DNA, 120 bp, Artificial Sequence
  ENSG00000166851_8 (sequence is synthesized)
cttctggctatatccctgcccgtctccccatcacctgcctgaccattccaccaaggttttcgattgctcccagcagcctggaccccagcaaccggaagcccctcacagtcctcaataaag

SEQ ID NO: 536931 - DNA, 120 bp, Artificial Sequence
  ENSG00000166851_9 (sequence is synthesized)
gcttggagaaccccctgcctgagcgtccccgggaaaaagaagaaccagtggttcgagagacaggtgaggtggtcgactgccacctcagtgacatgctgcagcagctgcacagtgtcaatg

SEQ ID NO: 536932 - DNA, 120 bp, Artificial Sequence
  ENSG00000166851_10 (sequence is synthesized)
cctccaagccctcggagcgtgggctggtcaggcaagaggaggctgaggatcctgcctgcatccccatcttctgggtcagcaagtgggtggactattcggacaagtacggccttgggtatc

SEQ ID NO: 536933 - DNA, 120 bp, Artificial Sequence
  ENSG00000166851_11 (sequence is synthesized)
agctctgtgataacagcgtgggggtgctcttcaatgactcaacacgcctcatcctctacaatgatggtgacagcctgcagtacatagagcgtgacggcactgagtcctacctcaccgtga

SEQ ID NO: 536934 - DNA, 120 bp, Artificial Sequence
  ENSG00000166851_12 (sequence is synthesized)
gttcccatcccaactccttgatgaagaagatcaccctccttaaatatttccgcaattacatgagcgagcacttgctgaaggcaggtgccaacatcacgccgcgcgaaggtgatgagctcg

SEQ ID NO: 536935 - DNA, 120 bp, Artificial Sequence
  ENSG00000166851_13 (sequence is synthesized)
cccggctgccctacctacggacctggttccgcacccgcagcgccatcatcctgcacctcagcaacggcagcgtgcagatcaacttcttccaggatcacaccaagctcatcttgtgcccac

SEQ ID NO: 536936 - DNA, 120 bp, Artificial Sequence
  ENSG00000166851_14 (sequence is synthesized)
tgatggcagccgtgacctacatcgacgagaagcgggacttccgcacataccgcctgagtctcctggaggagtacggctgctgcaaggagctggccagccggctccgctacgcccgcacta

SEQ ID NO: 536937 - DNA, 120 bp, Artificial Sequence
  ENSG00000166851_15 (sequence is synthesized)
tggtggacaagctgctgagctcacgctcggccagcaaccgtctcaaggcctcctaatagctgccctcccctccggactggtgccctcctcactcccacctgcatctggggcccatactgg

SEQ ID NO: 536938 - DNA, 120 bp, Artificial Sequence
  ENSG00000166851_16 (sequence is synthesized)
ttggctcccgcggtgccatgtctgcagtgtgccccccagccccggtggctgggcagagctgcatcatccttgcaggtgggggttgctgtataagttatttttgtacatgttcgggtgtgg

SEQ ID NO: 536939 - DNA, 120 bp, Artificial Sequence
  ENSG00000166851_17 (sequence is synthesized)
gttctacagccttgtccccctccccctcaaccccaccatatgaattgtacagaatatttctattgaattcggaactgtcctttccttggctttatgcacattaaacagatgtgaatattc

SEQ ID NO: 536940 - DNA, 120 bp, Artificial Sequence
  ENSG00000166851_18 (sequence is synthesized)
aagcactggtgacttgttcaggccctgtctgcataggaccattggtttccccatttcctgatatccaaggccctgcttccgtggctcctgccgccttttctgatccgtcttttttactct

SEQ ID NO: 536941 - DNA, 120 bp, Artificial Sequence
  ENSG00000166851_19 (sequence is synthesized)
tctgcctggatgctgaagatgctttccattctttgctcaaagctgggcagctctgagctgctggtgccttcaagctgtttgcctgagtggcaggtcatcctgcagggccacaccgttggg

SEQ ID NO: 536942 - DNA, 120 bp, Artificial Sequence
  ENSG00000166851_20 (sequence is synthesized)
tcagaggccacggcttctgaagatctgttgcctcacagtgagcactatgtgcctgtcacctgagcatggcagctgctgctctagtaaccaggcactgattcagtttccccaaagcagtgg

SEQ ID NO: 536943 - DNA, 120 bp, Artificial Sequence
  ENSG00000166851_21 (sequence is synthesized)
agacttcgggccttccgggggagatacgagtcaggaaagggatctggtgctggggactcggagcttccggagtggggctgagagaggacccccagtctctcctggagctgcacaagagga

SEQ ID NO: 536944 - DNA, 120 bp, Artificial Sequence
  ENSG00000166851_22 (sequence is synthesized)
gggctctatgaaggatcagagggtgctaaggaggcacagagaaagagcttttaacgtgggtattttactgttccagggttgccactcaagtacctacagaacaaacgggtgtagctgtaa

SEQ ID NO: 536945 - DNA, 120 bp, Artificial Sequence
  ENSG00000166851_23 (sequence is synthesized)
actgtggcaaactgaaagcatgtaggcacagagtaagtagctagagctgatttttttcaggaaaggccacaaatcccaacttttatgagctcctcttttaaatgctgtaaatgttttaca

SEQ ID NO: 536946 - DNA, 67 bp, Artificial Sequence
  ENSG00000166851_24 (sequence is synthesized)
gtgaaacctctccagctgctagggaggccgaggcgggaggattgcttgaacccgggaagcagaggtt

SEQ ID NO: 536947 - DNA, 120 bp, Artificial Sequence
  ENSG00000166851_25 (sequence is synthesized)
gcctgggcgacagagcaagattccgtcacacacacaaaaaaaaggcgtggggggaggccaaacaaaaccccgcaagacacatttggctatgacctgccagtttgctaggcattcttccaa

SEQ ID NO: 536948 - DNA, 120 bp, Artificial Sequence
  ENSG00000166851_26 (sequence is synthesized)
gcattcttccaaccttccctccctctgaccaagaaactgagtgtccactattttaggccctgggaaattcagtagcgaggaggccagacagcttcgttgcatcatggggggctctggtac

SEQ ID NO: 536949 - DNA, 120 bp, Artificial Sequence
  ENSG00000166851_27 (sequence is synthesized)
tgtgcttctccaacttcaggatgtgtaggaatcacctgagcagtcttgttgagaggcggacactgactcgggaggtctggggtagggcctgaacgtttgcctttgcggttctaacaagct

SEQ ID NO: 536950 - DNA, 120 bp, Artificial Sequence
  ENSG00000166851_28 (sequence is synthesized)
ctcaggtgatggcgatgctactgttccctggccccgaggtagaggaagatttaagtaaaagcttcctggaggaggcgcaagtgaaccgcaggagctttcccggacgcccgagaaagggag

SEQ ID NO: 536951 - DNA, 120 bp, Artificial Sequence
  ENSG00000166851_29 (sequence is synthesized)
aaaccccgaaggaattcctcctctctcggggctgggtctccgcatccacgccgggtttggtttcccaggctatcccacgtgttcgggcgtccgtgtcaatcaggttttccccggctgggt

SEQ ID NO: 536952 - DNA, 120 bp, Artificial Sequence
  ENSG00000166851_30 (sequence is synthesized)
ccgggtttaaaggctgctgctgcgcagggcgctcccatggtgccgcgcggcgggcgggtttggattttaaatccccgcggccaatcagtggcgcgcaggcttttgtaacgttcccagcgc

SEQ ID NO: 536953 - DNA, 120 bp, Artificial Sequence
  ENSG00000166851_31 (sequence is synthesized)
ggagggtgagtgtcgctgctggggaactggaactgcctgcggggcagttggagcgcccagacctggagctgctggaaagagtacccagcaagggagagcctgggacttggagctgctaga

SEQ ID NO: 536954 - DNA, 120 bp, Artificial Sequence
  ENSG00000166851_32 (sequence is synthesized)
gaagggtgctgggagcctcccgcttacgtatggaaagtgtctttggtaagggcttcttggctctgggagctgctagaggagggggttccagtgaagtggagtctgagtcatgttgctgat

SEQ ID NO: 536955 - DNA, 120 bp, Artificial Sequence
  ENSG00000166851_33 (sequence is synthesized)
agggaagtcagcttctggacgcgaggtgctggggggaggggtgctggtaatggacgctagggccctggagtacccagggaggagtcccaggttagtgatgccgcgccctgggagcttctg

SEQ ID NO: 536956 - DNA, 120 bp, Artificial Sequence
  ENSG00000166851_34 (sequence is synthesized)
ggagatacgagtcaggaaagggatctggtgctggggactcggagcttccggagtggggctgagagaggacccccaggtaaggggggaagctagtaggagaaggggtgctgcgaatggttg

SEQ ID NO: 536957 - DNA, 120 bp, Artificial Sequence
  ENSG00000166851_35 (sequence is synthesized)
tggacagtgttaaggcagggtccagatgccgctgtgctggagaaggaatggggtgggggcatagggaaggagagaaacccaccaagacccctctttcatcccttgggagtccagagtcca

SEQ ID NO: 536958 - DNA, 120 bp, Artificial Sequence
  ENSG00000166851_36 (sequence is synthesized)
gtcctgtgcttcctttgcctggtaaccctctcccttccccaccggcctcaatccacctccccatccctcctgccctctccttcccacccacagtctctcctggagctgcacaagaggagg

SEQ ID NO: 536959 - DNA, 120 bp, Artificial Sequence
  ENSG00000166855_0 (sequence is synthesized)
actctggtgaatagacggctgtggggcagagaagcgtgaaggcctggctgccgggcaggtgaactctccacggggtctagggcccgcgaaagggttcggaaccgagtcagcgcgccttgc

SEQ ID NO: 536960 - DNA, 120 bp, Artificial Sequence
  ENSG00000166855_1 (sequence is synthesized)
gggcaggattcacgccgctgtgacccggaggtcctcagggggcgaagccccggcctaggcctcgcggagatgcccagctgcggtgcttgtacttgcggcgcggcggccgtccggctcatc

SEQ ID NO: 536961 - DNA, 120 bp, Artificial Sequence
  ENSG00000166855_2 (sequence is synthesized)
acctcctcactcgcctccgcgcagagaggtatttctggtggtcgcattcatatgtcagttttaggaaggcttgggacatttgaaactcagattctgcaaagagctcctcttagatccttt

SEQ ID NO: 536962 - DNA, 120 bp, Artificial Sequence
  ENSG00000166855_3 (sequence is synthesized)
acagaaacaccagcatactttgcctcaaaagatgggataagtaaagatggttctggagatggaaataagaaatcagcaagtgagggaagtagtaagaaatcaggctctgggaattctggg

SEQ ID NO: 536963 - DNA, 120 bp, Artificial Sequence
  ENSG00000166855_4 (sequence is synthesized)
aaaggtggaaaccagctgcgctgtcctaaatgtggcgacttgtgcacacatgtagagacctttgtatcatccacccgttttgtcaagtgtgaaaagtgtcatcatttttttgttgtgcta

SEQ ID NO: 536964 - DNA, 120 bp, Artificial Sequence
  ENSG00000166855_5 (sequence is synthesized)
tctgaagcagactcaaagaaaagcataattaaagaacctgaatcagcagcagaagctgtaaaattggcattccaacagaaaccaccacctccccctaagaagatttataactacctcgac

SEQ ID NO: 536965 - DNA, 120 bp, Artificial Sequence
  ENSG00000166855_6 (sequence is synthesized)
aagtatgttgttggccagtcatttgctaagaaggtgctttcagttgctgtgtacaatcattataagagaatatataataatatcccagctaatctgagacagcaagcagaggttgagaag

SEQ ID NO: 536966 - DNA, 120 bp, Artificial Sequence
  ENSG00000166855_7 (sequence is synthesized)
cagacatcattaacaccaagagagttagaaataagaagacgggaggatgagtacagatttacaaaattgcttcagattgctggaattagcccacatggtaatgctttaggagcatcaatg

SEQ ID NO: 536967 - DNA, 120 bp, Artificial Sequence
  ENSG00000166855_8 (sequence is synthesized)
cagcaacaggtaaatcaacaaatacctcaggaaaaacgaggaggtgaagtattggattcttctcatgatgacataaaacttgaaaaaagtaatattttgctgcttggaccaactgggtca

SEQ ID NO: 536968 - DNA, 120 bp, Artificial Sequence
  ENSG00000166855_9 (sequence is synthesized)
ggtaaaactctgctggcacaaaccctagctaaatgccttgatgtcccttttgctatctgtgactgtacaactttgactcaggctggatatgtaggcgaagatattgaatctgtgattgca

SEQ ID NO: 536969 - DNA, 120 bp, Artificial Sequence
  ENSG00000166855_10 (sequence is synthesized)
aaactactccaagatgccaattataatgtggaaaaagcacaacaaggaattgtctttctggatgaagtagataagattggcagtgtgccaggcattcatcaattacgggatgtaggtgga

SEQ ID NO: 536970 - DNA, 120 bp, Artificial Sequence
  ENSG00000166855_11 (sequence is synthesized)
gaaggcgttcagcaaggcttattaaaactactagaaggcacaatagtcaatgttccagaaaagaattcccgaaagctccgtggagaaacagttcaagttgatacaacaaacatcctgttt

SEQ ID NO: 536971 - DNA, 120 bp, Artificial Sequence
  ENSG00000166855_12 (sequence is synthesized)
gtggcatctggtgctttcaatggtttagacagaatcatcagcaggaggaaaaatgaaaagtatcttggatttggaacaccatctaatctgggaaaaggcagaagggctgcagctgctgca

SEQ ID NO: 536972 - DNA, 120 bp, Artificial Sequence
  ENSG00000166855_13 (sequence is synthesized)
gaccttgctaatcgaagtggggaatcgaatactcaccaagacattgaagaaaaagatcggttattgcgtcatgtggaagccagagatctgattgagtttggcatgattcctgagtttgtg

SEQ ID NO: 536973 - DNA, 120 bp, Artificial Sequence
  ENSG00000166855_14 (sequence is synthesized)
ggacggttgcctgtggtggttccattgcatagcctagatgagaaaacacttgtacaaatattaactgagccacgaaatgctgttattcctcagtaccaggccttattcagcatggataag

SEQ ID NO: 536974 - DNA, 120 bp, Artificial Sequence
  ENSG00000166855_15 (sequence is synthesized)
tgtgaactgaatgttactgaggatgctttgaaagctatagccagattggcactagaacgaaaaacaggtgcacgaggccttcggtccataatggaaaagctgttactagaaccaatgttt

SEQ ID NO: 536975 - DNA, 120 bp, Artificial Sequence
  ENSG00000166855_16 (sequence is synthesized)
gaagtccctaattctgatatcgtatgtgtggaggttgacaaagaagtagtagaaggaaaaaaggaaccaggatacatccgggctccaacaaaagaatcctctgaagaggagtatgactct

SEQ ID NO: 536976 - DNA, 120 bp, Artificial Sequence
  ENSG00000166855_17 (sequence is synthesized)
ggagttgaagaagaaggatggccccgccaagcagatgctgcaaacagctaaactgtcatattgctgtcttgtatatacagcttttccttcttttgtttaggatcataattgtctctacag

SEQ ID NO: 536977 - DNA, 120 bp, Artificial Sequence
  ENSG00000166855_18 (sequence is synthesized)
tctgatattaaaggcattggatctatcttggatatcatacatggtcagagaagcctttaggagaagaatcagatcatgtatataattgtaacatcacattgattttacggaagatgttat

SEQ ID NO: 536978 - DNA, 120 bp, Artificial Sequence
  ENSG00000166855_19 (sequence is synthesized)
acaatgtttagagataaaatgtacattattttggttcagttttttaaaaaaaatatgctttaacaaaattcttaggaattcttttaagcaatgcaggtattgcgataactgtagatttta

SEQ ID NO: 536979 - DNA, 120 bp, Artificial Sequence
  ENSG00000166855_20 (sequence is synthesized)
caataatgttactctacaaatgggaaaataaattctttaaaattgaatattgagataccattctttagtgttaccttttttacccacatgtgtttctgaaaatattggaattttattcat

SEQ ID NO: 536980 - DNA, 120 bp, Artificial Sequence
  ENSG00000166855_21 (sequence is synthesized)
gggcgacaaagtgagactccgtctcagggcgaaaacaaaaaattggaccaggtagttttcaagtagttaaacatttcattgaaaaataccctgaagaactatattttgataattggttta

SEQ ID NO: 536981 - DNA, 120 bp, Artificial Sequence
  ENSG00000166855_22 (sequence is synthesized)
aataccctgaagaactatattttgataattggtttagctgtattcctagtcttatctgctaatgcatgacactaacttcccaattggttctgtaaaaaaggccattttcttaccaagttg

SEQ ID NO: 536982 - DNA, 120 bp, Artificial Sequence
  ENSG00000166855_23 (sequence is synthesized)
taaaaaaggccattttcttaccaagttgtctgatttatttaccatcttttttttttttttttttttaattgagcggagtctcacgctgtcccaagctgaagtgcagtggtgcgatcttgg

SEQ ID NO: 536983 - DNA, 120 bp, Artificial Sequence
  ENSG00000166855_24 (sequence is synthesized)
aagtgctgggattgcaggcgtaagccaccacacccggccttatttaccatctttaatccattttagtactatgggtgagtacatggaattgaagtctggcttaaatcttcagaaagttat

SEQ ID NO: 536984 - DNA, 88 bp, Artificial Sequence
  ENSG00000166855_25 (sequence is synthesized)
tatttaccatctttaatccattttagtactatgggtgagtacatggaattgaagtctggcttaaatcttcagaaagttatatatcgct

SEQ ID NO: 536985 - DNA, 120 bp, Artificial Sequence
  ENSG00000166855_26 (sequence is synthesized)
tttcgccatgttgcccaggctggtctctcctgagctcaggcaatcggccaccttggcctctgaaagtgctagaattacgggcatgagccaccgcatccagccagaaagatacatatctaa

SEQ ID NO: 536986 - DNA, 120 bp, Artificial Sequence
  ENSG00000166855_27 (sequence is synthesized)
ttctagaaatagcatgcagtatcagtcatagtaacagccatgtgctgacctaaataaaatttcttgatattgtgtatttaacctgaagtattgagctagtttttttgttttgttttttgg

SEQ ID NO: 536987 - DNA, 120 bp, Artificial Sequence
  ENSG00000166855_28 (sequence is synthesized)
tgctgaacattttggtctaattctttggcttcttagaacattttaaaaaatctatgttttgctatcagccaaagtaaatgtgttcacactaacatataagttactaaccttcattataca

SEQ ID NO: 536988 - DNA, 120 bp, Artificial Sequence
  ENSG00000166855_29 (sequence is synthesized)
gcaaagctaaaaagtggtgggatatttggggtcttaatgaaaattgtatcatttaattccataaatattaaaatatttgggtaccttttaagctttttttctttccttctataatggtgg

SEQ ID NO: 536989 - DNA, 120 bp, Artificial Sequence
  ENSG00000166855_30 (sequence is synthesized)
tacaagttctatattcattcagtttaatctcatttgaaattgtttaaatcagagtacatgtaaatatttgtgggtttttttttttggtttatagactcgagctttccttttacacagttt

SEQ ID NO: 536990 - DNA, 120 bp, Artificial Sequence
  ENSG00000166855_31 (sequence is synthesized)
tttttagggaaaaactaaagctattaggaaattctaaatcttgttgatgaagagttgggctttctttgatataattaataaaagggatgtatggtatttatggctgggtaggaccagaaa

SEQ ID NO: 536991 - DNA, 120 bp, Artificial Sequence
  ENSG00000166855_32 (sequence is synthesized)
tgcactttgtattacagagtgttaaggctggttgctatagtatggaacagaaacacctctccttggtctccctagtaatggttcaagttcttcccaggaagtcttacatattataacttt

SEQ ID NO: 536992 - DNA, 120 bp, Artificial Sequence
  ENSG00000166855_33 (sequence is synthesized)
gttcattatctttcccttatagcatcattttcctttttgtagagtggaaatcagactagctgctaaacatattaaggttaatcctccagaaatgtactggggaggcattttagtcacaac

SEQ ID NO: 536993 - DNA, 120 bp, Artificial Sequence
  ENSG00000166855_34 (sequence is synthesized)
aacttacatttggctttggaagttgttaacaaagcatagtcgatgtttttaaatcaaacataatttgtatcttggaacttacattttgacatttgaataaaacaaaaagactaaatgaaa

SEQ ID NO: 536994 - DNA, 120 bp, Artificial Sequence
  ENSG00000166855_35 (sequence is synthesized)
aagggaatacatcaacctcccaaatattgtacgtttggtttcacattcaattagattctgttttatttcttccgcccccaaactccacatatcattttgaagtagtttagatcctaaaag

SEQ ID NO: 536995 - DNA, 120 bp, Artificial Sequence
  ENSG00000166855_36 (sequence is synthesized)
actactcattttaaaaatcagaatataaatgattctataacctgtatcttgcgattgaagtattacggctcttgagaagaaaatctaaggccagtcatctagatacactatcagtattcc

SEQ ID NO: 536996 - DNA, 120 bp, Artificial Sequence
  ENSG00000166855_37 (sequence is synthesized)
tgcatagaatacaaactggatttgaggcattggtgttgcccttcaggccaatccctaacatcttcacaggaataataaaataaaaaacagctatatctaaataataatagatcggatgta

SEQ ID NO: 536997 - DNA, 120 bp, Artificial Sequence
  ENSG00000166855_38 (sequence is synthesized)
aagccccggggcccgcaggacagcggcgggagagatggggagaagtcccgcaggagttggttcggaagtacttgggtgtttcagcagtcctttgctggctttcccaacttgaccgggagg

SEQ ID NO: 536998 - DNA, 120 bp, Artificial Sequence
  ENSG00000166856_0 (sequence is synthesized)
agcagtgacagctacttcccggatgagaagggcggccgtgaagccagcagggaagccagccccacagccaagggccccccagcctcctcacagctccccatagcctggacctgccggccc

SEQ ID NO: 536999 - DNA, 120 bp, Artificial Sequence
  ENSG00000166856_1 (sequence is synthesized)
tccctccaggaccgaggggctcccaagggaaactcaggcgtgtgctggtcccaatgtcagtgaaacccagctgggggcctggcccctcggagggggtcaccgcagtgcctaccagtgacc

SEQ ID NO: 537000 - DNA, 120 bp, Artificial Sequence
  ENSG00000166856_2 (sequence is synthesized)
ttggagagatccacaactggaccgagctgcttgacctcttcaaccacactttgtctgagtgccacgtggagctcagccagagcaccaagcgcgtggtcctctttgccctctacctggcca

SEQ ID NO: 537001 - DNA, 120 bp, Artificial Sequence
  ENSG00000166856_3 (sequence is synthesized)
tgtttgtggttgggctggtggagaacctcctggtgatatgcgtcaactggcgcggctcaggccgggcagggctgatgaacctctacatcctcaacatggccatcgcggacctgggcattg

SEQ ID NO: 537002 - DNA, 120 bp, Artificial Sequence
  ENSG00000166856_4 (sequence is synthesized)
tcctgtctctgcccgtgtggatgctggaggtcacgctggactacacctggctctggggcagcttctcctgccgcttcactcactacttctactttgtcaacatgtatagcagcatcttct

SEQ ID NO: 537003 - DNA, 120 bp, Artificial Sequence
  ENSG00000166856_5 (sequence is synthesized)
tcctggtgtgcctcagtgtcgaccgctatgtcaccctcaccagcgcctccccctcctggcagcgttaccagcaccgagtgcggcgggccatgtgtgcaggcatctgggtcctctcggcca

SEQ ID NO: 537004 - DNA, 120 bp, Artificial Sequence
  ENSG00000166856_6 (sequence is synthesized)
tcatcccgctgcctgaggtggtccacatccagctggtggagggccctgagcccatgtgcctcttcatggcaccttttgaaacgtacagcacctgggccctggcggtggccctgtccacca

SEQ ID NO: 537005 - DNA, 120 bp, Artificial Sequence
  ENSG00000166856_7 (sequence is synthesized)
ccatcctgggcttcctgctgcccttccctctcatcacagtcttcaatgtgctgacagcctgccggctgcggcagccaggacaacccaagagccggcgccactgcctgctgctgtgcgcct

SEQ ID NO: 537006 - DNA, 120 bp, Artificial Sequence
  ENSG00000166856_8 (sequence is synthesized)
acgtggccgtctttgtcatgtgctggctgccctatcatgtgaccctgctgctgctcacactgcatgggacccacatctccctccactgccacctggtccacctgctctacttcttctatg

SEQ ID NO: 537007 - DNA, 120 bp, Artificial Sequence
  ENSG00000166856_9 (sequence is synthesized)
atgtcattgactgcttctccatgctgcactgtgtcatcaaccccatcctttacaactttctcagcccacacttccggggccggctcctgaatgctgtagtccattaccttcctaaggacc

SEQ ID NO: 537008 - DNA, 120 bp, Artificial Sequence
  ENSG00000166856_10 (sequence is synthesized)
agaccaaggcgggcacatgcgcctcctcttcctcctgttccacccagcattccatcatcatcaccaagggtgatagccagcctgctgcagcagccccccaccctgagccaagcctgagct

SEQ ID NO: 537009 - DNA, 120 bp, Artificial Sequence
  ENSG00000166856_11 (sequence is synthesized)
ttcaggcacaccatttgcttccaaatacttcccccatctctcccactcagcctcttacacccagctgaggtagaggccagactcctccaacagtgaaggaaaaggcacaggtgagagtat

SEQ ID NO: 537010 - DNA, 120 bp, Artificial Sequence
  ENSG00000166856_12 (sequence is synthesized)
aggtgggagatttggggggatgtagaggggagggtcaaagcactcgtggtcaattttgaatctatcttaaaatactgaggtgtggagagagagacaggatcaggagcgatagagagcagg

SEQ ID NO: 537011 - DNA, 120 bp, Artificial Sequence
  ENSG00000166856_13 (sequence is synthesized)
ccctcagtgttgtactatttgtctcggtccttgtgtctaaggagcaatgcagaaaaaaaggtgaaataaatggaagagatagccatggactctggatcttttaaaaatctgcacttccag

SEQ ID NO: 537012 - DNA, 120 bp, Artificial Sequence
  ENSG00000166856_14 (sequence is synthesized)
agacacattcatttcataaatcactctggctggaaacagtgaactctgcaggaacctcacaaaactccttttgcgtttgtgagcttgttgatcttccagctcactatgcaggttatgggg

SEQ ID NO: 537013 - DNA, 120 bp, Artificial Sequence
  ENSG00000166856_15 (sequence is synthesized)
acaagaggccagaggccaaggaaccaggcggccccagcaggacgttccctagctgtgcatcctatgcacagccatgataagtgaaggcggatggggatggcaggggtgggggcgaagcca

SEQ ID NO: 537014 - DNA, 120 bp, Artificial Sequence
  ENSG00000166856_16 (sequence is synthesized)
aggtctgagacctgcaccctgcagctgggtcagcaggatggtatctccacccgcggccatccaggaaacacagctccatttccttgctgacaccctcccctccccgttgtccatcctgct

SEQ ID NO: 537015 - DNA, 120 bp, Artificial Sequence
  ENSG00000166856_17 (sequence is synthesized)
ccctccccacaagcaagaggagttgtcccagagtcagctcctcatagctgacctcttaccagcttcggatctaggaaacttccagacttctagggagacacagagctaccagaaagccca

SEQ ID NO: 537016 - DNA, 120 bp, Artificial Sequence
  ENSG00000166856_18 (sequence is synthesized)
acccacccccatctctttctctccagatcataggaaagtatcaagggatgtcattccgggagcagcccttgggacagccagcagcaggtgctggcagatgctctgtccttcaccctctgt

SEQ ID NO: 537017 - DNA, 120 bp, Artificial Sequence
  ENSG00000166856_19 (sequence is synthesized)
ccccggcaccagatggggaaggccacagtggaaacttctcaattccgtcacagggcagagctctgacactgttataagtcagttctccctggccatgtcttttcctaattttcctgtccc

SEQ ID NO: 537018 - DNA, 120 bp, Artificial Sequence
  ENSG00000166856_20 (sequence is synthesized)
acaacttaggttccttaacacttgttctacagatgaaacaaaaaagtcctctgttaacaagtagaccttctggaaaaggatcacttatgtttgggagactaggaccctgtccatgaagaa

SEQ ID NO: 537019 - DNA, 120 bp, Artificial Sequence
  ENSG00000166856_21 (sequence is synthesized)
ctctgaagtaaaggcctaagaacaggatctagtttccgccttccaattccacgtcctttgcctcttaatcctgcccgtggtaaggggactggatggaatcactgatagcctcttcaccat

SEQ ID NO: 537020 - DNA, 120 bp, Artificial Sequence
  ENSG00000166856_22 (sequence is synthesized)
ctcctctgtcctgcttaagtgctccatgtgtctggaatgtttaacttggagtaactactcactgacttggagaccacctgttctactttgagaaatcagaactgttctgtggatgcactg

SEQ ID NO: 537021 - DNA, 120 bp, Artificial Sequence
  ENSG00000166856_23 (sequence is synthesized)
acagcgtgctccaactgcatatgcacccaggtttgtcaggagcatggaaggaaacctgcatctccctgtttactgggcccaaacctgaaagggtcttaagctgcagacagcttctcagta

SEQ ID NO: 537022 - DNA, 120 bp, Artificial Sequence
  ENSG00000166856_24 (sequence is synthesized)
gcacagagctgaaggctttttgaaccaggagtctgggttgtggcttgggtcgcagtaagggcttagcctatcaatgcagaattcacattgaaaaagactttcctctcttgtcccaacaca

SEQ ID NO: 537023 - DNA, 120 bp, Artificial Sequence
  ENSG00000166856_25 (sequence is synthesized)
aaaaagcaagccaagatctgatgcccatatcactgcctcctctgacttgggctacaggagtttcctgaaggaaaccaaattttacatctctgtcacattccagatcaccttagaggccac

SEQ ID NO: 537024 - DNA, 120 bp, Artificial Sequence
  ENSG00000166856_26 (sequence is synthesized)
gctcccaagattagttatcaccctggcagtatgaatacttccctaaggcctcccatccatggaggggaagagtgggaaccagctgttacactcagcatctactgagcactgatgggagcc

SEQ ID NO: 537025 - DNA, 120 bp, Artificial Sequence
  ENSG00000166856_27 (sequence is synthesized)
ctgcctgggccatgtgctgtggggccaaatggacatcactccctaacttcttgaggtctgtctcctctgtggattcacgcatgtatcaacctcattaaactatgccaaacttttgcctcc

SEQ ID NO: 537026 - DNA, 120 bp, Artificial Sequence
  ENSG00000166860_0 (sequence is synthesized)
gagtctggccgcggccggcggcgccgcctcctcgtcgggccgggcacggcgggccggggcctttgtgtgaagcggcggcggcgatggtgctcggggcgccgcagagccggattaactgtg

SEQ ID NO: 537027 - DNA, 120 bp, Artificial Sequence
  ENSG00000166860_1 (sequence is synthesized)
gctcggggcgccgcagagccggattaactgtgctgataaggaggtaatttcataggagctgctaagatgggcatgaggatcaaactgcaaagcaccaaccaccccaacaacctgctgaag

SEQ ID NO: 537028 - DNA, 120 bp, Artificial Sequence
  ENSG00000166860_2 (sequence is synthesized)
gaactcaacaagtgccggctctcagagaccatgtgcgacgtcaccattgtggtggggagccgctccttcccggcccacaaggctgtgctggcctgtgcagctggctacttccagaacctc

SEQ ID NO: 537029 - DNA, 120 bp, Artificial Sequence
  ENSG00000166860_3 (sequence is synthesized)
ttcctgaatactgggcttgatgctgccaggacctatgtggtggacttcatcacccctgccaactttgagaaggttctgagctttgtctacacttcagaactcttcacagacctgatcaat

SEQ ID NO: 537030 - DNA, 120 bp, Artificial Sequence
  ENSG00000166860_4 (sequence is synthesized)
gttggggtcatctacgaggtagctgagcgtctgggtatggaggacctcctccaggcctgtcactctacctttcctgatctggagagcactgccagggccaagcccctgaccagcaccagt

SEQ ID NO: 537031 - DNA, 120 bp, Artificial Sequence
  ENSG00000166860_5 (sequence is synthesized)
gagagccactctggtaccctgagttgtccttcggcagaacctgcccatccccttggagaactccgaggtggtggggactaccttggtgctgatagaaactatgtgttgcccagtgatgct

SEQ ID NO: 537032 - DNA, 120 bp, Artificial Sequence
  ENSG00000166860_6 (sequence is synthesized)
ggagggagctataaagaggaagagaagaatgttgccagtgacgctaaccatagcctgcatctgccgcaaccgcccccaccaccgccaaagacagaagaccatgacacccctgctcccttc

SEQ ID NO: 537033 - DNA, 120 bp, Artificial Sequence
  ENSG00000166860_7 (sequence is synthesized)
acgtccattcctagcatgatgacccagccactcctaggcactgtcagcacgggcatccagaccagcacgagctcctgccagccatacaaagttcaaagcaatggagacttcagtaaaaac

SEQ ID NO: 537034 - DNA, 120 bp, Artificial Sequence
  ENSG00000166860_8 (sequence is synthesized)
agcttcctcacccctgacaatgcagtagacattaccactgggaccaactcctgtctgagcaatagtgagcactccaaagatcctggctttgggcagatggatgagctccagctcgaggac

SEQ ID NO: 537035 - DNA, 120 bp, Artificial Sequence
  ENSG00000166860_9 (sequence is synthesized)
ctgggggatgatgacttgcagtttgaagaccctgctgaggatataggcacaactgaggaggtgattgagctgagtgatgacagtgaggatgagttggcttttggagagaatgacaatcgg

SEQ ID NO: 537036 - DNA, 120 bp, Artificial Sequence
  ENSG00000166860_10 (sequence is synthesized)
gagaataaggccatgccctgccaggtgtgcaagaaagttctagagcccaacattcaactgatccggcagcatgctcgggaccatgtggacctgctgacgggcaactgcaaggtctgcgag

SEQ ID NO: 537037 - DNA, 120 bp, Artificial Sequence
  ENSG00000166860_11 (sequence is synthesized)
acccacttccaggaccgaaactcccgggtaactcatgtcctgtcccacattggtattttccttttctcctgcgacatgtgtgaaactaagttctttacccagtggcagctgacccttcac

SEQ ID NO: 537038 - DNA, 120 bp, Artificial Sequence
  ENSG00000166860_12 (sequence is synthesized)
cgacgggatggaatatttgagaacaacatcattgtccaccccaacgatcccctgccagggaagctgggtctcttttcaggggcagcctccccagagctgaaatgcgctgcctgtgggaaa

SEQ ID NO: 537039 - DNA, 120 bp, Artificial Sequence
  ENSG00000166860_13 (sequence is synthesized)
gtattggccaaagatttccatgtggtccggggccacatccttgaccatctaaacttgaagggccaggcctgcagtgtctgcgaccagcgtcaccttaacctctgcagcctcatgtggcac

SEQ ID NO: 537040 - DNA, 120 bp, Artificial Sequence
  ENSG00000166860_14 (sequence is synthesized)
acgctgtcccatctcggcatctcagtcttctcctgttctgtctgtgcgaacagctttgtggactggcatcttctagagaagcacatggctgtgcaccaaagtctggaagacgccctcttc

SEQ ID NO: 537041 - DNA, 120 bp, Artificial Sequence
  ENSG00000166860_15 (sequence is synthesized)
cactgccgcttgtgcagccagagcttcaagtcagaggctgcctatcgctaccacgtcagccagcacaaatgcaacagtggccttgatgcacggcctggttttgggctgcagcacccagct

SEQ ID NO: 537042 - DNA, 120 bp, Artificial Sequence
  ENSG00000166860_16 (sequence is synthesized)
ctccagaagcggaagctgccagcagaggagtttctgggtgaagagctggcgctgcagggccaacctgggaacagcaagtatagctgcaaggtctgtggcaaaagatttgcccacacaagc

SEQ ID NO: 537043 - DNA, 120 bp, Artificial Sequence
  ENSG00000166860_17 (sequence is synthesized)
gaattcaactaccaccggcggatccacacgggggagaagccataccaatgtaaggtgtgccacaagttctttcgaggccgctcgaccatcaagtgccacctaaagacacactcgggggcc

SEQ ID NO: 537044 - DNA, 120 bp, Artificial Sequence
  ENSG00000166860_18 (sequence is synthesized)
ctcatgtaccgctgcacagtctgtgggcactacagttccacccttaacctcatgagcaaacatgttggtgtgcacaaaggcagcctcccccctgacttcaccatcgagcagaccttcatg

SEQ ID NO: 537045 - DNA, 120 bp, Artificial Sequence
  ENSG00000166860_19 (sequence is synthesized)
tacatcatccattccaaagaggcggataagaacccggacagttgactgggtcccggcagagccacggggagctcccaagcagcagccaggatgctgatatctaagaggtgttggtccctc

SEQ ID NO: 537046 - DNA, 120 bp, Artificial Sequence
  ENSG00000166860_20 (sequence is synthesized)
cccagctgaagttataattttgccttggtaggaattctgttctgtgttgtgtttaaagaagaaaagaagaagaaatagcacataagctgttactgttgttgagaagcaacagccctatca

SEQ ID NO: 537047 - DNA, 120 bp, Artificial Sequence
  ENSG00000166860_21 (sequence is synthesized)
catttacctccatacctgttcttgcccatgcagggctatgtttttcattcttttgaggctggttttgggatctagtcaagcagttggtgtccactagacccccttccccagcctctctag

SEQ ID NO: 537048 - DNA, 120 bp, Artificial Sequence
  ENSG00000166860_22 (sequence is synthesized)
ttttagtttactgataggttttatgctgctaagaatccaaccaacagcctcacttaacagaggaggtaaagggaggttttcactgtgggtgttactgcaggcctccaactgggatgacca

SEQ ID NO: 537049 - DNA, 120 bp, Artificial Sequence
  ENSG00000166860_23 (sequence is synthesized)
gcaatgagaaagattttgggaatgtgatcattcagaaaagacaggtcagcagggcagtcccctcaggttccagccctcagcagggacaagacatcagggatgttggtgtctgcttatcta

SEQ ID NO: 537050 - DNA, 120 bp, Artificial Sequence
  ENSG00000166860_24 (sequence is synthesized)
cagccctaatctgctgattgaacagtgaaaatcttttggcagctagatccatactaggcacagagctttctatttaggtcagaaagctttgggatgaacccctgccagccagaaggggtg

SEQ ID NO: 537051 - DNA, 120 bp, Artificial Sequence
  ENSG00000166860_25 (sequence is synthesized)
tcctgcagtgccaccagaagtggcagcctggatggacaggagaggtttctcttttctcctcatttccaaagaaacaggattttatggagtgatggcccgggacgtccggccttctgtggg

SEQ ID NO: 537052 - DNA, 120 bp, Artificial Sequence
  ENSG00000166860_26 (sequence is synthesized)
tagtcatctgttttggccacttctgttggccatgagtgtcttggtggagaggtggggatgtatctgacagcagcagccttgccttaatttatatctggtctcccgtccagaagtgtttgg

SEQ ID NO: 537053 - DNA, 120 bp, Artificial Sequence
  ENSG00000166860_27 (sequence is synthesized)
cccgtggtgtagatgagctgactccatgaagtggtggagtggcagaccgcgagcccttcaggattaaagggacctgagtaactggtggtgtgtagcagggtgtgcgttctgactgtctgt

SEQ ID NO: 537054 - DNA, 120 bp, Artificial Sequence
  ENSG00000166860_28 (sequence is synthesized)
cctagtcgggtaacctgtttactttgtgctaacagtgccggagctttgtcagctcacctttgacctgctggaatttatcctgatctgtcgttgccatcacctccagggggcgctattgga

SEQ ID NO: 537055 - DNA, 120 bp, Artificial Sequence
  ENSG00000166860_29 (sequence is synthesized)
tggcagctggttcaggccctccgtgggtggctgcagagtgtgccggcacagcccacgcagctggttagctccactcttacttggttttctaaggggctttgcccaaagaagtcttgaggg

SEQ ID NO: 537056 - DNA, 120 bp, Artificial Sequence
  ENSG00000166860_30 (sequence is synthesized)
atagggccctcgatcttgcatacttgtgaggtgccacctcagtagctcatactacctcaccctgctcaggtgagctctgggagtccctggcctcagccctggcactgcccctggtgggat

SEQ ID NO: 537057 - DNA, 120 bp, Artificial Sequence
  ENSG00000166860_31 (sequence is synthesized)
tcagcaacaccccgggctgtttcacaagcaagtggttttcattaactcacaaagcctttttggacattaatatttatttatttttgtttttgtatacacattacccagcatctcttttgt

SEQ ID NO: 537058 - DNA, 120 bp, Artificial Sequence
  ENSG00000166860_32 (sequence is synthesized)
ataagagactttaggaaaatgagtttctccccagcaagtagccatattccagagaacagccttgaccagagatgtggagaaccaggggtataactaagggaagacatgtcaagcccttaa

SEQ ID NO: 537059 - DNA, 120 bp, Artificial Sequence
  ENSG00000166860_33 (sequence is synthesized)
gcaaattcttcttctccagattgtctctagcataataaacccagggaacactttaggccatgggtgtatgttctataaagttcgggacagttaaattccaggcctttcatcccccttcct

SEQ ID NO: 537060 - DNA, 120 bp, Artificial Sequence
  ENSG00000166860_34 (sequence is synthesized)
tcctgtgatggagtagattggggacagggttgaggggaacaagtgacatgaatgacctatttgcacagtttggaagcctcctgtctttatttatattgagatgtcagacaaaccaaagct

SEQ ID NO: 537061 - DNA, 120 bp, Artificial Sequence
  ENSG00000166860_35 (sequence is synthesized)
ccatccttgttggacctgctgcttctccccagccctgaactgataaagcctcagagttggagtgcctggctctctggtggggtgaccattagatgaagggacttgtacagtggccagttt

SEQ ID NO: 537062 - DNA, 120 bp, Artificial Sequence
  ENSG00000166860_36 (sequence is synthesized)
aaaggtccacctttgaccatctaaacccaccttgttcagtgtcctctgaggacatcctcatcaggaaagcagtgttgagactcttcattgctgactggcttctccctttcttactcacac

SEQ ID NO: 537063 - DNA, 120 bp, Artificial Sequence
  ENSG00000166860_37 (sequence is synthesized)
tgaccattagaatttaagaaggaaatgtgtaacagactacagtcaagtgtctgctacattttcaagcatgagcaatccctcccagactgttggtgaggactgatttttgaaatgctggtg

SEQ ID NO: 537064 - DNA, 120 bp, Artificial Sequence
  ENSG00000166860_38 (sequence is synthesized)
tgagagaggtggtaattacaggaaccagccgagtggctgagagcagataaatgtgctggagaaacctttttccttaacagagggcatcatggatgctgggtggtctgtgtacttaacctg

SEQ ID NO: 537065 - DNA, 120 bp, Artificial Sequence
  ENSG00000166860_39 (sequence is synthesized)
aaactgtgaagttttccctttttgccagtaaaccaaaaagcagatccttgaaacttggcccttgaaacacgaaacagaaaactgcatcccctgatcccccgggggctgatcagattgatc

SEQ ID NO: 537066 - DNA, 120 bp, Artificial Sequence
  ENSG00000166860_40 (sequence is synthesized)
agggtggctcagttggtcccagtcagatacgtcataggatcagtagctcatgagatttgttgaccaaaccctctccctgttggtgacccctgtattcacacctgaacttcccgtttcccc

SEQ ID NO: 537067 - DNA, 120 bp, Artificial Sequence
  ENSG00000166860_41 (sequence is synthesized)
ccaccccaccaaagtcatgtctgcttcctctgcctccagctcaccctcttctgaatggttttgcttgaaacactatattgtggcagagggcaccctgggatacctggtagaaggtattca

SEQ ID NO: 537068 - DNA, 120 bp, Artificial Sequence
  ENSG00000166860_42 (sequence is synthesized)
ttttattttgcatttttaattgttttgactttctgttcatttgattttgttgctccctctctcctggaacctagtttactactctcttctgtgttactctgaagttctgtttaagccttg

SEQ ID NO: 537069 - DNA, 120 bp, Artificial Sequence
  ENSG00000166860_43 (sequence is synthesized)
aacatcctcttctcccattttcttggtatgtactcaggaccagctacatcatttgtggagccctcttattcataaattattaaaaatttcaaggtggtggtcatagagcattaaaccaaa

SEQ ID NO: 537070 - DNA, 120 bp, Artificial Sequence
  ENSG00000166860_44 (sequence is synthesized)
tatgaggccattcccaacttgttttccgaggggaaaatggtaatacttgtgtggcacccggggttaaacagcagaggctccatgtggccagaggcagagattagtatcctggcactccag

SEQ ID NO: 537071 - DNA, 120 bp, Artificial Sequence
  ENSG00000166860_45 (sequence is synthesized)
tgacccactgggtgactcactgatgccacagcacccgctaggaagctctgctgaaccttagtatttggtcctaaattttatgactccatggagttcccgtagtccatggctagttaggaa

SEQ ID NO: 537072 - DNA, 120 bp, Artificial Sequence
  ENSG00000166860_46 (sequence is synthesized)
gaaaggaggtgggataagggtcaggcccaggtgacccctaagaaccaggagatgggtaaaagtttttttttatattctgcttttctgatctgtgagtacctgtttgtctccaggccaaac

SEQ ID NO: 537073 - DNA, 120 bp, Artificial Sequence
  ENSG00000166860_47 (sequence is synthesized)
ctttgggcttaaatatctttttcctagacaggtttttgctagtgttgaattttcttcttcctctggcctccttctgtgcccctttccccaagcccaagactgcttaacttccaaagcaaa

SEQ ID NO: 537074 - DNA, 120 bp, Artificial Sequence
  ENSG00000166860_48 (sequence is synthesized)
ttctagatagacactgtatttattggtatgggagtgggctctatggggtggtctgcacccatctgggactcttttccctaaatcctgcaccaaatgagtcaggaggcagggtgcacagca

SEQ ID NO: 537075 - DNA, 120 bp, Artificial Sequence
  ENSG00000166860_49 (sequence is synthesized)
ttagtttcaatgtggttatgcatcataagcttaacatcagaatgaaaatgaaactcgattttgatgtttctttaaaacccttcccctgtccaatccactcgccgcccccaccttgaatag

SEQ ID NO: 537076 - DNA, 120 bp, Artificial Sequence
  ENSG00000166860_50 (sequence is synthesized)
ctaaagtctcttatgaaacagagaagagttgttgacgtctaactccttccattaaattaataagtactgacctcctaatatttaagtgtttactatctattgctgtaaagttttgtatat

SEQ ID NO: 537077 - DNA, 120 bp, Artificial Sequence
  ENSG00000166860_51 (sequence is synthesized)
tttgtaaacttttttccccaaatagtagatgtctaaaatcattgtacatctgattcttttatattccattgttcagcacaaagtgtggtttttatttagaataaaaaaagaaatttgaaa

SEQ ID NO: 537078 - DNA, 120 bp, Artificial Sequence
  ENSG00000166862_0 (sequence is synthesized)
gcggcgcagggagctgtccggttcagcaccacccgtaatgcagtaggtgggagcgcctccgcgggcgcccagccggtagcgagtggggggcaggcgcgcggcccaccctgcagcaagacg

SEQ ID NO: 537079 - DNA, 120 bp, Artificial Sequence
  ENSG00000166862_1 (sequence is synthesized)
ccggctccctcgtttccaggagctttgcagatagggggagggaaatccgcctcgattctccaggagaaaccccctctctcccccacttcgccaacactacccccgccaccaacaacaata

SEQ ID NO: 537080 - DNA, 120 bp, Artificial Sequence
  ENSG00000166862_2 (sequence is synthesized)
ccgccgccgccgcgcctgcccgccctgccgccgccgccgccgccgccgccgctgcccgggcaaaaccatggaaagcgagacccccgcacctgtgcagctgagctcaagggcttacagaat

SEQ ID NO: 537081 - DNA, 120 bp, Artificial Sequence
  ENSG00000166862_3 (sequence is synthesized)
tgcagctgagctcaagggcttacagaatactgggaagtctggtctgaaacgaaagcgccgagaccccccaaggaagagaactggcgaagcaaaggattttcatggcgcaggccgcagagc

SEQ ID NO: 537082 - DNA, 120 bp, Artificial Sequence
  ENSG00000166862_4 (sequence is synthesized)
cgagaacgaagaccgaaggttgcatctcggctctcacagtctctaactgtctaggtcccgaccatgagaaatggtgttgagaattcggctgttccctggttcactgtggaagccatctcc

SEQ ID NO: 537083 - DNA, 120 bp, Artificial Sequence
  ENSG00000166862_5 (sequence is synthesized)
ccatctccaaattaactatcacatatggaaactggagaccagaattttagaaaaagagattaaggcatctcacttgggggggtggggggtgtctttttattttttttttccttttctttt

SEQ ID NO: 537084 - DNA, 120 bp, Artificial Sequence
  ENSG00000166862_6 (sequence is synthesized)
aaacactgcaactggaacagtttctgatctcaaaaggcaagcctcttcccgtgtgatctttataatttacactcttttccgtgagctttcttacctccctttttttataactctccatat

SEQ ID NO: 537085 - DNA, 120 bp, Artificial Sequence
  ENSG00000166862_7 (sequence is synthesized)
tctctattcatacatatatccattatattagtagtggaataatttttatttttatttattttttttggctttagtacttgcaccctcacacacactctcccgagaaccagaagtcggttg

SEQ ID NO: 537086 - DNA, 120 bp, Artificial Sequence
  ENSG00000166862_8 (sequence is synthesized)
ggtgtttatataatgaagaattatggggctgtttgatcgaggtgttcaaatgcttttaaccaccgttggtgctttcgctgccttcagcctgatgaccatagctgtgggaaccgactattg

SEQ ID NO: 537087 - DNA, 120 bp, Artificial Sequence
  ENSG00000166862_9 (sequence is synthesized)
gcctagaagggaatttcaaaggtctgtgcaagcaaattgatcacttcccagaggatgcagattacgaagctgacacagcagaatatttcctccgggccgtgagggcctccagcattttcc

SEQ ID NO: 537088 - DNA, 120 bp, Artificial Sequence
  ENSG00000166862_10 (sequence is synthesized)
caatcctgagtgtgattctgcttttcatgggtggcctctgcatcgcagccagcgagttctacaaaactcgacacaacatcatcctgagtgccggcatcttcttcgtgtctgcaggtctga

SEQ ID NO: 537089 - DNA, 120 bp, Artificial Sequence
  ENSG00000166862_11 (sequence is synthesized)
gtaacatcattggcatcatagtgtacatatctgccaatgccggagacccctccaagagcgactccaaaaagaatagttactcatacggctggtccttctacttcggggccctgtccttca

SEQ ID NO: 537090 - DNA, 120 bp, Artificial Sequence
  ENSG00000166862_12 (sequence is synthesized)
tcatcgccgagatggtcggggtgctggcggtgcacatgtttatcgaccggcacaaacagctgcgggccacggcccgcgccacggactacctccaggcctctgccatcacccgcatcccca

SEQ ID NO: 537091 - DNA, 120 bp, Artificial Sequence
  ENSG00000166862_13 (sequence is synthesized)
gctaccgctaccgctaccagcgccgcagccgctccagctcgcgctccacggagccctcacactccagggacgcctcccccgtgggcatcaagggcttcaacaccctgccgtccacggaga

SEQ ID NO: 537092 - DNA, 120 bp, Artificial Sequence
  ENSG00000166862_14 (sequence is synthesized)
tctccatgtacacgctcagcagggaccccctgaaggccgccaccacgcccaccgccacctacaactccgacagggataacagcttcctccaggttcacaactgtatccagaaggagaaca

SEQ ID NO: 537093 - DNA, 120 bp, Artificial Sequence
  ENSG00000166862_15 (sequence is synthesized)
aggactctctccactccaacacagccaaccgccggaccacccccgtataaagaccgcgggcctcgccagaagaccgcgggaggagggcgcggtccccgggggcggggcggggcggggaga

SEQ ID NO: 537094 - DNA, 67 bp, Artificial Sequence
  ENSG00000166862_16 (sequence is synthesized)
aggagggcgcggtccccgggggcggggcggggcggggagacccagaccctccgctgggagaccttcc

SEQ ID NO: 537095 - DNA, 120 bp, Artificial Sequence
  ENSG00000166862_17 (sequence is synthesized)
taaaaaaaagaacaaaatataagaggaacaaagaagcaaaacaacaggaaatgtgggaaaatataaacgagggaagaaaacaaactttaaaaaaaagcgagagggataaaaaattaaaaa

SEQ ID NO: 537096 - DNA, 120 bp, Artificial Sequence
  ENSG00000166862_18 (sequence is synthesized)
tagaaaataaatctaaaagaaaatgcatgatttcccatgtaccattattttaacatttaataaaaatcaatttaaatgaaaaaataaaagggaaccaagataacattaaagcaaaaaaaa

SEQ ID NO: 537097 - DNA, 120 bp, Artificial Sequence
  ENSG00000166862_19 (sequence is synthesized)
aataattctttaaagctggaagacgcaagtttctatcattctctacgaagttctaacctagatcttgagagaagctggaagacggggatgatttttctagaaggatcccctgcccccagt

SEQ ID NO: 537098 - DNA, 120 bp, Artificial Sequence
  ENSG00000166862_20 (sequence is synthesized)
ccctacccccgcttctgattcagaagctcctctggggcctccctggcaccctgcatgtgtctacaattcaaccccgaccacactttgctgcaatgtcactggttcacactcgggatcccc

SEQ ID NO: 537099 - DNA, 120 bp, Artificial Sequence
  ENSG00000166862_21 (sequence is synthesized)
aagagactatgagcttcttgaaggcagagctatgtcccattcatttctgcaccccaagcacccagaaaaggccatggcagggaatttgacccaaaaaagcactttgatgactgagcaatg

SEQ ID NO: 537100 - DNA, 120 bp, Artificial Sequence
  ENSG00000166862_22 (sequence is synthesized)
aagtgactgggtgggcagagcttaggctgaaggaggcgggctgagctgcacctggggtggagagggcctgagtccactcctagttaaggtctgtcaaacccatctgcaccgctcatctgc

SEQ ID NO: 537101 - DNA, 120 bp, Artificial Sequence
  ENSG00000166862_23 (sequence is synthesized)
cgcaggggaggctgtgagggggcagaagcagctcctctccctgagggctagccatctggagggagacctacagacctaatgtttatgctgcatgctggaatagaaggaatcgtgtggtgc

SEQ ID NO: 537102 - DNA, 120 bp, Artificial Sequence
  ENSG00000166862_24 (sequence is synthesized)
tgagggaacctgtcccctaacccagaccagaggaggtccttccataagagttccctagagaaggtggcaccagagccaattcattcattcattcactcgagagatatttactaagcactc

SEQ ID NO: 537103 - DNA, 120 bp, Artificial Sequence
  ENSG00000166862_25 (sequence is synthesized)
actgagtgccagcactattgtcagtcctggggatccaagagtgaaccaaataaagagggccagtgccttcgtgaaggttacatcctagtgtaagaaacaagtaataaacaagtgtgaaac

SEQ ID NO: 537104 - DNA, 120 bp, Artificial Sequence
  ENSG00000166863_0 (sequence is synthesized)
aggttctcagtgaggttcaaggagaacagtgtggctgtcaaggtcgtccagggccctgcaggtggtgacaacagcaagctacgctacaaaaaaaaggggagtcattgcttggaggagcac

SEQ ID NO: 537105 - DNA, 120 bp, Artificial Sequence
  ENSG00000166863_1 (sequence is synthesized)
cggcagcaccagtgtgtgaggggagcaggcagcggtcctagccagttccttgatcctgccagaccacccagcccccggcacagagctgctccacaggcaccatgaggatcatgctgctat

SEQ ID NO: 537106 - DNA, 120 bp, Artificial Sequence
  ENSG00000166863_2 (sequence is synthesized)
tctaccagctgctccagagactcttcaaaagccactcatctctggagggattgctcaaagccctgagccaggctagcacagatcctaaggaatcaacatctcccgagaaacgtgacatgc

SEQ ID NO: 537107 - DNA, 120 bp, Artificial Sequence
  ENSG00000166863_3 (sequence is synthesized)
atgacttctttgtgggacttatgggcaagaggagcgtccagccagactctcctacggatgtgaatcaagagaacgtccccagctttggcatcctcaagtatcccccgagagcagaatagg

SEQ ID NO: 537108 - DNA, 120 bp, Artificial Sequence
  ENSG00000166863_4 (sequence is synthesized)
tcccaatccccaggtgcgcacgctcctgttaccctttctcttccctgttcttgtaacattcttgtgctttgactccttctccatcttttctacctgaccctggtgtggaaactgcatagt

SEQ ID NO: 537109 - DNA, 120 bp, Artificial Sequence
  ENSG00000166863_5 (sequence is synthesized)
gaatatccccaaccccaatgggcattgactgtagaataccctagagttcctgtagtgtcctacattaaaaatataatgtctctctctattcctcaacaataaaggatttttgcatatgaa

SEQ ID NO: 537110 - DNA, 120 bp, Artificial Sequence
  ENSG00000166863_6 (sequence is synthesized)
agatttgccctgaaatacactgccaatgcccagcacactgtcggccaaacacaaagacacttagaggcacgtgtgtttgtacacatcccccgtctttcatctctttcctctggatcatgg

SEQ ID NO: 537111 - DNA, 120 bp, Artificial Sequence
  ENSG00000166863_7 (sequence is synthesized)
acggcagctgactattgagcaggactctttcagagggacccataattgcagctttcataatcttaccattgagggagcattcccaacctgttaggtgtcaggcagaataggacataaggt

SEQ ID NO: 537112 - DNA, 120 bp, Artificial Sequence
  ENSG00000166863_8 (sequence is synthesized)
ttctgggagctggcatttaaagattagatgagatggatcaacacagatcattgtgtcatctgatttcattcatgtgaaacttactccacttccggactcctggactgcattaggaagacc

SEQ ID NO: 537113 - DNA, 120 bp, Artificial Sequence
  ENSG00000166863_9 (sequence is synthesized)
gggaaagacaggacctttcttaccttcagtgagggttcctcggccccttcatcccaatcagcttggatccacaggaaagtcttccctgggaacagaggagcagagacctttataagactc

SEQ ID NO: 537114 - DNA, 120 bp, Artificial Sequence
  ENSG00000166863_10 (sequence is synthesized)
cattttgtccagccccttctcacctggtacaaacaatatgccagctcccactgctcagccaacctttcctgaaagggagaggccatccagaactaggaggaagctggtgtgaggggcatg

SEQ ID NO: 537115 - DNA, 120 bp, Artificial Sequence
  ENSG00000166866_0 (sequence is synthesized)
ctctcctggtttgactggcacagggagcctgggctggaagaggcagcaaaagggaaaatcagaagagtggacactggcaagaggagggcagcctttttcccagcttccttgcaccatgga

SEQ ID NO: 537116 - DNA, 120 bp, Artificial Sequence
  ENSG00000166866_1 (sequence is synthesized)
cagctcccattaagccacctctccatcctggggccaggactcttatgccccattcctgtcaaattgagatttcatccaccattctccaaggacagtgaagttataccctagttccagtgt

SEQ ID NO: 537117 - DNA, 120 bp, Artificial Sequence
  ENSG00000166866_2 (sequence is synthesized)
tgggatcagtggcccctctggacatgcctctcctggaaggttctgtgggggtggaggatcttgtcctcctggaacccttggtggaggagtcactgctcaagaatcttcagcttcgctatg

SEQ ID NO: 537118 - DNA, 120 bp, Artificial Sequence
  ENSG00000166866_3 (sequence is synthesized)
aaaacaaggagatttatacctacattgggaatgtggtgatctcagtgaatccctatcaacagcttcccatctatgggccagagttcattgccaaatatcaagactatactttctatgagc

SEQ ID NO: 537119 - DNA, 120 bp, Artificial Sequence
  ENSG00000166866_4 (sequence is synthesized)
tgaagccccatatctacgcattggcaaatgtggcgtaccagtcactgagggacagggaccgagaccagtgtatcctcatcacaggcgagagtggatcagggaagactgaggccagcaagc

SEQ ID NO: 537120 - DNA, 120 bp, Artificial Sequence
  ENSG00000166866_5 (sequence is synthesized)
tggtgatgtcttatgtggctgccgtctgtgggaaaggagagcaggtgaactctgtgaaggagcagctgctacagtctaacccagtgctggaggcttttggcaatgccaagaccattcgca

SEQ ID NO: 537121 - DNA, 120 bp, Artificial Sequence
  ENSG00000166866_6 (sequence is synthesized)
acaacaattcctcccgatttggaaaatacatggatattgaatttgacttcaagggatcccccctcggtggtgtcatcacaaactatctgcttgagaaatcccgattagtgaagcagctca

SEQ ID NO: 537122 - DNA, 120 bp, Artificial Sequence
  ENSG00000166866_7 (sequence is synthesized)
aaggagaaaggaacttccacatcttctatcagctgctggctggagcagatgaacagctgctgaaggccctgaagcttgagcgggatacaactggctatgcctatctgaatcatgaagtat

SEQ ID NO: 537123 - DNA, 120 bp, Artificial Sequence
  ENSG00000166866_8 (sequence is synthesized)
ccagagtggatggcatggacgacgcctccagcttcagggctgtacagagtgcaatggcagtgattgggttctcggaggaggagattcgacaagtgctagaggtgacatccatggtgctaa

SEQ ID NO: 537124 - DNA, 120 bp, Artificial Sequence
  ENSG00000166866_9 (sequence is synthesized)
agctggggaacgtgttggtggctgatgagttccaggccagtgggataccagcaagtggcatccgtgatgggagaggtgttcgggagattggggagatggtgggcttgaattcagaagaag

SEQ ID NO: 537125 - DNA, 120 bp, Artificial Sequence
  ENSG00000166866_10 (sequence is synthesized)
tagagagagctttgtgctcgaggaccatggaaacagccaaggaaaaggtggtcactgcactgaatgttatgcaggctcagtatgctcgggacgccctggctaagaacatctacagccgcc

SEQ ID NO: 537126 - DNA, 120 bp, Artificial Sequence
  ENSG00000166866_11 (sequence is synthesized)
tctttgactggatagtgaatcgaatcaatgagagcatcaaggtgggcatcggggaaaagaagaaggtaatgggagtccttgatatctacggttttgagatattagaggataatagctttg

SEQ ID NO: 537127 - DNA, 120 bp, Artificial Sequence
  ENSG00000166866_12 (sequence is synthesized)
agcaatttgtgatcaactactgcaatgagaagctgcagcaggtgttcatagagatgaccctgaaagaagagcaagaggaatataagagagaaggcataccgtggacaaaggtggactact

SEQ ID NO: 537128 - DNA, 120 bp, Artificial Sequence
  ENSG00000166866_13 (sequence is synthesized)
ttgataatggcatcatttgtaagctcattgagcataatcagcgaggtatcctggccatgttggatgaggagtgcctgcggcctggggtggtcagtgactccactttcctagcaaagctga

SEQ ID NO: 537129 - DNA, 120 bp, Artificial Sequence
  ENSG00000166866_14 (sequence is synthesized)
accagctcttctccaagcatggccactacgagagcaaagtcacccagaatgcccagcgtcagtatgaccacaccatgggcctcagctgcttccgcatctgccactatgcgggcaaggtga

SEQ ID NO: 537130 - DNA, 120 bp, Artificial Sequence
  ENSG00000166866_15 (sequence is synthesized)
atgacctactcttccgagacctgttgcaggccatgtggaaggcccagcaccccctccttcggtccttgtttcctgagggcaatcctaagcaggcatctctcaaacgccccccgactgctg

SEQ ID NO: 537131 - DNA, 120 bp, Artificial Sequence
  ENSG00000166866_16 (sequence is synthesized)
gggcccagttcaagagttctgtggccatcctcatgaagaatctgtattccaagagccccaactacatcaggtgcataaagcccaatgagcatcagcagcgaggtcagttctcttcagacc

SEQ ID NO: 537132 - DNA, 120 bp, Artificial Sequence
  ENSG00000166866_17 (sequence is synthesized)
tggtggcaacccaggctcggtacctgggactgctggagaacgtacgggtgcgacgggcaggctatgcccaccgccagggttatgggcccttcctggaaaggtaccgattgctgagccgga

SEQ ID NO: 537133 - DNA, 120 bp, Artificial Sequence
  ENSG00000166866_18 (sequence is synthesized)
gcacctggcctcactggaatgggggagaccgggaaggtgttgagaaggtcctgggggagctgagcatgtcctcgggggagctggcctttggcaagacaaagatcttcattagaagcccca

SEQ ID NO: 537134 - DNA, 120 bp, Artificial Sequence
  ENSG00000166866_19 (sequence is synthesized)
agactcttttctacctcgaagaacagaggcgcctgagactccagcagctggccacactcatacagaagatttaccgaggctggcgctgccgcacccactaccaactgatgcgaaagagtc

SEQ ID NO: 537135 - DNA, 120 bp, Artificial Sequence
  ENSG00000166866_20 (sequence is synthesized)
agatcctcatctcctcttggtttcggggaaacatgcaaaagaaatgctatgggaagataaaggcatccgtgttattgatccaggcttttgtgagagggtggaaggcccgaaagaattatc

SEQ ID NO: 537136 - DNA, 120 bp, Artificial Sequence
  ENSG00000166866_21 (sequence is synthesized)
gcaaatatttccggtcagaggctgccctcaccttggcagatttcatctacaagagcatggtacagaaattcctactggggctgaagaacaatttgccatccacaaacgtcttagacaaga

SEQ ID NO: 537137 - DNA, 120 bp, Artificial Sequence
  ENSG00000166866_22 (sequence is synthesized)
catggccagccgccccctacaagtgcctcagcacagcaaatcaggagctgcagcagctcttctaccagtggaagtgcaagaggttccgggatcagctgtccccgaagcaggtagagatcc

SEQ ID NO: 537138 - DNA, 120 bp, Artificial Sequence
  ENSG00000166866_23 (sequence is synthesized)
tgagggaaaagctctgtgccagtgaactgttcaagggcaagaaggcttcatatccccagagtgtccccattccattctgtggtgactacattgggctgcaagggaaccccaagctgcaga

SEQ ID NO: 537139 - DNA, 120 bp, Artificial Sequence
  ENSG00000166866_24 (sequence is synthesized)
agctgaaaggcggggaggaggggcctgttctgatggcagaggccgtgaagaaggtcaatcgtggcaatggcaagacttcttctcggattctcctcctgaccaagggccatgtgattctca

SEQ ID NO: 537140 - DNA, 120 bp, Artificial Sequence
  ENSG00000166866_25 (sequence is synthesized)
cagacaccaagaagtcccaggccaaaattgtcattgggctagacaatgtggctggggtgtcagtcaccagcctcaaggatgggctctttagcttgcatctgagtgagatgtcatcggtgg

SEQ ID NO: 537141 - DNA, 120 bp, Artificial Sequence
  ENSG00000166866_26 (sequence is synthesized)
gctccaagggggacttcctgctggtcagcgagcatgtgattgaactgctgaccaaaatgtaccgggctgtgctggatgccacgcagaggcagcttacagtcaccgtgactgagaagttct

SEQ ID NO: 537142 - DNA, 120 bp, Artificial Sequence
  ENSG00000166866_27 (sequence is synthesized)
cagtgaggttcaaggagaacagtgtggctgtcaaggtcgtccagggccctgcaggtggtgacaacagcaagctacgctacaaaaaaaaggggagtcattgcttggaggtgactgtgcagt

SEQ ID NO: 537143 - DNA, 120 bp, Artificial Sequence
  ENSG00000166866_28 (sequence is synthesized)
gaggagggggcaccatgcagagatggcagttgcttcctcctgaaccagcactaatccccctctgccctcctgtgtgggaggatctctaacccctctgatcgtggcgcatggcttggggat

SEQ ID NO: 537144 - DNA, 120 bp, Artificial Sequence
  ENSG00000166866_29 (sequence is synthesized)
taaactacccttgaagaggacccttgtcccaaacccttcttgttctctcctccaaaagtagcttcctccaacccgcagcctctctgcacactaataaaacatgtggcttggaaaggttca

SEQ ID NO: 537145 - DNA, 120 bp, Artificial Sequence
  ENSG00000166866_30 (sequence is synthesized)
cctcccagaccctgcacagccagttccatcacgcagcagttctcaaacttgagcgtgccttagaatcacctggcaggattgtcacccccaggtgctgtgtccctcctcagagtctctgat

SEQ ID NO: 537146 - DNA, 120 bp, Artificial Sequence
  ENSG00000166866_31 (sequence is synthesized)
ccagcaggtcttggggtgaggaccaaaatttgcctttctaacaactccccaggtggtgctgatgtcttggtcctggactgtgctctgtggacactgacagaggatacgtggatgtggggg

SEQ ID NO: 537147 - DNA, 120 bp, Artificial Sequence
  ENSG00000166866_32 (sequence is synthesized)
caaccttggagggatggggacataaatagaaatcataccaaggacccctgtgaactatggggctttctgatgtcctttgttgggtgggtgaaaggctagatctggtgaggtctctggagg

SEQ ID NO: 537148 - DNA, 120 bp, Artificial Sequence
  ENSG00000166866_33 (sequence is synthesized)
agtctgctccaagtagagagagtggatgaacctgcgtgctggagattgagtgaaagatggtgtcttgaactggtttcacaatagtcattgcccacttcctccccacaagctacgcattgg

SEQ ID NO: 537149 - DNA, 120 bp, Artificial Sequence
  ENSG00000166866_34 (sequence is synthesized)
agttttccattttaatggagtatctgtattgccttcctcggggtggtgctattcagtgaggcaatgcaagggggagttcaatgaaactgggacatctatacacatggagcctgggctgga

SEQ ID NO: 537150 - DNA, 120 bp, Artificial Sequence
  ENSG00000166869_0 (sequence is synthesized)
ggcccttccgcctccagctcggccatggggtcgcgcagctcccacgccgcggtcattcccgacggggacagtattcggcgagagaccggcttctcccaagccagcctgctccgcctgcac

SEQ ID NO: 537151 - DNA, 120 bp, Artificial Sequence
  ENSG00000166869_1 (sequence is synthesized)
caccggttccgggcactggacaggaataagaagggctacctgagccgcatggatctccagcagataggggcgctcgccgtgaaccccctgggagaccgaattatagaaagcttcttcccc

SEQ ID NO: 537152 - DNA, 120 bp, Artificial Sequence
  ENSG00000166869_2 (sequence is synthesized)
gatgggagccagcgagtggatttcccaggctttgtcagggtcttggctcattttcgccctgtagaagatgaggacacagaaacccaagaccccaagaaacctgaacctctcaacagcaga

SEQ ID NO: 537153 - DNA, 120 bp, Artificial Sequence
  ENSG00000166869_3 (sequence is synthesized)
aggaacaaacttcactatgcatttcagctctatgacctggatcgcgatgggaagatctccaggcatgagatgctgcaggttctccgtctgatggttggggtacaggtgacagaagagcag

SEQ ID NO: 537154 - DNA, 120 bp, Artificial Sequence
  ENSG00000166869_4 (sequence is synthesized)
ctggagaacatcgctgaccgcacggtgcaggaggctgatgaagatggggatggggctgtgtccttcgtggagttcaccaagtccttagagaagatggacgttgagcaaaaaatgagcatc

SEQ ID NO: 537155 - DNA, 120 bp, Artificial Sequence
  ENSG00000166869_5 (sequence is synthesized)
cggatcctgaagtgactccgtttgtgccttgggcttgctcctgcaaccagtatctccttggaattcatccaaagcccccatggacgcatggacgcagggcgacaataaactgtattttcg

SEQ ID NO: 537156 - DNA, 120 bp, Artificial Sequence
  ENSG00000166869_6 (sequence is synthesized)
tttctaactctatttagggccaagagaagaaagctggaaggatgtgtactaaagtctagctcagcagtccccaacctttttggcatcagggacagtttttccacggatgggtgacagggg

SEQ ID NO: 537157 - DNA, 76 bp, Artificial Sequence
  ENSG00000166869_7 (sequence is synthesized)
attagattctcataaggagtgcacaatctagatcctttggtgtgcagttcacagtaggatttgggctcctatgagg

SEQ ID NO: 537158 - DNA, 120 bp, Artificial Sequence
  ENSG00000166869_8 (sequence is synthesized)
tgacaggaggcagagctcaggcggtaatgcaagcaatggggagtggctgtaaatatagatgaagcttcagctcgcctgccgctcaccttgtgctgtgcagcccggttcctaacagaccac

SEQ ID NO: 537159 - DNA, 120 bp, Artificial Sequence
  ENSG00000166869_9 (sequence is synthesized)
agaccccacaccaggtctatctcatttggtctcagagctgtgaatcagccagcaatattttagttgcaaatcactgaaaacccaactcaaagtgacttaagtcagaaagaaattttatga

SEQ ID NO: 537160 - DNA, 120 bp, Artificial Sequence
  ENSG00000166869_10 (sequence is synthesized)
attcaggtaattaaaaagtccagaagtatctgcctttaggcacagctggatccaagggcacaaatgatgtcatcaggctccagttattctccatctcccagctcagctttttctgtctgt

SEQ ID NO: 537161 - DNA, 120 bp, Artificial Sequence
  ENSG00000166869_11 (sequence is synthesized)
aagcctgattttcaggaaggctctttcctagtgatggagatgaccaccatcagctccaggcttctatcctgctaacccagtaacccagtgggaagagatttacttattccaataattcca

SEQ ID NO: 537162 - DNA, 120 bp, Artificial Sequence
  ENSG00000166869_12 (sequence is synthesized)
agtggagagtgtcattgacccgtttggggtctcatctctacttctaggggaatgaaacactctgagtggccaggcctgtgtcatgtgctaattcctagagccagggaaataaggtctgag

SEQ ID NO: 537163 - DNA, 120 bp, Artificial Sequence
  ENSG00000166869_13 (sequence is synthesized)
gattcaggatggggtgaaaggtggttgcttaaaggaaaatgaaatacaattagcagaataaggggaaacgagtggtctgctctgctcgggcaaaacaagagatgcccattactgtgaggg

SEQ ID NO: 537164 - DNA, 120 bp, Artificial Sequence
  ENSG00000166869_14 (sequence is synthesized)
acccttgaagtctggactcttaaatgggtttttgctgatttcctgggtgcatgctaggatgatggggcttgatgcagtagggaagagacgatgtaaaaataataaacaatatataccttc

SEQ ID NO: 537165 - DNA, 120 bp, Artificial Sequence
  ENSG00000166881_0 (sequence is synthesized)
aggtggcttgaggcaaccatggcgggaggaatgaaagtggcggtctcgccggcagttggtcccgggccctggggctcgggagtcgggggcggtgggacagtgcggctactcttgatcctc

SEQ ID NO: 537166 - DNA, 120 bp, Artificial Sequence
  ENSG00000166881_1 (sequence is synthesized)
tccggctgcttggtctacggcacagctgaaactgatgtaaatgtggtcatgcttcaggaatcccaagtttgtgaaaagcgtgccagccaacaattctgttacacaaatgtgcttatccca

SEQ ID NO: 537167 - DNA, 120 bp, Artificial Sequence
  ENSG00000166881_2 (sequence is synthesized)
aaatggcatgatatatggacacggatacagatccgagtaaatagttccagattggttcgagtcacccaggtggagaatgaggagaaactgaaggagctagagcaaagtcaaattttctac

SEQ ID NO: 537168 - DNA, 120 bp, Artificial Sequence
  ENSG00000166881_3 (sequence is synthesized)
tactctactgggatgactgtgggaattgtggcctctctgctaatcatcatttttatactatctaagtttatgcctaagaaaagtcccatttacgtcatcctggtgggaggctggtctttt

SEQ ID NO: 537169 - DNA, 120 bp, Artificial Sequence
  ENSG00000166881_4 (sequence is synthesized)
tctctgtacctcattcaactagtttttaaaaatttacaagagatctggaggtgttactggcagtatcttttaagttatgtcctcacagttggattcatgagttttgcagtatgttacaag

SEQ ID NO: 537170 - DNA, 120 bp, Artificial Sequence
  ENSG00000166881_5 (sequence is synthesized)
tatgggcccttggagaatgaacgaagtatcaacctgctgacctggaccttgcagctgatgggcctgtgtttcatgtattctggcatccagataccacatattgcccttgccattatcatc

SEQ ID NO: 537171 - DNA, 120 bp, Artificial Sequence
  ENSG00000166881_6 (sequence is synthesized)
attgctctttgtactaagaacctggaacaccctattcagtggctgtacatcacctgcagaaaggtgtgtaagggagcagaaaagcctgttccccctcgtctcctgacagaagaagaatat

SEQ ID NO: 537172 - DNA, 120 bp, Artificial Sequence
  ENSG00000166881_7 (sequence is synthesized)
cggatacaaggagaggtagaaacccgaaaggctttagaggagctccgagaattttgtaacagtccagactgctctgcttggaagactgtttctcgaatccagtctccaaaaagatttgct

SEQ ID NO: 537173 - DNA, 120 bp, Artificial Sequence
  ENSG00000166881_8 (sequence is synthesized)
gactttgtggaaggctcttcccacctcacgccaaatgaagtttctgtccatgagcaggagtatggattagggagcattattgcccaggatgaaatctatgaggaagcatcctctgaggag

SEQ ID NO: 537174 - DNA, 120 bp, Artificial Sequence
  ENSG00000166881_9 (sequence is synthesized)
gaggactcatattctcggtgtcctgctatcacacagaacaactttctaacctaggtagtggtcagttatctttacgtggactggcttggtgccttggtccatgttgcatgtgttgtgcaa

SEQ ID NO: 537175 - DNA, 120 bp, Artificial Sequence
  ENSG00000166881_10 (sequence is synthesized)
ttgctttcaaccctttgaaacagagtgagatagatagggtagaaattctcctactgaaataagaggcctaaaaaggcctccctttggaaatgggaggtctctatgggatccctgaggaag

SEQ ID NO: 537176 - DNA, 120 bp, Artificial Sequence
  ENSG00000166881_11 (sequence is synthesized)
gagagtggataaagtagtgaatgctgggtagttcacttcccattggttaagctaacagcccacttttatgtttccagagaaattggatggccacagctagcatggcattctagctccttc

SEQ ID NO: 537177 - DNA, 120 bp, Artificial Sequence
  ENSG00000166881_12 (sequence is synthesized)
ttgaaagttgattcaatcatggcatttctgtcactggctggctctccaaagtaagaactgttgttaagtgcaggaatgcttttagactataggctgcaacttccagagagaaatccacaa

SEQ ID NO: 537178 - DNA, 120 bp, Artificial Sequence
  ENSG00000166881_13 (sequence is synthesized)
atctgagcctccttcactccagcttttatttcagtgactttagaataattattgatttaactgttttgggaggaaaatagatttttattgttttgttttttaaatgaatgtcttttaaaa

SEQ ID NO: 537179 - DNA, 120 bp, Artificial Sequence
  ENSG00000166881_14 (sequence is synthesized)
aacataacaaactcatgttccagaaccagcaagtgctccagagtgacacaccccctaggcccctacatatttattaatatggattatccattaaagccccaggagctgttgttttaagct

SEQ ID NO: 537180 - DNA, 120 bp, Artificial Sequence
  ENSG00000166881_15 (sequence is synthesized)
ttgatttagttctcatacatatgatagaaagtcctatttgcctttaggaacatgcctgtaggctcttctgcaggtgagatgtactgggctttttattatattcaactttcaattccatct

SEQ ID NO: 537181 - DNA, 120 bp, Artificial Sequence
  ENSG00000166881_16 (sequence is synthesized)
taaaaaacatttgtattcttctcttcccattcttccttaccctgcctttgccctttcaggaagggtcagttcccttacctgtgaactatgtatgttcagagtagcattattcctgctagc

SEQ ID NO: 537182 - DNA, 120 bp, Artificial Sequence
  ENSG00000166881_17 (sequence is synthesized)
taggagaagtcatcttgtttaggggatttggatgctttttatacgttctccattttcctgtcattgggtcatgttatctttgagttgctatgaaatcaggaaactgtctccttttccttt

SEQ ID NO: 537183 - DNA, 120 bp, Artificial Sequence
  ENSG00000166881_18 (sequence is synthesized)
cccttcctttgtctacatgctctgtccattcctttcagccttttctcaccacccatactcccccaaatctgggtaatttttaagccttgaaactatgtagtttcttgatacacaatttgt

SEQ ID NO: 537184 - DNA, 120 bp, Artificial Sequence
  ENSG00000166881_19 (sequence is synthesized)
agttatgcagcagccacaatttgcattgccaggaaataggctccaggttatcttcatgcctctgggtgctcattcagctgtcaagtttccatgaacttacacttatttatgattgcgttt

SEQ ID NO: 537185 - DNA, 120 bp, Artificial Sequence
  ENSG00000166881_20 (sequence is synthesized)
ctgacctgagatgtatgctgcctgttattgcagtagcattagtttcagattcttttgccattgcaaagtaccccttataaaccagcaatgtcatctgtgaggaagcaaattctcaagtgt

SEQ ID NO: 537186 - DNA, 120 bp, Artificial Sequence
  ENSG00000166881_21 (sequence is synthesized)
ctgtcatttacttggttctttttctttgtggtcttcacccttataccctggaaaagtctgtaattaccttagccaggaagatagatggtcatggcaagcgcacagcaccagacttactgg

SEQ ID NO: 537187 - DNA, 120 bp, Artificial Sequence
  ENSG00000166881_22 (sequence is synthesized)
gcctagctccattgcagacttccaaagggtcagctctgagactgccctccaggtgggcagttgattatttccaccagtgttttccagagccttaaactgtcctaagtgacaactacctca

SEQ ID NO: 537188 - DNA, 120 bp, Artificial Sequence
  ENSG00000166881_23 (sequence is synthesized)
gttggcaggaaagagacatatagtagaaagtgaaaaatgagcagtatttgggcagatgctatgggttacagttgaagggtaaaaggaactttacattgggaaacctttatacccttgtga

SEQ ID NO: 537189 - DNA, 120 bp, Artificial Sequence
  ENSG00000166881_24 (sequence is synthesized)
attatgtacatggtaaaatgttctctctctacaaagaactattaaaacttctgaaatatactattttttaccttatttatagaaattgagacctagcatatttaagcataagtttatttt

SEQ ID NO: 537190 - DNA, 120 bp, Artificial Sequence
  ENSG00000166881_25 (sequence is synthesized)
aaaaaataattcaactcgtgcaagtggtctcaggattctctggagattttggtgcctcccctacttagggaggtgatagcttgcctataagggtgacttttcctgatcatgtctttattt

SEQ ID NO: 537191 - DNA, 120 bp, Artificial Sequence
  ENSG00000166881_26 (sequence is synthesized)
caatgagaaagcactgtgaaattgtgaaagattctcctctttctctgtttaataaacccccatgaaatatagtttccatctctagaccagttttttttccaccgtgtttagacttgaggt

SEQ ID NO: 537192 - DNA, 120 bp, Artificial Sequence
  ENSG00000166881_27 (sequence is synthesized)
gaataaaatcaaactgttttttactccctatctggtagttggagacctgagctgtaggcagtggagatggcaattggttctgcagcctgagagttgctctcacacagtgaaggacggtgc

SEQ ID NO: 537193 - DNA, 120 bp, Artificial Sequence
  ENSG00000166881_28 (sequence is synthesized)
tgctctggtgtgctgtgtgtccttgccctgcctgcctgtggctctgcccagatgcttcagatcctctgtgttccggagattgcttgacttcaaccttctttaggagctgctcttgtctcc

SEQ ID NO: 537194 - DNA, 120 bp, Artificial Sequence
  ENSG00000166881_29 (sequence is synthesized)
ctcttggccacttagtttgctggctcagtcactacttgaagaccccatttaatttttctctggcagttatagctcttgtgatttcagtacagtctcatctctcagaccaatctcatcaag

SEQ ID NO: 537195 - DNA, 120 bp, Artificial Sequence
  ENSG00000166881_30 (sequence is synthesized)
aaggattgaagggataactatgaggtaagctggacattggagccgtgtttgctgccacgtcagcgtcttgctgggtgaatgtcaagccataaatgggctccagggctctggatctcatca

SEQ ID NO: 537196 - DNA, 120 bp, Artificial Sequence
  ENSG00000166881_31 (sequence is synthesized)
gcattggaaatctattgcctctcatcagtctgaccaaattatgtagagcattaatgtagagactcccattaatgggaatacaagaggcagctggcataaaacatttctttcactttcctt

SEQ ID NO: 537197 - DNA, 120 bp, Artificial Sequence
  ENSG00000166881_32 (sequence is synthesized)
tcccactcagattgcttcaagagaccaacagaacacagggatcaaaaacaaggaaaatttagcaacttcattaccttctaataagtaattcctgttagccactgcatcccaccaaaacta

SEQ ID NO: 537198 - DNA, 120 bp, Artificial Sequence
  ENSG00000166881_33 (sequence is synthesized)
gtttatttttcccctcaaattcatgatttttacgtctgttacaaagggaattttgctgatagctctttgggtcccactgttccattttatgctaatagattccattctagggcccagccg

SEQ ID NO: 537199 - DNA, 120 bp, Artificial Sequence
  ENSG00000166881_34 (sequence is synthesized)
tctcttgactgatggtgttccctttaacccttggcatgtataatagaattttggtgaatgaaagaacccaaataggccagatagtccccccaggccctgatatccataaaaggcttggga

SEQ ID NO: 537200 - DNA, 120 bp, Artificial Sequence
  ENSG00000166881_35 (sequence is synthesized)
atgcattatgtaattgtccttagtctttttgttgttttagaaaaaaaaaacaagatgggctcagatggatgcctacgtaaaaatggttcctagctgtgtactcataacttttctttgaat

SEQ ID NO: 537201 - DNA, 120 bp, Artificial Sequence
  ENSG00000166881_36 (sequence is synthesized)
tgagtagtgaaaggaaggaggaggaaaggaaattaaatgtccttctagtattctctggactcaagtctgacatatgagataataacctatattgaaatgccaagaattgtatctgaaaca

SEQ ID NO: 537202 - DNA, 120 bp, Artificial Sequence
  ENSG00000166881_37 (sequence is synthesized)
agagaacagtttgacacatttatcatgccttcatattacatattaactgaaaccaattaataaacatatgaaatatccattgcacaaggcaaaggcacctaaaccttttgtttctttttc

SEQ ID NO: 537203 - DNA, 120 bp, Artificial Sequence
  ENSG00000166881_38 (sequence is synthesized)
tacatagcagaaattgattttttttttatttttttaggggaacctatataattatgacccagtgatgtcttttggtgacttaagcttatgaattcaggttacaattgagttgattctaga

SEQ ID NO: 537204 - DNA, 120 bp, Artificial Sequence
  ENSG00000166881_39 (sequence is synthesized)
tggttactaccttgaaaaggatgttggtgccttatgtgacacgagccagagcctgctgggaataaacaaagcagattcatgccaacaccaactcgtagctttagtggcagatgggagtgg

SEQ ID NO: 537205 - DNA, 120 bp, Artificial Sequence
  ENSG00000166881_40 (sequence is synthesized)
tcacagactcccaaaatgtggggctttggatttccacaccatcccacgtgtgtgtcatcttcctctttcacactcttgatgataatttgaaaatggtgaaatcacctctgaatttgccta

SEQ ID NO: 537206 - DNA, 120 bp, Artificial Sequence
  ENSG00000166881_41 (sequence is synthesized)
tagcatgagcacattcttatgacaacataacaaatagttcataatgtgaatattagaaactgttacagcctgcagttaccataattttccatgtttgtggaattgatattgaaatagcag

SEQ ID NO: 537207 - DNA, 120 bp, Artificial Sequence
  ENSG00000166881_42 (sequence is synthesized)
ggctaaggaattactggcaagttttagcctgtgggtaataccttagggttatttaaatatttgtaattttatttaaatgttcatgaatgtttgaaaggaacaaaattatcagggatggct

SEQ ID NO: 537208 - DNA, 120 bp, Artificial Sequence
  ENSG00000166881_43 (sequence is synthesized)
ctttgccatgggtcttattttcaccctcttttctgtaagaaaaaagaacaatgtcttaatgtatttttaaagtttttggtatagtttctaattccaattttaataaaagttttatagata

SEQ ID NO: 537209 - DNA, 120 bp, Artificial Sequence
  ENSG00000166881_44 (sequence is synthesized)
ggagctagagcagtttagtatctggaactttttttcctcctttttaaaagagaaattgaatgacacctatgttaacgtgggtctatacagcacaaaaacctgcctcaaagttgagattat

SEQ ID NO: 537210 - DNA, 120 bp, Artificial Sequence
  ENSG00000166881_45 (sequence is synthesized)
agagaaggacaccaagtacagtgtcattgtgatccggagatttgatcccaaactctttcttgttttccttcttggacttatgctatttttttgtggagacttgctgagcagaagtcaaat

SEQ ID NO: 537211 - DNA, 120 bp, Artificial Sequence
  ENSG00000166881_46 (sequence is synthesized)
tacgacgtgacttcctgcggcggagctggaaggaggagcgccttgaaggagcttagcccccgcctctgcaacccaccaccgtctccccctttggtttctcctagccccatctgctgaaac

SEQ ID NO: 537212 - DNA, 120 bp, Artificial Sequence
  ENSG00000166884_0 (sequence is synthesized)
cctggaagagagtcatccccatcatggaccagatcaaccacactaatgtgaaggagtttttcttcctggaacttacacgttcccgagagctggagtttttcttgtttgtggtcttctttg

SEQ ID NO: 537213 - DNA, 120 bp, Artificial Sequence
  ENSG00000166884_1 (sequence is synthesized)
ctgtgtatgtagcaacagtcctgggaaatgcactcattgtggtcactattacctgtgagtcccgcctacacactcctatgtactttctcctgcggaacaaatcagtcctggacatcgttt

SEQ ID NO: 537214 - DNA, 120 bp, Artificial Sequence
  ENSG00000166884_2 (sequence is synthesized)
tttcatctatcaccgtccccaagttcctggtggatcttttatcagacaggaaaaccatctcctacaatgactgcatggcacagatctttttcttccactttgctggtggggcagatattt

SEQ ID NO: 537215 - DNA, 120 bp, Artificial Sequence
  ENSG00000166884_3 (sequence is synthesized)
ttttcctctctgtgatggcctatgacagataccttgcaatcgccaagcccctgcactatgtgaccatgatgaggaaagaggtgtgggtggccttggtggtggcttcttgggtgagtggtg

SEQ ID NO: 537216 - DNA, 120 bp, Artificial Sequence
  ENSG00000166884_4 (sequence is synthesized)
ggtaaaactggcctgcactgacacctttgctttggagcttttcatgatctctaacaacggactggtgaccctgctctggttcctcctgctcctgggctcctacactgtcattctggtgat

SEQ ID NO: 537217 - DNA, 120 bp, Artificial Sequence
  ENSG00000166884_5 (sequence is synthesized)
gctgagatcccactctggggaggggcggaacaaggccctctccacgtgcacgtcccacatgctggtggtgactcttcacttcgtgccttgtgtttacatctactgccggcccttcatgac

SEQ ID NO: 537218 - DNA, 120 bp, Artificial Sequence
  ENSG00000166884_6 (sequence is synthesized)
gctgcccatggacacaaccatatccattaataacacggtcattacccccatgctgaaccccatcatctattccctgagaaatcaagagatgaagtcagccatgcagaggctgcagaggag

SEQ ID NO: 537219 - DNA, 120 bp, Artificial Sequence
  ENSG00000166884_7 (sequence is synthesized)
acttgggccttccgagagcagaaaatgggggtgagcagtcagatggagagtggaagtctgtctgacttagttttctcaaaatgctagcctaagagtaacaggtcgctagctcttcttcca

SEQ ID NO: 537220 - DNA, 120 bp, Artificial Sequence
  ENSG00000166886_0 (sequence is synthesized)
agacagaggcgcggaggctcggagagagaagacgtggagggagggacagagcctggacagcggtggacacggcatcgtgcgcggggaagagggcagcacgcagcaggcgccgagcgccgg

SEQ ID NO: 537221 - DNA, 120 bp, Artificial Sequence
  ENSG00000166886_1 (sequence is synthesized)
gcaccgagaagggcagcccgggtgatctccggccgtccatgcacagagcgccttcccccacagccgagcagccgccgggcggaggggacagcgcccgccggaccctgcagcccagactca

SEQ ID NO: 537222 - DNA, 120 bp, Artificial Sequence
  ENSG00000166886_2 (sequence is synthesized)
agcccagtgcccgagccatggcactgcctcggacgctgggggagctgcagctgtaccgggtcctgcagcgcgccaacctcctttcctactatgagaccttcatccagcagggaggggacg

SEQ ID NO: 537223 - DNA, 120 bp, Artificial Sequence
  ENSG00000166886_3 (sequence is synthesized)
acgtgcagcagctgtgtgaggcgggtgaggaggagtttctggagatcatggcacttgtgggcatggccaccaagcccctccatgtccggcgcctgcagaaggcactgagagagtgggcca

SEQ ID NO: 537224 - DNA, 120 bp, Artificial Sequence
  ENSG00000166886_4 (sequence is synthesized)
ccaatccagggctcttcagtcaaccagtgcctgctgttcccgtctccagcatcccgctcttcaagatctctgagactgcgggtacccggaaagggagcatgagcaatgggcatggcagcc

SEQ ID NO: 537225 - DNA, 120 bp, Artificial Sequence
  ENSG00000166886_5 (sequence is synthesized)
caggggaaaaggcaggcagtgcccgcagttttagccccaagagcccccttgaacttggagagaagctatcaccactgcctgggggacctggggcaggggacccccggatctggccaggcc

SEQ ID NO: 537226 - DNA, 120 bp, Artificial Sequence
  ENSG00000166886_6 (sequence is synthesized)
ggagcactccagagtcggacgttggggcaggaggagaagaggaggctggctcgccccccttctccccccctgcagggggaggagtccctgaggggactggggctggggggctggcagcag

SEQ ID NO: 537227 - DNA, 120 bp, Artificial Sequence
  ENSG00000166886_7 (sequence is synthesized)
gtgggactgggggtggtccagaccgactggagccagagatggtacgcatggtggtggaaagtgtggagaggatcttccggagcttcccaaggggggatgctggggaggtcacatccctgc

SEQ ID NO: 537228 - DNA, 120 bp, Artificial Sequence
  ENSG00000166886_8 (sequence is synthesized)
taaagctgaataagaagctggcacggagcgttgggcacatctttgagatggatgataatgacagccagaaggaagaggagatccgcaaatacagcatcatctatggccgtttcgactcta

SEQ ID NO: 537229 - DNA, 120 bp, Artificial Sequence
  ENSG00000166886_9 (sequence is synthesized)
agcggcgggagggcaagcagctcagcctgcacgagctcaccatcaacgaggctgctgcccagttctgcatgagggacaacacgctcttattacggagagtggagctcttctctttgtccc

SEQ ID NO: 537230 - DNA, 120 bp, Artificial Sequence
  ENSG00000166886_10 (sequence is synthesized)
gaaacaagaggttggagaacagagtcaccctgaaatccagcagcctcccccaggccctgagtcctatgtacccccataccgccccagcctggaggaggacagcgccagcctgtctgggga

SEQ ID NO: 537231 - DNA, 120 bp, Artificial Sequence
  ENSG00000166886_11 (sequence is synthesized)
gagtctggatggacatttgcaggctgtggggtcatgtccaaggctgacgccgccccctgctgacctgcctctggcattgccagcccatgggctatggagccgacacatcctgcagcagac

SEQ ID NO: 537232 - DNA, 120 bp, Artificial Sequence
  ENSG00000166886_12 (sequence is synthesized)
actgatggacgaggggctgcggctcgcccgcctcgtctcccacgaccgcgtgggccgcctcagcccctgtgtgcctgcgaagccacctctcgcagagttcgaggaagggctgctggacag

SEQ ID NO: 537233 - DNA, 120 bp, Artificial Sequence
  ENSG00000166886_13 (sequence is synthesized)
atgtcctgccccaggaccccatcccgcgctggtggagggtcgcaggagcagcgtgaaagtggaggctgaggccagccggcagtgagggttggactggtgtcttcagacccaggacctcag

SEQ ID NO: 537234 - DNA, 120 bp, Artificial Sequence
  ENSG00000166886_14 (sequence is synthesized)
acttctggctcacacagacccccacgctctccatccccggaatctagtcacaaccctggatccttcctctgcccttctcctgcctccccacctgctccatgggcataagactgtggggct

SEQ ID NO: 537235 - DNA, 120 bp, Artificial Sequence
  ENSG00000166886_15 (sequence is synthesized)
tcaagcaataacaagcagaggcctggagagaggacacaaggagggtgcgtggtgccctcacccctgcccagagcgagggggcaaggactctgcctccagggcatctggggttttcccctc

SEQ ID NO: 537236 - DNA, 120 bp, Artificial Sequence
  ENSG00000166886_16 (sequence is synthesized)
cctcacacaacacactcccattctctttaggtttgcaccagtggtgtgagcagttggactcagtttggacaagggggaaagggggacttccctgggaaggtccagctaaaagtggcaaca

SEQ ID NO: 537237 - DNA, 120 bp, Artificial Sequence
  ENSG00000166886_17 (sequence is synthesized)
tttgcccccagaattgggggcctgggaacactggacctgctccttctcccctctccttccccgtttttgtgcttctggtttgtttctttaattaatttaacaagtgctgcagtttgccct

SEQ ID NO: 537238 - DNA, 120 bp, Artificial Sequence
  ENSG00000166886_18 (sequence is synthesized)
cccattcccatctatcccccaagtcctttgcaatttcttccctgccctacataggggcggtgggtgtgggatcccttcactggccccctcgggaggcctgggttggactcagggtctcct

SEQ ID NO: 537239 - DNA, 120 bp, Artificial Sequence
  ENSG00000166886_19 (sequence is synthesized)
ccagctgggggctggaccgcagcacctatctgagcagttagagcgtctttcttttcagattgtgtacagtagattatttattttgttattttggaataaaatttattttatggcttagga

SEQ ID NO: 537240 - DNA, 120 bp, Artificial Sequence
  ENSG00000166886_20 (sequence is synthesized)
gcggccgcagtgcttccatcctcagctgagggggaagcagagatacaggcagcaccgagctgttcagctccttgtcactcaggaccccacaggagaggaggaggccccgggcattcctag

SEQ ID NO: 537241 - DNA, 120 bp, Artificial Sequence
  ENSG00000166886_21 (sequence is synthesized)
gaagctgtgggtgctgacctctgtcttcccacctcagaaagctcccatgtagtgtcaaaaccaaagcaagcgtctgatggatgggcctcatttgtccaatggtgaaggggtgtgaggagg

SEQ ID NO: 537242 - DNA, 120 bp, Artificial Sequence
  ENSG00000166887_0 (sequence is synthesized)
agcaggaagtccggggttgacgatggctgtgttgttgaagggcctgtagccggggggttcctggccggatcccggtctacccttagcccagactcgttccggaccccagcccggcccgga

SEQ ID NO: 537243 - DNA, 120 bp, Artificial Sequence
  ENSG00000166887_1 (sequence is synthesized)
acactctgggcgagacggcggtggcaactctccccttgccgccatgcacgacgctttcgagccagtgccgatcctagaaaagctgcctctgcaaatcgactgtctggctgcctgggagga

SEQ ID NO: 537244 - DNA, 120 bp, Artificial Sequence
  ENSG00000166887_2 (sequence is synthesized)
atggcttcttgtgggaaccaaacaaggacatcttcttctctataggattcggaaggacgttggttgcaacagatttgaagtgacactagagaaatccaataagaacttctccaaaaagat

SEQ ID NO: 537245 - DNA, 120 bp, Artificial Sequence
  ENSG00000166887_3 (sequence is synthesized)
tcagcagatccatgtggtttcccagtttaagattctggtcagcttgttagaaaataacatttatgtccatgacctattgacatttcaacaaatcactacggtttcaaaggcaaagggagc

SEQ ID NO: 537246 - DNA, 120 bp, Artificial Sequence
  ENSG00000166887_4 (sequence is synthesized)
atcactgtttacttgtgacctccagcacacagagaccggtgaggaggtgttacggatgtgtgtggcagtaaaaaagaagctgcagctctatttctggaaggacagggaatttcatgaatt

SEQ ID NO: 537247 - DNA, 120 bp, Artificial Sequence
  ENSG00000166887_5 (sequence is synthesized)
gcagggggactttagtgtgccagatgtgcccaagtccatggcgtggtgtgaaaattctatctgtgtgggtttcaagagagactactacctaataagggtggatggaaaggggtccatcaa

SEQ ID NO: 537248 - DNA, 120 bp, Artificial Sequence
  ENSG00000166887_6 (sequence is synthesized)
agagctctttccaacaggaaaacagctggagcccttagttgcacctctggcagatggaaaagtggctgtgggccaggatgatctcaccgtggtactcaatgaggaagggatctgcacaca

SEQ ID NO: 537249 - DNA, 120 bp, Artificial Sequence
  ENSG00000166887_7 (sequence is synthesized)
gaaatgtgccctgaactggacggacataccagtggccatggagcaccagcctccctacatcattgcagtgttgcctcgatatgttgagatccgaacatttgaaccgaggcttctggtcca

SEQ ID NO: 537250 - DNA, 120 bp, Artificial Sequence
  ENSG00000166887_8 (sequence is synthesized)
aagcattgaattgcaaaggccccgtttcattacctcaggaggatcaaacattatctatgtggccagcaatcattttgtttggagactcatccctgtccccatggcaacccaaatccaaca

SEQ ID NO: 537251 - DNA, 120 bp, Artificial Sequence
  ENSG00000166887_9 (sequence is synthesized)
acttctccaggacaagcagtttgaattggctctgcagctcgcagaaatgaaagatgattctgacagtgaaaagcagcaacaaattcatcacatcaagaacttgtatgccttcaacctctt

SEQ ID NO: 537252 - DNA, 120 bp, Artificial Sequence
  ENSG00000166887_10 (sequence is synthesized)
ctgccagaagcgttttgatgagtccatgcaggtctttgctaaacttggcacagatcccacccatgtgatgggcctgtaccctgacctgctgcccacagactacagaaagcagttgcagta

SEQ ID NO: 537253 - DNA, 120 bp, Artificial Sequence
  ENSG00000166887_11 (sequence is synthesized)
tcccaacccattgcctgtgctctccggggctgaattggagaaggctcacttagctctgattgactacctgacacagaaacgaagtcaattggtaaagaagctgaatgactctgatcacca

SEQ ID NO: 537254 - DNA, 120 bp, Artificial Sequence
  ENSG00000166887_12 (sequence is synthesized)
gtcaagcacctcaccgctcatggaaggcactcccaccatcaaatccaagaagaagctgctacaaatcatcgacaccaccctgctcaagtgctatctccatacaaatgtggccctggtggc

SEQ ID NO: 537255 - DNA, 120 bp, Artificial Sequence
  ENSG00000166887_13 (sequence is synthesized)
ccccttgctacgcctggagaacaatcactgccacatcgaggagagcgagcacgtgctaaagaaggctcacaagtacagtgagcttatcatcctgtatgagaagaaggggctccacgagaa

SEQ ID NO: 537256 - DNA, 120 bp, Artificial Sequence
  ENSG00000166887_14 (sequence is synthesized)
agctctgcaggtgctcgtggaccagtccaagaaagccaactcccctctgaaaggccacgagaggacagtgcagtatctgcagcatctgggcacagaaaacctgcatttgattttctccta

SEQ ID NO: 537257 - DNA, 120 bp, Artificial Sequence
  ENSG00000166887_15 (sequence is synthesized)
ctcagtgtgggtgctgagagacttcccagaagatggcctgaagatatttactgaagatctcccggaagtggagtctctgccacgtgatcgagtcctcggcttcttaatagagaattttaa

SEQ ID NO: 537258 - DNA, 120 bp, Artificial Sequence
  ENSG00000166887_16 (sequence is synthesized)
gggtctggctattccttatctggaacacatcatccatgtttgggaggagacaggctctcggttccacaactgcctgatccagctatactgtgagaaggtgcaaggtctgatgaaggagta

SEQ ID NO: 537259 - DNA, 120 bp, Artificial Sequence
  ENSG00000166887_17 (sequence is synthesized)
tctcctgtccttccctgcaggcaaaaccccagtcccagctggagaggaagagggtgagctgggagaataccggcaaaagctcctcatgttcttggagatttccagctactatgatccagg

SEQ ID NO: 537260 - DNA, 120 bp, Artificial Sequence
  ENSG00000166887_18 (sequence is synthesized)
ccggctcatctgtgattttccctttgatggcctcttagaagaacgagctctcctgttggggcgcatggggaaacatgaacaagctcttttcatttatgtccacatcttgaaggatacaag

SEQ ID NO: 537261 - DNA, 120 bp, Artificial Sequence
  ENSG00000166887_19 (sequence is synthesized)
gatggctgaggagtactgccacaaacactatgaccgaaacaaagatggcaacaaagatgtgtatctgtccctgcttcggatgtacctgtcgccccccagcattcactgcctggggccaat

SEQ ID NO: 537262 - DNA, 120 bp, Artificial Sequence
  ENSG00000166887_20 (sequence is synthesized)
tgcaggtcctcgagctacaccacagcaaactggacaccaccaaggccctcaaccttctgccagcaaacactcagatcaatgacatacgcatcttcctggaaaaggtcttggaagaaaatg

SEQ ID NO: 537263 - DNA, 120 bp, Artificial Sequence
  ENSG00000166887_21 (sequence is synthesized)
cacaaaagaaacggttcaatcaagtgctcaagaaccttctccatgcagaattcctgagggtccaggaagagcggattttacaccagcaggtgaagtgcatcatcacagaggagaaggtgt

SEQ ID NO: 537264 - DNA, 120 bp, Artificial Sequence
  ENSG00000166887_22 (sequence is synthesized)
gcatggtgtgtaagaagaagattgggaacagtgcatttgcaagataccccaatggagtggtcgtccattacttctgttccaaagaggtaaacccagctgacacttgagcccagcatcctg

SEQ ID NO: 537265 - DNA, 120 bp, Artificial Sequence
  ENSG00000166887_23 (sequence is synthesized)
gggatccagcggatggacagcttggctctcccagagaggtgaaggagcacctggccttaggaatcctggctgccaccaccacaaggctccccatttggacattactggctatcttgtgcc

SEQ ID NO: 537266 - DNA, 120 bp, Artificial Sequence
  ENSG00000166887_24 (sequence is synthesized)
ctggaacaactctgaattaattagactcatggtctggcattgccagctttttaatgggaaaagagattagttataccttataccattatgttgtgggcaattccagagaattcagtacct

SEQ ID NO: 537267 - DNA, 120 bp, Artificial Sequence
  ENSG00000166887_25 (sequence is synthesized)
gcttggtcaggaggatgtgcaccatcttgcctttgcacaccagtcacctgaacaaggaaacttgtcacaagtgtttgtaaccatggggttgttcatcaagggcttttctattaagtacat

SEQ ID NO: 537268 - DNA, 120 bp, Artificial Sequence
  ENSG00000166887_26 (sequence is synthesized)
gacttcacaaggaccgctcagcatggctcactggagagttccatgagagaacagcactcaagcttctggccgcatggacccgatggctcgcattctgtgtagtgttttacgtctccatgg

SEQ ID NO: 537269 - DNA, 120 bp, Artificial Sequence
  ENSG00000166887_27 (sequence is synthesized)
taactgtgccctgcacccctcggtagccgccctgttagttttcagtctccttttctttctcaccatttatcacttccctcactgccctacccaggctttctctcccacttccctgactct

SEQ ID NO: 537270 - DNA, 120 bp, Artificial Sequence
  ENSG00000166887_28 (sequence is synthesized)
gggaataactaatatttaagcaaggtaagatgagaagcaaggggtctcagttctaggaatacagtgctagttgattgtcaggtatgttgtaaatagaccctctttggccatacactccat

SEQ ID NO: 537271 - DNA, 120 bp, Artificial Sequence
  ENSG00000166887_29 (sequence is synthesized)
gcctagatgcctcggagagcatcattctctgcctaggcaaggccctgcatcccttgcctcaggccgggctgagtgtgactgcagctcctgaggatgggcctgccctgtctggggtatgcg

SEQ ID NO: 537272 - DNA, 120 bp, Artificial Sequence
  ENSG00000166887_30 (sequence is synthesized)
tgatccctagatacatgttcccacagaggtgcctgctccgtcttcgctcaccagacactcaggcaggctggcttagtctttgtgcgtggcgattttgtgctctgggccctttctcttttt

SEQ ID NO: 537273 - DNA, 120 bp, Artificial Sequence
  ENSG00000166887_31 (sequence is synthesized)
ccagccagtttccattcacttgccttacagcctgccctggccgtcactccccagctttgttcagcaatggtgtggttggagagttgtgctgggatagcgcaggaaggtgggtcccggcaa

SEQ ID NO: 537274 - DNA, 120 bp, Artificial Sequence
  ENSG00000166887_32 (sequence is synthesized)
cacgcaggggatgagtggacctggaactgacaatggcgtgctgccaagtgttcctgagaggtgtttaggcacagcagaggggacgcggggggcaagaacagcaggacgctggtttaaaaa

SEQ ID NO: 537275 - DNA, 120 bp, Artificial Sequence
  ENSG00000166887_33 (sequence is synthesized)
taactcaccgccaaacctgtggagcagtgtggggcatcctgccagaggtgcacaggctggagtttcaggcactgcaggctgatgacacacagggagagtggccctgcctcctgtcctccc

SEQ ID NO: 537276 - DNA, 120 bp, Artificial Sequence
  ENSG00000166887_34 (sequence is synthesized)
cggggtttttgcagactcgaagtctcactgcaccagtgtctttgatggtggtgagggtgggtgatggtgcccagcaccaacagttttagtggcctgtccttgacctgccgtggtcctttg

SEQ ID NO: 537277 - DNA, 120 bp, Artificial Sequence
  ENSG00000166887_35 (sequence is synthesized)
taaactatggctccatgctgtgtgacagatcaacgtgctgatggtaagtagactaggcttccccaggcatgccgtccgtgggggcctgaagagacagtgagtgccattggccccattcgc

SEQ ID NO: 537278 - DNA, 120 bp, Artificial Sequence
  ENSG00000166887_36 (sequence is synthesized)
agatgtgggagactctgctcaggcctgtgaggctgggcagcccttcaccagagttcggaggagcagtgtgtggcgccacgtcccgactggccatacccacacagaagcagtgctgcccgg

SEQ ID NO: 537279 - DNA, 120 bp, Artificial Sequence
  ENSG00000166887_37 (sequence is synthesized)
ggcctcatctgggccagcttggactctgcttcctccaggagcagcagggaagctctgggccacctccctggatagcaggaacttgacctgccatgtgtgccctgccttcctggccagctg

SEQ ID NO: 537280 - DNA, 120 bp, Artificial Sequence
  ENSG00000166887_38 (sequence is synthesized)
tgcttgttatcttccattctcacaaactgtctttgaagcaatagaataaagaatgtgtgttttctttcctggtatacatacatgatcccatgctcccaagctccattcttccttccctca

SEQ ID NO: 537281 - DNA, 120 bp, Artificial Sequence
  ENSG00000166887_39 (sequence is synthesized)
actctctgccctccacagagctatggagaaggctggagatgaaagctttgtagtgaggactgataaagatctcatcactgctccttataataaacctaataaagcaagaaaccaagccta

SEQ ID NO: 537282 - DNA, 120 bp, Artificial Sequence
  ENSG00000166887_40 (sequence is synthesized)
ggtgactgtcagcacagctgatgtgtcttttttgtgcaagagatttctctgatcataactcaagcaaagcaatttttttttatttttcttttttttagagtcaggatctcactctgtcac

SEQ ID NO: 537283 - DNA, 83 bp, Artificial Sequence
  ENSG00000166887_41 (sequence is synthesized)
ttttttttagagtcaggagttatggctcattgcagcctcaaactcctgggcttaaatgatcttcccacctcagcctcctgagt

SEQ ID NO: 537284 - DNA, 120 bp, Artificial Sequence
  ENSG00000166887_42 (sequence is synthesized)
gactaattttttaataaatgtttttgttgaggcagtgtctcactaagatgcctaggtcggtctcaaacttccggcctacgtgaccttcccacctcaacctctcaagttgctgggattaca

SEQ ID NO: 537285 - DNA, 120 bp, Artificial Sequence
  ENSG00000166887_43 (sequence is synthesized)
tttggagatccatttaaatgtatcttagaatgggcagctgaaacactccataaacccaaagccttagaccggaacaactgctgtgtatgttctctttcacagagcaccagcctccctaca

SEQ ID NO: 537286 - DNA, 120 bp, Artificial Sequence
  ENSG00000166887_44 (sequence is synthesized)
gataagaaacaggtttgcccacagagtatttctctattcagcttatttttttaaccgtaagctgatgttttggggccacatggagactatgaactaaaagaagttagcatggaagccacc

SEQ ID NO: 537287 - DNA, 120 bp, Artificial Sequence
  ENSG00000166887_45 (sequence is synthesized)
ctggaggccctttctggtcatgtggtgacatccttgaaccccattcccttcatttttcttgatgaccctacattgccacctggcagtgtcctttcattttgagcttggtttcccttaaag

SEQ ID NO: 537288 - DNA, 120 bp, Artificial Sequence
  ENSG00000166887_46 (sequence is synthesized)
cgttaggcatgctcagtgctgggggttctgggagggttgctgccagcctgacgtagctcatgtctctctgagacaggtgtatctgtccctgcttcggatgtacctgtcgccccccagcat

SEQ ID NO: 537289 - DNA, 120 bp, Artificial Sequence
  ENSG00000166887_47 (sequence is synthesized)
ctccatgcagaattcctgagggtccaggaagagcggattttacaccagcaggtgaagtgcatcatcacagaggagaaggtgtgcatggtgtgtaagaagaagattgggaacagagaagga

SEQ ID NO: 537290 - DNA, 120 bp, Artificial Sequence
  ENSG00000166887_48 (sequence is synthesized)
gaacatggctgctggctgtcctgacaacttttagttcttgagccttcagagagcagcctgttctatctgttgggagtgggcttcgagaatttaaagacctgcaatgtatgtgcatttgca

SEQ ID NO: 537291 - DNA, 120 bp, Artificial Sequence
  ENSG00000166887_49 (sequence is synthesized)
atttgggatttatgtcacttggggattggaaggatgagggttatttcagcttcctctgaagaaaaagatcccagtagaccaagctggaaatgctacctaccaaatctaggtaaactacag

SEQ ID NO: 537292 - DNA, 120 bp, Artificial Sequence
  ENSG00000166887_50 (sequence is synthesized)
agggataaaagaataatgttttagaaaaaaaaattccaaagccacatttggaaaaaaaattccaaagcgaaactcaaaagtgaccacaggacaatcaaataggcttaagtaccaggatgc

SEQ ID NO: 537293 - DNA, 120 bp, Artificial Sequence
  ENSG00000166887_51 (sequence is synthesized)
agatatttaaccacaattacatgagtcgctatgagagtttggaggattatgggacaaaattagtaaaatggagtttagtaattgagaagatggctcctcacgttactgggtcgcattgtg

SEQ ID NO: 537294 - DNA, 120 bp, Artificial Sequence
  ENSG00000166887_52 (sequence is synthesized)
aaacttcctggtggctttagacgagctgtctcttagtcatctttgcagcccgattaggggataatctggatgggacctgttgggccttaaaaatgtgagggaggctgggagaccaggtca

SEQ ID NO: 537295 - DNA, 120 bp, Artificial Sequence
  ENSG00000166887_53 (sequence is synthesized)
taagcaggccaccctattctctgcccaggtgcgcagaagttctgaagaggagccaggggagctaagtgacacaagcctggcacatgagactcaggagctcttgtctaggtcctggcatct

SEQ ID NO: 537296 - DNA, 120 bp, Artificial Sequence
  ENSG00000166887_54 (sequence is synthesized)
agcaggtaagcagtgatggcagtccttacaagaatatttgacttacatgagaccctgtcagactagaactttggtaatgttatttattaactctgaatcctcttctctttgaccttctat

SEQ ID NO: 537297 - DNA, 120 bp, Artificial Sequence
  ENSG00000166887_55 (sequence is synthesized)
ttatgcaggagtgtctgctcatatatcatgtgcctgagatcctctctcacaagcagaaatgataatcacagaaattatagtgcccagaaaaatcagtgagatccctgtaactggataggc

SEQ ID NO: 537298 - DNA, 120 bp, Artificial Sequence
  ENSG00000166887_56 (sequence is synthesized)
tgtccttccctgcaggtgcgcagaagttctgaagaggagccaggggagctaagtgacacaagcctggcacatgagactcaggagctcttgtctaggtcctggcatctctgagtgtctcag

SEQ ID NO: 537299 - DNA, 120 bp, Artificial Sequence
  ENSG00000166887_57 (sequence is synthesized)
tgccctgaactggacggacataccagtggccatgggtgagaccaacagtagctgctgtttcccactttgggttgaggttgtgtgccattcctgcagaacggagtcccattcgtagcttta

SEQ ID NO: 537300 - DNA, 120 bp, Artificial Sequence
  ENSG00000166887_58 (sequence is synthesized)
gcagactggtttacgttgtgtcattcactttcagttccccttcttataagtagatgacattttagggtcattaaaaatgggatagtctagttcttgcaagaagctgagttttactccaga

SEQ ID NO: 537301 - DNA, 120 bp, Artificial Sequence
  ENSG00000166887_59 (sequence is synthesized)
gggggaaaacatataaacagaaatgtttattttaggaagtgattatctactgctatcttttacttcttagtttttttcttcctcctttttttaagagttttgattgtgtcctctgccaaa

SEQ ID NO: 537302 - DNA, 120 bp, Artificial Sequence
  ENSG00000166887_60 (sequence is synthesized)
gagtccatgcaggtctttgctaaacttggcacaggtaacaagtggtgaggcctttatataagggactaatggaggaggggagcctgaaaagtatggggagaaatgataacagacttctga

SEQ ID NO: 537303 - DNA, 120 bp, Artificial Sequence
  ENSG00000166887_61 (sequence is synthesized)
cttgagccttcagagagcagcctgttctatctgttgggagtgggcttcgagaatttaaagacctgcaatgtatggtatggagctgttggattcttgtccataaaactcttcccctcttga

SEQ ID NO: 537304 - DNA, 120 bp, Artificial Sequence
  ENSG00000166887_62 (sequence is synthesized)
agctagaacctgatatagtgggtgcccaagagatgtaggtctgcagaaagttcttataaggaagatccagtgaaggaagaaaaagatctttcaagctactgcattgtgactcaagtagga

SEQ ID NO: 537305 - DNA, 120 bp, Artificial Sequence
  ENSG00000166887_63 (sequence is synthesized)
tcctgagccagactcatactgtgttaagacatatactctagttagtccccttttcttcaaaggagagtgatttgtctcttatgtagctggaaaaatatttttctttagaaagacaaactc

SEQ ID NO: 537306 - DNA, 120 bp, Artificial Sequence
  ENSG00000166887_64 (sequence is synthesized)
gccgtccttttcagaattagcctgaaacctgttctgatgaacattgttggctctcaggaagccagggctgagctttgggctggtgcactgcccatctttaatatgccttgtgttttgcat

SEQ ID NO: 537307 - DNA, 120 bp, Artificial Sequence
  ENSG00000166887_65 (sequence is synthesized)
aataaaaaaataccccatgcactcttaactgtgtgcacctcatcctctgtttggttatttgacagagatgatggctacagaaatccagagcccctcaggcaggctgttctttgaggtttg

SEQ ID NO: 537308 - DNA, 120 bp, Artificial Sequence
  ENSG00000166887_66 (sequence is synthesized)
ggtgggctgcttttggaatggccccccagcaatgtgcctcttctgtaggaggtgccgctgccagagaagtggtcacttagaagcagtcctcactcccaagccattttcttccctgcagtg

SEQ ID NO: 537309 - DNA, 74 bp, Artificial Sequence
  ENSG00000166888_0 (sequence is synthesized)
ctttatcttatttttctttttggtggtggtggtggaaggggggaggtgctagcagggccagccttgaactcgct

SEQ ID NO: 537310 - DNA, 120 bp, Artificial Sequence
  ENSG00000166888_1 (sequence is synthesized)
gaaggggggaggtgctagcagggccagccttgaactcgctggacagagctacagacctatggggcctggaagtgcccgctgagaaagggagaagacagcagaggggttgccgaggcaacc

SEQ ID NO: 537311 - DNA, 120 bp, Artificial Sequence
  ENSG00000166888_2 (sequence is synthesized)
tccaagtcccagatcatgtctctgtggggtctggtctccaagatgcccccagaaaaagtgcagcggctctatgtcgactttccccaacacctgcggcatcttctgggtgactggctggag

SEQ ID NO: 537312 - DNA, 120 bp, Artificial Sequence
  ENSG00000166888_3 (sequence is synthesized)
agccagccctgggagttcctggtcggctccgacgccttctgctgcaacttggctagtgccctactttcagacactgtccagcaccttcaggcctcggtgggagagcagggggaggggagc

SEQ ID NO: 537313 - DNA, 120 bp, Artificial Sequence
  ENSG00000166888_4 (sequence is synthesized)
accatcttgcaacacatcagcacccttgagagcatatatcagagggaccccctgaagctggtggccactttcagacaaatacttcaaggagagaaaaaagctgttatggaacagttccgc

SEQ ID NO: 537314 - DNA, 120 bp, Artificial Sequence
  ENSG00000166888_5 (sequence is synthesized)
cacttgccaatgcctttccactggaagcaggaagaactcaagtttaagacaggcttgcggaggctgcagcaccgagtaggggagatccaccttctccgagaagccctgcagaagggggct

SEQ ID NO: 537315 - DNA, 120 bp, Artificial Sequence
  ENSG00000166888_6 (sequence is synthesized)
gaggctggccaagtgtctctgcacagcttgatagaaactcctgctaatgggactgggccaagtgaggccctggccatgctactgcaggagaccactggagagctagaggcagccaaagcc

SEQ ID NO: 537316 - DNA, 120 bp, Artificial Sequence
  ENSG00000166888_7 (sequence is synthesized)
ctagtgctgaagaggatccagatttggaaacggcagcagcagctggcagggaatggcgcaccgtttgaggagagcctggccccactccaggagaggtgtgaaagcctggtggacatttat

SEQ ID NO: 537317 - DNA, 120 bp, Artificial Sequence
  ENSG00000166888_8 (sequence is synthesized)
tcccagctacagcaggaggtaggggcggctggtggggagcttgagcccaagacccgggcatcgctgactggccggctggatgaagtcctgagaaccctcgtcaccagttgcttcctggtg

SEQ ID NO: 537318 - DNA, 120 bp, Artificial Sequence
  ENSG00000166888_9 (sequence is synthesized)
gagaagcagcccccccaggtactgaagactcagaccaagttccaggctggagttcgattcctgttgggcttgaggttcctgggggccccagccaagcctccgctggtcagggccgacatg

SEQ ID NO: 537319 - DNA, 120 bp, Artificial Sequence
  ENSG00000166888_10 (sequence is synthesized)
gtgacagagaagcaggcgcgggagctgagtgtgcctcagggtcctggggctggagcagaaagcactggagaaatcatcaacaacactgtgcccttggagaacagcattcctgggaactgc

SEQ ID NO: 537320 - DNA, 120 bp, Artificial Sequence
  ENSG00000166888_11 (sequence is synthesized)
tgctctgccctgttcaagaacctgcttctcaagaagatcaagcggtgtgagcggaagggcactgagtctgtcacagaggagaagtgcgctgtgctcttctctgccagcttcacacttggc

SEQ ID NO: 537321 - DNA, 120 bp, Artificial Sequence
  ENSG00000166888_12 (sequence is synthesized)
cccggcaaactccccatccagctccaggccctgtctctgcccctggtggtcatcgtccatggcaaccaagacaacaatgccaaagccactatcctgtgggacaatgccttctctgagatg

SEQ ID NO: 537322 - DNA, 120 bp, Artificial Sequence
  ENSG00000166888_13 (sequence is synthesized)
gaccgcgtgccctttgtggtggctgagcgggtgccctgggagaagatgtgtgaaactctgaacctgaagttcatggctgaggtggggaccaaccgggggctgctcccagagcacttcctc

SEQ ID NO: 537323 - DNA, 120 bp, Artificial Sequence
  ENSG00000166888_14 (sequence is synthesized)
ttcctggcccagaagatcttcaatgacaacagcctcagtatggaggccttccagcaccgttctgtgtcctggtcgcagttcaacaaggagatcctgctgggccgtggcttcaccttttgg

SEQ ID NO: 537324 - DNA, 120 bp, Artificial Sequence
  ENSG00000166888_15 (sequence is synthesized)
cagtggtttgatggtgtcctggacctcaccaaacgctgtctccggagctactggtctgaccggctgatcattggcttcatcagcaaacagtacgttactagccttcttctcaatgagccc

SEQ ID NO: 537325 - DNA, 120 bp, Artificial Sequence
  ENSG00000166888_16 (sequence is synthesized)
ggaacctttctcctccgcttcagcgactcagagattgggggcatcaccattgcccatgtcatccggggccaggatggctctccacagatagagaacatccagccattctctgccaaagac

SEQ ID NO: 537326 - DNA, 120 bp, Artificial Sequence
  ENSG00000166888_17 (sequence is synthesized)
ctgtccattcgctcactgggggaccgaatccgggatcttgctcagctcaaaaatctctatcccaagaagcccaaggatgaggctttccggagccactacaagcctgaacagatgggtaag

SEQ ID NO: 537327 - DNA, 120 bp, Artificial Sequence
  ENSG00000166888_18 (sequence is synthesized)
gatggcaggggttatgtcccagctaccatcaagatgaccgtggaaagggaccaaccacttcctaccccagagctccagatgcctaccatggtgccttcttatgaccttggaatggcccct

SEQ ID NO: 537328 - DNA, 120 bp, Artificial Sequence
  ENSG00000166888_19 (sequence is synthesized)
gattcctccatgagcatgcagcttggcccagatatggtgccccaggtgtacccaccacactctcactccatccccccgtatcaaggcctctccccagaagaatcagtcaacgtgttgtca

SEQ ID NO: 537329 - DNA, 120 bp, Artificial Sequence
  ENSG00000166888_20 (sequence is synthesized)
gccttccaggagcctcacctgcagatgccccccagcctgggccagatgagcctgccctttgaccagcctcacccccagggcctgctgccgtgccagcctcaggagcatgctgtgtccagc

SEQ ID NO: 537330 - DNA, 120 bp, Artificial Sequence
  ENSG00000166888_21 (sequence is synthesized)
cctgaccccctgctctgctcagatgtgaccatggtggaagacagctgcctgagccagccagtgacagcgtttcctcagggcacttggattggtgaagacatattccctcctctgctgcct

SEQ ID NO: 537331 - DNA, 120 bp, Artificial Sequence
  ENSG00000166888_22 (sequence is synthesized)
cccactgaacaggacctcactaagcttctcctggaggggcaaggggagtcggggggagggtccttgggggcacagcccctcctgcagccctcccactatgggcaatctgggatctcaatg

SEQ ID NO: 537332 - DNA, 120 bp, Artificial Sequence
  ENSG00000166888_23 (sequence is synthesized)
tcccacatggacctaagggccaaccccagttggtgatcccagctggagggagaacccaaagagacagctcttctactacccccacagacctgctctggacacttgctcatgccctgccaa

SEQ ID NO: 537333 - DNA, 120 bp, Artificial Sequence
  ENSG00000166888_24 (sequence is synthesized)
gcagcagatggggagggtgccctcctatccccacctactcctgggtcaggaggaaaagactaacaggagaatgcacagtgggtggagccaatccactccttcctttctatcattcccctg

SEQ ID NO: 537334 - DNA, 120 bp, Artificial Sequence
  ENSG00000166888_25 (sequence is synthesized)
cccacctccttccagcactgactggaagggaagttcaggctctgagacacaccccaacatgcctgcacctgcagcgcgcacacgcacgcacacacacatacagagctctctgagggtgat

SEQ ID NO: 537335 - DNA, 120 bp, Artificial Sequence
  ENSG00000166888_26 (sequence is synthesized)
ggggctgagcaggaggggggctgggtaagagcacaggttagggcatggaaggcttctccgcccattctgacccagggcctaggacggataggcaggaacatacagacacatttacactag

SEQ ID NO: 537336 - DNA, 120 bp, Artificial Sequence
  ENSG00000166888_27 (sequence is synthesized)
aggccagggatagaggatattgggtctcagccctaggggaatgggaagcagctcaagggaccctgggtgggagcataggaggggtctggacatgtggttactagtacaggttttgccctg

SEQ ID NO: 537337 - DNA, 120 bp, Artificial Sequence
  ENSG00000166888_28 (sequence is synthesized)
attaaaaaatctcccaaagccccaaattcctgttagccaggtggaggcttctgatacgtgtatgagactatgcaaaagtacaagggctgagattcttcgtgtatagctgtgtgaacgtgt

SEQ ID NO: 537338 - DNA, 120 bp, Artificial Sequence
  ENSG00000166888_29 (sequence is synthesized)
atgtacctaggatatgttaaatgtatagctggcaccttagttgcatgaccacatagaacatgtgtctatctgcttttgcctacgtgacaacacaaatttgggagggtgagacactgcaca

SEQ ID NO: 537339 - DNA, 120 bp, Artificial Sequence
  ENSG00000166888_30 (sequence is synthesized)
gaagacagcagcaagtgtgctggcctctctgacatatgctaacccccaaatactctgaatttggagtctgactgtgcccaagtgggtccaagtggctgtgacatctacgtatggctccac

SEQ ID NO: 537340 - DNA, 120 bp, Artificial Sequence
  ENSG00000166888_31 (sequence is synthesized)
acctccaatgctgcctgggagccagggtgagagtctgggtccaggcctggccatgtggccctccagtgtatgagagggccctgcctgctgcatcttttctgttgccccatccaccgccag

SEQ ID NO: 537341 - DNA, 120 bp, Artificial Sequence
  ENSG00000166888_32 (sequence is synthesized)
cttcccttcactcccctatcccattctccctctcaaggcaggggtcatagatcctaagccataaaataaattttattccaaaataacaaaataaataatctactgtacacaatctgaaaa

SEQ ID NO: 537342 - DNA, 120 bp, Artificial Sequence
  ENSG00000166888_33 (sequence is synthesized)
cctgtcctggtcaagccaatcgacccagccttgttatgggttggggtggggagaaatgtgtcctcctgatggctggggaagaagaggggttggatatttctagccagggccatgccagga

SEQ ID NO: 537343 - DNA, 120 bp, Artificial Sequence
  ENSG00000166888_34 (sequence is synthesized)
gtatgcaggagtgggggctggggagagggtgcccccaggggtccaagggggacgcggaatctcactcaccgtcgatagccgccgcgaccagagctgagagcaggggcagcagcaggagca

SEQ ID NO: 537344 - DNA, 120 bp, Artificial Sequence
  ENSG00000166888_35 (sequence is synthesized)
gcaggaggggtaaggattctgccttgaggagaaaagagctggggtaagtgggcactggaggaaagaggggcatgaaggtcttggagcagaaacgtccagagaagggacctctccattttc

SEQ ID NO: 537345 - DNA, 120 bp, Artificial Sequence
  ENSG00000166888_36 (sequence is synthesized)
ggttctctatcgctcatacccagcactaccaagtcaggggccttcctgcagtaccattcagctgcacccagatgccccaagagcaatgagcccacacgcagagctggaggacctgaaagg

SEQ ID NO: 537346 - DNA, 120 bp, Artificial Sequence
  ENSG00000166888_37 (sequence is synthesized)
tgggggtgggcagctgaccctgctgaaggccctacaggtgagagaaagaagccaggcgggagggccttggagtggaccaagatgcataaaagccagttccagcggggctgtgcacactgt

SEQ ID NO: 537347 - DNA, 120 bp, Artificial Sequence
  ENSG00000166888_38 (sequence is synthesized)
caggtcgcatcctgtacaagtgggcctagtggaggggcacaagcggggactcatccaacccaggcttctctcctcaagccccatgcctagaggaataggagggcttttccatttggttta

SEQ ID NO: 537348 - DNA, 120 bp, Artificial Sequence
  ENSG00000166888_39 (sequence is synthesized)
ttgggtgggaacactttccaatttgccacaaagcactgtaagtggtggcagttgtcctgggtgcaagagccgtcgggggagaggcagctgggtttccacagggggtgtaggcactgagaa

SEQ ID NO: 537349 - DNA, 120 bp, Artificial Sequence
  ENSG00000166888_40 (sequence is synthesized)
tgaacctcccacccagaccctaggccaacagatcacagaacccccttcagcccaggtgccttgcagccacacccactacccaccccacttctccacacatgatagcctttctccctgggt

SEQ ID NO: 537350 - DNA, 120 bp, Artificial Sequence
  ENSG00000166888_41 (sequence is synthesized)
atggtgtgtacccaccacactctcactccatccccccgtatcaaggcctctccccagaagaatcagtcaacgtgttgtcagccttccaggagcctcacctgcagatgccccccagcctgg

SEQ ID NO: 537351 - DNA, 120 bp, Artificial Sequence
  ENSG00000166888_42 (sequence is synthesized)
acattcacgcattgggcaactcagagaagctgttttaactttcgatcctgtggtcccacaatcagaggactcgggcagataggggttgagataagcgagtttaggccaccaagcgggcgg

SEQ ID NO: 537352 - DNA, 120 bp, Artificial Sequence
  ENSG00000166888_43 (sequence is synthesized)
cctcctctccctgcccgcgtgtcatcctgatgtcactccctatttcatagctgtgcttctcttacttccccatgatccatgcccaccttttccacctcccttcctccctaaccccagagc

SEQ ID NO: 537353 - DNA, 120 bp, Artificial Sequence
  ENSG00000166888_44 (sequence is synthesized)
actccatggctgtcttttccttctcacaacagctgaacagatgggtaaggatggcaggggttatgtcccagctaccatcaagatgaccgtggaaaggtgagtgtggtggtatggacagtg

SEQ ID NO: 537354 - DNA, 120 bp, Artificial Sequence
  ENSG00000166888_45 (sequence is synthesized)
ggtaggtcaggggcttagtgcttatctgcaggaaggaggggtggcatcaacccttggtcagtcacatgtacctccttccctcctccagggaccaaccacttcctaccccagagctccaga

SEQ ID NO: 537355 - DNA, 120 bp, Artificial Sequence
  ENSG00000166888_46 (sequence is synthesized)
agaagactgagctcagagcatagaaatagcttgcccaggccatgactaagtcaggataaggagctggagcttgtttcctcactcagtggtcctgactttgcaccactctgcatttgccta

SEQ ID NO: 537356 - DNA, 120 bp, Artificial Sequence
  ENSG00000166888_47 (sequence is synthesized)
ctccccatccagctccaggtgaaccgtggcccagccctgccccaatctgggaccccgagtcctcctccaatgccacacacaagggccctggaccctcacctcttgtgactgccccatacc

SEQ ID NO: 537357 - DNA, 120 bp, Artificial Sequence
  ENSG00000166888_48 (sequence is synthesized)
ccatgtgtctgggattcatgcacactggggcccgggtgagtgggggtgagcaagagcatggagtgcacagggcagggaatggtagtggatagcagcaaacacttcggaagcacttcctat

SEQ ID NO: 537358 - DNA, 120 bp, Artificial Sequence
  ENSG00000166888_49 (sequence is synthesized)
agaccagggcactctattaaatgatacatacgcacatgcgtgccagcacacacacgtctggttttcacaataacattatgaggtaggcagtattatcagcctcattttatagataaggac

SEQ ID NO: 537359 - DNA, 120 bp, Artificial Sequence
  ENSG00000166888_50 (sequence is synthesized)
gagagtttaagtagtttgtcccagtcacacagctaagtgttggagctggtatttgaaacctggaggtctggttccatagcgatgactaataaccacttctctacggtgaggccctgattg

SEQ ID NO: 537360 - DNA, 120 bp, Artificial Sequence
  ENSG00000166888_51 (sequence is synthesized)
agcttcagaacgcatttaataacatggcatgagctttttgattatgatgtgtgagtccaataacttctctgagtgctcagagccagtcccctgaggaaacttcttgcttcactaagaaac

SEQ ID NO: 537361 - DNA, 89 bp, Artificial Sequence
  ENSG00000166888_52 (sequence is synthesized)
ttgcagtgagccaagattgcgccactgcccttcagcctgggcgacagagcaagactatgtctcaaaaacaaaacaaaacaactgcttga

SEQ ID NO: 537362 - DNA, 83 bp, Artificial Sequence
  ENSG00000166888_53 (sequence is synthesized)
ggccaaggtaggaggatcgcttgagcctgcaagtttaagaccagcctgggctacatagggagatccaatctctacaaaaaata

SEQ ID NO: 537363 - DNA, 120 bp, Artificial Sequence
  ENSG00000166889_0 (sequence is synthesized)
cgtccccacgcacgctccggcgtacggcggcggccaggggtcgcgagccggtggaggacccgcgcgcggaggagccggggagtcagcgcttcttccctccctccccctctcccctccccg

SEQ ID NO: 537364 - DNA, 120 bp, Artificial Sequence
  ENSG00000166889_1 (sequence is synthesized)
ctccctgcccccctccccaagaatgttccgctacgagtctttggaggattgtcctctggatgaagatgaagatgcatttcagggactgggagaagaagatgaagagattgatcaattcaa

SEQ ID NO: 537365 - DNA, 120 bp, Artificial Sequence
  ENSG00000166889_2 (sequence is synthesized)
tgatgatacatttgggtcaggtgcagttgatgatgattggcaggaagcacatgagcgcctggctgaattggaagaaaagctaccagtggcagttaatgaacaaacaggcaatggagagag

SEQ ID NO: 537366 - DNA, 120 bp, Artificial Sequence
  ENSG00000166889_3 (sequence is synthesized)
agatgaaatggacttgttgggtgaccatgaggagaatctggcagaaaggctcagtaagatggtgattgaaaatgaactagaagatccagctattatgagggcagtgcagaccaggccagt

SEQ ID NO: 537367 - DNA, 120 bp, Artificial Sequence
  ENSG00000166889_4 (sequence is synthesized)
tttacaaccccaaccaggaagtctgaattccagtatctgggatggatctgaagttctgaggcgaatccgaggaccactgcttgctcaggaaatgcctacagtgtctgtattagaatatgc

SEQ ID NO: 537368 - DNA, 120 bp, Artificial Sequence
  ENSG00000166889_5 (sequence is synthesized)
tttgcctcagaggcccccccagggtccagaagatgatcgggacctttctgaacgagcattaccaaggcggtcaacttcacctatcattggcagtcctcctgttagagctgtccccatagg

SEQ ID NO: 537369 - DNA, 120 bp, Artificial Sequence
  ENSG00000166889_6 (sequence is synthesized)
caccccacctaaacagatggctgtacccagcttcacccaacagattctgtgtccgaagcctgtccatgttcggcccccaatgccacctcgttatcctgctccctatggtgagaggatgtc

SEQ ID NO: 537370 - DNA, 120 bp, Artificial Sequence
  ENSG00000166889_7 (sequence is synthesized)
tccaaaccagctctgcagtgtcccgaactcttccctcctgggtcacccttttcctcctagtgttcctcctgttctcagccccctccagagagcacagcttcttggaggagcacagctaca

SEQ ID NO: 537371 - DNA, 120 bp, Artificial Sequence
  ENSG00000166889_8 (sequence is synthesized)
gcctggacggatgtctcccagccagtttgcacgggtccctggatttgttggtagtccacttgctgccatgaatcccaagttgctacaagggcgagttgggcagatgcttcccccagcacc

SEQ ID NO: 537372 - DNA, 120 bp, Artificial Sequence
  ENSG00000166889_9 (sequence is synthesized)
aggcttccgtgccttctttagtgctccaccctccgctacaccacctccacagcagcaccctcctggcccaggaccccacctgcaaaacctaagatctcaggccccaatgtttagaccgga

SEQ ID NO: 537373 - DNA, 120 bp, Artificial Sequence
  ENSG00000166889_10 (sequence is synthesized)
cacaactcacctccatccacagcaccgtcgactcttgcatcagagacagcaacagaatagaagtcagcatcggaatctcaatggtgcgggagatagaggaagtcaccggagcagtcatca

SEQ ID NO: 537374 - DNA, 120 bp, Artificial Sequence
  ENSG00000166889_11 (sequence is synthesized)
agatcatctccgaaaggatccatatgccaatctcatgttgcagcgggaaaaggattgggtctctaaaatccagatgatgcaactgcaaagcactgatccctacctggatgatttttatta

SEQ ID NO: 537375 - DNA, 120 bp, Artificial Sequence
  ENSG00000166889_12 (sequence is synthesized)
ccagaattactttgaaaaactggagaaactgtcagctgctgaagaaatacaaggtgatggccctaagaaggagcgcaccaagcttatcacccctcaggtggccaaactggagcacgccta

SEQ ID NO: 537376 - DNA, 120 bp, Artificial Sequence
  ENSG00000166889_13 (sequence is synthesized)
taagccagtgcaatttgagggctctttgggaaagcttaccgtttctagtgtgaataatccccgaaaaatgattgatgctgttgtgacatctcggagtgaggatgatgagacaaaagaaaa

SEQ ID NO: 537377 - DNA, 120 bp, Artificial Sequence
  ENSG00000166889_14 (sequence is synthesized)
acaagttcgagacaagaggagaaaaacccttgttataattgagaaaacctacagcttactccttgatgtggaggactatgaaagacgttatctcctaagtctggaagaagagcgacctgc

SEQ ID NO: 537378 - DNA, 120 bp, Artificial Sequence
  ENSG00000166889_15 (sequence is synthesized)
cctaatggatgacagaaagcacaaaatttgtagcatgtatgacaacttaagggggaaattgcctggacaagagaggcctagtgatgaccactttgtacagatcatgtgtatccgaaaagg

SEQ ID NO: 537379 - DNA, 120 bp, Artificial Sequence
  ENSG00000166889_16 (sequence is synthesized)
gaagagaatggttgcccgtattcttcctttcctctccacagagcaagcagctgacattctcatgacaacagccaggaacctccctttccttatcaagaaggatgcacaagatgaggtgct

SEQ ID NO: 537380 - DNA, 120 bp, Artificial Sequence
  ENSG00000166889_17 (sequence is synthesized)
gtgagtatcaccagccttttgcgacagctaatgaacctacctcaaagtgcagctacaccagcactctccaatcctcacctcactgctgtgctccagaacaagtttggcctgtcactgctc

SEQ ID NO: 537381 - DNA, 120 bp, Artificial Sequence
  ENSG00000166889_18 (sequence is synthesized)
ctcatcctcctgagccgtggtgaagacctacagagttcagaccctgctacagaatcaacacaaaataatcagtggacggaggtgatgttcatggcaacacgagaacttctgcggattccc

SEQ ID NO: 537382 - DNA, 120 bp, Artificial Sequence
  ENSG00000166889_19 (sequence is synthesized)
caagcagccctggccaagccaatctctatacctacaaacctagtgtccctcttttctcgctatgttgaccggcagaaactgaacttgctggagacaaaactgcagctagttcaggggata

SEQ ID NO: 537383 - DNA, 120 bp, Artificial Sequence
  ENSG00000166889_20 (sequence is synthesized)
cgataaaagatctccaaatgtgtcctgtacctccttttggctgccacctgcactgctgccatcaccaatggagtgtttttaatgagggaaggaaggtagctttttccccaaagcaaagtc

SEQ ID NO: 537384 - DNA, 120 bp, Artificial Sequence
  ENSG00000166889_21 (sequence is synthesized)
ttgtgggatcgattcctgtttacaggggttgtctctctaaatgtcagatatttccccactgctctatgaaatttggctgggtgatacttctgctggtttctttaccttctgtgttacagt

SEQ ID NO: 537385 - DNA, 120 bp, Artificial Sequence
  ENSG00000166889_22 (sequence is synthesized)
tctgcatgtcctacttttactcagttctgttttgcattttctttgccctagagacacaagtgtaatctctccctttatccctccactactccacctcagagtagattgtagcctgccaaa

SEQ ID NO: 537386 - DNA, 120 bp, Artificial Sequence
  ENSG00000166889_23 (sequence is synthesized)
ggattccttccctcatcctattgaagttgttttttcattgccccatattaatatgactatagaagagccaattaagtagaaatcaagatatacacacacacatagatacacacacacaca

SEQ ID NO: 537387 - DNA, 120 bp, Artificial Sequence
  ENSG00000166889_24 (sequence is synthesized)
ccccatacatgtatttatgtggtcttcagagggtccttaaagaatgaattttagattgaaaaatatttagttgtctcattacctcttctaaacacaaaccagctgatgtattttaatctg

SEQ ID NO: 537388 - DNA, 120 bp, Artificial Sequence
  ENSG00000166889_25 (sequence is synthesized)
tttctgttctatcttgtaattaatttggtgggttctacttgttttaacataaataaagagtatgcagcacgtttaataaaatcagaactcttaattggcttatgcccaggtctaggctga

SEQ ID NO: 537389 - DNA, 120 bp, Artificial Sequence
  ENSG00000166889_26 (sequence is synthesized)
gaagtcctttttcttcttcccacctttatttccttagtttctgtccaccttaatcgaaacaacacatggttatgtctttttcctgctacaactacagggtacttgagcctttcccctcaa

SEQ ID NO: 537390 - DNA, 120 bp, Artificial Sequence
  ENSG00000166889_27 (sequence is synthesized)
gtgcattcgaagtcacccaggatgatcctcactagtagcctgctttggcagtgtggctttttgcacacttgccctgtcttcctgagactacttcagtaagccatgcttccttcttcccca

SEQ ID NO: 537391 - DNA, 120 bp, Artificial Sequence
  ENSG00000166889_28 (sequence is synthesized)
cttttatttggtgtcatgaatagaaacttccaaatgtaaccatggaagctaagtttggcctgctttgctttttagtctccacaccatgggcagaactgctgtctttactacttcatctca

SEQ ID NO: 537392 - DNA, 120 bp, Artificial Sequence
  ENSG00000166889_29 (sequence is synthesized)
cccaagtcccgttcccaggcagccaggggcctgggtttgaataattgcagggccagcctgccatgatctttctcacttactcctctcccattcagcaatcaaccagactaaggagttttg

SEQ ID NO: 537393 - DNA, 120 bp, Artificial Sequence
  ENSG00000166889_30 (sequence is synthesized)
atccctagtgattacagccctgaagaaaattaaatctgaattaattttacatggccttcgtgatctttctgctgttcttactttttcgaatgtagttggggggtgggagggacaggttat

SEQ ID NO: 537394 - DNA, 120 bp, Artificial Sequence
  ENSG00000166889_31 (sequence is synthesized)
ggtatttaaagagaataaacattttgcacatacatgtattgtacaacagtaagatcctctgttaaaaccagctgtcctgttctccatctccatttcttcccatgctgtaaccccaggctc

SEQ ID NO: 537395 - DNA, 120 bp, Artificial Sequence
  ENSG00000166889_32 (sequence is synthesized)
caccagctgttccccagtgatgttacctagcttccctctaccgttgtctactgaccatttccactacatgcctttcctaccttcccttcacaaccaatcaagtgaatacttgattattat

SEQ ID NO: 537396 - DNA, 120 bp, Artificial Sequence
  ENSG00000166889_33 (sequence is synthesized)
ctcttccttactgtgctttatcttttttgtttggattggttctaattaatgaaaataaaagtttctaaatttacatttttatagggtattgtaaataaaaacaaattgtatacttaaaaa

SEQ ID NO: 537397 - DNA, 120 bp, Artificial Sequence
  ENSG00000166889_34 (sequence is synthesized)
caatcctcacctcactgctgtgctccagaacaaggtgatcttgcccttttaactccttgaactttgtgaaatgtcttaatttgcgttatagattaaaataatggctgctgtatctctagc

SEQ ID NO: 537398 - DNA, 120 bp, Artificial Sequence
  ENSG00000166889_35 (sequence is synthesized)
aacttgggaaaaaggcttctttcagtcaagagttacattaagctcctagtaaccggctagaaataacagtgttttcaacaaaatgggattttatgtgtctagtgtgaaataaatttgatt

SEQ ID NO: 537399 - DNA, 120 bp, Artificial Sequence
  ENSG00000166896_0 (sequence is synthesized)
agcccagccaggctgcccttcttccctgcggagggagggcctgggcggtcgcgttggcgggagggaggttacctttcccagtctcgctctggccgcctgagccaggaggaagcagcggcg

SEQ ID NO: 537400 - DNA, 120 bp, Artificial Sequence
  ENSG00000166896_1 (sequence is synthesized)
aggtctgcgggaggcatggcgggagctccggacgagcgccggcggggccccgcggcaggggagcagctgcagcagcaacacgtctcttgccaggtcttccccgagcgtctggcccagggg

SEQ ID NO: 537401 - DNA, 120 bp, Artificial Sequence
  ENSG00000166896_2 (sequence is synthesized)
aatccccagcaagggttcttctccagcttcttcaccagcaaccagaagtgccagcttaggctcctgaagacgctggagacaaatccatatgtcaaacttctgcttgatgctatgaaacac

SEQ ID NO: 537402 - DNA, 120 bp, Artificial Sequence
  ENSG00000166896_3 (sequence is synthesized)
tcaggttgtgctgttaacaaagatagacacttttcttgcgaagactgtaatggaaatgtcagtggaggttttgatgcttcaacatctcagatagttttgtgccagaataatatccataat

SEQ ID NO: 537403 - DNA, 120 bp, Artificial Sequence
  ENSG00000166896_4 (sequence is synthesized)
caggcccatatgaacagagtggtcacacacgagcttattcatgcatttgatcattgtcgtgcccatgtcgactggttcaccaacatcagacatttggcgtgctcagaggttcgagctgct

SEQ ID NO: 537404 - DNA, 120 bp, Artificial Sequence
  ENSG00000166896_5 (sequence is synthesized)
aaccttagtggagactgctcacttgtcaatgaaatattcaggttacattttggattaaaacaacaccaccagacttgtgtgcgagacagagccactctttctatcctggctgttaggaat

SEQ ID NO: 537405 - DNA, 120 bp, Artificial Sequence
  ENSG00000166896_6 (sequence is synthesized)
atcagcaaagaagtagctaaaaaggctgttgatgaagtttttgaatcttgtttcaatgaccatgaaccttttggaaggatcccacataacaagacttatgcaagatatgctcacagagac

SEQ ID NO: 537406 - DNA, 120 bp, Artificial Sequence
  ENSG00000166896_7 (sequence is synthesized)
tttgaaaaccgtgatcggtattattcaaatatatgagcacaatgacatttttatattacagagcttccatcatcatgaagaaaaaaaaatttggttctcaagtgaacaaacatataaaat

SEQ ID NO: 537407 - DNA, 120 bp, Artificial Sequence
  ENSG00000166896_8 (sequence is synthesized)
gtaaacaatccctacaatccagataaaacagagaagactgtgattctagcatattatcagaaaaagtaactatggcaaaaaatgaaactgctttaaactccaaggcagaaattgtatctt

SEQ ID NO: 537408 - DNA, 120 bp, Artificial Sequence
  ENSG00000166896_9 (sequence is synthesized)
tatagctaaccatttagtaaataaatacattacatttttgtattttagtcatttgtttttattacatgtgattattttaaaatttgattatgaaacctgtgaagtgtgctcttccatgat

SEQ ID NO: 537409 - DNA, 120 bp, Artificial Sequence
  ENSG00000166896_10 (sequence is synthesized)
gttgataggtgaccactgttggtatttacattaaatgtaaagaaatgtgtactgatctcattgtaggatacttattgagctgttgttatgatgaaaattggaaataattcattcagtggt

SEQ ID NO: 537410 - DNA, 120 bp, Artificial Sequence
  ENSG00000166896_11 (sequence is synthesized)
caatgctatcctctccctattcttcttttatcatatatgtgggacccatatggcctaattttctggggacagtcctggttagatctttttctttttaataaaggcagtgctcgaatttta

SEQ ID NO: 537411 - DNA, 120 bp, Artificial Sequence
  ENSG00000166896_12 (sequence is synthesized)
ggacccacagaccctctgaaggaagcgactgctcctacagtgcccaggagacaccccaaatactgtgagtgcccaactgcagaagtgggaaagggagaccctcctctcccacacacaccc

SEQ ID NO: 537412 - DNA, 120 bp, Artificial Sequence
  ENSG00000166896_13 (sequence is synthesized)
gagaccctcctctcccacacacacccccccactggagaaactgaaggtctgtttgtgggagaagtttccgaccttacctggagctgagttaatttagagagccgagcgaaatacaggggt

SEQ ID NO: 537413 - DNA, 120 bp, Artificial Sequence
  ENSG00000166896_14 (sequence is synthesized)
gtccccaagcagcccattcctgcctgtcaccacagagatccattgcaagggcagccagaagagcagcgggtaaaactccacagggagaaggacatctctagctgaactttgtaactattt

SEQ ID NO: 537414 - DNA, 120 bp, Artificial Sequence
  ENSG00000166896_15 (sequence is synthesized)
gagaaggacatctctagctgaactttgtaactatttcaatggggcaagaagcctcccggccagaacttgggagagggcacaaatcccatgtgcagaatccacagaggggaagaaccaagc

SEQ ID NO: 537415 - DNA, 120 bp, Artificial Sequence
  ENSG00000166896_16 (sequence is synthesized)
tcttttctttcacagctgggaggtgggtagcctggggcaagttttcaagcctgtctcacccaccacctggaagcagacttggggctgtggtggggggcatggtgggagtgagactggccc

SEQ ID NO: 537416 - DNA, 120 bp, Artificial Sequence
  ENSG00000166896_17 (sequence is synthesized)
ggtgaggcctgtgactgccggctttcccctacttccctgacaacctgcatgactccccagaggcagtcataatcctcctagggacacaactccagtgacctgggaatctcaccctcatct

SEQ ID NO: 537417 - DNA, 87 bp, Artificial Sequence
  ENSG00000166896_18 (sequence is synthesized)
ctatccctgccccgacctgatgttccttccctacccaccctggtatctgaacaaaaagggcatacaatcttgggagttctagggccc

SEQ ID NO: 537418 - DNA, 120 bp, Artificial Sequence
  ENSG00000166896_19 (sequence is synthesized)
tgaacaaaaagggcatacaatcttgggagttctagggccccactcaccacaagttcttctccatactaccacaactgatgctctctggaaagcgctacctcctggcaggaggccagccag

SEQ ID NO: 537419 - DNA, 120 bp, Artificial Sequence
  ENSG00000166896_20 (sequence is synthesized)
cacaaaaatagagccttcaaccaccaaagctaagaaccctcatggagtccattgcaccccccctgccacctccactggaacaggtgctggtatccacagccgagagacccatagacggtt

SEQ ID NO: 537420 - DNA, 88 bp, Artificial Sequence
  ENSG00000166896_21 (sequence is synthesized)
caggtgctggtatccacagccgagagacccatagacggttcacatcacaggattctgtgcaggcaacccccagtaccagcatggagct

SEQ ID NO: 537421 - DNA, 120 bp, Artificial Sequence
  ENSG00000166896_22 (sequence is synthesized)
atccatcggaaaagggggagggtatacatcaagggaacaccctgtgggacaaaggaacctgaacaatggccttcagccctagaccttccctttgacagagactacccaaatgagaaggaa

SEQ ID NO: 537422 - DNA, 120 bp, Artificial Sequence
  ENSG00000166896_23 (sequence is synthesized)
agaaggaaccagaaaactaaccctggtaatatgacaaaacaaaagctctttaacacccacaaaaaaatcacactagttcaccagcaatggattcaaaccaagaagaaatccctgatttac

SEQ ID NO: 537423 - DNA, 120 bp, Artificial Sequence
  ENSG00000166896_24 (sequence is synthesized)
ggaggcaccagagaaaggcaaagcccagtgcaaggaaatccaaaaaatgatataagaagtgaagggagaaatattcaaggaaatggagagcttaaagaaaaaagaataaaaaattcagga

SEQ ID NO: 537424 - DNA, 61 bp, Artificial Sequence
  ENSG00000166896_25 (sequence is synthesized)
gatataagaagtgaagggagaaatattcaaggaaatggagagcttaaagaaaaaatctcag

SEQ ID NO: 537425 - DNA, 120 bp, Artificial Sequence
  ENSG00000166896_26 (sequence is synthesized)
tggcccaggggaatccccagcaagggttcttctccagcttcttcaccagcaaccagaagtgccagcttaggctcctgaagacgctggagacaaatagttttgtgccagaataatatccat

SEQ ID NO: 537426 - DNA, 120 bp, Artificial Sequence
  ENSG00000166897_0 (sequence is synthesized)
gtctgcgcgcacacgcgcgctcccagacacacacacagacacacgcgggccaccccacggccacgcaccccgcacccacacccgcgctcacactcacattcacactcacactcacacgcg

SEQ ID NO: 537427 - DNA, 120 bp, Artificial Sequence
  ENSG00000166897_1 (sequence is synthesized)
caggccccgcggccgccgcttcccggaggcggtgcttggcccggatcccggctggggctgggaaggagaggacttgggtgaggagctgctgccacccgggctgggccaggacctgagatc

SEQ ID NO: 537428 - DNA, 120 bp, Artificial Sequence
  ENSG00000166897_2 (sequence is synthesized)
tcattgctactgctgccgctgctgcctggggaacctttctgagacccaggttggggacagtgccggaggggcctcctctgctgcagacatctggaaccaggtgcagatgggtctcttcct

SEQ ID NO: 537429 - DNA, 120 bp, Artificial Sequence
  ENSG00000166897_3 (sequence is synthesized)
tcctgcccccatctctctcactcctggctcagtgcggcactctccagcctcctgtgggaatcatctgaagttctgagcccggaagccaaggaggaagacgaggaggaggaggaggaggag

SEQ ID NO: 537430 - DNA, 120 bp, Artificial Sequence
  ENSG00000166897_4 (sequence is synthesized)
gaggaggaggagggagaggaagtcaagccctgagaacccttgcaccttcctagcaggagacaaggagcaacgctgcggtggggagcaggctgtggggcccccacccccagccctagccag

SEQ ID NO: 537431 - DNA, 120 bp, Artificial Sequence
  ENSG00000166897_5 (sequence is synthesized)
gcctagtgcctgctgtagcaccctagaagatccccagcagttggcactagctgtacccaccttgcctggggcccccgtgctgggggtcgcccccaagatggtggcggccccagggaggac

SEQ ID NO: 537432 - DNA, 120 bp, Artificial Sequence
  ENSG00000166897_6 (sequence is synthesized)
tgtactgccagccccagcctctggccgctaggcaccccctgccttgccctggcccctcactccgaggccagcgccatgctgcgcctggggctgtgcgcggcggcgctgctgtgcgtgtgc

SEQ ID NO: 537433 - DNA, 120 bp, Artificial Sequence
  ENSG00000166897_7 (sequence is synthesized)
cggccgggtgccgtgcgtgccgactgctggctcattgagggcgacaagggctacgtgtggctggccatctgcagccagaaccagccgccctacgagaccatcccgcagcacatcaatagc

SEQ ID NO: 537434 - DNA, 120 bp, Artificial Sequence
  ENSG00000166897_8 (sequence is synthesized)
accgtgcacgacctgcggctcaacgagaacaagctcaaagccgtgctctactcctcgctcaaccgctttgggaacctcaccgacctcaacctcaccaagaacgagatctcctacatcgag

SEQ ID NO: 537435 - DNA, 120 bp, Artificial Sequence
  ENSG00000166897_9 (sequence is synthesized)
gacggtgccttcctgggccagtcgagcctgcaggtcctgcagctgggctacaacaagctcagcaacctgacggagggcatgctgcgaggcatgagccgcctgcagttcctctttgtccag

SEQ ID NO: 537436 - DNA, 120 bp, Artificial Sequence
  ENSG00000166897_10 (sequence is synthesized)
cacaacctcatcgaggtggtgacgcccaccgccttctccgagtgcccgagcctcatcagcatcgacctgtcctccaaccgcctcagccgcctggacggtgccacctttgccagcctcgcc

SEQ ID NO: 537437 - DNA, 120 bp, Artificial Sequence
  ENSG00000166897_11 (sequence is synthesized)
agcctgatggtgtgtgagctggccggcaaccccttcaactgtgagtgcgacctcttcggcttcctggcctggctggtggtcttcaacaacgtcaccaagaactacgaccgcctgcagtgt

SEQ ID NO: 537438 - DNA, 120 bp, Artificial Sequence
  ENSG00000166897_12 (sequence is synthesized)
gagtcgccgcgggagtttgccggctacccgctgctggtgccccggccctaccacagcctcaacgccatcaccgtactccaggccaagtgtcggaatggctcgctgcccgcccggcccgtg

SEQ ID NO: 537439 - DNA, 120 bp, Artificial Sequence
  ENSG00000166897_13 (sequence is synthesized)
agccaccccacgccctactccaccgacgcccagagggagccagacgagaactcgggcttcaaccccgacgagatcctttcggtggagccgccggcctcgtccaccacggatgcgtcggca

SEQ ID NO: 537440 - DNA, 120 bp, Artificial Sequence
  ENSG00000166897_14 (sequence is synthesized)
gggccagccatcaagctgcaccacgtcacgttcacctcggccaccctggtggtcatcatcccacacccctacagcaagatgtacatcctcgtgcagtacaacaacagctacttctccgac

SEQ ID NO: 537441 - DNA, 120 bp, Artificial Sequence
  ENSG00000166897_15 (sequence is synthesized)
gtcatgaccctcaagaacaagaaggagatcgtgacgctggacaaactgcgggcgcacactgagtacaccttctgcgtgacctcgctgcgcaacagccgccgcttcaaccacacctgcctg

SEQ ID NO: 537442 - DNA, 120 bp, Artificial Sequence
  ENSG00000166897_16 (sequence is synthesized)
accttcaccacgcgggaccccgtccccggagacttggcgcccagcacctccaccaccacccactacatcatgaccatcctgggctgcctctttggcatggttatcgtgctgggagccgtg

SEQ ID NO: 537443 - DNA, 120 bp, Artificial Sequence
  ENSG00000166897_17 (sequence is synthesized)
tactactgcctgcgcaagcggcgcatgcaggaggagaagcagaagtctgtcaacgtcaagaagaccatcctggagatgcgctacggggctgatgtggatgccggctccattgtgcacgcc

SEQ ID NO: 537444 - DNA, 120 bp, Artificial Sequence
  ENSG00000166897_18 (sequence is synthesized)
gcccagaagctgggcgagcctcccgtgctgcccgtatctcgcatggcctccatcccctccatgatcggggagaagctgcccaccgccaaggggttggaggccgggctggacacacccaag

SEQ ID NO: 537445 - DNA, 120 bp, Artificial Sequence
  ENSG00000166897_19 (sequence is synthesized)
gtagccaccaaaggcaactatatcgaggtgcgcacaggcgccggcggggacggtctggctcggcccgaggatgacctcccggacctcgagaacggccagggctcggctgcagagatctcc

SEQ ID NO: 537446 - DNA, 120 bp, Artificial Sequence
  ENSG00000166897_20 (sequence is synthesized)
accattgccaaggaggtggacaaggtcaaccagatcattaacaactgcatcgatgctctcaagctggactcggcctcttttctgggaggcggcagcagcagtggggaccccgagctggcc

SEQ ID NO: 537447 - DNA, 120 bp, Artificial Sequence
  ENSG00000166897_21 (sequence is synthesized)
ttcgagtgccagtccctccctgcagctgctgccgcctcctcagccactggccccggggccctggagcggcccagcttcctttcgcctccctacaaggagagctcccaccacccactacag

SEQ ID NO: 537448 - DNA, 120 bp, Artificial Sequence
  ENSG00000166897_22 (sequence is synthesized)
cgccagctgagcgccgacgcggccgtgacccgcaagacctgcagcgtgtcgtccagtggttccatcaagagcgccaaggtctttagcctggacgtgcccgaccatccggccgccacaggg

SEQ ID NO: 537449 - DNA, 120 bp, Artificial Sequence
  ENSG00000166897_23 (sequence is synthesized)
ctggctaagggcgactccaagtacatcgagaagggcagccccctcaacagcccgctggaccggctcccgctggtgccggcgggcagcggcgggggcagcggcgggggcgggggcatccac

SEQ ID NO: 537450 - DNA, 120 bp, Artificial Sequence
  ENSG00000166897_24 (sequence is synthesized)
cacctggaggtgaagccggcctaccactgcagcgagcaccggcacagctttcccgccctgtactacgaggagggtgccgacagcctgagccagcgcgtgtccttcctcaagccgctgacc

SEQ ID NO: 537451 - DNA, 120 bp, Artificial Sequence
  ENSG00000166897_25 (sequence is synthesized)
cgctccaagcgtgactccacctactcgcagctctcccccagacactactactcagggtactcctccagccccgagtactcatccgagagcacgcacaagatctgggagcgcttccggccc

SEQ ID NO: 537452 - DNA, 120 bp, Artificial Sequence
  ENSG00000166897_26 (sequence is synthesized)
tacaagaagcaccaccgggaggaggtgtacatggccgccggtcacgccctgcgcaagaaggtccagttcgccaaggacgaggatctgcatgacatccttgattactggaagggggtctcc

SEQ ID NO: 537453 - DNA, 120 bp, Artificial Sequence
  ENSG00000166897_27 (sequence is synthesized)
gcccagcagaagctgtgaccccccccttcctccctggtgaggtcggagccagagggctgggggccttttgggggaagggtccaggcggccagggcggggagcagactcgggggccaaggc

SEQ ID NO: 537454 - DNA, 120 bp, Artificial Sequence
  ENSG00000166897_28 (sequence is synthesized)
ccaggagaggacgcacatgcagacccgcacgcacgcacgcacacacacacctgaccaccacccgactgtgaacaaaccaacatccgacaataacggacaggaaaacagagacacattttc

SEQ ID NO: 537455 - DNA, 120 bp, Artificial Sequence
  ENSG00000166897_29 (sequence is synthesized)
cttaaagtttacaaactgataccgaaaccagtcgtctttactgtgctgcccagggactctgctggggtgtgcagggccggggggctggcggggggaggaaggaagccaagagagggtgtg

SEQ ID NO: 537456 - DNA, 120 bp, Artificial Sequence
  ENSG00000166897_30 (sequence is synthesized)
gggtctggggggtctggggctagaaacaggtgtgggggtcaagaaagctggagtagagagggactgaagcccctctagggcagggagagggtcccttcccaagctgggagtcaagtcacc

SEQ ID NO: 537457 - DNA, 120 bp, Artificial Sequence
  ENSG00000166897_31 (sequence is synthesized)
tgcagatttagcattagacatcgggcaatgtctccttccactttagagagggggggaaactgaggcccagagaagggagttgacaaccccagggtcacacagcagcttagcctcaagtcc

SEQ ID NO: 537458 - DNA, 120 bp, Artificial Sequence
  ENSG00000166897_32 (sequence is synthesized)
cccaacttcccagcccagtgctgtcccggaaccccctgcagctctcttgtggacccctgcccgccctgtgcccaccccacatccctttccgaagctgtggtcccttggggctgagggact

SEQ ID NO: 537459 - DNA, 120 bp, Artificial Sequence
  ENSG00000166897_33 (sequence is synthesized)
tgggaatcaggcaggtgctttttcttcctagaaagccacatggcagtgcccccagagtgtgcagctgtgattcagaatcctggggggcttttgacccctatgccggcacccgggagaagg

SEQ ID NO: 537460 - DNA, 120 bp, Artificial Sequence
  ENSG00000166897_34 (sequence is synthesized)
gggcgtgtggcgggcaggccagctcccaggacgtctcaggtgcaggctcccggccccagcttctctggtcctccgagacccctgcccaccgcagaagggcagcggtgcactgtgatgcct

SEQ ID NO: 537461 - DNA, 120 bp, Artificial Sequence
  ENSG00000166897_35 (sequence is synthesized)
ggagggctgcagggaggagctgtcatgggggacttcctgcctgtccccatggcctgtgtccccacctgcccgaccccatcgtgggatctcggctcctatctcagccgcccacccggggaa

SEQ ID NO: 537462 - DNA, 120 bp, Artificial Sequence
  ENSG00000166897_36 (sequence is synthesized)
ggagggctttctcacccatcccctctgggctgctcatccaggcctggccccctggccagaggggctcccatgtttccgtggcaatggccacttccctctttctgacccccccacccaaca

SEQ ID NO: 537463 - DNA, 120 bp, Artificial Sequence
  ENSG00000166897_37 (sequence is synthesized)
tcaaacaaagcacaaacagtgaggcccccacccgagagagggttgaggagcaggctgggttcgtggcgccccagcccctcccagccagcctctgtcaccatggtaaccctgtgcctggca

SEQ ID NO: 537464 - DNA, 120 bp, Artificial Sequence
  ENSG00000166897_38 (sequence is synthesized)
gttggtgcccagagtgaccgttgggctctggggttctctgtccatgtaggcggtggcagagggtggtgagggagggccagcctggcagcagctcctggggccagctcttttgggaggcaa

SEQ ID NO: 537465 - DNA, 120 bp, Artificial Sequence
  ENSG00000166897_39 (sequence is synthesized)
atctgcggtcctgagactggggtcttgaccagtcaggatgctgatgggccggagtccatcatccttcacctctgggtgggagctggcccagcggggtgtggggacgcctctactagcagc

SEQ ID NO: 537466 - DNA, 120 bp, Artificial Sequence
  ENSG00000166897_40 (sequence is synthesized)
tttgcccgcctagcaacatgtcgcttggctgccacccacctcagcttggggggccccggctctccccacgcccctgccagagacccccagtctagggcctgtggcccacatgggtttcct

SEQ ID NO: 537467 - DNA, 120 bp, Artificial Sequence
  ENSG00000166897_41 (sequence is synthesized)
gagatttggggagtgtgactgaggggcgagggtaggcactggaatgggtccaagaccggcactgttggtgggcaggggctctgaccaggaaagctagtgccatcccctggggaccccaac

SEQ ID NO: 537468 - DNA, 120 bp, Artificial Sequence
  ENSG00000166897_42 (sequence is synthesized)
gaccttcctgctgggggcagggggtgagggaggacagcagagggctaggaggctcgggctcagctgagtacctctctcacaccaactttggggttaacgaagcccagggctcactttgag

SEQ ID NO: 537469 - DNA, 120 bp, Artificial Sequence
  ENSG00000166897_43 (sequence is synthesized)
ggtgacatttgcaaagaaaagactgttctcctggggcgaggaggggagggggcggcatggatacgcggagcagacctcctcccccggcccccaaaacctgccccccaacccctcctcaca

SEQ ID NO: 537470 - DNA, 120 bp, Artificial Sequence
  ENSG00000166897_44 (sequence is synthesized)
cccccttggcacaactgagaaaagcaagcaggcagagaagccaggggtgtgaggaagcagactccctgttatatttgcatgacgattttactgtatttttctgagcaaacatctgtcgtg

SEQ ID NO: 537471 - DNA, 120 bp, Artificial Sequence
  ENSG00000166897_45 (sequence is synthesized)
tatgtgccagtttgtccagactcccccgccccctctctgatgccctgctttcccacattctgtctgttgtgatctgacgagcagctcttgaaacccagggaggggtcagctctgcaaaaa

SEQ ID NO: 537472 - DNA, 120 bp, Artificial Sequence
  ENSG00000166897_46 (sequence is synthesized)
cagacccaaaacaggtgccaccaagacacagccctgccccacacccacctcctgtgtttctgagcattgggcccatgtgccacctcccttcctccctccctctctccactgccacctccc

SEQ ID NO: 537473 - DNA, 120 bp, Artificial Sequence
  ENSG00000166897_47 (sequence is synthesized)
ttgtccccagttccttcccctcctccatgccagggagggcagccccagggaagcctcctcaagggctcttgtcccggtggaagggactgtctgtccgtcccgcttgttcccgttttgtag

SEQ ID NO: 537474 - DNA, 120 bp, Artificial Sequence
  ENSG00000166897_48 (sequence is synthesized)
atgaggaagtcagggctcccagacgggcctggtgaattggctggccagctggggtggaggatcagtcacactgctgagtgtaggaggccaggagcttggggcttcgtggggggcttcagg

SEQ ID NO: 537475 - DNA, 120 bp, Artificial Sequence
  ENSG00000166897_49 (sequence is synthesized)
gagagggtgggggctttgagaaaggaacccgtgggaagaaggagcacgcctgggctgggccccagggagggttcccagcagcaggagttaggggcctgcgcttgccatttccccatcctt

SEQ ID NO: 537476 - DNA, 120 bp, Artificial Sequence
  ENSG00000166897_50 (sequence is synthesized)
tctgcgtgaagatatttaggaaacctcagactctctgactgcagggacaggggcccttccaaagagcaggactctgatgatccaggaggggaactggccttgaagacccagttcatgtgg

SEQ ID NO: 537477 - DNA, 120 bp, Artificial Sequence
  ENSG00000166897_51 (sequence is synthesized)
ttctttgtgaggcagagcggggtctaagactcgggtctctggcctcccagccaggccagagccccaactgctcagcttggggagagcccacccggaggctggcctgcatctgtgtcccac

SEQ ID NO: 537478 - DNA, 120 bp, Artificial Sequence
  ENSG00000166897_52 (sequence is synthesized)
gtcctgctcaggatgagtttttcccaggcgggagggaagtattcacaaaatgttgccatccaaggtctgggtttgtgatgatgatgagcatggtggagctgggctgtggtctggggcagg

SEQ ID NO: 537479 - DNA, 120 bp, Artificial Sequence
  ENSG00000166897_53 (sequence is synthesized)
ccagcagggcagacaccaggaaaagagggcagggggggccacagggagggaggggagatggaggcccggtggagcgagggatgtgtgggtgccacgccctggacctctgcggggaggcct

SEQ ID NO: 537480 - DNA, 120 bp, Artificial Sequence
  ENSG00000166897_54 (sequence is synthesized)
cctgccttgggccggaacaaggtcacacctgggcttgcctgcctctgttggagaatctcctctgaagctgtttctgggaagtagcacaatgggtctgctccttcctgggagggcacagca

SEQ ID NO: 537481 - DNA, 120 bp, Artificial Sequence
  ENSG00000166897_55 (sequence is synthesized)
ggtgcagctaaccctctgttggagcttatggccttccagtagcaaaacacagaggtctggcatgaaggcaagaaagcctggttggtggggaaacctcgtcacgggtcccggccttgcttt

SEQ ID NO: 537482 - DNA, 120 bp, Artificial Sequence
  ENSG00000166897_56 (sequence is synthesized)
tccccgcggcaggaagagtctctctctgcccaccaaagaatccctcacctgggctcccctcctgaggcagtgcaggaggcctgtgggagcagcctgtgtccaggctggggagcccgtgtc

SEQ ID NO: 537483 - DNA, 120 bp, Artificial Sequence
  ENSG00000166897_57 (sequence is synthesized)
tgggtaggtctgggaaaagggctgtcaggggagcgaggagggtgggagtaaagagacctgcttgggaaggccaggcctggatcgtccccgggaggcagctggggcagcagcagtggggag

SEQ ID NO: 537484 - DNA, 120 bp, Artificial Sequence
  ENSG00000166897_58 (sequence is synthesized)
tatcaggctggccgagagtcacccatgttctcaactggaagttggtcgcctgccccactccctcctggaaatgtaacagcggggtgaacagaagtgcagagacggaaaggagaggaaagg

SEQ ID NO: 537485 - DNA, 120 bp, Artificial Sequence
  ENSG00000166897_59 (sequence is synthesized)
agacctagagctgacaaactcggttgtgacagtgctgaggccgggatggcatcaggaattaaggacaccagtgacaggtcctagcttataaggggcctaagtgcagggaagggataagac

SEQ ID NO: 537486 - DNA, 120 bp, Artificial Sequence
  ENSG00000166897_60 (sequence is synthesized)
acaatgctccctagtgactggcgccttgcagaaaattaaaatagggtgatgggggaggggcaaggctggtcagggagcatcctgtgtgggatggggggacagggagccaagctgtgaatg

SEQ ID NO: 537487 - DNA, 120 bp, Artificial Sequence
  ENSG00000166897_61 (sequence is synthesized)
acaagaggagccagaagggtgggtgggtgggtgggtgtgaagacgagactagagggagtggggttgcagtggctgcctgtcccccaagcaccgcctctgtcccctactaccctgcccctg

SEQ ID NO: 537488 - DNA, 120 bp, Artificial Sequence
  ENSG00000166897_62 (sequence is synthesized)
cccattcctggcccagcagagccccctttccatgagtgtggatgggcggggcaagccgtcggggagcctggggaagctcagccctgaggggcttactttgcccgtggaagccagtgtgaa

SEQ ID NO: 537489 - DNA, 120 bp, Artificial Sequence
  ENSG00000166897_63 (sequence is synthesized)
ggttagggcagccttgcctggctggccccattgccacctctcctgtctgacaaggtggctgctccagaggtggctgagccccaggagaggggacctcctctaactctcatgctcagattc

SEQ ID NO: 537490 - DNA, 120 bp, Artificial Sequence
  ENSG00000166897_64 (sequence is synthesized)
catcctgacacactccttccctgaccctgggtgccccttctaagacaaaaccagggtccatactgcttgcctccagaggcggcttcaggcctcactaaaggtcaggcagtcctgctgagc

SEQ ID NO: 537491 - DNA, 120 bp, Artificial Sequence
  ENSG00000166897_65 (sequence is synthesized)
aggagggagaggaagggggtcctgtaggacgggcaggatggtctgggcctgctcctccttcctctgcccctctgccactccacactccagcacagggctgggacaggggcttggagttcc

SEQ ID NO: 537492 - DNA, 120 bp, Artificial Sequence
  ENSG00000166897_66 (sequence is synthesized)
tgcagtggcggccacacttccctccctccctcccttcctcaggagccgccagtccccaagttggctgtggttgggcacctggtttgggtcctgcagagctgggctcaggccctgggctct

SEQ ID NO: 537493 - DNA, 120 bp, Artificial Sequence
  ENSG00000166897_67 (sequence is synthesized)
gaacctgtgaacccttgctgtgttacgaaactttccttcctctgagggccttgaaccctctccttttcttcttttgggggtgggggttaactttattttctcttccctgtatctgcctct

SEQ ID NO: 537494 - DNA, 120 bp, Artificial Sequence
  ENSG00000166897_68 (sequence is synthesized)
cccttccctcaatttcctgttttaaaactgaatggcacgaaattgttttcctcaactcggagattcctgtatggagagaatcaatttctatatttgcaataaatttcttatttaaagcta

SEQ ID NO: 537495 - DNA, 120 bp, Artificial Sequence
  ENSG00000166897_69 (sequence is synthesized)
agagaagcggcgaagagggcggagagcagagaagacgtcctggaggaggcgaccgacgcacagccgcgtagcggtggctcgatatggtccatccacttggcggaggcagacctgggtctg

SEQ ID NO: 537496 - DNA, 120 bp, Artificial Sequence
  ENSG00000166897_70 (sequence is synthesized)
gtgcgcacgtgtttgcgcagatggagacgaggttccgccgaggcccgtctgtctgggagcgcctgtctgtgcaggtggaggtcagccagaaggagaggacttgggtgaggagctgctgcc

SEQ ID NO: 537497 - DNA, 120 bp, Artificial Sequence
  ENSG00000166897_71 (sequence is synthesized)
agaggctcgatggtggacggtgtgccagccggtgccacactgcacctctctgccctcatcttttcgaatcgggggccctaacccctctctttcacggggtgctgccgggtcaaggcattc

SEQ ID NO: 537498 - DNA, 80 bp, Artificial Sequence
  ENSG00000166900_0 (sequence is synthesized)
ggatttggagcgcgaggcgccggtgggggcggagggggctgcgcggcggaggctcccgtggcctcggacgctcctcctag

SEQ ID NO: 537499 - DNA, 120 bp, Artificial Sequence
  ENSG00000166900_1 (sequence is synthesized)
ttcgccccggcgggcccggccgccgcttccggcagctcacctgggaagcgctcacctgggacgcgctcacctgggacgcgctacctgcctccgggcgcctgggcttcaggatgaaggacc

SEQ ID NO: 537500 - DNA, 120 bp, Artificial Sequence
  ENSG00000166900_2 (sequence is synthesized)
gtctggagcagctgaaggccaagcagctgacacaggatgatgatactgatgcggttgagattgctatcgacaacacggcttttatggacgagttcttttctgagattgaggaaactcggc

SEQ ID NO: 537501 - DNA, 120 bp, Artificial Sequence
  ENSG00000166900_3 (sequence is synthesized)
ttaacattgacaagatctcagaacatgtagaggaggctaagaaactctacagtatcattctctctgcaccgattccagagccaaaaaccaaggatgacctagagcagctcacgactgaga

SEQ ID NO: 537502 - DNA, 120 bp, Artificial Sequence
  ENSG00000166900_4 (sequence is synthesized)
ttaagaaaagggccaacaacgtccggaacaaactgaagagcatggagaagcatattgaagaagatgaggtcaggtcatcggcagaccttcggattcggaaatcccagcactctgtccttt

SEQ ID NO: 537503 - DNA, 120 bp, Artificial Sequence
  ENSG00000166900_5 (sequence is synthesized)
ctcggaagtttgtggaggtgatgaccaaatacaatgaagctcaagtggacttccgagaacgcagcaaagggcgaatccagcggcagctcgaaattactggcaaaaagacaaccgatgagg

SEQ ID NO: 537504 - DNA, 120 bp, Artificial Sequence
  ENSG00000166900_6 (sequence is synthesized)
agctggaggagatgttggagagtggcaacccggccatcttcacttctgggatcattgactcacagatttccaagcaagccctcagtgagattgagggacgacacaaggacattgtgaggc

SEQ ID NO: 537505 - DNA, 120 bp, Artificial Sequence
  ENSG00000166900_7 (sequence is synthesized)
tggagagcagcatcaaggagcttcacgacatgtttatggacatcgccatgctggtggagaatcagggtgagatgttagataacatagagttgaatgtcatgcacacagtggaccacgtgg

SEQ ID NO: 537506 - DNA, 120 bp, Artificial Sequence
  ENSG00000166900_8 (sequence is synthesized)
agaaggcacgagatgaaacgaaaaaagctgtgaaataccagagtcaggcccggaagaaattgataattatcattgtgctagtagttgtgttgctgggcattttagcattgattattggac

SEQ ID NO: 537507 - DNA, 120 bp, Artificial Sequence
  ENSG00000166900_9 (sequence is synthesized)
tttccgttgggctgaattaagagtggcctaagaggctgctgcactgaaataaactgatttcactccagactggtgtggccacccttgtcttcagatgagaatggagtctgaatggccttc

SEQ ID NO: 537508 - DNA, 120 bp, Artificial Sequence
  ENSG00000166900_10 (sequence is synthesized)
ctgagagcgagtgcgacccgttcctttgtttccttgcaaccacccttggacctgactcagctaacaatctagccctgggggaatgtgatctacctgatgcgaccctgagttctccccaga

SEQ ID NO: 537509 - DNA, 120 bp, Artificial Sequence
  ENSG00000166900_11 (sequence is synthesized)
gcctcctcctgccccaccagctctcaagtaccttttctcctggactgtgtggacccacccagctttcttcctccctgttgtgtgtcagattatgccttgcacttgggaaagctcttgtga

SEQ ID NO: 537510 - DNA, 120 bp, Artificial Sequence
  ENSG00000166900_12 (sequence is synthesized)
gactctcccaaggtgctgtatttttctacctcatggagtattctcccagaaactgcaatgtatttttttaggggagtatctttaacaaagcagaatgattcttctaagtttggcaacaag

SEQ ID NO: 537511 - DNA, 120 bp, Artificial Sequence
  ENSG00000166900_13 (sequence is synthesized)
aaggcttggatctgagtcttctacctggcaggatgccaatcctgtttgttgtccgtatgtcctgaaaacatgagggactggcagatgtcattttggtctaaagagctgacttgtttgaaa

SEQ ID NO: 537512 - DNA, 120 bp, Artificial Sequence
  ENSG00000166900_14 (sequence is synthesized)
ttcagccttaaattaagctcttagttgttcagcttggggggcaactttgatttttctctgtgttgtagtctctcatatttactcaaggagggaccaggatgatacagtcatctgaggtta

SEQ ID NO: 537513 - DNA, 120 bp, Artificial Sequence
  ENSG00000166900_15 (sequence is synthesized)
tgctttgcaaaaggctgacggtatggaatatgtttccatgtctgagtcttagaaactggctgctcattgttagaaagtgatgctttgtgagactattgtcttggggccaaaaataatcag

SEQ ID NO: 537514 - DNA, 120 bp, Artificial Sequence
  ENSG00000166900_16 (sequence is synthesized)
ggattttaaattgggcaagggacaaggtgctagaatcctaagctctggaaatatttcatgacactggtgtattcactcatgtgttccagatgtattctaattgtgtatgaaatgtatgta

SEQ ID NO: 537515 - DNA, 120 bp, Artificial Sequence
  ENSG00000166900_17 (sequence is synthesized)
cacataagtgtgtgtgtctcaggaagtaggaaataaaaatggaagctattatgacctcaaaaaaaaaaagccaactttgagctaggataaaaattgggtaaaggacatttgcttacctgc

SEQ ID NO: 537516 - DNA, 120 bp, Artificial Sequence
  ENSG00000166900_18 (sequence is synthesized)
aaatgaatcactgtggaaatgtgatcttcccatatcatcaagaaacttgttttctggatgaatactgggagaataaaatgagaactctggagtgagctaaattgatcccaattaagtttt

SEQ ID NO: 537517 - DNA, 120 bp, Artificial Sequence
  ENSG00000166900_19 (sequence is synthesized)
tctgcttagcagacagaaggtataattttttgacaccctttcccacctggtgcctatgctaggcttgtcctgagaacatccctcagtaacttgatattcacatgacctacaggatgtccc

SEQ ID NO: 537518 - DNA, 120 bp, Artificial Sequence
  ENSG00000166900_20 (sequence is synthesized)
atctgcagggctgagtcagttggggaacaccagaggctacacagtagctcttcctgctactcggttaatgagcttggcaggttctttgtctcactgaattcttatcatggaaacagcagc

SEQ ID NO: 537519 - DNA, 120 bp, Artificial Sequence
  ENSG00000166900_21 (sequence is synthesized)
agcagccgctaggaaatcttcaagtgtagtgtctgtgctaacccagtggtaaatcccttagatcccctgctggtctctggcagtctccttgattttgggtaccatgtatattttccgctt

SEQ ID NO: 537520 - DNA, 120 bp, Artificial Sequence
  ENSG00000166900_22 (sequence is synthesized)
tgactttaacgctttctaggatagggtaagcacccttaattcaggcactgtccattagcttcctttgcaaaggctacttatggccggtcacaatccagcactcagacagagccaaggcaa

SEQ ID NO: 537521 - DNA, 120 bp, Artificial Sequence
  ENSG00000166900_23 (sequence is synthesized)
tatcctcttgcccatggctatgatgtcagacagtggatgggctccagcaacaagagacaaaataactaaaggcctttgctctcctctgacattgaggcctggggcttacagtttggaata

SEQ ID NO: 537522 - DNA, 120 bp, Artificial Sequence
  ENSG00000166900_24 (sequence is synthesized)
caacatgtgaaggtttttgttgttgtttgtattttttagatgtaaacttgattattttattgctaatttaaaaataaaaatgactttgtattgattgtgaaacggttctggctctgtctc

SEQ ID NO: 537523 - DNA, 120 bp, Artificial Sequence
  ENSG00000166900_25 (sequence is synthesized)
ggtgatttttattcaggttttagaatgcagttcacacctttttaagccatgtgctggatcagatggttcaaaagtgcaatttttgaacatggtttaactcccacagaatgcagtgtaact

SEQ ID NO: 537524 - DNA, 120 bp, Artificial Sequence
  ENSG00000166900_26 (sequence is synthesized)
atgtttgtgtttcagatttgaggtgttccccccaaaagaatttggttcagtccttgggagtatctggctttaggaggaaatgggggagatctgtcacgatgttatctagaaggtggaatg

SEQ ID NO: 537525 - DNA, 120 bp, Artificial Sequence
  ENSG00000166900_27 (sequence is synthesized)
accataccaaacatccttttaatctaacttgaatgtctcaccaaaaataacatttctgttggcattctgggtcctagaagccagatccatctcctttttccttctgttgctctcttcctt

SEQ ID NO: 537526 - DNA, 120 bp, Artificial Sequence
  ENSG00000166900_28 (sequence is synthesized)
cacaccctcttccatgtccacatgcacttatctccctgcagaatactttttgcgatgatgtttctcatgtattctttctttccttgtctggatgagcagaagaagatcatgatcatgatc

SEQ ID NO: 537527 - DNA, 120 bp, Artificial Sequence
  ENSG00000166900_29 (sequence is synthesized)
tgctgtattatccttgcgatcatcttagcttccaccattgggagcatatttgcctgaaaaaggtgagccatctgtggggagggtcagaccttctttcactgacttgaaacctttgtgtct

SEQ ID NO: 537528 - DNA, 120 bp, Artificial Sequence
  ENSG00000166900_30 (sequence is synthesized)
tgggggcactctaggtgccttaatctgggtgggattaggtgctaataatggttagagaaaactaaagaaagggatgtttcagagacagaaaagtgagtgaagaatgaactgttagtaggt

SEQ ID NO: 537529 - DNA, 120 bp, Artificial Sequence
  ENSG00000166900_31 (sequence is synthesized)
agtctgtgggaggaggggggagacagaaggtggcaatctgtcctataacctggtgtggcagaatgctttgtacaggtgaaggatagtgattcctgctaaacagtttgagccttggtatct

SEQ ID NO: 537530 - DNA, 120 bp, Artificial Sequence
  ENSG00000166900_32 (sequence is synthesized)
ggaagtgacaaaaagaacaagaattagttcttgcattaggtgcatcttgaactttttggaagagggccggccacacagtaaattcaaattaaatttcttccctttcaaggttaatgaaag

SEQ ID NO: 537531 - DNA, 120 bp, Artificial Sequence
  ENSG00000166900_33 (sequence is synthesized)
ttaacacagccttgtatgtagtcctttaccccgggtaagagggatttggtgatcccagccacgaacaccatgctatataatctatgatttttttcctccatttttctgttatctcccaca

SEQ ID NO: 537532 - DNA, 120 bp, Artificial Sequence
  ENSG00000166900_34 (sequence is synthesized)
gccctcacagattgatcgactggcatttctaatcctccttccacttctgtggtaccatcacttctccacgcagactcctcatcagcttctcctctttccattatgaaacttcttaagaaa

SEQ ID NO: 537533 - DNA, 120 bp, Artificial Sequence
  ENSG00000166900_35 (sequence is synthesized)
cagggcaccaatcaactacttattaagaattatgcaaagaataaacgtatacagaattgggcggaggacagggacagggagtacagatacatagctgattaggcagatggtttaaaggag

SEQ ID NO: 537534 - DNA, 120 bp, Artificial Sequence
  ENSG00000166900_36 (sequence is synthesized)
gactgcagggtagagaagcaagcagagtgggcgcctctttaggaagtgacacagcctgcatgtgcagtatggctgtgaaggggcagatatcatagcacacctaactcaacaggatcttac

SEQ ID NO: 537535 - DNA, 120 bp, Artificial Sequence
  ENSG00000166900_37 (sequence is synthesized)
ttgaactgctgtgagttggtcaagtcagggcacttctgctcttcaggctcctctaggtcacacctttgaccaccctacatctgtttcctctttcaggctccagtagtagtcttaaaagtg

SEQ ID NO: 537536 - DNA, 120 bp, Artificial Sequence
  ENSG00000166900_38 (sequence is synthesized)
aagtttatctaaggataagcacatgcctatcttgctcactgctgtgtccccactttttagcacagcgcctgctgcttacaggtactcaaatatctgctgacttaattacttataattaag

SEQ ID NO: 537537 - DNA, 120 bp, Artificial Sequence
  ENSG00000166900_39 (sequence is synthesized)
ctcttatttcagtcatggacaaatccttgggtttgactcctaaactctttaaggtaccaatgagaacgtggtttgttactgtcagaggctgtgtaaagccgcttgggaatgggctgatct

SEQ ID NO: 537538 - DNA, 120 bp, Artificial Sequence
  ENSG00000166900_40 (sequence is synthesized)
gcttatgcaaaaatgctaccaacctttcaaaccccattaccacaacatgaaaatttaaagtgctttttctatgggtggtgatggtggagttctagcaacagcctcttaatctgtggagaa

SEQ ID NO: 537539 - DNA, 120 bp, Artificial Sequence
  ENSG00000166900_41 (sequence is synthesized)
gatggctggctccaggactgtggttcaataacgaaatacaggcccacaaaataaaataggtttatagcatgactgaactcacacatcagtagaacactctgtgaaccataacaaagaaca

SEQ ID NO: 537540 - DNA, 120 bp, Artificial Sequence
  ENSG00000166900_42 (sequence is synthesized)
gataaaggtgtcaagtgagaaaggtgaaatgaggttatcactcacttcacctctcacctgatttgtgttgctagctgaaactgctggccagtaacgtatgtataagaaactgttataggc

SEQ ID NO: 537541 - DNA, 70 bp, Artificial Sequence
  ENSG00000166900_43 (sequence is synthesized)
tgggaggccaaggcaggtggatcaccagactgaccaacatagtgaaacccccttcccagctacttgggag

SEQ ID NO: 537542 - DNA, 120 bp, Artificial Sequence
  ENSG00000166900_44 (sequence is synthesized)
aaaaaaaaaacaaaaaaaaaaaactgttcttaatacttaatactgtccccaattccattcaaggttcagttgtgttcagctttaaaaccagctatgtgaatgtgagttctagtgcagatt

SEQ ID NO: 537543 - DNA, 120 bp, Artificial Sequence
  ENSG00000166900_45 (sequence is synthesized)
tgaatgtgagttctagtgcagattatttagtgattatgtaactaaaattgatgaaaaaatcacactatacaactgtgaggagcacacaactgctaagtttgtacttttgaaagtaaatta

SEQ ID NO: 537544 - DNA, 120 bp, Artificial Sequence
  ENSG00000166900_46 (sequence is synthesized)
ttctttgtttgataccttattttttaagaaagtgggattaaaaatattttggtcagtgctgttttctacccaccttcaaaagccaatggtttgatatttctattaatttgtgcttccttt

SEQ ID NO: 537545 - DNA, 120 bp, Artificial Sequence
  ENSG00000166900_47 (sequence is synthesized)
agttttaataggggatagaagactgcagctggttgggtctggaaaacattaatctgggcaaacggagctggagctatgaggatctgagtcctagggggccctcattcactagcagtaaga

SEQ ID NO: 537546 - DNA, 120 bp, Artificial Sequence
  ENSG00000166900_48 (sequence is synthesized)
atttaagtggtgcatggcacatagcactgtactagattctgcaggggcacaaacatagagccaaacactctccctcttggagaatttcagacccagaaaaggccacgcagttctaacttt

SEQ ID NO: 537547 - DNA, 120 bp, Artificial Sequence
  ENSG00000166900_49 (sequence is synthesized)
tgtcatcggttccttttgctaaaaggcaaagggtatgttccttgcctattgtccaacataccccttccaagattgtgagaagatgggtagctgggcatcaataaatattgaatcaattga

SEQ ID NO: 537548 - DNA, 120 bp, Artificial Sequence
  ENSG00000166900_50 (sequence is synthesized)
atgtttatggacatcgccatgctggtggagaatcagaaattgataattatcattgtgctagtagttgtgttgctgggcattttagcattgattattggactttccgttgggctgaattaa

SEQ ID NO: 537549 - DNA, 120 bp, Artificial Sequence
  ENSG00000166900_51 (sequence is synthesized)
tcacgacatgtttatggacatcgccatgctggtggagaatcagggatccatgattgaccgtattgagaacaacatggaccagtcagtgggctttgtggagcgggccgtggcagataccaa

SEQ ID NO: 537550 - DNA, 120 bp, Artificial Sequence
  ENSG00000166900_52 (sequence is synthesized)
aaaggctgtcaagtatcagagtgaagcccggaggaagaagatcatgatcatgatctgctgtattatccttgcgatcatcttagcttccaccattgggagcatatttgcctgaaaaagatt

SEQ ID NO: 537551 - DNA, 120 bp, Artificial Sequence
  ENSG00000166900_53 (sequence is synthesized)
gaagcccggaggaaactgatttcactccagactggtgtggccacccttgtcttcagatgagaatggagtctgaatggccttcctgagagcgagtgcgacccgttcctttgtttccttgca

SEQ ID NO: 537552 - DNA, 120 bp, Artificial Sequence
  ENSG00000166900_54 (sequence is synthesized)
aagaaaacaaggccgtccccaccaccatctatctcagctcccctagggtccagctttccgaactgaaactcctcttgatggaagtgacaccacttggtccatctttgcttgtggtttggg

SEQ ID NO: 537553 - DNA, 120 bp, Artificial Sequence
  ENSG00000166900_55 (sequence is synthesized)
ctctgtccccgcaatgatccattgtagccccagaaatttaccttttcttaaatcctgactgtactggaaagagtccagaattgaagctaggagatgagaattaaaatgtgctttcagctg

SEQ ID NO: 537554 - DNA, 120 bp, Artificial Sequence
  ENSG00000166900_56 (sequence is synthesized)
accaggggatctaaaagtcagcttattacagcattgagcattcaacttcatcttgaaagataagcaacagtgagatgaacaacctctcatagacaggtggttggttgattttttttttcc

SEQ ID NO: 537555 - DNA, 120 bp, Artificial Sequence
  ENSG00000166900_57 (sequence is synthesized)
cctcttttttctggcacttggagtctagcccttgacttttttgtatgtgaactttaaattttggtttggctctgaacaatctgattgaaatagatgttgaaattttaaaaagatataaga

SEQ ID NO: 537556 - DNA, 120 bp, Artificial Sequence
  ENSG00000166900_58 (sequence is synthesized)
agggtgacagatcgctataaactggtcataagccatgactaccagcaggacacaatcagccccacccaagaagacaaagaaaaacatctgggtgccacatcccgtgatggaaacaggagt

SEQ ID NO: 537557 - DNA, 120 bp, Artificial Sequence
  ENSG00000166900_59 (sequence is synthesized)
tttgcccattgaaaggaggtttgccaaggccaatggggtgatggaagatgtatagaagatttctagaactgccagattagccaggaaaaagtacatgggggtgtggagggaatgattgat

SEQ ID NO: 537558 - DNA, 120 bp, Artificial Sequence
  ENSG00000166900_60 (sequence is synthesized)
ctgaacaatgactgcaattgtagcatttccaccgaggctggtcagatacatcatcaggaagaccacaaaaatcagcatctggacctcagggtcaggtctaatggaagaggaaaaccagag

SEQ ID NO: 537559 - DNA, 120 bp, Artificial Sequence
  ENSG00000166900_61 (sequence is synthesized)
gggagtggtacacttccacttccacttcttttcaacagacctggtggtggcttcctttataattgtggccttgatgttgcaccaagaagccttgttggacacttcacctttgggcccaca

SEQ ID NO: 537560 - DNA, 120 bp, Artificial Sequence
  ENSG00000166902_0 (sequence is synthesized)
gccccactgagcggtgtcctgagccgattacagctaggtagtggagcgccgctgcttacctgggtgcaggagacagccggagtcgctgggggagctccgcgccgccggacgcccgtgacc

SEQ ID NO: 537561 - DNA, 120 bp, Artificial Sequence
  ENSG00000166902_1 (sequence is synthesized)
atgtggaggctgctggctcgcgctagtgcgccgctcctgcgggtgcccttgtcagattcctgggcactcctccccgccagtgctggcgtaaagacactgctcccagtaccaagttttgaa

SEQ ID NO: 537562 - DNA, 120 bp, Artificial Sequence
  ENSG00000166902_2 (sequence is synthesized)
gatgtttccattcctgaaaaacccaagcttagatttattgaaagggcaccacttgtgccaaaagtaagaagagaacctaaaaatttaagtgacatacggggaccttccactgaagctacg

SEQ ID NO: 537563 - DNA, 120 bp, Artificial Sequence
  ENSG00000166902_3 (sequence is synthesized)
gagtttacagaaggcaattttgcaatcttggcattgggtggtggctacctgcattggggccactttgaaatgatgcgcctgacaatcaaccgctctatggaccccaagaacatgtttgcc

SEQ ID NO: 537564 - DNA, 120 bp, Artificial Sequence
  ENSG00000166902_4 (sequence is synthesized)
tggcgagtaccagcccctttcaagcccatcactcgcaaaagtgttgggcatcgcatggggggaggcaaaggtgctattgaccactacgtgacacctgtgaaggctggccgccttgttgta

SEQ ID NO: 537565 - DNA, 120 bp, Artificial Sequence
  ENSG00000166902_5 (sequence is synthesized)
gagatgggtgggcgttgtgaatttgaagaagtgcaaggtttccttgaccaggttgcccacaagttgcccttcgcagcaaaggctgtgagccgcgggactctagagaagatgcgaaaagat

SEQ ID NO: 537566 - DNA, 120 bp, Artificial Sequence
  ENSG00000166902_6 (sequence is synthesized)
caagaggaaagagaacgtaacaaccagaacccctggacatttgagcgaatagccactgccaacatgctgggcatacggaaagtactgagcccatatgacttgacccacaaggggaaatac

SEQ ID NO: 537567 - DNA, 120 bp, Artificial Sequence
  ENSG00000166902_7 (sequence is synthesized)
tggggcaagttctacatgcccaaacgtgtgtagtgagtgtaggagataactgtatataggctactgaaagaaggattctgcatttctattcccctcagcctacccactgaagtctttggg

SEQ ID NO: 537568 - DNA, 120 bp, Artificial Sequence
  ENSG00000166902_8 (sequence is synthesized)
tagctcttaagccataactaaggagcagcatttgagtagatttctgaaaaacaatgttatttgttgatttaaaaagaaaactgtatttttattaaataaaatttaaacatcacttcagga

SEQ ID NO: 537569 - DNA, 120 bp, Artificial Sequence
  ENSG00000166902_9 (sequence is synthesized)
aaaaaataaaataaataaaaataagaagtagtacctttggcccaggttgtatcggggtcccggcctgttaccttcgtcgtttaacttgatttgtctttgtagattcctgggcactcctcc

SEQ ID NO: 537570 - DNA, 120 bp, Artificial Sequence
  ENSG00000166902_10 (sequence is synthesized)
ccgccagtgctggcgtaaagacactgctcccagtaccaagttttgaaggatgataaagaagatgtcacatgtctggcctgaagttttgcccacccaccaaaacctggcacactgacctgt

SEQ ID NO: 537571 - DNA, 120 bp, Artificial Sequence
  ENSG00000166902_11 (sequence is synthesized)
aattttgcaatcttggtgagtgaattcagcatcgagcagcaatgggatggaagctagggaataacaaaatctcatactccttgagataatttagtctcttcctccacagtttttattaga

SEQ ID NO: 537572 - DNA, 120 bp, Artificial Sequence
  ENSG00000166902_12 (sequence is synthesized)
actgccaccagttgctctttaaactggtatgtacagaggctactgggtacccagtaaacatttgggttatatatcttttttttttttaatgtagagtgaaaataacgtaaaagcagaagg

SEQ ID NO: 537573 - DNA, 120 bp, Artificial Sequence
  ENSG00000166902_13 (sequence is synthesized)
aaggggctagctaatgtgccccataatcagatcatgagatcttttcaagccctggtaaaaataaaaccatccacaatataggatgtggaagacagctgtttccttacttgttgagtagct

SEQ ID NO: 537574 - DNA, 120 bp, Artificial Sequence
  ENSG00000166902_14 (sequence is synthesized)
tccatgaagacttgatgtcagcagccacacaaatgggtgtgcactaggatttgttttccaccaggcagccagagtgatattccaaagtcctcttcctgcagcctacataatcacccccac

SEQ ID NO: 537575 - DNA, 120 bp, Artificial Sequence
  ENSG00000166902_15 (sequence is synthesized)
ctcgtgtttcccatccccgttcactctttcaataaatatgtttttagagcttacagttttgccaactaatattctgagcactagaaataaatcaaagacaaaggaaaccaaaaaagttcc

SEQ ID NO: 537576 - DNA, 120 bp, Artificial Sequence
  ENSG00000166902_16 (sequence is synthesized)
ttgctcttacggagcagcgtctaatgagatagctcccctaaaacctcccactggtgtgtgtcccatggtccactcagccagtagtcattggcctgaaatctggatttttgagcgggcatg

SEQ ID NO: 537577 - DNA, 120 bp, Artificial Sequence
  ENSG00000166908_0 (sequence is synthesized)
ggtcacgtgacagcagcgcaggtgagcgccgcttccggggtcgggcgcctggatagctgccggctccggcttccacttggtcggttgcgcgggagactatggcgtcctcctcggtcccac

SEQ ID NO: 537578 - DNA, 120 bp, Artificial Sequence
  ENSG00000166908_1 (sequence is synthesized)
cagccacggtatcggcggcgacagcaggccccggcccaggtttcggcttcgcctccaagaccaagaagaagcatttcgtgcagcagaaggtgaaggtgttccgggcggccgacccgctgg

SEQ ID NO: 537579 - DNA, 120 bp, Artificial Sequence
  ENSG00000166908_2 (sequence is synthesized)
tgggtgtgttcctgtggggcgtagcccactcgatcaatgagctcagccaggtgcctcccccggtgatgctgctgccagatgactttaaggccagctccaagatcaaggtcaacaatcacc

SEQ ID NO: 537580 - DNA, 120 bp, Artificial Sequence
  ENSG00000166908_3 (sequence is synthesized)
ttttccacagggaaaatctgcccagtcatttcaagttcaaggagtattgtccccaggtcttcaggaacctccgtgatcgatttggcattgatgaccaagattacttggtgtcccttaccc

SEQ ID NO: 537581 - DNA, 120 bp, Artificial Sequence
  ENSG00000166908_4 (sequence is synthesized)
gaaacccccccagcgaaagtgaaggcagtgatggtcgcttccttatctcctacgatcggactctggtcatcaaagaagtatccagtgaggacattgctgacatgcatagcaacctctcca

SEQ ID NO: 537582 - DNA, 120 bp, Artificial Sequence
  ENSG00000166908_5 (sequence is synthesized)
actatcaccagtacattgtgaagtgccatggcaacacgcttctgccccagttcctggggatgtaccgagtcagtgtggacaacgaagacagctacatgcttgtgatgcgcaatatgttta

SEQ ID NO: 537583 - DNA, 120 bp, Artificial Sequence
  ENSG00000166908_6 (sequence is synthesized)
gccaccgtcttcctgtgcacaggaagtatgacctcaagggttccctagtgtcccgggaagccagcgataaggaaaaggttaaagaattgcccacccttaaggatatggactttctcaaca

SEQ ID NO: 537584 - DNA, 120 bp, Artificial Sequence
  ENSG00000166908_7 (sequence is synthesized)
agaaccagaaagtatatattggtgaagaggagaagaaaatatttctggagaagctgaagagagatgtggagtttctagtgcagctgaagatcatggactacagccttctgctaggcatcc

SEQ ID NO: 537585 - DNA, 120 bp, Artificial Sequence
  ENSG00000166908_8 (sequence is synthesized)
acgacatcattcggggctctgaaccagaggaggaagcgcccgtgcgggaggatgagtcagaggtggatggggactgcagcctgactggacctcctgctctggtgggctcctatggcacct

SEQ ID NO: 537586 - DNA, 120 bp, Artificial Sequence
  ENSG00000166908_9 (sequence is synthesized)
ccccagagggtatcggaggctacatccattcccatcggcccctgggcccaggagagtttgagtccttcattgatgtctatgccatccggagtgctgaaggagccccccagaaggaggtct

SEQ ID NO: 537587 - DNA, 120 bp, Artificial Sequence
  ENSG00000166908_10 (sequence is synthesized)
acttcatgggcctcattgatatccttacacagtatgatgctaagaagaaagcagctcatgcagccaaaactgtcaagcatggggctggggcagagatctctactgtccatccggagcagt

SEQ ID NO: 537588 - DNA, 120 bp, Artificial Sequence
  ENSG00000166908_11 (sequence is synthesized)
atgctaagcgattcctggattttattaccaacatctttgcctaagagactgcctggttctctctgatgttcaaggtggtggggttctgagacacttgggggaattgtggggatattctag

SEQ ID NO: 537589 - DNA, 120 bp, Artificial Sequence
  ENSG00000166908_12 (sequence is synthesized)
ccaccagttctcttcttcctttgctaaattcaggctgcaggctccttccatccagataactccatcctgtcgagtaggctctttctgaccctcagaaatacattgtcctttttcctcttt

SEQ ID NO: 537590 - DNA, 120 bp, Artificial Sequence
  ENSG00000166908_13 (sequence is synthesized)
tgttattgttgactctctcccaagtgccttgatctttgtaatatctcctgttgtttctatgatataggagctaggggaagggggttgtttgccttcttcaggacctgactggacagatgg

SEQ ID NO: 537591 - DNA, 120 bp, Artificial Sequence
  ENSG00000166908_14 (sequence is synthesized)
acctggctcaagcaactactctggatgcactttgctgtgtgggatgaactaaaagtgtctgaattttgctgataactttataaaactcactatggcatgcttccctcctggtgggcccta

SEQ ID NO: 537592 - DNA, 120 bp, Artificial Sequence
  ENSG00000166908_15 (sequence is synthesized)
ggatggatgacactcaagatactacagatgtgggtgcaggcatgcacacacacgatggaatatggccattcctacacaggtggggtagagagtgggtcagcagcctggcacctcacagag

SEQ ID NO: 537593 - DNA, 120 bp, Artificial Sequence
  ENSG00000166908_16 (sequence is synthesized)
gtgggacctaagaggactcatgattatgcagagaattggattgggtctctgtcatagattgagtaatctcttcccttacctcaattccatctccacccatctctacatctgggcacagca

SEQ ID NO: 537594 - DNA, 120 bp, Artificial Sequence
  ENSG00000166908_17 (sequence is synthesized)
acccagagatggccaaaagcattcaagcctgggggaagatgtttgactattgctgctcttcaccagaacctcacacctctcctgggactggaacccttcagtgggtgtgtggccagtttt

SEQ ID NO: 537595 - DNA, 120 bp, Artificial Sequence
  ENSG00000166908_18 (sequence is synthesized)
ggaggctggaatgatgggccagggtgtaggattcattctccatgtaaagtttcctttcatcctgcctagccatccccaaggtttatttccagaagaaaggaatatctctacttggatcaa

SEQ ID NO: 537596 - DNA, 120 bp, Artificial Sequence
  ENSG00000166908_19 (sequence is synthesized)
ttctggtcatttcaagaggatggaggcctcaagtgtgggaacttcccctactccctggatgtgtgtacctagcacacttccttctcccacccctttttccagttggatttgtttttctgt

SEQ ID NO: 537597 - DNA, 120 bp, Artificial Sequence
  ENSG00000166908_20 (sequence is synthesized)
tctcttctgtcctgtcttatactgcaactgtgtctcctaggggacagatggccttctttgtcatcttcactctccacccccagagaggagtcagagccataactcaatcactcagcccct

SEQ ID NO: 537598 - DNA, 120 bp, Artificial Sequence
  ENSG00000166908_21 (sequence is synthesized)
ccaaagatagttgatgtgtgataatctcataatgttgagaaccctgatgagatacattgtcttcctctccctacaatgcctctggggccaaggcacccattcttcttgctatcctccatc

SEQ ID NO: 537599 - DNA, 120 bp, Artificial Sequence
  ENSG00000166908_22 (sequence is synthesized)
ccccttgaggcttccactttttttttttttagacataaagctgggcatcagcaactggcctgtggtgatgcaaagctgctttgctctgtatctggctggactgatctgtctcacaagaag

SEQ ID NO: 537600 - DNA, 120 bp, Artificial Sequence
  ENSG00000166908_23 (sequence is synthesized)
ccatgaggccatagggagaagctccctctccccttcatcttctgctccaaaggtggtagcaagaggagtacccagttaggggttggagcccccatataacatcttcctgtcagaagactg

SEQ ID NO: 537601 - DNA, 120 bp, Artificial Sequence
  ENSG00000166908_24 (sequence is synthesized)
atggatctttttcattccaaccatctccctttcccccgatgaatgcaataaaactctgtgacaccagcaaccattgctctttagaaatgggttttctgatcatatggctgatgtgttatg

SEQ ID NO: 537602 - DNA, 120 bp, Artificial Sequence
  ENSG00000166908_25 (sequence is synthesized)
ggcagtatggatgtcttcatttgttgcttctgtttttcatcttttttgttttattaataaaaatttatgtatttgctcctgttactataataatacagggaataaattattcaatccaaa

SEQ ID NO: 537603 - DNA, 120 bp, Artificial Sequence
  ENSG00000166912_0 (sequence is synthesized)
agtccgcccggctcggctggccgcagaaagggcctgggcggccgcactgagagctttacgcccggaggcgtcggcgctgccactggcccgcgacgggaacggggcgaaaaggcggcggca

SEQ ID NO: 537604 - DNA, 120 bp, Artificial Sequence
  ENSG00000166912_1 (sequence is synthesized)
ccatgttctccctcaagccgcccaaacccaccttcaggtcctacctcctgccaccgccccagactgacgataagatcaattcggaaccgaagattaaaaaactggagccagtccttttgc

SEQ ID NO: 537605 - DNA, 120 bp, Artificial Sequence
  ENSG00000166912_2 (sequence is synthesized)
caggagaaattgtcgtaaatgaagtcaattttgtgagaaaatgcattgcaacagacacaagccagtacgatttgtggggaaagctgatatgcagtaacttcaaaatctcctttattacag

SEQ ID NO: 537606 - DNA, 120 bp, Artificial Sequence
  ENSG00000166912_3 (sequence is synthesized)
atgacccaatgccattacagaaattccattacagaaaccttcttcttggtgaacacgatgtccctttaacatgtattgagcaaattgtcacagtaaacgaccacaagaggaagcagaaag

SEQ ID NO: 537607 - DNA, 120 bp, Artificial Sequence
  ENSG00000166912_4 (sequence is synthesized)
tcctaggccccaaccagaaactgaaatttaatccaacagagttaattatttattgtaaagatttcagaattgtcagatttcgctttgatgaatcaggtcccgaaagtgctaaaaaggtat

SEQ ID NO: 537608 - DNA, 120 bp, Artificial Sequence
  ENSG00000166912_5 (sequence is synthesized)
gccttgcaatagctcattattcccagccaacagacctccagctactctttgcatttgaatatgttgggaaaaaataccacaattcagcaaacaaaattaatggaattccctcaggagatg

SEQ ID NO: 537609 - DNA, 120 bp, Artificial Sequence
  ENSG00000166912_6 (sequence is synthesized)
gaggaggaggaggaggaggaggtaatggagctggtggtggcagcagccagaaaactccactctttgaaacttactcggattgggacagagaaatcaagaggacaggtgcttccgggtgga

SEQ ID NO: 537610 - DNA, 120 bp, Artificial Sequence
  ENSG00000166912_7 (sequence is synthesized)
gagtttgttctattaacgagggttacatgatatccacttgccttccagaatacattgtagtgccaagttctttagcagaccaagatctaaagatcttttcccattcttttgttgggagaa

SEQ ID NO: 537611 - DNA, 120 bp, Artificial Sequence
  ENSG00000166912_8 (sequence is synthesized)
ggatgccactctggtgctggagccactctaacggcagtgctcttgtgcgaatggccctcatcaaagacgtgctgcagcagaggaagattgaccagaggatttgtaatgcaataactaaaa

SEQ ID NO: 537612 - DNA, 120 bp, Artificial Sequence
  ENSG00000166912_9 (sequence is synthesized)
gtcacccacagagaagtgatgtttacaaatcagatttggataagaccttgcctaatattcaagaagtacaggcagcatttgtaaaactgaagcagctatgcgttaatgagccttttgaag

SEQ ID NO: 537613 - DNA, 120 bp, Artificial Sequence
  ENSG00000166912_10 (sequence is synthesized)
aaactgaagagaaatggttatcttcactggaaaatactcgatggttagaatatgtaagggcattccttaagcattcagcagaacttgtatacatgctagaaagcaaacatctctctgtag

SEQ ID NO: 537614 - DNA, 120 bp, Artificial Sequence
  ENSG00000166912_11 (sequence is synthesized)
tcctacaagaggaggaaggaagagacttgagctgttgtgtagcttctcttgttcaagtgatgctggatccctattttaggacaattactggatttcagagtctgatacagaaggagtggg

SEQ ID NO: 537615 - DNA, 120 bp, Artificial Sequence
  ENSG00000166912_12 (sequence is synthesized)
tcatggcaggatatcagtttctagacagatgcaaccatctaaagagatcagagaaagagtctcctttatttttgctattcttggatgccacctggcagctgttagaacaatatcctgcag

SEQ ID NO: 537616 - DNA, 120 bp, Artificial Sequence
  ENSG00000166912_13 (sequence is synthesized)
cttttgagttctccgaaacctacctggcagtgttgtatgacagcacccggatctcactgtttggcaccttcctgttcaactcccctcaccagcgagtgaagcaaagcacggaatttgcta

SEQ ID NO: 537617 - DNA, 120 bp, Artificial Sequence
  ENSG00000166912_14 (sequence is synthesized)
taagcaaaaacatccaattgggtgatgagaagggcttaaaattcccctctgtttgggactggtctctccagtttacagcaaaggatcgcacccttttccataaccccttctacattggaa

SEQ ID NO: 537618 - DNA, 120 bp, Artificial Sequence
  ENSG00000166912_15 (sequence is synthesized)
agagcacaccttgtatacagaatggctccgtgaagtcttttaaacggacaaagaaaagctacagctccacactaagaggaatgccgtctgccttaaagaatggaatcatcagtgaccaag

SEQ ID NO: 537619 - DNA, 120 bp, Artificial Sequence
  ENSG00000166912_16 (sequence is synthesized)
aattacttccaaggagaaattcattgatattaaaaccaaagccagatccagctcagcaaaccgacagccagaacagtgatacggagcagtattttagagaatggttttccaaacccgcca

SEQ ID NO: 537620 - DNA, 120 bp, Artificial Sequence
  ENSG00000166912_17 (sequence is synthesized)
acctgcacggtgttattctgccacgtgtctctggaacacacataaaactgtggaaactgtgctacttccgctgggttcccgaggcccagatcagcctgggtggctccatcacagcctttc

SEQ ID NO: 537621 - DNA, 120 bp, Artificial Sequence
  ENSG00000166912_18 (sequence is synthesized)
acaagctctccctcctggctgatgaagtcgacgtactgagcaggatgctgcggcaacagcgcagtggccccctggaggcctgctatggggagctgggccagagcaggatgtacttcaacg

SEQ ID NO: 537622 - DNA, 120 bp, Artificial Sequence
  ENSG00000166912_19 (sequence is synthesized)
ccagcggccctcaccacaccgacacctcggggacaccggagtttctctcctcctcatttccattttctcctgtagggaatctgtgcagacgaagcattttaggaacaccattaagcaaat

SEQ ID NO: 537623 - DNA, 120 bp, Artificial Sequence
  ENSG00000166912_20 (sequence is synthesized)
ttttctgaacattttgagggaagctgtcaacttttttcctctgaattaacattgctaacctaggcgtttgaatctctaataactttatatgtaagaataatagttggaatttgcactaat

SEQ ID NO: 537624 - DNA, 120 bp, Artificial Sequence
  ENSG00000166912_21 (sequence is synthesized)
atttaaaaacatgttgaatcatgcttctttcacacttattttaagagagatgtaaattttgttcctgtcctctttctgtcattacaggtctggctcttgtaaccgtgatcaaactgttca

SEQ ID NO: 537625 - DNA, 120 bp, Artificial Sequence
  ENSG00000166912_22 (sequence is synthesized)
tgttgtctgctacatttttgtctccatccatttttcctaccacctcctgaaggctatctgatagtcagtcacattagcagccccaggcagcagacaacaggaaagttaggaaatttgtgt

SEQ ID NO: 537626 - DNA, 120 bp, Artificial Sequence
  ENSG00000166912_23 (sequence is synthesized)
ttcgtgtcatttttaggagcatctgataaaacctccagcaggttttaggaagtattcatgtatttttctggttactttctgtcgtctctaattgaactcacctgatgaaggttcagtgtt

SEQ ID NO: 537627 - DNA, 120 bp, Artificial Sequence
  ENSG00000166912_24 (sequence is synthesized)
ctggggccagaatttatgattttagatcaccttctttggaaccttagatcactgtgttttgaaatcatgagtttgcttttaacttcatagggtcaactttaaaatgatatgcactgttaa

SEQ ID NO: 537628 - DNA, 120 bp, Artificial Sequence
  ENSG00000166912_25 (sequence is synthesized)
ttttaaagcatttgctgcagataattaaacttagaagtgcctttgactttaggatacaaatattacagaagaaaatataatttcactttttaaaattggggtgggaaaatcccattgcat

SEQ ID NO: 537629 - DNA, 120 bp, Artificial Sequence
  ENSG00000166912_26 (sequence is synthesized)
atttgaaataggcttttcatactaagcttcatagccaggagtccccagagtcttgttcctctgaaagccactggggagtggcctctggggtgctgattccacagaggtgtatgctgtaga

SEQ ID NO: 537630 - DNA, 120 bp, Artificial Sequence
  ENSG00000166912_27 (sequence is synthesized)
caggagagtgccatctatgccaaaactcgccctcaaaaacaaacaaggcttgctgggaggcgtgctgggcttggccatcagtatttccagtgtggtaaactattgctggcacttccccct

SEQ ID NO: 537631 - DNA, 120 bp, Artificial Sequence
  ENSG00000166912_28 (sequence is synthesized)
ggaaataactaatgaggttacgagttgggcacctgcacagatgtccttctctcatagttcctaatgcttaggaatagaggagaaataaaaaaatggattctctcaaaacactgccatttg

SEQ ID NO: 537632 - DNA, 120 bp, Artificial Sequence
  ENSG00000166912_29 (sequence is synthesized)
aatagcgacagaagtgctcccccagcccccaactttggacagcaaagttgaggagaatgagcagacacagttgtttgcttgatctgaatctctctaaagtaaagtatttccaaactgtgt

SEQ ID NO: 537633 - DNA, 120 bp, Artificial Sequence
  ENSG00000166912_30 (sequence is synthesized)
gacaagagcctacctaccactgtagcggtcaaagctgaagcttcttacagcagtgaaacggggcaccacctcccccacactcctcattccccgcttaaaacatggatactttcaaatttg

SEQ ID NO: 537634 - DNA, 120 bp, Artificial Sequence
  ENSG00000166912_31 (sequence is synthesized)
actgtttcttaaactgccatcctaagatatggaaaatttttatagtaaagtgtctagttagcttatttccttttctaaaacaagtgttttcaagataactgtattttacctttatatgta

SEQ ID NO: 537635 - DNA, 120 bp, Artificial Sequence
  ENSG00000166912_32 (sequence is synthesized)
ctgaatagctgtttctttttgaattatttgccttttaaaatttgataatgtctctggatataacaggacaggagttcttaaaaaatatcttaagaaattcactttatgggtaaacccaag

SEQ ID NO: 537636 - DNA, 120 bp, Artificial Sequence
  ENSG00000166912_33 (sequence is synthesized)
gtttttgccaacttgttgcctagaaaataagggctagtttcagtttatacaaatagaattattaaacattttacagtccttgattagaaaccagacccaatctccttataacaccacagc

SEQ ID NO: 537637 - DNA, 120 bp, Artificial Sequence
  ENSG00000166912_34 (sequence is synthesized)
gtatcctgccattgacagtgtaatcacaattctccctttttcatttagctgcttttttattattactaaatgttttggattgagcatttttccctctgtaattttcttccttcacgttta

SEQ ID NO: 537638 - DNA, 120 bp, Artificial Sequence
  ENSG00000166912_35 (sequence is synthesized)
tttccctctgtaattttcttccttcacgtttattttaactcttgtagtattttattgttgttaatttacaagtttaaaaatattaggtactattaataatggttaaaaatagaaaaatgc

SEQ ID NO: 537639 - DNA, 120 bp, Artificial Sequence
  ENSG00000166912_36 (sequence is synthesized)
ttttatttttgctggacagttgttatatcatgattattgtgctacagtttattgtgcataatatgaaaaacaactatgacagccttcagtcgggccagggtgaagctgcttataccacct

SEQ ID NO: 537640 - DNA, 120 bp, Artificial Sequence
  ENSG00000166912_37 (sequence is synthesized)
ctgccgtcagagggacatgtggtgacagcagtggtgtggctgcacagggcgcactagagagagctcagcacccctgctgcccgccagcagagcccgtgctgagggaatgccgcacagatg

SEQ ID NO: 537641 - DNA, 120 bp, Artificial Sequence
  ENSG00000166912_38 (sequence is synthesized)
ctgatgcactgggtgaaatttctagtattgaacgtaaaggtgtacagtgtcttgctgttattttatgatggaaactgattttgaaaccaaaaatagctaactaactttatttaaggaaag

SEQ ID NO: 537642 - DNA, 120 bp, Artificial Sequence
  ENSG00000166912_39 (sequence is synthesized)
gatattaatttgtactaacagagggtgaaagctgttcacatttgtcaacaaaatctgcttgctgcagtagtaacctcaagtggttaaaacttgatttcccgagaaaactaaaacctttgt

SEQ ID NO: 537643 - DNA, 120 bp, Artificial Sequence
  ENSG00000166912_40 (sequence is synthesized)
gcctaaaattgatgacttgagttcaagtgggatgagcaagaagatgtgttatcttgttgttcaacagtattgaatgtgaaggaaattttgatggcttaataaaattccacagcgactgtt

SEQ ID NO: 537644 - DNA, 120 bp, Artificial Sequence
  ENSG00000166912_41 (sequence is synthesized)
ctcctctgcgcttccgtggagcctccaggccgacccccgggaactggaggaccccaggaggctgcgcgcgtctccctgcccacagcagcgcggctgcctgattcccggcgccgcgaaatg

SEQ ID NO: 537645 - DNA, 120 bp, Artificial Sequence
  ENSG00000166912_42 (sequence is synthesized)
tgactaagcagggtctcaagccaaacttgaaaccattctgaaccaaagtgccatttcacccacctcgaaccaacaacagaagctgacaaatgccgtggagaccattgagagaaacagaaa

SEQ ID NO: 537646 - DNA, 120 bp, Artificial Sequence
  ENSG00000166912_43 (sequence is synthesized)
ggggcagctcttgtggaccttcaggaagcctttctaggaagaggattgccctcatagtgagctccggggtcttcagcctcagccgtaaggccctgggctaggcagtgtgacctagggagc

SEQ ID NO: 537647 - DNA, 120 bp, Artificial Sequence
  ENSG00000166912_44 (sequence is synthesized)
gggaaacctgagttctggccctggtctgggaaaagtgctaggcccatgttccactcaggcttcagcctgagagtccaggttgctaacctgtaaaatggatctgtcaaactaacacttatg

SEQ ID NO: 537648 - DNA, 120 bp, Artificial Sequence
  ENSG00000166912_45 (sequence is synthesized)
cctttagtctcattgtatgaggtgaaacattttgtaaactgtgaatcattatgcaaattttcctaaagacatatgaattattctggatttgttggtataaaagacaaaacacactggtca

SEQ ID NO: 537649 - DNA, 120 bp, Artificial Sequence
  ENSG00000166912_46 (sequence is synthesized)
aaacaatgtcttgagggcatgaaagtgaatgagatacctggccttaaggagctcttttatattctaggtcaacagaaaaacatgtaaatagtatctataatcactgccccaagatgatgc

SEQ ID NO: 537650 - DNA, 120 bp, Artificial Sequence
  ENSG00000166912_47 (sequence is synthesized)
cagagagcgttaaaagtaaaggcacttccaagagtaacactgctaatgcgggtttctgaggggtcattccctttttaactcaaatgactgtatcccagctttcttcctggtgtctgaggc

SEQ ID NO: 537651 - DNA, 120 bp, Artificial Sequence
  ENSG00000166912_48 (sequence is synthesized)
ccacaaagtctcagtacctgagagtgggcagattgcagctttgagcctgcaagcctgatttactaaagccccatttatccatttcttgatgattcaagccgccactgtggcagggaatgc

SEQ ID NO: 537652 - DNA, 120 bp, Artificial Sequence
  ENSG00000166912_49 (sequence is synthesized)
cgcctggctgtgatgtagtcatggcctcctgactgctatattcttgtcctaataacattcattgtttgcctttttaataattcccaaataaattcttgggattttttttggtagaaaatt

SEQ ID NO: 537653 - DNA, 120 bp, Artificial Sequence
  ENSG00000166912_50 (sequence is synthesized)
tgcagactactgaaaggtacagaacaaagaatcagacatttggcctcctgactgcctctgttcagtttgccattgttcttgatagaatcggccaggtctagtgttttttctagcccgtct

SEQ ID NO: 537654 - DNA, 120 bp, Artificial Sequence
  ENSG00000166912_51 (sequence is synthesized)
tagaacttatccttaagcaaattagtggataggaggtactctcatcccgcccccattcaggctgatagtaacagcctaggtagagtcaacacataaaaaagtgtaattccaggggaggag

SEQ ID NO: 537655 - DNA, 120 bp, Artificial Sequence
  ENSG00000166912_52 (sequence is synthesized)
gattagaataaggacacaaaggaagggaggaaaatgttctttgaggctgaaattccattaatttttcatagtattgagtttatatttgccattgcatccttcaatctttctaaaaaggga

SEQ ID NO: 537656 - DNA, 120 bp, Artificial Sequence
  ENSG00000166912_53 (sequence is synthesized)
ggcaaaaatctttaagactcttagaaaaaaatcaaatagtaatgtgtcatataaagtaatcctgaactgatacagtcagagtgtgtgtttaactcacaaatgcatgcagagcctaataat

SEQ ID NO: 537657 - DNA, 120 bp, Artificial Sequence
  ENSG00000166912_54 (sequence is synthesized)
cacaatttctctcatccagtgggtgttctcatcgtattggagaaccctactcatcctccatttctccatgcatttgtaatagaaaaggcctcagaagtagcactgaaccttcattttact

SEQ ID NO: 537658 - DNA, 120 bp, Artificial Sequence
  ENSG00000166912_55 (sequence is synthesized)
agcatttttatatacgtttatttttaaacagtttgttaaaaatttacatactatggaattcacccatttttaatttgtaattcagtaaattttagtaaatatacagagtctagttttgga

SEQ ID NO: 537659 - DNA, 120 bp, Artificial Sequence
  ENSG00000166912_56 (sequence is synthesized)
aatttttcatcaccccaaaagtcccagctccaggcagccactaatctttctgtctctagattttccctttctgggcatttcatataaatggaatcatacaatatgtggccttttgccgct

SEQ ID NO: 537660 - DNA, 120 bp, Artificial Sequence
  ENSG00000166912_57 (sequence is synthesized)
ggcttctttcattcaacatacatgtttttgaggttcattcatgtagtgtgtatcagcaatcttttcctttttatttctgaattgtattccactgtttgtaaatgcattttgcttacccat

SEQ ID NO: 537661 - DNA, 120 bp, Artificial Sequence
  ENSG00000166912_58 (sequence is synthesized)
ttacctgttgatggacatttgggttgtttccactttgtggctgttatgaattatgctgcttcatttatttagatctttcattttatcagcagtgttttattatgtaagtcttatatttat

SEQ ID NO: 537662 - DNA, 120 bp, Artificial Sequence
  ENSG00000166912_59 (sequence is synthesized)
tttgttaaatctcttaagtattttatttttatgtcactgtgaatataattgttaatttcattttcaggtttactatgtactcagattgttgtgtacagaatttctgtaaccttactgacc

SEQ ID NO: 537663 - DNA, 120 bp, Artificial Sequence
  ENSG00000166912_60 (sequence is synthesized)
tcatttattaattctagtagttattttgtggattccgtaggagtttttacatacaggatcatattgtcttcaaagacagtttttacctttttctttctgatctgaatgccttttattttc

SEQ ID NO: 537664 - DNA, 120 bp, Artificial Sequence
  ENSG00000166912_61 (sequence is synthesized)
tttttcttgcctaattgctctggctagattctccagttcaatgagatggagaagtgtagagaacagacatccttatcatcttcctgatcttagggagagagtatccagtctttcaccagt

SEQ ID NO: 537665 - DNA, 120 bp, Artificial Sequence
  ENSG00000166912_62 (sequence is synthesized)
gaaatgggaataacattaattgtaggtttttgtggatgtctctgatcagtttaaatatgtttacttttattcctaatcaggaatgaaggtagaattgtatcagatgctttttccgcatct

SEQ ID NO: 537666 - DNA, 120 bp, Artificial Sequence
  ENSG00000166912_63 (sequence is synthesized)
aatgagataatcgtgttggttttgtcctttattactgtggtacgttactacaattgacagatgttaaaccaactttgcattcctggataatttggtttactcatatttttattgattttt

SEQ ID NO: 537667 - DNA, 120 bp, Artificial Sequence
  ENSG00000166912_64 (sequence is synthesized)
acatctgtaatcataagggatattggtcaatagttgtcttctgatttccctggctgactttgatagcgtggcaattctggccttattggaaaggacaacaactataaaagacaggaggga

SEQ ID NO: 537668 - DNA, 120 bp, Artificial Sequence
  ENSG00000166912_65 (sequence is synthesized)
atcgtttgccacagcttcagttggtagtgaacagtcccactctccccattcacttctcagtattgccatgtggcctgtcagtagaaagattaccttatacttaataccttgacaaaagag

SEQ ID NO: 537669 - DNA, 120 bp, Artificial Sequence
  ENSG00000166912_66 (sequence is synthesized)
cagtagaatggagtctagacggattttctaccacaaaccattcgaatgtaaaaagtatgagtgatgagcttctattatctggcaaatatccatgtataaaagaccatctcctattaaatg

SEQ ID NO: 537670 - DNA, 120 bp, Artificial Sequence
  ENSG00000166912_67 (sequence is synthesized)
ctaatttagtttatctacaagtctgtaatattttagagttgctggaatccagtaaaatttccttatacagatttggaaggcagcctaggtgtgcagaatactaaattatctagtttacct

SEQ ID NO: 537671 - DNA, 120 bp, Artificial Sequence
  ENSG00000166913_0 (sequence is synthesized)
ggaagtggagctaccgccaccgccgccgccgattccggagccggggtagtcgccgccgccgccgccgctgcagccactgcaggcaccgctgccgccgcctgagtagtgggcttaggaagg

SEQ ID NO: 537672 - DNA, 120 bp, Artificial Sequence
  ENSG00000166913_1 (sequence is synthesized)
aagaggtcatctcgctcggagcttcgctcggaagggtctttgttccctgcagccctcccacgggaatgacaatggataaaagtgagctggtacagaaagccaaactcgctgagcaggctg

SEQ ID NO: 537673 - DNA, 120 bp, Artificial Sequence
  ENSG00000166913_2 (sequence is synthesized)
agcgatatgatgatatggctgcagccatgaaggcagtcacagaacaggggcatgaactctccaacgaagagagaaatctgctctctgttgcctacaagaatgtggtaggcgcccgccgct

SEQ ID NO: 537674 - DNA, 120 bp, Artificial Sequence
  ENSG00000166913_3 (sequence is synthesized)
cttcctggcgtgtcatctccagcattgagcagaaaacagagaggaatgagaagaagcagcagatgggcaaagagtaccgtgagaagatagaggcagaactgcaggacatctgcaatgatg

SEQ ID NO: 537675 - DNA, 120 bp, Artificial Sequence
  ENSG00000166913_4 (sequence is synthesized)
ttctggagctgttggacaaatatcttattcccaatgctacacaaccagaaagtaaggtgttctacttgaaaatgaaaggagattattttaggtatctttctgaagtggcatctggagaca

SEQ ID NO: 537676 - DNA, 120 bp, Artificial Sequence
  ENSG00000166913_5 (sequence is synthesized)
acaaacaaaccactgtgtcgaactcccagcaggcttaccaggaagcatttgaaattagtaagaaagaaatgcagcctacacacccaattcgtcttggtctggcactaaatttctcagtct

SEQ ID NO: 537677 - DNA, 120 bp, Artificial Sequence
  ENSG00000166913_6 (sequence is synthesized)
tttactatgagattctaaactctcctgaaaaggcctgtagcctggcaaaaacggcatttgatgaagcaattgctgaattggatacgctgaatgaagagtcttataaagacagcactctga

SEQ ID NO: 537678 - DNA, 120 bp, Artificial Sequence
  ENSG00000166913_7 (sequence is synthesized)
tcatgcagttacttagggacaatctcactctgtggacatcggaaaaccagggagacgaaggagacgctggggagggagagaactaatgtttctcgtgctttgtgatctgttcagtgtcac

SEQ ID NO: 537679 - DNA, 120 bp, Artificial Sequence
  ENSG00000166913_8 (sequence is synthesized)
aaaaaaaaaaaaaaaaaaagagaatcgtacgtcgactttcgatttttcacagcctcagcctaggaaaaatggttcatgggataaacagctggtatttgtatctaaaactcagattggtca

SEQ ID NO: 537680 - DNA, 120 bp, Artificial Sequence
  ENSG00000166913_9 (sequence is synthesized)
acagctggtatttgtatctaaaactcagattggtcacataaatgccacggcattccgaagttttgattttgattaacattgacaggattactgtgtgtttaattttttaaaaactgaaca

SEQ ID NO: 537681 - DNA, 120 bp, Artificial Sequence
  ENSG00000166913_10 (sequence is synthesized)
ctgtgattatggggttttgtaatttagcagaactcttactggtagaaaaaatagacctgaattatgtgtaactttttggaaggtttaatctgatatcaaaataatcattgaaatacaatt

SEQ ID NO: 537682 - DNA, 120 bp, Artificial Sequence
  ENSG00000166913_11 (sequence is synthesized)
ccattgtaaagttgtacagaaagttatagagattatattgtgatgctggaacttggagtgagacacacatcatttggcatttgagttgaatggtaattcacagtaatgctgccgttgttc

SEQ ID NO: 537683 - DNA, 120 bp, Artificial Sequence
  ENSG00000166913_12 (sequence is synthesized)
ctgtttgggctgttgccacttaaaagttcatgaccacaaatgtccacagtgtcttcctctgaggaaactcgaatcctgaaatggaaattctttgtggcagataactggcttatgacacct

SEQ ID NO: 537684 - DNA, 120 bp, Artificial Sequence
  ENSG00000166913_13 (sequence is synthesized)
tgaaaagttcaagtgctcatataacacaccacactgaaccccctttcctacagcaatatgttcactatgttaccaatttgcaacttgtgcttcaatagtggaatctactttcattgttaa

SEQ ID NO: 537685 - DNA, 120 bp, Artificial Sequence
  ENSG00000166913_14 (sequence is synthesized)
cactgagctaaagaaaaaaagccgtgtgttttatgaatgaccttatctgtttcctggataatacctttaagaataatgtcctgagtcaggcgtggtggtgcgtgcatctagtcccaacta

SEQ ID NO: 537686 - DNA, 120 bp, Artificial Sequence
  ENSG00000166913_15 (sequence is synthesized)
aggaggatcgcttgagcccaggagtttaaagctgcagtgccctgtggttgcacctgtgaataactgcactccagcctgggcaacatagcgagacctcatctccaaaaaagaaaacaaaaa

SEQ ID NO: 537687 - DNA, 120 bp, Artificial Sequence
  ENSG00000166913_16 (sequence is synthesized)
aaaaagaaaacaaaaaacaaaaaaaggaatgatgttctgtagagatggcctttcacttgaggagtactcagttttcaggttcttcctagctcggggcttttaaattttgaaatctaaaca

SEQ ID NO: 537688 - DNA, 120 bp, Artificial Sequence
  ENSG00000166913_17 (sequence is synthesized)
ttctttcccaccatcctttttgactgttgaccttggttttctcttctaagtttctgtccctctgcttccttactttttttcctttttgaattctatctttatctgtcttttgttcacttt

SEQ ID NO: 537689 - DNA, 120 bp, Artificial Sequence
  ENSG00000166913_18 (sequence is synthesized)
ttaatgctatatatgggcaggggtgagagacattactgagcaccttggtgagcaagcctggctttaaagattggagaagagcttctggcaccagaaccctgtcttcctccagttctcaac

SEQ ID NO: 537690 - DNA, 120 bp, Artificial Sequence
  ENSG00000166913_19 (sequence is synthesized)
acggtgttgctcttcagtcataccggaatctgaatcaaaaaagtatttttaaatatccatgatttctccctgtattgaggctagccctgatcatgctttttgtgcctgtcaccaggtctc

SEQ ID NO: 537691 - DNA, 120 bp, Artificial Sequence
  ENSG00000166913_20 (sequence is synthesized)
ccaagtgcactcatccaggtcagtgctcagatgtgtttaaggagaccctatattcagggaagttgcgtgaacactgcagtggggagaattgagaatagtcaggcctatcagtctcacaga

SEQ ID NO: 537692 - DNA, 120 bp, Artificial Sequence
  ENSG00000166913_21 (sequence is synthesized)
atcacccctctacctttgatattccacttagctgtagagtccatctgtttgtccatctgctgaaatgagaaaagaaaaatttatgcactgatttaaaacaaaccaaaaaaaaagaaaaaa

SEQ ID NO: 537693 - DNA, 120 bp, Artificial Sequence
  ENSG00000166913_22 (sequence is synthesized)
acaaaaaaaaaaatccctcctttctagctgaacaaaaatgtgcagttaatacttggcgcttgaaaatgcagtagtgaatgtggaaccaagcctgtctgtatatctggtagctcttttctt

SEQ ID NO: 537694 - DNA, 120 bp, Artificial Sequence
  ENSG00000166913_23 (sequence is synthesized)
gctttgttttttcttaccagtattctgcctaacgtttgcttctgtgatggttatattgcctagcaagcacacccgtggttgtgaaaatagtatagcaaaaaagaaaaatccccggttatt

SEQ ID NO: 537695 - DNA, 120 bp, Artificial Sequence
  ENSG00000166913_24 (sequence is synthesized)
gatgtactagatttgtgtatgtcttttaaacagttctagtttcaccttacacagaataatcaggaaaagtgtaaaaattcaaaagtgaaataaaaattttatcagttagttgcctgtgaa

SEQ ID NO: 537696 - DNA, 120 bp, Artificial Sequence
  ENSG00000166913_25 (sequence is synthesized)
tcatctcgctcggagcttcgctcggaagggtctttgttccctgcagccctcccacggcagagtctccagagatttgggccgctacaaaaagtgcattttgcccattcggctgtggataga

SEQ ID NO: 537697 - DNA, 120 bp, Artificial Sequence
  ENSG00000166913_26 (sequence is synthesized)
ggcatctgctgttatgacctgggctaaacaacatttagtagcttggatgaaaaattggtgtttttttaatcttccaaaaaattatttagaagcagtagtgtatatcttgaatctcaaaca

SEQ ID NO: 537698 - DNA, 120 bp, Artificial Sequence
  ENSG00000166913_27 (sequence is synthesized)
gaagagcttggtacttactgcctcttaaccagtttttcaggatgccacattctaaaacaactcttcgaaaatattgctctgtatacgaagcttggactccttcagaactacttttgttga

SEQ ID NO: 537699 - DNA, 120 bp, Artificial Sequence
  ENSG00000166913_28 (sequence is synthesized)
gtctttgttccctgcagccctcccacgtgcttgttatattgaagccattttagaattggagcgctatagatcagggaggcagcctctataaaaccaggctgagcaaattcccatgatgct

SEQ ID NO: 537700 - DNA, 120 bp, Artificial Sequence
  ENSG00000166913_29 (sequence is synthesized)
tgcagccctcccacgatagcatcaggtcctgattttgcttgccctgtgtgggagatggaatttggcaagatgatgctatgaacataaaatcagcctcgggaaccaaaagagaaaggcaga

SEQ ID NO: 537701 - DNA, 120 bp, Artificial Sequence
  ENSG00000166913_30 (sequence is synthesized)
tctcgctcggagcttcgctcggaagggtctttgttccctgcagccctcccacggtgagtgcggcgcggggtccgaccggggcccccgggggcccaaactcgaagcccctctctggctgct

SEQ ID NO: 537702 - DNA, 120 bp, Artificial Sequence
  ENSG00000166913_31 (sequence is synthesized)
agtgggtgggccccgtggggtagcggcgcgctgcctctttcgctccgcgcggccgccggcggcgaggccagacctcgcagcggcccctccctgtttccggggccgggccctttacctctt

SEQ ID NO: 537703 - DNA, 120 bp, Artificial Sequence
  ENSG00000166913_32 (sequence is synthesized)
gggccctttacctcttggagaggctcgggccgcctgaggtcctgccggccgggcggggtgcaactccgtactgtgccgtaagggacagcggagccggggatcccggaccctccctcacta

SEQ ID NO: 537704 - DNA, 120 bp, Artificial Sequence
  ENSG00000166913_33 (sequence is synthesized)
tctgcttcgggccccacgcgacccctccctgcgtcttggtcggcaagaacgtccccttcagccctgtcacctctgctccgtgctttctggtttccagaaattaaaatttaatcaaacgcg

SEQ ID NO: 537705 - DNA, 120 bp, Artificial Sequence
  ENSG00000166913_34 (sequence is synthesized)
gatgagttttctagccccagtccccgtgtttggctcctcctggatgagtaaggggtttaaccttgggagacagcagtgggggaaccccctcccattttgcagtaaaaccatttcatcatc

SEQ ID NO: 537706 - DNA, 120 bp, Artificial Sequence
  ENSG00000166913_35 (sequence is synthesized)
cttcactggttatggagcctggcaggacccaagattccctaggaagggaattgggtttgaatcaagaaaatctgtttgttggagccggttactgagtcaggccggatccccaggaaaaaa

SEQ ID NO: 537707 - DNA, 120 bp, Artificial Sequence
  ENSG00000166913_36 (sequence is synthesized)
tatcagggggtgagaatcggagtattttctcacagtatttaccgtcatttaatgccagattcttttgtgtctttaccccaaattcccccatattgtgtgttagcacgtttttcggtctga

SEQ ID NO: 537708 - DNA, 120 bp, Artificial Sequence
  ENSG00000166913_37 (sequence is synthesized)
aatttgcccggtggcttcctggtcggggggtggggagcggagggaagaagaggtgggaaggtgagtgcatctttgccgcaaatggagaactcccatataatggggttttcagaggtggca

SEQ ID NO: 537709 - DNA, 120 bp, Artificial Sequence
  ENSG00000166913_38 (sequence is synthesized)
gccttggtaagcaatttgccaacctttctgtaaaatacatgtttcttgtcgttgccttcattgcatttctctttggtaaggctagatagcatcaggtcctgattttgcttgccctgtgtg

SEQ ID NO: 537710 - DNA, 120 bp, Artificial Sequence
  ENSG00000166913_39 (sequence is synthesized)
ggagatggaatttggcaagatgatgctatgaacataaaatcagcctcgggaaccaaaagagaaaggtgaagcacttataagaatatgaaaattgtctgcatttctcattctgtcagttca

SEQ ID NO: 537711 - DNA, 120 bp, Artificial Sequence
  ENSG00000166913_40 (sequence is synthesized)
tgtgaagccagacacagatgcagtttgtagacctggacactgcagcttttgcattttcatttggaaatgtgtataagtatttgttcttggtgaatttcttcttgactgcttccagtgtac

SEQ ID NO: 537712 - DNA, 120 bp, Artificial Sequence
  ENSG00000166913_41 (sequence is synthesized)
cctatttcttacttagggatatctcatttgtttgagccctcatttttcttggatccctgtccttggcaacacacggtgtgtgagtgtaaaacctgtcaatcttattggacctaagttaga

SEQ ID NO: 537713 - DNA, 120 bp, Artificial Sequence
  ENSG00000166913_42 (sequence is synthesized)
aatttaagtgtggctttcaaaatggaaggctaataatcctgtagcaactgcagaattattttcctggcctgtccttccaatgagataagaaaccattcacctatcttgcagatgaagtct

SEQ ID NO: 537714 - DNA, 120 bp, Artificial Sequence
  ENSG00000166913_43 (sequence is synthesized)
ttatgagaaatgaggtgatttggcctagactatacacctagtttttttcaaactgaatatcctcattcatcagtagcaaatatttatggattgccagcccctggagtatgacgcctaccc

SEQ ID NO: 537715 - DNA, 120 bp, Artificial Sequence
  ENSG00000166913_44 (sequence is synthesized)
actctcaaaacagcttatgagagagaggtgtctgaatatactggaaagctgccaggtatttacaactaatttttaagcatatgatataatttgtgtcacctattgcctgatcagaggttg

SEQ ID NO: 537716 - DNA, 120 bp, Artificial Sequence
  ENSG00000166913_45 (sequence is synthesized)
tacatcacttctgagatactttcctctcctatcaaaaagacctgtgaaaaacagtgacattttttcagcctccctccatcttttaaaattgaggccagatagacaggattttaatagata

SEQ ID NO: 537717 - DNA, 120 bp, Artificial Sequence
  ENSG00000166913_46 (sequence is synthesized)
cagctacagataggctattgtgtatattagtcagagtagtgatgtcatcgccagtaggggagggagatgaaaaagctgagctgcctttcagcctctccccagtcatgccttcacactgta

SEQ ID NO: 537718 - DNA, 120 bp, Artificial Sequence
  ENSG00000166913_47 (sequence is synthesized)
aagtcctgctttggtctgaaagttaggcacatccatcaagttcggcatgcattccagagccaaattcaaagtgttttgggcattctcctctcctgtattttacataaacccttagtcaga

SEQ ID NO: 537719 - DNA, 120 bp, Artificial Sequence
  ENSG00000166913_48 (sequence is synthesized)
tttctttttcttccaggtgaaatcaggtaaaaatgaactcagcgagggctgctttgaagggaaaaggaattcacacttggggacctaccaccttccctgctggctgcctttctaaattac

SEQ ID NO: 537720 - DNA, 120 bp, Artificial Sequence
  ENSG00000166913_49 (sequence is synthesized)
tgcccatgactcctttcttttgaaaaccagtataaagcttgtcagccatcaggcagcaccccttatccctaacctattaggagttacacactgtctgtctacaaagaatattaaaacgac

SEQ ID NO: 537721 - DNA, 120 bp, Artificial Sequence
  ENSG00000166913_50 (sequence is synthesized)
tgccgccccctgcatcttctcactttggttgattaaatccccttataactaagctttgcattgagcttctctttttattagactcatggcgtaagagtgtcatgactaaatttgttgcct

SEQ ID NO: 537722 - DNA, 120 bp, Artificial Sequence
  ENSG00000166913_51 (sequence is synthesized)
gttggtaatttgggggtttgttaatggtgcactaattcctgaatgttaggtacatctggtattcagatgaagtatgtcatgcattccaagggcaagaaagttccataattcatgaaatgt

SEQ ID NO: 537723 - DNA, 120 bp, Artificial Sequence
  ENSG00000166913_52 (sequence is synthesized)
ctttatgtatgtcaacttatttatcattataactaccctagaagatggctataccctagaagatgacccttcgtatagctgaggaaagtgaggctcaaagtgattaggtaatttgtccag

SEQ ID NO: 537724 - DNA, 120 bp, Artificial Sequence
  ENSG00000166913_53 (sequence is synthesized)
agtcatacagataataagtggcagaagagggatttctacccaggtcagattgactttaaacttagttcttggcagttttgctctattatcacctttttcctcctaaggaaagatattttt

SEQ ID NO: 537725 - DNA, 120 bp, Artificial Sequence
  ENSG00000166913_54 (sequence is synthesized)
tcccctttaattatagaagtaataccagtttgtgggtttaaaaatggtggggggaacaagtcagaagaatataaataagaaagtaaaaatcacttctaatcttaccacccagagaaccat

SEQ ID NO: 537726 - DNA, 120 bp, Artificial Sequence
  ENSG00000166913_55 (sequence is synthesized)
tattaacatactccttccaggcttttcccttatatatttgtgagcatgtacacaaatgtatcttaatgttaaaataggattcttgtggtatttataatctgctttttttccactcagatt

SEQ ID NO: 537727 - DNA, 120 bp, Artificial Sequence
  ENSG00000166913_56 (sequence is synthesized)
tcttttgagagcctttccattatctgtttagctctgcatcattttaaaggcctacaaaacatttcattatatggctatactttaattatcccctatggatggtcaaagtgatttttaaca

SEQ ID NO: 537728 - DNA, 120 bp, Artificial Sequence
  ENSG00000166913_57 (sequence is synthesized)
gaccctttgtgatatctaaccatagcaaaacagtgcttgtgttattaacttcattttattcctgaacatactcattgtcttggactttttttgaaagattttctgggggtgggagtgtat

SEQ ID NO: 537729 - DNA, 120 bp, Artificial Sequence
  ENSG00000166913_58 (sequence is synthesized)
cttttatgagataaatacagatctgttacttttttaattcattctcaataccttctgctgactttgtttgattactgttttttgcgggtggttgtagaaagttccaggtgaatgtagtta

SEQ ID NO: 537730 - DNA, 120 bp, Artificial Sequence
  ENSG00000166913_59 (sequence is synthesized)
gttgtttcttaccaagctttgggccttggttatacattgtcattctcatgccaagatttgaggttatagttgtataaaagaaatacacagcacattcttgttgtgtgttggattaccttc

SEQ ID NO: 537731 - DNA, 120 bp, Artificial Sequence
  ENSG00000166913_60 (sequence is synthesized)
catattcttcctttggccttctctacatattttttatagtccctcaacatgcacacaactttttaaaaacatttttattcgggaaaggtgccttaaagttccgtcacttaaatcagattt

SEQ ID NO: 537732 - DNA, 120 bp, Artificial Sequence
  ENSG00000166913_61 (sequence is synthesized)
agtgatgtgagtttccagacattttgagttttagtttaaataaataaataattttaaatagaagattgctagaaaagtctttggtaattaaaaaatcacacgcgtttgcccagaatgact

SEQ ID NO: 537733 - DNA, 120 bp, Artificial Sequence
  ENSG00000166913_62 (sequence is synthesized)
gtgctagggttagcagtaatactgcttagttattaggtacagcaaagttcttaccttggagtttctgtcattgttggttggtgctttgtaaatatgccttatacttctgctggaaacagc

SEQ ID NO: 537734 - DNA, 120 bp, Artificial Sequence
  ENSG00000166913_63 (sequence is synthesized)
taacagacagggtaataatagcctaggttcccccaaagtactgtacaagaagataagttatattcacctagcgggaaaaaaagtgggctaaactagctccagagaacttgtgaattcttt

SEQ ID NO: 537735 - DNA, 120 bp, Artificial Sequence
  ENSG00000166920_0 (sequence is synthesized)
gttcggttccgggcgttaccatcgtccgtgcgcaccgcccggcgtccaggtgagtctcccatctgcagagacgcggacgcgccggcccgcagttggcctgcggagcgcggtggacggttt

SEQ ID NO: 537736 - DNA, 120 bp, Artificial Sequence
  ENSG00000166920_1 (sequence is synthesized)
ggcgcccaccaggcgatcaatactttggatttttaatttctagatttggcaattcttcgctgaagtcatcatgagctttttccaactcctgatgaaaaggaaggaactcattcccttggt

SEQ ID NO: 537737 - DNA, 120 bp, Artificial Sequence
  ENSG00000166920_2 (sequence is synthesized)
ggtgttcatgactgtggcggcgggtggagcctcatctttcgctgtgtattctctttggaaaaccgatgtgatccttgatcgaaaaaaaaatccagaaccttgggaaactgtggaccctac

SEQ ID NO: 537738 - DNA, 120 bp, Artificial Sequence
  ENSG00000166920_3 (sequence is synthesized)
ggaaacccattgaagagttgcaaaatgtccaaagggtgaccaaatgacgagccctcgcctctttcttctgaagagtactctataaatctagtggaaacatttctgcacaaactagattct

SEQ ID NO: 537739 - DNA, 120 bp, Artificial Sequence
  ENSG00000166920_4 (sequence is synthesized)
ggacaccagtgtgcggaaatgcttctgctacatttttagggtttgtctacattttttgggctctggataaggaattaaaggagtgcagcaataactgcactgtctaaaagtttgtgctta

SEQ ID NO: 537740 - DNA, 120 bp, Artificial Sequence
  ENSG00000166920_5 (sequence is synthesized)
ttttcttgtaaatttgaatattgcatattgaaatttttgtttatgatctatgaatgtttttcttaaaatttacaaagctttgtaaattagattttctttaataaaatgccatttgtgcaa

SEQ ID NO: 537741 - DNA, 120 bp, Artificial Sequence
  ENSG00000166920_6 (sequence is synthesized)
gatttctcaaagattaggtatatatttaaatggaagagaaaatatttttatgggagaaaaatacatttgaaccatgaaatttcatcttttaaataacatccagtacagatttctgtgtaa

SEQ ID NO: 537742 - DNA, 120 bp, Artificial Sequence
  ENSG00000166920_7 (sequence is synthesized)
gcgtgaccagagcgcgctggcccggcccacccggggcggttgtggtcgctatatataaggtggggaggccgccggcccgttcggttccgggcgttaccatcgtccgtgcgcaccgcccgg

SEQ ID NO: 537743 - DNA, 120 bp, Artificial Sequence
  ENSG00000166920_8 (sequence is synthesized)
tgtaagtaggtctcaatttataaaaacgtttttggcagtgtttggatgacttttagtttatgaaatgtataagtttcctatttttttcccatggatgagaatgccaaattgtgaactggg

SEQ ID NO: 537744 - DNA, 120 bp, Artificial Sequence
  ENSG00000166920_9 (sequence is synthesized)
agtcagggttaaaaagcatcttttatcagaaaactcttatgatattgtctaccaatgggtcagaaaatgaaaattagaaaaaaaaaagaaaaaatttaaaaaaacccatgatattaatca

SEQ ID NO: 537745 - DNA, 120 bp, Artificial Sequence
  ENSG00000166920_10 (sequence is synthesized)
cgacaactccaggccacaggaaggtcacaaatggtcagaaaaggaatgaatttgaaggaggaagaaccagccctgcccacgttgtctggggcccctcccaaggggacaggaaagctccac

SEQ ID NO: 537746 - DNA, 120 bp, Artificial Sequence
  ENSG00000166922_0 (sequence is synthesized)
taagatgcggaggagggtgacgcactagctctccagttcgcccgttcctggcctgacccccaccaaggcccataccgcagtaggctcctcgggctgcccctcggttgacaatggtctcca

SEQ ID NO: 537747 - DNA, 120 bp, Artificial Sequence
  ENSG00000166922_1 (sequence is synthesized)
ggatggtctctaccatgctatctggcctactgttttggctggcatctggatggactccagcatttgcttacagcccccggacccctgaccgggtctcagaagcagatatccagaggctgc

SEQ ID NO: 537748 - DNA, 120 bp, Artificial Sequence
  ENSG00000166922_2 (sequence is synthesized)
ttcatggtgttatggagcaattgggcattgccaggccccgagtggaatatccagctcaccaggccatgaatcttgtgggcccccagagcattgaaggtggagctcatgaaggacttcagc

SEQ ID NO: 537749 - DNA, 120 bp, Artificial Sequence
  ENSG00000166922_3 (sequence is synthesized)
atttgggtccttttggcaacatccccaacatcgtggcagagttgactggagacaacattcctaaggactttagtgaggatcaggggtacccagaccctccaaatccctgtcctgttggaa

SEQ ID NO: 537750 - DNA, 120 bp, Artificial Sequence
  ENSG00000166922_4 (sequence is synthesized)
aaacagcagatgatggatgtctagaaaacacccctgacactgcagagttcagtcgagagttccagttgcaccagcatctctttgatccggaacatgactatccaggcttgggcaagtgga

SEQ ID NO: 537751 - DNA, 120 bp, Artificial Sequence
  ENSG00000166922_5 (sequence is synthesized)
agacgaaagcggaggagtgtcaatccatatctacaaggacagagactggataatgttgttgcaaagaagtctgtcccccatttttcagatgaggataaggatccagagtaaagagaagat

SEQ ID NO: 537752 - DNA, 120 bp, Artificial Sequence
  ENSG00000166922_6 (sequence is synthesized)
gctagacgaaaacccacattacctgttaggcctcagcatggcttatgtgcacgtgtaaatggagtccctgtgaatgacagcatgtttcttacatagataattatggatacaaagcagctg

SEQ ID NO: 537753 - DNA, 120 bp, Artificial Sequence
  ENSG00000166922_7 (sequence is synthesized)
tatgtagatagtgtattgtcttcacaccgatgattctgctttttgctaaattagaataagagcttttttgtttcttgggtttttaaaatgtgaatctgcaatgatcataaaaattaaaat

SEQ ID NO: 537754 - DNA, 120 bp, Artificial Sequence
  ENSG00000166922_8 (sequence is synthesized)
gtgaatgtcaacaataaaaagcaagactatgaaaggctcagatttcttgcagtttaaaatggtgtctgaggttgtactattttggccaagtctgtagaaagctgtcatttgattttgatt

SEQ ID NO: 537755 - DNA, 120 bp, Artificial Sequence
  ENSG00000166922_9 (sequence is synthesized)
atgtagttcatccagcccttgggcattgttatacaccagtaaagaaggctgtactcaagaggaggagctgacacatttcacttggctgcgtcttaataaacatgaatgcaagcattggca

SEQ ID NO: 537756 - DNA, 120 bp, Artificial Sequence
  ENSG00000166922_10 (sequence is synthesized)
gaaggtggctgctagtgttctaagttactactgatgtgaacagattctgacctttggctgcctagttgtttttgataaattaactcttagaataatgatgaatgtcttggccgttcctca

SEQ ID NO: 537757 - DNA, 120 bp, Artificial Sequence
  ENSG00000166922_11 (sequence is synthesized)
gctgaaaccctcgcttgttgggaagtcacagaatcctcccttgtgtagtcctgagaaacactggtccatgtgacaagggccacacccagaaagtctgtccttggtttctgcgatggcttc

SEQ ID NO: 537758 - DNA, 120 bp, Artificial Sequence
  ENSG00000166922_12 (sequence is synthesized)
cccaggctttagcagatgatttttagtggaacgcgcagtctgtagcaattctagcaactccattccgttcaggaaatgtgtattgcttcccccatcagtgtgggacatatctggggggac

SEQ ID NO: 537759 - DNA, 120 bp, Artificial Sequence
  ENSG00000166922_13 (sequence is synthesized)
atgagggtctgtctgccctcccagggtctgtaggccagtggggaaaaactgatcacacatctgcatcaattctataaaaacacaggacagaaacagggaagtgctgaactgcatgctcca

SEQ ID NO: 537760 - DNA, 120 bp, Artificial Sequence
  ENSG00000166922_14 (sequence is synthesized)
ggaaataactttgaaggaattcgggagcaaaagatgagatgaacaaacttaatttctcctatgtatctttttttcttggcctagccagactgatgtaaaatctactagatctgtaatatt

SEQ ID NO: 537761 - DNA, 120 bp, Artificial Sequence
  ENSG00000166922_15 (sequence is synthesized)
gtggcaggatcctccttcatgagaagatggaagcatggtgttgtttttgcctggttttgctcaaatgtcatgcacaccaggcaccttttgattgtaaaccagcctttcctgtattggtct

SEQ ID NO: 537762 - DNA, 120 bp, Artificial Sequence
  ENSG00000166923_0 (sequence is synthesized)
gccgccgcgtcactctcggtcccgctgaccccgcgccgagccccggcggctctggccgcggccgcactcagcgccacgcgtcgaaagcgcaggccccgaggacccgccgcactgacagta

SEQ ID NO: 537763 - DNA, 120 bp, Artificial Sequence
  ENSG00000166923_1 (sequence is synthesized)
tcgaaagcgcaggccccgaggacccgccgcactgacagtatgagccgcacagcctacacggtgggagccctgcttctcctcttggggaccctgctgccggctgctgaagggaaaaagaaa

SEQ ID NO: 537764 - DNA, 120 bp, Artificial Sequence
  ENSG00000166923_2 (sequence is synthesized)
gggtcccaaggtgccatccccccgccagacaaggcccagcacaatgactcagagcagactcagtcgccccagcagcctggctccaggaaccgggggcggggccaagggcggggcactgcc

SEQ ID NO: 537765 - DNA, 120 bp, Artificial Sequence
  ENSG00000166923_3 (sequence is synthesized)
atgcccggggaggaggtgctggagtccagccaagaggccctgcatgtgacggagcgcaaatacctgaagcgagactggtgcaaaacccagccgcttaagcagaccatccacgaggaaggc

SEQ ID NO: 537766 - DNA, 120 bp, Artificial Sequence
  ENSG00000166923_4 (sequence is synthesized)
tgcaacagtcgcaccatcatcaaccgcttctgttacggccagtgcaactctttctacatccccaggcacatccggaaggaggaaggttcctttcagtcctgctccttctgcaagcccaag

SEQ ID NO: 537767 - DNA, 120 bp, Artificial Sequence
  ENSG00000166923_5 (sequence is synthesized)
aaattcactaccatgatggtcacactcaactgccctgaactacagccacctaccaagaagaagagagtcacacgtgtgaagcagtgtcgttgcatatccatcgatttggattaagccaaa

SEQ ID NO: 537768 - DNA, 120 bp, Artificial Sequence
  ENSG00000166923_6 (sequence is synthesized)
tccaggtgcacccagcatgtcctaggaatgcagccccaggaagtcccagacctaaaacaaccagattcttacttggcttaaacctagaggccagaagaacccccagctgcctcctggcag

SEQ ID NO: 537769 - DNA, 120 bp, Artificial Sequence
  ENSG00000166923_7 (sequence is synthesized)
gagcctgcttgtgcgtagttcgtgtgcatgagtgtggatgggtgcctgtgggtgtttttagacaccagagaaaacacagtctctgctagagagcactccctattttgtaaacatatctgc

SEQ ID NO: 537770 - DNA, 120 bp, Artificial Sequence
  ENSG00000166923_8 (sequence is synthesized)
tttaatggggatgtaccagaaacccacctcaccccggctcacatctaaaggggcggggccgtggtctggttctgactttgtgtttttgtgccctcctggggaccagaatctcctttcgga

SEQ ID NO: 537771 - DNA, 120 bp, Artificial Sequence
  ENSG00000166923_9 (sequence is synthesized)
atgaatgttcatggaagaggctcctctgagggcaagagacctgttttagtgctgcattcgacatggaaaagtccttttaacctgtgcttgcatcctcctttcctcctcctcctcacaatc

SEQ ID NO: 537772 - DNA, 120 bp, Artificial Sequence
  ENSG00000166923_10 (sequence is synthesized)
catctcttcttaagttgatagtgactatgtcagtctaatctcttgtttgccaaggttcctaaattaattcacttaaccatgatgcaaatgtttttcattttgtgaagaccctccagactc

SEQ ID NO: 537773 - DNA, 120 bp, Artificial Sequence
  ENSG00000166923_11 (sequence is synthesized)
tgggagaggctggtgtgggcaaggacaagcaggatagtggagtgagaaagggagggtggagggtgaggccaaatcaggtccagcaaaagtcagtagggacattgcagaagcttgaaaggc

SEQ ID NO: 537774 - DNA, 120 bp, Artificial Sequence
  ENSG00000166923_12 (sequence is synthesized)
caataccagaacacaggctgatgcttctgagaaagtcttttcctagtatttaacagaacccaagtgaacagaggagaaatgagattgccagaaagtgattaactttggccgttgcaatct

SEQ ID NO: 537775 - DNA, 120 bp, Artificial Sequence
  ENSG00000166923_13 (sequence is synthesized)
gctcaaacctaacaccaaactgaaaacataaatactgaccactcctatgttcggacccaagcaagttagctaaaccaaaccaactcctctgctttgtccctcaggtggaaaagagaggta

SEQ ID NO: 537776 - DNA, 120 bp, Artificial Sequence
  ENSG00000166923_14 (sequence is synthesized)
gtttagaactctctgcataggggtgggaattaatcaaaaacctcagaggctgaaattcctaatacctttcctttatcgtggttatagtcagctcatttccattccactatttcccataat

SEQ ID NO: 537777 - DNA, 120 bp, Artificial Sequence
  ENSG00000166923_15 (sequence is synthesized)
gcttctgagagccactaacttgattgataaagatcctgcctctgctgagtgtacctgacagtagtctaagatgagagagtttagggactactctgttttagcaagagatattttgggggt

SEQ ID NO: 537778 - DNA, 120 bp, Artificial Sequence
  ENSG00000166923_16 (sequence is synthesized)
ctttttgttttaactattgtcaggagattgggctaaagagaagacgacgagagtaaggaaataaagggaattgcctctggctagagagtagttaggtgttaatacctggtagagatgtaa

SEQ ID NO: 537779 - DNA, 120 bp, Artificial Sequence
  ENSG00000166923_17 (sequence is synthesized)
gggatatgacctccctttctttatgtgctcactgaggatctgaggggaccctgttaggagagcatagcatcatgatgtattagctgttcatctgctactggttggatggacataactatt

SEQ ID NO: 537780 - DNA, 120 bp, Artificial Sequence
  ENSG00000166923_18 (sequence is synthesized)
gtaactattcagtatttactggtaggcactgtcctctgattaaacttggcctactggcaatggctacttaggattgatctaagggccaaagtgcagggtgggtgaactttattgtacttt

SEQ ID NO: 537781 - DNA, 120 bp, Artificial Sequence
  ENSG00000166923_19 (sequence is synthesized)
ggatttggttaacctgttttcttcaagcctgaggttttatatacaaactccctgaatactctttttgccttgtatcttctcagcctcctagccaagtcctatgtaatatggaaaacaaac

SEQ ID NO: 537782 - DNA, 120 bp, Artificial Sequence
  ENSG00000166923_20 (sequence is synthesized)
actgcagacttgagattcagttgccgatcaaggctctggcattcagagaacccttgcaactcgagaagctgtttttatttcgtttttgttttgatccagtgctctcccatctaacaacta

SEQ ID NO: 537783 - DNA, 120 bp, Artificial Sequence
  ENSG00000166923_21 (sequence is synthesized)
aacaggagccatttcaaggcgggagatattttaaacacccaaaatgttgggtctgattttcaaacttttaaactcactactgatgattctcacgctaggcgaatttgtccaaacacatag

SEQ ID NO: 537784 - DNA, 120 bp, Artificial Sequence
  ENSG00000166923_22 (sequence is synthesized)
tgtgtgtgttttgtatacactgtatgaccccaccccaaatctttgtattgtccacattctccaacaataaagcacagagtggatttaattaagcacacaaatgctaaggcagaattttga

SEQ ID NO: 537785 - DNA, 120 bp, Artificial Sequence
  ENSG00000166923_23 (sequence is synthesized)
gggtgggagagaagaaaagggaaagaagctgaaaatgtaaaaccacaccagggaggaaaaatgacattcagaaccagcaaacactgaatttctcttgttgttttaactctgccacaagaa

SEQ ID NO: 537786 - DNA, 120 bp, Artificial Sequence
  ENSG00000166923_24 (sequence is synthesized)
tgcaatttcgttaacggagatgacttaagttggcagcagtaatcttcttttaggagcttgtaccacagtcttgcacataagtgcagatttggctcaagtaaagagaatttcctcaacact

SEQ ID NO: 537787 - DNA, 120 bp, Artificial Sequence
  ENSG00000166923_25 (sequence is synthesized)
aacttcactgggataatcagcagcgtaactaccctaaaagcatatcactagccaaagagggaaatatctgttcttcttactgtgcctatattaagactagtacaaatgtggtgtgtcttc

SEQ ID NO: 537788 - DNA, 120 bp, Artificial Sequence
  ENSG00000166923_26 (sequence is synthesized)
caactttcattgaaaatgccatatctataccatattttattcgagtcactgatgatgtaatgatatattttttcattattatagtagaatatttttatggcaagatatttgtggtcttga

SEQ ID NO: 537789 - DNA, 120 bp, Artificial Sequence
  ENSG00000166923_27 (sequence is synthesized)
tcatacctattaaaataatgccaaacaccaaatatgaattttatgatgtacactttgtgcttggcattaaaagaaaaaaacacacatcctggaagtctgtaagttgttttttgttactgt

SEQ ID NO: 537790 - DNA, 120 bp, Artificial Sequence
  ENSG00000166923_28 (sequence is synthesized)
aggtcttcaaagttaagagtgtaagtgaaaaatctggaggagaggataatttccactgtgtggaatgtgaatagttaaatgaaaagttatggttatttaatgtaattattacttcaaatc

SEQ ID NO: 537791 - DNA, 120 bp, Artificial Sequence
  ENSG00000166923_29 (sequence is synthesized)
ctttggtcactgtgatttcaagcatgttttctttttctcctttatatgactttctctgagttgggcaaagaagaagctgacacaccgtatgttgttagagtcttttatctggtcagggga

SEQ ID NO: 537792 - DNA, 120 bp, Artificial Sequence
  ENSG00000166923_30 (sequence is synthesized)
aacaaaatcttgacccagctgaacatgtcttcctgagtcagtgcctgaatctttattttttaaattgaatgttccttaaaggttaacatttctaaagcaatattaagaaagactttaaat

SEQ ID NO: 537793 - DNA, 120 bp, Artificial Sequence
  ENSG00000166923_31 (sequence is synthesized)
gttattttggaagacttacgatgcatgtatacaaacgaatagcagataatgatgactagttcacacataaagtccttttaaggagaaaatctaaaatgaaaagtggataaacagaacatt

SEQ ID NO: 537794 - DNA, 120 bp, Artificial Sequence
  ENSG00000166923_32 (sequence is synthesized)
tataagtgatcagttaatgcctaagagtgaaagtagttctattgacattcctcaagatatttaatatcaactgcattatgtattatgtctgcttaaatcatttaaaaacggcaaagaatt

SEQ ID NO: 537795 - DNA, 120 bp, Artificial Sequence
  ENSG00000166923_33 (sequence is synthesized)
atatagactatgaggtaccttgctgtgtaggaggatgaaaggggagttgatagtctcataaaactaatttggcttcaagtttcatgaatctgtaactagaatttaattttcaccccaata

SEQ ID NO: 537796 - DNA, 120 bp, Artificial Sequence
  ENSG00000166923_34 (sequence is synthesized)
atgttctatatagcctttgctaaagagcaactaataaattaaacctattctttctgtgtgtgtgagcgtgcgtttgtgtttggtagtgttcctagggcagaggtggagcagggatgcact

SEQ ID NO: 537797 - DNA, 120 bp, Artificial Sequence
  ENSG00000166923_35 (sequence is synthesized)
tatcatgggaagggaggtagaaaagagaattggatagcctgtgatctttggtggaatttattccttttgcctaggcctttcagaccctgcttgatttccgtaggacacttcaggttgtgg

SEQ ID NO: 537798 - DNA, 120 bp, Artificial Sequence
  ENSG00000166923_36 (sequence is synthesized)
caagggagagctggtctgcaatcggaagtaccagcctcttccctagagcacaactagaaagaagaactatagagtgttataagggaggccctgagatggaaggaccatcacacagaaatg

SEQ ID NO: 537799 - DNA, 120 bp, Artificial Sequence
  ENSG00000166923_37 (sequence is synthesized)
ataatatcttcatttcagggtgttccaggggaaaagcaggagaaagatttggggctcagtagaaggaaaagcttcctagtggtaagagtgattggcaataccatgaggtacctttaaaag

SEQ ID NO: 537800 - DNA, 120 bp, Artificial Sequence
  ENSG00000166923_38 (sequence is synthesized)
atagtgaactcctgtccttggaaatattaaaccacaggctagatatcatttaatagggatgtgaagtagagtaagtcactgcccttggtgtgcaattgtgaacttgtcaatttctgaggt

SEQ ID NO: 537801 - DNA, 120 bp, Artificial Sequence
  ENSG00000166923_39 (sequence is synthesized)
ccctttctacttagatatataatacaagatttctattaggtatgggtgctctgatgataatgaaaatcccagcagctatgtatgggatggttacaccagacactgtgctaaggattttct

SEQ ID NO: 537802 - DNA, 120 bp, Artificial Sequence
  ENSG00000166923_40 (sequence is synthesized)
ttgaattgtttctcactcaatcttcacggtagctcagtgaggtaggtaccattatcactgctagaaagcagtgaacttatatggtcttactgtggcactgggtccttaaacattatgcaa

SEQ ID NO: 537803 - DNA, 120 bp, Artificial Sequence
  ENSG00000166923_41 (sequence is synthesized)
aactgtgagcaacttttatcggtttgttcttttaagaacataacacagcactctaaaaatagatctaactagattgttcacatctagcgattaaggccaccctgagattatagctgcatc

SEQ ID NO: 537804 - DNA, 120 bp, Artificial Sequence
  ENSG00000166923_42 (sequence is synthesized)
atcaggaacccaagatctgaagcattcagtcaaagcctcttggccacctctctttttgtcatggccttcttggacttggagggggagaatggaagcaagtaccaaggagaaagtgttctc

SEQ ID NO: 537805 - DNA, 120 bp, Artificial Sequence
  ENSG00000166923_43 (sequence is synthesized)
agaaaagccacacccattagaaaaatacaaggcctgaaaggtgtgagtgggacttgacacggaagagcatttcaagcttaagaaaaaaaaaaaaaagaagaatgtgggaggatgtcagca

SEQ ID NO: 537806 - DNA, 120 bp, Artificial Sequence
  ENSG00000166923_44 (sequence is synthesized)
acaatgcttgagattccctggtcccccaaagagtctctcctccataaaactaatgagaatgtgacaaaaatagattcaacttcttatagctctggaaattaactgaagatgtatagcaat

SEQ ID NO: 537807 - DNA, 120 bp, Artificial Sequence
  ENSG00000166923_45 (sequence is synthesized)
ttgcagagcatttattcaagaaaaagactaaatctctgtgagcactgtgatattgtaacttgcactactctcatctccccctctccagctccacaatagctttgaaaccaacagcctgca

SEQ ID NO: 537808 - DNA, 120 bp, Artificial Sequence
  ENSG00000166923_46 (sequence is synthesized)
attaccatgaaaatcagcagtctggcagccactgaaggtgacagaatggagttggagttctttcaaagtcccattcctagacaattgtcactatttgacctgtttggcaggccctggaag

SEQ ID NO: 537809 - DNA, 120 bp, Artificial Sequence
  ENSG00000166923_47 (sequence is synthesized)
ctccacttgcaaggctatatttgacctgactggaagcttcccagggtaaaaaactttgtcaaaacaactagaggcaattgattctctttgtggctgcctggggtaatgtataacagttgg

SEQ ID NO: 537810 - DNA, 120 bp, Artificial Sequence
  ENSG00000166923_48 (sequence is synthesized)
ggaaagcaattggctaaataaaaagcctaaaaggagaagctggaaaaagagattttcatagggactttgaaaagctccaaagtgttattggcaatctagactgccaaatgcataaatagg

SEQ ID NO: 537811 - DNA, 120 bp, Artificial Sequence
  ENSG00000166923_49 (sequence is synthesized)
actccatccatgcccaggactgtgcagatgctcaggaaaaacccaagaaagccttaagctctcacttcaagctgatcttgaggctctgcacaagccataagtaaagggaatgcagagttg

SEQ ID NO: 537812 - DNA, 120 bp, Artificial Sequence
  ENSG00000166923_50 (sequence is synthesized)
tcaattgcatggcggagtgttgagtgtgcctcagcattcacacagagctccttggcagagactggttgaattattgattccaagtgtttgaggaaatccgtgtacaactattagatgact

SEQ ID NO: 537813 - DNA, 120 bp, Artificial Sequence
  ENSG00000166923_51 (sequence is synthesized)
actaaccaagcagagacttcagtgtccacacacaacaaaaaatacagactttacagaattagttcagaaaagtcattaaacaaagaaacaacaacaaaccctggggaaatgacagtacga

SEQ ID NO: 537814 - DNA, 120 bp, Artificial Sequence
  ENSG00000166923_52 (sequence is synthesized)
tcaaaccatgcatggccctgcctgcatgtgggaatcctcatccaagtcatactttctaaacatcataaaaagcccaaaccagtctcctttcctggctctctcaagtcattttcagaccag

SEQ ID NO: 537815 - DNA, 120 bp, Artificial Sequence
  ENSG00000166923_53 (sequence is synthesized)
gttaggagacgtgagctgctctccacaaaaagcctcatgtgagtaataaatgtttcatactctcttggggtgtgtgtaacatcatcagtctcagcatctaaaccaaattttggtgacatt

SEQ ID NO: 537816 - DNA, 120 bp, Artificial Sequence
  ENSG00000166923_54 (sequence is synthesized)
tcatcttgtttatgcagatgtccaccacacctataaataaacaaactactgaaactgattcaagaaaaaataaaaatctgaatagagctatcacaagtaaagagattaaataagcaatca

SEQ ID NO: 537817 - DNA, 120 bp, Artificial Sequence
  ENSG00000166923_55 (sequence is synthesized)
aataacttcccagaaagaaaagcccaatttaggatgtcttaactgattaatgttagcaaatatttaaagaagaattggtacaaattcttcacaaactcttccagaaatggaagaggagga

SEQ ID NO: 537818 - DNA, 120 bp, Artificial Sequence
  ENSG00000166923_56 (sequence is synthesized)
aacactttccaccttattttctataactagtattaccttgataccaaattctgacaaatacatcaaaaataaaaccatagaccaatatctcttttaagtgtaaatgcaaaaaaattcaac

SEQ ID NO: 537819 - DNA, 120 bp, Artificial Sequence
  ENSG00000166923_57 (sequence is synthesized)
aaaatgctagataactgggtccaacaacatatggaaaggattatataccttgaccaagtgggatttgccccaggaatgcaagattgatttaaccatcagtgtaatgcatcatattaatag

SEQ ID NO: 537820 - DNA, 120 bp, Artificial Sequence
  ENSG00000166923_58 (sequence is synthesized)
aataaagacagaaaccacacaatcatctcgatacacgcagaaaaatcatttggcaaaattcaacacccctttgtaataaaatcactcaacacactaggaagagaagggaacttcttcaac

SEQ ID NO: 537821 - DNA, 76 bp, Artificial Sequence
  ENSG00000166923_59 (sequence is synthesized)
atcactcaacacactaggaagagaagggaacttcttcaacctcacacatggcatctatgaaaaacccacagctggc

SEQ ID NO: 537822 - DNA, 120 bp, Artificial Sequence
  ENSG00000166923_60 (sequence is synthesized)
aaaaaaaaaaagaaaagaaaaacccacagctaacatcatacttaaaggtgaaagactgaaagctttcccccaagaggaactaacaggatatctgctgtcactatttttattcaatattat

SEQ ID NO: 537823 - DNA, 89 bp, Artificial Sequence
  ENSG00000166923_61 (sequence is synthesized)
agactgaaagctttcccccaagaggaactaacaggatatctgctgtcactatttttattcaatattatactggaggttctacctagggt

SEQ ID NO: 537824 - DNA, 120 bp, Artificial Sequence
  ENSG00000166923_62 (sequence is synthesized)
tcatccagattggaaaagaaataaaatgatttcaattttaagatgacataatattgtatgtagaaatcctaaggaatttacaaaagaactattagagctaatacatgatttcagcaaggt

SEQ ID NO: 537825 - DNA, 120 bp, Artificial Sequence
  ENSG00000166923_63 (sequence is synthesized)
tgcaggatacaagatcaacatacagatataaattgtattctacacacttgtaatgaaaaatctgaaaataaaattaagaaaatagcaccctttgaatagtatcaaaaagaataaaataca

SEQ ID NO: 537826 - DNA, 120 bp, Artificial Sequence
  ENSG00000166923_64 (sequence is synthesized)
tagaaaaaatgtaacaggaagtgcaagactggtacattgaaaacaataaaacattgttaaaaaatttaaaatcatcaaaatagatggaaataaaacctgtgttcatggatgaaaaaaatt

SEQ ID NO: 537827 - DNA, 120 bp, Artificial Sequence
  ENSG00000166923_65 (sequence is synthesized)
aacattgctctacagattcaatacaattcttatcaaaatcccaggtggcttaagaaattgacaagttaatcctaaaattcataagaaattgaaagggatccacaatagccaaaataatct

SEQ ID NO: 537828 - DNA, 120 bp, Artificial Sequence
  ENSG00000166923_66 (sequence is synthesized)
taaaaaagattttaaaaagttggagaactcacacttcctggtttcataacatacaccaggctgggcatggtggttcatgcccataatcccagcactttgggaagttgaggcagaaggatc

SEQ ID NO: 537829 - DNA, 120 bp, Artificial Sequence
  ENSG00000166923_67 (sequence is synthesized)
gagcacaggagtttgagaccagcctggacgatatagtgagaccttgtctctactaaaaatttaaaaaggaattagccaggtgtggtaacatgcacctgttgtcccagctacttaggaggc

SEQ ID NO: 537830 - DNA, 120 bp, Artificial Sequence
  ENSG00000166923_68 (sequence is synthesized)
aggctgaggcatgaggatcacttgagcccagaagattgtaccactgcactccagcctacatgacagagtaagtctctgtctcaaaaacaaaacaaacaacaaaaatactgaaagctttcc

SEQ ID NO: 537831 - DNA, 120 bp, Artificial Sequence
  ENSG00000166923_69 (sequence is synthesized)
ccatacaggaactaacaggatatctgctgtcactatttttattcaatattgttctggaggttctagctagggcaattaggcaaaaaaaggaaaaagaagtcatccagattagaaaagaaa

SEQ ID NO: 537832 - DNA, 120 bp, Artificial Sequence
  ENSG00000166923_70 (sequence is synthesized)
taaaataatttcaattttcagatgacataatattgtatgtagaaatcctaaggaatttacaaaagaactgctaccctgaaagaattgttgtaaggcaaatacccctgtaattaccattag

SEQ ID NO: 537833 - DNA, 120 bp, Artificial Sequence
  ENSG00000166923_71 (sequence is synthesized)
gggaagaaatttttccatgcttcacagaaactctccttataccccacctcaattttaatctttttctgtaccactacagttataattctcctaaagcttaaagcaattacctccttgttt

SEQ ID NO: 537834 - DNA, 120 bp, Artificial Sequence
  ENSG00000166923_72 (sequence is synthesized)
atatttatagtttcatcactgaagtgtgcattcctaaactcaacaccttagtctggttgcaaacagtttaaatgagaaaagataaggcctgaattaaggcagcagccctaaacctttttc

SEQ ID NO: 537835 - DNA, 120 bp, Artificial Sequence
  ENSG00000166923_73 (sequence is synthesized)
tataatcctgatagtgattaccacctaggggattataaatgtttgcttcttcctctggcaccaacaagtttactgagcagaagtttaaaataattggataatggggcaggtgacatcagc

SEQ ID NO: 537836 - DNA, 120 bp, Artificial Sequence
  ENSG00000166923_74 (sequence is synthesized)
aagatgttgtattagcaaatgctggacccttcttcaatccacaaacacatctattctgcaaaaattcatggctaaattcctttgtgaggaatccagaaactaaaaggctcctgcactccc

SEQ ID NO: 537837 - DNA, 120 bp, Artificial Sequence
  ENSG00000166923_75 (sequence is synthesized)
agcaaatgcaaaaaccagactcaccaaagctggtagagagatttgagataccaccttgtccgaatccctaaccccagcacagtgccatgtagtcagcaagagactccctagcactcagtt

SEQ ID NO: 537838 - DNA, 120 bp, Artificial Sequence
  ENSG00000166923_76 (sequence is synthesized)
tctcccaggtgagaggagttggttcacatatccaagacctccaacttttctgaggagattcccagaggactggcttctatcttgtcagtcttggagctctgacagaattggtactatcta

SEQ ID NO: 537839 - DNA, 120 bp, Artificial Sequence
  ENSG00000166923_77 (sequence is synthesized)
gctacctggggaaggacagagacagaggtttagaccagtagatgacatggcaccctgccctctactgcctcacctcctggctcagcacagacaggacaaaaatcatggctacctacattt

SEQ ID NO: 537840 - DNA, 120 bp, Artificial Sequence
  ENSG00000166923_78 (sequence is synthesized)
ccctggagaaggaatgatttgttaaaggcccccaaatcactgggcagacttattggtgggggtcttctcctctgaggcccagctgtgaggactgggacaggtgactgctttgtctaatgt

SEQ ID NO: 537841 - DNA, 120 bp, Artificial Sequence
  ENSG00000166923_79 (sequence is synthesized)
gcagacaccaacacaaagagtcaaggaaaatgaataatcatacgaagatgttccaaaccaaagaacaagataaatctctggaaactgagctaatgaaataaacttatgtgatttacctga

SEQ ID NO: 537842 - DNA, 120 bp, Artificial Sequence
  ENSG00000166923_80 (sequence is synthesized)
cagagaattcagaatagctctcataaagattctcaccagagtcaagagaacaatgcatgaaaaaagttaagaattttgacaaagagatagagtatatttaaaagtaccaaaaagaaatgg

SEQ ID NO: 537843 - DNA, 120 bp, Artificial Sequence
  ENSG00000166923_81 (sequence is synthesized)
aactgaagaacacaacaactgaactgaaaaaatttatgacaggacatcaacaggagacaagattaatcagaagaaagaatcaatgaacttgaagacaggtcattggaaataattcagtta

SEQ ID NO: 537844 - DNA, 120 bp, Artificial Sequence
  ENSG00000166923_82 (sequence is synthesized)
gaggagaaattaaaatgaaaaagagtgaaaaaaagcccaagggtcttatgggcaacatcaagctgaacaatatactcattattggcatcacagaataaaagagagaaaagaactgagaac

SEQ ID NO: 537845 - DNA, 120 bp, Artificial Sequence
  ENSG00000166923_83 (sequence is synthesized)
gtattcaaagaaataatggctgaacacttcccaaatatgaggaagaaaatgaacattctgatccaagaagcccaaaggtcataaaaaagtgatcccaaagcctacaggcatattataagt

SEQ ID NO: 537846 - DNA, 120 bp, Artificial Sequence
  ENSG00000166923_84 (sequence is synthesized)
tgtcatcctagagaaagaaaaatatctttctcccagcctccatattcaaatcttaaggaaaattcttatggacttagcttgagtttcaagttcatttctaaaatcaatcatggtggccaa

SEQ ID NO: 537847 - DNA, 120 bp, Artificial Sequence
  ENSG00000166923_85 (sequence is synthesized)
acggaatgagcattctgatttgccagtgtggtctcatgttacccctgtgcctagaaaggaaacaggagatgaaaagcatggtgataagaagactggatggcaccacatgggataggggga

SEQ ID NO: 537848 - DNA, 120 bp, Artificial Sequence
  ENSG00000166923_86 (sequence is synthesized)
aagtagttgaaaaaaaatagttgtaaggaaaagagatacaaggagtcaaaaataacaaatatctacttaaaagccttttccacatttaatgttttttgttcactgtggtgtagtaataaa

SEQ ID NO: 537849 - DNA, 120 bp, Artificial Sequence
  ENSG00000166923_87 (sequence is synthesized)
tgtctatacttaaggggtgaggattgatatatttaaagtgaatggtctggaaggcaaggaagctcattccaacagattcatgctacattgtttagtgacaaataaggggaacagaacaga

SEQ ID NO: 537850 - DNA, 120 bp, Artificial Sequence
  ENSG00000166923_88 (sequence is synthesized)
gaaagtgatttcagctataaatataggagataataaaatcctttagtaaacagtatctaagccttgtttttatgatattggggaacagtaacagatcaaagtactgtagtcttcagtatg

SEQ ID NO: 537851 - DNA, 120 bp, Artificial Sequence
  ENSG00000166923_89 (sequence is synthesized)
cagacctttcactttcttagtttattccagggtcttttttttttttgctgctattacaaatagcattgttttcctaatttttgtttaagatagttcatcgttggtatagaaatgccattg

SEQ ID NO: 537852 - DNA, 120 bp, Artificial Sequence
  ENSG00000166923_90 (sequence is synthesized)
atttttgtatgttgattttgtatcctccaactttactgaatttattagttctaacagttttttgatggagtctttagggttttctatgtataagattatgtcatctgcaaacagcaacaa

SEQ ID NO: 537853 - DNA, 120 bp, Artificial Sequence
  ENSG00000166923_91 (sequence is synthesized)
ttttaccctttgttttcaacgtgagcgtcttttatttatttttcttgcctaattgctttagctaggacttccagcactaaattgaatagaagtgatgagagtgggcatgtatgccttgtt

SEQ ID NO: 537854 - DNA, 120 bp, Artificial Sequence
  ENSG00000166923_92 (sequence is synthesized)
tctggtcttaaagaaaaacatttcagttttccattattcggtataatgttagttatgggtttttaaaaatatatatgacctttattaggttgaggtacttttcctctattcttagtttat

SEQ ID NO: 537855 - DNA, 120 bp, Artificial Sequence
  ENSG00000166923_93 (sequence is synthesized)
tgaatgtttttctcatgaaagtgtgttaaattttgtcaaaaccttttttacatccatcaaatgattatgtaatttttatcctttattctgttaatggattatcacattaactaattttca

SEQ ID NO: 537856 - DNA, 120 bp, Artificial Sequence
  ENSG00000166923_94 (sequence is synthesized)
cattaactaattttcatatcttgaagcatacttgcatcctaggaataaatcccactttgtcatagtctttgatccttttaatataatgttaaatttggtttgccagtattttgttgagga

SEQ ID NO: 537857 - DNA, 120 bp, Artificial Sequence
  ENSG00000166923_95 (sequence is synthesized)
ttcatcaaggatattgggctgtaattttcttttcttgtggtgtctttgtccggctttagtataaaggtaattctggcttcataaaataagttagaaagtgttctctcttctttgattttt

SEQ ID NO: 537858 - DNA, 120 bp, Artificial Sequence
  ENSG00000166923_96 (sequence is synthesized)
ttggaagagtttgagaataattggcattagttttgttaaatgtttggttgaattcactagtgaaattatttggtcctgggattttctttactgggagttttttgattacttgttcaatct

SEQ ID NO: 537859 - DNA, 120 bp, Artificial Sequence
  ENSG00000166923_97 (sequence is synthesized)
ttacgctagtcataggtctgtccagtctttgtatttcttcatgatttagtcatcatgtattcatgggttgtaagacttaatattcttaaaatgcccatattacccaaagtgatctataga

SEQ ID NO: 537860 - DNA, 120 bp, Artificial Sequence
  ENSG00000166923_98 (sequence is synthesized)
ttcatgcaatccccatcaaaaatcccagtggcatttttatttacagaaatagaataattctaaaattcatctgaagccacaaaagacaatgaataaacaaatcaatcttgaaaaagaaga

SEQ ID NO: 537861 - DNA, 120 bp, Artificial Sequence
  ENSG00000166923_99 (sequence is synthesized)
acaaagctggaggcattatacttcctgatttcaaaatatcctgcaaaggtacagtaatcaaaacagtatgttaccagcataaagacaaacacacagaccaatagaacagaatagagagct

SEQ ID NO: 537862 - DNA, 120 bp, Artificial Sequence
  ENSG00000166923_100 (sequence is synthesized)
cagcaacaaatccgtgaatatacagtcaactgacatttggcaatggtgccaagcatactcagtgggagaaatgataatctcttcaacaaatggtgttgggaaaactgaatatccacatgc

SEQ ID NO: 537863 - DNA, 120 bp, Artificial Sequence
  ENSG00000166923_101 (sequence is synthesized)
aaaagaataaaattggaccctatcttataccaaaaatcaactcaaaatggattatttaaatgtaagacttgaaacagtaaaactcctagaagtaaacagaagagaaagtttcatgacatt

SEQ ID NO: 537864 - DNA, 120 bp, Artificial Sequence
  ENSG00000166923_102 (sequence is synthesized)
gcccttggcaatgatttcatgtacataacaacaaaagcacaggtaataaaaacaaaaatagacaaatgggactacctcaaattaaaatgtttctgcacagcaaacgaccaactgaatgaa

SEQ ID NO: 537865 - DNA, 120 bp, Artificial Sequence
  ENSG00000166923_103 (sequence is synthesized)
aaggcaatctatggaacagaagacacggggtgacatgagaccactttggcaaatcagaatgctcattccatttggccaccatgattggttttagaaatggacttgaagctcaaagaaagc

SEQ ID NO: 537866 - DNA, 120 bp, Artificial Sequence
  ENSG00000166923_104 (sequence is synthesized)
ccataatatattccttaagatttgaatatagaggctggaagaaagatttttttctttctctaggatgacaagttatatataataagcctgtaggccaatatctgctggcagccacctttc

SEQ ID NO: 537867 - DNA, 120 bp, Artificial Sequence
  ENSG00000166923_105 (sequence is synthesized)
ccaggtatatggatgaaactatctgaaggatgaagcctccattcacagaaaatcagagctgtaaagggaagaggatatcctgatgaatttttttcttggattgagccatgtctgaagtca

SEQ ID NO: 537868 - DNA, 120 bp, Artificial Sequence
  ENSG00000166923_106 (sequence is synthesized)
agccaacttttgaagtatcctatagtacttatatattgcttggtaacaaattatgccaaaatttagtagcttaaaacaacaaacatctattatctcatgcatttctgatatagatatagg

SEQ ID NO: 537869 - DNA, 120 bp, Artificial Sequence
  ENSG00000166923_107 (sequence is synthesized)
agtgactaatctgggtggttctgggtcagaatctctggtgagtgtgtaggcaaggtgtcagtagggggctgcaattatctaaaggcttgcctggggctggagacgcactttcaatgtggt

SEQ ID NO: 537870 - DNA, 120 bp, Artificial Sequence
  ENSG00000166923_108 (sequence is synthesized)
gtactcacgtggctgttggttggaggccaaatgtgctaggcaaagcctcatgcacatttctctgtaaggaaacaaagctggcttacttgggggcaggatttttttttttcccagttgttc

SEQ ID NO: 537871 - DNA, 120 bp, Artificial Sequence
  ENSG00000166923_109 (sequence is synthesized)
ttcaaaatgaagtttcccgctccaagtcccagccagatatgtgaaaaacaatccttgcagaacaaccctattagcagttctgcaaggatttttaggaaccgtattagcaagttcctcagt

SEQ ID NO: 537872 - DNA, 120 bp, Artificial Sequence
  ENSG00000166923_110 (sequence is synthesized)
tcctcaccatgtgaacctctcttcacgacttagtaactggcttcctctagagtgactaatccaagagacagcaaggattgacagccatgacagcacagtgcctttcatgacttactctcc

SEQ ID NO: 537873 - DNA, 120 bp, Artificial Sequence
  ENSG00000166923_111 (sequence is synthesized)
aaagttacaaacctttacttttgctttatcttatttgttagagcaagtcactaaatttgcccacatctaagatgagggtatttgggcttcacctcttgaatggagaagcacccaaaaatc

SEQ ID NO: 537874 - DNA, 120 bp, Artificial Sequence
  ENSG00000166923_112 (sequence is synthesized)
tgtggcctttttttttaattacactctcagttacatgaatcaataaattccatttttggcttagcttctattgggtttctatcacttgcaaccaaagtgccctaaccagtatctacatct

SEQ ID NO: 537875 - DNA, 120 bp, Artificial Sequence
  ENSG00000166923_113 (sequence is synthesized)
caaccaaagtgccctaaccagtatctacatctgagtcattaagaaagtttcagacagggctgggcgcggtggctcacacctgttaatcccagactttgggaggccgaggcaggcggatca

SEQ ID NO: 537876 - DNA, 120 bp, Artificial Sequence
  ENSG00000166923_114 (sequence is synthesized)
agcctgggcgacagagtgagactcagcttcaaaaaaaaaaaaaaaaaagaaagtttcagatattattgtttattgcttttaatctagtgaattcataaatcgtcacttaactcaagcaaa

SEQ ID NO: 537877 - DNA, 120 bp, Artificial Sequence
  ENSG00000166923_115 (sequence is synthesized)
tagtgaattcataaatcgtcacttaactcaagcaaaacaatgttactctctttgtacattgtacagatgcaggataacaatgcagtgttatcctgcatctgtacaatcaagcacccaaac

SEQ ID NO: 537878 - DNA, 120 bp, Artificial Sequence
  ENSG00000166923_116 (sequence is synthesized)
tggttctgtagaggcaggaccttagcatatagcagagataacttatcttccagcagatccggagctccattttgtagacagaaatgaatgctctgtgccacagaaggagctgttgcacta

SEQ ID NO: 537879 - DNA, 120 bp, Artificial Sequence
  ENSG00000166923_117 (sequence is synthesized)
ttcattcccgtttcctcccattcactctccacatctccaatcctggcattgtctgctttgttacttgttaaaaacttgatttcgtagattgctttaaaataagaacaaaatgtactttga

SEQ ID NO: 537880 - DNA, 120 bp, Artificial Sequence
  ENSG00000166923_118 (sequence is synthesized)
cacacatcattttgtttggttctcattaattttgagagaaaggcaagatagatatttaaatgacccctattttagtggtaaacaagctgaaattagataaataaaatgatttgcctaatg

SEQ ID NO: 537881 - DNA, 120 bp, Artificial Sequence
  ENSG00000166923_119 (sequence is synthesized)
gcttagcgagggcgcgaagtccaggccgccagagcgcaggagcatccggacctgctagtcggccgctgactgcgcggcgagttgccttgagagggtcccatgtgcttggggcgccgcgct

SEQ ID NO: 537882 - DNA, 120 bp, Artificial Sequence
  ENSG00000166923_120 (sequence is synthesized)
gggtctgggggcgtcttggggcgcccattggagtccgcgggttggagcatccggagaatccatgatgtgtgcatttgccgatccccgagtatgagccgcacagcctacacggtgggagcc

SEQ ID NO: 537883 - DNA, 80 bp, Artificial Sequence
  ENSG00000166924_0 (sequence is synthesized)
gtctctgtctctcctcctccctcctcctgctccgggcggagcccggcatgggggggccggcgcccggcaggccagtggat

SEQ ID NO: 537884 - DNA, 120 bp, Artificial Sequence
  ENSG00000166924_1 (sequence is synthesized)
tgagcagggccccccagcccccacctcctgccccacgagatgaacctcctctaccgaaaaaccaagctggagtggaggcagcacaaggaagaggaggccaagaggagctccagtaaggag

SEQ ID NO: 537885 - DNA, 120 bp, Artificial Sequence
  ENSG00000166924_2 (sequence is synthesized)
gtggcccccgctggctcggctgggcccgcggccggccaggggcctggggtccgcgtgcgggacatcgcctcgctgcggcgctccctcaggatgggtttcatgacgatgcccgcctcccag

SEQ ID NO: 537886 - DNA, 120 bp, Artificial Sequence
  ENSG00000166924_3 (sequence is synthesized)
gagcacaccccgcacccctgccgcagcgccatggccccacgctccctctcctgccactcggtgggcagcatggacagtgtcgggggtggccctggcggggccagtgggggcctcacagag

SEQ ID NO: 537887 - DNA, 120 bp, Artificial Sequence
  ENSG00000166924_4 (sequence is synthesized)
gacagcagcacccgaagaccccctgccaagccccggagacaccccagcaccaagctcagcatggtggggcctgggtctggggcagagacgccccccagcaagaaagcaggctcacagaag

SEQ ID NO: 537888 - DNA, 120 bp, Artificial Sequence
  ENSG00000166924_5 (sequence is synthesized)
ccaaccccagagggccgagagtccagccggaaggttcctccgcagaagcccaggcgaagccctaacacccagctctctgtctccttcgatgagtcctgccccccaggcccctctcctcga

SEQ ID NO: 537889 - DNA, 120 bp, Artificial Sequence
  ENSG00000166924_6 (sequence is synthesized)
ggggggaacctgcctcttcagcgcctcactagggggtcccgagtagctggggaccctgatgtgggtgcccaggaagagcctgtgtacattgagatggtgggggacgtctttaggggagga

SEQ ID NO: 537890 - DNA, 120 bp, Artificial Sequence
  ENSG00000166924_7 (sequence is synthesized)
ggacgaagtggaggaggcctggctgggccccctcttgggggtgggggcccgacccctccagcgggcgccgactcggactctgaagagagtgaggccatctatgaagagatgaagtacccg

SEQ ID NO: 537891 - DNA, 120 bp, Artificial Sequence
  ENSG00000166924_8 (sequence is synthesized)
ctgccggaagaggctggggaaggccgggccaatggccctccaccattgacggcaacatccccgccacaacagcctcacgcccttccgccccatgcccaccgccgcccagcttcagccctc

SEQ ID NO: 537892 - DNA, 120 bp, Artificial Sequence
  ENSG00000166924_9 (sequence is synthesized)
ccgagccggagggacgggacgcccaccaagaccactccttgtgaaatccccccgcccttccccaacctccttcagcaccggcctccactcctggccttcccccaagccaagtctgcttcc

SEQ ID NO: 537893 - DNA, 120 bp, Artificial Sequence
  ENSG00000166924_10 (sequence is synthesized)
cgaacccctggcgatggggtctcaaggctacctgtcctctgccactccaaggagccagccggctccaccccagctccccaagtgcctgcacgggagcgggagacgcctcccccaccgcct

SEQ ID NO: 537894 - DNA, 120 bp, Artificial Sequence
  ENSG00000166924_11 (sequence is synthesized)
ccacctcctgctgccaacctgctgctgctgggaccatcgggccgggcccggagccactcgacaccgttgccaccccagggctctggccagccccggggggagcgggagctccccaactcc

SEQ ID NO: 537895 - DNA, 120 bp, Artificial Sequence
  ENSG00000166924_12 (sequence is synthesized)
cacagcatgatctgccctaaggcggcgggggcgccggcagccccccctgccccggccgccttgctccccggcccccccaaggacaaggccgtgtcttacaccatggtgtactcggcggtc

SEQ ID NO: 537896 - DNA, 120 bp, Artificial Sequence
  ENSG00000166924_13 (sequence is synthesized)
aaggtgaccacgcactctgtcctgccagctggtccacccctgggtgctggggagccaaagacggagaaggagatctcggtcctccatgggatgctgtgtaccagctcaaggccccctgtg

SEQ ID NO: 537897 - DNA, 120 bp, Artificial Sequence
  ENSG00000166924_14 (sequence is synthesized)
aggccccctgaccccgctgtggacctacccagccacagcagctgggctcaagagaccccctgcctatgagagcctcaaggctgggggggtgctgaataagggctgtggtgtgggggcccc

SEQ ID NO: 537898 - DNA, 120 bp, Artificial Sequence
  ENSG00000166924_15 (sequence is synthesized)
atcccccatggtcaagatccagctgcaggagcaagggaccgatgggggtgcttttgccagcatctcctgtgcccacgtcatcgccagcgcagggacaccagaggaggaagaagaggaggt

SEQ ID NO: 537899 - DNA, 120 bp, Artificial Sequence
  ENSG00000166924_16 (sequence is synthesized)
gggcgccgcgacatttggggcaggctgggccctgcagaggaaggtcctctatggagggagaaaagcaaaggagttggacaaggtcgaggacggtgcccgggcctggaatggcagtgccga

SEQ ID NO: 537900 - DNA, 120 bp, Artificial Sequence
  ENSG00000166924_17 (sequence is synthesized)
gggtccaggcaaggtggagcgtgaggacaggggccctgggacatcggggatcccagtgagaagccagggggcagagggactgctggccaggatccaccatggagaccgaggagggagccg

SEQ ID NO: 537901 - DNA, 120 bp, Artificial Sequence
  ENSG00000166924_18 (sequence is synthesized)
caccgcgctgcccattccctgccagaccttccccgcctgccaccgcaatggagacttcacgggaggctaccgcctggggcgctccgcctccacctccggagtccggcaggtcgtgctcca

SEQ ID NO: 537902 - DNA, 120 bp, Artificial Sequence
  ENSG00000166924_19 (sequence is synthesized)
ggccctgcagccagcccagggatgccctgagccagccccaccccgcgctgccgctgcctctgcccctgccgccccagccggcccgcgagcgtgacgggaagctgctggaggtgatcgagc

SEQ ID NO: 537903 - DNA, 120 bp, Artificial Sequence
  ENSG00000166924_20 (sequence is synthesized)
gatcgagcgcaagcgctgcgtgtgcaaggagatcaaggcgcgccaccgcccggaccgaggcctctgcaagcaggagagcatgcccatcctccccagctggcggcggggacccgagccccg

SEQ ID NO: 537904 - DNA, 120 bp, Artificial Sequence
  ENSG00000166924_21 (sequence is synthesized)
gccgccggcagcacacggtcctctgggacaccgccatctgaggcgggcgggggggtaccggggcgcctggactggggagggggcgggcacgcctggctctcccgggagcctcgccttgag

SEQ ID NO: 537905 - DNA, 120 bp, Artificial Sequence
  ENSG00000166924_22 (sequence is synthesized)
cccgggagcctcgccttgagagacattgaaagactacgtgggagagtgccagggagaacccctgccctccaacctaccccccgggatggggagagtctgccaggcccattgggcttagga

SEQ ID NO: 537906 - DNA, 120 bp, Artificial Sequence
  ENSG00000166924_23 (sequence is synthesized)
tgccaacagcgctgctgagaaacggaggaggaggagggtttgcttgaggttggggcgagagtcgctctggctgttcttcccgctgggcgttgtacacccctcctcctgaaccaagccaga

SEQ ID NO: 537907 - DNA, 120 bp, Artificial Sequence
  ENSG00000166924_24 (sequence is synthesized)
ggtcagcatggggaagggaggaaggaagggatgggaggaagaggggggtgggtgagctgaaagagagggactagagtgccagatggaggagctcttttctagagagccgggagttgggga

SEQ ID NO: 537908 - DNA, 120 bp, Artificial Sequence
  ENSG00000166924_25 (sequence is synthesized)
gggggtatttattttgttatttatttcagtctggagggcgattctgggcctttctgacctactcctgagctaggagtggagaatcagggccaagtttgcactctccccaatgccaatgcc

SEQ ID NO: 537909 - DNA, 120 bp, Artificial Sequence
  ENSG00000166924_26 (sequence is synthesized)
taaaggccccgccgtccatgccaccccacagccaaggaggggtctgcatggggagtggaccgagagaagaaggggcccagggaagcagagggcccaagaccattcacagtatttacaatt

SEQ ID NO: 537910 - DNA, 120 bp, Artificial Sequence
  ENSG00000166924_27 (sequence is synthesized)
tgccagaatttggtagtcagtgtggcctgctctgaatcaggcatcttatttagttctggggtgagggtctagtgccagggatgggcaggatgatgggggaggaggagggaaattttagcg

SEQ ID NO: 537911 - DNA, 120 bp, Artificial Sequence
  ENSG00000166924_28 (sequence is synthesized)
ggtggagggggtgggcagggtatttatttaaattaaaaaacaaaacagaagagatgtcaggaacttttttttaattcctttcttttcagaataatatattaaaagactcatgatcctaaa

SEQ ID NO: 537912 - DNA, 120 bp, Artificial Sequence
  ENSG00000166925_0 (sequence is synthesized)
gttgtcaacagcccagaaagagaaagacggagaggcagagacccaggggagccgaggagcggagacacggacccagcagggtcacgcgggaggagactcgggacacccactcgctggctg

SEQ ID NO: 537913 - DNA, 120 bp, Artificial Sequence
  ENSG00000166925_1 (sequence is synthesized)
ccaccgggagcagaggggggctcggccgccccctcccacatcagtctccagacccttggggcttcagaggccgctcctaggctcctcggaggaggcgcgggtttcttcttttccggagag

SEQ ID NO: 537914 - DNA, 120 bp, Artificial Sequence
  ENSG00000166925_2 (sequence is synthesized)
caaactttcctcggagatgcctggcaggatgagccgcggcccccggagaggacgggacagcctctgatcgccgcctgcgtgccccgccactgcccatggccaggaggccccagggaacgg

SEQ ID NO: 537915 - DNA, 120 bp, Artificial Sequence
  ENSG00000166925_3 (sequence is synthesized)
acagcccgacctcttaggcgccgggaccctcaggctcagatcagtggccgaggccccagagtttgcaaactcagctctggagttcagcagcaacagcagcaggaaaaacctgcccctgct

SEQ ID NO: 537916 - DNA, 120 bp, Artificial Sequence
  ENSG00000166925_4 (sequence is synthesized)
cccccctcccgccacctcccctctcctcttctcccctcacccagcaggcacccccggttcccgccaggccctcctgccatgtcggacccagacgtccccaggggctcggatgtccccgcc

SEQ ID NO: 537917 - DNA, 120 bp, Artificial Sequence
  ENSG00000166925_5 (sequence is synthesized)
atgtggcccccttgttccaggggtgcctgagccccttcaaggagccccaacccacccccaaccttggcccagccctgagccccagggaccatgagcgggggcaagaagaagagtagtttc

SEQ ID NO: 537918 - DNA, 120 bp, Artificial Sequence
  ENSG00000166925_6 (sequence is synthesized)
caaatcaccagcgtcaccacggactatgagggccctgggagcccaggggcttcggatccccctaccccacagcccccaaccgggcccccgccccgcctgcccaatggggagcccagcccc

SEQ ID NO: 537919 - DNA, 120 bp, Artificial Sequence
  ENSG00000166925_7 (sequence is synthesized)
gatccggggggcaagggcaccccccggaatggctccccaccacctggggccccttcctcccgtttccgggtggtgaagctgccccacggcctgggagagccttatcgccgcggtcgctgg

SEQ ID NO: 537920 - DNA, 120 bp, Artificial Sequence
  ENSG00000166925_8 (sequence is synthesized)
acgtgtgtggatgtttatgagcgagacctggagccccacagcttcggcggactcctggagggaattcgaggggcctcagggggcgccgggggcagatctttggattccaggttggagctg

SEQ ID NO: 537921 - DNA, 120 bp, Artificial Sequence
  ENSG00000166925_9 (sequence is synthesized)
cctgtctcagggccccacctcctggctccgtccaccccccacctctcctggacctcaggcccgctccttcactgggggactgggccagctggtggtgcccagcaaagccaaggcagagaa

SEQ ID NO: 537922 - DNA, 120 bp, Artificial Sequence
  ENSG00000166925_10 (sequence is synthesized)
acccccactgtcggcctcctcaccccagcagcgccccccagagcctgagaccggtgagagtgcgggcacatcccgggctgccacgcccctgccctctctgagggtggaagcggaggctgg

SEQ ID NO: 537923 - DNA, 120 bp, Artificial Sequence
  ENSG00000166925_11 (sequence is synthesized)
gggctcaggggccaggacccctccactgtcccggaggaaagctgtagacatgcggctgcggatggagttgggtgctccagaagagatggggcaggtgcccccacttgactctcgccccag

SEQ ID NO: 537924 - DNA, 120 bp, Artificial Sequence
  ENSG00000166925_12 (sequence is synthesized)
ctccccagccctctacttcacccacgatgccagcctggttcacaaatctccagaccccttcggagcagtagcagctcagaagttcagcctggcccactccatgttggccatcagtggtca

SEQ ID NO: 537925 - DNA, 120 bp, Artificial Sequence
  ENSG00000166925_13 (sequence is synthesized)
cctagacagcgacgatgatagtggctccggaagcctggttggcattgacaacaaaatcgagcaagccatggacttggtgaagtcccacctcatgtttgcggtccgggaggaggtggaggt

SEQ ID NO: 537926 - DNA, 120 bp, Artificial Sequence
  ENSG00000166925_14 (sequence is synthesized)
gctgaaggagcagatccgggaattggcggagcggaacgctgcgctggagcaggagaatgggctgctgcgcgccctggccagcccggagcagctggctcagctgccctcctcgggggtccc

SEQ ID NO: 537927 - DNA, 120 bp, Artificial Sequence
  ENSG00000166925_15 (sequence is synthesized)
acggcttgggccccctgcgcccaatgggccctccgtctgagcctcccttcccttacaatgtgcctttggggctgcccggccttgcgtcagccgcctgccccctcttcctatgcagcttta

SEQ ID NO: 537928 - DNA, 120 bp, Artificial Sequence
  ENSG00000166925_16 (sequence is synthesized)
atgtccccgtgtccccggggtgggagttcaaggctcagtaatggcctggtcccccggcccctgccccatctcctcatcatccccagccttgatggaggagggagggcttcaggacggggc

SEQ ID NO: 537929 - DNA, 120 bp, Artificial Sequence
  ENSG00000166925_17 (sequence is synthesized)
gtcagagggagccccctctgggagggaaccaacccccaccctccctcctgggaccccccagcagtagacggcttgggggagtcggaggctccccggcagacaccccacccccatcttgtt

SEQ ID NO: 537930 - DNA, 120 bp, Artificial Sequence
  ENSG00000166925_18 (sequence is synthesized)
cccttgaggtgcctcctctcctctgcccaggggagggagtgtggacagtatctggaagttctgggattcaggttgttattaaaataataataataattaaaaactctgaagaaacttgaa

SEQ ID NO: 537931 - DNA, 120 bp, Artificial Sequence
  ENSG00000166925_19 (sequence is synthesized)
ttagacgggcttggcaaaggattatttcctgggttttcttctggaggcaaaaaattaaaccaaccatctcaggacaccctgactccaagaaacactcattgaagaagatggagaagactc

SEQ ID NO: 537932 - DNA, 120 bp, Artificial Sequence
  ENSG00000166925_20 (sequence is synthesized)
tccaggtggttgagactttgaggttggtcgagctcccaaaagaggctaagcccaagttgggtgagtcccccgagctggcagatccctgcgtgttggccaagactacagaggagaccgagg

SEQ ID NO: 537933 - DNA, 120 bp, Artificial Sequence
  ENSG00000166925_21 (sequence is synthesized)
tggagctgggccaacagggccaatccctactgcagctgccgaggacggccgtcaagtctgtctccacgctcatggtctctgccctgcagagcggctggcagatgtgcagctggaaggtca

SEQ ID NO: 537934 - DNA, 120 bp, Artificial Sequence
  ENSG00000166925_22 (sequence is synthesized)
gggcttcgtggggtggtggggcgtggggttcaggttccccgcccagcacccggggtagctgtaagaaagtgcctggtaggcatccttcccccaggttgaacttggagaggacctcttaga

SEQ ID NO: 537935 - DNA, 120 bp, Artificial Sequence
  ENSG00000166925_23 (sequence is synthesized)
gaaacctggcctgggcatagccactgcacacagttgatttcggacccactccctctctgtggagagggctgggtgggactccctggctcagaactgtcaggtcacagacttttttagagt

SEQ ID NO: 537936 - DNA, 120 bp, Artificial Sequence
  ENSG00000166925_24 (sequence is synthesized)
ctgaagggagtcattgttgtcagattccagagctcttgcagatttagagatcatctggccaacccaggaacccactggcaaatgcatgctctagacagaatagcaaatcaggccggggca

SEQ ID NO: 537937 - DNA, 120 bp, Artificial Sequence
  ENSG00000166925_25 (sequence is synthesized)
cagtggctcccgcctgtactcatagtgctttgggaggcccaggcaggaaaattgcttgaggccaggagttcaagaccaagccctggcaatgtagcgagacctcatctctaaaaagaaaaa

SEQ ID NO: 537938 - DNA, 120 bp, Artificial Sequence
  ENSG00000166925_26 (sequence is synthesized)
gtctcctctctgcctgcctggcaccagccagaccctgctctgcccggggggctctgagccccccaggcattcccttcactgcatccctctccattgggggggtgtctaaggaccctttcc

SEQ ID NO: 537939 - DNA, 120 bp, Artificial Sequence
  ENSG00000166925_27 (sequence is synthesized)
ccttgggcatggcccagccaggggtctctgtcaagtccctggtgtcgtcttatgagacccgagtggtggggatggctccggggctgccccgaaaaaggggctgtgcctcttccccttgct

SEQ ID NO: 537940 - DNA, 120 bp, Artificial Sequence
  ENSG00000166925_28 (sequence is synthesized)
ctccccggggtgcatcccccatccgagggacatctgggcccccgccccaccggggcctgggaggccctgggcagcggccttcaacccgcagggggatggacaaaaccctcctctccctca

SEQ ID NO: 537941 - DNA, 120 bp, Artificial Sequence
  ENSG00000166925_29 (sequence is synthesized)
ggctccggaagcctggttggcattgacaacaaaatcgagcaagccatgccctcaaggcactgggcaggggatgaggcacccaccccgttgacgctgtgcctgtcccggggcccccaggac

SEQ ID NO: 537942 - DNA, 120 bp, Artificial Sequence
  ENSG00000166926_0 (sequence is synthesized)
aacttgggagctctgtacttttaagagctaaatctattttttcttccgtagttggcaacaccattatgacatcacaacctatttccaatgagaccatcataatgctcccatcaaatgtca

SEQ ID NO: 537943 - DNA, 120 bp, Artificial Sequence
  ENSG00000166926_1 (sequence is synthesized)
tcaacttctcccaagcagagaaacccgaacccaccaaccaggggcaggatagcctgaagaaacgtctacaggcaaaagtcaaagttattggggtgcatagcagcctggctggaagcattc

SEQ ID NO: 537944 - DNA, 120 bp, Artificial Sequence
  ENSG00000166926_2 (sequence is synthesized)
ttcttctttcttatgattatcattcaccttacaccatggactgccatagagccaaagccagtctggctggaactctgtctctgatgctggtttctactgtgttggagttctgcctagctg

SEQ ID NO: 537945 - DNA, 120 bp, Artificial Sequence
  ENSG00000166926_3 (sequence is synthesized)
tgctcactgctgtgctgcagtggaaacagactgtctgacttccctggttactcatgtcctcaaagacgactcatgatgctggatatgaagaactattgacttcttgggaaaaaacggaga

SEQ ID NO: 537946 - DNA, 120 bp, Artificial Sequence
  ENSG00000166926_4 (sequence is synthesized)
aatattaattggaaagttgatttttatgataatatggaaaacctaaccattataaaaaagcaaacttgagtttcctaaatgtaagcatttaaagtaatgcatatttgttttaaaaaatta

SEQ ID NO: 537947 - DNA, 120 bp, Artificial Sequence
  ENSG00000166926_5 (sequence is synthesized)
gaacccaccaaccaggggcaggatagcctgaagaaacgtctacaggcaaaagtcaaagttattgggagtttattaaagaagctgtattgcatgaagggaggagagaaagaagggatctat

SEQ ID NO: 537948 - DNA, 120 bp, Artificial Sequence
  ENSG00000166926_6 (sequence is synthesized)
cttggattgggagggaaacacagagttttggtttctagaattgcctctgcacttatgtgatctgaggtgcatagcagcctggctggaagcattctgagtgctctgtctgccctggtgggt

SEQ ID NO: 537949 - DNA, 120 bp, Artificial Sequence
  ENSG00000166926_7 (sequence is synthesized)
attctcctgtctgtcaacccggctgcattaaatcctgcctcattgcagtctgaaagaagtgtgatatcttaaatcaggagataagaaatatagggagatggagagtgtaactgagaatta

SEQ ID NO: 537950 - DNA, 120 bp, Artificial Sequence
  ENSG00000166926_8 (sequence is synthesized)
tcgcaggagaattctctctctttggaagaagaaaaacaatgaagtttggctaacagaaataatgtgtctgaagttgaaaaattaaggggtatgtgcatggccagcaacgcattgagagga

SEQ ID NO: 537951 - DNA, 120 bp, Artificial Sequence
  ENSG00000166927_0 (sequence is synthesized)
aagtctcagaggctggagagcagagcaccaagatcgttctggcaggaacagccagtgggaggttccagctgagcgctccccagaggtgagctgatccccagccacagcacacaggaccag

SEQ ID NO: 537952 - DNA, 120 bp, Artificial Sequence
  ENSG00000166927_1 (sequence is synthesized)
gctgcgagaacagcatcatcagcatcatgctattacaatcccaaaccatgggggtttctcacagctttacaccaaagggcatcactatccctcaaagagagaaacctggacacatgtacc

SEQ ID NO: 537953 - DNA, 120 bp, Artificial Sequence
  ENSG00000166927_2 (sequence is synthesized)
aaaacgaagattacctgcagaacgggctgccaacagaaaccaccgttcttgggactgtccagatcctgtgttgcctgttgatttcaagtctgggggccatcttggtttttgctccctacc

SEQ ID NO: 537954 - DNA, 120 bp, Artificial Sequence
  ENSG00000166927_3 (sequence is synthesized)
cctcccacttcaatccagcaatttccaccactttgatgtctgggtacccatttttaggagctctgtgttttggcattactggatccctctcaattatctctggaaaacaatcaactaagc

SEQ ID NO: 537955 - DNA, 120 bp, Artificial Sequence
  ENSG00000166927_4 (sequence is synthesized)
cctttgacctgagcagcttgacctcaaatgcagtgagttctgttactgcaggagcaggcctcttcctccttgctgacagcatggtagccctgaggactgcctctcaacattgtggctcag

SEQ ID NO: 537956 - DNA, 120 bp, Artificial Sequence
  ENSG00000166927_5 (sequence is synthesized)
aaatggattatctatcctcattgccttattcggagtactattatccaatatatgaaatcaaagattgtctcctgaccagtgtcagtttaacaggtgtcctagtggtgatgctcatcttca

SEQ ID NO: 537957 - DNA, 120 bp, Artificial Sequence
  ENSG00000166927_6 (sequence is synthesized)
ctgtgctggagctcttattagctgcatacagttctgtcttttggtggaaacagctctactccaacaaccctgggagttcattttcctcgacccagtcacaagatcatatccaacaggtca

SEQ ID NO: 537958 - DNA, 120 bp, Artificial Sequence
  ENSG00000166927_7 (sequence is synthesized)
aaaagagttcttcacggtcttggatataagtaactcttggcctcagaggaaggaaaagcaactcaacactcatggtcaagtgtgattagactttcctgaaatctctgccattttagatac

SEQ ID NO: 537959 - DNA, 120 bp, Artificial Sequence
  ENSG00000166927_8 (sequence is synthesized)
tgtgaaacaaactaaaaaaaaaaaagcttttgttttgtatttgtttactatgagtcgttatttaatttctcttgaaaataatttcctcaaagcccaagtcaataaatgttatcagccagt

SEQ ID NO: 537960 - DNA, 120 bp, Artificial Sequence
  ENSG00000166927_9 (sequence is synthesized)
cttccaaaatggtcataaactttataaactgctttgggtaaactgagcagaaggtgatacacagaagggaaaatgtgcactcatgctagtgtgaatttggtaagttgcgtgactctgcag

SEQ ID NO: 537961 - DNA, 120 bp, Artificial Sequence
  ENSG00000166927_10 (sequence is synthesized)
gctgtttctgtattattttcacactcatattgcttaaatattacatattagggattgtaagaaaactttaattaaaaattaaagactatatataattaaactactctgccctggacactc

SEQ ID NO: 537962 - DNA, 120 bp, Artificial Sequence
  ENSG00000166927_11 (sequence is synthesized)
tctgagaaacagatctactgggccctttttcatgagccattaggtggaagacagcaaagagatcttctcaagtgcttaggattacctctcaacacacagcaagcatgtccctgcctccca

SEQ ID NO: 537963 - DNA, 62 bp, Artificial Sequence
  ENSG00000166927_12 (sequence is synthesized)
tgtggcaccaaccagtggtgctcattctattgtttaaaaatggccttacggatcacccgagg

SEQ ID NO: 537964 - DNA, 120 bp, Artificial Sequence
  ENSG00000166927_13 (sequence is synthesized)
gaagaatcacttgaacccgggaaggggaggttgcagtgagcggagactgcaccactgcattccagcccggcctacaagaacaaaactccatctcaaaataaataaaaaaataaataaaaa

SEQ ID NO: 537965 - DNA, 120 bp, Artificial Sequence
  ENSG00000166927_14 (sequence is synthesized)
aaataaatgaataaaataaaataaaaaagaatattcagtcgttggcacataaactatgttctcttctgtcatttcagggtaggagtcaatgaagacatcttagtcttaacaagttacaga

SEQ ID NO: 537966 - DNA, 120 bp, Artificial Sequence
  ENSG00000166927_15 (sequence is synthesized)
taatctctgactggcatgttttctgcttctagcttggagctaaatgctgctcatgctgaaaagaataatgtctatttctttgtttgggtattagctctattttgatctatagcacagttt

SEQ ID NO: 537967 - DNA, 120 bp, Artificial Sequence
  ENSG00000166927_16 (sequence is synthesized)
tgtaattcagatcatcacccctgcactttgtaccacatgggcgtattctttcttcccagtcattgctgcaattatcttgtctgttctttgtgtaatatgttctgtgtgagcctctgcatt

SEQ ID NO: 537968 - DNA, 120 bp, Artificial Sequence
  ENSG00000166927_17 (sequence is synthesized)
aaactcgatttcttgggcaattatggaaattccagtgtggctgcagtttaactttgcactctctatgcatatgaggtttcctaaataaatgaggagtagcatagtttaaaatatatatat

SEQ ID NO: 537969 - DNA, 120 bp, Artificial Sequence
  ENSG00000166927_18 (sequence is synthesized)
cttataactttctacaacaaagaattattgagtccaaatgtcatcagtgctcattttgagataccctgctatcgatggtcgctacaaaccaggaaatactcaagttattatgtgtataca

SEQ ID NO: 537970 - DNA, 120 bp, Artificial Sequence
  ENSG00000166927_19 (sequence is synthesized)
ttggttttagttttatgaaacaatttaccttcatgatctcatagttaaaattgtaataaatttaggaatataaaggatcaatatgggaagcaaaatttctaaaggcagtttctgttgttt

SEQ ID NO: 537971 - DNA, 120 bp, Artificial Sequence
  ENSG00000166927_20 (sequence is synthesized)
taattagtatttgtgtagttcaaaccaggaaggatttgactatcattagattttgcttaactttatgaaagctaaaatattctctgttataaaggggcaactccatctggtcctatagca

SEQ ID NO: 537972 - DNA, 120 bp, Artificial Sequence
  ENSG00000166927_21 (sequence is synthesized)
tctttactactgatttttttttgtttaatttgaaaatgcaaagaattgttaaatgttcttaaatgttctcactacaaaaaaagaaaaaagataactacgtgaggtgatggatatgttaat

SEQ ID NO: 537973 - DNA, 120 bp, Artificial Sequence
  ENSG00000166927_22 (sequence is synthesized)
tagctggattgtggtaatcattttggaatgtatatgtatatcaaaacatgtagtacaccctaaatatatataatttttatttgtcaaatatacctcaataaagatggaaaaaaatcgaaa

SEQ ID NO: 537974 - DNA, 120 bp, Artificial Sequence
  ENSG00000166927_23 (sequence is synthesized)
tattcaataagcatttactaattatatcacatgattaactaaatagcgacaagagatacaaagatgaataaaacacagtttgtgcccacacaaggaaacaggaaggaaacagacccaagg

SEQ ID NO: 537975 - DNA, 120 bp, Artificial Sequence
  ENSG00000166927_24 (sequence is synthesized)
atgtgaaatctctgtgtctcccctttgcatactctctgcttttctggcagtctctggttggtcggtccgaatgcctggagacagacagaaataaacaaaaacttgtggttggaagaggcc

SEQ ID NO: 537976 - DNA, 120 bp, Artificial Sequence
  ENSG00000166927_25 (sequence is synthesized)
tgtctgctgactgcatggtgtgggggatgtactatagaaagtcaaaagaggaaatcatgaaggacagtagggagtctatccctccactggtctttcttaatcacaaacgttccaacctta

SEQ ID NO: 537977 - DNA, 120 bp, Artificial Sequence
  ENSG00000166927_26 (sequence is synthesized)
atgggtttaactcttaaagtacaacctttgttgtactcatcacaggcagaaatattcttcctactcatcacaggcagaaatattcttcatttgaattatattttaatttgggattctttt

SEQ ID NO: 537978 - DNA, 120 bp, Artificial Sequence
  ENSG00000166927_27 (sequence is synthesized)
atcgttctggcaggaacagccagtgggaggttccagctgagcgctccccagaggtgagctgatccccagccacagcacacaggaccaggctgcgagaacagctttacaccaaagggcatc

SEQ ID NO: 537979 - DNA, 120 bp, Artificial Sequence
  ENSG00000166927_28 (sequence is synthesized)
cccctctgtgcatctgcatgtcattcaaagtcaatatagacattcttatatcaggtgggaattaggcctatctagcaatatagatccacaagatttctgcagtgttctctccctaaaagt

SEQ ID NO: 537980 - DNA, 120 bp, Artificial Sequence
  ENSG00000166927_29 (sequence is synthesized)
tttccaacatcactttttgattgagtgattgacagtgacatggtgggcacatttccacaagacaactgaactgatcatttctctctcttctgggcagtttggcattactggatccctctc

SEQ ID NO: 537981 - DNA, 120 bp, Artificial Sequence
  ENSG00000166927_30 (sequence is synthesized)
atcataaatactgctctaagaaagggacaggaagtctcagaggctggagagcagagcaccaagatcgttctggcaggaacagccagtgggaggttccagctgagcgctccccagagcatc

SEQ ID NO: 537982 - DNA, 120 bp, Artificial Sequence
  ENSG00000166927_31 (sequence is synthesized)
aggcaacagaatgattctaaggctattgaggaagtcatgggagatgttggcagtgacctgagcagcactgtctctatcttgagtgctatagagagtcaatgggccagaacccctctccct

SEQ ID NO: 537983 - DNA, 120 bp, Artificial Sequence
  ENSG00000166927_32 (sequence is synthesized)
aaggggaatactgagaaaatactttgtaaatgtatctagactacagatctacagtgggtctgggaaactctttcactcttttctggctgactccaggctaatgaggacatgaaatggagc

SEQ ID NO: 537984 - DNA, 120 bp, Artificial Sequence
  ENSG00000166927_33 (sequence is synthesized)
tttaagggaagactcttaaagctctgcagcagtttctagaaactaaaaccactagatctttttcactagcatgcttcacaattaacaggttagtctttcttattttatttatttatatat

SEQ ID NO: 537985 - DNA, 120 bp, Artificial Sequence
  ENSG00000166928_0 (sequence is synthesized)
agagtcatcactaagggctcatctctgagggctccatgtgactctggtggagaggtagatcatgatttgggcggcaatgtttgctcactctttcccttactagagttctgccatagaatc

SEQ ID NO: 537986 - DNA, 120 bp, Artificial Sequence
  ENSG00000166928_1 (sequence is synthesized)
atggagtcaacatcccaggacagaagggcaactcacgtcatcactataaaaccaaacgaaactgtattgactgcatttccctacagacctcatagctctctgctggattttctgaaggga

SEQ ID NO: 537987 - DNA, 120 bp, Artificial Sequence
  ENSG00000166928_2 (sequence is synthesized)
gagccaagagtcttgggggctacccagatcctgcttgctctaatcattgtgggctttggaactatatttgcacttaattacatcggtttctcccaaagacttccccttgttgtcctcaca

SEQ ID NO: 537988 - DNA, 120 bp, Artificial Sequence
  ENSG00000166928_3 (sequence is synthesized)
ggatatccattctggggagcacttatttttattcttacaggatacctcacagtaaccgataagaaatcaaaacttctgggtcaaggtgtcacgggcatgaatgttatcagctccttggtt

SEQ ID NO: 537989 - DNA, 120 bp, Artificial Sequence
  ENSG00000166928_4 (sequence is synthesized)
gcgataactgggattactttcaccattctcagctacagacatcaagacaagtactgccagatgccatcctttgaagaaatatgtgttttcagtagaactcttttcattgttctgtttttc

SEQ ID NO: 537990 - DNA, 120 bp, Artificial Sequence
  ENSG00000166928_5 (sequence is synthesized)
ttgccttcggatgttactcaaaatagtgaacaacctgccccagaagaaaatgatcaattacaatttgtgcttcaagaagagttttccagtgatgattcaacaacaaatgcacaatctgtt

SEQ ID NO: 537991 - DNA, 120 bp, Artificial Sequence
  ENSG00000166928_6 (sequence is synthesized)
atctttggaggctatgctttcttcaagttaacactctctaggagtcctttagtctcccaaccaggtaataaaggtagagaatttgtgccagatgaacaaaagcaaagtatccttccatct

SEQ ID NO: 537992 - DNA, 120 bp, Artificial Sequence
  ENSG00000166928_7 (sequence is synthesized)
cccaaattttcagaggaagaaattgaacctttgcctcccacactagagaaaaagccctcagaaaatatgtccattcagctagactctacatttaaacaaatgaaagatgaagatctacaa

SEQ ID NO: 537993 - DNA, 120 bp, Artificial Sequence
  ENSG00000166928_8 (sequence is synthesized)
tctgctattgtacaaccttctcaaatgcaaaccaagcttctgcaggaccaagctgcgtcactccaagtttttccatcccattctgcactaaaactcgaagatatatcacctgaagacttg

SEQ ID NO: 537994 - DNA, 120 bp, Artificial Sequence
  ENSG00000166928_9 (sequence is synthesized)
ccatcccaagctctaccagtagaaggcctgtcagaacaaaccatgccatctaagtctacatcatcccatgtcaaacagtcttctaatctgacagctaatgacctgccccctcaaggcata

SEQ ID NO: 537995 - DNA, 120 bp, Artificial Sequence
  ENSG00000166928_10 (sequence is synthesized)
ctatcccaagacacatcatctcaagatatgctgtttcatgacatgacatcccaagatatgcaatccctagatatgctatctcaagacacaccatcccacgccatgccacctcaagacata

SEQ ID NO: 537996 - DNA, 120 bp, Artificial Sequence
  ENSG00000166928_11 (sequence is synthesized)
ccttcccaagatatgctatcccaagctctatcagcgcatgccatattacctgaagcctcaacatcccatattgtgcagttccctgaaatacaacacctacttcagcagcccccagatctt

SEQ ID NO: 537997 - DNA, 120 bp, Artificial Sequence
  ENSG00000166928_12 (sequence is synthesized)
agcaaattttacaaatgtcatatcaagatattagatcagaagttatggaagagaccaaagaatggaaatctgaggaggaactccatagaagaaaatcctcaagacggcattccttaaacc

SEQ ID NO: 537998 - DNA, 120 bp, Artificial Sequence
  ENSG00000166928_13 (sequence is synthesized)
agcaaaccaaagccttgcaatacttaaggagacattctttagacgtgcaagccaaaggccagaaatcctcaaagaggcattccttagatcagcaaagcaaaggctggcaatctccaaagc

SEQ ID NO: 537999 - DNA, 120 bp, Artificial Sequence
  ENSG00000166928_14 (sequence is synthesized)
agaaatccttagaccagcaaatcaaagactggctatccccaaagaggcactccgtagataagcaagctcaacttaatcaaactaaagagcaactcccagatcagcaagctgaagatcagc

SEQ ID NO: 538000 - DNA, 120 bp, Artificial Sequence
  ENSG00000166928_15 (sequence is synthesized)
aagccaaaggggaacaatacccagaaggacaatctaaagatggacaagttaaagaccagcagactgataaggagcaaaactcaaagaagcaaacccaggatcagcaaactgaagaccagc

SEQ ID NO: 538001 - DNA, 120 bp, Artificial Sequence
  ENSG00000166928_16 (sequence is synthesized)
cggcccaagagaagaaatccccgaaaggacaattccaaaatgttcaagccgaaggacagcaagctcaggtggagaaagtgccaaaactgttatgccaagattcagaatcccaaatacagc

SEQ ID NO: 538002 - DNA, 120 bp, Artificial Sequence
  ENSG00000166928_17 (sequence is synthesized)
aataccaattctggcaattccacaaaggcaatctccaggctggacaacccaggactgtcaatcttttggccaagaatcccctgactggataactcagggctggagaaacaaagattataa

SEQ ID NO: 538003 - DNA, 120 bp, Artificial Sequence
  ENSG00000166928_18 (sequence is synthesized)
agcacgagaatggcaatttgaaatgaagcactggcaaacacaggatctattagagaaagaagccctaaagcagaaagctctataccaagaagtccaaacccagcacgcaacagcccaaca

SEQ ID NO: 538004 - DNA, 120 bp, Artificial Sequence
  ENSG00000166928_19 (sequence is synthesized)
taacctagaatgtcaagacactcaagataaagaccaacaagaccttcaatccagagttacacaaaaaggagatatgtacactagagacatcaaaccaggggacatgaaatgtatagggca

SEQ ID NO: 538005 - DNA, 120 bp, Artificial Sequence
  ENSG00000166928_20 (sequence is synthesized)
aacctcaggggacctgcaatcagaagacgtgaaggcagattttcattcttcttctggccaaagctcagtacaagacacatgtttagcctatttgtccaatctagattcagaacaagatgt

SEQ ID NO: 538006 - DNA, 120 bp, Artificial Sequence
  ENSG00000166928_21 (sequence is synthesized)
gcaaccagacacttcagcttcctcaaattcatataaagaagatgtgaatttaacttctacttcatgtgatccaaaagatcaacagcaatctgaagactctgactaacatgcagaatctac

SEQ ID NO: 538007 - DNA, 120 bp, Artificial Sequence
  ENSG00000166928_22 (sequence is synthesized)
ccaataccacactgcccccattaatggaattaaattgggaaaaacaatattgcctcctccaatctgtgttctcaactgtggttgccacctcattaacttacaaaaaaatgaagggcatgc

SEQ ID NO: 538008 - DNA, 120 bp, Artificial Sequence
  ENSG00000166928_23 (sequence is synthesized)
tgagcactcaaacaatttgttcttacttaaaataaaatgacaacaaaccaaatgttaacactgtatcatcactttatgtatgtgaagaaataattcacatgtatattccttgtcatcaaa

SEQ ID NO: 538009 - DNA, 120 bp, Artificial Sequence
  ENSG00000166928_24 (sequence is synthesized)
cccaagatgatcagaggatcagcttcttccggctttgaaccgtcaccagggaattttgttaatcttactgatcatcagcatagcagagctcagcatctctgtgactattgcatcctttag

SEQ ID NO: 538010 - DNA, 120 bp, Artificial Sequence
  ENSG00000166928_25 (sequence is synthesized)
ggaagtctcagaggctggagagcagagcaccaagatcgttctggcaggaacagccagtgggaggttccagctgagcgctccccagaggtgagctgatccccagccacagcacacaggacc

SEQ ID NO: 538011 - DNA, 120 bp, Artificial Sequence
  ENSG00000166928_26 (sequence is synthesized)
atcaagtaaaagaaactcctttcaaaggagggcagaagcgtggctgagtttaaaaaacatagattttggagacaggtcaagttgagtttgccccttccctgtcctgtatgtctttgggtg

SEQ ID NO: 538012 - DNA, 120 bp, Artificial Sequence
  ENSG00000166928_27 (sequence is synthesized)
acataaccttgctgttcctcagtttcagtattgtagaactgttaaaagaataaatgttagtgcatgtcaacaccttctacacagttcccagaacataaggaatattccataagttttagt

SEQ ID NO: 538013 - DNA, 120 bp, Artificial Sequence
  ENSG00000166928_28 (sequence is synthesized)
tcctttataactcatgaacatatgtgtaaggacttgtttcgtatataccatctattctttgtttaccatatgtttgtaagcaaattgacaagagagtaagtcttctggatacagtacttt

SEQ ID NO: 538014 - DNA, 120 bp, Artificial Sequence
  ENSG00000166928_29 (sequence is synthesized)
gtgagtactgtcgattagaagctttggagaaattgctataaagatagatttgaactgcttcacgtcctagggtaatgaattccataaatatggccctccaggagaccaaaaaaggcagct

SEQ ID NO: 538015 - DNA, 120 bp, Artificial Sequence
  ENSG00000166928_30 (sequence is synthesized)
cccttcacggcaaaagaagcaactccatttggtcactgcactaccatcatcattgtaataactactctcagtttattcttacaggatacctcacagtaaccgataagaaatcaaaacttc

SEQ ID NO: 538016 - DNA, 120 bp, Artificial Sequence
  ENSG00000166930_0 (sequence is synthesized)
aaacaattccagtgctccaggcagcctcagcacaagaaaagaacatggtctagactgaagtaccaactaaatcatctcctttcaaattatcaccgacaccatcatggattcaagcaccgc

SEQ ID NO: 538017 - DNA, 120 bp, Artificial Sequence
  ENSG00000166930_1 (sequence is synthesized)
acacagtccggtgtttctggtatttcctccagaaatcactgcttcagaatatgagtccacagaactttcagccacgaccttttcaactcaaagccccttgcaaaaattatttgctagaaa

SEQ ID NO: 538018 - DNA, 120 bp, Artificial Sequence
  ENSG00000166930_2 (sequence is synthesized)
aatgaaaatcttagggactatccagatcctgtttggaattatgaccttttcttttggagttatcttccttttcaccttgttaaaaccatatccaaggtttccctttatatttctttcagg

SEQ ID NO: 538019 - DNA, 120 bp, Artificial Sequence
  ENSG00000166930_3 (sequence is synthesized)
gttttgttcattaattctggagccttcctaattgcagtgaaaagaaaaaccacagaaactctgataatattgagccgaataatgaattttcttagtgccctgggagcaatagctggaatc

SEQ ID NO: 538020 - DNA, 120 bp, Artificial Sequence
  ENSG00000166930_4 (sequence is synthesized)
attctcctcacatttggtttcatcctagatcaaaactacatttgtggttattctcaccaaaatagtcagtgtaaggctgttactgtcctgttcttgggaattttgattacattgatgact

SEQ ID NO: 538021 - DNA, 120 bp, Artificial Sequence
  ENSG00000166930_5 (sequence is synthesized)
ttcagcattattgaattattcatttctctgcctttctcaattttggggtgccactcagaggattgtgattgtgaacaatgttgttgactagcactgtgagaataaagatgtgttaaaata

SEQ ID NO: 538022 - DNA, 82 bp, Artificial Sequence
  ENSG00000166930_6 (sequence is synthesized)
agctcccagcgtgagatactgtgcttgatgaccctgcagctccagactagactaaaaagagaggggacacaagggaacttga

SEQ ID NO: 538023 - DNA, 120 bp, Artificial Sequence
  ENSG00000166938_0 (sequence is synthesized)
actccgcggccgccgggagacacgccgccatgctgcagaagcgggagaaggtgctgctgctgaggaccttccagggccgcacgctgcggatcgtgcgcgagcactacctgcggccctgcg

SEQ ID NO: 538024 - DNA, 120 bp, Artificial Sequence
  ENSG00000166938_1 (sequence is synthesized)
tgccctgccacagcccgctctgcccgcagcccgccgcctgcagccacgatgggaaactcttgtctagtgatgtgactcattacgtgatcccagactggaaagttgttcaagattatcttg

SEQ ID NO: 538025 - DNA, 120 bp, Artificial Sequence
  ENSG00000166938_2 (sequence is synthesized)
agatccttgagtttcctgagttgaagggaattattttcatgcagacagcttgtcaagctgtgcagcatcaaagaggcaggagacagtataacaaactgcgaaacctgctgaaggatgcgc

SEQ ID NO: 538026 - DNA, 120 bp, Artificial Sequence
  ENSG00000166938_3 (sequence is synthesized)
gtcatgattgcattctctttgctaatgaattccagcaatgctgctatctgccacgggaaagaggagagtccatggagaagtggcagaccaggagcatatacaacgcagctgtttggtact

SEQ ID NO: 538027 - DNA, 120 bp, Artificial Sequence
  ENSG00000166938_4 (sequence is synthesized)
atcatcactgccaggacaggatgccaattgttatggtgacagaagatgaagaggcaattcagcagtatggaagtgaaacagaaggagtattcgtgattactttcaagaattacctggaca

SEQ ID NO: 538028 - DNA, 120 bp, Artificial Sequence
  ENSG00000166938_5 (sequence is synthesized)
atttctggcctgatttaaaagctgcccacgagctttgtgattctatccttcagtctcgacgggagagagagaatgagagtcaggagagccatgggaaggagtacccagaacatcttcccc

SEQ ID NO: 538029 - DNA, 120 bp, Artificial Sequence
  ENSG00000166938_6 (sequence is synthesized)
tggaagtgttagaagctgggattaaatctggacgctatatccagggaattctgaatgtcaacaaacacagagcccaaatagaagcttttgttcgacttcaaggagccagcagtaaagatt

SEQ ID NO: 538030 - DNA, 120 bp, Artificial Sequence
  ENSG00000166938_7 (sequence is synthesized)
cagatttagtcagtgacatcctaatccacgggatgaaggctcgaaaccgctcaattcatggagatgtggtagttgtggagctgcttcctaaaaatgaatggaaaggaagaaccgtagccc

SEQ ID NO: 538031 - DNA, 120 bp, Artificial Sequence
  ENSG00000166938_8 (sequence is synthesized)
tgtgtgagaatgactgtgacgacaaggcttcgggcgagtccccaagtgagcccatgcctacaggtcgagtggtgggcatacttcagaagaactggcgggattatgtggtgacatttccgt

SEQ ID NO: 538032 - DNA, 120 bp, Artificial Sequence
  ENSG00000166938_9 (sequence is synthesized)
ccaaagaagaggtccaatctcagggcaaaaatgctcagaaaatcctggttacaccttgggattacagaattcccaaaattcgaattagcactcagcaagcagaaaccctccaggacttca

SEQ ID NO: 538033 - DNA, 120 bp, Artificial Sequence
  ENSG00000166938_10 (sequence is synthesized)
gggtggtcgtgcgcatcgattcctgggagtcaacatctgtgtatccaaatggacattttgtgcgtgttttaggaagaatcggagatctggaaggggaaattgcaaccatcctggtggaaa

SEQ ID NO: 538034 - DNA, 120 bp, Artificial Sequence
  ENSG00000166938_11 (sequence is synthesized)
acagtatttcagttattcctttctcagaagctcagatgtgtgagatgccagtaaacacaccagaaagtccctggaaggtgagtcctgaagaggaacaaaaacgtaaagacttgaggaaaa

SEQ ID NO: 538035 - DNA, 120 bp, Artificial Sequence
  ENSG00000166938_12 (sequence is synthesized)
gccatctcgtattcagcattgaccccaaaggttgtgaagatgtggatgacacactctcagtcagaaccttaaataatggcaacctggaacttggggtccacatcgcagatgtaacacact

SEQ ID NO: 538036 - DNA, 120 bp, Artificial Sequence
  ENSG00000166938_13 (sequence is synthesized)
ttgtggcaccaaattcttacattgatattgaagctagaacaagggccaccacttattatctagcagatcgtcgctatgacatgctgccttccgtcctcagtgcagatttgtgttcccttc

SEQ ID NO: 538037 - DNA, 120 bp, Artificial Sequence
  ENSG00000166938_14 (sequence is synthesized)
tgggaggcgttgataggtatgctgtaagcatcatgtgggaactggataaagcctcttatgaaattaagaaagtgtggtatggcagaaccattattcgatcagcatacaaactgttctatg

SEQ ID NO: 538038 - DNA, 120 bp, Artificial Sequence
  ENSG00000166938_15 (sequence is synthesized)
aagacttggatgagaagagcagacaagccaagctggaggagttggtgtgggcaattggaaagctgaccgacatagctcgccatgtcagagctaaacgagacggatgtggtgccctggaac

SEQ ID NO: 538039 - DNA, 120 bp, Artificial Sequence
  ENSG00000166938_16 (sequence is synthesized)
tggaaggggtagaggtttgcgtacagctagatgacaaaaagaacattcacgacctcatccccaagcagcccctggaagtccacgagacagtggctgaatgcatgatcctggccaaccact

SEQ ID NO: 538040 - DNA, 120 bp, Artificial Sequence
  ENSG00000166938_17 (sequence is synthesized)
gggtcgccaaaaagatctgggagagcttccctcatcaggccttgctgcgccagcaccctcctccacaccaggagttcttttcagaactccgggaatgtgctaaagccaaaggcttcttca

SEQ ID NO: 538041 - DNA, 120 bp, Artificial Sequence
  ENSG00000166938_18 (sequence is synthesized)
tagatacacggtccaataaaacactggctgattctctggataatgcgaacgacccccacgatcccattgtgaacaggctactgcgctccatggccacgcaggccatgtcgaatgctctgt

SEQ ID NO: 538042 - DNA, 120 bp, Artificial Sequence
  ENSG00000166938_19 (sequence is synthesized)
acttctccaccggatcctgtgcggaggaggagttccatcattacggtcttgcattagataaatatacccactttacttctccaataagaagatattcagatattgtagtacaccgcttgt

SEQ ID NO: 538043 - DNA, 120 bp, Artificial Sequence
  ENSG00000166938_20 (sequence is synthesized)
taatggcagccatttcaaaagataagaaaatggaaattaagggaaatctgttcagcaacaaagatcttgaggaattatgcagacatatcaacaacagaaaccaagcagcacagcattctc

SEQ ID NO: 538044 - DNA, 120 bp, Artificial Sequence
  ENSG00000166938_21 (sequence is synthesized)
agaagcagtctactgagctcttccagtgcatgtacttcaaagacaaagaccctgccaccgaggagcgttgcatatctgacggagttatttattcaattagaacaaatggtgtgcttctat

SEQ ID NO: 538045 - DNA, 120 bp, Artificial Sequence
  ENSG00000166938_22 (sequence is synthesized)
ttataccaaggtttgggattaaaggtgctgcttatctaaaaaataaagatggtttagtcatctcatgtggcccagatagctgttctgaatggaaaccaggatcccttcaacgatttcaaa

SEQ ID NO: 538046 - DNA, 120 bp, Artificial Sequence
  ENSG00000166938_23 (sequence is synthesized)
acaaaattacctctactacaacagatggggaatctgttacgttccatttgtttgaccatgtaaccgtaagaatatccatacaggcctcacgttgccattctgatacaatcagacttgaaa

SEQ ID NO: 538047 - DNA, 120 bp, Artificial Sequence
  ENSG00000166938_24 (sequence is synthesized)
taattagtaacaaaccatacaagataccaaatacagaacttattcatcagagttcccccttgctgaagagtgagttagtgaaagaagtaactaaatctgtggaagaagctcagcttgccc

SEQ ID NO: 538048 - DNA, 120 bp, Artificial Sequence
  ENSG00000166938_25 (sequence is synthesized)
aagaagtcaaagtaaacatcattcaggaggaatatcaagaatatcgccaaacaaagggaaggagcctatacacacttctagaggagatacgggacctagctctcctggatgtttcaaaca

SEQ ID NO: 538049 - DNA, 120 bp, Artificial Sequence
  ENSG00000166938_26 (sequence is synthesized)
attatggaatatgagaggctcttacttcactaagagctgtcatatgtgaatgttttacagtcttttcaaacttaacatttaatgtgtgtcactcagtgctctagtcgatcaggactgggt

SEQ ID NO: 538050 - DNA, 68 bp, Artificial Sequence
  ENSG00000166938_27 (sequence is synthesized)
aatgtgtgtcactcagtgctctagtcgatcaggactgggtagctatttcgcatatatgtaaaatgttc

SEQ ID NO: 538051 - DNA, 120 bp, Artificial Sequence
  ENSG00000166938_28 (sequence is synthesized)
taaataaagtataattaggtcactatggaaacagagttttcagtaatgagtggacagtaagtggtggctctgcagatggcccctttctaataagtttaataaacccgaaattactggtta

SEQ ID NO: 538052 - DNA, 120 bp, Artificial Sequence
  ENSG00000166938_29 (sequence is synthesized)
gacacggaggcgtaggccccgcggcctgcgcccgctcgccggcctcaccccccggctctctgccggtggggacccagcggcccggatgggaaactcttgtctagtgatgtgactcattac

SEQ ID NO: 538053 - DNA, 120 bp, Artificial Sequence
  ENSG00000166938_30 (sequence is synthesized)
attaattacccggtattagtattaatacggcggctccattcccacatggacctgggggggacaaacaaagtctcctaatcttggacagctgcgcccagcccttcttcacctgccgtccag

SEQ ID NO: 538054 - DNA, 120 bp, Artificial Sequence
  ENSG00000166938_31 (sequence is synthesized)
tcccgccgcaacctcgcgccgtggagaaatggggaggtcccgagctgggagcccccgggagctacaggccagctgctgccgctgcgaagctgacatcgcctgctttgcagccacaggttt

SEQ ID NO: 538055 - DNA, 120 bp, Artificial Sequence
  ENSG00000166938_32 (sequence is synthesized)
cctgacctgcccgcactgttgccccagacttttcccccagtggagagccacttcaccgtagatttgtgaactctctgggcccgcactggagcggaaggtcacggggaagttggactgggg

SEQ ID NO: 538056 - DNA, 120 bp, Artificial Sequence
  ENSG00000166938_33 (sequence is synthesized)
actcctgggccccagtccttggtttctaggccacaagggtggccgatagaacgatgcacgttactggctctcttcccccatgggaggatgagaatgggctgggggtccttgtcagcgaat

SEQ ID NO: 538057 - DNA, 120 bp, Artificial Sequence
  ENSG00000166938_34 (sequence is synthesized)
agacatatcaacaacagaaaccaagtggaaatgtaaagattcaagcaacgcataaagatatgatgacagaggccagacgtggtggctcacttgagggcggatcacttgaggtcaggaatt

SEQ ID NO: 538058 - DNA, 82 bp, Artificial Sequence
  ENSG00000166938_35 (sequence is synthesized)
tctcttgaacccaggaggtggagattgcagtggaattgagactgtgtctcaaaaaaaaaaaaagatatgaagacagaaacat

SEQ ID NO: 538059 - DNA, 120 bp, Artificial Sequence
  ENSG00000166938_36 (sequence is synthesized)
tgtgtctcaaaaaaaaaaaaagatatgaagacagaaacatcacctgttatcttaccacccagagctaacaattaatgattctagacactgctaacatttttatttataaaaatatcggcc

SEQ ID NO: 538060 - DNA, 120 bp, Artificial Sequence
  ENSG00000166938_37 (sequence is synthesized)
tgtcatctcttgctaagaaaatatcagctttattgtgtagtaccgtgaagtatcatatattctagcaaattaaattctagaattattctaaccagtgctttcagaacatttgtagatgtt

SEQ ID NO: 538061 - DNA, 120 bp, Artificial Sequence
  ENSG00000166938_38 (sequence is synthesized)
gcctgcgcccgctcgccggcctcaccccccggctctctgccggtggggacccagcggcccgggtccgcggcttctggggcgcccgggactcccttactgctccgccctgtccaatgggag

SEQ ID NO: 538062 - DNA, 120 bp, Artificial Sequence
  ENSG00000166938_39 (sequence is synthesized)
cctcagaggggcctgagggcgcggaagccgaggcctcctcccgccgcaacctcgcgccgtggagaaatggggaggtcccgagctgggagcccccgggagctacaggccagctgctgccgc

SEQ ID NO: 538063 - DNA, 120 bp, Artificial Sequence
  ENSG00000166938_40 (sequence is synthesized)
tgcgaagctgacatcgcctgctttgcagccacagatgggaaactcttgtctagtgatgtgactcattacgtgatcccagactggaaagttgttcaagattatcttgagatccttgagttt

SEQ ID NO: 538064 - DNA, 120 bp, Artificial Sequence
  ENSG00000166938_41 (sequence is synthesized)
tgacagccagatctttgaccaaaaagagaaaacagattcttggctctcctcatttttgaagacacatttttccctcttcattgttatgtatagagacttaaaacaagtttatttaggcat

SEQ ID NO: 538065 - DNA, 120 bp, Artificial Sequence
  ENSG00000166946_0 (sequence is synthesized)
cttgacgctgtggcccggaagtggagcggctgtcgcagtgcggctccggcagtggcagcggaggcctgtgtttgcggccttcggcaagcgactgagatggcgagcgcaactgcacctgca

SEQ ID NO: 538066 - DNA, 120 bp, Artificial Sequence
  ENSG00000166946_1 (sequence is synthesized)
gccgcagtccccaccctggcttcgcctttggagcagctccggcacttggcggaggagctgcggttgctcctgcctcgagtgcgggtcggcgaagcccaggagaccaccgaggagtttaat

SEQ ID NO: 538067 - DNA, 120 bp, Artificial Sequence
  ENSG00000166946_2 (sequence is synthesized)
cgagagatgttctggagaagactcaatgaggcagctgtgactgtgtcaagggaagccacgactctgaccatagtcttctctcagcttccactgccgtctccacaggaaacccagaagttc

SEQ ID NO: 538068 - DNA, 120 bp, Artificial Sequence
  ENSG00000166946_3 (sequence is synthesized)
tgtgaacaagtccatgctgccatcaaggcatttattgcagtgtactatttgcttccaaaggatcaggggatcaccctgagaaagctggtacggggcgccaccctggacatcgtggatggc

SEQ ID NO: 538069 - DNA, 120 bp, Artificial Sequence
  ENSG00000166946_4 (sequence is synthesized)
atggctcagctcatggaagtactttccgtcactccaactcagagccctgagaacaatgaccttatttcctacaacagtgtctgggttgcgtgccagcagatgcctcagataccaagagat

SEQ ID NO: 538070 - DNA, 120 bp, Artificial Sequence
  ENSG00000166946_5 (sequence is synthesized)
aacaaagctgcagctcttttgatgctgaccaagaatgtggattttgtgaaggatgcacatgaagaaatggagcaggctgtggaagaatgtgacccttactctggcctcttgaatgatact

SEQ ID NO: 538071 - DNA, 120 bp, Artificial Sequence
  ENSG00000166946_6 (sequence is synthesized)
gaggagaacaactctgacaaccacaatcatgaggatgatgtgttggggtttcccagcaatcaggacttgtattggtcagaggacgatcaagagctcataatcccatgccttgcgctggtg

SEQ ID NO: 538072 - DNA, 120 bp, Artificial Sequence
  ENSG00000166946_7 (sequence is synthesized)
agagcatccaaagcctgcctgaagaaaattcggatgttagtggcagagaatgggaagaaggatcaggtggcacagctggatgacattgtggatatttctgatgaaatcagccctagtgtg

SEQ ID NO: 538073 - DNA, 120 bp, Artificial Sequence
  ENSG00000166946_8 (sequence is synthesized)
gatgatttggctctgagcatatatccacctatgtgtcacctgaccgtgcgaatcaattctgcgaaacttgtatctgttttaaagaaggcacttgaaattacaaaagcaagtcatgtgacc

SEQ ID NO: 538074 - DNA, 120 bp, Artificial Sequence
  ENSG00000166946_9 (sequence is synthesized)
cctcagccagaagatagttggatccctttacttattaatgccattgatcattgcatgaatagaatcaaggagctcactcagagtgaacttgaattatgacttttcaggctcatttgtact

SEQ ID NO: 538075 - DNA, 120 bp, Artificial Sequence
  ENSG00000166946_10 (sequence is synthesized)
ctcttcccctctcatcgtcatggtcaggctctgatacctgcttttaaaatggagctagaatgcttgctggattgaaagggagtgcctatctatatttagcaagagacactattaccaaag

SEQ ID NO: 538076 - DNA, 120 bp, Artificial Sequence
  ENSG00000166946_11 (sequence is synthesized)
attgttggttaggccagattgacacctatttataaaccatatgcgtatatttttctgtgctatatatgaaaaataattgcatgatttctcattcctgagtcatttctcagagattcctag

SEQ ID NO: 538077 - DNA, 120 bp, Artificial Sequence
  ENSG00000166946_12 (sequence is synthesized)
gaaagctgccttattctctttttgcagtaaagtatgttgttttcattgtaaagatgttgatggtctcaataaaatgctaacttgccagtgattaaatgagtgcccttccaaagtttcttt

SEQ ID NO: 538078 - DNA, 120 bp, Artificial Sequence
  ENSG00000166946_13 (sequence is synthesized)
ttaccagaaatacagtggattgagactagaacattgctttcatttgggtttgtaggtttaaaaatctgattctaatcagaagtatatttagaacaaaacactttatttataaaagatgac

SEQ ID NO: 538079 - DNA, 120 bp, Artificial Sequence
  ENSG00000166946_14 (sequence is synthesized)
attattatcagcaagtccttctgaatattatcacagattactccatgtctctaaaatatattggcattgagctcatttgttaggtttgcccaccttattgaacagatttattttccttat

SEQ ID NO: 538080 - DNA, 120 bp, Artificial Sequence
  ENSG00000166946_15 (sequence is synthesized)
acatacttgtgttgtccttggttacgtgtgtccccaaatgtaaataccaaatttttataaatcaaaaattttttagtgtgtaagagattttatgtaattttaagggccttttcagttcat

SEQ ID NO: 538081 - DNA, 120 bp, Artificial Sequence
  ENSG00000166946_16 (sequence is synthesized)
ccttttgcaaaaccatcaccacttaattatacttttgcatcagtctagaagactgcatattggaaagcagtgtaaatctataatgatgtatattctggtgagctgaatagggcattatgc

SEQ ID NO: 538082 - DNA, 120 bp, Artificial Sequence
  ENSG00000166946_17 (sequence is synthesized)
atgtcctacaggtctccgccacctctcatgcccatcatcttccttttgtaggtgtaattcataacatatgcctttctgctgtctttaggtataatcagcaacagcagtcattctttgagt

SEQ ID NO: 538083 - DNA, 120 bp, Artificial Sequence
  ENSG00000166946_18 (sequence is synthesized)
gactaatgtatacttggggttggggttgaaattccttaagccaaatgagttttagcttactgttttgaagtgccattttgtattgttaacaagtgtcatgaagggaaggaactaaaatca

SEQ ID NO: 538084 - DNA, 120 bp, Artificial Sequence
  ENSG00000166946_19 (sequence is synthesized)
aactgacagagtgtcaaggcaacaaaataacataaacaaaataataacattgtacaacagtctagttcttttatcctttcatatagagcctattttttatatacttttatatttctctac

SEQ ID NO: 538085 - DNA, 120 bp, Artificial Sequence
  ENSG00000166946_20 (sequence is synthesized)
tggaccaaattcatgttattaacatcagactttaattgtgggatacttaatgaatatagaactctaatataaagacttacctctagctgaattattctctcaggtcctgtattgtataac

SEQ ID NO: 538086 - DNA, 120 bp, Artificial Sequence
  ENSG00000166946_21 (sequence is synthesized)
ctctagctgaattattctctcaggtcctgtattgtataacttcgttcagtcatgtttggatctttaaggataatgatcagggaaagcactgatcaatgtaattttttttttttttttttt

SEQ ID NO: 538087 - DNA, 85 bp, Artificial Sequence
  ENSG00000166946_22 (sequence is synthesized)
ctctgtcccccaagctggagtgcagtggcacatcaagcaattctctggcttcagcctctcaagtagctgggactacagatgcaca

SEQ ID NO: 538088 - DNA, 120 bp, Artificial Sequence
  ENSG00000166946_23 (sequence is synthesized)
gagcccagcttgatcaatgtaattttaagattacctaaaaattccattttgggataatatcccacttcatcagaaatattagaatgatttaagtgttaggtcctttcccttatctgtaag

SEQ ID NO: 538089 - DNA, 120 bp, Artificial Sequence
  ENSG00000166946_24 (sequence is synthesized)
ttaatgaatgtattaatgagcagtaaaatggttgcaaaaaacctgaacctgaacaatctgaatgtactccttaaaggtatctgagcaccttttcaacctgaatgactactcatttatctg

SEQ ID NO: 538090 - DNA, 120 bp, Artificial Sequence
  ENSG00000166946_25 (sequence is synthesized)
ataaagtgatgtagtttggatattcaaccctgcaaacctcatgctgaaattggattcccagtgttggaggtggggcctaatgggaggtgtttggatccctcatgaatggcttcgttccat

SEQ ID NO: 538091 - DNA, 120 bp, Artificial Sequence
  ENSG00000166946_26 (sequence is synthesized)
tggtggggtaatgagtaagttctcgctctatatgtccctcccccaccccagagctggctgttaaaacgaggctggcacctggcacttacccctacccctcaacccattcttgccctgtga

SEQ ID NO: 538092 - DNA, 120 bp, Artificial Sequence
  ENSG00000166946_27 (sequence is synthesized)
tctctgctcacgttgcctcccttcatcttcctgcataagtggaagcagcctgaagccctcactgtttcttgtacagcctgcagagccgtgagccaaataaagctcttttcttttaaacta

SEQ ID NO: 538093 - DNA, 120 bp, Artificial Sequence
  ENSG00000166946_28 (sequence is synthesized)
tccagcgtcccgaccccttttcctcccgctgtcccccacggaggggactgctctcccccgctgcatcctttctgtgaggtaccttacccacctcagcacctgagagggtgaaatagaatt

SEQ ID NO: 538094 - DNA, 120 bp, Artificial Sequence
  ENSG00000166946_29 (sequence is synthesized)
ctaacctcgacattcgggaagtgtttttgagaagtctcggtcggtaagggaagtcttccaagtccgtgcagcactaacgtattggcacctgcctcctcttcggccaccccccagatgagg

SEQ ID NO: 538095 - DNA, 120 bp, Artificial Sequence
  ENSG00000166946_30 (sequence is synthesized)
actacccaactctgcccttatagagcaaacacaactacagacattaaaaccagtgagtatggctgtgtcccaatacacttcatttccaaaaacaggcagtggggcctgacttggcctgag

SEQ ID NO: 538096 - DNA, 120 bp, Artificial Sequence
  ENSG00000166946_31 (sequence is synthesized)
gaccacagtttgccagctcctggtctaagatatcatgaatatcttgggatacagagtatcaggaataagttttttcctgctgtttcttaatggtttattgagttgtcagcccaatatcta

SEQ ID NO: 538097 - DNA, 120 bp, Artificial Sequence
  ENSG00000166946_32 (sequence is synthesized)
ctatatagctaactcctccctggtatgtgatgagtatagtaggcctgccttcataccaggacttcagaaaatgtttgatgatgctgtagaaatatctgccctaggccgggtgcagtggct

SEQ ID NO: 538098 - DNA, 81 bp, Artificial Sequence
  ENSG00000166946_33 (sequence is synthesized)
gaaatatctgctctattccacagcagaagggttgaccactttgatctaatctgtttcctttttcataggaaacccagaagt

SEQ ID NO: 538099 - DNA, 120 bp, Artificial Sequence
  ENSG00000166946_34 (sequence is synthesized)
aagtgttgcatttatcgtgtagatctttgctaatattgtggattatgtcttgtgacttttacctttacccaacttgaacatgtaactttctcccataaaatacagtgaaggataattttg

SEQ ID NO: 538100 - DNA, 120 bp, Artificial Sequence
  ENSG00000166946_35 (sequence is synthesized)
taatgtaagtgacttatataaacaagccattattctaagatacagatgctttgttcctatgacttcccatctcccctgccttgcctgactcataaggcttttaattctcacagccttctc

SEQ ID NO: 538101 - DNA, 120 bp, Artificial Sequence
  ENSG00000166946_36 (sequence is synthesized)
cctcttcaacccgttttaacaccacagatactggctggctctcagccccatatgcaggctcaggccatccttactttcctccacccatgttatatctcaccctatttctgaacatctgca

SEQ ID NO: 538102 - DNA, 120 bp, Artificial Sequence
  ENSG00000166946_37 (sequence is synthesized)
taggttaaatggcctccagccctgcctgtagaatcatgcattgattataatcatgccaaaattataactgaatacatgtcatggatcttcagggttactcaagtggcttaaacttcaagt

SEQ ID NO: 538103 - DNA, 120 bp, Artificial Sequence
  ENSG00000166946_38 (sequence is synthesized)
caggaggggcaagaaaatgccatggggatataagtaagacctgagttttgtgttagcatgtaggttaaagcatgtgggtgtacattaccttatagttctgtaatgcttagactcaggaaa

SEQ ID NO: 538104 - DNA, 120 bp, Artificial Sequence
  ENSG00000166946_39 (sequence is synthesized)
ctctgagcatatatccacctatgtgtcacctgaccgtgcgaatcaatgtaagtactggctttgagggaatagctacagaacaaatgggcagaatttcactaatcactagtatttcctgta

SEQ ID NO: 538105 - DNA, 120 bp, Artificial Sequence
  ENSG00000166946_40 (sequence is synthesized)
agctatagggtacatatttattagtcacatttggatggaagtacaacagtaatgtcacagttcttgcatgcgtttggggttgataaatattcactgaagttgaattataatagccatgag

SEQ ID NO: 538106 - DNA, 120 bp, Artificial Sequence
  ENSG00000166946_41 (sequence is synthesized)
ttataatagccatgagctttggtagttctctcttccataatcacctgggtaatcattcagaaaagcccaaaggccttagaaaatgatgctttaaggctgggcgcggtagctcacacctgt

SEQ ID NO: 538107 - DNA, 85 bp, Artificial Sequence
  ENSG00000166946_42 (sequence is synthesized)
gcgaaacctcatgcacctataatcccagctacttggaaggcttaagcaggagaatcgcttgaagccgggaagtggaggttgcagt

SEQ ID NO: 538108 - DNA, 66 bp, Artificial Sequence
  ENSG00000166946_43 (sequence is synthesized)
gcatcatgcacctataatcccagctacttggaaggcttaagcaggagaatcgcttgaagccgggaa

SEQ ID NO: 538109 - DNA, 120 bp, Artificial Sequence
  ENSG00000166946_44 (sequence is synthesized)
catttctgctttatattttgagctatcagcatttgggaccaattcaggttacattttcctttttctgtccttttttaaattgaaaatattttagatctaaaaaatcttattaaaatgtta

SEQ ID NO: 538110 - DNA, 120 bp, Artificial Sequence
  ENSG00000166946_45 (sequence is synthesized)
tagcaatagtattaataagatcttgctaaatagaaaagaacccgtaatcctgccaccctaacctaatcagcattttaaattttgcatacttccttcaggtcctttttctaaataattttt

SEQ ID NO: 538111 - DNA, 120 bp, Artificial Sequence
  ENSG00000166946_46 (sequence is synthesized)
ttattacttgggtctttaaaaatatttgaactcacctttttatggtagggctcagggtgaataacttctgtgtttcttttctagtctgcgaaacttgtatctgttttaaagaaggcactt

SEQ ID NO: 538112 - DNA, 120 bp, Artificial Sequence
  ENSG00000166946_47 (sequence is synthesized)
gatggcatggctcagctcatggaagtactttccgtcactccaactcagaggtagtgatgccacagtttaggttaccagttattggggttccttgcctcagaggggaaaagctcattttaa

SEQ ID NO: 538113 - DNA, 120 bp, Artificial Sequence
  ENSG00000166946_48 (sequence is synthesized)
ataaatgaatgaatgatgaataagaaagacggtgagcctgaggcttgcttgtgtagcctggcctaaggggcaagagaaggcgtggcctgtcctggcctctgagagtgggatggttggtgc

SEQ ID NO: 538114 - DNA, 120 bp, Artificial Sequence
  ENSG00000166946_49 (sequence is synthesized)
tgtacctcaggggacagggcggggcgggaggaggcggggccaggcctggtctctgataacgggatgggtggtgctggacctcgggcggggccgggcctcgtggcgggaggaggcagggca

SEQ ID NO: 538115 - DNA, 120 bp, Artificial Sequence
  ENSG00000166947_0 (sequence is synthesized)
aggagagaagaaacatgtcagggtgctcacaggagtagtggggggaggttttgctatttccagattcttaagccaacaaaagtgccttcatattttctgtctggaagacagaaagcccag

SEQ ID NO: 538116 - DNA, 120 bp, Artificial Sequence
  ENSG00000166947_1 (sequence is synthesized)
aaggagcccagaagcaacagtttgagagaggcgctttctgcggccaagtggataagaggagcggcctgcaaccatgggacagggtgagccaagccagcgctcgacagggcttgctggact

SEQ ID NO: 538117 - DNA, 120 bp, Artificial Sequence
  ENSG00000166947_2 (sequence is synthesized)
gtatgcagcccccgcagcatcacctgttttcattaaaggaagtgggatggatgccctgggtatcaagagctgtgactttcaggcagcaagaaacaatgaggagcaccacaccaaggccct

SEQ ID NO: 538118 - DNA, 120 bp, Artificial Sequence
  ENSG00000166947_3 (sequence is synthesized)
cagctcccggcgcctctttgtgaggagggggcagcccttcaccatcatcctgtacttccgcgctccagtccgtgcatttctgcctgccctgaagaaggtggccctcactgcacaaactgg

SEQ ID NO: 538119 - DNA, 120 bp, Artificial Sequence
  ENSG00000166947_4 (sequence is synthesized)
agagcagccttccaagatcaacaggacccaagccacattcccaatttccagtctgggggaccgaaagtggtggagtgcagtggtggaggagagagatgcccagtcctggaccatctctgt

SEQ ID NO: 538120 - DNA, 120 bp, Artificial Sequence
  ENSG00000166947_5 (sequence is synthesized)
gaccacacctgcggacgctgtcattggccactactcgcttctgctgcaggtctcaggcaggaagcaactcctcttgggtcagttcacactgctttttaacccctggaatagagaggatgc

SEQ ID NO: 538121 - DNA, 120 bp, Artificial Sequence
  ENSG00000166947_6 (sequence is synthesized)
tgtgttcctgaagaatgaggctcagcgcatggagtacttgttgaaccagaatggtctcatctacctgggtacagctgactgcatccaggcagagtcctgggactttggccagttcgaggg

SEQ ID NO: 538122 - DNA, 120 bp, Artificial Sequence
  ENSG00000166947_7 (sequence is synthesized)
ggatgtcattgacctcagcctgcgcttgctgagcaaggacaagcaggtagagaagtggagccagccggtgcacgtggcccgtgtgttgggtgccttgctgcattttctcaaggagcagag

SEQ ID NO: 538123 - DNA, 120 bp, Artificial Sequence
  ENSG00000166947_8 (sequence is synthesized)
ggtcctgcccaccccgcagacccaggccacccaggaaggggccttgctgaacaagcgccggggcagcgtgcccatcctgcggcagtggctcaccggccgaggccgacctgtgtatgatgg

SEQ ID NO: 538124 - DNA, 120 bp, Artificial Sequence
  ENSG00000166947_9 (sequence is synthesized)
ccaggcctgggtgttggctgctgttgcttgcacagtgctgcgatgcctgggaatccctgcccgcgtggtgaccacgtttgcctcagcacagggcaccggtgggcgtcttctcatagatga

SEQ ID NO: 538125 - DNA, 120 bp, Artificial Sequence
  ENSG00000166947_10 (sequence is synthesized)
ggccagagaggcagaatctggatcttccagacttccacagagtgctggatgacgcggcctgccttgccccagggttatgatggatggcagattctgcacccaagtgctcctaatggaggt

SEQ ID NO: 538126 - DNA, 120 bp, Artificial Sequence
  ENSG00000166947_11 (sequence is synthesized)
ggagtcctggggtcctgtgatctggtgccggtcagagcagtcaaggaggggacgctggggctgaccccagcagtgtcagacctttttgctgccataaatgcctcatgtgtggtctggaag

SEQ ID NO: 538127 - DNA, 120 bp, Artificial Sequence
  ENSG00000166947_12 (sequence is synthesized)
tgctgtgaggatgggacactggagttgactgactccaacacaaagtatgttggcaacaacatcagcaccaagggtgtgggcagtgaccgctgcgaggacatcactcagaactacaagtat

SEQ ID NO: 538128 - DNA, 120 bp, Artificial Sequence
  ENSG00000166947_13 (sequence is synthesized)
cctgaagggtctcttcaggaaaaagaggtgctggagagagtcgagaaagagaaaatggaacgtgagaaagacaacggcatccgtcctcccagtctcgagactgccagtcctctgtacctg

SEQ ID NO: 538129 - DNA, 120 bp, Artificial Sequence
  ENSG00000166947_14 (sequence is synthesized)
ctcttgaaagcacccagctccctacccctgagaggggatgcccagatctcagtgacgctggttaatcacagtgagcaggagaaggcagtgcagctggcaattggggtccaggctgtacac

SEQ ID NO: 538130 - DNA, 120 bp, Artificial Sequence
  ENSG00000166947_15 (sequence is synthesized)
tacaacggtgtccttgctgccaagctctggaggaagaagctgcacctcacgctcagtgccaacctggaaaagataataaccatcggcctgttcttctccaattttgagcgaaacccaccc

SEQ ID NO: 538131 - DNA, 120 bp, Artificial Sequence
  ENSG00000166947_16 (sequence is synthesized)
gagaacaccttccttagactcaccgccatggcaacacactctgaatccaaccttagctgctttgctcaggaagacattgccatttgtagaccacaccttgccatcaagatgccagagaaa

SEQ ID NO: 538132 - DNA, 120 bp, Artificial Sequence
  ENSG00000166947_17 (sequence is synthesized)
gcagagcagtatcaacccctcacagcctcagtcagcctccagaactccctagatgcccccatggaggactgtgtgatctccatcctgggaagggggctcattcacagagagaggagctac

SEQ ID NO: 538133 - DNA, 120 bp, Artificial Sequence
  ENSG00000166947_18 (sequence is synthesized)
agattccgttcagtgtggcctgaaaacaccatgtgtgccaagttccagttcacgccaacacatgtggggctccagagactcactgtggaagtggactgcaacatgttccagaacctaacc

SEQ ID NO: 538134 - DNA, 120 bp, Artificial Sequence
  ENSG00000166947_19 (sequence is synthesized)
aactataaaagcgtcaccgtggtagcccctgaactatcagcttaaacttccagctctatcaccactctcctgccaacccttgttctacaatctaaaccaaacatgtgctaggaagagaaa

SEQ ID NO: 538135 - DNA, 120 bp, Artificial Sequence
  ENSG00000166947_20 (sequence is synthesized)
ggagcccagaagcatgcaggtttaaccagtaccaggtggctctaatgctggggatctgttcaccatggttggagtactgtgatgagccctccttacccatgccctggaagctgtcctgcc

SEQ ID NO: 538136 - DNA, 120 bp, Artificial Sequence
  ENSG00000166947_21 (sequence is synthesized)
ctcacgctcagtgccaacctgggtaatgctctatggccccaccagacaccccccgacacacacacacacatggcccctgccttgggcaggcagcagccacagggcaccccctgcagtctc

SEQ ID NO: 538137 - DNA, 120 bp, Artificial Sequence
  ENSG00000166947_22 (sequence is synthesized)
tagagatggctttgagcccctgctgctcactctcatgttctctctcattcattcattcaacacatatttattgggcctgaagcaggaaaaaaacacgatgccaactgcagtcagataagt

SEQ ID NO: 538138 - DNA, 120 bp, Artificial Sequence
  ENSG00000166947_23 (sequence is synthesized)
aaacagacccttcgtagcagtgtgagaagtgtttgctgagtttaacagagtacagtggcaggagagcacctccccccaggctggaataagctgcccccaaataaattgtactgcatggaa

SEQ ID NO: 538139 - DNA, 120 bp, Artificial Sequence
  ENSG00000166948_0 (sequence is synthesized)
gcgccacactgtcctgacggtgcacacactgctgtgtggaggaacagaggagtccagctggccttcacatggcagggatcagagtcaccaaggtggactggcagcggtcgaggaatggcg

SEQ ID NO: 538140 - DNA, 120 bp, Artificial Sequence
  ENSG00000166948_1 (sequence is synthesized)
ctgcccaccacacccaggagtacccctgccctgagctggtggttcgcaggggccagtcgttcagcctcacgctggagctgagcagagccctggactgtgaggagatcctcatcttcacga

SEQ ID NO: 538141 - DNA, 120 bp, Artificial Sequence
  ENSG00000166948_2 (sequence is synthesized)
tggagacaggaccccgggcttctgaggccctccacaccaaagctgtgttccagacatcggagctggagcggggtgagggctggacagcagcaagggaggctcagatggagaaaactctga

SEQ ID NO: 538142 - DNA, 120 bp, Artificial Sequence
  ENSG00000166948_3 (sequence is synthesized)
ccgtcagtctcgccagccctcccagtgctgtcattggccgctacctgctgagcatcaggctttcctctcaccgcaaacacagcaaccggaggctgggcgagtttgttctccttttcaacc

SEQ ID NO: 538143 - DNA, 120 bp, Artificial Sequence
  ENSG00000166948_4 (sequence is synthesized)
catggtgtgcagaggacgatgtgtttctggcctcagaggaggagagacaggagtacgtgctcagcgacagcggcatcatcttccgaggcgtggagaagcacatacgagcccagggctgga

SEQ ID NO: 538144 - DNA, 120 bp, Artificial Sequence
  ENSG00000166948_5 (sequence is synthesized)
actacgggcagtttgaggaggacatcctgaacatctgcctctccatcctggatcgaagccccggtcaccaaaacaacccagccaccgacgtgtcctgccgccacaaccccatctacgtca

SEQ ID NO: 538145 - DNA, 120 bp, Artificial Sequence
  ENSG00000166948_6 (sequence is synthesized)
ccagggtcatcagtgccatggtgaacagcaacaacgaccgaggtgtggtgcaaggacagtggcagggcaagtacggcggcggcaccagcccgctgcactggcgcggcagcgtggccattc

SEQ ID NO: 538146 - DNA, 120 bp, Artificial Sequence
  ENSG00000166948_7 (sequence is synthesized)
tgcagaagtggctcaagggcaggtacaagccagtcaagtacggccagtgctgggtcttcgccggagtcctgtgcacagtcctcaggtgcttggggatagccacacgggtcgtgtccaact

SEQ ID NO: 538147 - DNA, 120 bp, Artificial Sequence
  ENSG00000166948_8 (sequence is synthesized)
tcaactcagcccacgacacagaccagaacctgagtgtggacaaatacgtggactccttcgggcggaccctggaggacctgacagaagacagcatgtggaatttccatgtctggaatgaga

SEQ ID NO: 538148 - DNA, 120 bp, Artificial Sequence
  ENSG00000166948_9 (sequence is synthesized)
cctaggcccctcttacaatggctggcaggttctggatgccaccccccaggaggagagtgaaggtgtgttccggtgcggcccagcctcagtcaccgccatccgcgagggtgatgtgcacct

SEQ ID NO: 538149 - DNA, 120 bp, Artificial Sequence
  ENSG00000166948_10 (sequence is synthesized)
ggctcacgatggccccttcgtgtttgcggaggtcaacgccgactacatcacctggctgtggcacgaggatgagagccgggagcgtgtatactcaaacacgaagaagattgggagatgcat

SEQ ID NO: 538150 - DNA, 120 bp, Artificial Sequence
  ENSG00000166948_11 (sequence is synthesized)
cagcaccaaggcggtgggcagtgactcccgcgtggacatcactgacctctacaagtatccggaagggtcccggaaagagaggcaggtgtacagcaaggcggtgaacaggctgttcggcgt

SEQ ID NO: 538151 - DNA, 120 bp, Artificial Sequence
  ENSG00000166948_12 (sequence is synthesized)
ggaagcctctggaaggagaatctggatccgcagggctgggggtcgctgtctctggcgtgacgacctcctggagcctgccaccaagcccagcatcgctggcaagttcaaggtgctagagcc

SEQ ID NO: 538152 - DNA, 120 bp, Artificial Sequence
  ENSG00000166948_13 (sequence is synthesized)
tcccatgctgggccacgacctgagactggccctgtgcttggccaacctcacctcccgggcccagcgggtgagggtcaacctgagcggtgccaccatcctctatacccgcaagccagtggc

SEQ ID NO: 538153 - DNA, 120 bp, Artificial Sequence
  ENSG00000166948_14 (sequence is synthesized)
agagatcctgcatgaatcccacgccgtgaggctggggccgcaagaagagaagagaatcccaattacaatatcttactctaagtataaagaagacctgacagaggacaagaagatcctgtt

SEQ ID NO: 538154 - DNA, 120 bp, Artificial Sequence
  ENSG00000166948_15 (sequence is synthesized)
ggctgccatgtgccttgtcaccaaaggagagaagcttctggtggagaaggacattactctagaggacttcatcaccatcaaggttctgggcccagccatggtgggagtggcagttacagt

SEQ ID NO: 538155 - DNA, 120 bp, Artificial Sequence
  ENSG00000166948_16 (sequence is synthesized)
ggaagtgacagtagtcaaccccctcatagagagagtgaaggactgtgcgctgatggtggagggcagcggccttctccaggaacagctcagcatcgacgtgcctaccctggagcctcagga

SEQ ID NO: 538156 - DNA, 120 bp, Artificial Sequence
  ENSG00000166948_17 (sequence is synthesized)
gagggcctcagtccagtttgacatcaccccctccaaaagtggcccaaggcagctgcaggtggaccttgtaagccctcacttcccggacatcaagggctttgtgatcgtccatgtggccac

SEQ ID NO: 538157 - DNA, 120 bp, Artificial Sequence
  ENSG00000166948_18 (sequence is synthesized)
tgccaagtgatggatcatgagggactgagaggggtggatttggcccctgtcctcctcctgcccattctttgtctcttccacatgggagccaggaggcctcagttaatcctgcctcaacct

SEQ ID NO: 538158 - DNA, 120 bp, Artificial Sequence
  ENSG00000166949_0 (sequence is synthesized)
gggagcgcggcgcacgccccgggccggcccagccagcgagcgagcgagcggcgagccgggaggaggagggtggcggggcggtgaggccgcagaggcggagggatctgcgcatcaaagcta

SEQ ID NO: 538159 - DNA, 120 bp, Artificial Sequence
  ENSG00000166949_1 (sequence is synthesized)
aggcggagggatctgcgcatcaaagctagcgaggcgagcgaagtttggccgggggttggactttccttcccggaggcggcacccaaacagctaccccgtgcggaaacccaaacttctgct

SEQ ID NO: 538160 - DNA, 120 bp, Artificial Sequence
  ENSG00000166949_2 (sequence is synthesized)
gccacttggagtctcgcggccgccgcctccgccccgcgttcggggccttcccgaccctgcactgctgccgtccgcccgcccggccgctcttctcttcgccgtgggagccgctccgggcgc

SEQ ID NO: 538161 - DNA, 120 bp, Artificial Sequence
  ENSG00000166949_3 (sequence is synthesized)
cttctcttcgccgtgggagccgctccgggcgcagggccgcgcgccgagccccgcaggctgcagcgccgcggcccggcccggcgccccggcaacttcgccgagagttgaggcgaagtttgg

SEQ ID NO: 538162 - DNA, 120 bp, Artificial Sequence
  ENSG00000166949_4 (sequence is synthesized)
ctgcgcccccggcgtcccgtcgagcccagccccgccgggggcgctcctcgccgcccgcgcgccctccccagccatgtcgtccatcctgcctttcactcccccgatcgtgaagcgcctgct

SEQ ID NO: 538163 - DNA, 120 bp, Artificial Sequence
  ENSG00000166949_5 (sequence is synthesized)
gggctggaagaagggcgagcagaacgggcaggaggagaaatggtgcgagaaggcggtcaagagcctggtcaagaaactcaagaagacggggcagctggacgagctggagaaggccatcac

SEQ ID NO: 538164 - DNA, 120 bp, Artificial Sequence
  ENSG00000166949_6 (sequence is synthesized)
cacgcagaacgtcaacaccaagtgcatcaccatccccaggtccctggatggccggttgcaggtgtcccatcggaaggggctccctcatgtcatctactgccgcctgtggcgatggccaga

SEQ ID NO: 538165 - DNA, 120 bp, Artificial Sequence
  ENSG00000166949_7 (sequence is synthesized)
cctgcacagccaccacgagctacgggccatggagctgtgtgagttcgccttcaatatgaagaaggacgaggtctgcgtgaatccctaccactaccagagagtagagacaccagttctacc

SEQ ID NO: 538166 - DNA, 120 bp, Artificial Sequence
  ENSG00000166949_8 (sequence is synthesized)
tcctgtgttggtgccacgccacacagagatcccggccgagttccccccactggacgactacagccattccatccccgaaaacactaacttccccgcaggcatcgagccccagagcaatat

SEQ ID NO: 538167 - DNA, 120 bp, Artificial Sequence
  ENSG00000166949_9 (sequence is synthesized)
tccagagaccccaccccctggctacctgagtgaagatggagaaaccagtgaccaccagatgaaccacagcatggacgcaggttctccaaacctatccccgaatccgatgtccccagcaca

SEQ ID NO: 538168 - DNA, 120 bp, Artificial Sequence
  ENSG00000166949_10 (sequence is synthesized)
taataacttggacctgcagccagttacctactgcgagccggccttctggtgctccatctcctactacgagctgaaccagcgcgtcggggagacattccacgcctcgcagccatccatgac

SEQ ID NO: 538169 - DNA, 120 bp, Artificial Sequence
  ENSG00000166949_11 (sequence is synthesized)
tgtggatggcttcaccgacccctccaattcggagcgcttctgcctagggctgctctccaatgtcaacaggaatgcagcagtggagctgacacggagacacatcggaagaggcgtgcggct

SEQ ID NO: 538170 - DNA, 120 bp, Artificial Sequence
  ENSG00000166949_12 (sequence is synthesized)
ctactacatcggaggggaggtcttcgcagagtgcctcagtgacagcgctatttttgtccagtctcccaactgtaaccagcgctatggctggcacccggccaccgtctgcaagatcccacc

SEQ ID NO: 538171 - DNA, 120 bp, Artificial Sequence
  ENSG00000166949_13 (sequence is synthesized)
aggatgcaacctgaagatcttcaacaaccaggagttcgctgccctcctggcccagtcggtcaaccagggctttgaggctgtctaccagttgacccgaatgtgcaccatccgcatgagctt

SEQ ID NO: 538172 - DNA, 120 bp, Artificial Sequence
  ENSG00000166949_14 (sequence is synthesized)
cgtcaaaggctggggagcggagtacaggagacagactgtgaccagtaccccctgctggattgagctgcacctgaatgggcctttgcagtggcttgacaaggtcctcacccagatgggctc

SEQ ID NO: 538173 - DNA, 120 bp, Artificial Sequence
  ENSG00000166949_15 (sequence is synthesized)
cccaagcatccgctgttccagtgtgtcttagagacatcaagtatggtaggggagggcaggcttggggaaaatggccatgcaggaggtggagaaaattggaactctactcaacccattgtt

SEQ ID NO: 538174 - DNA, 120 bp, Artificial Sequence
  ENSG00000166949_16 (sequence is synthesized)
gtcaaggaagaagaaatctttctccctcaactgaaggggtgcacccacctgttttctgaaacacacgagcaaacccagaggtggatgttatgaacagctgtgtctgccaaacacatttac

SEQ ID NO: 538175 - DNA, 120 bp, Artificial Sequence
  ENSG00000166949_17 (sequence is synthesized)
cctttggccccactttgaagggcaagaaatggcgtctgctctggtggcttaagtgagcagaacaggtagtattacaccaccggccccctccccccagactctttttttgagtgacagctt

SEQ ID NO: 538176 - DNA, 120 bp, Artificial Sequence
  ENSG00000166949_18 (sequence is synthesized)
tctgggatgtcacagtccaaccagaaacacccctctgtctaggactgcagtgtggagttcaccttggaagggcgttctaggtaggaagagcccgcagggccatgcagacctcatgcccag

SEQ ID NO: 538177 - DNA, 120 bp, Artificial Sequence
  ENSG00000166949_19 (sequence is synthesized)
ctctctgacgcttgtgacagtgcctcttccagtgaacattcccagcccagccccgccccgccccgccccaccactccagcagaccttgccccttgtgagctggatagacttgggatgggg

SEQ ID NO: 538178 - DNA, 120 bp, Artificial Sequence
  ENSG00000166949_20 (sequence is synthesized)
agggagggagttttgtctgtctccctcccctctcagaacatactgattgggaggtgcgtgttcagcagaacctgcacacaggacagcgggaaaaatcgatgagcgccacctctttaaaaa

SEQ ID NO: 538179 - DNA, 120 bp, Artificial Sequence
  ENSG00000166949_21 (sequence is synthesized)
ctcacttacgtttgtcctttttcactttgaaaagttggaaggatctgctgaggcccagtgcatatgcaatgtatagtgtctattatcacattaatctcaaagagattcgaatgacggtaa

SEQ ID NO: 538180 - DNA, 120 bp, Artificial Sequence
  ENSG00000166949_22 (sequence is synthesized)
gtgttctcatgaagcaggaggcccttgtcgtgggatggcatttggtctcaggcagcaccacactgggtgcgtctccagtcatctgtaagagcttgctccagattctgatgcatacggcta

SEQ ID NO: 538181 - DNA, 120 bp, Artificial Sequence
  ENSG00000166949_23 (sequence is synthesized)
tattggtttatgtagtcagttgcattcattaaatcaactttatcatatgctcttttaaatgtttggtttatatattttctttaaaaatcctgggctggcacattgactgggaaacctgag

SEQ ID NO: 538182 - DNA, 120 bp, Artificial Sequence
  ENSG00000166949_24 (sequence is synthesized)
tgagacccagcaactgcttctctcccttctctctcctgaggtgaagcttttccaggttttgttgaagagatacctgccagcacttctgcaagctgaaatttacagaagcaaattcaccag

SEQ ID NO: 538183 - DNA, 120 bp, Artificial Sequence
  ENSG00000166949_25 (sequence is synthesized)
aagggaaacatctcaggccaacataggcaaatgaaaagggctattaaaatatttttacacctttgaaaattgcaggcttggtacaaagaggtctgtcatcttccccctgggatataagat

SEQ ID NO: 538184 - DNA, 120 bp, Artificial Sequence
  ENSG00000166949_26 (sequence is synthesized)
ttcaactggaaaaaagaaaaaagagtcctcttcttttcccagccttttgcagaacacagtagacagaactgccaccttcaattggtactttattctttgctgctgtttttgtataaaatg

SEQ ID NO: 538185 - DNA, 120 bp, Artificial Sequence
  ENSG00000166949_27 (sequence is synthesized)
acctatcccacgtttttgcatgaatttatagcaggaaaaatcaagggatttcctatggaagtcctgctttattccaggtgaagggaaggaagtgtatatacttttggcaagtcatacagc

SEQ ID NO: 538186 - DNA, 120 bp, Artificial Sequence
  ENSG00000166949_28 (sequence is synthesized)
tcaaatgtgatgagatttctgatgttagagggagatggagaggcttcctgatgcctcatctgcagggtcctgtgcctctgaagttctagccatgaggtttccaggtaggacagctgctcc

SEQ ID NO: 538187 - DNA, 120 bp, Artificial Sequence
  ENSG00000166949_29 (sequence is synthesized)
ccaagcctcctgaggacacaggaagagacggaaggagcaccttgacagacttgtgtgagtcttctcgaaggagggttgactcagaacccagagacaatacaaaacccctcacttcctctg

SEQ ID NO: 538188 - DNA, 120 bp, Artificial Sequence
  ENSG00000166949_30 (sequence is synthesized)
agagggccaaatgctgtgagtctgaagtatgtgcctggtgtgaaatgatctatggcctgtttcttacacaggaagccccctgaacctcctgtacatgtgttcatgttcccagccagctct

SEQ ID NO: 538189 - DNA, 120 bp, Artificial Sequence
  ENSG00000166949_31 (sequence is synthesized)
gagacccaggaaccaaatattccattttggcttctgctagagcagtcatggttcctctcctaaaagccatgggcagcagtttccgagggcctgcatgatccacctgctgcacgatcctat

SEQ ID NO: 538190 - DNA, 120 bp, Artificial Sequence
  ENSG00000166949_32 (sequence is synthesized)
gagggcttcctgtggcacacagccctctgggtgcttgggaactagcttcaggcacagcctgattctggtgatccagtgatctatggaagtcgtgtcttactccaggtgaagggggaaaaa

SEQ ID NO: 538191 - DNA, 120 bp, Artificial Sequence
  ENSG00000166949_33 (sequence is synthesized)
aaaagcctatactttggcaggttatgaactttgaatgtgatgaaatgacacgtttggctgcatttggatggtgtcttagaaccctcattgctcagacctgaaggctacttctaggagcat

SEQ ID NO: 538192 - DNA, 120 bp, Artificial Sequence
  ENSG00000166949_34 (sequence is synthesized)
gaagtttgagttttgtgtttttccaaaggatacttccttggccctttttctttattgactagaccaccagaggaggatgtgtgggattgtaggcaaacccacctgtggcatcactgaaaa

SEQ ID NO: 538193 - DNA, 120 bp, Artificial Sequence
  ENSG00000166949_35 (sequence is synthesized)
taaatttgatcatacctaagaggttaggaaatggtgccattcccaccttagagtgctacataggtgctttgggcgtatgtaacattagtgtccttccttgaagccacaagctagttttct

SEQ ID NO: 538194 - DNA, 120 bp, Artificial Sequence
  ENSG00000166949_36 (sequence is synthesized)
tagttttaaaatcctgttgtatgaatggcatttgtatattaaaacacttttttaaaggacagttgaaaagggcaagaggaaaccagggcagttctagaggagtgctggtgactggatagc

SEQ ID NO: 538195 - DNA, 120 bp, Artificial Sequence
  ENSG00000166949_37 (sequence is synthesized)
agttttaagtggcgttcacctagtcaacacgaccgcgtgtgttgcccctgccctgggctccccgccatgacatcttcaccttgcagcttgtgctgagactgacccaagtgcagctagcac

SEQ ID NO: 538196 - DNA, 120 bp, Artificial Sequence
  ENSG00000166949_38 (sequence is synthesized)
tgggacacagatccttgtcttcagcaccttccaaggagccaacttttattccctttcctctctcccctccccacctcgcttcttcccaatttagtaacttagatgcttccagcacatacg

SEQ ID NO: 538197 - DNA, 120 bp, Artificial Sequence
  ENSG00000166949_39 (sequence is synthesized)
taggtagctaccccagccggtttggattacaggcctgtgctggaacatcatctcagttggccaccttcctggcaggctgtagacctgacattttgagacaagcctagaggagtcaggagc

SEQ ID NO: 538198 - DNA, 120 bp, Artificial Sequence
  ENSG00000166949_40 (sequence is synthesized)
agggactttgactcttaggaagagcacacatgagggcaaggctgctggcagacgtctccattgtccttatgttgtctgtgttgtatttttttttttttattgaccatggtgattattttt

SEQ ID NO: 538199 - DNA, 120 bp, Artificial Sequence
  ENSG00000166949_41 (sequence is synthesized)
ttaaaccatcgttaatatactgaagtgagctatagcacatatcatgtgcttagtttgtttatttttctccatctccccttggcttcctagagtttggacatattccaggctaaatgcttt

SEQ ID NO: 538200 - DNA, 120 bp, Artificial Sequence
  ENSG00000166949_42 (sequence is synthesized)
tactcaagactacagaaaggtttgaagtagtgtgtgcatggcatgcacgtatgtaagtaatctggggaagaagcaaagatctgtttcattcttagcctcaggcctcatgagggtctccac

SEQ ID NO: 538201 - DNA, 120 bp, Artificial Sequence
  ENSG00000166949_43 (sequence is synthesized)
agggccggagctcaggttacaccactccttcgtccttacaggagatgtagggagaagaatctgcaggctgcttgtaggactgttcaccaagggggataccagcagcaagagagtgcaccc

SEQ ID NO: 538202 - DNA, 120 bp, Artificial Sequence
  ENSG00000166949_44 (sequence is synthesized)
gtttagccctggaccctgtttcttactgtgtgacttggctagagttgggagttcccccaaaataaacgtgtccccattttaccagaaccaaacctcaacacagcgaagctgtactgtctt

SEQ ID NO: 538203 - DNA, 120 bp, Artificial Sequence
  ENSG00000166949_45 (sequence is synthesized)
tgtgtggcaaagatgttcccttgtaggcccctttcaggtaaccgtcttcacaatgtattttcatcacagtttaaggagcatcagccgcttctcaagtgggtagggaaagcagaaaaacgt

SEQ ID NO: 538204 - DNA, 120 bp, Artificial Sequence
  ENSG00000166949_46 (sequence is synthesized)
acgcaagaggacatggatccaaaatgatgatgaagcatctcccatggggaggtgatggtggggagatgatgggctaaacaggcaacttttcaaaaacacagctatcatagaaaagaaact

SEQ ID NO: 538205 - DNA, 120 bp, Artificial Sequence
  ENSG00000166949_47 (sequence is synthesized)
tgcctcatgtaaactggattgagaaattctcagtgattctgcaatggatttttttttaatgcagaagtaatgtatactctagtattctggtgtttttatatttatgtaataatttcttaa

SEQ ID NO: 538206 - DNA, 120 bp, Artificial Sequence
  ENSG00000166949_48 (sequence is synthesized)
aaccattcagacagataactatttaattttttttaagaaagttggaaaggtctctcctcccaaggacagtggctggaagagttggggcacagccagttctgaatgttggtggagggtgta

SEQ ID NO: 538207 - DNA, 120 bp, Artificial Sequence
  ENSG00000166949_49 (sequence is synthesized)
gtggctttttggctcagcatccagaaacaccaaaccaggctggctaaacaagtggccgcgtgtaaaaacagacagctctgagtcaaatctgggcccttccacaagggtcctctgaaccaa

SEQ ID NO: 538208 - DNA, 120 bp, Artificial Sequence
  ENSG00000166949_50 (sequence is synthesized)
gccccactcccttgctaggggtgaaagcattacagagagatggagccatctatccaagaagccttcactcaccttcactgctgctgttgcaactcggctgttctggactctgatgtgtgt

SEQ ID NO: 538209 - DNA, 120 bp, Artificial Sequence
  ENSG00000166949_51 (sequence is synthesized)
ggagggatggggaatagaacattgactgtgttgattaccttcactattcggccagcctgaccttttaataactttgtaaaaagcatgtatgtatttatagtgttttagatttttctaact

SEQ ID NO: 538210 - DNA, 120 bp, Artificial Sequence
  ENSG00000166949_52 (sequence is synthesized)
tttatatcttaaaagcagagcacctgtttaagcattgtacccctattgttaaagatttgtgtcctctcattccctctcttcctcttgtaagtgcccttctaataaacttttcatggaaaa

SEQ ID NO: 538211 - DNA, 120 bp, Artificial Sequence
  ENSG00000166949_53 (sequence is synthesized)
agtaatcctgctgcgttcctcttagagcattctaatttggacgtgacgttcatcctgggttagtttactgggctgagattggctacaggcctgtgtgcttgggtcagagtgttaaggagg

SEQ ID NO: 538212 - DNA, 120 bp, Artificial Sequence
  ENSG00000166949_54 (sequence is synthesized)
acacatttcagacttgggagttgatccggtcctgcgtgagcaaaggcagttatgatccaagcgggagtcagaggtggacaggggcgaggacaacagaaccaagagctggaacctctactc

SEQ ID NO: 538213 - DNA, 120 bp, Artificial Sequence
  ENSG00000166949_55 (sequence is synthesized)
tgtctttagttttactgtctggagaatcagatgcacaccttcacttagctgtgaatgtcacctccacccagcccagtgcccagaggccaaaatttggcccagatctctccttacctccta

SEQ ID NO: 538214 - DNA, 120 bp, Artificial Sequence
  ENSG00000166949_56 (sequence is synthesized)
gccccagcaccaggtgtattcatcagaggagcccaggtggagggtgcactgggccctctgccaagcttcctgtggggacggcaggcccagtagcctttcggccagcccgtctctgggggc

SEQ ID NO: 538215 - DNA, 120 bp, Artificial Sequence
  ENSG00000166949_57 (sequence is synthesized)
actgcctgctgtggaacggccagagctcctgttcctaggtgggtgaccagaccccacacagcatgggcaacctggcccaggtcccttatctctctgtcccctggtccctttgcccaagga

SEQ ID NO: 538216 - DNA, 120 bp, Artificial Sequence
  ENSG00000166949_58 (sequence is synthesized)
aaggcccccctctccacaccatctccctatttttggaagccctctttgcagacttctccctgctctgggagtcggagcttgtgggccagccttccatctccccttgcaggtatgtcagtg

SEQ ID NO: 538217 - DNA, 120 bp, Artificial Sequence
  ENSG00000166949_59 (sequence is synthesized)
gcacctcccagtgaggagatgggttcaaggggagggactgggttggccttccctttgcatggtactgagtgtggagtgtgtggcaaatgcatcacacaccatgtgtccctggagctgtat

SEQ ID NO: 538218 - DNA, 120 bp, Artificial Sequence
  ENSG00000166949_60 (sequence is synthesized)
ttggctgaagtcatgccagtggatggatttagtggagaggccgacccagctcaagatggaaagacagccagagatgcgctcgggtggtgggggttccttggagaaggctgaggtcagggg

SEQ ID NO: 538219 - DNA, 120 bp, Artificial Sequence
  ENSG00000166949_61 (sequence is synthesized)
gatgatggggtcacagcagctcagaggggaggcaagccctgaaggacagtggctacaagcgggccctgcagagatgcaaaatgagatttaagaagaggccttggatttggcatcagggtt

SEQ ID NO: 538220 - DNA, 120 bp, Artificial Sequence
  ENSG00000166949_62 (sequence is synthesized)
agcacagaggcaaaccacagagtacatttgaggcccagatctgcttatttcgagggtggggccgcgtttttctcctgccacagtgagctaattaaagaaaacaagcttcgggagttggga

SEQ ID NO: 538221 - DNA, 120 bp, Artificial Sequence
  ENSG00000166949_63 (sequence is synthesized)
gagaactgtccacaggacacttggggaggcttgctttggttgtggaggcctccacagcccccggaaggcaggtggaagtgggcatggagggtcctacgcatccccagcgggggtctgagg

SEQ ID NO: 538222 - DNA, 120 bp, Artificial Sequence
  ENSG00000166949_64 (sequence is synthesized)
agcccatggagatgggacagtgttctgaaatgcttcacaaatgtggacttttgccccaaactgtggacagagcgtatgtcctgagcgaggatcaactctgtccctggatggccggttgca

SEQ ID NO: 538223 - DNA, 120 bp, Artificial Sequence
  ENSG00000166949_65 (sequence is synthesized)
gcctcagtgacagcgctatttttgtccagtctcccaactgtaaccagcgctatggctggcacccggccaccgtctgcaagatcccaccaggaaaggcccccctctccacaccatctccct

SEQ ID NO: 538224 - DNA, 120 bp, Artificial Sequence
  ENSG00000166949_66 (sequence is synthesized)
aaaacaagcttcgggagttgggagagaactgtccacaggacacttggggaggcttgctttggttgtggaggcctccacagcccccggaaggtccctggatggccggttgcaggtgtccca

SEQ ID NO: 538225 - DNA, 120 bp, Artificial Sequence
  ENSG00000166949_67 (sequence is synthesized)
caagacctggagctcctacagccacggatgctagcatcatggtgtgcatgtgtgatgtctttgcaaaaggtgtctcagagccaagctgtgaaggccttttaacagaccaccttccttctg

SEQ ID NO: 538226 - DNA, 120 bp, Artificial Sequence
  ENSG00000166949_68 (sequence is synthesized)
aaataatccttgcagtgttacaacagtgtgcccgtgtagagaactgttttgcaaagagctcgatcaatgatgtcatctttgccttccgtgacccaggcagctgggtgcagtctcaagatc

SEQ ID NO: 538227 - DNA, 120 bp, Artificial Sequence
  ENSG00000166949_69 (sequence is synthesized)
ccctgtgacctcccaacttcacaaacatgtcttgcctgcaccctaggcaaacgtggaaaggcgcagctctggtacaccggaaagcatggtggatggggaggtccctggatggccggttgc

SEQ ID NO: 538228 - DNA, 120 bp, Artificial Sequence
  ENSG00000166949_70 (sequence is synthesized)
aaatatgagcttgtgcttgctggaggaggatgacagaggagcctgctgctgagttcactggtgctggggttaggtcactgctgggctgaagcgcactgaccataagagcaacatgtgggc

SEQ ID NO: 538229 - DNA, 120 bp, Artificial Sequence
  ENSG00000166949_71 (sequence is synthesized)
aagagccgcggcactggggtaatttattgccgccgctcgcttcaccaggaaccccacacgctgggttcccacaggatgcgacattcccacaggatgggacaactgcatggaaacccacac

SEQ ID NO: 538230 - DNA, 120 bp, Artificial Sequence
  ENSG00000166949_72 (sequence is synthesized)
aggatgtcaggaagcaactgtaggaaaccccctgtgtgggtgaagcagaggcgtcgctcagggccctctgcctggttctgggctctgggaccctgctcccctcccctgaaccccccctcc

SEQ ID NO: 538231 - DNA, 120 bp, Artificial Sequence
  ENSG00000166949_73 (sequence is synthesized)
cccggccccaggatggagcttgcttgccatcgcagtggatttgcggaagagggttccagagtgtggggagagcgtgctggggaggggagctatttgttcctttccagtcatcgctgtact

SEQ ID NO: 538232 - DNA, 120 bp, Artificial Sequence
  ENSG00000166959_0 (sequence is synthesized)
agcatgtaacctggcctgcatccaggaaatagaggacttcggatccttctaaccctaccacccaactggccccagtacattcattctctcaggaaaaaaaacaaggtccccacagcaaag

SEQ ID NO: 538233 - DNA, 120 bp, Artificial Sequence
  ENSG00000166959_1 (sequence is synthesized)
aaaaggaataggatcaagagatacgtggctgctggcagagcaagcatgaattcgatgacttcagcagttccggtggccaattctgtgttggtggtggcaccccacaatggttatcctgtg

SEQ ID NO: 538234 - DNA, 120 bp, Artificial Sequence
  ENSG00000166959_2 (sequence is synthesized)
accccaggaattatgtctcacgtgcccctgtatccaaacagccagccgcaagtccacctagttcctgggaacccacctagtttggtgtcgaatgtgaatgggcagcctgtgcagaaagct

SEQ ID NO: 538235 - DNA, 120 bp, Artificial Sequence
  ENSG00000166959_3 (sequence is synthesized)
ctgaaagaaggcaaaaccttgggggccatccagatcatcattggcctggctcacatcggcctcggctccatcatggcgacggttctcgtaggggaatacctgtctatttcattctacgga

SEQ ID NO: 538236 - DNA, 120 bp, Artificial Sequence
  ENSG00000166959_4 (sequence is synthesized)
ggctttcccttctggggaggcttgtggtttatcatttcaggatctctctccgtggcagcagaaaatcagccatattcttattgcctgctgtctggcagtttgggcttgaacatcgtcagt

SEQ ID NO: 538237 - DNA, 120 bp, Artificial Sequence
  ENSG00000166959_5 (sequence is synthesized)
gcgatttctggcgtgctgctggtcttctgcctcctggagtttggcatcgcatgcgcatcttcccactttggctgccagttggtctgctgtcaatcaagcaatgtgagtgtcatctatcca

SEQ ID NO: 538238 - DNA, 120 bp, Artificial Sequence
  ENSG00000166959_6 (sequence is synthesized)
aacatctatgcagcaaacccagtgatcaccccagaaccggtgacctcaccaccaagttattccagtgagatccaagcaaataagtaaggctacagattctggaagcatctttcactggga

SEQ ID NO: 538239 - DNA, 120 bp, Artificial Sequence
  ENSG00000166959_7 (sequence is synthesized)
ccaaaagaagtcctcctccctttctgggcttccataacccaggtcgttcctgttctgacagctgaggaaacgtctctcccactgtttgtactctcaccttcattcttcaattcagtctag

SEQ ID NO: 538240 - DNA, 120 bp, Artificial Sequence
  ENSG00000166959_8 (sequence is synthesized)
gaaaccatgctgtttctctatcaagaagaagacagagattttaaacagatgttaaccaagagggactccctagggcacatgcatcagcacatatgtgggcatccagcctctggggccttg

SEQ ID NO: 538241 - DNA, 120 bp, Artificial Sequence
  ENSG00000166959_9 (sequence is synthesized)
gcacacacacattcgtgtgctctgctgcatgtgagcttgtgggttagaggaacaaatatctagacattcaatcttcactctttcaattgtgcattcatttaataaatagatactgagcat

SEQ ID NO: 538242 - DNA, 120 bp, Artificial Sequence
  ENSG00000166959_10 (sequence is synthesized)
ccatatgcctaccccgactattatccttacgcctggggtgtgttctgccaatgattgatcttggaatgagaactcgccccatgcccaccacccattccaccttcaagcctcagtcatccc

SEQ ID NO: 538243 - DNA, 120 bp, Artificial Sequence
  ENSG00000166959_11 (sequence is synthesized)
atctgaacatggagggtcggactgcatctgagctttgcaaataatgacccaaggaatggagatactccggggtttccacatcaggaattatttttcatcaaataaaaaaaatctcagctg

SEQ ID NO: 538244 - DNA, 120 bp, Artificial Sequence
  ENSG00000166959_12 (sequence is synthesized)
ccatatgcctaccccgactattatccttacgcctggggtgtggtgagtatccctctcaaccaaagatcctctaagttctgaattagctacatttagaaaactcccagaaagggcttgaca

SEQ ID NO: 538245 - DNA, 120 bp, Artificial Sequence
  ENSG00000166959_13 (sequence is synthesized)
accaagctacctcactgaacatggtaggaaaaggaggtgctttcagcataggaacaaattttaaagtccttgacccatagctttaagcacatgacctttcccagtttgggtttctgcctt

SEQ ID NO: 538246 - DNA, 120 bp, Artificial Sequence
  ENSG00000166959_14 (sequence is synthesized)
tgtagaacaatacctaccttgtggcaatgttgagagaattaaatgcaattttacaaagaatgcatatgtgcccaccaaccagcacctctcctcacattctctgccttcttgcccattact

SEQ ID NO: 538247 - DNA, 120 bp, Artificial Sequence
  ENSG00000166959_15 (sequence is synthesized)
ataagccagaggttagcaaacttattctctaaagagccaatagtaagcagttaaggttttgcaggcctacagtctctgtcatgtagctatagctgccttacagcagccacagaaagcact

SEQ ID NO: 538248 - DNA, 120 bp, Artificial Sequence
  ENSG00000166959_16 (sequence is synthesized)
cttctaaccctaccacccaactggccccagtacattcattctctcaggaaaaaaaacaaggtccccacagcaaagaaaaggaataggatcaagagatacgtggctgctggcagagcaaga

SEQ ID NO: 538249 - DNA, 120 bp, Artificial Sequence
  ENSG00000166959_17 (sequence is synthesized)
ccatccataatgggatctgagcagccctgaaaaaacatatgttccaagaatacttaatgccatgaggacacattcatgatgaaatattaagttaataaaattcagggggccatgttgtgc

SEQ ID NO: 538250 - DNA, 120 bp, Artificial Sequence
  ENSG00000166959_18 (sequence is synthesized)
tatcaaggtatatatttgaaaagaataatgggagaatacaccaaaatgtaaacagttgttttctccaggcggaggggagattacaggtagtttttatttcatttttgtatttcccatatt

SEQ ID NO: 538251 - DNA, 120 bp, Artificial Sequence
  ENSG00000166959_19 (sequence is synthesized)
actttttagaccatgaaaataaaacatttattaaaattaaaaggaggctcataggggaggcaggacccagcctcagaaacaagacttcagcttgtggctctcctgacaggccatccagat

SEQ ID NO: 538252 - DNA, 120 bp, Artificial Sequence
  ENSG00000166959_20 (sequence is synthesized)
gttgccaggatccacgcccagccctgtggcctctgaagaaaggggtcccagcaagaccaaaatagaccacaaggtggagtcagaatccaataagatcgaatcaaatatttgcccaacagg

SEQ ID NO: 538253 - DNA, 120 bp, Artificial Sequence
  ENSG00000166959_21 (sequence is synthesized)
aaacaaagcaggccatccagatcatcattggcctggctcacatcggcctcggctccatcatggcgacggttctcgtaggggaatacctgtctatttcattctacggaggctttcccttct

SEQ ID NO: 538254 - DNA, 120 bp, Artificial Sequence
  ENSG00000166960_0 (sequence is synthesized)
gaccgcagcagagccggaggggtgggcaggcgcgggtccgggagacgcgcggggaaacgcgcggagccgtgtctgctcaatcaagtcaaatactgaacaacttcctggcggagaggctga

SEQ ID NO: 538255 - DNA, 120 bp, Artificial Sequence
  ENSG00000166960_1 (sequence is synthesized)
gaattttatacttgcttgctcgaaagcaccccaaataagatgatccacgccaacacctcccctttacaggttttaaaatattcttataactatgactgaaaacaagacagtttcctcttc

SEQ ID NO: 538256 - DNA, 120 bp, Artificial Sequence
  ENSG00000166960_2 (sequence is synthesized)
ttccactagagatgatcaaaccaatataggtttaacatgtcaggaagtaaaggctctcagagagaaggcatggtcaaggacaaatgaaggcaatgccatgtctcaaagtttggttctata

SEQ ID NO: 538257 - DNA, 120 bp, Artificial Sequence
  ENSG00000166960_3 (sequence is synthesized)
tggagcctctaaggagaacagtgaaggttttcatgaaagtaaaatgacaaatactgaaggggtgaataaaggcatttactttagctacccatgtcgacgtcacagctgtgccgtagtaaa

SEQ ID NO: 538258 - DNA, 120 bp, Artificial Sequence
  ENSG00000166960_4 (sequence is synthesized)
tattccagcaccttgtgtcaacaaaatgatttcacacatccaagatgtggagtccaaaatacaggagcatttgaaaaggtttgaaacttcttttgaagaatggagcagaacttcttccac

SEQ ID NO: 538259 - DNA, 120 bp, Artificial Sequence
  ENSG00000166960_5 (sequence is synthesized)
aaaagacctgaaagaagattggagtgtaactacaccagtgaaagaggtcaaaccaggagaaaagagagatgaaaagtgtccagagttaaagcaggaaatggaaacattgctctcagaggc

SEQ ID NO: 538260 - DNA, 120 bp, Artificial Sequence
  ENSG00000166960_6 (sequence is synthesized)
cattcgtctcattaaaagtctagaaactgaccgggcagacgctgaagaagctttaaaacaacagagatcaagaaagaatatgattaacatgaaaattgactcttggtcagtctggaaact

SEQ ID NO: 538261 - DNA, 120 bp, Artificial Sequence
  ENSG00000166960_7 (sequence is synthesized)
tcaagaactcccattggctgtgcagaaagaacatgaggcctatttgagtgatgttatagaattacaatggcatcttgaagataaagctaatcaactacaacattttgaaaaacaaaagac

SEQ ID NO: 538262 - DNA, 120 bp, Artificial Sequence
  ENSG00000166960_8 (sequence is synthesized)
agagttagaagaagcaaatgcaaagattcaagcagacatagactacatgaatgaacatggccctctactggactctaagcagaatcaggaacttcaagatctgaagaaccattataaaaa

SEQ ID NO: 538263 - DNA, 120 bp, Artificial Sequence
  ENSG00000166960_9 (sequence is synthesized)
aaaaatggaggtaatggacctacacagaaaagttaatgaagaacttgaagaagctttagaagcctgtgaaaatgccagattgaaggctcagcaaattaaagaagagattgataaggatat

SEQ ID NO: 538264 - DNA, 120 bp, Artificial Sequence
  ENSG00000166960_10 (sequence is synthesized)
ttaccaggatgaaaaaaccatagaggcctacaagagagagatatatcaacttaacagtctatttgatcattactcttcatcagtgataaatgttaatactaatattgaggagaaggaaga

SEQ ID NO: 538265 - DNA, 120 bp, Artificial Sequence
  ENSG00000166960_11 (sequence is synthesized)
ggaagtgactgaagcaataagggaaacaaagtcatcaaaaaatgaattacattctctatcaaaaatgctggaagatttgagaagagtttatgaccaactaacctggaagcaaaaaagtca

SEQ ID NO: 538266 - DNA, 120 bp, Artificial Sequence
  ENSG00000166960_12 (sequence is synthesized)
ttcagctatttctttggcatgtacaaaactgacggaagacaataaaaaacttgagattgatattaacaaaataacagtaaaaaccaatgaaagcatacggaaaaaatcaaaatacgaatc

SEQ ID NO: 538267 - DNA, 120 bp, Artificial Sequence
  ENSG00000166960_13 (sequence is synthesized)
tgaaataaaatatttgacaataatgaagttaaagaatgataaacatctcaagaacatctataaggaggcttatcgcattggtactcttttccacctaaccaaacacaagacagatgaaat

SEQ ID NO: 538268 - DNA, 120 bp, Artificial Sequence
  ENSG00000166960_14 (sequence is synthesized)
ggaagataaaatagcagaagtgagaagaaagttcaagggtagagaagaattcctgaaaaaactcactcaaggtgaagtggctgctggaatggtgcttcagaaaaaactatattccattta

SEQ ID NO: 538269 - DNA, 120 bp, Artificial Sequence
  ENSG00000166960_15 (sequence is synthesized)
cgaagtccaggcacttgagcggaaagagcttataaaaaatagagcaatatgtgccatgtcactggcagaactacaggaacctctgcttcaactagaagatgaagctgaaagaatcagaag

SEQ ID NO: 538270 - DNA, 120 bp, Artificial Sequence
  ENSG00000166960_16 (sequence is synthesized)
tctcgacaaagaacattctgttagtaaacgctcagcaatttttaaagacctagaagcaactaaaagtaagacaatgattttttatgcaaaaataaatgaattgaatgaggaattaaaagc

SEQ ID NO: 538271 - DNA, 120 bp, Artificial Sequence
  ENSG00000166960_17 (sequence is synthesized)
aaaagaagaagaaaagaaaagttttgatcagacacttgaaatattaaagaacaaatttataactatgagatttaaaagggaacatgcacaaactgtgtttgatcattatatgcaagagaa

SEQ ID NO: 538272 - DNA, 120 bp, Artificial Sequence
  ENSG00000166960_18 (sequence is synthesized)
aaaagactgtgaagagagaatctttgaggaagatcagagatttagagtgctccttgctgtaagacaaaaaactcttcaagatacccaaaaaataatagctgattcacttgaagaaaatct

SEQ ID NO: 538273 - DNA, 120 bp, Artificial Sequence
  ENSG00000166960_19 (sequence is synthesized)
gcgtttagctcaagagtatcaacagctacagattacattcttaaaagaaaaggacaattatttcaatatatatgataaacagctatcacttgatacttcaattagagataagaaacagct

SEQ ID NO: 538274 - DNA, 120 bp, Artificial Sequence
  ENSG00000166960_20 (sequence is synthesized)
ctgtcagctgcagagaaggatgcacacactgtggcaggagcacttcaaactggtggtcctcttcagccagatgaggctggccaacttccagacagactctcaggagagtattcagaaaat

SEQ ID NO: 538275 - DNA, 120 bp, Artificial Sequence
  ENSG00000166960_21 (sequence is synthesized)
attagctgtgcaggaggaatcttcaaatttaatgcaacacatcttaggtttcttccagactttgacagatggcacatgcgaaaacgatggttaagcaaacaaccaatgtatcttggatgc

SEQ ID NO: 538276 - DNA, 120 bp, Artificial Sequence
  ENSG00000166960_22 (sequence is synthesized)
tgaaataaaagacaagaaaagtcacacagttcagataacagtgtaattggacattcacctgtttgccatttcacacttccatgaacgaaaaactcactcacctcccagcatgctttgcca

SEQ ID NO: 538277 - DNA, 120 bp, Artificial Sequence
  ENSG00000166960_23 (sequence is synthesized)
ctcttttactcacagcaaatccataacaatgaaacaggtgactttcatgctgctgtcaggaacgatctaatttcagctctgggtgactgattgcaattggctttgcctcatctgataatt

SEQ ID NO: 538278 - DNA, 120 bp, Artificial Sequence
  ENSG00000166960_24 (sequence is synthesized)
aatctatgtcaccattaattggaagagagaataattactggcggtgttgacagtgactgttcgcttccccagatttccctatcgtcttggcccaaataaaggctttgccattcagtactt

SEQ ID NO: 538279 - DNA, 120 bp, Artificial Sequence
  ENSG00000166960_25 (sequence is synthesized)
ctcactgagagctgtctctctcaatcactcctcaatgttctatcttaattttgtggaagtttaaagttttcaatgagctggagatgaatgattaatgaataaatttaaatgcttcatttt

SEQ ID NO: 538280 - DNA, 120 bp, Artificial Sequence
  ENSG00000166960_26 (sequence is synthesized)
gttatgcttaataatataattgatcagaaagatcttattagaagaaaggtgggaaaagtaaagaaaaaattacgaaaaaaggggaagaaaacccttgatgcattaatagaaactgagagt

SEQ ID NO: 538281 - DNA, 120 bp, Artificial Sequence
  ENSG00000166960_27 (sequence is synthesized)
attcattagtgtgtagcatcaataatttagcccatcatttgccaacactgacttggctcagtagttcaatcatgtaaccctgtaaactcactttccattaaaatgaatgttgctgacaaa

SEQ ID NO: 538282 - DNA, 120 bp, Artificial Sequence
  ENSG00000166960_28 (sequence is synthesized)
aaaaccatagaggcctacaagtaagaatttttcgcaaacactaattatagcatttagaaattaaatgttaagtaaaaatgtaatgtatatttctatatagaaaatttagataaagagaaa

SEQ ID NO: 538283 - DNA, 120 bp, Artificial Sequence
  ENSG00000166960_29 (sequence is synthesized)
attcatacctgtcttatcaccaagtttatatgtaaataaaaagatatatatttcatatatgtaaaattatttgtgcataaatccctaaagtactatatttctgtgtcatcttaaagctct

SEQ ID NO: 538284 - DNA, 120 bp, Artificial Sequence
  ENSG00000166960_30 (sequence is synthesized)
gtcatcttaaagctcttcatatatattgcaaaattgcctgaggacatgttataacaataaatatccctactatgtgtgcaaaagtaactattttaaaaaaatccagcatgggatatgatt

SEQ ID NO: 538285 - DNA, 120 bp, Artificial Sequence
  ENSG00000166960_31 (sequence is synthesized)
gaaccaaatgcaattccctggccaccctgagggagttagagtcgactagttcttcaccccttccagaggcgtgtctgctcaatcaagtcaaatactgaacaacttcctggcggagaggct

SEQ ID NO: 538286 - DNA, 120 bp, Artificial Sequence
  ENSG00000166960_32 (sequence is synthesized)
taactacccttcccaaggtcagatagccagccagtaatggggcccatgaggaactgaattctacatctaactgattgaaaagctatgttctttggcatttgattaaactactttaatcat

SEQ ID NO: 538287 - DNA, 120 bp, Artificial Sequence
  ENSG00000166960_33 (sequence is synthesized)
gcatggagtcctggttgtatcatcccaagtggcaagaaagaaagaggtcctgcggtcctcccgaaggtggacgaagtctgtgatcccctcacgttctaacctcactgctgtacgaagggg

SEQ ID NO: 538288 - DNA, 120 bp, Artificial Sequence
  ENSG00000166961_0 (sequence is synthesized)
aggctctcacaagggcgggctctcagaagagctgcccccaccccctctcccagcccccttcagctgaaattgtctaagaactcattcttggcgttcactgcaagctataagctctgcaag

SEQ ID NO: 538289 - DNA, 120 bp, Artificial Sequence
  ENSG00000166961_1 (sequence is synthesized)
tggtgaccccgacgtgatcgccttgaagttacgcttgaaggaggaaaactcatcaattttcggggaatcccgcctttgtttcccaggctctctgagcacgatgtctgcagctcccgccag

SEQ ID NO: 538290 - DNA, 120 bp, Artificial Sequence
  ENSG00000166961_2 (sequence is synthesized)
caatggagtgtttgttgtcatcccgccaaacaacgccagtggcctctgcccacctccggccattctgcccacatccatgtgccaacctccagggattatgcagtttgaggagccaccgct

SEQ ID NO: 538291 - DNA, 120 bp, Artificial Sequence
  ENSG00000166961_3 (sequence is synthesized)
gggggcacagacaccaagggccacacagccacctgacttgcggcccgtggagacattcctgacaggagagcccaaagttttggggacggtgcagatcctcatcggcctcatccacctagg

SEQ ID NO: 538292 - DNA, 120 bp, Artificial Sequence
  ENSG00000166961_4 (sequence is synthesized)
ctttggcagcgtgctgctcatggttcgccgcggccacgtgggcatcttcttcatcgagggcggcgtccccttctggggaggagcctgcttcatcatctccggatccctctcagtggcagc

SEQ ID NO: 538293 - DNA, 120 bp, Artificial Sequence
  ENSG00000166961_5 (sequence is synthesized)
cgagaagaaccacaccagttgcctggtgaggagcagcctgggcaccaacatcctcagcgtcatggcggcctttgctgggacagccattctgctcatggattttggtgttaccaaccggga

SEQ ID NO: 538294 - DNA, 120 bp, Artificial Sequence
  ENSG00000166961_6 (sequence is synthesized)
tgtggacaggggctatctggccgtgcttactatcttcactgtcctggagttcttcacagcggtcattgccatgcacttcgggtgccaagccatccatgcccaggccagtgcacctgtgat

SEQ ID NO: 538295 - DNA, 120 bp, Artificial Sequence
  ENSG00000166961_7 (sequence is synthesized)
cttcctgccaaacgccttcagcgcagacttcaacatccccagcccggcagcctctgcgccccctgcctatgacaatgtggcatatgcccaaggagtcgtctgagtagcagatgtggcacc

SEQ ID NO: 538296 - DNA, 120 bp, Artificial Sequence
  ENSG00000166961_8 (sequence is synthesized)
ccccacccccaccttgttcatcaggggccagccccatcccagctgccctccctcaccacatctacacatactccggcatctgagtgaagtgtccccagggacatctctcccacactttcc

SEQ ID NO: 538297 - DNA, 120 bp, Artificial Sequence
  ENSG00000166961_9 (sequence is synthesized)
ccagtgctttctttctaaaagacaccgggctgacgtcaggggtgtgtgtccttcagctccctgagccctgtcacccttccaggacacccaccttgtgcatctaagcatttctctgctcat

SEQ ID NO: 538298 - DNA, 120 bp, Artificial Sequence
  ENSG00000166961_10 (sequence is synthesized)
tggggaaatcctggcctcattggagactcaggttcgaggcctgccctgaccctcgggcctcgggaaggtcagagagcccggaatcctccagaatggaagagtctgactctggcattccac

SEQ ID NO: 538299 - DNA, 120 bp, Artificial Sequence
  ENSG00000166961_11 (sequence is synthesized)
agaggtgccgataccaggccaaggcctcacagcagggtagtggcctggccgcaggtctcctggccccaagatcagctctgtcctttgtcatctgttgccacatccatggaactcaggttt

SEQ ID NO: 538300 - DNA, 120 bp, Artificial Sequence
  ENSG00000166961_12 (sequence is synthesized)
cctatttggaaactagagtgttgaaccagataaggttcatcaggcccttccagctccccaggctccctgaagtcctgggtctaggccaggcattgtccccctgcttcctggaaaccctca

SEQ ID NO: 538301 - DNA, 120 bp, Artificial Sequence
  ENSG00000166961_13 (sequence is synthesized)
ttttccttgtctgtaatatgaagtcagcattggccccgccccccaccccctaccatctcccaatggaggggaggttgcaggggagagctgccgccagcccactcctgaggcaccaccaca

SEQ ID NO: 538302 - DNA, 120 bp, Artificial Sequence
  ENSG00000166961_14 (sequence is synthesized)
gtcagcatcgacaggggcacagcagtggcagtttgggacctccctgtgcctctcagcactcccttccccacccccatagcccaaggacaaggctaccacagaaggttaccacaggacctg

SEQ ID NO: 538303 - DNA, 120 bp, Artificial Sequence
  ENSG00000166961_15 (sequence is synthesized)
ggcttcgtctccaggggacaaggagacactgtcagcctggtgttcaccaggcctggtagatgagatggcttgtctcatccacaccacagaaggaaataaaccatgtggcttaaattttga

SEQ ID NO: 538304 - DNA, 120 bp, Artificial Sequence
  ENSG00000166961_16 (sequence is synthesized)
tgcaaagtgccaggggaggggcaccacccaggcagaccagacgcagactgtgcatgtccaggagaagaagacagggatactctttcaatacacaagccagggtggaaagtgaggtccatg

SEQ ID NO: 538305 - DNA, 120 bp, Artificial Sequence
  ENSG00000166961_17 (sequence is synthesized)
ctcatggtcattccgagaaaggaaagatgctagaagatctcctgtaagagtcctgctgggccttggtgagcagagaggacttagaaataccacagggaaagctggagaatgcacggagga

SEQ ID NO: 538306 - DNA, 120 bp, Artificial Sequence
  ENSG00000166963_0 (sequence is synthesized)
actcccaccctaagtgctgcagactcttccctgaagctgccggctgaggccggagctgccgcctccatgagaggcttcctcctacaccccagggccagaggaccctttgccaccagagtg

SEQ ID NO: 538307 - DNA, 120 bp, Artificial Sequence
  ENSG00000166963_1 (sequence is synthesized)
agatcctagagaccatcatcctggtaaatcccagtgcagacagcatcagctctgaggttcatcatcttcttagcagctcatcagcttataaactactaatcttgagtgggcaaagtttag

SEQ ID NO: 538308 - DNA, 120 bp, Artificial Sequence
  ENSG00000166963_2 (sequence is synthesized)
agcctgggggagacctcatcctacagagtggcacctactcatatgaaaactttgcccaggtccttcacaaccccgagatttcccaattgctcagcaatagagaccctgggatacaggcct

SEQ ID NO: 538309 - DNA, 120 bp, Artificial Sequence
  ENSG00000166963_3 (sequence is synthesized)
tccttaccgtgtcctgcttaggggaaggtgattggagccacctgggattatccagttcccaagagaccctgcacctccggctaaaccctgagcccactctgcccaccatggacggcgtgg

SEQ ID NO: 538310 - DNA, 120 bp, Artificial Sequence
  ENSG00000166963_4 (sequence is synthesized)
ctgagttctccgagtatgtctctgagactgtggacgtgccatccccatttgacctactagagccccccacctcagggggcttcctcaagctctccaagccttgttgctacatcttcccag

SEQ ID NO: 538311 - DNA, 120 bp, Artificial Sequence
  ENSG00000166963_5 (sequence is synthesized)
gtggtcgtggggactctgccctctttgctgtcaatggtttcaacatcctggtggatggtggctctgatcgcaagtcctgtttttggaagctggtacggcacttggaccgcattgactcgg

SEQ ID NO: 538312 - DNA, 120 bp, Artificial Sequence
  ENSG00000166963_6 (sequence is synthesized)
tgctactcacacacattggggcagacaacctgccaggcatcaatggactactgcagcgcaaagtggcagagctagaggaggagcagtcccagggctctagcagttacagcgactgggtga

SEQ ID NO: 538313 - DNA, 120 bp, Artificial Sequence
  ENSG00000166963_7 (sequence is synthesized)
agaaccttatctctcctgagcttggagttgtctttttcaacgtgcctgagaagctgcggcttcctgatgcctcccggaaagccaagcgtagcattgaggaggcctgcctcactctgcagc

SEQ ID NO: 538314 - DNA, 120 bp, Artificial Sequence
  ENSG00000166963_8 (sequence is synthesized)
acttaaaccgcctgggcatccaggctgagcctctatatcgtgtggtcagcaataccattgagccactgaccctcttccacaaaatgggtgtgggccggctggacatgtatgtcctcaacc

SEQ ID NO: 538315 - DNA, 120 bp, Artificial Sequence
  ENSG00000166963_9 (sequence is synthesized)
ctgtcaaggacagcaaggagatgcagttcctcatgcaaaagtgggcaggcaatagtaaagccaagacaggcatcgtgctgcccaatgggaaggaggctgagatctccgtgccctacctta

SEQ ID NO: 538316 - DNA, 120 bp, Artificial Sequence
  ENSG00000166963_10 (sequence is synthesized)
cctctatcactgctctggtggtctggctaccagccaatcccactgagaagattgtgcgtgtgctttttccaggaaatgctccccaaaacaagatcttggagggcctagaaaagcttcggc

SEQ ID NO: 538317 - DNA, 120 bp, Artificial Sequence
  ENSG00000166963_11 (sequence is synthesized)
atctggacttcctgcgttaccctgtggccacgcagaaggacctggcttctggggctgtgcctaccaacctcaagcccagcaaaatcaaacagcgggctgatagcaaggagagcctcaaag

SEQ ID NO: 538318 - DNA, 120 bp, Artificial Sequence
  ENSG00000166963_12 (sequence is synthesized)
ccactaccaagacggccgtgagcaagttggccaaacgggaggaggtggtagaagagggagccaaggaggcacgttcagagctggccaaggagttagccaagacagagaagaaggcaaaag

SEQ ID NO: 538319 - DNA, 120 bp, Artificial Sequence
  ENSG00000166963_13 (sequence is synthesized)
agtcatctgagaagcccccagagaagcctgccaagcctgagagggtgaagacagagtcaagtgaggcactgaaggcagagaagcgaaagctgatcaaagacaaggtagggaaaaagcacc

SEQ ID NO: 538320 - DNA, 120 bp, Artificial Sequence
  ENSG00000166963_14 (sequence is synthesized)
ttaaagaaaagatatcaaagctggaagaaaaaaaagacaaggagaaaaaagagatcaaaaaggagaggaaagagctcaagaaggatgaaggaaggaaggaggagaagaaggatgccaaga

SEQ ID NO: 538321 - DNA, 120 bp, Artificial Sequence
  ENSG00000166963_15 (sequence is synthesized)
aggaggagaagaggaaagataccaaacctgagctcaagaagatttccaagccagacctaaagccctttactcctgaggtacgtaagaccctctataaagccaaggtccctggaagagtca

SEQ ID NO: 538322 - DNA, 120 bp, Artificial Sequence
  ENSG00000166963_16 (sequence is synthesized)
aaatagacaggagccgtgctatccgtggggagaaggagctgtcttctgagccccagacacccccagcccagaagggaactgtaccactcccaaccatcagtgggcacagggagctggtcc

SEQ ID NO: 538323 - DNA, 120 bp, Artificial Sequence
  ENSG00000166963_17 (sequence is synthesized)
tatcctcaccagaggacctcacacaggactttgaggagatgaagcgtgaggagagggctttgctggctgaacaaagggacacaggactaggagataagccattccctctagacactgcag

SEQ ID NO: 538324 - DNA, 120 bp, Artificial Sequence
  ENSG00000166963_18 (sequence is synthesized)
aggagggacccccaagtacagctatccagggaacaccaccctctgttccagggctgggacaagaagaacatgtgatgaaggagaaagagcttgtcccagaggtccctgaggaacaaggca

SEQ ID NO: 538325 - DNA, 120 bp, Artificial Sequence
  ENSG00000166963_19 (sequence is synthesized)
gcaaggacagaggcctagactctggggctgaaacagaggaagagaaagatacctgggaggaaaagaagcagagggaagcagagaggctcccagacagaacagaagccagagaggaaagtg

SEQ ID NO: 538326 - DNA, 120 bp, Artificial Sequence
  ENSG00000166963_20 (sequence is synthesized)
aacctgaagtaaaggaggatgtgatagaaaaggctgagttagaagaaatggaggaggtacacccttcagatgaggaggaagaggacgcgacaaaagctgagggtttttaccaaaaacata

SEQ ID NO: 538327 - DNA, 120 bp, Artificial Sequence
  ENSG00000166963_21 (sequence is synthesized)
tgcaggaacccttgaaggtaactccaaggagccgggaggcttttgggggtcgggaattgggactccagggcaaggcccctgagaaggagacctcgttattcctaagcagcctgaccacac

SEQ ID NO: 538328 - DNA, 120 bp, Artificial Sequence
  ENSG00000166963_22 (sequence is synthesized)
ctgcaggagccactgagcatgtctcttacatccaggatgagacaatccctggctactcagagactgagcagaccatctcagatgaggagatccatgatgagccggaggagcgcccagctc

SEQ ID NO: 538329 - DNA, 120 bp, Artificial Sequence
  ENSG00000166963_23 (sequence is synthesized)
cacccagatttcatacaagtacatatgacctgcccgggcctgaaggtgctggcccattcgaagccagccaacctgccgatagtgctgttcctgctacctctggcaaagtctatggaacgc

SEQ ID NO: 538330 - DNA, 120 bp, Artificial Sequence
  ENSG00000166963_24 (sequence is synthesized)
cagagactgaactcacctaccccactaacatagtggctgcccctttggctgaagaggaacatgtgtcctcggccacttcaatcactgagtgtgacaaactttcttcctttgccacatcag

SEQ ID NO: 538331 - DNA, 120 bp, Artificial Sequence
  ENSG00000166963_25 (sequence is synthesized)
tggctgaggaccaatctgtggcctcacttacagctccccagacagaggagacaggcaagagctccctgctgcttgacacagtcacaagcatcccttcctcccgtactgaagctacgcagg

SEQ ID NO: 538332 - DNA, 120 bp, Artificial Sequence
  ENSG00000166963_26 (sequence is synthesized)
gcttggactatgtgccatcagctggtaccatctcacccacctcctcactggaagaagacaagggcttcaaatcaccaccctgtgaggacttctctgtgactggggagtcagagaagagag

SEQ ID NO: 538333 - DNA, 120 bp, Artificial Sequence
  ENSG00000166963_27 (sequence is synthesized)
gagagatcatagggaaaggcttgtctggagagagagctgtggaagaggaagaggaggagacagcaaacgtagagatgtctgagaaactttgcagtcaatatggaactccagtgtttagtg

SEQ ID NO: 538334 - DNA, 120 bp, Artificial Sequence
  ENSG00000166963_28 (sequence is synthesized)
cccctgggcatgccctacatccaggagaaccagcccttggagaagcagaggagcggtgccttagcccagatgacagcacagtgaagatggcttctcctccaccatctggcccacccagtg

SEQ ID NO: 538335 - DNA, 120 bp, Artificial Sequence
  ENSG00000166963_29 (sequence is synthesized)
ccacccacacaccctttcatcagtccccagtggaagaaaagtctgagccccaagactttcaggaggcagactcctggggagacactaagcgcacaccaggtgtgggcaaagaagatgctg

SEQ ID NO: 538336 - DNA, 120 bp, Artificial Sequence
  ENSG00000166963_30 (sequence is synthesized)
ctgaggagacagtcaagccagggcctgaagagggcacactagagaaggaagagaaagttcctcctcccaggagcccccaggcccaggaagcacctgtcaacattgatgaggggcttacag

SEQ ID NO: 538337 - DNA, 120 bp, Artificial Sequence
  ENSG00000166963_31 (sequence is synthesized)
gctgtaccattcaactgttgccagcacaggataaagcaatagtctttgagattatggaggcaggagagcccacaggcccaattctgggagcagaagcccttcccggaggtttgaggactt

SEQ ID NO: 538338 - DNA, 120 bp, Artificial Sequence
  ENSG00000166963_32 (sequence is synthesized)
taccccaagaacctggcaaacctcagaaagatgaggtgctcagatatcctgaccgaagcctctctcctgaagatgcagaatccctctctgtcctcagcgtgccctccccagacactgcca

SEQ ID NO: 538339 - DNA, 120 bp, Artificial Sequence
  ENSG00000166963_33 (sequence is synthesized)
accaagagcctacccccaagtctccctgtggcctgacagaacagtacctacacaaagaccgttggccagaggtatctccagaagacacccagtcactttctctgtcagaagagagtccca

SEQ ID NO: 538340 - DNA, 120 bp, Artificial Sequence
  ENSG00000166963_34 (sequence is synthesized)
gcaaggagacctccctggatgtctcttctaagcagctctctccagaaagccttggcaccctccagtttggggaactaaaccttgggaaggaagaaatggggcatctgatgcaggccgagg

SEQ ID NO: 538341 - DNA, 120 bp, Artificial Sequence
  ENSG00000166963_35 (sequence is synthesized)
atacctctcaccacacagctcccatgtctgttccagagccccatgcagccacagcgtcacctcccacagatgggacaactcgatactctgcacagacagacatcacagatgacagccttg

SEQ ID NO: 538342 - DNA, 120 bp, Artificial Sequence
  ENSG00000166963_36 (sequence is synthesized)
acaggaagtcacctgccagctcattctctcactctacaccttcaggaaatgggaagtacttacctggggcgatcacaagccctgatgaacacattctgacacctgatagctccttctcca

SEQ ID NO: 538343 - DNA, 120 bp, Artificial Sequence
  ENSG00000166963_37 (sequence is synthesized)
agagtcctgagtctttgccaggccctgccttggaggacattgccataaagtgggaagataaagttccagggttgaaagacagaacctcagaacagaagaaggaacctgagccaaaggatg

SEQ ID NO: 538344 - DNA, 120 bp, Artificial Sequence
  ENSG00000166963_38 (sequence is synthesized)
aagttttacagcagaaagacaaaactctggagcacaaggaggtggtagagccgaaggatacagccatctatcagaaagatgaggctctgcatgtaaagaatgaggctgtgaaacagcagg

SEQ ID NO: 538345 - DNA, 120 bp, Artificial Sequence
  ENSG00000166963_39 (sequence is synthesized)
ataaggctttagaacaaaagggcagagacttagagcaaaaagacacagccctagaacagaaggacaaggccctggaaccaaaagacaaagacttagaagaaaaagacaaggccctggaac

SEQ ID NO: 538346 - DNA, 120 bp, Artificial Sequence
  ENSG00000166963_40 (sequence is synthesized)
agaaggataagattccagaagagaaagacaaagccttagaacaaaaggatacagccctggaacagaaggacaaggccctggaaccaaaagataaagacttggaacaaaaggacagggtcc

SEQ ID NO: 538347 - DNA, 120 bp, Artificial Sequence
  ENSG00000166963_41 (sequence is synthesized)
tagaacagaaggagaagatcccagaagagaaagacaaagccttagatcaaaaagtcagaagtgttgaacataaggctccggaggacacggtcgctgaaatgaaggacagagacctagaac

SEQ ID NO: 538348 - DNA, 120 bp, Artificial Sequence
  ENSG00000166963_42 (sequence is synthesized)
aggatcaggccttagaacaaaaatactgggctttgggacagaaggatgaagccctggaacaaaacattcaggctctggaagagaaccaccaaactcaggagcaggagagcctagtgcagg

SEQ ID NO: 538349 - DNA, 120 bp, Artificial Sequence
  ENSG00000166963_43 (sequence is synthesized)
aggataaaaccaggaaaccaaagatgctagaggaaaaatccccagaaaaggtcaaggccatggaagagaagttagaagctcttctggagaagaccaaagctctgggcctggaagagagcc

SEQ ID NO: 538350 - DNA, 120 bp, Artificial Sequence
  ENSG00000166963_44 (sequence is synthesized)
tagtgcaggagggcagggccagagagcaggaagaaaagtactggagggggcaggatgtggtccaggagtggcaagaaacatctcctaccagagaggagccggctggagaacagaaagagc

SEQ ID NO: 538351 - DNA, 120 bp, Artificial Sequence
  ENSG00000166963_45 (sequence is synthesized)
ttgccccggcatgggaggacacatctcctgagcaggacaataggtattggaggggcagagaggatgtggccttggaacaggacacatactggagggagctaagctgtgagcggaaggtct

SEQ ID NO: 538352 - DNA, 120 bp, Artificial Sequence
  ENSG00000166963_46 (sequence is synthesized)
ggttccctcacgagctggatggccagggggcccgcccacactacactgaggaacgggaaagcactttcctagatgagggcccagatgatgagcaagaagtacccctgcgggaacacgcaa

SEQ ID NO: 538353 - DNA, 120 bp, Artificial Sequence
  ENSG00000166963_47 (sequence is synthesized)
cccggagcccctgggcctcagacttcaaggatttccaggaatcctcaccacagaaggggctagaggtggagcgctggcttgctgaatcaccagttgggttgccaccagaggaagaggaca

SEQ ID NO: 538354 - DNA, 120 bp, Artificial Sequence
  ENSG00000166963_48 (sequence is synthesized)
aactgacccgctctccctttgagatcatctcccctccagcttccccacctgagatggttggacaaagggttccttcagccccaggacaagagagtcctatcccagaccctaagctcatgc

SEQ ID NO: 538355 - DNA, 120 bp, Artificial Sequence
  ENSG00000166963_49 (sequence is synthesized)
cacacatgaagaatgaacccactactccctcatggctggctgacatcccaccctgggtgcccaaggacagacccctcccccctgcacccctctccccagctcctggtccccccacacctg

SEQ ID NO: 538356 - DNA, 120 bp, Artificial Sequence
  ENSG00000166963_50 (sequence is synthesized)
ccccggaatcccatactcctgcacccttctcttggggcacagccgagtatgacagtgtggtggctgcagtgcaggagggggcagctgagttggaaggtgggccatactcccccctgggga

SEQ ID NO: 538357 - DNA, 120 bp, Artificial Sequence
  ENSG00000166963_51 (sequence is synthesized)
aggactaccgcaaggctgaaggggaaagggaagaagaaggtagggctgaggctcctgacaaaagctcacacagctcaaaggtaccagaggccagcaaaagccatgccaccacggagcctg

SEQ ID NO: 538358 - DNA, 120 bp, Artificial Sequence
  ENSG00000166963_52 (sequence is synthesized)
agcagactgagccggagcagagagagcccacaccctatcctgatgagagaagctttcagtatgcagacatctatgagcagatgatgcttactgggcttggccctgcatgccccactagag

SEQ ID NO: 538359 - DNA, 120 bp, Artificial Sequence
  ENSG00000166963_53 (sequence is synthesized)
agcctccacttggagcagctggggattggcccccatgcctctcaaccaaggaggcagctgccggccgaaacacatctgcagagaaggagctttcatctcctatctcacccaagagcctcc

SEQ ID NO: 538360 - DNA, 120 bp, Artificial Sequence
  ENSG00000166963_54 (sequence is synthesized)
agtctgacactccaaccttcagctatgcagccctggcaggacccactgtacccccaaggccagagccagggccaagtatggagcccagcctcaccccacctgcagttcccccccgtgctc

SEQ ID NO: 538361 - DNA, 120 bp, Artificial Sequence
  ENSG00000166963_55 (sequence is synthesized)
ctatcctgagcaaaggcccaagcccccctcttaatggtaacatcctgagctgcagcccagataggaggtccccatcccccaaggaatcaggccggagtcactgggatgacagcactagtg

SEQ ID NO: 538362 - DNA, 120 bp, Artificial Sequence
  ENSG00000166963_56 (sequence is synthesized)
actcagaactggagaagggggctcgggaacagccagaaaaagaggcccaatccccaagtcctcctcaccccattcctatggggtcccccacattatggccagaaactgaggcacatgtta

SEQ ID NO: 538363 - DNA, 120 bp, Artificial Sequence
  ENSG00000166963_57 (sequence is synthesized)
gccctcccttggactcacacctggggcctgcccgacccagtctggacttccctgcttcagcctttggcttctcctcattgcagccagctcccccacagctgccctctccagctgaacccc

SEQ ID NO: 538364 - DNA, 120 bp, Artificial Sequence
  ENSG00000166963_58 (sequence is synthesized)
gctcggcaccctgtggctcccttgccttctctggggatcgagctctggctctggctccaggaccccccaccagaacccggcatgatgaatacctggaagtgaccaaggcccccagcctgg

SEQ ID NO: 538365 - DNA, 120 bp, Artificial Sequence
  ENSG00000166963_59 (sequence is synthesized)
attcctcactgccccagctcccatcacccagttctcctggggcccctctcctctccaatctgccacgacctgcctcaccagccctgtctgagggctcctcctctgaggctaccacgcctg

SEQ ID NO: 538366 - DNA, 120 bp, Artificial Sequence
  ENSG00000166963_60 (sequence is synthesized)
tgatttcaagtgtggcggagcgcttctctccaagccttgaggctgcagaacaggagtctggagagctggacccaggaatggaaccagctgcccacagcctctgggacctcactcctctga

SEQ ID NO: 538367 - DNA, 120 bp, Artificial Sequence
  ENSG00000166963_61 (sequence is synthesized)
gcccagcacccccagcttcactggacttggccctagctccagctccaagcctgcctggagacatgggtgatggcatcctgccgtgccacctggagtgctcagaggcagccacggagaagc

SEQ ID NO: 538368 - DNA, 120 bp, Artificial Sequence
  ENSG00000166963_62 (sequence is synthesized)
caagccccttccaggttccctctgaggattgtgcagccaatggcccaactgaaaccagccctaaccccccaggccctgccccagccaaggctgaaaatgaagaggctgcggcttgccctg

SEQ ID NO: 538369 - DNA, 120 bp, Artificial Sequence
  ENSG00000166963_63 (sequence is synthesized)
cctgggaacgtggggcctggcctgaaggagctgagaggagctcccggcctgacacattgctctcccctgagcagccagtgtgtcctgcagggggctccgggggcccacccagcagtgcct

SEQ ID NO: 538370 - DNA, 120 bp, Artificial Sequence
  ENSG00000166963_64 (sequence is synthesized)
ctcctgaggtcgaagctgggccccagggatgtgccactgagcctcggccccatcgtggggagctctccccatccttcctgaacccacctctgcccccatccatagatgatagggacctct

SEQ ID NO: 538371 - DNA, 120 bp, Artificial Sequence
  ENSG00000166963_65 (sequence is synthesized)
caactgaggaagttcggctagtaggaagaggggggcggcgccgggtaggggggccagggaccactgggggcccatgccctgtgactgatgagacaccccctacatcagccagtgactcag

SEQ ID NO: 538372 - DNA, 120 bp, Artificial Sequence
  ENSG00000166963_66 (sequence is synthesized)
gctcctcacagtcagattctgatgtcccgccagaaactgaggagtgtccgtccatcacagctgaggcagccctcgactcagatgaagatggagacttcctacctgtggacaaagctgggg

SEQ ID NO: 538373 - DNA, 120 bp, Artificial Sequence
  ENSG00000166963_67 (sequence is synthesized)
gtgtcagtggtactcaccaccccaggcctggccatgacccacctcctctcccacagccagacccccgcccatcccctccccgccctgatgtgtgcatggctgaccccgaggggctcagct

SEQ ID NO: 538374 - DNA, 120 bp, Artificial Sequence
  ENSG00000166963_68 (sequence is synthesized)
cagagtctgggagagtagagaggctacgggagaaggaaaaggttcaggggcgagtagggcgcagggccccaggcaaggccaagccagcgtcccctgcacggcgtctggatcttcggggaa

SEQ ID NO: 538375 - DNA, 120 bp, Artificial Sequence
  ENSG00000166963_69 (sequence is synthesized)
aacgctcacccacccctggtaaagggcctgcagatcgagcatcccgggccccacctcgaccacgcagcaccacaagccaggtcaccccagcagaggaaaaggatggacacagccccatgt

SEQ ID NO: 538376 - DNA, 120 bp, Artificial Sequence
  ENSG00000166963_70 (sequence is synthesized)
ccaaaggcctagtcaatggactcaaggcaggaccaatggccttgagttccaagggcagctctggtgcccctgtatatgtggatctcgcctacatcccgaatcattgcagtggcaagactg

SEQ ID NO: 538377 - DNA, 120 bp, Artificial Sequence
  ENSG00000166963_71 (sequence is synthesized)
ctgaccttgacttcttccgtcgagtgcgtgcatcctactatgtggtcagtgggaatgaccctgccaatggcgagccaagccgggctgtgctggatgccctgctggagggcaaggcccagt

SEQ ID NO: 538378 - DNA, 120 bp, Artificial Sequence
  ENSG00000166963_72 (sequence is synthesized)
ggggggagaatcttcaggtgactctgatccctactcatgacacggaggtgactcgtgagtggtaccaacaaactcatgagcagcagcaacaactgaatgtcctggtcctggctagcagca

SEQ ID NO: 538379 - DNA, 120 bp, Artificial Sequence
  ENSG00000166963_73 (sequence is synthesized)
gcaccgtggtgatgcaggatgagtccttccctgcctgcaagattgagttctgaaagagccgccctcccttccccaaggatccactcccccagctcctttagagaatggctactgctgagt

SEQ ID NO: 538380 - DNA, 120 bp, Artificial Sequence
  ENSG00000166963_74 (sequence is synthesized)
cctttggggttgagggagatgggagctagggggaggggagggagatgtcttgttgtggggacttgggctgggctaaatgggaggggttgtccctccccatcatccattcctgtgaggtgt

SEQ ID NO: 538381 - DNA, 120 bp, Artificial Sequence
  ENSG00000166963_75 (sequence is synthesized)
ctcaaaccaaagttaacagggagaggatgggggaggggacaaattagaataggatagcatctgatgcctgagaaccctctcctagcactgtcaaatgctggtattgaatggggactgagg

SEQ ID NO: 538382 - DNA, 120 bp, Artificial Sequence
  ENSG00000166963_76 (sequence is synthesized)
atgggtctcagagagcaacctcctccctcgtagagggagattatatccccaactccagggacctctttatctcaatctatttatttggcatcctgggagggatttccaatagtaatttat

SEQ ID NO: 538383 - DNA, 120 bp, Artificial Sequence
  ENSG00000166963_77 (sequence is synthesized)
gtgacctggggcaggataccgtcagtgaggtgcccagagctgcaccctttcctccatttcccatcccccatctcctcaaccaccagggtctgagttctagcagggtcctgggggtatccc

SEQ ID NO: 538384 - DNA, 120 bp, Artificial Sequence
  ENSG00000166963_78 (sequence is synthesized)
actgctatactgttctactgcttccctcagtatctgaatgtctcaatttaaaacttgaagctctttagaccaatagactggtgagaggagaaaggagcttatcccccagaccctgcttta

SEQ ID NO: 538385 - DNA, 120 bp, Artificial Sequence
  ENSG00000166963_79 (sequence is synthesized)
taccattcacatcccagggctgtgtccagacagcacaaaacggcaaggagagcccaagccccaatgccagaattcttccaaactccctgactctttgaagtttttactcaccccatttca

SEQ ID NO: 538386 - DNA, 120 bp, Artificial Sequence
  ENSG00000166963_80 (sequence is synthesized)
attatcctgatcccttctcatcccctgcttggcttctctgcatgtggtcatctgctgtggcttggtgtttaatgggttaaaaataagccactgcctgacatcccaacatttgacacccca

SEQ ID NO: 538387 - DNA, 120 bp, Artificial Sequence
  ENSG00000166963_81 (sequence is synthesized)
gcaatgtgtgactcccccaacattccactatgccatcctgcagctgaaatgggaacactggctgcctctccaaacccgctcttggacagaggatctgggaggtggaagccaggccagagg

SEQ ID NO: 538388 - DNA, 120 bp, Artificial Sequence
  ENSG00000166963_82 (sequence is synthesized)
acttggggaaaatgagatggaggaaggaaaaagggagaagctgagccacagcttaactcctacagagtgaaatgaaaacgggctgaaaataccaccccaggagaggacctcgccccaagc

SEQ ID NO: 538389 - DNA, 120 bp, Artificial Sequence
  ENSG00000166963_83 (sequence is synthesized)
aagccagtgagcagccctgccagactactgccagactgagaaacccagaagctggtagtcatgtgggcttgccttctctgccaaacgactgggaaaccaaaatgagcccaccttgtgttc

SEQ ID NO: 538390 - DNA, 120 bp, Artificial Sequence
  ENSG00000166963_84 (sequence is synthesized)
ttcctagctccaccctccccgtgctgctgtgttctgctcctccccacgcttccctgctatagttcccagctgctgtaacggagccacctccaactctaacaataaaccaagttcattgca

SEQ ID NO: 538391 - DNA, 120 bp, Artificial Sequence
  ENSG00000166963_85 (sequence is synthesized)
gctgccggactaacactccgcgggtgtttccatggagaccgaggccgagcctgcgcggcctcacggcgttgccatggagacaactccggggctggggctccgaagtcccggcgcaccgct

SEQ ID NO: 538392 - DNA, 120 bp, Artificial Sequence
  ENSG00000166963_86 (sequence is synthesized)
ggctcagaaccccgcggagctgctgtgcgaggccggagccgcggtggcggctgcacgctgggacctgcagaagcactctttgctaattgtgatcggcgatatcggtacagagagtcagct

SEQ ID NO: 538393 - DNA, 120 bp, Artificial Sequence
  ENSG00000166963_87 (sequence is synthesized)
gagggccgtgcgggcccaccttgaacaagggattctctcctggaacattgacctgtcatcctttgacttgaaccaacagttgagactcttcattacccggcacctagctcacttctcctc

SEQ ID NO: 538394 - DNA, 120 bp, Artificial Sequence
  ENSG00000166965_0 (sequence is synthesized)
ggaaggtaaaagctgcttcctgttggggcatgagtccggcgcgtgtcgggttttgagctgccgcggtcccgggactgagataaggcagctccagcccctggaaggccagagacttgccag

SEQ ID NO: 538395 - DNA, 120 bp, Artificial Sequence
  ENSG00000166965_1 (sequence is synthesized)
tgtcccactagcgggctcttcgcaagaatccccccgggcccgccgcagccaggcggcggccggcagagggcgctgctcgggcatggcggaggagcggccgggggcctggttcggcttcgg

SEQ ID NO: 538396 - DNA, 120 bp, Artificial Sequence
  ENSG00000166965_2 (sequence is synthesized)
tttctgcggcttcgggcaggagctgggctccggacgcgggcgccaggtgcacagccccagtccgctgcgggcgggcgtcgacatctgccgcgtgagcgcgagctggagctacaccgcttt

SEQ ID NO: 538397 - DNA, 120 bp, Artificial Sequence
  ENSG00000166965_3 (sequence is synthesized)
ctacaccgctttcgtgacccgtggaggccgcttggagctgtcgggctcagccagcggcgcggcgggccgctgcaaggacgcgtgggcctcggaggggctcctcgcggtgctgcgcgccgg

SEQ ID NO: 538398 - DNA, 120 bp, Artificial Sequence
  ENSG00000166965_4 (sequence is synthesized)
ggcgttactgcaggtctgggcggccgaatcggcgctgcgtggggagccattgtgggcccagaatgtggtgcccgaggccgaaggggaagacgatccggccggtgaggcccaggctgggag

SEQ ID NO: 538399 - DNA, 120 bp, Artificial Sequence
  ENSG00000166965_5 (sequence is synthesized)
gctacccctgctgccctgcgcccgtgcctacgtgagcccgcgggcgcccttctaccggcctctggctccggagctgcgggcacgccagctggagctgggcgccgagcacgcgttgctgct

SEQ ID NO: 538400 - DNA, 120 bp, Artificial Sequence
  ENSG00000166965_6 (sequence is synthesized)
ggacgctgctggccaggtgttctcctggggcgggggcaggcatggacagctgggccatgggaccctggaggcagagctggagccacggctgttggaggcgttgcagggcctagtcatggc

SEQ ID NO: 538401 - DNA, 120 bp, Artificial Sequence
  ENSG00000166965_7 (sequence is synthesized)
tgaggtggccgcggggggctggcattctgtgtgtgtgagtgagactggggatatttatatctggggctggaatgaatcagggcagctggccctgcccaccaggaacctggcagaggatgg

SEQ ID NO: 538402 - DNA, 120 bp, Artificial Sequence
  ENSG00000166965_8 (sequence is synthesized)
agagactgtcgcaagggaagccacagaactgaatgaagatggttctcaggtgaagagaacgggtggggctgaggatggagcccctgcccccttcatagctgtccagcccttcccggcatt

SEQ ID NO: 538403 - DNA, 120 bp, Artificial Sequence
  ENSG00000166965_9 (sequence is synthesized)
actggatctccccatgggctcagatgcagtcaaggccagctgtggatcccggcacacagctgtggtgacacgaacaggggagctctacacctggggctggggtaaatatggacagctggg

SEQ ID NO: 538404 - DNA, 120 bp, Artificial Sequence
  ENSG00000166965_10 (sequence is synthesized)
ccacgaggacaccaccagcttggatcggcctcgccgtgtggaatactttgtagataagcaactccaagtaaaggctgtcacctgtgggccgtggaacacctacgtgtatgctgtggagaa

SEQ ID NO: 538405 - DNA, 120 bp, Artificial Sequence
  ENSG00000166965_11 (sequence is synthesized)
cccccattcaggtcaaggaaaaccattgcctgcaccccaagggccccatatttgcccctccccatcacagtcctgcccttcaccctcaagcacggtcctaaacttgtctgcactttagaa

SEQ ID NO: 538406 - DNA, 120 bp, Artificial Sequence
  ENSG00000166965_12 (sequence is synthesized)
acacctggagagcattgaaaactctgctgcctaaggtcagcatcaatcaaaacaatgaaatcaatgaaacaatgaaaccagagcttctaggtgtgtggcctggatagtggtagattcaaa

SEQ ID NO: 538407 - DNA, 120 bp, Artificial Sequence
  ENSG00000166965_13 (sequence is synthesized)
gctccacccacctcatcccaggtacatttgatgtgcagctgagattggggcacattccaggtcatcgtcttctgtcagtcatttccctgctttcgtttgaattttaccattcttgtatgc

SEQ ID NO: 538408 - DNA, 120 bp, Artificial Sequence
  ENSG00000166965_14 (sequence is synthesized)
agccttatacgacatagttgtgtttgcttttgagtgttagataaatggaatcctgtgtatgtgcttttgtgtcgtttttgtcactcagcattgtataatccatccttgttgggtcctgga

SEQ ID NO: 538409 - DNA, 120 bp, Artificial Sequence
  ENSG00000166965_15 (sequence is synthesized)
gttcatttttaatgctatatggtgttctgttgtatgaataatacctcaagtgatacagccttgttgatggtcatttttattgtttctgattttggtcattccacataattctttgtgcag

SEQ ID NO: 538410 - DNA, 120 bp, Artificial Sequence
  ENSG00000166965_16 (sequence is synthesized)
tcttctgcacatgtgcacaagttcctttgcagaacattgagttgaattgctaagtcaggagatacctttaattttactagataactgttgcccccagcagggtggggtctactgtggcta

SEQ ID NO: 538411 - DNA, 120 bp, Artificial Sequence
  ENSG00000166965_17 (sequence is synthesized)
tgtggctaaaatgtcaggtagatgcacactggttttaattggcatttccctggatactgatgaggttgagtagcttttcatttgttttggatggctgggcatggtggctcacacctgtag

SEQ ID NO: 538412 - DNA, 120 bp, Artificial Sequence
  ENSG00000166965_18 (sequence is synthesized)
ctttgggaggctaagcagggagattgcttgaggcgaagagttcatatgtttattggccacttggagtttttctgttgtcaagtgcctgttcaagttttctggccttttaaaatgttctgt

SEQ ID NO: 538413 - DNA, 120 bp, Artificial Sequence
  ENSG00000166965_19 (sequence is synthesized)
attttccttagtgatttttcttttggatatttcagatacaagtcttttgagagttagtattcagagtatcttctgctacaatgtagtttgtttcagtctctcttggtattaccaatttta

SEQ ID NO: 538414 - DNA, 120 bp, Artificial Sequence
  ENSG00000166965_20 (sequence is synthesized)
atacttaggtgatgcttactccatgccaggtaaggctcaaagtgctttacaagtatcaacttattttgataaaataagcttatcagtagttttctttatagttaaattctatttgtgcat

SEQ ID NO: 538415 - DNA, 120 bp, Artificial Sequence
  ENSG00000166965_21 (sequence is synthesized)
gtgtgtgtctgtggtttagcaaatgtttcccacccatggggtcttttttattgtggtaaaatatactgaacataaaatttatgttcaataaaaaacaaaaattgtttttaaccattttaa

SEQ ID NO: 538416 - DNA, 120 bp, Artificial Sequence
  ENSG00000166965_22 (sequence is synthesized)
ttagctccttgggagcagacagctgtcctcactggcagaggaggagcgctcagtaaatgctcgctggacgaataaatggctagataagccaggcggcggccggcagagggcgctgctcgg

SEQ ID NO: 538417 - DNA, 120 bp, Artificial Sequence
  ENSG00000166965_23 (sequence is synthesized)
gtgagcactccccgccccgtccccacttattccagccgcgctccccagtcgcctccccgcaccgctgtggccagtccagtttgtctcccccgttcaggccgccagccccacattctgggt

SEQ ID NO: 538418 - DNA, 120 bp, Artificial Sequence
  ENSG00000166965_24 (sequence is synthesized)
caaggctgcccaccagaaggacctgcccgagagggtagagggcatagggtcaagatcaaggtcagaggcccccttgggttgggagaggacacggaaggggttaggagcccaggaactggg

SEQ ID NO: 538419 - DNA, 120 bp, Artificial Sequence
  ENSG00000166965_25 (sequence is synthesized)
gagcccaggaactggggtctcaggagagacccaggatctgacttaagaggcctgaaaatgcccatgcaattctgcttcagcccgggtgcagcggctcacgcctgtaatcccaacgctttg

SEQ ID NO: 538420 - DNA, 120 bp, Artificial Sequence
  ENSG00000166965_26 (sequence is synthesized)
cccaggaatttgagaccagcctgggcagcatagcgagacccctgtctctattatattaaaaaaaaaaaaaaacaaacccgctccagccgaatctgcttgaagttggcgttgctgttgtaa

SEQ ID NO: 538421 - DNA, 120 bp, Artificial Sequence
  ENSG00000166965_27 (sequence is synthesized)
ttgctgttgtaaccaccagactgtttgtctccccatttaacggttagctccttgggagcagacagctgtcctcactggcagaggaggagcgctcagtaaatgctcgctggacgaataaat

SEQ ID NO: 538422 - DNA, 120 bp, Artificial Sequence
  ENSG00000166965_28 (sequence is synthesized)
gggctgggaggcactctgctccactcgagctggtgcctacggaagggggtgtggtcgacggaaaaacttctgtcttaaggcttctgtggctcatacagagcagctaccttgctcagtgga

SEQ ID NO: 538423 - DNA, 120 bp, Artificial Sequence
  ENSG00000166965_29 (sequence is synthesized)
cagcctgtcaggcccagaagtttcttccttctggtgggaggctgatgctttctgtcctccctgcacggccacagacacattccctgcccgccgccgcctctgacagcagggactgtccag

SEQ ID NO: 538424 - DNA, 120 bp, Artificial Sequence
  ENSG00000166965_30 (sequence is synthesized)
tctggcatggaagactgcggcgctcggtagcatggcacacaggaagatccgccactttttccctcgggatcctctgccatgccacgtgtgatcagccagttgttaagagaatatgttgtt

SEQ ID NO: 538425 - DNA, 120 bp, Artificial Sequence
  ENSG00000166965_31 (sequence is synthesized)
ccatgccaggcagatctcatgaggattgtaatatgctagctgtgggctgtgccaagctgggctggacagatgccttgccaaagaaccgtagtgacaactatcgattgtccttttgctttc

SEQ ID NO: 538426 - DNA, 120 bp, Artificial Sequence
  ENSG00000166965_32 (sequence is synthesized)
gaggaagcaggggcctcggccaggtcactgggaggaacaggactgctccctccctggggttggaacagacataggcgcgctcagtccgaggccagacaggggagacatggagaggatatc

SEQ ID NO: 538427 - DNA, 120 bp, Artificial Sequence
  ENSG00000166965_33 (sequence is synthesized)
ggtaccacccgcctacctctctgaaagactgtcttaagggagtatccaaccagcacttacaaagcagctttttgtggatgtgacactgggtggagaaaaagattcgatggaagtgtgtgc

SEQ ID NO: 538428 - DNA, 120 bp, Artificial Sequence
  ENSG00000166965_34 (sequence is synthesized)
tctgaacatcttagcttggatagcagggaagtctggaggagcgtcttgcctggagtggctggtcgccactagcctcttggggatccccaaggttgcctggctctgggtctcttggattca

SEQ ID NO: 538429 - DNA, 120 bp, Artificial Sequence
  ENSG00000166965_35 (sequence is synthesized)
cagagcagtggggcataatcccagcacttcatttgatagtctgggccccttcctggagggaaagcagcagcaagacccagtggagacgatggcaaaggggctgatttcactttaggtaaa

SEQ ID NO: 538430 - DNA, 120 bp, Artificial Sequence
  ENSG00000166965_36 (sequence is synthesized)
ggcccgaggggaagcgccttggcctggagtgctaccttgggcagggcaggctttagttgtccccaggagcggatgcgatggggaggagagtttggatggatgcaggggcttcacagtctg

SEQ ID NO: 538431 - DNA, 120 bp, Artificial Sequence
  ENSG00000166965_37 (sequence is synthesized)
tttcatgtgtccccttgatctctttcagagactggggatatttatatctggggctggaatgaatcagggcagctggccctgcccaccaggaacctggcagaggatggagagactgtcgca

SEQ ID NO: 538432 - DNA, 120 bp, Artificial Sequence
  ENSG00000166965_38 (sequence is synthesized)
agggaaggtgagggtcatctcggctcccacagccgtctccccaggatgtggctgtcattcctaactcctggctgtatgctggcctcagagctacactgctcagatggagcatgtgagccc

SEQ ID NO: 538433 - DNA, 120 bp, Artificial Sequence
  ENSG00000166965_39 (sequence is synthesized)
cttatgggagggagcattggcaaggctgatgccggtcttggcacaacacacttgtgcagcagtgccagccctgcctgcagaatgtaggggttgggagcaccagctttggagctaggcagt

SEQ ID NO: 538434 - DNA, 120 bp, Artificial Sequence
  ENSG00000166965_40 (sequence is synthesized)
gcgcgtgtcgggttttgagctgccgcggtcccgggactgagagactggggatatttatatctggggctggaatgaatcagggcagctggccctgcccaccaggaacctggcagaggatgg

SEQ ID NO: 538435 - DNA, 120 bp, Artificial Sequence
  ENSG00000166971_0 (sequence is synthesized)
gggagatgctgtcgggccgcggcggcgcttggcagccaggagctctgcattgaaggcactggggtaaagtgaatgccgaagacagaagatttggatgatacaccactgactttctttgtt

SEQ ID NO: 538436 - DNA, 120 bp, Artificial Sequence
  ENSG00000166971_1 (sequence is synthesized)
tggaatacacgttatgaaccctttctggagcatgtctacaagctctgtacgcaaacgatctgaaggtgaagagaagacattaacaggggacgtgaaaaccagtcctccacgaactgcacc

SEQ ID NO: 538437 - DNA, 120 bp, Artificial Sequence
  ENSG00000166971_2 (sequence is synthesized)
aaagaaacagctgccttctattcccaaaaatgctttgcccataactaagcctacatctcctgccccagcagcacagtcaacaaatggcacgcatgcgtcctatggacccttctacctgga

SEQ ID NO: 538438 - DNA, 120 bp, Artificial Sequence
  ENSG00000166971_3 (sequence is synthesized)
atactctcttcttgcagaatttaccttggttgtgaagcagaagctaccaggcgtctatgtgcagccatcttatcgctctgcattaatgtggtttggagtaatattcatacggcatggact

SEQ ID NO: 538439 - DNA, 120 bp, Artificial Sequence
  ENSG00000166971_4 (sequence is synthesized)
ttaccaagatggcgtatttaagtttacagtttacatccctgataactatccagatggtgactgtccacgcttggtgttcgatattcctgtctttcacccgctagttgatcccacctcagg

SEQ ID NO: 538440 - DNA, 120 bp, Artificial Sequence
  ENSG00000166971_5 (sequence is synthesized)
tgagctggatgtgaagagagcatttgcaaaatggaggcggaaccataatcatatttggcaggtattaatgtatgcaaggagagttttctacaagattgatacagcaagccccctgaaccc

SEQ ID NO: 538441 - DNA, 120 bp, Artificial Sequence
  ENSG00000166971_6 (sequence is synthesized)
agaggctgcagtactgtatgaaaaagatattcagctttttaaaagtaaagttgttgacagtgttaaggtgtgcactgctcgtttgtttgaccaacctaaaatagaagacccctatgcaat

SEQ ID NO: 538442 - DNA, 120 bp, Artificial Sequence
  ENSG00000166971_7 (sequence is synthesized)
tagcttttctccatggaatccttctgtacatgatgaagccagagaaaagatgctgactcagaaaaagcctgaagaacagcacaataaaagtgttcatgttgctggcctgtcatgggtaaa

SEQ ID NO: 538443 - DNA, 120 bp, Artificial Sequence
  ENSG00000166971_8 (sequence is synthesized)
gcctggctcagtacagcctttcagtaaagaagagaaaacagtggcgacttaagagatggtgaatctggtgcaccatgcactttcctgctagactctggcctagttcaagctgaccaatgg

SEQ ID NO: 538444 - DNA, 120 bp, Artificial Sequence
  ENSG00000166971_9 (sequence is synthesized)
gtaatgcattacttctgtcagaagtgtcttagggtggttatctagttcagtactccaaattattggggaccttgaggcttaagtaagtatttttctgaatataatgctaaaggtaagttg

SEQ ID NO: 538445 - DNA, 120 bp, Artificial Sequence
  ENSG00000166971_10 (sequence is synthesized)
cattcatttaaactaatagagcagacagaattcagcactacttaatagtttataaatcagtggtttcagttgtatatatgttaggaaatggagaggtatagagagagcaggttccatagc

SEQ ID NO: 538446 - DNA, 120 bp, Artificial Sequence
  ENSG00000166971_11 (sequence is synthesized)
tcagcacttttaagtggaagatcatttgaatctcagtcttcagcctgcactgatttgtagcctgcactgtcttactgatttacaaactgaaatcactgagaaatgtctttagttcagtga

SEQ ID NO: 538447 - DNA, 120 bp, Artificial Sequence
  ENSG00000166971_12 (sequence is synthesized)
gaagaaaccagaacacttgttcctagtgttgtgttgttttttttaagcaaattacttactgtatttttatggcaggagggagaaaaagtgttacaacggtttctaatgaagtccggtatt

SEQ ID NO: 538448 - DNA, 120 bp, Artificial Sequence
  ENSG00000166971_13 (sequence is synthesized)
taaatgataaatgactaatgtgtttagtagagacaaaataaaccaataaatgattgttctttgccatttatgcaggaaactacccttttctcaatataaccaaacaaaggctaatttata

SEQ ID NO: 538449 - DNA, 120 bp, Artificial Sequence
  ENSG00000166971_14 (sequence is synthesized)
aatgctttattgaaaaatacacttatcttcatataaaattacagtagcagtatcttgagaagttttataaatatttttgcagaacactattctaattgaacaatgtaagttccatatttc

SEQ ID NO: 538450 - DNA, 120 bp, Artificial Sequence
  ENSG00000166971_15 (sequence is synthesized)
tctcagcaatatgaagttacctagtaactttgtttatactgattcaatttacaattgaattttctccctaataagattattaatttgacttgaaaactgctggaacaatagtgattaata

SEQ ID NO: 538451 - DNA, 120 bp, Artificial Sequence
  ENSG00000166971_16 (sequence is synthesized)
aagatatgtatagataattcagctgttaaataacattttctaatttgtataaatggtactatggtactaataaaaacctaaattctccaaccaatttttttaaactgccaggaacaccca

SEQ ID NO: 538452 - DNA, 120 bp, Artificial Sequence
  ENSG00000166971_17 (sequence is synthesized)
aaaatatttttaaatatatcaccttaatagacatttcttttagataactccctcctaaaggaagaggtcataagttttcatattaatcccctcaattcaacttgattaaaatcttttctt

SEQ ID NO: 538453 - DNA, 120 bp, Artificial Sequence
  ENSG00000166971_18 (sequence is synthesized)
agctggttgatccctatataacaaaaaactggagaatttaaaacattcccaaaaggtggctataggggttttaacattttaaaaaaatataaaagcattaaagaaaatattggatgttta

SEQ ID NO: 538454 - DNA, 120 bp, Artificial Sequence
  ENSG00000166971_19 (sequence is synthesized)
gctggcgctgcggcgggagatgctgtcgggccgcggcggcgcttggcagccaggagctctgcattgaaggcactggggtgaggcttactgcccggcaggctggtgggtaaagtgaatgcc

SEQ ID NO: 538455 - DNA, 120 bp, Artificial Sequence
  ENSG00000166971_20 (sequence is synthesized)
cggggatcaagcaggggcagggctggcgctgcggcgggagatgctgtcgggccgcggcggcgcttggcagccaggagctctgcattgaaggcactgggccgtttgattggtgcaagtagg

SEQ ID NO: 538456 - DNA, 120 bp, Artificial Sequence
  ENSG00000166971_21 (sequence is synthesized)
ctgcattaagtaagatgaggattcactcttaatttatgggcacatttagttcctcccacacaaatttaggccttaactcttttattttttcctacagtgtggtttggagtaatattcata

SEQ ID NO: 538457 - DNA, 120 bp, Artificial Sequence
  ENSG00000166971_22 (sequence is synthesized)
ggaagttgctgttcttacagctgggcttggctgcttttcctttgcttctttgtatttttagtaaatgacccactgactttatgacctttgagacatgctttcttatccacgacttgaagc

SEQ ID NO: 538458 - DNA, 120 bp, Artificial Sequence
  ENSG00000166971_23 (sequence is synthesized)
ttcggctggaagatctgtacttgtgaaatgtctctcttgcgtgcctgtgttgcatttgtctggattgcttggcagttccttaagtacatgatcctgcagtttctatatgtttcgaagttg

SEQ ID NO: 538459 - DNA, 120 bp, Artificial Sequence
  ENSG00000166971_24 (sequence is synthesized)
gggcagggctggcgctgcggcgggagatgctgtcgggccgcggcggcgcttggcagccaggagctctgcattgaaggcactggggcgctcgcgactcggcgacggcggccgcagtgggac

SEQ ID NO: 538460 - DNA, 120 bp, Artificial Sequence
  ENSG00000166971_25 (sequence is synthesized)
ccgcagtgggacacggaggcggggccgggcacctgtgcgcgtttgcaggcacctgctgcgctggccgcctcgcagcccgggactgctgctggggactgcggctggagctgggctggcccg

SEQ ID NO: 538461 - DNA, 120 bp, Artificial Sequence
  ENSG00000166971_26 (sequence is synthesized)
agctctggttaagggggcgtcgccgggccccagagcccccccactggaggggcccgcggctcccgggccagcatcgagctagctgcgaggccaggacagggcccccgccttgcatcacct

SEQ ID NO: 538462 - DNA, 120 bp, Artificial Sequence
  ENSG00000166971_27 (sequence is synthesized)
taactatccagatggtgactgtccattgtccagggggacttctgtgctttgcagcagcttccggcatgccatcagagctttgtttctctgctcagggtctgcaagggaggctggctgcct

SEQ ID NO: 538463 - DNA, 120 bp, Artificial Sequence
  ENSG00000166971_28 (sequence is synthesized)
ctcttaaacaaaaagcttcacatctgacaggctgtgccgacagcacattctctggtgactttggtttcccagggatccttgtgatatatttattcattcccatgtcaggactcttctttt

SEQ ID NO: 538464 - DNA, 120 bp, Artificial Sequence
  ENSG00000166971_29 (sequence is synthesized)
cagctggcagttttagctggagcccctcttaaactgccaaaccctcattgacattcagatgtggtaaaaggagggaaactgaatagtgtgagaatggtgggttcctgaagcactatgaca

SEQ ID NO: 538465 - DNA, 120 bp, Artificial Sequence
  ENSG00000166971_30 (sequence is synthesized)
tttgatttaaggaacagtgtctggaggagtattgggaatggacgaattggtgattttgctctttggcaacattggtagtgcttaggaaggcagtggagtatagctattaagagcttggac

SEQ ID NO: 538466 - DNA, 67 bp, Artificial Sequence
  ENSG00000166971_31 (sequence is synthesized)
cttaggaaggcagtggagtatagctattaagagcttggactcatggccaggcatggtggcttatgcc

SEQ ID NO: 538467 - DNA, 90 bp, Artificial Sequence
  ENSG00000166971_32 (sequence is synthesized)
ttggcattgcactccaggtacctgtagtcccagcgaggctgaagcaggagaatggcctgaatctaggaggcggaggttgcagtgagccga

SEQ ID NO: 538468 - DNA, 120 bp, Artificial Sequence
  ENSG00000166971_33 (sequence is synthesized)
cactgcactccagcctgggtgacagaactagactcagtctcaaaaaaaagagcttggagtcagcagatggactacgtggcttttgtactttttagctctggtaacccagagcaattaatt

SEQ ID NO: 538469 - DNA, 120 bp, Artificial Sequence
  ENSG00000166971_34 (sequence is synthesized)
tactctgctttgctgtcttaatctttaaataacagtacttcaaggggtggtgtgaggcttaaatgagatcattcatgtatgagggatagttatgtgagaaaattaattagataatgtcta

SEQ ID NO: 538470 - DNA, 120 bp, Artificial Sequence
  ENSG00000166971_35 (sequence is synthesized)
taagttaggggaattggcttaaaactgcaaaatgaatgttatagaaatttagtgagccaacaaatagtttttaaatacttttctcttccttaagcttttctccatggaatccttctgtac

SEQ ID NO: 538471 - DNA, 120 bp, Artificial Sequence
  ENSG00000166971_36 (sequence is synthesized)
atgatgaagccagagaaaagatgctgactcagaaagtaagtggataacaacttatgaaatggctaactcattgtttcttttctaaaatgtcttcatttggagactgctcattacatacaa

SEQ ID NO: 538472 - DNA, 120 bp, Artificial Sequence
  ENSG00000166971_37 (sequence is synthesized)
gtaactttttttgggaaacaagtttgtacagtgctgaaatctcctcaccagtaattttttaaatatctgttttgattgtgcctagaagaagcctgaagaacagcacaataaaagtgttca

SEQ ID NO: 538473 - DNA, 120 bp, Artificial Sequence
  ENSG00000166971_38 (sequence is synthesized)
agatgctgtcgggccgcggcggcgcttggcagccaggagctctgcattgaaggcactggggtgaggcttactgcccggcaggctggtgggtacgcgagggctgaggtgtctgtaaatctg

SEQ ID NO: 538474 - DNA, 120 bp, Artificial Sequence
  ENSG00000166971_39 (sequence is synthesized)
gggcttacagctttcctggttcttttcctgacctggtacctttatgatttatctacccagtagttgtccagggggacttctgtgctttgcagcagcttccggcatgccatcagagctttg

SEQ ID NO: 538475 - DNA, 120 bp, Artificial Sequence
  ENSG00000166971_40 (sequence is synthesized)
tttctctgctcagggtctgcaagggaggctggctgcctgccatcctgcagcactcaccaggtgaatggtggccctcaggctctagtggaggagagggagttttccccgcttcattgcaaa

SEQ ID NO: 538476 - DNA, 120 bp, Artificial Sequence
  ENSG00000166971_41 (sequence is synthesized)
agaggcaaccaaaaatggaccaaacaacccggccagagaatgcggcttctgagtgtaagacactgaggcggtgtcacagacaggtaaagtgaatgccgaagacagaagatttggatgata

SEQ ID NO: 538477 - DNA, 120 bp, Artificial Sequence
  ENSG00000166974_0 (sequence is synthesized)
gagaaggcagtgagcgagcaggcggcaggcacggtccgtgcggagcaggcgagcgagcgggaagacgcagccaccttcctcaccagccagcccacagcggtttgttccccttctcgggag

SEQ ID NO: 538478 - DNA, 120 bp, Artificial Sequence
  ENSG00000166974_1 (sequence is synthesized)
tgcgccaatgcctgggccgacccaaaccctgtccccaaatggcgagaacaacaacgacatcatccaggataataacgggaccatcattcctttccggaagcacacagtgcgcggggagcg

SEQ ID NO: 538479 - DNA, 120 bp, Artificial Sequence
  ENSG00000166974_2 (sequence is synthesized)
ttcctacagttggggaatggcggtcaatgtgtattctacctcgataacccaagagactatgagcagacatgacatcattgcatgggttaatgacatagtatctttaaactacacaaaagt

SEQ ID NO: 538480 - DNA, 120 bp, Artificial Sequence
  ENSG00000166974_3 (sequence is synthesized)
ggaacagctttgttcaggagcggcctattgccaattcatggacatgctcttccctggctgcattagtttgaagaaagtaaaatttcaagcaaagctggaacatgaatatattcacaattt

SEQ ID NO: 538481 - DNA, 120 bp, Artificial Sequence
  ENSG00000166974_4 (sequence is synthesized)
taaacttctgcaagcatcatttaagcgaatgaacgttgataaggtaattccagtggagaagctagtgaaaggacgtttccaggacaacctggattttattcaatggtttaagaaattcta

SEQ ID NO: 538482 - DNA, 120 bp, Artificial Sequence
  ENSG00000166974_5 (sequence is synthesized)
tgatgctaactacgatgggaaggagtatgatcctgtagaggcacgacaagggcaagatgcaattcctcctcctgaccctggtgaacagatcttcaacctgccaaaaaagtctcaccatgc

SEQ ID NO: 538483 - DNA, 120 bp, Artificial Sequence
  ENSG00000166974_6 (sequence is synthesized)
aaactcccccacagcaggtgcagctaaatcaagtccagcagctaaaccaggatccacaccttctcgaccctcatcagccaaaagggcttcttccagtggctcagcatccaaatccgataa

SEQ ID NO: 538484 - DNA, 120 bp, Artificial Sequence
  ENSG00000166974_7 (sequence is synthesized)
agatttagaaacgcaggtcatacagcttaatgaacaggtacattcattaaaacttgcccttgaaggcgtggaaaaggaaagggatttctactttgggaagttgagagagatcgagctact

SEQ ID NO: 538485 - DNA, 120 bp, Artificial Sequence
  ENSG00000166974_8 (sequence is synthesized)
ctgccaagaacacgggcaggaaaatgatgacctcgtgcagagactaatggacatcctgtatgcttcagaagaacacgagggccacacagaagagccggaagcagaggagcaagcccacga

SEQ ID NO: 538486 - DNA, 120 bp, Artificial Sequence
  ENSG00000166974_9 (sequence is synthesized)
acagcagcccccgcagcaggaagagtactgacccaccccggctgctcttgacacttccattgtgtgtgggaacgtttcttctggagaattggaacatgtgtggccccaagctcaacagaa

SEQ ID NO: 538487 - DNA, 120 bp, Artificial Sequence
  ENSG00000166974_10 (sequence is synthesized)
accagttgttcccaatctgccgttaccatcaacgcactgttgcatatgccagccactgcgcttggttcccattttctttgccaaggtgtattagcggacggccctctggccacctacccg

SEQ ID NO: 538488 - DNA, 120 bp, Artificial Sequence
  ENSG00000166974_11 (sequence is synthesized)
agagatcgtagggtcacatacatccaacttcaccacttggctgcttgagattggttctgctcttttcttcatttctttccagaacaactctttcccaccccaacaccactgccaccaccc

SEQ ID NO: 538489 - DNA, 120 bp, Artificial Sequence
  ENSG00000166974_12 (sequence is synthesized)
ctctttttatcctggtgtgaaacaatggtaatttgatatatggtatttatattggcatttttcaacccagtgtcactagatgtcacacacatttgtggtgctttgatgtttgcaagtcta

SEQ ID NO: 538490 - DNA, 120 bp, Artificial Sequence
  ENSG00000166974_13 (sequence is synthesized)
acctctgaacataaatttggtcaaataattggaacaaagggaaacagatacttgatatgaaagccataatgacggtgacttgtgtcgtgggggaaaacataaggtcattttctccctcta

SEQ ID NO: 538491 - DNA, 120 bp, Artificial Sequence
  ENSG00000166974_14 (sequence is synthesized)
ctcacaatactaaagggaaaaaatggattcaaagctaggatttcagggcccagcagtgttcctccatcagcatgttagacaactacacagtatgttgttagttttgaaagacattcactc

SEQ ID NO: 538492 - DNA, 120 bp, Artificial Sequence
  ENSG00000166974_15 (sequence is synthesized)
aaggaaaacaccatctcaactttgcccgctcaccatgtcccttgcccccatgtagcccatttcccaggttatgctcttttctttctcagggtcctctttggtgggcagccactccccgag

SEQ ID NO: 538493 - DNA, 120 bp, Artificial Sequence
  ENSG00000166974_16 (sequence is synthesized)
atgttgccatcagttttctgcagtccaaagagggtatggttaggtacgggtcttcctgcctcattcctcttcctctttgtgtaggtttcagccacaaaactgtcattcactctaggggac

SEQ ID NO: 538494 - DNA, 120 bp, Artificial Sequence
  ENSG00000166974_17 (sequence is synthesized)
gtaacttcaggtgtgcagccctgagctccaaggctctgcaccatgccacacacttgctgtaaggctagaagtgaagaccttattaataggagcataattgcgagggagaatcatggttct

SEQ ID NO: 538495 - DNA, 120 bp, Artificial Sequence
  ENSG00000166974_18 (sequence is synthesized)
gcagtctggtgtagacactggaataacagcacagaaaaatctatgactcccaatatcttctagaataaagaattttccctctttaacacaagggccctccttgtcattgaccttagctaa

SEQ ID NO: 538496 - DNA, 120 bp, Artificial Sequence
  ENSG00000166974_19 (sequence is synthesized)
accatggcaattcataaatagaggaaacattaatgaattaaaagcattccttattttttaactaatatttgtacattttcttagtctctttccaagtctttgcctcttttttttctttat

SEQ ID NO: 538497 - DNA, 120 bp, Artificial Sequence
  ENSG00000166974_20 (sequence is synthesized)
ttttattttttcctttgacagatggtatcccttcctggatcattcatttcaccttggtttctaactttaggtttactttcacttgttatttgacttagcaggtgcaacaaaaacaagaaa

SEQ ID NO: 538498 - DNA, 120 bp, Artificial Sequence
  ENSG00000166974_21 (sequence is synthesized)
caaatgtgcccaccccactttccgcttaactgaaaagcttaaaataaatttctgaattatgtatcctgaagctttgaaatttctttattaatcgatgaaatatgaattctaaattctagc

SEQ ID NO: 538499 - DNA, 120 bp, Artificial Sequence
  ENSG00000166974_22 (sequence is synthesized)
attgaagcttttcaccaaaagaagtctctccaaaataaatcttttgcagcaaagtgatatttattgagttatgtggaaaagatggcttgtatttttcagattattacaacacactgtgca

SEQ ID NO: 538500 - DNA, 120 bp, Artificial Sequence
  ENSG00000166974_23 (sequence is synthesized)
gaattagacagatgttccgtggtgtttggtttccctttcttctctctcctgctcactctgcattatagcagcagcttatttctctaaggctggacagcctggctctcggcagtgacgtcc

SEQ ID NO: 538501 - DNA, 120 bp, Artificial Sequence
  ENSG00000166974_24 (sequence is synthesized)
tcccacacctggtcacaagtagtagtggctgtgctatacccagcatcatgcttaacagcgtgttgcccttctgagcctgttgtactcactgatctctttaaaaacaaaaaatagctcttg

SEQ ID NO: 538502 - DNA, 120 bp, Artificial Sequence
  ENSG00000166974_25 (sequence is synthesized)
taaaaggtcacaataactctatgcacctgatactgcagtggttcctaggccattcttcatctgctctggacatctcagtcatacccaatgctcagtggatcatgaccaaactcctgtcat

SEQ ID NO: 538503 - DNA, 120 bp, Artificial Sequence
  ENSG00000166974_26 (sequence is synthesized)
gtggatgcacgtgagtgggtagcagggagtcaggatcctgccttctccagcaaccccttactgctgtataacttgcataagcctccctggtgactcttgcaggaaccactccattgccct

SEQ ID NO: 538504 - DNA, 120 bp, Artificial Sequence
  ENSG00000166974_27 (sequence is synthesized)
ccagctccccagccttctcagttataaacatgctggccagatctcttagcctgcaaagagaactttccccagtcaccatagaccattctccttcctgaaggcttggggcagaccattcgt

SEQ ID NO: 538505 - DNA, 120 bp, Artificial Sequence
  ENSG00000166974_28 (sequence is synthesized)
ttatttagagaagagctatacattcttctttctggtcccatcttaaacgtcttctgttgtgctgcaccccagatggtgtctcagatgctttggggaatctttaacagctgaatttgagtc

SEQ ID NO: 538506 - DNA, 120 bp, Artificial Sequence
  ENSG00000166974_29 (sequence is synthesized)
agtcctcttaggctgcacctccagcctctgcagatcccccctcatttcccatggatggtgggaccccattattctctcatctcggcattcagggaacagtttccttagcggcccctggtc

SEQ ID NO: 538507 - DNA, 120 bp, Artificial Sequence
  ENSG00000166974_30 (sequence is synthesized)
acatgtcatcgggctgggcaggaagcgtccctgattgcgtgctccacttctccctctcaggaagcccagtttcatccttagtaccccccctcgtgcccgctgtcggctggttatagcact

SEQ ID NO: 538508 - DNA, 120 bp, Artificial Sequence
  ENSG00000166974_31 (sequence is synthesized)
tgtcggctggttatagcacttccactgctactgtcagataggaagtgatcgaagcagggggcaaagagaaagcccatatttgttctaagcagaaaagcaggaaaaaaaaaaaaaaaaaag

SEQ ID NO: 538509 - DNA, 120 bp, Artificial Sequence
  ENSG00000166974_32 (sequence is synthesized)
ctgagagaagtaaattccagaagggaaccaagaactcttcccttccctggtgagtatttccattattccgttaaggtttaatatgcattcagattacttttactaaataggacaccataa

SEQ ID NO: 538510 - DNA, 120 bp, Artificial Sequence
  ENSG00000166974_33 (sequence is synthesized)
aggacaccataaagcttttgttatatattaaatgtaaactgaaaggaatgtaaacatatgtattgttaattataaatatagataagtaatgacataatagatgaaaaagtcttattcaga

SEQ ID NO: 538511 - DNA, 120 bp, Artificial Sequence
  ENSG00000166974_34 (sequence is synthesized)
attttacattacccacctattgtcgcatggtagaatagttttttgtctctgaatatgtgaataacttgacttgcattgatctttttacatatttaataaaaaaaaaagtatatgttaaaa

SEQ ID NO: 538512 - DNA, 120 bp, Artificial Sequence
  ENSG00000166974_35 (sequence is synthesized)
ctctcgggtggactcccggagcggcggcggcggcggcggtggcagactgcgagtcacgtgcgacagaggaggcggagcacggcggccgggtgggtggagaaaacaaagcccccagctgtc

SEQ ID NO: 538513 - DNA, 120 bp, Artificial Sequence
  ENSG00000166974_36 (sequence is synthesized)
gcgttcctacaggtaatggggctggcacgagagcagcgccggggaccgccgtgagggcgcgcggaaatccagcccgttatataatggagcagacactgcctgcgacccctgctgcagttg

SEQ ID NO: 538514 - DNA, 120 bp, Artificial Sequence
  ENSG00000166974_37 (sequence is synthesized)
gaaggaggcgacagcgccggagcagaatgagctgcaatttatagactgaaaagacaaagggattcctttttcaccaaatcaaaaaacacattataattaacggctgcagttgactattat

SEQ ID NO: 538515 - DNA, 120 bp, Artificial Sequence
  ENSG00000166974_38 (sequence is synthesized)
cacgtcagccacacactcccttctgctcctcagaaccttaaagttctcctcatggctggggaacagtgatgtgctccagggctccaagcaatggattcctcagcagacattgctctgtga

SEQ ID NO: 538516 - DNA, 120 bp, Artificial Sequence
  ENSG00000166974_39 (sequence is synthesized)
attttgggtaggaaaaagtatatattgctattggcatgtaattaaagggggaaaaactcagatataactaaaggacgtattgggaaaagtgtttatgagcatccaggagcacaagcagag

SEQ ID NO: 538517 - DNA, 120 bp, Artificial Sequence
  ENSG00000166974_40 (sequence is synthesized)
ccacacggacacgtattggaaaggtctcttgcttgagcttcgtaatgcctttcactggctcctagcctcttctctgtcatcccatctgccatcacacttgcctcctgaaaacaccaattg

SEQ ID NO: 538518 - DNA, 120 bp, Artificial Sequence
  ENSG00000166974_41 (sequence is synthesized)
gttatttctgcttctctctctctctctcttttgggttttattcacaggaattgctggtcatgtcttatactatattttgggtggttttttttcttcactctcactcccttgcaggtacat

SEQ ID NO: 538519 - DNA, 120 bp, Artificial Sequence
  ENSG00000166974_42 (sequence is synthesized)
gtgcagaccggttgcgattgtggtcagacgcagcacctacttctaatctgaggacccgcgatttacacttttgctgaataggacactgtggaatgaaacagaacagagatcaaaagttca

SEQ ID NO: 538520 - DNA, 120 bp, Artificial Sequence
  ENSG00000166974_43 (sequence is synthesized)
gaaggaggcgacagcgccggagcagggctgcagttgactattataggatgtggtttcctgcaacatgcctgattttgaagaagggtgatctacacactgggaatgaagccacagagcatg

SEQ ID NO: 538521 - DNA, 120 bp, Artificial Sequence
  ENSG00000166974_44 (sequence is synthesized)
gtagacccgctaggcaggaagaggtcactaaaaatactatcgtgctgtcaatgtagaatgaagggttaagcgctcaaacccgcgcccgcgcgcaccgaaacggaagaacttccttgatta

SEQ ID NO: 538522 - DNA, 120 bp, Artificial Sequence
  ENSG00000166974_45 (sequence is synthesized)
gcatagtatcgaccctggggccgcgctgcgaggcggaggttcggtcccagctggggtgaagtgtgcagaccggttgcgattgtggtcagacgcagcacctacttctaatctgaggacccg

SEQ ID NO: 538523 - DNA, 120 bp, Artificial Sequence
  ENSG00000166974_46 (sequence is synthesized)
cgatttacacttttgctgaataggacactgtggaatgaaacagaacagagatcaaaagtgtcctgtttcccagaggaacagttcatttcaacagccagggagaaagcctggatgctcaag

SEQ ID NO: 538524 - DNA, 120 bp, Artificial Sequence
  ENSG00000166974_47 (sequence is synthesized)
ggtagggggcctaggatcccctaggactggggtaagggagggaagggtaaggaagaatccttggtttcaagtaagtgagaataaaaagaattgttcgaagacaaaatcagtagcccatga

SEQ ID NO: 538525 - DNA, 120 bp, Artificial Sequence
  ENSG00000166974_48 (sequence is synthesized)
tgaataaaaagtgttagtcacaaatctcaaagctgtacattaagatggggcagatggctcagccttgctgcagacttcaggctaccttcccctcccctgctcctcagggccgtcaagagc

SEQ ID NO: 538526 - DNA, 120 bp, Artificial Sequence
  ENSG00000166974_49 (sequence is synthesized)
tccaggctagaccgttgcccatcctgcccacttctggccattctagatagtgctgcattagggtgagtctgcctccctctctttttaaaggctgggtcagggttagtctgtctccctccc

SEQ ID NO: 538527 - DNA, 120 bp, Artificial Sequence
  ENSG00000166974_50 (sequence is synthesized)
actctcttcttttttcccttcttcctttctttcttcagctattagtagttgagcttattctatatgaaagatattacgcttaatgctggtaatataaaggtagtaaaatagatacctttc

SEQ ID NO: 538528 - DNA, 120 bp, Artificial Sequence
  ENSG00000166979_0 (sequence is synthesized)
gaggaggctctggcagcctgggcagggaggcggcggggggccgcggagccgctggccatcgattctccccgccatgtgacgccgtccttagccctgcgacccccagcgcgtcccgggcct

SEQ ID NO: 538529 - DNA, 120 bp, Artificial Sequence
  ENSG00000166979_1 (sequence is synthesized)
cgccgcgcagcgcacgatgcttctgccgggacgcgcacgccaaccgccgacgccccagcccgtgcagcatcccggcctccgccggcaggtagagccgccggggcagctcctgcgcctctt

SEQ ID NO: 538530 - DNA, 120 bp, Artificial Sequence
  ENSG00000166979_2 (sequence is synthesized)
cctgcgcctcttctactgcactgtcctggtctgctccaaagagatctcagcgctcaccgacttctctggttacctaaccaaactcctgcaaaaccacaccacctatgcctgtgatgggga

SEQ ID NO: 538531 - DNA, 120 bp, Artificial Sequence
  ENSG00000166979_3 (sequence is synthesized)
ctatttgaatctacagtgccctcggcattctacgataagtgtccaatcggcattttatgggcaagattaccaaatgtgtagttcccagaagcctgcctcccagagggaagacagcttaac

SEQ ID NO: 538532 - DNA, 120 bp, Artificial Sequence
  ENSG00000166979_4 (sequence is synthesized)
ctgtgtggcagccaccaccttccagaaggtgctggacgaatgccagaaccagcgggcctgccacctcctggtcaatagccgtgtttttggacctgacctttgtccaggaagcagtaaata

SEQ ID NO: 538533 - DNA, 120 bp, Artificial Sequence
  ENSG00000166979_5 (sequence is synthesized)
cctcctggtctcctttaaatgccaacctaatgaattaaaaaacaaaaccgtgtgtgaagaccaggagctgaaactgcactgccatgaatccaagttcctcaacatctactctgcgaccta

SEQ ID NO: 538534 - DNA, 120 bp, Artificial Sequence
  ENSG00000166979_6 (sequence is synthesized)
gaagcagagatgcaaaatcatcgtcaacaatcaccattttggaagcccctgtttgccaggcgtgaaaaaatacctcactgtgacctacgcatgtgttcccaagaacatactcacagcgat

SEQ ID NO: 538535 - DNA, 120 bp, Artificial Sequence
  ENSG00000166979_7 (sequence is synthesized)
tgatccagccattgctaatctaaaaccttctttgaagcagaaagatggtgaatatggtataaacttcgacccaagcggatcgaaggttctgaggaaagatggaattcttgttagcaactc

SEQ ID NO: 538536 - DNA, 120 bp, Artificial Sequence
  ENSG00000166979_8 (sequence is synthesized)
tctggcagcctttgcttacattagagcccacccggagagagctgccctgctgttcgtgtccagtgtctgcatcggcctggccctcacactgtgcgccctggtcatcagagagtcctgtgc

SEQ ID NO: 538537 - DNA, 120 bp, Artificial Sequence
  ENSG00000166979_9 (sequence is synthesized)
caaggacttccgcgacttgcagctggggagggagcagctggtgccaggaagtgacaaggtcgaggaggacagcgaggatgaagaagaggaggaggacccctctgagtctgatttcccagg

SEQ ID NO: 538538 - DNA, 120 bp, Artificial Sequence
  ENSG00000166979_10 (sequence is synthesized)
ggaactgtcggggttctgtaggacttcatatcctatatacagttccatagaagctgcagagctcgcagaaaggattgagcgcagggagcaaatcattcaggaaatatggatgaacagtgg

SEQ ID NO: 538539 - DNA, 120 bp, Artificial Sequence
  ENSG00000166979_11 (sequence is synthesized)
tttggacacctcgctcccaagaaacatgggccagttctactgaaaaccacatgcatcttgatgcgatcgcactttctgaagaaggaaggatcccaaatgcccctccagttctggttcacc

SEQ ID NO: 538540 - DNA, 120 bp, Artificial Sequence
  ENSG00000166979_12 (sequence is synthesized)
tgtaccttctatgaaggagaattcgtcatgtcattcaacactcgtgaggccaggaagctattaaagggatgtttcaagctgtttctagcacattccaaaataaatgaggagggaagagtc

SEQ ID NO: 538541 - DNA, 120 bp, Artificial Sequence
  ENSG00000166979_13 (sequence is synthesized)
cagcacccaaaggaagccgagctggagctaaagatcccggctccggagccatctgaccggttttgagacctccagctcgtcgccgtcctggctgcgagagcttgggcacggcgccggggc

SEQ ID NO: 538542 - DNA, 120 bp, Artificial Sequence
  ENSG00000166979_14 (sequence is synthesized)
ctttccctacggcccccctcgcttcctccggcacggcggcaacggagatttcctctcggggaaactacgcggatccttttcggggatcctcgccccgccccagttctccgccccctcccc

SEQ ID NO: 538543 - DNA, 80 bp, Artificial Sequence
  ENSG00000166979_15 (sequence is synthesized)
ggtgcgatcccacgcctccaggaccccaccttcctgcggcccccgatcggccccgccccgggggcgccccagctgcacgc

SEQ ID NO: 538544 - DNA, 120 bp, Artificial Sequence
  ENSG00000166979_16 (sequence is synthesized)
agtgcgtcacgggcaccggccgcgctccttctgccgccagggcgaggctggcacccggccagcgcgggcagggccacgggtgcccggctgtttcccgggtgtggaaggcgctcaaggtgc

SEQ ID NO: 538545 - DNA, 120 bp, Artificial Sequence
  ENSG00000166979_17 (sequence is synthesized)
gctcctccaaggcagagcggctcccccctttcggtatgtgcttttgtgtgtgtattagccagggttctctagagggacagaattaatagaatatatatatatatatcctatatatatcct

SEQ ID NO: 538546 - DNA, 120 bp, Artificial Sequence
  ENSG00000166979_18 (sequence is synthesized)
atatgattgtgaaagtcaatacttaacacaatcacgatcttgtgatcgtgtaagttaatacttaataaactcccgtgtgtgtgtgtatgtatatatatataaatgcttgtaaacagtaat

SEQ ID NO: 538547 - DNA, 120 bp, Artificial Sequence
  ENSG00000166979_19 (sequence is synthesized)
agtgattcactgtttccactatcagacaccagctctcacatgtgtgttttgactctctagctctattgcaaatcctgtgaaaggatgctttcatctgggtaaaaagcaagattgcttgtc

SEQ ID NO: 538548 - DNA, 120 bp, Artificial Sequence
  ENSG00000166979_20 (sequence is synthesized)
tttcctggtttataaaggtgcttcaggactccttggctcctggccaatatcttagtgcttcctgaaggggaaagagccctccaaaccattcagtgggccatcccagaccgaggtttctga

SEQ ID NO: 538549 - DNA, 120 bp, Artificial Sequence
  ENSG00000166979_21 (sequence is synthesized)
cccagacattgaaacaggaggagttcccttatccccccttgcagggcacgtgacaggggcatggctcgcttctcagtaccctgctgctcaaacccctagagggggcatgcagatggacag

SEQ ID NO: 538550 - DNA, 120 bp, Artificial Sequence
  ENSG00000166979_22 (sequence is synthesized)
gtcgtggggagcgtttttgggctccgaccccacagcagcttgtagaattgggtgtttacagctcccgaagccccagtgggcatgtgttacagtggtctccttcagttttgccatctgcag

SEQ ID NO: 538551 - DNA, 120 bp, Artificial Sequence
  ENSG00000166979_23 (sequence is synthesized)
agctcaattagaccctctgccttatcacaaagacagatggctttctgtatcccaggttcttgccctagtgtactcggaaaatcagatttcgcatggacttggagaaggagtgcaaggttt

SEQ ID NO: 538552 - DNA, 120 bp, Artificial Sequence
  ENSG00000166979_24 (sequence is synthesized)
aaggagtgcaaggttttattgagtggaggaggtggctctcggatggggagccagaagggggatggagtgggaaggtggtcttcccctagagttgggctgcccagcagccagactctcctc

SEQ ID NO: 538553 - DNA, 120 bp, Artificial Sequence
  ENSG00000166979_25 (sequence is synthesized)
cgaccgcccccgactgatttccacatcgccccgctgtcgaaagcccgccagcatctgctggtgtctgtcagtgtgctcttctgcttctctgctcctctcgacgtccagccacttgtgtgt

SEQ ID NO: 538554 - DNA, 120 bp, Artificial Sequence
  ENSG00000166979_26 (sequence is synthesized)
gtgcccactagggtcttgggttttttatgggcacaggatgggggtcatggcaggccagagtagtcttggaaaatgcaacatttggacatgaaaacaggagtgcctgttctcactaaggtc

SEQ ID NO: 538555 - DNA, 120 bp, Artificial Sequence
  ENSG00000166979_27 (sequence is synthesized)
catgggcacaagcccatgggtggagccctcgccagggaccccacccttctctacccagcactcccctgccccccttccatgtcaacatgaaagctgacattggctcctgtgccccacctc

SEQ ID NO: 538556 - DNA, 120 bp, Artificial Sequence
  ENSG00000166979_28 (sequence is synthesized)
tgggcctggtttggtgacctctgcaccagagctgctagggaggccccatcccacatgttgttgattgaacagcccttccccaggggaaccaacgtcctcctgtccccaaacccatggagg

SEQ ID NO: 538557 - DNA, 120 bp, Artificial Sequence
  ENSG00000166979_29 (sequence is synthesized)
tggagtgccagtacacaacatggattgcaccaggctgggtctaagataaaaccagactgtggacaacgggacagataaggcccacatggctctgcactgcctgggtctgttactgtgtgg

SEQ ID NO: 538558 - DNA, 120 bp, Artificial Sequence
  ENSG00000166979_30 (sequence is synthesized)
aggaatgtcttagtctgttgctcctgtgggtgtagctaaaacacgaaccaggagccttcatccttagaaaggagtcagacagacacctgagaaccaatcccaaactgcacccttcccctg

SEQ ID NO: 538559 - DNA, 120 bp, Artificial Sequence
  ENSG00000166979_31 (sequence is synthesized)
aacctcgtggaaccttctggaatgcaacttattactgccagagggtctttgatgagagtctactctccactatttgtcttcattacccacatattctctttccgtggaaaggttacctaa

SEQ ID NO: 538560 - DNA, 120 bp, Artificial Sequence
  ENSG00000166979_32 (sequence is synthesized)
ttcccacttcaaagtgcactaacgccagtcagcttgaaggcatcccctgagctgctggcaaacaaggcctttttacccacagattaacctcttatttgttttaataaatgatcaaaactt

SEQ ID NO: 538561 - DNA, 120 bp, Artificial Sequence
  ENSG00000166984_0 (sequence is synthesized)
ggctgctctctggtctctggagatgaggcgggaggacttggggacagctgtggggacacggcccagatgttctggtcccagcagaagtgactggcggggaccaggatgctggagggtcag

SEQ ID NO: 538562 - DNA, 120 bp, Artificial Sequence
  ENSG00000166984_1 (sequence is synthesized)
ctcgaggccagggagcccaaggagggcacccacccagaggacccgtgcccgggagctggggctgccatggagaagacacctgcagcagccgaggtccccagggaggacagcaatgccggg

SEQ ID NO: 538563 - DNA, 120 bp, Artificial Sequence
  ENSG00000166984_2 (sequence is synthesized)
gagatgccgtcattacagcagcagatcaccagcctccaccaagagctcgggagacagcagtcgctgtgggctgatattcacagaaaactccagagtcatatggatgccttgaggaagcag

SEQ ID NO: 538564 - DNA, 120 bp, Artificial Sequence
  ENSG00000166984_3 (sequence is synthesized)
aaccgggagctccgagaagagctgagaggcctgcagcggcagcagtgggaagccgggaagaaacccgcagcgtccccacacgcggggcgagaatcacacactctggcattggaacctgct

SEQ ID NO: 538565 - DNA, 120 bp, Artificial Sequence
  ENSG00000166984_4 (sequence is synthesized)
tttggaaaaatttcacctctgtcagctgatgaagagacaacgcccaaatacgctggccgcaagagtcagagtgcgactctcctgggacaaagatggtcatctaaccacttagctcctcca

SEQ ID NO: 538566 - DNA, 120 bp, Artificial Sequence
  ENSG00000166984_5 (sequence is synthesized)
aagccaatgagtttaaagacagaaagaattaactcggggaaaacaccaccacaggaagatagagagaaaagtcctcccgggagacgtcaagacagaagtccagcacccactggaaggccg

SEQ ID NO: 538567 - DNA, 120 bp, Artificial Sequence
  ENSG00000166984_6 (sequence is synthesized)
actcccggtgcagaaagacgggaggtgtctgaagacggaaagattatgcatccatcttcccgaagtctgcaaaactccggtggcagaaaatcaccagtgcaggcttcccaggccgccacg

SEQ ID NO: 538568 - DNA, 120 bp, Artificial Sequence
  ENSG00000166984_7 (sequence is synthesized)
ctgcaggagcagacggcagcagccggagttgctgacagaagctcatcagtcttagggagttctgaaggcggatttctcagccgcgttcaagctgaagagttcgccagttcttccccagac

SEQ ID NO: 538569 - DNA, 120 bp, Artificial Sequence
  ENSG00000166984_8 (sequence is synthesized)
ggcagatgactgccggcggtccggtttcccgagtgaatttccaggagctctgcatgccgctccctccagacaggacatggggccctgacctggaggccaggcgtttctagcattgttgac

SEQ ID NO: 538570 - DNA, 120 bp, Artificial Sequence
  ENSG00000166984_9 (sequence is synthesized)
tgccagtttattaccagtaaataaagcaatacgcttttcaggaggaagatttgttttaaatacttaaaaaaaaacccaaaactatagcctcaaatatcttccagccaccacattttagcc

SEQ ID NO: 538571 - DNA, 120 bp, Artificial Sequence
  ENSG00000166984_10 (sequence is synthesized)
cttgaggagagctcagttccggaaggacgcgtcaaggtggcggtggtcggcattgactcaggaaggggtgggaagaggcacctgctgcggctgcggctgcggctacagtgttttgtgagc

SEQ ID NO: 538572 - DNA, 120 bp, Artificial Sequence
  ENSG00000166984_11 (sequence is synthesized)
tccgaggagacccagtcctgcctggggcagcacatcatcgctgcttcttcagctcaacagttcgttcatctcacgcctcttgctggcctgttagaaactgggagtcggcctcaggctagc

SEQ ID NO: 538573 - DNA, 120 bp, Artificial Sequence
  ENSG00000166984_12 (sequence is synthesized)
tttgctgagggaactctgcctcagtaaaagcgaattcatgtcttgcaagcggataaagcatttggataaatgaacaacagggaatgctacttgcagtaacagtttgaattcactgaaatg

SEQ ID NO: 538574 - DNA, 120 bp, Artificial Sequence
  ENSG00000166984_13 (sequence is synthesized)
cttttgtctttagcgcagtggttgtagtggtttgtcaggggagaaggaaacccacatcatttgagcacctgaccttgccatccccataggcaggtccatgagacataagtgatgctcctc

SEQ ID NO: 538575 - DNA, 120 bp, Artificial Sequence
  ENSG00000166984_14 (sequence is synthesized)
cttggctaagtgcatggagaaaccaatcgctgaagctcatgaaaccacgaagatgaggacacaagaactaggtaacgcgctgtgccctctgctagcgcgatccttcctttctccccacaa

SEQ ID NO: 538576 - DNA, 120 bp, Artificial Sequence
  ENSG00000166984_15 (sequence is synthesized)
ccagcggtcacccacctctgcctgctcctacgtctctggctcccccaccctccctcccaggtcttcaacactttcctcttctcgtgactcatcttgcatctacttcttgtgtgtcttgca

SEQ ID NO: 538577 - DNA, 120 bp, Artificial Sequence
  ENSG00000166984_16 (sequence is synthesized)
ttggatatgccaaagttctttccttttttgtgttttctttcttttaataatataaactccaaaatagattgtttgattcttttcatgtggaacatttaaaatattatttgtgctttatta

SEQ ID NO: 538578 - DNA, 120 bp, Artificial Sequence
  ENSG00000166984_17 (sequence is synthesized)
aaggatggacaggaagagaccttatttcctgatgggacaatcgtaagggtggaaaggaacggcgacaaaaccattgtgctcagcaacgggcagaaagaaatccacacagcccggttcaag

SEQ ID NO: 538579 - DNA, 120 bp, Artificial Sequence
  ENSG00000166984_18 (sequence is synthesized)
aggagggagtacccggatggcaccgtcaagactgtgtattgcagcggctgtcaggaaaccaagtatgcctccgggagggttaagatcaaagatgaagctggaaatgtcgtcctggacgag

SEQ ID NO: 538580 - DNA, 120 bp, Artificial Sequence
  ENSG00000166984_19 (sequence is synthesized)
aagcagatgagccctcaacacgcagcatcacatgggaaatgccaattgcagatttttgctaaaacagacaaaaactaataacatattagctgccctaaatgatcttggagagccaccaaa

SEQ ID NO: 538581 - DNA, 120 bp, Artificial Sequence
  ENSG00000166984_20 (sequence is synthesized)
actttaggactacccaagtcatctagaaattgcaaaggaaaagacattctctcccctatttaggaaacttggttagagcagcacacgtcagagaacagaaggctcacaaaagaacgattt

SEQ ID NO: 538582 - DNA, 120 bp, Artificial Sequence
  ENSG00000166984_21 (sequence is synthesized)
cagaaacacatcaagcagctgtgaatgcaccccacatgcaggcactgtaatcaccttcctgttcctgtaatgaaatagaagcagtgcagcagtatttcagcaggctccacagcgagttcc

SEQ ID NO: 538583 - DNA, 120 bp, Artificial Sequence
  ENSG00000166984_22 (sequence is synthesized)
ctgctctaaaacgtccggtgtgttccggcccaagtgcctgctcaggtttaaagggggtttcttttgctagtacttaaaaaagttaaaaataatcactactattaaatagatctttagtgt

SEQ ID NO: 538584 - DNA, 120 bp, Artificial Sequence
  ENSG00000166984_23 (sequence is synthesized)
gttttaaatggcaaaagcacttcactcagaattggtgattctgtttcatgcgtgtgttaagtggggataggtttgtggcaagagttggatgctgttatcttgctgaatggagaaagtata

SEQ ID NO: 538585 - DNA, 120 bp, Artificial Sequence
  ENSG00000166984_24 (sequence is synthesized)
cataaacatagtgttttaagcttaaaatgatggaaaacccctacgtagatcttccaacgtggacattccaacaggaagctataaagagaagtaaaagtgacagcacattatcagtgaaaa

SEQ ID NO: 538586 - DNA, 120 bp, Artificial Sequence
  ENSG00000166984_25 (sequence is synthesized)
ataagactaggtttaaaaagaattacagacgctcttccaggtggcagacccgagtcagccaggaactgtcaacctggagatgaagtgcctcgctgggtggcctgcgcatcatgtgtgatg

SEQ ID NO: 538587 - DNA, 120 bp, Artificial Sequence
  ENSG00000166984_26 (sequence is synthesized)
ttatgagagtcagttttgccagtacacctctggatataaagaaaatcaaaatataagtgagcaaaaataagcccaaagacaaaagtggcaaggaggagaaaaatgggggctacagtctga

SEQ ID NO: 538588 - DNA, 120 bp, Artificial Sequence
  ENSG00000166984_27 (sequence is synthesized)
tcccaccaggcgggaccctgattcctgtccctgaggcctgtcattggacttccctcgccagacccctgtaggaatgcgccaccctgggacgctgatgctaaacttcctctcagaggggca

SEQ ID NO: 538589 - DNA, 120 bp, Artificial Sequence
  ENSG00000166984_28 (sequence is synthesized)
tcccctctgcaaccttctctctttgttgatgggaggcaggacacagagttaaagaaaatattaacattccagcttttctcttctaatccaggagaaggcaccagactttaaaaacttcat

SEQ ID NO: 538590 - DNA, 120 bp, Artificial Sequence
  ENSG00000166984_29 (sequence is synthesized)
taaagaaaatcaggttgacatgcctcacatcatcccagcaaccaccttcctcactggaccctgttggacagtgcttgctctcatgaaagtgccatgggtctctgtggccagggccacaca

SEQ ID NO: 538591 - DNA, 120 bp, Artificial Sequence
  ENSG00000166984_30 (sequence is synthesized)
gtgcagggctgtacctttatcacgatcccgcttattctcagagcaaggctggaggctctacggtccaatgaaggatgccacgggaaggctaacatgtcaggttgaaaatgcagtggcttc

SEQ ID NO: 538592 - DNA, 120 bp, Artificial Sequence
  ENSG00000166984_31 (sequence is synthesized)
ggaggtgtctgaagacggaaaggtgacctcggaaacctgggtcactctacactggcagcatggaaaattcagattcagatgaagttccacttaggtctcataagagtactcaatttgtta

SEQ ID NO: 538593 - DNA, 120 bp, Artificial Sequence
  ENSG00000166984_32 (sequence is synthesized)
ttcgaaatagacctagtaatttattaacctaattatgtttctatagataaaactttgaatttctgcagacatgtctttaatgctataaaagcaaataaattgaattgggttttaaaaagc

SEQ ID NO: 538594 - DNA, 120 bp, Artificial Sequence
  ENSG00000166986_0 (sequence is synthesized)
atcagcgagggattcacggcgaaatgagactgttcgtgagtgatggcgtcccgggttgcttgccggtgctggccgccgccgggagagcccggggcagagcagaggtgctcatcagcactg

SEQ ID NO: 538595 - DNA, 120 bp, Artificial Sequence
  ENSG00000166986_1 (sequence is synthesized)
taggcccggaagattgtgtggtcccgttcctgacccggcctaaggtccctgtcttgcagctggatagcggcaactacctcttctccactagtgcaatctgccgatatttttttttgttat

SEQ ID NO: 538596 - DNA, 120 bp, Artificial Sequence
  ENSG00000166986_2 (sequence is synthesized)
ctggctgggagcaagatgacctcactaaccagtggctggaatgggaagcgacagagctgcagccagctttgtctgctgccctgtactatttagtggtccaaggcaagaagggggaagatg

SEQ ID NO: 538597 - DNA, 120 bp, Artificial Sequence
  ENSG00000166986_3 (sequence is synthesized)
ttcttggttcagtgcggagagccctgactcacattgaccacagcttgagtcgtcagaactgtcctttcctggctggggagacagaatctctagccgacattgttttgtggggagccctat

SEQ ID NO: 538598 - DNA, 120 bp, Artificial Sequence
  ENSG00000166986_4 (sequence is synthesized)
acccattactgcaagatcccgcctacctccctgaggagctgagtgccctgcacagctggttccagacactgagtacccaggaaccatgtcagcgagctgcagagactgtactgaaacagc

SEQ ID NO: 538599 - DNA, 120 bp, Artificial Sequence
  ENSG00000166986_5 (sequence is synthesized)
aaggtgtcctggctctccggccttacctccaaaagcagccccagcccagccccgctgagggaagggctgtcaccaatgagcctgaggaggaggagctggctaccctatctgaggaggaga

SEQ ID NO: 538600 - DNA, 120 bp, Artificial Sequence
  ENSG00000166986_6 (sequence is synthesized)
ttgctatggctgttactgcttgggagaagggcctagaaagtttgcccccgctgcggccccagcagaatccagtgttgcctgtggctggagaaaggaatgtgctcatcaccagtgccctcc

SEQ ID NO: 538601 - DNA, 120 bp, Artificial Sequence
  ENSG00000166986_7 (sequence is synthesized)
cttacgtcaacaatgtcccccaccttgggaacatcattggttgtgtgctcagtgccgatgtctttgccaggtactctcgcctccgccagtggaacaccctctatctgtgtgggacagatg

SEQ ID NO: 538602 - DNA, 120 bp, Artificial Sequence
  ENSG00000166986_8 (sequence is synthesized)
agtatggtacagcaacagagaccaaggctctggaggagggactaaccccccaggagatctgcgacaagtaccacatcatccatgctgacatctaccgctggtttaacatttcgtttgata

SEQ ID NO: 538603 - DNA, 120 bp, Artificial Sequence
  ENSG00000166986_9 (sequence is synthesized)
tttttggtcgcaccaccactccacagcagaccaaaatcacccaggacattttccagcagttgctgaaacgaggttttgtgctgcaagatactgtggagcaactgcgatgtgagcactgtg

SEQ ID NO: 538604 - DNA, 120 bp, Artificial Sequence
  ENSG00000166986_10 (sequence is synthesized)
ctcgcttcctggctgaccgcttcgtggagggcgtgtgtcccttctgtggctatgaggaggctcggggtgaccagtgtgacaagtgtggcaagctcatcaatgctgtcgagcttaagaagc

SEQ ID NO: 538605 - DNA, 120 bp, Artificial Sequence
  ENSG00000166986_11 (sequence is synthesized)
gtcgagccagcacctgtttctggacctgcctaagctggagaagcgactggaggagtggttggggaggacattgcctggcagtgactggacacccaatgcccagtttatcacccgttcttg

SEQ ID NO: 538606 - DNA, 120 bp, Artificial Sequence
  ENSG00000166986_12 (sequence is synthesized)
gcttcgggatggcctcaagccacgctgcataacccgagacctcaaatggggaacccctgtacccttagaaggttttgaagacaaggtattctatgtctggtttgatgccactattggcta

SEQ ID NO: 538607 - DNA, 120 bp, Artificial Sequence
  ENSG00000166986_13 (sequence is synthesized)
tctgtccatcacagccaactacacagaccagtgggagagatggtggaagaacccagagcaagtggacctgtatcagttcatggccaaagacaatgttcctttccatagcttagtctttcc

SEQ ID NO: 538608 - DNA, 120 bp, Artificial Sequence
  ENSG00000166986_14 (sequence is synthesized)
ttgctcagccctaggagctgaggataactataccttggtcagccacctcattgctacagagtacctgaactatgaggatgggaaattctctaagagccgcggtgtgggagtgtttgggga

SEQ ID NO: 538609 - DNA, 120 bp, Artificial Sequence
  ENSG00000166986_15 (sequence is synthesized)
catggcccaggacacggggatccctgctgacatctggcgcttctatctgctgtacattcggcctgagggccaggacagtgctttctcctggacggacctgctgctgaagaataattctga

SEQ ID NO: 538610 - DNA, 120 bp, Artificial Sequence
  ENSG00000166986_16 (sequence is synthesized)
gctgcttaacaacctgggcaacttcatcaacagagctgggatgtttgtgtctaagttctttgggggctatgtgcctgagatggtgctcacccctgatgatcagcgcctgctggcccatgt

SEQ ID NO: 538611 - DNA, 120 bp, Artificial Sequence
  ENSG00000166986_17 (sequence is synthesized)
caccctggagctccagcactatcaccagctacttgagaaggttcggatccgggatgccttgcgcagtatcctcaccatatctcgacatggcaaccaatatattcaggtgaatgagccctg

SEQ ID NO: 538612 - DNA, 120 bp, Artificial Sequence
  ENSG00000166986_18 (sequence is synthesized)
gaagcggattaaaggcagtgaggctgacaggcaacgggcaggaacagtgactggcttggcagtgaatatagctgccttgctctctgtcatgcttcagccttacatgcccacggttagtgc

SEQ ID NO: 538613 - DNA, 120 bp, Artificial Sequence
  ENSG00000166986_19 (sequence is synthesized)
cacaatccaggcccagctgcagctcccacctccagcctgcagtatcctgctgacaaacttcctgtgtaccttaccagcaggacaccagattggcacagtcagtcccttgttccaaaaatt

SEQ ID NO: 538614 - DNA, 120 bp, Artificial Sequence
  ENSG00000166986_20 (sequence is synthesized)
ggaaaatgaccagattgaaagtttaaggcagcgctttggagggggccaggcaaaaacgtccccgaagccagcagttgtagagactgttacaacagccaagccacagcagatacaagcgct

SEQ ID NO: 538615 - DNA, 120 bp, Artificial Sequence
  ENSG00000166986_21 (sequence is synthesized)
gatggatgaagtgacaaaacaaggaaacattgtccgagaactgaaagcacaaaaggcagacaagaacgaggttgctgcggaggtggcgaaactcttggatctaaagaaacagttggctgt

SEQ ID NO: 538616 - DNA, 120 bp, Artificial Sequence
  ENSG00000166986_22 (sequence is synthesized)
agctgaggggaaaccccctgaagcccctaaaggcaagaagaaaaagtaaaagaccttggctcatagaaagtcactttaatagatagggacagtaataaataaatgtacaatctctatata

SEQ ID NO: 538617 - DNA, 120 bp, Artificial Sequence
  ENSG00000166986_23 (sequence is synthesized)
aacctagagaaacgaacaagaacctgaagaaagcaaaagtctaaagctaaaactctttagtagatataagcaaagagaaaaaagggccagaatggataggaagggactcccaaaatctga

SEQ ID NO: 538618 - DNA, 120 bp, Artificial Sequence
  ENSG00000166986_24 (sequence is synthesized)
gcataccagccccttaaggagaaatgttgctagacacccatagttgaggttagaaagaggaaagaaggaagagttagtgggctagagaggggaaggatgtgatgtgagcagatggttctc

SEQ ID NO: 538619 - DNA, 120 bp, Artificial Sequence
  ENSG00000166986_25 (sequence is synthesized)
gtgctggtgggcggtggatgggggggcgggaccgaaacacgccagattctctgcagctgtctttgccaaacccctagccctcgccacacaccccaatcgaccacttctcctattatcctt

SEQ ID NO: 538620 - DNA, 120 bp, Artificial Sequence
  ENSG00000166986_26 (sequence is synthesized)
gatcactccacgccttcttccctcccagtcacatctttcacttcctttaattaccctcaatataatacccttcccttatctctctcctcccctcttccgtcttcccggtccccgcctcac

SEQ ID NO: 538621 - DNA, 120 bp, Artificial Sequence
  ENSG00000166986_27 (sequence is synthesized)
gacagcccccaggcacccttttgtgttcttaggaaatccctctctcccctcctaacacacacacacgttcctttctgtttacctcttctcattctcagccgattgtttgggtgactctta

SEQ ID NO: 538622 - DNA, 120 bp, Artificial Sequence
  ENSG00000166986_28 (sequence is synthesized)
ggaggttctcttattgtgtggtcccgttcctgacccggcctaaggtccctgtcttgcagctggatagcggcaactacctcttctccactagtgcaatctgccgatatttttttttgttat

SEQ ID NO: 538623 - DNA, 120 bp, Artificial Sequence
  ENSG00000166986_29 (sequence is synthesized)
ttttttttactctggtgtgatgggacagagatctgaaactctgagaacaaatggagttatactgagaagatttgagtctccatgtttagagtaggccacatagtagagttattggagtgt

SEQ ID NO: 538624 - DNA, 120 bp, Artificial Sequence
  ENSG00000166986_30 (sequence is synthesized)
gccaactacacagaccagtgggagagatggtggaagaacccagagcaagtgagcagttcttggttaggctgtgcatggggagggtaggcggtagggtgtgggtgttagggttgggtgtct

SEQ ID NO: 538625 - DNA, 120 bp, Artificial Sequence
  ENSG00000166986_31 (sequence is synthesized)
ttgctacaggtaagtaccctggaagactactgatggggtgttcataggaaatgaggggtgaggcagtacttggaaaaagatcttggagagctgctatcttgagttaggagttgagctgaa

SEQ ID NO: 538626 - DNA, 120 bp, Artificial Sequence
  ENSG00000166986_32 (sequence is synthesized)
tgttgttgataggatggatatgtacactaacttccactttgtcactaattccgcacatggtaactccgaactctaaaactctgaccgttaagagcttgcatcgagagccactgcgagtag

SEQ ID NO: 538627 - DNA, 120 bp, Artificial Sequence
  ENSG00000166986_33 (sequence is synthesized)
ctgctgttatgacatggccatttcattctccacaacaagagaagcagccgcggcttcagtcaccgccctccagcagcgtaagaggataaaagtgcgacttgccctaaaacctaaacgtct

SEQ ID NO: 538628 - DNA, 73 bp, Artificial Sequence
  ENSG00000166986_34 (sequence is synthesized)
agaggataaaagtgcgacttgccctaaaacctaaacgtctcttctggatctccagaaaaaaagtgctgcaggc

SEQ ID NO: 538629 - DNA, 75 bp, Artificial Sequence
  ENSG00000166986_35 (sequence is synthesized)
cgaggcgggcggatcatctgaggtgaggacttcgagaccagcctagccaaaatggtcaaaggtgcctgtagtccc

SEQ ID NO: 538630 - DNA, 120 bp, Artificial Sequence
  ENSG00000166986_36 (sequence is synthesized)
tggaggcagaggttgcagcgagccaagaccgtgccactgcacttcagcccagcgttgcatgatgggagaaatagtctactttccggtagcggtgccagggcagtggcctaatacggaact

SEQ ID NO: 538631 - DNA, 120 bp, Artificial Sequence
  ENSG00000166986_37 (sequence is synthesized)
tgcaggtcctcataccaggcttccagctcccagctggacagtgtcccgaaggagaaaggcaatgactcagctgccatctctgcagttggatcagtctggaaaagcacatctgcaggataa

SEQ ID NO: 538632 - DNA, 120 bp, Artificial Sequence
  ENSG00000166986_38 (sequence is synthesized)
tggggagtggctggaacaagctccatgtagcaaacagtctatgccacaagttggcaagctggtctgatgcctgtttttgtaggtaaagttgtactggaatacagccacatctgtttattt

SEQ ID NO: 538633 - DNA, 120 bp, Artificial Sequence
  ENSG00000166986_39 (sequence is synthesized)
aaaaaaagttatatattgccaaattgtgctccaaaaaggttatatgtgtttatccttatgctaaccatatatgagactttcctaaatcagccctctttctccgttatctcagctggagaa

SEQ ID NO: 538634 - DNA, 120 bp, Artificial Sequence
  ENSG00000166986_40 (sequence is synthesized)
tttgttctcccactgtgaccttcagataattatgaagatatcccagttactttcagtcgttaagttcttggctgcagcactatcccaataccaccacctcctctgcagtccccatctgtt

SEQ ID NO: 538635 - DNA, 120 bp, Artificial Sequence
  ENSG00000166986_41 (sequence is synthesized)
gcttccagctggcagtttcagctgaacacctgctggcctctccagcccattccggaccaccccctttcagtggtcctatcctggaacttctgggttgagactgcccatctttcttttttt

SEQ ID NO: 538636 - DNA, 120 bp, Artificial Sequence
  ENSG00000166986_42 (sequence is synthesized)
cttgccatgcagcttttggagtgggtgagagaagacctaacatctctccagtgttactttggtcatgggactcctaagtttctgatataaagtccttggtagtcgttcacaagtccggaa

SEQ ID NO: 538637 - DNA, 120 bp, Artificial Sequence
  ENSG00000166986_43 (sequence is synthesized)
tgcgctcccggactctccctccccagcccgcgcctcactggagctccggcggctgctgaggcgcagcagcggcttggacaccagctccgactcctcttcttcgtcctccccggcgctcag

SEQ ID NO: 538638 - DNA, 120 bp, Artificial Sequence
  ENSG00000166986_44 (sequence is synthesized)
ctccgcgggtccagagcccgacagacgcagctccagggggttctcccgatcctagacccggggcgggccgtgtcgaagggtctgtgtcccctccatggagccagggttctgggttagggg

SEQ ID NO: 538639 - DNA, 120 bp, Artificial Sequence
  ENSG00000166986_45 (sequence is synthesized)
gctacatccagatgccacctctacccactctccacacccttcttatacttggctgattcttctgatcttctgagagccccggagagaaaacacactaccttgaggttcatcaggggaagg

SEQ ID NO: 538640 - DNA, 120 bp, Artificial Sequence
  ENSG00000166986_46 (sequence is synthesized)
aagagcttgaggggacagtggagaagcaggagagcttgcatcgagagccactgcgagtagctgctgttatgacatggccatttcattctccacaacaagagaagcagccgcggcttcagt

SEQ ID NO: 538641 - DNA, 120 bp, Artificial Sequence
  ENSG00000166986_47 (sequence is synthesized)
cctttcctggctggggtgagttgggtcttgagatgaggactggggaaggcttatggtgtaaggattaagagggaagactgtattcagagtgttcgaacccaacactgccacttactagta

SEQ ID NO: 538642 - DNA, 120 bp, Artificial Sequence
  ENSG00000166986_48 (sequence is synthesized)
gtgtaatcttggcaaatcacttaatctctctaatcctcaatttttttcagttgtgaaatgggataatattagtacctatctcagtgagttattgtgaggattaagtgagatcatataaag

SEQ ID NO: 538643 - DNA, 120 bp, Artificial Sequence
  ENSG00000166986_49 (sequence is synthesized)
agctgcaggtaggactaaggtatgggggatgtcaggcaggcccttgttctgcgtggccatcctgactcatgtcccctgcattttagccagctttgtctgctgccctgtactatttagtgg

SEQ ID NO: 538644 - DNA, 120 bp, Artificial Sequence
  ENSG00000166986_50 (sequence is synthesized)
ggcgaaatgagactgttcgtgagtgatggcgtcccgggttgcttgccggtgctggccgccgccgggagagcccggggcagagcagaggtgctcatcagcactgtaggcccggaagactgt

SEQ ID NO: 538645 - DNA, 120 bp, Artificial Sequence
  ENSG00000166986_51 (sequence is synthesized)
gaaagtttaaggcagcgctttggagggggccaggtgagaaagctaaaggctgtgccctcgctccacaacagccacagcatcacttccctaatttccctaagtagtcctcacccatcactc

SEQ ID NO: 538646 - DNA, 120 bp, Artificial Sequence
  ENSG00000166986_52 (sequence is synthesized)
tttccatcttttggccctgccgcttcctcacttacagtttttctttcctgtcttaactagaagagaccttcgacttaaaggtaaccactttccctctgagatgctgtataaaactggagg

SEQ ID NO: 538647 - DNA, 120 bp, Artificial Sequence
  ENSG00000166986_53 (sequence is synthesized)
gattatgtgggcagttggggaatatgtgtgatgggtctgagctcatccagtaaaactctcaaaagatgaatagatgcccttttccttgaggagccttctgcctgatttctttgtcactga

SEQ ID NO: 538648 - DNA, 120 bp, Artificial Sequence
  ENSG00000166987_0 (sequence is synthesized)
ccctggcccccatggcgcatgcgcgggaggccgctcggtgatccgcggcggcggcagcggcgcttcctgctaggaccggccggggccgtaccggaggctcgggctccaccgaccctcctc

SEQ ID NO: 538649 - DNA, 120 bp, Artificial Sequence
  ENSG00000166987_1 (sequence is synthesized)
ccaccccctcccactcaccctctgggccgcgactgcgcagggcggggccggccgaaccatgggccgcggtgtgggctaagctggtggccccggctttagactggaccccacaatgtttgc

SEQ ID NO: 538650 - DNA, 120 bp, Artificial Sequence
  ENSG00000166987_2 (sequence is synthesized)
agagatgttcaggcacgcgggagctgattacacacaatgaatgggggcaatgagagcagtggagcagacagagctgggggccctgtggccacatctgtccccatcggctggcagcgctgt

SEQ ID NO: 538651 - DNA, 120 bp, Artificial Sequence
  ENSG00000166987_3 (sequence is synthesized)
gtgcgagagggtgctgtgctctacatcagtccaagtggcacagagctgtcttccttggagcaaacccggagctacctcctcagcgatgggacctgcaagtgcggtctggagtgtccactt

SEQ ID NO: 538652 - DNA, 120 bp, Artificial Sequence
  ENSG00000166987_4 (sequence is synthesized)
aatgtccccaaggttttcaactttgaccctttggccccggtgaccccgggtggggctggggtggggccagcatcagaggaggacatgaccaagctgtgcaaccaccggcggaaagctgtt

SEQ ID NO: 538653 - DNA, 120 bp, Artificial Sequence
  ENSG00000166987_5 (sequence is synthesized)
gctatggcaactctgtaccgcagcatggagaccacctgctcacactcttctcctggagagggagcgagcccccaaatgttccacactgtgtccccagggcccccctctgcccgccctccc

SEQ ID NO: 538654 - DNA, 120 bp, Artificial Sequence
  ENSG00000166987_6 (sequence is synthesized)
tgtcgagttcctcctacaactccacttaatgggggtcctggctcccttcccccagaaccaccctcagtttcccaggcctttcccactctagcaggccctggggggcttttccccccaagg

SEQ ID NO: 538655 - DNA, 120 bp, Artificial Sequence
  ENSG00000166987_7 (sequence is synthesized)
cttgctgacccagtcccttctgggggcagtagcagcccccgtttcctcccaaggggcaatgccccctctccagccccacctcctccacctgctatcagcctcaatgctccctcatacaac

SEQ ID NO: 538656 - DNA, 120 bp, Artificial Sequence
  ENSG00000166987_8 (sequence is synthesized)
tggggagctgccctcagatccagcctggtgccctctgacctgggctctcctccggcccctcatgcctcctcctcaccaccttcagaccctcctctcttccactgtagtgatgccttaaca

SEQ ID NO: 538657 - DNA, 120 bp, Artificial Sequence
  ENSG00000166987_9 (sequence is synthesized)
ccccctcccctgcccccgagcaataatctccccgcccaccctggtcctgcctctcagccaccagtgtcttcagccactatgcacctgcccctggtcctggggcccctgggaggggccccc

SEQ ID NO: 538658 - DNA, 120 bp, Artificial Sequence
  ENSG00000166987_10 (sequence is synthesized)
acggtggaggggcctggggcaccccccttccttgctagcagcctactctctgcagcggccaaggcacagcatcccccactaccccctcccagcactttacagggccgaaggccccgtgcc

SEQ ID NO: 538659 - DNA, 120 bp, Artificial Sequence
  ENSG00000166987_11 (sequence is synthesized)
caggcaccctcagcttcccactcctcatcacttcgtccctctcagcgtcgtccccgcagaccccctactgtatttcgattgctagaagggagaggccctcaaacccctagacggagccgt

SEQ ID NO: 538660 - DNA, 120 bp, Artificial Sequence
  ENSG00000166987_12 (sequence is synthesized)
cctcgggcccctgctcctgtcccccaacccttttctctcccggagccatcccaaccaattctcccttctgtgctgtccctgctgggactccccacccctggcccttcccactctgatgga

SEQ ID NO: 538661 - DNA, 120 bp, Artificial Sequence
  ENSG00000166987_13 (sequence is synthesized)
agctttaaccttttggggtcagatgcacaccttcctcctcccccaaccctctcctcagggagccctccccagcccaggcaccccatccagccctccctgcctgggaccaccagtggcagc

SEQ ID NO: 538662 - DNA, 120 bp, Artificial Sequence
  ENSG00000166987_14 (sequence is synthesized)
ctcagcagtgtgccaggtgcccctgccccaccagctgcctccaaagccccagtagtccccagccctgtgcttcaaagcccatccgaaggactggggatgggggcaggcccggcctgccct

SEQ ID NO: 538663 - DNA, 120 bp, Artificial Sequence
  ENSG00000166987_15 (sequence is synthesized)
ctgcctcccctggctggtggagaggctttccctttccccagccctgagcagggcctggcactgagtggagctggcttccctgggatgcttggggccttgcctctccctctgagtctgggg

SEQ ID NO: 538664 - DNA, 120 bp, Artificial Sequence
  ENSG00000166987_16 (sequence is synthesized)
cagcctccaccttctccattgctcaaccacagtttatttggtgtgctgactgggggaggaggacaacctccccctgagcccctgctacccccaccaggaggacctggtcctcccctagcc

SEQ ID NO: 538665 - DNA, 120 bp, Artificial Sequence
  ENSG00000166987_17 (sequence is synthesized)
aggagagcctgaagggccttcgcttttggtggcttccttgcttcctccaccaccctcagaccttcttccacctccttcagcacctcccagcaacctccttgcctctttcctgcccctgtt

SEQ ID NO: 538666 - DNA, 120 bp, Artificial Sequence
  ENSG00000166987_18 (sequence is synthesized)
ggctctgggccccacagctggggatggggagggatctgcagagggagccgggggtccaagtggggagccattttcaggcttgggagacctgtcccccctacttttccccccactttcagc

SEQ ID NO: 538667 - DNA, 120 bp, Artificial Sequence
  ENSG00000166987_19 (sequence is synthesized)
cccccctaccctcatagctttaaattctgcgctgctggctgccaccctggatcccccctcggggacacccccccagccctgtgtcctgagtgccccccaacctggaccacctacctccag

SEQ ID NO: 538668 - DNA, 120 bp, Artificial Sequence
  ENSG00000166987_20 (sequence is synthesized)
tgtcaccacggcaactactgacccgggggcctcctctctgggcaaggccccctccaactcagggagacccccccaactccttagccctctgctgggtgccagcctgctgggtgacctgtc

SEQ ID NO: 538669 - DNA, 120 bp, Artificial Sequence
  ENSG00000166987_21 (sequence is synthesized)
ttcactgaccagcagccctggagccctccccagcctgttgcagcctcctggccctcttctctctggccagttggggctgcagctcctccctggggggggagctcctccacccctctcaga

SEQ ID NO: 538670 - DNA, 120 bp, Artificial Sequence
  ENSG00000166987_22 (sequence is synthesized)
ggcttctagtcccctagcctgcctgctacagagtctccagatccctccagagcagccagaagccccctgtctaccccccgagagccctgcctcagccctcgaaccagagcctgccaggcc

SEQ ID NO: 538671 - DNA, 120 bp, Artificial Sequence
  ENSG00000166987_23 (sequence is synthesized)
tcccctcagtgccttagccccaccccatggttctcccgaccccccagtccctgagctgctcactgggagggggtcagggaaacggggccggaggggaggagggggacttaggggcattaa

SEQ ID NO: 538672 - DNA, 120 bp, Artificial Sequence
  ENSG00000166987_24 (sequence is synthesized)
tggtgaggccaggccagcccggggccgaaagcctggcagccggcgggagcctggccgactggccctcaaatgggggacacgtggtggcttcaatggacaaatggaaaggtccccaagaag

SEQ ID NO: 538673 - DNA, 120 bp, Artificial Sequence
  ENSG00000166987_25 (sequence is synthesized)
aacccaccattggcagcataatggggagctggctgaagggggtgctgagcccaaggatccaccccctcccgggccccattctgaggaccttaaggtgcccccgggagtagtcagaaagtc

SEQ ID NO: 538674 - DNA, 120 bp, Artificial Sequence
  ENSG00000166987_26 (sequence is synthesized)
tcgtcgtggccgtaggagaaaatacaaccctacccggaacagcaatagctcccgccaggacattaccttggaacccagccctacagcccgagcagctgtccctctgcctccccgggcccg

SEQ ID NO: 538675 - DNA, 120 bp, Artificial Sequence
  ENSG00000166987_27 (sequence is synthesized)
ccctggccgtcctgccaaaaacaagaggaggaaactggccccatagcagccatacctggagctggatctgaccctgattggggagagctgagtgctgagccttgggagcccctgccagcc

SEQ ID NO: 538676 - DNA, 120 bp, Artificial Sequence
  ENSG00000166987_28 (sequence is synthesized)
acctgcacctgtggacagtgggtgggggcactactccccactcagagcacaaatgcaactccttcccctacaatcccatcctgagccattgcagggggcagggaagttcaccccccccca

SEQ ID NO: 538677 - DNA, 120 bp, Artificial Sequence
  ENSG00000166987_29 (sequence is synthesized)
ccacccccccgcccccccgaagccatgtcactgaaaaggcctgggggggatggtatatggccctttccccaccaggcgctaaggggaacacccccttccccaggtcttttatttgtttaa

SEQ ID NO: 538678 - DNA, 120 bp, Artificial Sequence
  ENSG00000166987_30 (sequence is synthesized)
gttatttttgcacaaatgactcttttatatttaattcgatttcattgcctcccttcttaaagccaacaggctcagtttacaaacctgtgagctactgttggctgctgccctccttcccag

SEQ ID NO: 538679 - DNA, 120 bp, Artificial Sequence
  ENSG00000166987_31 (sequence is synthesized)
tgaaaggtacaaagcaataagcatcatgcatcctccccttacccctccaacacccctctgcctctggctcaggttgctcaaagcacagatcctctcttaccccgtccccaggtttgaaac

SEQ ID NO: 538680 - DNA, 120 bp, Artificial Sequence
  ENSG00000166987_32 (sequence is synthesized)
acatagcctcatttcaaggtgtagccaggttcccccgactttcctctgggatataaaaaagggggtaagggggcaaagagagccctctgggcctctcctcccatacacactacactgccc

SEQ ID NO: 538681 - DNA, 120 bp, Artificial Sequence
  ENSG00000166987_33 (sequence is synthesized)
cttctccccccatcaaaacgctcagagacgttgtgatgatgcgactgaggattatgcaacgtggtccaaccggagcggccagcatgaccagctgtccaggggctgcctcctgccttttct

SEQ ID NO: 538682 - DNA, 120 bp, Artificial Sequence
  ENSG00000166987_34 (sequence is synthesized)
tttgtaaagacaagacccttgggagttttaattctgttttgtacttgccctgtggggcctccactgcttttctatgggagacactcttaatttaacagatgagaatattttgaaactctg

SEQ ID NO: 538683 - DNA, 120 bp, Artificial Sequence
  ENSG00000166987_35 (sequence is synthesized)
acctattttcccccacggtactcctatggctttctccaagaccctctcttgctgtaccagacagcaagtcctgtgactccctgtgtgaggagcgcggcacaggcctgcctcctaggtgtt

SEQ ID NO: 538684 - DNA, 120 bp, Artificial Sequence
  ENSG00000166987_36 (sequence is synthesized)
cgggtcgagatttacagcggagtctcatcccgggacgtgtgagtgcacttcagcgcaggactgccctggactggggagaccggagccgcgattttagactcaactccccatcacttgcca

SEQ ID NO: 538685 - DNA, 120 bp, Artificial Sequence
  ENSG00000166987_37 (sequence is synthesized)
gatacggcagaggactcctcagtctccctcccagctgaggggttccccttgctcctctggggcttcccctgagttttcttgggtctccccacaacctttgccttcctggagtcctctctc

SEQ ID NO: 538686 - DNA, 120 bp, Artificial Sequence
  ENSG00000166987_38 (sequence is synthesized)
accctctgccccctccgcgtcctctcggcccctttccccggccccatccccactcccccgccctcacctgcccccgccgcttctccctctcactgccagacttctgccttcctcaccgcc

SEQ ID NO: 538687 - DNA, 120 bp, Artificial Sequence
  ENSG00000166987_39 (sequence is synthesized)
ctcccctcagtgcttcgcccaccctccgcccgccctctccccaagttccttcctacttcgtgcgccttcccctcctcctcaagctgagggaagcagtctgggtgacagggcgccttgttg

SEQ ID NO: 538688 - DNA, 120 bp, Artificial Sequence
  ENSG00000166987_40 (sequence is synthesized)
actataagggactcccatatttcttggcccctcccagctaatgggcacataggccttttgaacttttctttttaaagttggtatccatccactgggattgtcgacatctcgagtcttctt

SEQ ID NO: 538689 - DNA, 120 bp, Artificial Sequence
  ENSG00000166987_41 (sequence is synthesized)
atcccagcactttgggaggctgaggagagcggatcacttgaggtgtgggctaagctggtggccccggctttagactggaccccacaatgtttgcagagatgttcaggcacgcgggagctg

SEQ ID NO: 538690 - DNA, 120 bp, Artificial Sequence
  ENSG00000166997_0 (sequence is synthesized)
cttcctcggctggatttaaggttgccgctagccgcctgggaatttaagggacccacactaccttcccgaagttgaaggcaagcggtgattgtttgtagacggcgctttgtcatgggacct

SEQ ID NO: 538691 - DNA, 120 bp, Artificial Sequence
  ENSG00000166997_1 (sequence is synthesized)
gtgcggttgggaatattgcttttcctttttttggccgtgcacgaggcttgggctgggatgttgaaggaggaggacgatgacacagaacgcttgcccagcaaatgcgaagtgtgtaagctg

SEQ ID NO: 538692 - DNA, 120 bp, Artificial Sequence
  ENSG00000166997_2 (sequence is synthesized)
ctgagcacagagctacaggcggaactgagtcgcaccggtcgatctcgagaggtgctggagctggggcaggtgctggatacaggcaagaggaagagacacgtgccttacagcgtttcagag

SEQ ID NO: 538693 - DNA, 120 bp, Artificial Sequence
  ENSG00000166997_3 (sequence is synthesized)
acaaggctggaagaggccttagagaatttatgtgagcggatcctggactatagtgttcacgctgagcgcaagggctcactgagatatgccaagggtcagagtcagaccatggcaacactg

SEQ ID NO: 538694 - DNA, 120 bp, Artificial Sequence
  ENSG00000166997_4 (sequence is synthesized)
aaaggcctagtgcagaagggggtgaaggtggatctggggatccctctggagctttgggatgagcccagcgtggaggtcacatacctcaagaagcagtgtgagaccatgttggaggagttt

SEQ ID NO: 538695 - DNA, 120 bp, Artificial Sequence
  ENSG00000166997_5 (sequence is synthesized)
gaagacattgtgggagactggtacttccaccatcaggagcagcccctacaaaattttctctgtgaaggtcatgtgctcccagctgctgaaactgcatgtctacaggaaacttggactgga

SEQ ID NO: 538696 - DNA, 120 bp, Artificial Sequence
  ENSG00000166997_6 (sequence is synthesized)
ggaagagcaggaggaggaggaggaagaggaggaagaggaagggggagacaagatgaccaagacaggaagccaccccaaacttgaccgagaagatctttgacccttgcctttgagccccca

SEQ ID NO: 538697 - DNA, 120 bp, Artificial Sequence
  ENSG00000166997_7 (sequence is synthesized)
ggaggggaagggatcatggagagccctctaaagcctgcactctccctgctccacagctttcagggtgtgtttatgagtgactccacccaagcttgtagctgttctctcccatctaacctc

SEQ ID NO: 538698 - DNA, 120 bp, Artificial Sequence
  ENSG00000166997_8 (sequence is synthesized)
aggcaagatcctggtgaaacagcatgacatggcttctggggtggagggtgggggtggaggtcctgctcctagagatgaactctatccagccccttaattggcaggtgtatgtgctgacag

SEQ ID NO: 538699 - DNA, 120 bp, Artificial Sequence
  ENSG00000166997_9 (sequence is synthesized)
tactgaaagctttcctctttaactgatcccacccccacccaaaagtcagcagtggcactggagctgtgggctttggggaagtcacttagctccttaaggtctgtttttagacccttccaa

SEQ ID NO: 538700 - DNA, 120 bp, Artificial Sequence
  ENSG00000166997_10 (sequence is synthesized)
ggaagaggccagaacggacattctctgcgatctatatacattgcctgtatccaggaggctacacaccagcaaaccgtgaaggagaatgggacactgggtcatggcctggagttgctgata

SEQ ID NO: 538701 - DNA, 120 bp, Artificial Sequence
  ENSG00000166997_11 (sequence is synthesized)
atttaggtgggatagatacttggtctacttaagctcaatgtaacccagagcccaccatatagttttataggtgctcaattttctatatcgctattaaacttttttctttttttctaaaaa

SEQ ID NO: 538702 - DNA, 120 bp, Artificial Sequence
  ENSG00000166997_12 (sequence is synthesized)
acctccttgaaggcttgagggaggttctggtggagcttggctgaatttggatggggtcaaggaagcgaacgtgtagtgccacctcaaactgcatccagagagagcctgcatttttttggc

SEQ ID NO: 538703 - DNA, 120 bp, Artificial Sequence
  ENSG00000166997_13 (sequence is synthesized)
tggcttggaaccccccgcccgccaatggattgtgggaattgtagttcagggaccatcggcccgggactgccaacttttagagcatcttcagtgagtgtttacctcatgtcaccagacctt

SEQ ID NO: 538704 - DNA, 120 bp, Artificial Sequence
  ENSG00000166997_14 (sequence is synthesized)
ttacaggccccacaccccgctgagggggtttgagggtgagtaattcagcctttgaagctcataaacaaaaggaagccacacaactaggagagtgtccccatccggtgagactttgcagac

SEQ ID NO: 538705 - DNA, 120 bp, Artificial Sequence
  ENSG00000166997_15 (sequence is synthesized)
aaaaaaaaaaaaaaagatgaagaaaccgaggcacagcaagcaggaagattgccacacagctgctaaatggctgagccaggattccaacccagccagtctggctccatagtctgcacttgt

SEQ ID NO: 538706 - DNA, 120 bp, Artificial Sequence
  ENSG00000167004_0 (sequence is synthesized)
agacgcgcgagcgcaagcagcgggttagtggtcgcgcgcccgacctccgcagtcccagccgagccgcgacccttccggccgtccccaccccacctcgccgccatgcgcctccgccgccta

SEQ ID NO: 538707 - DNA, 120 bp, Artificial Sequence
  ENSG00000167004_1 (sequence is synthesized)
gcgctgttcccgggtgtggcgctgcttcttgccgcggcccgcctcgccgctgcctccgacgtgctagaactcacggacgacaacttcgagagtcgcatctccgacacgggctctgcgggc

SEQ ID NO: 538708 - DNA, 120 bp, Artificial Sequence
  ENSG00000167004_2 (sequence is synthesized)
ctcatgctcgtcgagttcttcgccccctggtgtggacactgcaagagacttgcacctgagtatgaagctgcagctaccagattaaaaggaatagtcccattagcaaaggttgattgcact

SEQ ID NO: 538709 - DNA, 120 bp, Artificial Sequence
  ENSG00000167004_3 (sequence is synthesized)
gccaacactaacacctgtaataaatatggagtcagtggatatccaaccctgaagatatttagagatggtgaagaagcaggtgcttatgatggacctaggactgctgatggaattgtcagc

SEQ ID NO: 538710 - DNA, 120 bp, Artificial Sequence
  ENSG00000167004_4 (sequence is synthesized)
cacttgaagaagcaggcaggaccagcttcagtgcctctcaggactgaggaagaatttaagaaattcattagtgataaagatgcctctatagtaggttttttcgatgattcattcagtgag

SEQ ID NO: 538711 - DNA, 120 bp, Artificial Sequence
  ENSG00000167004_5 (sequence is synthesized)
gctcactccgagttcctaaaagcagccagcaacttgagggataactaccgatttgcacatacgaatgttgagtctctggtgaacgagtatgatgataatggagagggtatcatcttattt

SEQ ID NO: 538712 - DNA, 120 bp, Artificial Sequence
  ENSG00000167004_6 (sequence is synthesized)
cgtccttcacatctcactaacaagtttgaggacaagactgtggcatatacagagcaaaaaatgaccagtggcaaaattaaaaagtttatccaggaaaacatttttggtatctgccctcac

SEQ ID NO: 538713 - DNA, 120 bp, Artificial Sequence
  ENSG00000167004_7 (sequence is synthesized)
atgacagaagacaataaagatttgatacagggcaaggacttacttattgcttactatgatgtggactatgaaaagaacgctaaaggttccaactactggagaaacagggtaatgatggtg

SEQ ID NO: 538714 - DNA, 120 bp, Artificial Sequence
  ENSG00000167004_8 (sequence is synthesized)
gcaaagaaattcctggatgctgggcacaaactcaactttgctgtagctagccgcaaaacctttagccatgaactttctgattttggcttggagagcactgctggagagattcctgttgtt

SEQ ID NO: 538715 - DNA, 120 bp, Artificial Sequence
  ENSG00000167004_9 (sequence is synthesized)
gctatcagaactgctaaaggagagaagtttgtcatgcaggaggagttctcgcgtgatgggaaggctctggagaggttcctgcaggattactttgatggcaatctgaagagatacctgaag

SEQ ID NO: 538716 - DNA, 120 bp, Artificial Sequence
  ENSG00000167004_10 (sequence is synthesized)
tctgaacctatcccagagagcaatgatgggcctgtgaaggtagtggtagcagagaattttgatgaaatagtgaataatgaaaataaagatgtgctgattgaattttatgccccttggtgt

SEQ ID NO: 538717 - DNA, 120 bp, Artificial Sequence
  ENSG00000167004_11 (sequence is synthesized)
ggtcactgtaagaacctggagcccaagtataaagaacttggcgagaagctcagcaaagacccaaatatcgtcatagccaagatggatgccacagccaatgatgtgccttctccatatgaa

SEQ ID NO: 538718 - DNA, 120 bp, Artificial Sequence
  ENSG00000167004_12 (sequence is synthesized)
gtcagaggttttcctaccatatacttctctccagccaacaagaagctaaatccaaagaaatatgaaggtggccgtgaattaagtgattttattagctatctacaaagagaagctacaaac

SEQ ID NO: 538719 - DNA, 120 bp, Artificial Sequence
  ENSG00000167004_13 (sequence is synthesized)
ccccctgtaattcaagaagaaaaacccaagaagaagaagaaggcacaggaggatctctaaagcagtagccaaacaccactttgtaaaaggactcttccatcagagatgggaaaaccattg

SEQ ID NO: 538720 - DNA, 120 bp, Artificial Sequence
  ENSG00000167004_14 (sequence is synthesized)
gggaggactaggacccatatgggaattattacctctcagggccgagaggacagaatggatataatctgaatcctgttaaattttctctaaactgtttcttagctgcactgtttatggaaa

SEQ ID NO: 538721 - DNA, 120 bp, Artificial Sequence
  ENSG00000167004_15 (sequence is synthesized)
ggggtattttctaattttttttgtacatttggaacagtgacaataaatgagacccctttaaactgtcttattttccaccagattgagaaccagatgttctctacacactatcactgttca

SEQ ID NO: 538722 - DNA, 120 bp, Artificial Sequence
  ENSG00000167004_16 (sequence is synthesized)
atagagctttcttcagtgatggaaatgctctgtaatctacactgttcagtacaggtagctacggagcatctgaaatatggctagaaactacatttttgttttgattaatttaaatagcca

SEQ ID NO: 538723 - DNA, 120 bp, Artificial Sequence
  ENSG00000167004_17 (sequence is synthesized)
tacagttgctaccatactggtcacggcagctgtagactgactgggtccatagttcatcacctcaaaattctttcaaaatttattatctctttctctccttacatgtttatttcccaggcc

SEQ ID NO: 538724 - DNA, 120 bp, Artificial Sequence
  ENSG00000167004_18 (sequence is synthesized)
taccctggtgattagaacagctgaagggcctttcttgttaggctgtccatgccctaaggatgggttcctgtttatccttgccacgcagctgagcttactgcatgtttatatctcccaagg

SEQ ID NO: 538725 - DNA, 120 bp, Artificial Sequence
  ENSG00000167004_19 (sequence is synthesized)
actgttctctgctcagaaatgccctgtcaagggtgtggcatcacgcagtttcatccaagttgtttcaggaattgctgacactgctgggtgcagttctatcccctaaagcctagggtgtgg

SEQ ID NO: 538726 - DNA, 120 bp, Artificial Sequence
  ENSG00000167004_20 (sequence is synthesized)
ccctttaacttccccttcagtagaactgggaaaggcagtaccattcctagttatgagtgaagcatccactttcttttgtaacaatgaggaacagaaaggataagactgaagagtgatctt

SEQ ID NO: 538727 - DNA, 120 bp, Artificial Sequence
  ENSG00000167004_21 (sequence is synthesized)
ttgtccaactaaaccatttatctccttttgtaggtaaattcaaatcctgcccagttatagttttcagtcactggagaattccaggtaggagccctactttaggtgatcctaggaactcct

SEQ ID NO: 538728 - DNA, 120 bp, Artificial Sequence
  ENSG00000167004_22 (sequence is synthesized)
atgttcagaaaagaattttcttcctactatataattacagtatttagctgtcaattttaagatgaatttggtagagccttatagtaaagtatgtatcttggtcacacacaaagcttggaa

SEQ ID NO: 538729 - DNA, 120 bp, Artificial Sequence
  ENSG00000167004_23 (sequence is synthesized)
aaagtaaaagatgtctaaaccataatcttgtaactcataacatctgggctggggcccggggatctaattgtttagagagccccaaaagtggctcagatgtaaagccagggttaagaacca

SEQ ID NO: 538730 - DNA, 120 bp, Artificial Sequence
  ENSG00000167004_24 (sequence is synthesized)
tctgccttggaagatttaagggaaacatataaacttgtacaaaggacacagaagcagtcagttttaattttttagccatgttggtaaaagttcattttcagtacatgggtaacacccagg

SEQ ID NO: 538731 - DNA, 120 bp, Artificial Sequence
  ENSG00000167004_25 (sequence is synthesized)
ccctttcccattatatccaggtatgctacaagttcttttaactcttatcagaagttattattactgtttccttagagaggctaccaggctaaaattcacttagtttggtttgtctaatgt

SEQ ID NO: 538732 - DNA, 120 bp, Artificial Sequence
  ENSG00000167004_26 (sequence is synthesized)
cctcattattttatcctgaagatgatgtcatttctcaggacttgaaaatgacttggctgaactaaaggtaaaaaagccaagcctctgtcacttttcctagactcctaggcacagctatgg

SEQ ID NO: 538733 - DNA, 120 bp, Artificial Sequence
  ENSG00000167004_27 (sequence is synthesized)
agtctttgcacagtgcccataccctaaaaattaataatgaaaaccaaacctcaagaacctagagcagctctctacttgccaccatggactccagtggtcagcataagaaaagcagatagt

SEQ ID NO: 538734 - DNA, 120 bp, Artificial Sequence
  ENSG00000167004_28 (sequence is synthesized)
tgcattctatttagtttatagctgctttgttcctttgtgtttcactaagcagaggctcaaaaattcccttgataacttcagctgcccctgttcttttcctcaaactccaggatgagacct

SEQ ID NO: 538735 - DNA, 120 bp, Artificial Sequence
  ENSG00000167004_29 (sequence is synthesized)
ttaatgtgggacaatttctggtgaaggtactcacagcgacgcttttcttctctgtaacttgggtactgctgcagagaaaaagcatccatgtcaaaaagtaaaaattctcattctaccttg

SEQ ID NO: 538736 - DNA, 120 bp, Artificial Sequence
  ENSG00000167004_30 (sequence is synthesized)
atggatgccacagccaatgatgtgccttctccatatgaagtcagagggtaagtggcttaaaacttaacaaaagtgtctaggcaatagataggaataaagcttgtaaccaccaggaaatca

SEQ ID NO: 538737 - DNA, 120 bp, Artificial Sequence
  ENSG00000167004_31 (sequence is synthesized)
ttactagacatagttttcatattcagttgaaggcagaaccactgattccttcttggcttaagagttctgcagtatgggcccacataactgcttgaaattaataaatgtttctttccccag

SEQ ID NO: 538738 - DNA, 120 bp, Artificial Sequence
  ENSG00000167004_32 (sequence is synthesized)
ttcttcgccccctgttccattcctgctggatttgaagaggagagtctcctccagcctcattgaaactctttttgtggatttgatgaccttatggatattgccaaagtttaaggcagtgga

SEQ ID NO: 538739 - DNA, 120 bp, Artificial Sequence
  ENSG00000167005_0 (sequence is synthesized)
ctcctcttgcgctgtcctgttaatggcgggcagtagccgctgaggggattgcagataaccgcttcccgcacggggaaagtctaccctgcctgccactttctgctcgccgtcagcgccgga

SEQ ID NO: 538740 - DNA, 120 bp, Artificial Sequence
  ENSG00000167005_1 (sequence is synthesized)
gctcgccagcatgtctgtggtaccgcccaatcgctcgcagaccggctggccccggggggtcactcagttcggcaacaagtacatccagcagacgaagcccctcaccctggagcgcaccat

SEQ ID NO: 538741 - DNA, 120 bp, Artificial Sequence
  ENSG00000167005_2 (sequence is synthesized)
caacctgtaccctcttaccaattatacttttggtacaaaagagcccctctacgagaaggacagctctgttgcagccagatttcagcgcatgagggaagaatttgataaaattggaatgag

SEQ ID NO: 538742 - DNA, 120 bp, Artificial Sequence
  ENSG00000167005_3 (sequence is synthesized)
gaggactgtagaaggggttctgattgtacatgagcaccggctaccccatgtgttactgctgcagctgggaacaactttcttcaaactacctggtggtgaacttaacccaggagaagatga

SEQ ID NO: 538743 - DNA, 120 bp, Artificial Sequence
  ENSG00000167005_4 (sequence is synthesized)
agttgaaggactaaaacgcttaatgacagagatactgggtcgtcaggatggagttttgcaagactgggtcattgacgattgcattggtaactggtggagaccaaattttgaacctcctca

SEQ ID NO: 538744 - DNA, 120 bp, Artificial Sequence
  ENSG00000167005_5 (sequence is synthesized)
gtatccatatattcctgcacatattacaaagcctaaggaacataagaagttgtttctggttcagcttcaagaaaaagccttgtttgcagtccctaaaaattacaagctggtagctgcacc

SEQ ID NO: 538745 - DNA, 120 bp, Artificial Sequence
  ENSG00000167005_6 (sequence is synthesized)
attgtttgaattgtatgacaatgcaccaggatatggacccatcatttctagtctccctcagctgttgagcaggttcaattttatttacaactgaattcctgcgcagtggagaagtaaaag

SEQ ID NO: 538746 - DNA, 120 bp, Artificial Sequence
  ENSG00000167005_7 (sequence is synthesized)
aagccgcttgtctctgtgagcacagctatatacagtgtagaataaatgtggtagaaaagtttttttggttttatctcttttgcgatccctaaattgccacctttctattgtttgaatagt

SEQ ID NO: 538747 - DNA, 120 bp, Artificial Sequence
  ENSG00000167005_8 (sequence is synthesized)
aaaattaatatgaagaactagatagtggtgtaaacaaatgtgataatgtttatttactttcggttctgctcatacttttttgtacaacattaaagaaaatggactttttttattttaatt

SEQ ID NO: 538748 - DNA, 120 bp, Artificial Sequence
  ENSG00000167005_9 (sequence is synthesized)
tctcattaaacttctaaaattcttataggtgaggatcatttttccccccaccttaggatggtgaatgttgcaacacaatgacaggtttaagtcagtcaagtttattggacccttgctttg

SEQ ID NO: 538749 - DNA, 120 bp, Artificial Sequence
  ENSG00000167005_10 (sequence is synthesized)
ataccattcttgggcacatactccaagattgtattagatttttgtgatgaagagcttccattacttctgaaaactatatttatctgagtgagtccaaggtgcaactcctaaatgaattgt

SEQ ID NO: 538750 - DNA, 120 bp, Artificial Sequence
  ENSG00000167005_11 (sequence is synthesized)
gttgcagagaactcccagtataattcactgaccagtacattttataaccatccaggccttggtttgcaagcaacagaccttaaacatacaggaaactattaaaattggctcgatcagtag

SEQ ID NO: 538751 - DNA, 120 bp, Artificial Sequence
  ENSG00000167005_12 (sequence is synthesized)
tcataggaattggtataagaagagactcatttagagctcagagttttcttcacataatgggggtattaattatttgtgctgttgcgaaattatgtgtcttattcttaaagccatggtaaa

SEQ ID NO: 538752 - DNA, 120 bp, Artificial Sequence
  ENSG00000167005_13 (sequence is synthesized)
aatagggatctgtgaaggaaatttctaaaattggatgtattaggttttgaactctgagattgcacaaatattcaattaacttgaagttgtgtacatagagaagaaaatttggttttagca

SEQ ID NO: 538753 - DNA, 120 bp, Artificial Sequence
  ENSG00000167005_14 (sequence is synthesized)
aatgacagagccttcaaaaatatttttggaataatgtgaatcaaccgaaaactgggggcaaggcagaggacaggttttctcaggttaagagaaaaacgaaattttaaaaactttaaaaaa

SEQ ID NO: 538754 - DNA, 120 bp, Artificial Sequence
  ENSG00000167005_15 (sequence is synthesized)
tactgataaattcggatcaaatttgggggaataaaaaatattagagcaaaggagtttgctggttgtgtcattatttaatgatcaaagtatagcatgtatgccttattacagacttgttga

SEQ ID NO: 538755 - DNA, 120 bp, Artificial Sequence
  ENSG00000167005_16 (sequence is synthesized)
ctataggcttaatgtaaaaaggaatcttgccagatgtagctacttaaggaaaaaagggtttttaatagaaatgaacttttgattagtatggtgccagtcacagggctattttcctgaata

SEQ ID NO: 538756 - DNA, 120 bp, Artificial Sequence
  ENSG00000167005_17 (sequence is synthesized)
ttgggtgatgtcaaaggtatatgatacttgaggaaatcaggccaagtgtagctgagcaattaataaacactcaagtttttttagttggggtcatgtcaaaccctcacatggtggttaagt

SEQ ID NO: 538757 - DNA, 120 bp, Artificial Sequence
  ENSG00000167005_18 (sequence is synthesized)
tgaaaaagccactagttctgtgaattgtccttttccctcctgcccctaacagtcctacccctctagcctacattagcatatttctcatgtaatgtattttgctggtaagctcatccatta

SEQ ID NO: 538758 - DNA, 120 bp, Artificial Sequence
  ENSG00000167005_19 (sequence is synthesized)
gctgcgtccttcagctattcctttagattggaggaagtggatatgaagatggattgattcagctcaccttccatgattgcttttgagggaaaagctacagtggccacatttcagatgttc

SEQ ID NO: 538759 - DNA, 120 bp, Artificial Sequence
  ENSG00000167005_20 (sequence is synthesized)
acttttgcaatttgtggagggtggagagaggtagacttttgttgtgtgttttataaagtactctcagtaaggagtgtttgagttgaagagtcatctgattcgaggccactcatgttcttt

SEQ ID NO: 538760 - DNA, 120 bp, Artificial Sequence
  ENSG00000167005_21 (sequence is synthesized)
gtaacttaaactttgaccaagaaattcttcacttctcacttcttcacttcttcccaatatacagtaagtacgtgagccagtcatccatacactaaggcctagttgagaaaaacctttgat

SEQ ID NO: 538761 - DNA, 120 bp, Artificial Sequence
  ENSG00000167005_22 (sequence is synthesized)
tcaggatggctgggttactaaccttgaaatgtaagagatctggttttgaatgtaaaagttgcaacacacaaacggaagtcttaaaaactttttgctctggtcagttacaggtggatcccc

SEQ ID NO: 538762 - DNA, 120 bp, Artificial Sequence
  ENSG00000167005_23 (sequence is synthesized)
aataatctgtttttggttttctgatggaaataatagaattaggggaaatcaaatctggttggtaggtgtctacagtattagaagagggtataagggcactgtttaacactaagttctaat

SEQ ID NO: 538763 - DNA, 120 bp, Artificial Sequence
  ENSG00000167005_24 (sequence is synthesized)
acttccagaaactgtgcattccagatctacatactaaatgctcttatcattttgaaatgggctcttgattaatagacccatattttttagtggcttctatgttgtatatttgtctaaaat

SEQ ID NO: 538764 - DNA, 120 bp, Artificial Sequence
  ENSG00000167005_25 (sequence is synthesized)
gaaagctcttttgcgttctaaaactacaatatatgtcatcttattttccctgagtatccaagtatagtgcagattctatgtaaaactactaaatgacactggaatatgtttagtagatta

SEQ ID NO: 538765 - DNA, 120 bp, Artificial Sequence
  ENSG00000167005_26 (sequence is synthesized)
gggggaaaaactataaaggtttatacaattgtttgtagttacatttaggatggacttatccctttggagaagagtgaagtttgttttttcgccatgtgatgaagaccactgtgatttttt

SEQ ID NO: 538766 - DNA, 120 bp, Artificial Sequence
  ENSG00000167005_27 (sequence is synthesized)
aaaaaagtagataatacttaaaatggcgtaataattctgcacttgaatttgtactgttaacagcacatttggaagattttaaaactttttattgtcttataaatagcattcacttattat

SEQ ID NO: 538767 - DNA, 120 bp, Artificial Sequence
  ENSG00000167005_28 (sequence is synthesized)
tttggatatttaagggttccattaagttaacactgtatttggacaaagtgtgaccaaattagccagtctgttttcttccatgtttaattagaagtgagaggtagaagtacttcaaattca

SEQ ID NO: 538768 - DNA, 120 bp, Artificial Sequence
  ENSG00000167005_29 (sequence is synthesized)
acaggccagcaagcaatcggcttaaaattccctttcttaaatgttgtgctcttatgttctcggctttttaatgactttatttttacagtacttgttcagtcacttgagatgaaatgcttg

SEQ ID NO: 538769 - DNA, 120 bp, Artificial Sequence
  ENSG00000167005_30 (sequence is synthesized)
gggtagcttttccatcctcaaacttaatgtttttactagttcatagtgtttggaacagtatatgccaatcactgagactgcatcagagtttgcaattttgtatgtttcattgccaaagaa

SEQ ID NO: 538770 - DNA, 120 bp, Artificial Sequence
  ENSG00000167005_31 (sequence is synthesized)
ggcttagtggttgttgactgtagtataagtcagctttctgtagcataagatttgattttcccatacttacttcacttgttatacatcactgattatttgggttaaactggactcatttca

SEQ ID NO: 538771 - DNA, 120 bp, Artificial Sequence
  ENSG00000167005_32 (sequence is synthesized)
agcagtttgcttttgttcaaatcgtgatgagaaacctaatactgtaatttgatttgagccataaaacacattttaatattagcttgtattatagttattaagcttgtttttgtggaaaaa

SEQ ID NO: 538772 - DNA, 120 bp, Artificial Sequence
  ENSG00000167005_33 (sequence is synthesized)
aacttactaaaacctaggtaactctagattaggccagttcaggtgtattttgtatcttagtaatggatcatatcgtaaaaatagagataagttgggaagatatattgattatgctgttct

SEQ ID NO: 538773 - DNA, 120 bp, Artificial Sequence
  ENSG00000167005_34 (sequence is synthesized)
gttgagggaaaggtcatgtatttagaaatttaaacttttggttattgtgttcacatcatagtattcaagcatcatttatagtttggttttgagaacttttctggtattacgtttatggca

SEQ ID NO: 538774 - DNA, 120 bp, Artificial Sequence
  ENSG00000167005_35 (sequence is synthesized)
ggcaaatgtataaaagaaacaagttttggttatatttttatatttgtaaagtaagtttggttaaagtgatcactgttctttttttattttattgtcatttcaataaaaaatatttgaaag

SEQ ID NO: 538775 - DNA, 120 bp, Artificial Sequence
  ENSG00000167005_36 (sequence is synthesized)
cagcaagacagtttttagtaggattgctgtttatgcagctctggaatacaattttagccctcggtcattcatttcaacaaacactgctgttaatgatgtctttagaaagagaaaatcatg

SEQ ID NO: 538776 - DNA, 120 bp, Artificial Sequence
  ENSG00000167005_37 (sequence is synthesized)
tcaggatggagttttgcaagactgggtcattgacgattgcattggtaactggtggagaccaaattttgaacctcctcaggaaaatgtaaaacaaatacaaggccgggcgaggtggctcat

SEQ ID NO: 538777 - DNA, 73 bp, Artificial Sequence
  ENSG00000167005_38 (sequence is synthesized)
gaccagcctggccaacatggtgaaagctcgtctctactaaaaaatgtaaaaatcagctgggtttgatggtaca

SEQ ID NO: 538778 - DNA, 80 bp, Artificial Sequence
  ENSG00000167005_39 (sequence is synthesized)
gtgagactccttctcaaaaaataaataaataaatagaacaaatacaaaagaagagagaatggtaaaagtgaatgaattgc

SEQ ID NO: 538779 - DNA, 120 bp, Artificial Sequence
  ENSG00000167005_40 (sequence is synthesized)
gaaatacttcctattggatgttatgttcactgtttcagtgatgggttcactagaagcctaaaccttagcattacacaatatacctatgtaacaaacttgtacatgtacccgttgaatcta

SEQ ID NO: 538780 - DNA, 120 bp, Artificial Sequence
  ENSG00000167005_41 (sequence is synthesized)
caataaaataaaaataaatatatacgaagaggaaaaaaacctagggtttgtatactgttagtctggggaattgacatgaattcaagcatattctcccccttcactttgatacttgttttg

SEQ ID NO: 538781 - DNA, 120 bp, Artificial Sequence
  ENSG00000167005_42 (sequence is synthesized)
tgttatctccaaattgtattaagttgaaagctgaaattcttaacttttatacagacctggtggtgaacttaacccaggagaagatgaagttgaaggactaaaacgcttaatgacagaggt

SEQ ID NO: 538782 - DNA, 120 bp, Artificial Sequence
  ENSG00000167005_43 (sequence is synthesized)
atttttctgtttaaccactttgaataccatcaacttactagttatttggcttttaatgtcttgtaaaaaggatgcttattttggaatatttagttttcaataaatacaacttaaactcca

SEQ ID NO: 538783 - DNA, 120 bp, Artificial Sequence
  ENSG00000167005_44 (sequence is synthesized)
atcggacttcattatgttttaagtatctcaagctataaatcctgtgactacatattttatctcgaatggttgactggtttactgcttgttattttatatgcattaaagcatttatttact

SEQ ID NO: 538784 - DNA, 120 bp, Artificial Sequence
  ENSG00000167011_0 (sequence is synthesized)
gtgccacccgaacccctgaaccgatgggcgccccggcccgcgtcgccaacggagctgcggcgctgccccagcgctgaccgacgttagagtcgggctccgacagcgcggccgagtccccgc

SEQ ID NO: 538785 - DNA, 120 bp, Artificial Sequence
  ENSG00000167011_1 (sequence is synthesized)
gcgtcatcctcctttgactcttgggggctccaaagggacctctctcttggcaccgggggtgtctgcgcccgccgcccgccccgcttggctttgcggcatctcggccctggctccagctcc

SEQ ID NO: 538786 - DNA, 120 bp, Artificial Sequence
  ENSG00000167011_2 (sequence is synthesized)
ggctccggcgagggtcatgaagctggaagccagctgtggcacagccacctcagaggtccctaagccggaaaagaagactgcccgagatgcagagccaagctctgaaacccggccacagga

SEQ ID NO: 538787 - DNA, 120 bp, Artificial Sequence
  ENSG00000167011_3 (sequence is synthesized)
ggtggaggccgagcccaggtcgggatcggggcctgaggctgaggccgagccattggacttcgtggtggccacggaacgggagtttgaggaagtgctggccatctcggggggcatctacgg

SEQ ID NO: 538788 - DNA, 120 bp, Artificial Sequence
  ENSG00000167011_4 (sequence is synthesized)
cggcctggactaccttcctagccgctaccacagctggctccgggaccccgaccgcacggtggtgctggccaagcgcaacggaggcgtgatcgcgctggagtcggtgaacgtgatcgacgc

SEQ ID NO: 538789 - DNA, 120 bp, Artificial Sequence
  ENSG00000167011_5 (sequence is synthesized)
cggggagacggtgctggtggaggggctgcgcgtggcgccctgggagcgcgggaagggcgtggccgggctgctgcagcgcttctgctcgcagctggtcaagagacagcacccgggggtcaa

SEQ ID NO: 538790 - DNA, 120 bp, Artificial Sequence
  ENSG00000167011_6 (sequence is synthesized)
ggtggcacggctcacccgggacgaccagctgggcccccgggagctgaagaaataccgcctaatcaccaagcagggcatccttttggtccgattcaacgcgtccgcgctgctggccgggct

SEQ ID NO: 538791 - DNA, 120 bp, Artificial Sequence
  ENSG00000167011_7 (sequence is synthesized)
gggcgcgcggctggcggcgctgcggacctctggcaccttctcgccgctgcccaccgaggccgtgtccgaggcaggcggcgacgtggcacgcctcctgctgtcaccctccgtgcagcgcga

SEQ ID NO: 538792 - DNA, 120 bp, Artificial Sequence
  ENSG00000167011_8 (sequence is synthesized)
cgtgcttccaggcgggaccatcatccaggactggcagccctaccggcctagcgaaagcaacctgcgcctgctggcggccaagggcctggagtggcgcgtggacagccgcgcgcgcccgcg

SEQ ID NO: 538793 - DNA, 120 bp, Artificial Sequence
  ENSG00000167011_9 (sequence is synthesized)
cgtgctcacgctgtgcacgcgccccttccccatcccgcacggaggggacggcacttggcgctatctcaacatcgacgccttcggtagcgacggcgcgcaggtgcagagccagctgctgtg

SEQ ID NO: 538794 - DNA, 120 bp, Artificial Sequence
  ENSG00000167011_10 (sequence is synthesized)
gcacctgcagcgccaggccccgcgcctcgttggcctcaacgtcatgtgccagctcttcctggagccccagctgtggtcacagctggctgacttctgccaggtcgggctgggactggagct

SEQ ID NO: 538795 - DNA, 120 bp, Artificial Sequence
  ENSG00000167011_11 (sequence is synthesized)
ggtgaagggttatactgaacagtacctgctggaggccgacatctgaggcctctcctctggcggggagggggaaaaagacccgcccccttccgcagtttccccagccagcctctttcctgc

SEQ ID NO: 538796 - DNA, 120 bp, Artificial Sequence
  ENSG00000167011_12 (sequence is synthesized)
ccccccactctgtcccttttgcccttactatcttgcctctagctcccccaaacaccattgcccactccctgacctgaacttgcggactattaggtgggggctgggggtgggggccttgag

SEQ ID NO: 538797 - DNA, 120 bp, Artificial Sequence
  ENSG00000167011_13 (sequence is synthesized)
ctgctgttatccaccctctgtttttccaaagaactggtccccgcacaggcttcagagtccttccttccctctccatcacctcacccggggcgtgaactccccctttcctggcttctccct

SEQ ID NO: 538798 - DNA, 120 bp, Artificial Sequence
  ENSG00000167011_14 (sequence is synthesized)
tctgccccctcgtgggtggaagaactcaggagtgtgtgggatgcccagcctcgttcccgagcgcagccgcccaatccgcgtttcttttcttccttctgccctttctaaagccctaaaaac

SEQ ID NO: 538799 - DNA, 120 bp, Artificial Sequence
  ENSG00000167011_15 (sequence is synthesized)
tggtcctgcattgccctccacaccccaatcccctccccctgctcaagcttctggtgccagagatcagtgccctctccccacttctctctagcccctcatcctcatcctcgctggatctct

SEQ ID NO: 538800 - DNA, 120 bp, Artificial Sequence
  ENSG00000167011_16 (sequence is synthesized)
acgacgcttaacaccgcagtgcccatttttctgtccctgttttccttcccatcaccagcccagtgtgcaatccagagagagagagagtgatactgtaaaatgaaatgtatttagaatgct

SEQ ID NO: 538801 - DNA, 120 bp, Artificial Sequence
  ENSG00000167011_17 (sequence is synthesized)
cccccatttgggtccttgttcatctggtgatgcactttctgagcctgcctctctcactggggtttcctcctgctttgcacaactttgctatttcgcaggctcccccgtgccccagctcac

SEQ ID NO: 538802 - DNA, 120 bp, Artificial Sequence
  ENSG00000167011_18 (sequence is synthesized)
ccgagccgggcggggtggtggtggtggtggtggtgtgtgtgtggtgtggttctagctgaagagtttggtacagtggagggcgggtccctcagcctggcataggggctgtctcctggttcc

SEQ ID NO: 538803 - DNA, 120 bp, Artificial Sequence
  ENSG00000167011_19 (sequence is synthesized)
aaccaggccgccttctagtgcaactggaattcccacctcctggtatttctggacaccactccctttctctggatcatttatgcttttagaactttgagagtcttctatttaattgcaagt

SEQ ID NO: 538804 - DNA, 120 bp, Artificial Sequence
  ENSG00000167011_20 (sequence is synthesized)
agtaacagctgcatctgcacagcgctgtctccaatactggttccccacatcaaaggcagagggagaaaacagaaggctgggaaagatcaaagtgacttctaagtcattcaaagtagctag

SEQ ID NO: 538805 - DNA, 120 bp, Artificial Sequence
  ENSG00000167011_21 (sequence is synthesized)
gagcctcccagcgaatagaacccgggtgtcccaagcctagagcatgacctagaacttcactctgtgggatgatgttagcttgaacttcttgttgggcaatgcgtaggtgctaggagaatg

SEQ ID NO: 538806 - DNA, 120 bp, Artificial Sequence
  ENSG00000167011_22 (sequence is synthesized)
ttgacagtgagtttggggttcgctgggatgggatccgagatgtgggcagaggtggacaccagcaggtggaagaatgtggacaaggtggggggtaggggcagccgccgcttcgccactttc

SEQ ID NO: 538807 - DNA, 120 bp, Artificial Sequence
  ENSG00000167011_23 (sequence is synthesized)
cgcagctctggttttgctactgtgctgctctccttgggtgcatcctgtgcctggccacgctgccaccctccttgtcacggtgaccacgattgtatgacaataaaatggaccttttggcca

SEQ ID NO: 538808 - DNA, 120 bp, Artificial Sequence
  ENSG00000167011_24 (sequence is synthesized)
ttttcgctctcatctttgggcgctttgtgcagctgccttctttgtctccgcctctccggcgactgggctctcccttccctccctctcctccctcccccagtgtcaagaagccatcggcct

SEQ ID NO: 538809 - DNA, 120 bp, Artificial Sequence
  ENSG00000167011_25 (sequence is synthesized)
cggaggcgtggtgagcccgggggcacggcccaggtgacatggggtgaagccacctgcgggtgcgtggatcttaggaagaggaggatgagagcttctccccagccttcctctggaggctgc

SEQ ID NO: 538810 - DNA, 120 bp, Artificial Sequence
  ENSG00000167011_26 (sequence is synthesized)
ctaaagcagaggaaccagagggacaggtgagcgtttgaaagttcgaggatccaccggaggaatttctgggggtaaaagcaaaggaggtggggagcaggagagagagggtaggctaggggt

SEQ ID NO: 538811 - DNA, 120 bp, Artificial Sequence
  ENSG00000167011_27 (sequence is synthesized)
gggagcaggaagagcttagatttgggctgggggaggagctaagaggaagtggggcgtggcaaactcccgggggaggagccaaggaaggggcgtggtgagcggtccggaacttgacacact

SEQ ID NO: 538812 - DNA, 120 bp, Artificial Sequence
  ENSG00000167011_28 (sequence is synthesized)
tggtgagcggtccggaacttgacacactcggagctggagcatctcaagaggtggaaggggccgggcgcgtcggctaactcctgtaaccccagctctttgggaggccgaggcaggaggatc

SEQ ID NO: 538813 - DNA, 120 bp, Artificial Sequence
  ENSG00000167011_29 (sequence is synthesized)
tgggcaacatgcgagacccctgtctccaaaaaataaaaataaataaaaagccgagagtaggggtgcgtgcctgttgtcccagctactaggaagtcttgggggtgtaggggatcgcttgag

SEQ ID NO: 538814 - DNA, 77 bp, Artificial Sequence
  ENSG00000167011_30 (sequence is synthesized)
gctccagcctgggtgaggagaccctgtcctaaatttaaaataaataaaaataaaaaggtggacgaagccccggcgaa

SEQ ID NO: 538815 - DNA, 120 bp, Artificial Sequence
  ENSG00000167014_0 (sequence is synthesized)
ctctctcacatctccacaggcttggcgacgccatgtttcaagggcagcgcggttggttttgcggcagcgttagccaggatctgaggcaattctgggtggctgaagggggaacgatcagtg

SEQ ID NO: 538816 - DNA, 120 bp, Artificial Sequence
  ENSG00000167014_1 (sequence is synthesized)
acccgcgagccgccgacttcttgttcagctgtgatgcctcgcacccagacacgctgagaatatatcagagccttgattacatagaagataatgctacagtttttcatgcctactatctct

SEQ ID NO: 538817 - DNA, 120 bp, Artificial Sequence
  ENSG00000167014_2 (sequence is synthesized)
ctgcggtagctaatgccaaaataaaaaactcggtggctttgggtcatttcattcttcctcctgcgtgcctgcaaaaagaaataagaagaaaaattggtagttttatttgggaacaagacc

SEQ ID NO: 538818 - DNA, 120 bp, Artificial Sequence
  ENSG00000167014_3 (sequence is synthesized)
aacattttctgatagaaaagcatgatgaagtaacaccaaatgaaataaagacccttagggaaaacagtgaactagcaacagagcacaaaaaagaattatccaaaagcccagaaaagcatt

SEQ ID NO: 538819 - DNA, 120 bp, Artificial Sequence
  ENSG00000167014_4 (sequence is synthesized)
ttataagaactccagttgtagaaaagcagatgtacttccctctacagaattacccagttaacaacatggtaacaggttatatatcaattgatgccatgaagaaattccttggggagctac

SEQ ID NO: 538820 - DNA, 120 bp, Artificial Sequence
  ENSG00000167014_5 (sequence is synthesized)
aaattaaattgtaaataccttggcatttattttctataaaatattatacagatgtgcatatcataaaatgctcccttttggtactgggggatagtgaaatgggaaataatttttctgttt

SEQ ID NO: 538821 - DNA, 120 bp, Artificial Sequence
  ENSG00000167014_6 (sequence is synthesized)
ctcaaagtatatctttaggaaatacagaatcattttggttctgtgttttgacatttttcccctagcttttaacaacatgttcaaatattctcaatgcacagttgttaatgagtaattgcc

SEQ ID NO: 538822 - DNA, 120 bp, Artificial Sequence
  ENSG00000167014_7 (sequence is synthesized)
gttaaaatatatttcataagaagtctcaatctcaaactctccatctctcaatcctcctcctcctcctctttcttgctttctcttttccctctctctttctctcctccccttctctctttc

SEQ ID NO: 538823 - DNA, 120 bp, Artificial Sequence
  ENSG00000167014_8 (sequence is synthesized)
tgtctttcaaatgttcttttggctttaacattctattaattatattttttctagattgaatactgtgaatgctaagttttattaatctggtcatcttattttgattttaaaaattaggat

SEQ ID NO: 538824 - DNA, 120 bp, Artificial Sequence
  ENSG00000167014_9 (sequence is synthesized)
gctagttgcattctgaattactgtttctggtttgaaacatggagaaaaacattttaataattcatatttcatgttggatggtttctaataataaatatctcaaaagtgacttaacataaa

SEQ ID NO: 538825 - DNA, 120 bp, Artificial Sequence
  ENSG00000167014_10 (sequence is synthesized)
ggcgacgccatgtttcaagggcagcgcggttggttttgcggcagcgttagccaggatctgaggcaattctggggtaggaagctgagtggaagcagcgggttaggtggtgaggggagcatc

SEQ ID NO: 538826 - DNA, 61 bp, Artificial Sequence
  ENSG00000167014_11 (sequence is synthesized)
cagttgtagaaaagcagatgtacttccctctacagaattacccagttaacaacatggtaac

SEQ ID NO: 538827 - DNA, 120 bp, Artificial Sequence
  ENSG00000167034_0 (sequence is synthesized)
cgggtgcattcaggccaaggcggggccgccgggatgctcagggttccggagccgcggcccggggaggcgaaagcggagggggccgcgccgccgaccccgtccaagccgctcacgtccttc

SEQ ID NO: 538828 - DNA, 120 bp, Artificial Sequence
  ENSG00000167034_1 (sequence is synthesized)
gccgctcacgtccttcctcatccaggacatcctgcgggacggcgcgcagcggcaaggcggccgcacgagcagccagagacagcgcgacccggagccggagccagagccagagccagaggg

SEQ ID NO: 538829 - DNA, 120 bp, Artificial Sequence
  ENSG00000167034_2 (sequence is synthesized)
aggacgcagccgcgccggggcgcagaacgaccagctgagcaccgggccccgcgccgcgccggaggaggccgagacgctggcagagaccgagccagaaaggcacttggggtcttatctgtt

SEQ ID NO: 538830 - DNA, 120 bp, Artificial Sequence
  ENSG00000167034_3 (sequence is synthesized)
ggactctgaaaacacttcaggcgcccttccaaggcttccccaaacccctaagcagccgcagaagcgctcccgagctgccttctcccacactcaggtgatcgagttggagaggaagttcag

SEQ ID NO: 538831 - DNA, 120 bp, Artificial Sequence
  ENSG00000167034_4 (sequence is synthesized)
ccatcagaagtacctgtcggcccctgaacgggcccacctggccaagaacctcaagctcacggagacccaagtgaagatatggttccagaacagacgctataagactaagcgaaagcagct

SEQ ID NO: 538832 - DNA, 120 bp, Artificial Sequence
  ENSG00000167034_5 (sequence is synthesized)
ctcctcggagctgggagacttggagaagcactcctctttgccggccctgaaagaggaggccttctcccgggcctccctggtctccgtgtataacagctatccttactacccatacctgta

SEQ ID NO: 538833 - DNA, 120 bp, Artificial Sequence
  ENSG00000167034_6 (sequence is synthesized)
ctgcgtgggcagctggagcccagctttttggtaatgccagctcaggtgacaaccattatgatcaaaaactgccttccccagggtgtctctatgaaaagcacaaggggccaaggtcaggga

SEQ ID NO: 538834 - DNA, 120 bp, Artificial Sequence
  ENSG00000167034_7 (sequence is synthesized)
gcaagaggtgtgcacaccaaagctattggagatttgcgtggaaatctcagattcttcactggtgagacaatgaaacaacagagacagtgaaagttttaatacctaagtcattcctccagt

SEQ ID NO: 538835 - DNA, 120 bp, Artificial Sequence
  ENSG00000167034_8 (sequence is synthesized)
gcatactgtaggtcattttttttgcttctggctacctgtttgaaggggagagagggaaaatcaagtggtattttccagcactttgtatgattttggatgagttgtacacccaaggattct

SEQ ID NO: 538836 - DNA, 120 bp, Artificial Sequence
  ENSG00000167034_9 (sequence is synthesized)
gttctgcaactccatcctcctgtgtcactgaatatcaactctgaaagagcaaacctaacaggagaaaggacaaccaggatgaggatgtcaccaactgaattaaacttaagtccagaagcc

SEQ ID NO: 538837 - DNA, 120 bp, Artificial Sequence
  ENSG00000167034_10 (sequence is synthesized)
tcctgttggccttggaatatggccaaggctctctctgtccctgtaaaagagaggggcaaatagagagtctccaagagaacgccctcatgctcagcacatatttgcatgggagggggagat

SEQ ID NO: 538838 - DNA, 120 bp, Artificial Sequence
  ENSG00000167034_11 (sequence is synthesized)
gggtgggaggagatgaaaatatcagcttttcttattcctttttattccttttaaaatggtatgccaacttaagtatttacagggtggcccaaatagaacaagatgcactcgctgtgattt

SEQ ID NO: 538839 - DNA, 120 bp, Artificial Sequence
  ENSG00000167034_12 (sequence is synthesized)
taagacaagctgtataaacagaactccactgcaagagggggggccgggccaggagaatctccgcttgtccaagacaggggcctaaggagggtctccacactgctgctaggggctgttgca

SEQ ID NO: 538840 - DNA, 120 bp, Artificial Sequence
  ENSG00000167034_13 (sequence is synthesized)
cttttttcccttgggctggagaatttagaatcagaagtttcctggagttttcaggctatcatatatactgtatcctgaaaggcaacataattcttccttccctccttttaaaattttgtg

SEQ ID NO: 538841 - DNA, 120 bp, Artificial Sequence
  ENSG00000167034_14 (sequence is synthesized)
ttcctttttgcagcaattactcactaaagggcttcattttagtccagatttttagtctggctgcacctaacttatgcctcgcttatttagcccgagatctggtctttttttttttttttt

SEQ ID NO: 538842 - DNA, 120 bp, Artificial Sequence
  ENSG00000167034_15 (sequence is synthesized)
tttttttttttccgtctccccaaagctttatctgtcttgactttttaaaaaagtttgggggcagattctgaattggctaaaagacatgcatttttaaaactagcaactcttatttctttc

SEQ ID NO: 538843 - DNA, 120 bp, Artificial Sequence
  ENSG00000167034_16 (sequence is synthesized)
ctttaaaaatacatagcattaaatcccaaatcctatttaaagacctgacagcttgagaaggtcactactgcatttataggaccttctggtggttctgctgttacgtttgaagtctgacaa

SEQ ID NO: 538844 - DNA, 120 bp, Artificial Sequence
  ENSG00000167034_17 (sequence is synthesized)
tccttgagaatctttgcatgcagaggaggtaagaggtattggattttcacagaggaagaacacagcgcagaatgaagggccaggcttactgagctgtccagtggagggctcatgggtggg

SEQ ID NO: 538845 - DNA, 120 bp, Artificial Sequence
  ENSG00000167034_18 (sequence is synthesized)
acatggaaaagaaggcagcctaggccctggggagcccagtccactgagcaagcaagggactgagtgagccttttgcaggaaaaggctaagaaaaaggaaaaccattctaaaacacaacaa

SEQ ID NO: 538846 - DNA, 120 bp, Artificial Sequence
  ENSG00000167034_19 (sequence is synthesized)
gaaactgtccaaatgctttgggaactgtgtttattgcctataatgggtccccaaaatgggtaacctagacttcagagagaatgagcagagagcaaaggagaaatctggctgtccttccat

SEQ ID NO: 538847 - DNA, 120 bp, Artificial Sequence
  ENSG00000167034_20 (sequence is synthesized)
tttcattctgttatctcaggtgagctggtagaggggagacattagaaaaaaatgaaacaacaaaacaattactaatgaggtacgctgaggcctgggagtctcttgactccactacttaat

SEQ ID NO: 538848 - DNA, 120 bp, Artificial Sequence
  ENSG00000167034_21 (sequence is synthesized)
tccgtttagtgagaaacctttcaattttcttttattagaagggccagcttactgttggtggcaaaattgccaacataagttaatagaaagttggccaatttcaccccattttctgtggtt

SEQ ID NO: 538849 - DNA, 120 bp, Artificial Sequence
  ENSG00000167034_22 (sequence is synthesized)
tgggctccacattgcaatgttcaatgccacgtgctgctgacaccgaccggagtactagccagcacaaaaggcagggtagcctgaattgctttctgctctttacatttcttttaaaataag

SEQ ID NO: 538850 - DNA, 120 bp, Artificial Sequence
  ENSG00000167034_23 (sequence is synthesized)
catttagtgctcagtccctactgagtactctttctctcccctcctctgaatttaattctttcaacttgcaatttgcaaggattacacatttcactgtgatgtatattgtgttgcaaaaaa

SEQ ID NO: 538851 - DNA, 120 bp, Artificial Sequence
  ENSG00000167034_24 (sequence is synthesized)
aaaaaaaaagtgtctttgtttaaaattacttggtttgtgaatccatcttgctttttccccattggaactagtcattaacccatctctgaactggtagaaaaacatctgaagagctagtct

SEQ ID NO: 538852 - DNA, 120 bp, Artificial Sequence
  ENSG00000167034_25 (sequence is synthesized)
atcagcatctgacaggtgaattggatggttctcagaaccatttcacccagacagcctgtttctatcctgtttaataaattagtttgggttctctacatgcataacaaaccctgctccaat

SEQ ID NO: 538853 - DNA, 120 bp, Artificial Sequence
  ENSG00000167034_26 (sequence is synthesized)
ctgtcacataaaagtctgtgacttgaagtttagtcagcacccccaccaaactttatttttctatgtgttttttgcaacatatgagtgttttgaaaataaagtacccatgtctttattaga

SEQ ID NO: 538854 - DNA, 120 bp, Artificial Sequence
  ENSG00000167037_0 (sequence is synthesized)
cggagccatggcctcggcccccgcggaggcggagacccgacagaggctgctacgcaccgtcaagaaggaggtgaagcagatcatggaggaggctgtgacacgcaagtttgtccacgaaga

SEQ ID NO: 538855 - DNA, 120 bp, Artificial Sequence
  ENSG00000167037_1 (sequence is synthesized)
cagcagccacatcatctccttctgtgcggctgtggaggcctgcgttctgcacgggcttcggcggcgggcggctggcttcctacgcagcaataagattgcagccctctttatgaaagtggg

SEQ ID NO: 538856 - DNA, 120 bp, Artificial Sequence
  ENSG00000167037_2 (sequence is synthesized)
caagaacttcccgccggctgaggatctgagccgcaaggtgcaagacctggagcagctgatcgagagcgcgagaaaccagattcaaggcctccaggagaatgtgcggaagctgccgaagct

SEQ ID NO: 538857 - DNA, 120 bp, Artificial Sequence
  ENSG00000167037_3 (sequence is synthesized)
gcccaacttgtccccacttgccatcaagcatctgtggattcgcacagccttgtttgagaaggtcctggacaaaattgtgcattaccttgtggaaaacagcagtaaatactatgagaagga

SEQ ID NO: 538858 - DNA, 120 bp, Artificial Sequence
  ENSG00000167037_4 (sequence is synthesized)
agctctcctgatggaccctgtggacggccccatccttgcatctttgttggtggggccctgtgccctagagtacaccaagatgaagactgcagatcacttctggaccgatccctcggctga

SEQ ID NO: 538859 - DNA, 120 bp, Artificial Sequence
  ENSG00000167037_5 (sequence is synthesized)
cgaacttgtccagaggcaccgcatccacagctcccacgtgcggcaggactcgcccaccaagcgtcctgccctctgtatccagaagaggcattccagtggcagcatggatgaccggccatc

SEQ ID NO: 538860 - DNA, 120 bp, Artificial Sequence
  ENSG00000167037_6 (sequence is synthesized)
cctctctgcccgcgactacgtggagtccctgcatcagaactcccgtgccacccttctctatggcaaaaacaacgttcttgttcagccgagggacgacatggaggctgtgccagggtacct

SEQ ID NO: 538861 - DNA, 120 bp, Artificial Sequence
  ENSG00000167037_7 (sequence is synthesized)
gtccctgcaccagacggctgacgtcatgaccttgaagtggacacccaaccagctgatgaacgggtctgtgggggacctggactatgagaagagcgtctactgggactatgccatgaccat

SEQ ID NO: 538862 - DNA, 120 bp, Artificial Sequence
  ENSG00000167037_8 (sequence is synthesized)
ccgcttggaggagattgtctacctgcactgccaccagcaagttgacagcggcgggacagtggtattggtcagccaggacgggatccagaggccgcccttccgcttccccaagggcgggca

SEQ ID NO: 538863 - DNA, 120 bp, Artificial Sequence
  ENSG00000167037_9 (sequence is synthesized)
cctcctgcagttcctctcgtgcctggagaatgggctgctcccacatgggcagttggacccgccactgtggtcccagaggggtaagggcaaagtgtttcctaaactgcgcaagcgaagccc

SEQ ID NO: 538864 - DNA, 120 bp, Artificial Sequence
  ENSG00000167037_10 (sequence is synthesized)
tcagggttctgccgagtccacatcttcagacaaagatgatgatgaggccacggattatgtgttcaggatcatctaccctggcatgcagtcggaattcgttgcccccgacttcttgggcag

SEQ ID NO: 538865 - DNA, 120 bp, Artificial Sequence
  ENSG00000167037_11 (sequence is synthesized)
cacttcctccgtctctgtgggccctgcctggatgatggttcctgcaggccggtccatgctggtggtggccagagggagtcagtgggagccagccagatgggacactactctccccacgcc

SEQ ID NO: 538866 - DNA, 120 bp, Artificial Sequence
  ENSG00000167037_12 (sequence is synthesized)
aagcccgaaggagcagccccccatgccccaggatctgatggacgtctctgtaagcaacctcccatccctgtggcagcccagtccccggaagtcctcctgttcatcctgttcacagagtgg

SEQ ID NO: 538867 - DNA, 120 bp, Artificial Sequence
  ENSG00000167037_13 (sequence is synthesized)
ctcggctgatggtagctcgaccaatggctgcaaccatgagagggctcccctgaaacttctctgtgacaatatgaagtaccagatcctctccagagccttctatggatggctggcctactg

SEQ ID NO: 538868 - DNA, 120 bp, Artificial Sequence
  ENSG00000167037_14 (sequence is synthesized)
cagacacctgtccaccgtgagaacccacctatcagccctggtcaatcacatgatcgtgtctccagacttgccctgcgatgctggacagggactgacagccaggatctgggagcagtacct

SEQ ID NO: 538869 - DNA, 120 bp, Artificial Sequence
  ENSG00000167037_15 (sequence is synthesized)
tcacgacagcacaagttacgaggagcaggagctgctgcgcctcatctactacgggggcatccagcctgagatccgcaaggccgtgtggcccttcctcctgggccactaccagttcgggat

SEQ ID NO: 538870 - DNA, 120 bp, Artificial Sequence
  ENSG00000167037_16 (sequence is synthesized)
gacggaaacagaaaggaaagaggtggacgagcagattcatgcctgctatgcacagaccatggctgagtggctgggctgcgaggcgatcgtgcggcagagggagcgggagtcccatgcggc

SEQ ID NO: 538871 - DNA, 120 bp, Artificial Sequence
  ENSG00000167037_17 (sequence is synthesized)
catccgcctgcacagcgactccagcagcagcacacaggtgtttgagtctgtggatgaggtggagcaggtggaggctgaaggcagattggaggagaaacagcccaagatccccaatgggaa

SEQ ID NO: 538872 - DNA, 120 bp, Artificial Sequence
  ENSG00000167037_18 (sequence is synthesized)
cctagtgaacggcacttgttccccagactcgggtcatccttcctcccataacttctcctcgggcctctcagagcactcagagcccagtctgagcacagaagacagtgtcttggacgccca

SEQ ID NO: 538873 - DNA, 120 bp, Artificial Sequence
  ENSG00000167037_19 (sequence is synthesized)
gcggaacacccccacggtgctgcgacctagggatggcagcgtggatgacaggcagagcagcgaggccaccacatctcaggatgaggctccccgggaggagctggccgtgcaggacagcct

SEQ ID NO: 538874 - DNA, 120 bp, Artificial Sequence
  ENSG00000167037_20 (sequence is synthesized)
ggagagtgacctcctggccaacgagagcatggacgagttcatgtccatcacgggcagcctggacatggccctgcctgaaaaggacgatgttgtgatggagggctggaggagcagcgagac

SEQ ID NO: 538875 - DNA, 120 bp, Artificial Sequence
  ENSG00000167037_21 (sequence is synthesized)
agagaaacatggccaggcggacagtgaggacaacctctcggaggagcctgagatggaaagtctcttccctgccctggcttctctggctgtgactacttctgccaacgaggtgtcccctgt

SEQ ID NO: 538876 - DNA, 120 bp, Artificial Sequence
  ENSG00000167037_22 (sequence is synthesized)
gtcttccagcggcgtcacctactctccagagctgctggatctgtacacggtgaacctgcaccgcatcgagaaggatgtgcagaggtgcgaccgcaactactggtacttcacgcccgccaa

SEQ ID NO: 538877 - DNA, 120 bp, Artificial Sequence
  ENSG00000167037_23 (sequence is synthesized)
cttggagaagctgcgtaacatcatgtgcagctacatctggcagcacattgagatcggctatgtccagggcatgtgtgatcttctggctccactgctggtcattctggatgatgaggccct

SEQ ID NO: 538878 - DNA, 120 bp, Artificial Sequence
  ENSG00000167037_24 (sequence is synthesized)
tgccttcagctgcttcacggagctcatgaagaggatgaaccagaacttcccccacggaggcgccatggacacgcactttgcaaacatgagatcgttgatccagatcctggactcagagct

SEQ ID NO: 538879 - DNA, 120 bp, Artificial Sequence
  ENSG00000167037_25 (sequence is synthesized)
gtttgagctgatgcatcagaacggggactatactcacttctacttctgctaccgctggttcctgctggatttcaagcgagaactcgtctatgatgacgtcttcttggtctgggagaccat

SEQ ID NO: 538880 - DNA, 120 bp, Artificial Sequence
  ENSG00000167037_26 (sequence is synthesized)
ctgggcagccaaacacgtctcctctgcgcactacgtcctgttcattgcgctggctctggtggaagtctaccgtgacatcattttggagaacaacatggatttcacagacatcatcaaatt

SEQ ID NO: 538881 - DNA, 120 bp, Artificial Sequence
  ENSG00000167037_27 (sequence is synthesized)
ctttaatgaaatggctgagcgacacaacaccaagcaagtcctgaagctggcgcgggacctcgtgtacaaggtgcagactctgattgagaacaagtgaggggcacctcaccccggcagcct

SEQ ID NO: 538882 - DNA, 120 bp, Artificial Sequence
  ENSG00000167037_28 (sequence is synthesized)
cagccaagctgcccctgccccgctcctctgcttacttttcctcctggctggatgggcaccccgggagcggggtcctggtgtctgttcacaagcgtggagttcagtgcgcaaagaaactac

SEQ ID NO: 538883 - DNA, 120 bp, Artificial Sequence
  ENSG00000167037_29 (sequence is synthesized)
cctgacttttacttctgggcagatggggtggagggagtaccccttcaattcagccttacattttcctgtttgaccaaagattgcccaagtctggcgttcctcccttgcaggaggtggagg

SEQ ID NO: 538884 - DNA, 120 bp, Artificial Sequence
  ENSG00000167037_30 (sequence is synthesized)
ttgttggtggaggaggagccatctttgtttgctggtgcccggaatggtctcctcttcttctttccctatccctccaaactgtcttgtaagatgagacctggggaggaaacttctttttgg

SEQ ID NO: 538885 - DNA, 120 bp, Artificial Sequence
  ENSG00000167037_31 (sequence is synthesized)
aaattggtgtagaagaggtgtgtggggctacctctatgctcctctgcaaggggcctttggcgatgttctggacatggctgaagattgacttagagattgaccctccacctcgacattact

SEQ ID NO: 538886 - DNA, 120 bp, Artificial Sequence
  ENSG00000167037_32 (sequence is synthesized)
gacatttggggccaggtgattctttttgaggggactgtcccctgcattgtaggatgctgagcagcatcccgggcctcaccagatgccagtagtgccatcccccaaccatacccctggttg

SEQ ID NO: 538887 - DNA, 120 bp, Artificial Sequence
  ENSG00000167037_33 (sequence is synthesized)
tgacagcccccaaaaatgtctctagacattgcgaaatgttccctgcagggcaaaattgcccccatttgagaaccactggcttggagaagggactacaaatgtacttcctcccccattctt

SEQ ID NO: 538888 - DNA, 120 bp, Artificial Sequence
  ENSG00000167037_34 (sequence is synthesized)
ttggagaagggactacaaatgtacttcctcccccattcttttgacgctaagccaccctggtcctgacgcctcccctcacttagaaaaggcatacaggaggccgggcatggtggctcacac

SEQ ID NO: 538889 - DNA, 120 bp, Artificial Sequence
  ENSG00000167037_35 (sequence is synthesized)
ccactgcactccagcccgggcgacagttcaagactccatctcaaaaaaaaaaagaaaaggcacacaagagtccctcacacatctctcttggagtctgggattccatctgttgtattttct

SEQ ID NO: 538890 - DNA, 120 bp, Artificial Sequence
  ENSG00000167037_36 (sequence is synthesized)
atctgttgtattttctccttttttctcctctgtctgatgccagaagatacttgttttcttcttttcaagaaaagtatctccccacataggcggtggacccaaaaagtgtaggcatgagac

SEQ ID NO: 538891 - DNA, 120 bp, Artificial Sequence
  ENSG00000167037_37 (sequence is synthesized)
ggtcagagctctttggggtcctgctcagagtcccccaggcagggcagagtctgtatcctgctgccatcttgcaagggaaaaccgcctctccttccaagtattgggtcttggaaaggtgtg

SEQ ID NO: 538892 - DNA, 120 bp, Artificial Sequence
  ENSG00000167037_38 (sequence is synthesized)
tgtttggtgaaagccacttaatggtggtggggtgcagcttttctctaagtgcagttactcactcaggacaaaggaggaaaaggaaggcagaggtcagccagggtagagggtgatgtctgt

SEQ ID NO: 538893 - DNA, 120 bp, Artificial Sequence
  ENSG00000167037_39 (sequence is synthesized)
tttccttgggaaacatctgctgatgaactgggtccagggccgtgctaggtctgggaacaatcctctccaggtcttcacacagagtatcaccaatccacaaacagacccgaagtgaactag

SEQ ID NO: 538894 - DNA, 120 bp, Artificial Sequence
  ENSG00000167037_40 (sequence is synthesized)
tttactctgcctacctgtcctttcaatagagcagtctttcccgctcttctgttctgagaatgcacccggaatgggggaaacccagcaagcagcagagagaaaggctcttcccgggagacc

SEQ ID NO: 538895 - DNA, 120 bp, Artificial Sequence
  ENSG00000167037_41 (sequence is synthesized)
tgccgcctctagggtggtcagagaatagcagctgggattttggagagggagaggataggtaaagcagcgtattgaagcatttgcggaggggtgtattagtcctcccaccctgagcacacc

SEQ ID NO: 538896 - DNA, 120 bp, Artificial Sequence
  ENSG00000167037_42 (sequence is synthesized)
aggacggggatgcatccttgccttgtgtgcttgtaaaggcttctttcccttggtatagcaacttcaactgcacctgaacctccaacctctgcccagcctctggtgcagggtggatagagg

SEQ ID NO: 538897 - DNA, 120 bp, Artificial Sequence
  ENSG00000167037_43 (sequence is synthesized)
tctagccagcccttacttcctgaagagagctctgtgggaaactcgaggctacagtagcttcccggctcccagctcctaccctacccccaccaaagcagaaacgggagacggcaacgttct

SEQ ID NO: 538898 - DNA, 120 bp, Artificial Sequence
  ENSG00000167037_44 (sequence is synthesized)
ggctgccattagacttacgtctccctcccctacgtcccctagcttcccaagacaggaagaaatgtgcaaaaggcccctccggagaaaactattttgccgttcagctgttctttacagagg

SEQ ID NO: 538899 - DNA, 120 bp, Artificial Sequence
  ENSG00000167037_45 (sequence is synthesized)
atgttattttagtgagacccaggtcctagaccttctgattcctatttatttttttaacagactagtctcaaagtacagcacaaaatctcttctctgccttctcttgtgatgttccagaga

SEQ ID NO: 538900 - DNA, 120 bp, Artificial Sequence
  ENSG00000167037_46 (sequence is synthesized)
gcatctgtggttgtgatttggaataagtcatatttatttggtttactgtgcctattcagatctctgtatgttgtgtgtgtttctgtgtcctggaattggatgcgtgggactcgttctgtc

SEQ ID NO: 538901 - DNA, 120 bp, Artificial Sequence
  ENSG00000167037_47 (sequence is synthesized)
cgcggagtgcactctttttttcagtgtggcccacatatcttgtaaatgtttgctgaagagttgtgtctatatatagagaaaatatatataaacagagaaatatgtgaatctgtttttttt

SEQ ID NO: 538902 - DNA, 120 bp, Artificial Sequence
  ENSG00000167037_48 (sequence is synthesized)
tgtctttttttttttaatttgaaagaaaaaaatgcttgcttctgaggactgtgtcctcccactcacaccccagtgaccctatatggggtcagatttttgtaatagctgcctggccttttc

SEQ ID NO: 538903 - DNA, 120 bp, Artificial Sequence
  ENSG00000167037_49 (sequence is synthesized)
ccagaaaaggtgaatcacttctgacttcttgtattagctggctcttaccacaagtaatgctgcattacaaatgacccaaaaagtagtggtttaaaacagccatgtatttacctcataatt

SEQ ID NO: 538904 - DNA, 120 bp, Artificial Sequence
  ENSG00000167037_50 (sequence is synthesized)
ctgtgggtcagcatcccaggctaggttcagctaggaggttcttctgttctcagacttcttcatgtgtctgtggtcagctgatgtccagataggcaactctgcttctgatggttgtctggc

SEQ ID NO: 538905 - DNA, 120 bp, Artificial Sequence
  ENSG00000167037_51 (sequence is synthesized)
tgttgactagggcagtgggggaaactggattccgtatcttgcatcctccagcaggctagcttaggcttgtttacatggctatgatagcagatcccagaaggtaagcagaaacacacactg

SEQ ID NO: 538906 - DNA, 120 bp, Artificial Sequence
  ENSG00000167037_52 (sequence is synthesized)
tctcttggtctcagcttctctggcataaagtcatttctgccacattctgttggtcagagtaagtcacatgactcagcccagcttcatagggtagggaaatagactgtacttcctgatgag

SEQ ID NO: 538907 - DNA, 77 bp, Artificial Sequence
  ENSG00000167037_53 (sequence is synthesized)
gcttcatagggtagggaaatagactgtacttcctgatgagaatctttggaaagtgacactgaaaaggagcatgggcc

SEQ ID NO: 538908 - DNA, 80 bp, Artificial Sequence
  ENSG00000167037_54 (sequence is synthesized)
gcggccgcctcgggtcctgacgtcgggcgccctccggccgtcactcagcgctcggccccgccccgccgcggctgcagcag

SEQ ID NO: 538909 - DNA, 120 bp, Artificial Sequence
  ENSG00000167037_55 (sequence is synthesized)
gaacgcagcgctcggagccatggcctcggcccccgcggaggcggagacccgacagaggctgctacgcaccgtcaagaaggaggtctctggcaacctggcttctgggagcttttgctagtg

SEQ ID NO: 538910 - DNA, 120 bp, Artificial Sequence
  ENSG00000167037_56 (sequence is synthesized)
caagaacctcaactcatctaatttggccagtgtcactctctgagagccaagtctttgttttttccactctgaatttgccaagtatttattcaagactaattaaaactaagtagctggtaa

SEQ ID NO: 538911 - DNA, 120 bp, Artificial Sequence
  ENSG00000167037_57 (sequence is synthesized)
gggccacaggacagtgggaaacgctgtgggttccactgggtgggggtaactcagaactttgctttatttaccccaaacatcagaatcctcagggtgacatagagctggaacaggcctttt

SEQ ID NO: 538912 - DNA, 120 bp, Artificial Sequence
  ENSG00000167037_58 (sequence is synthesized)
ggattgttttccaacctcctcaacctcaaagtggggtaactgaggtccagagaggagacggactttgcttaaatcctacaatgactctgggcagaatcaggcccagaatctagtggagca

SEQ ID NO: 538913 - DNA, 120 bp, Artificial Sequence
  ENSG00000167037_59 (sequence is synthesized)
gaaggtattcaggctgccagaggatcaacaccaagagcagagaggcacagctgcccttttgcactgtgtccctgtgcctggcacattagaggcactcaggtgagaattcttgagcaaggg

SEQ ID NO: 538914 - DNA, 120 bp, Artificial Sequence
  ENSG00000167037_60 (sequence is synthesized)
agtgcgcagggaagagcacacagcctgggtgtctgtctcgagctggaacctgtctctgatagccagctctgcctccctgggtaagtgctttcatcttgctgagcatccatttcccaaaat

SEQ ID NO: 538915 - DNA, 120 bp, Artificial Sequence
  ENSG00000167037_61 (sequence is synthesized)
aagatcagaaacccacttgggaggtctccaagcagggatttgaactcaggtctacctgattccagggcaggtttttttaccctgcactttcttgattcctttatatatcttattcattca

SEQ ID NO: 538916 - DNA, 120 bp, Artificial Sequence
  ENSG00000167037_62 (sequence is synthesized)
tacactgattcattcattcatccagtcatttagaaaatgttgattgagcatctgccctgtgccaggcactgttctaggctgtgcaaattcagcagtgaatgaggcaaatgaagtttctgc

SEQ ID NO: 538917 - DNA, 120 bp, Artificial Sequence
  ENSG00000167037_63 (sequence is synthesized)
ccttgtggaacttaaattctagaagagagagatagacggtcaacaaatcaacaaatagaatgggaatagtggtagactgggcgcggcggctcacgcatgtaatccaagcacttttggagg

SEQ ID NO: 538918 - DNA, 85 bp, Artificial Sequence
  ENSG00000167037_64 (sequence is synthesized)
gatcacttgaggtcaggagttcaagacaacatagtgaaaccccgtctgtactaaaaatagaaaagttagctagaaaggcagaggc

SEQ ID NO: 538919 - DNA, 120 bp, Artificial Sequence
  ENSG00000167037_65 (sequence is synthesized)
tgagaatagtggtgagtgccctacaggaactaaaacaggggatgggagtggggaggggtctgccttagacagtgtggtcaggaaaggagatgacgttttgtgagatgcctaagagaagca

SEQ ID NO: 538920 - DNA, 120 bp, Artificial Sequence
  ENSG00000167037_66 (sequence is synthesized)
gcagcctgctgtgtgaagaacctgaacgaataattgataaaatgagaagcatggagctgtgacaggcctcagacctccaaaagacaaggcgaggagggggaaggaaagcaggtgtcaaaa

SEQ ID NO: 538921 - DNA, 120 bp, Artificial Sequence
  ENSG00000167037_67 (sequence is synthesized)
catcccaaacagcctgaaaggccttgtggggagcaatgcagcccttttggggcacctatacccaggtcaccttggtcaccttggacctcttcccctccggtcacctttgccttccaggtg

SEQ ID NO: 538922 - DNA, 120 bp, Artificial Sequence
  ENSG00000167065_0 (sequence is synthesized)
gtcgcacatgcgcacagagcccgggcggctacggaagcggtgagactgtctctcggctgcagccctggtgcgacccggcccgttgccgtagagatgggcagggctggatggagtggggtg

SEQ ID NO: 538923 - DNA, 120 bp, Artificial Sequence
  ENSG00000167065_1 (sequence is synthesized)
cggtgagctgagctgaccctgcttcgccacggggactgcagtgaccccggcttgccggcagggcgggtaacaggttgagccagggtggggctgctcaggggcgtggagccgaggccagga

SEQ ID NO: 538924 - DNA, 120 bp, Artificial Sequence
  ENSG00000167065_2 (sequence is synthesized)
tttctctgaagacccggcacaggctattcctttctgcgacgagcccattgctatggaaaccaaagcgttaggccagcggggattgaggctgcgggatcatgacgggtctctctcccgaag

SEQ ID NO: 538925 - DNA, 120 bp, Artificial Sequence
  ENSG00000167065_3 (sequence is synthesized)
aaccttgcctaaggcttccccaagcggctacttcctgagcgaacccgcccacccgcctgaaggagagagttttccatggacacagcctagcagaaagacgcagccttcgtgcttcgctga

SEQ ID NO: 538926 - DNA, 120 bp, Artificial Sequence
  ENSG00000167065_4 (sequence is synthesized)
ctgctgaccactgacccaccgccttgatgacagcaccctcgtgtgccttcccagttcagttccggcagccctcagtcagcggcctctcgcagataaccaaaagcctgtatatcagcaatg

SEQ ID NO: 538927 - DNA, 120 bp, Artificial Sequence
  ENSG00000167065_5 (sequence is synthesized)
gtgtggccgccaacaacaagctcatgctgtctagcaaccagatcaccatggtcatcaatgtctcagtggaggtagtgaacaccttgtatgaggatatccagtacatgcaggtacctgtgg

SEQ ID NO: 538928 - DNA, 120 bp, Artificial Sequence
  ENSG00000167065_6 (sequence is synthesized)
ctgactcccctaactcacgtctctgtgacttctttgaccctattgctgaccatatccacagcgtggagatgaagcagggccgtactttgctgcactgtgctgctggtgtgagccgctcag

SEQ ID NO: 538929 - DNA, 120 bp, Artificial Sequence
  ENSG00000167065_7 (sequence is synthesized)
ctgccctgtgcctcgcctacctcatgaagtaccacgccatgtccctgctggacgcccacacgtggaccaagtcatgccggcccatcatccgacccaacagcggcttttgggagcagctca

SEQ ID NO: 538930 - DNA, 120 bp, Artificial Sequence
  ENSG00000167065_8 (sequence is synthesized)
tccactatgagttccaattgtttggcaagaacactgtgcacatggtcagttccccagtgggaatgatccctgacatctatgagaaggaagtccgtttgatgattccactgtgagccatcc

SEQ ID NO: 538931 - DNA, 120 bp, Artificial Sequence
  ENSG00000167065_9 (sequence is synthesized)
cacgagcccctgcattggagtcagaggtacagatctattgttgatcttacaccaagatccaaacttgaacattctacttttgttgatacagaaaaaaacagatgatgccttttatgagca

SEQ ID NO: 538932 - DNA, 120 bp, Artificial Sequence
  ENSG00000167065_10 (sequence is synthesized)
attttctgccctgtgagtgacactggccaggggataggttgaggcagatggtgcccagaagaaagagggcagcacccattgcacatggcaggcctggaatcctgcagccctccccaaaaa

SEQ ID NO: 538933 - DNA, 120 bp, Artificial Sequence
  ENSG00000167065_11 (sequence is synthesized)
cagattgacccaggaatgaatctgctacaattccacctcattctttcacacccagagccagagccttaagcatcatggtacctcttgcgcttcttacagtgagtgccaatctactagata

SEQ ID NO: 538934 - DNA, 120 bp, Artificial Sequence
  ENSG00000167065_12 (sequence is synthesized)
aatggccttcaggcagtgctccaggaatcctggggggtcccaggccacctctgcttccaccttcactataagtggcccagttctggttttctagattgtacttatgcataagatagtttt

SEQ ID NO: 538935 - DNA, 120 bp, Artificial Sequence
  ENSG00000167065_13 (sequence is synthesized)
taaagaaagcattccactgtgtaaatttttttttgtctttttttgaaactgtcctgctctgtcacccatcctagagtgcagtagtgtgatcatggctcactgtagccacaacctctcagg

SEQ ID NO: 538936 - DNA, 120 bp, Artificial Sequence
  ENSG00000167065_14 (sequence is synthesized)
ctcaagtgatcctcttaccttagcctcctgcgtggctgggactacagatgtttgccaccatgcccgcctcattttttttctttttttatagagatgagattttactatgtcgcccagact

SEQ ID NO: 538937 - DNA, 120 bp, Artificial Sequence
  ENSG00000167065_15 (sequence is synthesized)
tcaaactcctggcctcaagcaatcctcacgcctcagcctcccaaagtgttgatgagccactgtaccccgataccactgtataaaaaatttaaaaaaaattgtgagtgctattgtacatgg

SEQ ID NO: 538938 - DNA, 120 bp, Artificial Sequence
  ENSG00000167065_16 (sequence is synthesized)
atggcaaagtttcaaagagctcttggccatccctcaccaaactttggcaaaagatggtgttagtccccttctccagggcacatgagaaaaacaggcctaacatcaggtctcagcggttcc

SEQ ID NO: 538939 - DNA, 120 bp, Artificial Sequence
  ENSG00000167065_17 (sequence is synthesized)
tctcacaggccttggcttggaaggctggagcttcggaccaaggcccagccctgtcacctcctcttcatgtgatgtggacccctgggagcatcagtgtcctcatctgtccaatgacagccc

SEQ ID NO: 538940 - DNA, 120 bp, Artificial Sequence
  ENSG00000167065_18 (sequence is synthesized)
ttttctcacagagttattgtgaagattcaacaatttcttggcatagtgcctggcacatggtgtgtgcttagcgcaaatggcagctctcatcatgaatgatagactctttcaccctgctgg

SEQ ID NO: 538941 - DNA, 120 bp, Artificial Sequence
  ENSG00000167065_19 (sequence is synthesized)
tcccaggtcggcacacacatccccataatggcatttctcctttctgtgcacagcactttattgttacaaagtactcttccaaaaagttaccctgtgtgtaaaaaaaaaaaaaaaaaaaaa

SEQ ID NO: 538942 - DNA, 120 bp, Artificial Sequence
  ENSG00000167065_20 (sequence is synthesized)
ggcaccacccagattgataaactggctcgtctgatcttgtggcccccacccaggaactgactgggcactagaaaacagcttcaacatcctgtgatttcatccctgaccaatcagcactcc

SEQ ID NO: 538943 - DNA, 120 bp, Artificial Sequence
  ENSG00000167065_21 (sequence is synthesized)
gaccaatcagcactcctgtctcactggcttcccccaacccaccaagttgtccttaaaactctgctccctgaatggtcggggagactgatttcagtaatagtaaaactctggtctcctgca

SEQ ID NO: 538944 - DNA, 120 bp, Artificial Sequence
  ENSG00000167065_22 (sequence is synthesized)
cttcctgagcgaacccgcccacccgcctgaaggagagaggtaaaaccctgggggtcctgacactaagcaggcgaagaagcctattccaatgccagctcccctaggaaacctacccggccc

SEQ ID NO: 538945 - DNA, 120 bp, Artificial Sequence
  ENSG00000167065_23 (sequence is synthesized)
acccctagaagtgatgcttcgctctcgttaactcttggactttgttccatgtttataacttagtatttcacgaacgccccgcggtgtttgttcatttttcccacacataatggaccataa

SEQ ID NO: 538946 - DNA, 120 bp, Artificial Sequence
  ENSG00000167065_24 (sequence is synthesized)
aggtcggcttctttgctttatgactcgttctgaacaagtccttttccgcgctgtgtctcactttcctcttttgtaaaatggaaatattaactctagacgccggtctgattaggttgcttt

SEQ ID NO: 538947 - DNA, 120 bp, Artificial Sequence
  ENSG00000167065_25 (sequence is synthesized)
gaagatcgaaccagatgagggaagccaaatacttcataggctgtaaagtggtgaagctgaactgctaccgagttgctatttttttctcctcctccctctcaagctaaacgttctttagat

SEQ ID NO: 538948 - DNA, 120 bp, Artificial Sequence
  ENSG00000167065_26 (sequence is synthesized)
cttttgtgatttcttcaggtggtctttgcgactccctaggctccgacctggaagaaatcttttttacacttccctttcacagagccctgcattttaacttccctatcagaagcgagaaaa

SEQ ID NO: 538949 - DNA, 120 bp, Artificial Sequence
  ENSG00000167065_27 (sequence is synthesized)
ggtcagttccccagtgggaatgatccctgacatctatgagaaggaagtccgtttgatgattccactgtgagccatcccacgagcccctgcattggagtcagagattaaactaattgtgag

SEQ ID NO: 538950 - DNA, 120 bp, Artificial Sequence
  ENSG00000167065_28 (sequence is synthesized)
ggagcacagttccagcttcccccaatcacttctaaacagtgactgcagccttgtttagaatcactatgaaaacctgcaccccggctgactactgggatccataagggggccgtgtcaaag

SEQ ID NO: 538951 - DNA, 120 bp, Artificial Sequence
  ENSG00000167065_29 (sequence is synthesized)
ggactaactagtggactccatcagtaggccctggaattcaggattgttcacatcctcttggtgccaaggacctggctgaagaccagctcttctgatccagaggttttcagcaaacagcat

SEQ ID NO: 538952 - DNA, 120 bp, Artificial Sequence
  ENSG00000167065_30 (sequence is synthesized)
aacagcatttgaaacaaaagcacagctgctctgtttgacaccaaactgtggctccagattccagtagaagccaaatgctttttcttttaacagctgggtgcctgtaatcccagttacttg

SEQ ID NO: 538953 - DNA, 120 bp, Artificial Sequence
  ENSG00000167065_31 (sequence is synthesized)
acaaagttggctggaagtaccagacagtgacagccaccctggaggagaagaggaaggagaaggccaagatccactaccagaataagaaacagctcatgggatggccgggcgcggtggctc

SEQ ID NO: 538954 - DNA, 120 bp, Artificial Sequence
  ENSG00000167074_0 (sequence is synthesized)
gcagtagctgcccgtgtcggcagctgcagcgggtcgcacggctccggcccatctcggggggcgggcgggggaggcgaggtgcgcgagccgagtccggggcacgatgtccgacgcgggcgg

SEQ ID NO: 538955 - DNA, 120 bp, Artificial Sequence
  ENSG00000167074_1 (sequence is synthesized)
cggaaagaagccgcctgtggacccgcaggcaggacccggtccggggccggggcgcgcagctggggaaaggggcctgtcggggtccttccccctggtcctgaagaagctgatggagaaccc

SEQ ID NO: 538956 - DNA, 120 bp, Artificial Sequence
  ENSG00000167074_2 (sequence is synthesized)
cccgcgcgaggcgcgcctcgataaggaaaaggggaaggaaaagctggaggaggacgaggccgcagccgccagcaccatggctgtctcagcctccctcatgccacccatctgggacaagac

SEQ ID NO: 538957 - DNA, 120 bp, Artificial Sequence
  ENSG00000167074_3 (sequence is synthesized)
catcccatatgatggcgaatctttccacctggagtacatggacctggatgagttcctgctggagaatggcatccccgccagccccacccacctggcccacaacctgctgctgcctgtagc

SEQ ID NO: 538958 - DNA, 120 bp, Artificial Sequence
  ENSG00000167074_4 (sequence is synthesized)
agagctagaagggaaggagtctgccagctcttccacagcatccccaccatcctcctccactgccatctttcagccctctgaaaccgtgtccagcacagaatcttccctggagaaggagag

SEQ ID NO: 538959 - DNA, 120 bp, Artificial Sequence
  ENSG00000167074_5 (sequence is synthesized)
ggagactcccagtcccatcgaccccaattgtgtggaagtggatgtgaacttcaatccggaccccgccgacctggtgctctccagtgtgccaggcggggagctcttcaaccctcggaagca

SEQ ID NO: 538960 - DNA, 120 bp, Artificial Sequence
  ENSG00000167074_6 (sequence is synthesized)
caagtttgctgaggaggacctgaagccccagcctatgatcaaaaaggccaagaaggtctttgtccccgacgagcagaaggatgaaaagtactggacaagacgcaagaagaacaacgtggc

SEQ ID NO: 538961 - DNA, 120 bp, Artificial Sequence
  ENSG00000167074_7 (sequence is synthesized)
agctaaacggtcacgggatgcccggcgcctgaaagagaatcagatcaccatccgggcagccttcctggagaaggagaacacagccctgcggacggaggtggccgagctacgcaaggaggt

SEQ ID NO: 538962 - DNA, 120 bp, Artificial Sequence
  ENSG00000167074_8 (sequence is synthesized)
gggcaagtgcaagaccatcgtgtccaagtatgagaccaaatacgggcccttgtaacccgtgccccccgcccgggcggggtactgcctgcacctcagacctctgcctgggggctccctgta

SEQ ID NO: 538963 - DNA, 120 bp, Artificial Sequence
  ENSG00000167074_9 (sequence is synthesized)
acccctcacacgcgtggagacttatgactcgtcgtgggcgcatggcggcgcacctgctgcaggagcggccacgtctcagcttcattataccatggcctgcgcacgtggcgacgtccctga

SEQ ID NO: 538964 - DNA, 120 bp, Artificial Sequence
  ENSG00000167074_10 (sequence is synthesized)
ggggccagtctcctcactggtggggaacgcaagagaatctgcgtagatgggtgactcagccttagtttctattcttggatgtcccagttgaatcagaaggggacctctggagtacacacc

SEQ ID NO: 538965 - DNA, 120 bp, Artificial Sequence
  ENSG00000167074_11 (sequence is synthesized)
tctctcctgggcgctcagggtccctggactctccctcagtctccagcctgggctgccgagggctatctctgcagaatgagttgtgatcattgtcaccctatgtcttctcaggtagcaggg

SEQ ID NO: 538966 - DNA, 120 bp, Artificial Sequence
  ENSG00000167074_12 (sequence is synthesized)
cgcgtttccacttaaggtgtgtctgtcacgcacctcattctccccagacagtctttgagtaacatctgttcccatcttccttggaagcaggacacaccagctcctccgtcagtgtctgca

SEQ ID NO: 538967 - DNA, 120 bp, Artificial Sequence
  ENSG00000167074_13 (sequence is synthesized)
tgggtagcaggctgcaggagtggggtctctgcacagcctgggatggggcttggggctggggcctgcagcagaagtgtgcccagcgtttctcggctcccgcaccccttttcccttatggct

SEQ ID NO: 538968 - DNA, 120 bp, Artificial Sequence
  ENSG00000167074_14 (sequence is synthesized)
ctgaggccatcggctgtctctgcatttcattggctgtggaggagagactcctaggatggctgctgtctgagccatgagtgccagggctgagagaggcctcttcatttcctctccaggcta

SEQ ID NO: 538969 - DNA, 120 bp, Artificial Sequence
  ENSG00000167074_15 (sequence is synthesized)
ctcagaggccatgtgaagctcgtttgtcccactagaccaggcctctgggcctgctctttctttccacccaatgtccagtcttggatcatagatttaaaaggaaaacccctcttatctagg

SEQ ID NO: 538970 - DNA, 120 bp, Artificial Sequence
  ENSG00000167074_16 (sequence is synthesized)
aggctttaacttcctggaccccaggattcaccttcctagtggtgtttagaaaatgcctccacagcccccttccaccatgggcatgagagctggggtgtgtttcttgagaagctccctttt

SEQ ID NO: 538971 - DNA, 120 bp, Artificial Sequence
  ENSG00000167074_17 (sequence is synthesized)
ttcttgctctgctcaccggtgtggcctgggctggagtgcactctccctgggggcagctggggcctcgcaattcttgcttcaggatctctcccatgcgagctgcccggagggtgtcagcag

SEQ ID NO: 538972 - DNA, 120 bp, Artificial Sequence
  ENSG00000167074_18 (sequence is synthesized)
cttgggacttttacacaggcctagggtcccctcagtcttggtcccaggagatgggggccactcgtgaggctggccatgctgtggcttctcacagctgtggtctcccctgcctcacaacga

SEQ ID NO: 538973 - DNA, 120 bp, Artificial Sequence
  ENSG00000167074_19 (sequence is synthesized)
ctcctttctcttgtgtggcgggactcgcccttttgctgtgctcagaagattcactgaggaaactcatggaagcctctgctcatttgggtcactgggacacccctgagatgggtgtgttta

SEQ ID NO: 538974 - DNA, 120 bp, Artificial Sequence
  ENSG00000167074_20 (sequence is synthesized)
tttgctcagggcgggcagcctatggtgaagaggagacagaggcgatgggcgtgcttcgtcctccgtaacactggctttatttaccgtggtggttcagagtcccaggccctgacctctaaa

SEQ ID NO: 538975 - DNA, 120 bp, Artificial Sequence
  ENSG00000167074_21 (sequence is synthesized)
gacttttcataacagacgttaagaccaagccgtggacctcaccccaggggaatgccacggccctttggggacctgcacacccacctctccgggggacttgacaaggggccctgaggccaa

SEQ ID NO: 538976 - DNA, 120 bp, Artificial Sequence
  ENSG00000167074_22 (sequence is synthesized)
gggaggtcactcctccctccaggcccctgacttttactttgtggttctctaaaaaccatgtacacactttcactctattgtaaccacacagggcaggcgcatccagcatgtcagtgtcct

SEQ ID NO: 538977 - DNA, 120 bp, Artificial Sequence
  ENSG00000167074_23 (sequence is synthesized)
gccccgggcagctctccctcccgggcacgctccctctggcctggtggatcaccaagagggcggttctcattttgttattagtggaagagccttgagcttaaaagctcttcattttctttg

SEQ ID NO: 538978 - DNA, 120 bp, Artificial Sequence
  ENSG00000167074_24 (sequence is synthesized)
ccggaaagtatatggtttgtgtttttgcagttttatttttttaaggatggacactaaatctctggtgtccatgttccgagcccggtggctgggatggtggctcgatgtgtctcctcttta

SEQ ID NO: 538979 - DNA, 120 bp, Artificial Sequence
  ENSG00000167074_25 (sequence is synthesized)
tcccgccctctgcctgtttggtgccctcccttctttcccccaggcagtgggtatcgggttctttcccaaagtgcttacttggaaagagtgtggctgctggactcttttcgaaatgcccct

SEQ ID NO: 538980 - DNA, 120 bp, Artificial Sequence
  ENSG00000167074_26 (sequence is synthesized)
ctgagtcaggagcctggtggggacaagatggaggatgtccacagaggctgacctgtgggggaaaagaagtgctcaggtaaggttgtctcctctcctgtcctaaaaaaatccatgcttgca

SEQ ID NO: 538981 - DNA, 120 bp, Artificial Sequence
  ENSG00000167074_27 (sequence is synthesized)
ggagagggttggtgcctgctcagtttctgtcgagggaatgggagtctcctcggctccctcctgggccctctgcttcttggaggccgaccgctggagactgcggctcctgtgcttggatct

SEQ ID NO: 538982 - DNA, 120 bp, Artificial Sequence
  ENSG00000167074_28 (sequence is synthesized)
ttgacatctgtcagtcactggaggctagagaagttgactttaccttggctttctgtgggttcccgatgggcttggaagtgccgtctacttcctaagcatcctgtctaaagctttgtggca

SEQ ID NO: 538983 - DNA, 120 bp, Artificial Sequence
  ENSG00000167074_29 (sequence is synthesized)
ccctcagtgcaacctcagaacagacaaatcatgaatgagctggaactttgcaagaatattcatattataaatgtctcatctgatggaggaacgtgtgcatttagagagagggagagtttt

SEQ ID NO: 538984 - DNA, 120 bp, Artificial Sequence
  ENSG00000167074_30 (sequence is synthesized)
caaggtttatggcaactttgtggaggacctgggtaactcttacccttggccaaaggaagaggttttcctgtctggcttctgaggttggagggggcacttagcagtgaaccttaagtctgg

SEQ ID NO: 538985 - DNA, 120 bp, Artificial Sequence
  ENSG00000167074_31 (sequence is synthesized)
gtacatgtaaccctgctgaggggctgtgcaggccgctcctacggtcctttggcctgaggcagggcgggaggcatgcaagccagtgggggaaaacccctctgaagctgggcagccctctac

SEQ ID NO: 538986 - DNA, 120 bp, Artificial Sequence
  ENSG00000167074_32 (sequence is synthesized)
ctgggccccgggagccgtgctccttggaacgcaaagggccgaggagcatctggttttcatggcaaagctctactccagagctcctttaacatctgctaattaagtgcaataaatttttct

SEQ ID NO: 538987 - DNA, 120 bp, Artificial Sequence
  ENSG00000167074_33 (sequence is synthesized)
agaaaatggcaaagatgacttccaggtggatattgctctcttacggtgttggggatgccagaacaccacttggttttatttttctaagtgcatgtgatgtgatagagtgtgtggggctct

SEQ ID NO: 538988 - DNA, 120 bp, Artificial Sequence
  ENSG00000167074_34 (sequence is synthesized)
gtgtccttccctgggagctggcattccagcgggcccctctctttacctttgttgggggaaggaggcaagagagaaattccttcttcccagccagagagggcagaagcagaccgtagccca

SEQ ID NO: 538989 - DNA, 120 bp, Artificial Sequence
  ENSG00000167074_35 (sequence is synthesized)
ttggccttatgtgcgtgtgtgcgtgcgagtgtgtcactgctggtgggccggagtgatgtggtgggagggaagccgggaatgtatccttttcagacaaaattaaatattttgaaatgagaa

SEQ ID NO: 538990 - DNA, 120 bp, Artificial Sequence
  ENSG00000167074_36 (sequence is synthesized)
agctggcaggtggccgagccgggggtggacgggcgggctgggactggtgctggccattggctgcctcaaggctcccaccccgcctgcctccctagcctgcggctggcggcccctgcctct

SEQ ID NO: 538991 - DNA, 120 bp, Artificial Sequence
  ENSG00000167074_37 (sequence is synthesized)
ccagctgcctctgaactccctggagcaagcacctcctgctgggctgtgtgagctgcgactggttctcagtggcccctgccatggacatgcctgaggtcctcaagtccctgctggagcact

SEQ ID NO: 538992 - DNA, 120 bp, Artificial Sequence
  ENSG00000167077_0 (sequence is synthesized)
gaaagagtgccgcctcagctgagggcaagcgaggagatggctgtgaggcaggcggcgacggcgggcactcccgggcccaggagagaggaagaggcggcgcttctattcgagagggcccat

SEQ ID NO: 538993 - DNA, 120 bp, Artificial Sequence
  ENSG00000167077_1 (sequence is synthesized)
taccggcacgacccgcgctggctgctgcccgtgaccccccgcctgtgcctggcctgcgcgctggagctgctgccggaccccggcgtgtcgttagtgcgcaagaagcacatgttgtcctgc

SEQ ID NO: 538994 - DNA, 120 bp, Artificial Sequence
  ENSG00000167077_2 (sequence is synthesized)
ttccaagatgcccttgtgaggcatacctccctggtcacgcaactggtgtctcaggatcagagagtctgcatccacttcataagtgtgctttttggactattatgcagcatggaagatggg

SEQ ID NO: 538995 - DNA, 120 bp, Artificial Sequence
  ENSG00000167077_3 (sequence is synthesized)
agtgtgacagacctctgtattgaagtccttattcagatcacaacgcagctgaagctggagcagactatccgttgcctgctggatgagtgccacaaagagctgtgtaacatgccctccatg

SEQ ID NO: 538996 - DNA, 120 bp, Artificial Sequence
  ENSG00000167077_4 (sequence is synthesized)
cgaggcagcctggccaccctgacccttcttggcaagttggtggatgccatccctgctctggcagacgagcttgtaatggagcatggcaacctgatggagcatctgttgagaggcttagta

SEQ ID NO: 538997 - DNA, 120 bp, Artificial Sequence
  ENSG00000167077_5 (sequence is synthesized)
taccccagtgagggcatacaagcttctgtctgttacctttatgggaagctatactcctcaccagtggcagctgagatgctttcaggacacttccgtgagaagctttttcccctcttcctt

SEQ ID NO: 538998 - DNA, 120 bp, Artificial Sequence
  ENSG00000167077_6 (sequence is synthesized)
tccatcctggatggtgcccagacaaaggagctgcagattaactgcttgggtttgctgaggcagctgttgaagtatgatctctttgtgtccatgatcatgaaccaggatggactgggagaa

SEQ ID NO: 538999 - DNA, 120 bp, Artificial Sequence
  ENSG00000167077_7 (sequence is synthesized)
agtgctaagaatatcgaagggtcatcaggaaatacctcactgcctttggtgctcaaaaagcttctcctctctagagatgaaaccctgcaggtggccagtgctcactgtataactgcggtg

SEQ ID NO: 539000 - DNA, 120 bp, Artificial Sequence
  ENSG00000167077_8 (sequence is synthesized)
cttgtccactccccagcaaagcatgcgtcagccttcatccacgctgacatcccagagttcctctttgagcatctttcttcttccagtgaagtgctcgtctggtccagctgtaactgcttg

SEQ ID NO: 539001 - DNA, 120 bp, Artificial Sequence
  ENSG00000167077_9 (sequence is synthesized)
acactcctggtagaagagccactctttttttccaagtgccacacggtgtatgggatcgaggcagtggtgaggagcctgcagggaagcctgaagatgaacaacatagagctgcacaagcag

SEQ ID NO: 539002 - DNA, 120 bp, Artificial Sequence
  ENSG00000167077_10 (sequence is synthesized)
ggcctgctgcttttcgctgaaatcctgacccggcagccagaggagatcaagctgttcacaagctcagccatgtgcagagatgctggccgtgccctccaagaagcagttagcagccctgtg

SEQ ID NO: 539003 - DNA, 120 bp, Artificial Sequence
  ENSG00000167077_11 (sequence is synthesized)
ctggaggtggctgctgaggccttgaaggccacttctgcttttctgaggaaggaccatcagagcactccacctgtgcagtatggggaactgcaggctttgctagaagccatgctaaaccga

SEQ ID NO: 539004 - DNA, 120 bp, Artificial Sequence
  ENSG00000167077_12 (sequence is synthesized)
tgtgcggagttttcccagaccttgctgagcaggaggcccctgggccatgcctccagtagagattcagagaaggccattcttcaaaggggaaagttcctcctcagcactctggagggattt

SEQ ID NO: 539005 - DNA, 120 bp, Artificial Sequence
  ENSG00000167077_13 (sequence is synthesized)
agaagtgcctgcaggttggctatagaattccagagtgagccttcagcccaggagaatccattcacagctcccagcgccaagaaggaagacaccttggaggccttctcagaatttcttctc

SEQ ID NO: 539006 - DNA, 120 bp, Artificial Sequence
  ENSG00000167077_14 (sequence is synthesized)
agtgcctgtgactcgctgtgtatccccatggtgatgagacacttggagcagaccacccacccagctttgatggaagttttcctctcaattctacataacctctttgtcatcgttccccac

SEQ ID NO: 539007 - DNA, 120 bp, Artificial Sequence
  ENSG00000167077_15 (sequence is synthesized)
atgaaggagaagttttccaagaagcttgcttcctcatccttcatacgactgaccctggagctgaaggccaggttttgcagtggtctgagtcactcagccctaaaccaggtgtgttccaat

SEQ ID NO: 539008 - DNA, 120 bp, Artificial Sequence
  ENSG00000167077_16 (sequence is synthesized)
ttccaaagaagaactctctgcagtgtctgagctcctgcagcatgggctgccccagataagcagcaggagccctgaaagccttgccttcctgtctgatcgccagtacatggagggagctgc

SEQ ID NO: 539009 - DNA, 120 bp, Artificial Sequence
  ENSG00000167077_17 (sequence is synthesized)
tcgccagagacagtactgcatcctgctcctcttctacttggcctacatccatgaagacaggtttgtctcagaggcagagttatttgaggctgtgcaaagcttcctcctgtcgctgcagga

SEQ ID NO: 539010 - DNA, 120 bp, Artificial Sequence
  ENSG00000167077_18 (sequence is synthesized)
ccagggcgagcgccccccactggtggtcttcaaagcctccatctatctgcttgcaatctgccaggacaaagacaatacactacgtgagactatggtcagtgcaatcagaaaattcctaga

SEQ ID NO: 539011 - DNA, 120 bp, Artificial Sequence
  ENSG00000167077_19 (sequence is synthesized)
aggcatcccagacctgcagctagtctatactcaccatccgctcctgctcaggttctttctgttgtatccagagctcatgagtaggtatgggcaccgtgtcctggaactttggttcttctg

SEQ ID NO: 539012 - DNA, 120 bp, Artificial Sequence
  ENSG00000167077_20 (sequence is synthesized)
ggaagagagcagctatgaggaactggatgatgtcacctctgctgggcagcccgcccttcctgccagcttagtagtcctgttccagttgctcagaagcatccccagcatcctgctcatctt

SEQ ID NO: 539013 - DNA, 120 bp, Artificial Sequence
  ENSG00000167077_21 (sequence is synthesized)
gctggacctcatctattccagcccagtggacacagctcacaaggtactgattagcctgaggaccttcctgaggaggaatgaggatatccaagtgggcggtcttatccgaggccacttcct

SEQ ID NO: 539014 - DNA, 120 bp, Artificial Sequence
  ENSG00000167077_22 (sequence is synthesized)
gctgatcctgcagcgtctgctagtggagcatggggcatccccatcaggagcctcggggaacctaccattgctgctgagcctcctctccctgatgcagctcaggaatgtgtcagagcaaga

SEQ ID NO: 539015 - DNA, 120 bp, Artificial Sequence
  ENSG00000167077_23 (sequence is synthesized)
actggacagcgtggccatgaagctccttcaccaagtaagcaagctgtgtgggaagtgcagccccactgacgtggacatcctgcagccctccttcaacttcctgtattggagccttcatca

SEQ ID NO: 539016 - DNA, 120 bp, Artificial Sequence
  ENSG00000167077_24 (sequence is synthesized)
gaccacacccagcagtcagaaaagagctgctgcagtgctcctgagcagcacaggcctgatggagcttctggagaagatgctggccctcaccttggcaaaggcagattctcccaggactgc

SEQ ID NO: 539017 - DNA, 120 bp, Artificial Sequence
  ENSG00000167077_25 (sequence is synthesized)
actcctctgctctgcctggctgctcactgcctccttctctgcccagcagcacaagggcagtttgcaggttcaccagacactctctgtggaaatggaccaagtattgaaggctctcagctt

SEQ ID NO: 539018 - DNA, 120 bp, Artificial Sequence
  ENSG00000167077_26 (sequence is synthesized)
tccaaagaaaaaggctgcactactctcagctgccatcttatgcttcctgcggacagccctgcgacaaagcttttcctctgccctggtagccctggtgccctcaggggcccagccactgcc

SEQ ID NO: 539019 - DNA, 120 bp, Artificial Sequence
  ENSG00000167077_27 (sequence is synthesized)
agccaccaaggacactgtcctagctccactgcgaatgtcgcaagtccggtccctggtcattgggctgcagaacctcctggtgcagaaggaccctctattgtcccaggcctgtgttggctg

SEQ ID NO: 539020 - DNA, 120 bp, Artificial Sequence
  ENSG00000167077_28 (sequence is synthesized)
cctggaggccttgcttgactacctggatgcccggagcccagacattgctctccacgtggcctcccagccttggaatcggtttttgctgtttaccctcttggatgctggagagaattcctt

SEQ ID NO: 539021 - DNA, 120 bp, Artificial Sequence
  ENSG00000167077_29 (sequence is synthesized)
cctcagacctgagattttgaggctcatgaccctgtttatgcggtaccggagtagcagtgtcctctctcatgaagaggtgggtgatgttctgcaaggtgtggctttggctgacctgtctac

SEQ ID NO: 539022 - DNA, 120 bp, Artificial Sequence
  ENSG00000167077_30 (sequence is synthesized)
cctctcgaacaccacactccaggccctgcatggcttcttccagcagctccagagcatgggacacctggctgaccacagcatggcccagaccctgcaggcctccttggagggccttccccc

SEQ ID NO: 539023 - DNA, 120 bp, Artificial Sequence
  ENSG00000167077_31 (sequence is synthesized)
tagcacctcctcaggccagccacccctgcaggacatgctctgcctgggaggggtggctgtatccctgtcccacatcagaaactgatcctcaggacttgaaggcccagaagtggagagaga

SEQ ID NO: 539024 - DNA, 120 bp, Artificial Sequence
  ENSG00000167077_32 (sequence is synthesized)
atgagacctggagacaaagggcataattgttggggaaatggatgacagctgaagctattcatatggagccatatactctattgttgaaatagaataaggaaataaaatgatacactcaca

SEQ ID NO: 539025 - DNA, 87 bp, Artificial Sequence
  ENSG00000167077_33 (sequence is synthesized)
aggctggagtgcaatggcacaatcttggatcacggcaacctctgcctctgcctcccaggttcaagcactagaggcgactgccagcac

SEQ ID NO: 539026 - DNA, 120 bp, Artificial Sequence
  ENSG00000167077_34 (sequence is synthesized)
acttattataccacatctagatttttagagtaggcacattcagtcattcattttatattcctagtttatgccaggcaccaggctgggacctggagatttagagataacaaataacattgg

SEQ ID NO: 539027 - DNA, 120 bp, Artificial Sequence
  ENSG00000167077_35 (sequence is synthesized)
ttcttgccctcagaaaagggagagagatgcaaagggaaatttcattatgagctgattagagctctgctagagggaagcacaggagctgtgggggctcaggggaggttcacagctctgaat

SEQ ID NO: 539028 - DNA, 120 bp, Artificial Sequence
  ENSG00000167077_36 (sequence is synthesized)
ggatcagggaaggctttttggaggagtggggttttgacctgattctccaaggaggaacaggagtatgccaagtggagaaaatatggcttggtcagtaggtgttcactgaaaacctcaagt

SEQ ID NO: 539029 - DNA, 120 bp, Artificial Sequence
  ENSG00000167077_37 (sequence is synthesized)
gccagggactgtgctatggcttgtactgggtgttggggagatgaatcagatgagggcccggcctcaaagatctcacagtctggtcccattagctcaatcttgtcagggtccctccacgag

SEQ ID NO: 539030 - DNA, 120 bp, Artificial Sequence
  ENSG00000167077_38 (sequence is synthesized)
tggcctccaactcatacatgctgtccagagcctgtcacctcttctgggtgggcagtgaaggaacaagagagcactgatccctggcctctgtcatgtcatcctgtggtagggatcgaggca

SEQ ID NO: 539031 - DNA, 120 bp, Artificial Sequence
  ENSG00000167077_39 (sequence is synthesized)
acagcgtggccatgaagctccttcaccaaggtgccctggctgcttgggatagcgcccaagggcccagggctggacgtgcagtgggtgctcactaataagcaagctgtgtgggaagtgcag

SEQ ID NO: 539032 - DNA, 120 bp, Artificial Sequence
  ENSG00000167077_40 (sequence is synthesized)
acattatctgatgttcccatgagagagattagagggagcaacacccttccaccctcctgctccagccttccattcccttgtgtgactcatacttgttttgtttaattcttttagcagcac

SEQ ID NO: 539033 - DNA, 120 bp, Artificial Sequence
  ENSG00000167077_41 (sequence is synthesized)
tgcaagggcagtcatgcccattatacagatgggatcaataaggttcagataggtcaaatgatgtgcccaaccaaggtcacaatgctcttaagtggcagagcccttcttactgcctgcctt

SEQ ID NO: 539034 - DNA, 120 bp, Artificial Sequence
  ENSG00000167077_42 (sequence is synthesized)
ccacaatcatggcgtatatagtttcaccgagccagtcaacataagtggattagaagcccagggaagaaagaaccctccttgggtcagcttgttcagtgccctgtctctaactgggtagcc

SEQ ID NO: 539035 - DNA, 120 bp, Artificial Sequence
  ENSG00000167077_43 (sequence is synthesized)
cctttttaagccaataggagaaggtcctcttgagcaatgtcccaaggcaaggtcttggaagcattaacaacccagtgtttcttgaagctctccacgtggcctcccagccttggaatcggt

SEQ ID NO: 539036 - DNA, 120 bp, Artificial Sequence
  ENSG00000167077_44 (sequence is synthesized)
gtattggagccttcatcagaccacacccagcagtcagaaaagaggtgcaggggcccgggctgggacagtgaagagtgctgggcagtctgtggtcctctgtatctcaactttttcatctta

SEQ ID NO: 539037 - DNA, 120 bp, Artificial Sequence
  ENSG00000167077_45 (sequence is synthesized)
aaaaaacaaatagggttgtgtgtgtggctggtggtcataaggtcctttctggctctaataacctgagcttctgttatgaagctgggacccttagagcctcaggatgatcctctgtttgtt

SEQ ID NO: 539038 - DNA, 120 bp, Artificial Sequence
  ENSG00000167077_46 (sequence is synthesized)
agcctcccaaagtgctagaattacaggcataagccactgtgcccagccccatatttacttttcatagccaccttaagacctcctctgccacggccatggctagaatttcactagcctctg

SEQ ID NO: 539039 - DNA, 120 bp, Artificial Sequence
  ENSG00000167077_47 (sequence is synthesized)
gtggtggagtacattttgaaccaagtctgtgtaactctgaaaccagagctttttgataccacccaggcttgggactctctgtgacaagtctggtttaaactgctctctgctttattccca

SEQ ID NO: 539040 - DNA, 120 bp, Artificial Sequence
  ENSG00000167077_48 (sequence is synthesized)
gagttctggacagcagagactacagattgggtcatagttttgcccagagccttcccactgatccatatggtggggtcctcacgttcctcttcctccagcattcaccatagccacacaaag

SEQ ID NO: 539041 - DNA, 120 bp, Artificial Sequence
  ENSG00000167077_49 (sequence is synthesized)
ctgagtagccccttccttttatacctttaacattcattaactcagacttctgagggaccacctctgtggcagtggggcagtgatgtgttggtgaaggcacaagaccaggaaactggtttg

SEQ ID NO: 539042 - DNA, 120 bp, Artificial Sequence
  ENSG00000167080_0 (sequence is synthesized)
ataggtggctgcagaggcgaggtgacggcgcgtgcggaacgaactctgcacccccaggaatggggagcgctggcttttccgtgggaaaattccacgtggaagtggcctctcgcggccggg

SEQ ID NO: 539043 - DNA, 120 bp, Artificial Sequence
  ENSG00000167080_1 (sequence is synthesized)
aatgtgtctcggggacgcccgagtgtgggaatcggctcgggagtgcgggcttcggggctctctgcttggaactcagaggcgctgacccagcctggggcccgtttgctgcccacgggagga

SEQ ID NO: 539044 - DNA, 120 bp, Artificial Sequence
  ENSG00000167080_2 (sequence is synthesized)
gccgccgtcagggctcgagatttctgtggctcctcaagatattggtcataatcctggtacttggcattgttggatttatgttcggaagcatgttccttcaagcagtgttcagcagcccca

SEQ ID NO: 539045 - DNA, 120 bp, Artificial Sequence
  ENSG00000167080_3 (sequence is synthesized)
agccagaactcccaagtcctgccccgggtgtccagaagctgaagcttctgcctgaggaacgtctcaggaacctcttttcctacgatggaatctggctgttcccgaaaaatcagtgcaaat

SEQ ID NO: 539046 - DNA, 120 bp, Artificial Sequence
  ENSG00000167080_4 (sequence is synthesized)
gtgaagccaacaaagagcagggaggttacaactttcaggatgcctatggccagagcgacctcccagcggtgaaagcgaggagacaggctgaatttgaacactttcagaggagagaagggc

SEQ ID NO: 539047 - DNA, 120 bp, Artificial Sequence
  ENSG00000167080_5 (sequence is synthesized)
tgccccgcccactgcccctgctggtccagcccaacctcccctttgggtacccagtccacggagtggaggtgatgcccctgcacacggttcccatcccaggcctccagtttgaaggacccg

SEQ ID NO: 539048 - DNA, 120 bp, Artificial Sequence
  ENSG00000167080_6 (sequence is synthesized)
atgcccccgtctatgaggtcaccctgacagcttctctggggacactgaacacccttgctgatgtcccagacagtgtggtgcagggcagaggccagaagcagctgatcatttctaccagtg

SEQ ID NO: 539049 - DNA, 120 bp, Artificial Sequence
  ENSG00000167080_7 (sequence is synthesized)
caagtttccagtgaccatccgccatcctgtcatacccaagctatacgaccctggaccagagaggaagctcagaaacctggttaccattgctaccaagactttcctccgcccccacaagct

SEQ ID NO: 539050 - DNA, 120 bp, Artificial Sequence
  ENSG00000167080_8 (sequence is synthesized)
catgatcatgctccggagtattcgagagtattacccagacttgaccgtaatagtggctgatgacagccagaagcccctggaaattaaagacaatcacgtggagtattacactatgccctt

SEQ ID NO: 539051 - DNA, 120 bp, Artificial Sequence
  ENSG00000167080_9 (sequence is synthesized)
tgggaagggttggtttgctggtaggaacctggccatatctcaggtcaccaccaaatacgttctctgggtggacgatgattttctcttcaacgaggagaccaagattgaggtgctggtgga

SEQ ID NO: 539052 - DNA, 120 bp, Artificial Sequence
  ENSG00000167080_10 (sequence is synthesized)
tgtcctggagaaaacagaactggacgtggtaggcggcagtgtgctgggaaatgtgttccagtttaagttgttgctggaacagagtgagaatggggcctgccttcacaagaggatgggatt

SEQ ID NO: 539053 - DNA, 120 bp, Artificial Sequence
  ENSG00000167080_11 (sequence is synthesized)
tttccaacccctggatggcttccccagctgcgtggtgaccagtggcgtggtcaacttcttcctggcccacacggagcgactccaaagagttggctttgatccccgcctgcaacgagtggc

SEQ ID NO: 539054 - DNA, 120 bp, Artificial Sequence
  ENSG00000167080_12 (sequence is synthesized)
tcactcagaattcttcattgatgggctagggaccctactcgtggggtcatgcccagaagtgattataggtcaccagtctcggtctccagtggtggactcagaactggctgccctagagaa

SEQ ID NO: 539055 - DNA, 120 bp, Artificial Sequence
  ENSG00000167080_13 (sequence is synthesized)
gacctacaatacataccggtccaacaccctcacccgggtccagttcaagctggccctccactacttcaagaaccatctccaatgtgccgcataaaggtgtgagggcataggagaaacact

SEQ ID NO: 539056 - DNA, 120 bp, Artificial Sequence
  ENSG00000167080_14 (sequence is synthesized)
aggctggctggttatggtatctatagcaggccaccaaaaactggactcctgataggtgaacgttgtaccaaaccagctggtgggtagggaaaagggaaatggctcagttactggaagtac

SEQ ID NO: 539057 - DNA, 120 bp, Artificial Sequence
  ENSG00000167080_15 (sequence is synthesized)
ttgcatgggcagtatctcacatcatctcatctgatatcacacaaagatgacattggttggtgtcctcagtcaaaagaacagctgcctggtccttgatagttgtttggtggaaattctgtc

SEQ ID NO: 539058 - DNA, 120 bp, Artificial Sequence
  ENSG00000167080_16 (sequence is synthesized)
acagtcagaagcatcggatccagcatcactgtcatccctatatttttattaggttctatcttgtagactcaaaaaatgtgaacattccagggtccttgccttgaggaggtttgcagcctg

SEQ ID NO: 539059 - DNA, 120 bp, Artificial Sequence
  ENSG00000167080_17 (sequence is synthesized)
gttcagttcagtccaatcacagaattaggcagccggggtcagaggatcagagaagggaaggggtcaccaggtcccaggtggtggaggaagactccgtggagtgaacttgttaggagcctg

SEQ ID NO: 539060 - DNA, 120 bp, Artificial Sequence
  ENSG00000167080_18 (sequence is synthesized)
aaagcagacattcaggcatcagagagggtaggagggccctggggccatcccactgtccaccagaacaaaggctgccctggcatcagactcactccagacctgttccagaatgccagggat

SEQ ID NO: 539061 - DNA, 120 bp, Artificial Sequence
  ENSG00000167080_19 (sequence is synthesized)
tgaactcagagcccatgccaaggcatgatggtgaacagacagtgtgagtgtggtgacaagccactaaactccagggacctgaggccagttgctggtcactcaaaactcatgtcatttaca

SEQ ID NO: 539062 - DNA, 120 bp, Artificial Sequence
  ENSG00000167080_20 (sequence is synthesized)
atgtcatttacagagtggttccatcactctgttgttggataagcctctttctgttgcctgggggttggcagattgccgagaccagcttggtcatggagaccctaacccagtggtgctaga

SEQ ID NO: 539063 - DNA, 79 bp, Artificial Sequence
  ENSG00000167080_21 (sequence is synthesized)
gtgctagaggaattaaagacacacacatacttcagagctgagagccctgaacggagtttgacccacatatttattgaca

SEQ ID NO: 539064 - DNA, 65 bp, Artificial Sequence
  ENSG00000167080_22 (sequence is synthesized)
ggaaacaaagggatgggcgcacagatagctcatactattatttgtggcttaggaatgctttaagc

SEQ ID NO: 539065 - DNA, 72 bp, Artificial Sequence
  ENSG00000167080_23 (sequence is synthesized)
gttatctgcagcaggaacatgtccttaaagcacagatagctcatactattatttgtggcttaggaatattct

SEQ ID NO: 539066 - DNA, 69 bp, Artificial Sequence
  ENSG00000167080_24 (sequence is synthesized)
gttcccctttttgttttccaaagtgataaaagcaaaggcagctttgtcatggtgagctaattctcacag

SEQ ID NO: 539067 - DNA, 120 bp, Artificial Sequence
  ENSG00000167080_25 (sequence is synthesized)
ccaacacgttcccctttttgttttccaaagtgataaaagcaaaggcagctttgtcatggtgagctaattctcacaggagtcaggatccgcacctgcagactatacaaagacaaacaacac

SEQ ID NO: 539068 - DNA, 64 bp, Artificial Sequence
  ENSG00000167080_26 (sequence is synthesized)
attgaaatcacagagcttccaagtgtctttatccactttaatgggttaatagtgtgcctgggat

SEQ ID NO: 539069 - DNA, 120 bp, Artificial Sequence
  ENSG00000167080_27 (sequence is synthesized)
atcatttgaggttgaggtgccactataccgccacgtttccagataatgggaactcttgctgtatttcttaccatttctaccatctgactgttttgtttagaccagctgaacatagtgtgg

SEQ ID NO: 539070 - DNA, 85 bp, Artificial Sequence
  ENSG00000167080_28 (sequence is synthesized)
gtatttcttaccatttctaccatctgactgttttgtttagaccagctgaacatagtgtggctgtggcacacagactgagaggtgt

SEQ ID NO: 539071 - DNA, 89 bp, Artificial Sequence
  ENSG00000167080_29 (sequence is synthesized)
attcattatttctggccaggtctaattctatttacaaataggttttgagctgcctttgctttgcctcaattataggagcagatttatta

SEQ ID NO: 539072 - DNA, 62 bp, Artificial Sequence
  ENSG00000167080_30 (sequence is synthesized)
ttataggagcagatttattatggtaaatattaagagcagaaagcatgtgtaactgtgtcaca

SEQ ID NO: 539073 - DNA, 82 bp, Artificial Sequence
  ENSG00000167080_31 (sequence is synthesized)
ctctgtgttgttctatcatatctatcattaaattactcattgtgactggttgtcccactttcctcaggttttcttccaccat

SEQ ID NO: 539074 - DNA, 76 bp, Artificial Sequence
  ENSG00000167080_32 (sequence is synthesized)
ttgctcatgaaggggatcctcgggatcctcctggaatctcttcctcagcatctggctcgtggcaaggtttcaggtg

SEQ ID NO: 539075 - DNA, 120 bp, Artificial Sequence
  ENSG00000167080_33 (sequence is synthesized)
tcctcgggatcctcctggaatctcttcctcagcatctggctcgtggcaaggtttcaggtgtcttgatggcacccaaattggctattgattcggtcctggagaaacacaagcataacctct

SEQ ID NO: 539076 - DNA, 62 bp, Artificial Sequence
  ENSG00000167080_34 (sequence is synthesized)
ctttaagcaggctcaaaaaatttaaagtcaataatgctagaatcaattgcatatggggtgtc

SEQ ID NO: 539077 - DNA, 120 bp, Artificial Sequence
  ENSG00000167080_35 (sequence is synthesized)
gctagaatcaattgcatatggggtgtcccgtagtccctgcttctccccttttgcttttgcaactgctgtttcagggagagattcattctttctactatggcttgtccttgagaattatat

SEQ ID NO: 539078 - DNA, 86 bp, Artificial Sequence
  ENSG00000167080_36 (sequence is synthesized)
atagctttagcttctttccaggtaatgccgtatctgtgtttgagaccagaggcattaacataggttaaattgtgaaagtgtctagc

SEQ ID NO: 539079 - DNA, 120 bp, Artificial Sequence
  ENSG00000167080_37 (sequence is synthesized)
gagccctaatgtgagtgatgtaaaaaggatgcattctactcctgactgctgtttgcaattgggtaaataaagccatcagttgctcatctgtgtggaatcgtagttgagcattttcaatta

SEQ ID NO: 539080 - DNA, 120 bp, Artificial Sequence
  ENSG00000167080_38 (sequence is synthesized)
cattttcaattaattgtgtggaatgaatcatgtatgaagaatcagaaatcacattgataggcctattaaaagcagtcaatacctcaattacagctataagctctgctttttgaactgaag

SEQ ID NO: 539081 - DNA, 120 bp, Artificial Sequence
  ENSG00000167080_39 (sequence is synthesized)
aaagcagtcaatacctcaattacagctataagctctgctttttgaactgaagtatagggcatctgaagcccttacttttcaagccagagttagaagctttaccattactagacccatctg

SEQ ID NO: 539082 - DNA, 120 bp, Artificial Sequence
  ENSG00000167080_40 (sequence is synthesized)
caattagttaatttcaaaaattgaaacaattttgttttgggaaaatgattatcaagaatacccacaaagtcagctaaatgggtttgccaggtaagactatttataaaagcttgctctatt

SEQ ID NO: 539083 - DNA, 120 bp, Artificial Sequence
  ENSG00000167080_41 (sequence is synthesized)
aaaagcttgctctatttgtgccttcatgagaaggacaataatttttccaggaccatatccatgtaatttaacaatctgagttctcccatttcctatcatagtagcgatttgatccaaata

SEQ ID NO: 539084 - DNA, 120 bp, Artificial Sequence
  ENSG00000167080_42 (sequence is synthesized)
aataaggagttagagtccgtgaattagtatgtggaagaaaaagccgctctacaagatcttgctcttgaacaataacaccagtaggtgaatgccgagttgaaaaaattagcaaatctagag

SEQ ID NO: 539085 - DNA, 120 bp, Artificial Sequence
  ENSG00000167080_43 (sequence is synthesized)
ttctggatctattatatttatttgagctttatggacttgctttttgatgagctgcagctctgcatcagcttcttttgttaattgccgagggctatgagactagcatctcctctaaggtta

SEQ ID NO: 539086 - DNA, 120 bp, Artificial Sequence
  ENSG00000167080_44 (sequence is synthesized)
gaaaatggcataggtaggaatgcctagagtaggtcatatccaattaatgtcccctggtaatttttgaaagtcatttaatgttttcagttgatccctacatatggttactttctgtggcac

SEQ ID NO: 539087 - DNA, 87 bp, Artificial Sequence
  ENSG00000167080_45 (sequence is synthesized)
ttttcagttgatccctacatatggttactttctgtggcacaatgatagtgtcatttactgaagtctccaagtaggagtaaggagtag

SEQ ID NO: 539088 - DNA, 79 bp, Artificial Sequence
  ENSG00000167080_46 (sequence is synthesized)
attggagtaatatttctcgagtggggggcagcacaaagtatatcgagtaggttcaattgtttgccctacataagtctgg

SEQ ID NO: 539089 - DNA, 71 bp, Artificial Sequence
  ENSG00000167080_47 (sequence is synthesized)
aatctatgactattaaaggccaattctttggaatcatagcaggagaaggcagtcctggctgcaatgtctcc

SEQ ID NO: 539090 - DNA, 77 bp, Artificial Sequence
  ENSG00000167080_48 (sequence is synthesized)
tctccatgtacctgattttttcttaattataaaaactggagagttccaaggggaaaatgttggagctatgtgtcctt

SEQ ID NO: 539091 - DNA, 86 bp, Artificial Sequence
  ENSG00000167080_49 (sequence is synthesized)
taattgttcagtaactaagtcctctgagcctccagtttctctttacttagcagtcattgttctatccaaattggctcagcttaaca

SEQ ID NO: 539092 - DNA, 120 bp, Artificial Sequence
  ENSG00000167080_50 (sequence is synthesized)
taggttctggaagcttaacaatggctgccatcaaaaatgatatcctaaaccttggcaggaactttgtctttccgcttgaagtggttccttcaaatcttgcaaattttttcctagtcccat

SEQ ID NO: 539093 - DNA, 120 bp, Artificial Sequence
  ENSG00000167080_51 (sequence is synthesized)
tgagggctatacaattgctctagaattagaacttgtgctatccattgttgtaacaaatctctttcccataaatgtataggtacagaagttataattggttgaatagtcccatgttgtcca

SEQ ID NO: 539094 - DNA, 67 bp, Artificial Sequence
  ENSG00000167080_52 (sequence is synthesized)
tacagaagttataattggttgaatagtcccatgttgtccatcgggcccctcacaatgcaaaatataa

SEQ ID NO: 539095 - DNA, 64 bp, Artificial Sequence
  ENSG00000167080_53 (sequence is synthesized)
acccaataagctgctttgtcttgtttatttgtgcttccaaattctcctattcgtttaatttcac

SEQ ID NO: 539096 - DNA, 120 bp, Artificial Sequence
  ENSG00000167080_54 (sequence is synthesized)
ttatttgtgcttccaaattctcctattcgtttaatttcacttttccccatttccacatacggcacaatcagaagttgtgctatacgctttcctggctctgctttccaaggaaaagaagta

SEQ ID NO: 539097 - DNA, 120 bp, Artificial Sequence
  ENSG00000167080_55 (sequence is synthesized)
atccacagacccctattggaactttttgtggggattccccaagcataaggctcacagcttttgtgcagtataaatctactgtggcactactggctgtcgtgggggacagacattgtacag

SEQ ID NO: 539098 - DNA, 120 bp, Artificial Sequence
  ENSG00000167080_56 (sequence is synthesized)
tataatatttccctgttgatctggggggtatatcctaacagggaactgccaagcctctatatcaccctctcgtctagctggctcaattcctgcctgaatagaactgagagcagtcactcg

SEQ ID NO: 539099 - DNA, 76 bp, Artificial Sequence
  ENSG00000167080_57 (sequence is synthesized)
tagggtcaggtcactctttttcttcaaaataatgagggggtgaagaagagtagggacaaacctcttcctcatttgc

SEQ ID NO: 539100 - DNA, 120 bp, Artificial Sequence
  ENSG00000167080_58 (sequence is synthesized)
ggggtgaagaagagtagggacaaacctcttcctcatttgccgctttagcttcagccagcaaacaaacctgctgtgtcatctcttctgttactttgttatactttccttccttctcatcat

SEQ ID NO: 539101 - DNA, 120 bp, Artificial Sequence
  ENSG00000167080_59 (sequence is synthesized)
tatactttccttccttctcatcattagtgtgaaaaggttctaaggtggaacgcaccagagcccacacttgtcccattgttaccctgatgtttccgagctccccttcttactcaccatggg

SEQ ID NO: 539102 - DNA, 120 bp, Artificial Sequence
  ENSG00000167080_60 (sequence is synthesized)
cctccagcttagttccacattctccaaccatcactccagcgacccttcaactggggttcaagccccacgttgggcgccacttgccgacaccagctcggtcttggagaccctaacccagcg

SEQ ID NO: 539103 - DNA, 120 bp, Artificial Sequence
  ENSG00000167080_61 (sequence is synthesized)
ttaaggcacagctcgctcatgctattgtttgtggcttaggaacaccttaagaggttttcccccctgggtgggacaggtgttccttgccctcattccagtaaatccacaaccttcagtgtg

SEQ ID NO: 539104 - DNA, 79 bp, Artificial Sequence
  ENSG00000167080_62 (sequence is synthesized)
attttatttacagattctatgaccacttcagccctgcctttacagtttctgtttacctgtaaactttttcttcctgtgg

SEQ ID NO: 539105 - DNA, 120 bp, Artificial Sequence
  ENSG00000167080_63 (sequence is synthesized)
ttacagtttctgtttacctgtaaactttttcttcctgtggcctagggtagttcaggatcactaaaaatgtgttctgtgatatattaataaaaattcctgaaaaatggacttacagcaaaa

SEQ ID NO: 539106 - DNA, 120 bp, Artificial Sequence
  ENSG00000167081_0 (sequence is synthesized)
ctcctccctcgtcgccgccgccgccgccgccgcctcagccttcgcctcagccgccgcccgctcccgcccgcgcgcggcgggatggacgatcaatccaggatgctgcagactctggccggg

SEQ ID NO: 539107 - DNA, 120 bp, Artificial Sequence
  ENSG00000167081_1 (sequence is synthesized)
gtgaacctggctggccactcggtgcaggggggcatggccctgccgcctcccccgcacggccacgaaggggcggacggcgacggcaggaagcaggacatcggcgacatcctccaccagatc

SEQ ID NO: 539108 - DNA, 120 bp, Artificial Sequence
  ENSG00000167081_2 (sequence is synthesized)
atgaccatcaccgaccagagcttggacgaggcgcaagcaaagaaacatgccctgaactgtcacagaatgaaaccagcgctcttcagcgtcctgtgtgagatcaaagagaaaacaggtctc

SEQ ID NO: 539109 - DNA, 120 bp, Artificial Sequence
  ENSG00000167081_3 (sequence is synthesized)
agcatcagaggagcccaggaggaggaccctcccgatccccagctaatgagactggacaatatgcttttggcagaaggggtttcaggtcctgagaaaggtgggggatcggcggcagcagct

SEQ ID NO: 539110 - DNA, 120 bp, Artificial Sequence
  ENSG00000167081_4 (sequence is synthesized)
gcagccgcggcagcctctggaggttcttcagataactctattgaacactcagattacagagccaaattgacccagatcagacaaatctatcacacagaactggagaaatatgaacaggca

SEQ ID NO: 539111 - DNA, 120 bp, Artificial Sequence
  ENSG00000167081_5 (sequence is synthesized)
tgtaatgaatttactacacatgtgatgaaccttctccgagaacagagtagaacacgtcccatttctccaaaagagattgaaagaatggtgggcatcatccatcgaaaatttagttccatt

SEQ ID NO: 539112 - DNA, 120 bp, Artificial Sequence
  ENSG00000167081_6 (sequence is synthesized)
cagatgcagctcaaacaaagcacttgtgaagcagttatgattttaagatcaaggttccttgatgccagacggaaaaggcgtaacttcagtaaacaggccacagaaatcttgaatgaatat

SEQ ID NO: 539113 - DNA, 120 bp, Artificial Sequence
  ENSG00000167081_7 (sequence is synthesized)
ttttactcacacctcagcaacccctaccccagtgaagaagccaaagaggagctggccaagaaatgcagcatcacagtgtcacaggtatccaattggtttggcaacaaacgaatcaggtac

SEQ ID NO: 539114 - DNA, 120 bp, Artificial Sequence
  ENSG00000167081_8 (sequence is synthesized)
aagaagaacattggcaagtttcaggaagaagccaacctctatgctgcaaagacggccgtgacagctgcacacgcagtagcagcagctgtgcagaacaaccagaccaattcgcccaccaca

SEQ ID NO: 539115 - DNA, 120 bp, Artificial Sequence
  ENSG00000167081_9 (sequence is synthesized)
ccaaattccggttcttctggttcttttaacctcccaaattctggggacatgttcatgaacatgcagagtctgaatggggattcttaccaagggtcccaagtcggagccaatgtgcaatca

SEQ ID NO: 539116 - DNA, 120 bp, Artificial Sequence
  ENSG00000167081_10 (sequence is synthesized)
caggtggataccctccgtcatgttatcaatcagacgggaggctacagtgatggccttggaggaaattcactgtacagtccacataatttaaatgctaatggaggctggcaggacgcaaca

SEQ ID NO: 539117 - DNA, 120 bp, Artificial Sequence
  ENSG00000167081_11 (sequence is synthesized)
tttccctgagctacatgccttgataagtgcattcagagcaataggaggaaaaggaaagcgtttttgtagcccaccatctacagctttactgtaaaaccttgtcttattcgagaacttggt

SEQ ID NO: 539118 - DNA, 120 bp, Artificial Sequence
  ENSG00000167081_12 (sequence is synthesized)
aaatctgttttttaaggaatcataatcatttgtatttatacttaaaaacacacaatgttaaaaaaaataaagcactttatccaattaggccaagatttaacattgttgacagtcctgtag

SEQ ID NO: 539119 - DNA, 120 bp, Artificial Sequence
  ENSG00000167081_13 (sequence is synthesized)
ctattttatcataatttattatcaatattttacattaatggtttcacagttgccaattacttggccttaagggtaaaaagtacaatatacactaaacctcaaccgttaaagcagatgcaa

SEQ ID NO: 539120 - DNA, 120 bp, Artificial Sequence
  ENSG00000167081_14 (sequence is synthesized)
aaattcacctcacctaaattgaacttcttgcatatttccattactgacttggattgtctttctttcatatcactaatggagttggaataaagagctgtttgcctatccctgttaatgatg

SEQ ID NO: 539121 - DNA, 120 bp, Artificial Sequence
  ENSG00000167081_15 (sequence is synthesized)
gttgtgtttaagaatcttcctcgtcacgtttgtgttcagatctcttatgttataattagatcagagactggtagcatcgtttctctctctgaaagcaccagtgcccagagtctgctcggt

SEQ ID NO: 539122 - DNA, 120 bp, Artificial Sequence
  ENSG00000167081_16 (sequence is synthesized)
aataaaattatggatccagattgttctgagagacgaagatacttgctgctgatagaggtgaaaacgagattgatccgtctggggttttacggtgtgcactgggtgctgcacagacttgtc

SEQ ID NO: 539123 - DNA, 120 bp, Artificial Sequence
  ENSG00000167081_17 (sequence is synthesized)
aaggtttgctacgtcctctgggcatctgcaaaaggccctgctctctggagtgttgtatatagtgtagcaaaagagtatttatacatcccaccaatcaaaacacagctttattacctcatg

SEQ ID NO: 539124 - DNA, 120 bp, Artificial Sequence
  ENSG00000167081_18 (sequence is synthesized)
cgaactcatacaaaccaatagaatttcaacatgttctgtagcttagagtgctcacttactacctctgaacaatactcacgctgtagtttgtctctttcttatctttttgcatcttgtaat

SEQ ID NO: 539125 - DNA, 120 bp, Artificial Sequence
  ENSG00000167081_19 (sequence is synthesized)
taactctttgtttcccttcataaaatgtaatgtacattgtaatcttttaaaagaaaaatcagggttgcacttgcaacttttaaaaaaccgagtgtggaaacattgggtcttaattcaaca

SEQ ID NO: 539126 - DNA, 120 bp, Artificial Sequence
  ENSG00000167081_20 (sequence is synthesized)
caggatcggtaaaactgttgtaaatactgagaaacattttgaatgttcttcatcttattactaatccatgcaaaaaaaaaaaaaaaagcagcgactaattgtgatgcattcagatttcag

SEQ ID NO: 539127 - DNA, 120 bp, Artificial Sequence
  ENSG00000167081_21 (sequence is synthesized)
tattcagtactgtatatttcaccctgtgtaatggggccccctctcctttctctctttttgtattgtatgcgattctgaaactgattgagtcatgaaaataatttgtggcggtgattctaa

SEQ ID NO: 539128 - DNA, 120 bp, Artificial Sequence
  ENSG00000167081_22 (sequence is synthesized)
tgtattaaaaacgtttcgtgttcctttctaactggattacaccctggattgaaaaagtcttcctcgtggtagttatatgtagtttcaaacatgaataaactttttgctttcatgattaaa

SEQ ID NO: 539129 - DNA, 80 bp, Artificial Sequence
  ENSG00000167081_23 (sequence is synthesized)
gtcaccctcccgctggccgcagtcggccggcctcctctgcacaggagcggacgcgggagcccctccgcacccgtcccctc

SEQ ID NO: 539130 - DNA, 120 bp, Artificial Sequence
  ENSG00000167081_24 (sequence is synthesized)
gcgcgggttcgcgtcgcgtctgcagtggccgaggctgctgcctgccgggcagatgggtccgccttgttccggctgcagctttcgccgccggggcttgctggctgtcgggaactagtcaac

SEQ ID NO: 539131 - DNA, 61 bp, Artificial Sequence
  ENSG00000167081_25 (sequence is synthesized)
tcctccaggttcttcggcctttggactcttggacttacatcagtggtttcccaggggcttc

SEQ ID NO: 539132 - DNA, 120 bp, Artificial Sequence
  ENSG00000167081_26 (sequence is synthesized)
tggactcttggacttacatcagtggtttcccaggggcttctgggcctttggtcacagactgaaggctgcactgtcgtcttccctacttttgaggctttttgacttggactaagccactac

SEQ ID NO: 539133 - DNA, 120 bp, Artificial Sequence
  ENSG00000167081_27 (sequence is synthesized)
tcccacggttcaaaagggccttccagaatggggggctggaattaaatcttgggtctaacttaaaggaaggcgccatattattccataggtgatgctaatacctttgtgtttcgttatttg

SEQ ID NO: 539134 - DNA, 120 bp, Artificial Sequence
  ENSG00000167081_28 (sequence is synthesized)
tgtttgtgtgtcagtttttaaaaggagcaacgggagactggatgccaggaccgagtccccgggagaagcatcgcccgaactttgttttacttagacagtcttaagcttcagctgcacgga

SEQ ID NO: 539135 - DNA, 120 bp, Artificial Sequence
  ENSG00000167081_29 (sequence is synthesized)
tagaagaatagatgcaattgaacagaccccagtagcatgcttgaattagtgttttaggtgggaaggctactttagagaatcgaggaagggtaatgatgtgtagacacatacgatgtatta

SEQ ID NO: 539136 - DNA, 120 bp, Artificial Sequence
  ENSG00000167081_30 (sequence is synthesized)
taatacttgtattattttgtattctgaagtcattacacttgtaactgtgcttaatatataaagtataaaaaggtctacagatgcaggttaaacaattttgaagtgtccaagtcagggaat

SEQ ID NO: 539137 - DNA, 120 bp, Artificial Sequence
  ENSG00000167081_31 (sequence is synthesized)
atataagaagataggttttgcagaagtgctggaatgaaaactacaggtacatatttggcaaatttttggcaattcgtttcagtttaactttcttgtcagactttattaattgaaggtctt

SEQ ID NO: 539138 - DNA, 120 bp, Artificial Sequence
  ENSG00000167081_32 (sequence is synthesized)
tcagtcttgacgtgaggtaactgctcaaactgaagcagagatttggatgttttagtttgtatttggcattatcttccctgtatgtggcaaacaagtacattaaacaagctctactgttta

SEQ ID NO: 539139 - DNA, 120 bp, Artificial Sequence
  ENSG00000167081_33 (sequence is synthesized)
cagcgaggtcataagctgagctcagtgaagggagccagaacatgaaatgatgctgagagaacgtctgggagatgagagttttaagcagtacagggttgaaaaagctttgcatgccagact

SEQ ID NO: 539140 - DNA, 120 bp, Artificial Sequence
  ENSG00000167081_34 (sequence is synthesized)
attgtgaatgagtggagttcataagaattcaaaggacaaaagagatcattatgctttgttacctcagctagttcattaccttaattgctgagtgtaatccagtcttggaagaaaactctg

SEQ ID NO: 539141 - DNA, 120 bp, Artificial Sequence
  ENSG00000167081_35 (sequence is synthesized)
cactaaaccttgatcaaaggctgaacttttcttaaggtcggccatgtgaacatcccctggagctgtaccattcgctgaaccataatgaagtttagtaggttcagcaccatttctctctga

SEQ ID NO: 539142 - DNA, 120 bp, Artificial Sequence
  ENSG00000167083_0 (sequence is synthesized)
tggatgaagagtgagctaggagaacttcgtaaggtgaaactgtggggatccaatgggcaacacaaagcatcttggttaaggaggttaggggccggtctaggacttgcctcaggaggaagg

SEQ ID NO: 539143 - DNA, 120 bp, Artificial Sequence
  ENSG00000167083_1 (sequence is synthesized)
acagcctcagagcatgctcagaggtgggaagggaaggaggagaaagcaggcgaagcggggccatctgctttatctgaagattttcagctgatgaagaactaggaggctcaaacactatct

SEQ ID NO: 539144 - DNA, 120 bp, Artificial Sequence
  ENSG00000167083_2 (sequence is synthesized)
tacctgagtccaggacaagtgacttggagagtgtgctcttctgtggcaggatcaggtctgtctagggcaggatggcccaggatctcagcgagaaggacctgttgaagatggaggtggagc

SEQ ID NO: 539145 - DNA, 120 bp, Artificial Sequence
  ENSG00000167083_3 (sequence is synthesized)
aaaggaaatcaaggagtacgtggaggcccaagcaggaaacgatccttttctcaaaggcatccctgaggacaagaatcccttcaaggagaaaggtggctgtctgataagctgatggcatgg

SEQ ID NO: 539146 - DNA, 120 bp, Artificial Sequence
  ENSG00000167083_4 (sequence is synthesized)
agccctgccctgagtgtctgtccctcttcagccaagcccaagtctcctagacccccagggagccagtgaactgtcaccttctcttcatcacagaatgagtaaagatccctgaacaaatgc

SEQ ID NO: 539147 - DNA, 120 bp, Artificial Sequence
  ENSG00000167083_5 (sequence is synthesized)
attgtgaacccattccccactcccaccttcaactcttttctcccattatttcctccacctgctgggtctctgctgaccttgctgggaacactctgaggacagtgtggctggccgagcggt

SEQ ID NO: 539148 - DNA, 120 bp, Artificial Sequence
  ENSG00000167083_6 (sequence is synthesized)
tggccccatgggtggtggggtgtgagaagcctgcaataccccaagaccccagagggcagtccttaggaagcacttacaccacctgggaacccctccgtcttttccctctactctcatcct

SEQ ID NO: 539149 - DNA, 120 bp, Artificial Sequence
  ENSG00000167083_7 (sequence is synthesized)
attccgggacaagaggaagtcagtcctgctccccgagcctgtgtctctctgtcccctgcccagaggaagggggaagccaggggcccatttgggggcccagcccccaatcccacccagcag

SEQ ID NO: 539150 - DNA, 120 bp, Artificial Sequence
  ENSG00000167083_8 (sequence is synthesized)
gggctgggggccagggttgggtggtcctgtccctccatatcatgtcctaccctatggtcctgttcctagtcatttagatcaccccagatggcctgatgacaacaagagtttgtgaagtta

SEQ ID NO: 539151 - DNA, 120 bp, Artificial Sequence
  ENSG00000167083_9 (sequence is synthesized)
ggcgaagcggggtaagtggggctgcagggtggaggtggagaaatagaagcgctgcgggctctaagctagtgaggtcaccaaaagtgtgaggctaacgcaaggcaaggtggtgaaaaggtg

SEQ ID NO: 539152 - DNA, 120 bp, Artificial Sequence
  ENSG00000167083_10 (sequence is synthesized)
gcttctgttttcgcgtttgtttttgtggggagaatgtctgtctctctgctctgctgtagtgagggcttgaaggctcaagcgggtgatgggcttagaactttgagcctatgatcagcttag

SEQ ID NO: 539153 - DNA, 120 bp, Artificial Sequence
  ENSG00000167083_11 (sequence is synthesized)
cccacatttaacgccttacttcttttgctgggaagagcttcttggttggagctaacctggtctaggacaccgtagctgcctagaagacatcacatgaatccatagatggtggtgttggca

SEQ ID NO: 539154 - DNA, 120 bp, Artificial Sequence
  ENSG00000167083_12 (sequence is synthesized)
gggaatacaaactcaattcctgaataagtgcctattccagtgaggacaattctgtgtcccttccattgacctgccaccagagaactggatggttgccttgaggtctggtactgtatgagg

SEQ ID NO: 539155 - DNA, 120 bp, Artificial Sequence
  ENSG00000167085_0 (sequence is synthesized)
agtatgtgtggttggggaattcatgtggaggtcagagtggaagcaggtgtgagagggtccagcagaaggaaacatggctgccaaagtgtttgagtccattggcaagtttggcctggcctt

SEQ ID NO: 539156 - DNA, 120 bp, Artificial Sequence
  ENSG00000167085_1 (sequence is synthesized)
agctgttgcaggaggcgtggtgaactctgccttatataatgtggatgctgggcacagagctgtcatctttgaccgattccgtggagtgcaggacattgtggtaggggaagggactcattt

SEQ ID NO: 539157 - DNA, 120 bp, Artificial Sequence
  ENSG00000167085_2 (sequence is synthesized)
tctcatcccgtgggtacagaaaccaattatctttgactgccgttctcgaccacgtaatgtgccagtcatcactggtagcaaagatttacagaatgtcaacatcacactgcgcatcctctt

SEQ ID NO: 539158 - DNA, 120 bp, Artificial Sequence
  ENSG00000167085_3 (sequence is synthesized)
ccggcctgtcgccagccagcttcctcgcatcttcaccagcatcggagaggactatgatgagcgtgtgctgccgtccatcacaactgagatcctcaagtcagtggtggctcgctttgatgc

SEQ ID NO: 539159 - DNA, 120 bp, Artificial Sequence
  ENSG00000167085_4 (sequence is synthesized)
tggagaactaatcacccagagagagctggtctccaggcaggtgagcgacgaccttacagagcgagccgccacctttgggctcatcctggatgacgtgtccttgacacatctgaccttcgg

SEQ ID NO: 539160 - DNA, 120 bp, Artificial Sequence
  ENSG00000167085_5 (sequence is synthesized)
gaaggagttcacagaagcggtggaagccaaacaggtggctcagcaggaagcagagagggccagatttgtggtggaaaaggctgagcaacagaaaaaggcggccatcatctctgctgaggg

SEQ ID NO: 539161 - DNA, 120 bp, Artificial Sequence
  ENSG00000167085_6 (sequence is synthesized)
cgactccaaggcagctgagctgattgccaactcactggccactgcaggggatggcctgatcgagctgcgcaagctggaagctgcagaggacatcgcgtaccagctctcacgctctcggaa

SEQ ID NO: 539162 - DNA, 120 bp, Artificial Sequence
  ENSG00000167085_7 (sequence is synthesized)
tcctccagctgccccagtgagggcccaccctgcctgcacctccgcgggctgactgggccacagccccgatgattcttaacacagccttccttctgctcccaccccagaaatcactgtgaa

SEQ ID NO: 539163 - DNA, 120 bp, Artificial Sequence
  ENSG00000167085_8 (sequence is synthesized)
atttcatgattggcttaaagtgaaggaaataaaggtaaaatcacttcagatctctaattagtctatcaaatgaaactctttcattcttctcacatccatctacttttttatccacctccc

SEQ ID NO: 539164 - DNA, 120 bp, Artificial Sequence
  ENSG00000167085_9 (sequence is synthesized)
taccaaaaattgccaagtgcctatgcaaaccagctttaggtcccaattcggggcctgctggagttccggcctgggcaccagcatttggcagcacgcaggcggggcagtatgtgatggact

SEQ ID NO: 539165 - DNA, 120 bp, Artificial Sequence
  ENSG00000167085_10 (sequence is synthesized)
ggggagcacaggtgtctgcctagatccacgtgtggcctccgtcctgtcactgatggaaggtttgcggatgagggcatgtgcggctgaactgagaaggcaggcctccgtcttcccagcggt

SEQ ID NO: 539166 - DNA, 120 bp, Artificial Sequence
  ENSG00000167085_11 (sequence is synthesized)
tcctgtgcagatgctgctgaagagaggtgccggggaggggcagagaggaagtggtctgtctgttaccataagtctgattctctttaactgtgtgaccagcggaaacaggtgtgtgtgaac

SEQ ID NO: 539167 - DNA, 120 bp, Artificial Sequence
  ENSG00000167085_12 (sequence is synthesized)
tgggcacagattgaagaatctgcccctgttgaggtgggtgggcctgactgttgccccccagggtcctaaaacttggatggacttgtatagtgagagaggaggcctggaccgagatgtgag

SEQ ID NO: 539168 - DNA, 120 bp, Artificial Sequence
  ENSG00000167085_13 (sequence is synthesized)
tcctgttgaagacttcctctctaccccccaccttggtccctctcagatacccagtggaattccaacttgaaggattgcatcctgctggggctgaacatgcctgccaaagacgtgtccgac

SEQ ID NO: 539169 - DNA, 120 bp, Artificial Sequence
  ENSG00000167085_14 (sequence is synthesized)
ctacgttcctggccccctcattcagagactgcccttctcacgggctctatgcctgcactgggaaggaaacaaatgtgtataaactgctgtcaataaatgacacccagaccttccggctca

SEQ ID NO: 539170 - DNA, 120 bp, Artificial Sequence
  ENSG00000167085_15 (sequence is synthesized)
gggcggggcagaggagctcatgcgcagtatgtgtggttggggaattcatgtggaggtcagagtggaagcagttatcttggccccaggatgtcatccagctcctgcttccataagaagcat

SEQ ID NO: 539171 - DNA, 120 bp, Artificial Sequence
  ENSG00000167085_16 (sequence is synthesized)
atgtggaggtcagagtggaagcaggtgagaatggagggggcggcaaaggctcgtttctgggcatctctgcagtcctcctctgctccatgatgtgcactttgggcgaggagagtgcgtgcg

SEQ ID NO: 539172 - DNA, 120 bp, Artificial Sequence
  ENSG00000167085_17 (sequence is synthesized)
cagagtggaagcaggtgagaatggagggggcggcaaaggctcgtttctgggcatctctgcagtcctcctctgctccatgatgtgcactttgggcgaggagagtgtgagagggtccagcag

SEQ ID NO: 539173 - DNA, 120 bp, Artificial Sequence
  ENSG00000167085_18 (sequence is synthesized)
gggagcactaggttaaattggagcccgatggatatgtggtaactgggaagacctcactgagttttagaagttttggtagatgattcctggaaatatgttggtgggagttcagggatagaa

SEQ ID NO: 539174 - DNA, 120 bp, Artificial Sequence
  ENSG00000167085_19 (sequence is synthesized)
tggtcattcagaaaatcaacagccagttccctcaaggagaaaggatgctaaggaacaggtcctattaccaatccttggggacatgtggaacaggaagtgactgcttagttttgcagctag

SEQ ID NO: 539175 - DNA, 120 bp, Artificial Sequence
  ENSG00000167085_20 (sequence is synthesized)
gtttaggtgcctggctccatttctgggtagacgctattaggtcctcccttctgctttgctagatgtgagacttgaaaacacggaaacatgctgaggtgaggcagtctccgtgggtttttc

SEQ ID NO: 539176 - DNA, 120 bp, Artificial Sequence
  ENSG00000167085_21 (sequence is synthesized)
agttgagggttcttttaccttccccctgccacacacatttttcttatgacctctggttgtatccagatagtctctaaccactaaatgttttaccttctccaaactgttacccagagagtg

SEQ ID NO: 539177 - DNA, 120 bp, Artificial Sequence
  ENSG00000167085_22 (sequence is synthesized)
ctgctttctctttcttttaaaccgtttaacagaaccattcacattgggaataccatgatttgcgttccaccgtccctcgtcctcttcctgttcagtggtggagctgctgtgggaagacgc

SEQ ID NO: 539178 - DNA, 120 bp, Artificial Sequence
  ENSG00000167085_23 (sequence is synthesized)
ggactggttaatccataaacagagagcatcaggctcttggatccctgggaaccagctgcctccctcactctcagggaccctgttttccatctggccttccttgggctttgaacaaggcat

SEQ ID NO: 539179 - DNA, 120 bp, Artificial Sequence
  ENSG00000167085_24 (sequence is synthesized)
caaaggcccttggaagagcactagtcagtggcgggggtcttagaacccacagttctcctcctctggggaggtggtcgattgagtagataccttctggtgcctgtgggccccatcaaaagc

SEQ ID NO: 539180 - DNA, 120 bp, Artificial Sequence
  ENSG00000167085_25 (sequence is synthesized)
ttgctacatgaggtcactgtactgagagtgacagagtaatatacaggagcagtttgggcagccagagagtctgggtgtaaactcagtttggatacagatacggaggtggaagagtgttct

SEQ ID NO: 539181 - DNA, 120 bp, Artificial Sequence
  ENSG00000167085_26 (sequence is synthesized)
ggcctcacggatgcctccagctgctagagccattgctggcctcttcttccagcggccatggagccctcccagcagtgctgtcgaagcaatcacactgcctcatcttgtgctcactctctc

SEQ ID NO: 539182 - DNA, 120 bp, Artificial Sequence
  ENSG00000167085_27 (sequence is synthesized)
ctgttgcaggaggcgtggtgaactctgccttatataatggtgaggcatggagggacagtgggtcactgcactttcctaggagttttctgttggtctgcatagcccatgtgacactcttga

SEQ ID NO: 539183 - DNA, 120 bp, Artificial Sequence
  ENSG00000167085_28 (sequence is synthesized)
gccatttcataccacaggactgcattgttatcagagcccctgacctttcagtcataggttctctcagagcctgtattcaaaaagagcttcccagcccacttcctagttggatgtgtccag

SEQ ID NO: 539184 - DNA, 120 bp, Artificial Sequence
  ENSG00000167085_29 (sequence is synthesized)
tggcttctgtcaaggtgaagtgaagccgcaccacccaaatgctgccgcacagtgtctggatttccctggctatctgaaatggagatctcatttgttctcctctgcttgcatgtggaataa

SEQ ID NO: 539185 - DNA, 120 bp, Artificial Sequence
  ENSG00000167085_30 (sequence is synthesized)
cagcaaaggctgcagatctgtttgggtgaccttgtcctgaacaggaacttttgctgtgctgaattcgggtagtttcagagaaagtatctttgagatgcattgcccagcttttaacagtgt

SEQ ID NO: 539186 - DNA, 120 bp, Artificial Sequence
  ENSG00000167085_31 (sequence is synthesized)
tgtgtggttggggaattcatgtggaggtcagagtggaagcaggtgagaatggagggggcggcaaaggctcgtttctgggcatctctgcagtcctcctctgctccatgatgtgcactttgg

SEQ ID NO: 539187 - DNA, 120 bp, Artificial Sequence
  ENSG00000167088_0 (sequence is synthesized)
cttgacgtccggagcccctggagtaggcgcttccggccattcatactgcagtcggtcagtgttcggttgaaggattctgtgtgctgtcggacccagagggtgacggcgccgctaggatga

SEQ ID NO: 539188 - DNA, 120 bp, Artificial Sequence
  ENSG00000167088_1 (sequence is synthesized)
agctcgtgagatttttgatgaaattgagtcatgaaactgtaaccattgaattgaagaacggaacacaggtccatggaacaatcacaggtgtggatgtcagcatgaatacacatcttaaag

SEQ ID NO: 539189 - DNA, 120 bp, Artificial Sequence
  ENSG00000167088_2 (sequence is synthesized)
ctgtgaaaatgaccctgaagaacagagaacctgtacagctggaaacgctgagtattcgaggaaataacattcggtattttattctaccagacagtttacctctggatacactacttgtgg

SEQ ID NO: 539190 - DNA, 120 bp, Artificial Sequence
  ENSG00000167088_3 (sequence is synthesized)
atgttgaacctaaggtgaaatctaagaaaagggaagctgttgcaggaagaggcagaggaagaggaagaggaagaggacgtggccgtggcagaggaagagggggtcctaggcgataatgtc

SEQ ID NO: 539191 - DNA, 120 bp, Artificial Sequence
  ENSG00000167088_4 (sequence is synthesized)
tctcaagatttcaaagtcatatgagatttgggatattttttgtacaggttgtgtttgtttatgtcagtttttaataaacataaatgtgggacagagctgtctatttagtatatcaaagtt

SEQ ID NO: 539192 - DNA, 120 bp, Artificial Sequence
  ENSG00000167088_5 (sequence is synthesized)
ttagtagtttcctccacattcacgaaattaccacagtgagagctaagcatttctactgggcagtttcatttttagttgatcaggttttaagtttttgaactaaaatttttctttttcttt

SEQ ID NO: 539193 - DNA, 120 bp, Artificial Sequence
  ENSG00000167088_6 (sequence is synthesized)
ttatgatgaataaggttaaaataaaagccttagacaaattaaatttggcagagtttaattgagcaaaggacaattcacaaatcaggtagcccctgaaccataataggctcagaggcttca

SEQ ID NO: 539194 - DNA, 120 bp, Artificial Sequence
  ENSG00000167088_7 (sequence is synthesized)
gcccagctgcatagttgaagatttatggacagaaggaaagtgatgtatggaaaatggaagtgagatacagcaacagccggattagttacagttcagcgtttgccttatttgaatatggtt

SEQ ID NO: 539195 - DNA, 120 bp, Artificial Sequence
  ENSG00000167088_8 (sequence is synthesized)
tgaacagttcgctgtctttggttggctgaaacttagtgattgccacaagagtagggtaccgtctgtttacacgtccagttaggctacagttctatgtactgagaaacctttaagctgaac

SEQ ID NO: 539196 - DNA, 120 bp, Artificial Sequence
  ENSG00000167088_9 (sequence is synthesized)
ttgagatatgtaaagagactttaggctaaacttaacaatatatataggatatatacccttctacttcacatgcactgaatatgcattttattgctttactcttcattctgtggcacctac

SEQ ID NO: 539197 - DNA, 120 bp, Artificial Sequence
  ENSG00000167088_10 (sequence is synthesized)
ccacaggggaagtaagaagtttgttttggtatttcggaaactaaagtccttatgggatggggtctagaattgattctcctttcctgagttttactccacggagtcttaggtacctggtaa

SEQ ID NO: 539198 - DNA, 120 bp, Artificial Sequence
  ENSG00000167088_11 (sequence is synthesized)
aaagttgtcttctaaattaagggtcattgctttgttgtctagctgctaatgtcttacttttgtttcttttgctttttaatcagttcttaataggatatagttttatgttttccaagttat

SEQ ID NO: 539199 - DNA, 120 bp, Artificial Sequence
  ENSG00000167088_12 (sequence is synthesized)
aacttggagttaatggtcactagattatcagttatgagcagtgttaaaatctcctattaatgtgtaatgtacctgtcagtgcctcctttattaaggggttctttgagaataaaagagaaa

SEQ ID NO: 539200 - DNA, 120 bp, Artificial Sequence
  ENSG00000167088_13 (sequence is synthesized)
agacctactttatttgacagcaaaactgttctaattgttaataaggacttttaaaaattgtttttgatttgctaagctcagaaaaaatgtctctcagtgcatcagttctttgtaaagctt

SEQ ID NO: 539201 - DNA, 120 bp, Artificial Sequence
  ENSG00000167088_14 (sequence is synthesized)
actacgaagtatttatatgctaaggaaaacaactgaggatgtgggtggcttaaatctgtattttcatcatgtatgtgagtttttttttttttaagtaaagaaattttctgcaaagatcgt

SEQ ID NO: 539202 - DNA, 120 bp, Artificial Sequence
  ENSG00000167088_15 (sequence is synthesized)
tccagcctgggcgatggagtgagactacgtctcaaaaaaaaatcgagagagagatatatatatgtatttatatatatatgtatttatactaatatataaatatatactaatagatatatt

SEQ ID NO: 539203 - DNA, 120 bp, Artificial Sequence
  ENSG00000167088_16 (sequence is synthesized)
acctcatcaagtaaattcaaatgctttttgatttttccacagttgataatttttttttgtaagtcattgaagttatatagtaattagcgttttttcccccacaaattattggcagtggtc

SEQ ID NO: 539204 - DNA, 120 bp, Artificial Sequence
  ENSG00000167088_17 (sequence is synthesized)
accatgttggccagacttaagacaattctttaatagtaaatatattaaaggtgagttggcttgacaagatacaaccaatatgtaatttttctccacacgttttttttttttttttttttt

SEQ ID NO: 539205 - DNA, 76 bp, Artificial Sequence
  ENSG00000167088_18 (sequence is synthesized)
ggtttcactgtgttaggatggtctcgttctcctgacctcatgatctgcacgtccccggcctatacctttcattaat

SEQ ID NO: 539206 - DNA, 120 bp, Artificial Sequence
  ENSG00000167088_19 (sequence is synthesized)
gcgtccccggcctatacctttcattaattaataagctgggggaataaataactggatttcattcttttccatcttctgacctgttggtgctcctattgcttgtatccaagtagaaggcaa

SEQ ID NO: 539207 - DNA, 120 bp, Artificial Sequence
  ENSG00000167088_20 (sequence is synthesized)
aaggcaagagacccctgtaatgcagcaagtggagagatttgttgaaggggtcaaacaaaaccctgcaagagtaggaaataaacagttggctcctgtcctcgtggagcttatagacagaag

SEQ ID NO: 539208 - DNA, 120 bp, Artificial Sequence
  ENSG00000167088_21 (sequence is synthesized)
cagataacaaataaaaattggagcttagtgccgtggtgcacacttgtagtccctgctactggggaggctaaggcaagaggatcgctatagcctgggaatttgaagctgtagcgtgctatg

SEQ ID NO: 539209 - DNA, 120 bp, Artificial Sequence
  ENSG00000167088_22 (sequence is synthesized)
attgcaagcagcctgggtaacctagtgagacctggctcttaaatttaaaatttaaatgaaaatggccacttagcataagagatctaaaattacgttttgtcctggcatggtggctcatgc

SEQ ID NO: 539210 - DNA, 120 bp, Artificial Sequence
  ENSG00000167088_23 (sequence is synthesized)
agagcgagactgtttcaaaaaaaaaaaaaaaatttgttttgagagtttttgtgtctaggatgtttgcagtgtgaagccagtctagtaacagtttaaatgtaataataaatcacagtgggt

SEQ ID NO: 539211 - DNA, 120 bp, Artificial Sequence
  ENSG00000167088_24 (sequence is synthesized)
actagattgagtttattccactagaggtcattatttcatttccatgtgaaagggctaaaattgggtgaagaaaaagctatttgaactgattaccatcatttgctataaaggaagcattat

SEQ ID NO: 539212 - DNA, 120 bp, Artificial Sequence
  ENSG00000167088_25 (sequence is synthesized)
agtatgaatagaaaacagactagagtttaacatgcttctcttgacccctcttcaccaccccctaaaaggcagatgggatcttaggactgcagcattttgtacacatctgatatttaatga

SEQ ID NO: 539213 - DNA, 61 bp, Artificial Sequence
  ENSG00000167088_26 (sequence is synthesized)
ttaggactgcagcattttgtacacatctgatatttaatgagatgttacatatgaactttag

SEQ ID NO: 539214 - DNA, 120 bp, Artificial Sequence
  ENSG00000167088_27 (sequence is synthesized)
tttaaagaaatgtattatgaatatagatagaaaacccaaagtgaaggaatagaaaatgaaatatcagtttcttttaatctatcataattatgtgagcataacttagtattttgaaataga

SEQ ID NO: 539215 - DNA, 120 bp, Artificial Sequence
  ENSG00000167088_28 (sequence is synthesized)
ttaatgtagtcagcaaacaattcatgtattacctataatagatatcatacatataacatttaataacatacagttcttgttcctgaagacttaacctagaaaataactccataacaagaa

SEQ ID NO: 539216 - DNA, 120 bp, Artificial Sequence
  ENSG00000167088_29 (sequence is synthesized)
gaatctctgtcataataaaccaacagcagacattttctaaaggcattaaaagtatatctgatactggcctttattaatgtgaaattcttgtggatctgtgaaataaagaggagtactttc

SEQ ID NO: 539217 - DNA, 120 bp, Artificial Sequence
  ENSG00000167088_30 (sequence is synthesized)
atcacagtttacctctggatacactacttgtggatgttgaacctaaggtgaaatctaagaaaagggaagctgttgcaggaagaggcagaggaagaggaagaggaagaggacgtggccgtg

SEQ ID NO: 539218 - DNA, 120 bp, Artificial Sequence
  ENSG00000167088_31 (sequence is synthesized)
ctggagtaggcgcttccggccattcatactgcagtcggtcagtgttcggttgaaggattctgtgtgctgtcggacccagagggtgacggcgccgctaggatgaagctcgtgaggtgtgga

SEQ ID NO: 539219 - DNA, 120 bp, Artificial Sequence
  ENSG00000167094_0 (sequence is synthesized)
agcaacgtcagggccagggccgcgaggtagttggcagaggcctcggggtcctcctggaaggggcctcatgacagattcggacgaggatgccctgaaggttgaccagggcccctcacggga

SEQ ID NO: 539220 - DNA, 120 bp, Artificial Sequence
  ENSG00000167094_1 (sequence is synthesized)
catcccaaagccatgggtgattccagcccccaaagggatcctgcagcacatctttgggaccagccacgtgttccaaagcatctgtgatgtaaaaccaaaggtcacagggttaacagtgcc

SEQ ID NO: 539221 - DNA, 120 bp, Artificial Sequence
  ENSG00000167094_2 (sequence is synthesized)
cctcaaagtcagggaatactactccagaggccagcagtgcttggagcaggcagactgggagacagctgtgctgctcttctcccgcgcactccacctggacccacagctggtggacttcta

SEQ ID NO: 539222 - DNA, 120 bp, Artificial Sequence
  ENSG00000167094_3 (sequence is synthesized)
tgccttacgggctgaggcctacctccagctctgtgacttctcctcggccgcccagaacctgcgaagggcctactcattacagcaggacaactgcaagcacctggagcgcctcacctttgt

SEQ ID NO: 539223 - DNA, 120 bp, Artificial Sequence
  ENSG00000167094_4 (sequence is synthesized)
gctctacctacagggacaatgcctttttgagcagtgtgccttcctggatgccctgaatgtcttctcacatgctgctgagctccagcctgagaaaccatgcttccgttaccgatgcatggc

SEQ ID NO: 539224 - DNA, 120 bp, Artificial Sequence
  ENSG00000167094_5 (sequence is synthesized)
ctgtctcctggccctcaagcagcatcaggcctgcctcacgctcatcaccaacgagctgaagcaggacaccaccaacgccgatgtctacatcttccgggccagactctacaactttctcca

SEQ ID NO: 539225 - DNA, 120 bp, Artificial Sequence
  ENSG00000167094_6 (sequence is synthesized)
gaagccccacctctgctaccgggacctgcacagcgccttgctgttgaatcccaagcacccgcaggccaggatgctgctccagaagatggtggcccaggcccagcaggcgcgccaagatgc

SEQ ID NO: 539226 - DNA, 120 bp, Artificial Sequence
  ENSG00000167094_7 (sequence is synthesized)
ggggatcctggctgtgcagggcaagctgcagcacgcactgcagcggatcaaccgtgccatcgagaacaaccctctggaccccagtctcttcctcttccggggcaccatgtaccgacggct

SEQ ID NO: 539227 - DNA, 120 bp, Artificial Sequence
  ENSG00000167094_8 (sequence is synthesized)
ccaggagttcgatggggcagtggaggacttcctgaaggtgctggacatggtgaccgaggaccaggaggacatggtgcggcaggcacagcgccagctgttgctgacctacaacgactttgc

SEQ ID NO: 539228 - DNA, 120 bp, Artificial Sequence
  ENSG00000167094_9 (sequence is synthesized)
cgtgcactgctacaggcagggcgcctaccaggagggcgtgctgctgctgaacaaggccctccgggacgagcagcaggagaaaggactctacatcaaccgaggcgattgcttcttccagct

SEQ ID NO: 539229 - DNA, 120 bp, Artificial Sequence
  ENSG00000167094_10 (sequence is synthesized)
gggcaacctggcctttgccgaggcggactaccagcaggcgctggcgctgagccctcaggacgagggcgccaacacgcgcatgggcctgctgcaggagaagatgggcttctgcgagcagag

SEQ ID NO: 539230 - DNA, 120 bp, Artificial Sequence
  ENSG00000167094_11 (sequence is synthesized)
ttttggggcccgccaggatgtggccactgtcctgctcctcaaccccaagcaaccaaagctgtccctgctgatgaccaacctcttcccgggcatgtcggtggaggaggtgcttagcaccca

SEQ ID NO: 539231 - DNA, 120 bp, Artificial Sequence
  ENSG00000167094_12 (sequence is synthesized)
gatagcccacctggccaggctgcagctggagcagatggtggagggcagcctgcaggccggcagcccacaaggcattgtggggatgcttaaacggcacgagttggagcgccagaaggcctt

SEQ ID NO: 539232 - DNA, 120 bp, Artificial Sequence
  ENSG00000167094_13 (sequence is synthesized)
ggccctgcagcactcatggaagcagggggagcctttgattgcgacctccgaggagctgaaggccacccctgagattccgcaggtaaaaccgggaagctcagagggagaggctgaggcccc

SEQ ID NO: 539233 - DNA, 120 bp, Artificial Sequence
  ENSG00000167094_14 (sequence is synthesized)
tgaggaggaggaagaaaaggagaaggagaaaaaagaggagaaaaaatcagagctcatacctagcaaggtggcgtccctgtctgacagctaccttgaccagacctcttcagcctccagcat

SEQ ID NO: 539234 - DNA, 120 bp, Artificial Sequence
  ENSG00000167094_15 (sequence is synthesized)
gagcttcaggaccacaggcacctcagagactgagatgtcggctatctgccaggaatacaggagcacctcagccaccgccgtgacattctctgactcgtcactgttgaagacgcaatcctc

SEQ ID NO: 539235 - DNA, 120 bp, Artificial Sequence
  ENSG00000167094_16 (sequence is synthesized)
ggactctgggaacaacagggaggcactaagccatggtcccagaaaaatcaaggccacccagggccagaggcagagccttagcaagactgagcccacccagagccagaggcggaactccag

SEQ ID NO: 539236 - DNA, 120 bp, Artificial Sequence
  ENSG00000167094_17 (sequence is synthesized)
caagaccaaggccactatacacaagaggaactccagcaagaccaaggccacccaaagccagaggcggaactccagcaagaccagggccacccagggccaggggcagagctccagcaagac

SEQ ID NO: 539237 - DNA, 120 bp, Artificial Sequence
  ENSG00000167094_18 (sequence is synthesized)
tgaggccactcagggccagaggcagagctccagcgagattgaggccacccagggcccaaggcaggagcccagcaagaccaagaccacccggagcccaaggcagaggcccagaaaggtcaa

SEQ ID NO: 539238 - DNA, 120 bp, Artificial Sequence
  ENSG00000167094_19 (sequence is synthesized)
ggctgctcgtggccggagctggagacccagcaaggttgatgccacccagggccgaagcaggggactgctccgaagttccaccaagactgaggctttctatgactcaaactggagcctcag

SEQ ID NO: 539239 - DNA, 120 bp, Artificial Sequence
  ENSG00000167094_20 (sequence is synthesized)
caaaactgagtatgcccaaggccagggccagaggtccagcaaggctgagggtgcccagggcaagagccagggcatgagctcaacttccagcaaggccgagtccacctggggacccagccc

SEQ ID NO: 539240 - DNA, 120 bp, Artificial Sequence
  ENSG00000167094_21 (sequence is synthesized)
aagtctcagcaaaactgaggttgatcaggacctcacctactatgaagctgtctgaagggaccatccagaccctcccttcttgctggggaggggacgagttctacccacctccccacactg

SEQ ID NO: 539241 - DNA, 120 bp, Artificial Sequence
  ENSG00000167094_22 (sequence is synthesized)
gcactcagccagctgcctccttccagagcaattaaaagtcttagcaacagtcctctggtcccacagctgagtttattatacttgttttcttttacaaaattaaaaacatctaaaaccagg

SEQ ID NO: 539242 - DNA, 120 bp, Artificial Sequence
  ENSG00000167094_23 (sequence is synthesized)
tgcgggggagcctcgccatctctaaggcccccactgggcacttgaggcccctggggggaaggaggaagggagagaggaaggaagcaagggaagaggaaatgtaatagtctcagtatccca

SEQ ID NO: 539243 - DNA, 120 bp, Artificial Sequence
  ENSG00000167094_24 (sequence is synthesized)
ggaacacactttgggaaatgttgccttagacaaactggctccagactccttaaaatgctcaaaacaggcagctggggaacagtgcccagacgcccagaaaactagagaggacggagactg

SEQ ID NO: 539244 - DNA, 120 bp, Artificial Sequence
  ENSG00000167094_25 (sequence is synthesized)
cggcggggggttatcagccaccagtttcaggccctggcccccgggctggagccggctgggctggggctcccgggcactgggagttgggggtccactcacccccgcctccggaccctagat

SEQ ID NO: 539245 - DNA, 120 bp, Artificial Sequence
  ENSG00000167094_26 (sequence is synthesized)
aggtaagtggagtacaggccagggctcggagcccttggggtctggggcacagcgtaccccagcccagggctgaaggatgcaggccagtggagtctggcttccaggcctggctctgcactc

SEQ ID NO: 539246 - DNA, 120 bp, Artificial Sequence
  ENSG00000167094_27 (sequence is synthesized)
cctcagctgtgtgatgggctggggacatcttgctatgagatggggatggtaccagcaaggggtgctcctgacggagggtgtgtggggatgtgggccctcagagagaggagtcacagccct

SEQ ID NO: 539247 - DNA, 120 bp, Artificial Sequence
  ENSG00000167094_28 (sequence is synthesized)
gctcatggtcactgtcatgaattctactgtaggcactagccacttgccacttgtgccagaattttttgtttttgagtcggagtcttgctctgtcaacctaggctggagtacagtggcaca

SEQ ID NO: 539248 - DNA, 67 bp, Artificial Sequence
  ENSG00000167094_29 (sequence is synthesized)
tgtgtgccaccacatccggctaatttttcgtatttttagtatttttgttgggcttaagtgatctgca

SEQ ID NO: 539249 - DNA, 120 bp, Artificial Sequence
  ENSG00000167094_30 (sequence is synthesized)
ctcttattgaacgtaacataaatatagaaaagtgcacaaatcataagtaccggtttgatgaattttcacaaactgcattacacccatgatagcattatccagatcgagaaagaacatttt

SEQ ID NO: 539250 - DNA, 120 bp, Artificial Sequence
  ENSG00000167094_31 (sequence is synthesized)
cccagctcccagaagccccttggggcccccttcgaggcccctcccgtaacccaccccacctacaaggctgtcttgattcctgacaccaaacatgagtttcgtcttttcttcacataaatg

SEQ ID NO: 539251 - DNA, 120 bp, Artificial Sequence
  ENSG00000167094_32 (sequence is synthesized)
gacagcatggtgagcgtcactcacgctgcggcgggtggcagcggcctgctccctctcgctggtgctgcagaatattccgtccttgacagtcccacagtgtgttcctctgttctactgctg

SEQ ID NO: 539252 - DNA, 120 bp, Artificial Sequence
  ENSG00000167094_33 (sequence is synthesized)
gctggtagacatcaagtacactaatgttcaaaggaaacttgaagcaattgaagtagaggaataccagcatcccttgccatcaatagaaaatgtggctgggcgcggtggctgacacctgta

SEQ ID NO: 539253 - DNA, 120 bp, Artificial Sequence
  ENSG00000167094_34 (sequence is synthesized)
acttgggaggctgaggcaagaggatctcttgagccccagagtcatttgaggctgcagtgagccgtaatcatactactgcattccagcctaggtgagagagccagaccctgtctaaagaag

SEQ ID NO: 539254 - DNA, 120 bp, Artificial Sequence
  ENSG00000167094_35 (sequence is synthesized)
ccagaccctgtctaaagaagaaaagaaaaaaggaaagaaagtgctagctcttcagttttctagctcatgttagaatgaatattaaagtacacaccttccctctgtgtgacccctgaagtc

SEQ ID NO: 539255 - DNA, 120 bp, Artificial Sequence
  ENSG00000167094_36 (sequence is synthesized)
tacaggtgtgaacgtgggcagagacccgcagcctaggtagggtctggctgtggcagccagcagacctggattcaaacccggcctctctgcttcttagccgagtggccctggacaggttgc

SEQ ID NO: 539256 - DNA, 120 bp, Artificial Sequence
  ENSG00000167094_37 (sequence is synthesized)
ttaggggctctgagctttggtttcctgttcagtgaaatggtcattagcagctctccccatccctccgtcttcacttgtattgggagaatggatgggggtaaagcctacagaagctcctca

SEQ ID NO: 539257 - DNA, 120 bp, Artificial Sequence
  ENSG00000167094_38 (sequence is synthesized)
agtcctccgtaagcattccccagggcacagccctttacaatttacagaagcctgttccacacctgaactaattttcattttgcagttgaaaaaaaccaaggcgctagcagctccttcaac

SEQ ID NO: 539258 - DNA, 120 bp, Artificial Sequence
  ENSG00000167094_39 (sequence is synthesized)
acaaccgttctcacggcaccatgcctgtctagcctggtcgctccccttcctgccaggcttagcctctgcgtgtccccaccccactctaacctggcaccttcaaagacctccaagctcagg

SEQ ID NO: 539259 - DNA, 120 bp, Artificial Sequence
  ENSG00000167094_40 (sequence is synthesized)
agaatgaccaccgaggggcccagggctgctggccttctagaggtgcagctgcacgggcctcctaccatctgaactacaaagcctgtttcttgccataggagaaaaaatcagagctcatac

SEQ ID NO: 539260 - DNA, 120 bp, Artificial Sequence
  ENSG00000167094_41 (sequence is synthesized)
ctagcaaggtggcgtccctgtctgacagctaccttgaccagacctcttcagcctccagcatgagctgtaagtccctggtgcttccgccaggcctcaggaagctaaggcagcagggtagtc

SEQ ID NO: 539261 - DNA, 120 bp, Artificial Sequence
  ENSG00000167094_42 (sequence is synthesized)
aaagctcaggggtcgaagaccgctggcctaggtgtgcgttcggccccgctgctgacagctgggtggcctggggcgagtggctctagagcgggagtaacactgttgcggggctgcccagga

SEQ ID NO: 539262 - DNA, 120 bp, Artificial Sequence
  ENSG00000167094_43 (sequence is synthesized)
cgaggtgaggcttgctccaggcacttcatggtagctgctgctctgctctcatcccctcctagccctgtccctgaaataagcccacaaaccttgtgcatggccagggggcttttagcccca

SEQ ID NO: 539263 - DNA, 120 bp, Artificial Sequence
  ENSG00000167094_44 (sequence is synthesized)
gtacatagggccctagcctggaggagacagaagtgaagaatggggaggctgctcctcagaggccccaaggcgggtgtgcgcagtcctcgctcgggaggcgagtggcagggcccaggcccc

SEQ ID NO: 539264 - DNA, 120 bp, Artificial Sequence
  ENSG00000167094_45 (sequence is synthesized)
ttcttcattttgtgaatccagcaaactccccaagtgccctgggccaggcctgtgctcaatactaggcacaggaatgactggcatagtccttgccctgagacatgaattctaagctccaac

SEQ ID NO: 539265 - DNA, 120 bp, Artificial Sequence
  ENSG00000167094_46 (sequence is synthesized)
aggaagaaggctcccaggtgacccacagccaggagacagggcagacacagtgcgggggaagccggggtgtgggtgcatttagcgccttttagtggggacgaggatggaaaagcaggaggg

SEQ ID NO: 539266 - DNA, 120 bp, Artificial Sequence
  ENSG00000167094_47 (sequence is synthesized)
tgccaggcggggggacgcaggggccctgctggggctgtctgctgcaacaggagcacagagggcaggggcagccacagagcagaggcctgggactgggagaagggggctcctaggcatctc

SEQ ID NO: 539267 - DNA, 120 bp, Artificial Sequence
  ENSG00000167094_48 (sequence is synthesized)
ccccatctcacagccccacccctcagggtctgggtcgctgggggctgggcgggggtgatctgcaggtctttccctttggtgatgcgaagcctctgggccacaggccagtgtgagattggg

SEQ ID NO: 539268 - DNA, 120 bp, Artificial Sequence
  ENSG00000167098_0 (sequence is synthesized)
acttttcaggggacattcagaggcatcagccccttcctcctcaccagctcccagagttcccatctccatccccaatcctaaagaaggaaatcgatgccacggtcctcaaggagccctggg

SEQ ID NO: 539269 - DNA, 120 bp, Artificial Sequence
  ENSG00000167098_1 (sequence is synthesized)
gacccaggcgccctactcgaagatgtggcccacaatcccagaccccggaggattgcccagcgaggccggaacaccagcaggatggcagaggacacctccccaaacatgaatgacaacatc

SEQ ID NO: 539270 - DNA, 120 bp, Artificial Sequence
  ENSG00000167098_2 (sequence is synthesized)
ctgttgcctgtccgcaacaatgaccaagccctaggcctgactcagtgcatgctgggatgtgtgtcctggttcacctgttttgcctgctccctgagaactcaggcccagcaggttctgttt

SEQ ID NO: 539271 - DNA, 120 bp, Artificial Sequence
  ENSG00000167098_3 (sequence is synthesized)
aacacgtgcagatgcaagctgctgtgccagaagctcatggagaagacaggcattctgctcctctgtgctttcggattctggatgttttctattcacttaccatcgaaaatgaaagtctgg

SEQ ID NO: 539272 - DNA, 120 bp, Artificial Sequence
  ENSG00000167098_4 (sequence is synthesized)
caggatgacagcataaatggtccactgcagagcttgaggttgtaccaggagaaggtgcgacatcacagtggggaaatccaggacctccgaggtagcatgaaccagctcattgccaagctc

SEQ ID NO: 539273 - DNA, 120 bp, Artificial Sequence
  ENSG00000167098_5 (sequence is synthesized)
agatgatacacggagattacatcgaaaagccagactttgccctgaagtctataggggccagcattgactttgagcacacgtcagtcacctataaccatgagaaggcccactcctactgga

SEQ ID NO: 539274 - DNA, 120 bp, Artificial Sequence
  ENSG00000167098_6 (sequence is synthesized)
actggatccagctgtggaactacgcacagcccccagacgtgatccttgagcccaacgtgacacctggcaattgctgggcctttgagggtgaccgcggccaggtgaccatccaattggctc

SEQ ID NO: 539275 - DNA, 120 bp, Artificial Sequence
  ENSG00000167098_7 (sequence is synthesized)
agaaggtttacctgtccaacctcacgctgcagcacatccccaagaccatctcattgtcaggcagcctggacaccgcccccaaggacttcgtcatctatggcatggagggctcccccaagg

SEQ ID NO: 539276 - DNA, 120 bp, Artificial Sequence
  ENSG00000167098_8 (sequence is synthesized)
aggaggtgttcctgggggcatttcagtttcagccagaaaacatcatccagatgttcccactccagaaccagccggcccgggctttcagtgcggtcaaggtgaagatctcaagcaactggg

SEQ ID NO: 539277 - DNA, 120 bp, Artificial Sequence
  ENSG00000167098_9 (sequence is synthesized)
ggaacccaggcttcacttgcctgtaccgcgtgcgagtgcatggctctgtggccccgcccagagagcagcctcaccagaacccctaccctaagagagattaaaatttattctttaccccca

SEQ ID NO: 539278 - DNA, 120 bp, Artificial Sequence
  ENSG00000167098_10 (sequence is synthesized)
ctgctcctctgtgctttcggtgtgtcccagggccctgcccagtcccaggtggaggtatccctgggccctggcactgattataggacactgggcaagacactgcactgccacgtgactcag

SEQ ID NO: 539279 - DNA, 120 bp, Artificial Sequence
  ENSG00000167098_11 (sequence is synthesized)
tttccccatctgcctgatgggtgttgctgtgagaattatgaaatgaaatgatgaccatgaaaatattgtagaagccaagaaatgcttcagaagttataaagctctccccaaaccgtgtta

SEQ ID NO: 539280 - DNA, 120 bp, Artificial Sequence
  ENSG00000167100_0 (sequence is synthesized)
cgcacacgcacacacacacggagcatcctcccgtcaggtctcctggtccagccccgcccgcgcctcctgcttccagcgaacctgttccctctccccacatcccccgccctccatctcccc

SEQ ID NO: 539281 - DNA, 120 bp, Artificial Sequence
  ENSG00000167100_1 (sequence is synthesized)
cctgttccctctccccacatcccccgccctccatctcccccggctctgggacccttcccgccgacctcacccccacccccgggatggagcggctcgagcccgcccggagccccccgcggc

SEQ ID NO: 539282 - DNA, 120 bp, Artificial Sequence
  ENSG00000167100_2 (sequence is synthesized)
gcctcgagcaccatgggcctgaggggttcccggggcgccagacgctgaagatgaccgatgccggagctctcttgagtcatggcttcttcaaagctccgagaacccgtggatgaagttttt

SEQ ID NO: 539283 - DNA, 120 bp, Artificial Sequence
  ENSG00000167100_3 (sequence is synthesized)
gacctggacttggctgtgccagagacggccagactggacagcagtttacacaaggcccgggcccaactgttggccaagggccggagacaccggccatcccgctccaggcttcgggacagt

SEQ ID NO: 539284 - DNA, 120 bp, Artificial Sequence
  ENSG00000167100_4 (sequence is synthesized)
gccagctccgcggaggatggtgaaggctcggatgggcccggaggcaaggtgaccgatggctgcgggagccccctgcaccggctgcgctcgcctttgcactcaggcccggggtccccggcc

SEQ ID NO: 539285 - DNA, 120 bp, Artificial Sequence
  ENSG00000167100_5 (sequence is synthesized)
gggggctctttctgcctggatcctccggggttgcggcgcagcctggacgaggacgagccgccgccctcgccgctcacacgctaccggcccctgcacaacgctgcgtcgcacgagggcctg

SEQ ID NO: 539286 - DNA, 120 bp, Artificial Sequence
  ENSG00000167100_6 (sequence is synthesized)
gccgccgcctcctgctctccgccgcgctccgcgccctcctccgacagctcccccagcttcgtgcgccgccacccgcgcgcagagccgcacagcgaagatgacagccgtgacgccagtcct

SEQ ID NO: 539287 - DNA, 120 bp, Artificial Sequence
  ENSG00000167100_7 (sequence is synthesized)
cctgagcccgccagccccaccatcggcctcgataagaagactcgccgaaagttcctggacctgggggtcaccctgcgccgagcatccacgggcaagagccggaaggagaaaggcagcaac

SEQ ID NO: 539288 - DNA, 120 bp, Artificial Sequence
  ENSG00000167100_8 (sequence is synthesized)
cgactgtccatgggcagcagggagtcagtggaggggtccggcaggtcagggggctccccgttcctgcctttttcctggttcacggacagcggcaagggctcagcatcctcgggtagcacc

SEQ ID NO: 539289 - DNA, 120 bp, Artificial Sequence
  ENSG00000167100_9 (sequence is synthesized)
acctcccccacctgctcccctaaacacgagggcttcagccctaagaagtcagcttcccaggaatccactctgagtgatgactccacgccccccagcagcagccccaagatccccagtggg

SEQ ID NO: 539290 - DNA, 120 bp, Artificial Sequence
  ENSG00000167100_10 (sequence is synthesized)
ccctggcaggaggccaaatgttcttacccctaccacacgctgtctcagtcttcagatgagttcctggatgaacccctcccccctgtccaccactggaccagccagcaggtgggccagtgg

SEQ ID NO: 539291 - DNA, 120 bp, Artificial Sequence
  ENSG00000167100_11 (sequence is synthesized)
ctgcagagcctcaacctggaacagtatgctgctgagtttgctgcacggcaggtagacgggccgcagctgctgcagctggacggaagcaaactaaagagcctggggctcagcaactctcat

SEQ ID NO: 539292 - DNA, 120 bp, Artificial Sequence
  ENSG00000167100_12 (sequence is synthesized)
gaccgggcactggtgaagcgcaagttgaaggagatggcagcagctgccgagaaggagcgcaaggcccaggagaaggctgcgcggcagcgggagaagctccggcgccgagagcaggaggcc

SEQ ID NO: 539293 - DNA, 120 bp, Artificial Sequence
  ENSG00000167100_13 (sequence is synthesized)
aagaagagctaggggagggtgcacaggcgctggcacccggcaggggcagccactggctccgcgggcacaggcctcaccagggaggctggacctgggcgctgcacttgggctagcctggtc

SEQ ID NO: 539294 - DNA, 120 bp, Artificial Sequence
  ENSG00000167100_14 (sequence is synthesized)
ccacgctctcaggggggacatgctctctcttaccctgtcacttggtctagacccagagaccccagaaagggagaccccagggagagggcctagtaataaatcctattttgaggacttgtt

SEQ ID NO: 539295 - DNA, 120 bp, Artificial Sequence
  ENSG00000167100_15 (sequence is synthesized)
tggcacagagttcctgggggaggagcagatgaaggggagagggcagagaggccagggctgaggcaagtctgggaggctgggtcaggctgtcccattgccctcaggccatcgtggggctgg

SEQ ID NO: 539296 - DNA, 120 bp, Artificial Sequence
  ENSG00000167100_16 (sequence is synthesized)
ggtggaggggagctaggaggcctgcctgcctgcttgcctgccagaggccctgaggccgggccccagggctcagagctgggctgggcatttcagcaggagcccatgtgggagcggctcctc

SEQ ID NO: 539297 - DNA, 120 bp, Artificial Sequence
  ENSG00000167100_17 (sequence is synthesized)
tccactcttccagggggctgtgtggtgggagagctctgtcctgctcccccaagaggccagtgggcgctgcagcaagtcgcactcagggtagactcccagccaaactcctcaacaggagcg

SEQ ID NO: 539298 - DNA, 120 bp, Artificial Sequence
  ENSG00000167100_18 (sequence is synthesized)
gcgagatgacaccacacaggtctgcctctcagggcccattcaagacctggtctttgacccattctccaagccaggactcccttcacttcctgctgcttcctcagagggcacctaagtcct

SEQ ID NO: 539299 - DNA, 120 bp, Artificial Sequence
  ENSG00000167100_19 (sequence is synthesized)
ctttgggagctgagcaaacaggaactgatagggacagaggacaccacttccaccagccaaggcctaggagctgctgacctggtcagccctcaccccagccaggcagagaggcaaaacctg

SEQ ID NO: 539300 - DNA, 120 bp, Artificial Sequence
  ENSG00000167100_20 (sequence is synthesized)
ggggtccccggcagctacgagattggaaaggttcatcagccctcccccatctgccccaggcattgtcagggaatcagtgggctcagaactggcaggcggtgcaagctctgcttccctggg

SEQ ID NO: 539301 - DNA, 120 bp, Artificial Sequence
  ENSG00000167100_21 (sequence is synthesized)
ccacactgagggctggggccagctccctggatgggggtggagtttaccagcagcctggggacagcatgtgtcctttttaggaaatgtccttggaggaagtgttcatgtgtggcgctggtc

SEQ ID NO: 539302 - DNA, 120 bp, Artificial Sequence
  ENSG00000167100_22 (sequence is synthesized)
agcagctagtcccgcttccaggacactggtcagagttaccgatgaggcctgggggctcccgcttggaaacccctccagctcctcccatctgcccagacagagcggcagatggcaccaatg

SEQ ID NO: 539303 - DNA, 120 bp, Artificial Sequence
  ENSG00000167100_23 (sequence is synthesized)
catgctggctccctcattcctgcccaggggctgtggcttacggccagcaccctgtacctgggactcagcccttatcccccctctgctatctgtgctgggagaggggcttcggagggaaac

SEQ ID NO: 539304 - DNA, 120 bp, Artificial Sequence
  ENSG00000167100_24 (sequence is synthesized)
agatatgaggacactggcaccatctgggcctggtggcagggccatgggaggttggaaggcacccacatccttaaagccatcagtagctatagtgggtgcccacctgcatgtgaaggggag

SEQ ID NO: 539305 - DNA, 120 bp, Artificial Sequence
  ENSG00000167100_25 (sequence is synthesized)
gcagttctcaatttatttcaataaatccttatgatgtgccagtgaccagaatttctgtctgctccagttgttgggttggccggactctgctgggccctgagtatggtgggacaacaggtc

SEQ ID NO: 539306 - DNA, 120 bp, Artificial Sequence
  ENSG00000167100_26 (sequence is synthesized)
tgtcaccaggtgctgggccatccggcgttctgaacagatggctttgcccagtgttttactcacagtcctgagctgggccggacgtccccggtgcgtcatgtggtggtcacagggcaccgc

SEQ ID NO: 539307 - DNA, 120 bp, Artificial Sequence
  ENSG00000167100_27 (sequence is synthesized)
agtgtgcgtgtgtacgtgcgcacgtgtgggtcccctcccccagggatgcagccaggccagtctcattcagtctcctctttactgtgggtgtgggtgtcactgtcactgccacagccactg

SEQ ID NO: 539308 - DNA, 120 bp, Artificial Sequence
  ENSG00000167100_28 (sequence is synthesized)
ggagggacacacagctttaacccctgtgtgcttaggggaagggtgggggcattcagggttataaaactaactatatacacagaaggtcctagggagaaagccaccctgagcacacatgtc

SEQ ID NO: 539309 - DNA, 120 bp, Artificial Sequence
  ENSG00000167100_29 (sequence is synthesized)
tgggcacagtgggggctgggggctggagctcaggcaggatggactaggcttgtggaggagcgggtgggcatgagcatgtgaggacatgctgggagggctcaggaggtggcacagacattg

SEQ ID NO: 539310 - DNA, 120 bp, Artificial Sequence
  ENSG00000167100_30 (sequence is synthesized)
ccaaggccactgcagggcctcgagcagcttggctggatggcaagctctcggtctaacaaggttcttccactttagagttgggccctgtgagagccaccccctccgccaccgaccttcaag

SEQ ID NO: 539311 - DNA, 120 bp, Artificial Sequence
  ENSG00000167100_31 (sequence is synthesized)
ccctgagcggagggagaggctgcaggaccagcctcattccccactcacgggtgtaactcctttccccactcagtccccaggtctggagggcacccaccctcttcctaacacttcagcagg

SEQ ID NO: 539312 - DNA, 120 bp, Artificial Sequence
  ENSG00000167100_32 (sequence is synthesized)
ccaaggccagggtgcctttgtgggctgggggaataaggcaacgggacatccacttggaaggcctgtgctgtggagggtgctgagggggacccagtacccctggcagaaaagtgacagccc

SEQ ID NO: 539313 - DNA, 120 bp, Artificial Sequence
  ENSG00000167100_33 (sequence is synthesized)
tggtctcagagaggaggactgccatgggaaaatgtctctgggacaccccatcagggtggagacatccctaaccctcaggcatcgcccacagagatagggaggccaccgaggggtctccac

SEQ ID NO: 539314 - DNA, 120 bp, Artificial Sequence
  ENSG00000167100_34 (sequence is synthesized)
agagatggactggcacttagggaccatcacagacctatcaccgcagtgacttccatagagacagaacctggtcatcagggagaacccaccccctgctcccccaggaggatggtgaggggc

SEQ ID NO: 539315 - DNA, 120 bp, Artificial Sequence
  ENSG00000167100_35 (sequence is synthesized)
accacggtggggggacccagaggcggcagtccgtcctctcaggtgcagatgcacggcggcccttagctgacgcggtacgtggacgtgttcttgggctccgtgctgggcacacaccagtcg

SEQ ID NO: 539316 - DNA, 120 bp, Artificial Sequence
  ENSG00000167100_36 (sequence is synthesized)
gccgcacagcgaaggacacccagctagtgaaggccaccagagccaggatgcctgattctaagtcaagagaatttctaccaccccacactggcagccgaaggaggcaggcagggcagcaaa

SEQ ID NO: 539317 - DNA, 120 bp, Artificial Sequence
  ENSG00000167100_37 (sequence is synthesized)
gcacaggaggcactgagcaactcctggtgcctagtccaggacttcggctccacccagatagggatggaatccactctgagtgatgactccacgccccccagcagcagccccaagatcccc

SEQ ID NO: 539318 - DNA, 120 bp, Artificial Sequence
  ENSG00000167100_38 (sequence is synthesized)
cccggaaggaccctcagggcccgcagtttacagggtgaaagtctcccagctcctccgggaagggaggaggagggttctcggtgagcggctgccccctcgtccaggtgaccgatggctgcg

SEQ ID NO: 539319 - DNA, 120 bp, Artificial Sequence
  ENSG00000167100_39 (sequence is synthesized)
cgccagacgctgaagatgaccgatgccggaggggatgctaatgatgcgaaggcccaagacagtgaaggggagaagttcagtgacccacgtgaaggcacacagcaaatcagtggaccagga

SEQ ID NO: 539320 - DNA, 120 bp, Artificial Sequence
  ENSG00000167100_40 (sequence is synthesized)
taccaggaccacagggctcagcctgtgtctgtgccttggttttgcgtctgcccccaccctcctactatactgcctgccccggcgcccaccatctgggttatgattccagtggcttctctt

SEQ ID NO: 539321 - DNA, 120 bp, Artificial Sequence
  ENSG00000167100_41 (sequence is synthesized)
cccggaggcaaggttggggcaagttaggaaaacacatatacaccctcccacccctccctctcctcccacccctggataatctctccagagtgctcttccagggaaaccacatccccagac

SEQ ID NO: 539322 - DNA, 120 bp, Artificial Sequence
  ENSG00000167100_42 (sequence is synthesized)
tcggtgaagtagggagggaaggcatgctcatctccattgtacagatgagcaaaggaaggcccagagagaaggggcttgcccacagactggcacagatataggtgccaagctctacaaccc

SEQ ID NO: 539323 - DNA, 120 bp, Artificial Sequence
  ENSG00000167100_43 (sequence is synthesized)
ccagcccagtacttgttctacggttctgtttcttacgtgcagctgggcagaggagaaaatcagaagctgggaattctgggaagaaagaatcccttcggacctggaacttccttctttcct

SEQ ID NO: 539324 - DNA, 120 bp, Artificial Sequence
  ENSG00000167100_44 (sequence is synthesized)
ccttctctttcttccttcccttatgctggtcactgggacaccatgatgaacaagatacaacccaggccctcctagagctcacagtccagtgaggataaagacctctaatcaggcacttat

SEQ ID NO: 539325 - DNA, 120 bp, Artificial Sequence
  ENSG00000167100_45 (sequence is synthesized)
tagctggggtactaaggccaggcgggaggcgcatagcagagacacctgacccagcctgggggaatctcggtggtctgcctgtaggaagtgacaccttgcctgagaccgcctccattccta

SEQ ID NO: 539326 - DNA, 120 bp, Artificial Sequence
  ENSG00000167100_46 (sequence is synthesized)
ctaacctggcttggttctagccccatgtcctccagatggctgcctgctctcccaaaggcttcaggtcctgatgcctgacatgagttatcatgtcctgtgtgcaggcccagctcctggctc

SEQ ID NO: 539327 - DNA, 120 bp, Artificial Sequence
  ENSG00000167100_47 (sequence is synthesized)
atgcacaggaggcactgagcaactcctggtgcctagtccaggacttcggctccacccagatagggatggtgggttgggggtgaactctcctcagtggcatgcacctttttctgtctagga

SEQ ID NO: 539328 - DNA, 120 bp, Artificial Sequence
  ENSG00000167100_48 (sequence is synthesized)
gagcaaggctggcccagggtgcccacggagtcctgacctctgactctgcaaggtgctcaggtcacaggccaagcctccccctcactctccttggtctctgcccagttcctggatgaaccc

SEQ ID NO: 539329 - DNA, 120 bp, Artificial Sequence
  ENSG00000167100_49 (sequence is synthesized)
ggatttgaagtccctcatcctgacctttgaccctcagcccagcctcctgggctgaccttttcactccatctgtggccaccaccctgacctctgacctctaggcaaggtccttggtctaat

SEQ ID NO: 539330 - DNA, 120 bp, Artificial Sequence
  ENSG00000167100_50 (sequence is synthesized)
cttttgagttgtagcatgaatccctagtttgacttgaaactctagtccatgacttcagtgtgaccttcaagctccagccctggtctccaggctgaccttgccctctaggatgacccttga

SEQ ID NO: 539331 - DNA, 120 bp, Artificial Sequence
  ENSG00000167100_51 (sequence is synthesized)
tgcatatgagtgtcctggtatcatgggaagccacatctccccctggtcagcttggtctgattctgtctcagaggctagtggtaatagtgggcagggggaggctgtaggaagggggtggtg

SEQ ID NO: 539332 - DNA, 120 bp, Artificial Sequence
  ENSG00000167100_52 (sequence is synthesized)
gcctctgacctataagctgggaggttcctggcctgtctcctgctctctgctgagttgcttggggcagggatggtgaaaagagcccccaggaagtctctggaagtgaggagggtccttggg

SEQ ID NO: 539333 - DNA, 120 bp, Artificial Sequence
  ENSG00000167100_53 (sequence is synthesized)
cactaactgtgtgaccttgggcaagtgactccccatctctgggcctcaggaggttgggcaggtccgggccaaggctgaaatactgagtggaggaatggtgggggaggaggaggaagcgcc

SEQ ID NO: 539334 - DNA, 120 bp, Artificial Sequence
  ENSG00000167100_54 (sequence is synthesized)
taatacccccaaccctcatctttcccaaccacactcattccaaattcttgctctgggggttctgatccatgggcaggtcacggtgtgggaggcggaggctccactccagggaggatttgg

SEQ ID NO: 539335 - DNA, 120 bp, Artificial Sequence
  ENSG00000167100_55 (sequence is synthesized)
agctccacagagtacacctggggcaaaaggagcctgggcgtgggaggccaggactgggaaggttctgggactctctccctcaccccggactcctccccagagcctggggctcagcaactc

SEQ ID NO: 539336 - DNA, 120 bp, Artificial Sequence
  ENSG00000167103_0 (sequence is synthesized)
agcccgggaagctgctgcgggggcgatggctgcgccgagcccggggccccgcgaggtcctggccccctcccctgaggctggatgcagagcagtcacctccagccggcgggggcttctctg

SEQ ID NO: 539337 - DNA, 120 bp, Artificial Sequence
  ENSG00000167103_1 (sequence is synthesized)
gcgcctccgagacaagcagtctcgcctgggcctgtttgagatcagcccggggcatgaactgcatgggatgacgtgcatgatgcaggcagggctgtgggctgccacccaggtctccatgga

SEQ ID NO: 539338 - DNA, 120 bp, Artificial Sequence
  ENSG00000167103_2 (sequence is synthesized)
ccacccacccacggggccgccctcccgggacgatttctcggaggtcctaacccaggttcacgagggcttcgagctgggcacgctggccggccccgcctttgcctggctgcgccgctccct

SEQ ID NO: 539339 - DNA, 120 bp, Artificial Sequence
  ENSG00000167103_3 (sequence is synthesized)
gggcctggcggaggaggactatcaggctgccctgggccccggcggcccctacctgcagttcctcagcacctccaagagcaaggccagcttcttcctgtcccacgaccagcgcttcttcct

SEQ ID NO: 539340 - DNA, 120 bp, Artificial Sequence
  ENSG00000167103_4 (sequence is synthesized)
gaagacccaggggcgccgagaggtgcaggctctgctcgcccacctgccccgctacgtgcagcacctgcagcggcacccgcactcgctgctggcgcggttgctgggagtgcacagtctgcg

SEQ ID NO: 539341 - DNA, 120 bp, Artificial Sequence
  ENSG00000167103_5 (sequence is synthesized)
ggtggaccggggaaagaagacgtacttcatcgtcatgcagagcgtcttctaccccgccggccgcatctccgagaggtatgacatcaaaggctgcgaggtgagccgctgggtggatcccgc

SEQ ID NO: 539342 - DNA, 120 bp, Artificial Sequence
  ENSG00000167103_6 (sequence is synthesized)
ccctgagggcagcccccttgttctggtgctgaaggacctcaactttcagggcaagaccatcaacctggggccccagcggagctggttcctccgccagatggaactggataccaccttcct

SEQ ID NO: 539343 - DNA, 120 bp, Artificial Sequence
  ENSG00000167103_7 (sequence is synthesized)
ccgggagctcaacgtgctggattacagcctcctgatagccttccaacgtctccacgaggatgagaggggcccgggcagcagcctcatcttccgcacggccaggtctgtgcaaggggcaca

SEQ ID NO: 539344 - DNA, 120 bp, Artificial Sequence
  ENSG00000167103_8 (sequence is synthesized)
gagcccggaagagtcgagagcccaaaaccgccggctgctgcccgacgcccccaacgccctacacatcctggacgggcccgagcagcgctatttcctgggcgtcgtggatctcgccacagt

SEQ ID NO: 539345 - DNA, 120 bp, Artificial Sequence
  ENSG00000167103_9 (sequence is synthesized)
cggctggagcacctgtggaagacactgcgctacccaggccggaccttctccactgtcagcccggctcgctacgcccgtcgcctctgccagtgggtggaggcgcacacggagtgacgggcg

SEQ ID NO: 539346 - DNA, 120 bp, Artificial Sequence
  ENSG00000167103_10 (sequence is synthesized)
cccggccccactctccggatctggacgatgggctcacgccaggaacgccggttcccccgggcccgggcatctcgcctgcgcttcctcctgatggtcgccagagggcagcatcccctaact

SEQ ID NO: 539347 - DNA, 120 bp, Artificial Sequence
  ENSG00000167103_11 (sequence is synthesized)
aataccgtaaccgcgcagtcccgtttgacggtggtgccgtgcccagcatcgtgccaaggactcccctactttagctcatttaatcctcaaaaaatgctattattctctttttacagacca

SEQ ID NO: 539348 - DNA, 120 bp, Artificial Sequence
  ENSG00000167103_12 (sequence is synthesized)
tgaaatggaggctcagggggtgaagggactgatcaagatcattcagcaataaatgctggaaccaggactcaaccatggcttttggattccggagcctgtattcttaaccaccagctcctg

SEQ ID NO: 539349 - DNA, 120 bp, Artificial Sequence
  ENSG00000167103_13 (sequence is synthesized)
cagcttggtcctcatgatctgggcaaggggggaggctgaaggctgcagccctcttgtcatccagatggggaaactgaggcccagagactttaaggggcgtaagcacgggtaagtggcaag

SEQ ID NO: 539350 - DNA, 120 bp, Artificial Sequence
  ENSG00000167103_14 (sequence is synthesized)
gtcggccctgagtacccaggcctcccggccccctgctcctggcctgatactctagggatgcaggtgggagaagcaggggtcctgggggctgcctggagctctgggaggcattctgaacgg

SEQ ID NO: 539351 - DNA, 120 bp, Artificial Sequence
  ENSG00000167103_15 (sequence is synthesized)
ggtctactactgatctcaggtgagctctgccctcctctgaaagtcacttttctcatcagttaaatgggggcaagggtccgtggtccgaccaaggtcttggcttcacagacatcaccagga

SEQ ID NO: 539352 - DNA, 120 bp, Artificial Sequence
  ENSG00000167103_16 (sequence is synthesized)
gcctgcatgcccctgatcactccttctccttcctccaggaaactccagcctggcctctgaccccagttcaatccgaccatgcccaagcccaagcgggcctttcctccagaactgctccgg

SEQ ID NO: 539353 - DNA, 120 bp, Artificial Sequence
  ENSG00000167103_17 (sequence is synthesized)
ggcctggctgtgtgactggagcaaggtgctaaacctctctgtgcctcgctggtctaatctgtaaaatgaaggaatggaaacagacctcattaactcattaaatatttgttgagcacctgc

SEQ ID NO: 539354 - DNA, 74 bp, Artificial Sequence
  ENSG00000167103_18 (sequence is synthesized)
tctgtctctacgaaaaacacacaaattagccaggcgtggtggtacccgcctataatcccagctactcaggaggc

SEQ ID NO: 539355 - DNA, 120 bp, Artificial Sequence
  ENSG00000167103_19 (sequence is synthesized)
accccgggttgtggagtttggggatcctcatccggcgccctctccccttccaggagtgcacagtctgcgggtggaccggggaaagaaggtatgacatcaaaggctgcgaggtgagccgct

SEQ ID NO: 539356 - DNA, 120 bp, Artificial Sequence
  ENSG00000167103_20 (sequence is synthesized)
gagtctgggaacgtgcctggcttgaactcatggcctggtgctggtgatccagagtggatgagatacactcaggccttgccgtgggtcactcttgtccccctggcatccctgggaggggcc

SEQ ID NO: 539357 - DNA, 120 bp, Artificial Sequence
  ENSG00000167103_21 (sequence is synthesized)
tcagggcaagaccatcaacctggatggaactggataccaccttcctccgggagctcaacgtgctggattacagcctcctgatagccttccaacgtctccacgaggatgagaggggcccgg

SEQ ID NO: 539358 - DNA, 120 bp, Artificial Sequence
  ENSG00000167103_22 (sequence is synthesized)
ggagcgggcggctggagggcgacagccggcctccctcactccctgtcccggcccccagacgtacttcatcgtcatgcagagcgtcttctaccccgccggccgcatctccgagagggcccc

SEQ ID NO: 539359 - DNA, 120 bp, Artificial Sequence
  ENSG00000167103_23 (sequence is synthesized)
tgggagggcagaattcccagtggcggggaaggccccctgaagagagaaacagagcggccctaatctgggagggtcagggccggatggtggacagatcggggaggagaggagggcgagggc

SEQ ID NO: 539360 - DNA, 120 bp, Artificial Sequence
  ENSG00000167103_24 (sequence is synthesized)
cgaaggcgagagaggcggtgccgagacctgggagcgagatccacgtgcacaggtcggggaagggggccgggtgggagccgctccagccaggcctgggcagtgacctctttctcttgcccc

SEQ ID NO: 539361 - DNA, 120 bp, Artificial Sequence
  ENSG00000167103_25 (sequence is synthesized)
ggcttcacttggccagcctgtgagtctgggaacgtgcctggcttgaactcatggcctggtgctggtgatccagagtggatgagatacactcaggccttgccgtgggtcactcttgtcccc

SEQ ID NO: 539362 - DNA, 120 bp, Artificial Sequence
  ENSG00000167103_26 (sequence is synthesized)
gccaaggaagggtccaggtgccgcggatcttgagaaggaggcgtggcctggcgctgggattggcgccggatgcaccccgggttgtggagtttggggatcctcatccggcgccctctcccc

SEQ ID NO: 539363 - DNA, 120 bp, Artificial Sequence
  ENSG00000167103_27 (sequence is synthesized)
tgtgtggagcaccgtggctggcacatgatgagcgctcaggtgggggcactgatgctccggcagggccccagcggagctggttcctccgccagatggaactggataccaccttcctccggg

SEQ ID NO: 539364 - DNA, 120 bp, Artificial Sequence
  ENSG00000167104_0 (sequence is synthesized)
atgctgcggatcctgtgcctggcactctgcagcctgctgactggcacgcgagctgaccctggggcactgctgcggttgggcatggacatcatgaaccaggtccagagcgccatggatgag

SEQ ID NO: 539365 - DNA, 120 bp, Artificial Sequence
  ENSG00000167104_1 (sequence is synthesized)
agtcatatcctggagaagatggcagccgaggcaggcaagaaacagccagggatgaaacctatcaagggcatcaccaatttgaaggtgaaggatgtccagctgcccgtcatcacactgaac

SEQ ID NO: 539366 - DNA, 120 bp, Artificial Sequence
  ENSG00000167104_2 (sequence is synthesized)
tttgtacctggagtgggcatcttccaatgtgtgtccacaggcatgaccgtcactggcaagagcttcatgggagggaacatggagatcatcgtggccctgaacatcacagccaccaaccgg

SEQ ID NO: 539367 - DNA, 120 bp, Artificial Sequence
  ENSG00000167104_3 (sequence is synthesized)
cttctgcgggatgaggagacaggcctccccgtgttcaagagtgagggctgtgaggtcatcctggtcaatgtgaagactaacctgcctagcaacatgctccccaagatggtcaacaagttc

SEQ ID NO: 539368 - DNA, 120 bp, Artificial Sequence
  ENSG00000167104_4 (sequence is synthesized)
ctggacagcaccctgcacaaagtcctccctgggctgatgtgtcccgccatcgatgcagtcctggtgtatgtgaacaggaagtggaccaacctcagtgaccccatgcctgtgggccagatg

SEQ ID NO: 539369 - DNA, 120 bp, Artificial Sequence
  ENSG00000167104_5 (sequence is synthesized)
gccagctacatccaactggacttcagtcctgtggtgcagcagcaaaagggcaaaaccatcaagcttgctgatgccggggaggccctcacgttccctgagggttatgccaaaggctcgtcg

SEQ ID NO: 539370 - DNA, 120 bp, Artificial Sequence
  ENSG00000167104_6 (sequence is synthesized)
cagctgctgctcccagccaccttcctctctgcagagcttgcccttctgcagaagtcctttcatgtgaatatccaggatacaatgattggtgagctgcccccacaaaccaccaagaccctg

SEQ ID NO: 539371 - DNA, 120 bp, Artificial Sequence
  ENSG00000167104_7 (sequence is synthesized)
gctcgcttcattcctgaagtggctgtagcttatcccaagtcaaagcccttgacgacccagatcaagataaagaagcctcccaaggtcactatgaagacaggcaagagcctgctgcacctc

SEQ ID NO: 539372 - DNA, 120 bp, Artificial Sequence
  ENSG00000167104_8 (sequence is synthesized)
cacagcaccctggagatgttcgcagctcggtggcggagcaaggctccaatgtccctctttctcctagaagtgcacttcaatctgaaggtccagtactcagtgcatgagaaccagctgcag

SEQ ID NO: 539373 - DNA, 120 bp, Artificial Sequence
  ENSG00000167104_9 (sequence is synthesized)
atggccacttctttggacagattactgagcttgtcccggaagtcctcatcgattggcaacttcaatgagagggaattaactggcttcatcaccagctatctcgaagaagcctacatccca

SEQ ID NO: 539374 - DNA, 120 bp, Artificial Sequence
  ENSG00000167104_10 (sequence is synthesized)
gttgtcaatgatgtgcttcaagtggggctcccactcccggactttctggccatgaattacaacctggctgagctggacatagtagagaatgccctgatgctggacttgaagctgggctga

SEQ ID NO: 539375 - DNA, 120 bp, Artificial Sequence
  ENSG00000167104_11 (sequence is synthesized)
atgctgcggatcctgtgcctggcactctgcagcctgctgactggcacgcgagctgaccctggggcactgctgcggttgggcatggacatcatgaaccgtgaggtccagagcgccatggat

SEQ ID NO: 539376 - DNA, 120 bp, Artificial Sequence
  ENSG00000167104_12 (sequence is synthesized)
gagagtcatatcctggagaagatggcagccgaggcaggcaagaaacagccagggatgaaacctatcaagggcatcaccaatgagcagggtcattttgaggaggaaatgaggttggaaagt

SEQ ID NO: 539377 - DNA, 120 bp, Artificial Sequence
  ENSG00000167104_13 (sequence is synthesized)
caaatttcaactctgcatgcaacatgaactcattgaatgtacgtgaaattaaatgaaaacatcctcaaatggtagagctggaaaggcatcaacaatcatctaatgacaagaggaaactgg

SEQ ID NO: 539378 - DNA, 120 bp, Artificial Sequence
  ENSG00000167104_14 (sequence is synthesized)
ttcctctgccagtgccacatgagattgatcagtaggggctgcctgaaacgatgcacttgggagggctctgaggcactgtctgcactcggcaggaactaggactgtgatcaactagcaatg

SEQ ID NO: 539379 - DNA, 120 bp, Artificial Sequence
  ENSG00000167105_0 (sequence is synthesized)
ttgaactcctaggctcaagtgatcctcctacctcaacctccagagtaactgggactacaggaaagctcagtggcccccaagccaggatgtcccaagcttgggtccccggcctcgcgccca

SEQ ID NO: 539380 - DNA, 120 bp, Artificial Sequence
  ENSG00000167105_1 (sequence is synthesized)
cttgggtccccggcctcgcgcccaccttgctgttcagcctgctggctggcccccaaaagattgcagccaaatgtggtctcatccttgcctgccccaaaggattcaaatgctgtggtgaca

SEQ ID NO: 539381 - DNA, 120 bp, Artificial Sequence
  ENSG00000167105_2 (sequence is synthesized)
gctgctgccaggagaacgagctcttccctggccccgtgaggatcttcgtcatcatcttcctggtcatcctgtccgtcttttgcatctgtggcctggctaagtgcttctgtcgcaactgca

SEQ ID NO: 539382 - DNA, 120 bp, Artificial Sequence
  ENSG00000167105_3 (sequence is synthesized)
gagagccggagccagacagcccagtggattgccgggggcccctggaactgccctccatcatccccccagagagggtcagagtatccctttctgcgcccccacccccctacagtgaggtga

SEQ ID NO: 539383 - DNA, 120 bp, Artificial Sequence
  ENSG00000167105_4 (sequence is synthesized)
ttctgaagcccagcctgggcccaactcccacagagccaccccctccctacagcttcaggcctgaagaatataccggggatcagaggggcattgacaacccggccttctgagtcacctcct

SEQ ID NO: 539384 - DNA, 120 bp, Artificial Sequence
  ENSG00000167105_5 (sequence is synthesized)
gcctggaatcttgccatcagcaacctcctccccagtgcctcctggatcaagctagagactgctggcaccccaggaatgtccctgcccatcctgccgtgtctctgttcattcttggattta

SEQ ID NO: 539385 - DNA, 120 bp, Artificial Sequence
  ENSG00000167105_6 (sequence is synthesized)
acttattactttttctgcttctgtttccaccccagctgcctctcttgtcctgagggttaggctggagtgacagtttccgcccaccccccagcccaagaaagaggctgccggaaagaaaat

SEQ ID NO: 539386 - DNA, 120 bp, Artificial Sequence
  ENSG00000167105_7 (sequence is synthesized)
gctgaccattggaggtgcccaacagtagaatgggctactgtgaggggtagtaagagccccatttctggaggtatgcaaatcttgactggacagccagctctgagattttatcagggcact

SEQ ID NO: 539387 - DNA, 120 bp, Artificial Sequence
  ENSG00000167105_8 (sequence is synthesized)
tctatacctgtgggacattggactggatgagccctgagccagcttccactcctacctgaatagagaactcactgcacccacccacaacacatgataaacacatgtcctcactgaatgtta

SEQ ID NO: 539388 - DNA, 120 bp, Artificial Sequence
  ENSG00000167105_9 (sequence is synthesized)
ctgattgcggctgagggcctgcctctggctgtgtggggaggtgggtggagaggtgagcccaggcactgctgaggggtgcggtgatggggtcgctgcgccgcaatcccaccactgatgagc

SEQ ID NO: 539389 - DNA, 120 bp, Artificial Sequence
  ENSG00000167105_10 (sequence is synthesized)
cacctgggaggtctgggaggacagtccatccatgggccgccctcggagagaggcttgttctagatgtattggctgtctgttttttgatgtctctgtgtgccaaacagcctggaaatgggg

SEQ ID NO: 539390 - DNA, 120 bp, Artificial Sequence
  ENSG00000167105_11 (sequence is synthesized)
gtcccttgtgtgggtttcccaatcccttccgcccaaggctttcctgggacacatggagcccagctctctggctgtcttaccatgagaagttggtaagttggctgtgagggggttggatcc

SEQ ID NO: 539391 - DNA, 120 bp, Artificial Sequence
  ENSG00000167105_12 (sequence is synthesized)
aggaagcagccctgggacagcccattctgctgttgatagcaggaaaccacctgctgggagacaatgggggtggggaaaagcccaggagagcagtgggtggggctgggcatccgtggagtg

SEQ ID NO: 539392 - DNA, 120 bp, Artificial Sequence
  ENSG00000167105_13 (sequence is synthesized)
gggctttaggagaccttgaacggccccaccctggaatctcctacaggaaggtgaggaggtggcaggttccacccttctctaccagccccgctcgctcgtgggagttaaccccctagggga

SEQ ID NO: 539393 - DNA, 120 bp, Artificial Sequence
  ENSG00000167105_14 (sequence is synthesized)
gaagagtcttcactggggttcgacccatgggggcctggcatagtcatgcagaatggggcgggacaatgccaatgccttgggactcagacagggctgagtgcctccaccctgatttttgcc

SEQ ID NO: 539394 - DNA, 120 bp, Artificial Sequence
  ENSG00000167105_15 (sequence is synthesized)
tctgcactgcgcccccacagcccactcaatgccagcctccttctccaggcagagagccccatgtcaatgctggccaaagctctcaggaggattggaggtagaactggccctggtatgcca

SEQ ID NO: 539395 - DNA, 120 bp, Artificial Sequence
  ENSG00000167105_16 (sequence is synthesized)
acaggggtgcctcttttagtgctctcccaataatgctcatcctgggggcatcaggacgcaggcaggtggcagagctgggggcagcttgatggcacaggcagccccaaagatgccaggaac

SEQ ID NO: 539396 - DNA, 120 bp, Artificial Sequence
  ENSG00000167105_17 (sequence is synthesized)
agggactgtccgggtgtgggttcccagtgagatagggccctggaaggagtgcagcagttactgacaatatagtgccagggttggccataggagaatgagcccaagcgtaagtggaagttt

SEQ ID NO: 539397 - DNA, 120 bp, Artificial Sequence
  ENSG00000167105_18 (sequence is synthesized)
ccctttactttcagggattggtcaggggtggcagaaaacatgtgggttctttgtgtagatgtggctagttccaattagagaagtcctgcagctgatgttgccctcaccgtgatagcagga

SEQ ID NO: 539398 - DNA, 120 bp, Artificial Sequence
  ENSG00000167105_19 (sequence is synthesized)
ggatgttgagaaatgggcttgggagacctggaggagaagttaccctcggcccagacgttgccttcctttcatcacagggcctttaactcctcctagggagtagcagagtggccctaggga

SEQ ID NO: 539399 - DNA, 120 bp, Artificial Sequence
  ENSG00000167105_20 (sequence is synthesized)
aagtggccatcctgaaacctagtgttgctgtgacctggtgacagaaatggaaacctctgtggctcttctggtcatccttggtgggagtgggaatggtgtcacctttctagagggccatct

SEQ ID NO: 539400 - DNA, 120 bp, Artificial Sequence
  ENSG00000167105_21 (sequence is synthesized)
ggcaccatgtaatcacgccacagatctttacgaagctcctgctatgtaggaaacactatgcctggcactgggtatccattaaaatgtaaaatgcacgtgacctggcaattccacttctag

SEQ ID NO: 539401 - DNA, 120 bp, Artificial Sequence
  ENSG00000167105_22 (sequence is synthesized)
aaatgagccttcagaagtgctcatacaaaagagctcaataagtatcatgcactaattcattgtgccaccagagctccctatgcagccttttaaaagaataaataggatctgtagcaccaa

SEQ ID NO: 539402 - DNA, 120 bp, Artificial Sequence
  ENSG00000167105_23 (sequence is synthesized)
atccttccagctccttcccgcctgagctttggacacctgggccagcacttagccccagctcagttcctccagtgctgggggaccctgggatgtccccaccctctttgggactgtgtctct

SEQ ID NO: 539403 - DNA, 80 bp, Artificial Sequence
  ENSG00000167106_0 (sequence is synthesized)
attctccaagcggcgcctcgcagcatcgggctctggctgcagcgtcggggccgcagggggcggcgctgctgctcgaaggg

SEQ ID NO: 539404 - DNA, 80 bp, Artificial Sequence
  ENSG00000167106_1 (sequence is synthesized)
gatcgaggaggaggcggcgcctccgctgcccggggccggcccggtgcctgccctgaggaggcccgaggccggacgttccc

SEQ ID NO: 539405 - DNA, 120 bp, Artificial Sequence
  ENSG00000167106_2 (sequence is synthesized)
ctgaggaggcccgaggccggacgttcccggcccgcagcgaccccgacgcgcctcctggagaggcccccgagctcctggcagccccctgggggtgccccaccttccccggcttcacctgcg

SEQ ID NO: 539406 - DNA, 80 bp, Artificial Sequence
  ENSG00000167106_3 (sequence is synthesized)
gccctccgccctcagccttaccggccagccagcccgcccgccgccctcagtctcaccggtccgcccggccgcgcggcgtg

SEQ ID NO: 539407 - DNA, 120 bp, Artificial Sequence
  ENSG00000167106_4 (sequence is synthesized)
gcggcgtgagctccccggacatcgcgtctcgggatgctgcaagccagcgcggccgctcgcgcgcagccccgcacctccgcccctgcctctgcctcctgggccatgccctgctgtttacat

SEQ ID NO: 539408 - DNA, 120 bp, Artificial Sequence
  ENSG00000167106_5 (sequence is synthesized)
gccggtgaggtccccggccgctccgaacccctccgagccccggctccccgagggtgaagcccgccggcccgcgaactggactggtggatctctcagacctggggccccggactccgatct

SEQ ID NO: 539409 - DNA, 120 bp, Artificial Sequence
  ENSG00000167106_6 (sequence is synthesized)
ccgccgtctccgccaccatcagggcgggatccggctctggtgttttgaggagggggtgtggtgtagggaaaggaatcccgtccctctccaccttttttcgccttcggggcttcagactca

SEQ ID NO: 539410 - DNA, 120 bp, Artificial Sequence
  ENSG00000167106_7 (sequence is synthesized)
gggaactcgctcatggctttcttgatgaagaagaagaaattcaaattccaaactactttcaccctggaggagctgactgcggttcccttcgtgaacggggtcctcttctgcaaggtccgg

SEQ ID NO: 539411 - DNA, 120 bp, Artificial Sequence
  ENSG00000167106_8 (sequence is synthesized)
ctgctggatggaggggattttgtcagcttgtcgtcaagggaggaggtacaggagaactgtgtgcggtggcgaaagaggttcaccttcgtgtgtaagatgagtgctaacccggccaccggc

SEQ ID NO: 539412 - DNA, 120 bp, Artificial Sequence
  ENSG00000167106_9 (sequence is synthesized)
ctgctggacccctgtgtcttccgtgtgtctgtgcgcaaggagctgaaaggcgggaaggcttattccaagctgggcttcgctgacttgaacctggccgagtttgcgggctcgggctccacg

SEQ ID NO: 539413 - DNA, 120 bp, Artificial Sequence
  ENSG00000167106_10 (sequence is synthesized)
gtgcgctgctgcctgctcgagggatatgacacgaagaacactcgccaggacaactccatccttaaggtcaccattggtatgttcctgctctctggagatccctgcttcaagacgccacca

SEQ ID NO: 539414 - DNA, 120 bp, Artificial Sequence
  ENSG00000167106_11 (sequence is synthesized)
tcgactgccaagtccatctccatcccaggccaggattcctccctgcagctgacgtgtaagggtggtgggaccagcagtgggggcagcagcaccaactccctgactgggtcccggcccccc

SEQ ID NO: 539415 - DNA, 120 bp, Artificial Sequence
  ENSG00000167106_12 (sequence is synthesized)
aaggctcggcccactattctcagctcagggctgccagaggaacccgaccagaacctgtccagccctgaggaggtgttccactctggccactcccgcaactccagctatgccagccagcag

SEQ ID NO: 539416 - DNA, 120 bp, Artificial Sequence
  ENSG00000167106_13 (sequence is synthesized)
tccaagatctccggctacagcacagagcactcgcgctcctccagcctctcagacctgacgcaccgccgcaacacgtccaccagcagcagcgcctctgggggccttggcatgaccgtggag

SEQ ID NO: 539417 - DNA, 120 bp, Artificial Sequence
  ENSG00000167106_14 (sequence is synthesized)
ggccctgagggcagtgagcgggagcaccggcccccggagaagccgccgcggccaccccggcccctgcatctgtccgatcgctctttcaggcggaagaaggactcggtggagagccacccg

SEQ ID NO: 539418 - DNA, 120 bp, Artificial Sequence
  ENSG00000167106_15 (sequence is synthesized)
acctgggtggacgacacgcggatcgatgcggatgccatcgtggagaagatcgtgcagagccaggatttcacagatggcagcaacaccgaggacagcaacctccggctgttcgtgagccgc

SEQ ID NO: 539419 - DNA, 120 bp, Artificial Sequence
  ENSG00000167106_16 (sequence is synthesized)
gatggctctgccacgctgagcggcatccagcttgccaccagggtctcttctggggtctacgagccagttgtgattgaaagccattgaggagcaggtgtccgggctggagaagagtcctgc

SEQ ID NO: 539420 - DNA, 120 bp, Artificial Sequence
  ENSG00000167106_17 (sequence is synthesized)
tttctctggagtccagacctgtatcattccatgaggaactttccccttcagatcacctctgcgccacatctcatccatgcctcctccatgcactccagtccacactccccgtagcatcat

SEQ ID NO: 539421 - DNA, 120 bp, Artificial Sequence
  ENSG00000167106_18 (sequence is synthesized)
tccattgcccctcccatccatgctgggaccctcctggcccaccaaggcccaggcaccactgtgaatattctcctctgaaccactagagggcaggccaggcaggccaggcgggcccgtgca

SEQ ID NO: 539422 - DNA, 120 bp, Artificial Sequence
  ENSG00000167106_19 (sequence is synthesized)
tctggctgaggacatgcagcggctcctaaatgtagagatgcctgtggctgagggggcctctctacctgtgtccccactcactccaggagcactggctttggtcacgtcttagcagcaggg

SEQ ID NO: 539423 - DNA, 120 bp, Artificial Sequence
  ENSG00000167106_20 (sequence is synthesized)
ccttgctccgttgttcccttgccctggtggtgggggggccagaccacctccggaatcctgccacctgtgactgtctgactgcttagtgcttcagctgtcccttccttgtgtcctggggga

SEQ ID NO: 539424 - DNA, 120 bp, Artificial Sequence
  ENSG00000167106_21 (sequence is synthesized)
cctgctggcggcctcttcctgggagccatgacctcagaccccacccacactccagatcgagacccctgcctccccccggcaaatgtcctcccgctgccttgcagcctgcactttgcacat

SEQ ID NO: 539425 - DNA, 120 bp, Artificial Sequence
  ENSG00000167106_22 (sequence is synthesized)
gctcacccccagcacagtcccactggcccctcacctccccttccctgagctccttcccaaggactcctggtcactgcctgctgtgcagtcagaggcccagggtccagcagcccggcggga

SEQ ID NO: 539426 - DNA, 120 bp, Artificial Sequence
  ENSG00000167106_23 (sequence is synthesized)
acgggtgctgcctcttcctccagttagctccagctcaggtctgagacccgtgctgagaaaggtctgagcaccgaccgtgccctctgcccagggctgggtcctgagcagctggttttcctg

SEQ ID NO: 539427 - DNA, 120 bp, Artificial Sequence
  ENSG00000167106_24 (sequence is synthesized)
caggaaggttggagcaagcaaagtccttctctgccctcagggtcagctgcccagactggggcggatgccagagaggcaggtgggctgtggctggactggtccggagctggcttccttacc

SEQ ID NO: 539428 - DNA, 120 bp, Artificial Sequence
  ENSG00000167106_25 (sequence is synthesized)
agaaaagcctcagccttcctctggaagcatcccccgttctgggcaagggggaagggctcctttaaggggtgtgctttcccagtggggagcagtctggccctgccccctactaaagcctct

SEQ ID NO: 539429 - DNA, 120 bp, Artificial Sequence
  ENSG00000167106_26 (sequence is synthesized)
gctctcagcactttcccccaagtccttgtaacttgcttgaaggtgggttctggctgccagccagtccctggacaaactctcctgccccttttaaatttcactcattttgtataaacccag

SEQ ID NO: 539430 - DNA, 120 bp, Artificial Sequence
  ENSG00000167106_27 (sequence is synthesized)
caggctggtgtttacttagccctgtagcttttttcattttttctttccgtctttcttcttgagttcacggttcaatattgcctcctcgccctggtgaggggaggtgctgcttttctgccc

SEQ ID NO: 539431 - DNA, 120 bp, Artificial Sequence
  ENSG00000167106_28 (sequence is synthesized)
cacctgccggctggttccagcagcgctggggcccagctggggggccgggatgggggcttctctctctgggaggggtgcaggtgccctccccaggctgggagggttccttccctagctccc

SEQ ID NO: 539432 - DNA, 120 bp, Artificial Sequence
  ENSG00000167106_29 (sequence is synthesized)
catctgcccccgctggtgagagttgggcttcttggtcttggaactccctggcattgggaacagagcatttccagcatttgttgttgttttactcacctaacccttagaaaatgaatgtta

SEQ ID NO: 539433 - DNA, 120 bp, Artificial Sequence
  ENSG00000167106_30 (sequence is synthesized)
gaaggtgcctgccgaggcgggacagagtgttcgctcgcgctggagaaggctctgctcagccctgagagtcccttcctgccccaccgatactggcactttaaaaaggaagctgaccgcaca

SEQ ID NO: 539434 - DNA, 120 bp, Artificial Sequence
  ENSG00000167106_31 (sequence is synthesized)
gtgtccagacgaattggcccccagaagatggggagttctgtcctgcccttctgtgtctgcgtgacctcacccagcctaggagggaggtgcattcagggtagatttgcctctcattcaaag

SEQ ID NO: 539435 - DNA, 120 bp, Artificial Sequence
  ENSG00000167106_32 (sequence is synthesized)
ttctggggctttgggtggaaaacagccagctttggcgctgttggggagactcctccagaccaggaaccccagaaggagacagagcctgccacatcctcccacgccaggccctgggccagg

SEQ ID NO: 539436 - DNA, 120 bp, Artificial Sequence
  ENSG00000167106_33 (sequence is synthesized)
gtgattggactgagaatttggccacaaccaaattgatgctggctggaaccagaggccagaaagcctggccttgtccccatgtgggagccctgtcctcagccctcttgtccccttgagctc

SEQ ID NO: 539437 - DNA, 120 bp, Artificial Sequence
  ENSG00000167106_34 (sequence is synthesized)
agtgaattcccaccaggtgcccacagctcctggacttcaaattctatatattgagagagttggagagtatatcagagatatttttggaaaggagttggtctatgcaatgtcagtttggaa

SEQ ID NO: 539438 - DNA, 120 bp, Artificial Sequence
  ENSG00000167106_35 (sequence is synthesized)
tcttcttgaaagtttaatgtttttattaggagatttaaagaaaataaaggtctacaatatctttaggttttttttttttcctgtttaccgcacaaactgaccacatggcatgtctatcag

SEQ ID NO: 539439 - DNA, 120 bp, Artificial Sequence
  ENSG00000167106_36 (sequence is synthesized)
gatggagggtgtccatgttctcctctgtctttagggaggtgataaggagatgggcggaggggtgtttttttctttgactcccctcctttctaacagaatgttgccaccactgcttgagtg

SEQ ID NO: 539440 - DNA, 120 bp, Artificial Sequence
  ENSG00000167106_37 (sequence is synthesized)
ggctgtgtttgttcctctgtcccagcttctgttgtagaaaataacattgttaggggaactcaggctagtgtcagcgtcttggtttggggagaaaaaattaaatgtttcggtttttgtttc

SEQ ID NO: 539441 - DNA, 120 bp, Artificial Sequence
  ENSG00000167106_38 (sequence is synthesized)
gctgccgacccggggcctctgtccttgggtcccagttatgcaacagtcagtcgaggctgtggggctggcccaggggctttatctgtctccctctccaacttttgccaagttacccttctg

SEQ ID NO: 539442 - DNA, 120 bp, Artificial Sequence
  ENSG00000167106_39 (sequence is synthesized)
gctgactgcggttcccttcgtgaacggggtcctcttctgcaaggtccggctgctggatggaggggattttgtcagcttgtcgtcaaggagctgaaaggcgggaaggcttattccaaggta

SEQ ID NO: 539443 - DNA, 120 bp, Artificial Sequence
  ENSG00000167106_40 (sequence is synthesized)
agcctccagccccttttctgccacaagcaagaggcactcagccctacctgagatgtgttattttttagaaatatctttattgatggtctttgcactcaatataaaggcagcatatggttg

SEQ ID NO: 539444 - DNA, 120 bp, Artificial Sequence
  ENSG00000167106_41 (sequence is synthesized)
ttgcaatataaatggtacagaagtccacagagcaaaagggccagtttctgtcccctttcctctctccaggcctctttctgggaccccattattggatagattaagacctttccagacctt

SEQ ID NO: 539445 - DNA, 120 bp, Artificial Sequence
  ENSG00000167106_42 (sequence is synthesized)
ggggtcgtcggggcggctggggcttgggggtgagagcagagtccccacagtccactcacctggccttgaacgccaaatcttgtcgccacagtgtgaccctgggcctgtcatgtctctgaa

SEQ ID NO: 539446 - DNA, 120 bp, Artificial Sequence
  ENSG00000167106_43 (sequence is synthesized)
cctccctttccccatctgtcaggctgtgtggacaccaccacctcacctgggagcctggggcagtgagggcacggacaggttcggtggtttcccacagttcacaaggtcacctccagcaat

SEQ ID NO: 539447 - DNA, 120 bp, Artificial Sequence
  ENSG00000167106_44 (sequence is synthesized)
gcctggtgcagggctcagcacatggcaggggcctcacacgcatttatttagaaccctcccttctacttcctcccagctccagggactcgggaagaatggtggtggtgatgcctcatgggt

SEQ ID NO: 539448 - DNA, 120 bp, Artificial Sequence
  ENSG00000167106_45 (sequence is synthesized)
ttactgaacaaatctttccctagcaccagctaggcactaggccctaagtgaaggcctggttcaatgcaggctgctgcctacacagcatccacagatggcaggggtagatgggaccaaagt

SEQ ID NO: 539449 - DNA, 120 bp, Artificial Sequence
  ENSG00000167106_46 (sequence is synthesized)
tgcgggaacgacagtttatagagtgctgcgtcacagacattcatttggagcatgttgactatgtgcctggctctccatgtgctttggctaaccaaatgaatgagcgagtgagcgaatgag

SEQ ID NO: 539450 - DNA, 120 bp, Artificial Sequence
  ENSG00000167106_47 (sequence is synthesized)
cttcccacaggcgggctgctgagggcaggtggggagcccgcctaacatccacatccccagggaagaggcgtggccaggccgctgcgcagaggctaccctctcaagctgctctgctgactc

SEQ ID NO: 539451 - DNA, 120 bp, Artificial Sequence
  ENSG00000167106_48 (sequence is synthesized)
ctgctggccacggcctggaatggcagctatcacctcccagtagcctcctgggctgctctcgggtgggggtgagggggcggtgagcaagaaggaaactgaggggctggcttccttatgggt

SEQ ID NO: 539452 - DNA, 120 bp, Artificial Sequence
  ENSG00000167106_49 (sequence is synthesized)
ttgtaaacacacccctccctggccccctctgaaaatgaggaagcatcttggggaaagaaaccaatctggttgggagcgagatcacagcagagctacatgctgagccccgagagtccccga

SEQ ID NO: 539453 - DNA, 120 bp, Artificial Sequence
  ENSG00000167106_50 (sequence is synthesized)
ctccagggctgggcctgggctcggcagggaaaggagctgaccaggtttcctgacttcccactgccctcttggtcaccctcacatccctctgagcctcagtttcttcacctgtcaagtggg

SEQ ID NO: 539454 - DNA, 120 bp, Artificial Sequence
  ENSG00000167106_51 (sequence is synthesized)
gcaggatgcagtgactccctgccgaggtgaccgtgaggatggggtggcacagccagatgtgcccggaagggctctgcaggccccacagactctgatgcttactatctgtgtcactgtggg

SEQ ID NO: 539455 - DNA, 120 bp, Artificial Sequence
  ENSG00000167106_52 (sequence is synthesized)
caagggacttaccatcgctggggcacggttttagcccctttgcaacacagggctggttaacagtacctgcttgtgaaacacctccagaggcctggtccagtggagcgctcaggaaatggg

SEQ ID NO: 539456 - DNA, 120 bp, Artificial Sequence
  ENSG00000167107_0 (sequence is synthesized)
ataggcagaggccaccctccccgcctccccgcccgctgcgcgcccgccccgccccggctcactttaaaagtttactcgggccgggacgcagggcaaagcgagccatggctgtctacgtcg

SEQ ID NO: 539457 - DNA, 120 bp, Artificial Sequence
  ENSG00000167107_1 (sequence is synthesized)
ggatgctgcgcctggggaggctgtgcgccgggagctcgggggtgctgggggcccgggccgccctctctcggagttggcaggaagccaggttgcagggtgtccgcttcctcagttccagag

SEQ ID NO: 539458 - DNA, 120 bp, Artificial Sequence
  ENSG00000167107_2 (sequence is synthesized)
aggtggatcgcatggtctccacgcccatcggaggcctcagctacgttcaggggtgcaccaaaaagcatcttaacagcaagactgtgggccagtgcctggagaccacagcacagagggtcc

SEQ ID NO: 539459 - DNA, 120 bp, Artificial Sequence
  ENSG00000167107_3 (sequence is synthesized)
cagaacgagaggccttggtcgtcctccatgaagacgtcaggttgacctttgcccaactcaaggaggaggtggacaaagctgcttctggcctcctgagcattggcctctgcaaaggtgacc

SEQ ID NO: 539460 - DNA, 120 bp, Artificial Sequence
  ENSG00000167107_4 (sequence is synthesized)
ggctgggcatgtggggacctaactcctatgcatgggtgctcatgcagttggccaccgcccaggcgggcatcattctggtgtctgtgaacccagcctaccaggctatggaactggagtatg

SEQ ID NO: 539461 - DNA, 120 bp, Artificial Sequence
  ENSG00000167107_5 (sequence is synthesized)
tcctcaagaaggtgggctgcaaggcccttgtgttccccaagcaattcaagacccagcaatactacaacgtcctgaagcagatctgtccagaagtggagaatgcccagccaggggccttga

SEQ ID NO: 539462 - DNA, 120 bp, Artificial Sequence
  ENSG00000167107_6 (sequence is synthesized)
agagtcagaggctcccagatctgaccacagtcatctcggtggatgcccctttgccggggaccctgctcctggatgaagtggtggcggctggcagcacacggcagcatctggaccagctcc

SEQ ID NO: 539463 - DNA, 120 bp, Artificial Sequence
  ENSG00000167107_7 (sequence is synthesized)
aatacaaccagcagttcctgtcctgccatgaccccatcaacatccagttcacctcggggacaacaggcagccccaagggggccaccctctcccactacaacattgtcaacaactccaaca

SEQ ID NO: 539464 - DNA, 120 bp, Artificial Sequence
  ENSG00000167107_8 (sequence is synthesized)
ttttaggagagcgcctgaaactgcatgagaagacaccagagcagttgcggatgatcctgcccaaccccctgtaccattgcctgggttccgtggcaggcacaatgatgtgtctgatgtacg

SEQ ID NO: 539465 - DNA, 120 bp, Artificial Sequence
  ENSG00000167107_9 (sequence is synthesized)
ccttcctgtatggtacccccacgatgttcgtggacattctgaaccagccagacttctccagttatgacatctcgaccatgtgtggaggtgtcattgctgggtcccctgcacctccagagt

SEQ ID NO: 539466 - DNA, 120 bp, Artificial Sequence
  ENSG00000167107_10 (sequence is synthesized)
tgatccgagccatcatcaacaagataaatatgaaggacctggtggttgcttatggaaccacagagaacagtcccgtgacattcgcgcacttccctgaggacactgtggagcagaaggcag

SEQ ID NO: 539467 - DNA, 120 bp, Artificial Sequence
  ENSG00000167107_11 (sequence is synthesized)
aaagcgtgggcagaattatgcctcacacggaggcccggatcatgaacatggaggcagggacgctggcaaagctgaacacgcccggggagctgtgcatccgagggtactgcgtcatgctgg

SEQ ID NO: 539468 - DNA, 120 bp, Artificial Sequence
  ENSG00000167107_12 (sequence is synthesized)
gctactggggtgagcctcagaagacagaggaagcagtggatcaggacaagtggtattggacaggagatgtcgccacaatgaatgagcagggcttctgcaagatcgtgggccgctctaagg

SEQ ID NO: 539469 - DNA, 120 bp, Artificial Sequence
  ENSG00000167107_13 (sequence is synthesized)
atatgatcatccggggtggtgagaacatctaccccgcagagctcgaggacttctttcacacacacccgaaggtgcaggaagtgcaggtggtgggagtgaaggacgatcggatgggggaag

SEQ ID NO: 539470 - DNA, 120 bp, Artificial Sequence
  ENSG00000167107_14 (sequence is synthesized)
agatttgtgcctgcattcggctgaaggacggggaggagaccacggtggaggagataaaagctttctgcaaagggaagatctctcacttcaagattccgaagtacatcgtgtttgtcacaa

SEQ ID NO: 539471 - DNA, 120 bp, Artificial Sequence
  ENSG00000167107_15 (sequence is synthesized)
actaccccctcaccatttcaggaaagatccagaaattcaaacttcgagagcagatggaacgacatctaaatctgtgaataaagcagcaggcctgtcctggccggttggcttgactctctc

SEQ ID NO: 539472 - DNA, 120 bp, Artificial Sequence
  ENSG00000167107_16 (sequence is synthesized)
ctgtcagaatgcaacctggctttatgcacctagatgtccccagcacccagttctgagccaggcacatcaaatgtcaaggaattgactgaacgaactaagagctcctggatgggtccggga

SEQ ID NO: 539473 - DNA, 120 bp, Artificial Sequence
  ENSG00000167107_17 (sequence is synthesized)
actcgcctgggcacaaggtgccaaaaggcaggcagcctgcccaggccctccctcctgtccatcccccacattcccctgtctgtccttgtgatttggcataaagagcttctgttttctttg

SEQ ID NO: 539474 - DNA, 120 bp, Artificial Sequence
  ENSG00000167107_18 (sequence is synthesized)
gctctgcagtccacaaacctctttctttgcagcagctgcctgcccactctgtttcctcagccctcccagcctgggactcagctcttctttcatgcccagctcaggtctctcactggcttt

SEQ ID NO: 539475 - DNA, 120 bp, Artificial Sequence
  ENSG00000167107_19 (sequence is synthesized)
gggtcgactctagcctttgtctcccttctctggatggggataagcagagccagggggcctcattccaggcagttgggttggggggttgggggcaggcaaagctctctccatttccaagga

SEQ ID NO: 539476 - DNA, 120 bp, Artificial Sequence
  ENSG00000167107_20 (sequence is synthesized)
agctcacggatcttgttgttgttgagctgcaagatgaagaggttgaccagcggggagagcaacccccggggcagctcagtgaccttgttgtggtccaggtagaggttgcttatggaacca

SEQ ID NO: 539477 - DNA, 120 bp, Artificial Sequence
  ENSG00000167107_21 (sequence is synthesized)
ccacctcccgtcacccagctggggtgcacccagctgggacatcggttgctttcagtgagagagtcaaatggctcactcaggatgcctagagccccccagcagcaggggtgtgctaggcct

SEQ ID NO: 539478 - DNA, 120 bp, Artificial Sequence
  ENSG00000167107_22 (sequence is synthesized)
caagcccactgtctgtttcagggcagccagggtagcctcaaagaggagccagagcacagagagttttcctacacagcttcttttcctccagtggtgctcgcctctcgctttagcagagtt

SEQ ID NO: 539479 - DNA, 120 bp, Artificial Sequence
  ENSG00000167107_23 (sequence is synthesized)
cttcttcttgcttggcgtaaacacttcatttcccaagcagcctatccctttggggcggtccctttgcccctcaaaggttgccccagagtgcacctgaatctcaaatgcccagccatgcct

SEQ ID NO: 539480 - DNA, 120 bp, Artificial Sequence
  ENSG00000167107_24 (sequence is synthesized)
cctttcctgctccaacactggggctgtgccagctggctcctgatttcccctgcacccttctgctcccgcccctgggggatcgctgcccccgtgcacaagcagctgcttcccctggggctg

SEQ ID NO: 539481 - DNA, 120 bp, Artificial Sequence
  ENSG00000167107_25 (sequence is synthesized)
gcaaagctgaacacgcccggggagctgtgcatccgagggtactgcgtcatgctgggctactgggagatgtcgccacaatgaatgagcagggcttctgcaagatcgtgggccgctctaagg

SEQ ID NO: 539482 - DNA, 120 bp, Artificial Sequence
  ENSG00000167107_26 (sequence is synthesized)
ttttcttttatgaattccttcccatttcctcagatagctcacctgatccctctgcacgtgctgagccctcttcaaacaccctttctggaccctctaggttgcttatggaaccacagagaa

SEQ ID NO: 539483 - DNA, 120 bp, Artificial Sequence
  ENSG00000167107_27 (sequence is synthesized)
agcagaagacagaggaagcagtggatcaggacaagtggtattggacaggcaccgttctcgccgctagaggtccagaggaaagtaagatgagaaggatcctgctttttggaggaagacaga

SEQ ID NO: 539484 - DNA, 88 bp, Artificial Sequence
  ENSG00000167107_28 (sequence is synthesized)
accgagatcgcgccactgcactcaagacaaacaagcaaatgaacaaacaaaaaacactaagaaaatgaaatagggttataggagagaa

SEQ ID NO: 539485 - DNA, 120 bp, Artificial Sequence
  ENSG00000167107_29 (sequence is synthesized)
aaaaaacactaagaaaatgaaatagggttataggagagaaagtggctgtggtggggaggggagcttcccttagattgagtggacagagaagatgtctggagacatttgagctgagacctg

SEQ ID NO: 539486 - DNA, 120 bp, Artificial Sequence
  ENSG00000167107_30 (sequence is synthesized)
ggtcgagactggcagcagacagggattagggtagggatgtgacaaggcgaggaagggaggtggcagagctgctcaccttggagatagccagagggacagggaacctggggacgggggatg

SEQ ID NO: 539487 - DNA, 120 bp, Artificial Sequence
  ENSG00000167107_31 (sequence is synthesized)
gtgccagctgtggccctggctcctggggcctccaggaagggaagaaggaaccagggcagagcccacagccaggagctcaccttctccaggttggtgttgtccagccagagggtctccagg

SEQ ID NO: 539488 - DNA, 120 bp, Artificial Sequence
  ENSG00000167107_32 (sequence is synthesized)
cgagccatcatcaacaagataaatatgaaggacctggtgaaatctcaggaagaaattgcagcatgggaagatggacagcaaagcaccgatgtcctgctagaacgtcctggcaggttgctt

SEQ ID NO: 539489 - DNA, 120 bp, Artificial Sequence
  ENSG00000167107_33 (sequence is synthesized)
ccgccagatttctgtgtgcccacttgccagccacgatgtccggattcctgtggaaaggggagggttgcttatggaaccacagagaacagtcccgtgacattcgcgcacttccctgaggac

SEQ ID NO: 539490 - DNA, 120 bp, Artificial Sequence
  ENSG00000167107_34 (sequence is synthesized)
tgaaggacctggtggtgagtggtgactgcggcccgggctgtgggcaggccaggcctgggatgacagcagatggacagacatggggatgagtccaggccagatgttcaaaggagaccctct

SEQ ID NO: 539491 - DNA, 120 bp, Artificial Sequence
  ENSG00000167107_35 (sequence is synthesized)
tgccttctttactgagactggccttcagctgtcctctctgccctggaaaatatcagcacctggtgtccttgtcacatttcctcccctagccccccgccctctccactccagccctcttgt

SEQ ID NO: 539492 - DNA, 120 bp, Artificial Sequence
  ENSG00000167107_36 (sequence is synthesized)
tcccggtgcagtggcagattcactgaaccaacacaggttggaactgctacaggctgcccctcatttagctgatgaggaatcagagacgcagaagagagaatttgcccaagccagcttgtg

SEQ ID NO: 539493 - DNA, 120 bp, Artificial Sequence
  ENSG00000167107_37 (sequence is synthesized)
ggtggcagagttctctgggccatgtaagtggcatgagaacggagaccttatcttctgcattgctggaccctgacacctggtatcgtggtagaccttttgcaaatatactgaacagatgga

SEQ ID NO: 539494 - DNA, 120 bp, Artificial Sequence
  ENSG00000167107_38 (sequence is synthesized)
gaacccacattgaaccaaaccccagccgtgccagagccagagcagctgatatgggggaagcttggtgcagggaggaggatggatgagatctggtatccgttgattaaaggggacctagga

SEQ ID NO: 539495 - DNA, 120 bp, Artificial Sequence
  ENSG00000167107_39 (sequence is synthesized)
agctgggcagaaccaggagcgtgggcacctggctatggggcaatgtgctagggctgccagagaaccccgagggatggcaggagaaggagacaggactgacgcacaaggggtccaatgcct

SEQ ID NO: 539496 - DNA, 120 bp, Artificial Sequence
  ENSG00000167107_40 (sequence is synthesized)
tcagtgaccttgttgtggtccaggtagaggttcggcatggcccggaacgaattggcagccagcaccgggaagttgttgcgctgttgcttatggaaccacagagaacagtcccgtgacatt

SEQ ID NO: 539497 - DNA, 120 bp, Artificial Sequence
  ENSG00000167107_41 (sequence is synthesized)
gtgagcccccagaaacaagaaacacacatgaacacggtgatgtctgatatttttctttggccctggaaggtggtgggagtgaaggacgatcggatgggggaagagatttgtgcctgcatt

SEQ ID NO: 539498 - DNA, 120 bp, Artificial Sequence
  ENSG00000167107_42 (sequence is synthesized)
cggctgaaggacggggaggagaccacggtggaggagataaaagctttctgcaaagggaaggtgggagcctccgctcaacctagctgatgctgctctgttctttgctcacccactcctctg

SEQ ID NO: 539499 - DNA, 120 bp, Artificial Sequence
  ENSG00000167110_0 (sequence is synthesized)
cgggatcgcgctgatgtggccccaaccccgcctccctccccgccccgcgatgtcggaagaaacccgacagagcaaattggccgcagcgaagaaaaagttgagagaatatcagcagaggaa

SEQ ID NO: 539500 - DNA, 120 bp, Artificial Sequence
  ENSG00000167110_1 (sequence is synthesized)
tagccctggtgttcctacaggagcgaaaaagaagaagaaaataaaaaatggcagtaaccctgagacaaccacttctggtggttgccactcacctgaggatacacccaaggacaatgctgc

SEQ ID NO: 539501 - DNA, 120 bp, Artificial Sequence
  ENSG00000167110_2 (sequence is synthesized)
tactctacaaccatctgatgacaccgtgttacctggcggtgtcccttcccctggtgccagtctcactagcatggcggcatctcagaatcatgatgctgacaatgtccctaatctcatgga

SEQ ID NO: 539502 - DNA, 120 bp, Artificial Sequence
  ENSG00000167110_3 (sequence is synthesized)
tgaaaccaagactttctcatcaaccgagagcctgcgacaactctcccaacagctcaatggtcttgtttgtgagtctgcgacatgtgtcaatggggagggccctgcatcgtctgctaacct

SEQ ID NO: 539503 - DNA, 120 bp, Artificial Sequence
  ENSG00000167110_4 (sequence is synthesized)
gaaggatctggagagccggtaccaacagctagcggtagccctggactccagctatgtaacaaacaaacaactcaatatcacgatagagaaattgaaacaacagaaccaagaaattacgga

SEQ ID NO: 539504 - DNA, 120 bp, Artificial Sequence
  ENSG00000167110_5 (sequence is synthesized)
tcagttggaagaagaaaagaaagaatgccaccaaaagcagggagccctaagggagcagttacaggttcacattcagaccatagggatcctcgtatcagagaaagctgagttacagacagc

SEQ ID NO: 539505 - DNA, 120 bp, Artificial Sequence
  ENSG00000167110_6 (sequence is synthesized)
cctggctcacactcagcatgctgccaggcagaaagaaggagagtctgaagatctggccagccgcctgcagtattcccggcggcgtgtgggagagttggagcgggctctctctgctgtctc

SEQ ID NO: 539506 - DNA, 120 bp, Artificial Sequence
  ENSG00000167110_7 (sequence is synthesized)
cacgcagcagaagaaggcagacaggtacaacaaggagttaaccaaagagagagacgccctcaggctggagttatacaagaacacccaaagcaatgaggacctgaagcaagagaaatcaga

SEQ ID NO: 539507 - DNA, 120 bp, Artificial Sequence
  ENSG00000167110_8 (sequence is synthesized)
attggaagagaagcttcgggtcctagtgactgagaaggctggcatgcagcttaacttggaagaattgcaaaagaagttagagatgacggaactcctgcttcaacagttttcaagccggtg

SEQ ID NO: 539508 - DNA, 120 bp, Artificial Sequence
  ENSG00000167110_9 (sequence is synthesized)
tgaagcccctgatgctaaccagcagttacagcaggccatggaggagcgggcacagctggaagcacacctggggcaggtaatggagtcggttagacaactacaaatggagagagataaata

SEQ ID NO: 539509 - DNA, 120 bp, Artificial Sequence
  ENSG00000167110_10 (sequence is synthesized)
tgcggagaatctcaaaggagagagcgccatgtggcggcagaggatgcagcagatgtcagagcaggtgcacacattgagagaggagaaggaatgtagcatgagtcgggtacaggagctgga

SEQ ID NO: 539510 - DNA, 120 bp, Artificial Sequence
  ENSG00000167110_11 (sequence is synthesized)
gacgagcttggctgaactgaggaaccagatggctgaacccccgcccccagagcccccagcagggccctccgaggtggagcagcagctacaagcggaggctgagcacctgcggaaggagct

SEQ ID NO: 539511 - DNA, 120 bp, Artificial Sequence
  ENSG00000167110_12 (sequence is synthesized)
ggagggtctggcaggacagcttcaagcccaggtgcaagacaatgagggcttgagtcgcctgaaccgggagcaggaggagaggctgctggagctggagcgggcggccgagctctgggggga

SEQ ID NO: 539512 - DNA, 120 bp, Artificial Sequence
  ENSG00000167110_13 (sequence is synthesized)
gcaggcggaggcgcgcaggcaaatcctggagaccatgcagaacgaccgcactaccatcagccgcgcactctcccagaaccgggagctcaaggagcagctggctgagctgcagagcggatt

SEQ ID NO: 539513 - DNA, 120 bp, Artificial Sequence
  ENSG00000167110_14 (sequence is synthesized)
tgtaaagctgactaatgagaacatggagatcaccagcgcactgcagtcggagcagcacgtcaagagggagctgggaaagaagctgggcgagctgcaggagaagctgagcgagctgaagga

SEQ ID NO: 539514 - DNA, 120 bp, Artificial Sequence
  ENSG00000167110_15 (sequence is synthesized)
aacggtggagctgaagagccaagaggctcaaagtctgcagcagcagcgagaccagtacctgggacacctgcagcagtatgtggccgcctatcagcagctgacctctgagaaggaggtgct

SEQ ID NO: 539515 - DNA, 120 bp, Artificial Sequence
  ENSG00000167110_16 (sequence is synthesized)
gcataatcagctactgctgcagacccagctcgtggaccagctgcagcagcaggaagctcagggcaaagcggtggccgagatggcccgccaagagttgcaggaaacccaggagcgcctgga

SEQ ID NO: 539516 - DNA, 120 bp, Artificial Sequence
  ENSG00000167110_17 (sequence is synthesized)
ggaaggagatggactggaccgggaggaggaggaggatgaggaggaggaggaggaggaggcggtggcagtacctcagcccatgccaagcatcccggaggacctggagagccgggaagccat

SEQ ID NO: 539517 - DNA, 120 bp, Artificial Sequence
  ENSG00000167110_18 (sequence is synthesized)
ggtggcatttttcaactcagctgtagccagtgccgaggaggagcaggcaaggctacgtgggcagctgaaggagcaaagggtgcgctgccggcgcctggctcacctgctggcctcggccca

SEQ ID NO: 539518 - DNA, 120 bp, Artificial Sequence
  ENSG00000167110_19 (sequence is synthesized)
gaaggagcctgaggcagcagccccagccccagggaccgggggtgattctgtgtgtggggagacccaccgggccctgcagggggccatggagaagctgcagagccgctttatggagctcat

SEQ ID NO: 539519 - DNA, 120 bp, Artificial Sequence
  ENSG00000167110_20 (sequence is synthesized)
gcaggagaaggcagacctgaaggagagggtagaggaactggaacatcgctgcatccagctttctggagagacagacaccattggagagtacattgcactgtaccagagccagagggcagt

SEQ ID NO: 539520 - DNA, 120 bp, Artificial Sequence
  ENSG00000167110_21 (sequence is synthesized)
gctgaaggagcggcaccgggagaaggaggagtacatcagcaggctggcccaagacaaggaggagatgaaggtgaagctgctggagctgcaggagctggtcttacggcttgtgggcgaccg

SEQ ID NO: 539521 - DNA, 120 bp, Artificial Sequence
  ENSG00000167110_22 (sequence is synthesized)
caacgagtggcatggcagattcctggcagctgcccagaaccctgctgatgagcccacttcaggggccccagccccccaggaacttggggctgccaaccagcagggtgatctttgcgaggt

SEQ ID NO: 539522 - DNA, 120 bp, Artificial Sequence
  ENSG00000167110_23 (sequence is synthesized)
gagcctcgccggcagtgtggagcctgcccaaggagaggccagggagggttctccccgtgacaaccccactgcacagcagatcatgcagctgcttcgtgagatgcagaacccccgggagcg

SEQ ID NO: 539523 - DNA, 120 bp, Artificial Sequence
  ENSG00000167110_24 (sequence is synthesized)
cccaggcttgggcagcaacccctgcattccttttttttaccgggctgacgagaatgatgaggtgaagatcactgtcatctaaaagccggctactgtcagcaaagcctgaagaagtggggc

SEQ ID NO: 539524 - DNA, 120 bp, Artificial Sequence
  ENSG00000167110_25 (sequence is synthesized)
tggataccctgcccccaccatatccctaccatcccttctcagtcaaccctttacccttacagtagcaagcatagacccctgtctaacgggggtagacaggtgcagatgaggtgaagatca

SEQ ID NO: 539525 - DNA, 120 bp, Artificial Sequence
  ENSG00000167110_26 (sequence is synthesized)
ctgtcatctaaaagctggccactaaattaaaaaaaaattaaaagttatgggattaaaaaaagttatgggataaaaaaggttatgggtaacttatggtataaaagttatgaaaaaaggcca

SEQ ID NO: 539526 - DNA, 120 bp, Artificial Sequence
  ENSG00000167110_27 (sequence is synthesized)
agactctgtctcaaaaaaaaaaaaaattatgaaaaaagttatgggattaaagaaagtcaggataaaaattttaaaaagcaggccactgtcagcaaagcctggagaagtggggccggaggc

SEQ ID NO: 539527 - DNA, 120 bp, Artificial Sequence
  ENSG00000167110_28 (sequence is synthesized)
ccggaggctccgcccccatcatgtgcctgccaccccttcccagtcatccctttactcttacagtagcaaataagacccctgtctaatggggggagacaaatgtgtagacccttagccacc

SEQ ID NO: 539528 - DNA, 120 bp, Artificial Sequence
  ENSG00000167110_29 (sequence is synthesized)
ttggccagggctgactccttaaatttctggatgatgatgattgttatttaatagccagaggctcatataattggcctctttggaagaggcctcatggcctccttactctcaccaaagcaa

SEQ ID NO: 539529 - DNA, 120 bp, Artificial Sequence
  ENSG00000167110_30 (sequence is synthesized)
tttttccctcaggggggctcccatcttcttacacagagaggcagctgaggcaggacagtggggctaactgtagaccaggcgagggcacgggctgctggggtggccctgcttccccagtgt

SEQ ID NO: 539530 - DNA, 120 bp, Artificial Sequence
  ENSG00000167110_31 (sequence is synthesized)
acatattgtatctgtgtaacattttgtatattccaggggtagggccgccccctgtatcatacctagcagaggttggagctggcacatggggaggaggttctaataattatttggggctgg

SEQ ID NO: 539531 - DNA, 120 bp, Artificial Sequence
  ENSG00000167110_32 (sequence is synthesized)
gaaacttatttattgatagcataggacagaggaaggaggcggggatggggtcgtggcgccctggtgatgcgactcctgtttattttgctttttatttcggaataaatggatttagccata

SEQ ID NO: 539532 - DNA, 120 bp, Artificial Sequence
  ENSG00000167110_33 (sequence is synthesized)
tgattaagagttctgggtttgtatcctacctgtccatctgctagggatgtgatttagggcaaattgcttgagctttttgggcctctcttttcacaactataaagtattgttttacttaca

SEQ ID NO: 539533 - DNA, 120 bp, Artificial Sequence
  ENSG00000167110_34 (sequence is synthesized)
agtcgggtacaggagctggagacgagcttggctgaactgaggaaccagatgggtaagctggggctggggtgacctgggagcaggaatggtgtcagagggttgtgggggtggtttagaatg

SEQ ID NO: 539534 - DNA, 120 bp, Artificial Sequence
  ENSG00000167110_35 (sequence is synthesized)
ggagtgcccgttgtcagccacccacagttgtcgctatcggaaagtggtttggaagattggctaacatccgggtgcgaggaatcatcagcagggaggccaagtttggggagcttgagagga

SEQ ID NO: 539535 - DNA, 120 bp, Artificial Sequence
  ENSG00000167110_36 (sequence is synthesized)
ctcccaaagtgttgagattacaggcatcagccaccatgcctggcctgagatctttttaaaattattttttatttctaaagcaaagaaacttgacagcagagttgtattgactgagttgca

SEQ ID NO: 539536 - DNA, 120 bp, Artificial Sequence
  ENSG00000167110_37 (sequence is synthesized)
agagacctttagaacagctggtcattatgccaactgggtgtccacactaagttcggcatcaatatggtgacttcctgggagcagggcactaccagcttacctaaggatgggtgaactggc

SEQ ID NO: 539537 - DNA, 120 bp, Artificial Sequence
  ENSG00000167110_38 (sequence is synthesized)
cagcttacctaaggatgggtgaactggcccaggtcagaaatgaagcaggtcagaactcccatgctgatcggtagtgggactgcacctgggcagcatagcgagcccttggctcttaaaaaa

SEQ ID NO: 539538 - DNA, 120 bp, Artificial Sequence
  ENSG00000167110_39 (sequence is synthesized)
gagaaattggtaagagtccagtggggtcccctgattccatgctgctaatcctgggctccagtttccccttgggaccctgaagaaaggggcagggggcccctggtgccaagggcgaatggg

SEQ ID NO: 539539 - DNA, 120 bp, Artificial Sequence
  ENSG00000167110_40 (sequence is synthesized)
gagctggggggcccaggcctcagctggagggaccccagagcacggagcatgcagcatggctcttctgttgctgccctctttgcctactctctcttctctagacacccctgctcgagtcct

SEQ ID NO: 539540 - DNA, 120 bp, Artificial Sequence
  ENSG00000167110_41 (sequence is synthesized)
cctggggttgttgcctcttggggaagcgctagcctgactggttgtcaggagccctgtatttctgccctgactcagtccttaatttgctctttgatttgggacaagccacctctcctcctt

SEQ ID NO: 539541 - DNA, 120 bp, Artificial Sequence
  ENSG00000167110_42 (sequence is synthesized)
cctctcctccttgggcttgcatttcctgaggaggtagagttagagagtatcaaaggtctcttagctctgagagtccaagatttaaaggcccattagaatgtaaacctcagggccaagggc

SEQ ID NO: 539542 - DNA, 120 bp, Artificial Sequence
  ENSG00000167110_43 (sequence is synthesized)
tcctgtctgtctttttctgtctggtatccctgctattaagaaccgtacctggcctgtgtgtgctcagcaaatgtttgttgaatgattacacctttctaaatcacaaactggcagagggtg

SEQ ID NO: 539543 - DNA, 120 bp, Artificial Sequence
  ENSG00000167110_44 (sequence is synthesized)
ggcttttctcacactccatctctagaggtttatgttactgtcctttcaagagaatcgagattcagactttcagttctgtggctgtgggcaaaaaccaacaaagacacaaatcccctttcc

SEQ ID NO: 539544 - DNA, 81 bp, Artificial Sequence
  ENSG00000167110_45 (sequence is synthesized)
gctgtgggcaaaaaccaacaaagacacaaatcccctttccttgagagcctgaggagagtttaccagttcgtgttcccattg

SEQ ID NO: 539545 - DNA, 120 bp, Artificial Sequence
  ENSG00000167110_46 (sequence is synthesized)
gggatgggaggtctgggggccctcagcatgggtggtgtgctgggaggtggggggtacaggtaagcatgatgaggtagtcatagaggtgtgcatgtgtgcccagcaaagctctagtgccag

SEQ ID NO: 539546 - DNA, 120 bp, Artificial Sequence
  ENSG00000167110_47 (sequence is synthesized)
ctgtgccactgactcatggtgtagccttgggtaactcgtatcttttctctggcctgtacatgtgacttttgattcctggggttccttccagtgccacagttctgtggttgtggggcaagg

SEQ ID NO: 539547 - DNA, 120 bp, Artificial Sequence
  ENSG00000167110_48 (sequence is synthesized)
gggagctcaaggagcagctggctgagctgcagagcggatttgtaaagctggtgcgctgccccacctggagagcccgccctcctccctagccctccagacctttgttttcccacctgtaaa

SEQ ID NO: 539548 - DNA, 120 bp, Artificial Sequence
  ENSG00000167110_49 (sequence is synthesized)
taaagtggggcagtgtagccctcacttgaaatggtacttctggaggcatctgtgagccagagccctgctccgatggctgtgggggagaggggatgatttttctaacctgcctccaccctt

SEQ ID NO: 539549 - DNA, 120 bp, Artificial Sequence
  ENSG00000167112_0 (sequence is synthesized)
acttccgtccaggtccagcgggtgctgtgatcttcaagtatggggtctgctggcttgtcgcggctgcatgggcttttcgcggtctataagcccccggggctaaaatggaagcacctgcgg

SEQ ID NO: 539550 - DNA, 120 bp, Artificial Sequence
  ENSG00000167112_1 (sequence is synthesized)
gatacagtggagctacaacttctgaagggtctcaatgccaggaagcctcccgctcctaaacagcgtgttcgcttcttgctgggccccatggaaggcagcgaagagaaggagctgaccctc

SEQ ID NO: 539551 - DNA, 120 bp, Artificial Sequence
  ENSG00000167112_2 (sequence is synthesized)
acagccaccagcgtaccctctttcatcaaccatccactggtatgtggaccagcattcgcccatctcaaggttggcgtgggacatcggttggatgcccaggcttctggagtacttgtgctc

SEQ ID NO: 539552 - DNA, 120 bp, Artificial Sequence
  ENSG00000167112_3 (sequence is synthesized)
ggcgtgggacatggatgcaggctcctcaccgatatgtacaatgctcatcttaccaaggattacacagtgcgtggcctcctgggcaaagctacagatgacttccgtgaggacgggaggctg

SEQ ID NO: 539553 - DNA, 120 bp, Artificial Sequence
  ENSG00000167112_4 (sequence is synthesized)
gtagagaagacaacctatgaccacgtgaccagagagaagctggaccgcattctggccgttatccaaggctcccatcagaaggccctggtgatgtactccaacctcgacctgaagacccag

SEQ ID NO: 539554 - DNA, 120 bp, Artificial Sequence
  ENSG00000167112_5 (sequence is synthesized)
gaggcctatgagatggccgtgagaggcctgatccggcccatgaacaagtccccgatgctgataactggcatccgatgcctctactttgcacctccggaattcctcttagaggtgcagtgc

SEQ ID NO: 539555 - DNA, 120 bp, Artificial Sequence
  ENSG00000167112_6 (sequence is synthesized)
atgcatgagacgcagaaagagctgcggaagttggttcatgaaatcggcctggaactaaagaccactgctgtctgcacccaagtgcggcgcacgcgcgacggcttcttcacgctagacagt

SEQ ID NO: 539556 - DNA, 120 bp, Artificial Sequence
  ENSG00000167112_7 (sequence is synthesized)
gccctcctgaggacccagtgggacctaaccaacatccaggatgctatccgggctgctacccctcaggtagctgcagagctggagaagagcttgagcccggggctggacaccaagcagctc

SEQ ID NO: 539557 - DNA, 120 bp, Artificial Sequence
  ENSG00000167112_8 (sequence is synthesized)
cccagtccgggatggtcctgggactcccagggcccgagctctaccttggggctggagaggggtgcggggcagtgaatgcccaggcagctcctggggcagtggatggataaatagaagaac

SEQ ID NO: 539558 - DNA, 120 bp, Artificial Sequence
  ENSG00000167112_9 (sequence is synthesized)
tgctatgagctggacctgatagctgtgcagaaagtgagagcaggggcaccttttctacgtaagacacaaaactcaagctgtaacagaaaggtcaatggacttgacccaactgagaaggaa

SEQ ID NO: 539559 - DNA, 120 bp, Artificial Sequence
  ENSG00000167112_10 (sequence is synthesized)
caatggacttgacccaactgagaaggaaaaacttctgtatggaggaaaagacagtaaacatgacagactgatagaaagtattggcagaccaggcgtggtggcgggcacttgtaatcccag

SEQ ID NO: 539560 - DNA, 120 bp, Artificial Sequence
  ENSG00000167112_11 (sequence is synthesized)
gcttgagcccaggagtttaaggttgtagtgcgctagacggcgcctgtgaatagccactgcactctagtctggggaacatatgagacccctgccatctcaaaaaaaaaaaaattctcaata

SEQ ID NO: 539561 - DNA, 120 bp, Artificial Sequence
  ENSG00000167112_12 (sequence is synthesized)
aactatgtgcccacgaaaattaaaaattaaaaaaaattgtaagtatttgcagtgtcattaaccaaggactaatatccatagtatacagagagcccttagaaagcaataagaagacaacga

SEQ ID NO: 539562 - DNA, 120 bp, Artificial Sequence
  ENSG00000167112_13 (sequence is synthesized)
caaaattaggcaaatgagatgaagtgtgtatcagaagaaatccaaatggctagtaagccagaaatgacactcaacctctttaatactggaagacacagatgaaaatgagatgatttttgt

SEQ ID NO: 539563 - DNA, 60 bp, Artificial Sequence
  ENSG00000167112_14 (sequence is synthesized)
cgccaccacacctggctaattttttgtatccgagatgaggtttcaccatgttgacctcag

SEQ ID NO: 539564 - DNA, 120 bp, Artificial Sequence
  ENSG00000167112_15 (sequence is synthesized)
tcagtcttttctcttaaaggtcttcagtttattgaatgagctccgcccacaattgtggtggataatcagcgtgactcaaagtctacccattgactgattgaaatgttaatcatttttttg

SEQ ID NO: 539565 - DNA, 89 bp, Artificial Sequence
  ENSG00000167112_16 (sequence is synthesized)
ctcaatctcctgacctcgtgatccgcctggcttggcctcccaaagtactgggattacagccgtgagccaccacacccggcctgttttgg

SEQ ID NO: 539566 - DNA, 79 bp, Artificial Sequence
  ENSG00000167112_17 (sequence is synthesized)
cgctgggattatgccaacctctgcctcccaaagcactgggatggcaggcatgagccaccacacccggcctgtttttgtt

SEQ ID NO: 539567 - DNA, 120 bp, Artificial Sequence
  ENSG00000167112_18 (sequence is synthesized)
tcacccaggctggagtgcagtgatgcaaacatgactcactgcagctttgtcctctcaggcttaaccatcttcccacctcagcttccagaatagctgggactgcaggcgtgcacacagtat

SEQ ID NO: 539568 - DNA, 120 bp, Artificial Sequence
  ENSG00000167112_19 (sequence is synthesized)
ccacctcagcttccagaatagctgggactgcaggcgtgcacacagtatctggctaatttatttattttattttatttttgagacagggcctcgcactgtcgcccaggctagagtgcagtg

SEQ ID NO: 539569 - DNA, 120 bp, Artificial Sequence
  ENSG00000167112_20 (sequence is synthesized)
gtgcagtggcgcggtttcaactcattgcagcctcgaccctcctgggtcaagcgattcttcctgccttagtctccagagttgctgggattaccggtgtgcaccaccaagcctggctaattt

SEQ ID NO: 539570 - DNA, 120 bp, Artificial Sequence
  ENSG00000167112_21 (sequence is synthesized)
gccaggctggtctggaactcctgacctgaggtgatccgcctacctcggccttccaaagtactgggaatataggcatgagccactgtttccggcctgttttttttagacagagtcttgctc

SEQ ID NO: 539571 - DNA, 120 bp, Artificial Sequence
  ENSG00000167112_22 (sequence is synthesized)
acccaggctggagtgcaatggtgcaaacatgactcactgcaccgtcatcctcccaggctcaaccatcttcccacctcaccctccagaatagctgggactacaggcgtgcaccacgatgcc

SEQ ID NO: 539572 - DNA, 89 bp, Artificial Sequence
  ENSG00000167112_23 (sequence is synthesized)
aaccatcttcccacctcaccctccagaatagctgggactacaggcgtgcaccacgatgcctggctaaatatttttttccagctaatttt

SEQ ID NO: 539573 - DNA, 76 bp, Artificial Sequence
  ENSG00000167112_24 (sequence is synthesized)
actaaaaatacaaaaattagccagctatggtgacgcactgaagcccaggaggtggagattgccattagctgagatt

SEQ ID NO: 539574 - DNA, 120 bp, Artificial Sequence
  ENSG00000167112_25 (sequence is synthesized)
gctgaagcccaggaggtggagattgccattagctgagattgtgcccctgcactccagtctggacgagagagtgagactctgtctcagaaaagaaaaaaaaaaaggctgggcacggtggct

SEQ ID NO: 539575 - DNA, 86 bp, Artificial Sequence
  ENSG00000167112_26 (sequence is synthesized)
tactaaaaatacaaaattagccgggcgtgcttgcacgtgcctgtagtcctggctacccgggaggctgatgcagaataactggaact

SEQ ID NO: 539576 - DNA, 120 bp, Artificial Sequence
  ENSG00000167112_27 (sequence is synthesized)
aaaaaaaaaaaaaagagaaaaatcagaacaaaatcagcaatatttagacaagcagaatccaatgaaatggtgaggaaagctgggtgggagtggagggtatcagcaaaactcagttctttg

SEQ ID NO: 539577 - DNA, 120 bp, Artificial Sequence
  ENSG00000167112_28 (sequence is synthesized)
cagcaaaactcagttctttggaaaaattaggtaacttgaacgtagggcacatgggctgtcacaccaccccatttagagcccttattggcatagagatgataaaagtggactctgtgatgg

SEQ ID NO: 539578 - DNA, 120 bp, Artificial Sequence
  ENSG00000167112_29 (sequence is synthesized)
cctctcatgatctcaggatagcaggataggggaactctgagtcatggccaaaataattggtcaatgtacagcctcagacagctgggaataccaccccaaatcacttggataaggagatgt

SEQ ID NO: 539579 - DNA, 120 bp, Artificial Sequence
  ENSG00000167112_30 (sequence is synthesized)
tttccttatcctgtgtctttaactctgagacggatggagttgaacaatcaacgattgttaaaaatgtaccaaatgtgtaagcatcatgaggtgtttaagctgagcttttaaattaaaatt

SEQ ID NO: 539580 - DNA, 70 bp, Artificial Sequence
  ENSG00000167112_31 (sequence is synthesized)
tgcgatccccacaggagaccctgtctctacaaaaaacaaacaaacaaacaaaaaagccgggggtgttggt

SEQ ID NO: 539581 - DNA, 79 bp, Artificial Sequence
  ENSG00000167112_32 (sequence is synthesized)
gtgtgggaggatcgcttgaacctagcaagtcaaggcggcagtaaatggagatctgtactccagcctgggcaacagagcg

SEQ ID NO: 539582 - DNA, 84 bp, Artificial Sequence
  ENSG00000167112_33 (sequence is synthesized)
agcaagtcaaggcggcagtaaatggagatgtcagaaaaaaagaaaaagccacccagcaggctgagcgtggtggctcacgcctgt

SEQ ID NO: 539583 - DNA, 80 bp, Artificial Sequence
  ENSG00000167112_34 (sequence is synthesized)
gactgtactctagcctgggtgacagggtgagaccctatctcaaaacaaacaaacaaaaaccccaccagcaaccttgctga

SEQ ID NO: 539584 - DNA, 120 bp, Artificial Sequence
  ENSG00000167112_35 (sequence is synthesized)
caaaacaaacaaacaaaaaccccaccagcaaccttgctgacaaatccacaggcccccacgtctgccaattgcctgcctgtatgaactgggcacctgggggaggggcgtggcccccaggct

SEQ ID NO: 539585 - DNA, 120 bp, Artificial Sequence
  ENSG00000167112_36 (sequence is synthesized)
actcatcttggctttcacagccaaagggcctgggtggaacctcagcttactgtgtttactgactgggtaatgtggcctctgaagctgtcacctatctataaaatggggattaaaacgaca

SEQ ID NO: 539586 - DNA, 120 bp, Artificial Sequence
  ENSG00000167112_37 (sequence is synthesized)
ttggccaacgggaggccaagaagagcaagagaaccaagctgtcctgctgagagtatatgatctaatggcaaggaaaccagggaccacatcattggagcacagagcccaagggcaagagca

SEQ ID NO: 539587 - DNA, 120 bp, Artificial Sequence
  ENSG00000167112_38 (sequence is synthesized)
gccaaggagttaagagcttgggctctggagccagcttgcctgggtttcctgactctaccaggcacctggtgatgaaggagggcaggaaaggtggctggaggagccacggtggcagggcac

SEQ ID NO: 539588 - DNA, 120 bp, Artificial Sequence
  ENSG00000167113_0 (sequence is synthesized)
ctccgcggacgcccgctgccatggcgactctgctgcgccctgtcctccgtcggctctgcgggctcccgggcctacagcggcctgcggcagaaatgcccctccgggctaggagcgacggcg

SEQ ID NO: 539589 - DNA, 120 bp, Artificial Sequence
  ENSG00000167113_1 (sequence is synthesized)
ccggcccgctatactcgcaccacctccccacctccccgctgcagaaagggctgttggccgccggctccgcggcgatggcgctctataacccctaccgccacgacatggtcgcagttctag

SEQ ID NO: 539590 - DNA, 120 bp, Artificial Sequence
  ENSG00000167113_2 (sequence is synthesized)
gggagaccacaggacaccgcaccctgaaggtcctcagggaccagatgaggagggatccagagggtgcccagatcctgcaggagcgtccccggatttcgacatccaccctcgacctgggca

SEQ ID NO: 539591 - DNA, 120 bp, Artificial Sequence
  ENSG00000167113_3 (sequence is synthesized)
agctccagagcctgccggaaggctccctcggtcgcgagtatctccgtttcctggatgtgaacagggtctccccagacacccgagcacccacccgcttcgtggatgatgaggagctagcgt

SEQ ID NO: 539592 - DNA, 120 bp, Artificial Sequence
  ENSG00000167113_4 (sequence is synthesized)
atgtgattcagcggtaccgggaggtgcacgacatgcttcacaccctgctggggatgcccaccaacatcctgggggagatcgtggtgaaatggtttgaggctgtccagactggcctgccca

SEQ ID NO: 539593 - DNA, 120 bp, Artificial Sequence
  ENSG00000167113_5 (sequence is synthesized)
agagcctgcaagtgctggtctcggagttgatcccatgggccgttcagaacgggcgcagagccccatgtgtcctcaacctgtactatgagcggcgctgggagcagtccctgagggctctgc

SEQ ID NO: 539594 - DNA, 120 bp, Artificial Sequence
  ENSG00000167113_6 (sequence is synthesized)
gggaggagctgggcattacagcaccacccatgcacgtccagggcttggcctgagctcctgagccagcggggcctggcctacctcccccatcccctgcttcccttggaggcagagggctcc

SEQ ID NO: 539595 - DNA, 120 bp, Artificial Sequence
  ENSG00000167113_7 (sequence is synthesized)
cttgactacctttgttcctcttctttgaacactgacccttggacaacatttatcataatttgtcataaccactgctgagtggccttgaggacgaaccccgcagggagcaagcagtacagt

SEQ ID NO: 539596 - DNA, 120 bp, Artificial Sequence
  ENSG00000167113_8 (sequence is synthesized)
ggcattcccagggggaccagcagctacccaaggagaaccatgcatgaacagtatcagtcgtctgggctcatgctgggatgtcgcagtgctcctgttgcaactcctcccagccagccaggt

SEQ ID NO: 539597 - DNA, 120 bp, Artificial Sequence
  ENSG00000167113_9 (sequence is synthesized)
ttgctgggggccaggctgggtgtcctcacaggagtgagggctacacccaattccaaaagcctgagaagagagaagtggagggggaggcgagtgtgtgaataaaggctcccatcaggtcaa

SEQ ID NO: 539598 - DNA, 120 bp, Artificial Sequence
  ENSG00000167113_10 (sequence is synthesized)
gcgtggttgcgtgtcctttgcagacactttctggggcgaggtgacatggcgagagtcttggatcggtggacgtagacggtagacagttcgcgtgcgtttccttcgcctacttggcctaca

SEQ ID NO: 539599 - DNA, 120 bp, Artificial Sequence
  ENSG00000167113_11 (sequence is synthesized)
tgccttctgcccgtgaagcgatgtttcccctcgaaaggccgtaggctacgccgtcagaatcggtttttcagtgagttttgacccctccgacgctccgtcgcctgacagaatcgcggcgtt

SEQ ID NO: 539600 - DNA, 120 bp, Artificial Sequence
  ENSG00000167113_12 (sequence is synthesized)
ggcgtgaaaccgaaagtctgtctttaaactacttgggagaatctgtcatgcagccatattgagaacatctagactaaatagatgattcataagtaccgatcagtttataatatcctacta

SEQ ID NO: 539601 - DNA, 120 bp, Artificial Sequence
  ENSG00000167113_13 (sequence is synthesized)
gaaagtcaactccgaggtcgaggaccatgtctgcctcgttccactgcatctgcagccttctggatagtgcctggcacatagtaaatgctcaataaatgtttgctggatgtgtgactagaa

SEQ ID NO: 539602 - DNA, 120 bp, Artificial Sequence
  ENSG00000167113_14 (sequence is synthesized)
cgtaggtaatttttaattttctgccagctactttaatagcaaaaagaaattaatttttttgctattaaaattaaggtggaatttttttgtttgtttttttgagatagagtctcactctgt

SEQ ID NO: 539603 - DNA, 72 bp, Artificial Sequence
  ENSG00000167113_15 (sequence is synthesized)
gcaccatgagtcaccgtgcctggctagaattgattttaaatatgcatcttgtttagcccaatatatccaaag

SEQ ID NO: 539604 - DNA, 120 bp, Artificial Sequence
  ENSG00000167113_16 (sequence is synthesized)
agtcaccgtgcctggctagaattgattttaaatatgcatcttgtttagcccaatatatccaaagtattatttcaacaagtaatcaattttctttttttttttttttttgagacgaagtct

SEQ ID NO: 539605 - DNA, 120 bp, Artificial Sequence
  ENSG00000167113_17 (sequence is synthesized)
cggccagtatttttaaatcattgagagttttacatttttttcatactaagcatttgaagtctcgtgtgtattttatatgatcagcacatctcgcttggacaactttcttggccacatgtg

SEQ ID NO: 539606 - DNA, 120 bp, Artificial Sequence
  ENSG00000167113_18 (sequence is synthesized)
gcaagcggctgccatactggacagtgtaggtctaggagacattaatactcacatccactaaacatcaaggtacagttattttgagtgccactaagaggtgaatgatgtttccagagacca

SEQ ID NO: 539607 - DNA, 120 bp, Artificial Sequence
  ENSG00000167113_19 (sequence is synthesized)
taacatgaacccacttggtctgtaggttaggggtggcctctctgtggtggggggaagggatgggggacaggggacacttaacccaggtcatgaaggataagtaggagttaccacagtgaa

SEQ ID NO: 539608 - DNA, 120 bp, Artificial Sequence
  ENSG00000167113_20 (sequence is synthesized)
gatggaggtagtgggagagaacaccccaagctgggagcaagttatgctaggatcagggtctttggggcttcattatttatttttagagacaatgtcttgcttgagtgcagtggtatagtc

SEQ ID NO: 539609 - DNA, 89 bp, Artificial Sequence
  ENSG00000167113_21 (sequence is synthesized)
ttttagagacaatgtcttgcttgagtgcagtggtatagtcatagctccctgtaacctcaaactcctgggctcaagcatcctcctgtccc

SEQ ID NO: 539610 - DNA, 71 bp, Artificial Sequence
  ENSG00000167113_22 (sequence is synthesized)
caccacacctgactaatttttgtattttttttgttctgggttttttttttctttgagacagagtctctgtc

SEQ ID NO: 539611 - DNA, 120 bp, Artificial Sequence
  ENSG00000167113_23 (sequence is synthesized)
agtgctgggatttacaggcatgagcctcggcccctggccagtcgccagagttttctagtaggtatgagttaggtgagagttgtgacggtgtcagagacagactggcaaatcgggccctgg

SEQ ID NO: 539612 - DNA, 120 bp, Artificial Sequence
  ENSG00000167113_24 (sequence is synthesized)
agggcttgcctatctccaccaccctctgcatcacctggcttggtgcctcaatttctgctttacctgaacatcttagtagcatctttgccacatgtcccccttctttctcccactgcccct

SEQ ID NO: 539613 - DNA, 120 bp, Artificial Sequence
  ENSG00000167113_25 (sequence is synthesized)
cagggctcctgcactaatggagcagcagagcccatcttcaaggctcctggtgtctttttaggctttagctgcctccctgctctgaaacctcagtagctccctaaggcctgcaggaaccat

SEQ ID NO: 539614 - DNA, 120 bp, Artificial Sequence
  ENSG00000167113_26 (sequence is synthesized)
cctggagtgtttagcctggcttatggggtcatggggtcctctgcgccctgaccccaggcttcctttccatcccctactcccttctgttcactcttgggctctctcctgtactccaagcca

SEQ ID NO: 539615 - DNA, 120 bp, Artificial Sequence
  ENSG00000167113_27 (sequence is synthesized)
agtgccccagggcccagcacaggccaggactgggcacagctgaccccgtagagattagggaggaacagtgcctctctttaccctgctgtgagcaccactggcctttccttcagatagctt

SEQ ID NO: 539616 - DNA, 120 bp, Artificial Sequence
  ENSG00000167113_28 (sequence is synthesized)
aggacagaggaatagcacaggcatgacaccctgaggaaagaggagccctgagctgccaccattggcaggagtgctcttcaggctcatgccaaggctttgtcattttctatgggataggca

SEQ ID NO: 539617 - DNA, 120 bp, Artificial Sequence
  ENSG00000167113_29 (sequence is synthesized)
aatgggtgggaacatgcctgcaattgataatactggccagtgttcattaacctcgcactgcatgcctgatgccagcctcatccgtgatcttgctgaatccccccacaactctgtcaagta

SEQ ID NO: 539618 - DNA, 120 bp, Artificial Sequence
  ENSG00000167113_30 (sequence is synthesized)
tgttctattattatcctcttttagcagataaggaaacagaggctcagagcagtgaagcaaacttgctaattccacataactggtattaatggagatagtaatcaatcccagatcatgctc

SEQ ID NO: 539619 - DNA, 120 bp, Artificial Sequence
  ENSG00000167113_31 (sequence is synthesized)
ttcactgctgtactgtatccctttattccagggacattgctttccctacggtatggcaggtgtggcactctccagcccctccagccccaggcagggaggacaaggagagggggaaagggg

SEQ ID NO: 539620 - DNA, 120 bp, Artificial Sequence
  ENSG00000167114_0 (sequence is synthesized)
gcgctggggctgcgctgcgccgccggctctgtggcttgccggcttcggggaaggtgcggcaggcggtgctgcggcctggcacagcaggtttggggtgcgggaggcgggcggggtaggagc

SEQ ID NO: 539621 - DNA, 120 bp, Artificial Sequence
  ENSG00000167114_1 (sequence is synthesized)
gccgggcggcgggcggggctggcggggcggccgggccatgcagggcgcagagccggctaaaccctgctgagacccggctccgtgcgtccaggggcggctaatgcccctcacgctgtctac

SEQ ID NO: 539622 - DNA, 120 bp, Artificial Sequence
  ENSG00000167114_2 (sequence is synthesized)
ccctcacgctgtctacgctgctgcaaccgggccgcatctggacggggcgccgcgcggcggagccgacgccgggccacaatgctgcttggagcctctctggtgggggtgctgctgttctcc

SEQ ID NO: 539623 - DNA, 120 bp, Artificial Sequence
  ENSG00000167114_3 (sequence is synthesized)
aagctggtgctgaaactgccctggacccaggtgggattctccctgttgttcctctacttgggatctggcggctggcgcttcatccgggtcttcatcaagaccatcaggcgcgatatcttt

SEQ ID NO: 539624 - DNA, 120 bp, Artificial Sequence
  ENSG00000167114_4 (sequence is synthesized)
ggcggcctggtcctcctgaaggtgaaggcaaaggtgcgacagtgcctgcaggagcggcggacagtgcccattttgtttgcctctaccgttcggcgccaccccgacaagacggccctgatc

SEQ ID NO: 539625 - DNA, 120 bp, Artificial Sequence
  ENSG00000167114_5 (sequence is synthesized)
ttcgagggcacagatacccactggaccttccgccagctggatgagtactcaagcagtgtagccaacttcctgcaggcccggggcctggcctcgggcgatgtggctgccatcttcatggag

SEQ ID NO: 539626 - DNA, 120 bp, Artificial Sequence
  ENSG00000167114_6 (sequence is synthesized)
aaccgcaatgagttcgtgggcctatggctgggcatggccaagctcggtgtggaggcagccctcatcaacaccaacctgcggcgggatgctctgctccactgcctcaccacctcgcgcgca

SEQ ID NO: 539627 - DNA, 120 bp, Artificial Sequence
  ENSG00000167114_7 (sequence is synthesized)
cgggcccttgtctttggcagcgaaatggcctcagccatctgtgaggtccatgccagcctggacccctcgctcagcctcttctgctctggctcctgggagcccggtgcggtgcctccaagc

SEQ ID NO: 539628 - DNA, 120 bp, Artificial Sequence
  ENSG00000167114_8 (sequence is synthesized)
acagaacacctggaccctctgctgaaagatgctcccaagcaccttcccagttgccctgacaagggcttcacagataaactgttctacatctacacatccggcaccacagggctgcccaag

SEQ ID NO: 539629 - DNA, 120 bp, Artificial Sequence
  ENSG00000167114_9 (sequence is synthesized)
gccgccatcgtggtgcacagcaggtattaccgcatggctgccctggtgtactatggattccgcatgcggcccaacgacatcgtctatgactgcctccccctctaccactcagcaggaaac

SEQ ID NO: 539630 - DNA, 120 bp, Artificial Sequence
  ENSG00000167114_10 (sequence is synthesized)
atcgtgggaatcggccagtgcctgctgcatggcatgacggtggtgattcggaagaagttctcagcctcccggttctgggacgattgtatcaagtacaactgcacgattgtgcagtacatt

SEQ ID NO: 539631 - DNA, 120 bp, Artificial Sequence
  ENSG00000167114_11 (sequence is synthesized)
ggtgaactgtgccgctacctcctgaaccagccaccgcgggaggcagaaaaccagcaccaggttcgcatggcactaggcaatggcctccggcagtccatctggaccaacttttccagccgc

SEQ ID NO: 539632 - DNA, 120 bp, Artificial Sequence
  ENSG00000167114_12 (sequence is synthesized)
ttccacataccccaggtggctgagttctacggggccacagagtgcaactgtagcctgggcaacttcgacagccaggtgggggcctgtggtttcaatagccgcatcctgtccttcgtgtac

SEQ ID NO: 539633 - DNA, 120 bp, Artificial Sequence
  ENSG00000167114_13 (sequence is synthesized)
tcatccagaaagaccccctgcgccgcttcgatggctacctcaaccagggcgccaacaacaagaagattgccaaggatgtcttcaagaagggggaccaggcctaccttactggtgatgtgc

SEQ ID NO: 539634 - DNA, 120 bp, Artificial Sequence
  ENSG00000167114_14 (sequence is synthesized)
tggtgatggacgagctgggctacctgtacttccgagaccgcactggggacacgttccgctggaaaggtgagaacgtgtccaccaccgaggtggaaggcacactcagccgcctgctggaca

SEQ ID NO: 539635 - DNA, 120 bp, Artificial Sequence
  ENSG00000167114_15 (sequence is synthesized)
tggctgacgtggccgtgtatggtgtcgaggtgccaggaaccgagggccgggccggaatggctgctgtggccagccccactggcaactgtgacctggagcgctttgctcaggtcttggaga

SEQ ID NO: 539636 - DNA, 120 bp, Artificial Sequence
  ENSG00000167114_16 (sequence is synthesized)
aggaactgcccctgtatgcgcgccccatcttcctgcgcctcctgcctgagctgcacaaaacaggaacctacaagttccagaagacagagctacggaaggagggctttgacccggctattg

SEQ ID NO: 539637 - DNA, 120 bp, Artificial Sequence
  ENSG00000167114_17 (sequence is synthesized)
tgaaagacccgctgttctatctagatgcccagaagggccgctacgtcccgctggaccaagaggcctacagccgcatccaggcaggcgaggagaagctgtgattccccccatccctctgag

SEQ ID NO: 539638 - DNA, 120 bp, Artificial Sequence
  ENSG00000167114_18 (sequence is synthesized)
ggccggcggatgctggatccggagccccaggttccgccccagagcggtcctggacaaggccagaccaaagcaagcagggcctggcacctccatcctgaggtgctgcccctccatccaaaa

SEQ ID NO: 539639 - DNA, 120 bp, Artificial Sequence
  ENSG00000167114_19 (sequence is synthesized)
ctgccaagtgactcattgccttcccaacccttccagaggctttctgtgaaagtctcatgtccaagttccgtcttctgggctgggcaggccctctggttcccaggctgagactgacgggtt

SEQ ID NO: 539640 - DNA, 120 bp, Artificial Sequence
  ENSG00000167114_20 (sequence is synthesized)
ttctcaggatgatgtcttgggtgagggtagggagaggacaaggggtcaccgagcccttcccagagagcagggagcttataaatggaaccagagcagaagtccccagactcaggaagtcaa

SEQ ID NO: 539641 - DNA, 120 bp, Artificial Sequence
  ENSG00000167114_21 (sequence is synthesized)
cagagtgggcagggacagtggtagcatccatctggtggccaaagagaatcgtagccccagagctgcccaagttcactgggctccacccccacctccaggaggggaggagaggacctgaca

SEQ ID NO: 539642 - DNA, 120 bp, Artificial Sequence
  ENSG00000167114_22 (sequence is synthesized)
tctgtaggtggcccctgatgccccatctacagcaggaggtcaggaccacgcccctggcctctccccactcccccatcctcctccctgggtggctgcctgattatccctcaggcagggcct

SEQ ID NO: 539643 - DNA, 120 bp, Artificial Sequence
  ENSG00000167114_23 (sequence is synthesized)
ctcagtccttgtgggtctgtgtcacctccatctcagtcttggcctggctatgaggggaggaggaatgggagagggggctcaggggccaataaactctgccttgagtcctcctagcctgtg

SEQ ID NO: 539644 - DNA, 120 bp, Artificial Sequence
  ENSG00000167114_24 (sequence is synthesized)
tgcaaaccacccaagcccaccctgaccccagaaccccacagccccactgtggccgcttgatcccccacgccaaccccctggcccattgacccgcctcatctgttcattcacttatctaag

SEQ ID NO: 539645 - DNA, 120 bp, Artificial Sequence
  ENSG00000167114_25 (sequence is synthesized)
ctgagggtgtagcaggtaagatgccgcagcccctgcctccaatgtgctggttcagccgggggcagtgcccatgtgaatctggcaaggtgtttaacagtgtgggcttgaaagtccaaacca

SEQ ID NO: 539646 - DNA, 120 bp, Artificial Sequence
  ENSG00000167117_0 (sequence is synthesized)
ttttgatgtctagaatcaggggatccaggatcatcaccaaggtcattttcccagacagatgtgctgaggctgtagaaagtgctttttatttggttgggagcttgtgcataaatgcgagag

SEQ ID NO: 539647 - DNA, 120 bp, Artificial Sequence
  ENSG00000167117_1 (sequence is synthesized)
gggctgcacatctgacggactagaggtgactcatggctgaaccggaacaggacatcggggagaagccagcagtcagaattcagaaccccaaagaaaatgacttcattgaaattgaactga

SEQ ID NO: 539648 - DNA, 120 bp, Artificial Sequence
  ENSG00000167117_2 (sequence is synthesized)
aagctaccaaacacactgctcagaaaggacaaagacattcgaagactgcgggactttcaggaagtggaactcattttaatgaaaaatggaagctccagattgacagaatatgtgccatct

SEQ ID NO: 539649 - DNA, 120 bp, Artificial Sequence
  ENSG00000167117_3 (sequence is synthesized)
ctgacagaaaggccctgctatgatagcaaagctgcaaaaatgacttattaaatactcccaggaatggccgcgcatggtggctcaccccctgtaatcccagcactttaggaagccaaggtg

SEQ ID NO: 539650 - DNA, 120 bp, Artificial Sequence
  ENSG00000167117_4 (sequence is synthesized)
tttacacttctgcatttcatgacaccagaaatcctggctgcaaaacggccaaacatggtagctaggtcattttcaatctggcgcttttaagatttgcacatctaatccataaacctttta

SEQ ID NO: 539651 - DNA, 79 bp, Artificial Sequence
  ENSG00000167117_5 (sequence is synthesized)
gcgcttttaagatttgcacatctaatccataaaccttttaaaaacctctaaatggtccgatcacggtggctcacaccag

SEQ ID NO: 539652 - DNA, 78 bp, Artificial Sequence
  ENSG00000167117_6 (sequence is synthesized)
tagaccctgtctcaaaaaaaaacaaacctctgaatgacaagtgactccccaatttaaggctttagttcagtgcttttg

SEQ ID NO: 539653 - DNA, 120 bp, Artificial Sequence
  ENSG00000167117_7 (sequence is synthesized)
atggctgaaccggaacaggacatcggggagaagccagcaggtgaatataaacaagaaggcacaaatccacacttgccaacaacggacccaagtgataacaagaaacccagtgacacctgt

SEQ ID NO: 539654 - DNA, 120 bp, Artificial Sequence
  ENSG00000167117_8 (sequence is synthesized)
cattttgatgtctagaatcaggggatccaggatcatcaccaaggtcattttcccaggtatggaggggtctttctgcttctttcttgtcatgcacagctgctgaggaaggggctgggagta

SEQ ID NO: 539655 - DNA, 120 bp, Artificial Sequence
  ENSG00000167117_9 (sequence is synthesized)
aagacagtgaaatggggaggaggagtccattcaaaccgagaaacaaagtgtttggtttttcttacccctggtgtagaagctaccaaccttttccaagaaagagggcctggcccccttctc

SEQ ID NO: 539656 - DNA, 120 bp, Artificial Sequence
  ENSG00000167117_10 (sequence is synthesized)
gggtctggctgggtgcctgctgtgcctctctggcctcccctccgaagggcaccattccctcgggtgagtactaccggcctgcaccgtcttccagtggggacagcctgagaagagagtctg

SEQ ID NO: 539657 - DNA, 120 bp, Artificial Sequence
  ENSG00000167117_11 (sequence is synthesized)
gagccttacttcagtaccttccttcactggcctcaccctgtgcaaatcatgccacacgctgcagcctccttttccctatctataaaataaaaatgaccctgctctatctcactgggctgg

SEQ ID NO: 539658 - DNA, 120 bp, Artificial Sequence
  ENSG00000167117_12 (sequence is synthesized)
gactcatggctgaaccggaacaggacatcggggagaagccagcaggtgagtctgggagtcctgttcccaacatggtcctcaaggaggatgggacagggggctggggaaggctgggacaca

SEQ ID NO: 539659 - DNA, 120 bp, Artificial Sequence
  ENSG00000167117_13 (sequence is synthesized)
ggtgatgctgtggccagcagtgccctgtggcctccgccactctgccagtggggtagtgaagagcagagcaactagaccaaaggtcctttcagaaggaagcaagtgtctatagctataata

SEQ ID NO: 539660 - DNA, 120 bp, Artificial Sequence
  ENSG00000167117_14 (sequence is synthesized)
aataataatagcagccagcaattactggtgctcacaactgctaggaagttgtaccttctgtgtactttctcattgacttcttacaatctggtgaggtaggattgttaacctcattttcag

SEQ ID NO: 539661 - DNA, 120 bp, Artificial Sequence
  ENSG00000167117_15 (sequence is synthesized)
attttgatgtctagaatcaggggatccaggatcatcaccaaggtcattttcccagaagctaccaaccttttccaagaaagagggcctggcccccttctcgggtctggctgggtgcctgct

SEQ ID NO: 539662 - DNA, 120 bp, Artificial Sequence
  ENSG00000167117_16 (sequence is synthesized)
agggccctgtgaaaagctcttcacctcctctgccctctggatctagtgaagcctattcatccttcagatgtcagctcaaataatcaaccttcatggaggcctcccttgacccctaacatg

SEQ ID NO: 539663 - DNA, 120 bp, Artificial Sequence
  ENSG00000167117_17 (sequence is synthesized)
ctttcaaagtactgtgtatttcacattcatcatgccccgacaactgtgatttcccatttattaatatctgtctcttctgctggcctgcaaactccaggagcacagagacatctttgggat

SEQ ID NO: 539664 - DNA, 120 bp, Artificial Sequence
  ENSG00000167117_18 (sequence is synthesized)
acatgttcagtggatattgtaagaaagaaagaaatacacaaaaggcctggcatatgcaaagcactctaaatattcactcctttcccttccctctgggtgagaaaatttctccttataaag

SEQ ID NO: 539665 - DNA, 120 bp, Artificial Sequence
  ENSG00000167117_19 (sequence is synthesized)
acaccctcctaactgtatctctgctagagaactgaagacataaagcactctgtgccaaaaatatttaagtaaaaacttgagctaagcacagagattataaatatttcttccccagattac

SEQ ID NO: 539666 - DNA, 120 bp, Artificial Sequence
  ENSG00000167117_20 (sequence is synthesized)
gcaccatttaaaaatactgtctcagctccttttcatgatttgggtggtgattaaagaaaattactcttcaagactgaaagtcattactgcccttttcctgacttgccttttcccttgaga

SEQ ID NO: 539667 - DNA, 120 bp, Artificial Sequence
  ENSG00000167117_21 (sequence is synthesized)
ggaggataagctgcagggcaggaagtggaagtggggcatccttgtcctttgtctggcagacagccaactggtcaggtactgctccttctcaactctttcctgattcccaggtgaatataa

SEQ ID NO: 539668 - DNA, 120 bp, Artificial Sequence
  ENSG00000167117_22 (sequence is synthesized)
acaagaaggcacaaatccacacttgccaacaacggacccaagtgataacaagaaacccagtgacacctgtctaggtgaagactcagcccctatgtgaccaggttgcaaagccaaactgac
